United States Patent Application Publication US 2005/0244851 A1 - sequence listing, part 57

SEQ ID NO: 2213113 - DNA, 25 bp, Homo sapien
gcatacaaggaatgaaacagtcatt

SEQ ID NO: 2213114 - DNA, 25 bp, Homo sapien
tctagcaagtttcccagcactgatg

SEQ ID NO: 2213115 - DNA, 25 bp, Homo sapien
ctctagcaagtttcccagcactgat

SEQ ID NO: 2213116 - DNA, 25 bp, Homo sapien
tttcaggtgcaatagcattgatcac

SEQ ID NO: 2213117 - DNA, 25 bp, Homo sapien
tccacatccttttcaggtgcaatag

SEQ ID NO: 2213118 - DNA, 25 bp, Homo sapien
tcaggtgcaatagcattgatcactc

SEQ ID NO: 2213119 - DNA, 25 bp, Homo sapien
tgcaatagcattgatcactccttca

SEQ ID NO: 2213120 - DNA, 25 bp, Homo sapien
ttcaaagatatgatgtacttgatca

SEQ ID NO: 2213121 - DNA, 25 bp, Homo sapien
caaagatatgatgtacttgatcacc

SEQ ID NO: 2213122 - DNA, 25 bp, Homo sapien
aaagatatgatgtacttgatcacct

SEQ ID NO: 2213123 - DNA, 25 bp, Homo sapien
cattcaaagatatgatgtacttgat

SEQ ID NO: 2213124 - DNA, 25 bp, Homo sapien
ctgtaatattgccaggcctggtgtg

SEQ ID NO: 2213125 - DNA, 25 bp, Homo sapien
attgccaggcctggtgtgaaaccag

SEQ ID NO: 2213126 - DNA, 25 bp, Homo sapien
tgccaggcctggtgtgaaaccaggt

SEQ ID NO: 2213127 - DNA, 25 bp, Homo sapien
ccaggcctggtgtgaaaccaggtac

SEQ ID NO: 2213128 - DNA, 25 bp, Homo sapien
ttgtccttcaactgagtgacttgat

SEQ ID NO: 2213129 - DNA, 25 bp, Homo sapien
gcccttatttgtgcggagatctcct

SEQ ID NO: 2213130 - DNA, 25 bp, Homo sapien
agtgacttgattcttcagtctcgcc

SEQ ID NO: 2213131 - DNA, 25 bp, Homo sapien
gattcttcagtctcgcccttatttg

SEQ ID NO: 2213132 - DNA, 25 bp, Homo sapien
gaatctgattgtcctctgggagcca

SEQ ID NO: 2213133 - DNA, 25 bp, Homo sapien
gaaagggcagaacaacagcataggc

SEQ ID NO: 2213134 - DNA, 25 bp, Homo sapien
gatagggcaatccaccaatcgaggg

SEQ ID NO: 2213135 - DNA, 25 bp, Homo sapien
gccagcagtagggtatggatcacca

SEQ ID NO: 2213136 - DNA, 25 bp, Homo sapien
tccatttttattactttctgagtgg

SEQ ID NO: 2213137 - DNA, 25 bp, Homo sapien
ttccatttttattactttctgagtg

SEQ ID NO: 2213138 - DNA, 25 bp, Homo sapien
tggctctccctttttgtcttttcca

SEQ ID NO: 2213139 - DNA, 25 bp, Homo sapien
cttctttcttggctctccctttttg

SEQ ID NO: 2213140 - DNA, 25 bp, Homo sapien
ggacctcttgtccaaactgtctctc

SEQ ID NO: 2213141 - DNA, 25 bp, Homo sapien
cagggacctcttgtccaaactgtct

SEQ ID NO: 2213142 - DNA, 25 bp, Homo sapien
ccagggacctcttgtccaaactgtc

SEQ ID NO: 2213143 - DNA, 25 bp, Homo sapien
gagagcacctattctcctctccagg

SEQ ID NO: 2213144 - DNA, 25 bp, Homo sapien
ggcatcctggtgataaattgctgcc

SEQ ID NO: 2213145 - DNA, 25 bp, Homo sapien
aaattgctgccagcaaggtcagcac

SEQ ID NO: 2213146 - DNA, 25 bp, Homo sapien
tctccaggtggcatcctggtgataa

SEQ ID NO: 2213147 - DNA, 25 bp, Homo sapien
ttgctgccagcaaggtcagcacatg

SEQ ID NO: 2213148 - DNA, 25 bp, Homo sapien
tggctggtggacctcattttgcacc

SEQ ID NO: 2213149 - DNA, 25 bp, Homo sapien
gctggtggacctcattttgcaccag

SEQ ID NO: 2213150 - DNA, 25 bp, Homo sapien
acagttcacctgatggagaactcag

SEQ ID NO: 2213151 - DNA, 25 bp, Homo sapien
agttcacctgatggagaactcagag

SEQ ID NO: 2213152 - DNA, 25 bp, Homo sapien
gtgagggacacggtgaacaagaact

SEQ ID NO: 2213153 - DNA, 25 bp, Homo sapien
tctagctccgcatccttggccagag

SEQ ID NO: 2213154 - DNA, 25 bp, Homo sapien
gggacacggtgaacaagaactgcat

SEQ ID NO: 2213155 - DNA, 25 bp, Homo sapien
cttggctctagctccgcatccttgg

SEQ ID NO: 2213156 - DNA, 25 bp, Homo sapien
gggtcactaaggttgtcagtgggag

SEQ ID NO: 2213157 - DNA, 25 bp, Homo sapien
ttgtcagtgggaggatgcgagccct

SEQ ID NO: 2213158 - DNA, 25 bp, Homo sapien
gatgcgagccctgttgggttcctcc

SEQ ID NO: 2213159 - DNA, 25 bp, Homo sapien
acaggggtcactaaggttgtcagtg

SEQ ID NO: 2213160 - DNA, 25 bp, Homo sapien
cacacacacacacgaccaggttcat

SEQ ID NO: 2213161 - DNA, 25 bp, Homo sapien
cacacacacacacacgaccaggttc

SEQ ID NO: 2213162 - DNA, 25 bp, Homo sapien
gctccacagccacacacacacacac

SEQ ID NO: 2213163 - DNA, 25 bp, Homo sapien
ttgctccacagccacacacacacac

SEQ ID NO: 2213164 - DNA, 25 bp, Homo sapien
gaataggccttcttcggagtagaca

SEQ ID NO: 2213165 - DNA, 25 bp, Homo sapien
ttggcatcatctagtaaagctcagg

SEQ ID NO: 2213166 - DNA, 25 bp, Homo sapien
gctggtgggattgacagcttgccca

SEQ ID NO: 2213167 - DNA, 25 bp, Homo sapien
ggagtagacactccaaaaggctcat

SEQ ID NO: 2213168 - DNA, 25 bp, Homo sapien
taagcatatgctggaacgacagtcg

SEQ ID NO: 2213169 - DNA, 25 bp, Homo sapien
ttttcaagagaccaagtgtccactg

SEQ ID NO: 2213170 - DNA, 25 bp, Homo sapien
cagtcgatggagacaaaggatctac

SEQ ID NO: 2213171 - DNA, 25 bp, Homo sapien
tacagcggctgtattctggaaggct

SEQ ID NO: 2213172 - DNA, 25 bp, Homo sapien
tcccggctcgcgggacactacaggg

SEQ ID NO: 2213173 - DNA, 25 bp, Homo sapien
gcagagatggaaatcccgaagctgc

SEQ ID NO: 2213174 - DNA, 25 bp, Homo sapien
gcttccagcggatagatacctaggt

SEQ ID NO: 2213175 - DNA, 25 bp, Homo sapien
actgtagaacgtatttatgcatacc

SEQ ID NO: 2213176 - DNA, 25 bp, Homo sapien
gtttggattccccaatgcagcagga

SEQ ID NO: 2213177 - DNA, 25 bp, Homo sapien
actgacaagttgtgtgaccctgagc

SEQ ID NO: 2213178 - DNA, 25 bp, Homo sapien
tactgacaccaaccaaagcggagtg

SEQ ID NO: 2213179 - DNA, 25 bp, Homo sapien
gactccttcgagcaccctttgtgaa

SEQ ID NO: 2213180 - DNA, 25 bp, Homo sapien
tcagacattctcctcatggcacatt

SEQ ID NO: 2213181 - DNA, 25 bp, Homo sapien
ctttggcagtgcactaaaattttgc

SEQ ID NO: 2213182 - DNA, 25 bp, Homo sapien
ctagtccagtagtgtttgcatgtgg

SEQ ID NO: 2213183 - DNA, 25 bp, Homo sapien
tacattgaagttctgtgcatacagg

SEQ ID NO: 2213184 - DNA, 25 bp, Homo sapien
gggattcagataatgaagtaatgaa

SEQ ID NO: 2213185 - DNA, 25 bp, Homo sapien
acccgtgatacgtatatttcataca

SEQ ID NO: 2213186 - DNA, 25 bp, Homo sapien
ctcattatccctgagaagtggggat

SEQ ID NO: 2213187 - DNA, 25 bp, Homo sapien
aggttaaggacatgcgcacattcta

SEQ ID NO: 2213188 - DNA, 25 bp, Homo sapien
ttcttcaaagcctcacataggagct

SEQ ID NO: 2213189 - DNA, 25 bp, Homo sapien
cagtcccagatccaagcacattagg

SEQ ID NO: 2213190 - DNA, 25 bp, Homo sapien
tcttggagaagctctgcgagataac

SEQ ID NO: 2213191 - DNA, 25 bp, Homo sapien
ctcaggtccagaacgacgaggctgt

SEQ ID NO: 2213192 - DNA, 25 bp, Homo sapien
catcacccatgtatccccgagtggg

SEQ ID NO: 2213193 - DNA, 25 bp, Homo sapien
agagaggtttacacatgtcagggac

SEQ ID NO: 2213194 - DNA, 25 bp, Homo sapien
cttgcaattgccttctataaagtga

SEQ ID NO: 2213195 - DNA, 25 bp, Homo sapien
caacctcggcaggaagcattttggg

SEQ ID NO: 2213196 - DNA, 25 bp, Homo sapien
tcaagaccttacacaatgcaggaag

SEQ ID NO: 2213197 - DNA, 25 bp, Homo sapien
agatattgcaggttacattttgagt

SEQ ID NO: 2213198 - DNA, 25 bp, Homo sapien
tgcaggaagcatatcattctggtca

SEQ ID NO: 2213199 - DNA, 25 bp, Homo sapien
ttgcaggttacattttgagtgtctc

SEQ ID NO: 2213200 - DNA, 25 bp, Homo sapien
caccaagaaagctattattgatttc

SEQ ID NO: 2213201 - DNA, 25 bp, Homo sapien
tctctgggagctttgcctttgctgc

SEQ ID NO: 2213202 - DNA, 25 bp, Homo sapien
tctgggagctttgcctttgctgcct

SEQ ID NO: 2213203 - DNA, 25 bp, Homo sapien
accaagaaagctattattgatttct

SEQ ID NO: 2213204 - DNA, 25 bp, Homo sapien
tgaaaacagcataatgtctactgca

SEQ ID NO: 2213205 - DNA, 25 bp, Homo sapien
ttgaaaacagcataatgtctactgc

SEQ ID NO: 2213206 - DNA, 25 bp, Homo sapien
gattgaaaacagcataatgtctact

SEQ ID NO: 2213207 - DNA, 25 bp, Homo sapien
attgaaaacagcataatgtctactg

SEQ ID NO: 2213208 - DNA, 25 bp, Homo sapien
ttgaacggagccatcactcccttca

SEQ ID NO: 2213209 - DNA, 25 bp, Homo sapien
tttgaacggagccatcactcccttc

SEQ ID NO: 2213210 - DNA, 25 bp, Homo sapien
tgaacggagccatcactcccttcac

SEQ ID NO: 2213211 - DNA, 25 bp, Homo sapien
tctttgaacggagccatcactccct

SEQ ID NO: 2213212 - DNA, 25 bp, Homo sapien
agcacaagagctccttcgggttcat

SEQ ID NO: 2213213 - DNA, 25 bp, Homo sapien
ctcgtacagacagcacaagagctcc

SEQ ID NO: 2213214 - DNA, 25 bp, Homo sapien
gacagcacaagagctccttcgggtt

SEQ ID NO: 2213215 - DNA, 25 bp, Homo sapien
actcgtacagacagcacaagagctc

SEQ ID NO: 2213216 - DNA, 25 bp, Homo sapien
ctccagggcgtggaacagcacagtg

SEQ ID NO: 2213217 - DNA, 25 bp, Homo sapien
cgaataagaagtgtcttgcttggat

SEQ ID NO: 2213218 - DNA, 25 bp, Homo sapien
tggatgtaggaatagcagcctttag

SEQ ID NO: 2213219 - DNA, 25 bp, Homo sapien
tgacatcaggcagcccaaagtggtc

SEQ ID NO: 2213220 - DNA, 25 bp, Homo sapien
caagtcctctccacggaacactgac

SEQ ID NO: 2213221 - DNA, 25 bp, Homo sapien
tctccacggaacactgacatctgcg

SEQ ID NO: 2213222 - DNA, 25 bp, Homo sapien
tcctctccacggaacactgacatct

SEQ ID NO: 2213223 - DNA, 25 bp, Homo sapien
aagtcctctccacggaacactgaca

SEQ ID NO: 2213224 - DNA, 25 bp, Homo sapien
cggccgcaaaggaagcgcaggaaca

SEQ ID NO: 2213225 - DNA, 25 bp, Homo sapien
gggaaccggccgcaaaggaagcgca

SEQ ID NO: 2213226 - DNA, 25 bp, Homo sapien
aacctctgcagcttcagactcatgc

SEQ ID NO: 2213227 - DNA, 25 bp, Homo sapien
gactcatgcacatgatccagcacac

SEQ ID NO: 2213228 - DNA, 25 bp, Homo sapien
aacagggccgcgtttcttctcatca

SEQ ID NO: 2213229 - DNA, 25 bp, Homo sapien
tgggtgccgagacaggctggaacag

SEQ ID NO: 2213230 - DNA, 25 bp, Homo sapien
ggaactcctccacccttacatagat

SEQ ID NO: 2213231 - DNA, 25 bp, Homo sapien
ttacatagatcggccgctccaccaa

SEQ ID NO: 2213232 - DNA, 25 bp, Homo sapien
cagggcccgcaggccacgtggtgac

SEQ ID NO: 2213233 - DNA, 25 bp, Homo sapien
tcagggcccgcaggccacgtggtga

SEQ ID NO: 2213234 - DNA, 25 bp, Homo sapien
agaagaccggcaccggcttctgctt

SEQ ID NO: 2213235 - DNA, 25 bp, Homo sapien
cccaagaagaccggcaccggcttct

SEQ ID NO: 2213236 - DNA, 25 bp, Homo sapien
caagaagaccggcaccggcttctgc

SEQ ID NO: 2213237 - DNA, 25 bp, Homo sapien
ctccccaagaagaccggcaccggct

SEQ ID NO: 2213238 - DNA, 25 bp, Homo sapien
tcaaagccgtcgaccacgaacagga

SEQ ID NO: 2213239 - DNA, 25 bp, Homo sapien
gaccacgaacaggattttctgtgct

SEQ ID NO: 2213240 - DNA, 25 bp, Homo sapien
ggctcccagctcatcaaagccgtcg

SEQ ID NO: 2213241 - DNA, 25 bp, Homo sapien
gcaattcaggccagttcctgaagac

SEQ ID NO: 2213242 - DNA, 25 bp, Homo sapien
ctgcaaaactgcacgggcccaggca

SEQ ID NO: 2213243 - DNA, 25 bp, Homo sapien
aaaactgcacgggcccaggcagatg

SEQ ID NO: 2213244 - DNA, 25 bp, Homo sapien
actgcacgggcccaggcagatgagc

SEQ ID NO: 2213245 - DNA, 25 bp, Homo sapien
tgcacgggcccaggcagatgagctc

SEQ ID NO: 2213246 - DNA, 25 bp, Homo sapien
tatggaccactttgaggtctccagg

SEQ ID NO: 2213247 - DNA, 25 bp, Homo sapien
atctaaatttctggctgaggttgtc

SEQ ID NO: 2213248 - DNA, 25 bp, Homo sapien
gtatctctgagccataatatggacc

SEQ ID NO: 2213249 - DNA, 25 bp, Homo sapien
tatactcctgtacctatcctcttta

SEQ ID NO: 2213250 - DNA, 25 bp, Homo sapien
ttctcctttcaagacttctttagct

SEQ ID NO: 2213251 - DNA, 25 bp, Homo sapien
tttctataaactctagtgcttctgc

SEQ ID NO: 2213252 - DNA, 25 bp, Homo sapien
tagcttctcttaggctggtgacatc

SEQ ID NO: 2213253 - DNA, 25 bp, Homo sapien
gtgcttctgcttcgaaacgccccag

SEQ ID NO: 2213254 - DNA, 25 bp, Homo sapien
tttctcagacagatccgctcggtgc

SEQ ID NO: 2213255 - DNA, 25 bp, Homo sapien
cattaagatgaccactcttaatggg

SEQ ID NO: 2213256 - DNA, 25 bp, Homo sapien
gctggtttgtctccactagatgttg

SEQ ID NO: 2213257 - DNA, 25 bp, Homo sapien
agtttgatactgttagttacaccag

SEQ ID NO: 2213258 - DNA, 25 bp, Homo sapien
gggtcctatagaccataactgagag

SEQ ID NO: 2213259 - DNA, 25 bp, Homo sapien
tgaaagaagaacagtgtaggcccct

SEQ ID NO: 2213260 - DNA, 25 bp, Homo sapien
gaaagtatgccttcgacaagaggcc

SEQ ID NO: 2213261 - DNA, 25 bp, Homo sapien
aggtgttgctccctcagcgcttcag

SEQ ID NO: 2213262 - DNA, 25 bp, Homo sapien
caaattctgagcacattgataggtc

SEQ ID NO: 2213263 - DNA, 25 bp, Homo sapien
ctcataagaactcccatatctgatg

SEQ ID NO: 2213264 - DNA, 25 bp, Homo sapien
actcccatatctgatggtgaatgtg

SEQ ID NO: 2213265 - DNA, 25 bp, Homo sapien
taagaactcccatatctgatggtga

SEQ ID NO: 2213266 - DNA, 25 bp, Homo sapien
ttctcactcataagaactcccatat

SEQ ID NO: 2213267 - DNA, 25 bp, Homo sapien
tgtctcttctcgtcaccacttcagt

SEQ ID NO: 2213268 - DNA, 25 bp, Homo sapien
taagcatgtcctaatcgtctttgca

SEQ ID NO: 2213269 - DNA, 25 bp, Homo sapien
caacactccggaattactacaacag

SEQ ID NO: 2213270 - DNA, 25 bp, Homo sapien
tacaacagactcctatgtgacggca

SEQ ID NO: 2213271 - DNA, 25 bp, Homo sapien
taatggatgcctatgacccttgcgt

SEQ ID NO: 2213272 - DNA, 25 bp, Homo sapien
gaaaccatgtgagcccacggacaat

SEQ ID NO: 2213273 - DNA, 25 bp, Homo sapien
taagggattaaggaaacaatgtgac

SEQ ID NO: 2213274 - DNA, 25 bp, Homo sapien
catgtcaactatcatggtgggacaa

SEQ ID NO: 2213275 - DNA, 25 bp, Homo sapien
ggctttgaatgcagaccgaagatac

SEQ ID NO: 2213276 - DNA, 25 bp, Homo sapien
tcttggaagaataggctgaatactc

SEQ ID NO: 2213277 - DNA, 25 bp, Homo sapien
gagtaagccagcaatgagctctcta

SEQ ID NO: 2213278 - DNA, 25 bp, Homo sapien
tctaatggacatgtggccaatgcca

SEQ ID NO: 2213279 - DNA, 25 bp, Homo sapien
cactctgggtctgagtgataacaaa

SEQ ID NO: 2213280 - DNA, 25 bp, Homo sapien
taaacagctaagaagaaccaactcc

SEQ ID NO: 2213281 - DNA, 25 bp, Homo sapien
gaaaaataagtctaggatgtaacac

SEQ ID NO: 2213282 - DNA, 25 bp, Homo sapien
tgaggctaagagagactaaataact

SEQ ID NO: 2213283 - DNA, 25 bp, Homo sapien
gcaatgtgttcaaaccaccacaatt

SEQ ID NO: 2213284 - DNA, 25 bp, Homo sapien
atcagaatttagatctccaaactca

SEQ ID NO: 2213285 - DNA, 25 bp, Homo sapien
gatctccaaactcatagtccagggc

SEQ ID NO: 2213286 - DNA, 25 bp, Homo sapien
tgtgttcaaaccaccacaatttata

SEQ ID NO: 2213287 - DNA, 25 bp, Homo sapien
actgttttcacaaagggtgctcgaa

SEQ ID NO: 2213288 - DNA, 25 bp, Homo sapien
cacaaagggtgctcgaaggagtcag

SEQ ID NO: 2213289 - DNA, 25 bp, Homo sapien
aaccatggtttcctgctgcattggg

SEQ ID NO: 2213290 - DNA, 25 bp, Homo sapien
actgttagcttactgctgggtgtca

SEQ ID NO: 2213291 - DNA, 25 bp, Homo sapien
tggactggagtttttcatggccaaa

SEQ ID NO: 2213292 - DNA, 25 bp, Homo sapien
gctctggactggagtttttcatggc

SEQ ID NO: 2213293 - DNA, 25 bp, Homo sapien
gccaaagagtccagagatcccaatg

SEQ ID NO: 2213294 - DNA, 25 bp, Homo sapien
gtttttcatggccaaagagtccaga

SEQ ID NO: 2213295 - DNA, 25 bp, Homo sapien
ggagctctgctgaaaaccagtggcc

SEQ ID NO: 2213296 - DNA, 25 bp, Homo sapien
tattacaagaggagatcgggcaacg

SEQ ID NO: 2213297 - DNA, 25 bp, Homo sapien
agaaaacgcgcactggtaaggcctc

SEQ ID NO: 2213298 - DNA, 25 bp, Homo sapien
acaaaggaaaggtctctcgccggtg

SEQ ID NO: 2213299 - DNA, 25 bp, Homo sapien
tggggcgccggagcaggcgcgggtt

SEQ ID NO: 2213300 - DNA, 25 bp, Homo sapien
gggcgccggagcaggcgcgggttct

SEQ ID NO: 2213301 - DNA, 25 bp, Homo sapien
cgccggagcaggcgcgggttctgcg

SEQ ID NO: 2213302 - DNA, 25 bp, Homo sapien
ccggagcaggcgcgggttctgcggg

SEQ ID NO: 2213303 - DNA, 25 bp, Homo sapien
tctgggcagtcacccgggtgcgcgg

SEQ ID NO: 2213304 - DNA, 25 bp, Homo sapien
ctctgggcagtcacccgggtgcgcg

SEQ ID NO: 2213305 - DNA, 25 bp, Homo sapien
gtgaggacgccgttctcaaagcgca

SEQ ID NO: 2213306 - DNA, 25 bp, Homo sapien
ggacgccgttctcaaagcgcaacag

SEQ ID NO: 2213307 - DNA, 25 bp, Homo sapien
gccagggtgaggacgccgttctcaa

SEQ ID NO: 2213308 - DNA, 25 bp, Homo sapien
gccgttctcaaagcgcaacagcagg

SEQ ID NO: 2213309 - DNA, 25 bp, Homo sapien
gccggagtgggaaccgcggacaggc

SEQ ID NO: 2213310 - DNA, 25 bp, Homo sapien
gcggagatcggggccggagtgggaa

SEQ ID NO: 2213311 - DNA, 25 bp, Homo sapien
ccggagtgggaaccgcggacaggca

SEQ ID NO: 2213312 - DNA, 25 bp, Homo sapien
ggcggagatcggggccggagtggga

SEQ ID NO: 2213313 - DNA, 25 bp, Homo sapien
gccagggccccgtgatgccgtgctg

SEQ ID NO: 2213314 - DNA, 25 bp, Homo sapien
ggagcccgcggtctccacgtcgcca

SEQ ID NO: 2213315 - DNA, 25 bp, Homo sapien
cagggccccgtgatgccgtgctggc

SEQ ID NO: 2213316 - DNA, 25 bp, Homo sapien
cccaccgggtcaagcagcaccagga

SEQ ID NO: 2213317 - DNA, 25 bp, Homo sapien
cgccatcttgggggccccggggcag

SEQ ID NO: 2213318 - DNA, 25 bp, Homo sapien
gggccccggggcagcaggaggcggc

SEQ ID NO: 2213319 - DNA, 25 bp, Homo sapien
cccggggcagcaggaggcggcgcgt

SEQ ID NO: 2213320 - DNA, 25 bp, Homo sapien
ggggcagcaggaggcggcgcgtggg

SEQ ID NO: 2213321 - DNA, 25 bp, Homo sapien
gcgagtcagggcctcggtggactcg

SEQ ID NO: 2213322 - DNA, 25 bp, Homo sapien
gtcagggcctcggtggactcggccg

SEQ ID NO: 2213323 - DNA, 25 bp, Homo sapien
cagccggcgagtcagggcctcggtg

SEQ ID NO: 2213324 - DNA, 25 bp, Homo sapien
agggcctcggtggactcggccgcca

SEQ ID NO: 2213325 - DNA, 25 bp, Homo sapien
cgccctgtagtgtcccgcgagccgg

SEQ ID NO: 2213326 - DNA, 25 bp, Homo sapien
gccgccgccctgtagtgtcccgcga

SEQ ID NO: 2213327 - DNA, 25 bp, Homo sapien
gtagtgtcccgcgagccgggagcag

SEQ ID NO: 2213328 - DNA, 25 bp, Homo sapien
cccgcgagccgggagcagcttcggg

SEQ ID NO: 2213329 - DNA, 25 bp, Homo sapien
ttgacattggacattgtgcacctgt

SEQ ID NO: 2213330 - DNA, 25 bp, Homo sapien
cagttgacattggacattgtgcacc

SEQ ID NO: 2213331 - DNA, 25 bp, Homo sapien
tgggtccccccctcagttgacattg

SEQ ID NO: 2213332 - DNA, 25 bp, Homo sapien
cccctcagttgacattggacattgt

SEQ ID NO: 2213333 - DNA, 25 bp, Homo sapien
ctgcctggctctacagaatgcatct

SEQ ID NO: 2213334 - DNA, 25 bp, Homo sapien
agtctctccttaagtacccaggcca

SEQ ID NO: 2213335 - DNA, 25 bp, Homo sapien
gcatctggcagggaactgattccac

SEQ ID NO: 2213336 - DNA, 25 bp, Homo sapien
tctccttaagtacccaggccaagaa

SEQ ID NO: 2213337 - DNA, 25 bp, Homo sapien
gacatctttttctcggttcacgcca

SEQ ID NO: 2213338 - DNA, 25 bp, Homo sapien
cacgccaggtcttgcaagtatccca

SEQ ID NO: 2213339 - DNA, 25 bp, Homo sapien
caattgctgttgctggcgttggagc

SEQ ID NO: 2213340 - DNA, 25 bp, Homo sapien
agtagccactgaggtacgcaattca

SEQ ID NO: 2213341 - DNA, 25 bp, Homo sapien
gaaatatgggcagcgcagttgtgtt

SEQ ID NO: 2213342 - DNA, 25 bp, Homo sapien
tctactcgaaccatgatggtgatcg

SEQ ID NO: 2213343 - DNA, 25 bp, Homo sapien
catgcaggggttcagacggtctact

SEQ ID NO: 2213344 - DNA, 25 bp, Homo sapien
gaggtatggaagtgtttcatgcagg

SEQ ID NO: 2213345 - DNA, 25 bp, Homo sapien
tcctcaccctctgagttgtttgggt

SEQ ID NO: 2213346 - DNA, 25 bp, Homo sapien
tcaccctctgagttgtttgggttct

SEQ ID NO: 2213347 - DNA, 25 bp, Homo sapien
cagtgggcgctggattgccgtcttc

SEQ ID NO: 2213348 - DNA, 25 bp, Homo sapien
tttcctcaccctctgagttgtttgg

SEQ ID NO: 2213349 - DNA, 25 bp, Homo sapien
ccacatgcagtcacgatggacaatg

SEQ ID NO: 2213350 - DNA, 25 bp, Homo sapien
gagattccgtctcatccccggcgca

SEQ ID NO: 2213351 - DNA, 25 bp, Homo sapien
aagctctcgagtggccccgagattc

SEQ ID NO: 2213352 - DNA, 25 bp, Homo sapien
gatgcatggttcctgccccaagctc

SEQ ID NO: 2213353 - DNA, 25 bp, Homo sapien
ctggcgctgggatcctagtctcagg

SEQ ID NO: 2213354 - DNA, 25 bp, Homo sapien
cctggcgctgggatcctagtctcag

SEQ ID NO: 2213355 - DNA, 25 bp, Homo sapien
atcctagtctcagggcggaaatgcg

SEQ ID NO: 2213356 - DNA, 25 bp, Homo sapien
gtctcagggcggaaatgcgggggtg

SEQ ID NO: 2213357 - DNA, 25 bp, Homo sapien
tttaccaggttggagacattcttct

SEQ ID NO: 2213358 - DNA, 25 bp, Homo sapien
tatccctgggtatatactagaaaca

SEQ ID NO: 2213359 - DNA, 25 bp, Homo sapien
gaatctaccaagagacacttctgag

SEQ ID NO: 2213360 - DNA, 25 bp, Homo sapien
tctgagtcagttgaggcctatagtg

SEQ ID NO: 2213361 - DNA, 25 bp, Homo sapien
ttcagtgtcccttgagacataagca

SEQ ID NO: 2213362 - DNA, 25 bp, Homo sapien
cttcagtgtcccttgagacataagc

SEQ ID NO: 2213363 - DNA, 25 bp, Homo sapien
tcagtgtcccttgagacataagcag

SEQ ID NO: 2213364 - DNA, 25 bp, Homo sapien
cagtgtcccttgagacataagcagg

SEQ ID NO: 2213365 - DNA, 25 bp, Homo sapien
gaggaagacgcaccaggagtagcaa

SEQ ID NO: 2213366 - DNA, 25 bp, Homo sapien
aagacgcaccaggagtagcaaggca

SEQ ID NO: 2213367 - DNA, 25 bp, Homo sapien
accaggagtagcaaggcaccaccat

SEQ ID NO: 2213368 - DNA, 25 bp, Homo sapien
acgcaccaggagtagcaaggcacca

SEQ ID NO: 2213369 - DNA, 25 bp, Homo sapien
aatcttcaaagaggtccacgcatcc

SEQ ID NO: 2213370 - DNA, 25 bp, Homo sapien
tatccccttgcggatcccacagaaa

SEQ ID NO: 2213371 - DNA, 25 bp, Homo sapien
gaaaaagtgtgtcgaagctgcgcta

SEQ ID NO: 2213372 - DNA, 25 bp, Homo sapien
aatgcttccgtttagcttttaggtg

SEQ ID NO: 2213373 - DNA, 25 bp, Homo sapien
tgtgaagatatagacgtttcaaacg

SEQ ID NO: 2213374 - DNA, 25 bp, Homo sapien
tctactacaagggtgttgcaaacct

SEQ ID NO: 2213375 - DNA, 25 bp, Homo sapien
cgtttcaaacgaaggctacaaagtg

SEQ ID NO: 2213376 - DNA, 25 bp, Homo sapien
aactgctccatcaaaaggattgttc

SEQ ID NO: 2213377 - DNA, 25 bp, Homo sapien
aatcttcaaagaggtccacgcatcc

SEQ ID NO: 2213378 - DNA, 25 bp, Homo sapien
aatgcttccgtttagcttttaggtg

SEQ ID NO: 2213379 - DNA, 25 bp, Homo sapien
tatccccttgcggatcccacagaaa

SEQ ID NO: 2213380 - DNA, 25 bp, Homo sapien
gaaaaagtgtgtcgaagctgcgcta

SEQ ID NO: 2213381 - DNA, 25 bp, Homo sapien
aatgcttccgtttagcttttaggtg

SEQ ID NO: 2213382 - DNA, 25 bp, Homo sapien
aatcttcaaagaggtccacgcatcc

SEQ ID NO: 2213383 - DNA, 25 bp, Homo sapien
tatccccttgcggatcccacagaaa

SEQ ID NO: 2213384 - DNA, 25 bp, Homo sapien
gaaaaagtgtgtcgaagctgcgcta

SEQ ID NO: 2213385 - DNA, 25 bp, Homo sapien
tctactacaagggtgttgcaaacct

SEQ ID NO: 2213386 - DNA, 25 bp, Homo sapien
tgtgaagatatagacgtttcaaacg

SEQ ID NO: 2213387 - DNA, 25 bp, Homo sapien
cgtttcaaacgaaggctacaaagtg

SEQ ID NO: 2213388 - DNA, 25 bp, Homo sapien
aactgctccatcaaaaggattgttc

SEQ ID NO: 2213389 - DNA, 25 bp, Homo sapien
aatgcttccgtttagcttttaggtg

SEQ ID NO: 2213390 - DNA, 25 bp, Homo sapien
aatcttcaaagaggtccacgcatcc

SEQ ID NO: 2213391 - DNA, 25 bp, Homo sapien
tatccccttgcggatcccacagaaa

SEQ ID NO: 2213392 - DNA, 25 bp, Homo sapien
gaaaaagtgtgtcgaagctgcgcta

SEQ ID NO: 2213393 - DNA, 25 bp, Homo sapien
aatgcttccgtttagcttttaggtg

SEQ ID NO: 2213394 - DNA, 25 bp, Homo sapien
aatcttcaaagaggtccacgcatcc

SEQ ID NO: 2213395 - DNA, 25 bp, Homo sapien
tatccccttgcggatcccacagaaa

SEQ ID NO: 2213396 - DNA, 25 bp, Homo sapien
gaaaaagtgtgtcgaagctgcgcta

SEQ ID NO: 2213397 - DNA, 25 bp, Homo sapien
aatgcttccgtttagcttttaggtg

SEQ ID NO: 2213398 - DNA, 25 bp, Homo sapien
aatcttcaaagaggtccacgcatcc

SEQ ID NO: 2213399 - DNA, 25 bp, Homo sapien
tatccccttgcggatcccacagaaa

SEQ ID NO: 2213400 - DNA, 25 bp, Homo sapien
gaaaaagtgtgtcgaagctgcgcta

SEQ ID NO: 2213401 - DNA, 25 bp, Homo sapien
tctactacaagggtgttgcaaacct

SEQ ID NO: 2213402 - DNA, 25 bp, Homo sapien
cgtttcaaacgaaggctacaaagtg

SEQ ID NO: 2213403 - DNA, 25 bp, Homo sapien
tgtgaagatatagacgtttcaaacg

SEQ ID NO: 2213404 - DNA, 25 bp, Homo sapien
aactgctccatcaaaaggattgttc

SEQ ID NO: 2213405 - DNA, 25 bp, Homo sapien
aatcttcaaagaggtccacgcatcc

SEQ ID NO: 2213406 - DNA, 25 bp, Homo sapien
aatgcttccgtttagcttttaggtg

SEQ ID NO: 2213407 - DNA, 25 bp, Homo sapien
tatccccttgcggatcccacagaaa

SEQ ID NO: 2213408 - DNA, 25 bp, Homo sapien
gaaaaagtgtgtcgaagctgcgcta

SEQ ID NO: 2213409 - DNA, 25 bp, Homo sapien
aactgctccatcaaaaggattgttc

SEQ ID NO: 2213410 - DNA, 25 bp, Homo sapien
tccatcaaaaggattgttcaactct

SEQ ID NO: 2213411 - DNA, 25 bp, Homo sapien
tgtgaagatatagacgtttcaaacg

SEQ ID NO: 2213412 - DNA, 25 bp, Homo sapien
tctactacaagggtgttgcaaacct

SEQ ID NO: 2213413 - DNA, 25 bp, Homo sapien
cgtttcaaacgaaggctacaaagtg

SEQ ID NO: 2213414 - DNA, 25 bp, Homo sapien
aactgctccatcaaaaggattgttc

SEQ ID NO: 2213415 - DNA, 25 bp, Homo sapien
tctactacaagggtgttgcaaacct

SEQ ID NO: 2213416 - DNA, 25 bp, Homo sapien
tgtgaagatatagacgtttcaaacg

SEQ ID NO: 2213417 - DNA, 25 bp, Homo sapien
cgtttcaaacgaaggctacaaagtg

SEQ ID NO: 2213418 - DNA, 25 bp, Homo sapien
caagggtgttgcaaacctgaactat

SEQ ID NO: 2213419 - DNA, 25 bp, Homo sapien
gatgtgtgcattcatctcacagtgt

SEQ ID NO: 2213420 - DNA, 25 bp, Homo sapien
gtgcattcatctcacagtgttgaac

SEQ ID NO: 2213421 - DNA, 25 bp, Homo sapien
tgtgcattcatctcacagtgttgaa

SEQ ID NO: 2213422 - DNA, 25 bp, Homo sapien
tgtgtgcattcatctcacagtgttg

SEQ ID NO: 2213423 - DNA, 25 bp, Homo sapien
tatcttttgattgagcagttttgaa

SEQ ID NO: 2213424 - DNA, 25 bp, Homo sapien
tcttttgattgagcagttttgaatc

SEQ ID NO: 2213425 - DNA, 25 bp, Homo sapien
tttgattgagcagttttgaatctct

SEQ ID NO: 2213426 - DNA, 25 bp, Homo sapien
ctatcttttgattgagcagttttga

SEQ ID NO: 2213427 - DNA, 25 bp, Homo sapien
tttggagtgctttgaggcctattgt

SEQ ID NO: 2213428 - DNA, 25 bp, Homo sapien
ggaaaaagaaatatcttcacacaaa

SEQ ID NO: 2213429 - DNA, 25 bp, Homo sapien
tttgaggcctattgtggaaaaagaa

SEQ ID NO: 2213430 - DNA, 25 bp, Homo sapien
gagtgctttgaggcctattgtggaa

SEQ ID NO: 2213431 - DNA, 25 bp, Homo sapien
tacatagaagcattctgagaaactt

SEQ ID NO: 2213432 - DNA, 25 bp, Homo sapien
ctacatagaagcattctgagaaact

SEQ ID NO: 2213433 - DNA, 25 bp, Homo sapien
acttctttgtgatgtgtgcattcat

SEQ ID NO: 2213434 - DNA, 25 bp, Homo sapien
gcattcatctaacagagttgaacct

SEQ ID NO: 2213435 - DNA, 25 bp, Homo sapien
cagagctgaacctttctttggatag

SEQ ID NO: 2213436 - DNA, 25 bp, Homo sapien
gagctgaacctttctttggatagag

SEQ ID NO: 2213437 - DNA, 25 bp, Homo sapien
cacagagctgaacctttctttggat

SEQ ID NO: 2213438 - DNA, 25 bp, Homo sapien
ctgaacctttctttggatagagcag

SEQ ID NO: 2213439 - DNA, 25 bp, Homo sapien
ggatatttggaatgctttgaggcct

SEQ ID NO: 2213440 - DNA, 25 bp, Homo sapien
agaaacttctttgtgctgagtgcat

SEQ ID NO: 2213441 - DNA, 25 bp, Homo sapien
cttctttgtgctgagtgcattcaac

SEQ ID NO: 2213442 - DNA, 25 bp, Homo sapien
tatttggaatgctttgaggcctatg

SEQ ID NO: 2213443 - DNA, 25 bp, Homo sapien
taaaaactagacagaagcattctca

SEQ ID NO: 2213444 - DNA, 25 bp, Homo sapien
ggaataccttcacataaaaactaga

SEQ ID NO: 2213445 - DNA, 25 bp, Homo sapien
aaaactagacagaagcattctcaga

SEQ ID NO: 2213446 - DNA, 25 bp, Homo sapien
aactagacagaagcattctcagaaa

SEQ ID NO: 2213447 - DNA, 25 bp, Homo sapien
gtctttattacaggttattcagcat

SEQ ID NO: 2213448 - DNA, 25 bp, Homo sapien
gcctcattgggctctaaaatgtacc

SEQ ID NO: 2213449 - DNA, 25 bp, Homo sapien
cagcattttgctataggcctcattg

SEQ ID NO: 2213450 - DNA, 25 bp, Homo sapien
taaaatgtaccctcacagattctac

SEQ ID NO: 2213451 - DNA, 25 bp, Homo sapien
ggttaattctgtggaatgaatccaa

SEQ ID NO: 2213452 - DNA, 25 bp, Homo sapien
tgtttcaaacctgctgaaccaaaaa

SEQ ID NO: 2213453 - DNA, 25 bp, Homo sapien
caaaatgtccctccatagattttac

SEQ ID NO: 2213454 - DNA, 25 bp, Homo sapien
gtccattaatagattgtacaaaaag

SEQ ID NO: 2213455 - DNA, 25 bp, Homo sapien
tcaccaccagcactcaaagctgaaa

SEQ ID NO: 2213456 - DNA, 25 bp, Homo sapien
ggaaaaatcttcctgcttcaccacc

SEQ ID NO: 2213457 - DNA, 25 bp, Homo sapien
aaggaaaaatcttcctgcttcacca

SEQ ID NO: 2213458 - DNA, 25 bp, Homo sapien
cttcaccaccagcactcaaagctga

SEQ ID NO: 2213459 - DNA, 25 bp, Homo sapien
caatttcataggaagttaccctggc

SEQ ID NO: 2213460 - DNA, 25 bp, Homo sapien
gcatcaactagtgcattgtgagtca

SEQ ID NO: 2213461 - DNA, 25 bp, Homo sapien
acttttaccatcatgagccctggcc

SEQ ID NO: 2213462 - DNA, 25 bp, Homo sapien
gataagtgggttattcaccctctca

SEQ ID NO: 2213463 - DNA, 25 bp, Homo sapien
aatctatgcccttttatgtcactgg

SEQ ID NO: 2213464 - DNA, 25 bp, Homo sapien
tgtcactggaagtagctacatcgct

SEQ ID NO: 2213465 - DNA, 25 bp, Homo sapien
agggtgcctgaaacagcactggctc

SEQ ID NO: 2213466 - DNA, 25 bp, Homo sapien
tataaagggccaccagaaacatgtc

SEQ ID NO: 2213467 - DNA, 25 bp, Homo sapien
gcccagaaattcactgggagacaac

SEQ ID NO: 2213468 - DNA, 25 bp, Homo sapien
ttcttgcccagaaattcactgggag

SEQ ID NO: 2213469 - DNA, 25 bp, Homo sapien
ctgtccatgactatagagaaaactg

SEQ ID NO: 2213470 - DNA, 25 bp, Homo sapien
ccatgactatggagaagacctgaat

SEQ ID NO: 2213471 - DNA, 25 bp, Homo sapien
gacatcgggtaggtctttcaccata

SEQ ID NO: 2213472 - DNA, 25 bp, Homo sapien
ggtctttcaccatacgtgaagttag

SEQ ID NO: 2213473 - DNA, 25 bp, Homo sapien
tacgtgaagttagatctcttttctc

SEQ ID NO: 2213474 - DNA, 25 bp, Homo sapien
tcaccatacgtgaagttagatctct

SEQ ID NO: 2213475 - DNA, 25 bp, Homo sapien
gagacgaatttcctgtagtcacaag

SEQ ID NO: 2213476 - DNA, 25 bp, Homo sapien
gctgttggaaaagtagcttggctag

SEQ ID NO: 2213477 - DNA, 25 bp, Homo sapien
tgagtcccatgagtagagttgttgc

SEQ ID NO: 2213478 - DNA, 25 bp, Homo sapien
tacaagacacattgaggagcttaca

SEQ ID NO: 2213479 - DNA, 25 bp, Homo sapien
cagaagcaacaacttgtaattgttt

SEQ ID NO: 2213480 - DNA, 25 bp, Homo sapien
agaagcaacaacttgtaattgtttc

SEQ ID NO: 2213481 - DNA, 25 bp, Homo sapien
gaagcaacaacttgtaattgtttct

SEQ ID NO: 2213482 - DNA, 25 bp, Homo sapien
aagcaacaacttgtaattgtttctg

SEQ ID NO: 2213483 - DNA, 25 bp, Homo sapien
gtatggcacaggtggtgttacaaac

SEQ ID NO: 2213484 - DNA, 25 bp, Homo sapien
tgtggtatggcacaggtggtgttac

SEQ ID NO: 2213485 - DNA, 25 bp, Homo sapien
tggtatggcacaggtggtgttacaa

SEQ ID NO: 2213486 - DNA, 25 bp, Homo sapien
atggcacaggtggtgttacaaacat

SEQ ID NO: 2213487 - DNA, 25 bp, Homo sapien
attgtgaatctttggtggcttggga

SEQ ID NO: 2213488 - DNA, 25 bp, Homo sapien
ggcttgggaggctgttttagcttca

SEQ ID NO: 2213489 - DNA, 25 bp, Homo sapien
agtaaagatagttcctgttcaagca

SEQ ID NO: 2213490 - DNA, 25 bp, Homo sapien
tttagtaaagatagttcctgttcaa

SEQ ID NO: 2213491 - DNA, 25 bp, Homo sapien
ctgaccagcctggtgaagggaagca

SEQ ID NO: 2213492 - DNA, 25 bp, Homo sapien
tgaccagcctggtgaagggaagcat

SEQ ID NO: 2213493 - DNA, 25 bp, Homo sapien
tagtttgagcaatattggtaccagt

SEQ ID NO: 2213494 - DNA, 25 bp, Homo sapien
aactgtggatctgtctagtcctgca

SEQ ID NO: 2213495 - DNA, 25 bp, Homo sapien
ccaggactttatcagcttattgtag

SEQ ID NO: 2213496 - DNA, 25 bp, Homo sapien
tgagttagggatgcattccctctcc

SEQ ID NO: 2213497 - DNA, 25 bp, Homo sapien
gagtctcaacaaaggtgacatttcc

SEQ ID NO: 2213498 - DNA, 25 bp, Homo sapien
tgccaaatattgacaccaaagacgt

SEQ ID NO: 2213499 - DNA, 25 bp, Homo sapien
gatggcaatactgtgaggcaaagca

SEQ ID NO: 2213500 - DNA, 25 bp, Homo sapien
ccaaagacgtgaaccagaatggagc

SEQ ID NO: 2213501 - DNA, 25 bp, Homo sapien
gccatacaggagccatcctgtctgg

SEQ ID NO: 2213502 - DNA, 25 bp, Homo sapien
agcagtctggcagattttctgaaag

SEQ ID NO: 2213503 - DNA, 25 bp, Homo sapien
tcctccttaacagacattatggctg

SEQ ID NO: 2213504 - DNA, 25 bp, Homo sapien
aagtttagaagcagtctggcagatt

SEQ ID NO: 2213505 - DNA, 25 bp, Homo sapien
tagagcaaagtgtgactagctttca

SEQ ID NO: 2213506 - DNA, 25 bp, Homo sapien
ctttgccatacccttcttggtccag

SEQ ID NO: 2213507 - DNA, 25 bp, Homo sapien
ccagtcccatagagcaaagtgtgac

SEQ ID NO: 2213508 - DNA, 25 bp, Homo sapien
gcttggaacagaaaccatgactcct

SEQ ID NO: 2213509 - DNA, 25 bp, Homo sapien
ggcagttgggccccaccttcttgca

SEQ ID NO: 2213510 - DNA, 25 bp, Homo sapien
ggaagctgtagttctgtgtagtgag

SEQ ID NO: 2213511 - DNA, 25 bp, Homo sapien
ctgggaagctgtagttctgtgtagt

SEQ ID NO: 2213512 - DNA, 25 bp, Homo sapien
gggaagctgtagttctgtgtagtga

SEQ ID NO: 2213513 - DNA, 25 bp, Homo sapien
tggctggaagtggatgtagtgtgaa

SEQ ID NO: 2213514 - DNA, 25 bp, Homo sapien
gctccaaacacagctcttgggctct

SEQ ID NO: 2213515 - DNA, 25 bp, Homo sapien
gtggatgtagtgtgaagtctccctc

SEQ ID NO: 2213516 - DNA, 25 bp, Homo sapien
gaagtggatgtagtgtgaagtctcc

SEQ ID NO: 2213517 - DNA, 25 bp, Homo sapien
ggtttgctgcaccgatcacctcata

SEQ ID NO: 2213518 - DNA, 25 bp, Homo sapien
cgatcacctcataacctaggtatta

SEQ ID NO: 2213519 - DNA, 25 bp, Homo sapien
tccctgaccccaccgtcctgacagg

SEQ ID NO: 2213520 - DNA, 25 bp, Homo sapien
tgcaccgatcacctcataacctagg

SEQ ID NO: 2213521 - DNA, 25 bp, Homo sapien
ggaatcatattgtcagggaagagag

SEQ ID NO: 2213522 - DNA, 25 bp, Homo sapien
gatttcactctcagcctacgtgttg

SEQ ID NO: 2213523 - DNA, 25 bp, Homo sapien
ttctaggaaccttttggcatagcct

SEQ ID NO: 2213524 - DNA, 25 bp, Homo sapien
tgagcctactataagggaacttccg

SEQ ID NO: 2213525 - DNA, 25 bp, Homo sapien
tgtcttttaagtgggatatctggcc

SEQ ID NO: 2213526 - DNA, 25 bp, Homo sapien
gagatgttcaaaatatgcgcccaat

SEQ ID NO: 2213527 - DNA, 25 bp, Homo sapien
tctactgagaggtctactgctagcc

SEQ ID NO: 2213528 - DNA, 25 bp, Homo sapien
taagggcctcttgtaatgctgatct

SEQ ID NO: 2213529 - DNA, 25 bp, Homo sapien
cttgtgggccgcatatagctgaatc

SEQ ID NO: 2213530 - DNA, 25 bp, Homo sapien
ggcattttctgtccaaagatctgtt

SEQ ID NO: 2213531 - DNA, 25 bp, Homo sapien
tctagagtgacgattaagttgaacc

SEQ ID NO: 2213532 - DNA, 25 bp, Homo sapien
tgatataagtgcactactcctagtg

SEQ ID NO: 2213533 - DNA, 25 bp, Homo sapien
tggagacttcttatctcatcctgtg

SEQ ID NO: 2213534 - DNA, 25 bp, Homo sapien
gatgatattcatgcctaacctcttg

SEQ ID NO: 2213535 - DNA, 25 bp, Homo sapien
ttattttacacagggactattcaag

SEQ ID NO: 2213536 - DNA, 25 bp, Homo sapien
tggccagcttctttatcacaaacag

SEQ ID NO: 2213537 - DNA, 25 bp, Homo sapien
tgcccatactctaatcgccaaaatc

SEQ ID NO: 2213538 - DNA, 25 bp, Homo sapien
ttcatgcccatactctaatcgccaa

SEQ ID NO: 2213539 - DNA, 25 bp, Homo sapien
catgcccatactctaatcgccaaaa

SEQ ID NO: 2213540 - DNA, 25 bp, Homo sapien
agtcttcatgcccatactctaatcg

SEQ ID NO: 2213541 - DNA, 25 bp, Homo sapien
tagagatataacaggcatgcacaat

SEQ ID NO: 2213542 - DNA, 25 bp, Homo sapien
aaggcaggcccaaaagatattgtat

SEQ ID NO: 2213543 - DNA, 25 bp, Homo sapien
tgaactaaaagacatctcagctagg

SEQ ID NO: 2213544 - DNA, 25 bp, Homo sapien
gagagagctattaaggcctttccaa

SEQ ID NO: 2213545 - DNA, 25 bp, Homo sapien
gatgcaagtctagacaatatcaaga

SEQ ID NO: 2213546 - DNA, 25 bp, Homo sapien
ctctagatgcaagtctagacaatat

SEQ ID NO: 2213547 - DNA, 25 bp, Homo sapien
tagatgcaagtctagacaatatcaa

SEQ ID NO: 2213548 - DNA, 25 bp, Homo sapien
tgtagtatgaagtttacatttaaac

SEQ ID NO: 2213549 - DNA, 25 bp, Homo sapien
aatcactaaactcttggatcaattc

SEQ ID NO: 2213550 - DNA, 25 bp, Homo sapien
gtgactgaaccctgccaacaatggt

SEQ ID NO: 2213551 - DNA, 25 bp, Homo sapien
ccaacaatggtttcagtgttcaaag

SEQ ID NO: 2213552 - DNA, 25 bp, Homo sapien
gaaccactgcccaatatgaaagttt

SEQ ID NO: 2213553 - DNA, 25 bp, Homo sapien
tatgaacaggcttagtcctttgtgg

SEQ ID NO: 2213554 - DNA, 25 bp, Homo sapien
cagtccttatttatggtgccaatga

SEQ ID NO: 2213555 - DNA, 25 bp, Homo sapien
gcaataagtttaggcagggaacacc

SEQ ID NO: 2213556 - DNA, 25 bp, Homo sapien
gatctgcttgtactgtatactctcc

SEQ ID NO: 2213557 - DNA, 25 bp, Homo sapien
ctttttacagcaaagtgcaggaaag

SEQ ID NO: 2213558 - DNA, 25 bp, Homo sapien
gctttttacagcaaagtgcaggaaa

SEQ ID NO: 2213559 - DNA, 25 bp, Homo sapien
tttttacagcaaagtgcaggaaagg

SEQ ID NO: 2213560 - DNA, 25 bp, Homo sapien
ctcaagagcgttaattcttgtcatt

SEQ ID NO: 2213561 - DNA, 25 bp, Homo sapien
tggctccaaacctcgagcaaagcct

SEQ ID NO: 2213562 - DNA, 25 bp, Homo sapien
aataatccgctctggctccaaacct

SEQ ID NO: 2213563 - DNA, 25 bp, Homo sapien
tcagcaatgaggtcgaggcaatcca

SEQ ID NO: 2213564 - DNA, 25 bp, Homo sapien
tgttatcctcatctgagaatccctt

SEQ ID NO: 2213565 - DNA, 25 bp, Homo sapien
cggtcgagaaatttttccaccacat

SEQ ID NO: 2213566 - DNA, 25 bp, Homo sapien
tccaccacatattccttttcctcct

SEQ ID NO: 2213567 - DNA, 25 bp, Homo sapien
ttttcctcctcttctagcacttcct

SEQ ID NO: 2213568 - DNA, 25 bp, Homo sapien
tttcctcctcttctagcacttcctc

SEQ ID NO: 2213569 - DNA, 25 bp, Homo sapien
tggcgtgtcacgtcgagtcacctgg

SEQ ID NO: 2213570 - DNA, 25 bp, Homo sapien
cccgagaggaatcagtgctgtgcta

SEQ ID NO: 2213571 - DNA, 25 bp, Homo sapien
gaatcagtgctgtgctactggcgtg

SEQ ID NO: 2213572 - DNA, 25 bp, Homo sapien
tgtgctactggcgtgtcacgtcgag

SEQ ID NO: 2213573 - DNA, 25 bp, Homo sapien
cagtgccgaatgaacacctcaaggg

SEQ ID NO: 2213574 - DNA, 25 bp, Homo sapien
gctcacaccacctgttccggaagtt

SEQ ID NO: 2213575 - DNA, 25 bp, Homo sapien
tcttccacaataggccaaatcggag

SEQ ID NO: 2213576 - DNA, 25 bp, Homo sapien
gcaataactaatataggtttctttg

SEQ ID NO: 2213577 - DNA, 25 bp, Homo sapien
gtgtagtggagcctttcctcaaggg

SEQ ID NO: 2213578 - DNA, 25 bp, Homo sapien
ggttctgggcgtgtaaactggttca

SEQ ID NO: 2213579 - DNA, 25 bp, Homo sapien
gcacagttactctggtaaatcggta

SEQ ID NO: 2213580 - DNA, 25 bp, Homo sapien
gctatgcttaccttgcctttgatgg

SEQ ID NO: 2213581 - DNA, 25 bp, Homo sapien
ggaacgggcgctttcattttggata

SEQ ID NO: 2213582 - DNA, 25 bp, Homo sapien
gtacagtcaacaagcaacaaccagt

SEQ ID NO: 2213583 - DNA, 25 bp, Homo sapien
catgagcaaagggtaagaacaggca

SEQ ID NO: 2213584 - DNA, 25 bp, Homo sapien
caggaatagcggaaactcttaaaca

SEQ ID NO: 2213585 - DNA, 25 bp, Homo sapien
caggaaggatctctagcgctaaaac

SEQ ID NO: 2213586 - DNA, 25 bp, Homo sapien
tcttcatcaggtatgcggacacgcc

SEQ ID NO: 2213587 - DNA, 25 bp, Homo sapien
tgttgaatgcggcagcccacgatgt

SEQ ID NO: 2213588 - DNA, 25 bp, Homo sapien
taaaactctcttatcgcggtgcagt

SEQ ID NO: 2213589 - DNA, 25 bp, Homo sapien
atcggaggcacggttggaggagaca

SEQ ID NO: 2213590 - DNA, 25 bp, Homo sapien
tcggaggcacggttggaggagacat

SEQ ID NO: 2213591 - DNA, 25 bp, Homo sapien
ccccatcggaggcacggttggagga

SEQ ID NO: 2213592 - DNA, 25 bp, Homo sapien
ccatcggaggcacggttggaggaga

SEQ ID NO: 2213593 - DNA, 25 bp, Homo sapien
ttgcgatctcaaagacctggtctgt

SEQ ID NO: 2213594 - DNA, 25 bp, Homo sapien
ttttggcagaaacgctcgaactcta

SEQ ID NO: 2213595 - DNA, 25 bp, Homo sapien
gctgccctggtcgattaaactgaca

SEQ ID NO: 2213596 - DNA, 25 bp, Homo sapien
caagtgcaaggctctcaccaaggtt

SEQ ID NO: 2213597 - DNA, 25 bp, Homo sapien
gagtgctgttcgtgccttgcgtccg

SEQ ID NO: 2213598 - DNA, 25 bp, Homo sapien
gaatcggccacttagctgttgtcga

SEQ ID NO: 2213599 - DNA, 25 bp, Homo sapien
tcactctggcgaccgggtctttgcg

SEQ ID NO: 2213600 - DNA, 25 bp, Homo sapien
ccctagaagggttactgcagcagtg

SEQ ID NO: 2213601 - DNA, 25 bp, Homo sapien
gagagctgcacatgagatgagtaca

SEQ ID NO: 2213602 - DNA, 25 bp, Homo sapien
catccagactgcaccaaaatgttaa

SEQ ID NO: 2213603 - DNA, 25 bp, Homo sapien
gctgcatgcttatatcgaaaacctg

SEQ ID NO: 2213604 - DNA, 25 bp, Homo sapien
tactgacattgtggagatcttctaa

SEQ ID NO: 2213605 - DNA, 25 bp, Homo sapien
ggaactcctggatacataaagcaag

SEQ ID NO: 2213606 - DNA, 25 bp, Homo sapien
taaagcaagcattaatggtcctagg

SEQ ID NO: 2213607 - DNA, 25 bp, Homo sapien
tacatggcccaacaatggaactcct

SEQ ID NO: 2213608 - DNA, 25 bp, Homo sapien
gaagtcaaagtgcactctagaccaa

SEQ ID NO: 2213609 - DNA, 25 bp, Homo sapien
ttggtcattctctaaattgtgggag

SEQ ID NO: 2213610 - DNA, 25 bp, Homo sapien
tggaaggtactgtttacaggaggaa

SEQ ID NO: 2213611 - DNA, 25 bp, Homo sapien
aggtttcaccttacaaggactccag

SEQ ID NO: 2213612 - DNA, 25 bp, Homo sapien
tattgtgcagtgtcaaggtttggag

SEQ ID NO: 2213613 - DNA, 25 bp, Homo sapien
caatggacataatcggcctggtggg

SEQ ID NO: 2213614 - DNA, 25 bp, Homo sapien
aacgcagtttggattagaaatgggc

SEQ ID NO: 2213615 - DNA, 25 bp, Homo sapien
caaatatgcggagcttctgaatctg

SEQ ID NO: 2213616 - DNA, 25 bp, Homo sapien
tcagcactcctaggtgtcattataa

SEQ ID NO: 2213617 - DNA, 25 bp, Homo sapien
gtggtagaatttggcatcaaagcca

SEQ ID NO: 2213618 - DNA, 25 bp, Homo sapien
ggcatcaaagccatacagtccaggg

SEQ ID NO: 2213619 - DNA, 25 bp, Homo sapien
tactgattcaaacttgtgactcact

SEQ ID NO: 2213620 - DNA, 25 bp, Homo sapien
cactcagtcttgtggattgtatctc

SEQ ID NO: 2213621 - DNA, 25 bp, Homo sapien
ggagcttccgaatggtttcctcgta

SEQ ID NO: 2213622 - DNA, 25 bp, Homo sapien
ttattgggagaaagacctgcggaga

SEQ ID NO: 2213623 - DNA, 25 bp, Homo sapien
ggaccagttacagtcccgggcagga

SEQ ID NO: 2213624 - DNA, 25 bp, Homo sapien
aaagggcgtcgttgatcatctggct

SEQ ID NO: 2213625 - DNA, 25 bp, Homo sapien
ggtattagacgtggcaaaggtgaaa

SEQ ID NO: 2213626 - DNA, 25 bp, Homo sapien
gtgtttttgcatgcttgcctggata

SEQ ID NO: 2213627 - DNA, 25 bp, Homo sapien
catgcttgcctggataaaacaattc

SEQ ID NO: 2213628 - DNA, 25 bp, Homo sapien
ctggtattagacgtggcaaaggtga

SEQ ID NO: 2213629 - DNA, 25 bp, Homo sapien
tacgaactgcgatatgaacaatgcc

SEQ ID NO: 2213630 - DNA, 25 bp, Homo sapien
ttgaaggatgactcccacgaggaag

SEQ ID NO: 2213631 - DNA, 25 bp, Homo sapien
caaggttaaatatgcatggcccaat

SEQ ID NO: 2213632 - DNA, 25 bp, Homo sapien
tattccagtgccaagtgcagcagtg

SEQ ID NO: 2213633 - DNA, 25 bp, Homo sapien
gaaaagcataacaccttctgccagg

SEQ ID NO: 2213634 - DNA, 25 bp, Homo sapien
tgtcaggtaccagtcacaggtgagg

SEQ ID NO: 2213635 - DNA, 25 bp, Homo sapien
tgtaagtaggtcagccggaagagcc

SEQ ID NO: 2213636 - DNA, 25 bp, Homo sapien
ggaattcttgttaggcacagcgagg

SEQ ID NO: 2213637 - DNA, 25 bp, Homo sapien
taccatcgtgaggagatatcagact

SEQ ID NO: 2213638 - DNA, 25 bp, Homo sapien
tttcgttatgaacagccctggagcc

SEQ ID NO: 2213639 - DNA, 25 bp, Homo sapien
tgcaatggataatgacggcctctag

SEQ ID NO: 2213640 - DNA, 25 bp, Homo sapien
gccaggctgccgaatctgctaagaa

SEQ ID NO: 2213641 - DNA, 25 bp, Homo sapien
agtaactagtccccagatctaaaag

SEQ ID NO: 2213642 - DNA, 25 bp, Homo sapien
aactgagtaactagtccccagatct

SEQ ID NO: 2213643 - DNA, 25 bp, Homo sapien
tgagtaactagtccccagatctaaa

SEQ ID NO: 2213644 - DNA, 25 bp, Homo sapien
taactagtccccagatctaaaagga

SEQ ID NO: 2213645 - DNA, 25 bp, Homo sapien
ttcagcagccaggtctacaatgctt

SEQ ID NO: 2213646 - DNA, 25 bp, Homo sapien
gcagcggaccctgggccccgtcagt

SEQ ID NO: 2213647 - DNA, 25 bp, Homo sapien
acaatgcttgccagactggaaccag

SEQ ID NO: 2213648 - DNA, 25 bp, Homo sapien
ggtctacaatgcttgccagactgga

SEQ ID NO: 2213649 - DNA, 25 bp, Homo sapien
gaggccggtgttggatgcaatggga

SEQ ID NO: 2213650 - DNA, 25 bp, Homo sapien
ccggtgttggatgcaatgggagtgg

SEQ ID NO: 2213651 - DNA, 25 bp, Homo sapien
aggccggtgttggatgcaatgggag

SEQ ID NO: 2213652 - DNA, 25 bp, Homo sapien
ggccggtgttggatgcaatgggagt

SEQ ID NO: 2213653 - DNA, 25 bp, Homo sapien
agtgcgtcatgtaattctcgtgcca

SEQ ID NO: 2213654 - DNA, 25 bp, Homo sapien
tgaagcttgtgagtgcgtcatgtaa

SEQ ID NO: 2213655 - DNA, 25 bp, Homo sapien
cttgtgagtgcgtcatgtaattctc

SEQ ID NO: 2213656 - DNA, 25 bp, Homo sapien
tgagtgcgtcatgtaattctcgtgc

SEQ ID NO: 2213657 - DNA, 25 bp, Homo sapien
cacaaatacaaactcatgtgaggag

SEQ ID NO: 2213658 - DNA, 25 bp, Homo sapien
tgtgaggagtctgccacatcaccac

SEQ ID NO: 2213659 - DNA, 25 bp, Homo sapien
gtggaccccattgtactgctgctgc

SEQ ID NO: 2213660 - DNA, 25 bp, Homo sapien
acaccaccagagcatgaacgtggac

SEQ ID NO: 2213661 - DNA, 25 bp, Homo sapien
aatgcacgtgcatggatcccaatgc

SEQ ID NO: 2213662 - DNA, 25 bp, Homo sapien
tgcacgtgcatggatcccaatgcat

SEQ ID NO: 2213663 - DNA, 25 bp, Homo sapien
ctggtgaatgcacgtgcatggatcc

SEQ ID NO: 2213664 - DNA, 25 bp, Homo sapien
tgaatgcacgtgcatggatcccaat

SEQ ID NO: 2213665 - DNA, 25 bp, Homo sapien
caggagaatcgcttgaacccaggag

SEQ ID NO: 2213666 - DNA, 25 bp, Homo sapien
gcggaggttgtggtgagccaagatt

SEQ ID NO: 2213667 - DNA, 25 bp, Homo sapien
atcccagtgactcaggatgctgagg

SEQ ID NO: 2213668 - DNA, 25 bp, Homo sapien
ccaagattgtgccattgcactccag

SEQ ID NO: 2213669 - DNA, 25 bp, Homo sapien
gaagattttatcaagtgtaagaaag

SEQ ID NO: 2213670 - DNA, 25 bp, Homo sapien
tagagttacatacaaagggaagccc

SEQ ID NO: 2213671 - DNA, 25 bp, Homo sapien
caaggcaggcccaagttcaaattca

SEQ ID NO: 2213672 - DNA, 25 bp, Homo sapien
ctagcaaggcaggcccaagttcaaa

SEQ ID NO: 2213673 - DNA, 25 bp, Homo sapien
cttgtcagattcacgaaagtcgaaa

SEQ ID NO: 2213674 - DNA, 25 bp, Homo sapien
tacttgtcagattcacgaaagtcga

SEQ ID NO: 2213675 - DNA, 25 bp, Homo sapien
agaacatacttgtcagattcacgaa

SEQ ID NO: 2213676 - DNA, 25 bp, Homo sapien
catacttgtcagattcacgaaagtc

SEQ ID NO: 2213677 - DNA, 25 bp, Homo sapien
tctcctacccctgcatcttcatatt

SEQ ID NO: 2213678 - DNA, 25 bp, Homo sapien
aagcaacaactgccattagaaacac

SEQ ID NO: 2213679 - DNA, 25 bp, Homo sapien
caacaactgccattagaaacacatt

SEQ ID NO: 2213680 - DNA, 25 bp, Homo sapien
ttctcctacccctgcatcttcatat

SEQ ID NO: 2213681 - DNA, 25 bp, Homo sapien
ggaactttccatgtctccgatcccc

SEQ ID NO: 2213682 - DNA, 25 bp, Homo sapien
ctttccatgtctccgatcccctccc

SEQ ID NO: 2213683 - DNA, 25 bp, Homo sapien
gggaactttccatgtctccgatccc

SEQ ID NO: 2213684 - DNA, 25 bp, Homo sapien
aactttccatgtctccgatcccctc

SEQ ID NO: 2213685 - DNA, 25 bp, Homo sapien
aggtgtgattgtacagcacctcttc

SEQ ID NO: 2213686 - DNA, 25 bp, Homo sapien
cattgtgtctctaactgggattata

SEQ ID NO: 2213687 - DNA, 25 bp, Homo sapien
ttccagattattaaatcagctcagc

SEQ ID NO: 2213688 - DNA, 25 bp, Homo sapien
tgaagtagcccgtgattgtggaatg

SEQ ID NO: 2213689 - DNA, 25 bp, Homo sapien
cagctcagcaggcagaattgaagta

SEQ ID NO: 2213690 - DNA, 25 bp, Homo sapien
cactttaggtaagcatgcagccctg

SEQ ID NO: 2213691 - DNA, 25 bp, Homo sapien
gaagcaacgtggatatctgatctca

SEQ ID NO: 2213692 - DNA, 25 bp, Homo sapien
ttttacaagcacaaatgggagctcc

SEQ ID NO: 2213693 - DNA, 25 bp, Homo sapien
tccagagagtaagcacaaccatttc

SEQ ID NO: 2213694 - DNA, 25 bp, Homo sapien
ctctactccactaggatttactttt

SEQ ID NO: 2213695 - DNA, 25 bp, Homo sapien
ctactccactaggatttacttttgt

SEQ ID NO: 2213696 - DNA, 25 bp, Homo sapien
tctactccactaggatttacttttg

SEQ ID NO: 2213697 - DNA, 25 bp, Homo sapien
ggaaagcatataatattagatagga

SEQ ID NO: 2213698 - DNA, 25 bp, Homo sapien
tgctcatgctaacacttttcagtcg

SEQ ID NO: 2213699 - DNA, 25 bp, Homo sapien
ttttctagcaaatttcagctgaatt

SEQ ID NO: 2213700 - DNA, 25 bp, Homo sapien
ttagataggaacttttgctcatgct

SEQ ID NO: 2213701 - DNA, 25 bp, Homo sapien
acatctccaattggcaagctaacat

SEQ ID NO: 2213702 - DNA, 25 bp, Homo sapien
tccaattggcaagctaacatcacag

SEQ ID NO: 2213703 - DNA, 25 bp, Homo sapien
cgaacaacttgctccagaatggcat

SEQ ID NO: 2213704 - DNA, 25 bp, Homo sapien
acaactgcatggaaatcgaacaact

SEQ ID NO: 2213705 - DNA, 25 bp, Homo sapien
ccccatcaactcagcccaaagcttc

SEQ ID NO: 2213706 - DNA, 25 bp, Homo sapien
agacaaaacaagcagatggaaaata

SEQ ID NO: 2213707 - DNA, 25 bp, Homo sapien
taaaccccatcaactcagcccaaag

SEQ ID NO: 2213708 - DNA, 25 bp, Homo sapien
ccatactcatggataaaaagggaca

SEQ ID NO: 2213709 - DNA, 25 bp, Homo sapien
gcgttaaaagggaaatctatagcac

SEQ ID NO: 2213710 - DNA, 25 bp, Homo sapien
ccaaagcgatttatacatgcaatgc

SEQ ID NO: 2213711 - DNA, 25 bp, Homo sapien
gaaagatctccgattgacagtctaa

SEQ ID NO: 2213712 - DNA, 25 bp, Homo sapien
gcttgtataagcaggactatcctaa

SEQ ID NO: 2213713 - DNA, 25 bp, Homo sapien
ccctggaatgcatgattggatgaac

SEQ ID NO: 2213714 - DNA, 25 bp, Homo sapien
tacctaggtgatggactgatacgcg

SEQ ID NO: 2213715 - DNA, 25 bp, Homo sapien
gggagtcaaactaaccctgttagca

SEQ ID NO: 2213716 - DNA, 25 bp, Homo sapien
ccttgatctgatacagaaggttagc

SEQ ID NO: 2213717 - DNA, 25 bp, Homo sapien
tacctctgctaggattcacctgtaa

SEQ ID NO: 2213718 - DNA, 25 bp, Homo sapien
caaactacacttttgaggtaaatgc

SEQ ID NO: 2213719 - DNA, 25 bp, Homo sapien
ccatctggtcatgggttgttttttg

SEQ ID NO: 2213720 - DNA, 25 bp, Homo sapien
cctgtaattccatctggtcatgggt

SEQ ID NO: 2213721 - DNA, 25 bp, Homo sapien
caggcaatctgacgtgaatttgtac

SEQ ID NO: 2213722 - DNA, 25 bp, Homo sapien
cctctatttactggttgtgacagca

SEQ ID NO: 2213723 - DNA, 25 bp, Homo sapien
tatccattactgagcttcaacaatg

SEQ ID NO: 2213724 - DNA, 25 bp, Homo sapien
ggacccattagccaacacttattat

SEQ ID NO: 2213725 - DNA, 25 bp, Homo sapien
gcttgatcagatttgagtgaacttt

SEQ ID NO: 2213726 - DNA, 25 bp, Homo sapien
tattgtgtaccttactaaaaggcac

SEQ ID NO: 2213727 - DNA, 25 bp, Homo sapien
cagtttattatgtaccttaaagatg

SEQ ID NO: 2213728 - DNA, 25 bp, Homo sapien
aggcaccttgtgactggcaacctaa

SEQ ID NO: 2213729 - DNA, 25 bp, Homo sapien
attcccgcactcctacccctggcgt

SEQ ID NO: 2213730 - DNA, 25 bp, Homo sapien
taaagggaggatgagtcctagctca

SEQ ID NO: 2213731 - DNA, 25 bp, Homo sapien
ctggcgtcctgctagctggtctggc

SEQ ID NO: 2213732 - DNA, 25 bp, Homo sapien
aaggcaaattattcaataaagggag

SEQ ID NO: 2213733 - DNA, 25 bp, Homo sapien
acttcgccacggtctgaactcttgg

SEQ ID NO: 2213734 - DNA, 25 bp, Homo sapien
aactcttggccacaagatctaagcc

SEQ ID NO: 2213735 - DNA, 25 bp, Homo sapien
gtcaccgccatccaactgcatgtca

SEQ ID NO: 2213736 - DNA, 25 bp, Homo sapien
aagatctaagccttccggatgcccc

SEQ ID NO: 2213737 - DNA, 25 bp, Homo sapien
tagtcggcttacttgatgccagcac

SEQ ID NO: 2213738 - DNA, 25 bp, Homo sapien
cgaggtagtcggcttacttgatgcc

SEQ ID NO: 2213739 - DNA, 25 bp, Homo sapien
cctttgccgaggtagtcggcttact

SEQ ID NO: 2213740 - DNA, 25 bp, Homo sapien
taagcctttgccgaggtagtcggct

SEQ ID NO: 2213741 - DNA, 25 bp, Homo sapien
gataaccagatagtcgagggaagat

SEQ ID NO: 2213742 - DNA, 25 bp, Homo sapien
ggaatgtttgcctattatacctaga

SEQ ID NO: 2213743 - DNA, 25 bp, Homo sapien
tagatagctatccatgtgtgactga

SEQ ID NO: 2213744 - DNA, 25 bp, Homo sapien
tacaataagtaggtaccatgtaggg

SEQ ID NO: 2213745 - DNA, 25 bp, Homo sapien
tgtgatgaggtggataacaaggacc

SEQ ID NO: 2213746 - DNA, 25 bp, Homo sapien
tccactgtgatgaggtggataacaa

SEQ ID NO: 2213747 - DNA, 25 bp, Homo sapien
ggataacaaggacccaatgccacat

SEQ ID NO: 2213748 - DNA, 25 bp, Homo sapien
tgaggtggataacaaggacccaatg

SEQ ID NO: 2213749 - DNA, 25 bp, Homo sapien
gctaagtcctgctgattttggtggg

SEQ ID NO: 2213750 - DNA, 25 bp, Homo sapien
ctaggaattggcaagatgcagaagc

SEQ ID NO: 2213751 - DNA, 25 bp, Homo sapien
ggaattggcaagatgcagaagcgac

SEQ ID NO: 2213752 - DNA, 25 bp, Homo sapien
gaagcgactgctgagagctaagtcc

SEQ ID NO: 2213753 - DNA, 25 bp, Homo sapien
cacagcaggtcccattgaacacact

SEQ ID NO: 2213754 - DNA, 25 bp, Homo sapien
tagatgtctgtcttaggactcccca

SEQ ID NO: 2213755 - DNA, 25 bp, Homo sapien
tgaacacactagcaaagccttttgg

SEQ ID NO: 2213756 - DNA, 25 bp, Homo sapien
gagcagcaagggtaatcaaagtcac

SEQ ID NO: 2213757 - DNA, 25 bp, Homo sapien
taacaggttaggatactgaacccag

SEQ ID NO: 2213758 - DNA, 25 bp, Homo sapien
gaaatgtaggcccagaaacttgtcc

SEQ ID NO: 2213759 - DNA, 25 bp, Homo sapien
gctcagggccatgcggaaattacaa

SEQ ID NO: 2213760 - DNA, 25 bp, Homo sapien
tcgaagaagcatgtcaaggccaagc

SEQ ID NO: 2213761 - DNA, 25 bp, Homo sapien
caaaaagctggccaaaagcgagcct

SEQ ID NO: 2213762 - DNA, 25 bp, Homo sapien
tgaagggaggcctgcatagctacca

SEQ ID NO: 2213763 - DNA, 25 bp, Homo sapien
caaggtctatccatgaaaagggcta

SEQ ID NO: 2213764 - DNA, 25 bp, Homo sapien
acaaagaaaagattcccaggctggg

SEQ ID NO: 2213765 - DNA, 25 bp, Homo sapien
ctttgagtgccagaacagctttaac

SEQ ID NO: 2213766 - DNA, 25 bp, Homo sapien
gatgttggaaacacggccttctttg

SEQ ID NO: 2213767 - DNA, 25 bp, Homo sapien
cagctttaactatatcaataccaaa

SEQ ID NO: 2213768 - DNA, 25 bp, Homo sapien
atgagaggatgttggaaacacggcc

SEQ ID NO: 2213769 - DNA, 25 bp, Homo sapien
tctgtaaatgggagcagggacaacc

SEQ ID NO: 2213770 - DNA, 25 bp, Homo sapien
tgcaaaattgcaacgacccagaagt

SEQ ID NO: 2213771 - DNA, 25 bp, Homo sapien
gcctgaatgcaaaatgttccctgaa

SEQ ID NO: 2213772 - DNA, 25 bp, Homo sapien
ggagaagtctcacacaattttaggg

SEQ ID NO: 2213773 - DNA, 25 bp, Homo sapien
aaaattatctgcctccctgtaggta

SEQ ID NO: 2213774 - DNA, 25 bp, Homo sapien
tattttaaaattatctgcctccctg

SEQ ID NO: 2213775 - DNA, 25 bp, Homo sapien
ttttaaaattatctgcctccctgta

SEQ ID NO: 2213776 - DNA, 25 bp, Homo sapien
ttaaaattatctgcctccctgtagg

SEQ ID NO: 2213777 - DNA, 25 bp, Homo sapien
ggtgaactcaaagacctgcgactga

SEQ ID NO: 2213778 - DNA, 25 bp, Homo sapien
tcctgcggtggtgggtaggaaggag

SEQ ID NO: 2213779 - DNA, 25 bp, Homo sapien
gctgcgcttgggttcggtgaactca

SEQ ID NO: 2213780 - DNA, 25 bp, Homo sapien
ccagaatggtgactggctgcgcttg

SEQ ID NO: 2213781 - DNA, 25 bp, Homo sapien
tttgactactcagttcagagctctt

SEQ ID NO: 2213782 - DNA, 25 bp, Homo sapien
caacaaactctatttcgccttctcc

SEQ ID NO: 2213783 - DNA, 25 bp, Homo sapien
caaactctatttcgccttctccagt

SEQ ID NO: 2213784 - DNA, 25 bp, Homo sapien
acaaactctatttcgccttctccag

SEQ ID NO: 2213785 - DNA, 25 bp, Homo sapien
cccaacaaactctatttcgccttct

SEQ ID NO: 2213786 - DNA, 25 bp, Homo sapien
atagagttaatagtgtccagcttct

SEQ ID NO: 2213787 - DNA, 25 bp, Homo sapien
aatagagttaatagtgtccagcttc

SEQ ID NO: 2213788 - DNA, 25 bp, Homo sapien
tagagttaatagtgtccagcttctc

SEQ ID NO: 2213789 - DNA, 25 bp, Homo sapien
ttctcacagtcattgcagcctgcct

SEQ ID NO: 2213790 - DNA, 25 bp, Homo sapien
tctcacagtcattgcagcctgcctc

SEQ ID NO: 2213791 - DNA, 25 bp, Homo sapien
tttctcacagtcattgcagcctgcc

SEQ ID NO: 2213792 - DNA, 25 bp, Homo sapien
tcacagtcattgcagcctgcctctt

SEQ ID NO: 2213793 - DNA, 25 bp, Homo sapien
ttagctacaaaatgcacaacacaga

SEQ ID NO: 2213794 - DNA, 25 bp, Homo sapien
ggagaatcgttaaataaagcatgac

SEQ ID NO: 2213795 - DNA, 25 bp, Homo sapien
gaacatgggctaagagtctgttaat

SEQ ID NO: 2213796 - DNA, 25 bp, Homo sapien
gaaacacacacccttactgagtgta

SEQ ID NO: 2213797 - DNA, 25 bp, Homo sapien
gtatgtcccgaatgatactgcctag

SEQ ID NO: 2213798 - DNA, 25 bp, Homo sapien
cccatgcgtatgtcccgaatgatac

SEQ ID NO: 2213799 - DNA, 25 bp, Homo sapien
ccatgcgtatgtcccgaatgatact

SEQ ID NO: 2213800 - DNA, 25 bp, Homo sapien
tgcgtatgtcccgaatgatactgcc

SEQ ID NO: 2213801 - DNA, 25 bp, Homo sapien
cacgttctttgaaacgaccaaatgt

SEQ ID NO: 2213802 - DNA, 25 bp, Homo sapien
aactgcagaagggataaacaaacca

SEQ ID NO: 2213803 - DNA, 25 bp, Homo sapien
tctatgctctcatgtttatcacagc

SEQ ID NO: 2213804 - DNA, 25 bp, Homo sapien
tataccgaggaaatatctatgctct

SEQ ID NO: 2213805 - DNA, 25 bp, Homo sapien
tgatatgcacgggagtcctggaacc

SEQ ID NO: 2213806 - DNA, 25 bp, Homo sapien
tatgcagaaaaaagcggctggttgc

SEQ ID NO: 2213807 - DNA, 25 bp, Homo sapien
tacgtacatggatatttattgcagc

SEQ ID NO: 2213808 - DNA, 25 bp, Homo sapien
aatgaatgtctagcaaaaaacgaac

SEQ ID NO: 2213809 - DNA, 25 bp, Homo sapien
acaggatgtctctccggattaggtc

SEQ ID NO: 2213810 - DNA, 25 bp, Homo sapien
catatttatccatgtcaatgcggcc

SEQ ID NO: 2213811 - DNA, 25 bp, Homo sapien
tcaatgcggcctttgtagtacagga

SEQ ID NO: 2213812 - DNA, 25 bp, Homo sapien
tctctgaaagccctgagccagcgta

SEQ ID NO: 2213813 - DNA, 25 bp, Homo sapien
acattctcaccggaccacattgcct

SEQ ID NO: 2213814 - DNA, 25 bp, Homo sapien
tctcaccggaccacattgcctaaaa

SEQ ID NO: 2213815 - DNA, 25 bp, Homo sapien
gaaccacacattctcaccggaccac

SEQ ID NO: 2213816 - DNA, 25 bp, Homo sapien
cacacattctcaccggaccacattg

SEQ ID NO: 2213817 - DNA, 25 bp, Homo sapien
tctccccagtgtagatcagctccga

SEQ ID NO: 2213818 - DNA, 25 bp, Homo sapien
gggctggtagatccaggccatctcc

SEQ ID NO: 2213819 - DNA, 25 bp, Homo sapien
cgtagggctggtagatccaggccat

SEQ ID NO: 2213820 - DNA, 25 bp, Homo sapien
agctcctgtctaggatgtcctcgcc

SEQ ID NO: 2213821 - DNA, 25 bp, Homo sapien
caggagtatgcctcatcaagccact

SEQ ID NO: 2213822 - DNA, 25 bp, Homo sapien
tctagccctacatttgatcttcttg

SEQ ID NO: 2213823 - DNA, 25 bp, Homo sapien
cttcttgtcccaggagtatgcctca

SEQ ID NO: 2213824 - DNA, 25 bp, Homo sapien
gtaacaaatccatctagccctacat

SEQ ID NO: 2213825 - DNA, 25 bp, Homo sapien
ttgggtattacacaaccaggctggg

SEQ ID NO: 2213826 - DNA, 25 bp, Homo sapien
gctacaatgttaggttcctgctaca

SEQ ID NO: 2213827 - DNA, 25 bp, Homo sapien
gagggatcccacaaagaggaaatta

SEQ ID NO: 2213828 - DNA, 25 bp, Homo sapien
cagtcatcaaatagcaaagtggaac

SEQ ID NO: 2213829 - DNA, 25 bp, Homo sapien
gggaacctgtgaaattgggccacca

SEQ ID NO: 2213830 - DNA, 25 bp, Homo sapien
catcatcaagccatggagcatccat

SEQ ID NO: 2213831 - DNA, 25 bp, Homo sapien
gaatgcacaaagaacctataccagg

SEQ ID NO: 2213832 - DNA, 25 bp, Homo sapien
gatttggatgacctccccaaggtag

SEQ ID NO: 2213833 - DNA, 25 bp, Homo sapien
tcccagtctaggacagaagcctgcc

SEQ ID NO: 2213834 - DNA, 25 bp, Homo sapien
cgcttgcgttcgttgatctgctgag

SEQ ID NO: 2213835 - DNA, 25 bp, Homo sapien
aagcagctgccacatacctgtagtc

SEQ ID NO: 2213836 - DNA, 25 bp, Homo sapien
tttctcatgacagccaaagcagctg

SEQ ID NO: 2213837 - DNA, 25 bp, Homo sapien
caaagaagtgctggtagcggctgtc

SEQ ID NO: 2213838 - DNA, 25 bp, Homo sapien
tcatctgctgcaagaggcgacaggc

SEQ ID NO: 2213839 - DNA, 25 bp, Homo sapien
cagtatactttaggagctcagccaa

SEQ ID NO: 2213840 - DNA, 25 bp, Homo sapien
tcagccaactgtaagggatacttgc

SEQ ID NO: 2213841 - DNA, 25 bp, Homo sapien
cttgaagtaatggaaagacagatca

SEQ ID NO: 2213842 - DNA, 25 bp, Homo sapien
ccccaaaagaagtcttgaagtaatg

SEQ ID NO: 2213843 - DNA, 25 bp, Homo sapien
gaagtaatggaaagacagatcatat

SEQ ID NO: 2213844 - DNA, 25 bp, Homo sapien
aaagaagtcttgaagtaatggaaag

SEQ ID NO: 2213845 - DNA, 25 bp, Homo sapien
ttaaatacattgctcctgaatgatc

SEQ ID NO: 2213846 - DNA, 25 bp, Homo sapien
caaatacaccgaaattaaatacatt

SEQ ID NO: 2213847 - DNA, 25 bp, Homo sapien
tgaccacaatgaaacaacactagaa

SEQ ID NO: 2213848 - DNA, 25 bp, Homo sapien
ctgaccacaatgaaacaacactaga

SEQ ID NO: 2213849 - DNA, 25 bp, Homo sapien
caatgttcccaaagattaccttcag

SEQ ID NO: 2213850 - DNA, 25 bp, Homo sapien
gctcgtcactgaacatgtcccttct

SEQ ID NO: 2213851 - DNA, 25 bp, Homo sapien
gaagcagggtcctatctcgctgagg

SEQ ID NO: 2213852 - DNA, 25 bp, Homo sapien
gtcatcattgttatactgtttctcc

SEQ ID NO: 2213853 - DNA, 25 bp, Homo sapien
agaatgttcaaattggtggttttct

SEQ ID NO: 2213854 - DNA, 25 bp, Homo sapien
ggcatatagttgctgctcagttatt

SEQ ID NO: 2213855 - DNA, 25 bp, Homo sapien
cccatgctggtgatgatcaaaggta

SEQ ID NO: 2213856 - DNA, 25 bp, Homo sapien
tcaactaaatgctaattagttcttc

SEQ ID NO: 2213857 - DNA, 25 bp, Homo sapien
ggttggctggattggaaactcctta

SEQ ID NO: 2213858 - DNA, 25 bp, Homo sapien
ataaggaaccagcaaattgtcaaca

SEQ ID NO: 2213859 - DNA, 25 bp, Homo sapien
aaagcaggatcatatcaccccctac

SEQ ID NO: 2213860 - DNA, 25 bp, Homo sapien
cagcaaattgtcaacaaaaggtttg

SEQ ID NO: 2213861 - DNA, 25 bp, Homo sapien
tggtcccggttctgtagtggccgcc

SEQ ID NO: 2213862 - DNA, 25 bp, Homo sapien
tcattatctcattgatgacattggc

SEQ ID NO: 2213863 - DNA, 25 bp, Homo sapien
gtgtccgttctgcacatcgctgggc

SEQ ID NO: 2213864 - DNA, 25 bp, Homo sapien
cttgatgtagtgacgctcagtgctc

SEQ ID NO: 2213865 - DNA, 25 bp, Homo sapien
gactttgatgacgtcgccagcttta

SEQ ID NO: 2213866 - DNA, 25 bp, Homo sapien
gatgacgtcgccagctttaaatgcc

SEQ ID NO: 2213867 - DNA, 25 bp, Homo sapien
aggaaaccatccctcctcatcgtcg

SEQ ID NO: 2213868 - DNA, 25 bp, Homo sapien
agcatccaagactttgatgacgtcg

SEQ ID NO: 2213869 - DNA, 25 bp, Homo sapien
tgcctcagcactaacgatggaatct

SEQ ID NO: 2213870 - DNA, 25 bp, Homo sapien
atactgcctcagcactaacgatgga

SEQ ID NO: 2213871 - DNA, 25 bp, Homo sapien
gcactaacgatggaatctccagtga

SEQ ID NO: 2213872 - DNA, 25 bp, Homo sapien
tcagcactaacgatggaatctccag

SEQ ID NO: 2213873 - DNA, 25 bp, Homo sapien
cttaggagacaaaatgagaatgtgt

SEQ ID NO: 2213874 - DNA, 25 bp, Homo sapien
gagacaaaatgagaatgtgttcagt

SEQ ID NO: 2213875 - DNA, 25 bp, Homo sapien
caaaatgagaatgtgttcagtccac

SEQ ID NO: 2213876 - DNA, 25 bp, Homo sapien
atgagaatgtgttcagtccacacag

SEQ ID NO: 2213877 - DNA, 25 bp, Homo sapien
ttttacatgtcaagtgacagactgg

SEQ ID NO: 2213878 - DNA, 25 bp, Homo sapien
ttccagctctggtattctactgagg

SEQ ID NO: 2213879 - DNA, 25 bp, Homo sapien
tgaggctaacacttactctgcaaag

SEQ ID NO: 2213880 - DNA, 25 bp, Homo sapien
cagcccgtctcagtttttttacatg

SEQ ID NO: 2213881 - DNA, 25 bp, Homo sapien
gaagataactcactcaagcattgct

SEQ ID NO: 2213882 - DNA, 25 bp, Homo sapien
cacttaaacccttgactgccgcatt

SEQ ID NO: 2213883 - DNA, 25 bp, Homo sapien
cagactacctgggaaaattgagaag

SEQ ID NO: 2213884 - DNA, 25 bp, Homo sapien
caaaagtcaatagggacctttgctt

SEQ ID NO: 2213885 - DNA, 25 bp, Homo sapien
gctccacatttcactggatggcctg

SEQ ID NO: 2213886 - DNA, 25 bp, Homo sapien
tactgcctgctccacatttcactgg

SEQ ID NO: 2213887 - DNA, 25 bp, Homo sapien
tccagtcccatatttcctactgcct

SEQ ID NO: 2213888 - DNA, 25 bp, Homo sapien
tttcctactgcctgctccacatttc

SEQ ID NO: 2213889 - DNA, 25 bp, Homo sapien
taaaatgcaaaattcatcatattcc

SEQ ID NO: 2213890 - DNA, 25 bp, Homo sapien
tgcaaaattcatcatattcccccat

SEQ ID NO: 2213891 - DNA, 25 bp, Homo sapien
aatgcaaaattcatcatattccccc

SEQ ID NO: 2213892 - DNA, 25 bp, Homo sapien
aaatgcaaaattcatcatattcccc

SEQ ID NO: 2213893 - DNA, 25 bp, Homo sapien
ttagttaggagcactgtgacctgct

SEQ ID NO: 2213894 - DNA, 25 bp, Homo sapien
ggagcactgtgacctgctcctatat

SEQ ID NO: 2213895 - DNA, 25 bp, Homo sapien
ttaggagcactgtgacctgctccta

SEQ ID NO: 2213896 - DNA, 25 bp, Homo sapien
tagttaggagcactgtgacctgctc

SEQ ID NO: 2213897 - DNA, 25 bp, Homo sapien
gacatcatcccttcagtactaaaac

SEQ ID NO: 2213898 - DNA, 25 bp, Homo sapien
tatagacatcatcccttcagtacta

SEQ ID NO: 2213899 - DNA, 25 bp, Homo sapien
tctcccactgctctatagacatcat

SEQ ID NO: 2213900 - DNA, 25 bp, Homo sapien
tgctctatagacatcatcccttcag

SEQ ID NO: 2213901 - DNA, 25 bp, Homo sapien
gatgaagggacaatcagcgtgtctc

SEQ ID NO: 2213902 - DNA, 25 bp, Homo sapien
tccaattcttcactgcttccaacat

SEQ ID NO: 2213903 - DNA, 25 bp, Homo sapien
acagcaggacatgagctgctgtagg

SEQ ID NO: 2213904 - DNA, 25 bp, Homo sapien
tcttcactgcttccaacatgcagga

SEQ ID NO: 2213905 - DNA, 25 bp, Homo sapien
caaaacatgccatcttgaacatcca

SEQ ID NO: 2213906 - DNA, 25 bp, Homo sapien
tacagagcctgctacaaaacatgcc

SEQ ID NO: 2213907 - DNA, 25 bp, Homo sapien
cttacagagcctgctacaaaacatg

SEQ ID NO: 2213908 - DNA, 25 bp, Homo sapien
aaacatgccatcttgaacatccatt

SEQ ID NO: 2213909 - DNA, 25 bp, Homo sapien
cctcatctgtaacactgggaattac

SEQ ID NO: 2213910 - DNA, 25 bp, Homo sapien
caaggctgatgtgatgctcaagtta

SEQ ID NO: 2213911 - DNA, 25 bp, Homo sapien
aacaatcttgctgacctttactttc

SEQ ID NO: 2213912 - DNA, 25 bp, Homo sapien
ctacattcaacatcacactagttag

SEQ ID NO: 2213913 - DNA, 25 bp, Homo sapien
caaagcgagagttcgcgacagctca

SEQ ID NO: 2213914 - DNA, 25 bp, Homo sapien
gaggactacaatcacggcaaaaacg

SEQ ID NO: 2213915 - DNA, 25 bp, Homo sapien
cgactacagtttgcacatccagggt

SEQ ID NO: 2213916 - DNA, 25 bp, Homo sapien
tgacattgacaagcaggaggactac

SEQ ID NO: 2213917 - DNA, 25 bp, Homo sapien
gctgatcgtttgtccctagctgaga

SEQ ID NO: 2213918 - DNA, 25 bp, Homo sapien
tgaagtcggcagagtccagcattct

SEQ ID NO: 2213919 - DNA, 25 bp, Homo sapien
aaatcttagcttgcgctgaagtcgg

SEQ ID NO: 2213920 - DNA, 25 bp, Homo sapien
ggcaaaatcctagctttcaaaggga

SEQ ID NO: 2213921 - DNA, 25 bp, Homo sapien
gtctgtccgggcgtgcgtccgtccg

SEQ ID NO: 2213922 - DNA, 25 bp, Homo sapien
taccggtcagtctcagtctccccta

SEQ ID NO: 2213923 - DNA, 25 bp, Homo sapien
tgtgagtggttctccggcgcctgct

SEQ ID NO: 2213924 - DNA, 25 bp, Homo sapien
gcgcctgctcagtctgtccgggcgt

SEQ ID NO: 2213925 - DNA, 25 bp, Homo sapien
gctgccagacactcgttcgatccct

SEQ ID NO: 2213926 - DNA, 25 bp, Homo sapien
gccttgctggccctatccctcttct

SEQ ID NO: 2213927 - DNA, 25 bp, Homo sapien
ttcgctcgttttcctaagcttgctc

SEQ ID NO: 2213928 - DNA, 25 bp, Homo sapien
taagcttgctcgctctcttcgctgg

SEQ ID NO: 2213929 - DNA, 25 bp, Homo sapien
acttgcgctggcgtgctagccgcga

SEQ ID NO: 2213930 - DNA, 25 bp, Homo sapien
gccgaccaataacagatgccgcagt

SEQ ID NO: 2213931 - DNA, 25 bp, Homo sapien
gcagtagcacgttcgctgcccaggg

SEQ ID NO: 2213932 - DNA, 25 bp, Homo sapien
gaccgccaatcagagcctcaaggct

SEQ ID NO: 2213933 - DNA, 25 bp, Homo sapien
agctcctcggcgcatttaaggcaaa

SEQ ID NO: 2213934 - DNA, 25 bp, Homo sapien
aatctgatgtccttcggcctctgta

SEQ ID NO: 2213935 - DNA, 25 bp, Homo sapien
gcctcagggcctatataaactgctg

SEQ ID NO: 2213936 - DNA, 25 bp, Homo sapien
aacagatggttagagctgtggcagc

SEQ ID NO: 2213937 - DNA, 25 bp, Homo sapien
tggagtagcaatacccctcccgaga

SEQ ID NO: 2213938 - DNA, 25 bp, Homo sapien
cagctccaacacctataatgatggg

SEQ ID NO: 2213939 - DNA, 25 bp, Homo sapien
cactaattggttatccggtctcagc

SEQ ID NO: 2213940 - DNA, 25 bp, Homo sapien
cggtatttgataccagccctgtcca

SEQ ID NO: 2213941 - DNA, 25 bp, Homo sapien
tcatggcaataggatctcttagaga

SEQ ID NO: 2213942 - DNA, 25 bp, Homo sapien
acttctctggtgtgctaggatgacc

SEQ ID NO: 2213943 - DNA, 25 bp, Homo sapien
tctagcacagaatccaggaagcctt

SEQ ID NO: 2213944 - DNA, 25 bp, Homo sapien
taggatgaccctttgacagtatatg

SEQ ID NO: 2213945 - DNA, 25 bp, Homo sapien
tgaatatagtcctagcccacaccag

SEQ ID NO: 2213946 - DNA, 25 bp, Homo sapien
tatgaaccggatgcccttaagaacc

SEQ ID NO: 2213947 - DNA, 25 bp, Homo sapien
tcctggctaagtcagagaggcatca

SEQ ID NO: 2213948 - DNA, 25 bp, Homo sapien
gctggacagcaaggactctaaggtc

SEQ ID NO: 2213949 - DNA, 25 bp, Homo sapien
ccggacctcgccttcagtcagtttg

SEQ ID NO: 2213950 - DNA, 25 bp, Homo sapien
tatccactgcatggtgcttgcgaag

SEQ ID NO: 2213951 - DNA, 25 bp, Homo sapien
cctgctgctcctagaggtcttggca

SEQ ID NO: 2213952 - DNA, 25 bp, Homo sapien
cagtttgttccatgccaaccggcag

SEQ ID NO: 2213953 - DNA, 25 bp, Homo sapien
taaattcagccagtgagttagcagc

SEQ ID NO: 2213954 - DNA, 25 bp, Homo sapien
ctaaattcagccagtgagttagcag

SEQ ID NO: 2213955 - DNA, 25 bp, Homo sapien
tccccactgactgaacattggactg

SEQ ID NO: 2213956 - DNA, 25 bp, Homo sapien
tcaggtaatttctcttacggtagtc

SEQ ID NO: 2213957 - DNA, 25 bp, Homo sapien
cggtagtcccattaagatagtcaca

SEQ ID NO: 2213958 - DNA, 25 bp, Homo sapien
gaaagagattgcttccaactgaaga

SEQ ID NO: 2213959 - DNA, 25 bp, Homo sapien
ccagaattctatgctccatactttc

SEQ ID NO: 2213960 - DNA, 25 bp, Homo sapien
ttttctccgatccattggcactaag

SEQ ID NO: 2213961 - DNA, 25 bp, Homo sapien
gcttccattccgcaaagaacagtag

SEQ ID NO: 2213962 - DNA, 25 bp, Homo sapien
gaacagtagcgccagaggctgacct

SEQ ID NO: 2213963 - DNA, 25 bp, Homo sapien
ctgttctgagaccaacaacccgttt

SEQ ID NO: 2213964 - DNA, 25 bp, Homo sapien
tgttctgagaccaacaacccgtttc

SEQ ID NO: 2213965 - DNA, 25 bp, Homo sapien
gctgttctgagaccaacaacccgtt

SEQ ID NO: 2213966 - DNA, 25 bp, Homo sapien
tgctgttctgagaccaacaacccgt

SEQ ID NO: 2213967 - DNA, 25 bp, Homo sapien
ctcttccactcccagtagttttctg

SEQ ID NO: 2213968 - DNA, 25 bp, Homo sapien
actcttccactcccagtagttttct

SEQ ID NO: 2213969 - DNA, 25 bp, Homo sapien
ctcccagtagttttctggaaccaat

SEQ ID NO: 2213970 - DNA, 25 bp, Homo sapien
ccagtagttttctggaaccaatcat

SEQ ID NO: 2213971 - DNA, 25 bp, Homo sapien
gctcccaattctcgctgttggcttg

SEQ ID NO: 2213972 - DNA, 25 bp, Homo sapien
tcccaattctcgctgttggcttgca

SEQ ID NO: 2213973 - DNA, 25 bp, Homo sapien
ctgctcccaattctcgctgttggct

SEQ ID NO: 2213974 - DNA, 25 bp, Homo sapien
cccaattctcgctgttggcttgcag

SEQ ID NO: 2213975 - DNA, 25 bp, Homo sapien
ctaatgcgtctgcaaaagggctgtc

SEQ ID NO: 2213976 - DNA, 25 bp, Homo sapien
ttttggggactgatgactgaagcac

SEQ ID NO: 2213977 - DNA, 25 bp, Homo sapien
cagtgaggatcctcggactcaggtg

SEQ ID NO: 2213978 - DNA, 25 bp, Homo sapien
gcacagcaaacagggctgaattccc

SEQ ID NO: 2213979 - DNA, 25 bp, Homo sapien
gaatatagcactcccttcacagtag

SEQ ID NO: 2213980 - DNA, 25 bp, Homo sapien
tgtagccattccctactagacagcc

SEQ ID NO: 2213981 - DNA, 25 bp, Homo sapien
gccaatttgaggttttgagcagctt

SEQ ID NO: 2213982 - DNA, 25 bp, Homo sapien
ttcacagtaggttggcaggccatct

SEQ ID NO: 2213983 - DNA, 25 bp, Homo sapien
tctggaccatcctgcactctgggat

SEQ ID NO: 2213984 - DNA, 25 bp, Homo sapien
tcccagtcatgttctggaccatcct

SEQ ID NO: 2213985 - DNA, 25 bp, Homo sapien
gatgtttatcctggcatgctagagt

SEQ ID NO: 2213986 - DNA, 25 bp, Homo sapien
ggatgtttatcctggcatgctagag

SEQ ID NO: 2213987 - DNA, 25 bp, Homo sapien
cagtattcaccaatgttcttgtggg

SEQ ID NO: 2213988 - DNA, 25 bp, Homo sapien
ttcttgtgggtttctagcatcttgg

SEQ ID NO: 2213989 - DNA, 25 bp, Homo sapien
ttccagtattcaccaatgttcttgt

SEQ ID NO: 2213990 - DNA, 25 bp, Homo sapien
tgttcttgtgggtttctagcatctt

SEQ ID NO: 2213991 - DNA, 25 bp, Homo sapien
ttcgaattgccagggggtaggtcca

SEQ ID NO: 2213992 - DNA, 25 bp, Homo sapien
ctatctgattcacttggcagtggaa

SEQ ID NO: 2213993 - DNA, 25 bp, Homo sapien
tcatctgcttctgacaatcagaagg

SEQ ID NO: 2213994 - DNA, 25 bp, Homo sapien
gtggaatggtatcagctgctcaaaa

SEQ ID NO: 2213995 - DNA, 25 bp, Homo sapien
ccagctctgtgggaatactctgtga

SEQ ID NO: 2213996 - DNA, 25 bp, Homo sapien
gattttaagtggcagagtccctggt

SEQ ID NO: 2213997 - DNA, 25 bp, Homo sapien
tctgtgggaatactctgtgagatgg

SEQ ID NO: 2213998 - DNA, 25 bp, Homo sapien
gaatactctgtgagatgggcagaga

SEQ ID NO: 2213999 - DNA, 25 bp, Homo sapien
tccaggggttgtctggcctggctgg

SEQ ID NO: 2214000 - DNA, 25 bp, Homo sapien
ggctccaggggttgtctggcctggc

SEQ ID NO: 2214001 - DNA, 25 bp, Homo sapien
gctccaggggttgtctggcctggct

SEQ ID NO: 2214002 - DNA, 25 bp, Homo sapien
ctccaggggttgtctggcctggctg

SEQ ID NO: 2214003 - DNA, 25 bp, Homo sapien
gttgtcctggaactcaaagatggcc

SEQ ID NO: 2214004 - DNA, 25 bp, Homo sapien
tgcataggcacctagctcacgggac

SEQ ID NO: 2214005 - DNA, 25 bp, Homo sapien
cagaagagtgctccctggtgaaggt

SEQ ID NO: 2214006 - DNA, 25 bp, Homo sapien
ccttgaggaagctgaccacggtctc

SEQ ID NO: 2214007 - DNA, 25 bp, Homo sapien
agtcttgtctcagcaccggtgttcg

SEQ ID NO: 2214008 - DNA, 25 bp, Homo sapien
caatgtggagtcctcgatggcatcc

SEQ ID NO: 2214009 - DNA, 25 bp, Homo sapien
ccaggcccttgatgaagccagcata

SEQ ID NO: 2214010 - DNA, 25 bp, Homo sapien
gatgccaaactcatcgaaggccagc

SEQ ID NO: 2214011 - DNA, 25 bp, Homo sapien
tcaatccatgaacctgaatttcgtt

SEQ ID NO: 2214012 - DNA, 25 bp, Homo sapien
gaggtgtctcccagtaaaagcatgg

SEQ ID NO: 2214013 - DNA, 25 bp, Homo sapien
tttcctggctggaggcgccttttct

SEQ ID NO: 2214014 - DNA, 25 bp, Homo sapien
gaatttcgtttcacttctgacagcc

SEQ ID NO: 2214015 - DNA, 25 bp, Homo sapien
ggtcaggctttctacctcagggtgg

SEQ ID NO: 2214016 - DNA, 25 bp, Homo sapien
ctgggatgacttgagtcacataacc

SEQ ID NO: 2214017 - DNA, 25 bp, Homo sapien
tacagcagctgttgagagtctccat

SEQ ID NO: 2214018 - DNA, 25 bp, Homo sapien
ggtcatactgctcagatttctccaa

SEQ ID NO: 2214019 - DNA, 25 bp, Homo sapien
ccttgggaatgtggcctatgcgtag

SEQ ID NO: 2214020 - DNA, 25 bp, Homo sapien
cacatgcgtggattatgggaaataa

SEQ ID NO: 2214021 - DNA, 25 bp, Homo sapien
tggcatcaggccatcttgagtaatt

SEQ ID NO: 2214022 - DNA, 25 bp, Homo sapien
ggtgtcacagtctctaaaacaagcc

SEQ ID NO: 2214023 - DNA, 25 bp, Homo sapien
cacccagttcaagcttcctggctgc

SEQ ID NO: 2214024 - DNA, 25 bp, Homo sapien
ccagttcaagcttcctggctgcttt

SEQ ID NO: 2214025 - DNA, 25 bp, Homo sapien
cccagttcaagcttcctggctgctt

SEQ ID NO: 2214026 - DNA, 25 bp, Homo sapien
tccacccagttcaagcttcctggct

SEQ ID NO: 2214027 - DNA, 25 bp, Homo sapien
cgggggcgccatcaaagtgaggagg

SEQ ID NO: 2214028 - DNA, 25 bp, Homo sapien
gcgggggcgccatcaaagtgaggag

SEQ ID NO: 2214029 - DNA, 25 bp, Homo sapien
tgcgggggcgccatcaaagtgagga

SEQ ID NO: 2214030 - DNA, 25 bp, Homo sapien
tccataggactctgtttcctagctc

SEQ ID NO: 2214031 - DNA, 25 bp, Homo sapien
catatctgacctggtctgtgtcgca

SEQ ID NO: 2214032 - DNA, 25 bp, Homo sapien
ctttccttctagggaaaattccatg

SEQ ID NO: 2214033 - DNA, 25 bp, Homo sapien
tccatgtgttatcagtgctttttct

SEQ ID NO: 2214034 - DNA, 25 bp, Homo sapien
ctctaaggcattcctttccagtcac

SEQ ID NO: 2214035 - DNA, 25 bp, Homo sapien
aggccccaaactgcttgcttctcca

SEQ ID NO: 2214036 - DNA, 25 bp, Homo sapien
ctgctctaagaggaacctcttccca

SEQ ID NO: 2214037 - DNA, 25 bp, Homo sapien
aagaggaacctcttcccactgttct

SEQ ID NO: 2214038 - DNA, 25 bp, Homo sapien
tcctcaggccccaaactgcttgctt

SEQ ID NO: 2214039 - DNA, 25 bp, Homo sapien
gcgatggcagctaggattttggaaa

SEQ ID NO: 2214040 - DNA, 25 bp, Homo sapien
gtagcagaggataatgagttctgtc

SEQ ID NO: 2214041 - DNA, 25 bp, Homo sapien
aattacaggatctgtagaaagccag

SEQ ID NO: 2214042 - DNA, 25 bp, Homo sapien
gagttctgtcttggacataatgaat

SEQ ID NO: 2214043 - DNA, 25 bp, Homo sapien
tgtcaaagatctatggttgtaggca

SEQ ID NO: 2214044 - DNA, 25 bp, Homo sapien
ggaaattttgtaaggatagcattac

SEQ ID NO: 2214045 - DNA, 25 bp, Homo sapien
tggttgtaggcatgccacctccttt

SEQ ID NO: 2214046 - DNA, 25 bp, Homo sapien
aattcaggtagtgttaggtcaccca

SEQ ID NO: 2214047 - DNA, 25 bp, Homo sapien
ttgacccacgagttatttataattg

SEQ ID NO: 2214048 - DNA, 25 bp, Homo sapien
tctattatatctagttggttgacga

SEQ ID NO: 2214049 - DNA, 25 bp, Homo sapien
agttctttactctgaagtctagttg

SEQ ID NO: 2214050 - DNA, 25 bp, Homo sapien
gagtgtttgcatgctatatttttcc

SEQ ID NO: 2214051 - DNA, 25 bp, Homo sapien
ttcatgtctataaaggttcctggaa

SEQ ID NO: 2214052 - DNA, 25 bp, Homo sapien
atttcatgtctataaaggttcctgg

SEQ ID NO: 2214053 - DNA, 25 bp, Homo sapien
tttcatgtctataaaggttcctgga

SEQ ID NO: 2214054 - DNA, 25 bp, Homo sapien
ggacttaccatattgctttcattaa

SEQ ID NO: 2214055 - DNA, 25 bp, Homo sapien
tttcctccagagtgaatactttcat

SEQ ID NO: 2214056 - DNA, 25 bp, Homo sapien
acagaacagaatgactgagggactt

SEQ ID NO: 2214057 - DNA, 25 bp, Homo sapien
gggctttcctccagagtgaatactt

SEQ ID NO: 2214058 - DNA, 25 bp, Homo sapien
cttttatgtattggacaggaaatag

SEQ ID NO: 2214059 - DNA, 25 bp, Homo sapien
cagtgtaagttcttttatgtattgg

SEQ ID NO: 2214060 - DNA, 25 bp, Homo sapien
atattcactgggctttgctccagtg

SEQ ID NO: 2214061 - DNA, 25 bp, Homo sapien
cttccttatattcactgggctttgc

SEQ ID NO: 2214062 - DNA, 25 bp, Homo sapien
aaatcaaaggcgttctcacatactg

SEQ ID NO: 2214063 - DNA, 25 bp, Homo sapien
tgagataaatgagggctttctgaca

SEQ ID NO: 2214064 - DNA, 25 bp, Homo sapien
caattttgtttacatccacagggct

SEQ ID NO: 2214065 - DNA, 25 bp, Homo sapien
cacagggcttactgcaatgggaatt

SEQ ID NO: 2214066 - DNA, 25 bp, Homo sapien
ggccgctcttcccaggtaaaagtca

SEQ ID NO: 2214067 - DNA, 25 bp, Homo sapien
tcaatatgtttgtctctccattggt

SEQ ID NO: 2214068 - DNA, 25 bp, Homo sapien
tctatataacccaagttccttaaga

SEQ ID NO: 2214069 - DNA, 25 bp, Homo sapien
caggaaggaccttgcaaaggccgct

SEQ ID NO: 2214070 - DNA, 25 bp, Homo sapien
tcctgttgagtcttttggacagcac

SEQ ID NO: 2214071 - DNA, 25 bp, Homo sapien
agtcaccaaatcctgttgagtcttt

SEQ ID NO: 2214072 - DNA, 25 bp, Homo sapien
ccaaatcctgttgagtcttttggac

SEQ ID NO: 2214073 - DNA, 25 bp, Homo sapien
caaatagtcaccaaatcctgttgag

SEQ ID NO: 2214074 - DNA, 25 bp, Homo sapien
tcttttcatctccactgttttcccc

SEQ ID NO: 2214075 - DNA, 25 bp, Homo sapien
ttcccctccacagcctgagccttca

SEQ ID NO: 2214076 - DNA, 25 bp, Homo sapien
tcccctccacagcctgagccttcat

SEQ ID NO: 2214077 - DNA, 25 bp, Homo sapien
catctccactgttttcccccttcca

SEQ ID NO: 2214078 - DNA, 25 bp, Homo sapien
cattgtaacactaactcaaaagtaa

SEQ ID NO: 2214079 - DNA, 25 bp, Homo sapien
caatcatataattgcacccctggtc

SEQ ID NO: 2214080 - DNA, 25 bp, Homo sapien
gacacagagcccaatcatataattg

SEQ ID NO: 2214081 - DNA, 25 bp, Homo sapien
aaggcaccttttacatggtgagaga

SEQ ID NO: 2214082 - DNA, 25 bp, Homo sapien
tcttcaagagacaaagagagtaaag

SEQ ID NO: 2214083 - DNA, 25 bp, Homo sapien
ttcttcaagagacaaagagagtaaa

SEQ ID NO: 2214084 - DNA, 25 bp, Homo sapien
ccttcttcaagagacaaagagagta

SEQ ID NO: 2214085 - DNA, 25 bp, Homo sapien
cttcttcaagagacaaagagagtaa

SEQ ID NO: 2214086 - DNA, 25 bp, Homo sapien
tttgagggacagcaaaactgttgtc

SEQ ID NO: 2214087 - DNA, 25 bp, Homo sapien
tgcaagcatcaccactaagtccagt

SEQ ID NO: 2214088 - DNA, 25 bp, Homo sapien
tgttgtccacagaagctgcactact

SEQ ID NO: 2214089 - DNA, 25 bp, Homo sapien
caattatcctgggtgaatacttagg

SEQ ID NO: 2214090 - DNA, 25 bp, Homo sapien
tttactttagcagggagtcatcttg

SEQ ID NO: 2214091 - DNA, 25 bp, Homo sapien
ggacaaccctgttaatgccacctag

SEQ ID NO: 2214092 - DNA, 25 bp, Homo sapien
cagggctgcttattttgatgggaca

SEQ ID NO: 2214093 - DNA, 25 bp, Homo sapien
ggcaaatctaggttagggcaaaaga

SEQ ID NO: 2214094 - DNA, 25 bp, Homo sapien
tcccatgtctacagcgttgttcagt

SEQ ID NO: 2214095 - DNA, 25 bp, Homo sapien
aatttaatatcccatgtctacagcg

SEQ ID NO: 2214096 - DNA, 25 bp, Homo sapien
taatatcccatgtctacagcgttgt

SEQ ID NO: 2214097 - DNA, 25 bp, Homo sapien
ttaatttaatatcccatgtctacag

SEQ ID NO: 2214098 - DNA, 25 bp, Homo sapien
cattgggcttccgatgcccacttta

SEQ ID NO: 2214099 - DNA, 25 bp, Homo sapien
tggtcgcactgttatgcacttgctt

SEQ ID NO: 2214100 - DNA, 25 bp, Homo sapien
ctgtttggtcgcactgttatgcact

SEQ ID NO: 2214101 - DNA, 25 bp, Homo sapien
atgcccactttaggtcccttacgtg

SEQ ID NO: 2214102 - DNA, 25 bp, Homo sapien
tactctcagagggtctagacatggg

SEQ ID NO: 2214103 - DNA, 25 bp, Homo sapien
tcctcaacgagatggtaaattcctg

SEQ ID NO: 2214104 - DNA, 25 bp, Homo sapien
aaagtaccatccacgtgtgagctgg

SEQ ID NO: 2214105 - DNA, 25 bp, Homo sapien
gattggaaagtcagggatcaggcca

SEQ ID NO: 2214106 - DNA, 25 bp, Homo sapien
cacttggcgtttgtcttcagtacct

SEQ ID NO: 2214107 - DNA, 25 bp, Homo sapien
gtcacttggcgtttgtcttcagtac

SEQ ID NO: 2214108 - DNA, 25 bp, Homo sapien
gagtcacttggcgtttgtcttcagt

SEQ ID NO: 2214109 - DNA, 25 bp, Homo sapien
cttggcgtttgtcttcagtacctgg

SEQ ID NO: 2214110 - DNA, 25 bp, Homo sapien
ggagggaacggacagtgtggtacag

SEQ ID NO: 2214111 - DNA, 25 bp, Homo sapien
catggggggagggaacggacagtgt

SEQ ID NO: 2214112 - DNA, 25 bp, Homo sapien
ctgtccctatcatggggggagggaa

SEQ ID NO: 2214113 - DNA, 25 bp, Homo sapien
tgtccctatcatggggggagggaac

SEQ ID NO: 2214114 - DNA, 25 bp, Homo sapien
tcctgagtgtgtgaagctacttccc

SEQ ID NO: 2214115 - DNA, 25 bp, Homo sapien
cattatccgggcagtcttgtggcct

SEQ ID NO: 2214116 - DNA, 25 bp, Homo sapien
gactctaaagcaccaagaaactggc

SEQ ID NO: 2214117 - DNA, 25 bp, Homo sapien
cagcaggatgaagggtacacaccca

SEQ ID NO: 2214118 - DNA, 25 bp, Homo sapien
gtttccattcatggcagtggaggag

SEQ ID NO: 2214119 - DNA, 25 bp, Homo sapien
tccattcatggcagtggaggagtag

SEQ ID NO: 2214120 - DNA, 25 bp, Homo sapien
aggtttccattcatggcagtggagg

SEQ ID NO: 2214121 - DNA, 25 bp, Homo sapien
agtggaggagtagctggtggcaaga

SEQ ID NO: 2214122 - DNA, 25 bp, Homo sapien
caaggctggaaggcccatagtgagt

SEQ ID NO: 2214123 - DNA, 25 bp, Homo sapien
aacaggcagcagcacatctcgaggc

SEQ ID NO: 2214124 - DNA, 25 bp, Homo sapien
ttgctcagccctctcctttgacagg

SEQ ID NO: 2214125 - DNA, 25 bp, Homo sapien
ggacgagctagttgaggcccagatt

SEQ ID NO: 2214126 - DNA, 25 bp, Homo sapien
cttgactctggcactgatagtgata

SEQ ID NO: 2214127 - DNA, 25 bp, Homo sapien
cctgcctatatggagactggctgga

SEQ ID NO: 2214128 - DNA, 25 bp, Homo sapien
cataggaggtatgcaacaggttgcc

SEQ ID NO: 2214129 - DNA, 25 bp, Homo sapien
tagtgatattgacatggtcatagga

SEQ ID NO: 2214130 - DNA, 25 bp, Homo sapien
cagcgatgtcaaaggtcaccatggg

SEQ ID NO: 2214131 - DNA, 25 bp, Homo sapien
cccaagtatcgagggaggctgctca

SEQ ID NO: 2214132 - DNA, 25 bp, Homo sapien
catgtttgtgatagtagcccagctc

SEQ ID NO: 2214133 - DNA, 25 bp, Homo sapien
tcatcagactcgaggtagccctgga

SEQ ID NO: 2214134 - DNA, 25 bp, Homo sapien
catctcagagcttcgaccatggagg

SEQ ID NO: 2214135 - DNA, 25 bp, Homo sapien
taaaggcagtcatctccaggtggag

SEQ ID NO: 2214136 - DNA, 25 bp, Homo sapien
taactgggtcaaggagcatgtagcc

SEQ ID NO: 2214137 - DNA, 25 bp, Homo sapien
tgaataagtagggtaggccctcctg

SEQ ID NO: 2214138 - DNA, 25 bp, Homo sapien
cccaggttcatattgggccgtggat

SEQ ID NO: 2214139 - DNA, 25 bp, Homo sapien
ggtgggatggtagcccaggttcata

SEQ ID NO: 2214140 - DNA, 25 bp, Homo sapien
catattgggccgtggatacatttgg

SEQ ID NO: 2214141 - DNA, 25 bp, Homo sapien
gatgtggtgggatggtagcccaggt

SEQ ID NO: 2214142 - DNA, 25 bp, Homo sapien
ttcctcctctaattccacctcttct

SEQ ID NO: 2214143 - DNA, 25 bp, Homo sapien
tcctcctctaattccacctcttctt

SEQ ID NO: 2214144 - DNA, 25 bp, Homo sapien
tcttcctcctctaattccacctctt

SEQ ID NO: 2214145 - DNA, 25 bp, Homo sapien
cttcttcctcctctaattccacctc

SEQ ID NO: 2214146 - DNA, 25 bp, Homo sapien
atcatctggcaaggccatctcctcc

SEQ ID NO: 2214147 - DNA, 25 bp, Homo sapien
gtcatcatcatctggcaaggccatc

SEQ ID NO: 2214148 - DNA, 25 bp, Homo sapien
ctcgtcatcatcatctggcaaggcc

SEQ ID NO: 2214149 - DNA, 25 bp, Homo sapien
tcatcatctggcaaggccatctcct

SEQ ID NO: 2214150 - DNA, 25 bp, Homo sapien
ccttggtaggtcaccaggcaggaac

SEQ ID NO: 2214151 - DNA, 25 bp, Homo sapien
tgctgtctgtcatactgtccatgtc

SEQ ID NO: 2214152 - DNA, 25 bp, Homo sapien
gcaggaacttcgcttggtcccatct

SEQ ID NO: 2214153 - DNA, 25 bp, Homo sapien
tatgtcaccacaacctgtcaatgaa

SEQ ID NO: 2214154 - DNA, 25 bp, Homo sapien
tgacggcggatactgctaaaaaagc

SEQ ID NO: 2214155 - DNA, 25 bp, Homo sapien
gaaattggcagggtaactcaggcaa

SEQ ID NO: 2214156 - DNA, 25 bp, Homo sapien
tgaccttgctcttccggtgacggcg

SEQ ID NO: 2214157 - DNA, 25 bp, Homo sapien
tcacgtgctcatgaggcctggctct

SEQ ID NO: 2214158 - DNA, 25 bp, Homo sapien
gctgcttcactcaggccatcgtggg

SEQ ID NO: 2214159 - DNA, 25 bp, Homo sapien
tctgaggttggtccttctgtcgcct

SEQ ID NO: 2214160 - DNA, 25 bp, Homo sapien
tcttcagcctacctgggccggatga

SEQ ID NO: 2214161 - DNA, 25 bp, Homo sapien
tgttcacgggtactcccagaggctg

SEQ ID NO: 2214162 - DNA, 25 bp, Homo sapien
tgatggggacaactgaggtacgtcc

SEQ ID NO: 2214163 - DNA, 25 bp, Homo sapien
gggacaactgaggtacgtccagctg

SEQ ID NO: 2214164 - DNA, 25 bp, Homo sapien
tgaggtacgtccagctggaaatgca

SEQ ID NO: 2214165 - DNA, 25 bp, Homo sapien
caactgaggtacgtccagctggaaa

SEQ ID NO: 2214166 - DNA, 25 bp, Homo sapien
atcagtcaggaagcatcacagtggg

SEQ ID NO: 2214167 - DNA, 25 bp, Homo sapien
taacattatcagtcaggaagcatca

SEQ ID NO: 2214168 - DNA, 25 bp, Homo sapien
cattatcagtcaggaagcatcacag

SEQ ID NO: 2214169 - DNA, 25 bp, Homo sapien
tataacattatcagtcaggaagcat

SEQ ID NO: 2214170 - DNA, 25 bp, Homo sapien
gcagtctgtggatgtcccaatccac

SEQ ID NO: 2214171 - DNA, 25 bp, Homo sapien
tggatgtcccaatccacgccaaagc

SEQ ID NO: 2214172 - DNA, 25 bp, Homo sapien
ggcccaagccagcacgccagcttga

SEQ ID NO: 2214173 - DNA, 25 bp, Homo sapien
gccagcttgagtccgcagaaaggag

SEQ ID NO: 2214174 - DNA, 25 bp, Homo sapien
atgtgctacaacaaagctgcagagc

SEQ ID NO: 2214175 - DNA, 25 bp, Homo sapien
gctcctggcctacaaatgcatggct

SEQ ID NO: 2214176 - DNA, 25 bp, Homo sapien
ccgcaaagcgggttccaaaggagag

SEQ ID NO: 2214177 - DNA, 25 bp, Homo sapien
gcggtacccgcgttacacagctgtt

SEQ ID NO: 2214178 - DNA, 25 bp, Homo sapien
agcctcggctgccacggctgagagc

SEQ ID NO: 2214179 - DNA, 25 bp, Homo sapien
tcaggttcctagcccggttattgtc

SEQ ID NO: 2214180 - DNA, 25 bp, Homo sapien
tagcccggttattgtccgctgagcc

SEQ ID NO: 2214181 - DNA, 25 bp, Homo sapien
ttattgtccgctgagccgccctggg

SEQ ID NO: 2214182 - DNA, 25 bp, Homo sapien
tggccgccaccaggacgtttattcc

SEQ ID NO: 2214183 - DNA, 25 bp, Homo sapien
gatcggtttcggttttcacgcactc

SEQ ID NO: 2214184 - DNA, 25 bp, Homo sapien
gtggcctcaaggagccagtcctgcc

SEQ ID NO: 2214185 - DNA, 25 bp, Homo sapien
tgtgcattcgcggtactgtgccctg

SEQ ID NO: 2214186 - DNA, 25 bp, Homo sapien
aagtagttaagatttggccttctga

SEQ ID NO: 2214187 - DNA, 25 bp, Homo sapien
agtagttaagatttggccttctgaa

SEQ ID NO: 2214188 - DNA, 25 bp, Homo sapien
ctgaagtagttaagatttggccttc

SEQ ID NO: 2214189 - DNA, 25 bp, Homo sapien
gaagtagttaagatttggccttctg

SEQ ID NO: 2214190 - DNA, 25 bp, Homo sapien
ggccccattcgaaggatgtactttc

SEQ ID NO: 2214191 - DNA, 25 bp, Homo sapien
tgaggttgacttagtccccaagggc

SEQ ID NO: 2214192 - DNA, 25 bp, Homo sapien
cagagtgtccatgtgccttcttggg

SEQ ID NO: 2214193 - DNA, 25 bp, Homo sapien
accagagtttgtgtcccagatgcca

SEQ ID NO: 2214194 - DNA, 25 bp, Homo sapien
tttattgtggaggataatacaggag

SEQ ID NO: 2214195 - DNA, 25 bp, Homo sapien
aagtggatgaggctgtaatgctctc

SEQ ID NO: 2214196 - DNA, 25 bp, Homo sapien
taatgctctccagctacgtgagtcc

SEQ ID NO: 2214197 - DNA, 25 bp, Homo sapien
ttcggaggcatcataagttcctggg

SEQ ID NO: 2214198 - DNA, 25 bp, Homo sapien
ttggtgttttaggtagctaatcaac

SEQ ID NO: 2214199 - DNA, 25 bp, Homo sapien
cagttggtgttttaggtagctaatc

SEQ ID NO: 2214200 - DNA, 25 bp, Homo sapien
tacagttggtgttttaggtagctaa

SEQ ID NO: 2214201 - DNA, 25 bp, Homo sapien
agttggtgttttaggtagctaatca

SEQ ID NO: 2214202 - DNA, 25 bp, Homo sapien
cctgtgatagaagtgaccgtggagt

SEQ ID NO: 2214203 - DNA, 25 bp, Homo sapien
tgggaggaatatccagctggttgat

SEQ ID NO: 2214204 - DNA, 25 bp, Homo sapien
gcacaaggctctgcggacgactaaa

SEQ ID NO: 2214205 - DNA, 25 bp, Homo sapien
tctgcggacgactaaacggacctgt

SEQ ID NO: 2214206 - DNA, 25 bp, Homo sapien
caggtcatgaggagcaattatcagc

SEQ ID NO: 2214207 - DNA, 25 bp, Homo sapien
aacaggtcatgaggagcaattatca

SEQ ID NO: 2214208 - DNA, 25 bp, Homo sapien
aggtcatgaggagcaattatcagca

SEQ ID NO: 2214209 - DNA, 25 bp, Homo sapien
acaggtcatgaggagcaattatcag

SEQ ID NO: 2214210 - DNA, 25 bp, Homo sapien
caccatgggctaagaggacttgcaa

SEQ ID NO: 2214211 - DNA, 25 bp, Homo sapien
ttgtagatgctaccaccaggagagg

SEQ ID NO: 2214212 - DNA, 25 bp, Homo sapien
gaagctatgtttgatgcccagactg

SEQ ID NO: 2214213 - DNA, 25 bp, Homo sapien
tgtaacgctcctggcgcaaaagctg

SEQ ID NO: 2214214 - DNA, 25 bp, Homo sapien
tggctaattggagaactattctcat

SEQ ID NO: 2214215 - DNA, 25 bp, Homo sapien
ttcagtgtcaaggtcgcccacctca

SEQ ID NO: 2214216 - DNA, 25 bp, Homo sapien
gtcaaggtcgcccacctcagtttgt

SEQ ID NO: 2214217 - DNA, 25 bp, Homo sapien
ggtcgcccacctcagtttgtaatgt

SEQ ID NO: 2214218 - DNA, 25 bp, Homo sapien
tcgcccacctcagtttgtaatgtca

SEQ ID NO: 2214219 - DNA, 25 bp, Homo sapien
tctgtgaaacattggggccctggtg

SEQ ID NO: 2214220 - DNA, 25 bp, Homo sapien
gcagctggggctctcgtttcccact

SEQ ID NO: 2214221 - DNA, 25 bp, Homo sapien
gctctcgtttcccactgttaacaat

SEQ ID NO: 2214222 - DNA, 25 bp, Homo sapien
cacggccccaacctggagcagctgg

SEQ ID NO: 2214223 - DNA, 25 bp, Homo sapien
caactttaaatgacctgtctccaag

SEQ ID NO: 2214224 - DNA, 25 bp, Homo sapien
tattagagtctgatgttgaaccact

SEQ ID NO: 2214225 - DNA, 25 bp, Homo sapien
aatccattagactctgttcactttt

SEQ ID NO: 2214226 - DNA, 25 bp, Homo sapien
cactctagcaagtatttcaatgcag

SEQ ID NO: 2214227 - DNA, 25 bp, Homo sapien
ctttgtaaggtggttcatctgttga

SEQ ID NO: 2214228 - DNA, 25 bp, Homo sapien
ttcatctgttgaggctaggtcagcg

SEQ ID NO: 2214229 - DNA, 25 bp, Homo sapien
ctgtctttgtaaggtggttcatctg

SEQ ID NO: 2214230 - DNA, 25 bp, Homo sapien
taggtcagcgtaccatttttggagg

SEQ ID NO: 2214231 - DNA, 25 bp, Homo sapien
taccgcagtggtgtaacaggctcaa

SEQ ID NO: 2214232 - DNA, 25 bp, Homo sapien
tgtggcactggacaaaacaactggc

SEQ ID NO: 2214233 - DNA, 25 bp, Homo sapien
caaataacctatgagaccagatgct

SEQ ID NO: 2214234 - DNA, 25 bp, Homo sapien
taacacaactgcagtagagggccaa

SEQ ID NO: 2214235 - DNA, 25 bp, Homo sapien
ggctgccaagactggtgacaatact

SEQ ID NO: 2214236 - DNA, 25 bp, Homo sapien
attgacatgtaaaggagacaagggc

SEQ ID NO: 2214237 - DNA, 25 bp, Homo sapien
caatactagtacttcctatttaagg

SEQ ID NO: 2214238 - DNA, 25 bp, Homo sapien
cttgcattgacatgtaaaggagaca

SEQ ID NO: 2214239 - DNA, 25 bp, Homo sapien
gatatcactaaatcatacacattgg

SEQ ID NO: 2214240 - DNA, 25 bp, Homo sapien
tttgcctgacagctcaaccatttct

SEQ ID NO: 2214241 - DNA, 25 bp, Homo sapien
tctcagagtgagacgcctaaaggtg

SEQ ID NO: 2214242 - DNA, 25 bp, Homo sapien
ttagaataaagcaaccagatttggt

SEQ ID NO: 2214243 - DNA, 25 bp, Homo sapien
gaaatcaaggagctatcctggcact

SEQ ID NO: 2214244 - DNA, 25 bp, Homo sapien
gttttgggtctacagtttacagcta

SEQ ID NO: 2214245 - DNA, 25 bp, Homo sapien
tcaaaggaaagcacctaatgaggta

SEQ ID NO: 2214246 - DNA, 25 bp, Homo sapien
ccaaaatgatttagagttcttccac

SEQ ID NO: 2214247 - DNA, 25 bp, Homo sapien
tagggcaggtcgatcattaaggaaa

SEQ ID NO: 2214248 - DNA, 25 bp, Homo sapien
tcattgtagctgctgtaggtatacc

SEQ ID NO: 2214249 - DNA, 25 bp, Homo sapien
tacctagcatggaagatgagtaact

SEQ ID NO: 2214250 - DNA, 25 bp, Homo sapien
cagtagaaccagcttaatatgtgtc

SEQ ID NO: 2214251 - DNA, 25 bp, Homo sapien
tagcctcaaaggtgcacatgtctcc

SEQ ID NO: 2214252 - DNA, 25 bp, Homo sapien
tacttgatccatctgagctcggagg

SEQ ID NO: 2214253 - DNA, 25 bp, Homo sapien
caagaggattggtcaaaggacttcc

SEQ ID NO: 2214254 - DNA, 25 bp, Homo sapien
caacagttatggtggaggtctgcac

SEQ ID NO: 2214255 - DNA, 25 bp, Homo sapien
gtttcctaattgagagcaggtacag

SEQ ID NO: 2214256 - DNA, 25 bp, Homo sapien
ggtggctcatcacggacttttagtt

SEQ ID NO: 2214257 - DNA, 25 bp, Homo sapien
gagagcaggtacagatctcttctgg

SEQ ID NO: 2214258 - DNA, 25 bp, Homo sapien
ctcttctggtggctcatcacggact

SEQ ID NO: 2214259 - DNA, 25 bp, Homo sapien
ggcaagaagatctctctttgggact

SEQ ID NO: 2214260 - DNA, 25 bp, Homo sapien
gggcaagaagatctctctttgggac

SEQ ID NO: 2214261 - DNA, 25 bp, Homo sapien
ccagaaggggcaagaagatctctct

SEQ ID NO: 2214262 - DNA, 25 bp, Homo sapien
agatctctctttgggacttttctcc

SEQ ID NO: 2214263 - DNA, 25 bp, Homo sapien
tgcagccctttgtcaaagcggttat

SEQ ID NO: 2214264 - DNA, 25 bp, Homo sapien
ccaggaggctctctagcatactctg

SEQ ID NO: 2214265 - DNA, 25 bp, Homo sapien
tctctagcatactctgcttgggctg

SEQ ID NO: 2214266 - DNA, 25 bp, Homo sapien
cagccctttgtcaaagcggttatac

SEQ ID NO: 2214267 - DNA, 25 bp, Homo sapien
gggctatagtaggagagttccccat

SEQ ID NO: 2214268 - DNA, 25 bp, Homo sapien
gatgagaatactctgagatgagaga

SEQ ID NO: 2214269 - DNA, 25 bp, Homo sapien
tatagtaggagagttccccatgtcc

SEQ ID NO: 2214270 - DNA, 25 bp, Homo sapien
cccataatgggctatagtaggagag

SEQ ID NO: 2214271 - DNA, 25 bp, Homo sapien
caaatcaagcttgcatgtgttcaca

SEQ ID NO: 2214272 - DNA, 25 bp, Homo sapien
taggctatcagccacctgaaggcaa

SEQ ID NO: 2214273 - DNA, 25 bp, Homo sapien
tcatgaatgagagccctagatttta

SEQ ID NO: 2214274 - DNA, 25 bp, Homo sapien
taaagatgatactgactgtccatca

SEQ ID NO: 2214275 - DNA, 25 bp, Homo sapien
tgttctattggtatactggcagata

SEQ ID NO: 2214276 - DNA, 25 bp, Homo sapien
gaactgttctattggtatactggca

SEQ ID NO: 2214277 - DNA, 25 bp, Homo sapien
aactggaactgttctattggtatac

SEQ ID NO: 2214278 - DNA, 25 bp, Homo sapien
tattggtatactggcagataaattg

SEQ ID NO: 2214279 - DNA, 25 bp, Homo sapien
caatatcatttgaagagaactgagc

SEQ ID NO: 2214280 - DNA, 25 bp, Homo sapien
tcaatatcatttgaagagaactgag

SEQ ID NO: 2214281 - DNA, 25 bp, Homo sapien
tgagcaatcatctcataggctaatt

SEQ ID NO: 2214282 - DNA, 25 bp, Homo sapien
gcaatcatctcataggctaatttgt

SEQ ID NO: 2214283 - DNA, 25 bp, Homo sapien
ctataagattggctatggattctgc

SEQ ID NO: 2214284 - DNA, 25 bp, Homo sapien
tggattctgcctcatttttagccat

SEQ ID NO: 2214285 - DNA, 25 bp, Homo sapien
tatggattctgcctcatttttagcc

SEQ ID NO: 2214286 - DNA, 25 bp, Homo sapien
ataagattggctatggattctgcct

SEQ ID NO: 2214287 - DNA, 25 bp, Homo sapien
cttctgagtgccaatatccccctta

SEQ ID NO: 2214288 - DNA, 25 bp, Homo sapien
tcatccagtactacttgtacaactt

SEQ ID NO: 2214289 - DNA, 25 bp, Homo sapien
ttaattcatccagtactacttgtac

SEQ ID NO: 2214290 - DNA, 25 bp, Homo sapien
gcttctgagtgccaatatccccctt

SEQ ID NO: 2214291 - DNA, 25 bp, Homo sapien
catctattactgcctgtatctgcag

SEQ ID NO: 2214292 - DNA, 25 bp, Homo sapien
tattactgcctgtatctgcagctga

SEQ ID NO: 2214293 - DNA, 25 bp, Homo sapien
tactgcctgtatctgcagctgatta

SEQ ID NO: 2214294 - DNA, 25 bp, Homo sapien
tctattactgcctgtatctgcagct

SEQ ID NO: 2214295 - DNA, 25 bp, Homo sapien
tgaaagagcatcataattcacaact

SEQ ID NO: 2214296 - DNA, 25 bp, Homo sapien
tgttacagagaaaccatactgcctc

SEQ ID NO: 2214297 - DNA, 25 bp, Homo sapien
ggattgcccacaagtatgaaagagc

SEQ ID NO: 2214298 - DNA, 25 bp, Homo sapien
tgctcttcaattccagtagccatgt

SEQ ID NO: 2214299 - DNA, 25 bp, Homo sapien
cccagtctgtatctactaatatatt

SEQ ID NO: 2214300 - DNA, 25 bp, Homo sapien
gggcccagtctgtatctactaatat

SEQ ID NO: 2214301 - DNA, 25 bp, Homo sapien
gagggcccagtctgtatctactaat

SEQ ID NO: 2214302 - DNA, 25 bp, Homo sapien
ggcccagtctgtatctactaatata

SEQ ID NO: 2214303 - DNA, 25 bp, Homo sapien
tgaaagcatttcctgtatggtttcc

SEQ ID NO: 2214304 - DNA, 25 bp, Homo sapien
ctgaaagcatttcctgtatggtttc

SEQ ID NO: 2214305 - DNA, 25 bp, Homo sapien
aaagcatttcctgtatggtttccat

SEQ ID NO: 2214306 - DNA, 25 bp, Homo sapien
gaaagcatttcctgtatggtttcca

SEQ ID NO: 2214307 - DNA, 25 bp, Homo sapien
ctttgtggtgacataaattggccat

SEQ ID NO: 2214308 - DNA, 25 bp, Homo sapien
taaattggtagacttcgatcactgg

SEQ ID NO: 2214309 - DNA, 25 bp, Homo sapien
tagactagaacaggtagtattccag

SEQ ID NO: 2214310 - DNA, 25 bp, Homo sapien
agcttgttcagaggttctagatgca

SEQ ID NO: 2214311 - DNA, 25 bp, Homo sapien
ttatgatagttctcaatgcccacac

SEQ ID NO: 2214312 - DNA, 25 bp, Homo sapien
cattgtccactatgaacgagctgat

SEQ ID NO: 2214313 - DNA, 25 bp, Homo sapien
tcttctcataatccccaagttgtgg

SEQ ID NO: 2214314 - DNA, 25 bp, Homo sapien
ggctgtctagtttttcattgtccac

SEQ ID NO: 2214315 - DNA, 25 bp, Homo sapien
ctgtgctgctatgccggctgtgcca

SEQ ID NO: 2214316 - DNA, 25 bp, Homo sapien
tacaatcagcctgtcagtattcaca

SEQ ID NO: 2214317 - DNA, 25 bp, Homo sapien
aacaccctgtcttaattattgtagc

SEQ ID NO: 2214318 - DNA, 25 bp, Homo sapien
gggaagaactgacagattggcaata

SEQ ID NO: 2214319 - DNA, 25 bp, Homo sapien
tgcagtaagtgttaaagtcaggtag

SEQ ID NO: 2214320 - DNA, 25 bp, Homo sapien
gaagtgtgccacatcgatgtactca

SEQ ID NO: 2214321 - DNA, 25 bp, Homo sapien
gatcctctgaaaccgtgacactgct

SEQ ID NO: 2214322 - DNA, 25 bp, Homo sapien
tatctgccgttatatcctccactga

SEQ ID NO: 2214323 - DNA, 25 bp, Homo sapien
aaatcctttgctatcatttcgacaa

SEQ ID NO: 2214324 - DNA, 25 bp, Homo sapien
tatgttagagcttaattccccatgt

SEQ ID NO: 2214325 - DNA, 25 bp, Homo sapien
tcagtggtttctctaggcagtatat

SEQ ID NO: 2214326 - DNA, 25 bp, Homo sapien
tgaagtgcaattattgtagacagca

SEQ ID NO: 2214327 - DNA, 25 bp, Homo sapien
ttttgtttgttcaatctgtcatttc

SEQ ID NO: 2214328 - DNA, 25 bp, Homo sapien
gaaacccagatattagacttgctag

SEQ ID NO: 2214329 - DNA, 25 bp, Homo sapien
aatgatgaaaagagcctcagggtcc

SEQ ID NO: 2214330 - DNA, 25 bp, Homo sapien
cctgtagaagattagtaagcagacc

SEQ ID NO: 2214331 - DNA, 25 bp, Homo sapien
caataagtgcacagagagagtccta

SEQ ID NO: 2214332 - DNA, 25 bp, Homo sapien
gccaggcaaggacacaattaaaaaa

SEQ ID NO: 2214333 - DNA, 25 bp, Homo sapien
ttttataaggatagcattaccctga

SEQ ID NO: 2214334 - DNA, 25 bp, Homo sapien
tcggcacaactgaagaggagacaat

SEQ ID NO: 2214335 - DNA, 25 bp, Homo sapien
tatgatcaagtggaactcatcccag

SEQ ID NO: 2214336 - DNA, 25 bp, Homo sapien
aatgttgtagggcacagtactagga

SEQ ID NO: 2214337 - DNA, 25 bp, Homo sapien
tactaggattgagtaccccatacat

SEQ ID NO: 2214338 - DNA, 25 bp, Homo sapien
cacagtactaggattgagtacccca

SEQ ID NO: 2214339 - DNA, 25 bp, Homo sapien
gtaccccatacatagtgaagccttt

SEQ ID NO: 2214340 - DNA, 25 bp, Homo sapien
gggtggtaggtacattctttttgca

SEQ ID NO: 2214341 - DNA, 25 bp, Homo sapien
gctatgccaaattcagggtggtagg

SEQ ID NO: 2214342 - DNA, 25 bp, Homo sapien
tcccctttcttgactgctatgccaa

SEQ ID NO: 2214343 - DNA, 25 bp, Homo sapien
tacattctttttgcactgaccacct

SEQ ID NO: 2214344 - DNA, 25 bp, Homo sapien
ggagaaaacatggtcatgaatctcc

SEQ ID NO: 2214345 - DNA, 25 bp, Homo sapien
tagatcttcccgatccttctggcag

SEQ ID NO: 2214346 - DNA, 25 bp, Homo sapien
agttttcattaaactcaaaggcaca

SEQ ID NO: 2214347 - DNA, 25 bp, Homo sapien
cattaattgccagatacagtctagg

SEQ ID NO: 2214348 - DNA, 25 bp, Homo sapien
gggacacttctttagagtccccatc

SEQ ID NO: 2214349 - DNA, 25 bp, Homo sapien
ctgggtgaagataggggacacttct

SEQ ID NO: 2214350 - DNA, 25 bp, Homo sapien
gataggggacacttctttagagtcc

SEQ ID NO: 2214351 - DNA, 25 bp, Homo sapien
acttctttagagtccccatcgaggt

SEQ ID NO: 2214352 - DNA, 25 bp, Homo sapien
tgtggcccatggatatccattcctt

SEQ ID NO: 2214353 - DNA, 25 bp, Homo sapien
ggcccatggatatccattccttctc

SEQ ID NO: 2214354 - DNA, 25 bp, Homo sapien
catggatatccattccttctctatc

SEQ ID NO: 2214355 - DNA, 25 bp, Homo sapien
acttgtggcccatggatatccattc

SEQ ID NO: 2214356 - DNA, 25 bp, Homo sapien
taggtaagaagtatgttgaacatac

SEQ ID NO: 2214357 - DNA, 25 bp, Homo sapien
ataggtaagaagtatgttgaacata

SEQ ID NO: 2214358 - DNA, 25 bp, Homo sapien
aagtaaaatatagtagcgtgctctc

SEQ ID NO: 2214359 - DNA, 25 bp, Homo sapien
agtaaaatatagtagcgtgctctct

SEQ ID NO: 2214360 - DNA, 25 bp, Homo sapien
taaaatatagtagcgtgctctctta

SEQ ID NO: 2214361 - DNA, 25 bp, Homo sapien
aaaatatagtagcgtgctctcttac

SEQ ID NO: 2214362 - DNA, 25 bp, Homo sapien
tctaggaggatgctagccactgagc

SEQ ID NO: 2214363 - DNA, 25 bp, Homo sapien
tccatcagaacaatggactaagaca

SEQ ID NO: 2214364 - DNA, 25 bp, Homo sapien
gccactgagcagacttgtgctgtgc

SEQ ID NO: 2214365 - DNA, 25 bp, Homo sapien
ctgtgcggtcccatccatcagaaca

SEQ ID NO: 2214366 - DNA, 25 bp, Homo sapien
ctctccaggccgctaagaaattcac

SEQ ID NO: 2214367 - DNA, 25 bp, Homo sapien
cataatagctttaatgtgtcttaac

SEQ ID NO: 2214368 - DNA, 25 bp, Homo sapien
tgtgtcttaaccaccctgagctctc

SEQ ID NO: 2214369 - DNA, 25 bp, Homo sapien
gctaagaaattcactcattgttgga

SEQ ID NO: 2214370 - DNA, 25 bp, Homo sapien
cagactgctccgcattacatggatg

SEQ ID NO: 2214371 - DNA, 25 bp, Homo sapien
ttccaagagtttctgcagactgctc

SEQ ID NO: 2214372 - DNA, 25 bp, Homo sapien
catggatgttctcaatgcccatgaa

SEQ ID NO: 2214373 - DNA, 25 bp, Homo sapien
attacatggatgttctcaatgccca

SEQ ID NO: 2214374 - DNA, 25 bp, Homo sapien
ttcccagctgctcggttggccatgg

SEQ ID NO: 2214375 - DNA, 25 bp, Homo sapien
ctttggtcttgtgtctacaacatac

SEQ ID NO: 2214376 - DNA, 25 bp, Homo sapien
catctacacagcgagtgtaaaatcc

SEQ ID NO: 2214377 - DNA, 25 bp, Homo sapien
ttggctaatggcctccaacaagagc

SEQ ID NO: 2214378 - DNA, 25 bp, Homo sapien
caacaagagctcatcatctacacag

SEQ ID NO: 2214379 - DNA, 25 bp, Homo sapien
aaccactatttcaggagggtaggtg

SEQ ID NO: 2214380 - DNA, 25 bp, Homo sapien
acagggacacgttctttacttctga

SEQ ID NO: 2214381 - DNA, 25 bp, Homo sapien
agaggtaggagagcacagggacacg

SEQ ID NO: 2214382 - DNA, 25 bp, Homo sapien
tttcaggagggtaggtgctgcatat

SEQ ID NO: 2214383 - DNA, 25 bp, Homo sapien
tggtccagtttctgttgggtattcc

SEQ ID NO: 2214384 - DNA, 25 bp, Homo sapien
gttatggtccagtttctgttgggta

SEQ ID NO: 2214385 - DNA, 25 bp, Homo sapien
ctgttatggtccagtttctgttggg

SEQ ID NO: 2214386 - DNA, 25 bp, Homo sapien
tccagtttctgttgggtattcccat

SEQ ID NO: 2214387 - DNA, 25 bp, Homo sapien
gatattgggtcaatcagtttccatc

SEQ ID NO: 2214388 - DNA, 25 bp, Homo sapien
caaagtctgatattgggtcaatcag

SEQ ID NO: 2214389 - DNA, 25 bp, Homo sapien
tctgatattgggtcaatcagtttcc

SEQ ID NO: 2214390 - DNA, 25 bp, Homo sapien
tattgggtcaatcagtttccatcca

SEQ ID NO: 2214391 - DNA, 25 bp, Homo sapien
ccacagtggcaatgtgatggagtgc

SEQ ID NO: 2214392 - DNA, 25 bp, Homo sapien
catggcacacaaggtcagaatctaa

SEQ ID NO: 2214393 - DNA, 25 bp, Homo sapien
cggaaattcttgcagcggagggtca

SEQ ID NO: 2214394 - DNA, 25 bp, Homo sapien
caggctagtgatgggtaacttctcc

SEQ ID NO: 2214395 - DNA, 25 bp, Homo sapien
gataaagaatcccattagctggttt

SEQ ID NO: 2214396 - DNA, 25 bp, Homo sapien
acatagatcaggtgggttgcagtaa

SEQ ID NO: 2214397 - DNA, 25 bp, Homo sapien
acataacgatccaccaatttcacgt

SEQ ID NO: 2214398 - DNA, 25 bp, Homo sapien
gctggtttcttactcacataacgat

SEQ ID NO: 2214399 - DNA, 25 bp, Homo sapien
tgaaatcagtgcgggaaaaactatg

SEQ ID NO: 2214400 - DNA, 25 bp, Homo sapien
ttctgaaatcagtgcgggaaaaact

SEQ ID NO: 2214401 - DNA, 25 bp, Homo sapien
aaatcagtgcgggaaaaactatgaa

SEQ ID NO: 2214402 - DNA, 25 bp, Homo sapien
cttttctgaaatcagtgcgggaaaa

SEQ ID NO: 2214403 - DNA, 25 bp, Homo sapien
aattttggctttgttgccactgctt

SEQ ID NO: 2214404 - DNA, 25 bp, Homo sapien
attttggctttgttgccactgcttt

SEQ ID NO: 2214405 - DNA, 25 bp, Homo sapien
tttggctttgttgccactgcttttg

SEQ ID NO: 2214406 - DNA, 25 bp, Homo sapien
tggctttgttgccactgcttttggt

SEQ ID NO: 2214407 - DNA, 25 bp, Homo sapien
caccactaggtacggtacagatttt

SEQ ID NO: 2214408 - DNA, 25 bp, Homo sapien
tctccactcctgagctgtagataga

SEQ ID NO: 2214409 - DNA, 25 bp, Homo sapien
aggcaggccacccaattgttttgtt

SEQ ID NO: 2214410 - DNA, 25 bp, Homo sapien
cactaggtacggtacagattttaat

SEQ ID NO: 2214411 - DNA, 25 bp, Homo sapien
gctgtgaaccataatccacgtttat

SEQ ID NO: 2214412 - DNA, 25 bp, Homo sapien
gagaagctgtgaaccataatccacg

SEQ ID NO: 2214413 - DNA, 25 bp, Homo sapien
ttggagaagctgtgaaccataatcc

SEQ ID NO: 2214414 - DNA, 25 bp, Homo sapien
ccataatccacgtttatctgtttgt

SEQ ID NO: 2214415 - DNA, 25 bp, Homo sapien
tctccatgtgcctccaactaaagca

SEQ ID NO: 2214416 - DNA, 25 bp, Homo sapien
tccatgtgcctccaactaaagcaaa

SEQ ID NO: 2214417 - DNA, 25 bp, Homo sapien
aagcaaatttcagacttggaaagga

SEQ ID NO: 2214418 - DNA, 25 bp, Homo sapien
tgcctccaactaaagcaaatttcag

SEQ ID NO: 2214419 - DNA, 25 bp, Homo sapien
aaatgacatgatccggaaacaaagg

SEQ ID NO: 2214420 - DNA, 25 bp, Homo sapien
catgtcagaggacccgtacaaatga

SEQ ID NO: 2214421 - DNA, 25 bp, Homo sapien
gcttttacacgggatgtggttatcc

SEQ ID NO: 2214422 - DNA, 25 bp, Homo sapien
gatgtggttatcctccacagagaaa

SEQ ID NO: 2214423 - DNA, 25 bp, Homo sapien
agatctcagtgctactccagatgcc

SEQ ID NO: 2214424 - DNA, 25 bp, Homo sapien
ccgccaccggaagatctcagtgcta

SEQ ID NO: 2214425 - DNA, 25 bp, Homo sapien
gatctcagtgctactccagatgccg

SEQ ID NO: 2214426 - DNA, 25 bp, Homo sapien
gactgcagttcccgccaccggaaga

SEQ ID NO: 2214427 - DNA, 25 bp, Homo sapien
tgcaatccactgtggaatgagtctc

SEQ ID NO: 2214428 - DNA, 25 bp, Homo sapien
tctgcctgggaaccatagtcccact

SEQ ID NO: 2214429 - DNA, 25 bp, Homo sapien
gcattgtaggggcaaccatgccaga

SEQ ID NO: 2214430 - DNA, 25 bp, Homo sapien
cctgaggctggccaattgggccggg

SEQ ID NO: 2214431 - DNA, 25 bp, Homo sapien
gatagcatcaggctcttactggcct

SEQ ID NO: 2214432 - DNA, 25 bp, Homo sapien
gaaggaagagtcctggatagcatca

SEQ ID NO: 2214433 - DNA, 25 bp, Homo sapien
tgcctataggtcgaagaccacactg

SEQ ID NO: 2214434 - DNA, 25 bp, Homo sapien
gagccacatgacctctgcctatagg

SEQ ID NO: 2214435 - DNA, 25 bp, Homo sapien
gcagctcttttaaggagtatagggt

SEQ ID NO: 2214436 - DNA, 25 bp, Homo sapien
ctcttttaaggagtatagggtctgc

SEQ ID NO: 2214437 - DNA, 25 bp, Homo sapien
tttaaggagtatagggtctgctggc

SEQ ID NO: 2214438 - DNA, 25 bp, Homo sapien
ttaaggagtatagggtctgctggca

SEQ ID NO: 2214439 - DNA, 25 bp, Homo sapien
tccttgagcaatggtttctaattct

SEQ ID NO: 2214440 - DNA, 25 bp, Homo sapien
ttccttgagcaatggtttctaattc

SEQ ID NO: 2214441 - DNA, 25 bp, Homo sapien
cttgagcaatggtttctaattctcc

SEQ ID NO: 2214442 - DNA, 25 bp, Homo sapien
atttccttgagcaatggtttctaat

SEQ ID NO: 2214443 - DNA, 25 bp, Homo sapien
atctctctagttgttggcactgtac

SEQ ID NO: 2214444 - DNA, 25 bp, Homo sapien
gtaccagaaaagtcctgctgtacca

SEQ ID NO: 2214445 - DNA, 25 bp, Homo sapien
tgtaccaccattaaacctatctctc

SEQ ID NO: 2214446 - DNA, 25 bp, Homo sapien
taaacctatctctctagttgttggc

SEQ ID NO: 2214447 - DNA, 25 bp, Homo sapien
cagtgtctatcatagagctctgcac

SEQ ID NO: 2214448 - DNA, 25 bp, Homo sapien
tctatcatagagctctgcacatggc

SEQ ID NO: 2214449 - DNA, 25 bp, Homo sapien
gtgtctatcatagagctctgcacat

SEQ ID NO: 2214450 - DNA, 25 bp, Homo sapien
cacagtgtctatcatagagctctgc

SEQ ID NO: 2214451 - DNA, 25 bp, Homo sapien
tggacttccaaaagagcctataacc

SEQ ID NO: 2214452 - DNA, 25 bp, Homo sapien
aagagcctataaccccatggccact

SEQ ID NO: 2214453 - DNA, 25 bp, Homo sapien
ttgggtggacttccaaaagagccta

SEQ ID NO: 2214454 - DNA, 25 bp, Homo sapien
ttccaaaagagcctataaccccatg

SEQ ID NO: 2214455 - DNA, 25 bp, Homo sapien
agcaacctcagacaagtaaccgtag

SEQ ID NO: 2214456 - DNA, 25 bp, Homo sapien
atctgataggatgtgctcgttgcat

SEQ ID NO: 2214457 - DNA, 25 bp, Homo sapien
cagagtagttaagggccagccccaa

SEQ ID NO: 2214458 - DNA, 25 bp, Homo sapien
agacaagtaaccgtagtagtctcct

SEQ ID NO: 2214459 - DNA, 25 bp, Homo sapien
ccccaactacctgattcgtttatag

SEQ ID NO: 2214460 - DNA, 25 bp, Homo sapien
tatcaatccccaactacctgattcg

SEQ ID NO: 2214461 - DNA, 25 bp, Homo sapien
cctgattcgtttatagcagtaaaaa

SEQ ID NO: 2214462 - DNA, 25 bp, Homo sapien
caactacctgattcgtttatagcag

SEQ ID NO: 2214463 - DNA, 25 bp, Homo sapien
gattcatgctcatgggaatcatatt

SEQ ID NO: 2214464 - DNA, 25 bp, Homo sapien
ggattcatgctcatgggaatcatat

SEQ ID NO: 2214465 - DNA, 25 bp, Homo sapien
ctggcacatgacagaggattcatgc

SEQ ID NO: 2214466 - DNA, 25 bp, Homo sapien
gaggattcatgctcatgggaatcat

SEQ ID NO: 2214467 - DNA, 25 bp, Homo sapien
tgacaaccgttggaagaccttctcc

SEQ ID NO: 2214468 - DNA, 25 bp, Homo sapien
ttgcttctaaaagtgacaaccgttg

SEQ ID NO: 2214469 - DNA, 25 bp, Homo sapien
ctccaaaatgtcagccacctccacc

SEQ ID NO: 2214470 - DNA, 25 bp, Homo sapien
catgcttggcaaacacacttttcag

SEQ ID NO: 2214471 - DNA, 25 bp, Homo sapien
ggattccaaatatcttggcgtcttc

SEQ ID NO: 2214472 - DNA, 25 bp, Homo sapien
tccaaatatcttggcgtcttccaca

SEQ ID NO: 2214473 - DNA, 25 bp, Homo sapien
ctggattccaaatatcttggcgtct

SEQ ID NO: 2214474 - DNA, 25 bp, Homo sapien
gattccaaatatcttggcgtcttcc

SEQ ID NO: 2214475 - DNA, 25 bp, Homo sapien
tcaggaaggtcctcggaatggcagt

SEQ ID NO: 2214476 - DNA, 25 bp, Homo sapien
aggtcctcggaatggcagtcctcac

SEQ ID NO: 2214477 - DNA, 25 bp, Homo sapien
catcaggaaggtcctcggaatggca

SEQ ID NO: 2214478 - DNA, 25 bp, Homo sapien
ggaaggtcctcggaatggcagtcct

SEQ ID NO: 2214479 - DNA, 25 bp, Homo sapien
cattccatactcactttgaatagca

SEQ ID NO: 2214480 - DNA, 25 bp, Homo sapien
tgaatagcaaccaaaccattttggg

SEQ ID NO: 2214481 - DNA, 25 bp, Homo sapien
tcactttgaatagcaaccaaaccat

SEQ ID NO: 2214482 - DNA, 25 bp, Homo sapien
accaaaccattttgggatgatgata

SEQ ID NO: 2214483 - DNA, 25 bp, Homo sapien
aactcatatgacatcttgatcctcc

SEQ ID NO: 2214484 - DNA, 25 bp, Homo sapien
tcttcattggtggtcgtcaattctc

SEQ ID NO: 2214485 - DNA, 25 bp, Homo sapien
ggtcgtcaattctccagtaagataa

SEQ ID NO: 2214486 - DNA, 25 bp, Homo sapien
tggtggtcgtcaattctccagtaag

SEQ ID NO: 2214487 - DNA, 25 bp, Homo sapien
agcttatagtcttcattggtggtcg

SEQ ID NO: 2214488 - DNA, 25 bp, Homo sapien
tcaaagagatagagtcatgagacca

SEQ ID NO: 2214489 - DNA, 25 bp, Homo sapien
aagagatagagtcatgagaccagat

SEQ ID NO: 2214490 - DNA, 25 bp, Homo sapien
agatagagtcatgagaccagataga

SEQ ID NO: 2214491 - DNA, 25 bp, Homo sapien
caaagagatagagtcatgagaccag

SEQ ID NO: 2214492 - DNA, 25 bp, Homo sapien
catgtttgcaatataccaaactttt

SEQ ID NO: 2214493 - DNA, 25 bp, Homo sapien
catccatatataacagcaagcttaa

SEQ ID NO: 2214494 - DNA, 25 bp, Homo sapien
taatcagtaaatgcgtatgttctga

SEQ ID NO: 2214495 - DNA, 25 bp, Homo sapien
aacaccgtgcactcactttgtgtct

SEQ ID NO: 2214496 - DNA, 25 bp, Homo sapien
ccagccttctcaagtgacatctcca

SEQ ID NO: 2214497 - DNA, 25 bp, Homo sapien
agccttctcaagtgacatctccaag

SEQ ID NO: 2214498 - DNA, 25 bp, Homo sapien
tccagccttctcaagtgacatctcc

SEQ ID NO: 2214499 - DNA, 25 bp, Homo sapien
cagccttctcaagtgacatctccaa

SEQ ID NO: 2214500 - DNA, 25 bp, Homo sapien
caccaattgtcgtccacaaatatct

SEQ ID NO: 2214501 - DNA, 25 bp, Homo sapien
gatgaacccagcttcgccttactca

SEQ ID NO: 2214502 - DNA, 25 bp, Homo sapien
atcggatgaacccagcttcgcctta

SEQ ID NO: 2214503 - DNA, 25 bp, Homo sapien
ccacagccaatccaccaattgtcgt

SEQ ID NO: 2214504 - DNA, 25 bp, Homo sapien
gtttgttgggaatctgtgtgtgtat

SEQ ID NO: 2214505 - DNA, 25 bp, Homo sapien
tgttgggaatctgtgtgtgtatacg

SEQ ID NO: 2214506 - DNA, 25 bp, Homo sapien
gtgtgtatacgtgtgggtcttggtg

SEQ ID NO: 2214507 - DNA, 25 bp, Homo sapien
ttgttgggaatctgtgtgtgtatac

SEQ ID NO: 2214508 - DNA, 25 bp, Homo sapien
ggtgtattccatatctacatgtaca

SEQ ID NO: 2214509 - DNA, 25 bp, Homo sapien
tatgcttttatctatgtctgactgt

SEQ ID NO: 2214510 - DNA, 25 bp, Homo sapien
catctgtgttggaggataacatcac

SEQ ID NO: 2214511 - DNA, 25 bp, Homo sapien
tcttgaagtgcctttgtattgggct

SEQ ID NO: 2214512 - DNA, 25 bp, Homo sapien
gcagcagtaagacccaatgggaata

SEQ ID NO: 2214513 - DNA, 25 bp, Homo sapien
aaagaggagccgcatttaattgact

SEQ ID NO: 2214514 - DNA, 25 bp, Homo sapien
tccagcttggaacatagcagcagta

SEQ ID NO: 2214515 - DNA, 25 bp, Homo sapien
tgatttccgttgagctccagaaggc

SEQ ID NO: 2214516 - DNA, 25 bp, Homo sapien
caagctggtgtgaccagggagaaac

SEQ ID NO: 2214517 - DNA, 25 bp, Homo sapien
gagagcttgtctgcttaaggagtac

SEQ ID NO: 2214518 - DNA, 25 bp, Homo sapien
tcaagtcagcccaaggcatgctgcc

SEQ ID NO: 2214519 - DNA, 25 bp, Homo sapien
tccacttaaggcatctgaatacagc

SEQ ID NO: 2214520 - DNA, 25 bp, Homo sapien
tgccattctgtattgttgccttaat

SEQ ID NO: 2214521 - DNA, 25 bp, Homo sapien
ttgcattgtgatattgttttgtagg

SEQ ID NO: 2214522 - DNA, 25 bp, Homo sapien
tgtattgttgccttaatactttggt

SEQ ID NO: 2214523 - DNA, 25 bp, Homo sapien
gcattgtgatattgttttgtaggtc

SEQ ID NO: 2214524 - DNA, 25 bp, Homo sapien
tagcgattatactatgctgcacccc

SEQ ID NO: 2214525 - DNA, 25 bp, Homo sapien
gacaaaatccgccacattatgggta

SEQ ID NO: 2214526 - DNA, 25 bp, Homo sapien
gttagtgagttcaccaaaggtcaca

SEQ ID NO: 2214527 - DNA, 25 bp, Homo sapien
gatttgaatccagactatccggctt

SEQ ID NO: 2214528 - DNA, 25 bp, Homo sapien
caatcttcaggaaagtcaccatgac

SEQ ID NO: 2214529 - DNA, 25 bp, Homo sapien
ggtactcttctaggcgcttaacaag

SEQ ID NO: 2214530 - DNA, 25 bp, Homo sapien
tgggagaccctatacaaggacaacc

SEQ ID NO: 2214531 - DNA, 25 bp, Homo sapien
gaagggtctgcgtcctttacaacca

SEQ ID NO: 2214532 - DNA, 25 bp, Homo sapien
ggatccaagactggtttaacatatc

SEQ ID NO: 2214533 - DNA, 25 bp, Homo sapien
gatccaagactggtttaacatatcc

SEQ ID NO: 2214534 - DNA, 25 bp, Homo sapien
tgaggctccagaagagttcagatcc

SEQ ID NO: 2214535 - DNA, 25 bp, Homo sapien
caggcctcaggcacaagagatagag

SEQ ID NO: 2214536 - DNA, 25 bp, Homo sapien
tttacctgaaacaagatatgggcct

SEQ ID NO: 2214537 - DNA, 25 bp, Homo sapien
taagcaacttgcataggtacctggc

SEQ ID NO: 2214538 - DNA, 25 bp, Homo sapien
tgcaaagagggcatataggtgcatt

SEQ ID NO: 2214539 - DNA, 25 bp, Homo sapien
gtgcattccggtgaatttgctggtg

SEQ ID NO: 2214540 - DNA, 25 bp, Homo sapien
gggcatataggtgcattccggtgaa

SEQ ID NO: 2214541 - DNA, 25 bp, Homo sapien
attcatcctgcttccgtttcggctt

SEQ ID NO: 2214542 - DNA, 25 bp, Homo sapien
catgtgggccaataaaactttaacg

SEQ ID NO: 2214543 - DNA, 25 bp, Homo sapien
tccacggcccttccatgggaggata

SEQ ID NO: 2214544 - DNA, 25 bp, Homo sapien
taatgaagcattgtctaacaggccc

SEQ ID NO: 2214545 - DNA, 25 bp, Homo sapien
gaaggaaggacataacccagttcag

SEQ ID NO: 2214546 - DNA, 25 bp, Homo sapien
tgccgagtatcctgcttcctagcca

SEQ ID NO: 2214547 - DNA, 25 bp, Homo sapien
ggccgtctgccgagtatcctgcttc

SEQ ID NO: 2214548 - DNA, 25 bp, Homo sapien
ggtggccgtctgccgagtatcctgc

SEQ ID NO: 2214549 - DNA, 25 bp, Homo sapien
cgtctgccgagtatcctgcttccta

SEQ ID NO: 2214550 - DNA, 25 bp, Homo sapien
ctttggagatgagagacactggcta

SEQ ID NO: 2214551 - DNA, 25 bp, Homo sapien
tatcgccttctagaccctgacttgg

SEQ ID NO: 2214552 - DNA, 25 bp, Homo sapien
taagtgtcctaaggcctctggtgac

SEQ ID NO: 2214553 - DNA, 25 bp, Homo sapien
gagatgaagtaagtcccaggccact

SEQ ID NO: 2214554 - DNA, 25 bp, Homo sapien
gcagggcatccacatgttctttcag

SEQ ID NO: 2214555 - DNA, 25 bp, Homo sapien
catgcagcctccttgtagactctag

SEQ ID NO: 2214556 - DNA, 25 bp, Homo sapien
gcagcttgtttaggtcattctcaga

SEQ ID NO: 2214557 - DNA, 25 bp, Homo sapien
tcttcacacaagtcagggagcctct

SEQ ID NO: 2214558 - DNA, 25 bp, Homo sapien
ggctttagagataggctccaggcag

SEQ ID NO: 2214559 - DNA, 25 bp, Homo sapien
caaaggctttagagataggctccag

SEQ ID NO: 2214560 - DNA, 25 bp, Homo sapien
aaaggctttagagataggctccagg

SEQ ID NO: 2214561 - DNA, 25 bp, Homo sapien
aaggctttagagataggctccaggc

SEQ ID NO: 2214562 - DNA, 25 bp, Homo sapien
tctcctgtagcagaaggtccatctc

SEQ ID NO: 2214563 - DNA, 25 bp, Homo sapien
tcagccttcaaacgagccttgatct

SEQ ID NO: 2214564 - DNA, 25 bp, Homo sapien
gcttgtattccttcaggtgcctttc

SEQ ID NO: 2214565 - DNA, 25 bp, Homo sapien
tgtcagcgtggatcagtcggagttc

SEQ ID NO: 2214566 - DNA, 25 bp, Homo sapien
aaaatagaaatggagccaggacttt

SEQ ID NO: 2214567 - DNA, 25 bp, Homo sapien
aaagcaggaaacaggccagcaaaag

SEQ ID NO: 2214568 - DNA, 25 bp, Homo sapien
aggcagagccaacctgaggccatct

SEQ ID NO: 2214569 - DNA, 25 bp, Homo sapien
gagccaggactttttttctaagcca

SEQ ID NO: 2214570 - DNA, 25 bp, Homo sapien
aagctgaagtgggataacttctgga

SEQ ID NO: 2214571 - DNA, 25 bp, Homo sapien
aaatctttgtgaatacgacttaggc

SEQ ID NO: 2214572 - DNA, 25 bp, Homo sapien
taaatggcacaagaattcacaatcc

SEQ ID NO: 2214573 - DNA, 25 bp, Homo sapien
atacgacttaggcaaacatttctcc

SEQ ID NO: 2214574 - DNA, 25 bp, Homo sapien
gaaagtggcgagtgagtgaaaggaa

SEQ ID NO: 2214575 - DNA, 25 bp, Homo sapien
ctcagagcagctgtcgcgatcccac

SEQ ID NO: 2214576 - DNA, 25 bp, Homo sapien
gcgatcccaccatcagcgcagcgac

SEQ ID NO: 2214577 - DNA, 25 bp, Homo sapien
ctcccaagcgcgggataggaaggaa

SEQ ID NO: 2214578 - DNA, 25 bp, Homo sapien
tgatctctttaatgctttccaattt

SEQ ID NO: 2214579 - DNA, 25 bp, Homo sapien
ctgatctctttaatgctttccaatt

SEQ ID NO: 2214580 - DNA, 25 bp, Homo sapien
tacaccagccaagggatacaataga

SEQ ID NO: 2214581 - DNA, 25 bp, Homo sapien
cacgtcccgagagatgtacaaatac

SEQ ID NO: 2214582 - DNA, 25 bp, Homo sapien
caatagacacaatgtagccacctcc

SEQ ID NO: 2214583 - DNA, 25 bp, Homo sapien
tcactgtcaatttcacgtcccgaga

SEQ ID NO: 2214584 - DNA, 25 bp, Homo sapien
tgagcctgtgcggtaggggcttgga

SEQ ID NO: 2214585 - DNA, 25 bp, Homo sapien
ctatgagcctgtgcggtaggggctt

SEQ ID NO: 2214586 - DNA, 25 bp, Homo sapien
tatgagcctgtgcggtaggggcttg

SEQ ID NO: 2214587 - DNA, 25 bp, Homo sapien
agcctgtgcggtaggggcttggaga

SEQ ID NO: 2214588 - DNA, 25 bp, Homo sapien
ttttcagccagaaggtgcactccaa

SEQ ID NO: 2214589 - DNA, 25 bp, Homo sapien
caatatagggtgtctgcagagggcc

SEQ ID NO: 2214590 - DNA, 25 bp, Homo sapien
ccatgcggcctgtatcaagctgctg

SEQ ID NO: 2214591 - DNA, 25 bp, Homo sapien
tgtctgacatcaccctacttggctg

SEQ ID NO: 2214592 - DNA, 25 bp, Homo sapien
atagaaaggcaagggaactgaaata

SEQ ID NO: 2214593 - DNA, 25 bp, Homo sapien
ccgtgcctggccgacacagacaaga

SEQ ID NO: 2214594 - DNA, 25 bp, Homo sapien
gaaaggcaagggaactgaaatagct

SEQ ID NO: 2214595 - DNA, 25 bp, Homo sapien
gccgacacagacaagatagttctaa

SEQ ID NO: 2214596 - DNA, 25 bp, Homo sapien
ggccagagagaggttcattccgcct

SEQ ID NO: 2214597 - DNA, 25 bp, Homo sapien
gctagtgcctcgatcttggatttct

SEQ ID NO: 2214598 - DNA, 25 bp, Homo sapien
gcaggctctcactagacatggaatc

SEQ ID NO: 2214599 - DNA, 25 bp, Homo sapien
tccgcctctgccatgtaaagttaca

SEQ ID NO: 2214600 - DNA, 25 bp, Homo sapien
cacaagtttgtacgtagccattgcc

SEQ ID NO: 2214601 - DNA, 25 bp, Homo sapien
caggtgaacctttgggaaatatgtc

SEQ ID NO: 2214602 - DNA, 25 bp, Homo sapien
ttaagaatcttagctcaggccgggc

SEQ ID NO: 2214603 - DNA, 25 bp, Homo sapien
taagcccctagaatatcacacaagt

SEQ ID NO: 2214604 - DNA, 25 bp, Homo sapien
tgagcactttctaggtcgtaggcct

SEQ ID NO: 2214605 - DNA, 25 bp, Homo sapien
tttctaggtcgtaggcctgctggtc

SEQ ID NO: 2214606 - DNA, 25 bp, Homo sapien
cgtcgctccttctaggccttaggaa

SEQ ID NO: 2214607 - DNA, 25 bp, Homo sapien
ttcacgtcgctccttctaggcctta

SEQ ID NO: 2214608 - DNA, 25 bp, Homo sapien
cctccacgtcgatggtggtgaagtt

SEQ ID NO: 2214609 - DNA, 25 bp, Homo sapien
actggtaacggcggtccctccagag

SEQ ID NO: 2214610 - DNA, 25 bp, Homo sapien
cacggagcgcaaggcaccaagctgt

SEQ ID NO: 2214611 - DNA, 25 bp, Homo sapien
aggctcaggcctagtaccccaggag

SEQ ID NO: 2214612 - DNA, 25 bp, Homo sapien
cccaggaggcgagcgaatcgctgct

SEQ ID NO: 2214613 - DNA, 25 bp, Homo sapien
ggtgagtagtggcaccgcactcgct

SEQ ID NO: 2214614 - DNA, 25 bp, Homo sapien
gcggctctctattcccttcgaggta

SEQ ID NO: 2214615 - DNA, 25 bp, Homo sapien
cactcgctcggttctagtgcgcctt

SEQ ID NO: 2214616 - DNA, 25 bp, Homo sapien
ttctcaggagcccattccccgggct

SEQ ID NO: 2214617 - DNA, 25 bp, Homo sapien
aggagcccattccccgggctgctgt

SEQ ID NO: 2214618 - DNA, 25 bp, Homo sapien
cgcgggcttctcaggagcccattcc

SEQ ID NO: 2214619 - DNA, 25 bp, Homo sapien
gcgggcttctcaggagcccattccc

SEQ ID NO: 2214620 - DNA, 25 bp, Homo sapien
ctacttatgtgggcagatcagctca

SEQ ID NO: 2214621 - DNA, 25 bp, Homo sapien
tacttatgtgggcagatcagctcac

SEQ ID NO: 2214622 - DNA, 25 bp, Homo sapien
tctcgggtaccttggctgtagaaca

SEQ ID NO: 2214623 - DNA, 25 bp, Homo sapien
taccttggctgtagaacaggagttg

SEQ ID NO: 2214624 - DNA, 25 bp, Homo sapien
tctgtgcaaatcaggttattctcgg

SEQ ID NO: 2214625 - DNA, 25 bp, Homo sapien
tcaggttattctcgggtaccttggc

SEQ ID NO: 2214626 - DNA, 25 bp, Homo sapien
ccaggggctaatcccaataaacaga

SEQ ID NO: 2214627 - DNA, 25 bp, Homo sapien
gatatatgatcttccagacagagaa

SEQ ID NO: 2214628 - DNA, 25 bp, Homo sapien
cccagtgaactaaataaaccaccag

SEQ ID NO: 2214629 - DNA, 25 bp, Homo sapien
tatactagcatcaacactacccagg

SEQ ID NO: 2214630 - DNA, 25 bp, Homo sapien
taggtctagccatgcagcagagctg

SEQ ID NO: 2214631 - DNA, 25 bp, Homo sapien
ttttagggagcctgtagcagtgacc

SEQ ID NO: 2214632 - DNA, 25 bp, Homo sapien
gagcctcctcgttgaaaaagcaagc

SEQ ID NO: 2214633 - DNA, 25 bp, Homo sapien
gcagtgacctagttccttcaaaggg

SEQ ID NO: 2214634 - DNA, 25 bp, Homo sapien
tatttatctccttctacaatgggtt

SEQ ID NO: 2214635 - DNA, 25 bp, Homo sapien
tgatttcgaggcttctctttgttta

SEQ ID NO: 2214636 - DNA, 25 bp, Homo sapien
tttctcttagaaccgtttttgctga

SEQ ID NO: 2214637 - DNA, 25 bp, Homo sapien
gctgaatttcgtaagttttggtatg

SEQ ID NO: 2214638 - DNA, 25 bp, Homo sapien
tagtggttccatcatgcaacaatgg

SEQ ID NO: 2214639 - DNA, 25 bp, Homo sapien
tcaacagctgtaaagcataactagg

SEQ ID NO: 2214640 - DNA, 25 bp, Homo sapien
aaatagtgactaaccgtacagcttg

SEQ ID NO: 2214641 - DNA, 25 bp, Homo sapien
caacaatggatatggacggtataca

SEQ ID NO: 2214642 - DNA, 25 bp, Homo sapien
gctcgatttctaaactgaacatgca

SEQ ID NO: 2214643 - DNA, 25 bp, Homo sapien
ctggttataaaggtagctcgatttc

SEQ ID NO: 2214644 - DNA, 25 bp, Homo sapien
tataaaggtagctcgatttctaaac

SEQ ID NO: 2214645 - DNA, 25 bp, Homo sapien
ggtagctcgatttctaaactgaaca

SEQ ID NO: 2214646 - DNA, 25 bp, Homo sapien
ctgcatattgttcctgaatgacttt

SEQ ID NO: 2214647 - DNA, 25 bp, Homo sapien
actttttgacgttctgtttctgcat

SEQ ID NO: 2214648 - DNA, 25 bp, Homo sapien
tctgttctctggaatgattcaaccc

SEQ ID NO: 2214649 - DNA, 25 bp, Homo sapien
tctgttacacacaagatgtcttctt

SEQ ID NO: 2214650 - DNA, 25 bp, Homo sapien
gcaggttagacactacacagggata

SEQ ID NO: 2214651 - DNA, 25 bp, Homo sapien
cagggatattacaccccagcattga

SEQ ID NO: 2214652 - DNA, 25 bp, Homo sapien
ccaggaggtccagtcgaaagtgaga

SEQ ID NO: 2214653 - DNA, 25 bp, Homo sapien
taaactcccacaggctgtaaaacag

SEQ ID NO: 2214654 - DNA, 25 bp, Homo sapien
agtatatttgacttcacatgggggc

SEQ ID NO: 2214655 - DNA, 25 bp, Homo sapien
gagagtatatttgacttcacatggg

SEQ ID NO: 2214656 - DNA, 25 bp, Homo sapien
tatatttgacttcacatgggggctc

SEQ ID NO: 2214657 - DNA, 25 bp, Homo sapien
ctgagagtatatttgacttcacatg

SEQ ID NO: 2214658 - DNA, 25 bp, Homo sapien
tttgcttcttgtaggaaactcttcg

SEQ ID NO: 2214659 - DNA, 25 bp, Homo sapien
gaaactcttcgggattttgggcaga

SEQ ID NO: 2214660 - DNA, 25 bp, Homo sapien
tctcagggtgaaatagatttcatga

SEQ ID NO: 2214661 - DNA, 25 bp, Homo sapien
gactcaataggatggtaggatgact

SEQ ID NO: 2214662 - DNA, 25 bp, Homo sapien
aaacactaccatagtgtggcgctcc

SEQ ID NO: 2214663 - DNA, 25 bp, Homo sapien
catagtgtggcgctcccagaggaga

SEQ ID NO: 2214664 - DNA, 25 bp, Homo sapien
agcactggcagctcggctatggcag

SEQ ID NO: 2214665 - DNA, 25 bp, Homo sapien
actgcccatgagagtccagcactgg

SEQ ID NO: 2214666 - DNA, 25 bp, Homo sapien
gacattcttggaaggttcatttgtg

SEQ ID NO: 2214667 - DNA, 25 bp, Homo sapien
agctaataactgatacattttgaca

SEQ ID NO: 2214668 - DNA, 25 bp, Homo sapien
aactcgaataatgccttcaaattgg

SEQ ID NO: 2214669 - DNA, 25 bp, Homo sapien
atggccaaactcgaataatgccttc

SEQ ID NO: 2214670 - DNA, 25 bp, Homo sapien
gtaaggctccaaagttctgcaggtt

SEQ ID NO: 2214671 - DNA, 25 bp, Homo sapien
tgtaagtaaggctccaaagttctgc

SEQ ID NO: 2214672 - DNA, 25 bp, Homo sapien
gcttctagcagaccaccaacagcaa

SEQ ID NO: 2214673 - DNA, 25 bp, Homo sapien
ctgcaggagtacaccacacagcaga

SEQ ID NO: 2214674 - DNA, 25 bp, Homo sapien
gtacaccacacagcagagcaacaag

SEQ ID NO: 2214675 - DNA, 25 bp, Homo sapien
gagtacaccacacagcagagcaaca

SEQ ID NO: 2214676 - DNA, 25 bp, Homo sapien
gcaggagtacaccacacagcagagc

SEQ ID NO: 2214677 - DNA, 25 bp, Homo sapien
caaggtgtttctgtcgggaatgcca

SEQ ID NO: 2214678 - DNA, 25 bp, Homo sapien
catcaagtacaagaagaacgaggtc

SEQ ID NO: 2214679 - DNA, 25 bp, Homo sapien
gatgttatagagtctgccaacctgc

SEQ ID NO: 2214680 - DNA, 25 bp, Homo sapien
gccaacctgctggtcaatgccaaag

SEQ ID NO: 2214681 - DNA, 25 bp, Homo sapien
ctaaagctgggctatgcagaggaac

SEQ ID NO: 2214682 - DNA, 25 bp, Homo sapien
tcagtgctaaacaagctgggcccag

SEQ ID NO: 2214683 - DNA, 25 bp, Homo sapien
caggtgttctaaaggcagcttcgac

SEQ ID NO: 2214684 - DNA, 25 bp, Homo sapien
caaaggtgattcagaagggcagatc

SEQ ID NO: 2214685 - DNA, 25 bp, Homo sapien
taacctcagaggtcaaacgtgtggc

SEQ ID NO: 2214686 - DNA, 25 bp, Homo sapien
catccggtctgtggctatggagcct

SEQ ID NO: 2214687 - DNA, 25 bp, Homo sapien
tgcaaatactaccatccggagcggg

SEQ ID NO: 2214688 - DNA, 25 bp, Homo sapien
gagagagagtcttaccccaaggcat

SEQ ID NO: 2214689 - DNA, 25 bp, Homo sapien
ggcaatttgaagctgcaccgctcag

SEQ ID NO: 2214690 - DNA, 25 bp, Homo sapien
tgggacccctattagctatgctgag

SEQ ID NO: 2214691 - DNA, 25 bp, Homo sapien
gatggatagcatttccgactcccgc

SEQ ID NO: 2214692 - DNA, 25 bp, Homo sapien
taacacgagtgcagagctatggccc

SEQ ID NO: 2214693 - DNA, 25 bp, Homo sapien
gcccagcctaccagagttttcgtag

SEQ ID NO: 2214694 - DNA, 25 bp, Homo sapien
tctatattacaaagtatggatgata

SEQ ID NO: 2214695 - DNA, 25 bp, Homo sapien
gagttttcgtagtcacatattctat

SEQ ID NO: 2214696 - DNA, 25 bp, Homo sapien
tacaaagtatggatgatatatccaa

SEQ ID NO: 2214697 - DNA, 25 bp, Homo sapien
tctggtggtttgacaatggcttgca

SEQ ID NO: 2214698 - DNA, 25 bp, Homo sapien
cagggttgtttctggtggtttgaca

SEQ ID NO: 2214699 - DNA, 25 bp, Homo sapien
tgtgaaacactctgaatgtgaggct

SEQ ID NO: 2214700 - DNA, 25 bp, Homo sapien
gaaggtgtgacactgcctataaatg

SEQ ID NO: 2214701 - DNA, 25 bp, Homo sapien
taccaacaacaatgggccgggcatg

SEQ ID NO: 2214702 - DNA, 25 bp, Homo sapien
tgcataaactatttgtgtactaacc

SEQ ID NO: 2214703 - DNA, 25 bp, Homo sapien
actcatggctctgtttctttaagaa

SEQ ID NO: 2214704 - DNA, 25 bp, Homo sapien
tgtccttgcgacttatattttgaga

SEQ ID NO: 2214705 - DNA, 25 bp, Homo sapien
cattttcttagcataagctctctcc

SEQ ID NO: 2214706 - DNA, 25 bp, Homo sapien
tctccgtcatttcttggtgcggccg

SEQ ID NO: 2214707 - DNA, 25 bp, Homo sapien
tggtgcggccgtttacagaaatccc

SEQ ID NO: 2214708 - DNA, 25 bp, Homo sapien
cctagcagaggcatcaggttatcat

SEQ ID NO: 2214709 - DNA, 25 bp, Homo sapien
gcatcagttgtactagggggtgggc

SEQ ID NO: 2214710 - DNA, 25 bp, Homo sapien
ccctggcacggctggatgaacactt

SEQ ID NO: 2214711 - DNA, 25 bp, Homo sapien
cctggcacggctggatgaacacttg

SEQ ID NO: 2214712 - DNA, 25 bp, Homo sapien
ccaggttgtctcagggagcatcagt

SEQ ID NO: 2214713 - DNA, 25 bp, Homo sapien
cagttttgagcccatgcagctgccc

SEQ ID NO: 2214714 - DNA, 25 bp, Homo sapien
tggctccagagaaggccctcgaagt

SEQ ID NO: 2214715 - DNA, 25 bp, Homo sapien
tttgagcccatgcagctgcccctgg

SEQ ID NO: 2214716 - DNA, 25 bp, Homo sapien
agagaaggccctcgaagttgctgct

SEQ ID NO: 2214717 - DNA, 25 bp, Homo sapien
agaaacgacttcgtgtgggccccag

SEQ ID NO: 2214718 - DNA, 25 bp, Homo sapien
gcaaatccgagaaacgacttcgtgt

SEQ ID NO: 2214719 - DNA, 25 bp, Homo sapien
gtatctgtgggatgggcccactctc

SEQ ID NO: 2214720 - DNA, 25 bp, Homo sapien
gtgtatctgtgggatgggcccactc

SEQ ID NO: 2214721 - DNA, 25 bp, Homo sapien
caggcttgggctataagactaggcc

SEQ ID NO: 2214722 - DNA, 25 bp, Homo sapien
gactaggcccacgattgcaagattg

SEQ ID NO: 2214723 - DNA, 25 bp, Homo sapien
gcagctgaaagaacccttacggata

SEQ ID NO: 2214724 - DNA, 25 bp, Homo sapien
tgcttcccgcaagtcaaggtccttc

SEQ ID NO: 2214725 - DNA, 25 bp, Homo sapien
tgtgttactagcatagcccctcagc

SEQ ID NO: 2214726 - DNA, 25 bp, Homo sapien
tgtacaggccctttggatgggctcc

SEQ ID NO: 2214727 - DNA, 25 bp, Homo sapien
gttactagcatagcccctcagcaag

SEQ ID NO: 2214728 - DNA, 25 bp, Homo sapien
gatgggctcctttgtgttactagca

SEQ ID NO: 2214729 - DNA, 25 bp, Homo sapien
tcctcagtaacgtgaaaaagctgga

SEQ ID NO: 2214730 - DNA, 25 bp, Homo sapien
ggaggcctactgattactctatgca

SEQ ID NO: 2214731 - DNA, 25 bp, Homo sapien
gaatgcaatctgagagggatgccaa

SEQ ID NO: 2214732 - DNA, 25 bp, Homo sapien
cccacactagggacagggagagctg

SEQ ID NO: 2214733 - DNA, 25 bp, Homo sapien
gctgggtcctcggtctgacctggca

SEQ ID NO: 2214734 - DNA, 25 bp, Homo sapien
aggctggtccaaaagatacatggtg

SEQ ID NO: 2214735 - DNA, 25 bp, Homo sapien
tcagtcttgcatgttgagggttcca

SEQ ID NO: 2214736 - DNA, 25 bp, Homo sapien
ttgagggttccagccgctgctctag

SEQ ID NO: 2214737 - DNA, 25 bp, Homo sapien
gatgagctggttctccgactggtgc

SEQ ID NO: 2214738 - DNA, 25 bp, Homo sapien
agctggttctccgactggtgcacag

SEQ ID NO: 2214739 - DNA, 25 bp, Homo sapien
ggctgatgagctggttctccgactg

SEQ ID NO: 2214740 - DNA, 25 bp, Homo sapien
gggaagtggcaagactgggctgatg

SEQ ID NO: 2214741 - DNA, 25 bp, Homo sapien
agagttaatgttctagactttccac

SEQ ID NO: 2214742 - DNA, 25 bp, Homo sapien
gagttaatgttctagactttccaca

SEQ ID NO: 2214743 - DNA, 25 bp, Homo sapien
ccactttagaatggggatgccggac

SEQ ID NO: 2214744 - DNA, 25 bp, Homo sapien
tccactttagaatggggatgccgga

SEQ ID NO: 2214745 - DNA, 25 bp, Homo sapien
atacagatgctccactttagaatgg

SEQ ID NO: 2214746 - DNA, 25 bp, Homo sapien
cccatatacagatgctccactttag

SEQ ID NO: 2214747 - DNA, 25 bp, Homo sapien
ctctatgttactgcccagggctcac

SEQ ID NO: 2214748 - DNA, 25 bp, Homo sapien
ccagcagcctgacagtggtccctgg

SEQ ID NO: 2214749 - DNA, 25 bp, Homo sapien
cagaaccatatatgtacacactccc

SEQ ID NO: 2214750 - DNA, 25 bp, Homo sapien
tgtgctcttatgtgaggtagccagc

SEQ ID NO: 2214751 - DNA, 25 bp, Homo sapien
aagccagctgtcatctatgcaccag

SEQ ID NO: 2214752 - DNA, 25 bp, Homo sapien
tccaggcttgcctcacattggctac

SEQ ID NO: 2214753 - DNA, 25 bp, Homo sapien
cacattggctacctcctgctacttt

SEQ ID NO: 2214754 - DNA, 25 bp, Homo sapien
gtagaaggaagcctcaagagccagc

SEQ ID NO: 2214755 - DNA, 25 bp, Homo sapien
cagagccctgcaaagctcctctttt

SEQ ID NO: 2214756 - DNA, 25 bp, Homo sapien
ctgagctaacctgccatgcagagcc

SEQ ID NO: 2214757 - DNA, 25 bp, Homo sapien
ccatgcagagccctgcaaagctcct

SEQ ID NO: 2214758 - DNA, 25 bp, Homo sapien
gagctaacctgccatgcagagccct

SEQ ID NO: 2214759 - DNA, 25 bp, Homo sapien
gaagcctagcattctcggcagtggg

SEQ ID NO: 2214760 - DNA, 25 bp, Homo sapien
ctcttgccctgtagagaaaggcccc

SEQ ID NO: 2214761 - DNA, 25 bp, Homo sapien
tgggccagaagcctagcattctcgg

SEQ ID NO: 2214762 - DNA, 25 bp, Homo sapien
gggactcttgccctgtagagaaagg

SEQ ID NO: 2214763 - DNA, 25 bp, Homo sapien
cttcagacccgaagctggagctggc

SEQ ID NO: 2214764 - DNA, 25 bp, Homo sapien
tccactctgggtataaatggaacag

SEQ ID NO: 2214765 - DNA, 25 bp, Homo sapien
ggcttgacgctccaatacaggctgt

SEQ ID NO: 2214766 - DNA, 25 bp, Homo sapien
ttgacatcattaacactgccctgct

SEQ ID NO: 2214767 - DNA, 25 bp, Homo sapien
tgaggacaataatgatacctaatgt

SEQ ID NO: 2214768 - DNA, 25 bp, Homo sapien
gaaagctcacatagaatgcctggca

SEQ ID NO: 2214769 - DNA, 25 bp, Homo sapien
atagaaacaacaggaccatggaccc

SEQ ID NO: 2214770 - DNA, 25 bp, Homo sapien
caggaccatggacccagaacaaact

SEQ ID NO: 2214771 - DNA, 25 bp, Homo sapien
cttgagctccaaggatatgcctgga

SEQ ID NO: 2214772 - DNA, 25 bp, Homo sapien
gaacacaaactgtgatccctttatg

SEQ ID NO: 2214773 - DNA, 25 bp, Homo sapien
tttatgggagcagctacagcccagc

SEQ ID NO: 2214774 - DNA, 25 bp, Homo sapien
ccaaggatatgcctggaagtgttct

SEQ ID NO: 2214775 - DNA, 25 bp, Homo sapien
gctgacaagacaaagcaggatgtgg

SEQ ID NO: 2214776 - DNA, 25 bp, Homo sapien
aagcagcggctgacaagacaaagca

SEQ ID NO: 2214777 - DNA, 25 bp, Homo sapien
cggctgacaagacaaagcaggatgt

SEQ ID NO: 2214778 - DNA, 25 bp, Homo sapien
cagcggctgacaagacaaagcagga

SEQ ID NO: 2214779 - DNA, 25 bp, Homo sapien
gagggttcacctgccaattctgagt

SEQ ID NO: 2214780 - DNA, 25 bp, Homo sapien
tgtttctgaagatcaccaagtgacc

SEQ ID NO: 2214781 - DNA, 25 bp, Homo sapien
cctgttccgacagttgaggccagag

SEQ ID NO: 2214782 - DNA, 25 bp, Homo sapien
cagtgagtagcccagctagagggca

SEQ ID NO: 2214783 - DNA, 25 bp, Homo sapien
gagcctcaatgtcttatctgtcaaa

SEQ ID NO: 2214784 - DNA, 25 bp, Homo sapien
tgagaaggtcacagattcaggctga

SEQ ID NO: 2214785 - DNA, 25 bp, Homo sapien
gatgaaggtagactttgggctcaca

SEQ ID NO: 2214786 - DNA, 25 bp, Homo sapien
tgtctggtcatagctcaggactgag

SEQ ID NO: 2214787 - DNA, 25 bp, Homo sapien
aagagcatgggactaaggacaggct

SEQ ID NO: 2214788 - DNA, 25 bp, Homo sapien
ggctatctggattctggccccagct

SEQ ID NO: 2214789 - DNA, 25 bp, Homo sapien
tctgacttgcagcataatacctggg

SEQ ID NO: 2214790 - DNA, 25 bp, Homo sapien
gattaggactagattcactgcttat

SEQ ID NO: 2214791 - DNA, 25 bp, Homo sapien
gtcgcatccctctggtatgcttggg

SEQ ID NO: 2214792 - DNA, 25 bp, Homo sapien
ctgtggtccagacttctccgagacc

SEQ ID NO: 2214793 - DNA, 25 bp, Homo sapien
tgttactgccggcatgtgtcgcatc

SEQ ID NO: 2214794 - DNA, 25 bp, Homo sapien
cagacttctccgagaccagcagctt

SEQ ID NO: 2214795 - DNA, 25 bp, Homo sapien
caaatgccatcagggttaaagaaag

SEQ ID NO: 2214796 - DNA, 25 bp, Homo sapien
gggactaagagggtcttggcatcca

SEQ ID NO: 2214797 - DNA, 25 bp, Homo sapien
ctagtctggagcacacatctggcaa

SEQ ID NO: 2214798 - DNA, 25 bp, Homo sapien
tacaaatacctctgtgtcccaaatg

SEQ ID NO: 2214799 - DNA, 25 bp, Homo sapien
gaagtattcgagagtcaacaggaca

SEQ ID NO: 2214800 - DNA, 25 bp, Homo sapien
cagatcagttcacgagggctggacc

SEQ ID NO: 2214801 - DNA, 25 bp, Homo sapien
taacccaacagagggatgcagggtc

SEQ ID NO: 2214802 - DNA, 25 bp, Homo sapien
gacagctgatgtagagtccttgccc

SEQ ID NO: 2214803 - DNA, 25 bp, Homo sapien
aagggtttagaatagtgaggaaatg

SEQ ID NO: 2214804 - DNA, 25 bp, Homo sapien
acaagtaaaagttcagacaagcaga

SEQ ID NO: 2214805 - DNA, 25 bp, Homo sapien
ggcctcgcccgagattaaaaatcat

SEQ ID NO: 2214806 - DNA, 25 bp, Homo sapien
aagcagaactgaggcctcgcccgag

SEQ ID NO: 2214807 - DNA, 25 bp, Homo sapien
ttcagtttgaccatagaacccaggg

SEQ ID NO: 2214808 - DNA, 25 bp, Homo sapien
tgatgagtggccgaactgagcaacc

SEQ ID NO: 2214809 - DNA, 25 bp, Homo sapien
gaatcaggcgctaaaggcttccatg

SEQ ID NO: 2214810 - DNA, 25 bp, Homo sapien
gactcacaggaggtatggctaccat

SEQ ID NO: 2214811 - DNA, 25 bp, Homo sapien
cctgcagaaaatcggcgagcattcc

SEQ ID NO: 2214812 - DNA, 25 bp, Homo sapien
caagcaggactcaaccatccggggc

SEQ ID NO: 2214813 - DNA, 25 bp, Homo sapien
gctggcccagcaaggtgagcccaag

SEQ ID NO: 2214814 - DNA, 25 bp, Homo sapien
ggactcaaccatccggggccagtca

SEQ ID NO: 2214815 - DNA, 25 bp, Homo sapien
tcccaactgctcaaagaattcaggg

SEQ ID NO: 2214816 - DNA, 25 bp, Homo sapien
ctttaacacgggaggtgtttgcctg

SEQ ID NO: 2214817 - DNA, 25 bp, Homo sapien
gaattcagggcactttgccccagcc

SEQ ID NO: 2214818 - DNA, 25 bp, Homo sapien
gcccagtttagttggctctgagaag

SEQ ID NO: 2214819 - DNA, 25 bp, Homo sapien
ccaatagggcctgcgtgaagttctg

SEQ ID NO: 2214820 - DNA, 25 bp, Homo sapien
cagaactgagagaacggctttggca

SEQ ID NO: 2214821 - DNA, 25 bp, Homo sapien
ttggccacgatcagttcaacggtcc

SEQ ID NO: 2214822 - DNA, 25 bp, Homo sapien
gctttggcaccaggacgtcattcaa

SEQ ID NO: 2214823 - DNA, 25 bp, Homo sapien
gttgccaccgcagaacaaaggaaag

SEQ ID NO: 2214824 - DNA, 25 bp, Homo sapien
tagtatctggcaaccaacaactgac

SEQ ID NO: 2214825 - DNA, 25 bp, Homo sapien
ggagagagaaaccagttagtatctg

SEQ ID NO: 2214826 - DNA, 25 bp, Homo sapien
gtgtgcgcgcgcatgagccaagccc

SEQ ID NO: 2214827 - DNA, 25 bp, Homo sapien
tgtgtgactttgggtcagtaccttc

SEQ ID NO: 2214828 - DNA, 25 bp, Homo sapien
tgtgactttgggtcagtaccttccc

SEQ ID NO: 2214829 - DNA, 25 bp, Homo sapien
gtgtgactttgggtcagtaccttcc

SEQ ID NO: 2214830 - DNA, 25 bp, Homo sapien
ttcatattctatctgcaaagctgcc

SEQ ID NO: 2214831 - DNA, 25 bp, Homo sapien
cttcatattctatctgcaaagctgc

SEQ ID NO: 2214832 - DNA, 25 bp, Homo sapien
tcatattctatctgcaaagctgcca

SEQ ID NO: 2214833 - DNA, 25 bp, Homo sapien
acaagaggacactagtttagcaaag

SEQ ID NO: 2214834 - DNA, 25 bp, Homo sapien
tggaacaagaggacactagtttagc

SEQ ID NO: 2214835 - DNA, 25 bp, Homo sapien
gaacaagaggacactagtttagcaa

SEQ ID NO: 2214836 - DNA, 25 bp, Homo sapien
ctggaacaagaggacactagtttag

SEQ ID NO: 2214837 - DNA, 25 bp, Homo sapien
ttgagctctgccaggacacattcta

SEQ ID NO: 2214838 - DNA, 25 bp, Homo sapien
ctgttctcgcatgtaacgcccttga

SEQ ID NO: 2214839 - DNA, 25 bp, Homo sapien
tgccaggacacattctacacgtggg

SEQ ID NO: 2214840 - DNA, 25 bp, Homo sapien
tctcgcatgtaacgcccttgagctc

SEQ ID NO: 2214841 - DNA, 25 bp, Homo sapien
ggggcagatgagagcacaccaagtc

SEQ ID NO: 2214842 - DNA, 25 bp, Homo sapien
gataccagcagttctcgggctcttt

SEQ ID NO: 2214843 - DNA, 25 bp, Homo sapien
tatgataccagcagttctcgggctc

SEQ ID NO: 2214844 - DNA, 25 bp, Homo sapien
actgctcctcttcgtatgataccag

SEQ ID NO: 2214845 - DNA, 25 bp, Homo sapien
tcttcgtatgataccagcagttctc

SEQ ID NO: 2214846 - DNA, 25 bp, Homo sapien
gactcagggcctttttgcaatgaga

SEQ ID NO: 2214847 - DNA, 25 bp, Homo sapien
tctccatcggcctttacatctgact

SEQ ID NO: 2214848 - DNA, 25 bp, Homo sapien
cacctcttcgctgcctttgctgtct

SEQ ID NO: 2214849 - DNA, 25 bp, Homo sapien
acatctgactccgtacttttcccat

SEQ ID NO: 2214850 - DNA, 25 bp, Homo sapien
caggctgttctccagttggcggcac

SEQ ID NO: 2214851 - DNA, 25 bp, Homo sapien
tctggagccaatccaggacaaagta

SEQ ID NO: 2214852 - DNA, 25 bp, Homo sapien
ggcaccaataggtcttctggagcca

SEQ ID NO: 2214853 - DNA, 25 bp, Homo sapien
ggagccaatccaggacaaagtagca

SEQ ID NO: 2214854 - DNA, 25 bp, Homo sapien
tctgcggcagtcatttatatggggc

SEQ ID NO: 2214855 - DNA, 25 bp, Homo sapien
gcattttcttgtgggtcaactcatg

SEQ ID NO: 2214856 - DNA, 25 bp, Homo sapien
tgtgggtcaactcatggcgaaggtc

SEQ ID NO: 2214857 - DNA, 25 bp, Homo sapien
gaaggtcaacaatccaatccggaat

SEQ ID NO: 2214858 - DNA, 25 bp, Homo sapien
tgtccttctccctgagtatccttta

SEQ ID NO: 2214859 - DNA, 25 bp, Homo sapien
ctgtgaatgagcattaacaatcacg

SEQ ID NO: 2214860 - DNA, 25 bp, Homo sapien
cattaacaatcacgttctccagcct

SEQ ID NO: 2214861 - DNA, 25 bp, Homo sapien
tgagcattaacaatcacgttctcca

SEQ ID NO: 2214862 - DNA, 25 bp, Homo sapien
tccgggaagcgctaatgactgagag

SEQ ID NO: 2214863 - DNA, 25 bp, Homo sapien
ctcctccgggaagcgctaatgactg

SEQ ID NO: 2214864 - DNA, 25 bp, Homo sapien
cctcctccgggaagcgctaatgact

SEQ ID NO: 2214865 - DNA, 25 bp, Homo sapien
gggaagcgctaatgactgagagcat

SEQ ID NO: 2214866 - DNA, 25 bp, Homo sapien
tacacagttcacatactcctcaggg

SEQ ID NO: 2214867 - DNA, 25 bp, Homo sapien
cctctacacagttcacatactcctc

SEQ ID NO: 2214868 - DNA, 25 bp, Homo sapien
tctacacagttcacatactcctcag

SEQ ID NO: 2214869 - DNA, 25 bp, Homo sapien
acacagttcacatactcctcagggt

SEQ ID NO: 2214870 - DNA, 25 bp, Homo sapien
cttcctctctgagataagattcaca

SEQ ID NO: 2214871 - DNA, 25 bp, Homo sapien
agacacttgagggggaccttggcaa

SEQ ID NO: 2214872 - DNA, 25 bp, Homo sapien
cttggcaaactttgtcttcctctct

SEQ ID NO: 2214873 - DNA, 25 bp, Homo sapien
tcctctctgagataagattcacaaa

SEQ ID NO: 2214874 - DNA, 25 bp, Homo sapien
tgccagagggagttcgttgcctgac

SEQ ID NO: 2214875 - DNA, 25 bp, Homo sapien
cagtctaagttcatcagtgcccaag

SEQ ID NO: 2214876 - DNA, 25 bp, Homo sapien
tgccatgccatagagcagtctaagt

SEQ ID NO: 2214877 - DNA, 25 bp, Homo sapien
cgtatcaggtcagcagtagaagcca

SEQ ID NO: 2214878 - DNA, 25 bp, Homo sapien
tccacctcagaacctaggttgttgc

SEQ ID NO: 2214879 - DNA, 25 bp, Homo sapien
cacctcagaacctaggttgttgcag

SEQ ID NO: 2214880 - DNA, 25 bp, Homo sapien
acctcagaacctaggttgttgcagg

SEQ ID NO: 2214881 - DNA, 25 bp, Homo sapien
ccacctcagaacctaggttgttgca

SEQ ID NO: 2214882 - DNA, 25 bp, Homo sapien
tgcaacttatggtcgtcacagaaca

SEQ ID NO: 2214883 - DNA, 25 bp, Homo sapien
agataaaccgtcacctggtcccact

SEQ ID NO: 2214884 - DNA, 25 bp, Homo sapien
accgtgatgcggttaagcgcgtacc

SEQ ID NO: 2214885 - DNA, 25 bp, Homo sapien
agcgcgtaccgctgcaacttatggt

SEQ ID NO: 2214886 - DNA, 25 bp, Homo sapien
gccgagagtggcaacgaccctttcc

SEQ ID NO: 2214887 - DNA, 25 bp, Homo sapien
caggcgaccacgatgccgtgggccg

SEQ ID NO: 2214888 - DNA, 25 bp, Homo sapien
ccacgatgccgtgggccgagagtgg

SEQ ID NO: 2214889 - DNA, 25 bp, Homo sapien
tgccgtgggccgagagtggcaacga

SEQ ID NO: 2214890 - DNA, 25 bp, Homo sapien
ccacgcactccacacgagatccatc

SEQ ID NO: 2214891 - DNA, 25 bp, Homo sapien
gtaccacgcactccacacgagatcc

SEQ ID NO: 2214892 - DNA, 25 bp, Homo sapien
acgcactccacacgagatccatccc

SEQ ID NO: 2214893 - DNA, 25 bp, Homo sapien
ttccgtaccacgcactccacacgag

SEQ ID NO: 2214894 - DNA, 25 bp, Homo sapien
ccgctccgcacagccttcagctcag

SEQ ID NO: 2214895 - DNA, 25 bp, Homo sapien
cttcagctcagcgtgctaccctcac

SEQ ID NO: 2214896 - DNA, 25 bp, Homo sapien
ttcagctcagcgtgctaccctcact

SEQ ID NO: 2214897 - DNA, 25 bp, Homo sapien
cgcgccgctccgcacagccttcagc

SEQ ID NO: 2214898 - DNA, 25 bp, Homo sapien
actccagcgaggtataggtacaggc

SEQ ID NO: 2214899 - DNA, 25 bp, Homo sapien
gcttcctccctgagaaccctgactc

SEQ ID NO: 2214900 - DNA, 25 bp, Homo sapien
cccttccaggttctctatgggcaga

SEQ ID NO: 2214901 - DNA, 25 bp, Homo sapien
tctatgggcagacggcgaaggtctt

SEQ ID NO: 2214902 - DNA, 25 bp, Homo sapien
agataagaatactctctgaggagtc

SEQ ID NO: 2214903 - DNA, 25 bp, Homo sapien
tggcagataagaatactctctgagg

SEQ ID NO: 2214904 - DNA, 25 bp, Homo sapien
tactcttagatctttcctggcagat

SEQ ID NO: 2214905 - DNA, 25 bp, Homo sapien
gtgcacaaggcgctactcttagatc

SEQ ID NO: 2214906 - DNA, 25 bp, Homo sapien
gctttgtcccacaggacaagcagaa

SEQ ID NO: 2214907 - DNA, 25 bp, Homo sapien
gaagaattcacctggaatcagctgg

SEQ ID NO: 2214908 - DNA, 25 bp, Homo sapien
tcacccacccatcagagaagaattc

SEQ ID NO: 2214909 - DNA, 25 bp, Homo sapien
caatggatgctcagaaaacgtaaga

SEQ ID NO: 2214910 - DNA, 25 bp, Homo sapien
gcagctcggtgagacagagcaactc

SEQ ID NO: 2214911 - DNA, 25 bp, Homo sapien
cgggagacaagaactggcagctgac

SEQ ID NO: 2214912 - DNA, 25 bp, Homo sapien
agcggccagaacaggccagcgggca

SEQ ID NO: 2214913 - DNA, 25 bp, Homo sapien
gacaacctgcgctggagcggccaga

SEQ ID NO: 2214914 - DNA, 25 bp, Homo sapien
ggctctgatacttggagtagaggcc

SEQ ID NO: 2214915 - DNA, 25 bp, Homo sapien
agggtgaacaggctctgatacttgg

SEQ ID NO: 2214916 - DNA, 25 bp, Homo sapien
ggcacattcacaagctaccaaaggg

SEQ ID NO: 2214917 - DNA, 25 bp, Homo sapien
tggcacattcacaagctaccaaagg

SEQ ID NO: 2214918 - DNA, 25 bp, Homo sapien
caagtgtcctcgagaaaagagagac

SEQ ID NO: 2214919 - DNA, 25 bp, Homo sapien
aagtgtcctcgagaaaagagagact

SEQ ID NO: 2214920 - DNA, 25 bp, Homo sapien
ccaagtgtcctcgagaaaagagaga

SEQ ID NO: 2214921 - DNA, 25 bp, Homo sapien
tccaagtgtcctcgagaaaagagag

SEQ ID NO: 2214922 - DNA, 25 bp, Homo sapien
ggcggggactggtcactcaagtcca

SEQ ID NO: 2214923 - DNA, 25 bp, Homo sapien
ggagcgagcaccagaggttacccag

SEQ ID NO: 2214924 - DNA, 25 bp, Homo sapien
gaaggagcgagcaccagaggttacc

SEQ ID NO: 2214925 - DNA, 25 bp, Homo sapien
aaggcggggactggtcactcaagtc

SEQ ID NO: 2214926 - DNA, 25 bp, Homo sapien
tgctccaggctgtcgctgggctgca

SEQ ID NO: 2214927 - DNA, 25 bp, Homo sapien
gctccaggctgtcgctgggctgcac

SEQ ID NO: 2214928 - DNA, 25 bp, Homo sapien
ctgctccaggctgtcgctgggctgc

SEQ ID NO: 2214929 - DNA, 25 bp, Homo sapien
gctggctgaagaaggacgtggtgct

SEQ ID NO: 2214930 - DNA, 25 bp, Homo sapien
gctgctggctgaagaaggacgtggt

SEQ ID NO: 2214931 - DNA, 25 bp, Homo sapien
cctggcccaaggacagctgctggct

SEQ ID NO: 2214932 - DNA, 25 bp, Homo sapien
ccaaggacagctgctggctgaagaa

SEQ ID NO: 2214933 - DNA, 25 bp, Homo sapien
gtcttcactcgcctgatccccttgc

SEQ ID NO: 2214934 - DNA, 25 bp, Homo sapien
ttcactcgcctgatccccttgccgt

SEQ ID NO: 2214935 - DNA, 25 bp, Homo sapien
tcgcctgatccccttgccgtcctcc

SEQ ID NO: 2214936 - DNA, 25 bp, Homo sapien
cttcgtcttcactcgcctgatcccc

SEQ ID NO: 2214937 - DNA, 25 bp, Homo sapien
cctccgcagcttggggcgctgaaca

SEQ ID NO: 2214938 - DNA, 25 bp, Homo sapien
gccctgcctccgcagcttggggcgc

SEQ ID NO: 2214939 - DNA, 25 bp, Homo sapien
ctgcctccgcagcttggggcgctga

SEQ ID NO: 2214940 - DNA, 25 bp, Homo sapien
tgcctccgcagcttggggcgctgaa

SEQ ID NO: 2214941 - DNA, 25 bp, Homo sapien
ctgagggcgagccagttgcactgtc

SEQ ID NO: 2214942 - DNA, 25 bp, Homo sapien
tgtcctgggggcctgcgggctccgc

SEQ ID NO: 2214943 - DNA, 25 bp, Homo sapien
gtcctgggggcctgcgggctccgcc

SEQ ID NO: 2214944 - DNA, 25 bp, Homo sapien
agggcgagccagttgcactgtcctg

SEQ ID NO: 2214945 - DNA, 25 bp, Homo sapien
ggcacacccatagaagggcagcttg

SEQ ID NO: 2214946 - DNA, 25 bp, Homo sapien
tgaccccgctgtccctgtcgaactc

SEQ ID NO: 2214947 - DNA, 25 bp, Homo sapien
tgctgtccacgacgtgcacaccttc

SEQ ID NO: 2214948 - DNA, 25 bp, Homo sapien
gtaggtcacgagctgcacgcggcac

SEQ ID NO: 2214949 - DNA, 25 bp, Homo sapien
aacacgttccttcggaactgcagga

SEQ ID NO: 2214950 - DNA, 25 bp, Homo sapien
agaacacgttccttcggaactgcag

SEQ ID NO: 2214951 - DNA, 25 bp, Homo sapien
acgttccttcggaactgcaggaaag

SEQ ID NO: 2214952 - DNA, 25 bp, Homo sapien
gaagaacacgttccttcggaactgc

SEQ ID NO: 2214953 - DNA, 25 bp, Homo sapien
cactggcgtcccagcttgtagggct

SEQ ID NO: 2214954 - DNA, 25 bp, Homo sapien
actggcgtcccagcttgtagggctg

SEQ ID NO: 2214955 - DNA, 25 bp, Homo sapien
ccactggcgtcccagcttgtagggc

SEQ ID NO: 2214956 - DNA, 25 bp, Homo sapien
cagccagagcgcgaagacatccagg

SEQ ID NO: 2214957 - DNA, 25 bp, Homo sapien
gagaccagccagagcgcgaagacat

SEQ ID NO: 2214958 - DNA, 25 bp, Homo sapien
agcgcgaagacatccagggcgatgt

SEQ ID NO: 2214959 - DNA, 25 bp, Homo sapien
agcgagggcaggttctccacagcca

SEQ ID NO: 2214960 - DNA, 25 bp, Homo sapien
ctcgggctcccacggaggacacgct

SEQ ID NO: 2214961 - DNA, 25 bp, Homo sapien
acggaggacacgctgcttcggtggg

SEQ ID NO: 2214962 - DNA, 25 bp, Homo sapien
cggaggacacgctgcttcggtggga

SEQ ID NO: 2214963 - DNA, 25 bp, Homo sapien
gtcgcagagcccgccacctgagagg

SEQ ID NO: 2214964 - DNA, 25 bp, Homo sapien
gcagagcccgccacctgagaggcaa

SEQ ID NO: 2214965 - DNA, 25 bp, Homo sapien
cagggtcgcagagcccgccacctga

SEQ ID NO: 2214966 - DNA, 25 bp, Homo sapien
gagcccgccacctgagaggcaaggc

SEQ ID NO: 2214967 - DNA, 25 bp, Homo sapien
tctggtccagaagacaacactttcc

SEQ ID NO: 2214968 - DNA, 25 bp, Homo sapien
tttaggcaccagtctgaggagaggc

SEQ ID NO: 2214969 - DNA, 25 bp, Homo sapien
cgagagcaccaacacttatttaggc

SEQ ID NO: 2214970 - DNA, 25 bp, Homo sapien
gaggaaatcgtcatcgaggctgcac

SEQ ID NO: 2214971 - DNA, 25 bp, Homo sapien
gatagatactttgtgcatccagggt

SEQ ID NO: 2214972 - DNA, 25 bp, Homo sapien
tggcaacccttctaccttgtgggaa

SEQ ID NO: 2214973 - DNA, 25 bp, Homo sapien
aagtgttgacatagctcttaggcca

SEQ ID NO: 2214974 - DNA, 25 bp, Homo sapien
tgcctaatgacacagataccagatc

SEQ ID NO: 2214975 - DNA, 25 bp, Homo sapien
gcacaagaagtcttggcatctgttt

SEQ ID NO: 2214976 - DNA, 25 bp, Homo sapien
agcacaagaagtcttggcatctgtt

SEQ ID NO: 2214977 - DNA, 25 bp, Homo sapien
aagcacaagaagtcttggcatctgt

SEQ ID NO: 2214978 - DNA, 25 bp, Homo sapien
tatactcccctaacaatggaggctg

SEQ ID NO: 2214979 - DNA, 25 bp, Homo sapien
tgaacaggcatcattagaggccgga

SEQ ID NO: 2214980 - DNA, 25 bp, Homo sapien
catagcctgttccacaagaggttgg

SEQ ID NO: 2214981 - DNA, 25 bp, Homo sapien
tctgtgcggaactgagccaaatgga

SEQ ID NO: 2214982 - DNA, 25 bp, Homo sapien
caggtagttcctggtcacaagcagt

SEQ ID NO: 2214983 - DNA, 25 bp, Homo sapien
tgtgataccatcacatgggaatgtg

SEQ ID NO: 2214984 - DNA, 25 bp, Homo sapien
gaggtagatggtttatcccagtctg

SEQ ID NO: 2214985 - DNA, 25 bp, Homo sapien
aagcagttggtacgccctcaggaat

SEQ ID NO: 2214986 - DNA, 25 bp, Homo sapien
ttagccgagatcatgagatcgtgcc

SEQ ID NO: 2214987 - DNA, 25 bp, Homo sapien
agttagccgagatcatgagatcgtg

SEQ ID NO: 2214988 - DNA, 25 bp, Homo sapien
tagccgagatcatgagatcgtgcca

SEQ ID NO: 2214989 - DNA, 25 bp, Homo sapien
gccgagatcatgagatcgtgccatt

SEQ ID NO: 2214990 - DNA, 25 bp, Homo sapien
taacccaggtcttgacaccagctgt

SEQ ID NO: 2214991 - DNA, 25 bp, Homo sapien
cccttggagctgtaaaccagagagc

SEQ ID NO: 2214992 - DNA, 25 bp, Homo sapien
gggattctggcctagtcccttccac

SEQ ID NO: 2214993 - DNA, 25 bp, Homo sapien
caccagctgttctgtcccttggagc

SEQ ID NO: 2214994 - DNA, 25 bp, Homo sapien
cattgctgtgaattagctcacttgg

SEQ ID NO: 2214995 - DNA, 25 bp, Homo sapien
ccttgaggagtcttgtgtgcattgc

SEQ ID NO: 2214996 - DNA, 25 bp, Homo sapien
gggtttatgctcaatccatgttcta

SEQ ID NO: 2214997 - DNA, 25 bp, Homo sapien
tgcagtgcccctagcttagagcctc

SEQ ID NO: 2214998 - DNA, 25 bp, Homo sapien
ttatagaaggaagtgtttcaggcct

SEQ ID NO: 2214999 - DNA, 25 bp, Homo sapien
gttgaattgctctaggtttggttgc

SEQ ID NO: 2215000 - DNA, 25 bp, Homo sapien
gctctaggtttggttgctccacatt

SEQ ID NO: 2215001 - DNA, 25 bp, Homo sapien
ggaagtgtttcaggcctgattgttc

SEQ ID NO: 2215002 - DNA, 25 bp, Homo sapien
ttagatttcatcctctggttctgga

SEQ ID NO: 2215003 - DNA, 25 bp, Homo sapien
tagatttcatcctctggttctggaa

SEQ ID NO: 2215004 - DNA, 25 bp, Homo sapien
agatttcatcctctggttctggaac

SEQ ID NO: 2215005 - DNA, 25 bp, Homo sapien
acacagctggttggaagagaacaga

SEQ ID NO: 2215006 - DNA, 25 bp, Homo sapien
ctttgtagctgaggttcaggatgtt

SEQ ID NO: 2215007 - DNA, 25 bp, Homo sapien
gaggctgaagtatttctgtctctgc

SEQ ID NO: 2215008 - DNA, 25 bp, Homo sapien
ctatcattgagtacacacagctggt

SEQ ID NO: 2215009 - DNA, 25 bp, Homo sapien
caaattacaggtgtaggtgaaaagt

SEQ ID NO: 2215010 - DNA, 25 bp, Homo sapien
gtgtaggtgaaaagtctttacagtc

SEQ ID NO: 2215011 - DNA, 25 bp, Homo sapien
tacaggtgtaggtgaaaagtcttta

SEQ ID NO: 2215012 - DNA, 25 bp, Homo sapien
ccacaaattacaggtgtaggtgaaa

SEQ ID NO: 2215013 - DNA, 25 bp, Homo sapien
acttactcaaaaccgctcaactaca

SEQ ID NO: 2215014 - DNA, 25 bp, Homo sapien
gcgctaaatgcccacaagagaaggc

SEQ ID NO: 2215015 - DNA, 25 bp, Homo sapien
gggacacattcaaagcagtatgtag

SEQ ID NO: 2215016 - DNA, 25 bp, Homo sapien
gacacattcaaagcagtatgtagag

SEQ ID NO: 2215017 - DNA, 25 bp, Homo sapien
catagggctctccacaagtctttgt

SEQ ID NO: 2215018 - DNA, 25 bp, Homo sapien
ggcaagaatggctcgcagaccaatc

SEQ ID NO: 2215019 - DNA, 25 bp, Homo sapien
aggcaagaatggctcgcagaccaat

SEQ ID NO: 2215020 - DNA, 25 bp, Homo sapien
ggaggcaagaatggctcgcagacca

SEQ ID NO: 2215021 - DNA, 25 bp, Homo sapien
caagaatggctcgcagaccaatcct

SEQ ID NO: 2215022 - DNA, 25 bp, Homo sapien
aataaatttgtgctcaggatcatgc

SEQ ID NO: 2215023 - DNA, 25 bp, Homo sapien
aaatttgtgctcaggatcatgctta

SEQ ID NO: 2215024 - DNA, 25 bp, Homo sapien
gtaaataaatttgtgctcaggatca

SEQ ID NO: 2215025 - DNA, 25 bp, Homo sapien
taaatttgtgctcaggatcatgctt

SEQ ID NO: 2215026 - DNA, 25 bp, Homo sapien
tatccagggatctatttgcatctct

SEQ ID NO: 2215027 - DNA, 25 bp, Homo sapien
ctttttctcgtgtaagtggatgtga

SEQ ID NO: 2215028 - DNA, 25 bp, Homo sapien
tatgtggtgatatattgctaaggtc

SEQ ID NO: 2215029 - DNA, 25 bp, Homo sapien
gatatattgctaaggtcacacattt

SEQ ID NO: 2215030 - DNA, 25 bp, Homo sapien
tagaaatattgttgagcatgagcta

SEQ ID NO: 2215031 - DNA, 25 bp, Homo sapien
aaatattgttgagcatgagctatac

SEQ ID NO: 2215032 - DNA, 25 bp, Homo sapien
agaaatattgttgagcatgagctat

SEQ ID NO: 2215033 - DNA, 25 bp, Homo sapien
gaaatattgttgagcatgagctata

SEQ ID NO: 2215034 - DNA, 25 bp, Homo sapien
catggtttaaatggttgctcttcct

SEQ ID NO: 2215035 - DNA, 25 bp, Homo sapien
tgccctggagatacatggtttaaat

SEQ ID NO: 2215036 - DNA, 25 bp, Homo sapien
ccctggagatacatggtttaaatgg

SEQ ID NO: 2215037 - DNA, 25 bp, Homo sapien
gatacatggtttaaatggttgctct

SEQ ID NO: 2215038 - DNA, 25 bp, Homo sapien
ccgaaatcaaactcgggaggctccg

SEQ ID NO: 2215039 - DNA, 25 bp, Homo sapien
cgccttctccgaaatcaaactcggg

SEQ ID NO: 2215040 - DNA, 25 bp, Homo sapien
aatcaaactcgggaggctccgcagc

SEQ ID NO: 2215041 - DNA, 25 bp, Homo sapien
ttctccgaaatcaaactcgggaggc

SEQ ID NO: 2215042 - DNA, 25 bp, Homo sapien
gtcggacgcggggatccggcgcgcc

SEQ ID NO: 2215043 - DNA, 25 bp, Homo sapien
atgtcggacgcggggatccggcgcg

SEQ ID NO: 2215044 - DNA, 25 bp, Homo sapien
tagatgtcggacgcggggatccggc

SEQ ID NO: 2215045 - DNA, 25 bp, Homo sapien
ggacgcggggatccggcgcgccggc

SEQ ID NO: 2215046 - DNA, 25 bp, Homo sapien
ttcgcttgcgccctactctgcctcg

SEQ ID NO: 2215047 - DNA, 25 bp, Homo sapien
gcgccttcgcttgcgccctactctg

SEQ ID NO: 2215048 - DNA, 25 bp, Homo sapien
ctctggcgccttcgcttgcgcccta

SEQ ID NO: 2215049 - DNA, 25 bp, Homo sapien
cgcctctggcgccttcgcttgcgcc

SEQ ID NO: 2215050 - DNA, 25 bp, Homo sapien
gcctccgcctccggtgagctgactt

SEQ ID NO: 2215051 - DNA, 25 bp, Homo sapien
ctccgcctccggtgagctgacttgt

SEQ ID NO: 2215052 - DNA, 25 bp, Homo sapien
cctccgcctccggtgagctgacttg

SEQ ID NO: 2215053 - DNA, 25 bp, Homo sapien
tttctgctctaactcaatggattcc

SEQ ID NO: 2215054 - DNA, 25 bp, Homo sapien
ttgggttacagtagtttgtttctgc

SEQ ID NO: 2215055 - DNA, 25 bp, Homo sapien
gggactccactaaatgctgcagtgt

SEQ ID NO: 2215056 - DNA, 25 bp, Homo sapien
ccagagcaccctgtggctagaatca

SEQ ID NO: 2215057 - DNA, 25 bp, Homo sapien
agtccgtagaaggatgaaatgggcc

SEQ ID NO: 2215058 - DNA, 25 bp, Homo sapien
ttccagttccagtccgtagaaggat

SEQ ID NO: 2215059 - DNA, 25 bp, Homo sapien
cacccctatagaagaagccaggttc

SEQ ID NO: 2215060 - DNA, 25 bp, Homo sapien
gcctcacccctatagaagaagccag

SEQ ID NO: 2215061 - DNA, 25 bp, Homo sapien
cattgcaggcattgacttgtgctct

SEQ ID NO: 2215062 - DNA, 25 bp, Homo sapien
gagcagatgcctgtgagggttccct

SEQ ID NO: 2215063 - DNA, 25 bp, Homo sapien
tggtgcctcagacccatctctgtgg

SEQ ID NO: 2215064 - DNA, 25 bp, Homo sapien
catctatcaactcaacttggaggag

SEQ ID NO: 2215065 - DNA, 25 bp, Homo sapien
tatgggggttcagcctgcttctttg

SEQ ID NO: 2215066 - DNA, 25 bp, Homo sapien
ttatgggggttcagcctgcttcttt

SEQ ID NO: 2215067 - DNA, 25 bp, Homo sapien
cttctttgcctggacttcagtcagc

SEQ ID NO: 2215068 - DNA, 25 bp, Homo sapien
tgttccttggatgccttggccagtg

SEQ ID NO: 2215069 - DNA, 25 bp, Homo sapien
tccttcctgagtggttgagcctgct

SEQ ID NO: 2215070 - DNA, 25 bp, Homo sapien
tatggcctgttcctcatatggctca

SEQ ID NO: 2215071 - DNA, 25 bp, Homo sapien
ctttagctggcttgacgtgtgtctc

SEQ ID NO: 2215072 - DNA, 25 bp, Homo sapien
tcagtcagttcagacagcaccagag

SEQ ID NO: 2215073 - DNA, 25 bp, Homo sapien
caactggttcggttagtgccagggc

SEQ ID NO: 2215074 - DNA, 25 bp, Homo sapien
gactcagctggttcaacaagtgccg

SEQ ID NO: 2215075 - DNA, 25 bp, Homo sapien
ccataactcagtgggttcagcctgc

SEQ ID NO: 2215076 - DNA, 25 bp, Homo sapien
ctcagcttgtgcattggccatctcc

SEQ ID NO: 2215077 - DNA, 25 bp, Homo sapien
tgggcaagttcagtctgcatctctg

SEQ ID NO: 2215078 - DNA, 25 bp, Homo sapien
ttccataggctcagcttgtgcattg

SEQ ID NO: 2215079 - DNA, 25 bp, Homo sapien
tcctcccgaagctgaaactcatgaa

SEQ ID NO: 2215080 - DNA, 25 bp, Homo sapien
gctcttttgccagtcttcccatcac

SEQ ID NO: 2215081 - DNA, 25 bp, Homo sapien
cttgaacctgtgtttgtactgtctc

SEQ ID NO: 2215082 - DNA, 25 bp, Homo sapien
ccctggtattgcagcttgaacctgt

SEQ ID NO: 2215083 - DNA, 25 bp, Homo sapien
tttgagtatagacatgggtatgagg

SEQ ID NO: 2215084 - DNA, 25 bp, Homo sapien
tacagtggaatgtatggccttcact

SEQ ID NO: 2215085 - DNA, 25 bp, Homo sapien
gttcttcaggaatatatacagtgga

SEQ ID NO: 2215086 - DNA, 25 bp, Homo sapien
tgcagaaggccttaggatttgagcc

SEQ ID NO: 2215087 - DNA, 25 bp, Homo sapien
ggttgaccaatgcagggagggaggt

SEQ ID NO: 2215088 - DNA, 25 bp, Homo sapien
acactctggattctgcaaacgcgct

SEQ ID NO: 2215089 - DNA, 25 bp, Homo sapien
tctggattctgcaaacgcgcttctg

SEQ ID NO: 2215090 - DNA, 25 bp, Homo sapien
ggattctgcaaacgcgcttctgacc

SEQ ID NO: 2215091 - DNA, 25 bp, Homo sapien
gaaatcccccaacactctggattct

SEQ ID NO: 2215092 - DNA, 25 bp, Homo sapien
tgggtcacagtgcttctcatcacgt

SEQ ID NO: 2215093 - DNA, 25 bp, Homo sapien
ctgggtcacagtgcttctcatcacg

SEQ ID NO: 2215094 - DNA, 25 bp, Homo sapien
cacagctggcatttacagcctgtgt

SEQ ID NO: 2215095 - DNA, 25 bp, Homo sapien
gcacagctggcatttacagcctgtg

SEQ ID NO: 2215096 - DNA, 25 bp, Homo sapien
atcaggaactgaaccagttgggtaa

SEQ ID NO: 2215097 - DNA, 25 bp, Homo sapien
ctgagagcaaggcctgtggtcagtg

SEQ ID NO: 2215098 - DNA, 25 bp, Homo sapien
agagcaaggcctgtggtcagtggat

SEQ ID NO: 2215099 - DNA, 25 bp, Homo sapien
gcaaggcctgtggtcagtggatggg

SEQ ID NO: 2215100 - DNA, 25 bp, Homo sapien
tgagagcaaggcctgtggtcagtgg

SEQ ID NO: 2215101 - DNA, 25 bp, Homo sapien
tagcaagttgggtgcaacacacagg

SEQ ID NO: 2215102 - DNA, 25 bp, Homo sapien
gccacaatgtggctcaggataccaa

SEQ ID NO: 2215103 - DNA, 25 bp, Homo sapien
cacacagggctaggttgaaagctat

SEQ ID NO: 2215104 - DNA, 25 bp, Homo sapien
caaagaggtactttagcagcaggca

SEQ ID NO: 2215105 - DNA, 25 bp, Homo sapien
ttctgagaagttcagggctgtgtgc

SEQ ID NO: 2215106 - DNA, 25 bp, Homo sapien
tgaaggttggttcaggtaataataa

SEQ ID NO: 2215107 - DNA, 25 bp, Homo sapien
taataataatatggctctctgttca

SEQ ID NO: 2215108 - DNA, 25 bp, Homo sapien
tctgttcacatgaacagttctgaga

SEQ ID NO: 2215109 - DNA, 25 bp, Homo sapien
ggcaggtgccctctaatccaatttc

SEQ ID NO: 2215110 - DNA, 25 bp, Homo sapien
acaatgactctctaaccatggacac

SEQ ID NO: 2215111 - DNA, 25 bp, Homo sapien
cagatgcagccacaaacaatgactc

SEQ ID NO: 2215112 - DNA, 25 bp, Homo sapien
tggaagatccccagatgttgggcag

SEQ ID NO: 2215113 - DNA, 25 bp, Homo sapien
ctttgcctgaccacatgatcttaat

SEQ ID NO: 2215114 - DNA, 25 bp, Homo sapien
catgatcttaatggtggcaagtcag

SEQ ID NO: 2215115 - DNA, 25 bp, Homo sapien
gcagaactcaactccactctaacat

SEQ ID NO: 2215116 - DNA, 25 bp, Homo sapien
cagaactcaactccactctaacatt

SEQ ID NO: 2215117 - DNA, 25 bp, Homo sapien
ctgagtggtcctggaggtgattggc

SEQ ID NO: 2215118 - DNA, 25 bp, Homo sapien
tttgtttgggcaatgttgtatgagc

SEQ ID NO: 2215119 - DNA, 25 bp, Homo sapien
ctgggtagtttgctcttgtgcttca

SEQ ID NO: 2215120 - DNA, 25 bp, Homo sapien
atggcacaggtttgtttgggcaatg

SEQ ID NO: 2215121 - DNA, 25 bp, Homo sapien
gggtcttcatggagtacaccaagcc

SEQ ID NO: 2215122 - DNA, 25 bp, Homo sapien
gtgtttcctgaaaaaagcagccatg

SEQ ID NO: 2215123 - DNA, 25 bp, Homo sapien
gaatcagagttgaggccaggaacca

SEQ ID NO: 2215124 - DNA, 25 bp, Homo sapien
ccccacgaggctctgtagactgtgg

SEQ ID NO: 2215125 - DNA, 25 bp, Homo sapien
tgcttctgctcttggatattactgt

SEQ ID NO: 2215126 - DNA, 25 bp, Homo sapien
tttggacaatgattctgcttctgct

SEQ ID NO: 2215127 - DNA, 25 bp, Homo sapien
tatgccttgacctctgtggactcct

SEQ ID NO: 2215128 - DNA, 25 bp, Homo sapien
gggatatattgctcatatttcagag

SEQ ID NO: 2215129 - DNA, 25 bp, Homo sapien
catatttcagagtgaaggtttcaaa

SEQ ID NO: 2215130 - DNA, 25 bp, Homo sapien
cacctgaacatcagttcttgggtta

SEQ ID NO: 2215131 - DNA, 25 bp, Homo sapien
tatcaagggctaactggagcagagt

SEQ ID NO: 2215132 - DNA, 25 bp, Homo sapien
gtatatcaagggctaactggagcag

SEQ ID NO: 2215133 - DNA, 25 bp, Homo sapien
tcaagggctaactggagcagagtga

SEQ ID NO: 2215134 - DNA, 25 bp, Homo sapien
atagtatatcaagggctaactggag

SEQ ID NO: 2215135 - DNA, 25 bp, Homo sapien
cactcggagtatggcacctgaagaa

SEQ ID NO: 2215136 - DNA, 25 bp, Homo sapien
tcctgtgagagtgcctagatcagaa

SEQ ID NO: 2215137 - DNA, 25 bp, Homo sapien
ctgaagaaaactggcctggccgatc

SEQ ID NO: 2215138 - DNA, 25 bp, Homo sapien
gaaaagtaatgcaccactcggagta

SEQ ID NO: 2215139 - DNA, 25 bp, Homo sapien
catgaaacaggtgtctgcacagatc

SEQ ID NO: 2215140 - DNA, 25 bp, Homo sapien
cagaagacgaccacaatgttggttg

SEQ ID NO: 2215141 - DNA, 25 bp, Homo sapien
tgtatgccaactgatcatgaaacag

SEQ ID NO: 2215142 - DNA, 25 bp, Homo sapien
aactgatcatgaaacaggtgtctgc

SEQ ID NO: 2215143 - DNA, 25 bp, Homo sapien
gggcccatggagagttcccatcaga

SEQ ID NO: 2215144 - DNA, 25 bp, Homo sapien
gactgggcccatggagagttcccat

SEQ ID NO: 2215145 - DNA, 25 bp, Homo sapien
gtctcatcatccgtgacgaaggtgg

SEQ ID NO: 2215146 - DNA, 25 bp, Homo sapien
atcatccgtgacgaaggtggactgg

SEQ ID NO: 2215147 - DNA, 25 bp, Homo sapien
tcatttcttgggctcctttggacag

SEQ ID NO: 2215148 - DNA, 25 bp, Homo sapien
ctgggctttcatttcttgggctcct

SEQ ID NO: 2215149 - DNA, 25 bp, Homo sapien
ctttcatttcttgggctcctttgga

SEQ ID NO: 2215150 - DNA, 25 bp, Homo sapien
atttcttgggctcctttggacagac

SEQ ID NO: 2215151 - DNA, 25 bp, Homo sapien
tcttcattgaagatcatagtattgg

SEQ ID NO: 2215152 - DNA, 25 bp, Homo sapien
ttgaagatcatagtattggctgcac

SEQ ID NO: 2215153 - DNA, 25 bp, Homo sapien
tcattgaagatcatagtattggctg

SEQ ID NO: 2215154 - DNA, 25 bp, Homo sapien
gatgtcttcattgaagatcatagta

SEQ ID NO: 2215155 - DNA, 25 bp, Homo sapien
ggcactactgccactttgaaagtgt

SEQ ID NO: 2215156 - DNA, 25 bp, Homo sapien
tcactgacgctcatgtctgcattgg

SEQ ID NO: 2215157 - DNA, 25 bp, Homo sapien
gatttcactagcaatggagtttcca

SEQ ID NO: 2215158 - DNA, 25 bp, Homo sapien
gacactcctggtatcactgcagttg

SEQ ID NO: 2215159 - DNA, 25 bp, Homo sapien
tttatccagtttataccctcttcat

SEQ ID NO: 2215160 - DNA, 25 bp, Homo sapien
ctttatccagtttataccctcttca

SEQ ID NO: 2215161 - DNA, 25 bp, Homo sapien
cttcatcacacatctcctcctcaca

SEQ ID NO: 2215162 - DNA, 25 bp, Homo sapien
caccagactggaatgtgttggtccc

SEQ ID NO: 2215163 - DNA, 25 bp, Homo sapien
actggaatgtgttggtcccagttgg

SEQ ID NO: 2215164 - DNA, 25 bp, Homo sapien
cagactggaatgtgttggtcccagt

SEQ ID NO: 2215165 - DNA, 25 bp, Homo sapien
ccagactggaatgtgttggtcccag

SEQ ID NO: 2215166 - DNA, 25 bp, Homo sapien
gggtgatgctcaggcaacagggaag

SEQ ID NO: 2215167 - DNA, 25 bp, Homo sapien
atgctcaggcaacagggaagggacc

SEQ ID NO: 2215168 - DNA, 25 bp, Homo sapien
tgctcaggcaacagggaagggacca

SEQ ID NO: 2215169 - DNA, 25 bp, Homo sapien
tgatgctcaggcaacagggaaggga

SEQ ID NO: 2215170 - DNA, 25 bp, Homo sapien
gaagatactaggcaagtgcttgaat

SEQ ID NO: 2215171 - DNA, 25 bp, Homo sapien
ggtaatttaggcttcactgggtcca

SEQ ID NO: 2215172 - DNA, 25 bp, Homo sapien
agccacattttggactgaggttcct

SEQ ID NO: 2215173 - DNA, 25 bp, Homo sapien
tgaggttcctggcaccaactggtga

SEQ ID NO: 2215174 - DNA, 25 bp, Homo sapien
gctctcaagatattgctgactaagc

SEQ ID NO: 2215175 - DNA, 25 bp, Homo sapien
ctgactaagctgtgtgcctagatct

SEQ ID NO: 2215176 - DNA, 25 bp, Homo sapien
tgctcaaaagcctagtgggaaaggg

SEQ ID NO: 2215177 - DNA, 25 bp, Homo sapien
ttttagcaggtgagagtccccttcc

SEQ ID NO: 2215178 - DNA, 25 bp, Homo sapien
gccaagtttgtctcctgatgtttgc

SEQ ID NO: 2215179 - DNA, 25 bp, Homo sapien
gctgcttctgctaccagttcctttt

SEQ ID NO: 2215180 - DNA, 25 bp, Homo sapien
tgcttctgctaccagttcctttttt

SEQ ID NO: 2215181 - DNA, 25 bp, Homo sapien
caaatctttgccaagtttgtctcct

SEQ ID NO: 2215182 - DNA, 25 bp, Homo sapien
ggttattctcagtgttgatttccta

SEQ ID NO: 2215183 - DNA, 25 bp, Homo sapien
tgtagtctgtcttggcgaatgttcc

SEQ ID NO: 2215184 - DNA, 25 bp, Homo sapien
gatttcctatgttattccacagtgg

SEQ ID NO: 2215185 - DNA, 25 bp, Homo sapien
actgtatctcggaagttttgatagg

SEQ ID NO: 2215186 - DNA, 25 bp, Homo sapien
tcctaagtttgttcatttaacacaa

SEQ ID NO: 2215187 - DNA, 25 bp, Homo sapien
ttttctgcgtgttaaagaagcttgt

SEQ ID NO: 2215188 - DNA, 25 bp, Homo sapien
atctctgtttgattgggttaattca

SEQ ID NO: 2215189 - DNA, 25 bp, Homo sapien
tccctccaatatgctttccaaacgt

SEQ ID NO: 2215190 - DNA, 25 bp, Homo sapien
caccctctaatagctagcttgtttg

SEQ ID NO: 2215191 - DNA, 25 bp, Homo sapien
tggctagatgttttgtggaagatct

SEQ ID NO: 2215192 - DNA, 25 bp, Homo sapien
gttttgtggaagatcttagaattgc

SEQ ID NO: 2215193 - DNA, 25 bp, Homo sapien
caaccaccctctaatagctagcttg

SEQ ID NO: 2215194 - DNA, 25 bp, Homo sapien
tccccctctatcagatcggcttcct

SEQ ID NO: 2215195 - DNA, 25 bp, Homo sapien
cccctctatcagatcggcttcctcc

SEQ ID NO: 2215196 - DNA, 25 bp, Homo sapien
ccctctatcagatcggcttcctcca

SEQ ID NO: 2215197 - DNA, 25 bp, Homo sapien
ctccccctctatcagatcggcttcc

SEQ ID NO: 2215198 - DNA, 25 bp, Homo sapien
gtgttccacggcttgaactgctgta

SEQ ID NO: 2215199 - DNA, 25 bp, Homo sapien
ctcttggtgttccacggcttgaact

SEQ ID NO: 2215200 - DNA, 25 bp, Homo sapien
gccaacctgatcacgaccacttgag

SEQ ID NO: 2215201 - DNA, 25 bp, Homo sapien
tgatcacgaccacttgagtagagat

SEQ ID NO: 2215202 - DNA, 25 bp, Homo sapien
ggcgccctcgtgtaggtggagctct

SEQ ID NO: 2215203 - DNA, 25 bp, Homo sapien
gggggcgccctcgtgtaggtggagc

SEQ ID NO: 2215204 - DNA, 25 bp, Homo sapien
agatgggggcgccctcgtgtaggtg

SEQ ID NO: 2215205 - DNA, 25 bp, Homo sapien
tccaccataagatgggggcgccctc

SEQ ID NO: 2215206 - DNA, 25 bp, Homo sapien
caagagggcagcgattcccttcgag

SEQ ID NO: 2215207 - DNA, 25 bp, Homo sapien
tggacctcggtaactatctcttcca

SEQ ID NO: 2215208 - DNA, 25 bp, Homo sapien
aggtggacctcggtaactatctctt

SEQ ID NO: 2215209 - DNA, 25 bp, Homo sapien
ctacaagagggcagcgattcccttc

SEQ ID NO: 2215210 - DNA, 25 bp, Homo sapien
gctactgcgaactggtcctgaaggt

SEQ ID NO: 2215211 - DNA, 25 bp, Homo sapien
ccattccactgctactgcgaactgg

SEQ ID NO: 2215212 - DNA, 25 bp, Homo sapien
actgcgaactggtcctgaaggtgca

SEQ ID NO: 2215213 - DNA, 25 bp, Homo sapien
ctgctactgcgaactggtcctgaag

SEQ ID NO: 2215214 - DNA, 25 bp, Homo sapien
cttggtggtggtcctctttttactg

SEQ ID NO: 2215215 - DNA, 25 bp, Homo sapien
cacttcttggtggtggtcctctttt

SEQ ID NO: 2215216 - DNA, 25 bp, Homo sapien
ccccacttcttggtggtggtcctct

SEQ ID NO: 2215217 - DNA, 25 bp, Homo sapien
ccacttcttggtggtggtcctcttt

SEQ ID NO: 2215218 - DNA, 25 bp, Homo sapien
ctggaagaactcatgttaaaattca

SEQ ID NO: 2215219 - DNA, 25 bp, Homo sapien
tggaagaactcatgttaaaattcat

SEQ ID NO: 2215220 - DNA, 25 bp, Homo sapien
atgttaaaattcatggaatatccac

SEQ ID NO: 2215221 - DNA, 25 bp, Homo sapien
ctcatgttaaaattcatggaatatc

SEQ ID NO: 2215222 - DNA, 25 bp, Homo sapien
catccatgtgtcctccccgtgaggg

SEQ ID NO: 2215223 - DNA, 25 bp, Homo sapien
agtcatccatgtgtcctccccgtga

SEQ ID NO: 2215224 - DNA, 25 bp, Homo sapien
tccatgtgtcctccccgtgagggag

SEQ ID NO: 2215225 - DNA, 25 bp, Homo sapien
tgtgtcctccccgtgagggaggttc

SEQ ID NO: 2215226 - DNA, 25 bp, Homo sapien
gaggcggtccacgtctaccactttc

SEQ ID NO: 2215227 - DNA, 25 bp, Homo sapien
caaatgacggtttggtggcttgttc

SEQ ID NO: 2215228 - DNA, 25 bp, Homo sapien
cactttcaaatgacggtttggtggc

SEQ ID NO: 2215229 - DNA, 25 bp, Homo sapien
taagaactcttggagggcctctact

SEQ ID NO: 2215230 - DNA, 25 bp, Homo sapien
tgcatccttagcgtctgctggtctt

SEQ ID NO: 2215231 - DNA, 25 bp, Homo sapien
gatttgttggtttcacagtctttca

SEQ ID NO: 2215232 - DNA, 25 bp, Homo sapien
ggctgcatccttagcgtctgctggt

SEQ ID NO: 2215233 - DNA, 25 bp, Homo sapien
gtctgctggtctttcaaaggtgata

SEQ ID NO: 2215234 - DNA, 25 bp, Homo sapien
aaaactttcctaggcgatctgcttc

SEQ ID NO: 2215235 - DNA, 25 bp, Homo sapien
aaactttcctaggcgatctgcttca

SEQ ID NO: 2215236 - DNA, 25 bp, Homo sapien
aaaaactttcctaggcgatctgctt

SEQ ID NO: 2215237 - DNA, 25 bp, Homo sapien
tccggtgagtcggaggagtgacaat

SEQ ID NO: 2215238 - DNA, 25 bp, Homo sapien
gtgacaatgggttcaagctccaaag

SEQ ID NO: 2215239 - DNA, 25 bp, Homo sapien
agctccaaagagctcgccgataggg

SEQ ID NO: 2215240 - DNA, 25 bp, Homo sapien
gtccgaggaccgaaccgcgaagctg

SEQ ID NO: 2215241 - DNA, 25 bp, Homo sapien
gataaaagggagatcaccacctatc

SEQ ID NO: 2215242 - DNA, 25 bp, Homo sapien
aaagggagatcaccacctatcccac

SEQ ID NO: 2215243 - DNA, 25 bp, Homo sapien
tgataaaagggagatcaccacctat

SEQ ID NO: 2215244 - DNA, 25 bp, Homo sapien
taaaagggagatcaccacctatccc

SEQ ID NO: 2215245 - DNA, 25 bp, Homo sapien
tcacgagcgttgggttcttcggcaa

SEQ ID NO: 2215246 - DNA, 25 bp, Homo sapien
cacgagcgttgggttcttcggcaac

SEQ ID NO: 2215247 - DNA, 25 bp, Homo sapien
atggttaatttccatttcctgcaca

SEQ ID NO: 2215248 - DNA, 25 bp, Homo sapien
catggttaatttccatttcctgcac

SEQ ID NO: 2215249 - DNA, 25 bp, Homo sapien
gagtgtgtggacacaagccacttgc

SEQ ID NO: 2215250 - DNA, 25 bp, Homo sapien
ctatgcatagcaatcactagggttg

SEQ ID NO: 2215251 - DNA, 25 bp, Homo sapien
gcaatcactagggttgaggtagagt

SEQ ID NO: 2215252 - DNA, 25 bp, Homo sapien
ggacacaagccacttgcacaggaag

SEQ ID NO: 2215253 - DNA, 25 bp, Homo sapien
tcctggctgttagtggggacttcca

SEQ ID NO: 2215254 - DNA, 25 bp, Homo sapien
ggagactgcaaacatgaggcattaa

SEQ ID NO: 2215255 - DNA, 25 bp, Homo sapien
tgaggcattaagaaaccatccacct

SEQ ID NO: 2215256 - DNA, 25 bp, Homo sapien
gcaaacatgaggcattaagaaacca

SEQ ID NO: 2215257 - DNA, 25 bp, Homo sapien
aacacagaagcttcttgctcacggc

SEQ ID NO: 2215258 - DNA, 25 bp, Homo sapien
tttcctgttgaagacaccaagggcc

SEQ ID NO: 2215259 - DNA, 25 bp, Homo sapien
cagaaagcccaattccatctggccc

SEQ ID NO: 2215260 - DNA, 25 bp, Homo sapien
gacaccaagggcccttcaaaacaca

SEQ ID NO: 2215261 - DNA, 25 bp, Homo sapien
gggttcagtgatcccaaatgttgca

SEQ ID NO: 2215262 - DNA, 25 bp, Homo sapien
tgggatttttagcaacaggatctga

SEQ ID NO: 2215263 - DNA, 25 bp, Homo sapien
gagaagggaggcaaaataaccaatg

SEQ ID NO: 2215264 - DNA, 25 bp, Homo sapien
tgattgttgccaagggaattctccc

SEQ ID NO: 2215265 - DNA, 25 bp, Homo sapien
tgccagctggatacaaggatgctca

SEQ ID NO: 2215266 - DNA, 25 bp, Homo sapien
caaggatgctcaccaagcaccaagt

SEQ ID NO: 2215267 - DNA, 25 bp, Homo sapien
gatatgacgaatggactgccagctg

SEQ ID NO: 2215268 - DNA, 25 bp, Homo sapien
tatgtgactttgcaggaactgaggc

SEQ ID NO: 2215269 - DNA, 25 bp, Homo sapien
tttcctgtaggaacactttctccat

SEQ ID NO: 2215270 - DNA, 25 bp, Homo sapien
ctctccccttttccacatgtctttt

SEQ ID NO: 2215271 - DNA, 25 bp, Homo sapien
ttttcctgtaggaacactttctcca

SEQ ID NO: 2215272 - DNA, 25 bp, Homo sapien
tttccacatgtcttttcctgtagga

SEQ ID NO: 2215273 - DNA, 25 bp, Homo sapien
tagcacctcgtaaattgtcaatgaa

SEQ ID NO: 2215274 - DNA, 25 bp, Homo sapien
ttgattgttgtctcccctaccacag

SEQ ID NO: 2215275 - DNA, 25 bp, Homo sapien
tccctgggccctggtatgtatgcct

SEQ ID NO: 2215276 - DNA, 25 bp, Homo sapien
cacagcccagtactttagttacaga

SEQ ID NO: 2215277 - DNA, 25 bp, Homo sapien
tccctcgggtcttctggtggcaaga

SEQ ID NO: 2215278 - DNA, 25 bp, Homo sapien
tagacttatagtggaggagcagaac

SEQ ID NO: 2215279 - DNA, 25 bp, Homo sapien
gaaccctggcctgtgaaataacaat

SEQ ID NO: 2215280 - DNA, 25 bp, Homo sapien
gatgaccaagtcctagtgctatggg

SEQ ID NO: 2215281 - DNA, 25 bp, Homo sapien
tccagcagctggcttacttgagatg

SEQ ID NO: 2215282 - DNA, 25 bp, Homo sapien
cagcagctggcttacttgagatgca

SEQ ID NO: 2215283 - DNA, 25 bp, Homo sapien
aagggcccagagccaaatccagcag

SEQ ID NO: 2215284 - DNA, 25 bp, Homo sapien
cagctggcttacttgagatgcatct

SEQ ID NO: 2215285 - DNA, 25 bp, Homo sapien
gctccagtgttggtaggcggacact

SEQ ID NO: 2215286 - DNA, 25 bp, Homo sapien
cggctccagtgttggtaggcggaca

SEQ ID NO: 2215287 - DNA, 25 bp, Homo sapien
ccagtgttggtaggcggacactttg

SEQ ID NO: 2215288 - DNA, 25 bp, Homo sapien
cagcggctccagtgttggtaggcgg

SEQ ID NO: 2215289 - DNA, 25 bp, Homo sapien
caaggactgactaggcaattatgtc

SEQ ID NO: 2215290 - DNA, 25 bp, Homo sapien
ggactgactaggcaattatgtcagc

SEQ ID NO: 2215291 - DNA, 25 bp, Homo sapien
gcagatcctggcctaatggggcatt

SEQ ID NO: 2215292 - DNA, 25 bp, Homo sapien
actgactaggcaattatgtcagcag

SEQ ID NO: 2215293 - DNA, 25 bp, Homo sapien
caggcgggcgtagttgccattgatc

SEQ ID NO: 2215294 - DNA, 25 bp, Homo sapien
catggtttctccagagtcgttggcc

SEQ ID NO: 2215295 - DNA, 25 bp, Homo sapien
tgggcgatgatctggtactcctgtc

SEQ ID NO: 2215296 - DNA, 25 bp, Homo sapien
tggccagaaactcataatccagagg

SEQ ID NO: 2215297 - DNA, 25 bp, Homo sapien
taattatcaggatcctaccacccag

SEQ ID NO: 2215298 - DNA, 25 bp, Homo sapien
gaaggcagctatgtcctgaccctga

SEQ ID NO: 2215299 - DNA, 25 bp, Homo sapien
gcctccggccttaggattgggtctg

SEQ ID NO: 2215300 - DNA, 25 bp, Homo sapien
aagagcccaccacccataagaaggg

SEQ ID NO: 2215301 - DNA, 25 bp, Homo sapien
agtggacaaaggtcaatcatggatc

SEQ ID NO: 2215302 - DNA, 25 bp, Homo sapien
aaaaggaggaatcatgtcagaagtt

SEQ ID NO: 2215303 - DNA, 25 bp, Homo sapien
tttcatggcaagtggacaaaggtca

SEQ ID NO: 2215304 - DNA, 25 bp, Homo sapien
catggcaagtggacaaaggtcaatc

SEQ ID NO: 2215305 - DNA, 25 bp, Homo sapien
ggccatggtaaaaaccaccatacag

SEQ ID NO: 2215306 - DNA, 25 bp, Homo sapien
tgttgggatgtcttccgacagagca

SEQ ID NO: 2215307 - DNA, 25 bp, Homo sapien
cagagcatgatataggccatggtaa

SEQ ID NO: 2215308 - DNA, 25 bp, Homo sapien
aaccaccatacagcacaaggagatg

SEQ ID NO: 2215309 - DNA, 25 bp, Homo sapien
tattaagattctggtcagttacttc

SEQ ID NO: 2215310 - DNA, 25 bp, Homo sapien
atcacacgctctggtcaagtcccca

SEQ ID NO: 2215311 - DNA, 25 bp, Homo sapien
gttacttctagccacaaagattctt

SEQ ID NO: 2215312 - DNA, 25 bp, Homo sapien
tccactgagccacttgagacacata

SEQ ID NO: 2215313 - DNA, 25 bp, Homo sapien
tcttgttgggactgagagagctcaa

SEQ ID NO: 2215314 - DNA, 25 bp, Homo sapien
gactctaagatatcgtgtcctagga

SEQ ID NO: 2215315 - DNA, 25 bp, Homo sapien
cagtatttgtggtcctcagagtgtc

SEQ ID NO: 2215316 - DNA, 25 bp, Homo sapien
ggtaagtttttacagcagccatgga

SEQ ID NO: 2215317 - DNA, 25 bp, Homo sapien
tgtcagtggtccagtcccaggactg

SEQ ID NO: 2215318 - DNA, 25 bp, Homo sapien
cagtggtccagtcccaggactgctt

SEQ ID NO: 2215319 - DNA, 25 bp, Homo sapien
catgtcagtggtccagtcccaggac

SEQ ID NO: 2215320 - DNA, 25 bp, Homo sapien
atccatgtcagtggtccagtcccag

SEQ ID NO: 2215321 - DNA, 25 bp, Homo sapien
ctttcaaggggtatgtcatggttgt

SEQ ID NO: 2215322 - DNA, 25 bp, Homo sapien
tcagtcttggtcttgagtagctttg

SEQ ID NO: 2215323 - DNA, 25 bp, Homo sapien
atgtcatggttgtaggtgcctcagt

SEQ ID NO: 2215324 - DNA, 25 bp, Homo sapien
catggttgtaggtgcctcagtcttg

SEQ ID NO: 2215325 - DNA, 25 bp, Homo sapien
taccctttggtgaatagtttaatgc

SEQ ID NO: 2215326 - DNA, 25 bp, Homo sapien
ctgcaaggaaaagggaaccgattga

SEQ ID NO: 2215327 - DNA, 25 bp, Homo sapien
tgcaaggaaaagggaaccgattgaa

SEQ ID NO: 2215328 - DNA, 25 bp, Homo sapien
ggtttgcagcaccttagacaggatt

SEQ ID NO: 2215329 - DNA, 25 bp, Homo sapien
ccagttttggtaagaacagcaagct

SEQ ID NO: 2215330 - DNA, 25 bp, Homo sapien
tctggtggttccctgaaagacctga

SEQ ID NO: 2215331 - DNA, 25 bp, Homo sapien
tattggtcacccagtgctaagagcc

SEQ ID NO: 2215332 - DNA, 25 bp, Homo sapien
ttctttgtgattgtacaaccattgc

SEQ ID NO: 2215333 - DNA, 25 bp, Homo sapien
tgcttgggatcctcctctcccaatt

SEQ ID NO: 2215334 - DNA, 25 bp, Homo sapien
tgcataagggcaccttttgaggtat

SEQ ID NO: 2215335 - DNA, 25 bp, Homo sapien
caagcttgtgtgttaagatgctcac

SEQ ID NO: 2215336 - DNA, 25 bp, Homo sapien
agaaccccgagcctggcattgaagg

SEQ ID NO: 2215337 - DNA, 25 bp, Homo sapien
ttgaaggctaatcctcattccctgg

SEQ ID NO: 2215338 - DNA, 25 bp, Homo sapien
gtgaagccataaccgctgccagttg

SEQ ID NO: 2215339 - DNA, 25 bp, Homo sapien
gagtcggctatcaccgcaggcttga

SEQ ID NO: 2215340 - DNA, 25 bp, Homo sapien
cacgacttggttgccatcaggagtc

SEQ ID NO: 2215341 - DNA, 25 bp, Homo sapien
gacacggagctcagtaatcttatct

SEQ ID NO: 2215342 - DNA, 25 bp, Homo sapien
tttctggacacggagctcagtaatc

SEQ ID NO: 2215343 - DNA, 25 bp, Homo sapien
agtaatcttatctctcacgacttgg

SEQ ID NO: 2215344 - DNA, 25 bp, Homo sapien
tctggcacttccaggatgggacggc

SEQ ID NO: 2215345 - DNA, 25 bp, Homo sapien
cataggtgcagggaagattcacatc

SEQ ID NO: 2215346 - DNA, 25 bp, Homo sapien
gacttcacacgtgtagtggctccgg

SEQ ID NO: 2215347 - DNA, 25 bp, Homo sapien
ggtctgagccacgttgtaccagcca

SEQ ID NO: 2215348 - DNA, 25 bp, Homo sapien
ggaaagaagcaaacgtagatggcat

SEQ ID NO: 2215349 - DNA, 25 bp, Homo sapien
aggaaagaagcaaacgtagatggca

SEQ ID NO: 2215350 - DNA, 25 bp, Homo sapien
ctgaagaggcggaacagaggaaaga

SEQ ID NO: 2215351 - DNA, 25 bp, Homo sapien
ccactgttaggtgccccaggagtag

SEQ ID NO: 2215352 - DNA, 25 bp, Homo sapien
gtagcaggcccagtaagatccccat

SEQ ID NO: 2215353 - DNA, 25 bp, Homo sapien
gtgtccactgttaggtgccccagga

SEQ ID NO: 2215354 - DNA, 25 bp, Homo sapien
ccaggagtagcaggcccagtaagat

SEQ ID NO: 2215355 - DNA, 25 bp, Homo sapien
gctacttctgtcctttcttccagcc

SEQ ID NO: 2215356 - DNA, 25 bp, Homo sapien
gagctacttctgtcctttcttccag

SEQ ID NO: 2215357 - DNA, 25 bp, Homo sapien
cacagccagagctacttctgtcctt

SEQ ID NO: 2215358 - DNA, 25 bp, Homo sapien
tacttctgtcctttcttccagcctc

SEQ ID NO: 2215359 - DNA, 25 bp, Homo sapien
ctgctaccaaagaggctcaaacttc

SEQ ID NO: 2215360 - DNA, 25 bp, Homo sapien
ggtggccgccagcgtctgtgactgc

SEQ ID NO: 2215361 - DNA, 25 bp, Homo sapien
gcgtctgtgactgcttacttccctt

SEQ ID NO: 2215362 - DNA, 25 bp, Homo sapien
tcagcccaggttgtggtcctccagc

SEQ ID NO: 2215363 - DNA, 25 bp, Homo sapien
ctcagcccaggttgtggtcctccag

SEQ ID NO: 2215364 - DNA, 25 bp, Homo sapien
tctcagcccaggttgtggtcctcca

SEQ ID NO: 2215365 - DNA, 25 bp, Homo sapien
gaggagagtcatggggaataattct

SEQ ID NO: 2215366 - DNA, 25 bp, Homo sapien
gagagtcatggggaataattctgac

SEQ ID NO: 2215367 - DNA, 25 bp, Homo sapien
gtcagggaggagagtcatggggaat

SEQ ID NO: 2215368 - DNA, 25 bp, Homo sapien
cagggaggagagtcatggggaataa

SEQ ID NO: 2215369 - DNA, 25 bp, Homo sapien
gccctttcttgacacccaacaacaa

SEQ ID NO: 2215370 - DNA, 25 bp, Homo sapien
ctttcttgacacccaacaacaaaag

SEQ ID NO: 2215371 - DNA, 25 bp, Homo sapien
ttcttgacacccaacaacaaaagga

SEQ ID NO: 2215372 - DNA, 25 bp, Homo sapien
ggccctttcttgacacccaacaaca

SEQ ID NO: 2215373 - DNA, 25 bp, Homo sapien
gagcccaggtcggaggaagtcccta

SEQ ID NO: 2215374 - DNA, 25 bp, Homo sapien
ggtatcggtagctttggcttcttcc

SEQ ID NO: 2215375 - DNA, 25 bp, Homo sapien
gatgtcatcatagatgctggccgtc

SEQ ID NO: 2215376 - DNA, 25 bp, Homo sapien
gatgctggccgtcgggggtatcggt

SEQ ID NO: 2215377 - DNA, 25 bp, Homo sapien
tttcttggttttctgtgtctcagag

SEQ ID NO: 2215378 - DNA, 25 bp, Homo sapien
tctttttcttggttttctgtgtctc

SEQ ID NO: 2215379 - DNA, 25 bp, Homo sapien
ctttttcttggttttctgtgtctca

SEQ ID NO: 2215380 - DNA, 25 bp, Homo sapien
caggctcagatgggatttctttttc

SEQ ID NO: 2215381 - DNA, 25 bp, Homo sapien
ggagcagacccactgaagctggctg

SEQ ID NO: 2215382 - DNA, 25 bp, Homo sapien
tttcaaagactcagatcttcgaggg

SEQ ID NO: 2215383 - DNA, 25 bp, Homo sapien
aatcaaatcacaaagttccccattt

SEQ ID NO: 2215384 - DNA, 25 bp, Homo sapien
ttttgtgtttcaaagactcagatct

SEQ ID NO: 2215385 - DNA, 25 bp, Homo sapien
aaatcaaatcacaaagttccccatt

SEQ ID NO: 2215386 - DNA, 25 bp, Homo sapien
ggtcactctcagacttgcccatatt

SEQ ID NO: 2215387 - DNA, 25 bp, Homo sapien
gatgtcatcattatcctcttggtca

SEQ ID NO: 2215388 - DNA, 25 bp, Homo sapien
gtcactctcagacttgcccatattg

SEQ ID NO: 2215389 - DNA, 25 bp, Homo sapien
cattatcctcttggtcactctcaga

SEQ ID NO: 2215390 - DNA, 25 bp, Homo sapien
ctattggcaatccagtggatggcga

SEQ ID NO: 2215391 - DNA, 25 bp, Homo sapien
tggatggcgattcggccgctattcc

SEQ ID NO: 2215392 - DNA, 25 bp, Homo sapien
aatccagtggatggcgattcggccg

SEQ ID NO: 2215393 - DNA, 25 bp, Homo sapien
tggcaatccagtggatggcgattcg

SEQ ID NO: 2215394 - DNA, 25 bp, Homo sapien
agaaagaggtagccacacatgacag

SEQ ID NO: 2215395 - DNA, 25 bp, Homo sapien
tcatgctattagggtctgtgtcatc

SEQ ID NO: 2215396 - DNA, 25 bp, Homo sapien
gaaagaggtagccacacatgacagc

SEQ ID NO: 2215397 - DNA, 25 bp, Homo sapien
cgttggtacttgcttggcttaggag

SEQ ID NO: 2215398 - DNA, 25 bp, Homo sapien
gacatatgcccagataagaacgtcc

SEQ ID NO: 2215399 - DNA, 25 bp, Homo sapien
taagaacgtccatgaaagacgttgg

SEQ ID NO: 2215400 - DNA, 25 bp, Homo sapien
tccatgaaagacgttggtacttgct

SEQ ID NO: 2215401 - DNA, 25 bp, Homo sapien
tgcagatctggagtctttatccttt

SEQ ID NO: 2215402 - DNA, 25 bp, Homo sapien
ggagagagcagcatacttccttgca

SEQ ID NO: 2215403 - DNA, 25 bp, Homo sapien
ccatcaatggagagagcagcatact

SEQ ID NO: 2215404 - DNA, 25 bp, Homo sapien
tccctctcctggaccatggctagag

SEQ ID NO: 2215405 - DNA, 25 bp, Homo sapien
tcgtgcatttctgccggatgtggcg

SEQ ID NO: 2215406 - DNA, 25 bp, Homo sapien
ggatgtggcggaggtcccagtctgc

SEQ ID NO: 2215407 - DNA, 25 bp, Homo sapien
atgtggcggaggtcccagtctgcaa

SEQ ID NO: 2215408 - DNA, 25 bp, Homo sapien
cattttctagtgacttctcactcac

SEQ ID NO: 2215409 - DNA, 25 bp, Homo sapien
aagcatctctactggactgggaggt

SEQ ID NO: 2215410 - DNA, 25 bp, Homo sapien
gaagcatctctactggactgggagg

SEQ ID NO: 2215411 - DNA, 25 bp, Homo sapien
gtctttgggagggacctctatcatc

SEQ ID NO: 2215412 - DNA, 25 bp, Homo sapien
tttgggagggacctctatcatcacc

SEQ ID NO: 2215413 - DNA, 25 bp, Homo sapien
gggagggacctctatcatcacccat

SEQ ID NO: 2215414 - DNA, 25 bp, Homo sapien
tcatcacccatataatcatcccgag

SEQ ID NO: 2215415 - DNA, 25 bp, Homo sapien
tcatcaaagctgtctgtggcaggac

SEQ ID NO: 2215416 - DNA, 25 bp, Homo sapien
agctgtctgtggcaggacgagccct

SEQ ID NO: 2215417 - DNA, 25 bp, Homo sapien
ttagtcatcaaagctgtctgtggca

SEQ ID NO: 2215418 - DNA, 25 bp, Homo sapien
tcaaagctgtctgtggcaggacgag

SEQ ID NO: 2215419 - DNA, 25 bp, Homo sapien
aactgagcaggaaatctaggtcctc

SEQ ID NO: 2215420 - DNA, 25 bp, Homo sapien
ggaactgagcaggaaatctaggtcc

SEQ ID NO: 2215421 - DNA, 25 bp, Homo sapien
agcaggaaatctaggtcctcaattt

SEQ ID NO: 2215422 - DNA, 25 bp, Homo sapien
tgagcaggaaatctaggtcctcaat

SEQ ID NO: 2215423 - DNA, 25 bp, Homo sapien
ggaggcaccctatacacttcatcat

SEQ ID NO: 2215424 - DNA, 25 bp, Homo sapien
tgggtttacgtgacaaacgcactgc

SEQ ID NO: 2215425 - DNA, 25 bp, Homo sapien
ggattgctgggtttacgtgacaaac

SEQ ID NO: 2215426 - DNA, 25 bp, Homo sapien
tttacgtgacaaacgcactgcactg

SEQ ID NO: 2215427 - DNA, 25 bp, Homo sapien
cagaaagtatgttagggagagtctt

SEQ ID NO: 2215428 - DNA, 25 bp, Homo sapien
agaaagtatgttagggagagtcttc

SEQ ID NO: 2215429 - DNA, 25 bp, Homo sapien
ccagaaagtatgttagggagagtct

SEQ ID NO: 2215430 - DNA, 25 bp, Homo sapien
gaaatatttatagttgcctctccaa

SEQ ID NO: 2215431 - DNA, 25 bp, Homo sapien
caagattggagcattgacatggaaa

SEQ ID NO: 2215432 - DNA, 25 bp, Homo sapien
gattggagcattgacatggaaagga

SEQ ID NO: 2215433 - DNA, 25 bp, Homo sapien
atcaagattggagcattgacatgga

SEQ ID NO: 2215434 - DNA, 25 bp, Homo sapien
caatggccagtgaatcttcactcat

SEQ ID NO: 2215435 - DNA, 25 bp, Homo sapien
ccaatggccagtgaatcttcactca

SEQ ID NO: 2215436 - DNA, 25 bp, Homo sapien
catcctgaattgatattttggggta

SEQ ID NO: 2215437 - DNA, 25 bp, Homo sapien
aggtacatcctgaattgatattttg

SEQ ID NO: 2215438 - DNA, 25 bp, Homo sapien
tcctgaattgatattttggggtatt

SEQ ID NO: 2215439 - DNA, 25 bp, Homo sapien
tacatcctgaattgatattttgggg

SEQ ID NO: 2215440 - DNA, 25 bp, Homo sapien
catcgtctccatcttctgggttcat

SEQ ID NO: 2215441 - DNA, 25 bp, Homo sapien
ccatcgtctccatcttctgggttca

SEQ ID NO: 2215442 - DNA, 25 bp, Homo sapien
ccagaaatcttgataataataagca

SEQ ID NO: 2215443 - DNA, 25 bp, Homo sapien
ttggaaataagcaccagaaatcttg

SEQ ID NO: 2215444 - DNA, 25 bp, Homo sapien
actttggaaataagcaccagaaatc

SEQ ID NO: 2215445 - DNA, 25 bp, Homo sapien
tggaaataagcaccagaaatcttga

SEQ ID NO: 2215446 - DNA, 25 bp, Homo sapien
tctggaacacattagggtagattct

SEQ ID NO: 2215447 - DNA, 25 bp, Homo sapien
cattagggtagattctgatatcctc

SEQ ID NO: 2215448 - DNA, 25 bp, Homo sapien
aaatttggcatccatgttgctctgc

SEQ ID NO: 2215449 - DNA, 25 bp, Homo sapien
agccatcattctctggaacacatta

SEQ ID NO: 2215450 - DNA, 25 bp, Homo sapien
tttgcagaaggctggtttcctccat

SEQ ID NO: 2215451 - DNA, 25 bp, Homo sapien
atattttgcagaaggctggtttcct

SEQ ID NO: 2215452 - DNA, 25 bp, Homo sapien
tattttgcagaaggctggtttcctc

SEQ ID NO: 2215453 - DNA, 25 bp, Homo sapien
tgcttgatattttgcagaaggctgg

SEQ ID NO: 2215454 - DNA, 25 bp, Homo sapien
tttgaagaatggatgctgaaattcc

SEQ ID NO: 2215455 - DNA, 25 bp, Homo sapien
ttgaagaatggatgctgaaattcca

SEQ ID NO: 2215456 - DNA, 25 bp, Homo sapien
tgaagaatggatgctgaaattccat

SEQ ID NO: 2215457 - DNA, 25 bp, Homo sapien
gaatctggattaatgaacacacaca

SEQ ID NO: 2215458 - DNA, 25 bp, Homo sapien
catgtaggaatctggattaatgaac

SEQ ID NO: 2215459 - DNA, 25 bp, Homo sapien
ctatcctgttcctttaagctcatgt

SEQ ID NO: 2215460 - DNA, 25 bp, Homo sapien
ctttaagctcatgtaggaatctgga

SEQ ID NO: 2215461 - DNA, 25 bp, Homo sapien
ccttggtgttcggtggcattgacac

SEQ ID NO: 2215462 - DNA, 25 bp, Homo sapien
tggaagatcagctccctgatgggcc

SEQ ID NO: 2215463 - DNA, 25 bp, Homo sapien
gggaatcagtcaagtactgcttgct

SEQ ID NO: 2215464 - DNA, 25 bp, Homo sapien
gcattgacactaccctggtgaggga

SEQ ID NO: 2215465 - DNA, 25 bp, Homo sapien
gccatctgcttacggaacgggtttg

SEQ ID NO: 2215466 - DNA, 25 bp, Homo sapien
caaacccgttccgtaagcagatggc

SEQ ID NO: 2215467 - DNA, 25 bp, Homo sapien
gcagcactaaatgagagaatcccag

SEQ ID NO: 2215468 - DNA, 25 bp, Homo sapien
aaatgagagaatcccagatcttctg

SEQ ID NO: 2215469 - DNA, 25 bp, Homo sapien
gcactaaatgagagaatcccagatc

SEQ ID NO: 2215470 - DNA, 25 bp, Homo sapien
ctaaatgagagaatcccagatcttc

SEQ ID NO: 2215471 - DNA, 25 bp, Homo sapien
caagtggagatggaacaccagtctc

SEQ ID NO: 2215472 - DNA, 25 bp, Homo sapien
ctgtcaagtggagatggaacaccag

SEQ ID NO: 2215473 - DNA, 25 bp, Homo sapien
tgtcaagtggagatggaacaccagt

SEQ ID NO: 2215474 - DNA, 25 bp, Homo sapien
tcaagtggagatggaacaccagtct

SEQ ID NO: 2215475 - DNA, 25 bp, Homo sapien
cctgcttggccctgctgtatcatct

SEQ ID NO: 2215476 - DNA, 25 bp, Homo sapien
caggagataagaagattagctccct

SEQ ID NO: 2215477 - DNA, 25 bp, Homo sapien
ggagataagaagattagctccctgc

SEQ ID NO: 2215478 - DNA, 25 bp, Homo sapien
ctgcttggccctgctgtatcatctg

SEQ ID NO: 2215479 - DNA, 25 bp, Homo sapien
cattgcatccttataattggtaggc

SEQ ID NO: 2215480 - DNA, 25 bp, Homo sapien
tcattgcatccttataattggtagg

SEQ ID NO: 2215481 - DNA, 25 bp, Homo sapien
attgttgctttctaataatgatggc

SEQ ID NO: 2215482 - DNA, 25 bp, Homo sapien
ccaggaagaacaagatgtatcaaga

SEQ ID NO: 2215483 - DNA, 25 bp, Homo sapien
ctgtaccaggtttgacatggcacca

SEQ ID NO: 2215484 - DNA, 25 bp, Homo sapien
tgtatcaagacgtataattgttgct

SEQ ID NO: 2215485 - DNA, 25 bp, Homo sapien
cacataatgggttgagcctcactcc

SEQ ID NO: 2215486 - DNA, 25 bp, Homo sapien
tcagatcacataacagggcccttct

SEQ ID NO: 2215487 - DNA, 25 bp, Homo sapien
aaaataccacataatgggttgagcc

SEQ ID NO: 2215488 - DNA, 25 bp, Homo sapien
ggttgagcctcactcctagaaattt

SEQ ID NO: 2215489 - DNA, 25 bp, Homo sapien
tgattcacagacttcacaaggcaga

SEQ ID NO: 2215490 - DNA, 25 bp, Homo sapien
ggttcctgaaccaactgagaaagag

SEQ ID NO: 2215491 - DNA, 25 bp, Homo sapien
gagtgctagccctggagatatttgc

SEQ ID NO: 2215492 - DNA, 25 bp, Homo sapien
tctacctacctatcgatcgagcagg

SEQ ID NO: 2215493 - DNA, 25 bp, Homo sapien
tagtttctttgctctacgtgggcac

SEQ ID NO: 2215494 - DNA, 25 bp, Homo sapien
gccaagtgagctgttaagataaccc

SEQ ID NO: 2215495 - DNA, 25 bp, Homo sapien
catgagcatgtacaacctctggagc

SEQ ID NO: 2215496 - DNA, 25 bp, Homo sapien
caagttcttaacctgtggcactgaa

SEQ ID NO: 2215497 - DNA, 25 bp, Homo sapien
ttgggaatacaatatgtctgcaaat

SEQ ID NO: 2215498 - DNA, 25 bp, Homo sapien
gggaatacaatatgtctgcaaatct

SEQ ID NO: 2215499 - DNA, 25 bp, Homo sapien
tgggaatacaatatgtctgcaaatc

SEQ ID NO: 2215500 - DNA, 25 bp, Homo sapien
gtacccggagagtttaggcaacatg

SEQ ID NO: 2215501 - DNA, 25 bp, Homo sapien
gatacgtacccggagagtttaggca

SEQ ID NO: 2215502 - DNA, 25 bp, Homo sapien
cgtacccggagagtttaggcaacat

SEQ ID NO: 2215503 - DNA, 25 bp, Homo sapien
gtttaggcaacatgcgtaagaacat

SEQ ID NO: 2215504 - DNA, 25 bp, Homo sapien
tattggcaatatagcccctggttgg

SEQ ID NO: 2215505 - DNA, 25 bp, Homo sapien
gaaactgagtataggtcccctctgg

SEQ ID NO: 2215506 - DNA, 25 bp, Homo sapien
gatccaaggcttctcatgcccagtt

SEQ ID NO: 2215507 - DNA, 25 bp, Homo sapien
tatactcagtgatacagacaagtgg

SEQ ID NO: 2215508 - DNA, 25 bp, Homo sapien
gtcctgctacatcaacaacaaggta

SEQ ID NO: 2215509 - DNA, 25 bp, Homo sapien
gctacatcaacaacaaggtaatctc

SEQ ID NO: 2215510 - DNA, 25 bp, Homo sapien
cctgctacatcaacaacaaggtaat

SEQ ID NO: 2215511 - DNA, 25 bp, Homo sapien
cagtcctgctacatcaacaacaagg

SEQ ID NO: 2215512 - DNA, 25 bp, Homo sapien
tgtcagcatttgagcagaaactggg

SEQ ID NO: 2215513 - DNA, 25 bp, Homo sapien
ggcatccaggaagagctgagatctg

SEQ ID NO: 2215514 - DNA, 25 bp, Homo sapien
gagcagaaactggggcatccaggaa

SEQ ID NO: 2215515 - DNA, 25 bp, Homo sapien
tttccttgtcagcatttgagcagaa

SEQ ID NO: 2215516 - DNA, 25 bp, Homo sapien
ttattgacatcgagtggctcctctt

SEQ ID NO: 2215517 - DNA, 25 bp, Homo sapien
attattgacatcgagtggctcctct

SEQ ID NO: 2215518 - DNA, 25 bp, Homo sapien
tattgacatcgagtggctcctcttc

SEQ ID NO: 2215519 - DNA, 25 bp, Homo sapien
gttcatgcctttcctggcgaccatt

SEQ ID NO: 2215520 - DNA, 25 bp, Homo sapien
gggacaccatagtctttacagatcc

SEQ ID NO: 2215521 - DNA, 25 bp, Homo sapien
ggctgcctgggtcgctgttatccag

SEQ ID NO: 2215522 - DNA, 25 bp, Homo sapien
gctgttatccagtgaggcatccctc

SEQ ID NO: 2215523 - DNA, 25 bp, Homo sapien
gcacggctcccaatgctagtagcag

SEQ ID NO: 2215524 - DNA, 25 bp, Homo sapien
caggccttggatggacagactcata

SEQ ID NO: 2215525 - DNA, 25 bp, Homo sapien
gcttgatgctgtccccaggttcgga

SEQ ID NO: 2215526 - DNA, 25 bp, Homo sapien
ttcggaacggatgctgcctgagctc

SEQ ID NO: 2215527 - DNA, 25 bp, Homo sapien
ttggagccagccgcattctcctgac

SEQ ID NO: 2215528 - DNA, 25 bp, Homo sapien
gagccagccgcattctcctgaccag

SEQ ID NO: 2215529 - DNA, 25 bp, Homo sapien
agccgcattctcctgaccagcgctc

SEQ ID NO: 2215530 - DNA, 25 bp, Homo sapien
attctcctgaccagcgctctattgc

SEQ ID NO: 2215531 - DNA, 25 bp, Homo sapien
cttggcagttgttgagagagtctta

SEQ ID NO: 2215532 - DNA, 25 bp, Homo sapien
ttaggttgaccgcagcagtgacctg

SEQ ID NO: 2215533 - DNA, 25 bp, Homo sapien
tgttgagagagtcttaggttgaccg

SEQ ID NO: 2215534 - DNA, 25 bp, Homo sapien
agagagtcttaggttgaccgcagca

SEQ ID NO: 2215535 - DNA, 25 bp, Homo sapien
tgctgtgcaaggatgcagtcccgga

SEQ ID NO: 2215536 - DNA, 25 bp, Homo sapien
ccaagtctggcagttctggtgacca

SEQ ID NO: 2215537 - DNA, 25 bp, Homo sapien
gggaatccccagacagttcgtcagg

SEQ ID NO: 2215538 - DNA, 25 bp, Homo sapien
caaggccggaggtttcttcaagaag

SEQ ID NO: 2215539 - DNA, 25 bp, Homo sapien
ggtccctggagtctatggcaaaagg

SEQ ID NO: 2215540 - DNA, 25 bp, Homo sapien
gtctatggcaaaagggtgacagctt

SEQ ID NO: 2215541 - DNA, 25 bp, Homo sapien
gccttagggcatgaggcagtggttt

SEQ ID NO: 2215542 - DNA, 25 bp, Homo sapien
ctgtcccagggtcaggaaacagcca

SEQ ID NO: 2215543 - DNA, 25 bp, Homo sapien
caaccttctggacctcccctatttg

SEQ ID NO: 2215544 - DNA, 25 bp, Homo sapien
gcagcaaacactatacccttctcct

SEQ ID NO: 2215545 - DNA, 25 bp, Homo sapien
ctggacctcccctatttgcacctgt

SEQ ID NO: 2215546 - DNA, 25 bp, Homo sapien
gcaaacactatacccttctccttcc

SEQ ID NO: 2215547 - DNA, 25 bp, Homo sapien
tgcccattccaaggcaaccattaat

SEQ ID NO: 2215548 - DNA, 25 bp, Homo sapien
tgatttaaggttcatctacaatgta

SEQ ID NO: 2215549 - DNA, 25 bp, Homo sapien
ggaagacatcagcataactaaatct

SEQ ID NO: 2215550 - DNA, 25 bp, Homo sapien
taagatccatcatgcctattaacat

SEQ ID NO: 2215551 - DNA, 25 bp, Homo sapien
tgagcaaaatgattcaccaggttct

SEQ ID NO: 2215552 - DNA, 25 bp, Homo sapien
ccttaggaccatggaaccctgtttg

SEQ ID NO: 2215553 - DNA, 25 bp, Homo sapien
tgaactataacccagatctcctgtg

SEQ ID NO: 2215554 - DNA, 25 bp, Homo sapien
tgctgtgctcactaagaaaagacac

SEQ ID NO: 2215555 - DNA, 25 bp, Homo sapien
gaggcttacctgaccaaaaatgcag

SEQ ID NO: 2215556 - DNA, 25 bp, Homo sapien
aaagtgtttgccctgcctcatgctg

SEQ ID NO: 2215557 - DNA, 25 bp, Homo sapien
catgaatgtggaatctggctcccca

SEQ ID NO: 2215558 - DNA, 25 bp, Homo sapien
gcaagaaatgctccagatcagtcct

SEQ ID NO: 2215559 - DNA, 25 bp, Homo sapien
cactcacttgggactcagcactggt

SEQ ID NO: 2215560 - DNA, 25 bp, Homo sapien
gaagccactagtcgagctgcagtcg

SEQ ID NO: 2215561 - DNA, 25 bp, Homo sapien
tcagctccagtataggaggcagagc

SEQ ID NO: 2215562 - DNA, 25 bp, Homo sapien
tgggaacttcaaagggcacattgag

SEQ ID NO: 2215563 - DNA, 25 bp, Homo sapien
ctgggtggcacggggaagagagatt

SEQ ID NO: 2215564 - DNA, 25 bp, Homo sapien
tggcacggggaagagagattcctcc

SEQ ID NO: 2215565 - DNA, 25 bp, Homo sapien
gctgttttatcagcctcaaactgca

SEQ ID NO: 2215566 - DNA, 25 bp, Homo sapien
ggaagagagattcctcctttgctgt

SEQ ID NO: 2215567 - DNA, 25 bp, Homo sapien
aggctagctggtactggatcagaga

SEQ ID NO: 2215568 - DNA, 25 bp, Homo sapien
attcaggtatcagattgaggctagc

SEQ ID NO: 2215569 - DNA, 25 bp, Homo sapien
tagctggtactggatcagagaaaat

SEQ ID NO: 2215570 - DNA, 25 bp, Homo sapien
ggtatcagattgaggctagctggta

SEQ ID NO: 2215571 - DNA, 25 bp, Homo sapien
gtgtatctgcctccactaagctcaa

SEQ ID NO: 2215572 - DNA, 25 bp, Homo sapien
aagaactgcttgcagtagaggaaga

SEQ ID NO: 2215573 - DNA, 25 bp, Homo sapien
gggtaaacaccactagcaggctgct

SEQ ID NO: 2215574 - DNA, 25 bp, Homo sapien
tcaccagtgcaacaagtgtggcctc

SEQ ID NO: 2215575 - DNA, 25 bp, Homo sapien
gatgcactcttggtcctgcaggcct

SEQ ID NO: 2215576 - DNA, 25 bp, Homo sapien
ggtctgcttcgtgcacgggatgcac

SEQ ID NO: 2215577 - DNA, 25 bp, Homo sapien
tcctgcaggcctccaatgcgtgtct

SEQ ID NO: 2215578 - DNA, 25 bp, Homo sapien
cgtgcacgggatgcactcttggtcc

SEQ ID NO: 2215579 - DNA, 25 bp, Homo sapien
aactctgacatctgtggtggcccca

SEQ ID NO: 2215580 - DNA, 25 bp, Homo sapien
cagcacaggtgatgcaactctgaca

SEQ ID NO: 2215581 - DNA, 25 bp, Homo sapien
tgaacacgattgatgacagcacagg

SEQ ID NO: 2215582 - DNA, 25 bp, Homo sapien
tgcttttgtacctgcgaggagggca

SEQ ID NO: 2215583 - DNA, 25 bp, Homo sapien
attgctttataggagcttggagatg

SEQ ID NO: 2215584 - DNA, 25 bp, Homo sapien
atattgctttataggagcttggaga

SEQ ID NO: 2215585 - DNA, 25 bp, Homo sapien
gatgggggttgttaatattgcttta

SEQ ID NO: 2215586 - DNA, 25 bp, Homo sapien
gacagatgggggttgttaatattgc

SEQ ID NO: 2215587 - DNA, 25 bp, Homo sapien
tggtcccagtactcattttcttggc

SEQ ID NO: 2215588 - DNA, 25 bp, Homo sapien
tgtccaggaccacaccgttggcagg

SEQ ID NO: 2215589 - DNA, 25 bp, Homo sapien
gtccccattggtcccagtactcatt

SEQ ID NO: 2215590 - DNA, 25 bp, Homo sapien
tggcaggtgacacaccgtccccatt

SEQ ID NO: 2215591 - DNA, 25 bp, Homo sapien
tgggccattctttcccattccttca

SEQ ID NO: 2215592 - DNA, 25 bp, Homo sapien
attccttcattcaaaggaaagtggg

SEQ ID NO: 2215593 - DNA, 25 bp, Homo sapien
aaggaaagtgggctacaagatccat

SEQ ID NO: 2215594 - DNA, 25 bp, Homo sapien
tttttcatcatcaactgggccattc

SEQ ID NO: 2215595 - DNA, 25 bp, Homo sapien
ggactccggtacaaatccacctcag

SEQ ID NO: 2215596 - DNA, 25 bp, Homo sapien
taacggacgagtagatggctcttgc

SEQ ID NO: 2215597 - DNA, 25 bp, Homo sapien
tcttgctcccaaatgggactccggt

SEQ ID NO: 2215598 - DNA, 25 bp, Homo sapien
ccggtaacggacgagtagatggctc

SEQ ID NO: 2215599 - DNA, 25 bp, Homo sapien
tttactcctgtctattccattttgc

SEQ ID NO: 2215600 - DNA, 25 bp, Homo sapien
tctgtgtttactcctgtctattcca

SEQ ID NO: 2215601 - DNA, 25 bp, Homo sapien
tgtctattccattttgctttatttg

SEQ ID NO: 2215602 - DNA, 25 bp, Homo sapien
gtctccatctgtgtttactcctgtc

SEQ ID NO: 2215603 - DNA, 25 bp, Homo sapien
ggacgatgctaatcatctattcatt

SEQ ID NO: 2215604 - DNA, 25 bp, Homo sapien
ttatataaggacgatgctaatcatc

SEQ ID NO: 2215605 - DNA, 25 bp, Homo sapien
tgaatttatgtgtcctccttatata

SEQ ID NO: 2215606 - DNA, 25 bp, Homo sapien
tatgtgtcctccttatataaggacg

SEQ ID NO: 2215607 - DNA, 25 bp, Homo sapien
gaccaccaggttctccagttatctc

SEQ ID NO: 2215608 - DNA, 25 bp, Homo sapien
tttacacagcagtaatcagctgctc

SEQ ID NO: 2215609 - DNA, 25 bp, Homo sapien
tgtgttacacagacagtctttacac

SEQ ID NO: 2215610 - DNA, 25 bp, Homo sapien
aacatgcaggcccaatctctttcgg

SEQ ID NO: 2215611 - DNA, 25 bp, Homo sapien
tgtttctgtttgagagcatgaaatt

SEQ ID NO: 2215612 - DNA, 25 bp, Homo sapien
gtttctgtttgagagcatgaaattc

SEQ ID NO: 2215613 - DNA, 25 bp, Homo sapien
ggaggtgaaaggtgaactaccacaa

SEQ ID NO: 2215614 - DNA, 25 bp, Homo sapien
gaggtgaaaggtgaactaccacaaa

SEQ ID NO: 2215615 - DNA, 25 bp, Homo sapien
ttgagcaggaagagttgacctatcc

SEQ ID NO: 2215616 - DNA, 25 bp, Homo sapien
ggcacctgctcacacaagttggtaa

SEQ ID NO: 2215617 - DNA, 25 bp, Homo sapien
ctctggatatgtctgtctagtaaca

SEQ ID NO: 2215618 - DNA, 25 bp, Homo sapien
tgtacactgtcgttagaactctgga

SEQ ID NO: 2215619 - DNA, 25 bp, Homo sapien
gctgtgttgtctacttgtgattcct

SEQ ID NO: 2215620 - DNA, 25 bp, Homo sapien
caggccatttcttggcactggactg

SEQ ID NO: 2215621 - DNA, 25 bp, Homo sapien
tccagctgccactactaattcagtc

SEQ ID NO: 2215622 - DNA, 25 bp, Homo sapien
tggtgtagcagaaggttgatccctg

SEQ ID NO: 2215623 - DNA, 25 bp, Homo sapien
ttgatccctgctgaaccctgcagaa

SEQ ID NO: 2215624 - DNA, 25 bp, Homo sapien
ggccagctgatcctttctctagctt

SEQ ID NO: 2215625 - DNA, 25 bp, Homo sapien
gatcctttctctagcttgttctcca

SEQ ID NO: 2215626 - DNA, 25 bp, Homo sapien
ggacatttaggccagctgatccttt

SEQ ID NO: 2215627 - DNA, 25 bp, Homo sapien
gacatttaggccagctgatcctttc

SEQ ID NO: 2215628 - DNA, 25 bp, Homo sapien
tgctgcccttagtttgtgctggacc

SEQ ID NO: 2215629 - DNA, 25 bp, Homo sapien
gatgctgcccttagtttgtgctgga

SEQ ID NO: 2215630 - DNA, 25 bp, Homo sapien
tctgatgctgcccttagtttgtgct

SEQ ID NO: 2215631 - DNA, 25 bp, Homo sapien
tgatgctgcccttagtttgtgctgg

SEQ ID NO: 2215632 - DNA, 25 bp, Homo sapien
aactgatgtcttgttaattcatcag

SEQ ID NO: 2215633 - DNA, 25 bp, Homo sapien
tgatgtcttgttaattcatcagtta

SEQ ID NO: 2215634 - DNA, 25 bp, Homo sapien
caccaactgatgtcttgttaattca

SEQ ID NO: 2215635 - DNA, 25 bp, Homo sapien
ccaactgatgtcttgttaattcatc

SEQ ID NO: 2215636 - DNA, 25 bp, Homo sapien
tcagaaacgctcatctctgggtaat

SEQ ID NO: 2215637 - DNA, 25 bp, Homo sapien
catctctgggtaatgtggcaggtga

SEQ ID NO: 2215638 - DNA, 25 bp, Homo sapien
acgctcatctctgggtaatgtggca

SEQ ID NO: 2215639 - DNA, 25 bp, Homo sapien
gaaacgctcatctctgggtaatgtg

SEQ ID NO: 2215640 - DNA, 25 bp, Homo sapien
tgtgtgcagacctttagagagttgt

SEQ ID NO: 2215641 - DNA, 25 bp, Homo sapien
aaatttctggatatgccaagtcttt

SEQ ID NO: 2215642 - DNA, 25 bp, Homo sapien
gcgtgcacatgcaagtgttaacact

SEQ ID NO: 2215643 - DNA, 25 bp, Homo sapien
acatcgtttcttatactggaggtat

SEQ ID NO: 2215644 - DNA, 25 bp, Homo sapien
cttggaatgccgaatggatacttta

SEQ ID NO: 2215645 - DNA, 25 bp, Homo sapien
tggatactttatggtcacaagtgtg

SEQ ID NO: 2215646 - DNA, 25 bp, Homo sapien
gaatcaaagctaggaaaattaatac

SEQ ID NO: 2215647 - DNA, 25 bp, Homo sapien
tggaatcaaagctaggaaaattaat

SEQ ID NO: 2215648 - DNA, 25 bp, Homo sapien
gaccccactttatgtaatctgccat

SEQ ID NO: 2215649 - DNA, 25 bp, Homo sapien
ttgaccccactttatgtaatctgcc

SEQ ID NO: 2215650 - DNA, 25 bp, Homo sapien
cccttgaccccactttatgtaatct

SEQ ID NO: 2215651 - DNA, 25 bp, Homo sapien
ccttgaccccactttatgtaatctg

SEQ ID NO: 2215652 - DNA, 25 bp, Homo sapien
gaaagactctttaggctccttgtaa

SEQ ID NO: 2215653 - DNA, 25 bp, Homo sapien
ggcacagctgacaaaactgccattg

SEQ ID NO: 2215654 - DNA, 25 bp, Homo sapien
agagttcctgaaagactctttaggc

SEQ ID NO: 2215655 - DNA, 25 bp, Homo sapien
tgttccatgttcctgaagatagggc

SEQ ID NO: 2215656 - DNA, 25 bp, Homo sapien
tatcctcgtcgttggcagactgtga

SEQ ID NO: 2215657 - DNA, 25 bp, Homo sapien
cctcgtcgttggcagactgtgaatt

SEQ ID NO: 2215658 - DNA, 25 bp, Homo sapien
cgttggcagactgtgaatttggatt

SEQ ID NO: 2215659 - DNA, 25 bp, Homo sapien
ctgactatcctcgtcgttggcagac

SEQ ID NO: 2215660 - DNA, 25 bp, Homo sapien
gagggtggcacacagttcagcccca

SEQ ID NO: 2215661 - DNA, 25 bp, Homo sapien
gggtggcacacagttcagccccaag

SEQ ID NO: 2215662 - DNA, 25 bp, Homo sapien
ttcgatgagggtggcacacagttca

SEQ ID NO: 2215663 - DNA, 25 bp, Homo sapien
ctttcgatgagggtggcacacagtt

SEQ ID NO: 2215664 - DNA, 25 bp, Homo sapien
ccaactggaagagctacaggatatt

SEQ ID NO: 2215665 - DNA, 25 bp, Homo sapien
ggaagagctacaggatattttgtca

SEQ ID NO: 2215666 - DNA, 25 bp, Homo sapien
aattttctatcccaactggaagagc

SEQ ID NO: 2215667 - DNA, 25 bp, Homo sapien
tatcccaactggaagagctacagga

SEQ ID NO: 2215668 - DNA, 25 bp, Homo sapien
taaagcagaatctcccaatcctagg

SEQ ID NO: 2215669 - DNA, 25 bp, Homo sapien
gaggtcctgagcaatacactcatgt

SEQ ID NO: 2215670 - DNA, 25 bp, Homo sapien
cttctccagtttgctgttgttactc

SEQ ID NO: 2215671 - DNA, 25 bp, Homo sapien
ggtgcctgaggatcttctattatgc

SEQ ID NO: 2215672 - DNA, 25 bp, Homo sapien
ctagaacggtgcctgctgcatagca

SEQ ID NO: 2215673 - DNA, 25 bp, Homo sapien
cggtgcctgctgcatagcatagtag

SEQ ID NO: 2215674 - DNA, 25 bp, Homo sapien
tgctgcatagcatagtaggagcagt

SEQ ID NO: 2215675 - DNA, 25 bp, Homo sapien
tagtaggagcagtgcataaacaaag

SEQ ID NO: 2215676 - DNA, 25 bp, Homo sapien
gcagccacgtggaaggagacatgtt

SEQ ID NO: 2215677 - DNA, 25 bp, Homo sapien
tgagaggctttattccaggtagttg

SEQ ID NO: 2215678 - DNA, 25 bp, Homo sapien
aagagctgaaaagaagctacaaccc

SEQ ID NO: 2215679 - DNA, 25 bp, Homo sapien
aacccagggcgtgcatgactgccaa

SEQ ID NO: 2215680 - DNA, 25 bp, Homo sapien
gatttgtgatagagctgcttcctgc

SEQ ID NO: 2215681 - DNA, 25 bp, Homo sapien
gcatttgctttgtagcacaaccact

SEQ ID NO: 2215682 - DNA, 25 bp, Homo sapien
tgcttcctgcatggttagctctaag

SEQ ID NO: 2215683 - DNA, 25 bp, Homo sapien
tgctccaaataacaggcattgattt

SEQ ID NO: 2215684 - DNA, 25 bp, Homo sapien
ccacttgagtagacatgtacagact

SEQ ID NO: 2215685 - DNA, 25 bp, Homo sapien
tacagactgaattcaaagaaatact

SEQ ID NO: 2215686 - DNA, 25 bp, Homo sapien
gagtgcaggtgccaaatcaatgggc

SEQ ID NO: 2215687 - DNA, 25 bp, Homo sapien
gcctgaaccttggttgtccacttga

SEQ ID NO: 2215688 - DNA, 25 bp, Homo sapien
tatatgacacgggacctttaagtgc

SEQ ID NO: 2215689 - DNA, 25 bp, Homo sapien
tgtttagcacaatatatgacacggg

SEQ ID NO: 2215690 - DNA, 25 bp, Homo sapien
gcagtgaatcgttgaattgtaatca

SEQ ID NO: 2215691 - DNA, 25 bp, Homo sapien
ttcttgttacgctcagcagtggcag

SEQ ID NO: 2215692 - DNA, 25 bp, Homo sapien
tgacaccacatgctcccagtaaatt

SEQ ID NO: 2215693 - DNA, 25 bp, Homo sapien
attgagtctgatgacaccacatgct

SEQ ID NO: 2215694 - DNA, 25 bp, Homo sapien
gacactgatacagacattgagtctg

SEQ ID NO: 2215695 - DNA, 25 bp, Homo sapien
taaattacacagatcaggggctctc

SEQ ID NO: 2215696 - DNA, 25 bp, Homo sapien
taagagttgtgactatgccctgggc

SEQ ID NO: 2215697 - DNA, 25 bp, Homo sapien
atgctcttggtaagagttgtgacta

SEQ ID NO: 2215698 - DNA, 25 bp, Homo sapien
tcttggtaagagttgtgactatgcc

SEQ ID NO: 2215699 - DNA, 25 bp, Homo sapien
gagttgtgactatgccctgggcctt

SEQ ID NO: 2215700 - DNA, 25 bp, Homo sapien
aatgccctccacctaaccgctttct

SEQ ID NO: 2215701 - DNA, 25 bp, Homo sapien
tcacatttcaactttggactcctct

SEQ ID NO: 2215702 - DNA, 25 bp, Homo sapien
aaggagaagacattcctattctttt

SEQ ID NO: 2215703 - DNA, 25 bp, Homo sapien
agtgaaacttattctagaatgccct

SEQ ID NO: 2215704 - DNA, 25 bp, Homo sapien
ctccatcatttaaccttctcatcat

SEQ ID NO: 2215705 - DNA, 25 bp, Homo sapien
atctccatcatttaaccttctcatc

SEQ ID NO: 2215706 - DNA, 25 bp, Homo sapien
tctccatcatttaaccttctcatca

SEQ ID NO: 2215707 - DNA, 25 bp, Homo sapien
gagttggttctttataggcttggga

SEQ ID NO: 2215708 - DNA, 25 bp, Homo sapien
ggtagtaagggaagtataagctatc

SEQ ID NO: 2215709 - DNA, 25 bp, Homo sapien
gccaggagacatgttcagaaacctg

SEQ ID NO: 2215710 - DNA, 25 bp, Homo sapien
ttgggatctttccacaggttctact

SEQ ID NO: 2215711 - DNA, 25 bp, Homo sapien
ggctgaatcactcttgaagttctgg

SEQ ID NO: 2215712 - DNA, 25 bp, Homo sapien
gaagttctgggaatcacctttgctc

SEQ ID NO: 2215713 - DNA, 25 bp, Homo sapien
ttgaagttctgggaatcacctttgc

SEQ ID NO: 2215714 - DNA, 25 bp, Homo sapien
tgtggctgaatcactcttgaagttc

SEQ ID NO: 2215715 - DNA, 25 bp, Homo sapien
agaaactcacttatggatgctgcca

SEQ ID NO: 2215716 - DNA, 25 bp, Homo sapien
gaaactcacttatggatgctgccat

SEQ ID NO: 2215717 - DNA, 25 bp, Homo sapien
catcaatgtcacattgttccatgac

SEQ ID NO: 2215718 - DNA, 25 bp, Homo sapien
tcctaggtgccatctcatcaatgtc

SEQ ID NO: 2215719 - DNA, 25 bp, Homo sapien
catgacacagtgtctctcagaacac

SEQ ID NO: 2215720 - DNA, 25 bp, Homo sapien
cacactgactcagacatcctaggtg

SEQ ID NO: 2215721 - DNA, 25 bp, Homo sapien
ttgttacccagtcccatagataacc

SEQ ID NO: 2215722 - DNA, 25 bp, Homo sapien
gttacccagtcccatagataaccac

SEQ ID NO: 2215723 - DNA, 25 bp, Homo sapien
cttgttacccagtcccatagataac

SEQ ID NO: 2215724 - DNA, 25 bp, Homo sapien
tacccagtcccatagataaccacat

SEQ ID NO: 2215725 - DNA, 25 bp, Homo sapien
tggacagaggtaatgtttccaggaa

SEQ ID NO: 2215726 - DNA, 25 bp, Homo sapien
ggacagaggtaatgtttccaggaaa

SEQ ID NO: 2215727 - DNA, 25 bp, Homo sapien
gatggtggacagaggtaatgtttcc

SEQ ID NO: 2215728 - DNA, 25 bp, Homo sapien
gacagaggtaatgtttccaggaaat

SEQ ID NO: 2215729 - DNA, 25 bp, Homo sapien
ggaaaaggcttgttatcagacactc

SEQ ID NO: 2215730 - DNA, 25 bp, Homo sapien
tatgccttaactctatcaacctgct

SEQ ID NO: 2215731 - DNA, 25 bp, Homo sapien
tatttatatctccttgtactggctc

SEQ ID NO: 2215732 - DNA, 25 bp, Homo sapien
tcagacactctactctaggataaaa

SEQ ID NO: 2215733 - DNA, 25 bp, Homo sapien
tgaaaagatgtgttaatcttggccg

SEQ ID NO: 2215734 - DNA, 25 bp, Homo sapien
tgtgttaatcttggccgcagcattc

SEQ ID NO: 2215735 - DNA, 25 bp, Homo sapien
ttcatcagagtctgccagagggatg

SEQ ID NO: 2215736 - DNA, 25 bp, Homo sapien
aagatgtgttaatcttggccgcagc

SEQ ID NO: 2215737 - DNA, 25 bp, Homo sapien
gataggagatgccagggttatctca

SEQ ID NO: 2215738 - DNA, 25 bp, Homo sapien
ttttctggataggagatgccagggt

SEQ ID NO: 2215739 - DNA, 25 bp, Homo sapien
cagggttatctcaggataagctgga

SEQ ID NO: 2215740 - DNA, 25 bp, Homo sapien
caggataagctggaacatccagcag

SEQ ID NO: 2215741 - DNA, 25 bp, Homo sapien
tctgcctttctaaggtgcttagcct

SEQ ID NO: 2215742 - DNA, 25 bp, Homo sapien
aggtgcttagcctgattttcaagtt

SEQ ID NO: 2215743 - DNA, 25 bp, Homo sapien
ctgcctttctaaggtgcttagcctg

SEQ ID NO: 2215744 - DNA, 25 bp, Homo sapien
tctctgcctttctaaggtgcttagc

SEQ ID NO: 2215745 - DNA, 25 bp, Homo sapien
tatccattccaagatgccagggcaa

SEQ ID NO: 2215746 - DNA, 25 bp, Homo sapien
gggcaatcccttcatgaaatccaag

SEQ ID NO: 2215747 - DNA, 25 bp, Homo sapien
gatgccagggcaatcccttcatgaa

SEQ ID NO: 2215748 - DNA, 25 bp, Homo sapien
cctccgcaattttatccattccaag

SEQ ID NO: 2215749 - DNA, 25 bp, Homo sapien
cttcagctcctctttagagtccata

SEQ ID NO: 2215750 - DNA, 25 bp, Homo sapien
aggaattcttagcaggttgtaggtt

SEQ ID NO: 2215751 - DNA, 25 bp, Homo sapien
tcttagcaggttgtaggttcttgac

SEQ ID NO: 2215752 - DNA, 25 bp, Homo sapien
ccatatttccatcatccaaatgtaa

SEQ ID NO: 2215753 - DNA, 25 bp, Homo sapien
ccagcgacagccaacgcctcttgca

SEQ ID NO: 2215754 - DNA, 25 bp, Homo sapien
ctccagcgacagccaacgcctcttg

SEQ ID NO: 2215755 - DNA, 25 bp, Homo sapien
cagcgacagccaacgcctcttgcag

SEQ ID NO: 2215756 - DNA, 25 bp, Homo sapien
tccagcgacagccaacgcctcttgc

SEQ ID NO: 2215757 - DNA, 25 bp, Homo sapien
ctgaccttaaagacatcctgagcga

SEQ ID NO: 2215758 - DNA, 25 bp, Homo sapien
ttaagcagctgctccgctgacctta

SEQ ID NO: 2215759 - DNA, 25 bp, Homo sapien
gctgctccgctgaccttaaagacat

SEQ ID NO: 2215760 - DNA, 25 bp, Homo sapien
ccttaaagacatcctgagcgaggcc

SEQ ID NO: 2215761 - DNA, 25 bp, Homo sapien
gaatcttggcaattaacaaggcagt

SEQ ID NO: 2215762 - DNA, 25 bp, Homo sapien
ttcccaacccactgtgtattgcaga

SEQ ID NO: 2215763 - DNA, 25 bp, Homo sapien
caaggcagtaattggcatcaggagg

SEQ ID NO: 2215764 - DNA, 25 bp, Homo sapien
tagtttgcttatctgcgccgtccct

SEQ ID NO: 2215765 - DNA, 25 bp, Homo sapien
ttgcctatgcaaatgcctgcctgaa

SEQ ID NO: 2215766 - DNA, 25 bp, Homo sapien
cagggaaccagggaaacgaatgcag

SEQ ID NO: 2215767 - DNA, 25 bp, Homo sapien
gaaacgaatgcagagtgctcctgac

SEQ ID NO: 2215768 - DNA, 25 bp, Homo sapien
cagagagggattcctcggaggtcat

SEQ ID NO: 2215769 - DNA, 25 bp, Homo sapien
tatgaagttatatcatgttcaggcc

SEQ ID NO: 2215770 - DNA, 25 bp, Homo sapien
aagttatatcatgttcaggccttct

SEQ ID NO: 2215771 - DNA, 25 bp, Homo sapien
tggctctcagccctggtactgtcct

SEQ ID NO: 2215772 - DNA, 25 bp, Homo sapien
taaccataaacctcatctttgccct

SEQ ID NO: 2215773 - DNA, 25 bp, Homo sapien
ccagaggacctttaagcatttttat

SEQ ID NO: 2215774 - DNA, 25 bp, Homo sapien
cctccagaggacctttaagcatttt

SEQ ID NO: 2215775 - DNA, 25 bp, Homo sapien
gaggacctttaagcatttttattga

SEQ ID NO: 2215776 - DNA, 25 bp, Homo sapien
aggtcctccagaggacctttaagca

SEQ ID NO: 2215777 - DNA, 25 bp, Homo sapien
tttctttcagctgactatctgctgt

SEQ ID NO: 2215778 - DNA, 25 bp, Homo sapien
ctttctttcagctgactatctgctg

SEQ ID NO: 2215779 - DNA, 25 bp, Homo sapien
tctttcagctgactatctgctgttc

SEQ ID NO: 2215780 - DNA, 25 bp, Homo sapien
ttctttcagctgactatctgctgtt

SEQ ID NO: 2215781 - DNA, 25 bp, Homo sapien
cagttatagcttgcccacagtaatg

SEQ ID NO: 2215782 - DNA, 25 bp, Homo sapien
tatcaaatcctctttggcagttata

SEQ ID NO: 2215783 - DNA, 25 bp, Homo sapien
tatagcttgcccacagtaatgtgtc

SEQ ID NO: 2215784 - DNA, 25 bp, Homo sapien
tctttggcagttatagcttgcccac

SEQ ID NO: 2215785 - DNA, 25 bp, Homo sapien
ttccaagaggccttaaaggtgttga

SEQ ID NO: 2215786 - DNA, 25 bp, Homo sapien
tccaagaggccttaaaggtgttgat

SEQ ID NO: 2215787 - DNA, 25 bp, Homo sapien
taaaggtgttgatctgttccctggg

SEQ ID NO: 2215788 - DNA, 25 bp, Homo sapien
aggtgttgatctgttccctgggcat

SEQ ID NO: 2215789 - DNA, 25 bp, Homo sapien
tgagcccagattaaagaatcaacaa

SEQ ID NO: 2215790 - DNA, 25 bp, Homo sapien
taaaattaatgttgatgagcccaga

SEQ ID NO: 2215791 - DNA, 25 bp, Homo sapien
ggagtgtcagccacataataggagc

SEQ ID NO: 2215792 - DNA, 25 bp, Homo sapien
catcaaccctattagaatggaagct

SEQ ID NO: 2215793 - DNA, 25 bp, Homo sapien
tctgacttccaccagaatcaacttc

SEQ ID NO: 2215794 - DNA, 25 bp, Homo sapien
cttcagatcttgtccaaagctccat

SEQ ID NO: 2215795 - DNA, 25 bp, Homo sapien
gaatcaacttcagatcttgtccaaa

SEQ ID NO: 2215796 - DNA, 25 bp, Homo sapien
tacatactgcttatctctgacttcc

SEQ ID NO: 2215797 - DNA, 25 bp, Homo sapien
tgtagcctcttcaactcccccaaaa

SEQ ID NO: 2215798 - DNA, 25 bp, Homo sapien
ctgtgtagcctcttcaactccccca

SEQ ID NO: 2215799 - DNA, 25 bp, Homo sapien
cccccaaaactcctctgtagcccat

SEQ ID NO: 2215800 - DNA, 25 bp, Homo sapien
tcccccaaaactcctctgtagccca

SEQ ID NO: 2215801 - DNA, 25 bp, Homo sapien
tccatagcttccatattgacaccag

SEQ ID NO: 2215802 - DNA, 25 bp, Homo sapien
tcatcagttgtaagcctctcattct

SEQ ID NO: 2215803 - DNA, 25 bp, Homo sapien
tgtattgatgtcaaagaagaatcac

SEQ ID NO: 2215804 - DNA, 25 bp, Homo sapien
tcccaagccagactcaaatattgta

SEQ ID NO: 2215805 - DNA, 25 bp, Homo sapien
tggacccctgtcaatcctgctttct

SEQ ID NO: 2215806 - DNA, 25 bp, Homo sapien
tctggacccctgtcaatcctgcttt

SEQ ID NO: 2215807 - DNA, 25 bp, Homo sapien
tgtctggacccctgtcaatcctgct

SEQ ID NO: 2215808 - DNA, 25 bp, Homo sapien
cccctgtcaatcctgctttctgcca

SEQ ID NO: 2215809 - DNA, 25 bp, Homo sapien
cacactacctgggtcctggaggcaa

SEQ ID NO: 2215810 - DNA, 25 bp, Homo sapien
ggcagagaagccagaacacctggtg

SEQ ID NO: 2215811 - DNA, 25 bp, Homo sapien
acctggtgcagctagggccactgtg

SEQ ID NO: 2215812 - DNA, 25 bp, Homo sapien
ttcagtatagtcactctctttaggc

SEQ ID NO: 2215813 - DNA, 25 bp, Homo sapien
gggagcagatcctgtaggccaccag

SEQ ID NO: 2215814 - DNA, 25 bp, Homo sapien
tcccgagctcaaagctagaaaggtc

SEQ ID NO: 2215815 - DNA, 25 bp, Homo sapien
taaatggtctggcaactcccgagct

SEQ ID NO: 2215816 - DNA, 25 bp, Homo sapien
caccagtctgtggagctgtgtccaa

SEQ ID NO: 2215817 - DNA, 25 bp, Homo sapien
gaagttttctgccaaactccgtgaa

SEQ ID NO: 2215818 - DNA, 25 bp, Homo sapien
tcttttgggcatgttcacagattct

SEQ ID NO: 2215819 - DNA, 25 bp, Homo sapien
aagccacaagcaccttatgtcctcc

SEQ ID NO: 2215820 - DNA, 25 bp, Homo sapien
tggtcatcaagcctgtttgcttctt

SEQ ID NO: 2215821 - DNA, 25 bp, Homo sapien
acaatctggctcatgtacaggatca

SEQ ID NO: 2215822 - DNA, 25 bp, Homo sapien
gagtgacatgatatgatccacaagg

SEQ ID NO: 2215823 - DNA, 25 bp, Homo sapien
aatcaagggccagtcatcaagctgc

SEQ ID NO: 2215824 - DNA, 25 bp, Homo sapien
tgagtaatatgccaatccaagactg

SEQ ID NO: 2215825 - DNA, 25 bp, Homo sapien
ccagggagaaggctccgtctgtgct

SEQ ID NO: 2215826 - DNA, 25 bp, Homo sapien
cgatgtggacgaagagtgaggaaga

SEQ ID NO: 2215827 - DNA, 25 bp, Homo sapien
caagttggcagtgctcgatgtggac

SEQ ID NO: 2215828 - DNA, 25 bp, Homo sapien
tggaaaagtcacaaggaccatctcc

SEQ ID NO: 2215829 - DNA, 25 bp, Homo sapien
tacccaagtgattgaccagtggccc

SEQ ID NO: 2215830 - DNA, 25 bp, Homo sapien
tgagatttaccacagggaaggccca

SEQ ID NO: 2215831 - DNA, 25 bp, Homo sapien
gagcaagcgctctatctttcacaca

SEQ ID NO: 2215832 - DNA, 25 bp, Homo sapien
tcctgcattggaacctggagcaagc

SEQ ID NO: 2215833 - DNA, 25 bp, Homo sapien
tatgggaacctgtactctgcagagg

SEQ ID NO: 2215834 - DNA, 25 bp, Homo sapien
tgagaagccttagaatgggtggccc

SEQ ID NO: 2215835 - DNA, 25 bp, Homo sapien
taagccacttggatgctgacagcag

SEQ ID NO: 2215836 - DNA, 25 bp, Homo sapien
actgtcctacagtgaagtgcctggg

SEQ ID NO: 2215837 - DNA, 25 bp, Homo sapien
attgtttgttgttccacagcagtct

SEQ ID NO: 2215838 - DNA, 25 bp, Homo sapien
ttgtttgttgttccacagcagtctc

SEQ ID NO: 2215839 - DNA, 25 bp, Homo sapien
tattgtttgttgttccacagcagtc

SEQ ID NO: 2215840 - DNA, 25 bp, Homo sapien
tgtttgttgttccacagcagtctcc

SEQ ID NO: 2215841 - DNA, 25 bp, Homo sapien
cagtcaaaatagtcttcccctggat

SEQ ID NO: 2215842 - DNA, 25 bp, Homo sapien
aggcccaagtcaccaagatcttcag

SEQ ID NO: 2215843 - DNA, 25 bp, Homo sapien
tactgggtcctatcattgcagtcaa

SEQ ID NO: 2215844 - DNA, 25 bp, Homo sapien
tcccctggatatttggttcccacca

SEQ ID NO: 2215845 - DNA, 25 bp, Homo sapien
tccaagcctagattgagtaaatgtt

SEQ ID NO: 2215846 - DNA, 25 bp, Homo sapien
caagcctagattgagtaaatgttgc

SEQ ID NO: 2215847 - DNA, 25 bp, Homo sapien
ctgatcatccaagcctagattgagt

SEQ ID NO: 2215848 - DNA, 25 bp, Homo sapien
tcatccaagcctagattgagtaaat

SEQ ID NO: 2215849 - DNA, 25 bp, Homo sapien
ggcagatactgatgactctgttcat

SEQ ID NO: 2215850 - DNA, 25 bp, Homo sapien
taatcagcaggcagatactgatgac

SEQ ID NO: 2215851 - DNA, 25 bp, Homo sapien
agataatcagcaggcagatactgat

SEQ ID NO: 2215852 - DNA, 25 bp, Homo sapien
tcagcaggcagatactgatgactct

SEQ ID NO: 2215853 - DNA, 25 bp, Homo sapien
ccaggtctggtgcatttttggtagt

SEQ ID NO: 2215854 - DNA, 25 bp, Homo sapien
tggtagtgtgtcctcctcatcaaga

SEQ ID NO: 2215855 - DNA, 25 bp, Homo sapien
tctgtttatacaccaggtctggtgc

SEQ ID NO: 2215856 - DNA, 25 bp, Homo sapien
tcaagacaatagagtgtgtgcaggg

SEQ ID NO: 2215857 - DNA, 25 bp, Homo sapien
tccccccgccacaagtagggatgca

SEQ ID NO: 2215858 - DNA, 25 bp, Homo sapien
ttccccccgccacaagtagggatgc

SEQ ID NO: 2215859 - DNA, 25 bp, Homo sapien
cccgccacaagtagggatgcaccac

SEQ ID NO: 2215860 - DNA, 25 bp, Homo sapien
cccccgccacaagtagggatgcacc

SEQ ID NO: 2215861 - DNA, 25 bp, Homo sapien
ctgtcaacagccaaagaggagcctc

SEQ ID NO: 2215862 - DNA, 25 bp, Homo sapien
agctgggctacctcccaagcctggc

SEQ ID NO: 2215863 - DNA, 25 bp, Homo sapien
accactgtcaacagccaaagaggag

SEQ ID NO: 2215864 - DNA, 25 bp, Homo sapien
ttcagctgggctacctcccaagcct

SEQ ID NO: 2215865 - DNA, 25 bp, Homo sapien
ccagttctttttcagcaagggcagc

SEQ ID NO: 2215866 - DNA, 25 bp, Homo sapien
ttttccttgtgtgatggcaggaaaa

SEQ ID NO: 2215867 - DNA, 25 bp, Homo sapien
ctttttcagcaagggcagctgtttt

SEQ ID NO: 2215868 - DNA, 25 bp, Homo sapien
tgttttccttgtgtgatggcaggaa

SEQ ID NO: 2215869 - DNA, 25 bp, Homo sapien
ttcccacgcatgagtgacaacacac

SEQ ID NO: 2215870 - DNA, 25 bp, Homo sapien
catactctggatatgatttgcctgc

SEQ ID NO: 2215871 - DNA, 25 bp, Homo sapien
gatatgatttgcctgcacatcagtg

SEQ ID NO: 2215872 - DNA, 25 bp, Homo sapien
tactctggatatgatttgcctgcac

SEQ ID NO: 2215873 - DNA, 25 bp, Homo sapien
tctggatatgatttgcctgcacatc

SEQ ID NO: 2215874 - DNA, 25 bp, Homo sapien
gaagctgcacttacagctgccccat

SEQ ID NO: 2215875 - DNA, 25 bp, Homo sapien
tcttagcttgcttggcttagtggta

SEQ ID NO: 2215876 - DNA, 25 bp, Homo sapien
tgatgggctccgctcagtttgaact

SEQ ID NO: 2215877 - DNA, 25 bp, Homo sapien
gcttagtggtagtgggatccactga

SEQ ID NO: 2215878 - DNA, 25 bp, Homo sapien
ttatacctacgtgatacagtttggg

SEQ ID NO: 2215879 - DNA, 25 bp, Homo sapien
aattggtatcactccttgaaactgg

SEQ ID NO: 2215880 - DNA, 25 bp, Homo sapien
ccaatggtgaaggtatgcctagtgg

SEQ ID NO: 2215881 - DNA, 25 bp, Homo sapien
ggatcacagggtaggatacctcctg

SEQ ID NO: 2215882 - DNA, 25 bp, Homo sapien
aggagccagacttcacgcgtcccat

SEQ ID NO: 2215883 - DNA, 25 bp, Homo sapien
taggagccagacttcacgcgtccca

SEQ ID NO: 2215884 - DNA, 25 bp, Homo sapien
ctaggagccagacttcacgcgtccc

SEQ ID NO: 2215885 - DNA, 25 bp, Homo sapien
gagttttggtctctattagcatgcg

SEQ ID NO: 2215886 - DNA, 25 bp, Homo sapien
tattagcatgcggtctggctttcga

SEQ ID NO: 2215887 - DNA, 25 bp, Homo sapien
ttcgaagtatcactagcaaaaccat

SEQ ID NO: 2215888 - DNA, 25 bp, Homo sapien
cggtctggctttcgaagtatcacta

SEQ ID NO: 2215889 - DNA, 25 bp, Homo sapien
ctggacatctttggcaccactacta

SEQ ID NO: 2215890 - DNA, 25 bp, Homo sapien
tggacatctttggcaccactactat

SEQ ID NO: 2215891 - DNA, 25 bp, Homo sapien
tctggacatctttggcaccactact

SEQ ID NO: 2215892 - DNA, 25 bp, Homo sapien
gagaggtcaccacatgatcaccaca

SEQ ID NO: 2215893 - DNA, 25 bp, Homo sapien
caggtgctgatcttgctcattagta

SEQ ID NO: 2215894 - DNA, 25 bp, Homo sapien
caagagtcttatcccagccatctgg

SEQ ID NO: 2215895 - DNA, 25 bp, Homo sapien
tcactgcaaatagctgaactctggt

SEQ ID NO: 2215896 - DNA, 25 bp, Homo sapien
gccatgagtgtgtaagaagtccttg

SEQ ID NO: 2215897 - DNA, 25 bp, Homo sapien
tcaagctggccaacgcttagggaaa

SEQ ID NO: 2215898 - DNA, 25 bp, Homo sapien
ggatccccgataagagttgttggca

SEQ ID NO: 2215899 - DNA, 25 bp, Homo sapien
gaaggctctaccgatcttcacaaca

SEQ ID NO: 2215900 - DNA, 25 bp, Homo sapien
ccatcagttcctcgggtagaaatct

SEQ ID NO: 2215901 - DNA, 25 bp, Homo sapien
gccatgtcttcccaatgggtggaga

SEQ ID NO: 2215902 - DNA, 25 bp, Homo sapien
tccagtaggactgaatgccacccat

SEQ ID NO: 2215903 - DNA, 25 bp, Homo sapien
gtgcaattatacctcctactggcca

SEQ ID NO: 2215904 - DNA, 25 bp, Homo sapien
tcaacattgaattcttccttttgca

SEQ ID NO: 2215905 - DNA, 25 bp, Homo sapien
aacattgaattcttccttttgcaga

SEQ ID NO: 2215906 - DNA, 25 bp, Homo sapien
caacattgaattcttccttttgcag

SEQ ID NO: 2215907 - DNA, 25 bp, Homo sapien
acattgaattcttccttttgcagac

SEQ ID NO: 2215908 - DNA, 25 bp, Homo sapien
ccttggcgaagtatggagacacctg

SEQ ID NO: 2215909 - DNA, 25 bp, Homo sapien
tgactgcccatccattaagcctagg

SEQ ID NO: 2215910 - DNA, 25 bp, Homo sapien
aaaaaacttgcataggagcctggga

SEQ ID NO: 2215911 - DNA, 25 bp, Homo sapien
gaaactgcccatgctacaaccttgg

SEQ ID NO: 2215912 - DNA, 25 bp, Homo sapien
actttcatctccaggaagtctgcct

SEQ ID NO: 2215913 - DNA, 25 bp, Homo sapien
tcaactttcatctccaggaagtctg

SEQ ID NO: 2215914 - DNA, 25 bp, Homo sapien
tcatctccaggaagtctgccttgag

SEQ ID NO: 2215915 - DNA, 25 bp, Homo sapien
atctccaggaagtctgccttgagaa

SEQ ID NO: 2215916 - DNA, 25 bp, Homo sapien
ctgtggataaagaaagacgtttcac

SEQ ID NO: 2215917 - DNA, 25 bp, Homo sapien
tggataaagaaagacgtttcactaa

SEQ ID NO: 2215918 - DNA, 25 bp, Homo sapien
ataaagaaagacgtttcactaagat

SEQ ID NO: 2215919 - DNA, 25 bp, Homo sapien
tgtggataaagaaagacgtttcact

SEQ ID NO: 2215920 - DNA, 25 bp, Homo sapien
tcctgttttccgggaagctgtttca

SEQ ID NO: 2215921 - DNA, 25 bp, Homo sapien
agctgtttcaaaaaacctggtcctg

SEQ ID NO: 2215922 - DNA, 25 bp, Homo sapien
tcaaaaaacctggtcctggaagcca

SEQ ID NO: 2215923 - DNA, 25 bp, Homo sapien
tcctggaggccgcactttgctgaaa

SEQ ID NO: 2215924 - DNA, 25 bp, Homo sapien
cccgcattgccagccacaatatctg

SEQ ID NO: 2215925 - DNA, 25 bp, Homo sapien
gatgatgtgatttcccccgcattgc

SEQ ID NO: 2215926 - DNA, 25 bp, Homo sapien
gggcggatgatggttggcttttctc

SEQ ID NO: 2215927 - DNA, 25 bp, Homo sapien
ctgggccaacttccttggcctccat

SEQ ID NO: 2215928 - DNA, 25 bp, Homo sapien
gccatccaaaataggcctgcttggg

SEQ ID NO: 2215929 - DNA, 25 bp, Homo sapien
cctggcatgggtccattggtggcct

SEQ ID NO: 2215930 - DNA, 25 bp, Homo sapien
tgggcagggctccaacttgccatcc

SEQ ID NO: 2215931 - DNA, 25 bp, Homo sapien
ggagctggtctctttatgtggaaag

SEQ ID NO: 2215932 - DNA, 25 bp, Homo sapien
gatagtaccattcggtgtttgatgt

SEQ ID NO: 2215933 - DNA, 25 bp, Homo sapien
cattcggtgtttgatgttggatttc

SEQ ID NO: 2215934 - DNA, 25 bp, Homo sapien
ctggtgatagtaccattcggtgttt

SEQ ID NO: 2215935 - DNA, 25 bp, Homo sapien
taccattcggtgtttgatgttggat

SEQ ID NO: 2215936 - DNA, 25 bp, Homo sapien
taggaaaagttggtgccaagaggga

SEQ ID NO: 2215937 - DNA, 25 bp, Homo sapien
aaaagttggtgccaagagggaagat

SEQ ID NO: 2215938 - DNA, 25 bp, Homo sapien
gaaaagttggtgccaagagggaaga

SEQ ID NO: 2215939 - DNA, 25 bp, Homo sapien
ctaggaaaagttggtgccaagaggg

SEQ ID NO: 2215940 - DNA, 25 bp, Homo sapien
caagagcgccaaataactagagcct

SEQ ID NO: 2215941 - DNA, 25 bp, Homo sapien
taccaaaggctcacaaataatggca

SEQ ID NO: 2215942 - DNA, 25 bp, Homo sapien
taatggcatgaacatgagcacaaga

SEQ ID NO: 2215943 - DNA, 25 bp, Homo sapien
gcataagtgcaaccagacagaggcc

SEQ ID NO: 2215944 - DNA, 25 bp, Homo sapien
tatgcatatatgcattctagaatgc

SEQ ID NO: 2215945 - DNA, 25 bp, Homo sapien
tgacaaagctaatcaggataagcta

SEQ ID NO: 2215946 - DNA, 25 bp, Homo sapien
gctaatcaggataagctacatcaaa

SEQ ID NO: 2215947 - DNA, 25 bp, Homo sapien
caaagctaatcaggataagctacat

SEQ ID NO: 2215948 - DNA, 25 bp, Homo sapien
gagctctaaactggcaccacccgta

SEQ ID NO: 2215949 - DNA, 25 bp, Homo sapien
taaactggcaccacccgtagtgctc

SEQ ID NO: 2215950 - DNA, 25 bp, Homo sapien
accacccgtagtgctcacatgtctg

SEQ ID NO: 2215951 - DNA, 25 bp, Homo sapien
cgtagtgctcacatgtctgatttta

SEQ ID NO: 2215952 - DNA, 25 bp, Homo sapien
gctttcaggaccacagtccaagccc

SEQ ID NO: 2215953 - DNA, 25 bp, Homo sapien
tttcaggaccacagtccaagcccat

SEQ ID NO: 2215954 - DNA, 25 bp, Homo sapien
ctgctttcaggaccacagtccaagc

SEQ ID NO: 2215955 - DNA, 25 bp, Homo sapien
tgctttcaggaccacagtccaagcc

SEQ ID NO: 2215956 - DNA, 25 bp, Homo sapien
gcttggccagtcttggcattctcat

SEQ ID NO: 2215957 - DNA, 25 bp, Homo sapien
tcaataggcaaggtaatcttcacac

SEQ ID NO: 2215958 - DNA, 25 bp, Homo sapien
gcagtgacaaagtcaataggcaagg

SEQ ID NO: 2215959 - DNA, 25 bp, Homo sapien
tcagccagcaggtatgccagaagcc

SEQ ID NO: 2215960 - DNA, 25 bp, Homo sapien
cagcatattattgatcaggtggatc

SEQ ID NO: 2215961 - DNA, 25 bp, Homo sapien
tcttctcagcttgggacattaggtc

SEQ ID NO: 2215962 - DNA, 25 bp, Homo sapien
tcttcatcaaacagagaagtgccag

SEQ ID NO: 2215963 - DNA, 25 bp, Homo sapien
ttaggtctttgacaatcttggctcc

SEQ ID NO: 2215964 - DNA, 25 bp, Homo sapien
tccacccagaatggccaggaagggt

SEQ ID NO: 2215965 - DNA, 25 bp, Homo sapien
ctccacccagaatggccaggaaggg

SEQ ID NO: 2215966 - DNA, 25 bp, Homo sapien
cacccagaatggccaggaagggtcg

SEQ ID NO: 2215967 - DNA, 25 bp, Homo sapien
ccacccagaatggccaggaagggtc

SEQ ID NO: 2215968 - DNA, 25 bp, Homo sapien
acatgcacattccctagcttggaaa

SEQ ID NO: 2215969 - DNA, 25 bp, Homo sapien
catgcacattccctagcttggaaag

SEQ ID NO: 2215970 - DNA, 25 bp, Homo sapien
tgggcctacacagtctttcaagaac

SEQ ID NO: 2215971 - DNA, 25 bp, Homo sapien
tcttccacatgaaagtggaggttct

SEQ ID NO: 2215972 - DNA, 25 bp, Homo sapien
ccttgcccagcagagatttgaattc

SEQ ID NO: 2215973 - DNA, 25 bp, Homo sapien
cagctgggttggcacaggctttctc

SEQ ID NO: 2215974 - DNA, 25 bp, Homo sapien
ctaaggagtattgtcaggcataggg

SEQ ID NO: 2215975 - DNA, 25 bp, Homo sapien
gatgcttaagacagtagccttaatc

SEQ ID NO: 2215976 - DNA, 25 bp, Homo sapien
gcttaagacagtagccttaatcctc

SEQ ID NO: 2215977 - DNA, 25 bp, Homo sapien
ttaagacagtagccttaatcctctg

SEQ ID NO: 2215978 - DNA, 25 bp, Homo sapien
tgcttaagacagtagccttaatcct

SEQ ID NO: 2215979 - DNA, 25 bp, Homo sapien
ctacacaggaacattgaagtccact

SEQ ID NO: 2215980 - DNA, 25 bp, Homo sapien
aacattgaagtccactctcataatg

SEQ ID NO: 2215981 - DNA, 25 bp, Homo sapien
acaggaacattgaagtccactctca

SEQ ID NO: 2215982 - DNA, 25 bp, Homo sapien
tacacaggaacattgaagtccactc

SEQ ID NO: 2215983 - DNA, 25 bp, Homo sapien
ggtttgtccaatgtcagcttgttag

SEQ ID NO: 2215984 - DNA, 25 bp, Homo sapien
ccgctgccctttgacgtctggtttg

SEQ ID NO: 2215985 - DNA, 25 bp, Homo sapien
tggagagaggtcgatgattcagaca

SEQ ID NO: 2215986 - DNA, 25 bp, Homo sapien
gaaatggagagaggtcgatgattca

SEQ ID NO: 2215987 - DNA, 25 bp, Homo sapien
tttcctcaggtggacctaaatagat

SEQ ID NO: 2215988 - DNA, 25 bp, Homo sapien
ttcttgctgtcacccgaggcggagg

SEQ ID NO: 2215989 - DNA, 25 bp, Homo sapien
tcgcagcaagcgctttgaaatcgtg

SEQ ID NO: 2215990 - DNA, 25 bp, Homo sapien
aggcactggcggtgcagcgctttcc

SEQ ID NO: 2215991 - DNA, 25 bp, Homo sapien
tgatgttcatcatggcggccacagt

SEQ ID NO: 2215992 - DNA, 25 bp, Homo sapien
caaagtgctcgattagtatttccac

SEQ ID NO: 2215993 - DNA, 25 bp, Homo sapien
ccaaagattactcccatgttggagg

SEQ ID NO: 2215994 - DNA, 25 bp, Homo sapien
gggtcataagattctctttgctgtg

SEQ ID NO: 2215995 - DNA, 25 bp, Homo sapien
cctaggtttaccaagagcaaagcac

SEQ ID NO: 2215996 - DNA, 25 bp, Homo sapien
taagccctagacaaagctgagtacc

SEQ ID NO: 2215997 - DNA, 25 bp, Homo sapien
aaaggctaaaccacaagggcacttg

SEQ ID NO: 2215998 - DNA, 25 bp, Homo sapien
agtatctccatgctaacaccaagtg

SEQ ID NO: 2215999 - DNA, 25 bp, Homo sapien
gaattaggcctggagcttgcttcca

SEQ ID NO: 2216000 - DNA, 25 bp, Homo sapien
tattccactggtagtaagattgcca

SEQ ID NO: 2216001 - DNA, 25 bp, Homo sapien
caagtcttttttcgtctgcctgctg

SEQ ID NO: 2216002 - DNA, 25 bp, Homo sapien
ccttcagaatggtagcccaggccta

SEQ ID NO: 2216003 - DNA, 25 bp, Homo sapien
tctaattaggaggtacataaggtgg

SEQ ID NO: 2216004 - DNA, 25 bp, Homo sapien
gcccaatagttttgattcatgtcta

SEQ ID NO: 2216005 - DNA, 25 bp, Homo sapien
tgatcaattacttaaggtggtgtct

SEQ ID NO: 2216006 - DNA, 25 bp, Homo sapien
tgcacttggcctgttccgttattac

SEQ ID NO: 2216007 - DNA, 25 bp, Homo sapien
caagtgtcttatcagaagttccagc

SEQ ID NO: 2216008 - DNA, 25 bp, Homo sapien
gaatagctcctaggcggtaatccag

SEQ ID NO: 2216009 - DNA, 25 bp, Homo sapien
ctcggttcttttctggtagcttata

SEQ ID NO: 2216010 - DNA, 25 bp, Homo sapien
tatataccagggagtgaatagctcc

SEQ ID NO: 2216011 - DNA, 25 bp, Homo sapien
cttccttgtggtactgagaagtgtg

SEQ ID NO: 2216012 - DNA, 25 bp, Homo sapien
cttgtggtactgagaagtgtgctgc

SEQ ID NO: 2216013 - DNA, 25 bp, Homo sapien
tccttgtggtactgagaagtgtgct

SEQ ID NO: 2216014 - DNA, 25 bp, Homo sapien
tgcctctggattcctgttaaaatca

SEQ ID NO: 2216015 - DNA, 25 bp, Homo sapien
ctttgtgaagtctataggtcatgac

SEQ ID NO: 2216016 - DNA, 25 bp, Homo sapien
cagctctttgtgaagtctataggtc

SEQ ID NO: 2216017 - DNA, 25 bp, Homo sapien
cagagaccagctctttgtgaagtct

SEQ ID NO: 2216018 - DNA, 25 bp, Homo sapien
tgaagtctataggtcatgacaggtt

SEQ ID NO: 2216019 - DNA, 25 bp, Homo sapien
tcatctttgaaaagggccaccctgc

SEQ ID NO: 2216020 - DNA, 25 bp, Homo sapien
gaccctctcatctttgaaaagggcc

SEQ ID NO: 2216021 - DNA, 25 bp, Homo sapien
cactcgcactttcaggcttgaccct

SEQ ID NO: 2216022 - DNA, 25 bp, Homo sapien
aggcttgaccctctcatctttgaaa

SEQ ID NO: 2216023 - DNA, 25 bp, Homo sapien
aaatcaacatctcctgggcatttag

SEQ ID NO: 2216024 - DNA, 25 bp, Homo sapien
ttcaaggagctggtgattgtcttaa

SEQ ID NO: 2216025 - DNA, 25 bp, Homo sapien
gattgtcttaatgtcccagtcacta

SEQ ID NO: 2216026 - DNA, 25 bp, Homo sapien
tcaacatctcctgggcatttaggat

SEQ ID NO: 2216027 - DNA, 25 bp, Homo sapien
tttgagcaggtaccagctgcctcca

SEQ ID NO: 2216028 - DNA, 25 bp, Homo sapien
agatctactgtgatgtgctggcaaa

SEQ ID NO: 2216029 - DNA, 25 bp, Homo sapien
tgtacagttacaccttttgagcagg

SEQ ID NO: 2216030 - DNA, 25 bp, Homo sapien
ccattaatggtgcaatactagaagc

SEQ ID NO: 2216031 - DNA, 25 bp, Homo sapien
cgctcccggtccctggcccgtcagc

SEQ ID NO: 2216032 - DNA, 25 bp, Homo sapien
tcccggtccctggcccgtcagcgac

SEQ ID NO: 2216033 - DNA, 25 bp, Homo sapien
tccgctcccggtccctggcccgtca

SEQ ID NO: 2216034 - DNA, 25 bp, Homo sapien
ctcccggtccctggcccgtcagcga

SEQ ID NO: 2216035 - DNA, 25 bp, Homo sapien
accaggcgacgctgaagcggcccat

SEQ ID NO: 2216036 - DNA, 25 bp, Homo sapien
ggcgaaccaggcgacgctgaagcgg

SEQ ID NO: 2216037 - DNA, 25 bp, Homo sapien
ctggcgaaccaggcgacgctgaagc

SEQ ID NO: 2216038 - DNA, 25 bp, Homo sapien
cgaaccaggcgacgctgaagcggcc

SEQ ID NO: 2216039 - DNA, 25 bp, Homo sapien
taacctcaagagatgcctgctgtac

SEQ ID NO: 2216040 - DNA, 25 bp, Homo sapien
tatctgggtaccaggtttaacctca

SEQ ID NO: 2216041 - DNA, 25 bp, Homo sapien
cctgaagctttgttatgtatctggg

SEQ ID NO: 2216042 - DNA, 25 bp, Homo sapien
tatgcaacggtatgggacaaggcca

SEQ ID NO: 2216043 - DNA, 25 bp, Homo sapien
cacacaatcatagagctccctggac

SEQ ID NO: 2216044 - DNA, 25 bp, Homo sapien
caatcatagagctccctggacactg

SEQ ID NO: 2216045 - DNA, 25 bp, Homo sapien
atagagctccctggacactgaacct

SEQ ID NO: 2216046 - DNA, 25 bp, Homo sapien
ttcacacaatcatagagctccctgg

SEQ ID NO: 2216047 - DNA, 25 bp, Homo sapien
tgacttaaatctaaccgaaaactgc

SEQ ID NO: 2216048 - DNA, 25 bp, Homo sapien
aatttctggaatattcacgttcgaa

SEQ ID NO: 2216049 - DNA, 25 bp, Homo sapien
cagagacagttgttctgatcagatg

SEQ ID NO: 2216050 - DNA, 25 bp, Homo sapien
cacgttcgaagattccttattaatg

SEQ ID NO: 2216051 - DNA, 25 bp, Homo sapien
gctgggattatcgaccacgatttcc

SEQ ID NO: 2216052 - DNA, 25 bp, Homo sapien
tgaaggactaagaacaacactgaaa

SEQ ID NO: 2216053 - DNA, 25 bp, Homo sapien
ttctgtcaaccagtttggagagcag

SEQ ID NO: 2216054 - DNA, 25 bp, Homo sapien
tgactaggccatgttgtaccataaa

SEQ ID NO: 2216055 - DNA, 25 bp, Homo sapien
tttgctctgaaagaaaaccacaaac

SEQ ID NO: 2216056 - DNA, 25 bp, Homo sapien
tccactatgctgaataccagattcc

SEQ ID NO: 2216057 - DNA, 25 bp, Homo sapien
tcatccactatgctgaataccagat

SEQ ID NO: 2216058 - DNA, 25 bp, Homo sapien
tatgctgaataccagattcctagag

SEQ ID NO: 2216059 - DNA, 25 bp, Homo sapien
ctacgtgtcatccactatgctgaat

SEQ ID NO: 2216060 - DNA, 25 bp, Homo sapien
tgtccctgagataatcagattggct

SEQ ID NO: 2216061 - DNA, 25 bp, Homo sapien
tgccaaggtggcttacaatggatcc

SEQ ID NO: 2216062 - DNA, 25 bp, Homo sapien
tcttacacgaggttccaagttgtcc

SEQ ID NO: 2216063 - DNA, 25 bp, Homo sapien
caaccaaccaacagcgtgattgaaa

SEQ ID NO: 2216064 - DNA, 25 bp, Homo sapien
ccagggtgggcaagtatgtgtatgt

SEQ ID NO: 2216065 - DNA, 25 bp, Homo sapien
cccagggtgggcaagtatgtgtatg

SEQ ID NO: 2216066 - DNA, 25 bp, Homo sapien
tgcccagggtgggcaagtatgtgta

SEQ ID NO: 2216067 - DNA, 25 bp, Homo sapien
agggtgggcaagtatgtgtatgttt

SEQ ID NO: 2216068 - DNA, 25 bp, Homo sapien
cacataaagtactcccaataagaat

SEQ ID NO: 2216069 - DNA, 25 bp, Homo sapien
aagtactcccaataagaattatcaa

SEQ ID NO: 2216070 - DNA, 25 bp, Homo sapien
acataaagtactcccaataagaatt

SEQ ID NO: 2216071 - DNA, 25 bp, Homo sapien
taaagtactcccaataagaattatc

SEQ ID NO: 2216072 - DNA, 25 bp, Homo sapien
ccacagtgcggtacaacccttctgt

SEQ ID NO: 2216073 - DNA, 25 bp, Homo sapien
tgcggtacaacccttctgtcttgat

SEQ ID NO: 2216074 - DNA, 25 bp, Homo sapien
cggtacaacccttctgtcttgatcc

SEQ ID NO: 2216075 - DNA, 25 bp, Homo sapien
cagtgcggtacaacccttctgtctt

SEQ ID NO: 2216076 - DNA, 25 bp, Homo sapien
cttcctgacaaacttgaagcccact

SEQ ID NO: 2216077 - DNA, 25 bp, Homo sapien
tcaataatattgatgcacttcctga

SEQ ID NO: 2216078 - DNA, 25 bp, Homo sapien
ctcaataatattgatgcacttcctg

SEQ ID NO: 2216079 - DNA, 25 bp, Homo sapien
tcctgacaaacttgaagcccacttc

SEQ ID NO: 2216080 - DNA, 25 bp, Homo sapien
tcaagcaaaggaaaagagttagatc

SEQ ID NO: 2216081 - DNA, 25 bp, Homo sapien
tgtttcaagcaaaggaaaagagtta

SEQ ID NO: 2216082 - DNA, 25 bp, Homo sapien
agcaaaggaaaagagttagatcctg

SEQ ID NO: 2216083 - DNA, 25 bp, Homo sapien
ctgtttcaagcaaaggaaaagagtt

SEQ ID NO: 2216084 - DNA, 25 bp, Homo sapien
gctgttttgttatagggctgtggta

SEQ ID NO: 2216085 - DNA, 25 bp, Homo sapien
tgttttgttatagggctgtggtaga

SEQ ID NO: 2216086 - DNA, 25 bp, Homo sapien
tttcttgctgttttgttatagggct

SEQ ID NO: 2216087 - DNA, 25 bp, Homo sapien
cttgctgttttgttatagggctgtg

SEQ ID NO: 2216088 - DNA, 25 bp, Homo sapien
catggcttccatccatagccttctg

SEQ ID NO: 2216089 - DNA, 25 bp, Homo sapien
tacttcagtgttaagtccaagggcc

SEQ ID NO: 2216090 - DNA, 25 bp, Homo sapien
aaaacagaacctcttgtcgatagac

SEQ ID NO: 2216091 - DNA, 25 bp, Homo sapien
gatagactccgtcttccttctcaca

SEQ ID NO: 2216092 - DNA, 25 bp, Homo sapien
ttccttctcacacagtacttcagtg

SEQ ID NO: 2216093 - DNA, 25 bp, Homo sapien
ttcacccaggatattcctaaagccc

SEQ ID NO: 2216094 - DNA, 25 bp, Homo sapien
tctcatactggcaatagtatttcac

SEQ ID NO: 2216095 - DNA, 25 bp, Homo sapien
catggtcagtgttttggtctctttc

SEQ ID NO: 2216096 - DNA, 25 bp, Homo sapien
ggcttctgctccataggcgtcatgg

SEQ ID NO: 2216097 - DNA, 25 bp, Homo sapien
cacagggagattctaaccttcacca

SEQ ID NO: 2216098 - DNA, 25 bp, Homo sapien
gattctaaccttcaccaactgcttc

SEQ ID NO: 2216099 - DNA, 25 bp, Homo sapien
tctggcttgctcaaaacctactctc

SEQ ID NO: 2216100 - DNA, 25 bp, Homo sapien
actgcacacagggagattctaacct

SEQ ID NO: 2216101 - DNA, 25 bp, Homo sapien
cacctggagattactatgagcacaa

SEQ ID NO: 2216102 - DNA, 25 bp, Homo sapien
gaagcctttagatatatgccccaaa

SEQ ID NO: 2216103 - DNA, 25 bp, Homo sapien
gcctttaggtgcagccactcaggag

SEQ ID NO: 2216104 - DNA, 25 bp, Homo sapien
taatgcagacgaagatatagggtac

SEQ ID NO: 2216105 - DNA, 25 bp, Homo sapien
aaattcacagccgacaagtggcagt

SEQ ID NO: 2216106 - DNA, 25 bp, Homo sapien
tagttcctggcttattgaaacccaa

SEQ ID NO: 2216107 - DNA, 25 bp, Homo sapien
tgaaacccaatggatacccctatgt

SEQ ID NO: 2216108 - DNA, 25 bp, Homo sapien
ggtctatgaacagtaagggtgccca

SEQ ID NO: 2216109 - DNA, 25 bp, Homo sapien
tctcttcccgggtactggagaaatg

SEQ ID NO: 2216110 - DNA, 25 bp, Homo sapien
gatagccttcaatagttggctgtcc

SEQ ID NO: 2216111 - DNA, 25 bp, Homo sapien
ttccatctcttcccgggtactggag

SEQ ID NO: 2216112 - DNA, 25 bp, Homo sapien
ctcttgtgtatagagatagccttca

SEQ ID NO: 2216113 - DNA, 25 bp, Homo sapien
ttaacttggttgtagtaggaagatg

SEQ ID NO: 2216114 - DNA, 25 bp, Homo sapien
gagaatgtgagagcccctagttcct

SEQ ID NO: 2216115 - DNA, 25 bp, Homo sapien
tctggagaatgtgagagcccctagt

SEQ ID NO: 2216116 - DNA, 25 bp, Homo sapien
taacttggttgtagtaggaagatgt

SEQ ID NO: 2216117 - DNA, 25 bp, Homo sapien
gcctggcacagagcttatgttcatt

SEQ ID NO: 2216118 - DNA, 25 bp, Homo sapien
gaaaaacttgcatgcatcttcatgg

SEQ ID NO: 2216119 - DNA, 25 bp, Homo sapien
ctctaccaggtagccaaatgctctg

SEQ ID NO: 2216120 - DNA, 25 bp, Homo sapien
taacacccattctaaagtcaccaac

SEQ ID NO: 2216121 - DNA, 25 bp, Homo sapien
tcaatcggaatggaaagaccggtga

SEQ ID NO: 2216122 - DNA, 25 bp, Homo sapien
tcggaatggaaagaccggtgagaaa

SEQ ID NO: 2216123 - DNA, 25 bp, Homo sapien
gaccggtgagaaaaatccacatgca

SEQ ID NO: 2216124 - DNA, 25 bp, Homo sapien
tggaaagaccggtgagaaaaatcca

SEQ ID NO: 2216125 - DNA, 25 bp, Homo sapien
ctgttgtttgtatgggaggaaatcc

SEQ ID NO: 2216126 - DNA, 25 bp, Homo sapien
tgtttgtatgggaggaaatcctgtg

SEQ ID NO: 2216127 - DNA, 25 bp, Homo sapien
tatgggaggaaatcctgtgtgagct

SEQ ID NO: 2216128 - DNA, 25 bp, Homo sapien
gggaggaaatcctgtgtgagctcca

SEQ ID NO: 2216129 - DNA, 25 bp, Homo sapien
aaattgtgcctctccttgtccacct

SEQ ID NO: 2216130 - DNA, 25 bp, Homo sapien
gactcgaaaaaattgtgcctctcct

SEQ ID NO: 2216131 - DNA, 25 bp, Homo sapien
cgaaaaaattgtgcctctccttgtc

SEQ ID NO: 2216132 - DNA, 25 bp, Homo sapien
agaggactcgaaaaaattgtgcctc

SEQ ID NO: 2216133 - DNA, 25 bp, Homo sapien
cagtaaagaataaaacctctcacca

SEQ ID NO: 2216134 - DNA, 25 bp, Homo sapien
gacaggtgtaagtgccgatccagta

SEQ ID NO: 2216135 - DNA, 25 bp, Homo sapien
taaagaataaaacctctcaccatcc

SEQ ID NO: 2216136 - DNA, 25 bp, Homo sapien
taagtgccgatccagtaaagaataa

SEQ ID NO: 2216137 - DNA, 25 bp, Homo sapien
tctatgacaaagagatatcctccca

SEQ ID NO: 2216138 - DNA, 25 bp, Homo sapien
tgacaaagagatatcctcccacatc

SEQ ID NO: 2216139 - DNA, 25 bp, Homo sapien
cttctatgacaaagagatatcctcc

SEQ ID NO: 2216140 - DNA, 25 bp, Homo sapien
tatgacaaagagatatcctcccaca

SEQ ID NO: 2216141 - DNA, 25 bp, Homo sapien
tgcttgaacaccagtcatttctaac

SEQ ID NO: 2216142 - DNA, 25 bp, Homo sapien
ttgcttgaacaccagtcatttctaa

SEQ ID NO: 2216143 - DNA, 25 bp, Homo sapien
aagggtttaatcagcaaatcactag

SEQ ID NO: 2216144 - DNA, 25 bp, Homo sapien
agggtttaatcagcaaatcactagc

SEQ ID NO: 2216145 - DNA, 25 bp, Homo sapien
gggtttaatcagcaaatcactagca

SEQ ID NO: 2216146 - DNA, 25 bp, Homo sapien
caagggtttaatcagcaaatcacta

SEQ ID NO: 2216147 - DNA, 25 bp, Homo sapien
tctgggatgggtacaaggaccagta

SEQ ID NO: 2216148 - DNA, 25 bp, Homo sapien
tcatgatggtactgccggtctaagg

SEQ ID NO: 2216149 - DNA, 25 bp, Homo sapien
cggtctaaggaccacacaaaaagat

SEQ ID NO: 2216150 - DNA, 25 bp, Homo sapien
tagtgacagatccagaattagagcc

SEQ ID NO: 2216151 - DNA, 25 bp, Homo sapien
cctctcattttctacctcgttgagc

SEQ ID NO: 2216152 - DNA, 25 bp, Homo sapien
tacctcgttgagcaattcagcaaat

SEQ ID NO: 2216153 - DNA, 25 bp, Homo sapien
ttttctacctcgttgagcaattcag

SEQ ID NO: 2216154 - DNA, 25 bp, Homo sapien
cctcgttgagcaattcagcaaattc

SEQ ID NO: 2216155 - DNA, 25 bp, Homo sapien
taataaaggttctccctatggcaat

SEQ ID NO: 2216156 - DNA, 25 bp, Homo sapien
cctcattaataaaggttctccctat

SEQ ID NO: 2216157 - DNA, 25 bp, Homo sapien
cttccttaattgtccagtgcatagt

SEQ ID NO: 2216158 - DNA, 25 bp, Homo sapien
tgcctctacaataccccaattttct

SEQ ID NO: 2216159 - DNA, 25 bp, Homo sapien
tgaaatgactgcagcgtctgggaaa

SEQ ID NO: 2216160 - DNA, 25 bp, Homo sapien
gcagcgtctgggaaaatttctgaac

SEQ ID NO: 2216161 - DNA, 25 bp, Homo sapien
gcgtctgggaaaatttctgaacagc

SEQ ID NO: 2216162 - DNA, 25 bp, Homo sapien
tgactgcagcgtctgggaaaatttc

SEQ ID NO: 2216163 - DNA, 25 bp, Homo sapien
atgttaaccagatgacagcctgggt

SEQ ID NO: 2216164 - DNA, 25 bp, Homo sapien
tggaagacgaagactccttaacttg

SEQ ID NO: 2216165 - DNA, 25 bp, Homo sapien
ttgttcacagagtatttatcaagag

SEQ ID NO: 2216166 - DNA, 25 bp, Homo sapien
ggatgctatctggaagacgaagact

SEQ ID NO: 2216167 - DNA, 25 bp, Homo sapien
tatgcatggacttactgagcctgag

SEQ ID NO: 2216168 - DNA, 25 bp, Homo sapien
taaaacaagttcaagcatttggctg

SEQ ID NO: 2216169 - DNA, 25 bp, Homo sapien
tttacacagaccaggttagcatggc

SEQ ID NO: 2216170 - DNA, 25 bp, Homo sapien
taatgaaaagctgacatcgttaagc

SEQ ID NO: 2216171 - DNA, 25 bp, Homo sapien
tttgacaatctagaataacattttc

SEQ ID NO: 2216172 - DNA, 25 bp, Homo sapien
cattttccactacaaatctaagcca

SEQ ID NO: 2216173 - DNA, 25 bp, Homo sapien
actacaaatctaagccacatgaatg

SEQ ID NO: 2216174 - DNA, 25 bp, Homo sapien
ttccactacaaatctaagccacatg

SEQ ID NO: 2216175 - DNA, 25 bp, Homo sapien
tcaggaaacctgctcaaagaccgaa

SEQ ID NO: 2216176 - DNA, 25 bp, Homo sapien
tatcgtgacgctacctagaaggtgc

SEQ ID NO: 2216177 - DNA, 25 bp, Homo sapien
ggcatgggtccattattagcataca

SEQ ID NO: 2216178 - DNA, 25 bp, Homo sapien
gccttagtctttatggtgaccaccc

SEQ ID NO: 2216179 - DNA, 25 bp, Homo sapien
ttgacataagcgctctagcctcaca

SEQ ID NO: 2216180 - DNA, 25 bp, Homo sapien
gggctttgacataagcgctctagcc

SEQ ID NO: 2216181 - DNA, 25 bp, Homo sapien
cataagcgctctagcctcacaacaa

SEQ ID NO: 2216182 - DNA, 25 bp, Homo sapien
tacaaaggggctttgacataagcgc

SEQ ID NO: 2216183 - DNA, 25 bp, Homo sapien
agatatggaagatgaacaacatgct

SEQ ID NO: 2216184 - DNA, 25 bp, Homo sapien
tctcacgtgcactaataaaattatc

SEQ ID NO: 2216185 - DNA, 25 bp, Homo sapien
gacaaagtggaatttatgccaataa

SEQ ID NO: 2216186 - DNA, 25 bp, Homo sapien
ttcccaactcagtctgtaaggccag

SEQ ID NO: 2216187 - DNA, 25 bp, Homo sapien
tcaatttcttcatttcagcaaccat

SEQ ID NO: 2216188 - DNA, 25 bp, Homo sapien
tttcacaatttccattgctcaattt

SEQ ID NO: 2216189 - DNA, 25 bp, Homo sapien
cacaatttccattgctcaatttctt

SEQ ID NO: 2216190 - DNA, 25 bp, Homo sapien
ctcaatttcttcatttcagcaacca

SEQ ID NO: 2216191 - DNA, 25 bp, Homo sapien
tacatttcatattctgaaactagtg

SEQ ID NO: 2216192 - DNA, 25 bp, Homo sapien
aaaaattcctctacatttcatattc

SEQ ID NO: 2216193 - DNA, 25 bp, Homo sapien
gtttggtaaacagagaatgaaatga

SEQ ID NO: 2216194 - DNA, 25 bp, Homo sapien
cagtcagtcatgttttgtttggtaa

SEQ ID NO: 2216195 - DNA, 25 bp, Homo sapien
tccagagatagggtatgcaagaaca

SEQ ID NO: 2216196 - DNA, 25 bp, Homo sapien
tgccaaaagggactctgctagtgtg

SEQ ID NO: 2216197 - DNA, 25 bp, Homo sapien
tacttaagagggacgtaggaggatc

SEQ ID NO: 2216198 - DNA, 25 bp, Homo sapien
agattacccaaatgagcccagtgta

SEQ ID NO: 2216199 - DNA, 25 bp, Homo sapien
catgaagatgaacacctttatgatg

SEQ ID NO: 2216200 - DNA, 25 bp, Homo sapien
gaactatcagataatatgtgcatgc

SEQ ID NO: 2216201 - DNA, 25 bp, Homo sapien
tctacagaccagataagccttccgg

SEQ ID NO: 2216202 - DNA, 25 bp, Homo sapien
tatcaaaatagacaattgacccttg

SEQ ID NO: 2216203 - DNA, 25 bp, Homo sapien
taataatgtcctacatcaggtacag

SEQ ID NO: 2216204 - DNA, 25 bp, Homo sapien
tattcccctagtctgctcattacag

SEQ ID NO: 2216205 - DNA, 25 bp, Homo sapien
atacgagcacatgacaccacctggc

SEQ ID NO: 2216206 - DNA, 25 bp, Homo sapien
aaaagaattcgtatgtgatgcaaac

SEQ ID NO: 2216207 - DNA, 25 bp, Homo sapien
ttaatgtacattagccctgccctgc

SEQ ID NO: 2216208 - DNA, 25 bp, Homo sapien
gaggccaactttctagagacagagg

SEQ ID NO: 2216209 - DNA, 25 bp, Homo sapien
ggtcctattcccacattggccaagg

SEQ ID NO: 2216210 - DNA, 25 bp, Homo sapien
ccagcttgttcaggcccagtatgca

SEQ ID NO: 2216211 - DNA, 25 bp, Homo sapien
gtcttcttgacacttctactttctg

SEQ ID NO: 2216212 - DNA, 25 bp, Homo sapien
cccagatgtcttcttgacacttcta

SEQ ID NO: 2216213 - DNA, 25 bp, Homo sapien
aaggccccagatgtcttcttgacac

SEQ ID NO: 2216214 - DNA, 25 bp, Homo sapien
gatgtcttcttgacacttctacttt

SEQ ID NO: 2216215 - DNA, 25 bp, Homo sapien
cttggagttcctcatatggcactat

SEQ ID NO: 2216216 - DNA, 25 bp, Homo sapien
ggaagttgaagtgtggccctcctgc

SEQ ID NO: 2216217 - DNA, 25 bp, Homo sapien
tggctctggaaagagttggaagttg

SEQ ID NO: 2216218 - DNA, 25 bp, Homo sapien
gctggacttactgctcaccacttgt

SEQ ID NO: 2216219 - DNA, 25 bp, Homo sapien
aagtcgctccgctggcacagtgtga

SEQ ID NO: 2216220 - DNA, 25 bp, Homo sapien
ctactttcagaaagtcgctccgctg

SEQ ID NO: 2216221 - DNA, 25 bp, Homo sapien
cgctccgctggcacagtgtgaggaa

SEQ ID NO: 2216222 - DNA, 25 bp, Homo sapien
cagaaagtcgctccgctggcacagt

SEQ ID NO: 2216223 - DNA, 25 bp, Homo sapien
ggacatacttgccaatgactctgag

SEQ ID NO: 2216224 - DNA, 25 bp, Homo sapien
tggttgactgcatccgcctaagaag

SEQ ID NO: 2216225 - DNA, 25 bp, Homo sapien
gaaggttgccacactggtcctagac

SEQ ID NO: 2216226 - DNA, 25 bp, Homo sapien
caaagttataaccatataggacata

SEQ ID NO: 2216227 - DNA, 25 bp, Homo sapien
tggcataaagggttggcttgcctgc

SEQ ID NO: 2216228 - DNA, 25 bp, Homo sapien
cctgcactctcgttggggatgttta

SEQ ID NO: 2216229 - DNA, 25 bp, Homo sapien
gcttgcctgcactctcgttggggat

SEQ ID NO: 2216230 - DNA, 25 bp, Homo sapien
tctgtgtatatgctttggcataaag

SEQ ID NO: 2216231 - DNA, 25 bp, Homo sapien
caagcagaaaaaaaacctccacaca

SEQ ID NO: 2216232 - DNA, 25 bp, Homo sapien
ttggatgtcactttgccccagacag

SEQ ID NO: 2216233 - DNA, 25 bp, Homo sapien
tggatgtcactttgccccagacagg

SEQ ID NO: 2216234 - DNA, 25 bp, Homo sapien
ggatgtcactttgccccagacaggg

SEQ ID NO: 2216235 - DNA, 25 bp, Homo sapien
cttggatgtcactttgccccagaca

SEQ ID NO: 2216236 - DNA, 25 bp, Homo sapien
acagcagattgtcccttaagaacaa

SEQ ID NO: 2216237 - DNA, 25 bp, Homo sapien
ctaacagtacagcagattgtccctt

SEQ ID NO: 2216238 - DNA, 25 bp, Homo sapien
gcagattgtcccttaagaacaatca

SEQ ID NO: 2216239 - DNA, 25 bp, Homo sapien
acagtacagcagattgtcccttaag

SEQ ID NO: 2216240 - DNA, 25 bp, Homo sapien
tggtggtgtggaaaggcttaaaggc

SEQ ID NO: 2216241 - DNA, 25 bp, Homo sapien
caatctcccttcccctggtggtgtg

SEQ ID NO: 2216242 - DNA, 25 bp, Homo sapien
aatctcccttcccctggtggtgtgg

SEQ ID NO: 2216243 - DNA, 25 bp, Homo sapien
cagctcagagaaacagctcatcgaa

SEQ ID NO: 2216244 - DNA, 25 bp, Homo sapien
tcagagaaacagctcatcgaagcct

SEQ ID NO: 2216245 - DNA, 25 bp, Homo sapien
gaaacagctcatcgaagccttgcac

SEQ ID NO: 2216246 - DNA, 25 bp, Homo sapien
cagctcatcgaagccttgcacttac

SEQ ID NO: 2216247 - DNA, 25 bp, Homo sapien
ttctcatagcgctgataagcgcgtt

SEQ ID NO: 2216248 - DNA, 25 bp, Homo sapien
acttgagcctctcgcggaaatcggg

SEQ ID NO: 2216249 - DNA, 25 bp, Homo sapien
tcgctgaactccagcgggggatgac

SEQ ID NO: 2216250 - DNA, 25 bp, Homo sapien
tgccgtctttgattacgtctttgat

SEQ ID NO: 2216251 - DNA, 25 bp, Homo sapien
ccagggagagctaactatcgcagtc

SEQ ID NO: 2216252 - DNA, 25 bp, Homo sapien
gatccttcctgagcaattgcaaacg

SEQ ID NO: 2216253 - DNA, 25 bp, Homo sapien
ccggagcgagcggaagacttccttg

SEQ ID NO: 2216254 - DNA, 25 bp, Homo sapien
ttgcaaacgtgacacttgggcccgc

SEQ ID NO: 2216255 - DNA, 25 bp, Homo sapien
gaaacgtagcctcgctccatagaca

SEQ ID NO: 2216256 - DNA, 25 bp, Homo sapien
catagacactgcagcgggaagagga

SEQ ID NO: 2216257 - DNA, 25 bp, Homo sapien
agccagggcggcaatgaaacgtagc

SEQ ID NO: 2216258 - DNA, 25 bp, Homo sapien
ttagagtttcctgaccagggcccgc

SEQ ID NO: 2216259 - DNA, 25 bp, Homo sapien
gagggctagcccagttagttttgga

SEQ ID NO: 2216260 - DNA, 25 bp, Homo sapien
ttccagtccttcaggtctatgacat

SEQ ID NO: 2216261 - DNA, 25 bp, Homo sapien
ctcctctgagggctagcccagttag

SEQ ID NO: 2216262 - DNA, 25 bp, Homo sapien
ctctgagggctagcccagttagttt

SEQ ID NO: 2216263 - DNA, 25 bp, Homo sapien
aacttgaagtcgctcggtagccggg

SEQ ID NO: 2216264 - DNA, 25 bp, Homo sapien
caactcctgagaacgggaaatgggc

SEQ ID NO: 2216265 - DNA, 25 bp, Homo sapien
cattccggcgcacgaaaacttgaag

SEQ ID NO: 2216266 - DNA, 25 bp, Homo sapien
ctttcctagaggtgccgtgatcgag

SEQ ID NO: 2216267 - DNA, 25 bp, Homo sapien
cgaccaaatcactcagcagctgttt

SEQ ID NO: 2216268 - DNA, 25 bp, Homo sapien
ccgaccaaatcactcagcagctgtt

SEQ ID NO: 2216269 - DNA, 25 bp, Homo sapien
gcatgagctaccgaacccgaccaaa

SEQ ID NO: 2216270 - DNA, 25 bp, Homo sapien
tgagctaccgaacccgaccaaatca

SEQ ID NO: 2216271 - DNA, 25 bp, Homo sapien
gcaagaactttggtctaagaatcaa

SEQ ID NO: 2216272 - DNA, 25 bp, Homo sapien
tggcaagaactttggtctaagaatc

SEQ ID NO: 2216273 - DNA, 25 bp, Homo sapien
gagtggcaagaactttggtctaaga

SEQ ID NO: 2216274 - DNA, 25 bp, Homo sapien
gacagagtggcaagaactttggtct

SEQ ID NO: 2216275 - DNA, 25 bp, Homo sapien
ggctgaggtaggaggatcacctgag

SEQ ID NO: 2216276 - DNA, 25 bp, Homo sapien
ctgggtgtggtggcgtgtgcctgta

SEQ ID NO: 2216277 - DNA, 25 bp, Homo sapien
catctgtacaaaaaataaaagttag

SEQ ID NO: 2216278 - DNA, 25 bp, Homo sapien
tgcctgtagtcccaattattcagga

SEQ ID NO: 2216279 - DNA, 25 bp, Homo sapien
gaactgatgtttgaaaggctgttct

SEQ ID NO: 2216280 - DNA, 25 bp, Homo sapien
tgtctctggcccttatttgtctaat

SEQ ID NO: 2216281 - DNA, 25 bp, Homo sapien
taaaagggagccatatagcactgtc

SEQ ID NO: 2216282 - DNA, 25 bp, Homo sapien
gcactgtcaccccttatttgaggaa

SEQ ID NO: 2216283 - DNA, 25 bp, Homo sapien
ggtccatttgggtgacaaccagtga

SEQ ID NO: 2216284 - DNA, 25 bp, Homo sapien
taggagtgggttcatacacggagaa

SEQ ID NO: 2216285 - DNA, 25 bp, Homo sapien
gagaataccagttcaggtgcagctc

SEQ ID NO: 2216286 - DNA, 25 bp, Homo sapien
tccttaaggcatgatggagtcaccg

SEQ ID NO: 2216287 - DNA, 25 bp, Homo sapien
catgcgtcactacacctaattggct

SEQ ID NO: 2216288 - DNA, 25 bp, Homo sapien
atgcgtcactacacctaattggcta

SEQ ID NO: 2216289 - DNA, 25 bp, Homo sapien
tgcgtcactacacctaattggctaa

SEQ ID NO: 2216290 - DNA, 25 bp, Homo sapien
gcgtcactacacctaattggctaat

SEQ ID NO: 2216291 - DNA, 25 bp, Homo sapien
cagagcctttgtactttgccatcac

SEQ ID NO: 2216292 - DNA, 25 bp, Homo sapien
cccagagggatggttaatgcatcac

SEQ ID NO: 2216293 - DNA, 25 bp, Homo sapien
tattaatagtcaagggatgcatctg

SEQ ID NO: 2216294 - DNA, 25 bp, Homo sapien
tggaacactgtatcagcagcatctg

SEQ ID NO: 2216295 - DNA, 25 bp, Homo sapien
taaaaacatggaagtgttgatgaat

SEQ ID NO: 2216296 - DNA, 25 bp, Homo sapien
tgaatgtgtgtgtcgtccttctgca

SEQ ID NO: 2216297 - DNA, 25 bp, Homo sapien
ttgatgaatgtgtgtgtcgtccttc

SEQ ID NO: 2216298 - DNA, 25 bp, Homo sapien
tgctaatattctccctatcgttcca

SEQ ID NO: 2216299 - DNA, 25 bp, Homo sapien
ttagaagaatcctgtcatgtacctc

SEQ ID NO: 2216300 - DNA, 25 bp, Homo sapien
tagaagaatcctgtcatgtacctct

SEQ ID NO: 2216301 - DNA, 25 bp, Homo sapien
agaagaatcctgtcatgtacctctc

SEQ ID NO: 2216302 - DNA, 25 bp, Homo sapien
ctacactgccatttcagttctatta

SEQ ID NO: 2216303 - DNA, 25 bp, Homo sapien
tacactgccatttcagttctattac

SEQ ID NO: 2216304 - DNA, 25 bp, Homo sapien
gccccactgtctgatgcttgcagga

SEQ ID NO: 2216305 - DNA, 25 bp, Homo sapien
ccactgtctgatgcttgcaggagct

SEQ ID NO: 2216306 - DNA, 25 bp, Homo sapien
cccactgtctgatgcttgcaggagc

SEQ ID NO: 2216307 - DNA, 25 bp, Homo sapien
cactgtctgatgcttgcaggagctt

SEQ ID NO: 2216308 - DNA, 25 bp, Homo sapien
gctcatagttgataccatcccattc

SEQ ID NO: 2216309 - DNA, 25 bp, Homo sapien
tgttagttctgcaccacactcctca

SEQ ID NO: 2216310 - DNA, 25 bp, Homo sapien
gttctgcaccacactcctcaatttg

SEQ ID NO: 2216311 - DNA, 25 bp, Homo sapien
cactcctcaatttgctcatagttga

SEQ ID NO: 2216312 - DNA, 25 bp, Homo sapien
tacacatgatttgttggaagcagct

SEQ ID NO: 2216313 - DNA, 25 bp, Homo sapien
tactagaggcaccacagcaaagaat

SEQ ID NO: 2216314 - DNA, 25 bp, Homo sapien
cagggttagggtctcaggtccagtc

SEQ ID NO: 2216315 - DNA, 25 bp, Homo sapien
gcttccgaaactgtgtactagaggc

SEQ ID NO: 2216316 - DNA, 25 bp, Homo sapien
tcagtggagggaaaactcgcagatg

SEQ ID NO: 2216317 - DNA, 25 bp, Homo sapien
gccaagttggaaaagtctggaaaga

SEQ ID NO: 2216318 - DNA, 25 bp, Homo sapien
aaactcgcagatgggggccaagttg

SEQ ID NO: 2216319 - DNA, 25 bp, Homo sapien
aaagaaggtgactccaacctggaag

SEQ ID NO: 2216320 - DNA, 25 bp, Homo sapien
ttcaggctctgttgccgggtcgcgc

SEQ ID NO: 2216321 - DNA, 25 bp, Homo sapien
gctgtatgggttttcccgtcggcca

SEQ ID NO: 2216322 - DNA, 25 bp, Homo sapien
tctctgctttcgagggcatttccag

SEQ ID NO: 2216323 - DNA, 25 bp, Homo sapien
tcttccagcgaagcctcgcgagtgg

SEQ ID NO: 2216324 - DNA, 25 bp, Homo sapien
cgaaaacgtttggacacgtctcatc

SEQ ID NO: 2216325 - DNA, 25 bp, Homo sapien
caagcgaaaacgtttggacacgtct

SEQ ID NO: 2216326 - DNA, 25 bp, Homo sapien
gacacgtctcatcttcataggcctc

SEQ ID NO: 2216327 - DNA, 25 bp, Homo sapien
cacgtctcatcttcataggcctcat

SEQ ID NO: 2216328 - DNA, 25 bp, Homo sapien
cagtgatcagtcacttctggacagg

SEQ ID NO: 2216329 - DNA, 25 bp, Homo sapien
gtgatcagtcacttctggacaggca

SEQ ID NO: 2216330 - DNA, 25 bp, Homo sapien
tcagtcacttctggacaggcagtcc

SEQ ID NO: 2216331 - DNA, 25 bp, Homo sapien
tgctctgtgcacttcttctcaccct

SEQ ID NO: 2216332 - DNA, 25 bp, Homo sapien
ttctcttgctggagacacaactcac

SEQ ID NO: 2216333 - DNA, 25 bp, Homo sapien
tagttctggcagcatattctcttgc

SEQ ID NO: 2216334 - DNA, 25 bp, Homo sapien
tggtgcccaggattgccaggccagc

SEQ ID NO: 2216335 - DNA, 25 bp, Homo sapien
ggtggagatagttctggcagcatat

SEQ ID NO: 2216336 - DNA, 25 bp, Homo sapien
agtcatggtccttagagcaagagtg

SEQ ID NO: 2216337 - DNA, 25 bp, Homo sapien
aagagtggggactaatgccttcgtc

SEQ ID NO: 2216338 - DNA, 25 bp, Homo sapien
ccttcgtcatctttgttaagggagg

SEQ ID NO: 2216339 - DNA, 25 bp, Homo sapien
tcatggtccttagagcaagagtggg

SEQ ID NO: 2216340 - DNA, 25 bp, Homo sapien
ccaagttaagtgggacctgcactgg

SEQ ID NO: 2216341 - DNA, 25 bp, Homo sapien
tctccaagttaagtgggacctgcac

SEQ ID NO: 2216342 - DNA, 25 bp, Homo sapien
tggggcttctccaagttaagtggga

SEQ ID NO: 2216343 - DNA, 25 bp, Homo sapien
ttctccaagttaagtgggacctgca

SEQ ID NO: 2216344 - DNA, 25 bp, Homo sapien
agaccaactccaacgcggcaggcaa

SEQ ID NO: 2216345 - DNA, 25 bp, Homo sapien
ccagcgttggcgtggttgacaagaa

SEQ ID NO: 2216346 - DNA, 25 bp, Homo sapien
aagcagctgcgcaaggagtcccaga

SEQ ID NO: 2216347 - DNA, 25 bp, Homo sapien
agaaagaccgcaagaacccgctgcc

SEQ ID NO: 2216348 - DNA, 25 bp, Homo sapien
tgactttggatgagtggaaggctat

SEQ ID NO: 2216349 - DNA, 25 bp, Homo sapien
tcaaaataaggactgggcaaaagta

SEQ ID NO: 2216350 - DNA, 25 bp, Homo sapien
ggagggtccaaaagagatgactttg

SEQ ID NO: 2216351 - DNA, 25 bp, Homo sapien
ccgtcatttccggaagccagcaaat

SEQ ID NO: 2216352 - DNA, 25 bp, Homo sapien
gtccaactgtgtaactgtgtgaggg

SEQ ID NO: 2216353 - DNA, 25 bp, Homo sapien
tgtgagggtgtcatacttcttctcc

SEQ ID NO: 2216354 - DNA, 25 bp, Homo sapien
gactgagtttatgaagagtgggctt

SEQ ID NO: 2216355 - DNA, 25 bp, Homo sapien
ttctgactgagtttatgaagagtgg

SEQ ID NO: 2216356 - DNA, 25 bp, Homo sapien
cagacatcaagcaaagaattcctca

SEQ ID NO: 2216357 - DNA, 25 bp, Homo sapien
tcctcaaaatgatccctaattacaa

SEQ ID NO: 2216358 - DNA, 25 bp, Homo sapien
tagaggcattgagagtgcatagtaa

SEQ ID NO: 2216359 - DNA, 25 bp, Homo sapien
gaggaagaaacggacagcatgagca

SEQ ID NO: 2216360 - DNA, 25 bp, Homo sapien
tgagtggctgatgtgtcatgcctca

SEQ ID NO: 2216361 - DNA, 25 bp, Homo sapien
tcaacccatcagtccagaactgctt

SEQ ID NO: 2216362 - DNA, 25 bp, Homo sapien
tctgagtggctgatgtgtcatgcct

SEQ ID NO: 2216363 - DNA, 25 bp, Homo sapien
gacacaataagatagcgcatcaacc

SEQ ID NO: 2216364 - DNA, 25 bp, Homo sapien
gcacgcacacccctatgaggaagac

SEQ ID NO: 2216365 - DNA, 25 bp, Homo sapien
tcatgcccagcagtggaccctggaa

SEQ ID NO: 2216366 - DNA, 25 bp, Homo sapien
ctgagttgcccagcgagggcacgca

SEQ ID NO: 2216367 - DNA, 25 bp, Homo sapien
agttgcccagcgagggcacgcacac

SEQ ID NO: 2216368 - DNA, 25 bp, Homo sapien
tctgttgccatttgtgtaaatacta

SEQ ID NO: 2216369 - DNA, 25 bp, Homo sapien
cttccaggtggcagtcggaagggtt

SEQ ID NO: 2216370 - DNA, 25 bp, Homo sapien
tgtttctgttgccatttgtgtaaat

SEQ ID NO: 2216371 - DNA, 25 bp, Homo sapien
gtttctgttgccatttgtgtaaata

SEQ ID NO: 2216372 - DNA, 25 bp, Homo sapien
aaacatcgtggcaatgtcaacctgg

SEQ ID NO: 2216373 - DNA, 25 bp, Homo sapien
caggtccttgtagtagatggttgga

SEQ ID NO: 2216374 - DNA, 25 bp, Homo sapien
ggtccttgtagtagatggttggagg

SEQ ID NO: 2216375 - DNA, 25 bp, Homo sapien
acatcgtggcaatgtcaacctggta

SEQ ID NO: 2216376 - DNA, 25 bp, Homo sapien
catcttctcaactgtgccacgataa

SEQ ID NO: 2216377 - DNA, 25 bp, Homo sapien
acgataatcacttgctaccgttggg

SEQ ID NO: 2216378 - DNA, 25 bp, Homo sapien
tccttttcgatgtaagcagcttttg

SEQ ID NO: 2216379 - DNA, 25 bp, Homo sapien
ttttaatgtacactccttttcgatg

SEQ ID NO: 2216380 - DNA, 25 bp, Homo sapien
ttggtgcttacaaccctggctctcc

SEQ ID NO: 2216381 - DNA, 25 bp, Homo sapien
gtttgtgttgtctgaagcttggtgc

SEQ ID NO: 2216382 - DNA, 25 bp, Homo sapien
agcctctcttgggtggtagtggttt

SEQ ID NO: 2216383 - DNA, 25 bp, Homo sapien
ttccaaaactggtttgagcctctct

SEQ ID NO: 2216384 - DNA, 25 bp, Homo sapien
ctgaaaactcagtgaccgtaagtat

SEQ ID NO: 2216385 - DNA, 25 bp, Homo sapien
ttttctccaatgtatcaattagaac

SEQ ID NO: 2216386 - DNA, 25 bp, Homo sapien
tgtatcaattagaaccaactcttct

SEQ ID NO: 2216387 - DNA, 25 bp, Homo sapien
ctcagtgaccgtaagtatttgtttt

SEQ ID NO: 2216388 - DNA, 25 bp, Homo sapien
cctgctccagttttgctccagtctc

SEQ ID NO: 2216389 - DNA, 25 bp, Homo sapien
tccagttttgctccagtctcaggga

SEQ ID NO: 2216390 - DNA, 25 bp, Homo sapien
ctgctccagttttgctccagtctca

SEQ ID NO: 2216391 - DNA, 25 bp, Homo sapien
agttttgctccagtctcagggatac

SEQ ID NO: 2216392 - DNA, 25 bp, Homo sapien
ctctgatggataggggtagagactg

SEQ ID NO: 2216393 - DNA, 25 bp, Homo sapien
tgatggataggggtagagactgggc

SEQ ID NO: 2216394 - DNA, 25 bp, Homo sapien
gggcaggttttcgggcagcctctga

SEQ ID NO: 2216395 - DNA, 25 bp, Homo sapien
tctggatactcagaggtatccaggg

SEQ ID NO: 2216396 - DNA, 25 bp, Homo sapien
tggatgtgggacttccaagtacatc

SEQ ID NO: 2216397 - DNA, 25 bp, Homo sapien
agtggatgtgggacttccaagtaca

SEQ ID NO: 2216398 - DNA, 25 bp, Homo sapien
gggcatttcgaatctgtactagcat

SEQ ID NO: 2216399 - DNA, 25 bp, Homo sapien
aggccttgggcatttcgaatctgta

SEQ ID NO: 2216400 - DNA, 25 bp, Homo sapien
ctcccctgatactgccttcttgctg

SEQ ID NO: 2216401 - DNA, 25 bp, Homo sapien
tctcccctgatactgccttcttgct

SEQ ID NO: 2216402 - DNA, 25 bp, Homo sapien
gagatgggtcagatgtaacttgtat

SEQ ID NO: 2216403 - DNA, 25 bp, Homo sapien
cagagagatgggtcagatgtaactt

SEQ ID NO: 2216404 - DNA, 25 bp, Homo sapien
acttgtatactttttgccttgcctt

SEQ ID NO: 2216405 - DNA, 25 bp, Homo sapien
tgggtcagatgtaacttgtatactt

SEQ ID NO: 2216406 - DNA, 25 bp, Homo sapien
aggggaactggctgcagatgatgtc

SEQ ID NO: 2216407 - DNA, 25 bp, Homo sapien
ggaactggctgcagatgatgtcaga

SEQ ID NO: 2216408 - DNA, 25 bp, Homo sapien
caggggaactggctgcagatgatgt

SEQ ID NO: 2216409 - DNA, 25 bp, Homo sapien
actggctgcagatgatgtcagaaag

SEQ ID NO: 2216410 - DNA, 25 bp, Homo sapien
actgtccccagcagctaagcaggca

SEQ ID NO: 2216411 - DNA, 25 bp, Homo sapien
tccactgtccccagcagctaagcag

SEQ ID NO: 2216412 - DNA, 25 bp, Homo sapien
ctccactgtccccagcagctaagca

SEQ ID NO: 2216413 - DNA, 25 bp, Homo sapien
ctaactccactgtccccagcagcta

SEQ ID NO: 2216414 - DNA, 25 bp, Homo sapien
gacccccggcagcccatctggctgt

SEQ ID NO: 2216415 - DNA, 25 bp, Homo sapien
tgtctgaccctttgccacctcctag

SEQ ID NO: 2216416 - DNA, 25 bp, Homo sapien
ggcacattcctgttgaggtcctcca

SEQ ID NO: 2216417 - DNA, 25 bp, Homo sapien
ctggctgtctgaccctttgccacct

SEQ ID NO: 2216418 - DNA, 25 bp, Homo sapien
cagcccctcatttcccggggaagag

SEQ ID NO: 2216419 - DNA, 25 bp, Homo sapien
cccaattctttcttgccgcagccgc

SEQ ID NO: 2216420 - DNA, 25 bp, Homo sapien
cccacccatattgccggccagctgc

SEQ ID NO: 2216421 - DNA, 25 bp, Homo sapien
tctgagctgcagcaacccccccacc

SEQ ID NO: 2216422 - DNA, 25 bp, Homo sapien
gaggggtggggtgatgatctttctc

SEQ ID NO: 2216423 - DNA, 25 bp, Homo sapien
atgcccctgctcactccagggaggg

SEQ ID NO: 2216424 - DNA, 25 bp, Homo sapien
ctgagcctcttccagatgcccctgc

SEQ ID NO: 2216425 - DNA, 25 bp, Homo sapien
ggggtggggtgatgatctttctcag

SEQ ID NO: 2216426 - DNA, 25 bp, Homo sapien
gcctcagtaggcctttctgtacagt

SEQ ID NO: 2216427 - DNA, 25 bp, Homo sapien
ttctggggcctcagtaggcctttct

SEQ ID NO: 2216428 - DNA, 25 bp, Homo sapien
cagtaggcctttctgtacagtgggt

SEQ ID NO: 2216429 - DNA, 25 bp, Homo sapien
gtaggcctttctgtacagtgggtgt

SEQ ID NO: 2216430 - DNA, 25 bp, Homo sapien
ccagctcaaatgttctaggattcat

SEQ ID NO: 2216431 - DNA, 25 bp, Homo sapien
gatttaataatctcttccagctcaa

SEQ ID NO: 2216432 - DNA, 25 bp, Homo sapien
ctcttccagctcaaatgttctagga

SEQ ID NO: 2216433 - DNA, 25 bp, Homo sapien
tgggggagtggatttaataatctct

SEQ ID NO: 2216434 - DNA, 25 bp, Homo sapien
gccttgagggatcatgtagccagga

SEQ ID NO: 2216435 - DNA, 25 bp, Homo sapien
ctgccttgagggatcatgtagccag

SEQ ID NO: 2216436 - DNA, 25 bp, Homo sapien
ccttgagggatcatgtagccaggag

SEQ ID NO: 2216437 - DNA, 25 bp, Homo sapien
tgccttgagggatcatgtagccagg

SEQ ID NO: 2216438 - DNA, 25 bp, Homo sapien
catgtgcggtggtgtgagtgaggcc

SEQ ID NO: 2216439 - DNA, 25 bp, Homo sapien
gatacacagaacttgggcgtgcctg

SEQ ID NO: 2216440 - DNA, 25 bp, Homo sapien
tccttgtcctgaggttcagatacac

SEQ ID NO: 2216441 - DNA, 25 bp, Homo sapien
gaggctttatcccactgtcggttgg

SEQ ID NO: 2216442 - DNA, 25 bp, Homo sapien
tcactatggactgccacctgttgat

SEQ ID NO: 2216443 - DNA, 25 bp, Homo sapien
gcttcactatggactgccacctgtt

SEQ ID NO: 2216444 - DNA, 25 bp, Homo sapien
ttcactatggactgccacctgttga

SEQ ID NO: 2216445 - DNA, 25 bp, Homo sapien
gggcttcactatggactgccacctg

SEQ ID NO: 2216446 - DNA, 25 bp, Homo sapien
tgtttctccacttcccttagctcca

SEQ ID NO: 2216447 - DNA, 25 bp, Homo sapien
tccacttcccttagctccacatctg

SEQ ID NO: 2216448 - DNA, 25 bp, Homo sapien
tcaaatgtggatttcctttcagcca

SEQ ID NO: 2216449 - DNA, 25 bp, Homo sapien
ctccacttcccttagctccacatct

SEQ ID NO: 2216450 - DNA, 25 bp, Homo sapien
ccagtgcaatagacagactactcat

SEQ ID NO: 2216451 - DNA, 25 bp, Homo sapien
ttaagccccagtgcaatagacagac

SEQ ID NO: 2216452 - DNA, 25 bp, Homo sapien
catcttaagccccagtgcaatagac

SEQ ID NO: 2216453 - DNA, 25 bp, Homo sapien
ccagcatcttaagccccagtgcaat

SEQ ID NO: 2216454 - DNA, 25 bp, Homo sapien
cttgctgttgcatgtgcacccatga

SEQ ID NO: 2216455 - DNA, 25 bp, Homo sapien
gccgctggctccctggactgactgt

SEQ ID NO: 2216456 - DNA, 25 bp, Homo sapien
catgtgcacccatgagccgctggct

SEQ ID NO: 2216457 - DNA, 25 bp, Homo sapien
cctggactgactgttggaggactat

SEQ ID NO: 2216458 - DNA, 25 bp, Homo sapien
ggtgtgtgtaagcccgtgttctgcc

SEQ ID NO: 2216459 - DNA, 25 bp, Homo sapien
tgtgccattgggagggtcgagcctc

SEQ ID NO: 2216460 - DNA, 25 bp, Homo sapien
tgagcccatgcccaactatctgaga

SEQ ID NO: 2216461 - DNA, 25 bp, Homo sapien
tcagtgtagcaacccctgtgtggca

SEQ ID NO: 2216462 - DNA, 25 bp, Homo sapien
gaaatgttagagttcttgtccagat

SEQ ID NO: 2216463 - DNA, 25 bp, Homo sapien
ttgcatctgccaagaggccgccctt

SEQ ID NO: 2216464 - DNA, 25 bp, Homo sapien
atctgccaagaggccgcccttcagg

SEQ ID NO: 2216465 - DNA, 25 bp, Homo sapien
gagaaatgttagagttcttgtccag

SEQ ID NO: 2216466 - DNA, 25 bp, Homo sapien
cctgaagtctgagtcgggtttttgc

SEQ ID NO: 2216467 - DNA, 25 bp, Homo sapien
tgagttgagagttttgacagctgca

SEQ ID NO: 2216468 - DNA, 25 bp, Homo sapien
gaattgtcagctatgcccttgtggg

SEQ ID NO: 2216469 - DNA, 25 bp, Homo sapien
tgccacagagaattgtcagctatgc

SEQ ID NO: 2216470 - DNA, 25 bp, Homo sapien
atggttcttactatcgtccaagaat

SEQ ID NO: 2216471 - DNA, 25 bp, Homo sapien
tggttcttactatcgtccaagaatc

SEQ ID NO: 2216472 - DNA, 25 bp, Homo sapien
ggttcttactatcgtccaagaatcc

SEQ ID NO: 2216473 - DNA, 25 bp, Homo sapien
acttggaggtttcccaacaggccat

SEQ ID NO: 2216474 - DNA, 25 bp, Homo sapien
tgttggtctacagcccacatcagag

SEQ ID NO: 2216475 - DNA, 25 bp, Homo sapien
acacctgttggtctacagcccacat

SEQ ID NO: 2216476 - DNA, 25 bp, Homo sapien
tcactctctgtctggcgcactgcct

SEQ ID NO: 2216477 - DNA, 25 bp, Homo sapien
tgggcacacctgttggtctacagcc

SEQ ID NO: 2216478 - DNA, 25 bp, Homo sapien
gagagggcatagactttctggcaca

SEQ ID NO: 2216479 - DNA, 25 bp, Homo sapien
gccctgagagggcatagactttctg

SEQ ID NO: 2216480 - DNA, 25 bp, Homo sapien
tcaggggattgtagaagagtttgcc

SEQ ID NO: 2216481 - DNA, 25 bp, Homo sapien
tttgccctgagagggcatagacttt

SEQ ID NO: 2216482 - DNA, 25 bp, Homo sapien
aaagctcggcccagggacctctgaa

SEQ ID NO: 2216483 - DNA, 25 bp, Homo sapien
taaagctcggcccagggacctctga

SEQ ID NO: 2216484 - DNA, 25 bp, Homo sapien
ctgaagtaaagctcggcccagggac

SEQ ID NO: 2216485 - DNA, 25 bp, Homo sapien
aagctgaagtaaagctcggcccagg

SEQ ID NO: 2216486 - DNA, 25 bp, Homo sapien
cctccatgattctatgtcttcatca

SEQ ID NO: 2216487 - DNA, 25 bp, Homo sapien
tagacatcctccatgattctatgtc

SEQ ID NO: 2216488 - DNA, 25 bp, Homo sapien
cttctagacatcctccatgattcta

SEQ ID NO: 2216489 - DNA, 25 bp, Homo sapien
gattctatgtcttcatcagtgggca

SEQ ID NO: 2216490 - DNA, 25 bp, Homo sapien
gcagagcccaaccaggagattttcc

SEQ ID NO: 2216491 - DNA, 25 bp, Homo sapien
gggaagctggcactcgacagccact

SEQ ID NO: 2216492 - DNA, 25 bp, Homo sapien
ccggttaggccagtccaagccgatt

SEQ ID NO: 2216493 - DNA, 25 bp, Homo sapien
gaggtgacaaccctatcgaccagct

SEQ ID NO: 2216494 - DNA, 25 bp, Homo sapien
gacctggcaggataatgtgggcttc

SEQ ID NO: 2216495 - DNA, 25 bp, Homo sapien
acctggcaggataatgtgggcttca

SEQ ID NO: 2216496 - DNA, 25 bp, Homo sapien
tggacctggcaggataatgtgggct

SEQ ID NO: 2216497 - DNA, 25 bp, Homo sapien
ctggacctggcaggataatgtgggc

SEQ ID NO: 2216498 - DNA, 25 bp, Homo sapien
cctcattggtaccctggggaaagtg

SEQ ID NO: 2216499 - DNA, 25 bp, Homo sapien
ctcattggtaccctggggaaagtgt

SEQ ID NO: 2216500 - DNA, 25 bp, Homo sapien
ggatacttcccaggcaacagagtag

SEQ ID NO: 2216501 - DNA, 25 bp, Homo sapien
caggaagtcaaagaccacatccgtc

SEQ ID NO: 2216502 - DNA, 25 bp, Homo sapien
gaatccccaggacttagcacattgc

SEQ ID NO: 2216503 - DNA, 25 bp, Homo sapien
tagggtgtgtatgcatcgtctctca

SEQ ID NO: 2216504 - DNA, 25 bp, Homo sapien
agcagttggggccggagctctcaga

SEQ ID NO: 2216505 - DNA, 25 bp, Homo sapien
gcagttggggccggagctctcagaa

SEQ ID NO: 2216506 - DNA, 25 bp, Homo sapien
cagttggggccggagctctcagaat

SEQ ID NO: 2216507 - DNA, 25 bp, Homo sapien
ttaataaagttaatcgcactcctaa

SEQ ID NO: 2216508 - DNA, 25 bp, Homo sapien
aaagttaatcgcactcctaatttgt

SEQ ID NO: 2216509 - DNA, 25 bp, Homo sapien
cactcctaatttgtatgtaatgaaa

SEQ ID NO: 2216510 - DNA, 25 bp, Homo sapien
ctcctaatttgtatgtaatgaaaag

SEQ ID NO: 2216511 - DNA, 25 bp, Homo sapien
cctgtgcctttcgtggaggacaaag

SEQ ID NO: 2216512 - DNA, 25 bp, Homo sapien
aggacaaagaatccccacgtgtaag

SEQ ID NO: 2216513 - DNA, 25 bp, Homo sapien
acgtgtaagtcctgacagcatccca

SEQ ID NO: 2216514 - DNA, 25 bp, Homo sapien
tactcccagccattcagttcgttga

SEQ ID NO: 2216515 - DNA, 25 bp, Homo sapien
aattcctccactcttgactgtgtcc

SEQ ID NO: 2216516 - DNA, 25 bp, Homo sapien
taattcctccactcttgactgtgtc

SEQ ID NO: 2216517 - DNA, 25 bp, Homo sapien
attcctccactcttgactgtgtcct

SEQ ID NO: 2216518 - DNA, 25 bp, Homo sapien
gcttgagtagtgaaacgtcttgctc

SEQ ID NO: 2216519 - DNA, 25 bp, Homo sapien
ccctattattgcttgagtagtgaaa

SEQ ID NO: 2216520 - DNA, 25 bp, Homo sapien
gagtagtgaaacgtcttgctcagca

SEQ ID NO: 2216521 - DNA, 25 bp, Homo sapien
ttattgcttgagtagtgaaacgtct

SEQ ID NO: 2216522 - DNA, 25 bp, Homo sapien
ccaccaccacaaacatgtgtatgtc

SEQ ID NO: 2216523 - DNA, 25 bp, Homo sapien
tgtgtatgtccccaacagggtagga

SEQ ID NO: 2216524 - DNA, 25 bp, Homo sapien
aaacatgtgtatgtccccaacaggg

SEQ ID NO: 2216525 - DNA, 25 bp, Homo sapien
ccaacagggtaggacttgccaaagg

SEQ ID NO: 2216526 - DNA, 25 bp, Homo sapien
ctgcaggatctctgacatcccagct

SEQ ID NO: 2216527 - DNA, 25 bp, Homo sapien
ctgctctgcaggatctctgacatcc

SEQ ID NO: 2216528 - DNA, 25 bp, Homo sapien
gctctgcaggatctctgacatccca

SEQ ID NO: 2216529 - DNA, 25 bp, Homo sapien
tctgcaggatctctgacatcccagc

SEQ ID NO: 2216530 - DNA, 25 bp, Homo sapien
ggccaatgcagggacgaaggagccc

SEQ ID NO: 2216531 - DNA, 25 bp, Homo sapien
acgaaggagcccgagcaagaggctg

SEQ ID NO: 2216532 - DNA, 25 bp, Homo sapien
ccaatgcagggacgaaggagcccga

SEQ ID NO: 2216533 - DNA, 25 bp, Homo sapien
agcccgagcaagaggctggtggcat

SEQ ID NO: 2216534 - DNA, 25 bp, Homo sapien
agaaggcaacagcataagcggtact

SEQ ID NO: 2216535 - DNA, 25 bp, Homo sapien
tcaaggcgtggacacgatggcccca

SEQ ID NO: 2216536 - DNA, 25 bp, Homo sapien
gcataagcggtactgggcaagactt

SEQ ID NO: 2216537 - DNA, 25 bp, Homo sapien
gtactgggcaagactttggcaagac

SEQ ID NO: 2216538 - DNA, 25 bp, Homo sapien
ggcacttgtcaggagcaaggctgct

SEQ ID NO: 2216539 - DNA, 25 bp, Homo sapien
ctgctgcatcaggccaggccagcat

SEQ ID NO: 2216540 - DNA, 25 bp, Homo sapien
caaggctgctgcatcaggccaggcc

SEQ ID NO: 2216541 - DNA, 25 bp, Homo sapien
tggcacttgtcaggagcaaggctgc

SEQ ID NO: 2216542 - DNA, 25 bp, Homo sapien
gccggaagagccttgaccctctgac

SEQ ID NO: 2216543 - DNA, 25 bp, Homo sapien
cttggcagggagcaggcggcagggg

SEQ ID NO: 2216544 - DNA, 25 bp, Homo sapien
ttggcagggagcaggcggcaggggc

SEQ ID NO: 2216545 - DNA, 25 bp, Homo sapien
cataaatgactgcttcatgtctgga

SEQ ID NO: 2216546 - DNA, 25 bp, Homo sapien
tcataaatgactgcttcatgtctgg

SEQ ID NO: 2216547 - DNA, 25 bp, Homo sapien
ataaatgactgcttcatgtctggag

SEQ ID NO: 2216548 - DNA, 25 bp, Homo sapien
taaatgactgcttcatgtctggagg

SEQ ID NO: 2216549 - DNA, 25 bp, Homo sapien
gacaggtccactgcatcataaacag

SEQ ID NO: 2216550 - DNA, 25 bp, Homo sapien
ggccccgggtgccaatgacaggtcc

SEQ ID NO: 2216551 - DNA, 25 bp, Homo sapien
ccgggtgccaatgacaggtccactg

SEQ ID NO: 2216552 - DNA, 25 bp, Homo sapien
tgccaatgacaggtccactgcatca

SEQ ID NO: 2216553 - DNA, 25 bp, Homo sapien
tcaagtccacaagacactgcagtag

SEQ ID NO: 2216554 - DNA, 25 bp, Homo sapien
cagccttaaagtactgggcacgagt

SEQ ID NO: 2216555 - DNA, 25 bp, Homo sapien
gcttagttgacatcccaggtccaag

SEQ ID NO: 2216556 - DNA, 25 bp, Homo sapien
gctttcctggtagagcacgcctcaa

SEQ ID NO: 2216557 - DNA, 25 bp, Homo sapien
tttccagtgaaactaaagcttttga

SEQ ID NO: 2216558 - DNA, 25 bp, Homo sapien
agtaccactgcttcagacaaaacca

SEQ ID NO: 2216559 - DNA, 25 bp, Homo sapien
gtcattcagtaccactgcttcagac

SEQ ID NO: 2216560 - DNA, 25 bp, Homo sapien
cagtgaaactaaagcttttgatgca

SEQ ID NO: 2216561 - DNA, 25 bp, Homo sapien
gcaacacattcccattctactgaag

SEQ ID NO: 2216562 - DNA, 25 bp, Homo sapien
ggaacatcgacccataacatgcaac

SEQ ID NO: 2216563 - DNA, 25 bp, Homo sapien
cattggaaataatcacgaggaatca

SEQ ID NO: 2216564 - DNA, 25 bp, Homo sapien
taataagcttttacggcactgcaat

SEQ ID NO: 2216565 - DNA, 25 bp, Homo sapien
tttaggctaactgactgattggttt

SEQ ID NO: 2216566 - DNA, 25 bp, Homo sapien
gagtgggggagggaacatgcagcgg

SEQ ID NO: 2216567 - DNA, 25 bp, Homo sapien
gtgggggagggaacatgcagcggca

SEQ ID NO: 2216568 - DNA, 25 bp, Homo sapien
tgggggagggaacatgcagcggcac

SEQ ID NO: 2216569 - DNA, 25 bp, Homo sapien
agtgggggagggaacatgcagcggc

SEQ ID NO: 2216570 - DNA, 25 bp, Homo sapien
cagatggacacacacggcttgtgga

SEQ ID NO: 2216571 - DNA, 25 bp, Homo sapien
gatcttcagtgaccaggatctcggg

SEQ ID NO: 2216572 - DNA, 25 bp, Homo sapien
catccagcatgaataccccaggttg

SEQ ID NO: 2216573 - DNA, 25 bp, Homo sapien
tccaagtgcgcaagggcagtttcca

SEQ ID NO: 2216574 - DNA, 25 bp, Homo sapien
tcagggtactttggctcgggatagc

SEQ ID NO: 2216575 - DNA, 25 bp, Homo sapien
tcgggatagccacttgaactctcgc

SEQ ID NO: 2216576 - DNA, 25 bp, Homo sapien
ttcgatatttccgacgcagagcagc

SEQ ID NO: 2216577 - DNA, 25 bp, Homo sapien
catcactgtgcgtccagaagtcagg

SEQ ID NO: 2216578 - DNA, 25 bp, Homo sapien
cttcagaagacgactgtgaggccac

SEQ ID NO: 2216579 - DNA, 25 bp, Homo sapien
gtttcacgcagtttggacttgccag

SEQ ID NO: 2216580 - DNA, 25 bp, Homo sapien
cagggactgggtctaacttgtctcg

SEQ ID NO: 2216581 - DNA, 25 bp, Homo sapien
gaagctctgtactctcttggcggat

SEQ ID NO: 2216582 - DNA, 25 bp, Homo sapien
ggagttcgtctttctctggctggca

SEQ ID NO: 2216583 - DNA, 25 bp, Homo sapien
tatcaatattcaggttggttcccga

SEQ ID NO: 2216584 - DNA, 25 bp, Homo sapien
gaaaatggcgatcggctcctcttgg

SEQ ID NO: 2216585 - DNA, 25 bp, Homo sapien
tctgtgcattgggacttcggagttc

SEQ ID NO: 2216586 - DNA, 25 bp, Homo sapien
gtattggactgataccctcctgttg

SEQ ID NO: 2216587 - DNA, 25 bp, Homo sapien
acaggcttgctagattcctgaccca

SEQ ID NO: 2216588 - DNA, 25 bp, Homo sapien
ggattgggccatacaggcttgctag

SEQ ID NO: 2216589 - DNA, 25 bp, Homo sapien
catacctcctacctgtattggactg

SEQ ID NO: 2216590 - DNA, 25 bp, Homo sapien
cctgctccctgcacacgtttttgag

SEQ ID NO: 2216591 - DNA, 25 bp, Homo sapien
gctccctgcacacgtttttgagatg

SEQ ID NO: 2216592 - DNA, 25 bp, Homo sapien
tcttctaaggcctggagtagcattc

SEQ ID NO: 2216593 - DNA, 25 bp, Homo sapien
gtttccaatacagctggggctcggg

SEQ ID NO: 2216594 - DNA, 25 bp, Homo sapien
gtttgcaggaaagccagacttagag

SEQ ID NO: 2216595 - DNA, 25 bp, Homo sapien
aaatgattacaagactgggtttgca

SEQ ID NO: 2216596 - DNA, 25 bp, Homo sapien
tgattacaagactgggtttgcagga

SEQ ID NO: 2216597 - DNA, 25 bp, Homo sapien
gattacaagactgggtttgcaggaa

SEQ ID NO: 2216598 - DNA, 25 bp, Homo sapien
gcaaaagagagctgtgtctgacaca

SEQ ID NO: 2216599 - DNA, 25 bp, Homo sapien
catgtttatgcgtatgtcacaggca

SEQ ID NO: 2216600 - DNA, 25 bp, Homo sapien
gtgtgcacctcagggaccagcaaaa

SEQ ID NO: 2216601 - DNA, 25 bp, Homo sapien
aaatgtcagtgtgagcaaatgcagc

SEQ ID NO: 2216602 - DNA, 25 bp, Homo sapien
aaagccacacgcttttcagagaagc

SEQ ID NO: 2216603 - DNA, 25 bp, Homo sapien
caagtccagaaagccacacgctttt

SEQ ID NO: 2216604 - DNA, 25 bp, Homo sapien
tctcggatctccgaccgccacgacc

SEQ ID NO: 2216605 - DNA, 25 bp, Homo sapien
tctccgaccgccacgaccgccagag

SEQ ID NO: 2216606 - DNA, 25 bp, Homo sapien
tagcttcgcgaaggctctccgcgcg

SEQ ID NO: 2216607 - DNA, 25 bp, Homo sapien
gagatctgcgcgattgtcagctaaa

SEQ ID NO: 2216608 - DNA, 25 bp, Homo sapien
attcccaagaggaaggtctgctccg

SEQ ID NO: 2216609 - DNA, 25 bp, Homo sapien
cggcccacaggcacccggcacgcgc

SEQ ID NO: 2216610 - DNA, 25 bp, Homo sapien
gggccgaacctactgctggagaagt

SEQ ID NO: 2216611 - DNA, 25 bp, Homo sapien
gccgaacctactgctggagaagtcc

SEQ ID NO: 2216612 - DNA, 25 bp, Homo sapien
ctttgcattcagggccgaacctact

SEQ ID NO: 2216613 - DNA, 25 bp, Homo sapien
ccccgccttccacccgagcacccat

SEQ ID NO: 2216614 - DNA, 25 bp, Homo sapien
tggtgctgacattcccatcatggct

SEQ ID NO: 2216615 - DNA, 25 bp, Homo sapien
tagaggagacatacagcagatcggt

SEQ ID NO: 2216616 - DNA, 25 bp, Homo sapien
ggctcatctcaagctggcagtgtga

SEQ ID NO: 2216617 - DNA, 25 bp, Homo sapien
aaaatgacaagccatagaccctgcc

SEQ ID NO: 2216618 - DNA, 25 bp, Homo sapien
tctctccctgtaggttggttccgca

SEQ ID NO: 2216619 - DNA, 25 bp, Homo sapien
gtaaccaccacctaggtcgagatat

SEQ ID NO: 2216620 - DNA, 25 bp, Homo sapien
gcctcttcccaatcagtaatccctg

SEQ ID NO: 2216621 - DNA, 25 bp, Homo sapien
cgagatatagaccattttcagcact

SEQ ID NO: 2216622 - DNA, 25 bp, Homo sapien
tattgaaccccctcagggctcttca

SEQ ID NO: 2216623 - DNA, 25 bp, Homo sapien
tcccttggggcctagctgctccgtg

SEQ ID NO: 2216624 - DNA, 25 bp, Homo sapien
tagacccatgtttctattgaacccc

SEQ ID NO: 2216625 - DNA, 25 bp, Homo sapien
aaaggagggtctgtagcgtccagac

SEQ ID NO: 2216626 - DNA, 25 bp, Homo sapien
cacaaaaatcattggcgtgcagagg

SEQ ID NO: 2216627 - DNA, 25 bp, Homo sapien
catgccttgatcatccagggctcca

SEQ ID NO: 2216628 - DNA, 25 bp, Homo sapien
tccccatagcttctgcaggaaacct

SEQ ID NO: 2216629 - DNA, 25 bp, Homo sapien
tttgacatgccttgatcatccaggg

SEQ ID NO: 2216630 - DNA, 25 bp, Homo sapien
taagaggagccattgtcagccaagg

SEQ ID NO: 2216631 - DNA, 25 bp, Homo sapien
gagccattgtcagccaagggagtcc

SEQ ID NO: 2216632 - DNA, 25 bp, Homo sapien
ccaggtggaagccataagaggagcc

SEQ ID NO: 2216633 - DNA, 25 bp, Homo sapien
tggaagccataagaggagccattgt

SEQ ID NO: 2216634 - DNA, 25 bp, Homo sapien
cagatgtggatttgggttctaattc

SEQ ID NO: 2216635 - DNA, 25 bp, Homo sapien
ggcagagagcttagggttagccata

SEQ ID NO: 2216636 - DNA, 25 bp, Homo sapien
ttagggttagccatattgtaaggcc

SEQ ID NO: 2216637 - DNA, 25 bp, Homo sapien
tagccatattgtaaggccagatgtg

SEQ ID NO: 2216638 - DNA, 25 bp, Homo sapien
tgctctttgctcctggatccacaag

SEQ ID NO: 2216639 - DNA, 25 bp, Homo sapien
ctctttgctcctggatccacaagct

SEQ ID NO: 2216640 - DNA, 25 bp, Homo sapien
tcttggtgctctttgctcctggatc

SEQ ID NO: 2216641 - DNA, 25 bp, Homo sapien
ggtgctctttgctcctggatccaca

SEQ ID NO: 2216642 - DNA, 25 bp, Homo sapien
tatcctaaagctcctagcaatatcc

SEQ ID NO: 2216643 - DNA, 25 bp, Homo sapien
cccggtacctgcagagcaacgtagc

SEQ ID NO: 2216644 - DNA, 25 bp, Homo sapien
catataggaggttgaagccatatcc

SEQ ID NO: 2216645 - DNA, 25 bp, Homo sapien
gagcaacgtagcagccatataggag

SEQ ID NO: 2216646 - DNA, 25 bp, Homo sapien
gcgatctccaccataggcagagaag

SEQ ID NO: 2216647 - DNA, 25 bp, Homo sapien
ctcgaatggctttcactaatggtca

SEQ ID NO: 2216648 - DNA, 25 bp, Homo sapien
cctgaatgagctgtgagctcgagct

SEQ ID NO: 2216649 - DNA, 25 bp, Homo sapien
cagagaagggttggcatatgcagat

SEQ ID NO: 2216650 - DNA, 25 bp, Homo sapien
gagcacttaggttttggaccatgga

SEQ ID NO: 2216651 - DNA, 25 bp, Homo sapien
tggtgaactgatgtggctgtttccc

SEQ ID NO: 2216652 - DNA, 25 bp, Homo sapien
tccagacgtctgcttgcccaccagg

SEQ ID NO: 2216653 - DNA, 25 bp, Homo sapien
tggtgtggtctgtccagacgtctgc

SEQ ID NO: 2216654 - DNA, 25 bp, Homo sapien
tatgctgtcctacaaggaagcccct

SEQ ID NO: 2216655 - DNA, 25 bp, Homo sapien
tctatgctgtcctacaaggaagccc

SEQ ID NO: 2216656 - DNA, 25 bp, Homo sapien
atgctgtcctacaaggaagcccctt

SEQ ID NO: 2216657 - DNA, 25 bp, Homo sapien
gatctatgctgtcctacaaggaagc

SEQ ID NO: 2216658 - DNA, 25 bp, Homo sapien
atggtcccaaatatcctttagaagc

SEQ ID NO: 2216659 - DNA, 25 bp, Homo sapien
tggtcccaaatatcctttagaagca

SEQ ID NO: 2216660 - DNA, 25 bp, Homo sapien
catggtcccaaatatcctttagaag

SEQ ID NO: 2216661 - DNA, 25 bp, Homo sapien
tcatggtcccaaatatcctttagaa

SEQ ID NO: 2216662 - DNA, 25 bp, Homo sapien
gccccaggcttagcagttcctgcag

SEQ ID NO: 2216663 - DNA, 25 bp, Homo sapien
ttttcagggagtgctcgggttgtct

SEQ ID NO: 2216664 - DNA, 25 bp, Homo sapien
tccggggcaagctttaaagaatggc

SEQ ID NO: 2216665 - DNA, 25 bp, Homo sapien
agtggcagccagcaaagatgtccgg

SEQ ID NO: 2216666 - DNA, 25 bp, Homo sapien
tgtccctggatctgcggagtcctga

SEQ ID NO: 2216667 - DNA, 25 bp, Homo sapien
cttagtgctggcgagctctaccttc

SEQ ID NO: 2216668 - DNA, 25 bp, Homo sapien
tgcggagtcctgaggaaactccaag

SEQ ID NO: 2216669 - DNA, 25 bp, Homo sapien
tgctggcgagctctaccttctcctg

SEQ ID NO: 2216670 - DNA, 25 bp, Homo sapien
aaatttcttattctatatcactcac

SEQ ID NO: 2216671 - DNA, 25 bp, Homo sapien
ccggcctaaatttcttattctatat

SEQ ID NO: 2216672 - DNA, 25 bp, Homo sapien
gcctaaatttcttattctatatcac

SEQ ID NO: 2216673 - DNA, 25 bp, Homo sapien
taaatttcttattctatatcactca

SEQ ID NO: 2216674 - DNA, 25 bp, Homo sapien
cctggattctcacagttggatcaac

SEQ ID NO: 2216675 - DNA, 25 bp, Homo sapien
ggctcctggattctcacagttggat

SEQ ID NO: 2216676 - DNA, 25 bp, Homo sapien
ggattctcacagttggatcaactgc

SEQ ID NO: 2216677 - DNA, 25 bp, Homo sapien
gctcctggattctcacagttggatc

SEQ ID NO: 2216678 - DNA, 25 bp, Homo sapien
ccaaagccggggttctctcctgagg

SEQ ID NO: 2216679 - DNA, 25 bp, Homo sapien
ggacagctgatcactggcatggaga

SEQ ID NO: 2216680 - DNA, 25 bp, Homo sapien
tcctgaggacagctgatcactggca

SEQ ID NO: 2216681 - DNA, 25 bp, Homo sapien
ctagacaaaggtgccaaagccgggg

SEQ ID NO: 2216682 - DNA, 25 bp, Homo sapien
ggatagggcttgaacttcctgggaa

SEQ ID NO: 2216683 - DNA, 25 bp, Homo sapien
tctttgccttgggggatagggcttg

SEQ ID NO: 2216684 - DNA, 25 bp, Homo sapien
gatagggcttgaacttcctgggaat

SEQ ID NO: 2216685 - DNA, 25 bp, Homo sapien
tcttcagatgaagcaccttccagac

SEQ ID NO: 2216686 - DNA, 25 bp, Homo sapien
taaaccactctattgcttctatcca

SEQ ID NO: 2216687 - DNA, 25 bp, Homo sapien
cttccagaccagtaaaccactctat

SEQ ID NO: 2216688 - DNA, 25 bp, Homo sapien
attcttcagatgaagcaccttccag

SEQ ID NO: 2216689 - DNA, 25 bp, Homo sapien
tttctgcccattgaagcagttccca

SEQ ID NO: 2216690 - DNA, 25 bp, Homo sapien
tgtatccaagcaaaacatgcctgcc

SEQ ID NO: 2216691 - DNA, 25 bp, Homo sapien
ctgaaactctctcttgggcagaatg

SEQ ID NO: 2216692 - DNA, 25 bp, Homo sapien
catgcctgccagcatacttgtgatg

SEQ ID NO: 2216693 - DNA, 25 bp, Homo sapien
tatgctaggcaagactgcctgctgc

SEQ ID NO: 2216694 - DNA, 25 bp, Homo sapien
ctgtaagttatgctaggcaagactg

SEQ ID NO: 2216695 - DNA, 25 bp, Homo sapien
ctgcctgctgctcagtattggaggc

SEQ ID NO: 2216696 - DNA, 25 bp, Homo sapien
ctgctgctcagtattggaggcctcc

SEQ ID NO: 2216697 - DNA, 25 bp, Homo sapien
tggacataacatacgaggtgagcac

SEQ ID NO: 2216698 - DNA, 25 bp, Homo sapien
gtcctctacctggacataacatacg

SEQ ID NO: 2216699 - DNA, 25 bp, Homo sapien
cataacatacgaggtgagcactcat

SEQ ID NO: 2216700 - DNA, 25 bp, Homo sapien
tctacctggacataacatacgaggt

SEQ ID NO: 2216701 - DNA, 25 bp, Homo sapien
cagggccatatgatggtggtggatg

SEQ ID NO: 2216702 - DNA, 25 bp, Homo sapien
caacagggccatatgatggtggtgg

SEQ ID NO: 2216703 - DNA, 25 bp, Homo sapien
ggccatatgatggtggtggatgccc

SEQ ID NO: 2216704 - DNA, 25 bp, Homo sapien
ggcaacagggccatatgatggtggt

SEQ ID NO: 2216705 - DNA, 25 bp, Homo sapien
ggtcatggaggtctggcccaggctt

SEQ ID NO: 2216706 - DNA, 25 bp, Homo sapien
agaggtcatggaggtctggcccagg

SEQ ID NO: 2216707 - DNA, 25 bp, Homo sapien
tcatggaggtctggcccaggcttgt

SEQ ID NO: 2216708 - DNA, 25 bp, Homo sapien
aggtcatggaggtctggcccaggct

SEQ ID NO: 2216709 - DNA, 25 bp, Homo sapien
ccgccccagacggccgtctggcctc

SEQ ID NO: 2216710 - DNA, 25 bp, Homo sapien
tcagcatcctaaataagtgggatcc

SEQ ID NO: 2216711 - DNA, 25 bp, Homo sapien
taaataagtgggatccaaggtgtgc

SEQ ID NO: 2216712 - DNA, 25 bp, Homo sapien
ataagtgggatccaaggtgtgcacc

SEQ ID NO: 2216713 - DNA, 25 bp, Homo sapien
tcctaaataagtgggatccaaggtg

SEQ ID NO: 2216714 - DNA, 25 bp, Homo sapien
cctggagtaagattcagctggtgcc

SEQ ID NO: 2216715 - DNA, 25 bp, Homo sapien
ccatatgccggatggactggtaggt

SEQ ID NO: 2216716 - DNA, 25 bp, Homo sapien
tatatggtgacccattgggagccat

SEQ ID NO: 2216717 - DNA, 25 bp, Homo sapien
gagcttgagagctgacctggagtaa

SEQ ID NO: 2216718 - DNA, 25 bp, Homo sapien
taattggactgtctcactcagatta

SEQ ID NO: 2216719 - DNA, 25 bp, Homo sapien
ctcactcagattacgagcccctggg

SEQ ID NO: 2216720 - DNA, 25 bp, Homo sapien
gactgtctcactcagattacgagcc

SEQ ID NO: 2216721 - DNA, 25 bp, Homo sapien
tggactgtctcactcagattacgag

SEQ ID NO: 2216722 - DNA, 25 bp, Homo sapien
tgtgtctcccgctgccggtttaaaa

SEQ ID NO: 2216723 - DNA, 25 bp, Homo sapien
cagggacaggtctactggatagaaa

SEQ ID NO: 2216724 - DNA, 25 bp, Homo sapien
ccctggaacaataagtgatggagca

SEQ ID NO: 2216725 - DNA, 25 bp, Homo sapien
ggtgtctaccagatacgcttcagga

SEQ ID NO: 2216726 - DNA, 25 bp, Homo sapien
taaaagcgtcatatcccaggaacct

SEQ ID NO: 2216727 - DNA, 25 bp, Homo sapien
tatctcttgggattagcactgtgtc

SEQ ID NO: 2216728 - DNA, 25 bp, Homo sapien
tactgtaagtcccttaaggtcagag

SEQ ID NO: 2216729 - DNA, 25 bp, Homo sapien
tctggtttgcctagcgctttcctgg

SEQ ID NO: 2216730 - DNA, 25 bp, Homo sapien
tggataagtggctggttgggtgaat

SEQ ID NO: 2216731 - DNA, 25 bp, Homo sapien
tagatgtgggtttggataagtggct

SEQ ID NO: 2216732 - DNA, 25 bp, Homo sapien
atgatgtagatgtgggtttggataa

SEQ ID NO: 2216733 - DNA, 25 bp, Homo sapien
tgtgggtttggataagtggctggtt

SEQ ID NO: 2216734 - DNA, 25 bp, Homo sapien
catgtagctggggaaggtctcacaa

SEQ ID NO: 2216735 - DNA, 25 bp, Homo sapien
cgtccatgtagctggggaaggtctc

SEQ ID NO: 2216736 - DNA, 25 bp, Homo sapien
ggaaggtctcacaatcatagtggag

SEQ ID NO: 2216737 - DNA, 25 bp, Homo sapien
aaggtctcacaatcatagtggaggg

SEQ ID NO: 2216738 - DNA, 25 bp, Homo sapien
agttccatgtggctggggaaggtct

SEQ ID NO: 2216739 - DNA, 25 bp, Homo sapien
cttcttaggccatcaccagctgctt

SEQ ID NO: 2216740 - DNA, 25 bp, Homo sapien
aggccatcaccagctgctttcagtc

SEQ ID NO: 2216741 - DNA, 25 bp, Homo sapien
catcaccagctgctttcagtctcat

SEQ ID NO: 2216742 - DNA, 25 bp, Homo sapien
ggccatcaccagctgctttcagtct

SEQ ID NO: 2216743 - DNA, 25 bp, Homo sapien
actgtcgcgcaggaacgggtccctg

SEQ ID NO: 2216744 - DNA, 25 bp, Homo sapien
ccctcggagtagagctgcacatgcg

SEQ ID NO: 2216745 - DNA, 25 bp, Homo sapien
agccgatggcaggacagtagccgcc

SEQ ID NO: 2216746 - DNA, 25 bp, Homo sapien
cctgtcagaggtcgtgaacggctga

SEQ ID NO: 2216747 - DNA, 25 bp, Homo sapien
ggaggccatgggctacccggaggtg

SEQ ID NO: 2216748 - DNA, 25 bp, Homo sapien
cccgggcgggcgaagggaacagctg

SEQ ID NO: 2216749 - DNA, 25 bp, Homo sapien
tgggtttctttggcctctcgctggc

SEQ ID NO: 2216750 - DNA, 25 bp, Homo sapien
gaggtggagcgcagggaactcctgc

SEQ ID NO: 2216751 - DNA, 25 bp, Homo sapien
aaaccttaactcttgtgtgcattct

SEQ ID NO: 2216752 - DNA, 25 bp, Homo sapien
ctgttcccccgaagaagaatgttct

SEQ ID NO: 2216753 - DNA, 25 bp, Homo sapien
ttaaaccttaactcttgtgtgcatt

SEQ ID NO: 2216754 - DNA, 25 bp, Homo sapien
cctccaggtccttcaaagctcaact

SEQ ID NO: 2216755 - DNA, 25 bp, Homo sapien
tcaatggaggaactgtgttgggata

SEQ ID NO: 2216756 - DNA, 25 bp, Homo sapien
cacctttatctgagggctgaacttc

SEQ ID NO: 2216757 - DNA, 25 bp, Homo sapien
gcaggccacctttatctgagggctg

SEQ ID NO: 2216758 - DNA, 25 bp, Homo sapien
tctgagggctgaacttctctaaaca

SEQ ID NO: 2216759 - DNA, 25 bp, Homo sapien
tttatctgagggctgaacttctcta

SEQ ID NO: 2216760 - DNA, 25 bp, Homo sapien
tataccgcaaggtcctcttggtcct

SEQ ID NO: 2216761 - DNA, 25 bp, Homo sapien
ttataccgcaaggtcctcttggtcc

SEQ ID NO: 2216762 - DNA, 25 bp, Homo sapien
tcctctgagttaaagttggtaatct

SEQ ID NO: 2216763 - DNA, 25 bp, Homo sapien
ttcctctgagttaaagttggtaatc

SEQ ID NO: 2216764 - DNA, 25 bp, Homo sapien
cctctgagttaaagttggtaatctt

SEQ ID NO: 2216765 - DNA, 25 bp, Homo sapien
ctctgagttaaagttggtaatcttt

SEQ ID NO: 2216766 - DNA, 25 bp, Homo sapien
atgaaccgtctaaaacttcttgtgg

SEQ ID NO: 2216767 - DNA, 25 bp, Homo sapien
tgtggtaaaccatgatgatatcctt

SEQ ID NO: 2216768 - DNA, 25 bp, Homo sapien
tcctttcttgaagcgtttgctaaat

SEQ ID NO: 2216769 - DNA, 25 bp, Homo sapien
gacaattgaagggttcattggattt

SEQ ID NO: 2216770 - DNA, 25 bp, Homo sapien
taaaggctttatctgtcagatactt

SEQ ID NO: 2216771 - DNA, 25 bp, Homo sapien
gtaaaggctttatctgtcagatact

SEQ ID NO: 2216772 - DNA, 25 bp, Homo sapien
ctgtaaaggctttatctgtcagata

SEQ ID NO: 2216773 - DNA, 25 bp, Homo sapien
tgtaaaggctttatctgtcagatac

SEQ ID NO: 2216774 - DNA, 25 bp, Homo sapien
aggcccccagttttgttgctgtctc

SEQ ID NO: 2216775 - DNA, 25 bp, Homo sapien
cttcagattccaggtggagagtgct

SEQ ID NO: 2216776 - DNA, 25 bp, Homo sapien
agagtgctttggagccccaactgat

SEQ ID NO: 2216777 - DNA, 25 bp, Homo sapien
ctaaaagggaatcttggtctcttca

SEQ ID NO: 2216778 - DNA, 25 bp, Homo sapien
ctgcatactgatccatggcaggcat

SEQ ID NO: 2216779 - DNA, 25 bp, Homo sapien
aactgctcgcttgatctttataatc

SEQ ID NO: 2216780 - DNA, 25 bp, Homo sapien
tgatccatggcaggcatgaccaaac

SEQ ID NO: 2216781 - DNA, 25 bp, Homo sapien
caggcatgaccaaactgctcgcttg

SEQ ID NO: 2216782 - DNA, 25 bp, Homo sapien
tacaaggtctgaagaagtaggaatg

SEQ ID NO: 2216783 - DNA, 25 bp, Homo sapien
ccttttacaaggtctgaagaagtag

SEQ ID NO: 2216784 - DNA, 25 bp, Homo sapien
tttgcccttttacaaggtctgaaga

SEQ ID NO: 2216785 - DNA, 25 bp, Homo sapien
tgcccttttacaaggtctgaagaag

SEQ ID NO: 2216786 - DNA, 25 bp, Homo sapien
tggaatcaacagtatattacataaa

SEQ ID NO: 2216787 - DNA, 25 bp, Homo sapien
tgagaaggcggggtcacccccgcag

SEQ ID NO: 2216788 - DNA, 25 bp, Homo sapien
cacccccgcagggttcccagttctg

SEQ ID NO: 2216789 - DNA, 25 bp, Homo sapien
tgatttccattgtgcaacagacagg

SEQ ID NO: 2216790 - DNA, 25 bp, Homo sapien
ttccactttccacagcggtaattat

SEQ ID NO: 2216791 - DNA, 25 bp, Homo sapien
ttccacagcggtaattatcatttgt

SEQ ID NO: 2216792 - DNA, 25 bp, Homo sapien
ccacagcggtaattatcatttgttc

SEQ ID NO: 2216793 - DNA, 25 bp, Homo sapien
ccactttccacagcggtaattatca

SEQ ID NO: 2216794 - DNA, 25 bp, Homo sapien
gattactaaggaattcatctggata

SEQ ID NO: 2216795 - DNA, 25 bp, Homo sapien
gctgattactaaggaattcatctgg

SEQ ID NO: 2216796 - DNA, 25 bp, Homo sapien
cttgctgattactaaggaattcatc

SEQ ID NO: 2216797 - DNA, 25 bp, Homo sapien
ctaaggaattcatctggataagtca

SEQ ID NO: 2216798 - DNA, 25 bp, Homo sapien
tgtttcccatttgttgtagcctttc

SEQ ID NO: 2216799 - DNA, 25 bp, Homo sapien
cataagtctcattaggcctttcttt

SEQ ID NO: 2216800 - DNA, 25 bp, Homo sapien
tatcctctcataagtctcattaggc

SEQ ID NO: 2216801 - DNA, 25 bp, Homo sapien
cttttctatcctctcataagtctca

SEQ ID NO: 2216802 - DNA, 25 bp, Homo sapien
ctgtctgttgttcaaaggattcaac

SEQ ID NO: 2216803 - DNA, 25 bp, Homo sapien
tgtctgttgttcaaaggattcaacc

SEQ ID NO: 2216804 - DNA, 25 bp, Homo sapien
gtctgttgttcaaaggattcaacca

SEQ ID NO: 2216805 - DNA, 25 bp, Homo sapien
ctgtcagcaatgatttagatcctgc

SEQ ID NO: 2216806 - DNA, 25 bp, Homo sapien
ttcctgtcagcaatgatttagatcc

SEQ ID NO: 2216807 - DNA, 25 bp, Homo sapien
cctgtcagcaatgatttagatcctg

SEQ ID NO: 2216808 - DNA, 25 bp, Homo sapien
tcctgtcagcaatgatttagatcct

SEQ ID NO: 2216809 - DNA, 25 bp, Homo sapien
acaatcgaaggatctcaaagaagtc

SEQ ID NO: 2216810 - DNA, 25 bp, Homo sapien
atgaggtacttcacatcataaatga

SEQ ID NO: 2216811 - DNA, 25 bp, Homo sapien
gaggtacttcacatcataaatgaca

SEQ ID NO: 2216812 - DNA, 25 bp, Homo sapien
aaaaacaatcgaaggatctcaaaga

SEQ ID NO: 2216813 - DNA, 25 bp, Homo sapien
ttgtgtcactgagctctcactcctc

SEQ ID NO: 2216814 - DNA, 25 bp, Homo sapien
tgtttcagagaatattttgtccttt

SEQ ID NO: 2216815 - DNA, 25 bp, Homo sapien
gggagtctagatgccaagcatcaaa

SEQ ID NO: 2216816 - DNA, 25 bp, Homo sapien
cctttatttatgtacttgtgtcact

SEQ ID NO: 2216817 - DNA, 25 bp, Homo sapien
ccacactggttctggacccacaaat

SEQ ID NO: 2216818 - DNA, 25 bp, Homo sapien
cacactggttctggacccacaaata

SEQ ID NO: 2216819 - DNA, 25 bp, Homo sapien
cactggttctggacccacaaatata

SEQ ID NO: 2216820 - DNA, 25 bp, Homo sapien
tccacactggttctggacccacaaa

SEQ ID NO: 2216821 - DNA, 25 bp, Homo sapien
ccattgaggaggcatagcttactac

SEQ ID NO: 2216822 - DNA, 25 bp, Homo sapien
gccattgaggaggcatagcttacta

SEQ ID NO: 2216823 - DNA, 25 bp, Homo sapien
ctgccattgaggaggcatagcttac

SEQ ID NO: 2216824 - DNA, 25 bp, Homo sapien
tgccattgaggaggcatagcttact

SEQ ID NO: 2216825 - DNA, 25 bp, Homo sapien
gatgtccaagatgccagtttcattt

SEQ ID NO: 2216826 - DNA, 25 bp, Homo sapien
atcagagatgtccaagatgccagtt

SEQ ID NO: 2216827 - DNA, 25 bp, Homo sapien
agagatgtccaagatgccagtttca

SEQ ID NO: 2216828 - DNA, 25 bp, Homo sapien
cagagatgtccaagatgccagtttc

SEQ ID NO: 2216829 - DNA, 25 bp, Homo sapien
cgtgttcgccgcaataaaagaagca

SEQ ID NO: 2216830 - DNA, 25 bp, Homo sapien
tgaaaagccatactctgaagaagaa

SEQ ID NO: 2216831 - DNA, 25 bp, Homo sapien
ctgatgaaaagccatactctgaaga

SEQ ID NO: 2216832 - DNA, 25 bp, Homo sapien
tgaagaagaaagtaggcgtgttcgc

SEQ ID NO: 2216833 - DNA, 25 bp, Homo sapien
agatgagatgacaatatcattcttt

SEQ ID NO: 2216834 - DNA, 25 bp, Homo sapien
aagatgagatgacaatatcattctt

SEQ ID NO: 2216835 - DNA, 25 bp, Homo sapien
ctaatgaagtcatgttctgtgctca

SEQ ID NO: 2216836 - DNA, 25 bp, Homo sapien
cctctaatgaagtcatgttctgtgc

SEQ ID NO: 2216837 - DNA, 25 bp, Homo sapien
ctctaatgaagtcatgttctgtgct

SEQ ID NO: 2216838 - DNA, 25 bp, Homo sapien
tctaatgaagtcatgttctgtgctc

SEQ ID NO: 2216839 - DNA, 25 bp, Homo sapien
gtcaaaaacttggtccgggccagca

SEQ ID NO: 2216840 - DNA, 25 bp, Homo sapien
ccagctgaaacggtcaaaaacttgg

SEQ ID NO: 2216841 - DNA, 25 bp, Homo sapien
cagctgaaacggtcaaaaacttggt

SEQ ID NO: 2216842 - DNA, 25 bp, Homo sapien
ttggtccgggccagcacacctttgc

SEQ ID NO: 2216843 - DNA, 25 bp, Homo sapien
aacagagtagttggtgcacacgcag

SEQ ID NO: 2216844 - DNA, 25 bp, Homo sapien
cagaggtgactgattgccccaaagt

SEQ ID NO: 2216845 - DNA, 25 bp, Homo sapien
gggaaaacgtaatctctggcacaag

SEQ ID NO: 2216846 - DNA, 25 bp, Homo sapien
ccaacggcctttgaggtaagcaaga

SEQ ID NO: 2216847 - DNA, 25 bp, Homo sapien
accaaagtgccgtcagggcacctct

SEQ ID NO: 2216848 - DNA, 25 bp, Homo sapien
gactatctcaccagtagctgcaaag

SEQ ID NO: 2216849 - DNA, 25 bp, Homo sapien
cctgtttcttgggactatctcacca

SEQ ID NO: 2216850 - DNA, 25 bp, Homo sapien
tggcaccaaagtgccgtcagggcac

SEQ ID NO: 2216851 - DNA, 25 bp, Homo sapien
agggtgaaggctactggggatgtct

SEQ ID NO: 2216852 - DNA, 25 bp, Homo sapien
cagggtgaaggctactggggatgtc

SEQ ID NO: 2216853 - DNA, 25 bp, Homo sapien
gccagggtgaaggctactggggatg

SEQ ID NO: 2216854 - DNA, 25 bp, Homo sapien
gggtgaaggctactggggatgtctg

SEQ ID NO: 2216855 - DNA, 25 bp, Homo sapien
cttggattctcaatcttgggcattg

SEQ ID NO: 2216856 - DNA, 25 bp, Homo sapien
tacgtagggcatcaatatagagtgt

SEQ ID NO: 2216857 - DNA, 25 bp, Homo sapien
tgtgtgatatttagccacgatctcc

SEQ ID NO: 2216858 - DNA, 25 bp, Homo sapien
tatgctggtcaaacagtttacgtag

SEQ ID NO: 2216859 - DNA, 25 bp, Homo sapien
tgctgatcatagaggtccgtctccc

SEQ ID NO: 2216860 - DNA, 25 bp, Homo sapien
cgatggtggttacaggccgactata

SEQ ID NO: 2216861 - DNA, 25 bp, Homo sapien
tctggaagcggttgacaaagccacc

SEQ ID NO: 2216862 - DNA, 25 bp, Homo sapien
tggtgaagccacgtccatagaaagc

SEQ ID NO: 2216863 - DNA, 25 bp, Homo sapien
tgacggcgcatgatccctgggtctg

SEQ ID NO: 2216864 - DNA, 25 bp, Homo sapien
atgccagacacgctgacggcgcatg

SEQ ID NO: 2216865 - DNA, 25 bp, Homo sapien
cagctgtgcctaggtccaagttgag

SEQ ID NO: 2216866 - DNA, 25 bp, Homo sapien
tgggggctccatggcctacccctgg

SEQ ID NO: 2216867 - DNA, 25 bp, Homo sapien
gatgaccatagttcgtaagaatgta

SEQ ID NO: 2216868 - DNA, 25 bp, Homo sapien
tgtggatgtcctttcatcaaaaccc

SEQ ID NO: 2216869 - DNA, 25 bp, Homo sapien
ttttggatcccttccgccagcctgg

SEQ ID NO: 2216870 - DNA, 25 bp, Homo sapien
tgtattgtatacttcctcctctctc

SEQ ID NO: 2216871 - DNA, 25 bp, Homo sapien
gcctgtgcctttatgagtcagcaga

SEQ ID NO: 2216872 - DNA, 25 bp, Homo sapien
cggttcttcaacaccagggtagaag

SEQ ID NO: 2216873 - DNA, 25 bp, Homo sapien
ggcaggctgtatctgcactcagcca

SEQ ID NO: 2216874 - DNA, 25 bp, Homo sapien
ctgaagggccatgcgcacaaagcca

SEQ ID NO: 2216875 - DNA, 25 bp, Homo sapien
aaccatccatgggcaaagagcccat

SEQ ID NO: 2216876 - DNA, 25 bp, Homo sapien
tggcagacgaggatgtagttgcggc

SEQ ID NO: 2216877 - DNA, 25 bp, Homo sapien
gccaggaaatatcttggagaagcct

SEQ ID NO: 2216878 - DNA, 25 bp, Homo sapien
ggctcccagtgtgagtatgtaaggg

SEQ ID NO: 2216879 - DNA, 25 bp, Homo sapien
gagggaaataatcgctgtagtgttt

SEQ ID NO: 2216880 - DNA, 25 bp, Homo sapien
cacaggcgccagtgcctcacacagg

SEQ ID NO: 2216881 - DNA, 25 bp, Homo sapien
ctcacacaggtaaaccggcggccgc

SEQ ID NO: 2216882 - DNA, 25 bp, Homo sapien
tagtgtttccacaggcgccagtgcc

SEQ ID NO: 2216883 - DNA, 25 bp, Homo sapien
gccagccaggtaagaataagcacag

SEQ ID NO: 2216884 - DNA, 25 bp, Homo sapien
ccaggtagaggttgacagcaatcac

SEQ ID NO: 2216885 - DNA, 25 bp, Homo sapien
cagtatggtgtgaacaccaccaggt

SEQ ID NO: 2216886 - DNA, 25 bp, Homo sapien
gggtcttccagtcaaaagccagcca

SEQ ID NO: 2216887 - DNA, 25 bp, Homo sapien
ctgaaggaccactggaaaacagcaa

SEQ ID NO: 2216888 - DNA, 25 bp, Homo sapien
caaggcactgaaggaccactggaaa

SEQ ID NO: 2216889 - DNA, 25 bp, Homo sapien
tgataagcaaggcactgaaggacca

SEQ ID NO: 2216890 - DNA, 25 bp, Homo sapien
gaccactggaaaacagcaaagacat

SEQ ID NO: 2216891 - DNA, 25 bp, Homo sapien
catgacattattggctctggcagca

SEQ ID NO: 2216892 - DNA, 25 bp, Homo sapien
ctaggagcccatgaacatgacatta

SEQ ID NO: 2216893 - DNA, 25 bp, Homo sapien
gacattattggctctggcagcagcc

SEQ ID NO: 2216894 - DNA, 25 bp, Homo sapien
aacatgacattattggctctggcag

SEQ ID NO: 2216895 - DNA, 25 bp, Homo sapien
cccatgatggattttgggttttaca

SEQ ID NO: 2216896 - DNA, 25 bp, Homo sapien
gacctgaggcccatacaatgctttg

SEQ ID NO: 2216897 - DNA, 25 bp, Homo sapien
gagacctgaggcccatacaatgctt

SEQ ID NO: 2216898 - DNA, 25 bp, Homo sapien
ctgtttctactggtggagagacctg

SEQ ID NO: 2216899 - DNA, 25 bp, Homo sapien
actgcagacaagagctaaacaatgc

SEQ ID NO: 2216900 - DNA, 25 bp, Homo sapien
tgctcaggtctaaggctgatcttat

SEQ ID NO: 2216901 - DNA, 25 bp, Homo sapien
gctgatcttattgcagtggaactgc

SEQ ID NO: 2216902 - DNA, 25 bp, Homo sapien
gcttcttcttcagtagggtggtcag

SEQ ID NO: 2216903 - DNA, 25 bp, Homo sapien
aggccaatgaatagcttctatcctt

SEQ ID NO: 2216904 - DNA, 25 bp, Homo sapien
ggccaatgaatagcttctatccttt

SEQ ID NO: 2216905 - DNA, 25 bp, Homo sapien
gccaatgaatagcttctatccttta

SEQ ID NO: 2216906 - DNA, 25 bp, Homo sapien
ccaatgaatagcttctatcctttaa

SEQ ID NO: 2216907 - DNA, 25 bp, Homo sapien
gagccttattgttagatatggggac

SEQ ID NO: 2216908 - DNA, 25 bp, Homo sapien
gatatggggacatgaattagcagtt

SEQ ID NO: 2216909 - DNA, 25 bp, Homo sapien
ccttattgttagatatggggacatg

SEQ ID NO: 2216910 - DNA, 25 bp, Homo sapien
ttagatatggggacatgaattagca

SEQ ID NO: 2216911 - DNA, 25 bp, Homo sapien
gtaaataagaagttggaggcttcta

SEQ ID NO: 2216912 - DNA, 25 bp, Homo sapien
gaggcttctattattagactcacaa

SEQ ID NO: 2216913 - DNA, 25 bp, Homo sapien
tggtaaataagaagttggaggcttc

SEQ ID NO: 2216914 - DNA, 25 bp, Homo sapien
tctaatgttttggttcaactgtatt

SEQ ID NO: 2216915 - DNA, 25 bp, Homo sapien
gaactaagtgcacgaagggaagccg

SEQ ID NO: 2216916 - DNA, 25 bp, Homo sapien
gagaaacccagacttggcggctgaa

SEQ ID NO: 2216917 - DNA, 25 bp, Homo sapien
tgaccggagttgcaggttgccaatc

SEQ ID NO: 2216918 - DNA, 25 bp, Homo sapien
caattatacagcgtggtaggtgcca

SEQ ID NO: 2216919 - DNA, 25 bp, Homo sapien
tcatggtaaaacagcgcctagggtt

SEQ ID NO: 2216920 - DNA, 25 bp, Homo sapien
tatcaaggttgcctttgaccccgga

SEQ ID NO: 2216921 - DNA, 25 bp, Homo sapien
aaatgagtctatggaaacggttgcc

SEQ ID NO: 2216922 - DNA, 25 bp, Homo sapien
taacgggctgcctggtaaaatgagt

SEQ ID NO: 2216923 - DNA, 25 bp, Homo sapien
tgaagacttaagagcccgtatggta

SEQ ID NO: 2216924 - DNA, 25 bp, Homo sapien
tggcaattcattagtgacccacaga

SEQ ID NO: 2216925 - DNA, 25 bp, Homo sapien
ttctcactcggaacatggctcaagc

SEQ ID NO: 2216926 - DNA, 25 bp, Homo sapien
tctaactcatctcgccaggagaggc

SEQ ID NO: 2216927 - DNA, 25 bp, Homo sapien
tcaccccactaccctccagcctggt

SEQ ID NO: 2216928 - DNA, 25 bp, Homo sapien
ccccactaccctccagcctggtcga

SEQ ID NO: 2216929 - DNA, 25 bp, Homo sapien
aatgagctgagatcaccccactacc

SEQ ID NO: 2216930 - DNA, 25 bp, Homo sapien
atgagctgagatcaccccactaccc

SEQ ID NO: 2216931 - DNA, 25 bp, Homo sapien
ggatgggactagataattcactgcc

SEQ ID NO: 2216932 - DNA, 25 bp, Homo sapien
gccaagctcatcgatgtagctgagg

SEQ ID NO: 2216933 - DNA, 25 bp, Homo sapien
gacaggaggctcacatagggttgct

SEQ ID NO: 2216934 - DNA, 25 bp, Homo sapien
ggctgcagtcttctggaagcttgga

SEQ ID NO: 2216935 - DNA, 25 bp, Homo sapien
tattgttgtgtctcaaggaacagag

SEQ ID NO: 2216936 - DNA, 25 bp, Homo sapien
ttgttgtgtctcaaggaacagagag

SEQ ID NO: 2216937 - DNA, 25 bp, Homo sapien
ggctactgtagggttattcattggc

SEQ ID NO: 2216938 - DNA, 25 bp, Homo sapien
tactgtagggttattcattggccca

SEQ ID NO: 2216939 - DNA, 25 bp, Homo sapien
tgtaccctagatgatatgaaccagc

SEQ ID NO: 2216940 - DNA, 25 bp, Homo sapien
tattccagcttcttaagtggaagga

SEQ ID NO: 2216941 - DNA, 25 bp, Homo sapien
ggctatccgaattctctgaaaaaat

SEQ ID NO: 2216942 - DNA, 25 bp, Homo sapien
gctctgtataatctatggctatccg

SEQ ID NO: 2216943 - DNA, 25 bp, Homo sapien
tctgcagtctagcttaggagaggtg

SEQ ID NO: 2216944 - DNA, 25 bp, Homo sapien
tacttctgtggctttgttacacggg

SEQ ID NO: 2216945 - DNA, 25 bp, Homo sapien
gatgacagaagactaccaataatct

SEQ ID NO: 2216946 - DNA, 25 bp, Homo sapien
tgcttaatgaggagtcatctcaccc

SEQ ID NO: 2216947 - DNA, 25 bp, Homo sapien
aattggactcatggagatagataga

SEQ ID NO: 2216948 - DNA, 25 bp, Homo sapien
tcgcttatttgtgggaactaacaaa

SEQ ID NO: 2216949 - DNA, 25 bp, Homo sapien
gtgtataatttgtaacaaaggagaa

SEQ ID NO: 2216950 - DNA, 25 bp, Homo sapien
aaaattgcaggctgtgtgacgtgac

SEQ ID NO: 2216951 - DNA, 25 bp, Homo sapien
tacacactgatttgtcctttccact

SEQ ID NO: 2216952 - DNA, 25 bp, Homo sapien
atttcctttaatgccgttacacact

SEQ ID NO: 2216953 - DNA, 25 bp, Homo sapien
gttacacactgatttgtcctttcca

SEQ ID NO: 2216954 - DNA, 25 bp, Homo sapien
taatgccgttacacactgatttgtc

SEQ ID NO: 2216955 - DNA, 25 bp, Homo sapien
ttggactgcccgtccaggcctctct

SEQ ID NO: 2216956 - DNA, 25 bp, Homo sapien
agctcacggccgtctcttggactgc

SEQ ID NO: 2216957 - DNA, 25 bp, Homo sapien
gggtccagcttatcacagccccgtt

SEQ ID NO: 2216958 - DNA, 25 bp, Homo sapien
tctggtcccggtccccttgatctgt

SEQ ID NO: 2216959 - DNA, 25 bp, Homo sapien
cattcagatttaggtcattgccccg

SEQ ID NO: 2216960 - DNA, 25 bp, Homo sapien
cttacactggaaataactcgttgcc

SEQ ID NO: 2216961 - DNA, 25 bp, Homo sapien
tctgaaggcattgagccaactgact

SEQ ID NO: 2216962 - DNA, 25 bp, Homo sapien
ccaactgactagattaggcaagcat

SEQ ID NO: 2216963 - DNA, 25 bp, Homo sapien
tgggaataaatctagtaaaccatac

SEQ ID NO: 2216964 - DNA, 25 bp, Homo sapien
aagatctaaataattagagacatac

SEQ ID NO: 2216965 - DNA, 25 bp, Homo sapien
tctatatactagcagagaagaattg

SEQ ID NO: 2216966 - DNA, 25 bp, Homo sapien
catacaggattcataggctaaaaac

SEQ ID NO: 2216967 - DNA, 25 bp, Homo sapien
tcaacacagtaaagatgccaattct

SEQ ID NO: 2216968 - DNA, 25 bp, Homo sapien
agattggaagattcaacacagtaaa

SEQ ID NO: 2216969 - DNA, 25 bp, Homo sapien
ttcaacacagtaaagatgccaattc

SEQ ID NO: 2216970 - DNA, 25 bp, Homo sapien
atgttcacagattggaagattcaac

SEQ ID NO: 2216971 - DNA, 25 bp, Homo sapien
taaacagagatttaccacgttcctg

SEQ ID NO: 2216972 - DNA, 25 bp, Homo sapien
cacgttcctggatgagacaattcaa

SEQ ID NO: 2216973 - DNA, 25 bp, Homo sapien
cttggcccaggaacaactaagctat

SEQ ID NO: 2216974 - DNA, 25 bp, Homo sapien
tatataccaataacaaccagactag

SEQ ID NO: 2216975 - DNA, 25 bp, Homo sapien
tattaataggcacgatcccaccact

SEQ ID NO: 2216976 - DNA, 25 bp, Homo sapien
tacaggtacgtgtctccaagcccgg

SEQ ID NO: 2216977 - DNA, 25 bp, Homo sapien
ccatatcaatgccaaacttgtgcca

SEQ ID NO: 2216978 - DNA, 25 bp, Homo sapien
agtgcagtggttattaataggcacg

SEQ ID NO: 2216979 - DNA, 25 bp, Homo sapien
tactccttgctactgcccaataggc

SEQ ID NO: 2216980 - DNA, 25 bp, Homo sapien
cataagcaatagtacctgaaagtga

SEQ ID NO: 2216981 - DNA, 25 bp, Homo sapien
gagaccagaatagaaatccagccct

SEQ ID NO: 2216982 - DNA, 25 bp, Homo sapien
gaaatttggcctttatctcataagc

SEQ ID NO: 2216983 - DNA, 25 bp, Homo sapien
tctgtgatatggaagttgcctccac

SEQ ID NO: 2216984 - DNA, 25 bp, Homo sapien
tacatatggcacatcctcggcatct

SEQ ID NO: 2216985 - DNA, 25 bp, Homo sapien
tgagatgactctgcctgatccaccc

SEQ ID NO: 2216986 - DNA, 25 bp, Homo sapien
ggttatcaccatcagatacgtcagg

SEQ ID NO: 2216987 - DNA, 25 bp, Homo sapien
tcactattgggttccctcacctctg

SEQ ID NO: 2216988 - DNA, 25 bp, Homo sapien
caaccctcagggtgagggcttctct

SEQ ID NO: 2216989 - DNA, 25 bp, Homo sapien
cctgcaaccctcagggtgagggctt

SEQ ID NO: 2216990 - DNA, 25 bp, Homo sapien
agaggaagaagcaccttaccaggta

SEQ ID NO: 2216991 - DNA, 25 bp, Homo sapien
ctatctgccctaggagtagagcagc

SEQ ID NO: 2216992 - DNA, 25 bp, Homo sapien
taggagtagagcagctactgtcctg

SEQ ID NO: 2216993 - DNA, 25 bp, Homo sapien
ccctaggagtagagcagctactgtc

SEQ ID NO: 2216994 - DNA, 25 bp, Homo sapien
tctgccctaggagtagagcagctac

SEQ ID NO: 2216995 - DNA, 25 bp, Homo sapien
tacaggcgacgagccatgagtccat

SEQ ID NO: 2216996 - DNA, 25 bp, Homo sapien
tgggcagcgacagcacatacaaggt

SEQ ID NO: 2216997 - DNA, 25 bp, Homo sapien
caatgttcagtactcggcagtcagc

SEQ ID NO: 2216998 - DNA, 25 bp, Homo sapien
gaacatgtaggtggccgttgcatcc

SEQ ID NO: 2216999 - DNA, 25 bp, Homo sapien
tagggagagctgacagaagcgcatc

SEQ ID NO: 2217000 - DNA, 25 bp, Homo sapien
cagggagagcagtggttgaagcact

SEQ ID NO: 2217001 - DNA, 25 bp, Homo sapien
gttgaagcactagggagagctgaca

SEQ ID NO: 2217002 - DNA, 25 bp, Homo sapien
cccatccctgagctggagcaaaaaa

SEQ ID NO: 2217003 - DNA, 25 bp, Homo sapien
tggcagcagtattacagatcaagat

SEQ ID NO: 2217004 - DNA, 25 bp, Homo sapien
taattctcactatggattaacccca

SEQ ID NO: 2217005 - DNA, 25 bp, Homo sapien
tgtgtagggaaactggctgaccttt

SEQ ID NO: 2217006 - DNA, 25 bp, Homo sapien
taacactaagaaacattactctggc

SEQ ID NO: 2217007 - DNA, 25 bp, Homo sapien
caggctttgctatatcttttgaata

SEQ ID NO: 2217008 - DNA, 25 bp, Homo sapien
tctatacctattgtcaaattgccct

SEQ ID NO: 2217009 - DNA, 25 bp, Homo sapien
tcatattgccccagtccttataaac

SEQ ID NO: 2217010 - DNA, 25 bp, Homo sapien
ttataccaattaaatctcactcctg

SEQ ID NO: 2217011 - DNA, 25 bp, Homo sapien
gatgatttctatccgcctctcactt

SEQ ID NO: 2217012 - DNA, 25 bp, Homo sapien
tatgagttcaattataactcttcca

SEQ ID NO: 2217013 - DNA, 25 bp, Homo sapien
ccattagcgcatttcagatgatttc

SEQ ID NO: 2217014 - DNA, 25 bp, Homo sapien
caaatcttagatacctgttacaaag

SEQ ID NO: 2217015 - DNA, 25 bp, Homo sapien
tctgaaaggaggacgctctggctaa

SEQ ID NO: 2217016 - DNA, 25 bp, Homo sapien
gggttctaggtctccatctgcgtat

SEQ ID NO: 2217017 - DNA, 25 bp, Homo sapien
gctttaggttcactaccacggagaa

SEQ ID NO: 2217018 - DNA, 25 bp, Homo sapien
tgatttcctacttgggcaggcagag

SEQ ID NO: 2217019 - DNA, 25 bp, Homo sapien
acacgtgcgagcagaaagaggtgac

SEQ ID NO: 2217020 - DNA, 25 bp, Homo sapien
ccagcactgcaggatgggaaggaca

SEQ ID NO: 2217021 - DNA, 25 bp, Homo sapien
cagataagtgggtagaacacgtgcg

SEQ ID NO: 2217022 - DNA, 25 bp, Homo sapien
tcccatcagggcacaaggatatgtt

SEQ ID NO: 2217023 - DNA, 25 bp, Homo sapien
gcggttgaaatcgaactggaatcct

SEQ ID NO: 2217024 - DNA, 25 bp, Homo sapien
ccttgacacacacttcagcggttga

SEQ ID NO: 2217025 - DNA, 25 bp, Homo sapien
ccttcgaggagtcaggcaacagaag

SEQ ID NO: 2217026 - DNA, 25 bp, Homo sapien
tgctgagttgatgcctgagtggtac

SEQ ID NO: 2217027 - DNA, 25 bp, Homo sapien
agtggctcccctgaagtctagttag

SEQ ID NO: 2217028 - DNA, 25 bp, Homo sapien
catcacaggtagttgcgaggaaggt

SEQ ID NO: 2217029 - DNA, 25 bp, Homo sapien
tcctttcagggaatgaagctcacct

SEQ ID NO: 2217030 - DNA, 25 bp, Homo sapien
tgaaaacagcgtctcactggagtct

SEQ ID NO: 2217031 - DNA, 25 bp, Homo sapien
ctagtgcacagtcctctctttttgg

SEQ ID NO: 2217032 - DNA, 25 bp, Homo sapien
gtcctctctttttggcgatgataat

SEQ ID NO: 2217033 - DNA, 25 bp, Homo sapien
gcacagtcctctctttttggcgatg

SEQ ID NO: 2217034 - DNA, 25 bp, Homo sapien
cagtcctctctttttggcgatgata

SEQ ID NO: 2217035 - DNA, 25 bp, Homo sapien
gcatgctgatttcacgagctgtctt

SEQ ID NO: 2217036 - DNA, 25 bp, Homo sapien
tgctgatttcacgagctgtcttcag

SEQ ID NO: 2217037 - DNA, 25 bp, Homo sapien
ctgatttcacgagctgtcttcagga

SEQ ID NO: 2217038 - DNA, 25 bp, Homo sapien
gctgatttcacgagctgtcttcagg

SEQ ID NO: 2217039 - DNA, 25 bp, Homo sapien
tgctcaatatcttggaaatccacat

SEQ ID NO: 2217040 - DNA, 25 bp, Homo sapien
tgctgtgctcaatatcttggaaatc

SEQ ID NO: 2217041 - DNA, 25 bp, Homo sapien
tcacagctagaacttggtccccttc

SEQ ID NO: 2217042 - DNA, 25 bp, Homo sapien
tcattcacagctagaacttggtccc

SEQ ID NO: 2217043 - DNA, 25 bp, Homo sapien
ggaggcctttcctcctcggatgtta

SEQ ID NO: 2217044 - DNA, 25 bp, Homo sapien
ttcctcctcggatgttaaatcccaa

SEQ ID NO: 2217045 - DNA, 25 bp, Homo sapien
gcctttcctcctcggatgttaaatc

SEQ ID NO: 2217046 - DNA, 25 bp, Homo sapien
tgaagatgcctagctgggaggcctt

SEQ ID NO: 2217047 - DNA, 25 bp, Homo sapien
actgggtcaactcattgttgtagtc

SEQ ID NO: 2217048 - DNA, 25 bp, Homo sapien
gaaactgggtcaactcattgttgta

SEQ ID NO: 2217049 - DNA, 25 bp, Homo sapien
aaactgggtcaactcattgttgtag

SEQ ID NO: 2217050 - DNA, 25 bp, Homo sapien
aactgggtcaactcattgttgtagt

SEQ ID NO: 2217051 - DNA, 25 bp, Homo sapien
gaaattttaccagtcttacttcaca

SEQ ID NO: 2217052 - DNA, 25 bp, Homo sapien
tttaccagtcttacttcacacctac

SEQ ID NO: 2217053 - DNA, 25 bp, Homo sapien
attttaccagtcttacttcacacct

SEQ ID NO: 2217054 - DNA, 25 bp, Homo sapien
cagaaattttaccagtcttacttca

SEQ ID NO: 2217055 - DNA, 25 bp, Homo sapien
tcatctgaaacactaatgaattacc

SEQ ID NO: 2217056 - DNA, 25 bp, Homo sapien
tgagtagatggatagcactggggca

SEQ ID NO: 2217057 - DNA, 25 bp, Homo sapien
gtagatggatagcactggggcagcc

SEQ ID NO: 2217058 - DNA, 25 bp, Homo sapien
aacacagactaaatgagtagatgga

SEQ ID NO: 2217059 - DNA, 25 bp, Homo sapien
aggtcatagacttaatttaagtaga

SEQ ID NO: 2217060 - DNA, 25 bp, Homo sapien
caccgggtagtcatcataaggaatc

SEQ ID NO: 2217061 - DNA, 25 bp, Homo sapien
aaaccaccgggtagtcatcataagg

SEQ ID NO: 2217062 - DNA, 25 bp, Homo sapien
accaccgggtagtcatcataaggaa

SEQ ID NO: 2217063 - DNA, 25 bp, Homo sapien
gaaaaccaccgggtagtcatcataa

SEQ ID NO: 2217064 - DNA, 25 bp, Homo sapien
tggaagagtgaatcagaacagacaa

SEQ ID NO: 2217065 - DNA, 25 bp, Homo sapien
gagcagcccagcaagtttcagacag

SEQ ID NO: 2217066 - DNA, 25 bp, Homo sapien
ctggaagagtgaatcagaacagaca

SEQ ID NO: 2217067 - DNA, 25 bp, Homo sapien
agcagcccagcaagtttcagacagc

SEQ ID NO: 2217068 - DNA, 25 bp, Homo sapien
ccagcccatatctaggtgttaaggt

SEQ ID NO: 2217069 - DNA, 25 bp, Homo sapien
tcagtctacaggcccagcccatatc

SEQ ID NO: 2217070 - DNA, 25 bp, Homo sapien
cccatatctaggtgttaaggttgga

SEQ ID NO: 2217071 - DNA, 25 bp, Homo sapien
catatctaggtgttaaggttggagg

SEQ ID NO: 2217072 - DNA, 25 bp, Homo sapien
caggtactctagaaagaggacctca

SEQ ID NO: 2217073 - DNA, 25 bp, Homo sapien
ttagctaaacatcttctggatgcca

SEQ ID NO: 2217074 - DNA, 25 bp, Homo sapien
tcttctggatgccaagcaacctgtc

SEQ ID NO: 2217075 - DNA, 25 bp, Homo sapien
tctggatgccaagcaacctgtcagg

SEQ ID NO: 2217076 - DNA, 25 bp, Homo sapien
caaaacagatgttaccgtctcaaac

SEQ ID NO: 2217077 - DNA, 25 bp, Homo sapien
gcaaaacagatgttaccgtctcaaa

SEQ ID NO: 2217078 - DNA, 25 bp, Homo sapien
tgcaaaacagatgttaccgtctcaa

SEQ ID NO: 2217079 - DNA, 25 bp, Homo sapien
ctgcaaaacagatgttaccgtctca

SEQ ID NO: 2217080 - DNA, 25 bp, Homo sapien
cggatgctccgcagggtcgaaaaga

SEQ ID NO: 2217081 - DNA, 25 bp, Homo sapien
cagactccgctcactgacaattcag

SEQ ID NO: 2217082 - DNA, 25 bp, Homo sapien
tgctccgcagggtcgaaaagaggcc

SEQ ID NO: 2217083 - DNA, 25 bp, Homo sapien
tctgggaaccggaagcggatgctcc

SEQ ID NO: 2217084 - DNA, 25 bp, Homo sapien
gactggatattgtccccgggttaca

SEQ ID NO: 2217085 - DNA, 25 bp, Homo sapien
tgaatttcattgtctcgaagagctg

SEQ ID NO: 2217086 - DNA, 25 bp, Homo sapien
tcaccttggagatggtagtgtagcc

SEQ ID NO: 2217087 - DNA, 25 bp, Homo sapien
catcacatctatgtaggagttgtgc

SEQ ID NO: 2217088 - DNA, 25 bp, Homo sapien
tagggaatgcacttgtaagacaagg

SEQ ID NO: 2217089 - DNA, 25 bp, Homo sapien
ttagggaatgcacttgtaagacaag

SEQ ID NO: 2217090 - DNA, 25 bp, Homo sapien
ggttagggaatgcacttgtaagaca

SEQ ID NO: 2217091 - DNA, 25 bp, Homo sapien
ctggttagggaatgcacttgtaaga

SEQ ID NO: 2217092 - DNA, 25 bp, Homo sapien
tctctagtgacttatgaggcaagac

SEQ ID NO: 2217093 - DNA, 25 bp, Homo sapien
caaagggactggtcgagagtctcta

SEQ ID NO: 2217094 - DNA, 25 bp, Homo sapien
tcttggaacgtctttgaactccatg

SEQ ID NO: 2217095 - DNA, 25 bp, Homo sapien
gaacgtctttgaactccatggtctc

SEQ ID NO: 2217096 - DNA, 25 bp, Homo sapien
caggtccagatagacctctctctgg

SEQ ID NO: 2217097 - DNA, 25 bp, Homo sapien
tagagcaggtccagatagacctctc

SEQ ID NO: 2217098 - DNA, 25 bp, Homo sapien
gtccagatagacctctctctggttg

SEQ ID NO: 2217099 - DNA, 25 bp, Homo sapien
gagcaggtccagatagacctctctc

SEQ ID NO: 2217100 - DNA, 25 bp, Homo sapien
tgcggatgtagagagggtaattctc

SEQ ID NO: 2217101 - DNA, 25 bp, Homo sapien
cgtgggggtgctgcggatgtagaga

SEQ ID NO: 2217102 - DNA, 25 bp, Homo sapien
gaaactcagctctttctccgtgggg

SEQ ID NO: 2217103 - DNA, 25 bp, Homo sapien
actcagctctttctccgtgggggtg

SEQ ID NO: 2217104 - DNA, 25 bp, Homo sapien
ggtgatcaccgggatgcatatcacc

SEQ ID NO: 2217105 - DNA, 25 bp, Homo sapien
cttggtgatcaccgggatgcatatc

SEQ ID NO: 2217106 - DNA, 25 bp, Homo sapien
tgatcaccgggatgcatatcaccat

SEQ ID NO: 2217107 - DNA, 25 bp, Homo sapien
ttggtgatcaccgggatgcatatca

SEQ ID NO: 2217108 - DNA, 25 bp, Homo sapien
cttttaaacatggagcctaggactc

SEQ ID NO: 2217109 - DNA, 25 bp, Homo sapien
gagatttcttatgtgcagccagagt

SEQ ID NO: 2217110 - DNA, 25 bp, Homo sapien
gcagtagttctcaagtctagccaca

SEQ ID NO: 2217111 - DNA, 25 bp, Homo sapien
cacattggaacacccaagggagctt

SEQ ID NO: 2217112 - DNA, 25 bp, Homo sapien
atggaattgaagctatatgtatcaa

SEQ ID NO: 2217113 - DNA, 25 bp, Homo sapien
tgtggcaacttcatagagtgaaaat

SEQ ID NO: 2217114 - DNA, 25 bp, Homo sapien
gctatcactactgcagccttgttta

SEQ ID NO: 2217115 - DNA, 25 bp, Homo sapien
catttatacaaagtttagaaacgtg

SEQ ID NO: 2217116 - DNA, 25 bp, Homo sapien
caagcaggtcagatccctatacctg

SEQ ID NO: 2217117 - DNA, 25 bp, Homo sapien
tatacctgccttacacctacctgtg

SEQ ID NO: 2217118 - DNA, 25 bp, Homo sapien
gatatacagtaattctagcaagcac

SEQ ID NO: 2217119 - DNA, 25 bp, Homo sapien
tgcattactacagctctatatgtga

SEQ ID NO: 2217120 - DNA, 25 bp, Homo sapien
gctgcctccactgcctgtatagctg

SEQ ID NO: 2217121 - DNA, 25 bp, Homo sapien
accatggccgagtcccccggctgct

SEQ ID NO: 2217122 - DNA, 25 bp, Homo sapien
ccggctgctgctccgtctgggcccg

SEQ ID NO: 2217123 - DNA, 25 bp, Homo sapien
ccaggccttcaccatggccgagtcc

SEQ ID NO: 2217124 - DNA, 25 bp, Homo sapien
ccttgaagagctccgaatgcctggc

SEQ ID NO: 2217125 - DNA, 25 bp, Homo sapien
gaagagactcaatgctggatcctgg

SEQ ID NO: 2217126 - DNA, 25 bp, Homo sapien
caaagcagggaacaggaactccttc

SEQ ID NO: 2217127 - DNA, 25 bp, Homo sapien
ctaggcagcagacgattcaggaaac

SEQ ID NO: 2217128 - DNA, 25 bp, Homo sapien
ctgcggcaatgaaggactcgcggga

SEQ ID NO: 2217129 - DNA, 25 bp, Homo sapien
tgcggcaatgaaggactcgcgggag

SEQ ID NO: 2217130 - DNA, 25 bp, Homo sapien
gattggctggaatcaactgagaagg

SEQ ID NO: 2217131 - DNA, 25 bp, Homo sapien
gggcgacacggagccgccagtgctg

SEQ ID NO: 2217132 - DNA, 25 bp, Homo sapien
tgactccactcagatccatcctggg

SEQ ID NO: 2217133 - DNA, 25 bp, Homo sapien
ccgcttcttctttgccgctgggcct

SEQ ID NO: 2217134 - DNA, 25 bp, Homo sapien
tggtccagggtccatcacacgggtt

SEQ ID NO: 2217135 - DNA, 25 bp, Homo sapien
tgggtgagattttgagactgcagaa

SEQ ID NO: 2217136 - DNA, 25 bp, Homo sapien
tgaagtaagtgtgcacatcctgtgg

SEQ ID NO: 2217137 - DNA, 25 bp, Homo sapien
tgagtgcagtcaaccccagggtgac

SEQ ID NO: 2217138 - DNA, 25 bp, Homo sapien
gcgccctagcctgcgggccagtgga

SEQ ID NO: 2217139 - DNA, 25 bp, Homo sapien
ccaaccgaggcccaggtgccgaggt

SEQ ID NO: 2217140 - DNA, 25 bp, Homo sapien
gtgccgaggtgagccgcgggaaggc

SEQ ID NO: 2217141 - DNA, 25 bp, Homo sapien
aaataaaggcgtttgattggctggg

SEQ ID NO: 2217142 - DNA, 25 bp, Homo sapien
cattcccgacttctttcgcctcctc

SEQ ID NO: 2217143 - DNA, 25 bp, Homo sapien
ttgtcccctagggctgcagcgcctg

SEQ ID NO: 2217144 - DNA, 25 bp, Homo sapien
cctttgtcccctagggctgcagcgc

SEQ ID NO: 2217145 - DNA, 25 bp, Homo sapien
cccctttgtcccctagggctgcagc

SEQ ID NO: 2217146 - DNA, 25 bp, Homo sapien
gcaccaccatgcccagctatttttt

SEQ ID NO: 2217147 - DNA, 25 bp, Homo sapien
accaccatgcccagctattttttgt

SEQ ID NO: 2217148 - DNA, 25 bp, Homo sapien
ttttggtagcaatggggtttcgcca

SEQ ID NO: 2217149 - DNA, 25 bp, Homo sapien
gctattttttgtatttttggtagca

SEQ ID NO: 2217150 - DNA, 25 bp, Homo sapien
cagctgcacggcttgtgaagtgagc

SEQ ID NO: 2217151 - DNA, 25 bp, Homo sapien
ctctgaacggtgcaacgtaatggcg

SEQ ID NO: 2217152 - DNA, 25 bp, Homo sapien
gtgactgtgcccattcctgcatgga

SEQ ID NO: 2217153 - DNA, 25 bp, Homo sapien
tgagctaaatgcaccacatgatgag

SEQ ID NO: 2217154 - DNA, 25 bp, Homo sapien
tttaagcactaccagccgaatccgg

SEQ ID NO: 2217155 - DNA, 25 bp, Homo sapien
aatcttcaccgccacaagtgcaggc

SEQ ID NO: 2217156 - DNA, 25 bp, Homo sapien
ggcacttgtttcctagcccgctggg

SEQ ID NO: 2217157 - DNA, 25 bp, Homo sapien
cagagaagtgcttggccctaggatt

SEQ ID NO: 2217158 - DNA, 25 bp, Homo sapien
aatttaaacagtcagcatctcggga

SEQ ID NO: 2217159 - DNA, 25 bp, Homo sapien
gcatctcgggacaatgtatcttctt

SEQ ID NO: 2217160 - DNA, 25 bp, Homo sapien
cagtcagcatctcgggacaatgtat

SEQ ID NO: 2217161 - DNA, 25 bp, Homo sapien
caacatgaaaacagggtctgagcaa

SEQ ID NO: 2217162 - DNA, 25 bp, Homo sapien
tgttcatgaaaaactgggcccttgt

SEQ ID NO: 2217163 - DNA, 25 bp, Homo sapien
cttgttgttactcaatgcttccaca

SEQ ID NO: 2217164 - DNA, 25 bp, Homo sapien
tctgacttgctccagtagccatgtt

SEQ ID NO: 2217165 - DNA, 25 bp, Homo sapien
ttccacaagctgactatacagcata

SEQ ID NO: 2217166 - DNA, 25 bp, Homo sapien
gaacaacaaatagatttcttgaggg

SEQ ID NO: 2217167 - DNA, 25 bp, Homo sapien
gagaacaacaaatagatttcttgag

SEQ ID NO: 2217168 - DNA, 25 bp, Homo sapien
ggaaagagaacaacaaatagatttc

SEQ ID NO: 2217169 - DNA, 25 bp, Homo sapien
ctgggaaagagaacaacaaatagat

SEQ ID NO: 2217170 - DNA, 25 bp, Homo sapien
cttgctcctgctaaacataagtact

SEQ ID NO: 2217171 - DNA, 25 bp, Homo sapien
cagatgcatacttgctcctgctaaa

SEQ ID NO: 2217172 - DNA, 25 bp, Homo sapien
caggacttgaccatcagccagagaa

SEQ ID NO: 2217173 - DNA, 25 bp, Homo sapien
agtactccggtattccaggacttga

SEQ ID NO: 2217174 - DNA, 25 bp, Homo sapien
ttttcggataaggttgtcaagaagc

SEQ ID NO: 2217175 - DNA, 25 bp, Homo sapien
cggataaggttgtcaagaagcagtt

SEQ ID NO: 2217176 - DNA, 25 bp, Homo sapien
ctctacttttcggataaggttgtca

SEQ ID NO: 2217177 - DNA, 25 bp, Homo sapien
taaggttgtcaagaagcagttttat

SEQ ID NO: 2217178 - DNA, 25 bp, Homo sapien
ctgaaagtttaatatcactatttga

SEQ ID NO: 2217179 - DNA, 25 bp, Homo sapien
gaaagtttaatatcactatttgact

SEQ ID NO: 2217180 - DNA, 25 bp, Homo sapien
aactgaaagtttaatatcactattt

SEQ ID NO: 2217181 - DNA, 25 bp, Homo sapien
agtttaatatcactatttgacttac

SEQ ID NO: 2217182 - DNA, 25 bp, Homo sapien
gcactgagaggttaaccaagttgtg

SEQ ID NO: 2217183 - DNA, 25 bp, Homo sapien
cgccccatctggcactgagaggtta

SEQ ID NO: 2217184 - DNA, 25 bp, Homo sapien
attcgacgccccatctggcactgag

SEQ ID NO: 2217185 - DNA, 25 bp, Homo sapien
ggacagagctctacattcgacgccc

SEQ ID NO: 2217186 - DNA, 25 bp, Homo sapien
tgtgatatatcaattggttcttcct

SEQ ID NO: 2217187 - DNA, 25 bp, Homo sapien
tgtgcaggcttttccattgctatta

SEQ ID NO: 2217188 - DNA, 25 bp, Homo sapien
aaggccttgagagcaatcaaaggat

SEQ ID NO: 2217189 - DNA, 25 bp, Homo sapien
caatcaaaggatagtgtgcaggctt

SEQ ID NO: 2217190 - DNA, 25 bp, Homo sapien
gaagctttccagtaatggatcattc

SEQ ID NO: 2217191 - DNA, 25 bp, Homo sapien
ctcacatgaatcatttgagaaggtc

SEQ ID NO: 2217192 - DNA, 25 bp, Homo sapien
tctaacttcaaactcgtacagcaga

SEQ ID NO: 2217193 - DNA, 25 bp, Homo sapien
aactcgtacagcagaagcaatttct

SEQ ID NO: 2217194 - DNA, 25 bp, Homo sapien
ctaatctctgagacaaaagtaatgc

SEQ ID NO: 2217195 - DNA, 25 bp, Homo sapien
ctgattgctgtattaagccaatgaa

SEQ ID NO: 2217196 - DNA, 25 bp, Homo sapien
ctgtattaagccaatgaaggaacca

SEQ ID NO: 2217197 - DNA, 25 bp, Homo sapien
ccatgagaactaatctctgagacaa

SEQ ID NO: 2217198 - DNA, 25 bp, Homo sapien
tggatctcctcaagtgcacgactca

SEQ ID NO: 2217199 - DNA, 25 bp, Homo sapien
caagtgcacgactcaggaacatggt

SEQ ID NO: 2217200 - DNA, 25 bp, Homo sapien
ttcaggaaattatggatgtcattgc

SEQ ID NO: 2217201 - DNA, 25 bp, Homo sapien
tcattgcatgtctggatctcctcaa

SEQ ID NO: 2217202 - DNA, 25 bp, Homo sapien
tgcaactgccataagtaaacatgtt

SEQ ID NO: 2217203 - DNA, 25 bp, Homo sapien
ttgctctagatcaactgcaactgcc

SEQ ID NO: 2217204 - DNA, 25 bp, Homo sapien
taaacatgttttccgtgcaatcaga

SEQ ID NO: 2217205 - DNA, 25 bp, Homo sapien
cagaattacttgatcagaaggacaa

SEQ ID NO: 2217206 - DNA, 25 bp, Homo sapien
gtaaccagaacatcaatgaatagtg

SEQ ID NO: 2217207 - DNA, 25 bp, Homo sapien
cagaacatcaatgaatagtgagaat

SEQ ID NO: 2217208 - DNA, 25 bp, Homo sapien
ctgataagaagtaaccagaacatca

SEQ ID NO: 2217209 - DNA, 25 bp, Homo sapien
ataagaagtaaccagaacatcaatg

SEQ ID NO: 2217210 - DNA, 25 bp, Homo sapien
actggatctttgtcacattgcacag

SEQ ID NO: 2217211 - DNA, 25 bp, Homo sapien
tcactggatctttgtcacattgcac

SEQ ID NO: 2217212 - DNA, 25 bp, Homo sapien
cactggatctttgtcacattgcaca

SEQ ID NO: 2217213 - DNA, 25 bp, Homo sapien
gcttcattagctcttgactccaaac

SEQ ID NO: 2217214 - DNA, 25 bp, Homo sapien
ctccaaacttaaggcttcttcacca

SEQ ID NO: 2217215 - DNA, 25 bp, Homo sapien
aaccactgagcttcattagctcttg

SEQ ID NO: 2217216 - DNA, 25 bp, Homo sapien
gtttttcgaaaccactgagcttcat

SEQ ID NO: 2217217 - DNA, 25 bp, Homo sapien
tctattcaggcaagtcaaaagtcga

SEQ ID NO: 2217218 - DNA, 25 bp, Homo sapien
tcaggcaagtcaaaagtcgatccat

SEQ ID NO: 2217219 - DNA, 25 bp, Homo sapien
tattcaggcaagtcaaaagtcgatc

SEQ ID NO: 2217220 - DNA, 25 bp, Homo sapien
ctctattcaggcaagtcaaaagtcg

SEQ ID NO: 2217221 - DNA, 25 bp, Homo sapien
agtatctggttccaacttcatattg

SEQ ID NO: 2217222 - DNA, 25 bp, Homo sapien
ttcatattgttgaaagaggaactga

SEQ ID NO: 2217223 - DNA, 25 bp, Homo sapien
tctggttccaacttcatattgttga

SEQ ID NO: 2217224 - DNA, 25 bp, Homo sapien
ggttccaacttcatattgttgaaag

SEQ ID NO: 2217225 - DNA, 25 bp, Homo sapien
tcataaccaacaagccatccaggtt

SEQ ID NO: 2217226 - DNA, 25 bp, Homo sapien
cagaatcataaccaacaagccatcc

SEQ ID NO: 2217227 - DNA, 25 bp, Homo sapien
tacagaatcataaccaacaagccat

SEQ ID NO: 2217228 - DNA, 25 bp, Homo sapien
aatcataaccaacaagccatccagg

SEQ ID NO: 2217229 - DNA, 25 bp, Homo sapien
agattccggcatttcagcaattttt

SEQ ID NO: 2217230 - DNA, 25 bp, Homo sapien
ttcagattccggcatttcagcaatt

SEQ ID NO: 2217231 - DNA, 25 bp, Homo sapien
ttatcttcagattccggcatttcag

SEQ ID NO: 2217232 - DNA, 25 bp, Homo sapien
tatcttcagattccggcatttcagc

SEQ ID NO: 2217233 - DNA, 25 bp, Homo sapien
ttacagctgtaagaacttgttcctg

SEQ ID NO: 2217234 - DNA, 25 bp, Homo sapien
tgttcctggtcttctgaatgttgag

SEQ ID NO: 2217235 - DNA, 25 bp, Homo sapien
gttcctggtcttctgaatgttgagc

SEQ ID NO: 2217236 - DNA, 25 bp, Homo sapien
tctctaaagtaattattgcctgcaa

SEQ ID NO: 2217237 - DNA, 25 bp, Homo sapien
tgggcagctaaacttagaagcatgg

SEQ ID NO: 2217238 - DNA, 25 bp, Homo sapien
tctgactcttcatctgttaatatat

SEQ ID NO: 2217239 - DNA, 25 bp, Homo sapien
ggtgaacctctctctgcaactagat

SEQ ID NO: 2217240 - DNA, 25 bp, Homo sapien
gcataagtttcaaagcctaacgtca

SEQ ID NO: 2217241 - DNA, 25 bp, Homo sapien
cctcgcataagtttcaaagcctaac

SEQ ID NO: 2217242 - DNA, 25 bp, Homo sapien
cataagtttcaaagcctaacgtcat

SEQ ID NO: 2217243 - DNA, 25 bp, Homo sapien
tcgcataagtttcaaagcctaacgt

SEQ ID NO: 2217244 - DNA, 25 bp, Homo sapien
gccctctatgactgcaatcttgaat

SEQ ID NO: 2217245 - DNA, 25 bp, Homo sapien
tcagagttgccctctatgactgcaa

SEQ ID NO: 2217246 - DNA, 25 bp, Homo sapien
tatataaaattgagtgaaaacgttc

SEQ ID NO: 2217247 - DNA, 25 bp, Homo sapien
tcctagggtcatgtcgttcagcttc

SEQ ID NO: 2217248 - DNA, 25 bp, Homo sapien
taatagtaccattgtagggcatcag

SEQ ID NO: 2217249 - DNA, 25 bp, Homo sapien
cctcagagaataatagtaccattgt

SEQ ID NO: 2217250 - DNA, 25 bp, Homo sapien
caaattcaggtaacagcaagccatg

SEQ ID NO: 2217251 - DNA, 25 bp, Homo sapien
tcatcagttgaataaaacctcagag

SEQ ID NO: 2217252 - DNA, 25 bp, Homo sapien
cggcttcacgagattgattctggac

SEQ ID NO: 2217253 - DNA, 25 bp, Homo sapien
cttcacgagattgattctggactac

SEQ ID NO: 2217254 - DNA, 25 bp, Homo sapien
gcttcacgagattgattctggacta

SEQ ID NO: 2217255 - DNA, 25 bp, Homo sapien
ggcttcacgagattgattctggact

SEQ ID NO: 2217256 - DNA, 25 bp, Homo sapien
catagacatcaaagacactggcttc

SEQ ID NO: 2217257 - DNA, 25 bp, Homo sapien
tgctgtgaatggtgcaactcatgca

SEQ ID NO: 2217258 - DNA, 25 bp, Homo sapien
ggtgcaactcatgcagtaatgtagc

SEQ ID NO: 2217259 - DNA, 25 bp, Homo sapien
ggcttcagctatgtccctgatagct

SEQ ID NO: 2217260 - DNA, 25 bp, Homo sapien
ttcttttaagcagtacataaacttg

SEQ ID NO: 2217261 - DNA, 25 bp, Homo sapien
atgtatcttggctattttcattcca

SEQ ID NO: 2217262 - DNA, 25 bp, Homo sapien
tttaagcagtacataaacttgggtc

SEQ ID NO: 2217263 - DNA, 25 bp, Homo sapien
ttttcatatgcttagatgtaaatct

SEQ ID NO: 2217264 - DNA, 25 bp, Homo sapien
tgtgtaaccagttcattgattctgc

SEQ ID NO: 2217265 - DNA, 25 bp, Homo sapien
tggcagcttgtctccacagaatgtt

SEQ ID NO: 2217266 - DNA, 25 bp, Homo sapien
gaatgttgtgtaaccagttcattga

SEQ ID NO: 2217267 - DNA, 25 bp, Homo sapien
gattctgctgtcagttgtcttcctg

SEQ ID NO: 2217268 - DNA, 25 bp, Homo sapien
ctccttggcaagaagttcttccttc

SEQ ID NO: 2217269 - DNA, 25 bp, Homo sapien
cttctccttggcaagaagttcttcc

SEQ ID NO: 2217270 - DNA, 25 bp, Homo sapien
aaaaagatttcttcaatcttctcct

SEQ ID NO: 2217271 - DNA, 25 bp, Homo sapien
gatttcttcaatcttctccttggca

SEQ ID NO: 2217272 - DNA, 25 bp, Homo sapien
gacttaaaacgttcatgaataatcg

SEQ ID NO: 2217273 - DNA, 25 bp, Homo sapien
tttccgatgacttaaaacgttcatg

SEQ ID NO: 2217274 - DNA, 25 bp, Homo sapien
tttccaatattttccgatgacttaa

SEQ ID NO: 2217275 - DNA, 25 bp, Homo sapien
cgttcatgaataatcgtcaggaaat

SEQ ID NO: 2217276 - DNA, 25 bp, Homo sapien
tttatcatcttggtttacaaaaggc

SEQ ID NO: 2217277 - DNA, 25 bp, Homo sapien
atcatcttggtttacaaaaggcctt

SEQ ID NO: 2217278 - DNA, 25 bp, Homo sapien
cttttatcatcttggtttacaaaag

SEQ ID NO: 2217279 - DNA, 25 bp, Homo sapien
tatcatcttggtttacaaaaggcct

SEQ ID NO: 2217280 - DNA, 25 bp, Homo sapien
cagtttagcaatgttcagacagaag

SEQ ID NO: 2217281 - DNA, 25 bp, Homo sapien
tgatccatcagcagtttagcaatgt

SEQ ID NO: 2217282 - DNA, 25 bp, Homo sapien
tgttcagacagaagtctaagggcat

SEQ ID NO: 2217283 - DNA, 25 bp, Homo sapien
caatgttcagacagaagtctaaggg

SEQ ID NO: 2217284 - DNA, 25 bp, Homo sapien
tttggataaacactgtcataaggaa

SEQ ID NO: 2217285 - DNA, 25 bp, Homo sapien
ttggtgactccaatcatctctctgg

SEQ ID NO: 2217286 - DNA, 25 bp, Homo sapien
cctatgttgtcttagttggagtaag

SEQ ID NO: 2217287 - DNA, 25 bp, Homo sapien
ttatcatcccaaactaatgtacttc

SEQ ID NO: 2217288 - DNA, 25 bp, Homo sapien
tcttcattagatgtttcgcctttca

SEQ ID NO: 2217289 - DNA, 25 bp, Homo sapien
gtttcgcctttcaagaggattttca

SEQ ID NO: 2217290 - DNA, 25 bp, Homo sapien
tagatgtttcgcctttcaagaggat

SEQ ID NO: 2217291 - DNA, 25 bp, Homo sapien
cttcaaggagttcttcattagatgt

SEQ ID NO: 2217292 - DNA, 25 bp, Homo sapien
gaacaccgtactgattagctccata

SEQ ID NO: 2217293 - DNA, 25 bp, Homo sapien
catgaacaccgtactgattagctcc

SEQ ID NO: 2217294 - DNA, 25 bp, Homo sapien
tgaacaccgtactgattagctccat

SEQ ID NO: 2217295 - DNA, 25 bp, Homo sapien
tacatgaacaccgtactgattagct

SEQ ID NO: 2217296 - DNA, 25 bp, Homo sapien
ggtgtcatcccaatccaaataattc

SEQ ID NO: 2217297 - DNA, 25 bp, Homo sapien
caaataattcgtggctaatagccgt

SEQ ID NO: 2217298 - DNA, 25 bp, Homo sapien
ggtttacagcattgagagccttatc

SEQ ID NO: 2217299 - DNA, 25 bp, Homo sapien
ttatcataatatttggtgtcatccc

SEQ ID NO: 2217300 - DNA, 25 bp, Homo sapien
tctggcccagtagatttcttatcca

SEQ ID NO: 2217301 - DNA, 25 bp, Homo sapien
ctggcccagtagatttcttatccat

SEQ ID NO: 2217302 - DNA, 25 bp, Homo sapien
ttctggcccagtagatttcttatcc

SEQ ID NO: 2217303 - DNA, 25 bp, Homo sapien
gactaagagccattgtgttgaaaca

SEQ ID NO: 2217304 - DNA, 25 bp, Homo sapien
cagtaaaatgaggactaagagccat

SEQ ID NO: 2217305 - DNA, 25 bp, Homo sapien
accacacccaacatgacagcaattg

SEQ ID NO: 2217306 - DNA, 25 bp, Homo sapien
aaccacacccaacatgacagcaatt

SEQ ID NO: 2217307 - DNA, 25 bp, Homo sapien
agctttctcttaacctgtggtatct

SEQ ID NO: 2217308 - DNA, 25 bp, Homo sapien
ggcataaactccaagctcacatcta

SEQ ID NO: 2217309 - DNA, 25 bp, Homo sapien
caagctcacatctagtcttaagctt

SEQ ID NO: 2217310 - DNA, 25 bp, Homo sapien
cacatctagtcttaagcttccagaa

SEQ ID NO: 2217311 - DNA, 25 bp, Homo sapien
tcttggcataaactccaagctcaca

SEQ ID NO: 2217312 - DNA, 25 bp, Homo sapien
ttctactccaaagttgtaacagaga

SEQ ID NO: 2217313 - DNA, 25 bp, Homo sapien
ctactccaaagttgtaacagagatg

SEQ ID NO: 2217314 - DNA, 25 bp, Homo sapien
gtttctactccaaagttgtaacaga

SEQ ID NO: 2217315 - DNA, 25 bp, Homo sapien
tctactccaaagttgtaacagagat

SEQ ID NO: 2217316 - DNA, 25 bp, Homo sapien
cttcctggaacttgatatagcatat

SEQ ID NO: 2217317 - DNA, 25 bp, Homo sapien
tgcatgaagtagtaatgattcttcc

SEQ ID NO: 2217318 - DNA, 25 bp, Homo sapien
aactcttggagaatgcagacttcac

SEQ ID NO: 2217319 - DNA, 25 bp, Homo sapien
gaatctccaaaaggttgcatgaagt

SEQ ID NO: 2217320 - DNA, 25 bp, Homo sapien
acatatctttacattgcagtacaca

SEQ ID NO: 2217321 - DNA, 25 bp, Homo sapien
catatctttacattgcagtacacac

SEQ ID NO: 2217322 - DNA, 25 bp, Homo sapien
cacttaggagataatgctgcacctc

SEQ ID NO: 2217323 - DNA, 25 bp, Homo sapien
aagcaacatcaagagccggctttac

SEQ ID NO: 2217324 - DNA, 25 bp, Homo sapien
taggagataatgctgcacctcttct

SEQ ID NO: 2217325 - DNA, 25 bp, Homo sapien
gagccggctttacacttaggagata

SEQ ID NO: 2217326 - DNA, 25 bp, Homo sapien
cactggaagaccctggtgcccacga

SEQ ID NO: 2217327 - DNA, 25 bp, Homo sapien
tggaagaccctggtgcccacgatac

SEQ ID NO: 2217328 - DNA, 25 bp, Homo sapien
ctggaagaccctggtgcccacgata

SEQ ID NO: 2217329 - DNA, 25 bp, Homo sapien
cccactggaagaccctggtgcccac

SEQ ID NO: 2217330 - DNA, 25 bp, Homo sapien
tgactctgcttggtaagaaagcact

SEQ ID NO: 2217331 - DNA, 25 bp, Homo sapien
gcctcaggggagctcctttgaatta

SEQ ID NO: 2217332 - DNA, 25 bp, Homo sapien
gaaagcactctgaagtggtcactct

SEQ ID NO: 2217333 - DNA, 25 bp, Homo sapien
tcaacagtaatcttctccatggtca

SEQ ID NO: 2217334 - DNA, 25 bp, Homo sapien
aaaacattcatcagcgattagaaaa

SEQ ID NO: 2217335 - DNA, 25 bp, Homo sapien
cattcatcagcgattagaaaatttc

SEQ ID NO: 2217336 - DNA, 25 bp, Homo sapien
gcatccaaccattcttttcctattc

SEQ ID NO: 2217337 - DNA, 25 bp, Homo sapien
catcagcgattagaaaatttccagc

SEQ ID NO: 2217338 - DNA, 25 bp, Homo sapien
cataatcagtcgttgaatactttgt

SEQ ID NO: 2217339 - DNA, 25 bp, Homo sapien
taatcagtcgttgaatactttgttc

SEQ ID NO: 2217340 - DNA, 25 bp, Homo sapien
ataatcagtcgttgaatactttgtt

SEQ ID NO: 2217341 - DNA, 25 bp, Homo sapien
tcagcaacttgcaagcaacataatg

SEQ ID NO: 2217342 - DNA, 25 bp, Homo sapien
cagcaacttgcaagcaacataatgt

SEQ ID NO: 2217343 - DNA, 25 bp, Homo sapien
agcaacttgcaagcaacataatgta

SEQ ID NO: 2217344 - DNA, 25 bp, Homo sapien
actcagcaacttgcaagcaacataa

SEQ ID NO: 2217345 - DNA, 25 bp, Homo sapien
agccaacctcctcctatggtaagtg

SEQ ID NO: 2217346 - DNA, 25 bp, Homo sapien
tgcccagttccataggtttactgcc

SEQ ID NO: 2217347 - DNA, 25 bp, Homo sapien
agtgcccagttccataggtttactg

SEQ ID NO: 2217348 - DNA, 25 bp, Homo sapien
caacctcctcctatggtaagtgccc

SEQ ID NO: 2217349 - DNA, 25 bp, Homo sapien
tgaagagtctatcaattgcctctgg

SEQ ID NO: 2217350 - DNA, 25 bp, Homo sapien
ggtgaattatcatttgtaaccaggt

SEQ ID NO: 2217351 - DNA, 25 bp, Homo sapien
tgttatttcagccatagactccctg

SEQ ID NO: 2217352 - DNA, 25 bp, Homo sapien
ctgttgatatttgctatgtcgctga

SEQ ID NO: 2217353 - DNA, 25 bp, Homo sapien
atctcttgaacccaggaggcagagg

SEQ ID NO: 2217354 - DNA, 25 bp, Homo sapien
ctactccagaaggtgagacaggaga

SEQ ID NO: 2217355 - DNA, 25 bp, Homo sapien
ccagctactccagaaggtgagacag

SEQ ID NO: 2217356 - DNA, 25 bp, Homo sapien
agctactccagaaggtgagacagga

SEQ ID NO: 2217357 - DNA, 25 bp, Homo sapien
gcctggacaacagagacagactcca

SEQ ID NO: 2217358 - DNA, 25 bp, Homo sapien
cctggacaacagagacagactccat

SEQ ID NO: 2217359 - DNA, 25 bp, Homo sapien
aatgtatgaatatgctgggctatag

SEQ ID NO: 2217360 - DNA, 25 bp, Homo sapien
tgtcattcttaatctgaggatccca

SEQ ID NO: 2217361 - DNA, 25 bp, Homo sapien
gattctaaactatgtggccctgtct

SEQ ID NO: 2217362 - DNA, 25 bp, Homo sapien
caatgaaagccaattatcttgactg

SEQ ID NO: 2217363 - DNA, 25 bp, Homo sapien
aaaaaaatcatcattgtccattttt

SEQ ID NO: 2217364 - DNA, 25 bp, Homo sapien
ccatttttaaatctctggctcaagc

SEQ ID NO: 2217365 - DNA, 25 bp, Homo sapien
aaaaatcatcattgtccatttttaa

SEQ ID NO: 2217366 - DNA, 25 bp, Homo sapien
gtccatttttaaatctctggctcaa

SEQ ID NO: 2217367 - DNA, 25 bp, Homo sapien
gaacgctagcaccttcagtatcctg

SEQ ID NO: 2217368 - DNA, 25 bp, Homo sapien
tttcccgctctgtgagaacgctagc

SEQ ID NO: 2217369 - DNA, 25 bp, Homo sapien
tctgtgagaacgctagcaccttcag

SEQ ID NO: 2217370 - DNA, 25 bp, Homo sapien
cctttttcccgctctgtgagaacgc

SEQ ID NO: 2217371 - DNA, 25 bp, Homo sapien
caacgtaatttaggtccttcagcat

SEQ ID NO: 2217372 - DNA, 25 bp, Homo sapien
tgcttcaacgtaatttaggtccttc

SEQ ID NO: 2217373 - DNA, 25 bp, Homo sapien
tcctgcttcaacgtaatttaggtcc

SEQ ID NO: 2217374 - DNA, 25 bp, Homo sapien
gaacagtcctgcttcaacgtaattt

SEQ ID NO: 2217375 - DNA, 25 bp, Homo sapien
tcctcaatcctcgtccaaaaacatt

SEQ ID NO: 2217376 - DNA, 25 bp, Homo sapien
caatcctcgtccaaaaacattacat

SEQ ID NO: 2217377 - DNA, 25 bp, Homo sapien
ctccccatactcctcaatcctcgtc

SEQ ID NO: 2217378 - DNA, 25 bp, Homo sapien
atactcctcaatcctcgtccaaaaa

SEQ ID NO: 2217379 - DNA, 25 bp, Homo sapien
agccaccaatgccgccctgctctct

SEQ ID NO: 2217380 - DNA, 25 bp, Homo sapien
caccaatgccgccctgctctctcca

SEQ ID NO: 2217381 - DNA, 25 bp, Homo sapien
cgcagccaccaatgccgccctgctc

SEQ ID NO: 2217382 - DNA, 25 bp, Homo sapien
gcagccaccaatgccgccctgctct

SEQ ID NO: 2217383 - DNA, 25 bp, Homo sapien
taaagttggtaagcagctagacatc

SEQ ID NO: 2217384 - DNA, 25 bp, Homo sapien
ccagacagcatttaggtgtgacgat

SEQ ID NO: 2217385 - DNA, 25 bp, Homo sapien
gaagcagacgggttaaaatagacaa

SEQ ID NO: 2217386 - DNA, 25 bp, Homo sapien
tccttcacatcgtacagaactgtat

SEQ ID NO: 2217387 - DNA, 25 bp, Homo sapien
gctggatcccatagccgaagtagat

SEQ ID NO: 2217388 - DNA, 25 bp, Homo sapien
gagagtgccgggatcaaggtctaca

SEQ ID NO: 2217389 - DNA, 25 bp, Homo sapien
cagttttggctctagacttgcgtga

SEQ ID NO: 2217390 - DNA, 25 bp, Homo sapien
caaactgagtggacatagagagtgc

SEQ ID NO: 2217391 - DNA, 25 bp, Homo sapien
agtggggaaaggtagctgtgaggtg

SEQ ID NO: 2217392 - DNA, 25 bp, Homo sapien
ctagtggggaaaggtagctgtgagg

SEQ ID NO: 2217393 - DNA, 25 bp, Homo sapien
tagtggggaaaggtagctgtgaggt

SEQ ID NO: 2217394 - DNA, 25 bp, Homo sapien
gtggggaaaggtagctgtgaggtgg

SEQ ID NO: 2217395 - DNA, 25 bp, Homo sapien
ccaaatcgggcccaggtaccagctg

SEQ ID NO: 2217396 - DNA, 25 bp, Homo sapien
cccaaatcgggcccaggtaccagct

SEQ ID NO: 2217397 - DNA, 25 bp, Homo sapien
tcagcatccagaccccaaatcgggc

SEQ ID NO: 2217398 - DNA, 25 bp, Homo sapien
catccagaccccaaatcgggcccag

SEQ ID NO: 2217399 - DNA, 25 bp, Homo sapien
tacataccacaggttgacctagaaa

SEQ ID NO: 2217400 - DNA, 25 bp, Homo sapien
cttctttgtacataccacaggttga

SEQ ID NO: 2217401 - DNA, 25 bp, Homo sapien
ttgtacataccacaggttgacctag

SEQ ID NO: 2217402 - DNA, 25 bp, Homo sapien
taccacaggttgacctagaaagaga

SEQ ID NO: 2217403 - DNA, 25 bp, Homo sapien
tgatcccaataatgagcagcaggag

SEQ ID NO: 2217404 - DNA, 25 bp, Homo sapien
caatgatcccaataatgagcagcag

SEQ ID NO: 2217405 - DNA, 25 bp, Homo sapien
gatcccaataatgagcagcaggagc

SEQ ID NO: 2217406 - DNA, 25 bp, Homo sapien
taaagtgaaggggagtggaactctg

SEQ ID NO: 2217407 - DNA, 25 bp, Homo sapien
agaaagcaatggaactgaccactgg

SEQ ID NO: 2217408 - DNA, 25 bp, Homo sapien
gaaagcaatggaactgaccactggg

SEQ ID NO: 2217409 - DNA, 25 bp, Homo sapien
cagaaagcaatggaactgaccactg

SEQ ID NO: 2217410 - DNA, 25 bp, Homo sapien
tcaagttgagagacatcaaaaccaa

SEQ ID NO: 2217411 - DNA, 25 bp, Homo sapien
cttcaaaggtcaagttgagagacat

SEQ ID NO: 2217412 - DNA, 25 bp, Homo sapien
ggtcaagttgagagacatcaaaacc

SEQ ID NO: 2217413 - DNA, 25 bp, Homo sapien
caaaggtcaagttgagagacatcaa

SEQ ID NO: 2217414 - DNA, 25 bp, Homo sapien
catagggtcaacttctctgattcag

SEQ ID NO: 2217415 - DNA, 25 bp, Homo sapien
gattcagtagttattgcctcctcct

SEQ ID NO: 2217416 - DNA, 25 bp, Homo sapien
tgagtgggaaaaatagtccccatag

SEQ ID NO: 2217417 - DNA, 25 bp, Homo sapien
caaacatagacaatttggccagaga

SEQ ID NO: 2217418 - DNA, 25 bp, Homo sapien
cagtgagtttgaagaggaatgccat

SEQ ID NO: 2217419 - DNA, 25 bp, Homo sapien
tcccaattgacatgaggtccacaag

SEQ ID NO: 2217420 - DNA, 25 bp, Homo sapien
cgacaccagggagtaagcaagcagg

SEQ ID NO: 2217421 - DNA, 25 bp, Homo sapien
gatgagaacacaaatcgacaccagg

SEQ ID NO: 2217422 - DNA, 25 bp, Homo sapien
aatgccagagaccacggtggctatg

SEQ ID NO: 2217423 - DNA, 25 bp, Homo sapien
tgccggtgtggatccgagcaagtac

SEQ ID NO: 2217424 - DNA, 25 bp, Homo sapien
gcaagtacacggaacaggaggccat

SEQ ID NO: 2217425 - DNA, 25 bp, Homo sapien
aggccatcctctgccatcgcgtaga

SEQ ID NO: 2217426 - DNA, 25 bp, Homo sapien
gatcacaatgcccatcgggatggaa

SEQ ID NO: 2217427 - DNA, 25 bp, Homo sapien
aacagccacaacatagcgggcagga

SEQ ID NO: 2217428 - DNA, 25 bp, Homo sapien
tggtagtaaggcatcatcagggtga

SEQ ID NO: 2217429 - DNA, 25 bp, Homo sapien
ggcaggagcccatccaatgtagaga

SEQ ID NO: 2217430 - DNA, 25 bp, Homo sapien
cagtggtagcaatacagtcgaaacc

SEQ ID NO: 2217431 - DNA, 25 bp, Homo sapien
aatgcatagaaacaggtcgctgctc

SEQ ID NO: 2217432 - DNA, 25 bp, Homo sapien
gagaattccctcgaagccgaaaggc

SEQ ID NO: 2217433 - DNA, 25 bp, Homo sapien
cagtcgaaaccaacaaatgcataga

SEQ ID NO: 2217434 - DNA, 25 bp, Homo sapien
ctgtgaacactttggtaaccagggc

SEQ ID NO: 2217435 - DNA, 25 bp, Homo sapien
ttcagccatggccaattcgtagtcc

SEQ ID NO: 2217436 - DNA, 25 bp, Homo sapien
ccccttaacgaagccagagatcatg

SEQ ID NO: 2217437 - DNA, 25 bp, Homo sapien
gagatcatgacgaacccaagaacca

SEQ ID NO: 2217438 - DNA, 25 bp, Homo sapien
ttctgcaaggacatggggcacgtgc

SEQ ID NO: 2217439 - DNA, 25 bp, Homo sapien
gtcttagagatgtggttcccaatca

SEQ ID NO: 2217440 - DNA, 25 bp, Homo sapien
caggcccgggccacactggctgtac

SEQ ID NO: 2217441 - DNA, 25 bp, Homo sapien
gcaatggacccctgcagagtcttag

SEQ ID NO: 2217442 - DNA, 25 bp, Homo sapien
ggcatctggcaaggcgagtctcagc

SEQ ID NO: 2217443 - DNA, 25 bp, Homo sapien
cataggagaggatgaggttccagcc

SEQ ID NO: 2217444 - DNA, 25 bp, Homo sapien
aaaagcagatcacaatggatggccc

SEQ ID NO: 2217445 - DNA, 25 bp, Homo sapien
tagagatatgccgaaccagaacggg

SEQ ID NO: 2217446 - DNA, 25 bp, Homo sapien
gcctgactccagtgtacgtctgcgt

SEQ ID NO: 2217447 - DNA, 25 bp, Homo sapien
tccagtgtacgtctgcgtaccagct

SEQ ID NO: 2217448 - DNA, 25 bp, Homo sapien
gtctgcgtaccagcttttgaccaaa

SEQ ID NO: 2217449 - DNA, 25 bp, Homo sapien
tctgcgtaccagcttttgaccaaat

SEQ ID NO: 2217450 - DNA, 25 bp, Homo sapien
gagccggtaacgtcatgggatccca

SEQ ID NO: 2217451 - DNA, 25 bp, Homo sapien
cacagagtcttggactgggctcggt

SEQ ID NO: 2217452 - DNA, 25 bp, Homo sapien
gagctgttgcaaacctagggagcac

SEQ ID NO: 2217453 - DNA, 25 bp, Homo sapien
gccccttatatacaccaggaggcgg

SEQ ID NO: 2217454 - DNA, 25 bp, Homo sapien
taagggtccagctgatcaagaatgg

SEQ ID NO: 2217455 - DNA, 25 bp, Homo sapien
gtccagctgatcaagaatggcaaga

SEQ ID NO: 2217456 - DNA, 25 bp, Homo sapien
tgtaagggtccagctgatcaagaat

SEQ ID NO: 2217457 - DNA, 25 bp, Homo sapien
gtgtgtaagggtccagctgatcaag

SEQ ID NO: 2217458 - DNA, 25 bp, Homo sapien
tcctggagtccgctttaaggttgtc

SEQ ID NO: 2217459 - DNA, 25 bp, Homo sapien
gatattcctggagtccgctttaagg

SEQ ID NO: 2217460 - DNA, 25 bp, Homo sapien
tgttggtgatattcctggagtccgc

SEQ ID NO: 2217461 - DNA, 25 bp, Homo sapien
ggtgatattcctggagtccgcttta

SEQ ID NO: 2217462 - DNA, 25 bp, Homo sapien
gatcataaatattaatggtgaaaac

SEQ ID NO: 2217463 - DNA, 25 bp, Homo sapien
tcataaatattaatggtgaaaaccc

SEQ ID NO: 2217464 - DNA, 25 bp, Homo sapien
atcataaatattaatggtgaaaacc

SEQ ID NO: 2217465 - DNA, 25 bp, Homo sapien
ttagagaggggcctaatactctttc

SEQ ID NO: 2217466 - DNA, 25 bp, Homo sapien
tatgccaggtattgagagtacaatc

SEQ ID NO: 2217467 - DNA, 25 bp, Homo sapien
ttcttcctcgccagagaactgaaag

SEQ ID NO: 2217468 - DNA, 25 bp, Homo sapien
aatacctattatgaagaacagctac

SEQ ID NO: 2217469 - DNA, 25 bp, Homo sapien
gataaaggacattacgtggccctgc

SEQ ID NO: 2217470 - DNA, 25 bp, Homo sapien
caagagcaagccagtagtgtgagac

SEQ ID NO: 2217471 - DNA, 25 bp, Homo sapien
ataggcagcgcaccagggttggcaa

SEQ ID NO: 2217472 - DNA, 25 bp, Homo sapien
gcctggtgcgagtgccttatatcaa

SEQ ID NO: 2217473 - DNA, 25 bp, Homo sapien
tgttagcctcccatactgtgttccc

SEQ ID NO: 2217474 - DNA, 25 bp, Homo sapien
gagccaaggagcacattccctaaag

SEQ ID NO: 2217475 - DNA, 25 bp, Homo sapien
caaagtttggaatctagagccaagg

SEQ ID NO: 2217476 - DNA, 25 bp, Homo sapien
tcccaaagtctcacaaaatacctgg

SEQ ID NO: 2217477 - DNA, 25 bp, Homo sapien
tccacctcccaggttctagcaattc

SEQ ID NO: 2217478 - DNA, 25 bp, Homo sapien
ctagcaattctcatgcttcagcctc

SEQ ID NO: 2217479 - DNA, 25 bp, Homo sapien
gtcacccagacagagggagtgcagt

SEQ ID NO: 2217480 - DNA, 25 bp, Homo sapien
ggcacagtctcagctcactgcaacc

SEQ ID NO: 2217481 - DNA, 25 bp, Homo sapien
gaaacagtatgagtgcctggctgag

SEQ ID NO: 2217482 - DNA, 25 bp, Homo sapien
catctggaggagtgggaatagtatt

SEQ ID NO: 2217483 - DNA, 25 bp, Homo sapien
aacagtatgagtgcctggctgagag

SEQ ID NO: 2217484 - DNA, 25 bp, Homo sapien
gaggaaacagtatgagtgcctggct

SEQ ID NO: 2217485 - DNA, 25 bp, Homo sapien
gtcattggtgaaagcatcgttgatg

SEQ ID NO: 2217486 - DNA, 25 bp, Homo sapien
tcattggtgaaagcatcgttgatgt

SEQ ID NO: 2217487 - DNA, 25 bp, Homo sapien
tcttccattctggagcatcacccag

SEQ ID NO: 2217488 - DNA, 25 bp, Homo sapien
ccttctcacgtaaggcatgacgcat

SEQ ID NO: 2217489 - DNA, 25 bp, Homo sapien
taatggtcctgcaccgtgatgctgt

SEQ ID NO: 2217490 - DNA, 25 bp, Homo sapien
gaagctggatccaacctgcttccaa

SEQ ID NO: 2217491 - DNA, 25 bp, Homo sapien
tctgatggctgctagaatgaaaaat

SEQ ID NO: 2217492 - DNA, 25 bp, Homo sapien
tgacaggactgtacaagcaatagat

SEQ ID NO: 2217493 - DNA, 25 bp, Homo sapien
cacagattgcctcataaactggaat

SEQ ID NO: 2217494 - DNA, 25 bp, Homo sapien
agaggactactcacctggctaaacc

SEQ ID NO: 2217495 - DNA, 25 bp, Homo sapien
cattgccagcaattatgcacctcag

SEQ ID NO: 2217496 - DNA, 25 bp, Homo sapien
cactccattgccagcaattatgcac

SEQ ID NO: 2217497 - DNA, 25 bp, Homo sapien
ttatgcacctcagtatccaattatt

SEQ ID NO: 2217498 - DNA, 25 bp, Homo sapien
gcaattatgcacctcagtatccaat

SEQ ID NO: 2217499 - DNA, 25 bp, Homo sapien
atggatgggcctcaccctgagaaaa

SEQ ID NO: 2217500 - DNA, 25 bp, Homo sapien
gaaagcacaaactcagtctcccact

SEQ ID NO: 2217501 - DNA, 25 bp, Homo sapien
tgcagtcgagtttcctgtatttggg

SEQ ID NO: 2217502 - DNA, 25 bp, Homo sapien
tgcaatggatgggcctcaccctgag

SEQ ID NO: 2217503 - DNA, 25 bp, Homo sapien
gaggcggaagttggcactgcactcc

SEQ ID NO: 2217504 - DNA, 25 bp, Homo sapien
gtgcatgcttgcagttctagctatt

SEQ ID NO: 2217505 - DNA, 25 bp, Homo sapien
cagggtggtgcatgcttgcagttct

SEQ ID NO: 2217506 - DNA, 25 bp, Homo sapien
gcatgcttgcagttctagctattca

SEQ ID NO: 2217507 - DNA, 25 bp, Homo sapien
ttcagttaatagttgtagaagaagc

SEQ ID NO: 2217508 - DNA, 25 bp, Homo sapien
atttcagttaatagttgtagaagaa

SEQ ID NO: 2217509 - DNA, 25 bp, Homo sapien
gaatttcagttaatagttgtagaag

SEQ ID NO: 2217510 - DNA, 25 bp, Homo sapien
cagttaatagttgtagaagaagctg

SEQ ID NO: 2217511 - DNA, 25 bp, Homo sapien
gcagtatctgtaatcagcctgtgtg

SEQ ID NO: 2217512 - DNA, 25 bp, Homo sapien
tccctgtagtctgaagcagtatctg

SEQ ID NO: 2217513 - DNA, 25 bp, Homo sapien
caaggatctgttgtagccccagaag

SEQ ID NO: 2217514 - DNA, 25 bp, Homo sapien
gattactgctcaattcaggcctgca

SEQ ID NO: 2217515 - DNA, 25 bp, Homo sapien
gcagtcgcttcaaacatatgcattt

SEQ ID NO: 2217516 - DNA, 25 bp, Homo sapien
ctgtgcagtcgcttcaaacatatgc

SEQ ID NO: 2217517 - DNA, 25 bp, Homo sapien
tgtgcagtcgcttcaaacatatgca

SEQ ID NO: 2217518 - DNA, 25 bp, Homo sapien
gtgcagtcgcttcaaacatatgcat

SEQ ID NO: 2217519 - DNA, 25 bp, Homo sapien
taagcagtcttctctctctaaacta

SEQ ID NO: 2217520 - DNA, 25 bp, Homo sapien
ctaagcagtcttctctctctaaact

SEQ ID NO: 2217521 - DNA, 25 bp, Homo sapien
tagatggcggaactttctgggtcac

SEQ ID NO: 2217522 - DNA, 25 bp, Homo sapien
gcgaatcgggccacaatgcttgcaa

SEQ ID NO: 2217523 - DNA, 25 bp, Homo sapien
tcctaacggctggacaagcggacta

SEQ ID NO: 2217524 - DNA, 25 bp, Homo sapien
ggactacggcttcattcaccacggc

SEQ ID NO: 2217525 - DNA, 25 bp, Homo sapien
gaaactaaaacctgacagtggtatc

SEQ ID NO: 2217526 - DNA, 25 bp, Homo sapien
gagtggtcagtatcctcaattagca

SEQ ID NO: 2217527 - DNA, 25 bp, Homo sapien
gatactgcctctagaacgaccaaaa

SEQ ID NO: 2217528 - DNA, 25 bp, Homo sapien
gctgtcactggaagcctaaactgca

SEQ ID NO: 2217529 - DNA, 25 bp, Homo sapien
catgtattaatgcaagaggaggtcc

SEQ ID NO: 2217530 - DNA, 25 bp, Homo sapien
gaggtccagaatacaatgcaaagtg

SEQ ID NO: 2217531 - DNA, 25 bp, Homo sapien
gaaatacttacacactggagcaagg

SEQ ID NO: 2217532 - DNA, 25 bp, Homo sapien
ccttggcaagggtgggaaatcataa

SEQ ID NO: 2217533 - DNA, 25 bp, Homo sapien
taactgttcttcaactggcactgcc

SEQ ID NO: 2217534 - DNA, 25 bp, Homo sapien
tgggtcaaagggtagataaggcatc

SEQ ID NO: 2217535 - DNA, 25 bp, Homo sapien
agagaagcctgaatgttatccacct

SEQ ID NO: 2217536 - DNA, 25 bp, Homo sapien
tatccatttcagtgagcagctgttc

SEQ ID NO: 2217537 - DNA, 25 bp, Homo sapien
tgagcctacagctacttcctgcaag

SEQ ID NO: 2217538 - DNA, 25 bp, Homo sapien
tcaaacaacaggtactgagcctaca

SEQ ID NO: 2217539 - DNA, 25 bp, Homo sapien
tatccacccaccaaaagttctgaga

SEQ ID NO: 2217540 - DNA, 25 bp, Homo sapien
gccctgctgttagcataggaccaga

SEQ ID NO: 2217541 - DNA, 25 bp, Homo sapien
tgctgaataaaagccccgagtcagg

SEQ ID NO: 2217542 - DNA, 25 bp, Homo sapien
cagtgccctgcatagaaaactccaa

SEQ ID NO: 2217543 - DNA, 25 bp, Homo sapien
gatagggagtctaagcaaagagccc

SEQ ID NO: 2217544 - DNA, 25 bp, Homo sapien
tcagggtcagtcagaatcagcaatc

SEQ ID NO: 2217545 - DNA, 25 bp, Homo sapien
aagacagtgttgatgcccttcccta

SEQ ID NO: 2217546 - DNA, 25 bp, Homo sapien
cctgtggcagcactaaatgggatgg

SEQ ID NO: 2217547 - DNA, 25 bp, Homo sapien
ggtaagagcctagaagataatccac

SEQ ID NO: 2217548 - DNA, 25 bp, Homo sapien
ccataaagtagcaagggcttaggga

SEQ ID NO: 2217549 - DNA, 25 bp, Homo sapien
ggatcctagcagagtgcccacatgg

SEQ ID NO: 2217550 - DNA, 25 bp, Homo sapien
caacagactgcttggactctaggag

SEQ ID NO: 2217551 - DNA, 25 bp, Homo sapien
cagtatgtatccaagtgcctcacca

SEQ ID NO: 2217552 - DNA, 25 bp, Homo sapien
cagacagtctatcaggccaggagat

SEQ ID NO: 2217553 - DNA, 25 bp, Homo sapien
cccgggacgtagttcctgtcaattg

SEQ ID NO: 2217554 - DNA, 25 bp, Homo sapien
tgcaggaacatgtgtaggcagcgtt

SEQ ID NO: 2217555 - DNA, 25 bp, Homo sapien
tgtaggcagcgttcattctgagcca

SEQ ID NO: 2217556 - DNA, 25 bp, Homo sapien
ggacgtagttcctgtcaattgcctc

SEQ ID NO: 2217557 - DNA, 25 bp, Homo sapien
tcttcgatgaaagactcctcaaaga

SEQ ID NO: 2217558 - DNA, 25 bp, Homo sapien
gcttcaaggctttcccaggcagtgg

SEQ ID NO: 2217559 - DNA, 25 bp, Homo sapien
tgcctcctttcttcgatgaaagact

SEQ ID NO: 2217560 - DNA, 25 bp, Homo sapien
tgttaataaactgctcgaggccctg

SEQ ID NO: 2217561 - DNA, 25 bp, Homo sapien
tcctttagcttgaagataggtaggt

SEQ ID NO: 2217562 - DNA, 25 bp, Homo sapien
cgtacgcaggactcctttagcttga

SEQ ID NO: 2217563 - DNA, 25 bp, Homo sapien
ctctctccagctcatttttcagcca

SEQ ID NO: 2217564 - DNA, 25 bp, Homo sapien
aaagtcactgtagcgccgccgtacg

SEQ ID NO: 2217565 - DNA, 25 bp, Homo sapien
tcctgcggcttcgagttaaggcgcc

SEQ ID NO: 2217566 - DNA, 25 bp, Homo sapien
ttaaggcgccgggtatcagctactg

SEQ ID NO: 2217567 - DNA, 25 bp, Homo sapien
taagcgtcggtcaggtcctgcggct

SEQ ID NO: 2217568 - DNA, 25 bp, Homo sapien
cacgcccaccgtctgaggattaaag

SEQ ID NO: 2217569 - DNA, 25 bp, Homo sapien
gcctgaggcaggagcgcgcacggcc

SEQ ID NO: 2217570 - DNA, 25 bp, Homo sapien
cctcccgcttgcaaaataactagcc

SEQ ID NO: 2217571 - DNA, 25 bp, Homo sapien
cgcacggcccctcccgcttgcaaaa

SEQ ID NO: 2217572 - DNA, 25 bp, Homo sapien
gcccctcccgcttgcaaaataacta

SEQ ID NO: 2217573 - DNA, 25 bp, Homo sapien
cagtgacctgaataagtcctggttt

SEQ ID NO: 2217574 - DNA, 25 bp, Homo sapien
aacagtgggcactgccccgtgagcc

SEQ ID NO: 2217575 - DNA, 25 bp, Homo sapien
cgtgagccaggctcctacagtgata

SEQ ID NO: 2217576 - DNA, 25 bp, Homo sapien
gtgataggccgaagcccagtgacct

SEQ ID NO: 2217577 - DNA, 25 bp, Homo sapien
actgctctgaggttgcttgcaaccc

SEQ ID NO: 2217578 - DNA, 25 bp, Homo sapien
agaactccatacttggcactgctct

SEQ ID NO: 2217579 - DNA, 25 bp, Homo sapien
gcagaactccatacttggcactgct

SEQ ID NO: 2217580 - DNA, 25 bp, Homo sapien
cactgctctgaggttgcttgcaacc

SEQ ID NO: 2217581 - DNA, 25 bp, Homo sapien
aattgatgcagtttagcagacttat

SEQ ID NO: 2217582 - DNA, 25 bp, Homo sapien
ctttgcaccagtgtgctctgagtga

SEQ ID NO: 2217583 - DNA, 25 bp, Homo sapien
gaaattgatgcagtttagcagactt

SEQ ID NO: 2217584 - DNA, 25 bp, Homo sapien
gatgcagtttagcagacttattagc

SEQ ID NO: 2217585 - DNA, 25 bp, Homo sapien
tcttctgttgctgggggggcttcct

SEQ ID NO: 2217586 - DNA, 25 bp, Homo sapien
tctatgatagcaccacctccagtca

SEQ ID NO: 2217587 - DNA, 25 bp, Homo sapien
ctcatgacccaggtagatcccattc

SEQ ID NO: 2217588 - DNA, 25 bp, Homo sapien
ctggccacgggcgtcggcctgtgtc

SEQ ID NO: 2217589 - DNA, 25 bp, Homo sapien
actggagtggctcgccaggccaaat

SEQ ID NO: 2217590 - DNA, 25 bp, Homo sapien
gccccttaggccagtgatgtgcggt

SEQ ID NO: 2217591 - DNA, 25 bp, Homo sapien
tcacccttagaaggctgcagataac

SEQ ID NO: 2217592 - DNA, 25 bp, Homo sapien
gatttctatgcagtggccccttagg

SEQ ID NO: 2217593 - DNA, 25 bp, Homo sapien
taaacacagggaagagctcccctac

SEQ ID NO: 2217594 - DNA, 25 bp, Homo sapien
acactcttctatgacccagcatggg

SEQ ID NO: 2217595 - DNA, 25 bp, Homo sapien
gctcccctacggaccaggtatagag

SEQ ID NO: 2217596 - DNA, 25 bp, Homo sapien
gtgttagggtgcagccacactcttc

SEQ ID NO: 2217597 - DNA, 25 bp, Homo sapien
aaagttaggtacagagacctccctg

SEQ ID NO: 2217598 - DNA, 25 bp, Homo sapien
tccctgactgcaggggttatgtgga

SEQ ID NO: 2217599 - DNA, 25 bp, Homo sapien
ttaggatggtaaagttaggtacaga

SEQ ID NO: 2217600 - DNA, 25 bp, Homo sapien
ggtacagagacctccctgttcaagg

SEQ ID NO: 2217601 - DNA, 25 bp, Homo sapien
tctgttcctaaaggtcggagacttg

SEQ ID NO: 2217602 - DNA, 25 bp, Homo sapien
gagttggcgacctttattcttcctg

SEQ ID NO: 2217603 - DNA, 25 bp, Homo sapien
cggagacttgcgagtggacttcttt

SEQ ID NO: 2217604 - DNA, 25 bp, Homo sapien
tcttcctgaagtctggtctgttcct

SEQ ID NO: 2217605 - DNA, 25 bp, Homo sapien
gcagatcacatttggcaagtcttac

SEQ ID NO: 2217606 - DNA, 25 bp, Homo sapien
ggcagatcacatttggcaagtctta

SEQ ID NO: 2217607 - DNA, 25 bp, Homo sapien
gggcagatcacatttggcaagtctt

SEQ ID NO: 2217608 - DNA, 25 bp, Homo sapien
ggggcagatcacatttggcaagtct

SEQ ID NO: 2217609 - DNA, 25 bp, Homo sapien
cattttaagcatctgaattcgtctc

SEQ ID NO: 2217610 - DNA, 25 bp, Homo sapien
caattataacgaccttcttggcttc

SEQ ID NO: 2217611 - DNA, 25 bp, Homo sapien
cgggacactcgcagggggttcaatt

SEQ ID NO: 2217612 - DNA, 25 bp, Homo sapien
gcatctgaattcgtctcctctccag

SEQ ID NO: 2217613 - DNA, 25 bp, Homo sapien
tcaaaccatcagctggagccccact

SEQ ID NO: 2217614 - DNA, 25 bp, Homo sapien
accatcagctggagccccacttggc

SEQ ID NO: 2217615 - DNA, 25 bp, Homo sapien
aaaccatcagctggagccccacttg

SEQ ID NO: 2217616 - DNA, 25 bp, Homo sapien
aaccatcagctggagccccacttgg

SEQ ID NO: 2217617 - DNA, 25 bp, Homo sapien
ccaaggctccggattcttgaggaga

SEQ ID NO: 2217618 - DNA, 25 bp, Homo sapien
cgtttgttcacacaaatcgatggtg

SEQ ID NO: 2217619 - DNA, 25 bp, Homo sapien
acgtagtaggtgcttcgagctgtaa

SEQ ID NO: 2217620 - DNA, 25 bp, Homo sapien
gcatgattgggcttcatcaggaaaa

SEQ ID NO: 2217621 - DNA, 25 bp, Homo sapien
tgctggcatactctgcatgattggg

SEQ ID NO: 2217622 - DNA, 25 bp, Homo sapien
ttggccattagtcccctccctaagc

SEQ ID NO: 2217623 - DNA, 25 bp, Homo sapien
cagtgatcctatacaaaatgggttg

SEQ ID NO: 2217624 - DNA, 25 bp, Homo sapien
tggagggagatcacagggtaattgg

SEQ ID NO: 2217625 - DNA, 25 bp, Homo sapien
gctctaaggatatgaggaactccct

SEQ ID NO: 2217626 - DNA, 25 bp, Homo sapien
gacagcacagttggtattgaccaga

SEQ ID NO: 2217627 - DNA, 25 bp, Homo sapien
ttaggcaactttactttactgcgga

SEQ ID NO: 2217628 - DNA, 25 bp, Homo sapien
acagcaacacgacgacagcacagtt

SEQ ID NO: 2217629 - DNA, 25 bp, Homo sapien
tactgcggatgtaatacagcaacac

SEQ ID NO: 2217630 - DNA, 25 bp, Homo sapien
ctccatgtttgatgaagatgaacat

SEQ ID NO: 2217631 - DNA, 25 bp, Homo sapien
gccctcaagatcgcctcactcttca

SEQ ID NO: 2217632 - DNA, 25 bp, Homo sapien
ccctcaagatcgcctcactcttcac

SEQ ID NO: 2217633 - DNA, 25 bp, Homo sapien
ccattgtaagtctaactctaaacta

SEQ ID NO: 2217634 - DNA, 25 bp, Homo sapien
actctttctagcaaattggtaatac

SEQ ID NO: 2217635 - DNA, 25 bp, Homo sapien
acagcatgaatgtactactcctttt

SEQ ID NO: 2217636 - DNA, 25 bp, Homo sapien
tagcaaattggtaatactcctgcct

SEQ ID NO: 2217637 - DNA, 25 bp, Homo sapien
aactttatttctcatcggttcagga

SEQ ID NO: 2217638 - DNA, 25 bp, Homo sapien
aatcctgcgaaaaggaagggccaga

SEQ ID NO: 2217639 - DNA, 25 bp, Homo sapien
taccacttagggctacaggaccctg

SEQ ID NO: 2217640 - DNA, 25 bp, Homo sapien
tcggttcaggaacaatcggagggta

SEQ ID NO: 2217641 - DNA, 25 bp, Homo sapien
tgggggggcccagtaggggctatgc

SEQ ID NO: 2217642 - DNA, 25 bp, Homo sapien
gcccagtaggggctatgctggttgc

SEQ ID NO: 2217643 - DNA, 25 bp, Homo sapien
gtttcaggctttagggtgtaacatg

SEQ ID NO: 2217644 - DNA, 25 bp, Homo sapien
tttcaggctttagggtgtaacatgg

SEQ ID NO: 2217645 - DNA, 25 bp, Homo sapien
gtagtctggctgcagactctcagcc

SEQ ID NO: 2217646 - DNA, 25 bp, Homo sapien
agactctcagccagtcccttagaca

SEQ ID NO: 2217647 - DNA, 25 bp, Homo sapien
cgaggcagagtcgttcactgtagtc

SEQ ID NO: 2217648 - DNA, 25 bp, Homo sapien
tctggctgcagactctcagccagtc

SEQ ID NO: 2217649 - DNA, 25 bp, Homo sapien
tctgtgccaaaggagtactcatgat

SEQ ID NO: 2217650 - DNA, 25 bp, Homo sapien
ggaagtaaaagaccgagctctgtgc

SEQ ID NO: 2217651 - DNA, 25 bp, Homo sapien
tcaggggtcaattaggggcaggaag

SEQ ID NO: 2217652 - DNA, 25 bp, Homo sapien
gcaggaagtaaaagaccgagctctg

SEQ ID NO: 2217653 - DNA, 25 bp, Homo sapien
agttcccgtggtattcagtaacaag

SEQ ID NO: 2217654 - DNA, 25 bp, Homo sapien
tcagtaacaagatcctctaggttct

SEQ ID NO: 2217655 - DNA, 25 bp, Homo sapien
tcttcagggtgggaattcggggcat

SEQ ID NO: 2217656 - DNA, 25 bp, Homo sapien
cgtggtattcagtaacaagatcctc

SEQ ID NO: 2217657 - DNA, 25 bp, Homo sapien
cattacttactgtctcatcctttac

SEQ ID NO: 2217658 - DNA, 25 bp, Homo sapien
tattgtcagctaccgttcccctcat

SEQ ID NO: 2217659 - DNA, 25 bp, Homo sapien
tcctttactcctaaagaccctgcaa

SEQ ID NO: 2217660 - DNA, 25 bp, Homo sapien
tctcccagttgtcccatatgaaata

SEQ ID NO: 2217661 - DNA, 25 bp, Homo sapien
cagagaaggctgataatcaatccca

SEQ ID NO: 2217662 - DNA, 25 bp, Homo sapien
tggagccaacagagataaccacggc

SEQ ID NO: 2217663 - DNA, 25 bp, Homo sapien
taaccacggcttccaatgcaaacag

SEQ ID NO: 2217664 - DNA, 25 bp, Homo sapien
tcaatcccatggagccaacagagat

SEQ ID NO: 2217665 - DNA, 25 bp, Homo sapien
gaccttatatttgttgtgcccctac

SEQ ID NO: 2217666 - DNA, 25 bp, Homo sapien
tacctccatcttacatcttaggaaa

SEQ ID NO: 2217667 - DNA, 25 bp, Homo sapien
caggcaccgcgctaaagacatactc

SEQ ID NO: 2217668 - DNA, 25 bp, Homo sapien
gtatgtggcacagcctagatccagc

SEQ ID NO: 2217669 - DNA, 25 bp, Homo sapien
aacgtgtagcgtttctgcccatcca

SEQ ID NO: 2217670 - DNA, 25 bp, Homo sapien
tccattcactccaatgctgagcact

SEQ ID NO: 2217671 - DNA, 25 bp, Homo sapien
ggattgggtggctccattcactcca

SEQ ID NO: 2217672 - DNA, 25 bp, Homo sapien
acagagtgggttaaagcggctccga

SEQ ID NO: 2217673 - DNA, 25 bp, Homo sapien
tatgtctataatccactgattgttc

SEQ ID NO: 2217674 - DNA, 25 bp, Homo sapien
tgaagtgttaggttctctggagccc

SEQ ID NO: 2217675 - DNA, 25 bp, Homo sapien
tcagttctagctgggattcactcag

SEQ ID NO: 2217676 - DNA, 25 bp, Homo sapien
tccaaacagtggttcaagaatctgt

SEQ ID NO: 2217677 - DNA, 25 bp, Homo sapien
cagtcagtccggtactgcaccaagt

SEQ ID NO: 2217678 - DNA, 25 bp, Homo sapien
gtgtgcatatgtggtcattcccctg

SEQ ID NO: 2217679 - DNA, 25 bp, Homo sapien
tggtctcttgaccctttctttccaa

SEQ ID NO: 2217680 - DNA, 25 bp, Homo sapien
atccctggtctcttgaccctttctt

SEQ ID NO: 2217681 - DNA, 25 bp, Homo sapien
agtatccctggtctcttgacccttt

SEQ ID NO: 2217682 - DNA, 25 bp, Homo sapien
ctggtctcttgaccctttctttcca

SEQ ID NO: 2217683 - DNA, 25 bp, Homo sapien
tgtttggtagaggtggatctccttt

SEQ ID NO: 2217684 - DNA, 25 bp, Homo sapien
acaaatgtttggtagaggtggatct

SEQ ID NO: 2217685 - DNA, 25 bp, Homo sapien
gactttatcattatccgagttcttg

SEQ ID NO: 2217686 - DNA, 25 bp, Homo sapien
ttctggactttatcattatccgagt

SEQ ID NO: 2217687 - DNA, 25 bp, Homo sapien
gacttatgacttaccccaggagaaa

SEQ ID NO: 2217688 - DNA, 25 bp, Homo sapien
tctcttggtctctgatccaacccac

SEQ ID NO: 2217689 - DNA, 25 bp, Homo sapien
ggtacctgggagacttgctaccctc

SEQ ID NO: 2217690 - DNA, 25 bp, Homo sapien
ccaggagaaaacagtggggtacctg

SEQ ID NO: 2217691 - DNA, 25 bp, Homo sapien
tcttcttcatcccctccccctcgtc

SEQ ID NO: 2217692 - DNA, 25 bp, Homo sapien
ctcttcttcatcccctccccctcgt

SEQ ID NO: 2217693 - DNA, 25 bp, Homo sapien
caattcatgtactcgacattgaaca

SEQ ID NO: 2217694 - DNA, 25 bp, Homo sapien
catgtactcgacattgaacacaaaa

SEQ ID NO: 2217695 - DNA, 25 bp, Homo sapien
gctgttccaagtgcaattcatgtac

SEQ ID NO: 2217696 - DNA, 25 bp, Homo sapien
caagtgcaattcatgtactcgacat

SEQ ID NO: 2217697 - DNA, 25 bp, Homo sapien
gggagtcagtgggcatagtggtcag

SEQ ID NO: 2217698 - DNA, 25 bp, Homo sapien
gagggagtcagtgggcatagtggtc

SEQ ID NO: 2217699 - DNA, 25 bp, Homo sapien
gtgggcatagtggtcaggaagaaat

SEQ ID NO: 2217700 - DNA, 25 bp, Homo sapien
agtcagtgggcatagtggtcaggaa

SEQ ID NO: 2217701 - DNA, 25 bp, Homo sapien
catgattgtaatggccagtggcagg

SEQ ID NO: 2217702 - DNA, 25 bp, Homo sapien
tcaattctgcccacatgattgtaat

SEQ ID NO: 2217703 - DNA, 25 bp, Homo sapien
tgcccacatgattgtaatggccagt

SEQ ID NO: 2217704 - DNA, 25 bp, Homo sapien
ggcaccagatctctgtacggcccct

SEQ ID NO: 2217705 - DNA, 25 bp, Homo sapien
cagccccctccagtcccagatttcc

SEQ ID NO: 2217706 - DNA, 25 bp, Homo sapien
gccccctccagtcccagatttccca

SEQ ID NO: 2217707 - DNA, 25 bp, Homo sapien
tgtggtgtcttcattcccattgggc

SEQ ID NO: 2217708 - DNA, 25 bp, Homo sapien
agaattgtcgtgttcagccccactc

SEQ ID NO: 2217709 - DNA, 25 bp, Homo sapien
taagagggatgtgaatggtaatgat

SEQ ID NO: 2217710 - DNA, 25 bp, Homo sapien
tcccattgggcgtcagaattgtcgt

SEQ ID NO: 2217711 - DNA, 25 bp, Homo sapien
ggcgcttgctcttcattccctgggt

SEQ ID NO: 2217712 - DNA, 25 bp, Homo sapien
gcgcttgctcttcattccctgggtg

SEQ ID NO: 2217713 - DNA, 25 bp, Homo sapien
ctctagtcatgattctatctagact

SEQ ID NO: 2217714 - DNA, 25 bp, Homo sapien
gactccatcaactggcctccctttc

SEQ ID NO: 2217715 - DNA, 25 bp, Homo sapien
actccatcaactggcctccctttct

SEQ ID NO: 2217716 - DNA, 25 bp, Homo sapien
ccatcaactggcctccctttctaaa

SEQ ID NO: 2217717 - DNA, 25 bp, Homo sapien
ttagcgcacctatttttcagatgcc

SEQ ID NO: 2217718 - DNA, 25 bp, Homo sapien
aatagacggagttcctaaccaatgc

SEQ ID NO: 2217719 - DNA, 25 bp, Homo sapien
tcagatgccggaactaagaaacgaa

SEQ ID NO: 2217720 - DNA, 25 bp, Homo sapien
cccttgaaggaggtgttagcgcacc

SEQ ID NO: 2217721 - DNA, 25 bp, Homo sapien
gtaacacgatgatgactagcctggg

SEQ ID NO: 2217722 - DNA, 25 bp, Homo sapien
taacaatgtgagtagtgcctggacc

SEQ ID NO: 2217723 - DNA, 25 bp, Homo sapien
tgttgcaggagatcaggaattggcc

SEQ ID NO: 2217724 - DNA, 25 bp, Homo sapien
aacttggaccagtggaccatgcgcc

SEQ ID NO: 2217725 - DNA, 25 bp, Homo sapien
tggtttggaacagtccgagtggacc

SEQ ID NO: 2217726 - DNA, 25 bp, Homo sapien
caaacagaagatctcgccctgggat

SEQ ID NO: 2217727 - DNA, 25 bp, Homo sapien
tggaccggcgagtggctcgaggaga

SEQ ID NO: 2217728 - DNA, 25 bp, Homo sapien
gggttgaagccgtcagcaccactct

SEQ ID NO: 2217729 - DNA, 25 bp, Homo sapien
gacctcatgatctacctgcctcagc

SEQ ID NO: 2217730 - DNA, 25 bp, Homo sapien
ttacagttatgtgccatcacgcccg

SEQ ID NO: 2217731 - DNA, 25 bp, Homo sapien
attacagttatgtgccatcacgccc

SEQ ID NO: 2217732 - DNA, 25 bp, Homo sapien
ctgacctcatgatctacctgcctca

SEQ ID NO: 2217733 - DNA, 25 bp, Homo sapien
ttaagaaggggcaatgaacattctc

SEQ ID NO: 2217734 - DNA, 25 bp, Homo sapien
ggccattaggccaggggaaacatca

SEQ ID NO: 2217735 - DNA, 25 bp, Homo sapien
acaacaccccagatgttgggcctca

SEQ ID NO: 2217736 - DNA, 25 bp, Homo sapien
gggatataccgctgggattgaggag

SEQ ID NO: 2217737 - DNA, 25 bp, Homo sapien
aatagaacctgattcttcttccaca

SEQ ID NO: 2217738 - DNA, 25 bp, Homo sapien
ggtggagatgacagacactgcctac

SEQ ID NO: 2217739 - DNA, 25 bp, Homo sapien
gggtggagatgacagacactgccta

SEQ ID NO: 2217740 - DNA, 25 bp, Homo sapien
gtggtccccatcatgcaccaagtgg

SEQ ID NO: 2217741 - DNA, 25 bp, Homo sapien
gcatgtgccatcatagaataggtcg

SEQ ID NO: 2217742 - DNA, 25 bp, Homo sapien
ggcatacctttcataggacagagaa

SEQ ID NO: 2217743 - DNA, 25 bp, Homo sapien
catcatagaataggtcgtggaagga

SEQ ID NO: 2217744 - DNA, 25 bp, Homo sapien
gagaaaactcaaaactgttgcccca

SEQ ID NO: 2217745 - DNA, 25 bp, Homo sapien
gaactgcctgttctcacgtgaccca

SEQ ID NO: 2217746 - DNA, 25 bp, Homo sapien
agagtcacatttggagctgcggcag

SEQ ID NO: 2217747 - DNA, 25 bp, Homo sapien
ccttggcagttacccaggatgactt

SEQ ID NO: 2217748 - DNA, 25 bp, Homo sapien
ccccgtgtccgggaacgcgcagcgc

SEQ ID NO: 2217749 - DNA, 25 bp, Homo sapien
ctcggtgcgcgggcacagcagccag

SEQ ID NO: 2217750 - DNA, 25 bp, Homo sapien
gagttaatggcagggaccgcgcccc

SEQ ID NO: 2217751 - DNA, 25 bp, Homo sapien
cgcgccccctcggtgcgcgggcaca

SEQ ID NO: 2217752 - DNA, 25 bp, Homo sapien
tccccttctcgatggggagaagccc

SEQ ID NO: 2217753 - DNA, 25 bp, Homo sapien
gcggcggctggtgcatggcacagag

SEQ ID NO: 2217754 - DNA, 25 bp, Homo sapien
gtctgtctgtccgttggtgtgtttc

SEQ ID NO: 2217755 - DNA, 25 bp, Homo sapien
tagcggataatgacggggatgaaga

SEQ ID NO: 2217756 - DNA, 25 bp, Homo sapien
gacagccccgtcatttggataacca

SEQ ID NO: 2217757 - DNA, 25 bp, Homo sapien
ttaagaactcgcacttgacagcccc

SEQ ID NO: 2217758 - DNA, 25 bp, Homo sapien
gataaccagaacagcacatctaggg

SEQ ID NO: 2217759 - DNA, 25 bp, Homo sapien
caataagcccgtattggatgccggg

SEQ ID NO: 2217760 - DNA, 25 bp, Homo sapien
ctttgttgttttgttgcccaaagca

SEQ ID NO: 2217761 - DNA, 25 bp, Homo sapien
tgttgcccaaagcatcccagaacag

SEQ ID NO: 2217762 - DNA, 25 bp, Homo sapien
ttcctgtgtagtggggcctttgttg

SEQ ID NO: 2217763 - DNA, 25 bp, Homo sapien
tgttttgttgcccaaagcatcccag

SEQ ID NO: 2217764 - DNA, 25 bp, Homo sapien
tgaacaacgtactatggaagccaca

SEQ ID NO: 2217765 - DNA, 25 bp, Homo sapien
agtgctcacacaatcagaccaagga

SEQ ID NO: 2217766 - DNA, 25 bp, Homo sapien
ttcaggcccgaaggtctctctggct

SEQ ID NO: 2217767 - DNA, 25 bp, Homo sapien
tccaacccatgagtgctaagagcct

SEQ ID NO: 2217768 - DNA, 25 bp, Homo sapien
caggagaaacgacagcggggctttt

SEQ ID NO: 2217769 - DNA, 25 bp, Homo sapien
gacagcggggcttttgccactcaat

SEQ ID NO: 2217770 - DNA, 25 bp, Homo sapien
caatttccagttcaattccagaacc

SEQ ID NO: 2217771 - DNA, 25 bp, Homo sapien
gctttttctcgtccacaagatcggg

SEQ ID NO: 2217772 - DNA, 25 bp, Homo sapien
caacaagggttgagtgacactaaaa

SEQ ID NO: 2217773 - DNA, 25 bp, Homo sapien
tccacattactttacacgtagtcgt

SEQ ID NO: 2217774 - DNA, 25 bp, Homo sapien
gaggcatttctctgtccaagactct

SEQ ID NO: 2217775 - DNA, 25 bp, Homo sapien
cttgacaatcagagacaacaagggt

SEQ ID NO: 2217776 - DNA, 25 bp, Homo sapien
tgcaagtgacctcttaaagcctcct

SEQ ID NO: 2217777 - DNA, 25 bp, Homo sapien
ccatggtgttctgtacacttcgatc

SEQ ID NO: 2217778 - DNA, 25 bp, Homo sapien
tatagagcttacttactccagcccc

SEQ ID NO: 2217779 - DNA, 25 bp, Homo sapien
gatctttaaattgctaatcagtggc

SEQ ID NO: 2217780 - DNA, 25 bp, Homo sapien
tgccacaactccctgaagtaatgag

SEQ ID NO: 2217781 - DNA, 25 bp, Homo sapien
tcaagattgccgttgctgaggcagc

SEQ ID NO: 2217782 - DNA, 25 bp, Homo sapien
aactccctgaagtaatgagcagagc

SEQ ID NO: 2217783 - DNA, 25 bp, Homo sapien
tccctgaagtaatgagcagagctct

SEQ ID NO: 2217784 - DNA, 25 bp, Homo sapien
taaataatgtgatcggtttgctcca

SEQ ID NO: 2217785 - DNA, 25 bp, Homo sapien
aactctcttagtcttcggtggaaca

SEQ ID NO: 2217786 - DNA, 25 bp, Homo sapien
ggcctaaagctctgaactatgacaa

SEQ ID NO: 2217787 - DNA, 25 bp, Homo sapien
gacaatgtcggtggtaagatgcgct

SEQ ID NO: 2217788 - DNA, 25 bp, Homo sapien
tcactacaacacaagggtgggcatg

SEQ ID NO: 2217789 - DNA, 25 bp, Homo sapien
ggccaggcgcctcagaacaatatat

SEQ ID NO: 2217790 - DNA, 25 bp, Homo sapien
cctatgcgggatgggtcaggaaacc

SEQ ID NO: 2217791 - DNA, 25 bp, Homo sapien
aatgagtagcattggttcctgggcc

SEQ ID NO: 2217792 - DNA, 25 bp, Homo sapien
ataaatctcgcgcacagccaggatg

SEQ ID NO: 2217793 - DNA, 25 bp, Homo sapien
catcgttgcgagtccggaggctttc

SEQ ID NO: 2217794 - DNA, 25 bp, Homo sapien
tcaggttgcaggtagaacacatcgt

SEQ ID NO: 2217795 - DNA, 25 bp, Homo sapien
gaataccagagaggtgactcggcga

SEQ ID NO: 2217796 - DNA, 25 bp, Homo sapien
tagaattcatagaacttgacagggc

SEQ ID NO: 2217797 - DNA, 25 bp, Homo sapien
catagaacttgacagggcagcggag

SEQ ID NO: 2217798 - DNA, 25 bp, Homo sapien
cggttctcacgctgctctaagatag

SEQ ID NO: 2217799 - DNA, 25 bp, Homo sapien
gggattcatgcggttctcacgctgc

SEQ ID NO: 2217800 - DNA, 25 bp, Homo sapien
gcatagtagcggatgctcaccacct

SEQ ID NO: 2217801 - DNA, 25 bp, Homo sapien
tcctccactcgagagaacaccgtat

SEQ ID NO: 2217802 - DNA, 25 bp, Homo sapien
accacattggtgaaggagagttgca

SEQ ID NO: 2217803 - DNA, 25 bp, Homo sapien
gagtagacccccagttgcttacact

SEQ ID NO: 2217804 - DNA, 25 bp, Homo sapien
tcaccatccggttattttccagcaa

SEQ ID NO: 2217805 - DNA, 25 bp, Homo sapien
tcttgaacaaaagtcaggtagtaaa

SEQ ID NO: 2217806 - DNA, 25 bp, Homo sapien
taaaggtccgtgaaaatgttcacca

SEQ ID NO: 2217807 - DNA, 25 bp, Homo sapien
cagagacttgttgagttcttgaaca

SEQ ID NO: 2217808 - DNA, 25 bp, Homo sapien
ccgtgcctaacccagaatcatttct

SEQ ID NO: 2217809 - DNA, 25 bp, Homo sapien
caggaagtgaggtggtgcacaagag

SEQ ID NO: 2217810 - DNA, 25 bp, Homo sapien
catttctgtttagaccctgcctgct

SEQ ID NO: 2217811 - DNA, 25 bp, Homo sapien
tttctgtttagaccctgcctgctgt

SEQ ID NO: 2217812 - DNA, 25 bp, Homo sapien
tgggccagaccgtagttgagctcag

SEQ ID NO: 2217813 - DNA, 25 bp, Homo sapien
gaatatcctctttgatacgcatggg

SEQ ID NO: 2217814 - DNA, 25 bp, Homo sapien
cagcagctgagcaggcgagaatatc

SEQ ID NO: 2217815 - DNA, 25 bp, Homo sapien
ccattgggccgagtgatttctctca

SEQ ID NO: 2217816 - DNA, 25 bp, Homo sapien
agctttcggaaagcaccagccgctt

SEQ ID NO: 2217817 - DNA, 25 bp, Homo sapien
tgagcccggtacaactaggctgact

SEQ ID NO: 2217818 - DNA, 25 bp, Homo sapien
tgactgctcatggagtcccgggagc

SEQ ID NO: 2217819 - DNA, 25 bp, Homo sapien
gacaccatatgaatagttgagcccg

SEQ ID NO: 2217820 - DNA, 25 bp, Homo sapien
taccaggccacaatcaaagaggaag

SEQ ID NO: 2217821 - DNA, 25 bp, Homo sapien
tacactgggattaatgtccagagga

SEQ ID NO: 2217822 - DNA, 25 bp, Homo sapien
cttgttcagtagacacatcctcagg

SEQ ID NO: 2217823 - DNA, 25 bp, Homo sapien
aaagaggaagtctacactgggatta

SEQ ID NO: 2217824 - DNA, 25 bp, Homo sapien
gccatcttgactgccatggccagga

SEQ ID NO: 2217825 - DNA, 25 bp, Homo sapien
aggacatcatctcgagcaggcccaa

SEQ ID NO: 2217826 - DNA, 25 bp, Homo sapien
gctcatccaagacattggccatctt

SEQ ID NO: 2217827 - DNA, 25 bp, Homo sapien
gcaggcccaaacaggtcacagtctt

SEQ ID NO: 2217828 - DNA, 25 bp, Homo sapien
cacaaaggtcagatgaggccttgtc

SEQ ID NO: 2217829 - DNA, 25 bp, Homo sapien
ggtctctacaatcttgtctgtgctc

SEQ ID NO: 2217830 - DNA, 25 bp, Homo sapien
tcctcaatggtctctacaatcttgt

SEQ ID NO: 2217831 - DNA, 25 bp, Homo sapien
tctccaaggtagtgggcaagaacat

SEQ ID NO: 2217832 - DNA, 25 bp, Homo sapien
gcaccgggactttctggcagtacag

SEQ ID NO: 2217833 - DNA, 25 bp, Homo sapien
atgggcagcacgatcacctgtggct

SEQ ID NO: 2217834 - DNA, 25 bp, Homo sapien
cgggataggcatcgagaaaggcacc

SEQ ID NO: 2217835 - DNA, 25 bp, Homo sapien
cataggcactggcacgaagatgggc

SEQ ID NO: 2217836 - DNA, 25 bp, Homo sapien
accttgcaggagacgccccgattct

SEQ ID NO: 2217837 - DNA, 25 bp, Homo sapien
cagccttgtttttgcggggtgttgc

SEQ ID NO: 2217838 - DNA, 25 bp, Homo sapien
cagtgggagctgatcgggtcttcac

SEQ ID NO: 2217839 - DNA, 25 bp, Homo sapien
ttctgcatcagtggcttacacatgg

SEQ ID NO: 2217840 - DNA, 25 bp, Homo sapien
tcccattttcctctggggtcctcac

SEQ ID NO: 2217841 - DNA, 25 bp, Homo sapien
ttcccattttcctctggggtcctca

SEQ ID NO: 2217842 - DNA, 25 bp, Homo sapien
cttgcccaaattcccattttcctct

SEQ ID NO: 2217843 - DNA, 25 bp, Homo sapien
tgcccaaattcccattttcctctgg

SEQ ID NO: 2217844 - DNA, 25 bp, Homo sapien
ccactttggtttgagagggtgtctg

SEQ ID NO: 2217845 - DNA, 25 bp, Homo sapien
tgtgttgctgttctccactttggtt

SEQ ID NO: 2217846 - DNA, 25 bp, Homo sapien
agggtgtctggggttttgactcagg

SEQ ID NO: 2217847 - DNA, 25 bp, Homo sapien
tggggttttgactcaggagactgac

SEQ ID NO: 2217848 - DNA, 25 bp, Homo sapien
gaagacactgctggttgcagaaatg

SEQ ID NO: 2217849 - DNA, 25 bp, Homo sapien
tgcccacgccagtggatggtctcca

SEQ ID NO: 2217850 - DNA, 25 bp, Homo sapien
tcgggcccactctgggtatccaggt

SEQ ID NO: 2217851 - DNA, 25 bp, Homo sapien
tggctatagaaacgcagaagacact

SEQ ID NO: 2217852 - DNA, 25 bp, Homo sapien
gccatccagttgctcggtgactccg

SEQ ID NO: 2217853 - DNA, 25 bp, Homo sapien
tcctcactgcagaagtcccaggtgc

SEQ ID NO: 2217854 - DNA, 25 bp, Homo sapien
ccacagcaggtacttgctcttacag

SEQ ID NO: 2217855 - DNA, 25 bp, Homo sapien
gagcagtaagtacaagtgatacagc

SEQ ID NO: 2217856 - DNA, 25 bp, Homo sapien
tcggagtttctcatgcaagagtttc

SEQ ID NO: 2217857 - DNA, 25 bp, Homo sapien
gccgcttgaagtcctcacagcaatc

SEQ ID NO: 2217858 - DNA, 25 bp, Homo sapien
tctccactccgctgaatcggagttt

SEQ ID NO: 2217859 - DNA, 25 bp, Homo sapien
gtttctcctgccgacagtgctcaca

SEQ ID NO: 2217860 - DNA, 25 bp, Homo sapien
gtgaatgcccccctcagggcttgtg

SEQ ID NO: 2217861 - DNA, 25 bp, Homo sapien
agaggctgtgacagtagtgacagct

SEQ ID NO: 2217862 - DNA, 25 bp, Homo sapien
tgacagctcaggtgaatgcccccct

SEQ ID NO: 2217863 - DNA, 25 bp, Homo sapien
aagacctcaggcttgccactgaaga

SEQ ID NO: 2217864 - DNA, 25 bp, Homo sapien
gactgtgcggtcaaccttgttgtag

SEQ ID NO: 2217865 - DNA, 25 bp, Homo sapien
cggtcaaccttgttgtagtaacagg

SEQ ID NO: 2217866 - DNA, 25 bp, Homo sapien
ctggtagactgtgcggtcaaccttg

SEQ ID NO: 2217867 - DNA, 25 bp, Homo sapien
tgcggtcaaccttgttgtagtaaca

SEQ ID NO: 2217868 - DNA, 25 bp, Homo sapien
gcggcagaagctgcagggtcgggga

SEQ ID NO: 2217869 - DNA, 25 bp, Homo sapien
ctgcggcggcagaagctgcagggtc

SEQ ID NO: 2217870 - DNA, 25 bp, Homo sapien
gcggcggcagaagctgcagggtcgg

SEQ ID NO: 2217871 - DNA, 25 bp, Homo sapien
gcagaagctgcagggtcggggaggg

SEQ ID NO: 2217872 - DNA, 25 bp, Homo sapien
ggtcttgccattacgatccacatgt

SEQ ID NO: 2217873 - DNA, 25 bp, Homo sapien
tggtacagcacagggaacagaacaa

SEQ ID NO: 2217874 - DNA, 25 bp, Homo sapien
gcatctcaaagttcttacacagggt

SEQ ID NO: 2217875 - DNA, 25 bp, Homo sapien
gggtcttgcaccagacacatgggta

SEQ ID NO: 2217876 - DNA, 25 bp, Homo sapien
aaataaaacataacggatacaattg

SEQ ID NO: 2217877 - DNA, 25 bp, Homo sapien
tagatgatgatgtaacaaagacctg

SEQ ID NO: 2217878 - DNA, 25 bp, Homo sapien
taaaacataacggatacaattgaaa

SEQ ID NO: 2217879 - DNA, 25 bp, Homo sapien
agcccttgacccatcagccaccttt

SEQ ID NO: 2217880 - DNA, 25 bp, Homo sapien
caagaatcgctgcagagccggtgta

SEQ ID NO: 2217881 - DNA, 25 bp, Homo sapien
cggtgtaccacgctgccattgctga

SEQ ID NO: 2217882 - DNA, 25 bp, Homo sapien
cagaaccgcttttgttggccctcgt

SEQ ID NO: 2217883 - DNA, 25 bp, Homo sapien
ccaggactcccggtcttggtgtaga

SEQ ID NO: 2217884 - DNA, 25 bp, Homo sapien
agacagacggatgtgcagaactcat

SEQ ID NO: 2217885 - DNA, 25 bp, Homo sapien
atatgctgcagcgagtagcgtcggc

SEQ ID NO: 2217886 - DNA, 25 bp, Homo sapien
tagcgtcggcgggatccccagactg

SEQ ID NO: 2217887 - DNA, 25 bp, Homo sapien
gtcttctggcatatgctgcagcgag

SEQ ID NO: 2217888 - DNA, 25 bp, Homo sapien
ccacaaccgagtccttggtgttcca

SEQ ID NO: 2217889 - DNA, 25 bp, Homo sapien
ctgcgccacaaccgagtccttggtg

SEQ ID NO: 2217890 - DNA, 25 bp, Homo sapien
gccacaaccgagtccttggtgttcc

SEQ ID NO: 2217891 - DNA, 25 bp, Homo sapien
gcgccacaaccgagtccttggtgtt

SEQ ID NO: 2217892 - DNA, 25 bp, Homo sapien
gggtcatctaccatggcatcagaat

SEQ ID NO: 2217893 - DNA, 25 bp, Homo sapien
agtggtgtccggcaatgtgcacaag

SEQ ID NO: 2217894 - DNA, 25 bp, Homo sapien
cacacttgagcgtagggacatgcga

SEQ ID NO: 2217895 - DNA, 25 bp, Homo sapien
gcccggccctttgtgacacacttga

SEQ ID NO: 2217896 - DNA, 25 bp, Homo sapien
tgctctcagtggaatctacaacctc

SEQ ID NO: 2217897 - DNA, 25 bp, Homo sapien
ttctgctctcctaacgcgctcgctt

SEQ ID NO: 2217898 - DNA, 25 bp, Homo sapien
ctgctctcctaacgcgctcgcttct

SEQ ID NO: 2217899 - DNA, 25 bp, Homo sapien
ctctcagtggaatctacaacctcag

SEQ ID NO: 2217900 - DNA, 25 bp, Homo sapien
cttctcactcgccttcgcagtcagg

SEQ ID NO: 2217901 - DNA, 25 bp, Homo sapien
ccgttcaggcggcttctcactcgcc

SEQ ID NO: 2217902 - DNA, 25 bp, Homo sapien
actcgccttcgcagtcaggccatct

SEQ ID NO: 2217903 - DNA, 25 bp, Homo sapien
gttcaggcggcttctcactcgcctt

SEQ ID NO: 2217904 - DNA, 25 bp, Homo sapien
tctctcccactgaagggctaggcgg

SEQ ID NO: 2217905 - DNA, 25 bp, Homo sapien
tgtctactggtaggtctccagccag

SEQ ID NO: 2217906 - DNA, 25 bp, Homo sapien
tctagtagcccctcaggtgaacagg

SEQ ID NO: 2217907 - DNA, 25 bp, Homo sapien
tcttgcagtagctatggaggtggtc

SEQ ID NO: 2217908 - DNA, 25 bp, Homo sapien
gtcgcccacttcctcagccccgtcc

SEQ ID NO: 2217909 - DNA, 25 bp, Homo sapien
aggtcgcccacttcctcagccccgt

SEQ ID NO: 2217910 - DNA, 25 bp, Homo sapien
ttcaggtcgcccacttcctcagccc

SEQ ID NO: 2217911 - DNA, 25 bp, Homo sapien
tcaggtcgcccacttcctcagcccc

SEQ ID NO: 2217912 - DNA, 25 bp, Homo sapien
gcctagaactgcagacagcgacggc

SEQ ID NO: 2217913 - DNA, 25 bp, Homo sapien
cggcagggttagtgcaaaggctaca

SEQ ID NO: 2217914 - DNA, 25 bp, Homo sapien
tgcaaaggctacaagcctagaactg

SEQ ID NO: 2217915 - DNA, 25 bp, Homo sapien
tacaagcctagaactgcagacagcg

SEQ ID NO: 2217916 - DNA, 25 bp, Homo sapien
gggcggtgccagcaaccaaccccat

SEQ ID NO: 2217917 - DNA, 25 bp, Homo sapien
ctccctagcagccgggacaggggtc

SEQ ID NO: 2217918 - DNA, 25 bp, Homo sapien
ctagcagccgggacaggggtcgcgg

SEQ ID NO: 2217919 - DNA, 25 bp, Homo sapien
ctttaaatggcagcgccgctcgcag

SEQ ID NO: 2217920 - DNA, 25 bp, Homo sapien
tggctcaagagtctggcccccgtca

SEQ ID NO: 2217921 - DNA, 25 bp, Homo sapien
tcctctcattcaaatggttcccggt

SEQ ID NO: 2217922 - DNA, 25 bp, Homo sapien
gtctctcttagcttcccactcgtgt

SEQ ID NO: 2217923 - DNA, 25 bp, Homo sapien
tcctggagcccactctacccgtgat

SEQ ID NO: 2217924 - DNA, 25 bp, Homo sapien
aatggctctggctcagtggcaacgc

SEQ ID NO: 2217925 - DNA, 25 bp, Homo sapien
tatctgaagcttgatccccagccac

SEQ ID NO: 2217926 - DNA, 25 bp, Homo sapien
ccagccacacaggtcgggttaaatg

SEQ ID NO: 2217927 - DNA, 25 bp, Homo sapien
gtaaccgttactgcttgatgacccc

SEQ ID NO: 2217928 - DNA, 25 bp, Homo sapien
tctttctcctccagccccctttctg

SEQ ID NO: 2217929 - DNA, 25 bp, Homo sapien
ctctttctcctccagccccctttct

SEQ ID NO: 2217930 - DNA, 25 bp, Homo sapien
ctctctttctcctccagcccccttt

SEQ ID NO: 2217931 - DNA, 25 bp, Homo sapien
ctctctctttctcctccagccccct

SEQ ID NO: 2217932 - DNA, 25 bp, Homo sapien
catctggttccatggaaggtctagg

SEQ ID NO: 2217933 - DNA, 25 bp, Homo sapien
caaactggagcttttgtatccttaa

SEQ ID NO: 2217934 - DNA, 25 bp, Homo sapien
tattttgtctttgactaggccaaga

SEQ ID NO: 2217935 - DNA, 25 bp, Homo sapien
tgcacccagcctcgttactgttatt

SEQ ID NO: 2217936 - DNA, 25 bp, Homo sapien
attcctgttcttatgccaccctcta

SEQ ID NO: 2217937 - DNA, 25 bp, Homo sapien
agctatctctaccacactatcaata

SEQ ID NO: 2217938 - DNA, 25 bp, Homo sapien
cacttattctcattcctgttcttat

SEQ ID NO: 2217939 - DNA, 25 bp, Homo sapien
ccagcctacttttatactcacttat

SEQ ID NO: 2217940 - DNA, 25 bp, Homo sapien
tcagtcagttcgtttaggtctctcc

SEQ ID NO: 2217941 - DNA, 25 bp, Homo sapien
caccacttggtctttcagtctttca

SEQ ID NO: 2217942 - DNA, 25 bp, Homo sapien
gcgcagtgcaggactgctccgagca

SEQ ID NO: 2217943 - DNA, 25 bp, Homo sapien
gagcacgcctacgcgcgcattttct

SEQ ID NO: 2217944 - DNA, 25 bp, Homo sapien
aaattaaaaacaacgaggcatcagc

SEQ ID NO: 2217945 - DNA, 25 bp, Homo sapien
tgaaaatgctggctcactactggca

SEQ ID NO: 2217946 - DNA, 25 bp, Homo sapien
tatgggctgtgaggttaggcatcct

SEQ ID NO: 2217947 - DNA, 25 bp, Homo sapien
tcctagcccacagtacataccgtgg

SEQ ID NO: 2217948 - DNA, 25 bp, Homo sapien
gaaatagattctggttatcacaagg

SEQ ID NO: 2217949 - DNA, 25 bp, Homo sapien
tgagaactgtttgcactagaatcgc

SEQ ID NO: 2217950 - DNA, 25 bp, Homo sapien
tatttccacggtatgtactgtgggc

SEQ ID NO: 2217951 - DNA, 25 bp, Homo sapien
tttatcatcccctttagaacagctg

SEQ ID NO: 2217952 - DNA, 25 bp, Homo sapien
actgtatgccagtagtgagccagca

SEQ ID NO: 2217953 - DNA, 25 bp, Homo sapien
gcgattctagtgcaaacagttctca

SEQ ID NO: 2217954 - DNA, 25 bp, Homo sapien
tcaaacctaaggatgcctaacctca

SEQ ID NO: 2217955 - DNA, 25 bp, Homo sapien
ggtaggtaccagagaagataagact

SEQ ID NO: 2217956 - DNA, 25 bp, Homo sapien
agcatgggcaacaaagcaaaactcc

SEQ ID NO: 2217957 - DNA, 25 bp, Homo sapien
gcacgcactggtagttccagctact

SEQ ID NO: 2217958 - DNA, 25 bp, Homo sapien
ttagccaggcgcagtggcacgcact

SEQ ID NO: 2217959 - DNA, 25 bp, Homo sapien
tggcacgcactggtagttccagcta

SEQ ID NO: 2217960 - DNA, 25 bp, Homo sapien
cgcagtggcacgcactggtagttcc

SEQ ID NO: 2217961 - DNA, 25 bp, Homo sapien
tggccaacagggtgaaacctggtct

SEQ ID NO: 2217962 - DNA, 25 bp, Homo sapien
agtagctggaactaccagtgcgtgc

SEQ ID NO: 2217963 - DNA, 25 bp, Homo sapien
ggaactaccagtgcgtgccactgcg

SEQ ID NO: 2217964 - DNA, 25 bp, Homo sapien
agtgcgtgccactgcgcctggctaa

SEQ ID NO: 2217965 - DNA, 25 bp, Homo sapien
tagagaccaggtttcaccctgttgg

SEQ ID NO: 2217966 - DNA, 25 bp, Homo sapien
ggagttttgctttgttgcccatgct

SEQ ID NO: 2217967 - DNA, 25 bp, Homo sapien
tagctggaactaccagtgcgtgcca

SEQ ID NO: 2217968 - DNA, 25 bp, Homo sapien
cacagcatgactacctaagataggc

SEQ ID NO: 2217969 - DNA, 25 bp, Homo sapien
gctgtgaacagcaacatcatagaca

SEQ ID NO: 2217970 - DNA, 25 bp, Homo sapien
taagataggcgagtctaagagctac

SEQ ID NO: 2217971 - DNA, 25 bp, Homo sapien
ctaggcctatcaagaaaagctgtga

SEQ ID NO: 2217972 - DNA, 25 bp, Homo sapien
ttgtggacgtttgcctgaattctca

SEQ ID NO: 2217973 - DNA, 25 bp, Homo sapien
tataacagaaccgtatgtacgctgc

SEQ ID NO: 2217974 - DNA, 25 bp, Homo sapien
tcacagcttttcttgataggcctag

SEQ ID NO: 2217975 - DNA, 25 bp, Homo sapien
tgagaattcaggcaaacgtccacaa

SEQ ID NO: 2217976 - DNA, 25 bp, Homo sapien
tatcttaggtagtcatgctgtgcat

SEQ ID NO: 2217977 - DNA, 25 bp, Homo sapien
ggagcagtaatgcagcatcaaccta

SEQ ID NO: 2217978 - DNA, 25 bp, Homo sapien
aggtcacaggcagcgtacatacggt

SEQ ID NO: 2217979 - DNA, 25 bp, Homo sapien
gacagtagctcttagactcgcctat

SEQ ID NO: 2217980 - DNA, 25 bp, Homo sapien
tagaatcttagataccaggatattg

SEQ ID NO: 2217981 - DNA, 25 bp, Homo sapien
gaatagtgacaccagacagttgatg

SEQ ID NO: 2217982 - DNA, 25 bp, Homo sapien
accagacagttgatgtctagatagg

SEQ ID NO: 2217983 - DNA, 25 bp, Homo sapien
taggacctcaatgattcccttagaa

SEQ ID NO: 2217984 - DNA, 25 bp, Homo sapien
gcctgactgaggctgtcaagagcag

SEQ ID NO: 2217985 - DNA, 25 bp, Homo sapien
gatttatcaaagtagtttcgccttc

SEQ ID NO: 2217986 - DNA, 25 bp, Homo sapien
cattgtcagggaaaagggcaagctg

SEQ ID NO: 2217987 - DNA, 25 bp, Homo sapien
catttcttcaggtgtgacggtcctg

SEQ ID NO: 2217988 - DNA, 25 bp, Homo sapien
tatctttcattatggtaacctttac

SEQ ID NO: 2217989 - DNA, 25 bp, Homo sapien
aggtgtgacggtcctgggagaccag

SEQ ID NO: 2217990 - DNA, 25 bp, Homo sapien
tttctgttccacaaaactgccactg

SEQ ID NO: 2217991 - DNA, 25 bp, Homo sapien
tctgttccacaaaactgccactgtc

SEQ ID NO: 2217992 - DNA, 25 bp, Homo sapien
cctttctgttccacaaaactgccac

SEQ ID NO: 2217993 - DNA, 25 bp, Homo sapien
tgttccacaaaactgccactgtcat

SEQ ID NO: 2217994 - DNA, 25 bp, Homo sapien
gctctggcgttcgaatggctctgga

SEQ ID NO: 2217995 - DNA, 25 bp, Homo sapien
ggagaacgatcggattgagaacccc

SEQ ID NO: 2217996 - DNA, 25 bp, Homo sapien
tcccaggaggtttcaggcatcgagt

SEQ ID NO: 2217997 - DNA, 25 bp, Homo sapien
gaggctggccctagaacttcacttc

SEQ ID NO: 2217998 - DNA, 25 bp, Homo sapien
gggaggcctcgccactcagaattgg

SEQ ID NO: 2217999 - DNA, 25 bp, Homo sapien
ggcagagagcaacccctagtgggct

SEQ ID NO: 2218000 - DNA, 25 bp, Homo sapien
gctgatggtcagtgaataccctggg

SEQ ID NO: 2218001 - DNA, 25 bp, Homo sapien
tcctagatggaaaaagaaccggctg

SEQ ID NO: 2218002 - DNA, 25 bp, Homo sapien
gacagactacaaagcatacagtaca

SEQ ID NO: 2218003 - DNA, 25 bp, Homo sapien
cctttaccaggatagttaagaagat

SEQ ID NO: 2218004 - DNA, 25 bp, Homo sapien
tatagcgctgattaggttgtaccac

SEQ ID NO: 2218005 - DNA, 25 bp, Homo sapien
ggagcatgctgcctaacttctgagt

SEQ ID NO: 2218006 - DNA, 25 bp, Homo sapien
tctcttcagggctccatacctgtgc

SEQ ID NO: 2218007 - DNA, 25 bp, Homo sapien
tggttagaaataccattcttgaact

SEQ ID NO: 2218008 - DNA, 25 bp, Homo sapien
ttccttctaaccatcctagtgggtg

SEQ ID NO: 2218009 - DNA, 25 bp, Homo sapien
ccctattgactaattatgctgaaaa

SEQ ID NO: 2218010 - DNA, 25 bp, Homo sapien
ggcaggttttacctatagcctcatc

SEQ ID NO: 2218011 - DNA, 25 bp, Homo sapien
cagtggggggatatactcctcagga

SEQ ID NO: 2218012 - DNA, 25 bp, Homo sapien
atttgcccatccacggatgtctgga

SEQ ID NO: 2218013 - DNA, 25 bp, Homo sapien
catccacggatgtctggacgctata

SEQ ID NO: 2218014 - DNA, 25 bp, Homo sapien
cataaggtctggatctactgtatca

SEQ ID NO: 2218015 - DNA, 25 bp, Homo sapien
cagagacatcacaatactggagaga

SEQ ID NO: 2218016 - DNA, 25 bp, Homo sapien
catagaaggtttccagggttgaatc

SEQ ID NO: 2218017 - DNA, 25 bp, Homo sapien
cactttgggtctctggctatagagc

SEQ ID NO: 2218018 - DNA, 25 bp, Homo sapien
tacaatgctagataaaccaggagtc

SEQ ID NO: 2218019 - DNA, 25 bp, Homo sapien
tattagtctctctcacatagccagt

SEQ ID NO: 2218020 - DNA, 25 bp, Homo sapien
tactattctactactggagaaggca

SEQ ID NO: 2218021 - DNA, 25 bp, Homo sapien
gtaaaactacaggtcttaatgccac

SEQ ID NO: 2218022 - DNA, 25 bp, Homo sapien
ttttcttctctttcctcctcatact

SEQ ID NO: 2218023 - DNA, 25 bp, Homo sapien
cttctctttcctcctcatacttttt

SEQ ID NO: 2218024 - DNA, 25 bp, Homo sapien
cttctgtcctctttttttcttctct

SEQ ID NO: 2218025 - DNA, 25 bp, Homo sapien
tcttctctttcctcctcatactttt

SEQ ID NO: 2218026 - DNA, 25 bp, Homo sapien
tagcctggcctctgtagacgtgacc

SEQ ID NO: 2218027 - DNA, 25 bp, Homo sapien
tggcctctgtagacgtgaccccggg

SEQ ID NO: 2218028 - DNA, 25 bp, Homo sapien
aatcgagagagggaactgctgtagt

SEQ ID NO: 2218029 - DNA, 25 bp, Homo sapien
accactgtggaatcgagagagggaa

SEQ ID NO: 2218030 - DNA, 25 bp, Homo sapien
gcaaaccctttggaatggccactaa

SEQ ID NO: 2218031 - DNA, 25 bp, Homo sapien
tctatatatgcaaaccctttggaat

SEQ ID NO: 2218032 - DNA, 25 bp, Homo sapien
cacagagtatggtaacacggttgac

SEQ ID NO: 2218033 - DNA, 25 bp, Homo sapien
taaatagggagtcatctaaggccag

SEQ ID NO: 2218034 - DNA, 25 bp, Homo sapien
attgccaacatagatggaacgggca

SEQ ID NO: 2218035 - DNA, 25 bp, Homo sapien
caacatagatggaacgggcatcggc

SEQ ID NO: 2218036 - DNA, 25 bp, Homo sapien
acatagatggaacgggcatcggcct

SEQ ID NO: 2218037 - DNA, 25 bp, Homo sapien
gccaacatagatggaacgggcatcg

SEQ ID NO: 2218038 - DNA, 25 bp, Homo sapien
tccggatcctcaatggcgctgtctt

SEQ ID NO: 2218039 - DNA, 25 bp, Homo sapien
ctccggatcctcaatggcgctgtct

SEQ ID NO: 2218040 - DNA, 25 bp, Homo sapien
cagctccggatcctcaatggcgctg

SEQ ID NO: 2218041 - DNA, 25 bp, Homo sapien
gctccggatcctcaatggcgctgtc

SEQ ID NO: 2218042 - DNA, 25 bp, Homo sapien
tcgaccagtcatggctcctcctcct

SEQ ID NO: 2218043 - DNA, 25 bp, Homo sapien
gccagggcggctcctcttcaggctt

SEQ ID NO: 2218044 - DNA, 25 bp, Homo sapien
gggctcccgaaccaggcctggagct

SEQ ID NO: 2218045 - DNA, 25 bp, Homo sapien
gcggcagctcctcaggctacagttc

SEQ ID NO: 2218046 - DNA, 25 bp, Homo sapien
ggcacacatctccaagcccggctaa

SEQ ID NO: 2218047 - DNA, 25 bp, Homo sapien
acaggcacacatctccaagcccggc

SEQ ID NO: 2218048 - DNA, 25 bp, Homo sapien
gtagtgtgatcatgggtcattgcag

SEQ ID NO: 2218049 - DNA, 25 bp, Homo sapien
tacagtagtgtgatcatgggtcatt

SEQ ID NO: 2218050 - DNA, 25 bp, Homo sapien
tacattttgcctagtcgcctggtga

SEQ ID NO: 2218051 - DNA, 25 bp, Homo sapien
ttaaaagttaaagcctctgcctgcc

SEQ ID NO: 2218052 - DNA, 25 bp, Homo sapien
tatagggtagccctgttccgcaaga

SEQ ID NO: 2218053 - DNA, 25 bp, Homo sapien
taacagcttggtctatagtcttagg

SEQ ID NO: 2218054 - DNA, 25 bp, Homo sapien
atttcttagagtgatgtgttgcaaa

SEQ ID NO: 2218055 - DNA, 25 bp, Homo sapien
tggatatttcttagagtgatgtgtt

SEQ ID NO: 2218056 - DNA, 25 bp, Homo sapien
tttcttagagtgatgtgttgcaaag

SEQ ID NO: 2218057 - DNA, 25 bp, Homo sapien
gatatttcttagagtgatgtgttgc

SEQ ID NO: 2218058 - DNA, 25 bp, Homo sapien
ggtgactagagcgaccaactgcact

SEQ ID NO: 2218059 - DNA, 25 bp, Homo sapien
catatgtcaagaatgactgggccct

SEQ ID NO: 2218060 - DNA, 25 bp, Homo sapien
cagagtagcctgacgggtgactaga

SEQ ID NO: 2218061 - DNA, 25 bp, Homo sapien
tgtccccatgggtagagtcaggcac

SEQ ID NO: 2218062 - DNA, 25 bp, Homo sapien
tcacaatgataaccccccaggaatg

SEQ ID NO: 2218063 - DNA, 25 bp, Homo sapien
tgtaacatatgtgatcgcatttttg

SEQ ID NO: 2218064 - DNA, 25 bp, Homo sapien
agggggcttctgtgtttgttatgta

SEQ ID NO: 2218065 - DNA, 25 bp, Homo sapien
catatgtgatcgcatttttgtaaaa

SEQ ID NO: 2218066 - DNA, 25 bp, Homo sapien
tgagccatcaagcttggctggaaat

SEQ ID NO: 2218067 - DNA, 25 bp, Homo sapien
ttacttgctgtaagtctagtcagat

SEQ ID NO: 2218068 - DNA, 25 bp, Homo sapien
ggttatccaataattatagtctctt

SEQ ID NO: 2218069 - DNA, 25 bp, Homo sapien
gctgtaagtctagtcagatttccta

SEQ ID NO: 2218070 - DNA, 25 bp, Homo sapien
gagtatgttgtgattcttggacctg

SEQ ID NO: 2218071 - DNA, 25 bp, Homo sapien
tcttcataattactgtacttggagt

SEQ ID NO: 2218072 - DNA, 25 bp, Homo sapien
tatagaaggctgcttgggattgccc

SEQ ID NO: 2218073 - DNA, 25 bp, Homo sapien
tcagggactcccatcacatgtatag

SEQ ID NO: 2218074 - DNA, 25 bp, Homo sapien
aaacaccactgcactccgatcagcc

SEQ ID NO: 2218075 - DNA, 25 bp, Homo sapien
ttagacgcatgtccccaaactacct

SEQ ID NO: 2218076 - DNA, 25 bp, Homo sapien
cagcaaaggtggcaatgtaatcaac

SEQ ID NO: 2218077 - DNA, 25 bp, Homo sapien
gttctcctcactattagacgcatgt

SEQ ID NO: 2218078 - DNA, 25 bp, Homo sapien
cgcccggcctctaacaacattcttt

SEQ ID NO: 2218079 - DNA, 25 bp, Homo sapien
ccatcgttctttccccggcatctgg

SEQ ID NO: 2218080 - DNA, 25 bp, Homo sapien
ttctttccccggcatctggaacagt

SEQ ID NO: 2218081 - DNA, 25 bp, Homo sapien
cgttctttccccggcatctggaaca

SEQ ID NO: 2218082 - DNA, 25 bp, Homo sapien
tttgcccatcgttctttccccggca

SEQ ID NO: 2218083 - DNA, 25 bp, Homo sapien
gttgagactcacacacgagaagcgg

SEQ ID NO: 2218084 - DNA, 25 bp, Homo sapien
tcacacacgagaagcggaaccactc

SEQ ID NO: 2218085 - DNA, 25 bp, Homo sapien
gggcattcgttgtcgcagcggatca

SEQ ID NO: 2218086 - DNA, 25 bp, Homo sapien
ggcattcgttgtcgcagcggatcat

SEQ ID NO: 2218087 - DNA, 25 bp, Homo sapien
agctctgcttcttcttagaggtctg

SEQ ID NO: 2218088 - DNA, 25 bp, Homo sapien
tctccttgggcgtgcccgaggtgac

SEQ ID NO: 2218089 - DNA, 25 bp, Homo sapien
ctacgccttggccatggagctctgc

SEQ ID NO: 2218090 - DNA, 25 bp, Homo sapien
tgacgtcgtcgtggtcgcggttgct

SEQ ID NO: 2218091 - DNA, 25 bp, Homo sapien
gttgcgctgccgccgagaacgcttt

SEQ ID NO: 2218092 - DNA, 25 bp, Homo sapien
cgctgccgccgagaacgctttgctg

SEQ ID NO: 2218093 - DNA, 25 bp, Homo sapien
tttgctgttggacttctccgcctgc

SEQ ID NO: 2218094 - DNA, 25 bp, Homo sapien
tgttggacttctccgcctgcgcgtc

SEQ ID NO: 2218095 - DNA, 25 bp, Homo sapien
cgccgtcgcgctgcgtcgccctgct

SEQ ID NO: 2218096 - DNA, 25 bp, Homo sapien
cttgccgccgtcgcgctgcgtcgcc

SEQ ID NO: 2218097 - DNA, 25 bp, Homo sapien
gccgccgtcgcgctgcgtcgccctg

SEQ ID NO: 2218098 - DNA, 25 bp, Homo sapien
gtcgcgctgcgtcgccctgctcctg

SEQ ID NO: 2218099 - DNA, 25 bp, Homo sapien
ctacctgccgcgtgaggctctccac

SEQ ID NO: 2218100 - DNA, 25 bp, Homo sapien
ctgcgggtggaacggctccacgtgg

SEQ ID NO: 2218101 - DNA, 25 bp, Homo sapien
tgtctacctgccgcgtgaggctctc

SEQ ID NO: 2218102 - DNA, 25 bp, Homo sapien
ggctgtctacctgccgcgtgaggct

SEQ ID NO: 2218103 - DNA, 25 bp, Homo sapien
cgtgtcgcggcggaccttctcatag

SEQ ID NO: 2218104 - DNA, 25 bp, Homo sapien
cgcgcagtccgtgtcgcggcggacc

SEQ ID NO: 2218105 - DNA, 25 bp, Homo sapien
gtgtcgcggcggaccttctcatagc

SEQ ID NO: 2218106 - DNA, 25 bp, Homo sapien
cagtccgtgtcgcggcggaccttct

SEQ ID NO: 2218107 - DNA, 25 bp, Homo sapien
ggccgcaccctccggtctgcagagg

SEQ ID NO: 2218108 - DNA, 25 bp, Homo sapien
gccgcaccctccggtctgcagaggt

SEQ ID NO: 2218109 - DNA, 25 bp, Homo sapien
ccgcaccctccggtctgcagaggtg

SEQ ID NO: 2218110 - DNA, 25 bp, Homo sapien
cgcaccctccggtctgcagaggtgt

SEQ ID NO: 2218111 - DNA, 25 bp, Homo sapien
tgaaagataacagtcattatggcta

SEQ ID NO: 2218112 - DNA, 25 bp, Homo sapien
gaaagataacagtcattatggctat

SEQ ID NO: 2218113 - DNA, 25 bp, Homo sapien
ttgaaagataacagtcattatggct

SEQ ID NO: 2218114 - DNA, 25 bp, Homo sapien
cttgaaagataacagtcattatggc

SEQ ID NO: 2218115 - DNA, 25 bp, Homo sapien
ttattttgcaggttttttcagctcc

SEQ ID NO: 2218116 - DNA, 25 bp, Homo sapien
gcttgtcacaaccatagtgtcacta

SEQ ID NO: 2218117 - DNA, 25 bp, Homo sapien
ctactttggacagaatcatcaactc

SEQ ID NO: 2218118 - DNA, 25 bp, Homo sapien
ggaggacagtcaggattagaattca

SEQ ID NO: 2218119 - DNA, 25 bp, Homo sapien
ttagattctgtattggaggtagtaa

SEQ ID NO: 2218120 - DNA, 25 bp, Homo sapien
tctggagcaacgaccaggtcctgct

SEQ ID NO: 2218121 - DNA, 25 bp, Homo sapien
caaagatctctggagcaacgaccag

SEQ ID NO: 2218122 - DNA, 25 bp, Homo sapien
ggtaccaatgaacaagccattcaga

SEQ ID NO: 2218123 - DNA, 25 bp, Homo sapien
aggtcctgctctacccgattctcag

SEQ ID NO: 2218124 - DNA, 25 bp, Homo sapien
attcactagttagtgatggttgttg

SEQ ID NO: 2218125 - DNA, 25 bp, Homo sapien
actagttagtgatggttgttgtact

SEQ ID NO: 2218126 - DNA, 25 bp, Homo sapien
tcactagttagtgatggttgttgta

SEQ ID NO: 2218127 - DNA, 25 bp, Homo sapien
cactagttagtgatggttgttgtac

SEQ ID NO: 2218128 - DNA, 25 bp, Homo sapien
ctcgaggcctggatctagggcagac

SEQ ID NO: 2218129 - DNA, 25 bp, Homo sapien
tccctgctgtatgcaatagccctga

SEQ ID NO: 2218130 - DNA, 25 bp, Homo sapien
caagccagcatattcctagtagatg

SEQ ID NO: 2218131 - DNA, 25 bp, Homo sapien
tattccatgcgtaaggtgcctcgct

SEQ ID NO: 2218132 - DNA, 25 bp, Homo sapien
tcttctgatgatgcgctgtgaccct

SEQ ID NO: 2218133 - DNA, 25 bp, Homo sapien
tgtgaccctgcagtagcgcaaaggc

SEQ ID NO: 2218134 - DNA, 25 bp, Homo sapien
gtaatctgattgactggctccctca

SEQ ID NO: 2218135 - DNA, 25 bp, Homo sapien
tgcgtgcgaatgaacccctgtgaac

SEQ ID NO: 2218136 - DNA, 25 bp, Homo sapien
cgatgctgttaggttgcgcaagcga

SEQ ID NO: 2218137 - DNA, 25 bp, Homo sapien
tagcgcagcagttcgcagcgattgc

SEQ ID NO: 2218138 - DNA, 25 bp, Homo sapien
tttgcgctcgcattacagggacctc

SEQ ID NO: 2218139 - DNA, 25 bp, Homo sapien
tctggttggccgtttgctgcgtcta

SEQ ID NO: 2218140 - DNA, 25 bp, Homo sapien
tttcctggcacgaaaagtagccgct

SEQ ID NO: 2218141 - DNA, 25 bp, Homo sapien
gagatatagattgtccggccgcttt

SEQ ID NO: 2218142 - DNA, 25 bp, Homo sapien
ttatgggatctcaacaaagggtcga

SEQ ID NO: 2218143 - DNA, 25 bp, Homo sapien
gaaatatcagttaaaggttgccagc

SEQ ID NO: 2218144 - DNA, 25 bp, Homo sapien
actccacgggcagttggaggtgagc

SEQ ID NO: 2218145 - DNA, 25 bp, Homo sapien
atctttgcacacactccacgggcag

SEQ ID NO: 2218146 - DNA, 25 bp, Homo sapien
catcgcagttgctccggatctttgc

SEQ ID NO: 2218147 - DNA, 25 bp, Homo sapien
cctgcgcctggcgttgttcatcgca

SEQ ID NO: 2218148 - DNA, 25 bp, Homo sapien
tggcgccagtggctatgtaggaata

SEQ ID NO: 2218149 - DNA, 25 bp, Homo sapien
gagcgctggtggtggcgtaggagcg

SEQ ID NO: 2218150 - DNA, 25 bp, Homo sapien
cgtaggagcgtgtggtggcgccagt

SEQ ID NO: 2218151 - DNA, 25 bp, Homo sapien
ctatgtaggaatacgtggcgccggt

SEQ ID NO: 2218152 - DNA, 25 bp, Homo sapien
cccagtggtggtgtaggaacaggtg

SEQ ID NO: 2218153 - DNA, 25 bp, Homo sapien
tgggggccccagtggtggtgtagga

SEQ ID NO: 2218154 - DNA, 25 bp, Homo sapien
gggccccagtggtggtgtaggaaca

SEQ ID NO: 2218155 - DNA, 25 bp, Homo sapien
ggtggtgtaggaacaggtggtgtcc

SEQ ID NO: 2218156 - DNA, 25 bp, Homo sapien
ataggagcacatagtagcgctggcg

SEQ ID NO: 2218157 - DNA, 25 bp, Homo sapien
tggcataggagcacatagtagcgct

SEQ ID NO: 2218158 - DNA, 25 bp, Homo sapien
gcataggagcacatagtagcgctgg

SEQ ID NO: 2218159 - DNA, 25 bp, Homo sapien
ttggtggcataggagcacatagtag

SEQ ID NO: 2218160 - DNA, 25 bp, Homo sapien
tctcttctggaacactaccctattt

SEQ ID NO: 2218161 - DNA, 25 bp, Homo sapien
ggagatgcgccctgaaccaataaag

SEQ ID NO: 2218162 - DNA, 25 bp, Homo sapien
ttttcctccctcacagatatgcatg

SEQ ID NO: 2218163 - DNA, 25 bp, Homo sapien
cagtgatgtgatcaggagctatttt

SEQ ID NO: 2218164 - DNA, 25 bp, Homo sapien
ctcgaaccttcacatagatgggcat

SEQ ID NO: 2218165 - DNA, 25 bp, Homo sapien
gtagccaggcgccacattggaggag

SEQ ID NO: 2218166 - DNA, 25 bp, Homo sapien
atgtagccaggcgccacattggagg

SEQ ID NO: 2218167 - DNA, 25 bp, Homo sapien
tgtagccaggcgccacattggagga

SEQ ID NO: 2218168 - DNA, 25 bp, Homo sapien
gatgtagccaggcgccacattggag

SEQ ID NO: 2218169 - DNA, 25 bp, Homo sapien
acagtggatgtccagccggctgctg

SEQ ID NO: 2218170 - DNA, 25 bp, Homo sapien
ggtggtgctgcataactctcgtaag

SEQ ID NO: 2218171 - DNA, 25 bp, Homo sapien
tctcgtaagtgatagcaagaggcaa

SEQ ID NO: 2218172 - DNA, 25 bp, Homo sapien
aagtgcttggcttcacctcaggtgg

SEQ ID NO: 2218173 - DNA, 25 bp, Homo sapien
tattgctaaccattctgtgcccttg

SEQ ID NO: 2218174 - DNA, 25 bp, Homo sapien
aagatgggacccgtattgtgcccca

SEQ ID NO: 2218175 - DNA, 25 bp, Homo sapien
gaaaaattatgcaggagatggctag

SEQ ID NO: 2218176 - DNA, 25 bp, Homo sapien
aaatcgttggacaccagccgcttca

SEQ ID NO: 2218177 - DNA, 25 bp, Homo sapien
agcaaatatagaggtcttggggacc

SEQ ID NO: 2218178 - DNA, 25 bp, Homo sapien
aaggagcagcaatggtgcagtcctc

SEQ ID NO: 2218179 - DNA, 25 bp, Homo sapien
ggaagtcagactgtgggcgaaaggg

SEQ ID NO: 2218180 - DNA, 25 bp, Homo sapien
ggctgccagtgagtcccgggagcga

SEQ ID NO: 2218181 - DNA, 25 bp, Homo sapien
caggcgcaagagcagcatccacatc

SEQ ID NO: 2218182 - DNA, 25 bp, Homo sapien
gaatcccggcgggaagacgatggct

SEQ ID NO: 2218183 - DNA, 25 bp, Homo sapien
taggaggcctctgaggtctcagacc

SEQ ID NO: 2218184 - DNA, 25 bp, Homo sapien
cgggaagacgatggctgcctctgga

SEQ ID NO: 2218185 - DNA, 25 bp, Homo sapien
tgctttctcggccacagttgcgggc

SEQ ID NO: 2218186 - DNA, 25 bp, Homo sapien
atgtgggcatagcagtaggccatga

SEQ ID NO: 2218187 - DNA, 25 bp, Homo sapien
tgcatgtagcccaggcctgaggtga

SEQ ID NO: 2218188 - DNA, 25 bp, Homo sapien
tgaggtgaccgacttggccacgtct

SEQ ID NO: 2218189 - DNA, 25 bp, Homo sapien
ggcgttgaggcgctcgtcgtggtgg

SEQ ID NO: 2218190 - DNA, 25 bp, Homo sapien
ggaagttgtattggcagtgggtggc

SEQ ID NO: 2218191 - DNA, 25 bp, Homo sapien
tgtgggaagttgtattggcagtggg

SEQ ID NO: 2218192 - DNA, 25 bp, Homo sapien
gctcgtcgtggtgggccgacaggaa

SEQ ID NO: 2218193 - DNA, 25 bp, Homo sapien
ctcctgcgtagaagttgatgttgaa

SEQ ID NO: 2218194 - DNA, 25 bp, Homo sapien
actatgttcaggtagcggtcaaagc

SEQ ID NO: 2218195 - DNA, 25 bp, Homo sapien
ccccggcggtagagctgggtggcat

SEQ ID NO: 2218196 - DNA, 25 bp, Homo sapien
aggcaggtgagggtcacgcgggccg

SEQ ID NO: 2218197 - DNA, 25 bp, Homo sapien
aaggcccggtcgaagttcaggctga

SEQ ID NO: 2218198 - DNA, 25 bp, Homo sapien
ggaggtacagcacgagtcactctcg

SEQ ID NO: 2218199 - DNA, 25 bp, Homo sapien
agggcggcaacctcggcgtcattta

SEQ ID NO: 2218200 - DNA, 25 bp, Homo sapien
cagcgtgtctgctacagctaggtgg

SEQ ID NO: 2218201 - DNA, 25 bp, Homo sapien
ccgccagtcttccagggccgtactt

SEQ ID NO: 2218202 - DNA, 25 bp, Homo sapien
ttccagggccgtacttcctcaactc

SEQ ID NO: 2218203 - DNA, 25 bp, Homo sapien
ggaactcttttgtgattgagtctga

SEQ ID NO: 2218204 - DNA, 25 bp, Homo sapien
tagtctgtgatttactctgagcagc

SEQ ID NO: 2218205 - DNA, 25 bp, Homo sapien
tctgggatagtgacttcccttctca

SEQ ID NO: 2218206 - DNA, 25 bp, Homo sapien
cattcttctgcgtgatcccatcggc

SEQ ID NO: 2218207 - DNA, 25 bp, Homo sapien
gctctgggatagtgacttcccttct

SEQ ID NO: 2218208 - DNA, 25 bp, Homo sapien
gcttctctcgcattcttctgcgtga

SEQ ID NO: 2218209 - DNA, 25 bp, Homo sapien
tctgctttggtgcttgtggttggaa

SEQ ID NO: 2218210 - DNA, 25 bp, Homo sapien
cctctgctttggtgcttgtggttgg

SEQ ID NO: 2218211 - DNA, 25 bp, Homo sapien
gcccctctgctttggtgcttgtggt

SEQ ID NO: 2218212 - DNA, 25 bp, Homo sapien
tgctttggtgcttgtggttggaaac

SEQ ID NO: 2218213 - DNA, 25 bp, Homo sapien
gaggaagtgggagtttcaggcagtt

SEQ ID NO: 2218214 - DNA, 25 bp, Homo sapien
aagtgggagtttcaggcagttctca

SEQ ID NO: 2218215 - DNA, 25 bp, Homo sapien
ggaagtgggagtttcaggcagttct

SEQ ID NO: 2218216 - DNA, 25 bp, Homo sapien
cagaggaagtgggagtttcaggcag

SEQ ID NO: 2218217 - DNA, 25 bp, Homo sapien
ggaggctcaaaggttgaggcctggg

SEQ ID NO: 2218218 - DNA, 25 bp, Homo sapien
gggaggctcaaaggttgaggcctgg

SEQ ID NO: 2218219 - DNA, 25 bp, Homo sapien
ggaaggagggcccctactgctgtct

SEQ ID NO: 2218220 - DNA, 25 bp, Homo sapien
tgcctcttggagcactactccaaaa

SEQ ID NO: 2218221 - DNA, 25 bp, Homo sapien
ctctctgtcagagtcggctgcttca

SEQ ID NO: 2218222 - DNA, 25 bp, Homo sapien
tccaaaagctactggacttggccgc

SEQ ID NO: 2218223 - DNA, 25 bp, Homo sapien
gagtcggctgcttcacaacctctct

SEQ ID NO: 2218224 - DNA, 25 bp, Homo sapien
gagtaaagacaatagctgctccttc

SEQ ID NO: 2218225 - DNA, 25 bp, Homo sapien
gcttagaactagtcaagaggttggg

SEQ ID NO: 2218226 - DNA, 25 bp, Homo sapien
catgggttaatctggctctagctgt

SEQ ID NO: 2218227 - DNA, 25 bp, Homo sapien
caggtcctctggatggagtaaagac

SEQ ID NO: 2218228 - DNA, 25 bp, Homo sapien
caagccaccctcagggagtacaagg

SEQ ID NO: 2218229 - DNA, 25 bp, Homo sapien
gtgtggagccttcactcaagccacc

SEQ ID NO: 2218230 - DNA, 25 bp, Homo sapien
attaatgccataaaccagtgtggag

SEQ ID NO: 2218231 - DNA, 25 bp, Homo sapien
gccataaaccagtgtggagccttca

SEQ ID NO: 2218232 - DNA, 25 bp, Homo sapien
ttcacgctggatcatgagaacggag

SEQ ID NO: 2218233 - DNA, 25 bp, Homo sapien
cacatgggcgccgttcacgctggat

SEQ ID NO: 2218234 - DNA, 25 bp, Homo sapien
cgccgttcacgctggatcatgagaa

SEQ ID NO: 2218235 - DNA, 25 bp, Homo sapien
gcacaaccacatgggcgccgttcac

SEQ ID NO: 2218236 - DNA, 25 bp, Homo sapien
gatagagtttgcatggccaccctgg

SEQ ID NO: 2218237 - DNA, 25 bp, Homo sapien
ggcaaacactggtgttggcctcatc

SEQ ID NO: 2218238 - DNA, 25 bp, Homo sapien
tggcaaacactggtgttggcctcat

SEQ ID NO: 2218239 - DNA, 25 bp, Homo sapien
aggcactcagctcgccagacctccg

SEQ ID NO: 2218240 - DNA, 25 bp, Homo sapien
ctcagctcgccagacctccggagcc

SEQ ID NO: 2218241 - DNA, 25 bp, Homo sapien
cactcagctcgccagacctccggag

SEQ ID NO: 2218242 - DNA, 25 bp, Homo sapien
ggcactcagctcgccagacctccgg

SEQ ID NO: 2218243 - DNA, 25 bp, Homo sapien
ggcccacccagtcgaggattccggc

SEQ ID NO: 2218244 - DNA, 25 bp, Homo sapien
cccagtcgaggattccggctgaagg

SEQ ID NO: 2218245 - DNA, 25 bp, Homo sapien
ccacccagtcgaggattccggctga

SEQ ID NO: 2218246 - DNA, 25 bp, Homo sapien
cagtcgaggattccggctgaaggta

SEQ ID NO: 2218247 - DNA, 25 bp, Homo sapien
aacagggagctcgaggaaatctcat

SEQ ID NO: 2218248 - DNA, 25 bp, Homo sapien
agaacagggagctcgaggaaatctc

SEQ ID NO: 2218249 - DNA, 25 bp, Homo sapien
cagggagctcgaggaaatctcatgt

SEQ ID NO: 2218250 - DNA, 25 bp, Homo sapien
ggagctcgaggaaatctcatgtgac

SEQ ID NO: 2218251 - DNA, 25 bp, Homo sapien
tggctgaacaggatatggagggaac

SEQ ID NO: 2218252 - DNA, 25 bp, Homo sapien
tcaaattgctttgaactgcgttggg

SEQ ID NO: 2218253 - DNA, 25 bp, Homo sapien
ctttgaactgcgttgggaagtgtgc

SEQ ID NO: 2218254 - DNA, 25 bp, Homo sapien
aactgcgttgggaagtgtgcaaatg

SEQ ID NO: 2218255 - DNA, 25 bp, Homo sapien
ctccggagctccaaaggtggcagct

SEQ ID NO: 2218256 - DNA, 25 bp, Homo sapien
gtggcagctgttcatcttgtaggaa

SEQ ID NO: 2218257 - DNA, 25 bp, Homo sapien
cttgtaggaagatgctggctccaac

SEQ ID NO: 2218258 - DNA, 25 bp, Homo sapien
cagctccggagctccaaaggtggca

SEQ ID NO: 2218259 - DNA, 25 bp, Homo sapien
aacttgtcagtgaggaactgcatgg

SEQ ID NO: 2218260 - DNA, 25 bp, Homo sapien
gaacttgtcagtgaggaactgcatg

SEQ ID NO: 2218261 - DNA, 25 bp, Homo sapien
ggaacttgtcagtgaggaactgcat

SEQ ID NO: 2218262 - DNA, 25 bp, Homo sapien
acttgtcagtgaggaactgcatggc

SEQ ID NO: 2218263 - DNA, 25 bp, Homo sapien
ctcaatttccctctgcagccggatg

SEQ ID NO: 2218264 - DNA, 25 bp, Homo sapien
caatttccctctgcagccggatgca

SEQ ID NO: 2218265 - DNA, 25 bp, Homo sapien
ctagttggtctctaaggtcctcaat

SEQ ID NO: 2218266 - DNA, 25 bp, Homo sapien
agttggtctctaaggtcctcaattt

SEQ ID NO: 2218267 - DNA, 25 bp, Homo sapien
gacctggatttctaggagccacaca

SEQ ID NO: 2218268 - DNA, 25 bp, Homo sapien
cagtttaacctagacacagatccca

SEQ ID NO: 2218269 - DNA, 25 bp, Homo sapien
gggttggcacagaatcctcaatgga

SEQ ID NO: 2218270 - DNA, 25 bp, Homo sapien
ctcaatggaaaggaggcaccctctc

SEQ ID NO: 2218271 - DNA, 25 bp, Homo sapien
ctgcctttccggtcttgggggatgg

SEQ ID NO: 2218272 - DNA, 25 bp, Homo sapien
gctgcctttccggtcttgggggatg

SEQ ID NO: 2218273 - DNA, 25 bp, Homo sapien
tgcctttccggtcttgggggatgga

SEQ ID NO: 2218274 - DNA, 25 bp, Homo sapien
tgctgcctttccggtcttgggggat

SEQ ID NO: 2218275 - DNA, 25 bp, Homo sapien
tctccacgatgcgtggataggcgag

SEQ ID NO: 2218276 - DNA, 25 bp, Homo sapien
cgatgcgtggataggcgaggcagtc

SEQ ID NO: 2218277 - DNA, 25 bp, Homo sapien
ctgaattctccacgatgcgtggata

SEQ ID NO: 2218278 - DNA, 25 bp, Homo sapien
gaattctccacgatgcgtggatagg

SEQ ID NO: 2218279 - DNA, 25 bp, Homo sapien
tgggccatcttcctcttagaagggc

SEQ ID NO: 2218280 - DNA, 25 bp, Homo sapien
gggctgctgtgcttaggcttttggg

SEQ ID NO: 2218281 - DNA, 25 bp, Homo sapien
gtggccggccctgggggagtggctg

SEQ ID NO: 2218282 - DNA, 25 bp, Homo sapien
cggccgcacaccaggcaatggctgg

SEQ ID NO: 2218283 - DNA, 25 bp, Homo sapien
tcaggaaacggcctggcacgggcaa

SEQ ID NO: 2218284 - DNA, 25 bp, Homo sapien
cagcattttcttcccgggagagtcc

SEQ ID NO: 2218285 - DNA, 25 bp, Homo sapien
tctttgtggcgaatgcccatcctca

SEQ ID NO: 2218286 - DNA, 25 bp, Homo sapien
gcctggcacgggcaagtaactctcc

SEQ ID NO: 2218287 - DNA, 25 bp, Homo sapien
gatggcggctgtctcatcaaccagg

SEQ ID NO: 2218288 - DNA, 25 bp, Homo sapien
cacgggacaggaacaacaaggcctt

SEQ ID NO: 2218289 - DNA, 25 bp, Homo sapien
tcagtagtggcgtcttcagggaacg

SEQ ID NO: 2218290 - DNA, 25 bp, Homo sapien
tggaagtaccgtgttcccgacagcg

SEQ ID NO: 2218291 - DNA, 25 bp, Homo sapien
tttctgtcatgagcatccttactct

SEQ ID NO: 2218292 - DNA, 25 bp, Homo sapien
tgttgaggagcatgacggagctcat

SEQ ID NO: 2218293 - DNA, 25 bp, Homo sapien
tccttactctccctgcggcttgatg

SEQ ID NO: 2218294 - DNA, 25 bp, Homo sapien
gcctctcctgtatggttatttccat

SEQ ID NO: 2218295 - DNA, 25 bp, Homo sapien
ggcaaacactggtgttggcctcatc

SEQ ID NO: 2218296 - DNA, 25 bp, Homo sapien
tggcaaacactggtgttggcctcat

SEQ ID NO: 2218297 - DNA, 25 bp, Homo sapien
aggcactcagctcgccagacctccg

SEQ ID NO: 2218298 - DNA, 25 bp, Homo sapien
ctcagctcgccagacctccggagcc

SEQ ID NO: 2218299 - DNA, 25 bp, Homo sapien
cactcagctcgccagacctccggag

SEQ ID NO: 2218300 - DNA, 25 bp, Homo sapien
ggcactcagctcgccagacctccgg

SEQ ID NO: 2218301 - DNA, 25 bp, Homo sapien
tctcctgtccttgttcgacaccctg

SEQ ID NO: 2218302 - DNA, 25 bp, Homo sapien
agaacctacacacacctcctcactg

SEQ ID NO: 2218303 - DNA, 25 bp, Homo sapien
ttcgacaccctgtctctcggcgatg

SEQ ID NO: 2218304 - DNA, 25 bp, Homo sapien
aatctgtgcccaaatctgggacctg

SEQ ID NO: 2218305 - DNA, 25 bp, Homo sapien
gctgttggctgcgtataggacacca

SEQ ID NO: 2218306 - DNA, 25 bp, Homo sapien
cacctccaaccgagagactgtcttg

SEQ ID NO: 2218307 - DNA, 25 bp, Homo sapien
caggtatcttccctttggctcagct

SEQ ID NO: 2218308 - DNA, 25 bp, Homo sapien
gacaccaaggatgtggaagccgcct

SEQ ID NO: 2218309 - DNA, 25 bp, Homo sapien
ctccggagctccaaaggtggcagct

SEQ ID NO: 2218310 - DNA, 25 bp, Homo sapien
gtggcagctgttcatcttgtaggaa

SEQ ID NO: 2218311 - DNA, 25 bp, Homo sapien
cttgtaggaagatgctggctccaac

SEQ ID NO: 2218312 - DNA, 25 bp, Homo sapien
cagctccggagctccaaaggtggca

SEQ ID NO: 2218313 - DNA, 25 bp, Homo sapien
tgtgaaacagagtaggctcagggac

SEQ ID NO: 2218314 - DNA, 25 bp, Homo sapien
gcccacagccctcctaaggtaccat

SEQ ID NO: 2218315 - DNA, 25 bp, Homo sapien
ctgtgaaacagagtaggctcaggga

SEQ ID NO: 2218316 - DNA, 25 bp, Homo sapien
taccatgattgtggaaaggggcatg

SEQ ID NO: 2218317 - DNA, 25 bp, Homo sapien
aacttgtcagtgaggaactgcatgg

SEQ ID NO: 2218318 - DNA, 25 bp, Homo sapien
gaacttgtcagtgaggaactgcatg

SEQ ID NO: 2218319 - DNA, 25 bp, Homo sapien
ggaacttgtcagtgaggaactgcat

SEQ ID NO: 2218320 - DNA, 25 bp, Homo sapien
acttgtcagtgaggaactgcatggc

SEQ ID NO: 2218321 - DNA, 25 bp, Homo sapien
gggaaccacctagccctgcaaccag

SEQ ID NO: 2218322 - DNA, 25 bp, Homo sapien
cggtggggaaccacctagccctgca

SEQ ID NO: 2218323 - DNA, 25 bp, Homo sapien
gactgactcacccacccgtcacctg

SEQ ID NO: 2218324 - DNA, 25 bp, Homo sapien
ggactgactcacccacccgtcacct

SEQ ID NO: 2218325 - DNA, 25 bp, Homo sapien
tgctgtgtaaggtcctcaatttccc

SEQ ID NO: 2218326 - DNA, 25 bp, Homo sapien
tcaatttccctctgcagccagatgc

SEQ ID NO: 2218327 - DNA, 25 bp, Homo sapien
ctagctgctgtgtaaggtcctcaat

SEQ ID NO: 2218328 - DNA, 25 bp, Homo sapien
agctgctgtgtaaggtcctcaattt

SEQ ID NO: 2218329 - DNA, 25 bp, Homo sapien
gctgcctttccggtcttgggggatg

SEQ ID NO: 2218330 - DNA, 25 bp, Homo sapien
tgcctttccggtcttgggggatgga

SEQ ID NO: 2218331 - DNA, 25 bp, Homo sapien
tgctgcctttccggtcttgggggat

SEQ ID NO: 2218332 - DNA, 25 bp, Homo sapien
ctgcctttccggtcttgggggatgg

SEQ ID NO: 2218333 - DNA, 25 bp, Homo sapien
gttcccggaagttggggagctctga

SEQ ID NO: 2218334 - DNA, 25 bp, Homo sapien
ttcccggaagttggggagctctgat

SEQ ID NO: 2218335 - DNA, 25 bp, Homo sapien
cgagggctctgaagttcccggaagt

SEQ ID NO: 2218336 - DNA, 25 bp, Homo sapien
ccgagggctctgaagttcccggaag

SEQ ID NO: 2218337 - DNA, 25 bp, Homo sapien
taactctccttgcagtggaagcttg

SEQ ID NO: 2218338 - DNA, 25 bp, Homo sapien
gtaactctccttgcagtggaagctt

SEQ ID NO: 2218339 - DNA, 25 bp, Homo sapien
acaacgtccccttggtcatccaccg

SEQ ID NO: 2218340 - DNA, 25 bp, Homo sapien
cgcatctgcccaattctcagccgac

SEQ ID NO: 2218341 - DNA, 25 bp, Homo sapien
tagaatgagtagtccacaacgtccc

SEQ ID NO: 2218342 - DNA, 25 bp, Homo sapien
tggtaacggcgggagcggagagctg

SEQ ID NO: 2218343 - DNA, 25 bp, Homo sapien
ctgagcgggccacgcgacagaaaca

SEQ ID NO: 2218344 - DNA, 25 bp, Homo sapien
gagcgggccacgcgacagaaacagt

SEQ ID NO: 2218345 - DNA, 25 bp, Homo sapien
tgagcgggccacgcgacagaaacag

SEQ ID NO: 2218346 - DNA, 25 bp, Homo sapien
agcgggccacgcgacagaaacagtg

SEQ ID NO: 2218347 - DNA, 25 bp, Homo sapien
tgccaaccagcacgccctttgtggg

SEQ ID NO: 2218348 - DNA, 25 bp, Homo sapien
agcgagtggcttcctcgcgcccttg

SEQ ID NO: 2218349 - DNA, 25 bp, Homo sapien
attggtccccgtctgccaaccagca

SEQ ID NO: 2218350 - DNA, 25 bp, Homo sapien
cctgagctttaaccaatcgggacac

SEQ ID NO: 2218351 - DNA, 25 bp, Homo sapien
ggagctgcagccaagcgagtttcct

SEQ ID NO: 2218352 - DNA, 25 bp, Homo sapien
tccctggcgctggaagaacagttcc

SEQ ID NO: 2218353 - DNA, 25 bp, Homo sapien
tgtgccgggtgttgctccgttccct

SEQ ID NO: 2218354 - DNA, 25 bp, Homo sapien
ccatagtgccctgggtctaggtgct

SEQ ID NO: 2218355 - DNA, 25 bp, Homo sapien
gaaaaccaatcgactgtgaatgaac

SEQ ID NO: 2218356 - DNA, 25 bp, Homo sapien
taagaaaagtccattaccaagatat

SEQ ID NO: 2218357 - DNA, 25 bp, Homo sapien
cacgtattgagtactgaggtcaaga

SEQ ID NO: 2218358 - DNA, 25 bp, Homo sapien
gaaagagtacattgcagttctagag

SEQ ID NO: 2218359 - DNA, 25 bp, Homo sapien
aaggaggaaactcgcttggctgcag

SEQ ID NO: 2218360 - DNA, 25 bp, Homo sapien
tgcagctccggacgctggctccaac

SEQ ID NO: 2218361 - DNA, 25 bp, Homo sapien
taaggaggaaactcgcttggctgca

SEQ ID NO: 2218362 - DNA, 25 bp, Homo sapien
cctggctaaggaggataaggaggaa

SEQ ID NO: 2218363 - DNA, 25 bp, Homo sapien
tcaaaggccctggaacttgtcgttg

SEQ ID NO: 2218364 - DNA, 25 bp, Homo sapien
ctggaacttgtcgttgaagaactgc

SEQ ID NO: 2218365 - DNA, 25 bp, Homo sapien
ggaacttgtcgttgaagaactgcat

SEQ ID NO: 2218366 - DNA, 25 bp, Homo sapien
ggccctggaacttgtcgttgaagaa

SEQ ID NO: 2218367 - DNA, 25 bp, Homo sapien
tagctgctgtgtaaggtcctcaatt

SEQ ID NO: 2218368 - DNA, 25 bp, Homo sapien
ctagctgctgtgtaaggtcctcaat

SEQ ID NO: 2218369 - DNA, 25 bp, Homo sapien
agctgctgtgtaaggtcctcaattt

SEQ ID NO: 2218370 - DNA, 25 bp, Homo sapien
gctgctgtgtaaggtcctcaatttc

SEQ ID NO: 2218371 - DNA, 25 bp, Homo sapien
aaccagcgcgccctttgttggcaga

SEQ ID NO: 2218372 - DNA, 25 bp, Homo sapien
tggcttctgcgcgtgcacttgacgc

SEQ ID NO: 2218373 - DNA, 25 bp, Homo sapien
caggaacagtgaggccttcgggaca

SEQ ID NO: 2218374 - DNA, 25 bp, Homo sapien
cagtgccgcgacttctcattggtcc

SEQ ID NO: 2218375 - DNA, 25 bp, Homo sapien
tctctgaaggaagccaaatgcacat

SEQ ID NO: 2218376 - DNA, 25 bp, Homo sapien
cacctttagagaatcgcagtccgag

SEQ ID NO: 2218377 - DNA, 25 bp, Homo sapien
agaagcccgccatctgacaaacagt

SEQ ID NO: 2218378 - DNA, 25 bp, Homo sapien
caaacagttgtaaggtgatcaagcc

SEQ ID NO: 2218379 - DNA, 25 bp, Homo sapien
tggcatgtagtgtcacgaacccggc

SEQ ID NO: 2218380 - DNA, 25 bp, Homo sapien
ggtcccatagtatccctcatagctg

SEQ ID NO: 2218381 - DNA, 25 bp, Homo sapien
gaaacattctccgattgtccccatg

SEQ ID NO: 2218382 - DNA, 25 bp, Homo sapien
cctggagttcattcgtggaaagcct

SEQ ID NO: 2218383 - DNA, 25 bp, Homo sapien
tcagtgcacgacatcagcagattct

SEQ ID NO: 2218384 - DNA, 25 bp, Homo sapien
caaactgtgacttctaatgctggag

SEQ ID NO: 2218385 - DNA, 25 bp, Homo sapien
tgatcagcccgccttaaagtgtgct

SEQ ID NO: 2218386 - DNA, 25 bp, Homo sapien
cagattaccccattgtgaaagtgcc

SEQ ID NO: 2218387 - DNA, 25 bp, Homo sapien
tccatggaataataggcgcgaatct

SEQ ID NO: 2218388 - DNA, 25 bp, Homo sapien
tgacaggcaacactaacctaccttg

SEQ ID NO: 2218389 - DNA, 25 bp, Homo sapien
gcaagggacaacacggacatgctta

SEQ ID NO: 2218390 - DNA, 25 bp, Homo sapien
tccatgggacggaatgaatacattg

SEQ ID NO: 2218391 - DNA, 25 bp, Homo sapien
ttctcaggggcagacgacttaggac

SEQ ID NO: 2218392 - DNA, 25 bp, Homo sapien
tttttctcacgggagatttgtcacc

SEQ ID NO: 2218393 - DNA, 25 bp, Homo sapien
tgtgattatgtgttggaacaccatg

SEQ ID NO: 2218394 - DNA, 25 bp, Homo sapien
ccatgcacttggtacatttttctca

SEQ ID NO: 2218395 - DNA, 25 bp, Homo sapien
acatgcggccaacaatcctgtgaaa

SEQ ID NO: 2218396 - DNA, 25 bp, Homo sapien
tcatcgctgagcatatacccaaagg

SEQ ID NO: 2218397 - DNA, 25 bp, Homo sapien
gaataatggatactggcgaggttgc

SEQ ID NO: 2218398 - DNA, 25 bp, Homo sapien
cagcaatctcatcgctgagcatata

SEQ ID NO: 2218399 - DNA, 25 bp, Homo sapien
tttcagggcccatcgcagagcttat

SEQ ID NO: 2218400 - DNA, 25 bp, Homo sapien
cacgtggagaagctgagtagacaaa

SEQ ID NO: 2218401 - DNA, 25 bp, Homo sapien
catatgagagtcatcgtagtatcga

SEQ ID NO: 2218402 - DNA, 25 bp, Homo sapien
atctgtccgccaagtattcattgaa

SEQ ID NO: 2218403 - DNA, 25 bp, Homo sapien
aaggtaagcttccatgattcttccc

SEQ ID NO: 2218404 - DNA, 25 bp, Homo sapien
gcaaggtaagcttccatgattcttc

SEQ ID NO: 2218405 - DNA, 25 bp, Homo sapien
tgcaaggtaagcttccatgattctt

SEQ ID NO: 2218406 - DNA, 25 bp, Homo sapien
caaggtaagcttccatgattcttcc

SEQ ID NO: 2218407 - DNA, 25 bp, Homo sapien
tactcaccatgtgaaagaacccgtt

SEQ ID NO: 2218408 - DNA, 25 bp, Homo sapien
taatgtttcgatggacaagcatgca

SEQ ID NO: 2218409 - DNA, 25 bp, Homo sapien
tgcgtggtacaaatcaggactgtgt

SEQ ID NO: 2218410 - DNA, 25 bp, Homo sapien
caaagagagggtatggttgccaccg

SEQ ID NO: 2218411 - DNA, 25 bp, Homo sapien
cagtaagattagtggtaatagtaga

SEQ ID NO: 2218412 - DNA, 25 bp, Homo sapien
ttatcgccagtccctactcggacgg

SEQ ID NO: 2218413 - DNA, 25 bp, Homo sapien
cggacggcatataggaagatcaggc

SEQ ID NO: 2218414 - DNA, 25 bp, Homo sapien
agacctcagtaagattagtggtaat

SEQ ID NO: 2218415 - DNA, 25 bp, Homo sapien
tggttctccaacgactggtcctgtt

SEQ ID NO: 2218416 - DNA, 25 bp, Homo sapien
ccagatatgtaagaaaccgattgtc

SEQ ID NO: 2218417 - DNA, 25 bp, Homo sapien
cacggcggcaagctggatagatgct

SEQ ID NO: 2218418 - DNA, 25 bp, Homo sapien
gctggatagatgcttgttgattcaa

SEQ ID NO: 2218419 - DNA, 25 bp, Homo sapien
gattccccgaaaagtaatgagctct

SEQ ID NO: 2218420 - DNA, 25 bp, Homo sapien
tccccgaaaagtaatgagctctcct

SEQ ID NO: 2218421 - DNA, 25 bp, Homo sapien
caggattccccgaaaagtaatgagc

SEQ ID NO: 2218422 - DNA, 25 bp, Homo sapien
cccgaaaagtaatgagctctcctcc

SEQ ID NO: 2218423 - DNA, 25 bp, Homo sapien
ggctttcagctccatgagctacttt

SEQ ID NO: 2218424 - DNA, 25 bp, Homo sapien
ttggctttcagctccatgagctact

SEQ ID NO: 2218425 - DNA, 25 bp, Homo sapien
ccttggctttcagctccatgagcta

SEQ ID NO: 2218426 - DNA, 25 bp, Homo sapien
cttggctttcagctccatgagctac

SEQ ID NO: 2218427 - DNA, 25 bp, Homo sapien
caaagccgggggcatcaacctacct

SEQ ID NO: 2218428 - DNA, 25 bp, Homo sapien
gaacaaagccgggggcatcaaccta

SEQ ID NO: 2218429 - DNA, 25 bp, Homo sapien
aagccgggggcatcaacctacctga

SEQ ID NO: 2218430 - DNA, 25 bp, Homo sapien
ccgggggcatcaacctacctgactt

SEQ ID NO: 2218431 - DNA, 25 bp, Homo sapien
ggaggaacttcgtcggccctctcca

SEQ ID NO: 2218432 - DNA, 25 bp, Homo sapien
gaaatggcagcggaggaacttcgtc

SEQ ID NO: 2218433 - DNA, 25 bp, Homo sapien
tccgctgacattggggcagacctgg

SEQ ID NO: 2218434 - DNA, 25 bp, Homo sapien
ggcatcactgccaaagggtccgctg

SEQ ID NO: 2218435 - DNA, 25 bp, Homo sapien
agacacttgcagacgccccagtttc

SEQ ID NO: 2218436 - DNA, 25 bp, Homo sapien
ttttcaccaaagaaggaatccaggc

SEQ ID NO: 2218437 - DNA, 25 bp, Homo sapien
gagagttaccttcaggttcagggac

SEQ ID NO: 2218438 - DNA, 25 bp, Homo sapien
ccccagtttccaccgcagggagagt

SEQ ID NO: 2218439 - DNA, 25 bp, Homo sapien
ctcctggggaagtctgcgagaccca

SEQ ID NO: 2218440 - DNA, 25 bp, Homo sapien
cctggggaagtctgcgagacccaag

SEQ ID NO: 2218441 - DNA, 25 bp, Homo sapien
tggggaagtctgcgagacccaagga

SEQ ID NO: 2218442 - DNA, 25 bp, Homo sapien
gctcctggggaagtctgcgagaccc

SEQ ID NO: 2218443 - DNA, 25 bp, Homo sapien
ctgcagaccatgggggctgtaaggt

SEQ ID NO: 2218444 - DNA, 25 bp, Homo sapien
gctgcagaccatgggggctgtaagg

SEQ ID NO: 2218445 - DNA, 25 bp, Homo sapien
gggttccttccgtatcctcttcagc

SEQ ID NO: 2218446 - DNA, 25 bp, Homo sapien
gagctgcagccaaacgggttccttc

SEQ ID NO: 2218447 - DNA, 25 bp, Homo sapien
aagcagtttccaataaagtcgttct

SEQ ID NO: 2218448 - DNA, 25 bp, Homo sapien
agcagtttccaataaagtcgttctc

SEQ ID NO: 2218449 - DNA, 25 bp, Homo sapien
ggagccattatgtccctctggtgcc

SEQ ID NO: 2218450 - DNA, 25 bp, Homo sapien
tcatcctacccctcgggagctcagt

SEQ ID NO: 2218451 - DNA, 25 bp, Homo sapien
tgcacacggtcaggtcatctgggcc

SEQ ID NO: 2218452 - DNA, 25 bp, Homo sapien
gcatgacagagctcatcctacccct

SEQ ID NO: 2218453 - DNA, 25 bp, Homo sapien
tatgaaagacgtgggcagtaaatat

SEQ ID NO: 2218454 - DNA, 25 bp, Homo sapien
ttatgaaagacgtgggcagtaaata

SEQ ID NO: 2218455 - DNA, 25 bp, Homo sapien
cttatgaaagacgtgggcagtaaat

SEQ ID NO: 2218456 - DNA, 25 bp, Homo sapien
cgcagctcggcagacctctggagcc

SEQ ID NO: 2218457 - DNA, 25 bp, Homo sapien
gcagctcggcagacctctggagccc

SEQ ID NO: 2218458 - DNA, 25 bp, Homo sapien
acgcagctcggcagacctctggagc

SEQ ID NO: 2218459 - DNA, 25 bp, Homo sapien
gagggtgcatggcgtctgggcacga

SEQ ID NO: 2218460 - DNA, 25 bp, Homo sapien
ggtgcatggcgtctgggcacgaggc

SEQ ID NO: 2218461 - DNA, 25 bp, Homo sapien
tgcatggcgtctgggcacgaggcct

SEQ ID NO: 2218462 - DNA, 25 bp, Homo sapien
agggtgcatggcgtctgggcacgag

SEQ ID NO: 2218463 - DNA, 25 bp, Homo sapien
tcttggacatcccctgcggccgcac

SEQ ID NO: 2218464 - DNA, 25 bp, Homo sapien
ttggacatcccctgcggccgcacac

SEQ ID NO: 2218465 - DNA, 25 bp, Homo sapien
cttggacatcccctgcggccgcaca

SEQ ID NO: 2218466 - DNA, 25 bp, Homo sapien
ctctctactactggagcgagtccgg

SEQ ID NO: 2218467 - DNA, 25 bp, Homo sapien
tcatctggggaatcagagtcgtgcc

SEQ ID NO: 2218468 - DNA, 25 bp, Homo sapien
gcccaccctcatcagcggtaagtcg

SEQ ID NO: 2218469 - DNA, 25 bp, Homo sapien
gtggccgctcaacctgctcttcgag

SEQ ID NO: 2218470 - DNA, 25 bp, Homo sapien
tcgggatctgttgcccgctgttgcc

SEQ ID NO: 2218471 - DNA, 25 bp, Homo sapien
tcgactgcggtgtcagaccggcctt

SEQ ID NO: 2218472 - DNA, 25 bp, Homo sapien
cacgatgacagctggcttgtcagcc

SEQ ID NO: 2218473 - DNA, 25 bp, Homo sapien
tctgaggacttgtgtccctggacgc

SEQ ID NO: 2218474 - DNA, 25 bp, Homo sapien
gcctgcgttccacactaagaggtag

SEQ ID NO: 2218475 - DNA, 25 bp, Homo sapien
tgcgttccacactaagaggtagcac

SEQ ID NO: 2218476 - DNA, 25 bp, Homo sapien
cctgcgttccacactaagaggtagc

SEQ ID NO: 2218477 - DNA, 25 bp, Homo sapien
ctgcgttccacactaagaggtagca

SEQ ID NO: 2218478 - DNA, 25 bp, Homo sapien
agatatcttgcattctcatcaggaa

SEQ ID NO: 2218479 - DNA, 25 bp, Homo sapien
gagatatcttgcattctcatcagga

SEQ ID NO: 2218480 - DNA, 25 bp, Homo sapien
caaacatatggaatgcttcgcaaat

SEQ ID NO: 2218481 - DNA, 25 bp, Homo sapien
ttgcatgtcatccttgcacagaggc

SEQ ID NO: 2218482 - DNA, 25 bp, Homo sapien
agtatatgtgctactgaagcaaaca

SEQ ID NO: 2218483 - DNA, 25 bp, Homo sapien
catgctaatcttctctgtattgttt

SEQ ID NO: 2218484 - DNA, 25 bp, Homo sapien
tttacatagcccagcacaagtggtg

SEQ ID NO: 2218485 - DNA, 25 bp, Homo sapien
tgtctttacatagcccagcacaagt

SEQ ID NO: 2218486 - DNA, 25 bp, Homo sapien
catagcccagcacaagtggtgccca

SEQ ID NO: 2218487 - DNA, 25 bp, Homo sapien
aaataattgtctttacatagcccag

SEQ ID NO: 2218488 - DNA, 25 bp, Homo sapien
tgggtcaaagtggaagcactgatga

SEQ ID NO: 2218489 - DNA, 25 bp, Homo sapien
ctgggtcaaagtggaagcactgatg

SEQ ID NO: 2218490 - DNA, 25 bp, Homo sapien
gggtcaaagtggaagcactgatgac

SEQ ID NO: 2218491 - DNA, 25 bp, Homo sapien
gcagaaaggatgcttcgttcttcct

SEQ ID NO: 2218492 - DNA, 25 bp, Homo sapien
gttggagcaatgagacaggcagaaa

SEQ ID NO: 2218493 - DNA, 25 bp, Homo sapien
ccatggttggagcaatgagacaggc

SEQ ID NO: 2218494 - DNA, 25 bp, Homo sapien
agacaggcagaaaggatgcttcgtt

SEQ ID NO: 2218495 - DNA, 25 bp, Homo sapien
gatctgtgataggatgagtctcgcc

SEQ ID NO: 2218496 - DNA, 25 bp, Homo sapien
tcaagattcagacactgggcagagt

SEQ ID NO: 2218497 - DNA, 25 bp, Homo sapien
caaaatgaatctgcctaaggaccca

SEQ ID NO: 2218498 - DNA, 25 bp, Homo sapien
ccaagcttttgagcagggatgtcct

SEQ ID NO: 2218499 - DNA, 25 bp, Homo sapien
tggaatgagtaggtacgtggtctgg

SEQ ID NO: 2218500 - DNA, 25 bp, Homo sapien
aatgagtaggtacgtggtctggaca

SEQ ID NO: 2218501 - DNA, 25 bp, Homo sapien
aagtggctggaatgagtaggtacgt

SEQ ID NO: 2218502 - DNA, 25 bp, Homo sapien
tggctggaatgagtaggtacgtggt

SEQ ID NO: 2218503 - DNA, 25 bp, Homo sapien
tcagggaaaatgacttaatgctact

SEQ ID NO: 2218504 - DNA, 25 bp, Homo sapien
ttggatgactacaagcaaggctttt

SEQ ID NO: 2218505 - DNA, 25 bp, Homo sapien
gactacaagcaaggcttttagcttt

SEQ ID NO: 2218506 - DNA, 25 bp, Homo sapien
gggaaaatgacttaatgctactcag

SEQ ID NO: 2218507 - DNA, 25 bp, Homo sapien
tcgtgaagcctgcaaggaccgaaca

SEQ ID NO: 2218508 - DNA, 25 bp, Homo sapien
ggaatcgatctcgtgaagcctgcaa

SEQ ID NO: 2218509 - DNA, 25 bp, Homo sapien
cgatctcgtgaagcctgcaaggacc

SEQ ID NO: 2218510 - DNA, 25 bp, Homo sapien
aatcgatctcgtgaagcctgcaagg

SEQ ID NO: 2218511 - DNA, 25 bp, Homo sapien
tcaggcttcttggactttactcgac

SEQ ID NO: 2218512 - DNA, 25 bp, Homo sapien
ttcaggcttcttggactttactcga

SEQ ID NO: 2218513 - DNA, 25 bp, Homo sapien
aaaagcgtgtgcctccctgtctgaa

SEQ ID NO: 2218514 - DNA, 25 bp, Homo sapien
gcctccctgtctgaagcagtcgaaa

SEQ ID NO: 2218515 - DNA, 25 bp, Homo sapien
cctgtctgaagcagtcgaaatgttc

SEQ ID NO: 2218516 - DNA, 25 bp, Homo sapien
ggaaggtagaaaagcgtgtgcctcc

SEQ ID NO: 2218517 - DNA, 25 bp, Homo sapien
gatccagggcaaagtggactggcag

SEQ ID NO: 2218518 - DNA, 25 bp, Homo sapien
tccagggcaaagtggactggcaggg

SEQ ID NO: 2218519 - DNA, 25 bp, Homo sapien
atccagggcaaagtggactggcagg

SEQ ID NO: 2218520 - DNA, 25 bp, Homo sapien
tcaggaagtctttggttcctccaga

SEQ ID NO: 2218521 - DNA, 25 bp, Homo sapien
caggaagtctttggttcctccagat

SEQ ID NO: 2218522 - DNA, 25 bp, Homo sapien
attcttccacttgcgggtctctctc

SEQ ID NO: 2218523 - DNA, 25 bp, Homo sapien
gaagtctttggttcctccagattct

SEQ ID NO: 2218524 - DNA, 25 bp, Homo sapien
gtgagaagcaccatgggaacaggca

SEQ ID NO: 2218525 - DNA, 25 bp, Homo sapien
cagggccagagtgttgaccatcagc

SEQ ID NO: 2218526 - DNA, 25 bp, Homo sapien
gaagaatagcaggtcccctcgaaga

SEQ ID NO: 2218527 - DNA, 25 bp, Homo sapien
tctggaatgcactcttgaggaaatc

SEQ ID NO: 2218528 - DNA, 25 bp, Homo sapien
aaagttgtttactcctgccctggtg

SEQ ID NO: 2218529 - DNA, 25 bp, Homo sapien
caaagttgtttactcctgccctggt

SEQ ID NO: 2218530 - DNA, 25 bp, Homo sapien
aagttgtttactcctgccctggtgg

SEQ ID NO: 2218531 - DNA, 25 bp, Homo sapien
cagtatgcatgactgcacaggtggc

SEQ ID NO: 2218532 - DNA, 25 bp, Homo sapien
tgacaagacatagcaagaacacact

SEQ ID NO: 2218533 - DNA, 25 bp, Homo sapien
caaaagcgctaatgaaaagggcatc

SEQ ID NO: 2218534 - DNA, 25 bp, Homo sapien
caagaactggcagggtgatctcagc

SEQ ID NO: 2218535 - DNA, 25 bp, Homo sapien
taaggtccgcctgagattatcggtc

SEQ ID NO: 2218536 - DNA, 25 bp, Homo sapien
tctgtcccagaaggaatggccaatc

SEQ ID NO: 2218537 - DNA, 25 bp, Homo sapien
tatcggtcagactcccatgaggaac

SEQ ID NO: 2218538 - DNA, 25 bp, Homo sapien
tgtggcaagtcagtccaagagccct

SEQ ID NO: 2218539 - DNA, 25 bp, Homo sapien
gattctggttcctccgtctgctagg

SEQ ID NO: 2218540 - DNA, 25 bp, Homo sapien
tgcacccaggaagttttcggcgtgg

SEQ ID NO: 2218541 - DNA, 25 bp, Homo sapien
caaactcgaattcggccacgagcag

SEQ ID NO: 2218542 - DNA, 25 bp, Homo sapien
gttgtcctaaacgacctgtgcggcg

SEQ ID NO: 2218543 - DNA, 25 bp, Homo sapien
tgacgcgtgaacaaaggtcggctcc

SEQ ID NO: 2218544 - DNA, 25 bp, Homo sapien
acgcgtgaacaaaggtcggctccat

SEQ ID NO: 2218545 - DNA, 25 bp, Homo sapien
ctgggatgacgcgtgaacaaaggtc

SEQ ID NO: 2218546 - DNA, 25 bp, Homo sapien
gatgacgcgtgaacaaaggtcggct

SEQ ID NO: 2218547 - DNA, 25 bp, Homo sapien
cacctcaccataggtctcctcagtc

SEQ ID NO: 2218548 - DNA, 25 bp, Homo sapien
cctccacctcaccataggtctcctc

SEQ ID NO: 2218549 - DNA, 25 bp, Homo sapien
taggtcatcatcttgggcctcatcc

SEQ ID NO: 2218550 - DNA, 25 bp, Homo sapien
tctaggtcatcatcttgggcctcat

SEQ ID NO: 2218551 - DNA, 25 bp, Homo sapien
gtgcctgcgtgcctcttggtcttca

SEQ ID NO: 2218552 - DNA, 25 bp, Homo sapien
tctcttgctgaaaagccctcatgcg

SEQ ID NO: 2218553 - DNA, 25 bp, Homo sapien
gctgaaaagccctcatgcgcttcct

SEQ ID NO: 2218554 - DNA, 25 bp, Homo sapien
tccttggagtgaagcctgtgcctgc

SEQ ID NO: 2218555 - DNA, 25 bp, Homo sapien
cctcattgggactcggagcaaaagg

SEQ ID NO: 2218556 - DNA, 25 bp, Homo sapien
tccagggagcgggataggcttggga

SEQ ID NO: 2218557 - DNA, 25 bp, Homo sapien
gcgggataggcttgggaacgcgcac

SEQ ID NO: 2218558 - DNA, 25 bp, Homo sapien
aagatgatatttcgaactccaggga

SEQ ID NO: 2218559 - DNA, 25 bp, Homo sapien
tccttcctgggtgaccgagatggcc

SEQ ID NO: 2218560 - DNA, 25 bp, Homo sapien
tttcatccaggaagcgcgggaagtt

SEQ ID NO: 2218561 - DNA, 25 bp, Homo sapien
ccctgcttgagcttgcgaatggcct

SEQ ID NO: 2218562 - DNA, 25 bp, Homo sapien
gaagaattccgacaggcctttgagg

SEQ ID NO: 2218563 - DNA, 25 bp, Homo sapien
gaggccggcacaagaagggcagttc

SEQ ID NO: 2218564 - DNA, 25 bp, Homo sapien
ctggatcacgttaatcaaaagatca

SEQ ID NO: 2218565 - DNA, 25 bp, Homo sapien
aatgacttcgatctcactgagcgcg

SEQ ID NO: 2218566 - DNA, 25 bp, Homo sapien
tcatccgagatacagtcgggctccg

SEQ ID NO: 2218567 - DNA, 25 bp, Homo sapien
catttaattcttcgcgcagggccac

SEQ ID NO: 2218568 - DNA, 25 bp, Homo sapien
gatgtagctggagacattgccccgc

SEQ ID NO: 2218569 - DNA, 25 bp, Homo sapien
cgcaaggacgggcactatgggtact

SEQ ID NO: 2218570 - DNA, 25 bp, Homo sapien
caaggaattaacctcggccagggct

SEQ ID NO: 2218571 - DNA, 25 bp, Homo sapien
ccggaggaggccgaaatgcggcggc

SEQ ID NO: 2218572 - DNA, 25 bp, Homo sapien
ggatgcgggcgacacggtggcggcg

SEQ ID NO: 2218573 - DNA, 25 bp, Homo sapien
tcgggagggaccgaagtgcggcagc

SEQ ID NO: 2218574 - DNA, 25 bp, Homo sapien
ggcgagctcggagggcggcgctctg

SEQ ID NO: 2218575 - DNA, 25 bp, Homo sapien
cactcgaggtcgtcatggcgacagc

SEQ ID NO: 2218576 - DNA, 25 bp, Homo sapien
gcgacagccagtgaacgtgttcctc

SEQ ID NO: 2218577 - DNA, 25 bp, Homo sapien
cagagcctgttgcaaggtaccgaga

SEQ ID NO: 2218578 - DNA, 25 bp, Homo sapien
ctagctgcagctaactcgggtcggg

SEQ ID NO: 2218579 - DNA, 25 bp, Homo sapien
cattggccagtcctagtatgcagtc

SEQ ID NO: 2218580 - DNA, 25 bp, Homo sapien
taagttagcccttaccatttagtgc

SEQ ID NO: 2218581 - DNA, 25 bp, Homo sapien
tggaaggtacaggaaagacacatct

SEQ ID NO: 2218582 - DNA, 25 bp, Homo sapien
gacaagaatttacagaccataccct

SEQ ID NO: 2218583 - DNA, 25 bp, Homo sapien
gagcagggacaccttatgcttgagg

SEQ ID NO: 2218584 - DNA, 25 bp, Homo sapien
tatgataggaggatagcaacaccag

SEQ ID NO: 2218585 - DNA, 25 bp, Homo sapien
tacctagtactatgcaattggcaca

SEQ ID NO: 2218586 - DNA, 25 bp, Homo sapien
taggtgcagccttaagccatggttg

SEQ ID NO: 2218587 - DNA, 25 bp, Homo sapien
gagtaaaattaagaatgaccagaat

SEQ ID NO: 2218588 - DNA, 25 bp, Homo sapien
aaaattccctcatattcagtttcac

SEQ ID NO: 2218589 - DNA, 25 bp, Homo sapien
taagctagtgctcagaataccagac

SEQ ID NO: 2218590 - DNA, 25 bp, Homo sapien
taagcctgaatgcttcatgttccca

SEQ ID NO: 2218591 - DNA, 25 bp, Homo sapien
tagggcctcctggatttttccacac

SEQ ID NO: 2218592 - DNA, 25 bp, Homo sapien
tccacgctttacaagagtctcatag

SEQ ID NO: 2218593 - DNA, 25 bp, Homo sapien
tcaagagcataacttcaggatctgc

SEQ ID NO: 2218594 - DNA, 25 bp, Homo sapien
gtctcatagtcatttgtagcctctg

SEQ ID NO: 2218595 - DNA, 25 bp, Homo sapien
tgtatacttggaggcttcgccactg

SEQ ID NO: 2218596 - DNA, 25 bp, Homo sapien
agacagtgtttctccggaaggatcc

SEQ ID NO: 2218597 - DNA, 25 bp, Homo sapien
caactgttcaccagacaaaggctca

SEQ ID NO: 2218598 - DNA, 25 bp, Homo sapien
ggcttagacgtcattaaccagctgg

SEQ ID NO: 2218599 - DNA, 25 bp, Homo sapien
gagacctcctagaagccagagatct

SEQ ID NO: 2218600 - DNA, 25 bp, Homo sapien
catattaataagagacctcctagaa

SEQ ID NO: 2218601 - DNA, 25 bp, Homo sapien
catgtcctccacgtggtctaaaacc

SEQ ID NO: 2218602 - DNA, 25 bp, Homo sapien
tgcttcactgctgtcgtcaagtctt

SEQ ID NO: 2218603 - DNA, 25 bp, Homo sapien
tgttttgctatgcacaaaccctgct

SEQ ID NO: 2218604 - DNA, 25 bp, Homo sapien
gctctaaagactgactggaaaaatt

SEQ ID NO: 2218605 - DNA, 25 bp, Homo sapien
tcgccatctgaaacaatccttctag

SEQ ID NO: 2218606 - DNA, 25 bp, Homo sapien
ggtgcagagccacacaagctatttt

SEQ ID NO: 2218607 - DNA, 25 bp, Homo sapien
taatgggccaaggattgcaatgacg

SEQ ID NO: 2218608 - DNA, 25 bp, Homo sapien
aaatttggcccaatatcagctttgg

SEQ ID NO: 2218609 - DNA, 25 bp, Homo sapien
tgcagtgcactatgggatgctgaaa

SEQ ID NO: 2218610 - DNA, 25 bp, Homo sapien
ttccagaggatcctcttgcagtgcc

SEQ ID NO: 2218611 - DNA, 25 bp, Homo sapien
ggtaaagtagctatagagtcagcac

SEQ ID NO: 2218612 - DNA, 25 bp, Homo sapien
tcccaatgaagagttagtacaaagt

SEQ ID NO: 2218613 - DNA, 25 bp, Homo sapien
tctttgggcagatcatcaatgacta

SEQ ID NO: 2218614 - DNA, 25 bp, Homo sapien
tcacctttatactggagagatcttg

SEQ ID NO: 2218615 - DNA, 25 bp, Homo sapien
tcgaattcaacgaggaattgagctt

SEQ ID NO: 2218616 - DNA, 25 bp, Homo sapien
gaattcaacgaggaattgagctttc

SEQ ID NO: 2218617 - DNA, 25 bp, Homo sapien
caacgaggaattgagctttctgaac

SEQ ID NO: 2218618 - DNA, 25 bp, Homo sapien
attcaacgaggaattgagctttctg

SEQ ID NO: 2218619 - DNA, 25 bp, Homo sapien
tacttgcaggaatagcacgagcaca

SEQ ID NO: 2218620 - DNA, 25 bp, Homo sapien
aaaggtgagcgcgtctccattagca

SEQ ID NO: 2218621 - DNA, 25 bp, Homo sapien
gagtaactgtcccatcgattcgcaa

SEQ ID NO: 2218622 - DNA, 25 bp, Homo sapien
gacagcagcctaggatgatcacaca

SEQ ID NO: 2218623 - DNA, 25 bp, Homo sapien
atgatcaggccactgaattccagtc

SEQ ID NO: 2218624 - DNA, 25 bp, Homo sapien
tatgatcaggccactgaattccagt

SEQ ID NO: 2218625 - DNA, 25 bp, Homo sapien
actatgatcaggccactgaattcca

SEQ ID NO: 2218626 - DNA, 25 bp, Homo sapien
tgaactatgatcaggccactgaatt

SEQ ID NO: 2218627 - DNA, 25 bp, Homo sapien
tgaccctcggattgggttccagtta

SEQ ID NO: 2218628 - DNA, 25 bp, Homo sapien
gcctgctctgggctcaaggcctcgg

SEQ ID NO: 2218629 - DNA, 25 bp, Homo sapien
ggagcttgaatttcgctcactcccg

SEQ ID NO: 2218630 - DNA, 25 bp, Homo sapien
tccggaaaccttcgggatgcctcca

SEQ ID NO: 2218631 - DNA, 25 bp, Homo sapien
tctggaaactccaacgttcttctgg

SEQ ID NO: 2218632 - DNA, 25 bp, Homo sapien
tcttgtagtgaagtggctcacagac

SEQ ID NO: 2218633 - DNA, 25 bp, Homo sapien
gaaggctcagtcctcctaatttggt

SEQ ID NO: 2218634 - DNA, 25 bp, Homo sapien
caccgggaatgcaaaggcgaagact

SEQ ID NO: 2218635 - DNA, 25 bp, Homo sapien
ataagcccaatttttcagggtcgtg

SEQ ID NO: 2218636 - DNA, 25 bp, Homo sapien
aacagagttgaggactgcagcggca

SEQ ID NO: 2218637 - DNA, 25 bp, Homo sapien
cagctggagaataagggcactaagt

SEQ ID NO: 2218638 - DNA, 25 bp, Homo sapien
ctgaaaaacagagttgaggactgca

SEQ ID NO: 2218639 - DNA, 25 bp, Homo sapien
gcactaagtccaaggaactgcaatg

SEQ ID NO: 2218640 - DNA, 25 bp, Homo sapien
aacagactgcctaagcctgcctgag

SEQ ID NO: 2218641 - DNA, 25 bp, Homo sapien
gatgggctagtgcaatacagactgg

SEQ ID NO: 2218642 - DNA, 25 bp, Homo sapien
ccaagggaacttaacagggcagagg

SEQ ID NO: 2218643 - DNA, 25 bp, Homo sapien
tcatcctgcgtttggcaagatgggc

SEQ ID NO: 2218644 - DNA, 25 bp, Homo sapien
aagatctgacatgtcacccagggac

SEQ ID NO: 2218645 - DNA, 25 bp, Homo sapien
gatctgacatgtcacccagggaccc

SEQ ID NO: 2218646 - DNA, 25 bp, Homo sapien
tctgacatgtcacccagggacccat

SEQ ID NO: 2218647 - DNA, 25 bp, Homo sapien
aaagatctgacatgtcacccaggga

SEQ ID NO: 2218648 - DNA, 25 bp, Homo sapien
tggtgaggcggataccctttcctcg

SEQ ID NO: 2218649 - DNA, 25 bp, Homo sapien
gtttggccgccagtcttttgtctct

SEQ ID NO: 2218650 - DNA, 25 bp, Homo sapien
ctttcctcggggaagagaaatccat

SEQ ID NO: 2218651 - DNA, 25 bp, Homo sapien
ctctgtttggccgccagtcttttgt

SEQ ID NO: 2218652 - DNA, 25 bp, Homo sapien
gatgctggttaccaaaagcacccac

SEQ ID NO: 2218653 - DNA, 25 bp, Homo sapien
catcagctaggcagttgcaagacac

SEQ ID NO: 2218654 - DNA, 25 bp, Homo sapien
ccaactcatagtggcttggcacatg

SEQ ID NO: 2218655 - DNA, 25 bp, Homo sapien
gaaactcaccgtatgcccttcagaa

SEQ ID NO: 2218656 - DNA, 25 bp, Homo sapien
tggaaagtcgagtggcaaagctgtt

SEQ ID NO: 2218657 - DNA, 25 bp, Homo sapien
tgttggaaagtcgagtggcaaagct

SEQ ID NO: 2218658 - DNA, 25 bp, Homo sapien
aaaaatgttggaaagtcgagtggca

SEQ ID NO: 2218659 - DNA, 25 bp, Homo sapien
aatgttggaaagtcgagtggcaaag

SEQ ID NO: 2218660 - DNA, 25 bp, Homo sapien
ctttcacgtgaaccacgtcaaaaga

SEQ ID NO: 2218661 - DNA, 25 bp, Homo sapien
ggtgatcacaccaattcttcctagg

SEQ ID NO: 2218662 - DNA, 25 bp, Homo sapien
cacgtgaaccacgtcaaaagatcca

SEQ ID NO: 2218663 - DNA, 25 bp, Homo sapien
ccaattcttcctaggttagcacctc

SEQ ID NO: 2218664 - DNA, 25 bp, Homo sapien
taatctgcttcaactcaatataaca

SEQ ID NO: 2218665 - DNA, 25 bp, Homo sapien
cagctcagagatgggtccaaacaaa

SEQ ID NO: 2218666 - DNA, 25 bp, Homo sapien
cagagatgggtccaaacaaatttta

SEQ ID NO: 2218667 - DNA, 25 bp, Homo sapien
aagaaataatctgcttcaactcaat

SEQ ID NO: 2218668 - DNA, 25 bp, Homo sapien
ggtagcggatggtgcgggcatcatg

SEQ ID NO: 2218669 - DNA, 25 bp, Homo sapien
gggatcggggtagcggatggtgcgg

SEQ ID NO: 2218670 - DNA, 25 bp, Homo sapien
atcggggtagcggatggtgcgggca

SEQ ID NO: 2218671 - DNA, 25 bp, Homo sapien
ggggtagcggatggtgcgggcatca

SEQ ID NO: 2218672 - DNA, 25 bp, Homo sapien
gccctccagtctgctgttaacaagg

SEQ ID NO: 2218673 - DNA, 25 bp, Homo sapien
aactgctgcagattaattgtgacgc

SEQ ID NO: 2218674 - DNA, 25 bp, Homo sapien
caagggttagccacattcaatccat

SEQ ID NO: 2218675 - DNA, 25 bp, Homo sapien
gtaaatgccactccagtttcccagg

SEQ ID NO: 2218676 - DNA, 25 bp, Homo sapien
tcccacaaatggagacatggcaaag

SEQ ID NO: 2218677 - DNA, 25 bp, Homo sapien
caggaagtcgcggttcaactggaat

SEQ ID NO: 2218678 - DNA, 25 bp, Homo sapien
cactcgtactcaatgcaggccctta

SEQ ID NO: 2218679 - DNA, 25 bp, Homo sapien
tggcaaagggctcctacgtcaggta

SEQ ID NO: 2218680 - DNA, 25 bp, Homo sapien
tagatcagacggaaattctctcccg

SEQ ID NO: 2218681 - DNA, 25 bp, Homo sapien
atcagacggaaattctctcccgtct

SEQ ID NO: 2218682 - DNA, 25 bp, Homo sapien
cagacggaaattctctcccgtcttg

SEQ ID NO: 2218683 - DNA, 25 bp, Homo sapien
gacggaaattctctcccgtcttgtc

SEQ ID NO: 2218684 - DNA, 25 bp, Homo sapien
ccatcgattttaatgaaccgctgca

SEQ ID NO: 2218685 - DNA, 25 bp, Homo sapien
agttcggaccttgccatcgatttta

SEQ ID NO: 2218686 - DNA, 25 bp, Homo sapien
atcagttcggaccttgccatcgatt

SEQ ID NO: 2218687 - DNA, 25 bp, Homo sapien
gccatcgattttaatgaaccgctgc

SEQ ID NO: 2218688 - DNA, 25 bp, Homo sapien
tcatctcctgtcagggcatacttaa

SEQ ID NO: 2218689 - DNA, 25 bp, Homo sapien
ggggaccggtggatggacgaggagc

SEQ ID NO: 2218690 - DNA, 25 bp, Homo sapien
acttgtggggaccggtggatggacg

SEQ ID NO: 2218691 - DNA, 25 bp, Homo sapien
cactctctcaacttgtggggaccgg

SEQ ID NO: 2218692 - DNA, 25 bp, Homo sapien
aacacaccggtcaatttatccagca

SEQ ID NO: 2218693 - DNA, 25 bp, Homo sapien
aaacacaccggtcaatttatccagc

SEQ ID NO: 2218694 - DNA, 25 bp, Homo sapien
acacaccggtcaatttatccagcat

SEQ ID NO: 2218695 - DNA, 25 bp, Homo sapien
atgctttggagctgccacccgcttc

SEQ ID NO: 2218696 - DNA, 25 bp, Homo sapien
gctgccacccgcttcagatgcttct

SEQ ID NO: 2218697 - DNA, 25 bp, Homo sapien
ctttggagctgccacccgcttcaga

SEQ ID NO: 2218698 - DNA, 25 bp, Homo sapien
ttggagctgccacccgcttcagatg

SEQ ID NO: 2218699 - DNA, 25 bp, Homo sapien
cctccgtcttccggtgcgcgtagaa

SEQ ID NO: 2218700 - DNA, 25 bp, Homo sapien
ccgtcttccggtgcgcgtagaaatt

SEQ ID NO: 2218701 - DNA, 25 bp, Homo sapien
gcgcgtagaaattggggctggagac

SEQ ID NO: 2218702 - DNA, 25 bp, Homo sapien
gctggagactgcgcgcgccggattt

SEQ ID NO: 2218703 - DNA, 25 bp, Homo sapien
gttctctttctgatcggcttgtgtg

SEQ ID NO: 2218704 - DNA, 25 bp, Homo sapien
ttctctttctgatcggcttgtgtgc

SEQ ID NO: 2218705 - DNA, 25 bp, Homo sapien
ctctttctgatcggcttgtgtgcat

SEQ ID NO: 2218706 - DNA, 25 bp, Homo sapien
catcatctgtattcatttgttcctc

SEQ ID NO: 2218707 - DNA, 25 bp, Homo sapien
ttgtgaatatcactgcactcggact

SEQ ID NO: 2218708 - DNA, 25 bp, Homo sapien
ttagttgtgaatatcactgcactcg

SEQ ID NO: 2218709 - DNA, 25 bp, Homo sapien
agttgtgaatatcactgcactcgga

SEQ ID NO: 2218710 - DNA, 25 bp, Homo sapien
tgaatatcactgcactcggactacc

SEQ ID NO: 2218711 - DNA, 25 bp, Homo sapien
cagaattggtggctttattcctcca

SEQ ID NO: 2218712 - DNA, 25 bp, Homo sapien
tacaacagaattggtggctttattc

SEQ ID NO: 2218713 - DNA, 25 bp, Homo sapien
gaattggtggctttattcctccatc

SEQ ID NO: 2218714 - DNA, 25 bp, Homo sapien
tatttacaacagaattggtggcttt

SEQ ID NO: 2218715 - DNA, 25 bp, Homo sapien
ggtccgaatcgatgatagcagggct

SEQ ID NO: 2218716 - DNA, 25 bp, Homo sapien
tcattggctcggtccaaccccagtt

SEQ ID NO: 2218717 - DNA, 25 bp, Homo sapien
gaaagtccgcagtgaagtcaaactc

SEQ ID NO: 2218718 - DNA, 25 bp, Homo sapien
cacagctccggaagctcattggctc

SEQ ID NO: 2218719 - DNA, 25 bp, Homo sapien
gagagagtgattctgcccctcccgc

SEQ ID NO: 2218720 - DNA, 25 bp, Homo sapien
ggagagagtgattctgcccctcccg

SEQ ID NO: 2218721 - DNA, 25 bp, Homo sapien
aggagagagtgattctgcccctccc

SEQ ID NO: 2218722 - DNA, 25 bp, Homo sapien
tggctattaagtttctgcaggtgca

SEQ ID NO: 2218723 - DNA, 25 bp, Homo sapien
tgcaggtgcatactagccagcaagt

SEQ ID NO: 2218724 - DNA, 25 bp, Homo sapien
tgtaggagagcctattggagatccc

SEQ ID NO: 2218725 - DNA, 25 bp, Homo sapien
tcccgaggaactagtgggagcccca

SEQ ID NO: 2218726 - DNA, 25 bp, Homo sapien
tttgcgatctttcaccgcaaggttg

SEQ ID NO: 2218727 - DNA, 25 bp, Homo sapien
taggccacggagctcatctcttggt

SEQ ID NO: 2218728 - DNA, 25 bp, Homo sapien
caccgcaaggttggagtaggccacg

SEQ ID NO: 2218729 - DNA, 25 bp, Homo sapien
cccagggtagtgcagaatggccact

SEQ ID NO: 2218730 - DNA, 25 bp, Homo sapien
ggtggagaggtagcaagacgacccc

SEQ ID NO: 2218731 - DNA, 25 bp, Homo sapien
gctcccacctcaagcatccttttgc

SEQ ID NO: 2218732 - DNA, 25 bp, Homo sapien
ccttgaaaattaggctcccacctca

SEQ ID NO: 2218733 - DNA, 25 bp, Homo sapien
gaggtagcaagacgacccccttgaa

SEQ ID NO: 2218734 - DNA, 25 bp, Homo sapien
tgacatcaagtgcaggcctcgacgt

SEQ ID NO: 2218735 - DNA, 25 bp, Homo sapien
tcaagtgcaggcctcgacgttgttg

SEQ ID NO: 2218736 - DNA, 25 bp, Homo sapien
gtgcaggcctcgacgttgttggcat

SEQ ID NO: 2218737 - DNA, 25 bp, Homo sapien
acatcaagtgcaggcctcgacgttg

SEQ ID NO: 2218738 - DNA, 25 bp, Homo sapien
gttggataaattggcgggaagtgat

SEQ ID NO: 2218739 - DNA, 25 bp, Homo sapien
ataaattggcgggaagtgatgctgc

SEQ ID NO: 2218740 - DNA, 25 bp, Homo sapien
agaagttggataaattggcgggaag

SEQ ID NO: 2218741 - DNA, 25 bp, Homo sapien
aaattggcgggaagtgatgctgcca

SEQ ID NO: 2218742 - DNA, 25 bp, Homo sapien
cccaaagcagggcaatgccacgcag

SEQ ID NO: 2218743 - DNA, 25 bp, Homo sapien
acaaagcactagcaaagcccaaagc

SEQ ID NO: 2218744 - DNA, 25 bp, Homo sapien
aaagcccaaagcagggcaatgccac

SEQ ID NO: 2218745 - DNA, 25 bp, Homo sapien
caacaaagcactagcaaagcccaaa

SEQ ID NO: 2218746 - DNA, 25 bp, Homo sapien
cagcacagggaaataacaagtctct

SEQ ID NO: 2218747 - DNA, 25 bp, Homo sapien
gcgcaaatgtcatggagctccaaag

SEQ ID NO: 2218748 - DNA, 25 bp, Homo sapien
tcagggcaaggaagacctagaaagc

SEQ ID NO: 2218749 - DNA, 25 bp, Homo sapien
gagaagctaggaatgtgtcactttc

SEQ ID NO: 2218750 - DNA, 25 bp, Homo sapien
tcttgaggaccttaaaaagagtctc

SEQ ID NO: 2218751 - DNA, 25 bp, Homo sapien
gagtctctaatctttccaaggaggc

SEQ ID NO: 2218752 - DNA, 25 bp, Homo sapien
gaatctgctcagacacttctagaaa

SEQ ID NO: 2218753 - DNA, 25 bp, Homo sapien
actccgcagcggtcattaagaatct

SEQ ID NO: 2218754 - DNA, 25 bp, Homo sapien
ttcgtgggcaaaacttggcaacgcg

SEQ ID NO: 2218755 - DNA, 25 bp, Homo sapien
gctcaataggcgctcagtaagtgtt

SEQ ID NO: 2218756 - DNA, 25 bp, Homo sapien
gaagcaatcgcatttccatcggcat

SEQ ID NO: 2218757 - DNA, 25 bp, Homo sapien
tgggaaacctagagcaacaagtgcc

SEQ ID NO: 2218758 - DNA, 25 bp, Homo sapien
taaccagaccagtcagtttcgccac

SEQ ID NO: 2218759 - DNA, 25 bp, Homo sapien
tgctattttctcactcagaaggaga

SEQ ID NO: 2218760 - DNA, 25 bp, Homo sapien
gcggcttggcttggacgcgctctaa

SEQ ID NO: 2218761 - DNA, 25 bp, Homo sapien
tggttccatctcgattgctattttc

SEQ ID NO: 2218762 - DNA, 25 bp, Homo sapien
ccgcatcccagatggagccgcggaa

SEQ ID NO: 2218763 - DNA, 25 bp, Homo sapien
agcatcccttgcacggcgggcgcgt

SEQ ID NO: 2218764 - DNA, 25 bp, Homo sapien
cgttcccgcaagtgctgtatcagga

SEQ ID NO: 2218765 - DNA, 25 bp, Homo sapien
taaaggcccgttgtttgcggacagc

SEQ ID NO: 2218766 - DNA, 25 bp, Homo sapien
tagccaagccgcctgcggtcagtgc

SEQ ID NO: 2218767 - DNA, 25 bp, Homo sapien
ctgagcatccgacgcggcagcaggc

SEQ ID NO: 2218768 - DNA, 25 bp, Homo sapien
atcaacacttactgagcgcccgctg

SEQ ID NO: 2218769 - DNA, 25 bp, Homo sapien
aaaccccgctaggagaagagtgaga

SEQ ID NO: 2218770 - DNA, 25 bp, Homo sapien
tcacagcgctagaaagtggcggagc

SEQ ID NO: 2218771 - DNA, 25 bp, Homo sapien
tggcggagccgggattcgcagccag

SEQ ID NO: 2218772 - DNA, 25 bp, Homo sapien
cacagcgctagaaagtggcggagcc

SEQ ID NO: 2218773 - DNA, 25 bp, Homo sapien
aggtcacagcgctagaaagtggcgg

SEQ ID NO: 2218774 - DNA, 25 bp, Homo sapien
tataaccggcttagggcattattag

SEQ ID NO: 2218775 - DNA, 25 bp, Homo sapien
ggagctcggtgagccgcaagagagg

SEQ ID NO: 2218776 - DNA, 25 bp, Homo sapien
tgacgcacacgcacacggcagcaga

SEQ ID NO: 2218777 - DNA, 25 bp, Homo sapien
tggcctcggctaggaatcccaggaa

SEQ ID NO: 2218778 - DNA, 25 bp, Homo sapien
cgcgggtgctgtgccgtccgctgct

SEQ ID NO: 2218779 - DNA, 25 bp, Homo sapien
gtgctgtgccgtccgctgctctctt

SEQ ID NO: 2218780 - DNA, 25 bp, Homo sapien
cgggtgctgtgccgtccgctgctct

SEQ ID NO: 2218781 - DNA, 25 bp, Homo sapien
cgcgcgggtgctgtgccgtccgctg

SEQ ID NO: 2218782 - DNA, 25 bp, Homo sapien
ttcctctcggcagctcagcggtgcc

SEQ ID NO: 2218783 - DNA, 25 bp, Homo sapien
ctcgccggcggactacaagagggca

SEQ ID NO: 2218784 - DNA, 25 bp, Homo sapien
gccgggcagagcgagcttcctctcg

SEQ ID NO: 2218785 - DNA, 25 bp, Homo sapien
tgccgccgggcacatttttatagca

SEQ ID NO: 2218786 - DNA, 25 bp, Homo sapien
agtccgggctatgggcagccctcgc

SEQ ID NO: 2218787 - DNA, 25 bp, Homo sapien
gcggatcgtgtgaaagcaaagggcc

SEQ ID NO: 2218788 - DNA, 25 bp, Homo sapien
acgcgagtccggcagccctgtggac

SEQ ID NO: 2218789 - DNA, 25 bp, Homo sapien
gaacggagtccacgcggccacgcga

SEQ ID NO: 2218790 - DNA, 25 bp, Homo sapien
tacgaagagcttgccccagggttcg

SEQ ID NO: 2218791 - DNA, 25 bp, Homo sapien
tgccttcccacgatgtcaggttgtt

SEQ ID NO: 2218792 - DNA, 25 bp, Homo sapien
cagggttcgcggagattcctcctgc

SEQ ID NO: 2218793 - DNA, 25 bp, Homo sapien
taggctcgccgaaaagccaacagta

SEQ ID NO: 2218794 - DNA, 25 bp, Homo sapien
ggagagacggatcaaggcccttcct

SEQ ID NO: 2218795 - DNA, 25 bp, Homo sapien
agcaaatggagagacggatcaaggc

SEQ ID NO: 2218796 - DNA, 25 bp, Homo sapien
tggaggaagcttgggcgagtgtctt

SEQ ID NO: 2218797 - DNA, 25 bp, Homo sapien
tgtcttggtcgccaggtaaacccat

SEQ ID NO: 2218798 - DNA, 25 bp, Homo sapien
ccaacacaaaccccggtagcatcca

SEQ ID NO: 2218799 - DNA, 25 bp, Homo sapien
tcccaacacaaaccccggtagcatc

SEQ ID NO: 2218800 - DNA, 25 bp, Homo sapien
acacaaaccccggtagcatccacac

SEQ ID NO: 2218801 - DNA, 25 bp, Homo sapien
tgtcccaacacaaaccccggtagca

SEQ ID NO: 2218802 - DNA, 25 bp, Homo sapien
tggatgccacgttaagaaattcagc

SEQ ID NO: 2218803 - DNA, 25 bp, Homo sapien
tgcaggagccagacttggatgccac

SEQ ID NO: 2218804 - DNA, 25 bp, Homo sapien
gctgaggatcagcattctccaggta

SEQ ID NO: 2218805 - DNA, 25 bp, Homo sapien
cacaggatgggatctatgaggttgc

SEQ ID NO: 2218806 - DNA, 25 bp, Homo sapien
cactttcagcttgtgcaaacccatg

SEQ ID NO: 2218807 - DNA, 25 bp, Homo sapien
actttcagcttgtgcaaacccatgc

SEQ ID NO: 2218808 - DNA, 25 bp, Homo sapien
cttcactttcagcttgtgcaaaccc

SEQ ID NO: 2218809 - DNA, 25 bp, Homo sapien
tttcagcttgtgcaaacccatgccc

SEQ ID NO: 2218810 - DNA, 25 bp, Homo sapien
taaaacaacaccagcggacttctcc

SEQ ID NO: 2218811 - DNA, 25 bp, Homo sapien
aaacacgctgtcttcattataggca

SEQ ID NO: 2218812 - DNA, 25 bp, Homo sapien
tacaaactggtgactgctctcatcc

SEQ ID NO: 2218813 - DNA, 25 bp, Homo sapien
gctgccacttgatgccccttggaaa

SEQ ID NO: 2218814 - DNA, 25 bp, Homo sapien
tagtgcagagaggttctacacaccc

SEQ ID NO: 2218815 - DNA, 25 bp, Homo sapien
taggccatttaatcgcaagtgtaga

SEQ ID NO: 2218816 - DNA, 25 bp, Homo sapien
tagattcatgacagagaggagttcc

SEQ ID NO: 2218817 - DNA, 25 bp, Homo sapien
caagtgtagattcatgtaacctcaa

SEQ ID NO: 2218818 - DNA, 25 bp, Homo sapien
aatttcttagttcacgccttctcca

SEQ ID NO: 2218819 - DNA, 25 bp, Homo sapien
atgagttgtgaagcctaacctcaag

SEQ ID NO: 2218820 - DNA, 25 bp, Homo sapien
tctctggataatctttgatccttaa

SEQ ID NO: 2218821 - DNA, 25 bp, Homo sapien
cacatcttatgagttgtgaagccta

SEQ ID NO: 2218822 - DNA, 25 bp, Homo sapien
cattaacttaagtccactgtttacg

SEQ ID NO: 2218823 - DNA, 25 bp, Homo sapien
ccattagagtatcatgcaggaatag

SEQ ID NO: 2218824 - DNA, 25 bp, Homo sapien
aagattcgcttttggtcttgcacag

SEQ ID NO: 2218825 - DNA, 25 bp, Homo sapien
cagtcatatggttagaatcaaacag

SEQ ID NO: 2218826 - DNA, 25 bp, Homo sapien
ttaattttaatgaacttagccacat

SEQ ID NO: 2218827 - DNA, 25 bp, Homo sapien
taattttaatgaacttagccacatg

SEQ ID NO: 2218828 - DNA, 25 bp, Homo sapien
cttcatgacgttgactaggggtcat

SEQ ID NO: 2218829 - DNA, 25 bp, Homo sapien
ttccttcatgacgttgactaggggt

SEQ ID NO: 2218830 - DNA, 25 bp, Homo sapien
ccttcatgacgttgactaggggtca

SEQ ID NO: 2218831 - DNA, 25 bp, Homo sapien
tccttcatgacgttgactaggggtc

SEQ ID NO: 2218832 - DNA, 25 bp, Homo sapien
taaagcatacgttaaaataaatatg

SEQ ID NO: 2218833 - DNA, 25 bp, Homo sapien
gcctcatctatcataagcagcaata

SEQ ID NO: 2218834 - DNA, 25 bp, Homo sapien
tattttggcctcatctatcataagc

SEQ ID NO: 2218835 - DNA, 25 bp, Homo sapien
aataatagacaacttgcttattaca

SEQ ID NO: 2218836 - DNA, 25 bp, Homo sapien
cagtaccaagggttcctatgaagcc

SEQ ID NO: 2218837 - DNA, 25 bp, Homo sapien
tctacctgggaacaattgcagtacc

SEQ ID NO: 2218838 - DNA, 25 bp, Homo sapien
tgtcgatccctcctgtcatcagaga

SEQ ID NO: 2218839 - DNA, 25 bp, Homo sapien
gaacctgaggttgtggattaatccc

SEQ ID NO: 2218840 - DNA, 25 bp, Homo sapien
ggcccgtctctaggcacttcagctg

SEQ ID NO: 2218841 - DNA, 25 bp, Homo sapien
tatggcccgtctctaggcacttcag

SEQ ID NO: 2218842 - DNA, 25 bp, Homo sapien
ttccattttatggcccgtctctagg

SEQ ID NO: 2218843 - DNA, 25 bp, Homo sapien
attttatggcccgtctctaggcact

SEQ ID NO: 2218844 - DNA, 25 bp, Homo sapien
ccgagaggtctttactgaatagcat

SEQ ID NO: 2218845 - DNA, 25 bp, Homo sapien
ttaatctctgttcccaaatgtcacc

SEQ ID NO: 2218846 - DNA, 25 bp, Homo sapien
gcaaggactttatttgacctatttc

SEQ ID NO: 2218847 - DNA, 25 bp, Homo sapien
tttcattaatctctgttcccaaatg

SEQ ID NO: 2218848 - DNA, 25 bp, Homo sapien
tccaagtcttcatgagtaatatgcc

SEQ ID NO: 2218849 - DNA, 25 bp, Homo sapien
gtaatatgccaagggttttcatggt

SEQ ID NO: 2218850 - DNA, 25 bp, Homo sapien
ggtgttgtgctgtaccctgtcaata

SEQ ID NO: 2218851 - DNA, 25 bp, Homo sapien
tcccacttcacagatttaggtagaa

SEQ ID NO: 2218852 - DNA, 25 bp, Homo sapien
tatactctttagtgaaacaagaaag

SEQ ID NO: 2218853 - DNA, 25 bp, Homo sapien
ctcttatactctttagtgaaacaag

SEQ ID NO: 2218854 - DNA, 25 bp, Homo sapien
aacagcaataacaacgatgacaaga

SEQ ID NO: 2218855 - DNA, 25 bp, Homo sapien
taacaacgatgacaagaagcctttc

SEQ ID NO: 2218856 - DNA, 25 bp, Homo sapien
tagggacctccacttgattcgaatg

SEQ ID NO: 2218857 - DNA, 25 bp, Homo sapien
gaatgtcatcagtaccagagaccag

SEQ ID NO: 2218858 - DNA, 25 bp, Homo sapien
cccatgcagagctagccaggcttga

SEQ ID NO: 2218859 - DNA, 25 bp, Homo sapien
gaaagcctcctacctctatctgcat

SEQ ID NO: 2218860 - DNA, 25 bp, Homo sapien
cattgtcatggcaacgcactatctg

SEQ ID NO: 2218861 - DNA, 25 bp, Homo sapien
gcctttccacgctgaccattgtcat

SEQ ID NO: 2218862 - DNA, 25 bp, Homo sapien
gcagcctttccacgctgaccattgt

SEQ ID NO: 2218863 - DNA, 25 bp, Homo sapien
tatctgatggcagcatgcgtcacca

SEQ ID NO: 2218864 - DNA, 25 bp, Homo sapien
gcagggaagcaagggcatacacata

SEQ ID NO: 2218865 - DNA, 25 bp, Homo sapien
catttccatttcctcaatagcaaga

SEQ ID NO: 2218866 - DNA, 25 bp, Homo sapien
cactctctggagctatgtccctggg

SEQ ID NO: 2218867 - DNA, 25 bp, Homo sapien
gccaccactctctggagctatgtcc

SEQ ID NO: 2218868 - DNA, 25 bp, Homo sapien
aagggtctcagggaacactttagag

SEQ ID NO: 2218869 - DNA, 25 bp, Homo sapien
gtgctttactattggccttttgaaa

SEQ ID NO: 2218870 - DNA, 25 bp, Homo sapien
gcagtgccaaaagctgaaccctttg

SEQ ID NO: 2218871 - DNA, 25 bp, Homo sapien
cttaaagagtgctttactattggcc

SEQ ID NO: 2218872 - DNA, 25 bp, Homo sapien
atggtatttaaggaagcccccactg

SEQ ID NO: 2218873 - DNA, 25 bp, Homo sapien
ccacaaactgggtggaacaaggagg

SEQ ID NO: 2218874 - DNA, 25 bp, Homo sapien
gtatttaaggaagcccccactgatg

SEQ ID NO: 2218875 - DNA, 25 bp, Homo sapien
aaggaagcccccactgatgggccac

SEQ ID NO: 2218876 - DNA, 25 bp, Homo sapien
gcagcttggcgtgatttccagcaca

SEQ ID NO: 2218877 - DNA, 25 bp, Homo sapien
ccagcacataatcaggaccatatgc

SEQ ID NO: 2218878 - DNA, 25 bp, Homo sapien
ttgaggatttgttggattcggtggg

SEQ ID NO: 2218879 - DNA, 25 bp, Homo sapien
gggctcattgcggtctggccggcag

SEQ ID NO: 2218880 - DNA, 25 bp, Homo sapien
caccgtgggagatgttgtggaacaa

SEQ ID NO: 2218881 - DNA, 25 bp, Homo sapien
gatggttttgcatatccatgacaga

SEQ ID NO: 2218882 - DNA, 25 bp, Homo sapien
cagtgtctttgtagattccatggaa

SEQ ID NO: 2218883 - DNA, 25 bp, Homo sapien
tctctagggattctaacagtgtctt

SEQ ID NO: 2218884 - DNA, 25 bp, Homo sapien
gacacatccagaaccattaccccct

SEQ ID NO: 2218885 - DNA, 25 bp, Homo sapien
gggggacacatccagaaccattacc

SEQ ID NO: 2218886 - DNA, 25 bp, Homo sapien
cacatccagaaccattacccccttt

SEQ ID NO: 2218887 - DNA, 25 bp, Homo sapien
gggacacatccagaaccattacccc

SEQ ID NO: 2218888 - DNA, 25 bp, Homo sapien
taagaaggagactagtgtataccag

SEQ ID NO: 2218889 - DNA, 25 bp, Homo sapien
gtgggtgttttaagatgggaggata

SEQ ID NO: 2218890 - DNA, 25 bp, Homo sapien
gagactagtgtataccagcagtccc

SEQ ID NO: 2218891 - DNA, 25 bp, Homo sapien
gcggttaagaaggagactagtgtat

SEQ ID NO: 2218892 - DNA, 25 bp, Homo sapien
agaaagagtggcagagagatcaaga

SEQ ID NO: 2218893 - DNA, 25 bp, Homo sapien
gagatcaagaagagaaggattccaa

SEQ ID NO: 2218894 - DNA, 25 bp, Homo sapien
agccagaaagagtggcagagagatc

SEQ ID NO: 2218895 - DNA, 25 bp, Homo sapien
tatcccaaaaccctgaagccagaaa

SEQ ID NO: 2218896 - DNA, 25 bp, Homo sapien
gacttggtgcttcccggcagccagc

SEQ ID NO: 2218897 - DNA, 25 bp, Homo sapien
tactgtgaacatagcggggagcctg

SEQ ID NO: 2218898 - DNA, 25 bp, Homo sapien
cctgttccacagttgtagacttggt

SEQ ID NO: 2218899 - DNA, 25 bp, Homo sapien
tggcaagcatccagaggtgtttctt

SEQ ID NO: 2218900 - DNA, 25 bp, Homo sapien
tctgctaatgatgaacccgatgact

SEQ ID NO: 2218901 - DNA, 25 bp, Homo sapien
tctagttctttttccggttctgcta

SEQ ID NO: 2218902 - DNA, 25 bp, Homo sapien
tgatgaacccgatgactttggacat

SEQ ID NO: 2218903 - DNA, 25 bp, Homo sapien
ggctcagcatcatagcttctagttc

SEQ ID NO: 2218904 - DNA, 25 bp, Homo sapien
ttgtaattttgctgagctttgcaaa

SEQ ID NO: 2218905 - DNA, 25 bp, Homo sapien
catggagtggaggaaactagtcctt

SEQ ID NO: 2218906 - DNA, 25 bp, Homo sapien
gagtggaggaaactagtccttattc

SEQ ID NO: 2218907 - DNA, 25 bp, Homo sapien
tggagtggaggaaactagtccttat

SEQ ID NO: 2218908 - DNA, 25 bp, Homo sapien
atgcatggagtggaggaaactagtc

SEQ ID NO: 2218909 - DNA, 25 bp, Homo sapien
gggcaactttgccttagcacttcac

SEQ ID NO: 2218910 - DNA, 25 bp, Homo sapien
gcttgaagttcagccataggtgaga

SEQ ID NO: 2218911 - DNA, 25 bp, Homo sapien
cagccttgggaatgcctatcatcct

SEQ ID NO: 2218912 - DNA, 25 bp, Homo sapien
gcttggttaggttagtcgtcagcta

SEQ ID NO: 2218913 - DNA, 25 bp, Homo sapien
ccttggtttatctcctggctgtgta

SEQ ID NO: 2218914 - DNA, 25 bp, Homo sapien
gagctagtttcccaccaagctgatg

SEQ ID NO: 2218915 - DNA, 25 bp, Homo sapien
ttcccttggtttatctcctggctgt

SEQ ID NO: 2218916 - DNA, 25 bp, Homo sapien
gctagtttcccaccaagctgatggt

SEQ ID NO: 2218917 - DNA, 25 bp, Homo sapien
tgaagacgaggaattgcacccaagc

SEQ ID NO: 2218918 - DNA, 25 bp, Homo sapien
cagaaacacaagctatgaggcactt

SEQ ID NO: 2218919 - DNA, 25 bp, Homo sapien
caaatgcaaccaggagatcccgaca

SEQ ID NO: 2218920 - DNA, 25 bp, Homo sapien
tgcacagtgcagtgtactctgccca

SEQ ID NO: 2218921 - DNA, 25 bp, Homo sapien
cgactaaagaacagtgactcaccca

SEQ ID NO: 2218922 - DNA, 25 bp, Homo sapien
cagcatcgactaaagaacagtgact

SEQ ID NO: 2218923 - DNA, 25 bp, Homo sapien
tcgactaaagaacagtgactcaccc

SEQ ID NO: 2218924 - DNA, 25 bp, Homo sapien
catcgactaaagaacagtgactcac

SEQ ID NO: 2218925 - DNA, 25 bp, Homo sapien
gaaattatcccctatcccaagacta

SEQ ID NO: 2218926 - DNA, 25 bp, Homo sapien
tagaccctgagtactaaatgcctct

SEQ ID NO: 2218927 - DNA, 25 bp, Homo sapien
gatggtggtactgcaagttgagaac

SEQ ID NO: 2218928 - DNA, 25 bp, Homo sapien
ggctcttacgtctcaggacacctag

SEQ ID NO: 2218929 - DNA, 25 bp, Homo sapien
tcataaccgaggtaattaagcctag

SEQ ID NO: 2218930 - DNA, 25 bp, Homo sapien
gtgattctaatccatgacaacatga

SEQ ID NO: 2218931 - DNA, 25 bp, Homo sapien
catcattgcttattgagaagtcagc

SEQ ID NO: 2218932 - DNA, 25 bp, Homo sapien
tctggaatttcttaggcctgaatct

SEQ ID NO: 2218933 - DNA, 25 bp, Homo sapien
gttgcagtgaatatacacgtacatg

SEQ ID NO: 2218934 - DNA, 25 bp, Homo sapien
actgatgtataaagcttcattgagg

SEQ ID NO: 2218935 - DNA, 25 bp, Homo sapien
tgctctttgctctctacccttatta

SEQ ID NO: 2218936 - DNA, 25 bp, Homo sapien
cacgtacatgtgtcctagaatgatt

SEQ ID NO: 2218937 - DNA, 25 bp, Homo sapien
taagcctggtattgaggaggacccc

SEQ ID NO: 2218938 - DNA, 25 bp, Homo sapien
ttagaaaagtgataggagccagatc

SEQ ID NO: 2218939 - DNA, 25 bp, Homo sapien
ggtgttgtaggccactgcaaggact

SEQ ID NO: 2218940 - DNA, 25 bp, Homo sapien
gaggacccctgatttttagggcaga

SEQ ID NO: 2218941 - DNA, 25 bp, Homo sapien
ttcataagatacattgcactgtaat

SEQ ID NO: 2218942 - DNA, 25 bp, Homo sapien
cataagatacattgcactgtaattt

SEQ ID NO: 2218943 - DNA, 25 bp, Homo sapien
tagtgtataatgacgttaatatatg

SEQ ID NO: 2218944 - DNA, 25 bp, Homo sapien
tatatggttagatttgggttgctag

SEQ ID NO: 2218945 - DNA, 25 bp, Homo sapien
tacttcttctaggataggattagtg

SEQ ID NO: 2218946 - DNA, 25 bp, Homo sapien
gattagtggtaatagactccctcag

SEQ ID NO: 2218947 - DNA, 25 bp, Homo sapien
tagcttcgatttacagtctagtgtc

SEQ ID NO: 2218948 - DNA, 25 bp, Homo sapien
tcccattgtattctggcctccatgg

SEQ ID NO: 2218949 - DNA, 25 bp, Homo sapien
tcttcattctggtggacatctactc

SEQ ID NO: 2218950 - DNA, 25 bp, Homo sapien
ccttctacagagctggtgtcttgga

SEQ ID NO: 2218951 - DNA, 25 bp, Homo sapien
tcttagtactatcaaccacaccagg

SEQ ID NO: 2218952 - DNA, 25 bp, Homo sapien
tagttgcctcaccttagaaatgttg

SEQ ID NO: 2218953 - DNA, 25 bp, Homo sapien
cagtgcccgagtctatcttttgcta

SEQ ID NO: 2218954 - DNA, 25 bp, Homo sapien
taaggccaatgggtgacctagcagg

SEQ ID NO: 2218955 - DNA, 25 bp, Homo sapien
taaagcagccggtaaattcccagtg

SEQ ID NO: 2218956 - DNA, 25 bp, Homo sapien
tatcaaatggtgcaacttgacgagg

SEQ ID NO: 2218957 - DNA, 25 bp, Homo sapien
tgtgggatattctcccagaaatggg

SEQ ID NO: 2218958 - DNA, 25 bp, Homo sapien
tcctggaggtgcacgccagtgagaa

SEQ ID NO: 2218959 - DNA, 25 bp, Homo sapien
gtgtatttcctggaggtgcacgcca

SEQ ID NO: 2218960 - DNA, 25 bp, Homo sapien
tcagaaggtgtatttcctggaggtg

SEQ ID NO: 2218961 - DNA, 25 bp, Homo sapien
tgcccaatgtcacacggctgataag

SEQ ID NO: 2218962 - DNA, 25 bp, Homo sapien
ggaactcttaggtgcatctgacaca

SEQ ID NO: 2218963 - DNA, 25 bp, Homo sapien
tcaaacaatcgaggcttagagaggt

SEQ ID NO: 2218964 - DNA, 25 bp, Homo sapien
gagcctggaggatataaacacacac

SEQ ID NO: 2218965 - DNA, 25 bp, Homo sapien
tactttactagttgatcctgggcaa

SEQ ID NO: 2218966 - DNA, 25 bp, Homo sapien
cactagggatataattggtgcttca

SEQ ID NO: 2218967 - DNA, 25 bp, Homo sapien
tcaatgttttgttccatgagctgtc

SEQ ID NO: 2218968 - DNA, 25 bp, Homo sapien
tcccagggttgctgacagacatata

SEQ ID NO: 2218969 - DNA, 25 bp, Homo sapien
gcttcaagtgatctgcctgccttag

SEQ ID NO: 2218970 - DNA, 25 bp, Homo sapien
caagtgatctgcctgccttagcttc

SEQ ID NO: 2218971 - DNA, 25 bp, Homo sapien
atgtgccaccacaccgggcttcttt

SEQ ID NO: 2218972 - DNA, 25 bp, Homo sapien
ttcaagtgatctgcctgccttagct

SEQ ID NO: 2218973 - DNA, 25 bp, Homo sapien
ctggacctaggaagataatagagaa

SEQ ID NO: 2218974 - DNA, 25 bp, Homo sapien
taatagagaagtagggaacgggcat

SEQ ID NO: 2218975 - DNA, 25 bp, Homo sapien
gtttttgaagggcacaggacttgaa

SEQ ID NO: 2218976 - DNA, 25 bp, Homo sapien
caggacttgaagctggacctaggaa

SEQ ID NO: 2218977 - DNA, 25 bp, Homo sapien
tttatatttcattaagcttccaaat

SEQ ID NO: 2218978 - DNA, 25 bp, Homo sapien
ttatatttcattaagcttccaaata

SEQ ID NO: 2218979 - DNA, 25 bp, Homo sapien
ctttatatttcattaagcttccaaa

SEQ ID NO: 2218980 - DNA, 25 bp, Homo sapien
ttcccacagtctctgtaattaattg

SEQ ID NO: 2218981 - DNA, 25 bp, Homo sapien
ttaaagttggttggcctttgagatc

SEQ ID NO: 2218982 - DNA, 25 bp, Homo sapien
gtatgtccagcatcgagccgtgttg

SEQ ID NO: 2218983 - DNA, 25 bp, Homo sapien
cagcatcgagccgtgttggcaaggt

SEQ ID NO: 2218984 - DNA, 25 bp, Homo sapien
gatgaccccggtcaagtatgtccag

SEQ ID NO: 2218985 - DNA, 25 bp, Homo sapien
gatctcagaggatagtgttttccct

SEQ ID NO: 2218986 - DNA, 25 bp, Homo sapien
tattatccaatgcaagaaagccaag

SEQ ID NO: 2218987 - DNA, 25 bp, Homo sapien
taacctttaaccagaggatctttgc

SEQ ID NO: 2218988 - DNA, 25 bp, Homo sapien
gcctcaggtaggttggtattatcca

SEQ ID NO: 2218989 - DNA, 25 bp, Homo sapien
gaagtcaatgcacatgctaagctga

SEQ ID NO: 2218990 - DNA, 25 bp, Homo sapien
taagacacttgccaattcccactgg

SEQ ID NO: 2218991 - DNA, 25 bp, Homo sapien
aactgccattgaaggatgtacttaa

SEQ ID NO: 2218992 - DNA, 25 bp, Homo sapien
gaaggatgtacttaagacacttgcc

SEQ ID NO: 2218993 - DNA, 25 bp, Homo sapien
aaaatgagtgttgccaactgccatt

SEQ ID NO: 2218994 - DNA, 25 bp, Homo sapien
gatccccagctattgtgtcagctcc

SEQ ID NO: 2218995 - DNA, 25 bp, Homo sapien
ccagctgtaagaccactgctttggg

SEQ ID NO: 2218996 - DNA, 25 bp, Homo sapien
taagaccactgctttgggattaaag

SEQ ID NO: 2218997 - DNA, 25 bp, Homo sapien
gttaaaggagcacatgggatcccca

SEQ ID NO: 2218998 - DNA, 25 bp, Homo sapien
aaggaagatgtcaatgtgacagatg

SEQ ID NO: 2218999 - DNA, 25 bp, Homo sapien
tgacagatgaccttagtcaagcttt

SEQ ID NO: 2219000 - DNA, 25 bp, Homo sapien
gtcaagctttcagtattatcattaa

SEQ ID NO: 2219001 - DNA, 25 bp, Homo sapien
cattaattgaacactggcagtgtcc

SEQ ID NO: 2219002 - DNA, 25 bp, Homo sapien
ttacctttctacatgtctacatcac

SEQ ID NO: 2219003 - DNA, 25 bp, Homo sapien
acttgtgcctgaaagttacctttct

SEQ ID NO: 2219004 - DNA, 25 bp, Homo sapien
gtctacatcacagccattctttaaa

SEQ ID NO: 2219005 - DNA, 25 bp, Homo sapien
tacatgtctacatcacagccattct

SEQ ID NO: 2219006 - DNA, 25 bp, Homo sapien
cagctcttccgtgatgtggttccca

SEQ ID NO: 2219007 - DNA, 25 bp, Homo sapien
aactttgatcttgctgtaccctgtg

SEQ ID NO: 2219008 - DNA, 25 bp, Homo sapien
gagtgttaatcttcccaagcaagct

SEQ ID NO: 2219009 - DNA, 25 bp, Homo sapien
gatccttcagtattcagcagtctag

SEQ ID NO: 2219010 - DNA, 25 bp, Homo sapien
aatggggaagacaagctgcggcagc

SEQ ID NO: 2219011 - DNA, 25 bp, Homo sapien
gctgcttctacaggcctggatttgg

SEQ ID NO: 2219012 - DNA, 25 bp, Homo sapien
ggaagacaagctgcggcagctgctt

SEQ ID NO: 2219013 - DNA, 25 bp, Homo sapien
tggatttggggcaggaggttcgtac

SEQ ID NO: 2219014 - DNA, 25 bp, Homo sapien
gatgaaatccagatcacttcaatga

SEQ ID NO: 2219015 - DNA, 25 bp, Homo sapien
tctagtctgtatgcaaattcaaaac

SEQ ID NO: 2219016 - DNA, 25 bp, Homo sapien
gatcatttaggatcagtgtcctgtt

SEQ ID NO: 2219017 - DNA, 25 bp, Homo sapien
gagtgtctggtggatcatttaggat

SEQ ID NO: 2219018 - DNA, 25 bp, Homo sapien
aaagtccagccaacgtaacatcagg

SEQ ID NO: 2219019 - DNA, 25 bp, Homo sapien
gctctttcctggtagtacaatgggt

SEQ ID NO: 2219020 - DNA, 25 bp, Homo sapien
gctggacactgggtttaactaaatc

SEQ ID NO: 2219021 - DNA, 25 bp, Homo sapien
tctttaagtaccaatggacatggct

SEQ ID NO: 2219022 - DNA, 25 bp, Homo sapien
ataatgccctgaccagacttgactt

SEQ ID NO: 2219023 - DNA, 25 bp, Homo sapien
tatgaatatgagtttaacacaaccc

SEQ ID NO: 2219024 - DNA, 25 bp, Homo sapien
cattggcaccaatctgtctgtctac

SEQ ID NO: 2219025 - DNA, 25 bp, Homo sapien
actctagtggtccacacattggcac

SEQ ID NO: 2219026 - DNA, 25 bp, Homo sapien
ggctgacttctattcggatttgctt

SEQ ID NO: 2219027 - DNA, 25 bp, Homo sapien
gaatgggcacatttacactgtagta

SEQ ID NO: 2219028 - DNA, 25 bp, Homo sapien
ttcatcttgtatgccatcctgaatg

SEQ ID NO: 2219029 - DNA, 25 bp, Homo sapien
gccatcctgaatgggcacatttaca

SEQ ID NO: 2219030 - DNA, 25 bp, Homo sapien
catttacactgtagtaccgtccctt

SEQ ID NO: 2219031 - DNA, 25 bp, Homo sapien
ggccaacatcagacacgtcacctgt

SEQ ID NO: 2219032 - DNA, 25 bp, Homo sapien
taggccaacatcagacacgtcacct

SEQ ID NO: 2219033 - DNA, 25 bp, Homo sapien
ctaggccaacatcagacacgtcacc

SEQ ID NO: 2219034 - DNA, 25 bp, Homo sapien
aggccaacatcagacacgtcacctg

SEQ ID NO: 2219035 - DNA, 25 bp, Homo sapien
gagaatttgtgcagggacacggtca

SEQ ID NO: 2219036 - DNA, 25 bp, Homo sapien
gacacggtcatgactttggaggtga

SEQ ID NO: 2219037 - DNA, 25 bp, Homo sapien
ggaggtgaaactgaatgcgtcttct

SEQ ID NO: 2219038 - DNA, 25 bp, Homo sapien
gtgaaactgaatgcgtcttctacac

SEQ ID NO: 2219039 - DNA, 25 bp, Homo sapien
cccaggacagcatcattgagataac

SEQ ID NO: 2219040 - DNA, 25 bp, Homo sapien
tccatggtgcagatccaaatccacg

SEQ ID NO: 2219041 - DNA, 25 bp, Homo sapien
caaatccacgtagagaatacgctca

SEQ ID NO: 2219042 - DNA, 25 bp, Homo sapien
cgcaatcgtaatattcccaggacag

SEQ ID NO: 2219043 - DNA, 25 bp, Homo sapien
cagccaaaaagcaatccaagggagt

SEQ ID NO: 2219044 - DNA, 25 bp, Homo sapien
acagccaacagccaaaaagcaatcc

SEQ ID NO: 2219045 - DNA, 25 bp, Homo sapien
aacaagttgctacagccaacagcca

SEQ ID NO: 2219046 - DNA, 25 bp, Homo sapien
gaaaacaagttgctacagccaacag

SEQ ID NO: 2219047 - DNA, 25 bp, Homo sapien
taaccaaggccttacctggaatgcc

SEQ ID NO: 2219048 - DNA, 25 bp, Homo sapien
gaaaactagcctggtacctgactta

SEQ ID NO: 2219049 - DNA, 25 bp, Homo sapien
tcagacacttttaaggaactaaggc

SEQ ID NO: 2219050 - DNA, 25 bp, Homo sapien
agaagcttaggatattttgtcgacc

SEQ ID NO: 2219051 - DNA, 25 bp, Homo sapien
gaccagccttattttgcgttcaaga

SEQ ID NO: 2219052 - DNA, 25 bp, Homo sapien
cagccttattttgcgttcaagaata

SEQ ID NO: 2219053 - DNA, 25 bp, Homo sapien
atggatgtcacacacttattggata

SEQ ID NO: 2219054 - DNA, 25 bp, Homo sapien
tgtcacacacttattggatatatga

SEQ ID NO: 2219055 - DNA, 25 bp, Homo sapien
tttacttgtctatccccatttacca

SEQ ID NO: 2219056 - DNA, 25 bp, Homo sapien
tgtttacttgtctatccccatttac

SEQ ID NO: 2219057 - DNA, 25 bp, Homo sapien
ctgtttacttgtctatccccattta

SEQ ID NO: 2219058 - DNA, 25 bp, Homo sapien
catttggcacgataaacagtcacta

SEQ ID NO: 2219059 - DNA, 25 bp, Homo sapien
gaaacaaggtaatacttgcctgaaa

SEQ ID NO: 2219060 - DNA, 25 bp, Homo sapien
tatcaagaacgttgactatgagtcc

SEQ ID NO: 2219061 - DNA, 25 bp, Homo sapien
gctggaaggccagtttttggaccca

SEQ ID NO: 2219062 - DNA, 25 bp, Homo sapien
gcaaagcagctgtctcgggcttaat

SEQ ID NO: 2219063 - DNA, 25 bp, Homo sapien
aagcagctgtctcgggcttaataca

SEQ ID NO: 2219064 - DNA, 25 bp, Homo sapien
agctgtctcgggcttaatacatatg

SEQ ID NO: 2219065 - DNA, 25 bp, Homo sapien
cagctgtctcgggcttaatacatat

SEQ ID NO: 2219066 - DNA, 25 bp, Homo sapien
cagtaagacaggaaatttgcgagac

SEQ ID NO: 2219067 - DNA, 25 bp, Homo sapien
ttagtctatcattagtaccaggcag

SEQ ID NO: 2219068 - DNA, 25 bp, Homo sapien
gacttaacaagtagccagaaagagc

SEQ ID NO: 2219069 - DNA, 25 bp, Homo sapien
tgtagtgtcacagtcaccgggaaag

SEQ ID NO: 2219070 - DNA, 25 bp, Homo sapien
gttcttcccttatgaattgtcttag

SEQ ID NO: 2219071 - DNA, 25 bp, Homo sapien
tgtagatcctagtaccatttgtgga

SEQ ID NO: 2219072 - DNA, 25 bp, Homo sapien
gaagacttactcctatgctttcttg

SEQ ID NO: 2219073 - DNA, 25 bp, Homo sapien
tggcttgaggtagggattgaaattc

SEQ ID NO: 2219074 - DNA, 25 bp, Homo sapien
gctcaagtaccacaacagcctcaat

SEQ ID NO: 2219075 - DNA, 25 bp, Homo sapien
gatatgctttcctagtactctgtgg

SEQ ID NO: 2219076 - DNA, 25 bp, Homo sapien
tactctgtggcaattacaaccatga

SEQ ID NO: 2219077 - DNA, 25 bp, Homo sapien
tggccccttatgactcagctcaagt

SEQ ID NO: 2219078 - DNA, 25 bp, Homo sapien
ccagtttccttatcaatttcttcca

SEQ ID NO: 2219079 - DNA, 25 bp, Homo sapien
tcagtttctctatccatttccccag

SEQ ID NO: 2219080 - DNA, 25 bp, Homo sapien
ttctcagtttctctatccatttccc

SEQ ID NO: 2219081 - DNA, 25 bp, Homo sapien
catttccccagtttccttatcaatt

SEQ ID NO: 2219082 - DNA, 25 bp, Homo sapien
tattctggataaaagacccttctta

SEQ ID NO: 2219083 - DNA, 25 bp, Homo sapien
aatgctcttattgactacttgtata

SEQ ID NO: 2219084 - DNA, 25 bp, Homo sapien
ggattatctttctacttacttgaag

SEQ ID NO: 2219085 - DNA, 25 bp, Homo sapien
gttgcaagagttctatacacatata

SEQ ID NO: 2219086 - DNA, 25 bp, Homo sapien
caatttctgcaagaaagcccaggcc

SEQ ID NO: 2219087 - DNA, 25 bp, Homo sapien
tcctagaactagaaacagacagaat

SEQ ID NO: 2219088 - DNA, 25 bp, Homo sapien
gtggttatcaggttatcccagcacc

SEQ ID NO: 2219089 - DNA, 25 bp, Homo sapien
taggaggtcagtattattaccccga

SEQ ID NO: 2219090 - DNA, 25 bp, Homo sapien
ggcagctctaggaacagtgagatca

SEQ ID NO: 2219091 - DNA, 25 bp, Homo sapien
aaaaatataccccacagtctggtgc

SEQ ID NO: 2219092 - DNA, 25 bp, Homo sapien
taagggctctgtgcctagagttggc

SEQ ID NO: 2219093 - DNA, 25 bp, Homo sapien
tttggctctggtacacctacacttg

SEQ ID NO: 2219094 - DNA, 25 bp, Homo sapien
tcccgtggggtcaaacaagcccaga

SEQ ID NO: 2219095 - DNA, 25 bp, Homo sapien
agcagagctaatgattcccgtgggg

SEQ ID NO: 2219096 - DNA, 25 bp, Homo sapien
aaatccccatgtacaaaagcagagc

SEQ ID NO: 2219097 - DNA, 25 bp, Homo sapien
tcaagcagtgaaatccccatgtaca

SEQ ID NO: 2219098 - DNA, 25 bp, Homo sapien
ccttgtaggccatggtagggacttc

SEQ ID NO: 2219099 - DNA, 25 bp, Homo sapien
ggaacatgcctggtatgtccaaggg

SEQ ID NO: 2219100 - DNA, 25 bp, Homo sapien
ggcaaagccctagaggtgggaacat

SEQ ID NO: 2219101 - DNA, 25 bp, Homo sapien
gaatagcagttttaccagggagagg

SEQ ID NO: 2219102 - DNA, 25 bp, Homo sapien
cagtcctggtaccttgaactgaaag

SEQ ID NO: 2219103 - DNA, 25 bp, Homo sapien
tcccagagaatgaggcggtggacca

SEQ ID NO: 2219104 - DNA, 25 bp, Homo sapien
tttggtcactgagcataacagtctg

SEQ ID NO: 2219105 - DNA, 25 bp, Homo sapien
ggtagtcaaagtacaccaaggagta

SEQ ID NO: 2219106 - DNA, 25 bp, Homo sapien
catcatcacctccttactgataaat

SEQ ID NO: 2219107 - DNA, 25 bp, Homo sapien
tttcatcctttgaagacatcttcat

SEQ ID NO: 2219108 - DNA, 25 bp, Homo sapien
taaatcttacgtcatctctatagca

SEQ ID NO: 2219109 - DNA, 25 bp, Homo sapien
tccttgtctcactggcacatccctt

SEQ ID NO: 2219110 - DNA, 25 bp, Homo sapien
gataatggcattcatagcaacatgg

SEQ ID NO: 2219111 - DNA, 25 bp, Homo sapien
ccttagaatagattgccaagaatat

SEQ ID NO: 2219112 - DNA, 25 bp, Homo sapien
tgctgtcttactcctaagatataaa

SEQ ID NO: 2219113 - DNA, 25 bp, Homo sapien
caagaatattgttactggcccaact

SEQ ID NO: 2219114 - DNA, 25 bp, Homo sapien
ttcactgtaatccttctaccacctg

SEQ ID NO: 2219115 - DNA, 25 bp, Homo sapien
gactttgagcagtgtgctttccact

SEQ ID NO: 2219116 - DNA, 25 bp, Homo sapien
gggagggtaatcagtccaagtcagt

SEQ ID NO: 2219117 - DNA, 25 bp, Homo sapien
ggcctagggagggtaatcagtccaa

SEQ ID NO: 2219118 - DNA, 25 bp, Homo sapien
aactaggtgtagagcccaggtgtcc

SEQ ID NO: 2219119 - DNA, 25 bp, Homo sapien
tcttcagaatgccttgtaaagtgcc

SEQ ID NO: 2219120 - DNA, 25 bp, Homo sapien
atttcttcagaatgccttgtaaagt

SEQ ID NO: 2219121 - DNA, 25 bp, Homo sapien
ttcagaatgccttgtaaagtgccac

SEQ ID NO: 2219122 - DNA, 25 bp, Homo sapien
cagaatgccttgtaaagtgccacat

SEQ ID NO: 2219123 - DNA, 25 bp, Homo sapien
ataagcataagagtttacataactg

SEQ ID NO: 2219124 - DNA, 25 bp, Homo sapien
tagctgctgcatagtcaaatatccc

SEQ ID NO: 2219125 - DNA, 25 bp, Homo sapien
cattccgtcaatcaggcattgggca

SEQ ID NO: 2219126 - DNA, 25 bp, Homo sapien
gatcgtagcccctcctatagctgct

SEQ ID NO: 2219127 - DNA, 25 bp, Homo sapien
gcattgggcagctgtgatcgtagcc

SEQ ID NO: 2219128 - DNA, 25 bp, Homo sapien
gctgaccttctggagatgctgcaga

SEQ ID NO: 2219129 - DNA, 25 bp, Homo sapien
tagcccatattctatggagtccgga

SEQ ID NO: 2219130 - DNA, 25 bp, Homo sapien
ccatggaggccactttaggcttaac

SEQ ID NO: 2219131 - DNA, 25 bp, Homo sapien
gatgatcatcatcgccctcttggct

SEQ ID NO: 2219132 - DNA, 25 bp, Homo sapien
cagtgcatatgcttcaatcaaagaa

SEQ ID NO: 2219133 - DNA, 25 bp, Homo sapien
atatgcttcaatcaaagaatgcacc

SEQ ID NO: 2219134 - DNA, 25 bp, Homo sapien
tgcttatgcagtgcatatgcttcaa

SEQ ID NO: 2219135 - DNA, 25 bp, Homo sapien
tcatctgcttatgcagtgcatatgc

SEQ ID NO: 2219136 - DNA, 25 bp, Homo sapien
gatacagctactcgaaatttctgaa

SEQ ID NO: 2219137 - DNA, 25 bp, Homo sapien
gctgcgctctcagaaacgatatgag

SEQ ID NO: 2219138 - DNA, 25 bp, Homo sapien
tacagctttaggtatctgatacagc

SEQ ID NO: 2219139 - DNA, 25 bp, Homo sapien
ggacgtcccgaagagacatgctgcg

SEQ ID NO: 2219140 - DNA, 25 bp, Homo sapien
cagggagtcacacatactgacatac

SEQ ID NO: 2219141 - DNA, 25 bp, Homo sapien
ggccagggagtcacacatactgaca

SEQ ID NO: 2219142 - DNA, 25 bp, Homo sapien
ttggccagggagtcacacatactga

SEQ ID NO: 2219143 - DNA, 25 bp, Homo sapien
cttggccagggagtcacacatactg

SEQ ID NO: 2219144 - DNA, 25 bp, Homo sapien
tatagatataaaccgggaccagcga

SEQ ID NO: 2219145 - DNA, 25 bp, Homo sapien
agcgactgcccactgtccgccggtt

SEQ ID NO: 2219146 - DNA, 25 bp, Homo sapien
gatataaaccgggaccagcgactgc

SEQ ID NO: 2219147 - DNA, 25 bp, Homo sapien
ggactatagatataaaccgggacca

SEQ ID NO: 2219148 - DNA, 25 bp, Homo sapien
tgatcggccgcagcggtgctccctg

SEQ ID NO: 2219149 - DNA, 25 bp, Homo sapien
tgctcctctgatcggccgcagcggt

SEQ ID NO: 2219150 - DNA, 25 bp, Homo sapien
agatctggcttttttcggactcggc

SEQ ID NO: 2219151 - DNA, 25 bp, Homo sapien
aaaccgttccgcagccaccttccag

SEQ ID NO: 2219152 - DNA, 25 bp, Homo sapien
aatggatgggacttcccagaccaga

SEQ ID NO: 2219153 - DNA, 25 bp, Homo sapien
tttagtgaccacagttcaaggaaaa

SEQ ID NO: 2219154 - DNA, 25 bp, Homo sapien
tattcttgagatcgccggagacact

SEQ ID NO: 2219155 - DNA, 25 bp, Homo sapien
gaccagactcccctcatttagtgac

SEQ ID NO: 2219156 - DNA, 25 bp, Homo sapien
ctttttgtcattagaaattcactgg

SEQ ID NO: 2219157 - DNA, 25 bp, Homo sapien
ccctttttgtcattagaaattcact

SEQ ID NO: 2219158 - DNA, 25 bp, Homo sapien
ttgtcattagaaattcactggtgcc

SEQ ID NO: 2219159 - DNA, 25 bp, Homo sapien
tcaaagacccctttttgtcattaga

SEQ ID NO: 2219160 - DNA, 25 bp, Homo sapien
gcaaggctacctacatatgggatga

SEQ ID NO: 2219161 - DNA, 25 bp, Homo sapien
cactggttctgcaaggtgagcctcc

SEQ ID NO: 2219162 - DNA, 25 bp, Homo sapien
tagttccatgcacaatcaaccgagg

SEQ ID NO: 2219163 - DNA, 25 bp, Homo sapien
taagtagagcacctatagactggac

SEQ ID NO: 2219164 - DNA, 25 bp, Homo sapien
gatgcgggatcctttgccaacatgg

SEQ ID NO: 2219165 - DNA, 25 bp, Homo sapien
tgggtgcactgtcatacagaagagt

SEQ ID NO: 2219166 - DNA, 25 bp, Homo sapien
tcatggtgccaaacctgccactggg

SEQ ID NO: 2219167 - DNA, 25 bp, Homo sapien
catggtatcatctgcgccaagggtt

SEQ ID NO: 2219168 - DNA, 25 bp, Homo sapien
gcaatgatgcttccgatgctatgaa

SEQ ID NO: 2219169 - DNA, 25 bp, Homo sapien
gagaatttaatctcacctggagtca

SEQ ID NO: 2219170 - DNA, 25 bp, Homo sapien
ggtacacgattcaggacagactcca

SEQ ID NO: 2219171 - DNA, 25 bp, Homo sapien
ttcaaccagcagctgacggtactct

SEQ ID NO: 2219172 - DNA, 25 bp, Homo sapien
caaacccttcaacagaaagtccgtg

SEQ ID NO: 2219173 - DNA, 25 bp, Homo sapien
tccagccttcttcggcgttgccatt

SEQ ID NO: 2219174 - DNA, 25 bp, Homo sapien
ttctgataaaatccaactggaactc

SEQ ID NO: 2219175 - DNA, 25 bp, Homo sapien
gaccttgacgactatctttagatga

SEQ ID NO: 2219176 - DNA, 25 bp, Homo sapien
ggaactctattcagtgccccatcca

SEQ ID NO: 2219177 - DNA, 25 bp, Homo sapien
tacttggagtcatagaggttccagg

SEQ ID NO: 2219178 - DNA, 25 bp, Homo sapien
tgctgatcatatgcactaggaaagg

SEQ ID NO: 2219179 - DNA, 25 bp, Homo sapien
cactaggaaaggacccactacttgg

SEQ ID NO: 2219180 - DNA, 25 bp, Homo sapien
gacccactacttggagtcatagagg

SEQ ID NO: 2219181 - DNA, 25 bp, Homo sapien
gattataagggcataccatccgcag

SEQ ID NO: 2219182 - DNA, 25 bp, Homo sapien
tacaacatgaagtgggactgattcc

SEQ ID NO: 2219183 - DNA, 25 bp, Homo sapien
tgttaaacttctagctcgtccatgg

SEQ ID NO: 2219184 - DNA, 25 bp, Homo sapien
caccttgggtgatatcgttagactc

SEQ ID NO: 2219185 - DNA, 25 bp, Homo sapien
tatacccaggggatgaccaccattg

SEQ ID NO: 2219186 - DNA, 25 bp, Homo sapien
cataaaagacggtgacatcaaatct

SEQ ID NO: 2219187 - DNA, 25 bp, Homo sapien
gacggtgacatcaaatctataccca

SEQ ID NO: 2219188 - DNA, 25 bp, Homo sapien
tacccaggggatgaccaccattgga

SEQ ID NO: 2219189 - DNA, 25 bp, Homo sapien
agattgacagtctacgaaattccac

SEQ ID NO: 2219190 - DNA, 25 bp, Homo sapien
tgagattgacagtctacgaaattcc

SEQ ID NO: 2219191 - DNA, 25 bp, Homo sapien
ctctcagctgagattgacagtctac

SEQ ID NO: 2219192 - DNA, 25 bp, Homo sapien
cagctgagattgacagtctacgaaa

SEQ ID NO: 2219193 - DNA, 25 bp, Homo sapien
tgatcccagttcgttctgttttggt

SEQ ID NO: 2219194 - DNA, 25 bp, Homo sapien
tgttttggttgctccaacagcacca

SEQ ID NO: 2219195 - DNA, 25 bp, Homo sapien
ccaatctcgtggatagaaatagcag

SEQ ID NO: 2219196 - DNA, 25 bp, Homo sapien
aatagcaggactgacatttgaatca

SEQ ID NO: 2219197 - DNA, 25 bp, Homo sapien
aaatgaaacatgatagtaatcaatc

SEQ ID NO: 2219198 - DNA, 25 bp, Homo sapien
ttccaaatcttgttccagaagacag

SEQ ID NO: 2219199 - DNA, 25 bp, Homo sapien
caatccacttagttgatataccatt

SEQ ID NO: 2219200 - DNA, 25 bp, Homo sapien
acttaaaccaaacagtatgaaatga

SEQ ID NO: 2219201 - DNA, 25 bp, Homo sapien
catggccgaaggactgagattcatc

SEQ ID NO: 2219202 - DNA, 25 bp, Homo sapien
actccaaactccttgccgctgagaa

SEQ ID NO: 2219203 - DNA, 25 bp, Homo sapien
ttcttcatggccgaaggactgagat

SEQ ID NO: 2219204 - DNA, 25 bp, Homo sapien
gagaatgtgatgcaggagattcttc

SEQ ID NO: 2219205 - DNA, 25 bp, Homo sapien
gagtcacttgattggaagaacagaa

SEQ ID NO: 2219206 - DNA, 25 bp, Homo sapien
ttgatagcaccctactgcttaggta

SEQ ID NO: 2219207 - DNA, 25 bp, Homo sapien
cctgcttccagaccattagggtact

SEQ ID NO: 2219208 - DNA, 25 bp, Homo sapien
tccagtttgtggattagcgaggtaa

SEQ ID NO: 2219209 - DNA, 25 bp, Homo sapien
tttttctatgccatccctatctgta

SEQ ID NO: 2219210 - DNA, 25 bp, Homo sapien
cattttgccctacagctttcacagg

SEQ ID NO: 2219211 - DNA, 25 bp, Homo sapien
tgagttaggtttgactcaaattgat

SEQ ID NO: 2219212 - DNA, 25 bp, Homo sapien
tttcacaggctccaactattcttct

SEQ ID NO: 2219213 - DNA, 25 bp, Homo sapien
tgccataacttgtatgatcagacca

SEQ ID NO: 2219214 - DNA, 25 bp, Homo sapien
agtgggccagttctgttgccataac

SEQ ID NO: 2219215 - DNA, 25 bp, Homo sapien
aattcgaagtcgaaacatttcagca

SEQ ID NO: 2219216 - DNA, 25 bp, Homo sapien
tcgcatatacatggctagatatacc

SEQ ID NO: 2219217 - DNA, 25 bp, Homo sapien
ctgagtgagcgcctcatagggcaga

SEQ ID NO: 2219218 - DNA, 25 bp, Homo sapien
tgtgtaaggattgaaatgctcatat

SEQ ID NO: 2219219 - DNA, 25 bp, Homo sapien
tgaaatgctcatatccccttcactg

SEQ ID NO: 2219220 - DNA, 25 bp, Homo sapien
ggcttcatctatcagctgagtgagc

SEQ ID NO: 2219221 - DNA, 25 bp, Homo sapien
gtcttttctcgaggttctggaggaa

SEQ ID NO: 2219222 - DNA, 25 bp, Homo sapien
gatagtcttttctcgaggttctgga

SEQ ID NO: 2219223 - DNA, 25 bp, Homo sapien
gcagagatagtcttttctcgaggtt

SEQ ID NO: 2219224 - DNA, 25 bp, Homo sapien
gagatagtcttttctcgaggttctg

SEQ ID NO: 2219225 - DNA, 25 bp, Homo sapien
ctggtgggagagaaggtctgtgcag

SEQ ID NO: 2219226 - DNA, 25 bp, Homo sapien
ggtgggagagaaggtctgtgcaggc

SEQ ID NO: 2219227 - DNA, 25 bp, Homo sapien
tggtgggagagaaggtctgtgcagg

SEQ ID NO: 2219228 - DNA, 25 bp, Homo sapien
tcccactttgccatacagctcggta

SEQ ID NO: 2219229 - DNA, 25 bp, Homo sapien
gaaatgtatcggatcaggccccagt

SEQ ID NO: 2219230 - DNA, 25 bp, Homo sapien
tcggtaagaagctctctcactgtag

SEQ ID NO: 2219231 - DNA, 25 bp, Homo sapien
aggccccagtgacgaatttctccca

SEQ ID NO: 2219232 - DNA, 25 bp, Homo sapien
tcatagtatacagcatatagaggat

SEQ ID NO: 2219233 - DNA, 25 bp, Homo sapien
ccagactggtctctaggaagatgta

SEQ ID NO: 2219234 - DNA, 25 bp, Homo sapien
tgtaagcttgaggtctccttcaact

SEQ ID NO: 2219235 - DNA, 25 bp, Homo sapien
catatagaggatatcagcttgttcc

SEQ ID NO: 2219236 - DNA, 25 bp, Homo sapien
aatgaaggccgggaagcctgaaata

SEQ ID NO: 2219237 - DNA, 25 bp, Homo sapien
gcctgaaataacttcgtaggaagat

SEQ ID NO: 2219238 - DNA, 25 bp, Homo sapien
ctcctgtcggggatgaggtgaatca

SEQ ID NO: 2219239 - DNA, 25 bp, Homo sapien
tgaatcaagtaagttgaatgaaggc

SEQ ID NO: 2219240 - DNA, 25 bp, Homo sapien
taagtcacatgtgagtcagttcttc

SEQ ID NO: 2219241 - DNA, 25 bp, Homo sapien
tagcactagctggacatgtaagata

SEQ ID NO: 2219242 - DNA, 25 bp, Homo sapien
tctggctgctagtggttaaatttcc

SEQ ID NO: 2219243 - DNA, 25 bp, Homo sapien
taatccacgatggtgcgttcactga

SEQ ID NO: 2219244 - DNA, 25 bp, Homo sapien
cactgatactttgatggaatacgac

SEQ ID NO: 2219245 - DNA, 25 bp, Homo sapien
gcagtgtgcgccaaaaggtgatcta

SEQ ID NO: 2219246 - DNA, 25 bp, Homo sapien
taagtcgcaggttgtttgcacagca

SEQ ID NO: 2219247 - DNA, 25 bp, Homo sapien
ggtcaccaaggacattaagtcgcag

SEQ ID NO: 2219248 - DNA, 25 bp, Homo sapien
gcacagcagcttggaaccgatctag

SEQ ID NO: 2219249 - DNA, 25 bp, Homo sapien
tacaggctaacagtcaaatacccag

SEQ ID NO: 2219250 - DNA, 25 bp, Homo sapien
tatcacctttgtattgctagaagcc

SEQ ID NO: 2219251 - DNA, 25 bp, Homo sapien
tcttaagataaagaaattggctgcc

SEQ ID NO: 2219252 - DNA, 25 bp, Homo sapien
ctgtagggtagtgttgctcagtcac

SEQ ID NO: 2219253 - DNA, 25 bp, Homo sapien
cacttcaaatgcctgggagaggaat

SEQ ID NO: 2219254 - DNA, 25 bp, Homo sapien
tccccaatcttagtaagggactgtc

SEQ ID NO: 2219255 - DNA, 25 bp, Homo sapien
catgtcaaaatcaccagccacttca

SEQ ID NO: 2219256 - DNA, 25 bp, Homo sapien
ccgcaggaatattagaccagaaacc

SEQ ID NO: 2219257 - DNA, 25 bp, Homo sapien
tcactgtacagcttaccctcaggtc

SEQ ID NO: 2219258 - DNA, 25 bp, Homo sapien
gttgccagattccaggtaatcatag

SEQ ID NO: 2219259 - DNA, 25 bp, Homo sapien
tgtgtgcaacaagatgttgtcaaaa

SEQ ID NO: 2219260 - DNA, 25 bp, Homo sapien
gtccagggtccatgaagctcaagtg

SEQ ID NO: 2219261 - DNA, 25 bp, Homo sapien
tcttgcatttttcggagtgctgcca

SEQ ID NO: 2219262 - DNA, 25 bp, Homo sapien
ctgccaggatacttgaattcaagct

SEQ ID NO: 2219263 - DNA, 25 bp, Homo sapien
tcggagtgctgccaggatacttgaa

SEQ ID NO: 2219264 - DNA, 25 bp, Homo sapien
aatacccatcttgcatttttcggag

SEQ ID NO: 2219265 - DNA, 25 bp, Homo sapien
cagaattttaaaacaatctttgtgg

SEQ ID NO: 2219266 - DNA, 25 bp, Homo sapien
atgaacagaattttaaaacaatctt

SEQ ID NO: 2219267 - DNA, 25 bp, Homo sapien
acagaattttaaaacaatctttgtg

SEQ ID NO: 2219268 - DNA, 25 bp, Homo sapien
ttgaaatgaacagaattttaaaaca

SEQ ID NO: 2219269 - DNA, 25 bp, Homo sapien
ttaatctgataggtaaaacaagaag

SEQ ID NO: 2219270 - DNA, 25 bp, Homo sapien
ggatattacccttttcgctctcata

SEQ ID NO: 2219271 - DNA, 25 bp, Homo sapien
cctacacttttaacaacaatgggca

SEQ ID NO: 2219272 - DNA, 25 bp, Homo sapien
agagtttttcgtgttttgtggatat

SEQ ID NO: 2219273 - DNA, 25 bp, Homo sapien
tgttgtctccattctgctactgggc

SEQ ID NO: 2219274 - DNA, 25 bp, Homo sapien
gctactgggcctatctagtgagttg

SEQ ID NO: 2219275 - DNA, 25 bp, Homo sapien
tgaaagtttaagctccccactagcc

SEQ ID NO: 2219276 - DNA, 25 bp, Homo sapien
tattagtcctacaggtctttgaggc

SEQ ID NO: 2219277 - DNA, 25 bp, Homo sapien
ttcccatcatgaatatataatagtt

SEQ ID NO: 2219278 - DNA, 25 bp, Homo sapien
tatcatgttggtgtactatttatca

SEQ ID NO: 2219279 - DNA, 25 bp, Homo sapien
tcaagtttgttactcctctatgtct

SEQ ID NO: 2219280 - DNA, 25 bp, Homo sapien
tctgtgacattctgatagaagtatg

SEQ ID NO: 2219281 - DNA, 25 bp, Homo sapien
tttggcagtacaaacaggtctttgg

SEQ ID NO: 2219282 - DNA, 25 bp, Homo sapien
cagaaaggaagcagtcgcttcagta

SEQ ID NO: 2219283 - DNA, 25 bp, Homo sapien
acaggtctttggaagcaacaggaga

SEQ ID NO: 2219284 - DNA, 25 bp, Homo sapien
cagtattggctctagtcctccagga

SEQ ID NO: 2219285 - DNA, 25 bp, Homo sapien
atccgccagcggctacagaggtagg

SEQ ID NO: 2219286 - DNA, 25 bp, Homo sapien
tccgccagcggctacagaggtagga

SEQ ID NO: 2219287 - DNA, 25 bp, Homo sapien
tgtcatccgccagcggctacagagg

SEQ ID NO: 2219288 - DNA, 25 bp, Homo sapien
tggcctgtcatccgccagcggctac

SEQ ID NO: 2219289 - DNA, 25 bp, Homo sapien
caagcactcccatgtgtctgtaggg

SEQ ID NO: 2219290 - DNA, 25 bp, Homo sapien
tggagtgaaagtaaagatagttttc

SEQ ID NO: 2219291 - DNA, 25 bp, Homo sapien
tagggtcgtccactgagtttcattc

SEQ ID NO: 2219292 - DNA, 25 bp, Homo sapien
gatagttttccgaatgtcatagagt

SEQ ID NO: 2219293 - DNA, 25 bp, Homo sapien
ctgatacagaattgagaaatggtaa

SEQ ID NO: 2219294 - DNA, 25 bp, Homo sapien
tacagaattgagaaatggtaaaaat

SEQ ID NO: 2219295 - DNA, 25 bp, Homo sapien
tgatacagaattgagaaatggtaaa

SEQ ID NO: 2219296 - DNA, 25 bp, Homo sapien
atacagaattgagaaatggtaaaaa

SEQ ID NO: 2219297 - DNA, 25 bp, Homo sapien
tagcatcagagaattgttaaagcct

SEQ ID NO: 2219298 - DNA, 25 bp, Homo sapien
ccttggtcatattccagggtccatg

SEQ ID NO: 2219299 - DNA, 25 bp, Homo sapien
gcacacattttacctgagattgatg

SEQ ID NO: 2219300 - DNA, 25 bp, Homo sapien
caaatatgccagttttagtgttgct

SEQ ID NO: 2219301 - DNA, 25 bp, Homo sapien
ttgtactctgatggggtatacctca

SEQ ID NO: 2219302 - DNA, 25 bp, Homo sapien
tcagcaatggtctccacgtaaattc

SEQ ID NO: 2219303 - DNA, 25 bp, Homo sapien
ctgagaatacgagctggttgtactc

SEQ ID NO: 2219304 - DNA, 25 bp, Homo sapien
attcccttgtccttcaaaatggtct

SEQ ID NO: 2219305 - DNA, 25 bp, Homo sapien
gactgggagatttagatgaacaacc

SEQ ID NO: 2219306 - DNA, 25 bp, Homo sapien
gaaattatggtgcattggtgactgg

SEQ ID NO: 2219307 - DNA, 25 bp, Homo sapien
cgagtggttctaatagaaattatgg

SEQ ID NO: 2219308 - DNA, 25 bp, Homo sapien
ggctgtgatttttcgagtggttcta

SEQ ID NO: 2219309 - DNA, 25 bp, Homo sapien
cacaacatcgggcttcggtacagta

SEQ ID NO: 2219310 - DNA, 25 bp, Homo sapien
gcttcggtacagtagaaaacctgcg

SEQ ID NO: 2219311 - DNA, 25 bp, Homo sapien
tacagtagaaaacctgcgattcagg

SEQ ID NO: 2219312 - DNA, 25 bp, Homo sapien
cttgaaccacaacatcgggcttcgg

SEQ ID NO: 2219313 - DNA, 25 bp, Homo sapien
ggactcggtccacagtgtgaggatt

SEQ ID NO: 2219314 - DNA, 25 bp, Homo sapien
agcttcctaaaatgtatagagactg

SEQ ID NO: 2219315 - DNA, 25 bp, Homo sapien
agagactgaccccacatgtgaggca

SEQ ID NO: 2219316 - DNA, 25 bp, Homo sapien
acatgtgaggcaatttccccatggg

SEQ ID NO: 2219317 - DNA, 25 bp, Homo sapien
atttttgcccttgatgaggactgct

SEQ ID NO: 2219318 - DNA, 25 bp, Homo sapien
agtgggactccatttttgcccttga

SEQ ID NO: 2219319 - DNA, 25 bp, Homo sapien
aagtgggactccatttttgcccttg

SEQ ID NO: 2219320 - DNA, 25 bp, Homo sapien
tttgcccttgatgaggactgcttca

SEQ ID NO: 2219321 - DNA, 25 bp, Homo sapien
taaagtatgtccagaacaatggcca

SEQ ID NO: 2219322 - DNA, 25 bp, Homo sapien
gaagaccccatcaagaataaagtat

SEQ ID NO: 2219323 - DNA, 25 bp, Homo sapien
tctgcattgccactgaagaccccat

SEQ ID NO: 2219324 - DNA, 25 bp, Homo sapien
cagctcagctggttcatagtacaga

SEQ ID NO: 2219325 - DNA, 25 bp, Homo sapien
gaaagcgacagcaaccataacgacc

SEQ ID NO: 2219326 - DNA, 25 bp, Homo sapien
gttttatatccatctcgtagaaagc

SEQ ID NO: 2219327 - DNA, 25 bp, Homo sapien
tatccatctcgtagaaagcgacagc

SEQ ID NO: 2219328 - DNA, 25 bp, Homo sapien
catctcgtagaaagcgacagcaacc

SEQ ID NO: 2219329 - DNA, 25 bp, Homo sapien
ctatcctctactgcaaaggcaggga

SEQ ID NO: 2219330 - DNA, 25 bp, Homo sapien
atcaacctcttttgatgttgaagca

SEQ ID NO: 2219331 - DNA, 25 bp, Homo sapien
accaactggctatcctctactgcaa

SEQ ID NO: 2219332 - DNA, 25 bp, Homo sapien
ccactgagagtagactagcatcaac

SEQ ID NO: 2219333 - DNA, 25 bp, Homo sapien
ccaggacatggataactgattgagg

SEQ ID NO: 2219334 - DNA, 25 bp, Homo sapien
gattgaggcccacctttcacaccaa

SEQ ID NO: 2219335 - DNA, 25 bp, Homo sapien
gttcatctaatgcttccagggctgc

SEQ ID NO: 2219336 - DNA, 25 bp, Homo sapien
tcacaccaaacagatccagttcatc

SEQ ID NO: 2219337 - DNA, 25 bp, Homo sapien
tgccattccaactgaactggcattc

SEQ ID NO: 2219338 - DNA, 25 bp, Homo sapien
ctgagatcccttggttggtcttgtc

SEQ ID NO: 2219339 - DNA, 25 bp, Homo sapien
tttgccattccaactgaactggcat

SEQ ID NO: 2219340 - DNA, 25 bp, Homo sapien
gccattccaactgaactggcattca

SEQ ID NO: 2219341 - DNA, 25 bp, Homo sapien
gaacatggtaggtcctgcctgcaat

SEQ ID NO: 2219342 - DNA, 25 bp, Homo sapien
tcctgtgaccttttgacatgcctat

SEQ ID NO: 2219343 - DNA, 25 bp, Homo sapien
ccactgatggatcttgccagaaaca

SEQ ID NO: 2219344 - DNA, 25 bp, Homo sapien
tagttgcaactcttctctaaggaag

SEQ ID NO: 2219345 - DNA, 25 bp, Homo sapien
gccccagctgcagatatgaagcgga

SEQ ID NO: 2219346 - DNA, 25 bp, Homo sapien
cgggcagcggagctgtctcagtctt

SEQ ID NO: 2219347 - DNA, 25 bp, Homo sapien
cgcccgaccgccgggaggatggagt

SEQ ID NO: 2219348 - DNA, 25 bp, Homo sapien
aggatggagttcagcgggcagcgga

SEQ ID NO: 2219349 - DNA, 25 bp, Homo sapien
aaacacaaggttctgtatgaaattg

SEQ ID NO: 2219350 - DNA, 25 bp, Homo sapien
tgaaattgacttcatctaggctgtg

SEQ ID NO: 2219351 - DNA, 25 bp, Homo sapien
tctaggctgtggatgatatggagtc

SEQ ID NO: 2219352 - DNA, 25 bp, Homo sapien
cagttttatatgcagcttcaatgta

SEQ ID NO: 2219353 - DNA, 25 bp, Homo sapien
cattgatcatcacccactacagtgg

SEQ ID NO: 2219354 - DNA, 25 bp, Homo sapien
gcatggaggctatccttagtactct

SEQ ID NO: 2219355 - DNA, 25 bp, Homo sapien
cagaggtagcatccaactgcaggtg

SEQ ID NO: 2219356 - DNA, 25 bp, Homo sapien
tgaggcagtcatttgggctaagaag

SEQ ID NO: 2219357 - DNA, 25 bp, Homo sapien
gatcatgcagtgcagtagtcctctc

SEQ ID NO: 2219358 - DNA, 25 bp, Homo sapien
ctgtctgatcatgcagtgcagtagt

SEQ ID NO: 2219359 - DNA, 25 bp, Homo sapien
gcagtagtcctctcatcagcttcac

SEQ ID NO: 2219360 - DNA, 25 bp, Homo sapien
cagtgcagtagtcctctcatcagct

SEQ ID NO: 2219361 - DNA, 25 bp, Homo sapien
tggagctcagattgcctaagtcttg

SEQ ID NO: 2219362 - DNA, 25 bp, Homo sapien
caaatgcctgctgttgctaaggaca

SEQ ID NO: 2219363 - DNA, 25 bp, Homo sapien
taaaagttggcttaaaggcatctgc

SEQ ID NO: 2219364 - DNA, 25 bp, Homo sapien
gatttatagatgaagactggagctc

SEQ ID NO: 2219365 - DNA, 25 bp, Homo sapien
tttgccttatcctcatcccggtctg

SEQ ID NO: 2219366 - DNA, 25 bp, Homo sapien
tatctcggacccaagcatctttctg

SEQ ID NO: 2219367 - DNA, 25 bp, Homo sapien
ggtctgcattcttccgataggccag

SEQ ID NO: 2219368 - DNA, 25 bp, Homo sapien
tgctgtacacattatctcggaccca

SEQ ID NO: 2219369 - DNA, 25 bp, Homo sapien
ccccggagttactccggctcctcat

SEQ ID NO: 2219370 - DNA, 25 bp, Homo sapien
cagtcgagcgtagccgtccagccgg

SEQ ID NO: 2219371 - DNA, 25 bp, Homo sapien
tgcaccagtcgagcgtagccgtcca

SEQ ID NO: 2219372 - DNA, 25 bp, Homo sapien
ctgttgcaccagtcgagcgtagccg

SEQ ID NO: 2219373 - DNA, 25 bp, Homo sapien
aacgctgctccaccctcgtggtggg

SEQ ID NO: 2219374 - DNA, 25 bp, Homo sapien
taaggaacaagtatccaacgctgct

SEQ ID NO: 2219375 - DNA, 25 bp, Homo sapien
tcctctgagaaatagcccgggtgcc

SEQ ID NO: 2219376 - DNA, 25 bp, Homo sapien
gacacgttactaattgtcctctgag

SEQ ID NO: 2219377 - DNA, 25 bp, Homo sapien
ctttgctccgttcatctccggctcc

SEQ ID NO: 2219378 - DNA, 25 bp, Homo sapien
tttgctccgttcatctccggctcct

SEQ ID NO: 2219379 - DNA, 25 bp, Homo sapien
ttgctccgttcatctccggctcctc

SEQ ID NO: 2219380 - DNA, 25 bp, Homo sapien
tacctcttagtctcctgatggaaaa

SEQ ID NO: 2219381 - DNA, 25 bp, Homo sapien
ggaaaagaagaacgattatcagtgg

SEQ ID NO: 2219382 - DNA, 25 bp, Homo sapien
tcagactgcgttttctacctcttag

SEQ ID NO: 2219383 - DNA, 25 bp, Homo sapien
tttctggcaccctacacattcagag

SEQ ID NO: 2219384 - DNA, 25 bp, Homo sapien
ctggttgctgtctgatggtcatttt

SEQ ID NO: 2219385 - DNA, 25 bp, Homo sapien
gccatattcataatagtgaatctta

SEQ ID NO: 2219386 - DNA, 25 bp, Homo sapien
ttcataatagtgaatcttaagcact

SEQ ID NO: 2219387 - DNA, 25 bp, Homo sapien
tttcactggttgctgtctgatggtc

SEQ ID NO: 2219388 - DNA, 25 bp, Homo sapien
cttccactccaatgaccacttcaga

SEQ ID NO: 2219389 - DNA, 25 bp, Homo sapien
tccactccaatgaccacttcagaat

SEQ ID NO: 2219390 - DNA, 25 bp, Homo sapien
tccaatgaccacttcagaattttta

SEQ ID NO: 2219391 - DNA, 25 bp, Homo sapien
cactccaatgaccacttcagaattt

SEQ ID NO: 2219392 - DNA, 25 bp, Homo sapien
tcaatgcatgcaggaatagtctgtt

SEQ ID NO: 2219393 - DNA, 25 bp, Homo sapien
ctttcaatgcatgcaggaatagtct

SEQ ID NO: 2219394 - DNA, 25 bp, Homo sapien
aatgcatgcaggaatagtctgttgc

SEQ ID NO: 2219395 - DNA, 25 bp, Homo sapien
tgcatgcaggaatagtctgttgccc

SEQ ID NO: 2219396 - DNA, 25 bp, Homo sapien
taacataaacagtacagaagccgct

SEQ ID NO: 2219397 - DNA, 25 bp, Homo sapien
gtacagaagccgctggaataatgat

SEQ ID NO: 2219398 - DNA, 25 bp, Homo sapien
aagccgctggaataatgatctttca

SEQ ID NO: 2219399 - DNA, 25 bp, Homo sapien
cagaagccgctggaataatgatctt

SEQ ID NO: 2219400 - DNA, 25 bp, Homo sapien
gcttttttccatacgtgatcaaatt

SEQ ID NO: 2219401 - DNA, 25 bp, Homo sapien
ctagaaatctgctattacctaggtt

SEQ ID NO: 2219402 - DNA, 25 bp, Homo sapien
tttttccatacgtgatcaaatttaa

SEQ ID NO: 2219403 - DNA, 25 bp, Homo sapien
agaaatctgctattacctaggttag

SEQ ID NO: 2219404 - DNA, 25 bp, Homo sapien
gcaattaagacctgatcttcatatc

SEQ ID NO: 2219405 - DNA, 25 bp, Homo sapien
tgcaattaagacctgatcttcatat

SEQ ID NO: 2219406 - DNA, 25 bp, Homo sapien
ctgcaattaagacctgatcttcata

SEQ ID NO: 2219407 - DNA, 25 bp, Homo sapien
tcagggtgcaatagatgagcctcaa

SEQ ID NO: 2219408 - DNA, 25 bp, Homo sapien
aaagtgcgaactcagtcccccatgt

SEQ ID NO: 2219409 - DNA, 25 bp, Homo sapien
tggaaatatcgggtgtcagcacact

SEQ ID NO: 2219410 - DNA, 25 bp, Homo sapien
tcgagtctcccctgtttgtggaaat

SEQ ID NO: 2219411 - DNA, 25 bp, Homo sapien
tgaaggtttctgggcttcttcccca

SEQ ID NO: 2219412 - DNA, 25 bp, Homo sapien
tggagaggtactagttctaaatatc

SEQ ID NO: 2219413 - DNA, 25 bp, Homo sapien
aacatggagaggtactagttctaaa

SEQ ID NO: 2219414 - DNA, 25 bp, Homo sapien
aaatatctcaattctctgtcaatca

SEQ ID NO: 2219415 - DNA, 25 bp, Homo sapien
gcaaacatggagaggtactagttct

SEQ ID NO: 2219416 - DNA, 25 bp, Homo sapien
gggtgtattgccaagccctctctgc

SEQ ID NO: 2219417 - DNA, 25 bp, Homo sapien
ttaccatctcatagagaagagttct

SEQ ID NO: 2219418 - DNA, 25 bp, Homo sapien
agagttctttcctagcagggtgtat

SEQ ID NO: 2219419 - DNA, 25 bp, Homo sapien
ccatggtttgttaaccagcaggaat

SEQ ID NO: 2219420 - DNA, 25 bp, Homo sapien
tcagcttgggtcatcctctggtggc

SEQ ID NO: 2219421 - DNA, 25 bp, Homo sapien
tctggtggcccctcttcaaaagtgt

SEQ ID NO: 2219422 - DNA, 25 bp, Homo sapien
cccctcttcaaaagtgtaaagcatt

SEQ ID NO: 2219423 - DNA, 25 bp, Homo sapien
ttgggtcatcctctggtggcccctc

SEQ ID NO: 2219424 - DNA, 25 bp, Homo sapien
ctgctcagaggcaactgatagtggg

SEQ ID NO: 2219425 - DNA, 25 bp, Homo sapien
tggagctgctcagaggcaactgata

SEQ ID NO: 2219426 - DNA, 25 bp, Homo sapien
ctgtagaagagaccaccaaggcagg

SEQ ID NO: 2219427 - DNA, 25 bp, Homo sapien
tggtggtgcatgggaaggctggagc

SEQ ID NO: 2219428 - DNA, 25 bp, Homo sapien
cgcggcgacgtcactgtcctctcgg

SEQ ID NO: 2219429 - DNA, 25 bp, Homo sapien
ctggggctccgggtcttcttagcag

SEQ ID NO: 2219430 - DNA, 25 bp, Homo sapien
gggtcttcttagcagccgccgcagc

SEQ ID NO: 2219431 - DNA, 25 bp, Homo sapien
cgacgtcactgtcctctcggcctgg

SEQ ID NO: 2219432 - DNA, 25 bp, Homo sapien
gccgaatgcccgtggacgcgcatct

SEQ ID NO: 2219433 - DNA, 25 bp, Homo sapien
cgtccgcggtagaggtgacacccag

SEQ ID NO: 2219434 - DNA, 25 bp, Homo sapien
aatgcccgtggacgcgcatctcttc

SEQ ID NO: 2219435 - DNA, 25 bp, Homo sapien
gccaaagccgcaggtgagaacgtcc

SEQ ID NO: 2219436 - DNA, 25 bp, Homo sapien
tcttctgaggcatggagcccctgct

SEQ ID NO: 2219437 - DNA, 25 bp, Homo sapien
ggggacaccaagtgctccccggagc

SEQ ID NO: 2219438 - DNA, 25 bp, Homo sapien
cttcttctgaggcatggagcccctg

SEQ ID NO: 2219439 - DNA, 25 bp, Homo sapien
tctgaggcatggagcccctgctcag

SEQ ID NO: 2219440 - DNA, 25 bp, Homo sapien
cggtggcgatcaaaagggcagacat

SEQ ID NO: 2219441 - DNA, 25 bp, Homo sapien
ctgctggttaagaaccggaagacgg

SEQ ID NO: 2219442 - DNA, 25 bp, Homo sapien
taagaaccggaagacggtggcgatc

SEQ ID NO: 2219443 - DNA, 25 bp, Homo sapien
accggaagacggtggcgatcaaaag

SEQ ID NO: 2219444 - DNA, 25 bp, Homo sapien
tgacaagtgccagtgttagtgccag

SEQ ID NO: 2219445 - DNA, 25 bp, Homo sapien
tcctttccgtggcagtaaatgaggc

SEQ ID NO: 2219446 - DNA, 25 bp, Homo sapien
aatgcaagtgccagttgccagtgcc

SEQ ID NO: 2219447 - DNA, 25 bp, Homo sapien
tccagggcctatgccatggctgaag

SEQ ID NO: 2219448 - DNA, 25 bp, Homo sapien
ttattccgtcgtcattcctgcatgt

SEQ ID NO: 2219449 - DNA, 25 bp, Homo sapien
attccgtcgtcattcctgcatgtaa

SEQ ID NO: 2219450 - DNA, 25 bp, Homo sapien
tattccgtcgtcattcctgcatgta

SEQ ID NO: 2219451 - DNA, 25 bp, Homo sapien
aaaactcaccattgattggccacag

SEQ ID NO: 2219452 - DNA, 25 bp, Homo sapien
agctgccagctgtggaaaactcacc

SEQ ID NO: 2219453 - DNA, 25 bp, Homo sapien
ccaggacccaggaacaagcagcgct

SEQ ID NO: 2219454 - DNA, 25 bp, Homo sapien
aggacccaggaacaagcagcgctgc

SEQ ID NO: 2219455 - DNA, 25 bp, Homo sapien
ttcacccgacgtgttgaaagttaca

SEQ ID NO: 2219456 - DNA, 25 bp, Homo sapien
cccgacgtgttgaaagttacatcaa

SEQ ID NO: 2219457 - DNA, 25 bp, Homo sapien
cgtgttgaaagttacatcaaatgcc

SEQ ID NO: 2219458 - DNA, 25 bp, Homo sapien
cccacttcacccgacgtgttgaaag

SEQ ID NO: 2219459 - DNA, 25 bp, Homo sapien
tatttcaggcctggtgactgggaca

SEQ ID NO: 2219460 - DNA, 25 bp, Homo sapien
ttatttcaggcctggtgactgggac

SEQ ID NO: 2219461 - DNA, 25 bp, Homo sapien
catttatttcaggcctggtgactgg

SEQ ID NO: 2219462 - DNA, 25 bp, Homo sapien
tttatttcaggcctggtgactggga

SEQ ID NO: 2219463 - DNA, 25 bp, Homo sapien
gcagcagaaggggcttggtcaccgt

SEQ ID NO: 2219464 - DNA, 25 bp, Homo sapien
agcagcagaaggggcttggtcaccg

SEQ ID NO: 2219465 - DNA, 25 bp, Homo sapien
gtggtctcagattccgagtgcccgg

SEQ ID NO: 2219466 - DNA, 25 bp, Homo sapien
ctgtggctccggtggtctcagattc

SEQ ID NO: 2219467 - DNA, 25 bp, Homo sapien
ctgtgtctgtggctccggtggtctc

SEQ ID NO: 2219468 - DNA, 25 bp, Homo sapien
ctcagattccgagtgcccggtatcc

SEQ ID NO: 2219469 - DNA, 25 bp, Homo sapien
cagagtgacaagtggaccctcggga

SEQ ID NO: 2219470 - DNA, 25 bp, Homo sapien
gcagagtgacaagtggaccctcggg

SEQ ID NO: 2219471 - DNA, 25 bp, Homo sapien
ccaccggatgggtcctccgtggcgt

SEQ ID NO: 2219472 - DNA, 25 bp, Homo sapien
tgggtcctccgtggcgtcagacaca

SEQ ID NO: 2219473 - DNA, 25 bp, Homo sapien
ccacccattcctcagggtcgttttg

SEQ ID NO: 2219474 - DNA, 25 bp, Homo sapien
cattcctcagggtcgttttgcagcc

SEQ ID NO: 2219475 - DNA, 25 bp, Homo sapien
gtggaaggaagggagtgaagatcat

SEQ ID NO: 2219476 - DNA, 25 bp, Homo sapien
caggtcagcaggtggaaggaaggga

SEQ ID NO: 2219477 - DNA, 25 bp, Homo sapien
gtcagcaggtggaaggaagggagtg

SEQ ID NO: 2219478 - DNA, 25 bp, Homo sapien
ggtggaaggaagggagtgaagatca

SEQ ID NO: 2219479 - DNA, 25 bp, Homo sapien
cgacaggacttcgttgaagacaccg

SEQ ID NO: 2219480 - DNA, 25 bp, Homo sapien
gtagggaccgacaggacttcgttga

SEQ ID NO: 2219481 - DNA, 25 bp, Homo sapien
gaccgacaggacttcgttgaagaca

SEQ ID NO: 2219482 - DNA, 25 bp, Homo sapien
gggaccgacaggacttcgttgaaga

SEQ ID NO: 2219483 - DNA, 25 bp, Homo sapien
cctccacgccccattcagcccctct

SEQ ID NO: 2219484 - DNA, 25 bp, Homo sapien
ctccacgccccattcagcccctctg

SEQ ID NO: 2219485 - DNA, 25 bp, Homo sapien
cccctccacgccccattcagcccct

SEQ ID NO: 2219486 - DNA, 25 bp, Homo sapien
tccacgccccattcagcccctctgc

SEQ ID NO: 2219487 - DNA, 25 bp, Homo sapien
agagtttcgggcacactcttaagct

SEQ ID NO: 2219488 - DNA, 25 bp, Homo sapien
taatgagctgtacccttacagagct

SEQ ID NO: 2219489 - DNA, 25 bp, Homo sapien
agctttccacctgtaagagtttcgg

SEQ ID NO: 2219490 - DNA, 25 bp, Homo sapien
ttccatgcgccaagatcacactgag

SEQ ID NO: 2219491 - DNA, 25 bp, Homo sapien
tcaggcccggtgaccgggacactgg

SEQ ID NO: 2219492 - DNA, 25 bp, Homo sapien
gctcggtcaccgttcacgcctgtgt

SEQ ID NO: 2219493 - DNA, 25 bp, Homo sapien
catcagagggggctcggtcaccgtt

SEQ ID NO: 2219494 - DNA, 25 bp, Homo sapien
ggggctcggtcaccgttcacgcctg

SEQ ID NO: 2219495 - DNA, 25 bp, Homo sapien
actggatgggtcctccgcggtgtca

SEQ ID NO: 2219496 - DNA, 25 bp, Homo sapien
agatacagcaaccaattcctcaggg

SEQ ID NO: 2219497 - DNA, 25 bp, Homo sapien
cagaggctggctccgaaggagctct

SEQ ID NO: 2219498 - DNA, 25 bp, Homo sapien
ctctcgcctgaagcacttgatgaaa

SEQ ID NO: 2219499 - DNA, 25 bp, Homo sapien
tagggaccaacaggacttcaatgaa

SEQ ID NO: 2219500 - DNA, 25 bp, Homo sapien
gggaccaacaggacttcaatgaaga

SEQ ID NO: 2219501 - DNA, 25 bp, Homo sapien
ggaccaacaggacttcaatgaagac

SEQ ID NO: 2219502 - DNA, 25 bp, Homo sapien
ggtagggaccaacaggacttcaatg

SEQ ID NO: 2219503 - DNA, 25 bp, Homo sapien
caggtctgtgcggtccgcaccgctg

SEQ ID NO: 2219504 - DNA, 25 bp, Homo sapien
ggtccgcaccgctgacttcacagga

SEQ ID NO: 2219505 - DNA, 25 bp, Homo sapien
tgtgcggtccgcaccgctgacttca

SEQ ID NO: 2219506 - DNA, 25 bp, Homo sapien
gtccgcaccgctgacttcacaggag

SEQ ID NO: 2219507 - DNA, 25 bp, Homo sapien
agagttgatctctgtgagcctatca

SEQ ID NO: 2219508 - DNA, 25 bp, Homo sapien
tgggccgtgccctgaatgaggctct

SEQ ID NO: 2219509 - DNA, 25 bp, Homo sapien
taatcctgaggctacagagttgatc

SEQ ID NO: 2219510 - DNA, 25 bp, Homo sapien
tctgtgagcctatcatgggccgtgc

SEQ ID NO: 2219511 - DNA, 25 bp, Homo sapien
gaccatgtgaaagggaccacaaccg

SEQ ID NO: 2219512 - DNA, 25 bp, Homo sapien
ccacaaccggagctctagaagcaaa

SEQ ID NO: 2219513 - DNA, 25 bp, Homo sapien
gaagcaaagatgtatagctcaccac

SEQ ID NO: 2219514 - DNA, 25 bp, Homo sapien
tttaaagccttatgatcaccaagcc

SEQ ID NO: 2219515 - DNA, 25 bp, Homo sapien
tttgccacatttactgaatttcctg

SEQ ID NO: 2219516 - DNA, 25 bp, Homo sapien
catttactgaatttcctgattgtca

SEQ ID NO: 2219517 - DNA, 25 bp, Homo sapien
cacatttactgaatttcctgattgt

SEQ ID NO: 2219518 - DNA, 25 bp, Homo sapien
ataatggccaatttgccacatttac

SEQ ID NO: 2219519 - DNA, 25 bp, Homo sapien
aaggcagcgcaagagctcattggcc

SEQ ID NO: 2219520 - DNA, 25 bp, Homo sapien
attggcctttgtggcaagagcggga

SEQ ID NO: 2219521 - DNA, 25 bp, Homo sapien
tcattggtcgccagccacagcggcg

SEQ ID NO: 2219522 - DNA, 25 bp, Homo sapien
tcagaccgtctgactggttctgact

SEQ ID NO: 2219523 - DNA, 25 bp, Homo sapien
tttccctatggatgtactgaggaca

SEQ ID NO: 2219524 - DNA, 25 bp, Homo sapien
tataggttgctgtgaccgctgccac

SEQ ID NO: 2219525 - DNA, 25 bp, Homo sapien
tgaccctagaagcatggatcccgtg

SEQ ID NO: 2219526 - DNA, 25 bp, Homo sapien
gaggacaaataaatacccgctgcac

SEQ ID NO: 2219527 - DNA, 25 bp, Homo sapien
tctctgccctgtactccagtgacct

SEQ ID NO: 2219528 - DNA, 25 bp, Homo sapien
gtctctgccctgtactccagtgacc

SEQ ID NO: 2219529 - DNA, 25 bp, Homo sapien
gccctgtactccagtgaccttggag

SEQ ID NO: 2219530 - DNA, 25 bp, Homo sapien
cctgtgccacccttgaccctcttct

SEQ ID NO: 2219531 - DNA, 25 bp, Homo sapien
gcctattctctcatgcactttcctt

SEQ ID NO: 2219532 - DNA, 25 bp, Homo sapien
cacttgtcgtattgggaagaggtgt

SEQ ID NO: 2219533 - DNA, 25 bp, Homo sapien
gggcggagtttagtggatgggaaga

SEQ ID NO: 2219534 - DNA, 25 bp, Homo sapien
cctgcaccagccttgcaacccacca

SEQ ID NO: 2219535 - DNA, 25 bp, Homo sapien
tctgctgactctgagaaactctgcc

SEQ ID NO: 2219536 - DNA, 25 bp, Homo sapien
agctggaggccgctgaggctctgct

SEQ ID NO: 2219537 - DNA, 25 bp, Homo sapien
caggctttggtttctgcccactcag

SEQ ID NO: 2219538 - DNA, 25 bp, Homo sapien
ggatggcaggtatatcagttatttc

SEQ ID NO: 2219539 - DNA, 25 bp, Homo sapien
ggagcataatggctagtgttgtcac

SEQ ID NO: 2219540 - DNA, 25 bp, Homo sapien
aaacattcgtgtttctgactttgaa

SEQ ID NO: 2219541 - DNA, 25 bp, Homo sapien
ttaaactttatagaggatggcaggt

SEQ ID NO: 2219542 - DNA, 25 bp, Homo sapien
caagttgtaattggatgtcatccga

SEQ ID NO: 2219543 - DNA, 25 bp, Homo sapien
catccgaatcaattgtcttgggtaa

SEQ ID NO: 2219544 - DNA, 25 bp, Homo sapien
tggatgtcatccgaatcaattgtct

SEQ ID NO: 2219545 - DNA, 25 bp, Homo sapien
aaggacaagttgtaattggatgtca

SEQ ID NO: 2219546 - DNA, 25 bp, Homo sapien
gagttttgaaccttttattcaatgc

SEQ ID NO: 2219547 - DNA, 25 bp, Homo sapien
ttaaaaatcgaattattcgctgatt

SEQ ID NO: 2219548 - DNA, 25 bp, Homo sapien
ccctctgactgatgtttgttgcttt

SEQ ID NO: 2219549 - DNA, 25 bp, Homo sapien
aatcgaattattcgctgatttaggg

SEQ ID NO: 2219550 - DNA, 25 bp, Homo sapien
catgagtgcacaggtatgtcagcaa

SEQ ID NO: 2219551 - DNA, 25 bp, Homo sapien
aaaaggccccagcatccaaaagagt

SEQ ID NO: 2219552 - DNA, 25 bp, Homo sapien
taaaaactctggcatatgaactcac

SEQ ID NO: 2219553 - DNA, 25 bp, Homo sapien
ttcagaaactggataccaaataggc

SEQ ID NO: 2219554 - DNA, 25 bp, Homo sapien
gagatgcatcccagatgtccaatag

SEQ ID NO: 2219555 - DNA, 25 bp, Homo sapien
gtccaataggcagcgagatggagct

SEQ ID NO: 2219556 - DNA, 25 bp, Homo sapien
tgtccaataggcagcgagatggagc

SEQ ID NO: 2219557 - DNA, 25 bp, Homo sapien
gatgtccaataggcagcgagatgga

SEQ ID NO: 2219558 - DNA, 25 bp, Homo sapien
caacgacccccattccccagctatt

SEQ ID NO: 2219559 - DNA, 25 bp, Homo sapien
cacaacgacccccattccccagcta

SEQ ID NO: 2219560 - DNA, 25 bp, Homo sapien
acaacgacccccattccccagctat

SEQ ID NO: 2219561 - DNA, 25 bp, Homo sapien
gacccccattccccagctattccca

SEQ ID NO: 2219562 - DNA, 25 bp, Homo sapien
tgtattctcctttcagggagcaggc

SEQ ID NO: 2219563 - DNA, 25 bp, Homo sapien
tattctcctttcagggagcaggcta

SEQ ID NO: 2219564 - DNA, 25 bp, Homo sapien
cctgtattctcctttcagggagcag

SEQ ID NO: 2219565 - DNA, 25 bp, Homo sapien
attctcctttcagggagcaggctac

SEQ ID NO: 2219566 - DNA, 25 bp, Homo sapien
ctgagtgggcagaaaccaaagcctg

SEQ ID NO: 2219567 - DNA, 25 bp, Homo sapien
tcttcccaatacgacaagtgcccct

SEQ ID NO: 2219568 - DNA, 25 bp, Homo sapien
tgctcttcccatccactaaactccg

SEQ ID NO: 2219569 - DNA, 25 bp, Homo sapien
ggaaaggaaagtgcatgagagaata

SEQ ID NO: 2219570 - DNA, 25 bp, Homo sapien
taggcactgggaaactacacctctt

SEQ ID NO: 2219571 - DNA, 25 bp, Homo sapien
tagaagagggtcaagggtggcacag

SEQ ID NO: 2219572 - DNA, 25 bp, Homo sapien
gggctggaggatcagagttgagcat

SEQ ID NO: 2219573 - DNA, 25 bp, Homo sapien
ctgtggctgcagtagaagagggtca

SEQ ID NO: 2219574 - DNA, 25 bp, Homo sapien
gctgcagtagaagagggtcaagggt

SEQ ID NO: 2219575 - DNA, 25 bp, Homo sapien
gatccccagaaggagaaaccagttg

SEQ ID NO: 2219576 - DNA, 25 bp, Homo sapien
cactggagtacagggcagagacaaa

SEQ ID NO: 2219577 - DNA, 25 bp, Homo sapien
cagaaggagaaaccagttgctgctc

SEQ ID NO: 2219578 - DNA, 25 bp, Homo sapien
caaggtcactggagtacagggcaga

SEQ ID NO: 2219579 - DNA, 25 bp, Homo sapien
gtgaagatgtgggtctcgggctgca

SEQ ID NO: 2219580 - DNA, 25 bp, Homo sapien
aagatgtgggtctcgggctgcagca

SEQ ID NO: 2219581 - DNA, 25 bp, Homo sapien
agatgtgggtctcgggctgcagcat

SEQ ID NO: 2219582 - DNA, 25 bp, Homo sapien
tgaagatgtgggtctcgggctgcag

SEQ ID NO: 2219583 - DNA, 25 bp, Homo sapien
accccacctccagtcgcaggtctca

SEQ ID NO: 2219584 - DNA, 25 bp, Homo sapien
aaagaccaggaacagctttggtgag

SEQ ID NO: 2219585 - DNA, 25 bp, Homo sapien
gaccaggaacagctttggtgagtct

SEQ ID NO: 2219586 - DNA, 25 bp, Homo sapien
cttcaccccacctccagtcgcaggt

SEQ ID NO: 2219587 - DNA, 25 bp, Homo sapien
cctgacacggatgggagctttggga

SEQ ID NO: 2219588 - DNA, 25 bp, Homo sapien
tcctgacacggatgggagctttggg

SEQ ID NO: 2219589 - DNA, 25 bp, Homo sapien
ttcctgacacggatgggagctttgg

SEQ ID NO: 2219590 - DNA, 25 bp, Homo sapien
tgacacggatgggagctttgggagg

SEQ ID NO: 2219591 - DNA, 25 bp, Homo sapien
tgtctctttgatcgtgcccgctgct

SEQ ID NO: 2219592 - DNA, 25 bp, Homo sapien
cagcaggcaagaccctgaggcgttc

SEQ ID NO: 2219593 - DNA, 25 bp, Homo sapien
actccttattggtccttgagccagg

SEQ ID NO: 2219594 - DNA, 25 bp, Homo sapien
tattggtccttgagccaggtgtctc

SEQ ID NO: 2219595 - DNA, 25 bp, Homo sapien
cagtgatacccaaatggttgtggca

SEQ ID NO: 2219596 - DNA, 25 bp, Homo sapien
caccatactcatgagaagagggcac

SEQ ID NO: 2219597 - DNA, 25 bp, Homo sapien
tagtcccatttagaggaggtctggc

SEQ ID NO: 2219598 - DNA, 25 bp, Homo sapien
gatagcagggctaagattagtccca

SEQ ID NO: 2219599 - DNA, 25 bp, Homo sapien
tcaggaagcccaatcatccactccc

SEQ ID NO: 2219600 - DNA, 25 bp, Homo sapien
cctcaggaagcccaatcatccactc

SEQ ID NO: 2219601 - DNA, 25 bp, Homo sapien
gcccaatcatccactccctcccgga

SEQ ID NO: 2219602 - DNA, 25 bp, Homo sapien
aggaagcccaatcatccactccctc

SEQ ID NO: 2219603 - DNA, 25 bp, Homo sapien
ctgcctcattggccaaaggccaggg

SEQ ID NO: 2219604 - DNA, 25 bp, Homo sapien
cctgcctcattggccaaaggccagg

SEQ ID NO: 2219605 - DNA, 25 bp, Homo sapien
atcaaaagcaatcccatgagccctg

SEQ ID NO: 2219606 - DNA, 25 bp, Homo sapien
aatcaaaagcaatcccatgagccct

SEQ ID NO: 2219607 - DNA, 25 bp, Homo sapien
tgtgcatatttacgaggtacagagt

SEQ ID NO: 2219608 - DNA, 25 bp, Homo sapien
caatagatcactaaagcttcttgct

SEQ ID NO: 2219609 - DNA, 25 bp, Homo sapien
tcctcctatcgatctgtaatattgt

SEQ ID NO: 2219610 - DNA, 25 bp, Homo sapien
caatgtgtaatgactataccagagt

SEQ ID NO: 2219611 - DNA, 25 bp, Homo sapien
tcttcgtttatttgaggtctcttgg

SEQ ID NO: 2219612 - DNA, 25 bp, Homo sapien
ttctaatccataggcatggaatgcc

SEQ ID NO: 2219613 - DNA, 25 bp, Homo sapien
agcctttaagtttctataacaatat

SEQ ID NO: 2219614 - DNA, 25 bp, Homo sapien
ggtctcttggggtcccatatgaatt

SEQ ID NO: 2219615 - DNA, 25 bp, Homo sapien
gtttgcagggagctcctgtgaagtc

SEQ ID NO: 2219616 - DNA, 25 bp, Homo sapien
ctcctgtgaagtcagcggtgcggac

SEQ ID NO: 2219617 - DNA, 25 bp, Homo sapien
tgaagtcagcggtgcggaccgcaca

SEQ ID NO: 2219618 - DNA, 25 bp, Homo sapien
actgtttgcagggagctcctgtgaa

SEQ ID NO: 2219619 - DNA, 25 bp, Homo sapien
cagaaacaaatggaatgcgacatgc

SEQ ID NO: 2219620 - DNA, 25 bp, Homo sapien
tctgctcggcaaggagaaacgtggc

SEQ ID NO: 2219621 - DNA, 25 bp, Homo sapien
tgcgacatgccagaaatgtatcccc

SEQ ID NO: 2219622 - DNA, 25 bp, Homo sapien
gtggctcgagcctgctgagagggcc

SEQ ID NO: 2219623 - DNA, 25 bp, Homo sapien
agctgctgtcataaccatgagctca

SEQ ID NO: 2219624 - DNA, 25 bp, Homo sapien
ttccttcatagctgctgtcataacc

SEQ ID NO: 2219625 - DNA, 25 bp, Homo sapien
agtccaaaagaggagcagcgttcca

SEQ ID NO: 2219626 - DNA, 25 bp, Homo sapien
agcgttccaactccctagggctggg

SEQ ID NO: 2219627 - DNA, 25 bp, Homo sapien
tcagaaaacatgaacttcactggca

SEQ ID NO: 2219628 - DNA, 25 bp, Homo sapien
catgtacatcgcacttctcagaaaa

SEQ ID NO: 2219629 - DNA, 25 bp, Homo sapien
aataagtcctttcagacaccacatg

SEQ ID NO: 2219630 - DNA, 25 bp, Homo sapien
tctgccggcctctgacaataagtcc

SEQ ID NO: 2219631 - DNA, 25 bp, Homo sapien
aagcccaccaagagaacctcaggcc

SEQ ID NO: 2219632 - DNA, 25 bp, Homo sapien
cccagggctcccaagggtccaattg

SEQ ID NO: 2219633 - DNA, 25 bp, Homo sapien
ggctcccaagggtccaattgtcact

SEQ ID NO: 2219634 - DNA, 25 bp, Homo sapien
agggtccaattgtcactctgttttc

SEQ ID NO: 2219635 - DNA, 25 bp, Homo sapien
ctaggggaggataccggacactcgg

SEQ ID NO: 2219636 - DNA, 25 bp, Homo sapien
taggggaggataccggacactcgga

SEQ ID NO: 2219637 - DNA, 25 bp, Homo sapien
tactggcacacttgactcttttggt

SEQ ID NO: 2219638 - DNA, 25 bp, Homo sapien
tttatggtttgcctctttcggtgaa

SEQ ID NO: 2219639 - DNA, 25 bp, Homo sapien
cagtgggcctgaaatacatactggc

SEQ ID NO: 2219640 - DNA, 25 bp, Homo sapien
tttggtgttatgatatttgatgtcc

SEQ ID NO: 2219641 - DNA, 25 bp, Homo sapien
agccaaatgggttactgtcctcgta

SEQ ID NO: 2219642 - DNA, 25 bp, Homo sapien
ctagccaaatgggttactgtcctcg

SEQ ID NO: 2219643 - DNA, 25 bp, Homo sapien
tagccaaatgggttactgtcctcgt

SEQ ID NO: 2219644 - DNA, 25 bp, Homo sapien
gccaaatgggttactgtcctcgtac

SEQ ID NO: 2219645 - DNA, 25 bp, Homo sapien
acttttgcaatagcacaatggttga

SEQ ID NO: 2219646 - DNA, 25 bp, Homo sapien
ggttgatggacagtaaacatgctac

SEQ ID NO: 2219647 - DNA, 25 bp, Homo sapien
aacatgctactggtttcaaacactt

SEQ ID NO: 2219648 - DNA, 25 bp, Homo sapien
tggagcagtactgcatgtcccccag

SEQ ID NO: 2219649 - DNA, 25 bp, Homo sapien
gggtcccagtcccacccgagtgatg

SEQ ID NO: 2219650 - DNA, 25 bp, Homo sapien
ggagaggcctggagcaccatcctgg

SEQ ID NO: 2219651 - DNA, 25 bp, Homo sapien
atgggtgtgtgcttcagtcacaggg

SEQ ID NO: 2219652 - DNA, 25 bp, Homo sapien
gcctggagcaccatcctgggtccca

SEQ ID NO: 2219653 - DNA, 25 bp, Homo sapien
gcaaaatccagttgacccctactcc

SEQ ID NO: 2219654 - DNA, 25 bp, Homo sapien
tggcaaaatccagttgacccctact

SEQ ID NO: 2219655 - DNA, 25 bp, Homo sapien
gctggcaaaatccagttgaccccta

SEQ ID NO: 2219656 - DNA, 25 bp, Homo sapien
ggcaaaatccagttgacccctactc

SEQ ID NO: 2219657 - DNA, 25 bp, Homo sapien
gtggggcacggttttctcatcttgt

SEQ ID NO: 2219658 - DNA, 25 bp, Homo sapien
ggggcacggttttctcatcttgttc

SEQ ID NO: 2219659 - DNA, 25 bp, Homo sapien
gggctcagggactccgtggggcacg

SEQ ID NO: 2219660 - DNA, 25 bp, Homo sapien
gactccgtggggcacggttttctca

SEQ ID NO: 2219661 - DNA, 25 bp, Homo sapien
tagcctgagattgcaaccacactgg

SEQ ID NO: 2219662 - DNA, 25 bp, Homo sapien
tggaactggcactaacactggcact

SEQ ID NO: 2219663 - DNA, 25 bp, Homo sapien
tactgatacttgctccagccatggc

SEQ ID NO: 2219664 - DNA, 25 bp, Homo sapien
tggactccccaaagacgaaatgctt

SEQ ID NO: 2219665 - DNA, 25 bp, Homo sapien
ttagacgaaatgtgcctccaacacc

SEQ ID NO: 2219666 - DNA, 25 bp, Homo sapien
tagacgaaatgtgcctccaacaccc

SEQ ID NO: 2219667 - DNA, 25 bp, Homo sapien
tgtgcctccaacaccctcaacacct

SEQ ID NO: 2219668 - DNA, 25 bp, Homo sapien
aaatgtgcctccaacaccctcaaca

SEQ ID NO: 2219669 - DNA, 25 bp, Homo sapien
caaaccagggcaggatcgatttttc

SEQ ID NO: 2219670 - DNA, 25 bp, Homo sapien
cagagtaatcatcaggagccgggtc

SEQ ID NO: 2219671 - DNA, 25 bp, Homo sapien
gctggcctgcatgaagatcgagtcc

SEQ ID NO: 2219672 - DNA, 25 bp, Homo sapien
ttctgatcaagacataggagtgctc

SEQ ID NO: 2219673 - DNA, 25 bp, Homo sapien
cttttgatcgccaccgtcttccggt

SEQ ID NO: 2219674 - DNA, 25 bp, Homo sapien
accagctcagctactttctagctca

SEQ ID NO: 2219675 - DNA, 25 bp, Homo sapien
gcccctgggcatgcgcatcagggat

SEQ ID NO: 2219676 - DNA, 25 bp, Homo sapien
gttcttaaccagcaggtactgcacc

SEQ ID NO: 2219677 - DNA, 25 bp, Homo sapien
ggagcacttggtgtccccgctgcag

SEQ ID NO: 2219678 - DNA, 25 bp, Homo sapien
tgcctcagaagaagtgctcccaggg

SEQ ID NO: 2219679 - DNA, 25 bp, Homo sapien
atgcctcagaagaagtgctcccagg

SEQ ID NO: 2219680 - DNA, 25 bp, Homo sapien
gctccggggagcacttggtgtcccc

SEQ ID NO: 2219681 - DNA, 25 bp, Homo sapien
cgctgtgtgccaggccgagaggaca

SEQ ID NO: 2219682 - DNA, 25 bp, Homo sapien
cgagaggacagtgacgtcgccgcgg

SEQ ID NO: 2219683 - DNA, 25 bp, Homo sapien
gcggccggagcgctgtgtgccaggc

SEQ ID NO: 2219684 - DNA, 25 bp, Homo sapien
gaagagatgcgcgtccacgggcatt

SEQ ID NO: 2219685 - DNA, 25 bp, Homo sapien
ccccagggtcttgagtcggagaccg

SEQ ID NO: 2219686 - DNA, 25 bp, Homo sapien
agggtcttgagtcggagaccgccgc

SEQ ID NO: 2219687 - DNA, 25 bp, Homo sapien
ccagggtcttgagtcggagaccgcc

SEQ ID NO: 2219688 - DNA, 25 bp, Homo sapien
gtcttgagtcggagaccgccgccct

SEQ ID NO: 2219689 - DNA, 25 bp, Homo sapien
tcctttttctggagaatggggtctc

SEQ ID NO: 2219690 - DNA, 25 bp, Homo sapien
cctttttctggagaatggggtctcg

SEQ ID NO: 2219691 - DNA, 25 bp, Homo sapien
tcaagctatcctcccgcctcttgcc

SEQ ID NO: 2219692 - DNA, 25 bp, Homo sapien
tcccgcctcttgcctccctgagagc

SEQ ID NO: 2219693 - DNA, 25 bp, Homo sapien
ccttaaaacgataacgtttgctatg

SEQ ID NO: 2219694 - DNA, 25 bp, Homo sapien
agctttgggtcagcaaataagaggg

SEQ ID NO: 2219695 - DNA, 25 bp, Homo sapien
ctatggatggctttatgggtttgtt

SEQ ID NO: 2219696 - DNA, 25 bp, Homo sapien
ggctttatgggtttgtttcatgagc

SEQ ID NO: 2219697 - DNA, 25 bp, Homo sapien
tcctcatagcttagcaaccatttat

SEQ ID NO: 2219698 - DNA, 25 bp, Homo sapien
gcttagcaaccatttatgagcgaca

SEQ ID NO: 2219699 - DNA, 25 bp, Homo sapien
tttatgagcgacaacatacaatgtt

SEQ ID NO: 2219700 - DNA, 25 bp, Homo sapien
caaccatttatgagcgacaacatac

SEQ ID NO: 2219701 - DNA, 25 bp, Homo sapien
tagcgtatgtacttgtccctaacgg

SEQ ID NO: 2219702 - DNA, 25 bp, Homo sapien
ggccttttttgggacatcttgacac

SEQ ID NO: 2219703 - DNA, 25 bp, Homo sapien
taatataggagtcagtcccatcttc

SEQ ID NO: 2219704 - DNA, 25 bp, Homo sapien
tcatttgacaggtaccctaaaaaca

SEQ ID NO: 2219705 - DNA, 25 bp, Homo sapien
tccttgcccttagcttagagggagg

SEQ ID NO: 2219706 - DNA, 25 bp, Homo sapien
agggacttgttcgtgtattagaggc

SEQ ID NO: 2219707 - DNA, 25 bp, Homo sapien
tcgtgtattagaggctgattggctg

SEQ ID NO: 2219708 - DNA, 25 bp, Homo sapien
ccttagcttagagggagggacttgt

SEQ ID NO: 2219709 - DNA, 25 bp, Homo sapien
gaggatggatttgtcttattatggc

SEQ ID NO: 2219710 - DNA, 25 bp, Homo sapien
tctgccaaacaccaatcctgggatg

SEQ ID NO: 2219711 - DNA, 25 bp, Homo sapien
tctgttcttctgcactaaaggccat

SEQ ID NO: 2219712 - DNA, 25 bp, Homo sapien
gctaatattcatgcctctgccaaac

SEQ ID NO: 2219713 - DNA, 25 bp, Homo sapien
ggccacattcaaacgctttccaatt

SEQ ID NO: 2219714 - DNA, 25 bp, Homo sapien
agggccacattcaaacgctttccaa

SEQ ID NO: 2219715 - DNA, 25 bp, Homo sapien
cagggccacattcaaacgctttcca

SEQ ID NO: 2219716 - DNA, 25 bp, Homo sapien
aacagggccacattcaaacgctttc

SEQ ID NO: 2219717 - DNA, 25 bp, Homo sapien
tgtgtggacggtgtgaattgacaga

SEQ ID NO: 2219718 - DNA, 25 bp, Homo sapien
caacgagcaattcacgggaagaggc

SEQ ID NO: 2219719 - DNA, 25 bp, Homo sapien
tccctgcagctatgcaacgagcaat

SEQ ID NO: 2219720 - DNA, 25 bp, Homo sapien
tatttagaggaatttggtagtggcg

SEQ ID NO: 2219721 - DNA, 25 bp, Homo sapien
gcacttacagtcctctgctgacact

SEQ ID NO: 2219722 - DNA, 25 bp, Homo sapien
agaatacgtgctgggcaggtgaaat

SEQ ID NO: 2219723 - DNA, 25 bp, Homo sapien
gtgaaattctatggccaccgtcgtc

SEQ ID NO: 2219724 - DNA, 25 bp, Homo sapien
tccaatcacatagcacttacagtcc

SEQ ID NO: 2219725 - DNA, 25 bp, Homo sapien
tgggaccaggcacttcattctagag

SEQ ID NO: 2219726 - DNA, 25 bp, Homo sapien
ttatcccttcggtctacagcggagc

SEQ ID NO: 2219727 - DNA, 25 bp, Homo sapien
cattgaggacagtactagagacagg

SEQ ID NO: 2219728 - DNA, 25 bp, Homo sapien
ttgagtgtattctcaaggccacccc

SEQ ID NO: 2219729 - DNA, 25 bp, Homo sapien
ttcataaatatccaggcgacccgag

SEQ ID NO: 2219730 - DNA, 25 bp, Homo sapien
ctaccgaggacagcgaaacaccctt

SEQ ID NO: 2219731 - DNA, 25 bp, Homo sapien
ttgtttccagcaaaactaccgagga

SEQ ID NO: 2219732 - DNA, 25 bp, Homo sapien
ccagcaaaactaccgaggacagcga

SEQ ID NO: 2219733 - DNA, 25 bp, Homo sapien
actagacctacagacaaaaatgttt

SEQ ID NO: 2219734 - DNA, 25 bp, Homo sapien
ttccctcatctgatatccttctcct

SEQ ID NO: 2219735 - DNA, 25 bp, Homo sapien
gaaccattctataacggtgtgttaa

SEQ ID NO: 2219736 - DNA, 25 bp, Homo sapien
aagagagcctggaaaagcagcacac

SEQ ID NO: 2219737 - DNA, 25 bp, Homo sapien
gggagtaggaccaggggagcaatta

SEQ ID NO: 2219738 - DNA, 25 bp, Homo sapien
gcttttggaagtgcacgaacccgta

SEQ ID NO: 2219739 - DNA, 25 bp, Homo sapien
tttatgcgacttgaatctcccgacg

SEQ ID NO: 2219740 - DNA, 25 bp, Homo sapien
cacaggccactttgcaggagaggat

SEQ ID NO: 2219741 - DNA, 25 bp, Homo sapien
ccgagaagatgttgtacagcgcctt

SEQ ID NO: 2219742 - DNA, 25 bp, Homo sapien
ggaccacatgatgcgcactggcctg

SEQ ID NO: 2219743 - DNA, 25 bp, Homo sapien
actgaacttctcgtacagcattgcc

SEQ ID NO: 2219744 - DNA, 25 bp, Homo sapien
ccaccggttgctggtagttgacata

SEQ ID NO: 2219745 - DNA, 25 bp, Homo sapien
ccgcttggcgtccaccggttgctgg

SEQ ID NO: 2219746 - DNA, 25 bp, Homo sapien
tcacagtcaccgagggtctcatccg

SEQ ID NO: 2219747 - DNA, 25 bp, Homo sapien
cagtcaccgagggtctcatccgcat

SEQ ID NO: 2219748 - DNA, 25 bp, Homo sapien
ccctcacagtcaccgagggtctcat

SEQ ID NO: 2219749 - DNA, 25 bp, Homo sapien
ctcacagtcaccgagggtctcatcc

SEQ ID NO: 2219750 - DNA, 25 bp, Homo sapien
cgccacctcggccgccaccttcgca

SEQ ID NO: 2219751 - DNA, 25 bp, Homo sapien
gccacctcggccgccaccttcgcat

SEQ ID NO: 2219752 - DNA, 25 bp, Homo sapien
ctgccgcgacctcccttcccgcgag

SEQ ID NO: 2219753 - DNA, 25 bp, Homo sapien
tgtcgctgctgtcgccacggtcgcc

SEQ ID NO: 2219754 - DNA, 25 bp, Homo sapien
tcagcctctacctctgcttccgcct

SEQ ID NO: 2219755 - DNA, 25 bp, Homo sapien
ttccgcctccgccacggaggcctcc

SEQ ID NO: 2219756 - DNA, 25 bp, Homo sapien
gtgctgccaggagcgcgccggtgcg

SEQ ID NO: 2219757 - DNA, 25 bp, Homo sapien
aggagcgcgccggtgcgagtcgccg

SEQ ID NO: 2219758 - DNA, 25 bp, Homo sapien
ccaggagcgcgccggtgcgagtcgc

SEQ ID NO: 2219759 - DNA, 25 bp, Homo sapien
gagcgcgccggtgcgagtcgccgca

SEQ ID NO: 2219760 - DNA, 25 bp, Homo sapien
caaccgtgaacctgaggaagtgact

SEQ ID NO: 2219761 - DNA, 25 bp, Homo sapien
tgccttctttgggtaagtaaagctg

SEQ ID NO: 2219762 - DNA, 25 bp, Homo sapien
tggctggatcttggcagtcatacat

SEQ ID NO: 2219763 - DNA, 25 bp, Homo sapien
catacatgatagaacaaccgtgaac

SEQ ID NO: 2219764 - DNA, 25 bp, Homo sapien
agtgagaactcttcgtcgctggctg

SEQ ID NO: 2219765 - DNA, 25 bp, Homo sapien
gagaactcttcgtcgctggctggaa

SEQ ID NO: 2219766 - DNA, 25 bp, Homo sapien
ctcttcgtcgctggctggaaagcat

SEQ ID NO: 2219767 - DNA, 25 bp, Homo sapien
cgaggcagtgagaactcttcgtcgc

SEQ ID NO: 2219768 - DNA, 25 bp, Homo sapien
catttccaggttggtgtccaagagg

SEQ ID NO: 2219769 - DNA, 25 bp, Homo sapien
ttccaggttggtgtccaagagggac

SEQ ID NO: 2219770 - DNA, 25 bp, Homo sapien
tttccaggttggtgtccaagaggga

SEQ ID NO: 2219771 - DNA, 25 bp, Homo sapien
atttccaggttggtgtccaagaggg

SEQ ID NO: 2219772 - DNA, 25 bp, Homo sapien
aggcagaggccaagggggaagccat

SEQ ID NO: 2219773 - DNA, 25 bp, Homo sapien
gaaggcagaggccaagggggaagcc

SEQ ID NO: 2219774 - DNA, 25 bp, Homo sapien
ctgagaaggcagaggccaaggggga

SEQ ID NO: 2219775 - DNA, 25 bp, Homo sapien
gagaaggcagaggccaagggggaag

SEQ ID NO: 2219776 - DNA, 25 bp, Homo sapien
ggggatgtggcgaggatgagaagag

SEQ ID NO: 2219777 - DNA, 25 bp, Homo sapien
gggatgtggcgaggatgagaagagc

SEQ ID NO: 2219778 - DNA, 25 bp, Homo sapien
ggatgagaagagctcctcggcccat

SEQ ID NO: 2219779 - DNA, 25 bp, Homo sapien
aggatgagaagagctcctcggccca

SEQ ID NO: 2219780 - DNA, 25 bp, Homo sapien
tctcaatgctcctagctgtacgtgc

SEQ ID NO: 2219781 - DNA, 25 bp, Homo sapien
tctgatcatttctcagtggagcttt

SEQ ID NO: 2219782 - DNA, 25 bp, Homo sapien
cgactttgtgtgcttggctttggac

SEQ ID NO: 2219783 - DNA, 25 bp, Homo sapien
aaaatgggacaacaacgactttgtg

SEQ ID NO: 2219784 - DNA, 25 bp, Homo sapien
gtagcaacctgacaaaagccatgga

SEQ ID NO: 2219785 - DNA, 25 bp, Homo sapien
accactggagtgctagatgaaatgc

SEQ ID NO: 2219786 - DNA, 25 bp, Homo sapien
catagatgcagactagtagcaacct

SEQ ID NO: 2219787 - DNA, 25 bp, Homo sapien
gccagttgttaacctggaggcccac

SEQ ID NO: 2219788 - DNA, 25 bp, Homo sapien
ggtgtgagcgatgaagaagtcttcc

SEQ ID NO: 2219789 - DNA, 25 bp, Homo sapien
tacattccctgatcatcgtatcttg

SEQ ID NO: 2219790 - DNA, 25 bp, Homo sapien
ctgagtcattctgtcataaaccgga

SEQ ID NO: 2219791 - DNA, 25 bp, Homo sapien
tgtaaagtgtaacacagctcttggg

SEQ ID NO: 2219792 - DNA, 25 bp, Homo sapien
tcaggaccgtttgcacagtgacgtt

SEQ ID NO: 2219793 - DNA, 25 bp, Homo sapien
ctgagtggcggtacacatcagcccc

SEQ ID NO: 2219794 - DNA, 25 bp, Homo sapien
gccaaagcaacgctctaccgcagat

SEQ ID NO: 2219795 - DNA, 25 bp, Homo sapien
tccattctatcatgctgccaaagca

SEQ ID NO: 2219796 - DNA, 25 bp, Homo sapien
ggattatctttttctccgtccacat

SEQ ID NO: 2219797 - DNA, 25 bp, Homo sapien
tcgaaatcctcctcacgatcctcca

SEQ ID NO: 2219798 - DNA, 25 bp, Homo sapien
gccgtgagccagaaatcggggatcc

SEQ ID NO: 2219799 - DNA, 25 bp, Homo sapien
aagtcctcatactccggattctcct

SEQ ID NO: 2219800 - DNA, 25 bp, Homo sapien
gaaacactcaccgaactgtaggcga

SEQ ID NO: 2219801 - DNA, 25 bp, Homo sapien
tacttaaccaccagaggcaggctct

SEQ ID NO: 2219802 - DNA, 25 bp, Homo sapien
ggtacttggcctctagcacggcaca

SEQ ID NO: 2219803 - DNA, 25 bp, Homo sapien
taaaatctgcgtctgaggagtactc

SEQ ID NO: 2219804 - DNA, 25 bp, Homo sapien
tcctggcggtagcagctcccaaagt

SEQ ID NO: 2219805 - DNA, 25 bp, Homo sapien
ttcctggcggtagcagctcccaaag

SEQ ID NO: 2219806 - DNA, 25 bp, Homo sapien
ctggcggtagcagctcccaaagttt

SEQ ID NO: 2219807 - DNA, 25 bp, Homo sapien
cctggcggtagcagctcccaaagtt

SEQ ID NO: 2219808 - DNA, 25 bp, Homo sapien
tcccttcagaaggagcccaattgac

SEQ ID NO: 2219809 - DNA, 25 bp, Homo sapien
cccaattgacaagagagatacagaa

SEQ ID NO: 2219810 - DNA, 25 bp, Homo sapien
tacagaaaggagtcgggtcacagga

SEQ ID NO: 2219811 - DNA, 25 bp, Homo sapien
gagatacagaaaggagtcgggtcac

SEQ ID NO: 2219812 - DNA, 25 bp, Homo sapien
tttatggagttcctagactccccaa

SEQ ID NO: 2219813 - DNA, 25 bp, Homo sapien
gacagaataacagtgttaaacctgt

SEQ ID NO: 2219814 - DNA, 25 bp, Homo sapien
tgaggttaaggaccccgtagacaga

SEQ ID NO: 2219815 - DNA, 25 bp, Homo sapien
tgtataattttatggagttcctaga

SEQ ID NO: 2219816 - DNA, 25 bp, Homo sapien
tctccactcatctctccattgtcat

SEQ ID NO: 2219817 - DNA, 25 bp, Homo sapien
cactcatctctccattgtcatccat

SEQ ID NO: 2219818 - DNA, 25 bp, Homo sapien
ctctccactcatctctccattgtca

SEQ ID NO: 2219819 - DNA, 25 bp, Homo sapien
tccactcatctctccattgtcatcc

SEQ ID NO: 2219820 - DNA, 25 bp, Homo sapien
ggtcaagatctgaaggaggaggcat

SEQ ID NO: 2219821 - DNA, 25 bp, Homo sapien
gggtcaagatctgaaggaggaggca

SEQ ID NO: 2219822 - DNA, 25 bp, Homo sapien
tgggtcaagatctgaaggaggaggc

SEQ ID NO: 2219823 - DNA, 25 bp, Homo sapien
aatttcagggccatgtatactctgc

SEQ ID NO: 2219824 - DNA, 25 bp, Homo sapien
ccttgagtaactatatctagggcag

SEQ ID NO: 2219825 - DNA, 25 bp, Homo sapien
tcagaaggattaagctacacaacac

SEQ ID NO: 2219826 - DNA, 25 bp, Homo sapien
gcaggcctcttaagcatccaagttt

SEQ ID NO: 2219827 - DNA, 25 bp, Homo sapien
tcagttacagttcggattgttcccc

SEQ ID NO: 2219828 - DNA, 25 bp, Homo sapien
tactcaatcgcagttcccctatagg

SEQ ID NO: 2219829 - DNA, 25 bp, Homo sapien
ggctcgccaggatctgaaagcttaa

SEQ ID NO: 2219830 - DNA, 25 bp, Homo sapien
tgagattccagtgcatcacctgaga

SEQ ID NO: 2219831 - DNA, 25 bp, Homo sapien
tgtcaggagcttcagaataggctca

SEQ ID NO: 2219832 - DNA, 25 bp, Homo sapien
gtcaggagcttcagaataggctcat

SEQ ID NO: 2219833 - DNA, 25 bp, Homo sapien
gagtgagtgtatcaacgttttttaa

SEQ ID NO: 2219834 - DNA, 25 bp, Homo sapien
tcaggaattcccttaggatcctcct

SEQ ID NO: 2219835 - DNA, 25 bp, Homo sapien
ggagtgagtgtatcaacgtttttta

SEQ ID NO: 2219836 - DNA, 25 bp, Homo sapien
taatagtcctcataaccatcgtcct

SEQ ID NO: 2219837 - DNA, 25 bp, Homo sapien
taataatagtcctcataaccatcgt

SEQ ID NO: 2219838 - DNA, 25 bp, Homo sapien
ataataatagtcctcataaccatcg

SEQ ID NO: 2219839 - DNA, 25 bp, Homo sapien
tagtcctcataaccatcgtcctcat

SEQ ID NO: 2219840 - DNA, 25 bp, Homo sapien
taagtccttttggacggtctgcctc

SEQ ID NO: 2219841 - DNA, 25 bp, Homo sapien
cagtaagggttggtacatttcagca

SEQ ID NO: 2219842 - DNA, 25 bp, Homo sapien
ttggattctaaattggccgctctag

SEQ ID NO: 2219843 - DNA, 25 bp, Homo sapien
gagtcctcatcagtatcgccacctt

SEQ ID NO: 2219844 - DNA, 25 bp, Homo sapien
aacggtgccgcagtatgattacgca

SEQ ID NO: 2219845 - DNA, 25 bp, Homo sapien
gctgaggctttgagaaccggactga

SEQ ID NO: 2219846 - DNA, 25 bp, Homo sapien
taccacagagatcgggagaccaaac

SEQ ID NO: 2219847 - DNA, 25 bp, Homo sapien
tgcgttgaccgatcctgcaggagag

SEQ ID NO: 2219848 - DNA, 25 bp, Homo sapien
attggataaagactcaagacccatt

SEQ ID NO: 2219849 - DNA, 25 bp, Homo sapien
cacagactggcaaattggataaaga

SEQ ID NO: 2219850 - DNA, 25 bp, Homo sapien
caaattggataaagactcaagaccc

SEQ ID NO: 2219851 - DNA, 25 bp, Homo sapien
tgggctaaatgcccaaattaaaaga

SEQ ID NO: 2219852 - DNA, 25 bp, Homo sapien
tcaacgagacagaaagtcaacaagg

SEQ ID NO: 2219853 - DNA, 25 bp, Homo sapien
cagatcaacgagacagaaagtcaac

SEQ ID NO: 2219854 - DNA, 25 bp, Homo sapien
cagaaagtcaacaaggatacccagg

SEQ ID NO: 2219855 - DNA, 25 bp, Homo sapien
cgagacagaaagtcaacaaggatac

SEQ ID NO: 2219856 - DNA, 25 bp, Homo sapien
ttcacaaatctacctgccatccttg

SEQ ID NO: 2219857 - DNA, 25 bp, Homo sapien
atctacctgccatccttgcataggg

SEQ ID NO: 2219858 - DNA, 25 bp, Homo sapien
ggttcacaaatctacctgccatcct

SEQ ID NO: 2219859 - DNA, 25 bp, Homo sapien
acaaatctacctgccatccttgcat

SEQ ID NO: 2219860 - DNA, 25 bp, Homo sapien
taaatatatgcacatgtgccagtta

SEQ ID NO: 2219861 - DNA, 25 bp, Homo sapien
tatatgcacatgtgccagttaggac

SEQ ID NO: 2219862 - DNA, 25 bp, Homo sapien
atatgcacatgtgccagttaggaca

SEQ ID NO: 2219863 - DNA, 25 bp, Homo sapien
aatatatgcacatgtgccagttagg

SEQ ID NO: 2219864 - DNA, 25 bp, Homo sapien
tgccagagacgataacacatgtcca

SEQ ID NO: 2219865 - DNA, 25 bp, Homo sapien
cacatgtccaaaaataatctcagtt

SEQ ID NO: 2219866 - DNA, 25 bp, Homo sapien
ttaagagcccattatgtgcaggata

SEQ ID NO: 2219867 - DNA, 25 bp, Homo sapien
tcagtttaaggcagtatgtgatcca

SEQ ID NO: 2219868 - DNA, 25 bp, Homo sapien
gtccacactttatgtgcaaccatac

SEQ ID NO: 2219869 - DNA, 25 bp, Homo sapien
tccaagagtgtttctgagtccacac

SEQ ID NO: 2219870 - DNA, 25 bp, Homo sapien
ttcaaaactccaagagtgtttctga

SEQ ID NO: 2219871 - DNA, 25 bp, Homo sapien
aaccatacttgacaaaaatgactgg

SEQ ID NO: 2219872 - DNA, 25 bp, Homo sapien
actcaatgctccaattaaaagacac

SEQ ID NO: 2219873 - DNA, 25 bp, Homo sapien
agactggcaaattggataaagagtc

SEQ ID NO: 2219874 - DNA, 25 bp, Homo sapien
tttaaatgtaaatggactcaatgct

SEQ ID NO: 2219875 - DNA, 25 bp, Homo sapien
ttggataaagagtcaagacccatca

SEQ ID NO: 2219876 - DNA, 25 bp, Homo sapien
gatttattacaactgacctgcaggc

SEQ ID NO: 2219877 - DNA, 25 bp, Homo sapien
gaagcagttatgttactgagctcca

SEQ ID NO: 2219878 - DNA, 25 bp, Homo sapien
aatattccaaagctccaagaagcag

SEQ ID NO: 2219879 - DNA, 25 bp, Homo sapien
ttacagacaaataaggcaatatccc

SEQ ID NO: 2219880 - DNA, 25 bp, Homo sapien
tctttgaacgcaacatggtttttgg

SEQ ID NO: 2219881 - DNA, 25 bp, Homo sapien
ccaaacatcaactgtaactgtaaag

SEQ ID NO: 2219882 - DNA, 25 bp, Homo sapien
agaaggcaatgtgtctcgttggctg

SEQ ID NO: 2219883 - DNA, 25 bp, Homo sapien
cgttggctgtgcaagctcttctcac

SEQ ID NO: 2219884 - DNA, 25 bp, Homo sapien
aaaacaccattccagtagctgcatc

SEQ ID NO: 2219885 - DNA, 25 bp, Homo sapien
gaaatgaacaccaatgtcattgcac

SEQ ID NO: 2219886 - DNA, 25 bp, Homo sapien
catgatggaaatgaacaccaatgtc

SEQ ID NO: 2219887 - DNA, 25 bp, Homo sapien
tggaaatgaacaccaatgtcattgc

SEQ ID NO: 2219888 - DNA, 25 bp, Homo sapien
tgaacaccaatgtcattgcacatgg

SEQ ID NO: 2219889 - DNA, 25 bp, Homo sapien
cctttcacgacttgtgttagttgat

SEQ ID NO: 2219890 - DNA, 25 bp, Homo sapien
tcagctgcggaggatctcctttcac

SEQ ID NO: 2219891 - DNA, 25 bp, Homo sapien
gttagttgatcaaatacactattcc

SEQ ID NO: 2219892 - DNA, 25 bp, Homo sapien
tcagaattactcagctgcggaggat

SEQ ID NO: 2219893 - DNA, 25 bp, Homo sapien
ggaaatcagcccgtggccaactcac

SEQ ID NO: 2219894 - DNA, 25 bp, Homo sapien
atcagcccgtggccaactcacacaa

SEQ ID NO: 2219895 - DNA, 25 bp, Homo sapien
agcccgtggccaactcacacaatgt

SEQ ID NO: 2219896 - DNA, 25 bp, Homo sapien
gaaatcagcccgtggccaactcaca

SEQ ID NO: 2219897 - DNA, 25 bp, Homo sapien
accctgtctgtagagtgcatcataa

SEQ ID NO: 2219898 - DNA, 25 bp, Homo sapien
ccctgtctgtagagtgcatcataaa

SEQ ID NO: 2219899 - DNA, 25 bp, Homo sapien
ctgtctgtagagtgcatcataaaac

SEQ ID NO: 2219900 - DNA, 25 bp, Homo sapien
gtctgtagagtgcatcataaaactg

SEQ ID NO: 2219901 - DNA, 25 bp, Homo sapien
cttggtttgtggaccattttgttgg

SEQ ID NO: 2219902 - DNA, 25 bp, Homo sapien
tgtggaccattttgttggcagaacc

SEQ ID NO: 2219903 - DNA, 25 bp, Homo sapien
ttgtggaccattttgttggcagaac

SEQ ID NO: 2219904 - DNA, 25 bp, Homo sapien
ggtttgtggaccattttgttggcag

SEQ ID NO: 2219905 - DNA, 25 bp, Homo sapien
gttttgaactcctgtaggattggga

SEQ ID NO: 2219906 - DNA, 25 bp, Homo sapien
tgaaatcccagtgttgttcagggga

SEQ ID NO: 2219907 - DNA, 25 bp, Homo sapien
ctcctgtaggattgggattcagagt

SEQ ID NO: 2219908 - DNA, 25 bp, Homo sapien
ttgaactcctgtaggattgggattc

SEQ ID NO: 2219909 - DNA, 25 bp, Homo sapien
cttgctgtagatttgaaaggtggat

SEQ ID NO: 2219910 - DNA, 25 bp, Homo sapien
ttcaacttcagtgctttgcgtttac

SEQ ID NO: 2219911 - DNA, 25 bp, Homo sapien
gaaaggtggatttgcaaaattcaac

SEQ ID NO: 2219912 - DNA, 25 bp, Homo sapien
aaaattcaacttcagtgctttgcgt

SEQ ID NO: 2219913 - DNA, 25 bp, Homo sapien
cttcagggatcctacaggtcccggg

SEQ ID NO: 2219914 - DNA, 25 bp, Homo sapien
ggcttcagggatcctacaggtcccg

SEQ ID NO: 2219915 - DNA, 25 bp, Homo sapien
agccgccgctcagtctcggagctgc

SEQ ID NO: 2219916 - DNA, 25 bp, Homo sapien
ctggcttcagggatcctacaggtcc

SEQ ID NO: 2219917 - DNA, 25 bp, Homo sapien
agtgaggagccaagcgacgccgtgg

SEQ ID NO: 2219918 - DNA, 25 bp, Homo sapien
ggagtgaggagccaagcgacgccgt

SEQ ID NO: 2219919 - DNA, 25 bp, Homo sapien
gtgaggagccaagcgacgccgtggc

SEQ ID NO: 2219920 - DNA, 25 bp, Homo sapien
gaggagccaagcgacgccgtggcgg

SEQ ID NO: 2219921 - DNA, 25 bp, Homo sapien
aatgtgcatcttagccctgtggtaa

SEQ ID NO: 2219922 - DNA, 25 bp, Homo sapien
gcattactaaaagggagccaagtgc

SEQ ID NO: 2219923 - DNA, 25 bp, Homo sapien
tcagagggcacaagctgtaaaccag

SEQ ID NO: 2219924 - DNA, 25 bp, Homo sapien
gaaagaatccaagcagactgtagag

SEQ ID NO: 2219925 - DNA, 25 bp, Homo sapien
agagcagtattaaggcgagcacccg

SEQ ID NO: 2219926 - DNA, 25 bp, Homo sapien
cgcagaccggacctggataactcct

SEQ ID NO: 2219927 - DNA, 25 bp, Homo sapien
tccttggagttcacctctagcggcc

SEQ ID NO: 2219928 - DNA, 25 bp, Homo sapien
tacaagtagctgacgctcagagagc

SEQ ID NO: 2219929 - DNA, 25 bp, Homo sapien
cagggtagacagcagacctatttct

SEQ ID NO: 2219930 - DNA, 25 bp, Homo sapien
ctttgaaaaccagataagatgcttc

SEQ ID NO: 2219931 - DNA, 25 bp, Homo sapien
ccctgcaaggtatgttacactttat

SEQ ID NO: 2219932 - DNA, 25 bp, Homo sapien
ctctttttgcttttggcgtaatcac

SEQ ID NO: 2219933 - DNA, 25 bp, Homo sapien
tgtaggtgtagttatatccaacttt

SEQ ID NO: 2219934 - DNA, 25 bp, Homo sapien
gctttgaaatacaggtccaagaaat

SEQ ID NO: 2219935 - DNA, 25 bp, Homo sapien
tgctgctgcatgtgttgtaggtgta

SEQ ID NO: 2219936 - DNA, 25 bp, Homo sapien
tttaccattggctttgaaatacagg

SEQ ID NO: 2219937 - DNA, 25 bp, Homo sapien
tgcacaaggtaagagcttttgccag

SEQ ID NO: 2219938 - DNA, 25 bp, Homo sapien
tcccaaactctcaaaggcattgtcc

SEQ ID NO: 2219939 - DNA, 25 bp, Homo sapien
gaacaattggaacagctgttcccaa

SEQ ID NO: 2219940 - DNA, 25 bp, Homo sapien
gagcttttgccagaacaattggaac

SEQ ID NO: 2219941 - DNA, 25 bp, Homo sapien
gtttcaattgtgacatctagatggc

SEQ ID NO: 2219942 - DNA, 25 bp, Homo sapien
tcttgtttaatcagtagtggtagtg

SEQ ID NO: 2219943 - DNA, 25 bp, Homo sapien
ggtagaaggacaatgacgaagccac

SEQ ID NO: 2219944 - DNA, 25 bp, Homo sapien
cacccatgctgaacaatatttttca

SEQ ID NO: 2219945 - DNA, 25 bp, Homo sapien
tactgagtccagctgataccacaca

SEQ ID NO: 2219946 - DNA, 25 bp, Homo sapien
tagagaagctgttgcatgagaaatc

SEQ ID NO: 2219947 - DNA, 25 bp, Homo sapien
tcttatgacaagaagggtcacactg

SEQ ID NO: 2219948 - DNA, 25 bp, Homo sapien
ctattggaactgcatgaaactgaac

SEQ ID NO: 2219949 - DNA, 25 bp, Homo sapien
ctgcccagcagtggtcagtcatttt

SEQ ID NO: 2219950 - DNA, 25 bp, Homo sapien
caaggctggtaccaatgagactggg

SEQ ID NO: 2219951 - DNA, 25 bp, Homo sapien
tttgggaattagttggtcatcatcc

SEQ ID NO: 2219952 - DNA, 25 bp, Homo sapien
aagtgtaggtggttccccaaggctg

SEQ ID NO: 2219953 - DNA, 25 bp, Homo sapien
gaatcaaaaagcacgcctgaggcat

SEQ ID NO: 2219954 - DNA, 25 bp, Homo sapien
tacctgcttatcgtagtggccagag

SEQ ID NO: 2219955 - DNA, 25 bp, Homo sapien
tatcctagggcatgtagttccgagc

SEQ ID NO: 2219956 - DNA, 25 bp, Homo sapien
gagccccacagaaagtaatcaccat

SEQ ID NO: 2219957 - DNA, 25 bp, Homo sapien
caaaatgctaacataggtattgcct

SEQ ID NO: 2219958 - DNA, 25 bp, Homo sapien
cagtgcctttaacagtgagttcaca

SEQ ID NO: 2219959 - DNA, 25 bp, Homo sapien
tggtgccttagagttcacaaaatgc

SEQ ID NO: 2219960 - DNA, 25 bp, Homo sapien
tggctgtggctaaatgaaatatgat

SEQ ID NO: 2219961 - DNA, 25 bp, Homo sapien
tggtatctggcacattataggtgac

SEQ ID NO: 2219962 - DNA, 25 bp, Homo sapien
aattaagtgactttcggtctggatc

SEQ ID NO: 2219963 - DNA, 25 bp, Homo sapien
taggtgaccacaacaagcttagtcc

SEQ ID NO: 2219964 - DNA, 25 bp, Homo sapien
tagaaagcacattcgcaagctgaat

SEQ ID NO: 2219965 - DNA, 25 bp, Homo sapien
tatttatgatttgaccccttacaga

SEQ ID NO: 2219966 - DNA, 25 bp, Homo sapien
tgagcagggagttcaggctgtcccc

SEQ ID NO: 2219967 - DNA, 25 bp, Homo sapien
taagctatgaacagcaggccaaatc

SEQ ID NO: 2219968 - DNA, 25 bp, Homo sapien
tattaaacccaggagtagcgttggc

SEQ ID NO: 2219969 - DNA, 25 bp, Homo sapien
tttaaagctggctcaagactggccc

SEQ ID NO: 2219970 - DNA, 25 bp, Homo sapien
gactggcccaggcataatactgtca

SEQ ID NO: 2219971 - DNA, 25 bp, Homo sapien
tatatgaatgtctgctcctgaggga

SEQ ID NO: 2219972 - DNA, 25 bp, Homo sapien
cagattccggccgttagtcttgaga

SEQ ID NO: 2219973 - DNA, 25 bp, Homo sapien
caatgcttgctctgatagccgacgt

SEQ ID NO: 2219974 - DNA, 25 bp, Homo sapien
tgggctttccatcttagtcctcggg

SEQ ID NO: 2219975 - DNA, 25 bp, Homo sapien
tagccgacgttctgcacctatcagg

SEQ ID NO: 2219976 - DNA, 25 bp, Homo sapien
cagcatgtgacccaaaaaggagaca

SEQ ID NO: 2219977 - DNA, 25 bp, Homo sapien
aagacaagaaagaaagagacaaaga

SEQ ID NO: 2219978 - DNA, 25 bp, Homo sapien
ctttagatagagaacaaagagcaaa

SEQ ID NO: 2219979 - DNA, 25 bp, Homo sapien
gcaaagacaagaaagaaagagacaa

SEQ ID NO: 2219980 - DNA, 25 bp, Homo sapien
aaagaaagagacaaagaaatacaca

SEQ ID NO: 2219981 - DNA, 25 bp, Homo sapien
gaagagccaaatgggatgtcacaga

SEQ ID NO: 2219982 - DNA, 25 bp, Homo sapien
gcctgctacctgatagtgctagtgg

SEQ ID NO: 2219983 - DNA, 25 bp, Homo sapien
cacaagaggcatgaaaagcatcaca

SEQ ID NO: 2219984 - DNA, 25 bp, Homo sapien
taaaaggctctttgataggacttgc

SEQ ID NO: 2219985 - DNA, 25 bp, Homo sapien
gatgagaaagggttaccctttcagc

SEQ ID NO: 2219986 - DNA, 25 bp, Homo sapien
gagatgagaaagggttaccctttca

SEQ ID NO: 2219987 - DNA, 25 bp, Homo sapien
tgagaaagggttaccctttcagcag

SEQ ID NO: 2219988 - DNA, 25 bp, Homo sapien
gagaaagggttaccctttcagcaga

SEQ ID NO: 2219989 - DNA, 25 bp, Homo sapien
caggactgcaacatcaacaacttac

SEQ ID NO: 2219990 - DNA, 25 bp, Homo sapien
tctgaagtgatcctcacaggactgc

SEQ ID NO: 2219991 - DNA, 25 bp, Homo sapien
tctttgagttgcttcagtgaaccca

SEQ ID NO: 2219992 - DNA, 25 bp, Homo sapien
caactggtaagaagaccataatgtc

SEQ ID NO: 2219993 - DNA, 25 bp, Homo sapien
tgttcaaatttcttggacctgctga

SEQ ID NO: 2219994 - DNA, 25 bp, Homo sapien
atgatttggcagataggaacaatga

SEQ ID NO: 2219995 - DNA, 25 bp, Homo sapien
agtgccaggcatgttgatcttcagg

SEQ ID NO: 2219996 - DNA, 25 bp, Homo sapien
tatcctcaagtgctagagtgccagg

SEQ ID NO: 2219997 - DNA, 25 bp, Homo sapien
tagttaaagaccagaactgccgggc

SEQ ID NO: 2219998 - DNA, 25 bp, Homo sapien
cactatttacgaagaatgctgggca

SEQ ID NO: 2219999 - DNA, 25 bp, Homo sapien
cacatagactactggccctaggaga

SEQ ID NO: 2220000 - DNA, 25 bp, Homo sapien
caggatttattgcaccgaatggtca

SEQ ID NO: 2220001 - DNA, 25 bp, Homo sapien
ttgtattatacaccatggcatccca

SEQ ID NO: 2220002 - DNA, 25 bp, Homo sapien
ttgttgtattatacaccatggcatc

SEQ ID NO: 2220003 - DNA, 25 bp, Homo sapien
tgttgtattatacaccatggcatcc

SEQ ID NO: 2220004 - DNA, 25 bp, Homo sapien
gttgtattatacaccatggcatccc

SEQ ID NO: 2220005 - DNA, 25 bp, Homo sapien
gaatacgacctcagtgaaacactaa

SEQ ID NO: 2220006 - DNA, 25 bp, Homo sapien
cagttgcttcccaggttagttagga

SEQ ID NO: 2220007 - DNA, 25 bp, Homo sapien
cagttaatctcacacccagttgctt

SEQ ID NO: 2220008 - DNA, 25 bp, Homo sapien
tatgcttttagggacagcttacgca

SEQ ID NO: 2220009 - DNA, 25 bp, Homo sapien
cctatctgggaccaggaaagtatct

SEQ ID NO: 2220010 - DNA, 25 bp, Homo sapien
aaacaacaagcctattcttctgagg

SEQ ID NO: 2220011 - DNA, 25 bp, Homo sapien
tgacagaacctcctgacctagggtt

SEQ ID NO: 2220012 - DNA, 25 bp, Homo sapien
tctccacctagggatcgtcaaaggg

SEQ ID NO: 2220013 - DNA, 25 bp, Homo sapien
gaattaggcctaccaaaactgagct

SEQ ID NO: 2220014 - DNA, 25 bp, Homo sapien
tagggcgccaccaaagttctaggat

SEQ ID NO: 2220015 - DNA, 25 bp, Homo sapien
tgagcgatcctctacaatgtgggtt

SEQ ID NO: 2220016 - DNA, 25 bp, Homo sapien
tcaacaacctgtataatagggcgcc

SEQ ID NO: 2220017 - DNA, 25 bp, Homo sapien
caagtagattagctggagcttggcc

SEQ ID NO: 2220018 - DNA, 25 bp, Homo sapien
gattaatttggagcctcttatagct

SEQ ID NO: 2220019 - DNA, 25 bp, Homo sapien
agctgtttgcagtcctcaggtctca

SEQ ID NO: 2220020 - DNA, 25 bp, Homo sapien
cagatagctggcaacccatccaagt

SEQ ID NO: 2220021 - DNA, 25 bp, Homo sapien
tctctaaggaaactgggaacccaga

SEQ ID NO: 2220022 - DNA, 25 bp, Homo sapien
taatgacaagccctggcagtacacg

SEQ ID NO: 2220023 - DNA, 25 bp, Homo sapien
aatacatcattttaggtccaggcag

SEQ ID NO: 2220024 - DNA, 25 bp, Homo sapien
taatcagggcactttttgtaacagc

SEQ ID NO: 2220025 - DNA, 25 bp, Homo sapien
catgcagcgtggtatcttcaatggg

SEQ ID NO: 2220026 - DNA, 25 bp, Homo sapien
taaggagacatgactactaaggaca

SEQ ID NO: 2220027 - DNA, 25 bp, Homo sapien
tgactactaaggacacatgcagcgt

SEQ ID NO: 2220028 - DNA, 25 bp, Homo sapien
tactaaggacacatgcagcgtggta

SEQ ID NO: 2220029 - DNA, 25 bp, Homo sapien
gaagcccaagctccatgtatcagta

SEQ ID NO: 2220030 - DNA, 25 bp, Homo sapien
tttccgggaacactagaagactagc

SEQ ID NO: 2220031 - DNA, 25 bp, Homo sapien
taatttaagaagtctagcaccggtc

SEQ ID NO: 2220032 - DNA, 25 bp, Homo sapien
tatgaatgcctaatcacagcagccc

SEQ ID NO: 2220033 - DNA, 25 bp, Homo sapien
tctttacagctgtccgaggagctag

SEQ ID NO: 2220034 - DNA, 25 bp, Homo sapien
tccttctccgagaaacaatattctt

SEQ ID NO: 2220035 - DNA, 25 bp, Homo sapien
ctgggccgatcttttgacatccttc

SEQ ID NO: 2220036 - DNA, 25 bp, Homo sapien
agtattctaaagagccagagactct

SEQ ID NO: 2220037 - DNA, 25 bp, Homo sapien
tgtaagcaacgaggaagcaggagtc

SEQ ID NO: 2220038 - DNA, 25 bp, Homo sapien
cagtaaagcagtaacacaggtgggc

SEQ ID NO: 2220039 - DNA, 25 bp, Homo sapien
taaagatcataaggagtgggcaccc

SEQ ID NO: 2220040 - DNA, 25 bp, Homo sapien
gattttacacactggcgcaatgcaa

SEQ ID NO: 2220041 - DNA, 25 bp, Homo sapien
aatgtaagggtcttatggagtgagc

SEQ ID NO: 2220042 - DNA, 25 bp, Homo sapien
taagggtcttatggagtgagcactc

SEQ ID NO: 2220043 - DNA, 25 bp, Homo sapien
gtaagggtcttatggagtgagcact

SEQ ID NO: 2220044 - DNA, 25 bp, Homo sapien
tgtaagggtcttatggagtgagcac

SEQ ID NO: 2220045 - DNA, 25 bp, Homo sapien
gagagtaaggccttattcagatgag

SEQ ID NO: 2220046 - DNA, 25 bp, Homo sapien
ttgtctagtacacagaaacctggac

SEQ ID NO: 2220047 - DNA, 25 bp, Homo sapien
gagataggccgtgtgcagttacaca

SEQ ID NO: 2220048 - DNA, 25 bp, Homo sapien
aaagaaagattatgcgtagatggga

SEQ ID NO: 2220049 - DNA, 25 bp, Homo sapien
attattgaccaaggtgcatggctgc

SEQ ID NO: 2220050 - DNA, 25 bp, Homo sapien
tattgaccaaggtgcatggctgcgg

SEQ ID NO: 2220051 - DNA, 25 bp, Homo sapien
ttattgaccaaggtgcatggctgcg

SEQ ID NO: 2220052 - DNA, 25 bp, Homo sapien
ttgaccaaggtgcatggctgcggtc

SEQ ID NO: 2220053 - DNA, 25 bp, Homo sapien
tgtaaggttcttatggagctggcac

SEQ ID NO: 2220054 - DNA, 25 bp, Homo sapien
aatgtaaggttcttatggagctggc

SEQ ID NO: 2220055 - DNA, 25 bp, Homo sapien
atgtaaggttcttatggagctggca

SEQ ID NO: 2220056 - DNA, 25 bp, Homo sapien
catgtcttatacactggaacccaga

SEQ ID NO: 2220057 - DNA, 25 bp, Homo sapien
catttatgtccaaggtgcatggttg

SEQ ID NO: 2220058 - DNA, 25 bp, Homo sapien
tcacatacgttaacaggccaggaag

SEQ ID NO: 2220059 - DNA, 25 bp, Homo sapien
caaatataatcacatacgttaacag

SEQ ID NO: 2220060 - DNA, 25 bp, Homo sapien
tgtccaaatgtaagggtcttatgga

SEQ ID NO: 2220061 - DNA, 25 bp, Homo sapien
gtccaaatgtaagggtcttatggag

SEQ ID NO: 2220062 - DNA, 25 bp, Homo sapien
cagcacccctgctgtactgcaaaaa

SEQ ID NO: 2220063 - DNA, 25 bp, Homo sapien
tgtccaaggtgagtgcctatgctca

SEQ ID NO: 2220064 - DNA, 25 bp, Homo sapien
tgcacattcatgtccaaggtgagtg

SEQ ID NO: 2220065 - DNA, 25 bp, Homo sapien
ccatgtctattacacaggaactgga

SEQ ID NO: 2220066 - DNA, 25 bp, Homo sapien
attgtccaaatgtaagggtatatgg

SEQ ID NO: 2220067 - DNA, 25 bp, Homo sapien
caaatgtaagggtatatggagtgga

SEQ ID NO: 2220068 - DNA, 25 bp, Homo sapien
ccaaatgtaagggtatatggagtgg

SEQ ID NO: 2220069 - DNA, 25 bp, Homo sapien
tgtccaaatgtaagggtatatggag

SEQ ID NO: 2220070 - DNA, 25 bp, Homo sapien
gatgggccatgtgcagttacgcaca

SEQ ID NO: 2220071 - DNA, 25 bp, Homo sapien
cattaatgtccaaggtgtatgcctg

SEQ ID NO: 2220072 - DNA, 25 bp, Homo sapien
gtacccctgctgtactgcaaagggc

SEQ ID NO: 2220073 - DNA, 25 bp, Homo sapien
gggccttggtgattcagtacccctg

SEQ ID NO: 2220074 - DNA, 25 bp, Homo sapien
ccaaacgtaagcgtcttatggagag

SEQ ID NO: 2220075 - DNA, 25 bp, Homo sapien
aaacgtaagcgtcttatggagaggg

SEQ ID NO: 2220076 - DNA, 25 bp, Homo sapien
tccaaacgtaagcgtcttatggaga

SEQ ID NO: 2220077 - DNA, 25 bp, Homo sapien
caaacgtaagcgtcttatggagagg

SEQ ID NO: 2220078 - DNA, 25 bp, Homo sapien
ttatgcaaatccatgtctaaggtgc

SEQ ID NO: 2220079 - DNA, 25 bp, Homo sapien
gcataccaggccaggaaaaagggcc

SEQ ID NO: 2220080 - DNA, 25 bp, Homo sapien
caaacataatcacacgcataccagg

SEQ ID NO: 2220081 - DNA, 25 bp, Homo sapien
catgtctaatacacaggaaccggga

SEQ ID NO: 2220082 - DNA, 25 bp, Homo sapien
atgtgagagtcttatggagtgggca

SEQ ID NO: 2220083 - DNA, 25 bp, Homo sapien
tgagagtcttatggagtgggcactc

SEQ ID NO: 2220084 - DNA, 25 bp, Homo sapien
gagagtcttatggagtgggcactcc

SEQ ID NO: 2220085 - DNA, 25 bp, Homo sapien
caaatgtgagagtcttatggagtgg

SEQ ID NO: 2220086 - DNA, 25 bp, Homo sapien
taggatcccagacgattataatcac

SEQ ID NO: 2220087 - DNA, 25 bp, Homo sapien
gaggaccctccttttctagtgcata

SEQ ID NO: 2220088 - DNA, 25 bp, Homo sapien
tataatcacacacaacatgccaaga

SEQ ID NO: 2220089 - DNA, 25 bp, Homo sapien
catgccaagaaaaggggactgcgtt

SEQ ID NO: 2220090 - DNA, 25 bp, Homo sapien
cagtgtgcgattacgcacataaatg

SEQ ID NO: 2220091 - DNA, 25 bp, Homo sapien
gtgcgattacgcacataaatgtcca

SEQ ID NO: 2220092 - DNA, 25 bp, Homo sapien
aatgagcagtgtgcgattacgcaca

SEQ ID NO: 2220093 - DNA, 25 bp, Homo sapien
gattacgcacataaatgtccaagat

SEQ ID NO: 2220094 - DNA, 25 bp, Homo sapien
attgtgcacctagactctccaaata

SEQ ID NO: 2220095 - DNA, 25 bp, Homo sapien
ttgtgcacctagactctccaaataa

SEQ ID NO: 2220096 - DNA, 25 bp, Homo sapien
gctaggcaggcaggatacaacgaaa

SEQ ID NO: 2220097 - DNA, 25 bp, Homo sapien
tcgttagcaacatcccacagaaggt

SEQ ID NO: 2220098 - DNA, 25 bp, Homo sapien
tgcacattcatagtcccagggaaag

SEQ ID NO: 2220099 - DNA, 25 bp, Homo sapien
taaatctcaggtagtcagcgctgcc

SEQ ID NO: 2220100 - DNA, 25 bp, Homo sapien
caaaagataaatataaatcaaaatc

SEQ ID NO: 2220101 - DNA, 25 bp, Homo sapien
aaagataaatataaatcaaaatccg

SEQ ID NO: 2220102 - DNA, 25 bp, Homo sapien
agataaatataaatcaaaatccgac

SEQ ID NO: 2220103 - DNA, 25 bp, Homo sapien
tccaaaagataaatataaatcaaaa

SEQ ID NO: 2220104 - DNA, 25 bp, Homo sapien
tggccaacgatcatctgtgatccat

SEQ ID NO: 2220105 - DNA, 25 bp, Homo sapien
tctggtccttgccacggctcaccac

SEQ ID NO: 2220106 - DNA, 25 bp, Homo sapien
tcttctgccacctgttggccaacga

SEQ ID NO: 2220107 - DNA, 25 bp, Homo sapien
ggtgttcctcttgaggaaggcagga

SEQ ID NO: 2220108 - DNA, 25 bp, Homo sapien
catctttaacaatgcggcaagcccg

SEQ ID NO: 2220109 - DNA, 25 bp, Homo sapien
cagatatccagcactgcaagaggca

SEQ ID NO: 2220110 - DNA, 25 bp, Homo sapien
gatatacatatgacaacgcctgcca

SEQ ID NO: 2220111 - DNA, 25 bp, Homo sapien
aagaggcccgccatgttttacactg

SEQ ID NO: 2220112 - DNA, 25 bp, Homo sapien
gactagccctaagccgagttatgcg

SEQ ID NO: 2220113 - DNA, 25 bp, Homo sapien
gaattaaaaggcaggtatccacggc

SEQ ID NO: 2220114 - DNA, 25 bp, Homo sapien
tatgcggcaagtctaaaatggcggc

SEQ ID NO: 2220115 - DNA, 25 bp, Homo sapien
tctgccaaagcggtaggtacactca

SEQ ID NO: 2220116 - DNA, 25 bp, Homo sapien
gtggctttgggtgaactcccagagg

SEQ ID NO: 2220117 - DNA, 25 bp, Homo sapien
agaggccgctgataggccctccaca

SEQ ID NO: 2220118 - DNA, 25 bp, Homo sapien
actcccagaggccgctgataggccc

SEQ ID NO: 2220119 - DNA, 25 bp, Homo sapien
ctgccccacccttgcctgaatgctg

SEQ ID NO: 2220120 - DNA, 25 bp, Homo sapien
gcgcccggccagaacattagtttta

SEQ ID NO: 2220121 - DNA, 25 bp, Homo sapien
caccgcgcccggccagaacattagt

SEQ ID NO: 2220122 - DNA, 25 bp, Homo sapien
ccgcgcccggccagaacattagttt

SEQ ID NO: 2220123 - DNA, 25 bp, Homo sapien
cccttgggagaaggcaaaacacttg

SEQ ID NO: 2220124 - DNA, 25 bp, Homo sapien
ctccatattttgcagcagggtaaat

SEQ ID NO: 2220125 - DNA, 25 bp, Homo sapien
tgttccagtgctgttgatgttgtac

SEQ ID NO: 2220126 - DNA, 25 bp, Homo sapien
tgtactgttttagcaatgaagagat

SEQ ID NO: 2220127 - DNA, 25 bp, Homo sapien
tacgtagctagatactgtgttccag

SEQ ID NO: 2220128 - DNA, 25 bp, Homo sapien
gccgggaagcatgttttctgaaaca

SEQ ID NO: 2220129 - DNA, 25 bp, Homo sapien
ctcctaatctcaggtgatccgtctg

SEQ ID NO: 2220130 - DNA, 25 bp, Homo sapien
cctaatctcaggtgatccgtctgcc

SEQ ID NO: 2220131 - DNA, 25 bp, Homo sapien
tcctaatctcaggtgatccgtctgc

SEQ ID NO: 2220132 - DNA, 25 bp, Homo sapien
gcctttttaacaatggtgcttgacc

SEQ ID NO: 2220133 - DNA, 25 bp, Homo sapien
gacatatacaattaggcccgactga

SEQ ID NO: 2220134 - DNA, 25 bp, Homo sapien
tcatgacttgggaaactcaacatag

SEQ ID NO: 2220135 - DNA, 25 bp, Homo sapien
tcagtttgtgctaggcaaggagttc

SEQ ID NO: 2220136 - DNA, 25 bp, Homo sapien
cattgctggtatattgggaagcaat

SEQ ID NO: 2220137 - DNA, 25 bp, Homo sapien
gaagcaattcgctactgtatgtgtg

SEQ ID NO: 2220138 - DNA, 25 bp, Homo sapien
tttttggggctgctagtgtatatgc

SEQ ID NO: 2220139 - DNA, 25 bp, Homo sapien
gtatgtattttggtagatttatacc

SEQ ID NO: 2220140 - DNA, 25 bp, Homo sapien
tagagcccttagtatgttaatcaaa

SEQ ID NO: 2220141 - DNA, 25 bp, Homo sapien
gtgtccagtgtacagagtctatcaa

SEQ ID NO: 2220142 - DNA, 25 bp, Homo sapien
cagtgtacagagtctatcaaagtca

SEQ ID NO: 2220143 - DNA, 25 bp, Homo sapien
tagtgttttagatctttagcatttg

SEQ ID NO: 2220144 - DNA, 25 bp, Homo sapien
tttttgtttgattgagatggagcct

SEQ ID NO: 2220145 - DNA, 25 bp, Homo sapien
ttttttgtttgattgagatggagcc

SEQ ID NO: 2220146 - DNA, 25 bp, Homo sapien
ttttgtttgattgagatggagcctt

SEQ ID NO: 2220147 - DNA, 25 bp, Homo sapien
gatttgcaaggacccacaggactgg

SEQ ID NO: 2220148 - DNA, 25 bp, Homo sapien
caggactggcgtataattgtactca

SEQ ID NO: 2220149 - DNA, 25 bp, Homo sapien
gtgcttttgcgttggcgagccccag

SEQ ID NO: 2220150 - DNA, 25 bp, Homo sapien
gccccagcacaagggtagtttcagt

SEQ ID NO: 2220151 - DNA, 25 bp, Homo sapien
tatctttttacctttaggtccatga

SEQ ID NO: 2220152 - DNA, 25 bp, Homo sapien
aatgagcgaggtaatatgttgtcac

SEQ ID NO: 2220153 - DNA, 25 bp, Homo sapien
taaagagattgcaggccatgcacag

SEQ ID NO: 2220154 - DNA, 25 bp, Homo sapien
tggtatgtggtcctctagttgtttc

SEQ ID NO: 2220155 - DNA, 25 bp, Homo sapien
tcctgattcatgaacctagtatttc

SEQ ID NO: 2220156 - DNA, 25 bp, Homo sapien
caatagctacaagaagacgttgctg

SEQ ID NO: 2220157 - DNA, 25 bp, Homo sapien
gtacctcactgagtctcctgattca

SEQ ID NO: 2220158 - DNA, 25 bp, Homo sapien
gaaattggagagcatttgtacctca

SEQ ID NO: 2220159 - DNA, 25 bp, Homo sapien
actctgcatgttacctgtaggtctt

SEQ ID NO: 2220160 - DNA, 25 bp, Homo sapien
tcttcctttgcaatgtatgtgccct

SEQ ID NO: 2220161 - DNA, 25 bp, Homo sapien
cctttattaggttaagcacctccat

SEQ ID NO: 2220162 - DNA, 25 bp, Homo sapien
tgggagggcatactttactagtagt

SEQ ID NO: 2220163 - DNA, 25 bp, Homo sapien
tatgctgtatctttctccacccttg

SEQ ID NO: 2220164 - DNA, 25 bp, Homo sapien
aacctttgattaggtgcgtatacct

SEQ ID NO: 2220165 - DNA, 25 bp, Homo sapien
gatagtaatgttcaggccttccata

SEQ ID NO: 2220166 - DNA, 25 bp, Homo sapien
ttaataagccaaaacatgatctgtc

SEQ ID NO: 2220167 - DNA, 25 bp, Homo sapien
tctggaccttccatacaattagaat

SEQ ID NO: 2220168 - DNA, 25 bp, Homo sapien
gagttctgcaactaacaccattatt

SEQ ID NO: 2220169 - DNA, 25 bp, Homo sapien
gtctcagttcttttacatgggttaa

SEQ ID NO: 2220170 - DNA, 25 bp, Homo sapien
actggtggtgtttagaccattacaa

SEQ ID NO: 2220171 - DNA, 25 bp, Homo sapien
tgtcccagtaatcaaatgctcagat

SEQ ID NO: 2220172 - DNA, 25 bp, Homo sapien
ttttcagccatagctgctactcctt

SEQ ID NO: 2220173 - DNA, 25 bp, Homo sapien
ggattcctattctcaggccagccca

SEQ ID NO: 2220174 - DNA, 25 bp, Homo sapien
tgtggcttcctattgataacagctg

SEQ ID NO: 2220175 - DNA, 25 bp, Homo sapien
tttctagtgccctatatatttgaga

SEQ ID NO: 2220176 - DNA, 25 bp, Homo sapien
gttgtttctagtgccctatatattt

SEQ ID NO: 2220177 - DNA, 25 bp, Homo sapien
gtttctagtgccctatatatttgag

SEQ ID NO: 2220178 - DNA, 25 bp, Homo sapien
tgtttctagtgccctatatatttga

SEQ ID NO: 2220179 - DNA, 25 bp, Homo sapien
atgtttctgtgactgttacctattt

SEQ ID NO: 2220180 - DNA, 25 bp, Homo sapien
aattggttcaagattgttttatgac

SEQ ID NO: 2220181 - DNA, 25 bp, Homo sapien
tggttcaagattgttttatgaccca

SEQ ID NO: 2220182 - DNA, 25 bp, Homo sapien
ccagaatgtggtatgtcttggtaaa

SEQ ID NO: 2220183 - DNA, 25 bp, Homo sapien
tcttttttgagttaaccaggataca

SEQ ID NO: 2220184 - DNA, 25 bp, Homo sapien
tgggatattccggaagtttggactg

SEQ ID NO: 2220185 - DNA, 25 bp, Homo sapien
cagtagttatttacggccagtgtcc

SEQ ID NO: 2220186 - DNA, 25 bp, Homo sapien
tggactggtgtaaccacagtagtta

SEQ ID NO: 2220187 - DNA, 25 bp, Homo sapien
tgttctctacactactgcaagggtg

SEQ ID NO: 2220188 - DNA, 25 bp, Homo sapien
taatagactgtaatctccttgcagg

SEQ ID NO: 2220189 - DNA, 25 bp, Homo sapien
catttatcttctagcaccactgcag

SEQ ID NO: 2220190 - DNA, 25 bp, Homo sapien
taggccttcactaccttaatgtgga

SEQ ID NO: 2220191 - DNA, 25 bp, Homo sapien
taatcttgagcaacaaggacacagc

SEQ ID NO: 2220192 - DNA, 25 bp, Homo sapien
ccttaaaagcatgggcagcaaaaac

SEQ ID NO: 2220193 - DNA, 25 bp, Homo sapien
caggaaagcccagacataactcata

SEQ ID NO: 2220194 - DNA, 25 bp, Homo sapien
gccagacaactatcagggaacctgc

SEQ ID NO: 2220195 - DNA, 25 bp, Homo sapien
tagaaataacacagagataggaact

SEQ ID NO: 2220196 - DNA, 25 bp, Homo sapien
aataacacagagataggaactatac

SEQ ID NO: 2220197 - DNA, 25 bp, Homo sapien
ttagaaataacacagagataggaac

SEQ ID NO: 2220198 - DNA, 25 bp, Homo sapien
gaaataacacagagataggaactat

SEQ ID NO: 2220199 - DNA, 25 bp, Homo sapien
accccagtggatccaataaatttgg

SEQ ID NO: 2220200 - DNA, 25 bp, Homo sapien
aaggacaggataaaacattcttgcc

SEQ ID NO: 2220201 - DNA, 25 bp, Homo sapien
gatgacatggttttgtacatacaca

SEQ ID NO: 2220202 - DNA, 25 bp, Homo sapien
gaagatttaagcatcgctaggtgcg

SEQ ID NO: 2220203 - DNA, 25 bp, Homo sapien
cacatacagttagttaggcttagca

SEQ ID NO: 2220204 - DNA, 25 bp, Homo sapien
aaactgtataccacattggaaaata

SEQ ID NO: 2220205 - DNA, 25 bp, Homo sapien
tatgtgtagaccaaacctgcacttg

SEQ ID NO: 2220206 - DNA, 25 bp, Homo sapien
cagcagatttatttcagtagctgaa

SEQ ID NO: 2220207 - DNA, 25 bp, Homo sapien
caattgggccagttgagattcacaa

SEQ ID NO: 2220208 - DNA, 25 bp, Homo sapien
cagaggattgactttgggaccccta

SEQ ID NO: 2220209 - DNA, 25 bp, Homo sapien
ctatgtgcctgccatcatgtgtgga

SEQ ID NO: 2220210 - DNA, 25 bp, Homo sapien
cccctatatgggatgggcaatgctc

SEQ ID NO: 2220211 - DNA, 25 bp, Homo sapien
tctacaagaaacagcagcaagccaa

SEQ ID NO: 2220212 - DNA, 25 bp, Homo sapien
taggcatacgtctacaagaaacagc

SEQ ID NO: 2220213 - DNA, 25 bp, Homo sapien
aaactgtaggcatacgtctacaaga

SEQ ID NO: 2220214 - DNA, 25 bp, Homo sapien
acagcagcaagccaataaccatgac

SEQ ID NO: 2220215 - DNA, 25 bp, Homo sapien
cagtggccaatgcaaatacataggc

SEQ ID NO: 2220216 - DNA, 25 bp, Homo sapien
ccataatacgaggagtaagatgcaa

SEQ ID NO: 2220217 - DNA, 25 bp, Homo sapien
gaaaattatgctaacgtccaaagag

SEQ ID NO: 2220218 - DNA, 25 bp, Homo sapien
tcagaaattgtacataccaggaggg

SEQ ID NO: 2220219 - DNA, 25 bp, Homo sapien
gcacattgcatgaacctaggaacta

SEQ ID NO: 2220220 - DNA, 25 bp, Homo sapien
gaatacttcgtctaacagcggcaca

SEQ ID NO: 2220221 - DNA, 25 bp, Homo sapien
gaagatggatctttgcgtaggcctt

SEQ ID NO: 2220222 - DNA, 25 bp, Homo sapien
tggatctgacttacactacatctgg

SEQ ID NO: 2220223 - DNA, 25 bp, Homo sapien
acagctagtgggaaatgtgcttcca

SEQ ID NO: 2220224 - DNA, 25 bp, Homo sapien
cttctgtctatggtataaggtagga

SEQ ID NO: 2220225 - DNA, 25 bp, Homo sapien
tactgatgtctagttgttcaacacc

SEQ ID NO: 2220226 - DNA, 25 bp, Homo sapien
catcgccaactcaaattaacttctg

SEQ ID NO: 2220227 - DNA, 25 bp, Homo sapien
gttattggtttgtaggaatgattgt

SEQ ID NO: 2220228 - DNA, 25 bp, Homo sapien
taggctattactgcctgaatttcaa

SEQ ID NO: 2220229 - DNA, 25 bp, Homo sapien
gctattactgcctgaatttcaaaac

SEQ ID NO: 2220230 - DNA, 25 bp, Homo sapien
cgtctgttcctggactttttatggt

SEQ ID NO: 2220231 - DNA, 25 bp, Homo sapien
tggtaggctattactgcctgaattt

SEQ ID NO: 2220232 - DNA, 25 bp, Homo sapien
ctttttatgtgtagtgcttttttca

SEQ ID NO: 2220233 - DNA, 25 bp, Homo sapien
catctattgacacctgtgtatgctt

SEQ ID NO: 2220234 - DNA, 25 bp, Homo sapien
tcttagtttaattgcattgtgttag

SEQ ID NO: 2220235 - DNA, 25 bp, Homo sapien
agcttagaggagtttattacccacg

SEQ ID NO: 2220236 - DNA, 25 bp, Homo sapien
atcaattcatctattgacacctgtg

SEQ ID NO: 2220237 - DNA, 25 bp, Homo sapien
gagaagcatttttgtagcgatccaa

SEQ ID NO: 2220238 - DNA, 25 bp, Homo sapien
tgatgagctcgctgggatcttcaga

SEQ ID NO: 2220239 - DNA, 25 bp, Homo sapien
gcgatccaaattaagtcaggtgact

SEQ ID NO: 2220240 - DNA, 25 bp, Homo sapien
cttgcagcaataaagagccacaatg

SEQ ID NO: 2220241 - DNA, 25 bp, Homo sapien
taccattgcagctacagcagtaccg

SEQ ID NO: 2220242 - DNA, 25 bp, Homo sapien
tacttgtcactggtcaggatctccc

SEQ ID NO: 2220243 - DNA, 25 bp, Homo sapien
ccttatggaaaggtaaccaggctgc

SEQ ID NO: 2220244 - DNA, 25 bp, Homo sapien
gcttaagaatgatcatgggcctcca

SEQ ID NO: 2220245 - DNA, 25 bp, Homo sapien
ggatatagccacattccctaggcct

SEQ ID NO: 2220246 - DNA, 25 bp, Homo sapien
tacagctggatagcgctattggccc

SEQ ID NO: 2220247 - DNA, 25 bp, Homo sapien
gaattttcaggtttagagatggcca

SEQ ID NO: 2220248 - DNA, 25 bp, Homo sapien
tagaattccagaagtccaacagcct

SEQ ID NO: 2220249 - DNA, 25 bp, Homo sapien
atgtgccgccgaacacgtccggttg

SEQ ID NO: 2220250 - DNA, 25 bp, Homo sapien
gcctgaccaactttgtgctgtctgt

SEQ ID NO: 2220251 - DNA, 25 bp, Homo sapien
gctgctgcctgtacaagatgtgccg

SEQ ID NO: 2220252 - DNA, 25 bp, Homo sapien
gaacacgtccggttgtcaccagcat

SEQ ID NO: 2220253 - DNA, 25 bp, Homo sapien
tgagtatgatacagatgtgtcctgg

SEQ ID NO: 2220254 - DNA, 25 bp, Homo sapien
cagctttctgtgagtatgatacaga

SEQ ID NO: 2220255 - DNA, 25 bp, Homo sapien
tctgtgagtatgatacagatgtgtc

SEQ ID NO: 2220256 - DNA, 25 bp, Homo sapien
tgcagctttctgtgagtatgataca

SEQ ID NO: 2220257 - DNA, 25 bp, Homo sapien
ttctttctgattattacttgtaccc

SEQ ID NO: 2220258 - DNA, 25 bp, Homo sapien
tacttgtacccatagaacatcccca

SEQ ID NO: 2220259 - DNA, 25 bp, Homo sapien
gattattacttgtacccatagaaca

SEQ ID NO: 2220260 - DNA, 25 bp, Homo sapien
gtgggcacatagtagaggtatgtat

SEQ ID NO: 2220261 - DNA, 25 bp, Homo sapien
tgcttgtgcttgtggagtaaagact

SEQ ID NO: 2220262 - DNA, 25 bp, Homo sapien
tctattcacttggttgatagtatct

SEQ ID NO: 2220263 - DNA, 25 bp, Homo sapien
aaagactgtgttttcccgagtgcat

SEQ ID NO: 2220264 - DNA, 25 bp, Homo sapien
aatgggttcactgtttgtgtgtgga

SEQ ID NO: 2220265 - DNA, 25 bp, Homo sapien
gggcccaggctgatcatttcacaca

SEQ ID NO: 2220266 - DNA, 25 bp, Homo sapien
catatggtgctggaagacatgctac

SEQ ID NO: 2220267 - DNA, 25 bp, Homo sapien
cataatctcctgtgatcccacggag

SEQ ID NO: 2220268 - DNA, 25 bp, Homo sapien
gaagacagcctgatgacggtggtac

SEQ ID NO: 2220269 - DNA, 25 bp, Homo sapien
gattgggtcagaggattccttcctg

SEQ ID NO: 2220270 - DNA, 25 bp, Homo sapien
cctgttcttaaacatgggtgatgag

SEQ ID NO: 2220271 - DNA, 25 bp, Homo sapien
tcagctgtgcacattgcccatagcc

SEQ ID NO: 2220272 - DNA, 25 bp, Homo sapien
tcatagttcatgaatattgttgcca

SEQ ID NO: 2220273 - DNA, 25 bp, Homo sapien
ttggtcttggaagggattacgtgtc

SEQ ID NO: 2220274 - DNA, 25 bp, Homo sapien
cttggaagggattacgtgtccagaa

SEQ ID NO: 2220275 - DNA, 25 bp, Homo sapien
tgtgaatcagtctggtcatgggctc

SEQ ID NO: 2220276 - DNA, 25 bp, Homo sapien
gaatcagtctggtcatgggctcttt

SEQ ID NO: 2220277 - DNA, 25 bp, Homo sapien
gatttaatcaactatccaccctcat

SEQ ID NO: 2220278 - DNA, 25 bp, Homo sapien
ttcttagatgacaagatactactga

SEQ ID NO: 2220279 - DNA, 25 bp, Homo sapien
taaaacaggcatggtcagaaaaatc

SEQ ID NO: 2220280 - DNA, 25 bp, Homo sapien
caaaatcgtaggcaatttcatggtg

SEQ ID NO: 2220281 - DNA, 25 bp, Homo sapien
tataagacataattgagtggcctaa

SEQ ID NO: 2220282 - DNA, 25 bp, Homo sapien
tcaacagacttattagacagaaact

SEQ ID NO: 2220283 - DNA, 25 bp, Homo sapien
tcagcagactcaaacagggagaaaa

SEQ ID NO: 2220284 - DNA, 25 bp, Homo sapien
tagtaaaggccttcatagcagtctt

SEQ ID NO: 2220285 - DNA, 25 bp, Homo sapien
ggtaatttgggagcatattattcaa

SEQ ID NO: 2220286 - DNA, 25 bp, Homo sapien
tgctggtaatttgggagcatattat

SEQ ID NO: 2220287 - DNA, 25 bp, Homo sapien
cttcattgacctgctggtaatttgg

SEQ ID NO: 2220288 - DNA, 25 bp, Homo sapien
gctgtatcccatgggtttttgtata

SEQ ID NO: 2220289 - DNA, 25 bp, Homo sapien
ataatacttaaaactaatcttgatt

SEQ ID NO: 2220290 - DNA, 25 bp, Homo sapien
taatacttaaaactaatcttgattc

SEQ ID NO: 2220291 - DNA, 25 bp, Homo sapien
cagagaaacagtgtagaacggtgat

SEQ ID NO: 2220292 - DNA, 25 bp, Homo sapien
aaatatgttaactgagtgaggtgac

SEQ ID NO: 2220293 - DNA, 25 bp, Homo sapien
agatgtcggtcaaagggcacacact

SEQ ID NO: 2220294 - DNA, 25 bp, Homo sapien
cagaatggtaactaacttgggtgca

SEQ ID NO: 2220295 - DNA, 25 bp, Homo sapien
accatcacgaccagcacctgaggaa

SEQ ID NO: 2220296 - DNA, 25 bp, Homo sapien
atgatgttcagccagcaatctaggg

SEQ ID NO: 2220297 - DNA, 25 bp, Homo sapien
cctacctaagagttcagccagtgac

SEQ ID NO: 2220298 - DNA, 25 bp, Homo sapien
agtgctctgcctaaccctacctaag

SEQ ID NO: 2220299 - DNA, 25 bp, Homo sapien
catggcaattcctgcagtcttattc

SEQ ID NO: 2220300 - DNA, 25 bp, Homo sapien
ccacttttctatcacacttggagtt

SEQ ID NO: 2220301 - DNA, 25 bp, Homo sapien
tttctctttgttcgaatccccctgc

SEQ ID NO: 2220302 - DNA, 25 bp, Homo sapien
agcctcctcatataagcagccactt

SEQ ID NO: 2220303 - DNA, 25 bp, Homo sapien
cgttggctgctgtactaaagactca

SEQ ID NO: 2220304 - DNA, 25 bp, Homo sapien
tggcagagaaccctcaactataccg

SEQ ID NO: 2220305 - DNA, 25 bp, Homo sapien
tttctttaggaacgggcatgcatca

SEQ ID NO: 2220306 - DNA, 25 bp, Homo sapien
cacaagactaaggacgctggtgttc

SEQ ID NO: 2220307 - DNA, 25 bp, Homo sapien
tgtctctttgtatttctgaacgagt

SEQ ID NO: 2220308 - DNA, 25 bp, Homo sapien
ttagccctcctccacgtgcaaatgc

SEQ ID NO: 2220309 - DNA, 25 bp, Homo sapien
gcatgcttgtaaaagcagttccctc

SEQ ID NO: 2220310 - DNA, 25 bp, Homo sapien
cgtgcacgccttgttgctcattgtc

SEQ ID NO: 2220311 - DNA, 25 bp, Homo sapien
tgatctctgggcagtatccatcgga

SEQ ID NO: 2220312 - DNA, 25 bp, Homo sapien
gggactcaatgcacgattttatacg

SEQ ID NO: 2220313 - DNA, 25 bp, Homo sapien
tgggactcaatgcacgattttatac

SEQ ID NO: 2220314 - DNA, 25 bp, Homo sapien
actcaatgcacgattttatacgctg

SEQ ID NO: 2220315 - DNA, 25 bp, Homo sapien
caagggtgcttcagtgaaggaaggt

SEQ ID NO: 2220316 - DNA, 25 bp, Homo sapien
gcttcagtgaaggaaggtaccgtag

SEQ ID NO: 2220317 - DNA, 25 bp, Homo sapien
gtgcttcagtgaaggaaggtaccgt

SEQ ID NO: 2220318 - DNA, 25 bp, Homo sapien
tcagtgaaggaaggtaccgtaggac

SEQ ID NO: 2220319 - DNA, 25 bp, Homo sapien
gtattcatttcaactatcgatgaga

SEQ ID NO: 2220320 - DNA, 25 bp, Homo sapien
cacagttacctctgtccttacaaac

SEQ ID NO: 2220321 - DNA, 25 bp, Homo sapien
gagaggtcatgcgagaatccacagt

SEQ ID NO: 2220322 - DNA, 25 bp, Homo sapien
tatttgcagcggtcaccataaacac

SEQ ID NO: 2220323 - DNA, 25 bp, Homo sapien
tgtctacagttcttaatctcatctg

SEQ ID NO: 2220324 - DNA, 25 bp, Homo sapien
taatgccaactcatcatgtgataat

SEQ ID NO: 2220325 - DNA, 25 bp, Homo sapien
aaaaaactccagctatgaaagcaac

SEQ ID NO: 2220326 - DNA, 25 bp, Homo sapien
cctggagaagctaatgccaactcat

SEQ ID NO: 2220327 - DNA, 25 bp, Homo sapien
tgtttccgctttctgttgtcccaag

SEQ ID NO: 2220328 - DNA, 25 bp, Homo sapien
tccacaagtgttggcctggagtctg

SEQ ID NO: 2220329 - DNA, 25 bp, Homo sapien
tgggtctatgcatgccaacctggtg

SEQ ID NO: 2220330 - DNA, 25 bp, Homo sapien
gagactggaggctaggtccacaagt

SEQ ID NO: 2220331 - DNA, 25 bp, Homo sapien
taagccttgaatgggagctagacac

SEQ ID NO: 2220332 - DNA, 25 bp, Homo sapien
tagcactacagtgagcctgaagcct

SEQ ID NO: 2220333 - DNA, 25 bp, Homo sapien
gaagctgggtacttaaggtcatggc

SEQ ID NO: 2220334 - DNA, 25 bp, Homo sapien
gactcttggctacactcaccaggaa

SEQ ID NO: 2220335 - DNA, 25 bp, Homo sapien
aaatattagcaaaggacattctgat

SEQ ID NO: 2220336 - DNA, 25 bp, Homo sapien
tagaagcaataccaaaagtacaacc

SEQ ID NO: 2220337 - DNA, 25 bp, Homo sapien
tctaccctgtgacaatgtaaaaaga

SEQ ID NO: 2220338 - DNA, 25 bp, Homo sapien
gaagaaagaatagattaactgaact

SEQ ID NO: 2220339 - DNA, 25 bp, Homo sapien
cccattggcaagagcaggtataatc

SEQ ID NO: 2220340 - DNA, 25 bp, Homo sapien
tttgcccattgatgaacacctaggt

SEQ ID NO: 2220341 - DNA, 25 bp, Homo sapien
caatgggtaccaaaactgttgtgcc

SEQ ID NO: 2220342 - DNA, 25 bp, Homo sapien
gcagcaagccttccacatcgtttga

SEQ ID NO: 2220343 - DNA, 25 bp, Homo sapien
tatggatagtgcatcaggtgctgcc

SEQ ID NO: 2220344 - DNA, 25 bp, Homo sapien
tggttcccaatccacgtgcaggtga

SEQ ID NO: 2220345 - DNA, 25 bp, Homo sapien
gaactaggtagtggtaacgcctgca

SEQ ID NO: 2220346 - DNA, 25 bp, Homo sapien
tctacaagggtgtcaggaccatacc

SEQ ID NO: 2220347 - DNA, 25 bp, Homo sapien
cttatggaggtcaagccgggtagca

SEQ ID NO: 2220348 - DNA, 25 bp, Homo sapien
gctggaagactatactgacaacctg

SEQ ID NO: 2220349 - DNA, 25 bp, Homo sapien
tttatggccaccagagacgtgatcc

SEQ ID NO: 2220350 - DNA, 25 bp, Homo sapien
tatctctagcttgggaactgccacc

SEQ ID NO: 2220351 - DNA, 25 bp, Homo sapien
tgaagggcctaactctgtccatatg

SEQ ID NO: 2220352 - DNA, 25 bp, Homo sapien
agatgacacacttttggacgctgta

SEQ ID NO: 2220353 - DNA, 25 bp, Homo sapien
cattggaactcacctaagactggaa

SEQ ID NO: 2220354 - DNA, 25 bp, Homo sapien
ttgtgataacccaagtgtgccatgg

SEQ ID NO: 2220355 - DNA, 25 bp, Homo sapien
cccgcatttttcattagggtggttg

SEQ ID NO: 2220356 - DNA, 25 bp, Homo sapien
gcttcaagatatctgctgctagaaa

SEQ ID NO: 2220357 - DNA, 25 bp, Homo sapien
tggaaaactggtgtggaaacccgca

SEQ ID NO: 2220358 - DNA, 25 bp, Homo sapien
tcagtgtgagaggaatatctgggtg

SEQ ID NO: 2220359 - DNA, 25 bp, Homo sapien
gaaggacaattgacttcaaggtgtc

SEQ ID NO: 2220360 - DNA, 25 bp, Homo sapien
aattgacttcaaggtgtctggcttc

SEQ ID NO: 2220361 - DNA, 25 bp, Homo sapien
acttcaaggtgtctggcttctgcca

SEQ ID NO: 2220362 - DNA, 25 bp, Homo sapien
gagaatgaaggacaattgacttcaa

SEQ ID NO: 2220363 - DNA, 25 bp, Homo sapien
gcagaatttggtgaattggagcaca

SEQ ID NO: 2220364 - DNA, 25 bp, Homo sapien
agggcatacatcagctatacaagag

SEQ ID NO: 2220365 - DNA, 25 bp, Homo sapien
aggagaagctttaccctgctctgag

SEQ ID NO: 2220366 - DNA, 25 bp, Homo sapien
tgggacttgcctctagcttctgcag

SEQ ID NO: 2220367 - DNA, 25 bp, Homo sapien
ttaagaagtaacctgggctcagtgc

SEQ ID NO: 2220368 - DNA, 25 bp, Homo sapien
cagttcgaggtcaacttcgaggtca

SEQ ID NO: 2220369 - DNA, 25 bp, Homo sapien
tcagccacatagtgtagggaggcaa

SEQ ID NO: 2220370 - DNA, 25 bp, Homo sapien
gtattcaggacttgagggaagcatc

SEQ ID NO: 2220371 - DNA, 25 bp, Homo sapien
ttctgtccccatatactgtctacta

SEQ ID NO: 2220372 - DNA, 25 bp, Homo sapien
tgactttcagatgcatataccccta

SEQ ID NO: 2220373 - DNA, 25 bp, Homo sapien
ctcttctgtccccatatactgtcta

SEQ ID NO: 2220374 - DNA, 25 bp, Homo sapien
ccctatttggtgttcaatcacatca

SEQ ID NO: 2220375 - DNA, 25 bp, Homo sapien
ctttacatttacatcgtcccaattg

SEQ ID NO: 2220376 - DNA, 25 bp, Homo sapien
catttacatcgtcccaattgtcaac

SEQ ID NO: 2220377 - DNA, 25 bp, Homo sapien
tacatttacatcgtcccaattgtca

SEQ ID NO: 2220378 - DNA, 25 bp, Homo sapien
tacatcgtcccaattgtcaacattt

SEQ ID NO: 2220379 - DNA, 25 bp, Homo sapien
gtgttgtctaaatgtggtttattaa

SEQ ID NO: 2220380 - DNA, 25 bp, Homo sapien
tgtgttgtctaaatgtggtttatta

SEQ ID NO: 2220381 - DNA, 25 bp, Homo sapien
tgttgtctaaatgtggtttattaaa

SEQ ID NO: 2220382 - DNA, 25 bp, Homo sapien
taaaaaccactaccattgacaacag

SEQ ID NO: 2220383 - DNA, 25 bp, Homo sapien
ttttgagacggacgaagttgtacac

SEQ ID NO: 2220384 - DNA, 25 bp, Homo sapien
cagctatatcatgtttgtggcctaa

SEQ ID NO: 2220385 - DNA, 25 bp, Homo sapien
gaataggcagcccagaattagaccc

SEQ ID NO: 2220386 - DNA, 25 bp, Homo sapien
gcaacagaggtattacagcgcaaca

SEQ ID NO: 2220387 - DNA, 25 bp, Homo sapien
taagccataggctgatactgggatc

SEQ ID NO: 2220388 - DNA, 25 bp, Homo sapien
taaacacccgccaaagtgagagtgc

SEQ ID NO: 2220389 - DNA, 25 bp, Homo sapien
aatagtggctggcaatgactctcac

SEQ ID NO: 2220390 - DNA, 25 bp, Homo sapien
ccccgccacaaagaaggaatgtatt

SEQ ID NO: 2220391 - DNA, 25 bp, Homo sapien
gccaagatgacaagatggcgccact

SEQ ID NO: 2220392 - DNA, 25 bp, Homo sapien
ttattgaaggccaaacagagcaagt

SEQ ID NO: 2220393 - DNA, 25 bp, Homo sapien
cctctctgggtcttaagtgatggga

SEQ ID NO: 2220394 - DNA, 25 bp, Homo sapien
gttgtattatatccatccgagtagg

SEQ ID NO: 2220395 - DNA, 25 bp, Homo sapien
tttgtcacgtgctgggtgtcccaag

SEQ ID NO: 2220396 - DNA, 25 bp, Homo sapien
ttcaacaagtttaagtcacacagcc

SEQ ID NO: 2220397 - DNA, 25 bp, Homo sapien
caggcaccagggtctgctgttgttt

SEQ ID NO: 2220398 - DNA, 25 bp, Homo sapien
tatgtgacagtgagagtaggcctgc

SEQ ID NO: 2220399 - DNA, 25 bp, Homo sapien
tactgatgagaaggaccagcaactt

SEQ ID NO: 2220400 - DNA, 25 bp, Homo sapien
caattcaggtgtctaggtgtctccc

SEQ ID NO: 2220401 - DNA, 25 bp, Homo sapien
tatgccaataatgactaaggccact

SEQ ID NO: 2220402 - DNA, 25 bp, Homo sapien
cacagtagatacagggaacacacca

SEQ ID NO: 2220403 - DNA, 25 bp, Homo sapien
gaagttgtattgaataattccccac

SEQ ID NO: 2220404 - DNA, 25 bp, Homo sapien
aattgacccttgaacctggcgcagg

SEQ ID NO: 2220405 - DNA, 25 bp, Homo sapien
taaatatatcctctacaagctgcta

SEQ ID NO: 2220406 - DNA, 25 bp, Homo sapien
ccagctggccccaaatacccaccta

SEQ ID NO: 2220407 - DNA, 25 bp, Homo sapien
gccagctggccccaaatacccacct

SEQ ID NO: 2220408 - DNA, 25 bp, Homo sapien
cagctggccccaaatacccacctac

SEQ ID NO: 2220409 - DNA, 25 bp, Homo sapien
cgcctccgaggttccagcctcccca

SEQ ID NO: 2220410 - DNA, 25 bp, Homo sapien
tttcaggatggagaaagcccttcca

SEQ ID NO: 2220411 - DNA, 25 bp, Homo sapien
aaggaggtcaaacggatgctgccat

SEQ ID NO: 2220412 - DNA, 25 bp, Homo sapien
gaaagtcttcaactggtatgaatcc

SEQ ID NO: 2220413 - DNA, 25 bp, Homo sapien
caccaagtctacaggagctttcagg

SEQ ID NO: 2220414 - DNA, 25 bp, Homo sapien
gaatgagggatgtgtcctgcaacat

SEQ ID NO: 2220415 - DNA, 25 bp, Homo sapien
tatgtgcaagaccaacaaatgccag

SEQ ID NO: 2220416 - DNA, 25 bp, Homo sapien
tacatacgcagataccgaagacccg

SEQ ID NO: 2220417 - DNA, 25 bp, Homo sapien
tgatatttgtgaacactcgacaagc

SEQ ID NO: 2220418 - DNA, 25 bp, Homo sapien
cagaggccgggaatcgagatcactt

SEQ ID NO: 2220419 - DNA, 25 bp, Homo sapien
cagagcttggcagaataaatatttt

SEQ ID NO: 2220420 - DNA, 25 bp, Homo sapien
tagattaacaggcacaaaaaaggct

SEQ ID NO: 2220421 - DNA, 25 bp, Homo sapien
agttggagacctcagtatgctttca

SEQ ID NO: 2220422 - DNA, 25 bp, Homo sapien
catccgtcaaatgatggataaacaa

SEQ ID NO: 2220423 - DNA, 25 bp, Homo sapien
tgtaaatgcaaacatccgtcaaatg

SEQ ID NO: 2220424 - DNA, 25 bp, Homo sapien
tactgacaaaagacaacatctgtaa

SEQ ID NO: 2220425 - DNA, 25 bp, Homo sapien
tgtttttagcaccattactgacaaa

SEQ ID NO: 2220426 - DNA, 25 bp, Homo sapien
tacagttgattgaccatgagtgaag

SEQ ID NO: 2220427 - DNA, 25 bp, Homo sapien
gaagatttgtacaagcacctaacta

SEQ ID NO: 2220428 - DNA, 25 bp, Homo sapien
accacatggcgattagtactataag

SEQ ID NO: 2220429 - DNA, 25 bp, Homo sapien
gcaggattgctgagataggcattcc

SEQ ID NO: 2220430 - DNA, 25 bp, Homo sapien
tatggcaagttaaagtacctcagga

SEQ ID NO: 2220431 - DNA, 25 bp, Homo sapien
tctacaatacatagggcatgctgac

SEQ ID NO: 2220432 - DNA, 25 bp, Homo sapien
caaatcatgggctgtgctttcataa

SEQ ID NO: 2220433 - DNA, 25 bp, Homo sapien
tcttgcaggcagataaaccccaaag

SEQ ID NO: 2220434 - DNA, 25 bp, Homo sapien
tatgtcaaacagatgtcagatagca

SEQ ID NO: 2220435 - DNA, 25 bp, Homo sapien
tttagacatgcgaaaaatatgggca

SEQ ID NO: 2220436 - DNA, 25 bp, Homo sapien
ttggctggaaagaacggaggaattc

SEQ ID NO: 2220437 - DNA, 25 bp, Homo sapien
gcatgtaatgtactctctaaaggga

SEQ ID NO: 2220438 - DNA, 25 bp, Homo sapien
tatgctgacaggttctagaaagccc

SEQ ID NO: 2220439 - DNA, 25 bp, Homo sapien
gaaagcccctttctatgcatagaga

SEQ ID NO: 2220440 - DNA, 25 bp, Homo sapien
taagcaccgcatacagtcaaaggac

SEQ ID NO: 2220441 - DNA, 25 bp, Homo sapien
tctgtgctgcaacatgaggctcctt

SEQ ID NO: 2220442 - DNA, 25 bp, Homo sapien
gacctgatggctggttggctcccaa

SEQ ID NO: 2220443 - DNA, 25 bp, Homo sapien
ggtaatcctatacttggtaagccag

SEQ ID NO: 2220444 - DNA, 25 bp, Homo sapien
tcctggtagccagataaagtaatca

SEQ ID NO: 2220445 - DNA, 25 bp, Homo sapien
gggactaaacccagaaagcagtatc

SEQ ID NO: 2220446 - DNA, 25 bp, Homo sapien
tgtaggtttggctatccctaaaaca

SEQ ID NO: 2220447 - DNA, 25 bp, Homo sapien
ggaatccaatcggcatagctcacta

SEQ ID NO: 2220448 - DNA, 25 bp, Homo sapien
gaatccaatcggcatagctcactac

SEQ ID NO: 2220449 - DNA, 25 bp, Homo sapien
ccaaatttagtgcaggaatccaatc

SEQ ID NO: 2220450 - DNA, 25 bp, Homo sapien
tttagtgcaggaatccaatcggcat

SEQ ID NO: 2220451 - DNA, 25 bp, Homo sapien
tacaaagtatactggaggcaaagaa

SEQ ID NO: 2220452 - DNA, 25 bp, Homo sapien
ggacatcaatttacataacacactg

SEQ ID NO: 2220453 - DNA, 25 bp, Homo sapien
cacatgttcaggtagtggacatcaa

SEQ ID NO: 2220454 - DNA, 25 bp, Homo sapien
gactgaaggccctcagagaatatgg

SEQ ID NO: 2220455 - DNA, 25 bp, Homo sapien
ttatgactcaaccaagaacacaagc

SEQ ID NO: 2220456 - DNA, 25 bp, Homo sapien
tcctgtttaagccatgcaaagacca

SEQ ID NO: 2220457 - DNA, 25 bp, Homo sapien
tcaagtattctgatgcatagtccag

SEQ ID NO: 2220458 - DNA, 25 bp, Homo sapien
agcagtatgaagcaatgggcatgca

SEQ ID NO: 2220459 - DNA, 25 bp, Homo sapien
aggaggaaggaagattgagaactgg

SEQ ID NO: 2220460 - DNA, 25 bp, Homo sapien
gaggaaggaagattgagaactggga

SEQ ID NO: 2220461 - DNA, 25 bp, Homo sapien
ggaaggaagattgagaactgggaat

SEQ ID NO: 2220462 - DNA, 25 bp, Homo sapien
tgtatcttgtaaggaggaaggaaga

SEQ ID NO: 2220463 - DNA, 25 bp, Homo sapien
ccctggaaggtgtacgaatgctgcc

SEQ ID NO: 2220464 - DNA, 25 bp, Homo sapien
taagcaaaagtactgtggaagctgc

SEQ ID NO: 2220465 - DNA, 25 bp, Homo sapien
acagggcctggacgcactaactgca

SEQ ID NO: 2220466 - DNA, 25 bp, Homo sapien
tgagcaagaaaagccaccctggaag

SEQ ID NO: 2220467 - DNA, 25 bp, Homo sapien
taataaaagcttgcctgaacttggg

SEQ ID NO: 2220468 - DNA, 25 bp, Homo sapien
tatctaggcgccacagtgaagccag

SEQ ID NO: 2220469 - DNA, 25 bp, Homo sapien
gggatgcggccataccaaagaactc

SEQ ID NO: 2220470 - DNA, 25 bp, Homo sapien
tctgtgataaagcagccggcgggtt

SEQ ID NO: 2220471 - DNA, 25 bp, Homo sapien
tagcctagctaggaaagagccagtc

SEQ ID NO: 2220472 - DNA, 25 bp, Homo sapien
tgtgcaacagcctgtacaaccctgt

SEQ ID NO: 2220473 - DNA, 25 bp, Homo sapien
caggctgacagttaataagaactca

SEQ ID NO: 2220474 - DNA, 25 bp, Homo sapien
tccatagtaataagcctgtcctccc

SEQ ID NO: 2220475 - DNA, 25 bp, Homo sapien
ctagaacttaagctgtaaggagtcc

SEQ ID NO: 2220476 - DNA, 25 bp, Homo sapien
gaacttaagctgtaaggagtcctgt

SEQ ID NO: 2220477 - DNA, 25 bp, Homo sapien
cttaagctgtaaggagtcctgtgga

SEQ ID NO: 2220478 - DNA, 25 bp, Homo sapien
aacttaagctgtaaggagtcctgtg

SEQ ID NO: 2220479 - DNA, 25 bp, Homo sapien
gaagcccctttggactatatctgag

SEQ ID NO: 2220480 - DNA, 25 bp, Homo sapien
tttgaaaggacgagctggccatgcc

SEQ ID NO: 2220481 - DNA, 25 bp, Homo sapien
catgaacatgttggtgggcacacac

SEQ ID NO: 2220482 - DNA, 25 bp, Homo sapien
ggtaggccctcacatagtttgaaag

SEQ ID NO: 2220483 - DNA, 25 bp, Homo sapien
tctggttataattctcctgttgcac

SEQ ID NO: 2220484 - DNA, 25 bp, Homo sapien
tgttgagtcccatgatctatgaccc

SEQ ID NO: 2220485 - DNA, 25 bp, Homo sapien
tgttgcactttcattactaggttag

SEQ ID NO: 2220486 - DNA, 25 bp, Homo sapien
tctatgacccgcaagacactgtcta

SEQ ID NO: 2220487 - DNA, 25 bp, Homo sapien
gaactcagttcctctggtgccacag

SEQ ID NO: 2220488 - DNA, 25 bp, Homo sapien
gaaatccgtgttttggaaggcacac

SEQ ID NO: 2220489 - DNA, 25 bp, Homo sapien
cacatttaagcaggtgccgggaatc

SEQ ID NO: 2220490 - DNA, 25 bp, Homo sapien
caggccacgcaagtctagaaggtca

SEQ ID NO: 2220491 - DNA, 25 bp, Homo sapien
taaggctggccttaagctgtagaca

SEQ ID NO: 2220492 - DNA, 25 bp, Homo sapien
gacccagaagcctgatgtgccggca

SEQ ID NO: 2220493 - DNA, 25 bp, Homo sapien
tcacgtatttgacctcatatggagg

SEQ ID NO: 2220494 - DNA, 25 bp, Homo sapien
taagcaatatgtctcctatagtggg

SEQ ID NO: 2220495 - DNA, 25 bp, Homo sapien
cccagagatgggcaaggacagcttg

SEQ ID NO: 2220496 - DNA, 25 bp, Homo sapien
ttgggtgggatctctttgactgtct

SEQ ID NO: 2220497 - DNA, 25 bp, Homo sapien
taactgcttggtgtggctaaagtca

SEQ ID NO: 2220498 - DNA, 25 bp, Homo sapien
tcataacctaattaaggctcgttgg

SEQ ID NO: 2220499 - DNA, 25 bp, Homo sapien
ggaggcaccgcaaaccctgttttca

SEQ ID NO: 2220500 - DNA, 25 bp, Homo sapien
cttctggtagtatgggactcctggg

SEQ ID NO: 2220501 - DNA, 25 bp, Homo sapien
aaataacttctggtagtatgggact

SEQ ID NO: 2220502 - DNA, 25 bp, Homo sapien
aggcaccgcaaaccctgttttcaga

SEQ ID NO: 2220503 - DNA, 25 bp, Homo sapien
gacgggataatctataagggttcat

SEQ ID NO: 2220504 - DNA, 25 bp, Homo sapien
gaggtcttaagacactaatctgccc

SEQ ID NO: 2220505 - DNA, 25 bp, Homo sapien
tcagagggcccctgaaatattcaga

SEQ ID NO: 2220506 - DNA, 25 bp, Homo sapien
tcatggaaacgaactggaattaaca

SEQ ID NO: 2220507 - DNA, 25 bp, Homo sapien
tcagagtttatcttgggaactcaag

SEQ ID NO: 2220508 - DNA, 25 bp, Homo sapien
gctcagagtttatcttgggaactca

SEQ ID NO: 2220509 - DNA, 25 bp, Homo sapien
gaagctcagagtttatcttgggaac

SEQ ID NO: 2220510 - DNA, 25 bp, Homo sapien
atagaagctcagagtttatcttggg

SEQ ID NO: 2220511 - DNA, 25 bp, Homo sapien
taactgcatagacttgacctccagc

SEQ ID NO: 2220512 - DNA, 25 bp, Homo sapien
gtggcccatcgtagctaactgcata

SEQ ID NO: 2220513 - DNA, 25 bp, Homo sapien
gcatagacttgacctccagcaacca

SEQ ID NO: 2220514 - DNA, 25 bp, Homo sapien
agtttagaatctttccgtggcccat

SEQ ID NO: 2220515 - DNA, 25 bp, Homo sapien
tataaggacaatcagcacagctgac

SEQ ID NO: 2220516 - DNA, 25 bp, Homo sapien
gagtcctgagagtattcactgcacc

SEQ ID NO: 2220517 - DNA, 25 bp, Homo sapien
gtatgaaccatatttcagagtcctg

SEQ ID NO: 2220518 - DNA, 25 bp, Homo sapien
tattcctcctcatgcccgctttgga

SEQ ID NO: 2220519 - DNA, 25 bp, Homo sapien
gagaggcagggtttgtaatgagccg

SEQ ID NO: 2220520 - DNA, 25 bp, Homo sapien
ctgagaggcagggtttgtaatgagc

SEQ ID NO: 2220521 - DNA, 25 bp, Homo sapien
gttgagtgacaagattatagcttat

SEQ ID NO: 2220522 - DNA, 25 bp, Homo sapien
tttagttgagtgacaagattatagc

SEQ ID NO: 2220523 - DNA, 25 bp, Homo sapien
gcggccaagatgtagaaatgcaata

SEQ ID NO: 2220524 - DNA, 25 bp, Homo sapien
tctggctgacattctaacactgctg

SEQ ID NO: 2220525 - DNA, 25 bp, Homo sapien
tatataagatgaagggcacatgtgc

SEQ ID NO: 2220526 - DNA, 25 bp, Homo sapien
cacatctgaatcaagtggtggccac

SEQ ID NO: 2220527 - DNA, 25 bp, Homo sapien
tactagtccatgacaaggctgccaa

SEQ ID NO: 2220528 - DNA, 25 bp, Homo sapien
taagaatccccaccaaacataagag

SEQ ID NO: 2220529 - DNA, 25 bp, Homo sapien
tttgggcactatctcatacactggg

SEQ ID NO: 2220530 - DNA, 25 bp, Homo sapien
gatggatgacacaaactcttgcgct

SEQ ID NO: 2220531 - DNA, 25 bp, Homo sapien
tgtataaaaacaagcggttggccag

SEQ ID NO: 2220532 - DNA, 25 bp, Homo sapien
gctggaccctgatatagagaactgg

SEQ ID NO: 2220533 - DNA, 25 bp, Homo sapien
ctgggaggctgcatcaaagatagtc

SEQ ID NO: 2220534 - DNA, 25 bp, Homo sapien
gatgtccccaaggatattcagtgta

SEQ ID NO: 2220535 - DNA, 25 bp, Homo sapien
tcaaaggacaaccataggttaagcc

SEQ ID NO: 2220536 - DNA, 25 bp, Homo sapien
gacagaatctgaagtgagaagctct

SEQ ID NO: 2220537 - DNA, 25 bp, Homo sapien
gaaccaaggagactgtttggctccc

SEQ ID NO: 2220538 - DNA, 25 bp, Homo sapien
gagaagctctagtcaaaaaacagta

SEQ ID NO: 2220539 - DNA, 25 bp, Homo sapien
cagaataggtgcatgggcttaagat

SEQ ID NO: 2220540 - DNA, 25 bp, Homo sapien
agctgcatgcagctagactccgtct

SEQ ID NO: 2220541 - DNA, 25 bp, Homo sapien
gatttcattactgtgccaaattaca

SEQ ID NO: 2220542 - DNA, 25 bp, Homo sapien
agaagcccagaataggtgcatgggc

SEQ ID NO: 2220543 - DNA, 25 bp, Homo sapien
cgagctatcctcctacgtcagcctg

SEQ ID NO: 2220544 - DNA, 25 bp, Homo sapien
gctatcctcctacgtcagcctggga

SEQ ID NO: 2220545 - DNA, 25 bp, Homo sapien
caggctcgagctatcctcctacgtc

SEQ ID NO: 2220546 - DNA, 25 bp, Homo sapien
ggctcgagctatcctcctacgtcag

SEQ ID NO: 2220547 - DNA, 25 bp, Homo sapien
gatgcctgatgatgccctttgccag

SEQ ID NO: 2220548 - DNA, 25 bp, Homo sapien
tgatctagtccagaggataccaggt

SEQ ID NO: 2220549 - DNA, 25 bp, Homo sapien
tgcaagccacgtgttcaaaatgccc

SEQ ID NO: 2220550 - DNA, 25 bp, Homo sapien
caatggaactgtctacgggaatgat

SEQ ID NO: 2220551 - DNA, 25 bp, Homo sapien
gagagagaagtccaacagtcagttg

SEQ ID NO: 2220552 - DNA, 25 bp, Homo sapien
taactaaactgggatacaacaggcc

SEQ ID NO: 2220553 - DNA, 25 bp, Homo sapien
ggcagacatttccactaggcaacaa

SEQ ID NO: 2220554 - DNA, 25 bp, Homo sapien
tatcctcctagtagcgtcagttgcc

SEQ ID NO: 2220555 - DNA, 25 bp, Homo sapien
tcaacttgtgaggaataggcacagg

SEQ ID NO: 2220556 - DNA, 25 bp, Homo sapien
gaacataccacagctacgtaagaag

SEQ ID NO: 2220557 - DNA, 25 bp, Homo sapien
caaagttgatcagaccaagggaaag

SEQ ID NO: 2220558 - DNA, 25 bp, Homo sapien
caaaggcatatgtctacacgctgat

SEQ ID NO: 2220559 - DNA, 25 bp, Homo sapien
agtcagaatactatattatgggcca

SEQ ID NO: 2220560 - DNA, 25 bp, Homo sapien
tcagaatactatattatgggccagg

SEQ ID NO: 2220561 - DNA, 25 bp, Homo sapien
ttgtcaagtcagaatactatattat

SEQ ID NO: 2220562 - DNA, 25 bp, Homo sapien
agaatactatattatgggccaggca

SEQ ID NO: 2220563 - DNA, 25 bp, Homo sapien
caacagggtagacagccaagcaaag

SEQ ID NO: 2220564 - DNA, 25 bp, Homo sapien
taaccaggaggttagaggaagacag

SEQ ID NO: 2220565 - DNA, 25 bp, Homo sapien
tagctatcgcctgtgctctcggaaa

SEQ ID NO: 2220566 - DNA, 25 bp, Homo sapien
tgcaaggaagagaccctcaaaagga

SEQ ID NO: 2220567 - DNA, 25 bp, Homo sapien
gagaaagcccactatgacgaagcag

SEQ ID NO: 2220568 - DNA, 25 bp, Homo sapien
gaagatagcataagccaatggcagg

SEQ ID NO: 2220569 - DNA, 25 bp, Homo sapien
tgttgagagctccacaagtaccctt

SEQ ID NO: 2220570 - DNA, 25 bp, Homo sapien
cagtgtcataaagcaggtattggca

SEQ ID NO: 2220571 - DNA, 25 bp, Homo sapien
ctttgtccagatcaccttttgagat

SEQ ID NO: 2220572 - DNA, 25 bp, Homo sapien
tcctttgtccagatcaccttttgag

SEQ ID NO: 2220573 - DNA, 25 bp, Homo sapien
ttgtccagatcaccttttgagatat

SEQ ID NO: 2220574 - DNA, 25 bp, Homo sapien
cctttgtccagatcaccttttgaga

SEQ ID NO: 2220575 - DNA, 25 bp, Homo sapien
tgggactacatgagactacagccat

SEQ ID NO: 2220576 - DNA, 25 bp, Homo sapien
aaagtttgccaacccgtgccatagt

SEQ ID NO: 2220577 - DNA, 25 bp, Homo sapien
aacagctggcaaaacctagacctag

SEQ ID NO: 2220578 - DNA, 25 bp, Homo sapien
tgaatagagagactacctagccctt

SEQ ID NO: 2220579 - DNA, 25 bp, Homo sapien
tgtgtgtaccccatgctctagataa

SEQ ID NO: 2220580 - DNA, 25 bp, Homo sapien
cagctgcctgggttatcaaaagatt

SEQ ID NO: 2220581 - DNA, 25 bp, Homo sapien
ggtaatgcagtctcgaaggctagcc

SEQ ID NO: 2220582 - DNA, 25 bp, Homo sapien
gaggagagaaacctactgtgtgtac

SEQ ID NO: 2220583 - DNA, 25 bp, Homo sapien
ggcttactccccagaaaggtcaaga

SEQ ID NO: 2220584 - DNA, 25 bp, Homo sapien
tatggtgcccttccagtaacaggac

SEQ ID NO: 2220585 - DNA, 25 bp, Homo sapien
tacatcaaccatgatatgccagggc

SEQ ID NO: 2220586 - DNA, 25 bp, Homo sapien
tcccagactgggtgagcatataatc

SEQ ID NO: 2220587 - DNA, 25 bp, Homo sapien
ctggtggactctaaaatacttttca

SEQ ID NO: 2220588 - DNA, 25 bp, Homo sapien
tctggtggactctaaaatacttttc

SEQ ID NO: 2220589 - DNA, 25 bp, Homo sapien
atgatctggtggactctaaaatact

SEQ ID NO: 2220590 - DNA, 25 bp, Homo sapien
gatctggtggactctaaaatacttt

SEQ ID NO: 2220591 - DNA, 25 bp, Homo sapien
ggcaggaagcatcagtatgagtaac

SEQ ID NO: 2220592 - DNA, 25 bp, Homo sapien
cagtatgagtaacaggcagatctta

SEQ ID NO: 2220593 - DNA, 25 bp, Homo sapien
cacaaggacattcatggcaaccgta

SEQ ID NO: 2220594 - DNA, 25 bp, Homo sapien
catggcaaccgtaattcatcctcgc

SEQ ID NO: 2220595 - DNA, 25 bp, Homo sapien
tcactggaggttaaccaggcagggc

SEQ ID NO: 2220596 - DNA, 25 bp, Homo sapien
ttgataactaggtgcaggatgctga

SEQ ID NO: 2220597 - DNA, 25 bp, Homo sapien
caggcagggctcaatatacctcttc

SEQ ID NO: 2220598 - DNA, 25 bp, Homo sapien
gatgctgatttgagcctctcccaat

SEQ ID NO: 2220599 - DNA, 25 bp, Homo sapien
cagagaagtgagtaaggtgcagggc

SEQ ID NO: 2220600 - DNA, 25 bp, Homo sapien
cagtatatgacactggacctggact

SEQ ID NO: 2220601 - DNA, 25 bp, Homo sapien
ggcagtatatgacactggacctgga

SEQ ID NO: 2220602 - DNA, 25 bp, Homo sapien
agtaaggtgcagggcagtatatgac

SEQ ID NO: 2220603 - DNA, 25 bp, Homo sapien
tctcaaaatggctaccaagaaccag

SEQ ID NO: 2220604 - DNA, 25 bp, Homo sapien
cacaaaacaaagatatcggccaggt

SEQ ID NO: 2220605 - DNA, 25 bp, Homo sapien
tattactgggagcatatctgcaaca

SEQ ID NO: 2220606 - DNA, 25 bp, Homo sapien
taagatctaaaagtccagcctcact

SEQ ID NO: 2220607 - DNA, 25 bp, Homo sapien
tattcagagccaagtacagcgaccc

SEQ ID NO: 2220608 - DNA, 25 bp, Homo sapien
gacagtatgagtcccaggcagccat

SEQ ID NO: 2220609 - DNA, 25 bp, Homo sapien
gacccaagatcggaaagccagagag

SEQ ID NO: 2220610 - DNA, 25 bp, Homo sapien
tgcgtactgcccaaatgtggcctgt

SEQ ID NO: 2220611 - DNA, 25 bp, Homo sapien
tcactcagctaaaaaggtagttctc

SEQ ID NO: 2220612 - DNA, 25 bp, Homo sapien
tctgcaaggcctgctagcccaagat

SEQ ID NO: 2220613 - DNA, 25 bp, Homo sapien
actgagaggctaagattctgggtta

SEQ ID NO: 2220614 - DNA, 25 bp, Homo sapien
ggttaatttctagtggatctggcca

SEQ ID NO: 2220615 - DNA, 25 bp, Homo sapien
tgttaaatatgcctgcgagtccttc

SEQ ID NO: 2220616 - DNA, 25 bp, Homo sapien
actttgcgttgttaaatatgcctgc

SEQ ID NO: 2220617 - DNA, 25 bp, Homo sapien
tcaaatatgcatgagcgccacctct

SEQ ID NO: 2220618 - DNA, 25 bp, Homo sapien
ggtaccaactcctagcaactttgcg

SEQ ID NO: 2220619 - DNA, 25 bp, Homo sapien
gcagcagcaggccttagcggcaatg

SEQ ID NO: 2220620 - DNA, 25 bp, Homo sapien
agagagacacgcctgaatggcagca

SEQ ID NO: 2220621 - DNA, 25 bp, Homo sapien
tagcaggaattcttagagctggccg

SEQ ID NO: 2220622 - DNA, 25 bp, Homo sapien
gttgaattcagtgtcgtagcaggaa

SEQ ID NO: 2220623 - DNA, 25 bp, Homo sapien
ttcttccaaggaacttctacttcta

SEQ ID NO: 2220624 - DNA, 25 bp, Homo sapien
tcttccaaggaacttctacttctac

SEQ ID NO: 2220625 - DNA, 25 bp, Homo sapien
tggctgattttctcgagtatctttg

SEQ ID NO: 2220626 - DNA, 25 bp, Homo sapien
acagatgagaacttcttgtccccag

SEQ ID NO: 2220627 - DNA, 25 bp, Homo sapien
caggatgttgcctggacactccctt

SEQ ID NO: 2220628 - DNA, 25 bp, Homo sapien
ccggagacttccctgtacttgcagt

SEQ ID NO: 2220629 - DNA, 25 bp, Homo sapien
gagactgaggtacatgcacccaagg

SEQ ID NO: 2220630 - DNA, 25 bp, Homo sapien
gaggtacatgcacccaagggcagtc

SEQ ID NO: 2220631 - DNA, 25 bp, Homo sapien
gggagactgaggtacatgcacccaa

SEQ ID NO: 2220632 - DNA, 25 bp, Homo sapien
actgaggtacatgcacccaagggca

SEQ ID NO: 2220633 - DNA, 25 bp, Homo sapien
cagtagtgactgggatgacttgccc

SEQ ID NO: 2220634 - DNA, 25 bp, Homo sapien
acagtagtgactgggatgacttgcc

SEQ ID NO: 2220635 - DNA, 25 bp, Homo sapien
catggtgtcaccacagtagtgactg

SEQ ID NO: 2220636 - DNA, 25 bp, Homo sapien
aatgaggacctgaagtaaaccatca

SEQ ID NO: 2220637 - DNA, 25 bp, Homo sapien
tagaaaatacagagcctagccactt

SEQ ID NO: 2220638 - DNA, 25 bp, Homo sapien
gcctgcgcctgctcatcatctagca

SEQ ID NO: 2220639 - DNA, 25 bp, Homo sapien
accatcaactctggaataatcctca

SEQ ID NO: 2220640 - DNA, 25 bp, Homo sapien
agtggagaaaaccacccactactat

SEQ ID NO: 2220641 - DNA, 25 bp, Homo sapien
tctaaagacactgtggaacaaatct

SEQ ID NO: 2220642 - DNA, 25 bp, Homo sapien
tgcttcctcggaggtgaaattaatt

SEQ ID NO: 2220643 - DNA, 25 bp, Homo sapien
tctgcttcctcggaggtgaaattaa

SEQ ID NO: 2220644 - DNA, 25 bp, Homo sapien
ggatctgcttcctcggaggtgaaat

SEQ ID NO: 2220645 - DNA, 25 bp, Homo sapien
ttgagtctgatcttatttacttgtt

SEQ ID NO: 2220646 - DNA, 25 bp, Homo sapien
ttttttgagtctgatcttatttact

SEQ ID NO: 2220647 - DNA, 25 bp, Homo sapien
tttttttgagtctgatcttatttac

SEQ ID NO: 2220648 - DNA, 25 bp, Homo sapien
ttttgagtctgatcttatttacttg

SEQ ID NO: 2220649 - DNA, 25 bp, Homo sapien
tgcaatttgttcttggcgcttctct

SEQ ID NO: 2220650 - DNA, 25 bp, Homo sapien
gattcaggcttagaagtagaaggtc

SEQ ID NO: 2220651 - DNA, 25 bp, Homo sapien
gaagaaagtctgtgtctctttgcaa

SEQ ID NO: 2220652 - DNA, 25 bp, Homo sapien
ttagaagtagaaggtcgcagagaag

SEQ ID NO: 2220653 - DNA, 25 bp, Homo sapien
cttacaacatacttggcaaacatca

SEQ ID NO: 2220654 - DNA, 25 bp, Homo sapien
cgccactgtttgtgttgcaggacac

SEQ ID NO: 2220655 - DNA, 25 bp, Homo sapien
tgtttgtgttgcaggacacatggat

SEQ ID NO: 2220656 - DNA, 25 bp, Homo sapien
ttcttacaacatacttggcaaacat

SEQ ID NO: 2220657 - DNA, 25 bp, Homo sapien
gagagattgagaaatttgtggattc

SEQ ID NO: 2220658 - DNA, 25 bp, Homo sapien
tagagagattgagaaatttgtggat

SEQ ID NO: 2220659 - DNA, 25 bp, Homo sapien
ctttagagagattgagaaatttgtg

SEQ ID NO: 2220660 - DNA, 25 bp, Homo sapien
gattgagaaatttgtggattctgct

SEQ ID NO: 2220661 - DNA, 25 bp, Homo sapien
aggaatatccaatatccttctctcc

SEQ ID NO: 2220662 - DNA, 25 bp, Homo sapien
tccaggaatatccaatatccttctc

SEQ ID NO: 2220663 - DNA, 25 bp, Homo sapien
agtccaggaatatccaatatccttc

SEQ ID NO: 2220664 - DNA, 25 bp, Homo sapien
ccccaggcgacgaggcaccatagta

SEQ ID NO: 2220665 - DNA, 25 bp, Homo sapien
aagatgagaacgctcagactggcat

SEQ ID NO: 2220666 - DNA, 25 bp, Homo sapien
gaacgctcagactggcatccatgaa

SEQ ID NO: 2220667 - DNA, 25 bp, Homo sapien
gctcagactggcatccatgaaatga

SEQ ID NO: 2220668 - DNA, 25 bp, Homo sapien
gagaacgctcagactggcatccatg

SEQ ID NO: 2220669 - DNA, 25 bp, Homo sapien
agtcgtttccaccactgatttggac

SEQ ID NO: 2220670 - DNA, 25 bp, Homo sapien
tgttagtcgtttccaccactgattt

SEQ ID NO: 2220671 - DNA, 25 bp, Homo sapien
ttagtcgtttccaccactgatttgg

SEQ ID NO: 2220672 - DNA, 25 bp, Homo sapien
tagtcgtttccaccactgatttgga

SEQ ID NO: 2220673 - DNA, 25 bp, Homo sapien
aagtatgaagtttacgttcatcatc

SEQ ID NO: 2220674 - DNA, 25 bp, Homo sapien
tgaagtttacgttcatcatccactt

SEQ ID NO: 2220675 - DNA, 25 bp, Homo sapien
gcagcaacttctgtagccatacact

SEQ ID NO: 2220676 - DNA, 25 bp, Homo sapien
aagcagcaacttctgtagccataca

SEQ ID NO: 2220677 - DNA, 25 bp, Homo sapien
ctgggaaggagatgttcagcttcat

SEQ ID NO: 2220678 - DNA, 25 bp, Homo sapien
ccagtaatttcttgtaactgtccaa

SEQ ID NO: 2220679 - DNA, 25 bp, Homo sapien
tcatttgttcctttaagttcaagaa

SEQ ID NO: 2220680 - DNA, 25 bp, Homo sapien
gaaagacaaaatctacactgaaatc

SEQ ID NO: 2220681 - DNA, 25 bp, Homo sapien
gaaatccttgtttggcgagctcaca

SEQ ID NO: 2220682 - DNA, 25 bp, Homo sapien
ttatctgtgggaagctctgacttac

SEQ ID NO: 2220683 - DNA, 25 bp, Homo sapien
gaattatctgtgggaagctctgact

SEQ ID NO: 2220684 - DNA, 25 bp, Homo sapien
tccacggtttcggaattatctgtgg

SEQ ID NO: 2220685 - DNA, 25 bp, Homo sapien
ttccacggtttcggaattatctgtg

SEQ ID NO: 2220686 - DNA, 25 bp, Homo sapien
atacgtgtcagcatagtgttcctct

SEQ ID NO: 2220687 - DNA, 25 bp, Homo sapien
acgtgtcagcatagtgttcctctga

SEQ ID NO: 2220688 - DNA, 25 bp, Homo sapien
tacgtgtcagcatagtgttcctctg

SEQ ID NO: 2220689 - DNA, 25 bp, Homo sapien
tttaagttcctgaataatgtgctcc

SEQ ID NO: 2220690 - DNA, 25 bp, Homo sapien
ctttaagttcctgaataatgtgctc

SEQ ID NO: 2220691 - DNA, 25 bp, Homo sapien
tctttaagttcctgaataatgtgct

SEQ ID NO: 2220692 - DNA, 25 bp, Homo sapien
ttctttatagtaactctcagaggtt

SEQ ID NO: 2220693 - DNA, 25 bp, Homo sapien
tctttatagtaactctcagaggtta

SEQ ID NO: 2220694 - DNA, 25 bp, Homo sapien
ctttatagtaactctcagaggttag

SEQ ID NO: 2220695 - DNA, 25 bp, Homo sapien
catcacttcgttgagtgaatgcagt

SEQ ID NO: 2220696 - DNA, 25 bp, Homo sapien
tgcagtactgcagtcaagctactgg

SEQ ID NO: 2220697 - DNA, 25 bp, Homo sapien
cctcaaaccaaaattcattataaat

SEQ ID NO: 2220698 - DNA, 25 bp, Homo sapien
cctggtgagctctgcggaatttccc

SEQ ID NO: 2220699 - DNA, 25 bp, Homo sapien
caaagaagacatcagaggtttgccc

SEQ ID NO: 2220700 - DNA, 25 bp, Homo sapien
ctgcaaagaagacatcagaggtttg

SEQ ID NO: 2220701 - DNA, 25 bp, Homo sapien
gcaaagaagacatcagaggtttgcc

SEQ ID NO: 2220702 - DNA, 25 bp, Homo sapien
tgcaaagaagacatcagaggtttgc

SEQ ID NO: 2220703 - DNA, 25 bp, Homo sapien
gagcagagtgtgtagacagcttggg

SEQ ID NO: 2220704 - DNA, 25 bp, Homo sapien
gttcttaatgcaacggatactccca

SEQ ID NO: 2220705 - DNA, 25 bp, Homo sapien
ggatactcccataacagatactgat

SEQ ID NO: 2220706 - DNA, 25 bp, Homo sapien
ttcctcaattgttcttaatgcaacg

SEQ ID NO: 2220707 - DNA, 25 bp, Homo sapien
tgtcaaactgctttctcagaacttc

SEQ ID NO: 2220708 - DNA, 25 bp, Homo sapien
cgttgtgtcaaactgctttctcaga

SEQ ID NO: 2220709 - DNA, 25 bp, Homo sapien
gtgtcaaactgctttctcagaactt

SEQ ID NO: 2220710 - DNA, 25 bp, Homo sapien
tgccgttgtgtcaaactgctttctc

SEQ ID NO: 2220711 - DNA, 25 bp, Homo sapien
tttcccatcaggatcaagatttcaa

SEQ ID NO: 2220712 - DNA, 25 bp, Homo sapien
cagtgcctgaaagttatctggagta

SEQ ID NO: 2220713 - DNA, 25 bp, Homo sapien
caggatcaagatttcaaatagagat

SEQ ID NO: 2220714 - DNA, 25 bp, Homo sapien
gaatttattcggcactccagcagtg

SEQ ID NO: 2220715 - DNA, 25 bp, Homo sapien
cagtgtcctgattttgtctgcactc

SEQ ID NO: 2220716 - DNA, 25 bp, Homo sapien
cctgattttgtctgcactcagttct

SEQ ID NO: 2220717 - DNA, 25 bp, Homo sapien
gactggtaagatcaaatattgttgg

SEQ ID NO: 2220718 - DNA, 25 bp, Homo sapien
ctcagaagtttcatcgaattttttc

SEQ ID NO: 2220719 - DNA, 25 bp, Homo sapien
cggactgcgtgctcttccacgtgca

SEQ ID NO: 2220720 - DNA, 25 bp, Homo sapien
gcgtgctcttccacgtgcacttggg

SEQ ID NO: 2220721 - DNA, 25 bp, Homo sapien
ctgaaaaggccaggtcggactgcgt

SEQ ID NO: 2220722 - DNA, 25 bp, Homo sapien
acctgaaaaggccaggtcggactgc

SEQ ID NO: 2220723 - DNA, 25 bp, Homo sapien
tgagataattgcaccacagacatgt

SEQ ID NO: 2220724 - DNA, 25 bp, Homo sapien
gcctcacctgatgggttagaacaca

SEQ ID NO: 2220725 - DNA, 25 bp, Homo sapien
tctatgacaattgtgtgaagtacaa

SEQ ID NO: 2220726 - DNA, 25 bp, Homo sapien
tgaagtacaattatgattacatatg

SEQ ID NO: 2220727 - DNA, 25 bp, Homo sapien
ccagatggggcggctgccgggtgga

SEQ ID NO: 2220728 - DNA, 25 bp, Homo sapien
tcccagatggggcggctgccgggtg

SEQ ID NO: 2220729 - DNA, 25 bp, Homo sapien
agatggggcggctgccgggtggagg

SEQ ID NO: 2220730 - DNA, 25 bp, Homo sapien
cttcccagatggggcggctgccggg

SEQ ID NO: 2220731 - DNA, 25 bp, Homo sapien
gcaaacaaagccctgattgactgcc

SEQ ID NO: 2220732 - DNA, 25 bp, Homo sapien
aaagccctgattgactgcccggagg

SEQ ID NO: 2220733 - DNA, 25 bp, Homo sapien
ggttggcgcaaacaaagccctgatt

SEQ ID NO: 2220734 - DNA, 25 bp, Homo sapien
ctccgggctccaggttggcgcaaac

SEQ ID NO: 2220735 - DNA, 25 bp, Homo sapien
ctctaacgggcatccgggcaagaac

SEQ ID NO: 2220736 - DNA, 25 bp, Homo sapien
tcagtgtcggttctagagcctgcgg

SEQ ID NO: 2220737 - DNA, 25 bp, Homo sapien
ggagaacaggatagtttgtgcttcc

SEQ ID NO: 2220738 - DNA, 25 bp, Homo sapien
tcagttgcgggctgcttgtgaggaa

SEQ ID NO: 2220739 - DNA, 25 bp, Homo sapien
agtggcggctggagtaggtaggcga

SEQ ID NO: 2220740 - DNA, 25 bp, Homo sapien
gcagtggcggctggagtaggtaggc

SEQ ID NO: 2220741 - DNA, 25 bp, Homo sapien
cagtggcggctggagtaggtaggcg

SEQ ID NO: 2220742 - DNA, 25 bp, Homo sapien
agccacagtccccccgccgcgatgg

SEQ ID NO: 2220743 - DNA, 25 bp, Homo sapien
ccacagtccccccgccgcgatggcg

SEQ ID NO: 2220744 - DNA, 25 bp, Homo sapien
cccaagcagccacagtccccccgcc

SEQ ID NO: 2220745 - DNA, 25 bp, Homo sapien
agcagccacagtccccccgccgcga

SEQ ID NO: 2220746 - DNA, 25 bp, Homo sapien
ttcgagtccgagcgggtgcacgaac

SEQ ID NO: 2220747 - DNA, 25 bp, Homo sapien
tgccggagctggagttcgagtccga

SEQ ID NO: 2220748 - DNA, 25 bp, Homo sapien
gagctggagttcgagtccgagcggg

SEQ ID NO: 2220749 - DNA, 25 bp, Homo sapien
ctggagttcgagtccgagcgggtgc

SEQ ID NO: 2220750 - DNA, 25 bp, Homo sapien
ttccagcctcccgaaggtggcttcg

SEQ ID NO: 2220751 - DNA, 25 bp, Homo sapien
tggtggtgttcgctgccacctggtg

SEQ ID NO: 2220752 - DNA, 25 bp, Homo sapien
aacggctccatcttcggcatccata

SEQ ID NO: 2220753 - DNA, 25 bp, Homo sapien
acgcctacggtagagacccgcggca

SEQ ID NO: 2220754 - DNA, 25 bp, Homo sapien
tgagagaagcactgtaccgctgatc

SEQ ID NO: 2220755 - DNA, 25 bp, Homo sapien
tttccaggccagtggacgcaagacc

SEQ ID NO: 2220756 - DNA, 25 bp, Homo sapien
gaatggatctccgtgccctatgagc

SEQ ID NO: 2220757 - DNA, 25 bp, Homo sapien
gagaagtcagaggaaccatctcgct

SEQ ID NO: 2220758 - DNA, 25 bp, Homo sapien
gatccattggcacagcagcggtgtg

SEQ ID NO: 2220759 - DNA, 25 bp, Homo sapien
tagtgcgtcagtggttgtcaaagga

SEQ ID NO: 2220760 - DNA, 25 bp, Homo sapien
aaggaagtctcttgactacccaggc

SEQ ID NO: 2220761 - DNA, 25 bp, Homo sapien
caggccccgatgaagatagtgcgtc

SEQ ID NO: 2220762 - DNA, 25 bp, Homo sapien
ttccctgctttgatgcagttcaggg

SEQ ID NO: 2220763 - DNA, 25 bp, Homo sapien
ctgctttgatgcagttcaggggctc

SEQ ID NO: 2220764 - DNA, 25 bp, Homo sapien
cacagtcacccctgggaccaccttt

SEQ ID NO: 2220765 - DNA, 25 bp, Homo sapien
gccacagtcacccctgggaccacct

SEQ ID NO: 2220766 - DNA, 25 bp, Homo sapien
agcaagacgccattgattgtaggcc

SEQ ID NO: 2220767 - DNA, 25 bp, Homo sapien
taaaggcccaagcatagcttcttgg

SEQ ID NO: 2220768 - DNA, 25 bp, Homo sapien
tgtaggccccagctcaatattggga

SEQ ID NO: 2220769 - DNA, 25 bp, Homo sapien
ggacaggaggcaaccaggcaattct

SEQ ID NO: 2220770 - DNA, 25 bp, Homo sapien
tccagcagagctagatcaggttggc

SEQ ID NO: 2220771 - DNA, 25 bp, Homo sapien
tggactgtaacactaaattgctgac

SEQ ID NO: 2220772 - DNA, 25 bp, Homo sapien
gcgcctgctgtggtgcttcaagcca

SEQ ID NO: 2220773 - DNA, 25 bp, Homo sapien
ttcattgcttggttcagtgtctcac

SEQ ID NO: 2220774 - DNA, 25 bp, Homo sapien
taccaagggagttgcagtttttcat

SEQ ID NO: 2220775 - DNA, 25 bp, Homo sapien
ctaagacatagtgaaggtgtagggg

SEQ ID NO: 2220776 - DNA, 25 bp, Homo sapien
caactaccaagggagttgcagtttt

SEQ ID NO: 2220777 - DNA, 25 bp, Homo sapien
gggcaactaccaagggagttgcagt

SEQ ID NO: 2220778 - DNA, 25 bp, Homo sapien
taggcacaatcccattattgattag

SEQ ID NO: 2220779 - DNA, 25 bp, Homo sapien
tagacaacccagtggttccccactc

SEQ ID NO: 2220780 - DNA, 25 bp, Homo sapien
tcactatgtttcccatcttggagtg

SEQ ID NO: 2220781 - DNA, 25 bp, Homo sapien
tcaccccaccttagacaacccagtg

SEQ ID NO: 2220782 - DNA, 25 bp, Homo sapien
agccatgactccgatcttgatcaac

SEQ ID NO: 2220783 - DNA, 25 bp, Homo sapien
catgactccgatcttgatcaaccat

SEQ ID NO: 2220784 - DNA, 25 bp, Homo sapien
ctgagccatgactccgatcttgatc

SEQ ID NO: 2220785 - DNA, 25 bp, Homo sapien
gtaactgagccatgactccgatctt

SEQ ID NO: 2220786 - DNA, 25 bp, Homo sapien
aagagggttgaaaataagaatattg

SEQ ID NO: 2220787 - DNA, 25 bp, Homo sapien
aatgcataactgatgtacaataaac

SEQ ID NO: 2220788 - DNA, 25 bp, Homo sapien
tttagagcttattaatgcataactg

SEQ ID NO: 2220789 - DNA, 25 bp, Homo sapien
tattgagttagttcaacagcatcca

SEQ ID NO: 2220790 - DNA, 25 bp, Homo sapien
gccaccactgtgctttgctaaattc

SEQ ID NO: 2220791 - DNA, 25 bp, Homo sapien
caccactgtgctttgctaaattcac

SEQ ID NO: 2220792 - DNA, 25 bp, Homo sapien
tgtgctttgctaaattcacaaatct

SEQ ID NO: 2220793 - DNA, 25 bp, Homo sapien
tttttttcccatacatatgagtatt

SEQ ID NO: 2220794 - DNA, 25 bp, Homo sapien
ggctggatgaggcaatggccaactc

SEQ ID NO: 2220795 - DNA, 25 bp, Homo sapien
gcaatggccaactcttgctttgaca

SEQ ID NO: 2220796 - DNA, 25 bp, Homo sapien
gaggcaatggccaactcttgctttg

SEQ ID NO: 2220797 - DNA, 25 bp, Homo sapien
ggatgaggcaatggccaactcttgc

SEQ ID NO: 2220798 - DNA, 25 bp, Homo sapien
cacggtgtcatatgtgacaaatcca

SEQ ID NO: 2220799 - DNA, 25 bp, Homo sapien
ggtgtcatatgtgacaaatccaaag

SEQ ID NO: 2220800 - DNA, 25 bp, Homo sapien
tctcccccacggtgtcatatgtgac

SEQ ID NO: 2220801 - DNA, 25 bp, Homo sapien
ccccacggtgtcatatgtgacaaat

SEQ ID NO: 2220802 - DNA, 25 bp, Homo sapien
ggagggcttggtgtttggatcactc

SEQ ID NO: 2220803 - DNA, 25 bp, Homo sapien
ctggagggcttggtgtttggatcac

SEQ ID NO: 2220804 - DNA, 25 bp, Homo sapien
gagggcttggtgtttggatcactca

SEQ ID NO: 2220805 - DNA, 25 bp, Homo sapien
gggcttggtgtttggatcactcatt

SEQ ID NO: 2220806 - DNA, 25 bp, Homo sapien
ccctgggcagggaccttcttttgtg

SEQ ID NO: 2220807 - DNA, 25 bp, Homo sapien
agagtcccagcatcaggtcttggtc

SEQ ID NO: 2220808 - DNA, 25 bp, Homo sapien
tgctcttacattatgcagctctgtg

SEQ ID NO: 2220809 - DNA, 25 bp, Homo sapien
gttgaaggaggcctctcagcttgga

SEQ ID NO: 2220810 - DNA, 25 bp, Homo sapien
gagaaaatgtcctgtggattctata

SEQ ID NO: 2220811 - DNA, 25 bp, Homo sapien
tctatatttaatgtgttcagtgaca

SEQ ID NO: 2220812 - DNA, 25 bp, Homo sapien
cagagacgtttaagtgggatttttg

SEQ ID NO: 2220813 - DNA, 25 bp, Homo sapien
cagtgacatgcagagacgtttaagt

SEQ ID NO: 2220814 - DNA, 25 bp, Homo sapien
caaggctggtttgtaaatcctgagc

SEQ ID NO: 2220815 - DNA, 25 bp, Homo sapien
cctgagctattgaggagctgtctgt

SEQ ID NO: 2220816 - DNA, 25 bp, Homo sapien
atgggccctctgatccccgacatga

SEQ ID NO: 2220817 - DNA, 25 bp, Homo sapien
tcagtcccattgttcgggtttctgg

SEQ ID NO: 2220818 - DNA, 25 bp, Homo sapien
ggattggcagacagtacagagaaca

SEQ ID NO: 2220819 - DNA, 25 bp, Homo sapien
tggcagacagtacagagaacaaaga

SEQ ID NO: 2220820 - DNA, 25 bp, Homo sapien
ctgggattggcagacagtacagaga

SEQ ID NO: 2220821 - DNA, 25 bp, Homo sapien
ttggcagacagtacagagaacaaag

SEQ ID NO: 2220822 - DNA, 25 bp, Homo sapien
gcatgagtggctattgccttccctt

SEQ ID NO: 2220823 - DNA, 25 bp, Homo sapien
tcgactctggcttgatcagtgctgg

SEQ ID NO: 2220824 - DNA, 25 bp, Homo sapien
tggcatgagtggctattgccttccc

SEQ ID NO: 2220825 - DNA, 25 bp, Homo sapien
gccaggtcgctcttgagtccatcga

SEQ ID NO: 2220826 - DNA, 25 bp, Homo sapien
tagctagggttacttttctcactgc

SEQ ID NO: 2220827 - DNA, 25 bp, Homo sapien
ccctcgcgatgggtatgatcttctt

SEQ ID NO: 2220828 - DNA, 25 bp, Homo sapien
tcactgcagaatcccctgtggccat

SEQ ID NO: 2220829 - DNA, 25 bp, Homo sapien
tattcactgaccgtttgggctgccg

SEQ ID NO: 2220830 - DNA, 25 bp, Homo sapien
ttaaccagtcagctcctctttctcc

SEQ ID NO: 2220831 - DNA, 25 bp, Homo sapien
taaccagtcagctcctctttctcct

SEQ ID NO: 2220832 - DNA, 25 bp, Homo sapien
aaccagtcagctcctctttctcctc

SEQ ID NO: 2220833 - DNA, 25 bp, Homo sapien
aatttcagagctcaagacatgggac

SEQ ID NO: 2220834 - DNA, 25 bp, Homo sapien
tgttgattggcaaaagcagcacagt

SEQ ID NO: 2220835 - DNA, 25 bp, Homo sapien
caatttacttcttccacacatgtgg

SEQ ID NO: 2220836 - DNA, 25 bp, Homo sapien
taatatttagagtaggatgcagcct

SEQ ID NO: 2220837 - DNA, 25 bp, Homo sapien
gtctgaaaatcacaacctcacagcc

SEQ ID NO: 2220838 - DNA, 25 bp, Homo sapien
cagtttatacactcgtctttgaaaa

SEQ ID NO: 2220839 - DNA, 25 bp, Homo sapien
tggtgccccagtttatacactcgtc

SEQ ID NO: 2220840 - DNA, 25 bp, Homo sapien
ttcatctttattgaagctggtgccc

SEQ ID NO: 2220841 - DNA, 25 bp, Homo sapien
tttcaatcaattaatctaggactag

SEQ ID NO: 2220842 - DNA, 25 bp, Homo sapien
tttgctcggtacatacggttcagtt

SEQ ID NO: 2220843 - DNA, 25 bp, Homo sapien
ttcaatcaattaatctaggactagc

SEQ ID NO: 2220844 - DNA, 25 bp, Homo sapien
gctcggtacatacggttcagtttcc

SEQ ID NO: 2220845 - DNA, 25 bp, Homo sapien
cttgataccgtttgccctagggctg

SEQ ID NO: 2220846 - DNA, 25 bp, Homo sapien
tatagttagtaatccatgcaaggcc

SEQ ID NO: 2220847 - DNA, 25 bp, Homo sapien
gctaaggtgtatctggtaatgccca

SEQ ID NO: 2220848 - DNA, 25 bp, Homo sapien
tgtatatatacagggcaagcaaggg

SEQ ID NO: 2220849 - DNA, 25 bp, Homo sapien
caaggttgcactgtaattccatgac

SEQ ID NO: 2220850 - DNA, 25 bp, Homo sapien
tattttaccactcaacgattaagcc

SEQ ID NO: 2220851 - DNA, 25 bp, Homo sapien
taagccattcaactacacaacacag

SEQ ID NO: 2220852 - DNA, 25 bp, Homo sapien
gaagcaacagaacctttatagcaga

SEQ ID NO: 2220853 - DNA, 25 bp, Homo sapien
tgtccatagatagcgagtcagcagt

SEQ ID NO: 2220854 - DNA, 25 bp, Homo sapien
tgagtctctcccgaaggtcaggaag

SEQ ID NO: 2220855 - DNA, 25 bp, Homo sapien
tcatgtcatggacgcctgggaagca

SEQ ID NO: 2220856 - DNA, 25 bp, Homo sapien
tacagggcttcccaaccaggagtct

SEQ ID NO: 2220857 - DNA, 25 bp, Homo sapien
gctcctctcttatggtgtgggaaaa

SEQ ID NO: 2220858 - DNA, 25 bp, Homo sapien
aaaaaggagccattgctaaggcaga

SEQ ID NO: 2220859 - DNA, 25 bp, Homo sapien
cacagtgatgggcttaggagacagt

SEQ ID NO: 2220860 - DNA, 25 bp, Homo sapien
gacatgtccagtatcaccaagtctg

SEQ ID NO: 2220861 - DNA, 25 bp, Homo sapien
ccttcagaaagcaatgactcaattc

SEQ ID NO: 2220862 - DNA, 25 bp, Homo sapien
tccttcagaaagcaatgactcaatt

SEQ ID NO: 2220863 - DNA, 25 bp, Homo sapien
gaattctcagataaccagcgatcga

SEQ ID NO: 2220864 - DNA, 25 bp, Homo sapien
tctgttaccagaagctaagactgct

SEQ ID NO: 2220865 - DNA, 25 bp, Homo sapien
taagactgctctgcgacaaatagga

SEQ ID NO: 2220866 - DNA, 25 bp, Homo sapien
gagtcctctaggttggtcatcatca

SEQ ID NO: 2220867 - DNA, 25 bp, Homo sapien
actcgaactggaaccagaactacta

SEQ ID NO: 2220868 - DNA, 25 bp, Homo sapien
ctcgaactggaaccagaactactac

SEQ ID NO: 2220869 - DNA, 25 bp, Homo sapien
aactcgaactggaaccagaactact

SEQ ID NO: 2220870 - DNA, 25 bp, Homo sapien
ctgtacataaaatagcttaactcac

SEQ ID NO: 2220871 - DNA, 25 bp, Homo sapien
tcttccactccgtgactctgccctt

SEQ ID NO: 2220872 - DNA, 25 bp, Homo sapien
gactgagccagtaggctctgagtcg

SEQ ID NO: 2220873 - DNA, 25 bp, Homo sapien
tccgtgactctgccctttccatatt

SEQ ID NO: 2220874 - DNA, 25 bp, Homo sapien
tgacagtgttgtttggtgtctgaga

SEQ ID NO: 2220875 - DNA, 25 bp, Homo sapien
tgtacgcctaaaacctcctcgttca

SEQ ID NO: 2220876 - DNA, 25 bp, Homo sapien
caatgtcacatggtgccgggttcta

SEQ ID NO: 2220877 - DNA, 25 bp, Homo sapien
ggaattctgatggtactgacatagg

SEQ ID NO: 2220878 - DNA, 25 bp, Homo sapien
tcagcaactcttcctcagtactttc

SEQ ID NO: 2220879 - DNA, 25 bp, Homo sapien
caaattgttatctctcataagccta

SEQ ID NO: 2220880 - DNA, 25 bp, Homo sapien
gcctagcaaattgttatctctcata

SEQ ID NO: 2220881 - DNA, 25 bp, Homo sapien
tagcaaattgttatctctcataagc

SEQ ID NO: 2220882 - DNA, 25 bp, Homo sapien
ggtgcctagcaaattgttatctctc

SEQ ID NO: 2220883 - DNA, 25 bp, Homo sapien
tccaaatgatcaaatacagctctat

SEQ ID NO: 2220884 - DNA, 25 bp, Homo sapien
caaatgatcaaatacagctctatct

SEQ ID NO: 2220885 - DNA, 25 bp, Homo sapien
aatgatcaaatacagctctatctcc

SEQ ID NO: 2220886 - DNA, 25 bp, Homo sapien
tgatcaaatacagctctatctccat

SEQ ID NO: 2220887 - DNA, 25 bp, Homo sapien
ctgactgttatgacatagtattgaa

SEQ ID NO: 2220888 - DNA, 25 bp, Homo sapien
tatgacatagtattgaaatacaata

SEQ ID NO: 2220889 - DNA, 25 bp, Homo sapien
ctgttatgacatagtattgaaatac

SEQ ID NO: 2220890 - DNA, 25 bp, Homo sapien
tgaaatacaataaactggattttag

SEQ ID NO: 2220891 - DNA, 25 bp, Homo sapien
tctaagattctgacgcctgaggcca

SEQ ID NO: 2220892 - DNA, 25 bp, Homo sapien
ttcgagcaagggagtaaaccacatt

SEQ ID NO: 2220893 - DNA, 25 bp, Homo sapien
gatatgccagggttattcgagcaag

SEQ ID NO: 2220894 - DNA, 25 bp, Homo sapien
cctcagggaagatgtcatcgcggcc

SEQ ID NO: 2220895 - DNA, 25 bp, Homo sapien
ttagggtcaggatccgactcggttg

SEQ ID NO: 2220896 - DNA, 25 bp, Homo sapien
tctcaagcccgcctccaatgagtag

SEQ ID NO: 2220897 - DNA, 25 bp, Homo sapien
gatccgactcggttggttcggccgc

SEQ ID NO: 2220898 - DNA, 25 bp, Homo sapien
aatgagtagctggttgagacccgcc

SEQ ID NO: 2220899 - DNA, 25 bp, Homo sapien
gcagcgacaggaaacgactgcccac

SEQ ID NO: 2220900 - DNA, 25 bp, Homo sapien
tcggagacgttgctcaggcagccat

SEQ ID NO: 2220901 - DNA, 25 bp, Homo sapien
tcttccccattgttaccaagcagcg

SEQ ID NO: 2220902 - DNA, 25 bp, Homo sapien
caacaggaagtgatgatgccgcgtc

SEQ ID NO: 2220903 - DNA, 25 bp, Homo sapien
caatcccagtcgattcctcgaaaag

SEQ ID NO: 2220904 - DNA, 25 bp, Homo sapien
tcctcgaaaaggctccgcgggagga

SEQ ID NO: 2220905 - DNA, 25 bp, Homo sapien
aaaggaaagctgttatgacgcccac

SEQ ID NO: 2220906 - DNA, 25 bp, Homo sapien
gacggcagacgacgcggcaaggcgg

SEQ ID NO: 2220907 - DNA, 25 bp, Homo sapien
cgccattttgaattgtggcgagaaa

SEQ ID NO: 2220908 - DNA, 25 bp, Homo sapien
ggcgagaaatttgcgttctgagaat

SEQ ID NO: 2220909 - DNA, 25 bp, Homo sapien
gagaattgtgggaaccttcgctttc

SEQ ID NO: 2220910 - DNA, 25 bp, Homo sapien
tctgagaattgtgggaaccttcgct

SEQ ID NO: 2220911 - DNA, 25 bp, Homo sapien
tagaagactcattgatattgtcatt

SEQ ID NO: 2220912 - DNA, 25 bp, Homo sapien
cctagaagactcattgatattgtca

SEQ ID NO: 2220913 - DNA, 25 bp, Homo sapien
ccctagaagactcattgatattgtc

SEQ ID NO: 2220914 - DNA, 25 bp, Homo sapien
tccctagaagactcattgatattgt

SEQ ID NO: 2220915 - DNA, 25 bp, Homo sapien
tagtgaaaggcttgtctttacattc

SEQ ID NO: 2220916 - DNA, 25 bp, Homo sapien
taaagcggtagtgaaaggcttgtct

SEQ ID NO: 2220917 - DNA, 25 bp, Homo sapien
aagcagatttactgtcatgtctttt

SEQ ID NO: 2220918 - DNA, 25 bp, Homo sapien
gctcttaaagcggtagtgaaaggct

SEQ ID NO: 2220919 - DNA, 25 bp, Homo sapien
cacagtcagtgtcaaatcagctgca

SEQ ID NO: 2220920 - DNA, 25 bp, Homo sapien
ctgcagtaacaagaacctttttccg

SEQ ID NO: 2220921 - DNA, 25 bp, Homo sapien
tcagtgtcaaatcagctgcagtaac

SEQ ID NO: 2220922 - DNA, 25 bp, Homo sapien
tccttgtcacagtcagtgtcaaatc

SEQ ID NO: 2220923 - DNA, 25 bp, Homo sapien
gttttctaatccatgtgttgtccat

SEQ ID NO: 2220924 - DNA, 25 bp, Homo sapien
aaggccaaggcattactgccacggt

SEQ ID NO: 2220925 - DNA, 25 bp, Homo sapien
ctgtgccaaccagattctgaaggcc

SEQ ID NO: 2220926 - DNA, 25 bp, Homo sapien
ggtccttaatcggttgctgtgccaa

SEQ ID NO: 2220927 - DNA, 25 bp, Homo sapien
tgcctgctgccaaggtccttaatcg

SEQ ID NO: 2220928 - DNA, 25 bp, Homo sapien
gctgctggtctagtcaaagtattat

SEQ ID NO: 2220929 - DNA, 25 bp, Homo sapien
tgaagactggacacactagaagatg

SEQ ID NO: 2220930 - DNA, 25 bp, Homo sapien
tgcatctctgcagattccatctgga

SEQ ID NO: 2220931 - DNA, 25 bp, Homo sapien
gacttgtctcaaacagggtaccaac

SEQ ID NO: 2220932 - DNA, 25 bp, Homo sapien
taatatagcacctaaccagggcagg

SEQ ID NO: 2220933 - DNA, 25 bp, Homo sapien
gacacaagagactgacgctgggaac

SEQ ID NO: 2220934 - DNA, 25 bp, Homo sapien
tacaggtgctatccacataagtggg

SEQ ID NO: 2220935 - DNA, 25 bp, Homo sapien
taaatgcatatacttgggtccctga

SEQ ID NO: 2220936 - DNA, 25 bp, Homo sapien
gaaaatgcgagtctcttcttcaaac

SEQ ID NO: 2220937 - DNA, 25 bp, Homo sapien
ctttctggaaaatgcgagtctcttc

SEQ ID NO: 2220938 - DNA, 25 bp, Homo sapien
ttttaggagattgtagtcggaatcc

SEQ ID NO: 2220939 - DNA, 25 bp, Homo sapien
tctgcttttaggagattgtagtcgg

SEQ ID NO: 2220940 - DNA, 25 bp, Homo sapien
taaccaggcatgtttgcacgaccag

SEQ ID NO: 2220941 - DNA, 25 bp, Homo sapien
tctccagggaattagcaagatggcc

SEQ ID NO: 2220942 - DNA, 25 bp, Homo sapien
gaagagctttggttcatagccccac

SEQ ID NO: 2220943 - DNA, 25 bp, Homo sapien
gagctgccagaattagtgtcccgag

SEQ ID NO: 2220944 - DNA, 25 bp, Homo sapien
acaatagccttatcttgttggttat

SEQ ID NO: 2220945 - DNA, 25 bp, Homo sapien
taatcagagtgttttctccgttggc

SEQ ID NO: 2220946 - DNA, 25 bp, Homo sapien
cgttggctgaggcaacaatagcctt

SEQ ID NO: 2220947 - DNA, 25 bp, Homo sapien
agtgttttctccgttggctgaggca

SEQ ID NO: 2220948 - DNA, 25 bp, Homo sapien
cattccaagtccaaatgctgtccaa

SEQ ID NO: 2220949 - DNA, 25 bp, Homo sapien
ttactctttgcccattttagaccat

SEQ ID NO: 2220950 - DNA, 25 bp, Homo sapien
gaattactctttgcccattttagac

SEQ ID NO: 2220951 - DNA, 25 bp, Homo sapien
actctttgcccattttagaccattg

SEQ ID NO: 2220952 - DNA, 25 bp, Homo sapien
cagaattactctttgcccattttag

SEQ ID NO: 2220953 - DNA, 25 bp, Homo sapien
taattagataccatctatcaatttt

SEQ ID NO: 2220954 - DNA, 25 bp, Homo sapien
agataccatctatcaattttggctt

SEQ ID NO: 2220955 - DNA, 25 bp, Homo sapien
agtttaattagataccatctatcaa

SEQ ID NO: 2220956 - DNA, 25 bp, Homo sapien
ttagataccatctatcaattttggc

SEQ ID NO: 2220957 - DNA, 25 bp, Homo sapien
aggtatgcagaaggcacacaacatg

SEQ ID NO: 2220958 - DNA, 25 bp, Homo sapien
tgcaatgaacctgctacagtgccaa

SEQ ID NO: 2220959 - DNA, 25 bp, Homo sapien
gattttattgcctgctgtactcttc

SEQ ID NO: 2220960 - DNA, 25 bp, Homo sapien
ccaggttcgattacaatcaaggtat

SEQ ID NO: 2220961 - DNA, 25 bp, Homo sapien
tctcatctccacctattccataata

SEQ ID NO: 2220962 - DNA, 25 bp, Homo sapien
tgatgtttttgccaggatactgggc

SEQ ID NO: 2220963 - DNA, 25 bp, Homo sapien
tccacctattccataatatgtccaa

SEQ ID NO: 2220964 - DNA, 25 bp, Homo sapien
accacactcagatatggcattctca

SEQ ID NO: 2220965 - DNA, 25 bp, Homo sapien
cacagcaccttataggctataaaat

SEQ ID NO: 2220966 - DNA, 25 bp, Homo sapien
tttatttgatctgtacaacaaagct

SEQ ID NO: 2220967 - DNA, 25 bp, Homo sapien
aagctatgaagcatgtattatctct

SEQ ID NO: 2220968 - DNA, 25 bp, Homo sapien
tgcgcctagccccatcttaaaattt

SEQ ID NO: 2220969 - DNA, 25 bp, Homo sapien
tttgataaagtttcactgctctccg

SEQ ID NO: 2220970 - DNA, 25 bp, Homo sapien
acattctagctcttctccttttagc

SEQ ID NO: 2220971 - DNA, 25 bp, Homo sapien
tgctctccggagaaatagtaagaga

SEQ ID NO: 2220972 - DNA, 25 bp, Homo sapien
cagcttttggcatcgttacaaagta

SEQ ID NO: 2220973 - DNA, 25 bp, Homo sapien
agccttaggtttccttaggtgtatg

SEQ ID NO: 2220974 - DNA, 25 bp, Homo sapien
ccttaggtttccttaggtgtatgtg

SEQ ID NO: 2220975 - DNA, 25 bp, Homo sapien
taagattttccctcttaccaggatg

SEQ ID NO: 2220976 - DNA, 25 bp, Homo sapien
taccaggatgtggtgtagctcagtt

SEQ ID NO: 2220977 - DNA, 25 bp, Homo sapien
tgtgaaatttatactaagattttcc

SEQ ID NO: 2220978 - DNA, 25 bp, Homo sapien
tgtagctcagtttagtggaggccag

SEQ ID NO: 2220979 - DNA, 25 bp, Homo sapien
tgtgaaatttatactaagattttcc

SEQ ID NO: 2220980 - DNA, 25 bp, Homo sapien
gctccaaacgcctaaagggctggct

SEQ ID NO: 2220981 - DNA, 25 bp, Homo sapien
agtctgtctgactaagccatatgtc

SEQ ID NO: 2220982 - DNA, 25 bp, Homo sapien
ctgcattcatctgtgtagtctgtct

SEQ ID NO: 2220983 - DNA, 25 bp, Homo sapien
tgccaacataaccttgctgtgctcc

SEQ ID NO: 2220984 - DNA, 25 bp, Homo sapien
caaaggatctggatccagagcacca

SEQ ID NO: 2220985 - DNA, 25 bp, Homo sapien
aaaggatctggatccagagcaccag

SEQ ID NO: 2220986 - DNA, 25 bp, Homo sapien
aggatctggatccagagcaccagag

SEQ ID NO: 2220987 - DNA, 25 bp, Homo sapien
aaggatctggatccagagcaccaga

SEQ ID NO: 2220988 - DNA, 25 bp, Homo sapien
tgaaataatgtggattttatgaggg

SEQ ID NO: 2220989 - DNA, 25 bp, Homo sapien
ataatgtggattttatgagggtgag

SEQ ID NO: 2220990 - DNA, 25 bp, Homo sapien
ttacttggtaaattgaaataatgtg

SEQ ID NO: 2220991 - DNA, 25 bp, Homo sapien
tacttggtaaattgaaataatgtgg

SEQ ID NO: 2220992 - DNA, 25 bp, Homo sapien
tcaatcatacttgcatcttgtgtga

SEQ ID NO: 2220993 - DNA, 25 bp, Homo sapien
catacttgcatcttgtgtgatgttt

SEQ ID NO: 2220994 - DNA, 25 bp, Homo sapien
tttggctgaataatgagggtgtttg

SEQ ID NO: 2220995 - DNA, 25 bp, Homo sapien
aatcatacttgcatcttgtgtgatg

SEQ ID NO: 2220996 - DNA, 25 bp, Homo sapien
ttccctttccttccgcattccatct

SEQ ID NO: 2220997 - DNA, 25 bp, Homo sapien
tctgtaggctatgtgacgtgggact

SEQ ID NO: 2220998 - DNA, 25 bp, Homo sapien
tcccacttgaagtaaagttgaagtc

SEQ ID NO: 2220999 - DNA, 25 bp, Homo sapien
ggctccttcccataagaacataaga

SEQ ID NO: 2221000 - DNA, 25 bp, Homo sapien
ttccattactcctatagatgaacaa

SEQ ID NO: 2221001 - DNA, 25 bp, Homo sapien
ctatagatgaacaattttcagtatc

SEQ ID NO: 2221002 - DNA, 25 bp, Homo sapien
aggttttccattactcctatagatg

SEQ ID NO: 2221003 - DNA, 25 bp, Homo sapien
tctttagcactatcaggttttccat

SEQ ID NO: 2221004 - DNA, 25 bp, Homo sapien
tcagcttgtcagtcattctccatcc

SEQ ID NO: 2221005 - DNA, 25 bp, Homo sapien
tcctcccctggctcggagtaatttg

SEQ ID NO: 2221006 - DNA, 25 bp, Homo sapien
tttgaatgtcctcccctggctcgga

SEQ ID NO: 2221007 - DNA, 25 bp, Homo sapien
ttcttctctcagcttgtcagtcatt

SEQ ID NO: 2221008 - DNA, 25 bp, Homo sapien
tcagagggatgagcaaaggagaggt

SEQ ID NO: 2221009 - DNA, 25 bp, Homo sapien
tggagaaactccacacaaagtcaga

SEQ ID NO: 2221010 - DNA, 25 bp, Homo sapien
ataaacactctctacaccccagtgg

SEQ ID NO: 2221011 - DNA, 25 bp, Homo sapien
aaacactctctacaccccagtggag

SEQ ID NO: 2221012 - DNA, 25 bp, Homo sapien
cagcaatggaactcgtagctcagca

SEQ ID NO: 2221013 - DNA, 25 bp, Homo sapien
aactcgtagctcagcattgtgccac

SEQ ID NO: 2221014 - DNA, 25 bp, Homo sapien
tagctcagcattgtgccactcatga

SEQ ID NO: 2221015 - DNA, 25 bp, Homo sapien
cattgtgccactcatgaatttcatg

SEQ ID NO: 2221016 - DNA, 25 bp, Homo sapien
catatacactgctctctccttagat

SEQ ID NO: 2221017 - DNA, 25 bp, Homo sapien
tcttcccatatacactgctctctcc

SEQ ID NO: 2221018 - DNA, 25 bp, Homo sapien
ccagatgctcagacattccttctgc

SEQ ID NO: 2221019 - DNA, 25 bp, Homo sapien
cttctgcacatcaaatggctgtact

SEQ ID NO: 2221020 - DNA, 25 bp, Homo sapien
gacacataagaaatatgacagttgg

SEQ ID NO: 2221021 - DNA, 25 bp, Homo sapien
tgacacataagaaatatgacagttg

SEQ ID NO: 2221022 - DNA, 25 bp, Homo sapien
taatcttccagtgaaaggcgttgtg

SEQ ID NO: 2221023 - DNA, 25 bp, Homo sapien
cacattaaattgacctctgagggcc

SEQ ID NO: 2221024 - DNA, 25 bp, Homo sapien
tctggccaaggagaaattattgctg

SEQ ID NO: 2221025 - DNA, 25 bp, Homo sapien
gatttggacacagatgcttaggctt

SEQ ID NO: 2221026 - DNA, 25 bp, Homo sapien
ggtaagtcctgtacagactgtctca

SEQ ID NO: 2221027 - DNA, 25 bp, Homo sapien
tcaaagggttcctctgatgagggag

SEQ ID NO: 2221028 - DNA, 25 bp, Homo sapien
tgagggaggtaagtcctgtacagac

SEQ ID NO: 2221029 - DNA, 25 bp, Homo sapien
ttaaagactcaaagggttcctctga

SEQ ID NO: 2221030 - DNA, 25 bp, Homo sapien
gcgtggccttaaagtcacagctaaa

SEQ ID NO: 2221031 - DNA, 25 bp, Homo sapien
cgtggccttaaagtcacagctaaac

SEQ ID NO: 2221032 - DNA, 25 bp, Homo sapien
tgagcacgttccctagcagaggcct

SEQ ID NO: 2221033 - DNA, 25 bp, Homo sapien
gttccctagcagaggcctgtgaatc

SEQ ID NO: 2221034 - DNA, 25 bp, Homo sapien
ccaaaatgagcacgttccctagcag

SEQ ID NO: 2221035 - DNA, 25 bp, Homo sapien
gtgaatcactgtgggcaatgaggga

SEQ ID NO: 2221036 - DNA, 25 bp, Homo sapien
gaatgttcacctctgcctaaaaaga

SEQ ID NO: 2221037 - DNA, 25 bp, Homo sapien
tgagaagacacgaatgttcacctct

SEQ ID NO: 2221038 - DNA, 25 bp, Homo sapien
gttgtttgagaagacacgaatgttc

SEQ ID NO: 2221039 - DNA, 25 bp, Homo sapien
gacacgaatgttcacctctgcctaa

SEQ ID NO: 2221040 - DNA, 25 bp, Homo sapien
gctctcgccgaagcgtgccatgccc

SEQ ID NO: 2221041 - DNA, 25 bp, Homo sapien
cgccgcgtgggttttcccgctctcg

SEQ ID NO: 2221042 - DNA, 25 bp, Homo sapien
ctttgcggctttggtccgagcgccc

SEQ ID NO: 2221043 - DNA, 25 bp, Homo sapien
tttgcggctttggtccgagcgcccg

SEQ ID NO: 2221044 - DNA, 25 bp, Homo sapien
gccgtcgccgcagctgttcgagctg

SEQ ID NO: 2221045 - DNA, 25 bp, Homo sapien
aggcgcacgtcgctggcgggctcag

SEQ ID NO: 2221046 - DNA, 25 bp, Homo sapien
agctagcgcggtcgcagtcaaggct

SEQ ID NO: 2221047 - DNA, 25 bp, Homo sapien
tcaaggctgggctgtcgccgtcgcc

SEQ ID NO: 2221048 - DNA, 25 bp, Homo sapien
gctgctgatgctactggttttcctt

SEQ ID NO: 2221049 - DNA, 25 bp, Homo sapien
ctgctgctgatgctactggttttcc

SEQ ID NO: 2221050 - DNA, 25 bp, Homo sapien
gctgatgctactggttttccttccc

SEQ ID NO: 2221051 - DNA, 25 bp, Homo sapien
tgctgatgctactggttttccttcc

SEQ ID NO: 2221052 - DNA, 25 bp, Homo sapien
ctggcagacacgcaaccggacacca

SEQ ID NO: 2221053 - DNA, 25 bp, Homo sapien
cagtccactacgccagtggtgcgtt

SEQ ID NO: 2221054 - DNA, 25 bp, Homo sapien
ccatgccttttagggcagttgtgtg

SEQ ID NO: 2221055 - DNA, 25 bp, Homo sapien
tgcgcggccacctgtcataaagggc

SEQ ID NO: 2221056 - DNA, 25 bp, Homo sapien
acacaaggccctgtaacacagttct

SEQ ID NO: 2221057 - DNA, 25 bp, Homo sapien
gccacaagccaaagatgttcgtggc

SEQ ID NO: 2221058 - DNA, 25 bp, Homo sapien
ctgtaacacagttctagccacaagc

SEQ ID NO: 2221059 - DNA, 25 bp, Homo sapien
cacaagccaaagatgttcgtggctt

SEQ ID NO: 2221060 - DNA, 25 bp, Homo sapien
gtgggtgtagtgaggaaatgtgtcc

SEQ ID NO: 2221061 - DNA, 25 bp, Homo sapien
tggtgggtgtagtgaggaaatgtgt

SEQ ID NO: 2221062 - DNA, 25 bp, Homo sapien
tgtggtgggtgtagtgaggaaatgt

SEQ ID NO: 2221063 - DNA, 25 bp, Homo sapien
ctgtggtgggtgtagtgaggaaatg

SEQ ID NO: 2221064 - DNA, 25 bp, Homo sapien
acaagtccaaatgttgcccattctt

SEQ ID NO: 2221065 - DNA, 25 bp, Homo sapien
tctttaagatccagttcaaatgtca

SEQ ID NO: 2221066 - DNA, 25 bp, Homo sapien
gctcttgccatctctacaagtccaa

SEQ ID NO: 2221067 - DNA, 25 bp, Homo sapien
ccattctttaagatccagttcaaat

SEQ ID NO: 2221068 - DNA, 25 bp, Homo sapien
aagtcctagaagtaagccccacagg

SEQ ID NO: 2221069 - DNA, 25 bp, Homo sapien
taagtcctagaagtaagccccacag

SEQ ID NO: 2221070 - DNA, 25 bp, Homo sapien
ctaagtcctagaagtaagccccaca

SEQ ID NO: 2221071 - DNA, 25 bp, Homo sapien
gctcttctaatagagtctgccccag

SEQ ID NO: 2221072 - DNA, 25 bp, Homo sapien
ttctaatagagtctgccccagcatc

SEQ ID NO: 2221073 - DNA, 25 bp, Homo sapien
gggcagctcttctaatagagtctgc

SEQ ID NO: 2221074 - DNA, 25 bp, Homo sapien
gcagctcttctaatagagtctgccc

SEQ ID NO: 2221075 - DNA, 25 bp, Homo sapien
aatgcaaattaattcgggctctgtg

SEQ ID NO: 2221076 - DNA, 25 bp, Homo sapien
ttaattcgggctctgtggaaagcag

SEQ ID NO: 2221077 - DNA, 25 bp, Homo sapien
tggctattttttgactaaagtcaaa

SEQ ID NO: 2221078 - DNA, 25 bp, Homo sapien
tctcaaaggaagacacataagtggt

SEQ ID NO: 2221079 - DNA, 25 bp, Homo sapien
ggctgtcgtcattcatgcctgtgga

SEQ ID NO: 2221080 - DNA, 25 bp, Homo sapien
tatccaggtggccatcaatggtgga

SEQ ID NO: 2221081 - DNA, 25 bp, Homo sapien
cagagagttcgtgatattagccttc

SEQ ID NO: 2221082 - DNA, 25 bp, Homo sapien
gctggaaaccattaccctaagtgaa

SEQ ID NO: 2221083 - DNA, 25 bp, Homo sapien
cacctgctttttccccgtgtatggg

SEQ ID NO: 2221084 - DNA, 25 bp, Homo sapien
gtcatctgggccacttctaaggcag

SEQ ID NO: 2221085 - DNA, 25 bp, Homo sapien
tggatattgatcctcctttcctggg

SEQ ID NO: 2221086 - DNA, 25 bp, Homo sapien
tatttcctccacagtgtgcagcctg

SEQ ID NO: 2221087 - DNA, 25 bp, Homo sapien
ataatggccaggtatcgggaaaaat

SEQ ID NO: 2221088 - DNA, 25 bp, Homo sapien
cataatggccaggtatcgggaaaaa

SEQ ID NO: 2221089 - DNA, 25 bp, Homo sapien
accaatgccaactgtatttcaagtc

SEQ ID NO: 2221090 - DNA, 25 bp, Homo sapien
gaagtgtcaacacagattagagtct

SEQ ID NO: 2221091 - DNA, 25 bp, Homo sapien
gattatgttgtttgggctcctcctc

SEQ ID NO: 2221092 - DNA, 25 bp, Homo sapien
tctacatagcgacatgagaatgaag

SEQ ID NO: 2221093 - DNA, 25 bp, Homo sapien
ctcgttatgtcaggcttaaagaaac

SEQ ID NO: 2221094 - DNA, 25 bp, Homo sapien
tctgcttcagtgcaaatatgtagtc

SEQ ID NO: 2221095 - DNA, 25 bp, Homo sapien
tcagtgcaaatatgtagtccaaaac

SEQ ID NO: 2221096 - DNA, 25 bp, Homo sapien
tgcaaatatgtagtccaaaacaaca

SEQ ID NO: 2221097 - DNA, 25 bp, Homo sapien
acaattctgcttcagtgcaaatatg

SEQ ID NO: 2221098 - DNA, 25 bp, Homo sapien
catggttctgcacacggctgctctg

SEQ ID NO: 2221099 - DNA, 25 bp, Homo sapien
gccacatttctgaatagatactatg

SEQ ID NO: 2221100 - DNA, 25 bp, Homo sapien
ttagcaagcaaaccatggtgggtac

SEQ ID NO: 2221101 - DNA, 25 bp, Homo sapien
acacggctgctctgtgtatgccaca

SEQ ID NO: 2221102 - DNA, 25 bp, Homo sapien
gataatgtgccctggtacagcttta

SEQ ID NO: 2221103 - DNA, 25 bp, Homo sapien
gagatattcccttcagagcttttag

SEQ ID NO: 2221104 - DNA, 25 bp, Homo sapien
gaactaccactagtcagatgttgga

SEQ ID NO: 2221105 - DNA, 25 bp, Homo sapien
ggtactcaggccctttcaatctaga

SEQ ID NO: 2221106 - DNA, 25 bp, Homo sapien
cattgaaaggctgaccggaagctct

SEQ ID NO: 2221107 - DNA, 25 bp, Homo sapien
tgttttggaggtctatccactgaca

SEQ ID NO: 2221108 - DNA, 25 bp, Homo sapien
tatgcctttctaaaccactggactt

SEQ ID NO: 2221109 - DNA, 25 bp, Homo sapien
aagctctgtgtgcatcaatatgcct

SEQ ID NO: 2221110 - DNA, 25 bp, Homo sapien
tcatctgcatcaaccactgttgaca

SEQ ID NO: 2221111 - DNA, 25 bp, Homo sapien
tttcatctgcatcaaccactgttga

SEQ ID NO: 2221112 - DNA, 25 bp, Homo sapien
gcatcaaccactgttgacaatctgt

SEQ ID NO: 2221113 - DNA, 25 bp, Homo sapien
tctgcatcaaccactgttgacaatc

SEQ ID NO: 2221114 - DNA, 25 bp, Homo sapien
taatcgaatctaacgatgaagtagc

SEQ ID NO: 2221115 - DNA, 25 bp, Homo sapien
tcatagagtatgactggggggtcct

SEQ ID NO: 2221116 - DNA, 25 bp, Homo sapien
ctcttgcaattgctactctttgctt

SEQ ID NO: 2221117 - DNA, 25 bp, Homo sapien
ctggggggtccttcaaaatggctct

SEQ ID NO: 2221118 - DNA, 25 bp, Homo sapien
tacaaccaccaagtaatacactgaa

SEQ ID NO: 2221119 - DNA, 25 bp, Homo sapien
ggaagcatagtgcatgcatatttta

SEQ ID NO: 2221120 - DNA, 25 bp, Homo sapien
tttagtgtttccattgattacaacc

SEQ ID NO: 2221121 - DNA, 25 bp, Homo sapien
aaggaagcatagtgcatgcatattt

SEQ ID NO: 2221122 - DNA, 25 bp, Homo sapien
gaattgcatcatgaagtccagctaa

SEQ ID NO: 2221123 - DNA, 25 bp, Homo sapien
gcactgatgtttccatataagaggt

SEQ ID NO: 2221124 - DNA, 25 bp, Homo sapien
cacttcctcaggtgaagcactgatg

SEQ ID NO: 2221125 - DNA, 25 bp, Homo sapien
catgtggcattcgaagaattgcatc

SEQ ID NO: 2221126 - DNA, 25 bp, Homo sapien
tagagattgtccatgtcaataacag

SEQ ID NO: 2221127 - DNA, 25 bp, Homo sapien
tagtgtgcatcattccagacttctt

SEQ ID NO: 2221128 - DNA, 25 bp, Homo sapien
tttcccctaacacaagtatggtcat

SEQ ID NO: 2221129 - DNA, 25 bp, Homo sapien
tgtcttctaaatatggccctaccag

SEQ ID NO: 2221130 - DNA, 25 bp, Homo sapien
tgtatacttccaccagcaaaacaag

SEQ ID NO: 2221131 - DNA, 25 bp, Homo sapien
tttcaggaacttgatacacactgcc

SEQ ID NO: 2221132 - DNA, 25 bp, Homo sapien
tggctgcatgactctgatcctataa

SEQ ID NO: 2221133 - DNA, 25 bp, Homo sapien
cacactgccaatttgcttgtcagga

SEQ ID NO: 2221134 - DNA, 25 bp, Homo sapien
ccagggcttcctatcatgcagattt

SEQ ID NO: 2221135 - DNA, 25 bp, Homo sapien
cactggtagggtctaatactgacta

SEQ ID NO: 2221136 - DNA, 25 bp, Homo sapien
tctagttacggattgatcaacccaa

SEQ ID NO: 2221137 - DNA, 25 bp, Homo sapien
tctattatgctatcattccagggct

SEQ ID NO: 2221138 - DNA, 25 bp, Homo sapien
gaggctcatagaagcgaaataatag

SEQ ID NO: 2221139 - DNA, 25 bp, Homo sapien
caagataaatgctacccttttgagg

SEQ ID NO: 2221140 - DNA, 25 bp, Homo sapien
taatagcctcactattgtgcttttc

SEQ ID NO: 2221141 - DNA, 25 bp, Homo sapien
cactgccctccgaaggctttccagg

SEQ ID NO: 2221142 - DNA, 25 bp, Homo sapien
aaatattacattgggaatcatcagc

SEQ ID NO: 2221143 - DNA, 25 bp, Homo sapien
tagctcctattaatgttaggaaacc

SEQ ID NO: 2221144 - DNA, 25 bp, Homo sapien
ccagttttaaaccacagtaatcatt

SEQ ID NO: 2221145 - DNA, 25 bp, Homo sapien
ggaatcatcagcctataatacagaa

SEQ ID NO: 2221146 - DNA, 25 bp, Homo sapien
gtagctgtctgtggtgtgatctgaa

SEQ ID NO: 2221147 - DNA, 25 bp, Homo sapien
aaggatattccactaaggactttct

SEQ ID NO: 2221148 - DNA, 25 bp, Homo sapien
gatctgaaggggagatgccatcact

SEQ ID NO: 2221149 - DNA, 25 bp, Homo sapien
tgcacattatcaaaggccacggtag

SEQ ID NO: 2221150 - DNA, 25 bp, Homo sapien
cttgtctagtctctctatatacagt

SEQ ID NO: 2221151 - DNA, 25 bp, Homo sapien
taatttgggtgtctaccttgagtag

SEQ ID NO: 2221152 - DNA, 25 bp, Homo sapien
tgaaagctgaaaaagcagtccattc

SEQ ID NO: 2221153 - DNA, 25 bp, Homo sapien
ggtgttcatatctatgagtgcttgt

SEQ ID NO: 2221154 - DNA, 25 bp, Homo sapien
gctgttaaaccgacactgaaaatag

SEQ ID NO: 2221155 - DNA, 25 bp, Homo sapien
gagtagaggtacttttcaatgaagc

SEQ ID NO: 2221156 - DNA, 25 bp, Homo sapien
tgactggcgagcaccattatagctg

SEQ ID NO: 2221157 - DNA, 25 bp, Homo sapien
gtctcatacgtcttcaaaaatccat

SEQ ID NO: 2221158 - DNA, 25 bp, Homo sapien
tagacctacataggatcagggtcaa

SEQ ID NO: 2221159 - DNA, 25 bp, Homo sapien
agtattattccatcacgcctagaga

SEQ ID NO: 2221160 - DNA, 25 bp, Homo sapien
tagagatcatatcctaacctgaagc

SEQ ID NO: 2221161 - DNA, 25 bp, Homo sapien
aatattaaatgatgggtcgcgcagc

SEQ ID NO: 2221162 - DNA, 25 bp, Homo sapien
agcattacctgcatcattatctgct

SEQ ID NO: 2221163 - DNA, 25 bp, Homo sapien
tcataattcagcagtgagtctatag

SEQ ID NO: 2221164 - DNA, 25 bp, Homo sapien
aattcagcagtgagtctatagcagc

SEQ ID NO: 2221165 - DNA, 25 bp, Homo sapien
taattcagcagtgagtctatagcag

SEQ ID NO: 2221166 - DNA, 25 bp, Homo sapien
aagatttgcataggcatgaaataca

SEQ ID NO: 2221167 - DNA, 25 bp, Homo sapien
acaaagatttgcataggcatgaaat

SEQ ID NO: 2221168 - DNA, 25 bp, Homo sapien
gacaaagatttgcataggcatgaaa

SEQ ID NO: 2221169 - DNA, 25 bp, Homo sapien
caaagatttgcataggcatgaaata

SEQ ID NO: 2221170 - DNA, 25 bp, Homo sapien
gttaccaaagcaaactgggcaccgc

SEQ ID NO: 2221171 - DNA, 25 bp, Homo sapien
aatgctgtgtatgtaccaagtgttc

SEQ ID NO: 2221172 - DNA, 25 bp, Homo sapien
tgtgtatgtaccaagtgttccaagg

SEQ ID NO: 2221173 - DNA, 25 bp, Homo sapien
gcaactgtgaatgctgtgtatgtac

SEQ ID NO: 2221174 - DNA, 25 bp, Homo sapien
cacgataaagaatttgagcagtcca

SEQ ID NO: 2221175 - DNA, 25 bp, Homo sapien
gagcagtccattgaagcttgtggca

SEQ ID NO: 2221176 - DNA, 25 bp, Homo sapien
tctactttaggcaacaagggaagaa

SEQ ID NO: 2221177 - DNA, 25 bp, Homo sapien
tgggcatgcaacagtacaacagctt

SEQ ID NO: 2221178 - DNA, 25 bp, Homo sapien
taaagctcccgtctgtctgctcagg

SEQ ID NO: 2221179 - DNA, 25 bp, Homo sapien
ggtgaaaacccagatccaggttgtg

SEQ ID NO: 2221180 - DNA, 25 bp, Homo sapien
gattaaataccaaagcactcaggac

SEQ ID NO: 2221181 - DNA, 25 bp, Homo sapien
ccttgttcctctgtcaatagcctta

SEQ ID NO: 2221182 - DNA, 25 bp, Homo sapien
gactaaaggcatacccctactaatg

SEQ ID NO: 2221183 - DNA, 25 bp, Homo sapien
tttaatagctaacaatgccagcaag

SEQ ID NO: 2221184 - DNA, 25 bp, Homo sapien
tggaaatggatgttacaaaaagcct

SEQ ID NO: 2221185 - DNA, 25 bp, Homo sapien
gaccctgaagaatcaagtgccttga

SEQ ID NO: 2221186 - DNA, 25 bp, Homo sapien
gcaactgtatttggtgcatcactca

SEQ ID NO: 2221187 - DNA, 25 bp, Homo sapien
tgtttcccgacatctggttgaggct

SEQ ID NO: 2221188 - DNA, 25 bp, Homo sapien
tgaagggaaccacaatattcatggc

SEQ ID NO: 2221189 - DNA, 25 bp, Homo sapien
cactcaggttcagcatgtttcccga

SEQ ID NO: 2221190 - DNA, 25 bp, Homo sapien
tccaaggtaacgtatacaagagtct

SEQ ID NO: 2221191 - DNA, 25 bp, Homo sapien
caagagtcttaccaaccaagcaggc

SEQ ID NO: 2221192 - DNA, 25 bp, Homo sapien
taaactaaattacacagcaagccag

SEQ ID NO: 2221193 - DNA, 25 bp, Homo sapien
caagcaggcattctagtattcgaca

SEQ ID NO: 2221194 - DNA, 25 bp, Homo sapien
cacaggaggcctgctaaacagaaga

SEQ ID NO: 2221195 - DNA, 25 bp, Homo sapien
aatagaggcccaagtaggaacctgg

SEQ ID NO: 2221196 - DNA, 25 bp, Homo sapien
taaccagcaaagtatgagtgaccca

SEQ ID NO: 2221197 - DNA, 25 bp, Homo sapien
tctgaaagatttcggagtagccatc

SEQ ID NO: 2221198 - DNA, 25 bp, Homo sapien
gcttttatgattttccgagtatcaa

SEQ ID NO: 2221199 - DNA, 25 bp, Homo sapien
accacccaaaaatcccagcgaaatg

SEQ ID NO: 2221200 - DNA, 25 bp, Homo sapien
aactctagctcgtagatctggcctg

SEQ ID NO: 2221201 - DNA, 25 bp, Homo sapien
gattttccgagtatcaacatctttt

SEQ ID NO: 2221202 - DNA, 25 bp, Homo sapien
cctaagtgatacatgttggagaaca

SEQ ID NO: 2221203 - DNA, 25 bp, Homo sapien
tgtaggagtttacaccaaagtgtca

SEQ ID NO: 2221204 - DNA, 25 bp, Homo sapien
taatttcgagtagatttgcaaagca

SEQ ID NO: 2221205 - DNA, 25 bp, Homo sapien
caaagtgtcaataacagtagctgtg

SEQ ID NO: 2221206 - DNA, 25 bp, Homo sapien
tggaaaaggagacgttacaactgat

SEQ ID NO: 2221207 - DNA, 25 bp, Homo sapien
catcggagactactatgagcacttc

SEQ ID NO: 2221208 - DNA, 25 bp, Homo sapien
taaagctgaaagaccactagctaga

SEQ ID NO: 2221209 - DNA, 25 bp, Homo sapien
gagcacttctatgcatacaaactag

SEQ ID NO: 2221210 - DNA, 25 bp, Homo sapien
cagggacttaccaaacataggcagt

SEQ ID NO: 2221211 - DNA, 25 bp, Homo sapien
catcctgtggtatgagtgccggctc

SEQ ID NO: 2221212 - DNA, 25 bp, Homo sapien
gtggttacagcagatcctcggtgag

SEQ ID NO: 2221213 - DNA, 25 bp, Homo sapien
tttgaccctagttcctgactcacag

SEQ ID NO: 2221214 - DNA, 25 bp, Homo sapien
catgtcctcttttctatcagtggcc

SEQ ID NO: 2221215 - DNA, 25 bp, Homo sapien
gcatgaccatgccaacatgtcctct

SEQ ID NO: 2221216 - DNA, 25 bp, Homo sapien
atgtcctcttttctatcagtggcca

SEQ ID NO: 2221217 - DNA, 25 bp, Homo sapien
ctcctgcatgaccatgccaacatgt

SEQ ID NO: 2221218 - DNA, 25 bp, Homo sapien
aatctctgccatgtgatacttttta

SEQ ID NO: 2221219 - DNA, 25 bp, Homo sapien
tttgcagcatctaagaactgtcctg

SEQ ID NO: 2221220 - DNA, 25 bp, Homo sapien
ctgccatgtgatactttttaatgac

SEQ ID NO: 2221221 - DNA, 25 bp, Homo sapien
gtcctgaattgccttttcccaatct

SEQ ID NO: 2221222 - DNA, 25 bp, Homo sapien
tcaaatactcctcttttgttctctc

SEQ ID NO: 2221223 - DNA, 25 bp, Homo sapien
tggtctttgcttcttaaatccccta

SEQ ID NO: 2221224 - DNA, 25 bp, Homo sapien
tctttactgtattttattatgctcc

SEQ ID NO: 2221225 - DNA, 25 bp, Homo sapien
aaatggcttttatgctcttttcaaa

SEQ ID NO: 2221226 - DNA, 25 bp, Homo sapien
gaagcatgctcttagccacctagga

SEQ ID NO: 2221227 - DNA, 25 bp, Homo sapien
tacttttgaggacagctaatggcag

SEQ ID NO: 2221228 - DNA, 25 bp, Homo sapien
ggaagtgccacagatcccgttttgg

SEQ ID NO: 2221229 - DNA, 25 bp, Homo sapien
cacctaggaagtatggagatgtccc

SEQ ID NO: 2221230 - DNA, 25 bp, Homo sapien
ttaaggaatgtaacttgacttacag

SEQ ID NO: 2221231 - DNA, 25 bp, Homo sapien
tttaaggaatgtaacttgacttaca

SEQ ID NO: 2221232 - DNA, 25 bp, Homo sapien
taactctctcatctgagagtagtac

SEQ ID NO: 2221233 - DNA, 25 bp, Homo sapien
accttcctaaatcctttccacatca

SEQ ID NO: 2221234 - DNA, 25 bp, Homo sapien
taaatcctttccacatcactctctt

SEQ ID NO: 2221235 - DNA, 25 bp, Homo sapien
tcttctccaagcctgaagtaactct

SEQ ID NO: 2221236 - DNA, 25 bp, Homo sapien
cttcactttctgaccttgttctgat

SEQ ID NO: 2221237 - DNA, 25 bp, Homo sapien
cactttctgaccttgttctgatatg

SEQ ID NO: 2221238 - DNA, 25 bp, Homo sapien
ttcactttctgaccttgttctgata

SEQ ID NO: 2221239 - DNA, 25 bp, Homo sapien
ctttctgaccttgttctgatatgct

SEQ ID NO: 2221240 - DNA, 25 bp, Homo sapien
ggagtgccggcgcttttcgaaagca

SEQ ID NO: 2221241 - DNA, 25 bp, Homo sapien
gactaaaggccggatcagaatcgcg

SEQ ID NO: 2221242 - DNA, 25 bp, Homo sapien
cagcgccaagaatgcatcgcgagca

SEQ ID NO: 2221243 - DNA, 25 bp, Homo sapien
tcccaaggcgccgagttgatgtggc

SEQ ID NO: 2221244 - DNA, 25 bp, Homo sapien
aagaggattatgggacactggcgga

SEQ ID NO: 2221245 - DNA, 25 bp, Homo sapien
agaggaaccgagagaagaggattat

SEQ ID NO: 2221246 - DNA, 25 bp, Homo sapien
gaagaggattatgggacactggcgg

SEQ ID NO: 2221247 - DNA, 25 bp, Homo sapien
tccacagtcagaagtatcccacaag

SEQ ID NO: 2221248 - DNA, 25 bp, Homo sapien
tgtgggtgagaccaaatatcctcag

SEQ ID NO: 2221249 - DNA, 25 bp, Homo sapien
gacaagcccaaggtaagtaatctgg

SEQ ID NO: 2221250 - DNA, 25 bp, Homo sapien
ggtgctatctcagaacccctgtgga

SEQ ID NO: 2221251 - DNA, 25 bp, Homo sapien
tgtggaggataataggctaagtgaa

SEQ ID NO: 2221252 - DNA, 25 bp, Homo sapien
tactacataataccacctatgtgat

SEQ ID NO: 2221253 - DNA, 25 bp, Homo sapien
ccacctatgtgatgaatctaaaata

SEQ ID NO: 2221254 - DNA, 25 bp, Homo sapien
tggaatcaaagttattagacaaaga

SEQ ID NO: 2221255 - DNA, 25 bp, Homo sapien
tacttatctccaaataacatggttt

SEQ ID NO: 2221256 - DNA, 25 bp, Homo sapien
aaagtgacaggtagttttatggcat

SEQ ID NO: 2221257 - DNA, 25 bp, Homo sapien
gaatgtatacttatctccaaataac

SEQ ID NO: 2221258 - DNA, 25 bp, Homo sapien
agttttatggcatagattgtgctga

SEQ ID NO: 2221259 - DNA, 25 bp, Homo sapien
ggcaccgaattcaacaatgaagtat

SEQ ID NO: 2221260 - DNA, 25 bp, Homo sapien
tctactaaggtttcacatatgtggc

SEQ ID NO: 2221261 - DNA, 25 bp, Homo sapien
gaagtatatgcaactcttacaaaac

SEQ ID NO: 2221262 - DNA, 25 bp, Homo sapien
tactggacatgctagtaacttggag

SEQ ID NO: 2221263 - DNA, 25 bp, Homo sapien
tctaggtctttttattgtgacgtta

SEQ ID NO: 2221264 - DNA, 25 bp, Homo sapien
ctctaggtctttttattgtgacgtt

SEQ ID NO: 2221265 - DNA, 25 bp, Homo sapien
tctctaggtctttttattgtgacgt

SEQ ID NO: 2221266 - DNA, 25 bp, Homo sapien
tttttcagttgctgataccggtcgt

SEQ ID NO: 2221267 - DNA, 25 bp, Homo sapien
cagttgctgataccggtcgttcctt

SEQ ID NO: 2221268 - DNA, 25 bp, Homo sapien
ttcagttgctgataccggtcgttcc

SEQ ID NO: 2221269 - DNA, 25 bp, Homo sapien
catgttttttcagttgctgataccg

SEQ ID NO: 2221270 - DNA, 25 bp, Homo sapien
ccaatttaagctttacagaatactg

SEQ ID NO: 2221271 - DNA, 25 bp, Homo sapien
gttataaagatctattcaaaaccat

SEQ ID NO: 2221272 - DNA, 25 bp, Homo sapien
gagaatcttgtatttatggcatcag

SEQ ID NO: 2221273 - DNA, 25 bp, Homo sapien
tgtcccatgggtaatactattgtct

SEQ ID NO: 2221274 - DNA, 25 bp, Homo sapien
taccagttgactctttgaaataggt

SEQ ID NO: 2221275 - DNA, 25 bp, Homo sapien
tcttcttcccaaagccatgcttgtt

SEQ ID NO: 2221276 - DNA, 25 bp, Homo sapien
catgtttcctcacgccagatctcaa

SEQ ID NO: 2221277 - DNA, 25 bp, Homo sapien
tcagtcttcactgtctgagcaaatc

SEQ ID NO: 2221278 - DNA, 25 bp, Homo sapien
cttttgagaggcatataagaatttg

SEQ ID NO: 2221279 - DNA, 25 bp, Homo sapien
tttgcttttgagaggcatataagaa

SEQ ID NO: 2221280 - DNA, 25 bp, Homo sapien
aatttgcttttgagaggcatataag

SEQ ID NO: 2221281 - DNA, 25 bp, Homo sapien
gcttttgagaggcatataagaattt

SEQ ID NO: 2221282 - DNA, 25 bp, Homo sapien
gattccaagggtgtaattcgttcat

SEQ ID NO: 2221283 - DNA, 25 bp, Homo sapien
agggtgtaattcgttcatcattttc

SEQ ID NO: 2221284 - DNA, 25 bp, Homo sapien
caagggtgtaattcgttcatcattt

SEQ ID NO: 2221285 - DNA, 25 bp, Homo sapien
tccaagggtgtaattcgttcatcat

SEQ ID NO: 2221286 - DNA, 25 bp, Homo sapien
tcctcctcctcctcgggggctccca

SEQ ID NO: 2221287 - DNA, 25 bp, Homo sapien
ccagcactcgagcagttcctggcac

SEQ ID NO: 2221288 - DNA, 25 bp, Homo sapien
gcactcgaactgctcctcgtcgttt

SEQ ID NO: 2221289 - DNA, 25 bp, Homo sapien
gcacccagcactcgagcagttcctg

SEQ ID NO: 2221290 - DNA, 25 bp, Homo sapien
agcactcgagcagttcctggcactc

SEQ ID NO: 2221291 - DNA, 25 bp, Homo sapien
cagaaataccgaacacatggaaggg

SEQ ID NO: 2221292 - DNA, 25 bp, Homo sapien
taaaagccattgcagctaatttccc

SEQ ID NO: 2221293 - DNA, 25 bp, Homo sapien
attaagtgtcactagactggtcagc

SEQ ID NO: 2221294 - DNA, 25 bp, Homo sapien
cagagaagtctacataccacgcata

SEQ ID NO: 2221295 - DNA, 25 bp, Homo sapien
catgggttgcatgctactaggagcc

SEQ ID NO: 2221296 - DNA, 25 bp, Homo sapien
tgtgcaggacacagacctaaccctt

SEQ ID NO: 2221297 - DNA, 25 bp, Homo sapien
tataggaagataaagctggccagca

SEQ ID NO: 2221298 - DNA, 25 bp, Homo sapien
tataatacccgcatgcaaaaggcta

SEQ ID NO: 2221299 - DNA, 25 bp, Homo sapien
tgctaggattgtgcttaaatctcca

SEQ ID NO: 2221300 - DNA, 25 bp, Homo sapien
tctccattaacctcaatgtctatac

SEQ ID NO: 2221301 - DNA, 25 bp, Homo sapien
acctcaatgtctatactttgtgcaa

SEQ ID NO: 2221302 - DNA, 25 bp, Homo sapien
caatttggtataaacatggagtgca

SEQ ID NO: 2221303 - DNA, 25 bp, Homo sapien
gctctatggtgccacaggaggtaat

SEQ ID NO: 2221304 - DNA, 25 bp, Homo sapien
tctgccctgagattgggctctatgg

SEQ ID NO: 2221305 - DNA, 25 bp, Homo sapien
caatgtctgccctgagattgggctc

SEQ ID NO: 2221306 - DNA, 25 bp, Homo sapien
aatggcactggttgatgccacatag

SEQ ID NO: 2221307 - DNA, 25 bp, Homo sapien
gaaagaggcacatattgcattctta

SEQ ID NO: 2221308 - DNA, 25 bp, Homo sapien
tgctccatgataattccagtcctgg

SEQ ID NO: 2221309 - DNA, 25 bp, Homo sapien
taagagttgtacaaattgcatactt

SEQ ID NO: 2221310 - DNA, 25 bp, Homo sapien
tgatcctgttgtaattactctcaaa

SEQ ID NO: 2221311 - DNA, 25 bp, Homo sapien
gagctgagtgctgatacaccctatg

SEQ ID NO: 2221312 - DNA, 25 bp, Homo sapien
aacccagtgtgtgcatagtcatcta

SEQ ID NO: 2221313 - DNA, 25 bp, Homo sapien
tgagtttgagaaagtcactagccct

SEQ ID NO: 2221314 - DNA, 25 bp, Homo sapien
ggagaattttactgcaccctgacaa

SEQ ID NO: 2221315 - DNA, 25 bp, Homo sapien
gaagctttcaatccaacacggtgac

SEQ ID NO: 2221316 - DNA, 25 bp, Homo sapien
gaggaccttggtcacagtgtactga

SEQ ID NO: 2221317 - DNA, 25 bp, Homo sapien
tgatcttcttgagtagctgtggtgc

SEQ ID NO: 2221318 - DNA, 25 bp, Homo sapien
tgaactctgtaagcctcatgggagg

SEQ ID NO: 2221319 - DNA, 25 bp, Homo sapien
caatgcataatcatcacattttggt

SEQ ID NO: 2221320 - DNA, 25 bp, Homo sapien
attttggtaaatgaggtatccatca

SEQ ID NO: 2221321 - DNA, 25 bp, Homo sapien
catgcaatgcataatcatcacattt

SEQ ID NO: 2221322 - DNA, 25 bp, Homo sapien
cacattttggtaaatgaggtatcca

SEQ ID NO: 2221323 - DNA, 25 bp, Homo sapien
aataaatcagtgtttgcctggtgat

SEQ ID NO: 2221324 - DNA, 25 bp, Homo sapien
aaatacatttgtacagatctacttg

SEQ ID NO: 2221325 - DNA, 25 bp, Homo sapien
gaagaaaacctttgggagagatgga

SEQ ID NO: 2221326 - DNA, 25 bp, Homo sapien
cagcaacaaaggtgaatctcaatta

SEQ ID NO: 2221327 - DNA, 25 bp, Homo sapien
caggaggaggcttataattcacagt

SEQ ID NO: 2221328 - DNA, 25 bp, Homo sapien
gatccccggagtttttttcagcaca

SEQ ID NO: 2221329 - DNA, 25 bp, Homo sapien
aacggaatgtttgggtgtctggatc

SEQ ID NO: 2221330 - DNA, 25 bp, Homo sapien
tgagtttgcagggaataagggcatc

SEQ ID NO: 2221331 - DNA, 25 bp, Homo sapien
cagtccaggtgccactgtatgtgtc

SEQ ID NO: 2221332 - DNA, 25 bp, Homo sapien
caggtgccactgtatgtgtctccct

SEQ ID NO: 2221333 - DNA, 25 bp, Homo sapien
gccgccttcttagcagtccaggtgc

SEQ ID NO: 2221334 - DNA, 25 bp, Homo sapien
ctcccaagccgccttcttagcagtc

SEQ ID NO: 2221335 - DNA, 25 bp, Homo sapien
agagatgcaggaaatgtgaaaactg

SEQ ID NO: 2221336 - DNA, 25 bp, Homo sapien
tgagagatgcaggaaatgtgaaaac

SEQ ID NO: 2221337 - DNA, 25 bp, Homo sapien
gtctgagagatgcaggaaatgtgaa

SEQ ID NO: 2221338 - DNA, 25 bp, Homo sapien
ctgtctgagagatgcaggaaatgtg

SEQ ID NO: 2221339 - DNA, 25 bp, Homo sapien
agcaagagatgatgagccttctgga

SEQ ID NO: 2221340 - DNA, 25 bp, Homo sapien
ctatgtttccgtttccacagcaaga

SEQ ID NO: 2221341 - DNA, 25 bp, Homo sapien
tatgtttccgtttccacagcaagag

SEQ ID NO: 2221342 - DNA, 25 bp, Homo sapien
cacagcaagagatgatgagccttct

SEQ ID NO: 2221343 - DNA, 25 bp, Homo sapien
gactgtagcccacaaccacaatgtc

SEQ ID NO: 2221344 - DNA, 25 bp, Homo sapien
ctaagactgtagcccacaaccacaa

SEQ ID NO: 2221345 - DNA, 25 bp, Homo sapien
atgtccaccctatgcttcagtgttc

SEQ ID NO: 2221346 - DNA, 25 bp, Homo sapien
acaatgtccaccctatgcttcagtg

SEQ ID NO: 2221347 - DNA, 25 bp, Homo sapien
gttgtaactctgacctggaatgcta

SEQ ID NO: 2221348 - DNA, 25 bp, Homo sapien
actctgacctggaatgctaattcct

SEQ ID NO: 2221349 - DNA, 25 bp, Homo sapien
taactctgacctggaatgctaattc

SEQ ID NO: 2221350 - DNA, 25 bp, Homo sapien
tgtaactctgacctggaatgctaat

SEQ ID NO: 2221351 - DNA, 25 bp, Homo sapien
agaaagctggtaaatgcccttttgg

SEQ ID NO: 2221352 - DNA, 25 bp, Homo sapien
atgcccttttggctggaaccgccat

SEQ ID NO: 2221353 - DNA, 25 bp, Homo sapien
tggtaaatgcccttttggctggaac

SEQ ID NO: 2221354 - DNA, 25 bp, Homo sapien
aagctggtaaatgcccttttggctg

SEQ ID NO: 2221355 - DNA, 25 bp, Homo sapien
ttctacgagattacaaagagctggt

SEQ ID NO: 2221356 - DNA, 25 bp, Homo sapien
gatcaggtagatttcatccccggaa

SEQ ID NO: 2221357 - DNA, 25 bp, Homo sapien
caagccaatccaccatgatcaggta

SEQ ID NO: 2221358 - DNA, 25 bp, Homo sapien
tgaaaagaccaagaatgagctccaa

SEQ ID NO: 2221359 - DNA, 25 bp, Homo sapien
ttataacttgtgactgctgtaagta

SEQ ID NO: 2221360 - DNA, 25 bp, Homo sapien
cagtgggttctgtgactcattcata

SEQ ID NO: 2221361 - DNA, 25 bp, Homo sapien
gactcattcatagacctcataggga

SEQ ID NO: 2221362 - DNA, 25 bp, Homo sapien
agacctcatagggaaggagtgtcca

SEQ ID NO: 2221363 - DNA, 25 bp, Homo sapien
atcctcgttgtcttcccaggtttct

SEQ ID NO: 2221364 - DNA, 25 bp, Homo sapien
tggaaccaataggtattaaccagaa

SEQ ID NO: 2221365 - DNA, 25 bp, Homo sapien
acacctgctggatattcttgatgaa

SEQ ID NO: 2221366 - DNA, 25 bp, Homo sapien
aaacacctgctggatattcttgatg

SEQ ID NO: 2221367 - DNA, 25 bp, Homo sapien
ctggaaccaataggtattaaccaga

SEQ ID NO: 2221368 - DNA, 25 bp, Homo sapien
gaaaaaggacatggaacttagagcg

SEQ ID NO: 2221369 - DNA, 25 bp, Homo sapien
tagagcgaacactgggtaattcccc

SEQ ID NO: 2221370 - DNA, 25 bp, Homo sapien
agccaacaatggtaaccaaagagaa

SEQ ID NO: 2221371 - DNA, 25 bp, Homo sapien
caacaatggtaaccaaagagaatca

SEQ ID NO: 2221372 - DNA, 25 bp, Homo sapien
tttgatgaaatagctgaagactgtc

SEQ ID NO: 2221373 - DNA, 25 bp, Homo sapien
gactgtcgtagcaatgtacaggcag

SEQ ID NO: 2221374 - DNA, 25 bp, Homo sapien
ggaaaatccaatgcagttattaacc

SEQ ID NO: 2221375 - DNA, 25 bp, Homo sapien
tgaaggaagaatttgtagttggaaa

SEQ ID NO: 2221376 - DNA, 25 bp, Homo sapien
caagggcagtgatgatccattttta

SEQ ID NO: 2221377 - DNA, 25 bp, Homo sapien
gtgatgatccatttttaacacacac

SEQ ID NO: 2221378 - DNA, 25 bp, Homo sapien
agggcagtgatgatccatttttaac

SEQ ID NO: 2221379 - DNA, 25 bp, Homo sapien
ggcagtgatgatccatttttaacac

SEQ ID NO: 2221380 - DNA, 25 bp, Homo sapien
tgacaccggtcacagaatcgtacag

SEQ ID NO: 2221381 - DNA, 25 bp, Homo sapien
atagcacagacagagcagtggtggc

SEQ ID NO: 2221382 - DNA, 25 bp, Homo sapien
tggcagcggtctggcttgatcagat

SEQ ID NO: 2221383 - DNA, 25 bp, Homo sapien
ggcttgatcagatgacaccggtcac

SEQ ID NO: 2221384 - DNA, 25 bp, Homo sapien
gaggcaaaatataggacccaaatcc

SEQ ID NO: 2221385 - DNA, 25 bp, Homo sapien
tagctctgccttggtaatggtaaat

SEQ ID NO: 2221386 - DNA, 25 bp, Homo sapien
ttgtagctctgccttggtaatggta

SEQ ID NO: 2221387 - DNA, 25 bp, Homo sapien
aagaggcaaaatataggacccaaat

SEQ ID NO: 2221388 - DNA, 25 bp, Homo sapien
ggaatggtacccttaagattatgca

SEQ ID NO: 2221389 - DNA, 25 bp, Homo sapien
tgttagcagaagaatccagtttggg

SEQ ID NO: 2221390 - DNA, 25 bp, Homo sapien
ggtagatgtcttactgatgtcagct

SEQ ID NO: 2221391 - DNA, 25 bp, Homo sapien
tcagaaacataagatggcttgacga

SEQ ID NO: 2221392 - DNA, 25 bp, Homo sapien
tttgagaacatatatgacttagcct

SEQ ID NO: 2221393 - DNA, 25 bp, Homo sapien
gagaacatatatgacttagcctttc

SEQ ID NO: 2221394 - DNA, 25 bp, Homo sapien
ctagtttgagaacatatatgactta

SEQ ID NO: 2221395 - DNA, 25 bp, Homo sapien
agtttgagaacatatatgacttagc

SEQ ID NO: 2221396 - DNA, 25 bp, Homo sapien
tttggccatatcaacaagcatctgc

SEQ ID NO: 2221397 - DNA, 25 bp, Homo sapien
cggtagctttttggccatatcaaca

SEQ ID NO: 2221398 - DNA, 25 bp, Homo sapien
ctttttggccatatcaacaagcatc

SEQ ID NO: 2221399 - DNA, 25 bp, Homo sapien
aaccggtagctttttggccatatca

SEQ ID NO: 2221400 - DNA, 25 bp, Homo sapien
gagaagctggatgagactgcttgta

SEQ ID NO: 2221401 - DNA, 25 bp, Homo sapien
tgataacacccttggagaagctgga

SEQ ID NO: 2221402 - DNA, 25 bp, Homo sapien
ggtaacactgataacacccttggag

SEQ ID NO: 2221403 - DNA, 25 bp, Homo sapien
agagttttcacaggtaacactgata

SEQ ID NO: 2221404 - DNA, 25 bp, Homo sapien
tggaattgctagaccctgtggtggt

SEQ ID NO: 2221405 - DNA, 25 bp, Homo sapien
gatatacagccatctctttgagacc

SEQ ID NO: 2221406 - DNA, 25 bp, Homo sapien
gaattcgtctactttaggtacctca

SEQ ID NO: 2221407 - DNA, 25 bp, Homo sapien
tgaagtttcgtccatgtggtagcat

SEQ ID NO: 2221408 - DNA, 25 bp, Homo sapien
taccctgactctttcgtattattta

SEQ ID NO: 2221409 - DNA, 25 bp, Homo sapien
tgactctttcgtattatttactcct

SEQ ID NO: 2221410 - DNA, 25 bp, Homo sapien
agattaccctgactctttcgtatta

SEQ ID NO: 2221411 - DNA, 25 bp, Homo sapien
ccctgactctttcgtattatttact

SEQ ID NO: 2221412 - DNA, 25 bp, Homo sapien
gggagtgtaaagatagacttccagt

SEQ ID NO: 2221413 - DNA, 25 bp, Homo sapien
gacttccagtaggtccaggtaaaga

SEQ ID NO: 2221414 - DNA, 25 bp, Homo sapien
gagtgtaaagatagacttccagtag

SEQ ID NO: 2221415 - DNA, 25 bp, Homo sapien
gtgtaaagatagacttccagtaggt

SEQ ID NO: 2221416 - DNA, 25 bp, Homo sapien
aaaaatacaaagctccatgacgaat

SEQ ID NO: 2221417 - DNA, 25 bp, Homo sapien
gacattctgcaagttgcacacctta

SEQ ID NO: 2221418 - DNA, 25 bp, Homo sapien
cctttatgacaatgtagggaaaact

SEQ ID NO: 2221419 - DNA, 25 bp, Homo sapien
gaaacaagccataatgacaaacctg

SEQ ID NO: 2221420 - DNA, 25 bp, Homo sapien
ccgatgatatgatcgtacacctaga

SEQ ID NO: 2221421 - DNA, 25 bp, Homo sapien
tccagatctggtcaatgaatgcagt

SEQ ID NO: 2221422 - DNA, 25 bp, Homo sapien
gaatgcagtagtgtctggatataaa

SEQ ID NO: 2221423 - DNA, 25 bp, Homo sapien
taatcaacataggatcagaagtcct

SEQ ID NO: 2221424 - DNA, 25 bp, Homo sapien
tattcacatttgtcggccacaggta

SEQ ID NO: 2221425 - DNA, 25 bp, Homo sapien
cacagactgggtctctaaatggcag

SEQ ID NO: 2221426 - DNA, 25 bp, Homo sapien
tagtagccattctgagatggtatct

SEQ ID NO: 2221427 - DNA, 25 bp, Homo sapien
ggaaacctaatattcttgtatcagt

SEQ ID NO: 2221428 - DNA, 25 bp, Homo sapien
ttttctgctgggctcaaaacagtca

SEQ ID NO: 2221429 - DNA, 25 bp, Homo sapien
ctttttctgctgggctcaaaacagt

SEQ ID NO: 2221430 - DNA, 25 bp, Homo sapien
tttttctgctgggctcaaaacagtc

SEQ ID NO: 2221431 - DNA, 25 bp, Homo sapien
ttttctcttagatgtttcttagatt

SEQ ID NO: 2221432 - DNA, 25 bp, Homo sapien
atgaataactttgattccccccact

SEQ ID NO: 2221433 - DNA, 25 bp, Homo sapien
gtcaaaatgaataactttgattccc

SEQ ID NO: 2221434 - DNA, 25 bp, Homo sapien
ttattcagtgtcaaaatgaataact

SEQ ID NO: 2221435 - DNA, 25 bp, Homo sapien
tgcccacgcctatgaagagtccagg

SEQ ID NO: 2221436 - DNA, 25 bp, Homo sapien
ccacgcctatgaagagtccaggacc

SEQ ID NO: 2221437 - DNA, 25 bp, Homo sapien
gcccacgcctatgaagagtccagga

SEQ ID NO: 2221438 - DNA, 25 bp, Homo sapien
ttgcccacgcctatgaagagtccag

SEQ ID NO: 2221439 - DNA, 25 bp, Homo sapien
cagaaggagagcacaaggtgcagat

SEQ ID NO: 2221440 - DNA, 25 bp, Homo sapien
gtaggggctcccagaaggagagcac

SEQ ID NO: 2221441 - DNA, 25 bp, Homo sapien
agagcacaaggtgcagatggttgcc

SEQ ID NO: 2221442 - DNA, 25 bp, Homo sapien
tcaacttggtacagtaggggctccc

SEQ ID NO: 2221443 - DNA, 25 bp, Homo sapien
aataacgagcactggcacccaggac

SEQ ID NO: 2221444 - DNA, 25 bp, Homo sapien
cagagcacgacgaggacaataacga

SEQ ID NO: 2221445 - DNA, 25 bp, Homo sapien
caaagacgtaggcatagtaggacca

SEQ ID NO: 2221446 - DNA, 25 bp, Homo sapien
taggcatagtaggaccagagcacga

SEQ ID NO: 2221447 - DNA, 25 bp, Homo sapien
gaaccgctagggtggcggctgcgag

SEQ ID NO: 2221448 - DNA, 25 bp, Homo sapien
ctggaaggcgcgctgtgcggcactc

SEQ ID NO: 2221449 - DNA, 25 bp, Homo sapien
gctgtgcggcactccactgtctagc

SEQ ID NO: 2221450 - DNA, 25 bp, Homo sapien
aagcaggcctgctggcgccgggtcg

SEQ ID NO: 2221451 - DNA, 25 bp, Homo sapien
tgaagccgaagaaatttgggtccgc

SEQ ID NO: 2221452 - DNA, 25 bp, Homo sapien
agggctagacctccgcaaaatcgtg

SEQ ID NO: 2221453 - DNA, 25 bp, Homo sapien
gagtcacggcgttgaggaactagcc

SEQ ID NO: 2221454 - DNA, 25 bp, Homo sapien
gatccgtcaggcagtcggagctagc

SEQ ID NO: 2221455 - DNA, 25 bp, Homo sapien
cgccgcggcctcttcggctgtggat

SEQ ID NO: 2221456 - DNA, 25 bp, Homo sapien
tgcggagcccggtgaggctctattc

SEQ ID NO: 2221457 - DNA, 25 bp, Homo sapien
tcggctgtggatcctgccattcccg

SEQ ID NO: 2221458 - DNA, 25 bp, Homo sapien
ggacgtggagcctgaagccggcgct

SEQ ID NO: 2221459 - DNA, 25 bp, Homo sapien
gtttctagctctgcatcaatggaca

SEQ ID NO: 2221460 - DNA, 25 bp, Homo sapien
ctatgaggaatacaccagcaagcta

SEQ ID NO: 2221461 - DNA, 25 bp, Homo sapien
tcaattaagttgacacaggaacata

SEQ ID NO: 2221462 - DNA, 25 bp, Homo sapien
caatggacaccgttaaatcttcttc

SEQ ID NO: 2221463 - DNA, 25 bp, Homo sapien
tctaatcccagagtgcggtgctgtt

SEQ ID NO: 2221464 - DNA, 25 bp, Homo sapien
gtctaaagaaagcactgatgatgag

SEQ ID NO: 2221465 - DNA, 25 bp, Homo sapien
tgtggagttacagtcggagacagtc

SEQ ID NO: 2221466 - DNA, 25 bp, Homo sapien
tagatgtgacatggagcaaccccaa

SEQ ID NO: 2221467 - DNA, 25 bp, Homo sapien
ttcctttacttgtaaacatgcagag

SEQ ID NO: 2221468 - DNA, 25 bp, Homo sapien
gctgcaattcataatccgaggaggt

SEQ ID NO: 2221469 - DNA, 25 bp, Homo sapien
tctgtaacgcgtccaaaagctgatg

SEQ ID NO: 2221470 - DNA, 25 bp, Homo sapien
aacatgcagagacttggtcaattgc

SEQ ID NO: 2221471 - DNA, 25 bp, Homo sapien
caaatccttagagacctacgaagag

SEQ ID NO: 2221472 - DNA, 25 bp, Homo sapien
aatccttagagacctacgaagagac

SEQ ID NO: 2221473 - DNA, 25 bp, Homo sapien
agcaaatccttagagacctacgaag

SEQ ID NO: 2221474 - DNA, 25 bp, Homo sapien
aaagcaaatccttagagacctacga

SEQ ID NO: 2221475 - DNA, 25 bp, Homo sapien
ttaagtccactgaacctgctaccgc

SEQ ID NO: 2221476 - DNA, 25 bp, Homo sapien
tgggacccattgaacgagactgctt

SEQ ID NO: 2221477 - DNA, 25 bp, Homo sapien
tctgttagaccctgatgggagctgc

SEQ ID NO: 2221478 - DNA, 25 bp, Homo sapien
gaaacttgatcatcctaggccaact

SEQ ID NO: 2221479 - DNA, 25 bp, Homo sapien
tgaacctacaggatttggcaggagt

SEQ ID NO: 2221480 - DNA, 25 bp, Homo sapien
cagaggaggttaatatcccagcacc

SEQ ID NO: 2221481 - DNA, 25 bp, Homo sapien
cacagagctacattcagatggtaaa

SEQ ID NO: 2221482 - DNA, 25 bp, Homo sapien
gaactaggccatgctagcaggaaaa

SEQ ID NO: 2221483 - DNA, 25 bp, Homo sapien
tatgtgctccaggttggaactccca

SEQ ID NO: 2221484 - DNA, 25 bp, Homo sapien
catatacctagccagtaaccgcagc

SEQ ID NO: 2221485 - DNA, 25 bp, Homo sapien
tagataaggcacaagctagcaggga

SEQ ID NO: 2221486 - DNA, 25 bp, Homo sapien
tcaggagagcatgccgaaagcatgc

SEQ ID NO: 2221487 - DNA, 25 bp, Homo sapien
catgcagtgctagaacctgaactaa

SEQ ID NO: 2221488 - DNA, 25 bp, Homo sapien
cacatgcagtgctagaacctgaact

SEQ ID NO: 2221489 - DNA, 25 bp, Homo sapien
gctagaacctgaactaatacaataa

SEQ ID NO: 2221490 - DNA, 25 bp, Homo sapien
cagtgctagaacctgaactaataca

SEQ ID NO: 2221491 - DNA, 25 bp, Homo sapien
tattttgacacacagatactatgcc

SEQ ID NO: 2221492 - DNA, 25 bp, Homo sapien
gcactacaacattagactggctatg

SEQ ID NO: 2221493 - DNA, 25 bp, Homo sapien
tgtcactgggcaataggaatatttc

SEQ ID NO: 2221494 - DNA, 25 bp, Homo sapien
taggcacatcattaaccaaaaagtt

SEQ ID NO: 2221495 - DNA, 25 bp, Homo sapien
tagtcctgggttcatgagtgctact

SEQ ID NO: 2221496 - DNA, 25 bp, Homo sapien
tccaggtgacaagggagaagcttgt

SEQ ID NO: 2221497 - DNA, 25 bp, Homo sapien
gtttgattaccttagagccacatag

SEQ ID NO: 2221498 - DNA, 25 bp, Homo sapien
tctctctaatgatgcccactgatgc

SEQ ID NO: 2221499 - DNA, 25 bp, Homo sapien
tcttgaaatagatagggcagatacc

SEQ ID NO: 2221500 - DNA, 25 bp, Homo sapien
cactcttgaaatagatagggcagat

SEQ ID NO: 2221501 - DNA, 25 bp, Homo sapien
ctcttgaaatagatagggcagatac

SEQ ID NO: 2221502 - DNA, 25 bp, Homo sapien
tcactcttgaaatagatagggcaga

SEQ ID NO: 2221503 - DNA, 25 bp, Homo sapien
tgaacactcagtgcaccaaaacctc

SEQ ID NO: 2221504 - DNA, 25 bp, Homo sapien
tccagattgtgagagcaaaccgtcc

SEQ ID NO: 2221505 - DNA, 25 bp, Homo sapien
ccagaataaggagattaaggtccag

SEQ ID NO: 2221506 - DNA, 25 bp, Homo sapien
gagcaaaccgtccttcatgaatgaa

SEQ ID NO: 2221507 - DNA, 25 bp, Homo sapien
gcacacctgttcatggggctctcca

SEQ ID NO: 2221508 - DNA, 25 bp, Homo sapien
tgcaccaacctctagctgtctgctt

SEQ ID NO: 2221509 - DNA, 25 bp, Homo sapien
ctgcctgtaccccttgcaccaacct

SEQ ID NO: 2221510 - DNA, 25 bp, Homo sapien
cagaactgcctttccacgatggctc

SEQ ID NO: 2221511 - DNA, 25 bp, Homo sapien
tcaactacagaagtaacatccaggg

SEQ ID NO: 2221512 - DNA, 25 bp, Homo sapien
gtatcacagtgacggacaaggttct

SEQ ID NO: 2221513 - DNA, 25 bp, Homo sapien
tccagggtgtcaaccacgtttctat

SEQ ID NO: 2221514 - DNA, 25 bp, Homo sapien
tatacagctgtagattagccctagc

SEQ ID NO: 2221515 - DNA, 25 bp, Homo sapien
cctgtttcaaactaagacgtaagct

SEQ ID NO: 2221516 - DNA, 25 bp, Homo sapien
ctttctgcatgttaacacccatagc

SEQ ID NO: 2221517 - DNA, 25 bp, Homo sapien
tcaaactaagacgtaagcttctttg

SEQ ID NO: 2221518 - DNA, 25 bp, Homo sapien
caaactaagacgtaagcttctttga

SEQ ID NO: 2221519 - DNA, 25 bp, Homo sapien
gcgcccggccgaatatgttaagaat

SEQ ID NO: 2221520 - DNA, 25 bp, Homo sapien
attcttccgattcaacacgctggcg

SEQ ID NO: 2221521 - DNA, 25 bp, Homo sapien
tagccatcattttgttagccactgc

SEQ ID NO: 2221522 - DNA, 25 bp, Homo sapien
aaggcggctcccgattctcactggg

SEQ ID NO: 2221523 - DNA, 25 bp, Homo sapien
aggagatcacaagtctggcaggctg

SEQ ID NO: 2221524 - DNA, 25 bp, Homo sapien
acaggagatcacaagtctggcaggc

SEQ ID NO: 2221525 - DNA, 25 bp, Homo sapien
gacaggagatcacaagtctggcagg

SEQ ID NO: 2221526 - DNA, 25 bp, Homo sapien
caggagatcacaagtctggcaggct

SEQ ID NO: 2221527 - DNA, 25 bp, Homo sapien
taaacccttggtcatcatggcctga

SEQ ID NO: 2221528 - DNA, 25 bp, Homo sapien
gagactggcttgaacatgcagcaca

SEQ ID NO: 2221529 - DNA, 25 bp, Homo sapien
tcgcttgcggaagtcataaaccctt

SEQ ID NO: 2221530 - DNA, 25 bp, Homo sapien
atggtgcaacaaccgccaagggtgg

SEQ ID NO: 2221531 - DNA, 25 bp, Homo sapien
tcctcttgccattttttaatttctc

SEQ ID NO: 2221532 - DNA, 25 bp, Homo sapien
taaatactctcctgcttttgaaatg

SEQ ID NO: 2221533 - DNA, 25 bp, Homo sapien
gatattaacgaagaatcctcaagga

SEQ ID NO: 2221534 - DNA, 25 bp, Homo sapien
atgtccgggtgttatcaaatctctg

SEQ ID NO: 2221535 - DNA, 25 bp, Homo sapien
tatgctggcgatgtccgggtgttat

SEQ ID NO: 2221536 - DNA, 25 bp, Homo sapien
gcgtggctgtattccatatgccgga

SEQ ID NO: 2221537 - DNA, 25 bp, Homo sapien
ccttcgatgatgttggctcaaagaa

SEQ ID NO: 2221538 - DNA, 25 bp, Homo sapien
gctgtttaagagatgcttcataccg

SEQ ID NO: 2221539 - DNA, 25 bp, Homo sapien
gcttcataccgagaaaagaaaggtc

SEQ ID NO: 2221540 - DNA, 25 bp, Homo sapien
tcttttttttggatctttctcttca

SEQ ID NO: 2221541 - DNA, 25 bp, Homo sapien
tgcttcttttttttggatctttctc

SEQ ID NO: 2221542 - DNA, 25 bp, Homo sapien
atgtgcggcactgcggcaacgctgc

SEQ ID NO: 2221543 - DNA, 25 bp, Homo sapien
ctttatgtttcggaggctgacttga

SEQ ID NO: 2221544 - DNA, 25 bp, Homo sapien
caactctgtaaaggcatgtgcggca

SEQ ID NO: 2221545 - DNA, 25 bp, Homo sapien
taaagtcaattgtgaactagaactg

SEQ ID NO: 2221546 - DNA, 25 bp, Homo sapien
atgcacaagtcacgcacacacggag

SEQ ID NO: 2221547 - DNA, 25 bp, Homo sapien
aaaattgtccgtgatgcacaagtca

SEQ ID NO: 2221548 - DNA, 25 bp, Homo sapien
gtgatgcacaagtcacgcacacacg

SEQ ID NO: 2221549 - DNA, 25 bp, Homo sapien
tgtccgtgatgcacaagtcacgcac

SEQ ID NO: 2221550 - DNA, 25 bp, Homo sapien
gcccgcgagcctgggacgcaggcat

SEQ ID NO: 2221551 - DNA, 25 bp, Homo sapien
ggaagcttgcatggctgagcaagac

SEQ ID NO: 2221552 - DNA, 25 bp, Homo sapien
tcaaagctgattatgggtctggaag

SEQ ID NO: 2221553 - DNA, 25 bp, Homo sapien
caaagctgattatgggtctggaagc

SEQ ID NO: 2221554 - DNA, 25 bp, Homo sapien
gactgatggagttaagacaaagagg

SEQ ID NO: 2221555 - DNA, 25 bp, Homo sapien
gatcttgactcccagattcagccca

SEQ ID NO: 2221556 - DNA, 25 bp, Homo sapien
ttgactcccagattcagcccagact

SEQ ID NO: 2221557 - DNA, 25 bp, Homo sapien
tcagatcttgactcccagattcagc

SEQ ID NO: 2221558 - DNA, 25 bp, Homo sapien
actcccagattcagcccagactcac

SEQ ID NO: 2221559 - DNA, 25 bp, Homo sapien
tatgccatccaacactgcattgttc

SEQ ID NO: 2221560 - DNA, 25 bp, Homo sapien
gtctctggtgcataaactgtttccc

SEQ ID NO: 2221561 - DNA, 25 bp, Homo sapien
aatcacgagcacaggttctatgcca

SEQ ID NO: 2221562 - DNA, 25 bp, Homo sapien
gaagtgccttgtgaactttaacaaa

SEQ ID NO: 2221563 - DNA, 25 bp, Homo sapien
ccaaggtgactagcaactggagtgg

SEQ ID NO: 2221564 - DNA, 25 bp, Homo sapien
gagctgctctatgaaaacatggcaa

SEQ ID NO: 2221565 - DNA, 25 bp, Homo sapien
tgagattctgaggtgacaaaaggct

SEQ ID NO: 2221566 - DNA, 25 bp, Homo sapien
tggcaaaaagtccatacctccctgg

SEQ ID NO: 2221567 - DNA, 25 bp, Homo sapien
gaaagaagggacattcaaaatagga

SEQ ID NO: 2221568 - DNA, 25 bp, Homo sapien
tccctttttgcaggcgatatgatcc

SEQ ID NO: 2221569 - DNA, 25 bp, Homo sapien
cttgaaagccggcagaagacaagga

SEQ ID NO: 2221570 - DNA, 25 bp, Homo sapien
cccacaggcaatatactgaatgggc

SEQ ID NO: 2221571 - DNA, 25 bp, Homo sapien
aagggagagcaatcacagatcagtg

SEQ ID NO: 2221572 - DNA, 25 bp, Homo sapien
tatgctgaaacaagaccgggatggc

SEQ ID NO: 2221573 - DNA, 25 bp, Homo sapien
tatacggcagtagacacaaagggag

SEQ ID NO: 2221574 - DNA, 25 bp, Homo sapien
gattctaatttagagccccaatgcc

SEQ ID NO: 2221575 - DNA, 25 bp, Homo sapien
tttcatggtgagctcgaggacccca

SEQ ID NO: 2221576 - DNA, 25 bp, Homo sapien
cacactgagagttgattggcgcctg

SEQ ID NO: 2221577 - DNA, 25 bp, Homo sapien
gacattggcctctttgacacggttg

SEQ ID NO: 2221578 - DNA, 25 bp, Homo sapien
tcctatcggtgatctggaaaccccg

SEQ ID NO: 2221579 - DNA, 25 bp, Homo sapien
cagcagtgttggtgcctcggcacaa

SEQ ID NO: 2221580 - DNA, 25 bp, Homo sapien
agtgctggccagcaacgactgcaag

SEQ ID NO: 2221581 - DNA, 25 bp, Homo sapien
tcagcgatcagtcggagagaggacc

SEQ ID NO: 2221582 - DNA, 25 bp, Homo sapien
gaagagcgatctttctacacaagtg

SEQ ID NO: 2221583 - DNA, 25 bp, Homo sapien
actcttgcaacaggtagatcagata

SEQ ID NO: 2221584 - DNA, 25 bp, Homo sapien
ggtagatcagatacacccactggtg

SEQ ID NO: 2221585 - DNA, 25 bp, Homo sapien
caacaggtagatcagatacacccac

SEQ ID NO: 2221586 - DNA, 25 bp, Homo sapien
gatacacccactggtgaggtctgca

SEQ ID NO: 2221587 - DNA, 25 bp, Homo sapien
atcggtcagcatttccttgtccgta

SEQ ID NO: 2221588 - DNA, 25 bp, Homo sapien
gtcagcatttccttgtccgtaaagt

SEQ ID NO: 2221589 - DNA, 25 bp, Homo sapien
cggtcagcatttccttgtccgtaaa

SEQ ID NO: 2221590 - DNA, 25 bp, Homo sapien
aaaatcggtcagcatttccttgtcc

SEQ ID NO: 2221591 - DNA, 25 bp, Homo sapien
gaggacgacggtagcctgtgaggct

SEQ ID NO: 2221592 - DNA, 25 bp, Homo sapien
ctatagggtcatcgccaccgtagcc

SEQ ID NO: 2221593 - DNA, 25 bp, Homo sapien
caccgtagccgccaagaggagctgg

SEQ ID NO: 2221594 - DNA, 25 bp, Homo sapien
gctcgttgtagacaacatggcggcg

SEQ ID NO: 2221595 - DNA, 25 bp, Homo sapien
atatggagactgttcaatcaccagg

SEQ ID NO: 2221596 - DNA, 25 bp, Homo sapien
tcaccaggagcacaaagttatcatt

SEQ ID NO: 2221597 - DNA, 25 bp, Homo sapien
cggctgccggagattgtgagaattc

SEQ ID NO: 2221598 - DNA, 25 bp, Homo sapien
gagaattctcttcaccagaatatgg

SEQ ID NO: 2221599 - DNA, 25 bp, Homo sapien
ttttcagagtaagttattaaagctg

SEQ ID NO: 2221600 - DNA, 25 bp, Homo sapien
taagttattaaagctgtaatagaca

SEQ ID NO: 2221601 - DNA, 25 bp, Homo sapien
gtaagttattaaagctgtaatagac

SEQ ID NO: 2221602 - DNA, 25 bp, Homo sapien
cagagtaagttattaaagctgtaat

SEQ ID NO: 2221603 - DNA, 25 bp, Homo sapien
ttctcataatgaatcctctcaggac

SEQ ID NO: 2221604 - DNA, 25 bp, Homo sapien
tctcataatgaatcctctcaggaca

SEQ ID NO: 2221605 - DNA, 25 bp, Homo sapien
ctcataatgaatcctctcaggacat

SEQ ID NO: 2221606 - DNA, 25 bp, Homo sapien
tcataatgaatcctctcaggacatt

SEQ ID NO: 2221607 - DNA, 25 bp, Homo sapien
ccatcccttctttccaatacacagt

SEQ ID NO: 2221608 - DNA, 25 bp, Homo sapien
acagccccaggaagtattatagggt

SEQ ID NO: 2221609 - DNA, 25 bp, Homo sapien
tatagggtgtactgtagttggtgta

SEQ ID NO: 2221610 - DNA, 25 bp, Homo sapien
cccaggaagtattatagggtgtact

SEQ ID NO: 2221611 - DNA, 25 bp, Homo sapien
tctttcagaaatgctctgaccagat

SEQ ID NO: 2221612 - DNA, 25 bp, Homo sapien
gtgggttctgcccaatccgaacttc

SEQ ID NO: 2221613 - DNA, 25 bp, Homo sapien
accagataggagaaatctagaaagg

SEQ ID NO: 2221614 - DNA, 25 bp, Homo sapien
gttctgcccaatccgaacttcctgg

SEQ ID NO: 2221615 - DNA, 25 bp, Homo sapien
tatttgctctagctaggaaaaccag

SEQ ID NO: 2221616 - DNA, 25 bp, Homo sapien
acagaagtggctagagtgaacatcc

SEQ ID NO: 2221617 - DNA, 25 bp, Homo sapien
tcaaatccatatcaaaatcccaaag

SEQ ID NO: 2221618 - DNA, 25 bp, Homo sapien
tcagcttcatcattcagtgtgttag

SEQ ID NO: 2221619 - DNA, 25 bp, Homo sapien
gatggctttcaacttcatccgtctc

SEQ ID NO: 2221620 - DNA, 25 bp, Homo sapien
tgatggctttcaacttcatccgtct

SEQ ID NO: 2221621 - DNA, 25 bp, Homo sapien
atggctttcaacttcatccgtctcc

SEQ ID NO: 2221622 - DNA, 25 bp, Homo sapien
aaaataattggctaacatcatgatg

SEQ ID NO: 2221623 - DNA, 25 bp, Homo sapien
taattggctaacatcatgatgacag

SEQ ID NO: 2221624 - DNA, 25 bp, Homo sapien
aataattggctaacatcatgatgac

SEQ ID NO: 2221625 - DNA, 25 bp, Homo sapien
tgaagcaaccacataaacaagtctg

SEQ ID NO: 2221626 - DNA, 25 bp, Homo sapien
atggagccaatcaagtaccataagt

SEQ ID NO: 2221627 - DNA, 25 bp, Homo sapien
tggagccaatcaagtaccataagtc

SEQ ID NO: 2221628 - DNA, 25 bp, Homo sapien
ttgggcttggcatcagcccacagag

SEQ ID NO: 2221629 - DNA, 25 bp, Homo sapien
gtttttagttgagctgttctacaca

SEQ ID NO: 2221630 - DNA, 25 bp, Homo sapien
tgacatattgctgatctgcttgact

SEQ ID NO: 2221631 - DNA, 25 bp, Homo sapien
tgcttgacttctatgaaaggccttc

SEQ ID NO: 2221632 - DNA, 25 bp, Homo sapien
cttgggagactctggagtttttagt

SEQ ID NO: 2221633 - DNA, 25 bp, Homo sapien
tgggaccggaggagatacacagctc

SEQ ID NO: 2221634 - DNA, 25 bp, Homo sapien
ccggaggagatacacagctcacaaa

SEQ ID NO: 2221635 - DNA, 25 bp, Homo sapien
tcacaaaacacatcaatacagagaa

SEQ ID NO: 2221636 - DNA, 25 bp, Homo sapien
cggacaaggactgggcttttactct

SEQ ID NO: 2221637 - DNA, 25 bp, Homo sapien
ggtacaatgcttgttatatgaggag

SEQ ID NO: 2221638 - DNA, 25 bp, Homo sapien
gcaagaatcagtgttgttatcttta

SEQ ID NO: 2221639 - DNA, 25 bp, Homo sapien
caagaatcagtgttgttatctttaa

SEQ ID NO: 2221640 - DNA, 25 bp, Homo sapien
atgcttgttatatgaggagatgtgc

SEQ ID NO: 2221641 - DNA, 25 bp, Homo sapien
aattccgtacaacgcgaacgcgcat

SEQ ID NO: 2221642 - DNA, 25 bp, Homo sapien
aggactgagcgtgtccatcttcgca

SEQ ID NO: 2221643 - DNA, 25 bp, Homo sapien
ggagatgactctcggaaacggtccg

SEQ ID NO: 2221644 - DNA, 25 bp, Homo sapien
cgcagctggcttgggaattccgtac

SEQ ID NO: 2221645 - DNA, 25 bp, Homo sapien
tctctgctcgaacttctggcgcttt

SEQ ID NO: 2221646 - DNA, 25 bp, Homo sapien
tatcttgttcaggtccctcagtgga

SEQ ID NO: 2221647 - DNA, 25 bp, Homo sapien
gtttatcttgttcaggtccctcagt

SEQ ID NO: 2221648 - DNA, 25 bp, Homo sapien
ccgtttatcttgttcaggtccctca

SEQ ID NO: 2221649 - DNA, 25 bp, Homo sapien
cgatttgcaactgggaggcgggcgg

SEQ ID NO: 2221650 - DNA, 25 bp, Homo sapien
ccggaagtcgatttgcaactgggag

SEQ ID NO: 2221651 - DNA, 25 bp, Homo sapien
aggcgggcggtctgccgaagtgctg

SEQ ID NO: 2221652 - DNA, 25 bp, Homo sapien
gggtgccccggaagtcgatttgcaa

SEQ ID NO: 2221653 - DNA, 25 bp, Homo sapien
gtcctgcagaggatcgtgtttccct

SEQ ID NO: 2221654 - DNA, 25 bp, Homo sapien
cagtttgtcagattcgatctcaggg

SEQ ID NO: 2221655 - DNA, 25 bp, Homo sapien
cagaatctgacatctgacgatggga

SEQ ID NO: 2221656 - DNA, 25 bp, Homo sapien
catctcagggaaaagcataggtgcc

SEQ ID NO: 2221657 - DNA, 25 bp, Homo sapien
caaaacagtccggggacaggatcac

SEQ ID NO: 2221658 - DNA, 25 bp, Homo sapien
tgaccacaaaacagtccggggacag

SEQ ID NO: 2221659 - DNA, 25 bp, Homo sapien
tcctgaccacaaaacagtccgggga

SEQ ID NO: 2221660 - DNA, 25 bp, Homo sapien
ccacaaaacagtccggggacaggat

SEQ ID NO: 2221661 - DNA, 25 bp, Homo sapien
ccgaggttactggtttgagccacca

SEQ ID NO: 2221662 - DNA, 25 bp, Homo sapien
tttaaattgaaaggcaggctaggcg

SEQ ID NO: 2221663 - DNA, 25 bp, Homo sapien
ttctggagtcaagcaaaccgcctgc

SEQ ID NO: 2221664 - DNA, 25 bp, Homo sapien
tcagcctccgaaactgccgaggtta

SEQ ID NO: 2221665 - DNA, 25 bp, Homo sapien
caattgaaggatacgcagaaggaca

SEQ ID NO: 2221666 - DNA, 25 bp, Homo sapien
gtaaggtatacagggaacagcactc

SEQ ID NO: 2221667 - DNA, 25 bp, Homo sapien
tagtctaacagtcaggagctgctct

SEQ ID NO: 2221668 - DNA, 25 bp, Homo sapien
tcaattgagactacaagtaccacgg

SEQ ID NO: 2221669 - DNA, 25 bp, Homo sapien
aatacatattctgtcgattgaagtg

SEQ ID NO: 2221670 - DNA, 25 bp, Homo sapien
atacatattctgtcgattgaagtgg

SEQ ID NO: 2221671 - DNA, 25 bp, Homo sapien
gaatacatattctgtcgattgaagt

SEQ ID NO: 2221672 - DNA, 25 bp, Homo sapien
ttctgtcgattgaagtggagagttc

SEQ ID NO: 2221673 - DNA, 25 bp, Homo sapien
ttaattttatttgttcaagaactca

SEQ ID NO: 2221674 - DNA, 25 bp, Homo sapien
aattttatttgttcaagaactcata

SEQ ID NO: 2221675 - DNA, 25 bp, Homo sapien
taattttatttgttcaagaactcat

SEQ ID NO: 2221676 - DNA, 25 bp, Homo sapien
attttatttgttcaagaactcatac

SEQ ID NO: 2221677 - DNA, 25 bp, Homo sapien
gggatccagtaaatggatgaaaact

SEQ ID NO: 2221678 - DNA, 25 bp, Homo sapien
caaactgggatccagtaaatggatg

SEQ ID NO: 2221679 - DNA, 25 bp, Homo sapien
actgggatccagtaaatggatgaaa

SEQ ID NO: 2221680 - DNA, 25 bp, Homo sapien
aactgggatccagtaaatggatgaa

SEQ ID NO: 2221681 - DNA, 25 bp, Homo sapien
aacgctggttaatccccgggcattg

SEQ ID NO: 2221682 - DNA, 25 bp, Homo sapien
tcctttagcttctggttgataacgc

SEQ ID NO: 2221683 - DNA, 25 bp, Homo sapien
tggttgataacgctggttaatcccc

SEQ ID NO: 2221684 - DNA, 25 bp, Homo sapien
gcttctggttgataacgctggttaa

SEQ ID NO: 2221685 - DNA, 25 bp, Homo sapien
tatcccagtgggtatatccatttag

SEQ ID NO: 2221686 - DNA, 25 bp, Homo sapien
tccaatatcccagtgggtatatcca

SEQ ID NO: 2221687 - DNA, 25 bp, Homo sapien
caatatcccagtgggtatatccatt

SEQ ID NO: 2221688 - DNA, 25 bp, Homo sapien
tcccagtgggtatatccatttagct

SEQ ID NO: 2221689 - DNA, 25 bp, Homo sapien
tcacatggtgtttgagtaatccact

SEQ ID NO: 2221690 - DNA, 25 bp, Homo sapien
ccacacttgagtcactatgttcccc

SEQ ID NO: 2221691 - DNA, 25 bp, Homo sapien
gagaaaaacctgtcacattcatgcc

SEQ ID NO: 2221692 - DNA, 25 bp, Homo sapien
tgtcacattcatgccaatccacaca

SEQ ID NO: 2221693 - DNA, 25 bp, Homo sapien
caattatgtgcaatcagaagtgtgc

SEQ ID NO: 2221694 - DNA, 25 bp, Homo sapien
acaattatgtgcaatcagaagtgtg

SEQ ID NO: 2221695 - DNA, 25 bp, Homo sapien
ccctcttgctgaaggactcctgaag

SEQ ID NO: 2221696 - DNA, 25 bp, Homo sapien
gcctctccccctcttgctgaaggac

SEQ ID NO: 2221697 - DNA, 25 bp, Homo sapien
ccccctcttgctgaaggactcctga

SEQ ID NO: 2221698 - DNA, 25 bp, Homo sapien
ctcttgctgaaggactcctgaagtt

SEQ ID NO: 2221699 - DNA, 25 bp, Homo sapien
aattcatcagccagagattttccca

SEQ ID NO: 2221700 - DNA, 25 bp, Homo sapien
tccttaagagttgctattttgcaca

SEQ ID NO: 2221701 - DNA, 25 bp, Homo sapien
aagagttgctattttgcacaggaga

SEQ ID NO: 2221702 - DNA, 25 bp, Homo sapien
tttccttaagagttgctattttgca

SEQ ID NO: 2221703 - DNA, 25 bp, Homo sapien
tggtacaatgagtttttccttaaga

SEQ ID NO: 2221704 - DNA, 25 bp, Homo sapien
gtgtctcagagttgctcctctcgag

SEQ ID NO: 2221705 - DNA, 25 bp, Homo sapien
ctcagagttgctcctctcgaggaat

SEQ ID NO: 2221706 - DNA, 25 bp, Homo sapien
attatgtgtctcagagttgctcctc

SEQ ID NO: 2221707 - DNA, 25 bp, Homo sapien
atgtgtctcagagttgctcctctcg

SEQ ID NO: 2221708 - DNA, 25 bp, Homo sapien
cagaaattttgatttaggccaattg

SEQ ID NO: 2221709 - DNA, 25 bp, Homo sapien
agaaattttgatttaggccaattgg

SEQ ID NO: 2221710 - DNA, 25 bp, Homo sapien
catccattgcctgttgaattgtttc

SEQ ID NO: 2221711 - DNA, 25 bp, Homo sapien
taacaggcaacagttgactctgagt

SEQ ID NO: 2221712 - DNA, 25 bp, Homo sapien
ttcatgagtttctatcaaattcagg

SEQ ID NO: 2221713 - DNA, 25 bp, Homo sapien
tgagtttctatcaaattcagggcat

SEQ ID NO: 2221714 - DNA, 25 bp, Homo sapien
cagaaagttaacaaggatatccaga

SEQ ID NO: 2221715 - DNA, 25 bp, Homo sapien
agaaagttaacaaggatatccagaa

SEQ ID NO: 2221716 - DNA, 25 bp, Homo sapien
gaaagttaacaaggatatccagaaa

SEQ ID NO: 2221717 - DNA, 25 bp, Homo sapien
ttggtgatacccagggaacaaccag

SEQ ID NO: 2221718 - DNA, 25 bp, Homo sapien
tggaactaatctccatggactgggt

SEQ ID NO: 2221719 - DNA, 25 bp, Homo sapien
gatacccagggaacaaccagatctc

SEQ ID NO: 2221720 - DNA, 25 bp, Homo sapien
acccagaaggtggaactaatctcca

SEQ ID NO: 2221721 - DNA, 25 bp, Homo sapien
ccaaagatgggcctcctgatgatga

SEQ ID NO: 2221722 - DNA, 25 bp, Homo sapien
ttcctgaatggcaaccaagccaagg

SEQ ID NO: 2221723 - DNA, 25 bp, Homo sapien
tcagagcaagtaccctatccgggag

SEQ ID NO: 2221724 - DNA, 25 bp, Homo sapien
ctgagatactcaggcgagcagcagc

SEQ ID NO: 2221725 - DNA, 25 bp, Homo sapien
tctgacaatcgagctcagtgaggga

SEQ ID NO: 2221726 - DNA, 25 bp, Homo sapien
ccttgcagtgttaactgactgtgca

SEQ ID NO: 2221727 - DNA, 25 bp, Homo sapien
gtctgaagtcaacctctgacaatcg

SEQ ID NO: 2221728 - DNA, 25 bp, Homo sapien
ccaagtggtcttgcacaaagggtcc

SEQ ID NO: 2221729 - DNA, 25 bp, Homo sapien
gaaatcagctctggaccaagcagac

SEQ ID NO: 2221730 - DNA, 25 bp, Homo sapien
gagctgagtttaagttctgaatatt

SEQ ID NO: 2221731 - DNA, 25 bp, Homo sapien
gtttaagttctgaatattcttgtta

SEQ ID NO: 2221732 - DNA, 25 bp, Homo sapien
gagtttaagttctgaatattcttgt

SEQ ID NO: 2221733 - DNA, 25 bp, Homo sapien
taagttctgaatattcttgttaatt

SEQ ID NO: 2221734 - DNA, 25 bp, Homo sapien
ctctaacatttaagtctgtaatcca

SEQ ID NO: 2221735 - DNA, 25 bp, Homo sapien
tagctctaacatttaagtctgtaat

SEQ ID NO: 2221736 - DNA, 25 bp, Homo sapien
gttttagctctaacatttaagtctg

SEQ ID NO: 2221737 - DNA, 25 bp, Homo sapien
tttagctctaacatttaagtctgta

SEQ ID NO: 2221738 - DNA, 25 bp, Homo sapien
tgggcatcttcagggttgtatggcc

SEQ ID NO: 2221739 - DNA, 25 bp, Homo sapien
ttgggcatcttcagggttgtatggc

SEQ ID NO: 2221740 - DNA, 25 bp, Homo sapien
gcatcttcagggttgtatggccgta

SEQ ID NO: 2221741 - DNA, 25 bp, Homo sapien
agattgggcatcttcagggttgtat

SEQ ID NO: 2221742 - DNA, 25 bp, Homo sapien
tctgggattatctccaaagacagcc

SEQ ID NO: 2221743 - DNA, 25 bp, Homo sapien
tttgcaggtaatgtgaaaaggctct

SEQ ID NO: 2221744 - DNA, 25 bp, Homo sapien
gctcttgtagttacagaatctggga

SEQ ID NO: 2221745 - DNA, 25 bp, Homo sapien
gaacatggtctaagtactggcgtcc

SEQ ID NO: 2221746 - DNA, 25 bp, Homo sapien
gatttcgagaaataagtcattcttc

SEQ ID NO: 2221747 - DNA, 25 bp, Homo sapien
gaagatgaagtattccgaatctaga

SEQ ID NO: 2221748 - DNA, 25 bp, Homo sapien
ccgaatctagatttcgagaaataag

SEQ ID NO: 2221749 - DNA, 25 bp, Homo sapien
aagtattccgaatctagatttcgag

SEQ ID NO: 2221750 - DNA, 25 bp, Homo sapien
caagttctgccactatagccatgga

SEQ ID NO: 2221751 - DNA, 25 bp, Homo sapien
cataaagatctcctgtctgtgtgga

SEQ ID NO: 2221752 - DNA, 25 bp, Homo sapien
tcaggcatggtaagatgacagacag

SEQ ID NO: 2221753 - DNA, 25 bp, Homo sapien
tatgcctagtagacagtatcaccct

SEQ ID NO: 2221754 - DNA, 25 bp, Homo sapien
atctgtgtttccactactaaggtat

SEQ ID NO: 2221755 - DNA, 25 bp, Homo sapien
aagattctgatatgtgttcagagac

SEQ ID NO: 2221756 - DNA, 25 bp, Homo sapien
gaagagtttagaagattctgatatg

SEQ ID NO: 2221757 - DNA, 25 bp, Homo sapien
agtcctgtgacattgttgtcagaca

SEQ ID NO: 2221758 - DNA, 25 bp, Homo sapien
ccggattcacctccatttgtgaatt

SEQ ID NO: 2221759 - DNA, 25 bp, Homo sapien
ttatgtattgctggaacaggctaca

SEQ ID NO: 2221760 - DNA, 25 bp, Homo sapien
tatgtattgctggaacaggctacag

SEQ ID NO: 2221761 - DNA, 25 bp, Homo sapien
ctctgcaaagtccgaagcagctgct

SEQ ID NO: 2221762 - DNA, 25 bp, Homo sapien
tgcaaagtccgaagcagctgcttgt

SEQ ID NO: 2221763 - DNA, 25 bp, Homo sapien
ttcctctaaggctgttatgcagata

SEQ ID NO: 2221764 - DNA, 25 bp, Homo sapien
cctctaaggctgttatgcagataga

SEQ ID NO: 2221765 - DNA, 25 bp, Homo sapien
tcctctaaggctgttatgcagatag

SEQ ID NO: 2221766 - DNA, 25 bp, Homo sapien
ttaagaatctcctgtatggctggtt

SEQ ID NO: 2221767 - DNA, 25 bp, Homo sapien
tatcataaagtggttagctagttcc

SEQ ID NO: 2221768 - DNA, 25 bp, Homo sapien
gaacatggatggagcccgggtaatt

SEQ ID NO: 2221769 - DNA, 25 bp, Homo sapien
tagtatcttgcaggcgttctccacc

SEQ ID NO: 2221770 - DNA, 25 bp, Homo sapien
cccttgggcccattagtcatgagca

SEQ ID NO: 2221771 - DNA, 25 bp, Homo sapien
agtttttgttggcataccaccacct

SEQ ID NO: 2221772 - DNA, 25 bp, Homo sapien
caggctgtcatagtgaatgacggcc

SEQ ID NO: 2221773 - DNA, 25 bp, Homo sapien
aatgacggcctccaaatgccaccgt

SEQ ID NO: 2221774 - DNA, 25 bp, Homo sapien
ctagtgcacataactggaaggtact

SEQ ID NO: 2221775 - DNA, 25 bp, Homo sapien
tctctgtggatagattgaatgtcac

SEQ ID NO: 2221776 - DNA, 25 bp, Homo sapien
gaaggtactacaatcccagacagtt

SEQ ID NO: 2221777 - DNA, 25 bp, Homo sapien
cataactggaaggtactacaatccc

SEQ ID NO: 2221778 - DNA, 25 bp, Homo sapien
ctcttggcaagggtttgtgggagat

SEQ ID NO: 2221779 - DNA, 25 bp, Homo sapien
cacattgcacttattttaaaattga

SEQ ID NO: 2221780 - DNA, 25 bp, Homo sapien
taaaacactcctcagcaaatgcaaa

SEQ ID NO: 2221781 - DNA, 25 bp, Homo sapien
cagcaaatgcaaaagaatagaaatc

SEQ ID NO: 2221782 - DNA, 25 bp, Homo sapien
ttaaaattgaccacataattggaag

SEQ ID NO: 2221783 - DNA, 25 bp, Homo sapien
cactgtaccatttcatgggtagtac

SEQ ID NO: 2221784 - DNA, 25 bp, Homo sapien
ctatctcttttcctagcatatgtta

SEQ ID NO: 2221785 - DNA, 25 bp, Homo sapien
tcgcataacagagcttaaacaattt

SEQ ID NO: 2221786 - DNA, 25 bp, Homo sapien
gttgccctagaattcacaatataca

SEQ ID NO: 2221787 - DNA, 25 bp, Homo sapien
tctcttatccttctgatgtttgcat

SEQ ID NO: 2221788 - DNA, 25 bp, Homo sapien
tatgtaaatgttgcacgttttgtaa

SEQ ID NO: 2221789 - DNA, 25 bp, Homo sapien
ttatgtaaatgttgcacgttttgta

SEQ ID NO: 2221790 - DNA, 25 bp, Homo sapien
cattatgtaaatgttgcacgttttg

SEQ ID NO: 2221791 - DNA, 25 bp, Homo sapien
gggccagttgcagaaggagcctctt

SEQ ID NO: 2221792 - DNA, 25 bp, Homo sapien
gcaatgacctcccatcagataaaaa

SEQ ID NO: 2221793 - DNA, 25 bp, Homo sapien
gggtaaatacctcatcagggccagt

SEQ ID NO: 2221794 - DNA, 25 bp, Homo sapien
tatcaccaagacaactaggccaatg

SEQ ID NO: 2221795 - DNA, 25 bp, Homo sapien
tgcattccaacaccattctccagga

SEQ ID NO: 2221796 - DNA, 25 bp, Homo sapien
cagctgcattccaacaccattctcc

SEQ ID NO: 2221797 - DNA, 25 bp, Homo sapien
ttcatgatattctcatctactccag

SEQ ID NO: 2221798 - DNA, 25 bp, Homo sapien
gctgcattccaacaccattctccag

SEQ ID NO: 2221799 - DNA, 25 bp, Homo sapien
cactgagatgcatatggagctgaat

SEQ ID NO: 2221800 - DNA, 25 bp, Homo sapien
ggaaagatgctgatgctcgccagac

SEQ ID NO: 2221801 - DNA, 25 bp, Homo sapien
gatgctcgccagacaggatcaaacc

SEQ ID NO: 2221802 - DNA, 25 bp, Homo sapien
tgtcgataaggagccatcaaaccac

SEQ ID NO: 2221803 - DNA, 25 bp, Homo sapien
tcccatctgcaagcctacaattcta

SEQ ID NO: 2221804 - DNA, 25 bp, Homo sapien
atttaattgtgttaacagagggctt

SEQ ID NO: 2221805 - DNA, 25 bp, Homo sapien
acagtacttagcacattcttctatt

SEQ ID NO: 2221806 - DNA, 25 bp, Homo sapien
tgtgttaacagagggctttggcctt

SEQ ID NO: 2221807 - DNA, 25 bp, Homo sapien
tcacactgaagacacagtcagagtc

SEQ ID NO: 2221808 - DNA, 25 bp, Homo sapien
gaggatatctctctatcttataggc

SEQ ID NO: 2221809 - DNA, 25 bp, Homo sapien
tcttataggctttgagagaaactcc

SEQ ID NO: 2221810 - DNA, 25 bp, Homo sapien
tggcagtgatggagcgcagtgccat

SEQ ID NO: 2221811 - DNA, 25 bp, Homo sapien
catgtataagctccctcctgaggat

SEQ ID NO: 2221812 - DNA, 25 bp, Homo sapien
cactccatttgtaagacaactggct

SEQ ID NO: 2221813 - DNA, 25 bp, Homo sapien
ctagtcttccactccatttgtaaga

SEQ ID NO: 2221814 - DNA, 25 bp, Homo sapien
tttactacctcatgggttgcctggg

SEQ ID NO: 2221815 - DNA, 25 bp, Homo sapien
cagtaggcaaatagacctgttgcag

SEQ ID NO: 2221816 - DNA, 25 bp, Homo sapien
taatcagtgcaacctttagcgacca

SEQ ID NO: 2221817 - DNA, 25 bp, Homo sapien
gaggtaatcagtgcaacctttagcg

SEQ ID NO: 2221818 - DNA, 25 bp, Homo sapien
cggctcaaagaggtaatcagtgcaa

SEQ ID NO: 2221819 - DNA, 25 bp, Homo sapien
ctcggctcaaagaggtaatcagtgc

SEQ ID NO: 2221820 - DNA, 25 bp, Homo sapien
actgggacactgcatagtgaagcta

SEQ ID NO: 2221821 - DNA, 25 bp, Homo sapien
agatccactgacaacttccactctg

SEQ ID NO: 2221822 - DNA, 25 bp, Homo sapien
gaaaaatccctattgtccaggcaga

SEQ ID NO: 2221823 - DNA, 25 bp, Homo sapien
tacaggggcagagccattatgcaga

SEQ ID NO: 2221824 - DNA, 25 bp, Homo sapien
tgtaaatggactaaattctccaatt

SEQ ID NO: 2221825 - DNA, 25 bp, Homo sapien
caactaacgagcaaaacaaccagct

SEQ ID NO: 2221826 - DNA, 25 bp, Homo sapien
aacatcataatgacaggatcaaatt

SEQ ID NO: 2221827 - DNA, 25 bp, Homo sapien
cacacataacaatattaactttaaa

SEQ ID NO: 2221828 - DNA, 25 bp, Homo sapien
gctagtgtgattagggtgagtttca

SEQ ID NO: 2221829 - DNA, 25 bp, Homo sapien
ttgggccgtagggaagagacaccac

SEQ ID NO: 2221830 - DNA, 25 bp, Homo sapien
tgaagaacaaacaggatttggtgag

SEQ ID NO: 2221831 - DNA, 25 bp, Homo sapien
aagaggctggctgatcatgatgttc

SEQ ID NO: 2221832 - DNA, 25 bp, Homo sapien
tcatagcgcccttgatttcaactcc

SEQ ID NO: 2221833 - DNA, 25 bp, Homo sapien
atagcgcccttgatttcaactcctc

SEQ ID NO: 2221834 - DNA, 25 bp, Homo sapien
tagcgcccttgatttcaactcctct

SEQ ID NO: 2221835 - DNA, 25 bp, Homo sapien
catagcgcccttgatttcaactcct

SEQ ID NO: 2221836 - DNA, 25 bp, Homo sapien
taaaatgtctgtcagacctctcatt

SEQ ID NO: 2221837 - DNA, 25 bp, Homo sapien
aaatgtctgtcagacctctcatttt

SEQ ID NO: 2221838 - DNA, 25 bp, Homo sapien
aaaatgtctgtcagacctctcattt

SEQ ID NO: 2221839 - DNA, 25 bp, Homo sapien
aatgtctgtcagacctctcattttt

SEQ ID NO: 2221840 - DNA, 25 bp, Homo sapien
gtgaaggtgtgtgcaacagtcgcta

SEQ ID NO: 2221841 - DNA, 25 bp, Homo sapien
aaggtgtgtgcaacagtcgctatca

SEQ ID NO: 2221842 - DNA, 25 bp, Homo sapien
ggtgtgtgcaacagtcgctatcaaa

SEQ ID NO: 2221843 - DNA, 25 bp, Homo sapien
tggtgaaggtgtgtgcaacagtcgc

SEQ ID NO: 2221844 - DNA, 25 bp, Homo sapien
gaaacaagggctactgggacagaat

SEQ ID NO: 2221845 - DNA, 25 bp, Homo sapien
gaaacttgatcactcctttgggact

SEQ ID NO: 2221846 - DNA, 25 bp, Homo sapien
tctatcaagtgtgggttggtagccc

SEQ ID NO: 2221847 - DNA, 25 bp, Homo sapien
gaggccaggtaataaggaagcttct

SEQ ID NO: 2221848 - DNA, 25 bp, Homo sapien
ctgtatgatttcagcagccaaagct

SEQ ID NO: 2221849 - DNA, 25 bp, Homo sapien
gctggatgatggactgaaacattac

SEQ ID NO: 2221850 - DNA, 25 bp, Homo sapien
acagcactttgaatggtgaaaacac

SEQ ID NO: 2221851 - DNA, 25 bp, Homo sapien
gaaacattactatacaactgggaca

SEQ ID NO: 2221852 - DNA, 25 bp, Homo sapien
taacagttggccagagtgtactgcc

SEQ ID NO: 2221853 - DNA, 25 bp, Homo sapien
gaaaagaagcgcatagaagccagtg

SEQ ID NO: 2221854 - DNA, 25 bp, Homo sapien
tccagtgatacctaaagcaaagccc

SEQ ID NO: 2221855 - DNA, 25 bp, Homo sapien
caataaagcaggagcccagtttcag

SEQ ID NO: 2221856 - DNA, 25 bp, Homo sapien
attgggggtggtgcacgctgtaatg

SEQ ID NO: 2221857 - DNA, 25 bp, Homo sapien
tgggaaggtcctggatttttgcttc

SEQ ID NO: 2221858 - DNA, 25 bp, Homo sapien
ggaaggtcctggatttttgcttctc

SEQ ID NO: 2221859 - DNA, 25 bp, Homo sapien
cttgggaaggtcctggatttttgct

SEQ ID NO: 2221860 - DNA, 25 bp, Homo sapien
tgttgcttgttgataagtcatttgt

SEQ ID NO: 2221861 - DNA, 25 bp, Homo sapien
tcctctcatatcaatctgctggtag

SEQ ID NO: 2221862 - DNA, 25 bp, Homo sapien
catgaggtgacccagtgttgcttgt

SEQ ID NO: 2221863 - DNA, 25 bp, Homo sapien
taagtattcgctgaacacagctgat

SEQ ID NO: 2221864 - DNA, 25 bp, Homo sapien
gccaggagattgcttgtgccacacc

SEQ ID NO: 2221865 - DNA, 25 bp, Homo sapien
ctcagagacatgctaccttcaggtg

SEQ ID NO: 2221866 - DNA, 25 bp, Homo sapien
tggacactatgggaagagactcctg

SEQ ID NO: 2221867 - DNA, 25 bp, Homo sapien
gaatatcacgtcagccacagtagga

SEQ ID NO: 2221868 - DNA, 25 bp, Homo sapien
catctgttgttttgtcaatacatca

SEQ ID NO: 2221869 - DNA, 25 bp, Homo sapien
taatgctaacgcctgtacttgggcc

SEQ ID NO: 2221870 - DNA, 25 bp, Homo sapien
ctggctggcttgtctacttaatgct

SEQ ID NO: 2221871 - DNA, 25 bp, Homo sapien
catcattgtagattgcttctcttcg

SEQ ID NO: 2221872 - DNA, 25 bp, Homo sapien
catccattttaccagtattttacta

SEQ ID NO: 2221873 - DNA, 25 bp, Homo sapien
gctgggttacggtttggcattatcc

SEQ ID NO: 2221874 - DNA, 25 bp, Homo sapien
tctctcttgtgccaacatctatgta

SEQ ID NO: 2221875 - DNA, 25 bp, Homo sapien
aaacatgatgcaaaacagggtacta

SEQ ID NO: 2221876 - DNA, 25 bp, Homo sapien
tatcctcaagaggttgaatcctcac

SEQ ID NO: 2221877 - DNA, 25 bp, Homo sapien
aattatatcctcaagaggttgaatc

SEQ ID NO: 2221878 - DNA, 25 bp, Homo sapien
tatatcctcaagaggttgaatcctc

SEQ ID NO: 2221879 - DNA, 25 bp, Homo sapien
ttatatcctcaagaggttgaatcct

SEQ ID NO: 2221880 - DNA, 25 bp, Homo sapien
cactgtttgttgcttctacaacttt

SEQ ID NO: 2221881 - DNA, 25 bp, Homo sapien
ggcacttgaaattgcctttaattca

SEQ ID NO: 2221882 - DNA, 25 bp, Homo sapien
tattcaggggtaatcttttggagaa

SEQ ID NO: 2221883 - DNA, 25 bp, Homo sapien
aaccctcaacaacaaggcacttgaa

SEQ ID NO: 2221884 - DNA, 25 bp, Homo sapien
tgatatttctgcatagggaaccctc

SEQ ID NO: 2221885 - DNA, 25 bp, Homo sapien
ttggtatgttgaaacgcatggtcag

SEQ ID NO: 2221886 - DNA, 25 bp, Homo sapien
tgattactcattgctgacagggctc

SEQ ID NO: 2221887 - DNA, 25 bp, Homo sapien
gaatataaggagtttgagagttgaa

SEQ ID NO: 2221888 - DNA, 25 bp, Homo sapien
gacagggctcccaaattgaaaggaa

SEQ ID NO: 2221889 - DNA, 25 bp, Homo sapien
gttctttatgtatctgaaggagctc

SEQ ID NO: 2221890 - DNA, 25 bp, Homo sapien
atctgaaggagctctgcaagtatgg

SEQ ID NO: 2221891 - DNA, 25 bp, Homo sapien
gaaggagctctgcaagtatggtatc

SEQ ID NO: 2221892 - DNA, 25 bp, Homo sapien
tcatggtatcctacaatgtgttctt

SEQ ID NO: 2221893 - DNA, 25 bp, Homo sapien
aaagaccatacaaatgacaggactc

SEQ ID NO: 2221894 - DNA, 25 bp, Homo sapien
gacaggactcaataaagtctactga

SEQ ID NO: 2221895 - DNA, 25 bp, Homo sapien
gagattacaacaggtataatccatt

SEQ ID NO: 2221896 - DNA, 25 bp, Homo sapien
aaattttgtagacataggatctcag

SEQ ID NO: 2221897 - DNA, 25 bp, Homo sapien
tagaaacttgctatcgaagctgact

SEQ ID NO: 2221898 - DNA, 25 bp, Homo sapien
tctctcacgccaatgtagaaacttg

SEQ ID NO: 2221899 - DNA, 25 bp, Homo sapien
tagatcaatctccaaagtccactgt

SEQ ID NO: 2221900 - DNA, 25 bp, Homo sapien
tccactgttactgaccaggcaggca

SEQ ID NO: 2221901 - DNA, 25 bp, Homo sapien
aagacacacttgtagcctataaaca

SEQ ID NO: 2221902 - DNA, 25 bp, Homo sapien
gaaaacgtttgcaatctatctatat

SEQ ID NO: 2221903 - DNA, 25 bp, Homo sapien
caaatctatgagaaagaaacaaccc

SEQ ID NO: 2221904 - DNA, 25 bp, Homo sapien
tatactgttggtgttcaaccattgt

SEQ ID NO: 2221905 - DNA, 25 bp, Homo sapien
gctagtcataggtgtgattatgtac

SEQ ID NO: 2221906 - DNA, 25 bp, Homo sapien
aaaacttggtcatgaaaacactagt

SEQ ID NO: 2221907 - DNA, 25 bp, Homo sapien
gaaggaaataaataaggccatctag

SEQ ID NO: 2221908 - DNA, 25 bp, Homo sapien
tatgtactacatagcctcgaacccc

SEQ ID NO: 2221909 - DNA, 25 bp, Homo sapien
gagctagtggctcttgtattgaaca

SEQ ID NO: 2221910 - DNA, 25 bp, Homo sapien
taatagtactctctgcaacgatgga

SEQ ID NO: 2221911 - DNA, 25 bp, Homo sapien
tgtttgcactatccaagacagtagc

SEQ ID NO: 2221912 - DNA, 25 bp, Homo sapien
gatcacaggctctggaatactgctc

SEQ ID NO: 2221913 - DNA, 25 bp, Homo sapien
cactttgctccttaatagttgggcg

SEQ ID NO: 2221914 - DNA, 25 bp, Homo sapien
agttgggcgatcctttactacaaag

SEQ ID NO: 2221915 - DNA, 25 bp, Homo sapien
taacaaacagaaacgaccaccacag

SEQ ID NO: 2221916 - DNA, 25 bp, Homo sapien
taatatcatctatagctcagagcta

SEQ ID NO: 2221917 - DNA, 25 bp, Homo sapien
caactcgaaaagacagtgactgctt

SEQ ID NO: 2221918 - DNA, 25 bp, Homo sapien
taagtctggctcaaaagtataaagt

SEQ ID NO: 2221919 - DNA, 25 bp, Homo sapien
ctttggcagcatgggagtatccctc

SEQ ID NO: 2221920 - DNA, 25 bp, Homo sapien
catagtaaaatgacgctccacctgc

SEQ ID NO: 2221921 - DNA, 25 bp, Homo sapien
tagtttgtccaaagcgataaactct

SEQ ID NO: 2221922 - DNA, 25 bp, Homo sapien
caagaagcgtcgaatataattactc

SEQ ID NO: 2221923 - DNA, 25 bp, Homo sapien
gaacctatatacataaacaggctta

SEQ ID NO: 2221924 - DNA, 25 bp, Homo sapien
tctggatgtcataagatggattcca

SEQ ID NO: 2221925 - DNA, 25 bp, Homo sapien
tcaggatgataatacatatgcccag

SEQ ID NO: 2221926 - DNA, 25 bp, Homo sapien
actatcaagagttcagagaattcat

SEQ ID NO: 2221927 - DNA, 25 bp, Homo sapien
gagaattcatttcttacttactgaa

SEQ ID NO: 2221928 - DNA, 25 bp, Homo sapien
cctgaaagtctatattgtattgggt

SEQ ID NO: 2221929 - DNA, 25 bp, Homo sapien
tgcctgtgcttgtggtaaattacta

SEQ ID NO: 2221930 - DNA, 25 bp, Homo sapien
tatactgggaaaacgaatgaggaaa

SEQ ID NO: 2221931 - DNA, 25 bp, Homo sapien
cacagtattcaagtggcttacaaat

SEQ ID NO: 2221932 - DNA, 25 bp, Homo sapien
gccaggatttacaatatttctacag

SEQ ID NO: 2221933 - DNA, 25 bp, Homo sapien
tgaagaccatgtagggaaacaatac

SEQ ID NO: 2221934 - DNA, 25 bp, Homo sapien
cctagattggttgctgaagaactcc

SEQ ID NO: 2221935 - DNA, 25 bp, Homo sapien
gttataacaaggcactaccagggtg

SEQ ID NO: 2221936 - DNA, 25 bp, Homo sapien
cagacaagtctgatttcacaaggtc

SEQ ID NO: 2221937 - DNA, 25 bp, Homo sapien
agtggaaccatctaaacggtaatag

SEQ ID NO: 2221938 - DNA, 25 bp, Homo sapien
acggtaatagtcaatgtttcgaagc

SEQ ID NO: 2221939 - DNA, 25 bp, Homo sapien
ccatctaaacggtaatagtcaatgt

SEQ ID NO: 2221940 - DNA, 25 bp, Homo sapien
atagtcaatgtttcgaagccacttc

SEQ ID NO: 2221941 - DNA, 25 bp, Homo sapien
aaaactacctataagaagagcccag

SEQ ID NO: 2221942 - DNA, 25 bp, Homo sapien
aaataattaagctcaatgctttaca

SEQ ID NO: 2221943 - DNA, 25 bp, Homo sapien
taagaagagcccaggccaagatggc

SEQ ID NO: 2221944 - DNA, 25 bp, Homo sapien
tccctaaggattagtgatgctagac

SEQ ID NO: 2221945 - DNA, 25 bp, Homo sapien
caagtccagagatatgagggactgg

SEQ ID NO: 2221946 - DNA, 25 bp, Homo sapien
aatcaagtccagagatatgagggac

SEQ ID NO: 2221947 - DNA, 25 bp, Homo sapien
ctccctactagctaattcaagaaaa

SEQ ID NO: 2221948 - DNA, 25 bp, Homo sapien
tgtcttctccctactagctaattca

SEQ ID NO: 2221949 - DNA, 25 bp, Homo sapien
aagtaccattttcccagaatgctct

SEQ ID NO: 2221950 - DNA, 25 bp, Homo sapien
gaatgctctaaaacctcagcatcag

SEQ ID NO: 2221951 - DNA, 25 bp, Homo sapien
tctgtaacaaaatctttgtaccagt

SEQ ID NO: 2221952 - DNA, 25 bp, Homo sapien
taacaaaatctttgtaccagtctgg

SEQ ID NO: 2221953 - DNA, 25 bp, Homo sapien
tgtgctactaggatctggaaaccgc

SEQ ID NO: 2221954 - DNA, 25 bp, Homo sapien
tctccaacttatagagggctcgaag

SEQ ID NO: 2221955 - DNA, 25 bp, Homo sapien
cataaagtatgtgaggtgaaggcca

SEQ ID NO: 2221956 - DNA, 25 bp, Homo sapien
caagtgtaagagacaaaccctcggg

SEQ ID NO: 2221957 - DNA, 25 bp, Homo sapien
ccatttaggcttatcagttccctcc

SEQ ID NO: 2221958 - DNA, 25 bp, Homo sapien
tcaatttaccatttaggcttatcag

SEQ ID NO: 2221959 - DNA, 25 bp, Homo sapien
tatcagttccctccttatgtctggg

SEQ ID NO: 2221960 - DNA, 25 bp, Homo sapien
cctccttatgtctgggcatatagta

SEQ ID NO: 2221961 - DNA, 25 bp, Homo sapien
tactcatttacggaggcaaaccagc

SEQ ID NO: 2221962 - DNA, 25 bp, Homo sapien
ggaggcagactagccccttaatact

SEQ ID NO: 2221963 - DNA, 25 bp, Homo sapien
cgagacagctactacaaaaggatta

SEQ ID NO: 2221964 - DNA, 25 bp, Homo sapien
atgagaccgatgtgctgcctactgc

SEQ ID NO: 2221965 - DNA, 25 bp, Homo sapien
caccacctccccgagatcttgaatt

SEQ ID NO: 2221966 - DNA, 25 bp, Homo sapien
gaattccagaccttaatcacttcaa

SEQ ID NO: 2221967 - DNA, 25 bp, Homo sapien
actgccacttccacttgagctacta

SEQ ID NO: 2221968 - DNA, 25 bp, Homo sapien
cacttgagctactatcttttttccc

SEQ ID NO: 2221969 - DNA, 25 bp, Homo sapien
gtataatcatcggagcttaaactca

SEQ ID NO: 2221970 - DNA, 25 bp, Homo sapien
tttgtataatcatcggagcttaaac

SEQ ID NO: 2221971 - DNA, 25 bp, Homo sapien
taatcatcggagcttaaactcatgg

SEQ ID NO: 2221972 - DNA, 25 bp, Homo sapien
catcggagcttaaactcatggaggt

SEQ ID NO: 2221973 - DNA, 25 bp, Homo sapien
accaaggatgagtccatattctact

SEQ ID NO: 2221974 - DNA, 25 bp, Homo sapien
ctttgctaatgtagtctagctgcaa

SEQ ID NO: 2221975 - DNA, 25 bp, Homo sapien
aacaccaaggatgagtccatattct

SEQ ID NO: 2221976 - DNA, 25 bp, Homo sapien
tttctttgctaatgtagtctagctg

SEQ ID NO: 2221977 - DNA, 25 bp, Homo sapien
ttccaccttcactattattgcccac

SEQ ID NO: 2221978 - DNA, 25 bp, Homo sapien
cttccaccttcactattattgccca

SEQ ID NO: 2221979 - DNA, 25 bp, Homo sapien
ccaccttcactattattgcccacac

SEQ ID NO: 2221980 - DNA, 25 bp, Homo sapien
tccaccttcactattattgcccaca

SEQ ID NO: 2221981 - DNA, 25 bp, Homo sapien
gacacaaaaattgtctatatcaacc

SEQ ID NO: 2221982 - DNA, 25 bp, Homo sapien
tcaaccaagtttctagattaggagt

SEQ ID NO: 2221983 - DNA, 25 bp, Homo sapien
ttttggcagtgtagagaagcttata

SEQ ID NO: 2221984 - DNA, 25 bp, Homo sapien
tacttgtgacataaacacttttggc

SEQ ID NO: 2221985 - DNA, 25 bp, Homo sapien
aatcccacagctggatatatactca

SEQ ID NO: 2221986 - DNA, 25 bp, Homo sapien
aagacagacaaacgctggcgaggag

SEQ ID NO: 2221987 - DNA, 25 bp, Homo sapien
aaagacagacaaacgctggcgagga

SEQ ID NO: 2221988 - DNA, 25 bp, Homo sapien
ccacagctggatatatactcagaag

SEQ ID NO: 2221989 - DNA, 25 bp, Homo sapien
tacagttgacccttgcgcaccaaag

SEQ ID NO: 2221990 - DNA, 25 bp, Homo sapien
tttcatatatgcaggttctgcggga

SEQ ID NO: 2221991 - DNA, 25 bp, Homo sapien
aaccacacgggtccacttatacaga

SEQ ID NO: 2221992 - DNA, 25 bp, Homo sapien
tatacacaggcaggtcctagaacca

SEQ ID NO: 2221993 - DNA, 25 bp, Homo sapien
gagaaacaaactcatgaatttaact

SEQ ID NO: 2221994 - DNA, 25 bp, Homo sapien
ttttaggcatactacatgccttgcc

SEQ ID NO: 2221995 - DNA, 25 bp, Homo sapien
tcttcataacaaaagcacccagaaa

SEQ ID NO: 2221996 - DNA, 25 bp, Homo sapien
cattattcatatgtgctgtatatct

SEQ ID NO: 2221997 - DNA, 25 bp, Homo sapien
acatattcgtgttttggaggcaaga

SEQ ID NO: 2221998 - DNA, 25 bp, Homo sapien
taagtagtactgatagagcttgcac

SEQ ID NO: 2221999 - DNA, 25 bp, Homo sapien
cactgaatagaagtcattctcacag

SEQ ID NO: 2222000 - DNA, 25 bp, Homo sapien
gaagtcattctcacagctaacacat

SEQ ID NO: 2222001 - DNA, 25 bp, Homo sapien
gcataatcttagctccttgcagtct

SEQ ID NO: 2222002 - DNA, 25 bp, Homo sapien
ccaagtgacagagactataggtgcg

SEQ ID NO: 2222003 - DNA, 25 bp, Homo sapien
aaaacatctttgaggctatcatcag

SEQ ID NO: 2222004 - DNA, 25 bp, Homo sapien
tctccaggattactttaaaagtggc

SEQ ID NO: 2222005 - DNA, 25 bp, Homo sapien
tatgtaaacgacaccactagtctgt

SEQ ID NO: 2222006 - DNA, 25 bp, Homo sapien
tatatccaaccaaaagaatagcctg

SEQ ID NO: 2222007 - DNA, 25 bp, Homo sapien
tattcctgaactccttaatggatcc

SEQ ID NO: 2222008 - DNA, 25 bp, Homo sapien
gaatgtgagcacgttttttcatcac

SEQ ID NO: 2222009 - DNA, 25 bp, Homo sapien
gaacacatccagctaacatctcata

SEQ ID NO: 2222010 - DNA, 25 bp, Homo sapien
taccatggtagaatctgcacactga

SEQ ID NO: 2222011 - DNA, 25 bp, Homo sapien
ttaaaataatcctcctccttgatcg

SEQ ID NO: 2222012 - DNA, 25 bp, Homo sapien
tagaattcatagctttagaaacagc

SEQ ID NO: 2222013 - DNA, 25 bp, Homo sapien
tcctccttgatcgtatagaattcat

SEQ ID NO: 2222014 - DNA, 25 bp, Homo sapien
attttttagaatatggccttcatca

SEQ ID NO: 2222015 - DNA, 25 bp, Homo sapien
gaacagctggcgacattaagggtga

SEQ ID NO: 2222016 - DNA, 25 bp, Homo sapien
tattaacctttcatactgatggccc

SEQ ID NO: 2222017 - DNA, 25 bp, Homo sapien
cacctaatatttggatagctggaag

SEQ ID NO: 2222018 - DNA, 25 bp, Homo sapien
cttaaaaggagataagcaagcagca

SEQ ID NO: 2222019 - DNA, 25 bp, Homo sapien
atgtagcttctctcctgaggacgtt

SEQ ID NO: 2222020 - DNA, 25 bp, Homo sapien
tcctgaggacgtttcacagttgcta

SEQ ID NO: 2222021 - DNA, 25 bp, Homo sapien
gcctatgatcataacaccaccatct

SEQ ID NO: 2222022 - DNA, 25 bp, Homo sapien
ctatacatctcatagcctatgatca

SEQ ID NO: 2222023 - DNA, 25 bp, Homo sapien
aaatagtttactatatgaatttcat

SEQ ID NO: 2222024 - DNA, 25 bp, Homo sapien
tagtttactatatgaatttcatgtg

SEQ ID NO: 2222025 - DNA, 25 bp, Homo sapien
gctactaaaaacatgtgaatattaa

SEQ ID NO: 2222026 - DNA, 25 bp, Homo sapien
tattaaatattcccactgaaatatg

SEQ ID NO: 2222027 - DNA, 25 bp, Homo sapien
atcttttaatccctcttgccacttc

SEQ ID NO: 2222028 - DNA, 25 bp, Homo sapien
tcaaagcagtattaagaggacaaac

SEQ ID NO: 2222029 - DNA, 25 bp, Homo sapien
ggacaaaccactaacgccgtgctga

SEQ ID NO: 2222030 - DNA, 25 bp, Homo sapien
aaatccagtttgtcacacaaaagaa

SEQ ID NO: 2222031 - DNA, 25 bp, Homo sapien
ttgtcaccttcgtttaaatatccac

SEQ ID NO: 2222032 - DNA, 25 bp, Homo sapien
ttaagcaatcttacaatattatagc

SEQ ID NO: 2222033 - DNA, 25 bp, Homo sapien
tcaccttcgtttaaatatccacaaa

SEQ ID NO: 2222034 - DNA, 25 bp, Homo sapien
attaagcaatcttacaatattatag

SEQ ID NO: 2222035 - DNA, 25 bp, Homo sapien
tagaatataagctccttggagacag

SEQ ID NO: 2222036 - DNA, 25 bp, Homo sapien
gcctgaaacataatagaatccaata

SEQ ID NO: 2222037 - DNA, 25 bp, Homo sapien
gctttatcttcagcccctacgactg

SEQ ID NO: 2222038 - DNA, 25 bp, Homo sapien
atccacaaaaacaggataccttcat

SEQ ID NO: 2222039 - DNA, 25 bp, Homo sapien
atgcatcctgaacctggagatttct

SEQ ID NO: 2222040 - DNA, 25 bp, Homo sapien
agtgggcaagaatgcatcctgaacc

SEQ ID NO: 2222041 - DNA, 25 bp, Homo sapien
cttaccaaggcccatacagtgggca

SEQ ID NO: 2222042 - DNA, 25 bp, Homo sapien
cacagactcacagcagcaatcccac

SEQ ID NO: 2222043 - DNA, 25 bp, Homo sapien
tgaacctgcactaaaggttctttgg

SEQ ID NO: 2222044 - DNA, 25 bp, Homo sapien
accaacttggttgttattggacact

SEQ ID NO: 2222045 - DNA, 25 bp, Homo sapien
atatttctatgaacctgcactaaag

SEQ ID NO: 2222046 - DNA, 25 bp, Homo sapien
acacttggtgggtgaagcatcttca

SEQ ID NO: 2222047 - DNA, 25 bp, Homo sapien
acgctccctctcagcaatacgtttt

SEQ ID NO: 2222048 - DNA, 25 bp, Homo sapien
agaatcttccgaattttctttctgc

SEQ ID NO: 2222049 - DNA, 25 bp, Homo sapien
caatttttctcgctcacgctccctc

SEQ ID NO: 2222050 - DNA, 25 bp, Homo sapien
agcaatacgttttcgtctctcttcc

SEQ ID NO: 2222051 - DNA, 25 bp, Homo sapien
ctgtttatagctccgctgattttct

SEQ ID NO: 2222052 - DNA, 25 bp, Homo sapien
tctgtttatagctccgctgattttc

SEQ ID NO: 2222053 - DNA, 25 bp, Homo sapien
tttctgtttatagctccgctgattt

SEQ ID NO: 2222054 - DNA, 25 bp, Homo sapien
tttatagctccgctgattttcttcc

SEQ ID NO: 2222055 - DNA, 25 bp, Homo sapien
catcttcggattcactaacttcttc

SEQ ID NO: 2222056 - DNA, 25 bp, Homo sapien
gttctgggccgctgttcatcttcgg

SEQ ID NO: 2222057 - DNA, 25 bp, Homo sapien
taactcctgattcctgaaaatcaga

SEQ ID NO: 2222058 - DNA, 25 bp, Homo sapien
tcactaacttcttcactaactcctg

SEQ ID NO: 2222059 - DNA, 25 bp, Homo sapien
cacagtcaatttgtgccgcaaaagc

SEQ ID NO: 2222060 - DNA, 25 bp, Homo sapien
tgtgccgcaaaagcctatgtctgta

SEQ ID NO: 2222061 - DNA, 25 bp, Homo sapien
tcactcacagtcaatttgtgccgca

SEQ ID NO: 2222062 - DNA, 25 bp, Homo sapien
gattctccgtcactcacagtcaatt

SEQ ID NO: 2222063 - DNA, 25 bp, Homo sapien
ctcatcagaggaaagattggcttta

SEQ ID NO: 2222064 - DNA, 25 bp, Homo sapien
catcagaggaaagattggctttaat

SEQ ID NO: 2222065 - DNA, 25 bp, Homo sapien
tcctcatcagaggaaagattggctt

SEQ ID NO: 2222066 - DNA, 25 bp, Homo sapien
cagaggaaagattggctttaatttc

SEQ ID NO: 2222067 - DNA, 25 bp, Homo sapien
ggagtcacgggccacagagacttca

SEQ ID NO: 2222068 - DNA, 25 bp, Homo sapien
atcatcacttgagaaccagctgagg

SEQ ID NO: 2222069 - DNA, 25 bp, Homo sapien
ggccacagagacttcaaggatatca

SEQ ID NO: 2222070 - DNA, 25 bp, Homo sapien
cacttgagaaccagctgaggctggc

SEQ ID NO: 2222071 - DNA, 25 bp, Homo sapien
tagcatccaaagcagtcacgactct

SEQ ID NO: 2222072 - DNA, 25 bp, Homo sapien
gctcaatattacatcttggggcagg

SEQ ID NO: 2222073 - DNA, 25 bp, Homo sapien
attagaggcacaggccgtgccactc

SEQ ID NO: 2222074 - DNA, 25 bp, Homo sapien
agtaatggagccactcctccatttt

SEQ ID NO: 2222075 - DNA, 25 bp, Homo sapien
taaaaataagtgtatttcgcatatt

SEQ ID NO: 2222076 - DNA, 25 bp, Homo sapien
aatctcaacctggagtgagggaggc

SEQ ID NO: 2222077 - DNA, 25 bp, Homo sapien
tgcaagaactcaagctttaattttt

SEQ ID NO: 2222078 - DNA, 25 bp, Homo sapien
tatgtatttagaaatgcaagaactc

SEQ ID NO: 2222079 - DNA, 25 bp, Homo sapien
tatctactggctggacacctgtgtt

SEQ ID NO: 2222080 - DNA, 25 bp, Homo sapien
tcctgactgggaattctagtagaaa

SEQ ID NO: 2222081 - DNA, 25 bp, Homo sapien
ccatagaaggacaaaggtcaccact

SEQ ID NO: 2222082 - DNA, 25 bp, Homo sapien
ggtcaccactacacatcatatgtct

SEQ ID NO: 2222083 - DNA, 25 bp, Homo sapien
tacagagagatacgatcaggtaact

SEQ ID NO: 2222084 - DNA, 25 bp, Homo sapien
taaaaaagtaggcaagcagaatctg

SEQ ID NO: 2222085 - DNA, 25 bp, Homo sapien
taaaatacttgccagttacagagag

SEQ ID NO: 2222086 - DNA, 25 bp, Homo sapien
gaaagtatttgtatccccatcatga

SEQ ID NO: 2222087 - DNA, 25 bp, Homo sapien
ccatgcctagggtgtgttataatct

SEQ ID NO: 2222088 - DNA, 25 bp, Homo sapien
actgtgagcgagtctttctaaggca

SEQ ID NO: 2222089 - DNA, 25 bp, Homo sapien
tacaacctgcttgctgttccgttgc

SEQ ID NO: 2222090 - DNA, 25 bp, Homo sapien
gcactcctggtttttacaacctgct

SEQ ID NO: 2222091 - DNA, 25 bp, Homo sapien
ctattctcaggatcattgtcgtcat

SEQ ID NO: 2222092 - DNA, 25 bp, Homo sapien
cactgatttagataaggcttcatct

SEQ ID NO: 2222093 - DNA, 25 bp, Homo sapien
cactgtgacaggcactgatttagat

SEQ ID NO: 2222094 - DNA, 25 bp, Homo sapien
ttctcaggatcattgtcgtcatcat

SEQ ID NO: 2222095 - DNA, 25 bp, Homo sapien
gcttccctcacctatagaattctga

SEQ ID NO: 2222096 - DNA, 25 bp, Homo sapien
tgtgaagacagcactaaattttcag

SEQ ID NO: 2222097 - DNA, 25 bp, Homo sapien
ccttttagtgcttgttcttagggag

SEQ ID NO: 2222098 - DNA, 25 bp, Homo sapien
gaggatgtaatgtcagcttgcttcc

SEQ ID NO: 2222099 - DNA, 25 bp, Homo sapien
tcagaagtttcatcgctctggtctt

SEQ ID NO: 2222100 - DNA, 25 bp, Homo sapien
ttgaactctttccaagcaacttgca

SEQ ID NO: 2222101 - DNA, 25 bp, Homo sapien
gacaaatttcttctcgctcaggtaa

SEQ ID NO: 2222102 - DNA, 25 bp, Homo sapien
tctgaagagtcacaactatctcctt

SEQ ID NO: 2222103 - DNA, 25 bp, Homo sapien
gcttcttaggaagtcgatctcttaa

SEQ ID NO: 2222104 - DNA, 25 bp, Homo sapien
tggtcgtgtctttatcaactgtgcc

SEQ ID NO: 2222105 - DNA, 25 bp, Homo sapien
ccatcagtggaagcacttgcttgct

SEQ ID NO: 2222106 - DNA, 25 bp, Homo sapien
gaaagcttatcgacaccatcagtgg

SEQ ID NO: 2222107 - DNA, 25 bp, Homo sapien
caaatttttgtgcccttgattatcc

SEQ ID NO: 2222108 - DNA, 25 bp, Homo sapien
aatttttgtgcccttgattatccat

SEQ ID NO: 2222109 - DNA, 25 bp, Homo sapien
aaatttttgtgcccttgattatcca

SEQ ID NO: 2222110 - DNA, 25 bp, Homo sapien
caattttactcatgctctttatctc

SEQ ID NO: 2222111 - DNA, 25 bp, Homo sapien
ccaattttactcatgctctttatct

SEQ ID NO: 2222112 - DNA, 25 bp, Homo sapien
ttttactcatgctctttatctcttt

SEQ ID NO: 2222113 - DNA, 25 bp, Homo sapien
aattttactcatgctctttatctct

SEQ ID NO: 2222114 - DNA, 25 bp, Homo sapien
tcaaaatctgagccagatgtagaac

SEQ ID NO: 2222115 - DNA, 25 bp, Homo sapien
cctttatcatctttccccgcctgag

SEQ ID NO: 2222116 - DNA, 25 bp, Homo sapien
tttatcatctttccccgcctgagtc

SEQ ID NO: 2222117 - DNA, 25 bp, Homo sapien
catctttccccgcctgagtctttaa

SEQ ID NO: 2222118 - DNA, 25 bp, Homo sapien
tttccccgcctgagtctttaaatca

SEQ ID NO: 2222119 - DNA, 25 bp, Homo sapien
atcagtatctgaagaagaactgtga

SEQ ID NO: 2222120 - DNA, 25 bp, Homo sapien
gaatttcattaatatcagtatctga

SEQ ID NO: 2222121 - DNA, 25 bp, Homo sapien
tgaagaagaactgtgactcatcctg

SEQ ID NO: 2222122 - DNA, 25 bp, Homo sapien
aagaactgtgactcatcctgctcac

SEQ ID NO: 2222123 - DNA, 25 bp, Homo sapien
tagtttctgtcggtcgcctcaaggg

SEQ ID NO: 2222124 - DNA, 25 bp, Homo sapien
cactgtcagaagaattacgcttatc

SEQ ID NO: 2222125 - DNA, 25 bp, Homo sapien
cagtctctgattgcttagattttgg

SEQ ID NO: 2222126 - DNA, 25 bp, Homo sapien
gatcttcgaagatcagattcctcta

SEQ ID NO: 2222127 - DNA, 25 bp, Homo sapien
acttccatagcagtctcaagattct

SEQ ID NO: 2222128 - DNA, 25 bp, Homo sapien
caggagtgagtttaacatataattc

SEQ ID NO: 2222129 - DNA, 25 bp, Homo sapien
tcttcagaagtgttggcaggttcat

SEQ ID NO: 2222130 - DNA, 25 bp, Homo sapien
tacctcctctgttgtcttttgaaga

SEQ ID NO: 2222131 - DNA, 25 bp, Homo sapien
gctcactatctacctgttttcttga

SEQ ID NO: 2222132 - DNA, 25 bp, Homo sapien
acattctgatgcatgtgctcactat

SEQ ID NO: 2222133 - DNA, 25 bp, Homo sapien
gcatgtgctcactatctacctgttt

SEQ ID NO: 2222134 - DNA, 25 bp, Homo sapien
tctgatgcatgtgctcactatctac

SEQ ID NO: 2222135 - DNA, 25 bp, Homo sapien
tgtggacaactcctttcgaccaagg

SEQ ID NO: 2222136 - DNA, 25 bp, Homo sapien
cagcatccatcgctcgaaactcgga

SEQ ID NO: 2222137 - DNA, 25 bp, Homo sapien
tcgaccaaggttgcgtagaatgcat

SEQ ID NO: 2222138 - DNA, 25 bp, Homo sapien
tacgctgttacatgcagtgaccaag

SEQ ID NO: 2222139 - DNA, 25 bp, Homo sapien
gagtcacggctaatatcatcactca

SEQ ID NO: 2222140 - DNA, 25 bp, Homo sapien
ccattccatctgagtcacggctaat

SEQ ID NO: 2222141 - DNA, 25 bp, Homo sapien
tctgagtcacggctaatatcatcac

SEQ ID NO: 2222142 - DNA, 25 bp, Homo sapien
tccatctgagtcacggctaatatca

SEQ ID NO: 2222143 - DNA, 25 bp, Homo sapien
agataggcccctggctgaactgaat

SEQ ID NO: 2222144 - DNA, 25 bp, Homo sapien
tagataggcccctggctgaactgaa

SEQ ID NO: 2222145 - DNA, 25 bp, Homo sapien
ctagataggcccctggctgaactga

SEQ ID NO: 2222146 - DNA, 25 bp, Homo sapien
cctagataggcccctggctgaactg

SEQ ID NO: 2222147 - DNA, 25 bp, Homo sapien
agcagtgcagctcacaatcccatga

SEQ ID NO: 2222148 - DNA, 25 bp, Homo sapien
tttgaaaatgattgacctgttgtcc

SEQ ID NO: 2222149 - DNA, 25 bp, Homo sapien
caatgaagggtgtctataaatggaa

SEQ ID NO: 2222150 - DNA, 25 bp, Homo sapien
gaacttgcaatgaagggtgtctata

SEQ ID NO: 2222151 - DNA, 25 bp, Homo sapien
aagtatcttctatgtgctttggtgc

SEQ ID NO: 2222152 - DNA, 25 bp, Homo sapien
catacatcgctcaagaattaaacaa

SEQ ID NO: 2222153 - DNA, 25 bp, Homo sapien
gctttggtgcatacatcgctcaaga

SEQ ID NO: 2222154 - DNA, 25 bp, Homo sapien
agtatcttctatgtgctttggtgca

SEQ ID NO: 2222155 - DNA, 25 bp, Homo sapien
tctgcttctaaattcaggcccttta

SEQ ID NO: 2222156 - DNA, 25 bp, Homo sapien
cttctgcttctaaattcaggccctt

SEQ ID NO: 2222157 - DNA, 25 bp, Homo sapien
tacttctgcttctaaattcaggccc

SEQ ID NO: 2222158 - DNA, 25 bp, Homo sapien
tttacttctgcttctaaattcaggc

SEQ ID NO: 2222159 - DNA, 25 bp, Homo sapien
attttcattagacgcatcttcattt

SEQ ID NO: 2222160 - DNA, 25 bp, Homo sapien
catctgattctacatactttgttac

SEQ ID NO: 2222161 - DNA, 25 bp, Homo sapien
ttcattagacgcatcttcatttaca

SEQ ID NO: 2222162 - DNA, 25 bp, Homo sapien
tgatcgtgacgatcctgaagacttg

SEQ ID NO: 2222163 - DNA, 25 bp, Homo sapien
ctttgatcgtgacgatcctgaagac

SEQ ID NO: 2222164 - DNA, 25 bp, Homo sapien
ttgatcgtgacgatcctgaagactt

SEQ ID NO: 2222165 - DNA, 25 bp, Homo sapien
ctctttgatcgtgacgatcctgaag

SEQ ID NO: 2222166 - DNA, 25 bp, Homo sapien
aatatattttactggattcagtttt

SEQ ID NO: 2222167 - DNA, 25 bp, Homo sapien
gccagtataatcaatatattttact

SEQ ID NO: 2222168 - DNA, 25 bp, Homo sapien
atcaatatattttactggattcagt

SEQ ID NO: 2222169 - DNA, 25 bp, Homo sapien
ttgccagtataatcaatatatttta

SEQ ID NO: 2222170 - DNA, 25 bp, Homo sapien
ttccatcatatcagagttacttcca

SEQ ID NO: 2222171 - DNA, 25 bp, Homo sapien
catcatatcagagttacttccagaa

SEQ ID NO: 2222172 - DNA, 25 bp, Homo sapien
ccatcatatcagagttacttccaga

SEQ ID NO: 2222173 - DNA, 25 bp, Homo sapien
tccatcatatcagagttacttccag

SEQ ID NO: 2222174 - DNA, 25 bp, Homo sapien
ctgtgttttgattcattgcaagtcg

SEQ ID NO: 2222175 - DNA, 25 bp, Homo sapien
tcattgcaagtcgtggaggagaact

SEQ ID NO: 2222176 - DNA, 25 bp, Homo sapien
tgattcattgcaagtcgtggaggag

SEQ ID NO: 2222177 - DNA, 25 bp, Homo sapien
aagtcgtggaggagaacttgtttct

SEQ ID NO: 2222178 - DNA, 25 bp, Homo sapien
gagtgtgcaaggaagtcatgaagct

SEQ ID NO: 2222179 - DNA, 25 bp, Homo sapien
tgagtgtgcaaggaagtcatgaagc

SEQ ID NO: 2222180 - DNA, 25 bp, Homo sapien
ctgatgagtgtgcaaggaagtcatg

SEQ ID NO: 2222181 - DNA, 25 bp, Homo sapien
tgcaccaatgtattcaacttgcttt

SEQ ID NO: 2222182 - DNA, 25 bp, Homo sapien
gcaccaatgtattcaacttgctttc

SEQ ID NO: 2222183 - DNA, 25 bp, Homo sapien
ctgcaccaatgtattcaacttgctt

SEQ ID NO: 2222184 - DNA, 25 bp, Homo sapien
caccaatgtattcaacttgctttca

SEQ ID NO: 2222185 - DNA, 25 bp, Homo sapien
tgcgtgtgtttccagtttcaaaatc

SEQ ID NO: 2222186 - DNA, 25 bp, Homo sapien
gcgtgtgtttccagtttcaaaatca

SEQ ID NO: 2222187 - DNA, 25 bp, Homo sapien
tgtgcgtgtgtttccagtttcaaaa

SEQ ID NO: 2222188 - DNA, 25 bp, Homo sapien
atgtgcgtgtgtttccagtttcaaa

SEQ ID NO: 2222189 - DNA, 25 bp, Homo sapien
aagctaagatatccataaaagcact

SEQ ID NO: 2222190 - DNA, 25 bp, Homo sapien
taaatggacgaaggataagctaaga

SEQ ID NO: 2222191 - DNA, 25 bp, Homo sapien
ttacaggcatgttcccgactaaaac

SEQ ID NO: 2222192 - DNA, 25 bp, Homo sapien
ccataaaagcactttcaggtaatac

SEQ ID NO: 2222193 - DNA, 25 bp, Homo sapien
ccaagcagtacacatgaacccaatt

SEQ ID NO: 2222194 - DNA, 25 bp, Homo sapien
ttatagccgggtagtattccatcat

SEQ ID NO: 2222195 - DNA, 25 bp, Homo sapien
catctcccaagcagtacacatgaac

SEQ ID NO: 2222196 - DNA, 25 bp, Homo sapien
ttcattcttatagccgggtagtatt

SEQ ID NO: 2222197 - DNA, 25 bp, Homo sapien
tgttccacagaaccactttaagtag

SEQ ID NO: 2222198 - DNA, 25 bp, Homo sapien
taatcaagacaggtagagtagttca

SEQ ID NO: 2222199 - DNA, 25 bp, Homo sapien
tagcggaaacctcatctgggtggac

SEQ ID NO: 2222200 - DNA, 25 bp, Homo sapien
tagaccaactaagaagaaaaggcag

SEQ ID NO: 2222201 - DNA, 25 bp, Homo sapien
gattccatatctttaatcttgtgaa

SEQ ID NO: 2222202 - DNA, 25 bp, Homo sapien
cagtagccactactcaattttgagg

SEQ ID NO: 2222203 - DNA, 25 bp, Homo sapien
caatcaacatacaaatgtaggtatc

SEQ ID NO: 2222204 - DNA, 25 bp, Homo sapien
ccactactcaattttgaggaagcac

SEQ ID NO: 2222205 - DNA, 25 bp, Homo sapien
tccagccgtggacatgagacatccc

SEQ ID NO: 2222206 - DNA, 25 bp, Homo sapien
gacaaccagcaacagacatcatcag

SEQ ID NO: 2222207 - DNA, 25 bp, Homo sapien
tatacatgctatatacgctgcctgc

SEQ ID NO: 2222208 - DNA, 25 bp, Homo sapien
catcaggacgtgatgattcaggacc

SEQ ID NO: 2222209 - DNA, 25 bp, Homo sapien
aataaacttgttctacataatagac

SEQ ID NO: 2222210 - DNA, 25 bp, Homo sapien
taaacttgttctacataatagacac

SEQ ID NO: 2222211 - DNA, 25 bp, Homo sapien
tgtaataaacttgttctacataata

SEQ ID NO: 2222212 - DNA, 25 bp, Homo sapien
gtaataaacttgttctacataatag

SEQ ID NO: 2222213 - DNA, 25 bp, Homo sapien
cagacatataatgtaaggcatttca

SEQ ID NO: 2222214 - DNA, 25 bp, Homo sapien
tcagtgctgcccaacagacatataa

SEQ ID NO: 2222215 - DNA, 25 bp, Homo sapien
caggaatgaaaagtgggcaatatag

SEQ ID NO: 2222216 - DNA, 25 bp, Homo sapien
gcaatatagatcagtgctgcccaac

SEQ ID NO: 2222217 - DNA, 25 bp, Homo sapien
taagatacgcaatgacttggccagg

SEQ ID NO: 2222218 - DNA, 25 bp, Homo sapien
tctatgttgtcaccaatggcaagca

SEQ ID NO: 2222219 - DNA, 25 bp, Homo sapien
ttactatggtcaagcaaaatgtccc

SEQ ID NO: 2222220 - DNA, 25 bp, Homo sapien
gacctagtcatcctacgtgattcca

SEQ ID NO: 2222221 - DNA, 25 bp, Homo sapien
actttgaactcacacaacaacttac

SEQ ID NO: 2222222 - DNA, 25 bp, Homo sapien
ctatctctctataaagctttccttg

SEQ ID NO: 2222223 - DNA, 25 bp, Homo sapien
cacggcgcccggctcaaatgctatc

SEQ ID NO: 2222224 - DNA, 25 bp, Homo sapien
ttgaactcacacaacaacttacttt

SEQ ID NO: 2222225 - DNA, 25 bp, Homo sapien
ctctttcggctaagcaacacacagg

SEQ ID NO: 2222226 - DNA, 25 bp, Homo sapien
acaggcctaacccaccaagcgaacg

SEQ ID NO: 2222227 - DNA, 25 bp, Homo sapien
aacacccgactcagacggtgcctgg

SEQ ID NO: 2222228 - DNA, 25 bp, Homo sapien
aagagaaaacgatgcctctttcggc

SEQ ID NO: 2222229 - DNA, 25 bp, Homo sapien
tgattgctgggcgccgatctgcgct

SEQ ID NO: 2222230 - DNA, 25 bp, Homo sapien
cgccttgtcggcttctgtgattgct

SEQ ID NO: 2222231 - DNA, 25 bp, Homo sapien
gttttcgcttgaacgccttgtcggc

SEQ ID NO: 2222232 - DNA, 25 bp, Homo sapien
tcgcttgaacgccttgtcggcttct

SEQ ID NO: 2222233 - DNA, 25 bp, Homo sapien
ggaacctccccacagctcaaaggcc

SEQ ID NO: 2222234 - DNA, 25 bp, Homo sapien
ctggaacctccccacagctcaaagg

SEQ ID NO: 2222235 - DNA, 25 bp, Homo sapien
ctccccacagctcaaaggccgctac

SEQ ID NO: 2222236 - DNA, 25 bp, Homo sapien
acctccccacagctcaaaggccgct

SEQ ID NO: 2222237 - DNA, 25 bp, Homo sapien
gccgcggaaacaaagcgacaccgct

SEQ ID NO: 2222238 - DNA, 25 bp, Homo sapien
aggagccgcggaaacaaagcgacac

SEQ ID NO: 2222239 - DNA, 25 bp, Homo sapien
ggaaacaaagcgacaccgctgccgc

SEQ ID NO: 2222240 - DNA, 25 bp, Homo sapien
cgccgcaggagccgcggaaacaaag

SEQ ID NO: 2222241 - DNA, 25 bp, Homo sapien
gaaggcaacctagacctttctctga

SEQ ID NO: 2222242 - DNA, 25 bp, Homo sapien
ataaatgcgtaacttgtgaatgtgc

SEQ ID NO: 2222243 - DNA, 25 bp, Homo sapien
aggcaacctagacctttctctgact

SEQ ID NO: 2222244 - DNA, 25 bp, Homo sapien
ctctgactcttgaccataaatgcgt

SEQ ID NO: 2222245 - DNA, 25 bp, Homo sapien
cagtgaaagttcaattaataatgca

SEQ ID NO: 2222246 - DNA, 25 bp, Homo sapien
gatgtttcctgctcataaaccagtg

SEQ ID NO: 2222247 - DNA, 25 bp, Homo sapien
tcttatatttaaggtgtttactctc

SEQ ID NO: 2222248 - DNA, 25 bp, Homo sapien
atctgatagccccaaaccagatgtt

SEQ ID NO: 2222249 - DNA, 25 bp, Homo sapien
aatatacagtctccccacctaaatt

SEQ ID NO: 2222250 - DNA, 25 bp, Homo sapien
accctaatatacagtctccccacct

SEQ ID NO: 2222251 - DNA, 25 bp, Homo sapien
ccctaatatacagtctccccaccta

SEQ ID NO: 2222252 - DNA, 25 bp, Homo sapien
atatacagtctccccacctaaattc

SEQ ID NO: 2222253 - DNA, 25 bp, Homo sapien
gcgtgacaatgcgagactgcgtctc

SEQ ID NO: 2222254 - DNA, 25 bp, Homo sapien
taacatatgggttccgatatggttt

SEQ ID NO: 2222255 - DNA, 25 bp, Homo sapien
agcctgcgtgacaatgcgagactgc

SEQ ID NO: 2222256 - DNA, 25 bp, Homo sapien
catatgggttccgatatggtttgga

SEQ ID NO: 2222257 - DNA, 25 bp, Homo sapien
tcaaaaagcaaacagccagacattt

SEQ ID NO: 2222258 - DNA, 25 bp, Homo sapien
gtttattgatatggtcaaaaagcaa

SEQ ID NO: 2222259 - DNA, 25 bp, Homo sapien
caatgtgtcattctgaactgtatct

SEQ ID NO: 2222260 - DNA, 25 bp, Homo sapien
tacttaaggcacttcatatgaaagc

SEQ ID NO: 2222261 - DNA, 25 bp, Homo sapien
ctttctccttacagaagaatgtgct

SEQ ID NO: 2222262 - DNA, 25 bp, Homo sapien
cctttctccttacagaagaatgtgc

SEQ ID NO: 2222263 - DNA, 25 bp, Homo sapien
tctacacattttagccagaatgctg

SEQ ID NO: 2222264 - DNA, 25 bp, Homo sapien
ttttagccagaatgctgcctttctc

SEQ ID NO: 2222265 - DNA, 25 bp, Homo sapien
ccacatggcagggttattagaaggt

SEQ ID NO: 2222266 - DNA, 25 bp, Homo sapien
tggtcaatctgtacaaatcagggca

SEQ ID NO: 2222267 - DNA, 25 bp, Homo sapien
catggcagtagtattcccgtggtca

SEQ ID NO: 2222268 - DNA, 25 bp, Homo sapien
tggcaggtggcagtcatagtatctt

SEQ ID NO: 2222269 - DNA, 25 bp, Homo sapien
tcaggttactcttcataactatggg

SEQ ID NO: 2222270 - DNA, 25 bp, Homo sapien
tcaaattggtactttgtttctccac

SEQ ID NO: 2222271 - DNA, 25 bp, Homo sapien
gcacatatggttatttctactgaca

SEQ ID NO: 2222272 - DNA, 25 bp, Homo sapien
ccacaatagtggcatttcaggttac

SEQ ID NO: 2222273 - DNA, 25 bp, Homo sapien
taatttctatatacaggcatcagct

SEQ ID NO: 2222274 - DNA, 25 bp, Homo sapien
cacagatgggtcaccttaaaagaaa

SEQ ID NO: 2222275 - DNA, 25 bp, Homo sapien
gggagtccttttctaactgagccta

SEQ ID NO: 2222276 - DNA, 25 bp, Homo sapien
ggtagttaacaccatactcaagcag

SEQ ID NO: 2222277 - DNA, 25 bp, Homo sapien
tcccaggtattaagcaagtctcgtg

SEQ ID NO: 2222278 - DNA, 25 bp, Homo sapien
tcatgttcacagctatcgagaagca

SEQ ID NO: 2222279 - DNA, 25 bp, Homo sapien
cctcggactcccaatagatgtcttt

SEQ ID NO: 2222280 - DNA, 25 bp, Homo sapien
catagacattgctggtgtggtagct

SEQ ID NO: 2222281 - DNA, 25 bp, Homo sapien
acaaaaacaatcatagacagcactg

SEQ ID NO: 2222282 - DNA, 25 bp, Homo sapien
aacaaaaacaatcatagacagcact

SEQ ID NO: 2222283 - DNA, 25 bp, Homo sapien
catagacagcactgtatttcagtag

SEQ ID NO: 2222284 - DNA, 25 bp, Homo sapien
caatcatagacagcactgtatttca

SEQ ID NO: 2222285 - DNA, 25 bp, Homo sapien
tgggaacacctggtcaggacttact

SEQ ID NO: 2222286 - DNA, 25 bp, Homo sapien
tcttgctgagggctagacgtgtgct

SEQ ID NO: 2222287 - DNA, 25 bp, Homo sapien
ccccatctttggataaggcaatata

SEQ ID NO: 2222288 - DNA, 25 bp, Homo sapien
tgtaacaggcatatgtgggaacacc

SEQ ID NO: 2222289 - DNA, 25 bp, Homo sapien
aaatgttccataaagttcactggga

SEQ ID NO: 2222290 - DNA, 25 bp, Homo sapien
cttttcaaacacacacgattttcgt

SEQ ID NO: 2222291 - DNA, 25 bp, Homo sapien
tccagtactccagtgtctatatatc

SEQ ID NO: 2222292 - DNA, 25 bp, Homo sapien
gcttgttaaggcactacacatcttc

SEQ ID NO: 2222293 - DNA, 25 bp, Homo sapien
gtatgggtagccatgatatttagat

SEQ ID NO: 2222294 - DNA, 25 bp, Homo sapien
ctgtatgggtagccatgatatttag

SEQ ID NO: 2222295 - DNA, 25 bp, Homo sapien
tgtatgggtagccatgatatttaga

SEQ ID NO: 2222296 - DNA, 25 bp, Homo sapien
atagagagcatccaactgaagaata

SEQ ID NO: 2222297 - DNA, 25 bp, Homo sapien
aatagagagcatccaactgaagaat

SEQ ID NO: 2222298 - DNA, 25 bp, Homo sapien
aaattttaagttcagtatcttcatc

SEQ ID NO: 2222299 - DNA, 25 bp, Homo sapien
tttaagttcagtatcttcatctttt

SEQ ID NO: 2222300 - DNA, 25 bp, Homo sapien
tcaaattttaagttcagtatcttca

SEQ ID NO: 2222301 - DNA, 25 bp, Homo sapien
taagttcagtatcttcatctttttt

SEQ ID NO: 2222302 - DNA, 25 bp, Homo sapien
tgcaacagataacaatgtgtgaata

SEQ ID NO: 2222303 - DNA, 25 bp, Homo sapien
cacagtgggaaaggttgcttgagca

SEQ ID NO: 2222304 - DNA, 25 bp, Homo sapien
atatataaaaagttcatgcaggctg

SEQ ID NO: 2222305 - DNA, 25 bp, Homo sapien
ggaaaatcttgacttatttcatgaa

SEQ ID NO: 2222306 - DNA, 25 bp, Homo sapien
ctttcgctttccaatatccatgtca

SEQ ID NO: 2222307 - DNA, 25 bp, Homo sapien
gctttccaatatccatgtcagaggt

SEQ ID NO: 2222308 - DNA, 25 bp, Homo sapien
tccaatatccatgtcagaggtagca

SEQ ID NO: 2222309 - DNA, 25 bp, Homo sapien
caatatccatgtcagaggtagcagc

SEQ ID NO: 2222310 - DNA, 25 bp, Homo sapien
ttcttcctggtttagacatgagagg

SEQ ID NO: 2222311 - DNA, 25 bp, Homo sapien
cttcctggtttagacatgagagggt

SEQ ID NO: 2222312 - DNA, 25 bp, Homo sapien
ctggtttagacatgagagggtgtat

SEQ ID NO: 2222313 - DNA, 25 bp, Homo sapien
tcctggtttagacatgagagggtgt

SEQ ID NO: 2222314 - DNA, 25 bp, Homo sapien
gtttgtttctttgctggtgaggagc

SEQ ID NO: 2222315 - DNA, 25 bp, Homo sapien
ctgtccaggtttgtttctttgctgg

SEQ ID NO: 2222316 - DNA, 25 bp, Homo sapien
gttccctccagaccctgttggcctg

SEQ ID NO: 2222317 - DNA, 25 bp, Homo sapien
attctctgtccaggtttgtttcttt

SEQ ID NO: 2222318 - DNA, 25 bp, Homo sapien
ctcccagacctggagtctacagagg

SEQ ID NO: 2222319 - DNA, 25 bp, Homo sapien
tcggttcacgctcagtgcgctgcat

SEQ ID NO: 2222320 - DNA, 25 bp, Homo sapien
gttcacgctcagtgcgctgcatcca

SEQ ID NO: 2222321 - DNA, 25 bp, Homo sapien
ctgctcccagacctggagtctacag

SEQ ID NO: 2222322 - DNA, 25 bp, Homo sapien
gtgacttgcattaagagaacagccc

SEQ ID NO: 2222323 - DNA, 25 bp, Homo sapien
caaatgctgtagagagaatactaga

SEQ ID NO: 2222324 - DNA, 25 bp, Homo sapien
ttgcattaagagaacagccccagcc

SEQ ID NO: 2222325 - DNA, 25 bp, Homo sapien
ccccagccaaatgctgtagagagaa

SEQ ID NO: 2222326 - DNA, 25 bp, Homo sapien
cagctacaaactgggcttgactgct

SEQ ID NO: 2222327 - DNA, 25 bp, Homo sapien
gaacaatgtgtgtttcagctacaaa

SEQ ID NO: 2222328 - DNA, 25 bp, Homo sapien
aatgtgtgtttcagctacaaactgg

SEQ ID NO: 2222329 - DNA, 25 bp, Homo sapien
gtgtttcagctacaaactgggcttg

SEQ ID NO: 2222330 - DNA, 25 bp, Homo sapien
tatgggcatatggtggtcctcttat

SEQ ID NO: 2222331 - DNA, 25 bp, Homo sapien
cacatgtcccgtgtggggattctta

SEQ ID NO: 2222332 - DNA, 25 bp, Homo sapien
ggtggtcctcttatatggttccaca

SEQ ID NO: 2222333 - DNA, 25 bp, Homo sapien
gattcttatgggcatatggtggtcc

SEQ ID NO: 2222334 - DNA, 25 bp, Homo sapien
ttaaggcttatatttcatcccaagg

SEQ ID NO: 2222335 - DNA, 25 bp, Homo sapien
gactatagaagcatggaaccacgcc

SEQ ID NO: 2222336 - DNA, 25 bp, Homo sapien
tcacaattcgataatacttcaaaag

SEQ ID NO: 2222337 - DNA, 25 bp, Homo sapien
tcatcccaaggatcacaattcgata

SEQ ID NO: 2222338 - DNA, 25 bp, Homo sapien
aatacactattaggaattttattca

SEQ ID NO: 2222339 - DNA, 25 bp, Homo sapien
atacactattaggaattttattcaa

SEQ ID NO: 2222340 - DNA, 25 bp, Homo sapien
caaaagcaatcccaacataagggga

SEQ ID NO: 2222341 - DNA, 25 bp, Homo sapien
aattccatattacttcttcgaagat

SEQ ID NO: 2222342 - DNA, 25 bp, Homo sapien
cataaggggaccagcataatttggg

SEQ ID NO: 2222343 - DNA, 25 bp, Homo sapien
cgaagatacacaagtccaccaataa

SEQ ID NO: 2222344 - DNA, 25 bp, Homo sapien
gacatcagttctgtcggcgatccac

SEQ ID NO: 2222345 - DNA, 25 bp, Homo sapien
actcatatgtatcaccccgtttggg

SEQ ID NO: 2222346 - DNA, 25 bp, Homo sapien
aaccccgcacctgtaactcatatgt

SEQ ID NO: 2222347 - DNA, 25 bp, Homo sapien
gatccaccgggcaatctgctcagct

SEQ ID NO: 2222348 - DNA, 25 bp, Homo sapien
catccttgccaaaagttgatgtgat

SEQ ID NO: 2222349 - DNA, 25 bp, Homo sapien
atccttgccaaaagttgatgtgatg

SEQ ID NO: 2222350 - DNA, 25 bp, Homo sapien
tgggtgaagactgtactttatcatt

SEQ ID NO: 2222351 - DNA, 25 bp, Homo sapien
acatccttgccaaaagttgatgtga

SEQ ID NO: 2222352 - DNA, 25 bp, Homo sapien
agtcattcatatgaagatgtatagc

SEQ ID NO: 2222353 - DNA, 25 bp, Homo sapien
gggaaagaactagtagagatgctga

SEQ ID NO: 2222354 - DNA, 25 bp, Homo sapien
aaaattgaatctatgtccttaagta

SEQ ID NO: 2222355 - DNA, 25 bp, Homo sapien
tatagcaaggcattatatccagctt

SEQ ID NO: 2222356 - DNA, 25 bp, Homo sapien
tcctgttggtgaatgcactggagta

SEQ ID NO: 2222357 - DNA, 25 bp, Homo sapien
ccaggagtttgccaggatctggaat

SEQ ID NO: 2222358 - DNA, 25 bp, Homo sapien
ggcaaaaaatatcctgttggtgaat

SEQ ID NO: 2222359 - DNA, 25 bp, Homo sapien
tgcactggagtatcgccaggagttt

SEQ ID NO: 2222360 - DNA, 25 bp, Homo sapien
ctggatgcaatgagattcgtaaaga

SEQ ID NO: 2222361 - DNA, 25 bp, Homo sapien
tggatgcaatgagattcgtaaagat

SEQ ID NO: 2222362 - DNA, 25 bp, Homo sapien
gatgcaatgagattcgtaaagataa

SEQ ID NO: 2222363 - DNA, 25 bp, Homo sapien
tgcaatgagattcgtaaagataaca

SEQ ID NO: 2222364 - DNA, 25 bp, Homo sapien
cagttttcttgaattccaaacttgg

SEQ ID NO: 2222365 - DNA, 25 bp, Homo sapien
tcttgaattccaaacttggatgaag

SEQ ID NO: 2222366 - DNA, 25 bp, Homo sapien
ttccaaacttggatgaagccaccat

SEQ ID NO: 2222367 - DNA, 25 bp, Homo sapien
gaattccaaacttggatgaagccac

SEQ ID NO: 2222368 - DNA, 25 bp, Homo sapien
cacaaggcgacggaacttgtctcca

SEQ ID NO: 2222369 - DNA, 25 bp, Homo sapien
gttggagagcagtgaacatgacgat

SEQ ID NO: 2222370 - DNA, 25 bp, Homo sapien
tctccattcattcttattacaggtc

SEQ ID NO: 2222371 - DNA, 25 bp, Homo sapien
cgataacggagtaatttctcggtgg

SEQ ID NO: 2222372 - DNA, 25 bp, Homo sapien
caagtcggatggatcacttgatgtc

SEQ ID NO: 2222373 - DNA, 25 bp, Homo sapien
tctcagtgctttgggaggtcaagtc

SEQ ID NO: 2222374 - DNA, 25 bp, Homo sapien
agtgctttgggaggtcaagtcggat

SEQ ID NO: 2222375 - DNA, 25 bp, Homo sapien
tcagtgctttgggaggtcaagtcgg

SEQ ID NO: 2222376 - DNA, 25 bp, Homo sapien
gaagacaaagagttacagttccttc

SEQ ID NO: 2222377 - DNA, 25 bp, Homo sapien
gacaaagagttacagttccttctct

SEQ ID NO: 2222378 - DNA, 25 bp, Homo sapien
gaaaaccgcgtaattgaagccacca

SEQ ID NO: 2222379 - DNA, 25 bp, Homo sapien
ctgggaagaggcgaacagaccctct

SEQ ID NO: 2222380 - DNA, 25 bp, Homo sapien
catgctgctggaaaccgcgttctca

SEQ ID NO: 2222381 - DNA, 25 bp, Homo sapien
caccaaaggcatagaagcggcaggg

SEQ ID NO: 2222382 - DNA, 25 bp, Homo sapien
accaaaaccgccaacgcgctgccat

SEQ ID NO: 2222383 - DNA, 25 bp, Homo sapien
acagagacacaccaaaaccgccaac

SEQ ID NO: 2222384 - DNA, 25 bp, Homo sapien
aggctgagggaacgtcgcaaacgat

SEQ ID NO: 2222385 - DNA, 25 bp, Homo sapien
gggaacgtcgcaaacgatgagcagc

SEQ ID NO: 2222386 - DNA, 25 bp, Homo sapien
ttctataagtgaaactttgctccgg

SEQ ID NO: 2222387 - DNA, 25 bp, Homo sapien
cttctataagtgaaactttgctccg

SEQ ID NO: 2222388 - DNA, 25 bp, Homo sapien
tctataagtgaaactttgctccggc

SEQ ID NO: 2222389 - DNA, 25 bp, Homo sapien
gagggtggggcgtgagaacaggcaa

SEQ ID NO: 2222390 - DNA, 25 bp, Homo sapien
ctgagggtggggcgtgagaacaggc

SEQ ID NO: 2222391 - DNA, 25 bp, Homo sapien
tgagggtggggcgtgagaacaggca

SEQ ID NO: 2222392 - DNA, 25 bp, Homo sapien
agggtggggcgtgagaacaggcaaa

SEQ ID NO: 2222393 - DNA, 25 bp, Homo sapien
aatattgcggagttttcggagtcca

SEQ ID NO: 2222394 - DNA, 25 bp, Homo sapien
tttccaagcacgcatgcgcagttgt

SEQ ID NO: 2222395 - DNA, 25 bp, Homo sapien
aaatggcttgaagttgctagaacag

SEQ ID NO: 2222396 - DNA, 25 bp, Homo sapien
aagtccttgaaattcgccgccttca

SEQ ID NO: 2222397 - DNA, 25 bp, Homo sapien
ccttggtcaaaagcgcactaaatcg

SEQ ID NO: 2222398 - DNA, 25 bp, Homo sapien
cagcagctgtattgccgcagttcta

SEQ ID NO: 2222399 - DNA, 25 bp, Homo sapien
tcaagggtacctgaagcgaattggc

SEQ ID NO: 2222400 - DNA, 25 bp, Homo sapien
ttcacgatgtttcccttggtcaaaa

SEQ ID NO: 2222401 - DNA, 25 bp, Homo sapien
attaacaatgttagctggccaggcg

SEQ ID NO: 2222402 - DNA, 25 bp, Homo sapien
caacccaaatggtatcgatgcagct

SEQ ID NO: 2222403 - DNA, 25 bp, Homo sapien
tattactgtaatagacggaaactgt

SEQ ID NO: 2222404 - DNA, 25 bp, Homo sapien
tagacggaaactgtaaatctagctc

SEQ ID NO: 2222405 - DNA, 25 bp, Homo sapien
gccctccagtacgcctggcagattt

SEQ ID NO: 2222406 - DNA, 25 bp, Homo sapien
cctccagtacgcctggcagattttt

SEQ ID NO: 2222407 - DNA, 25 bp, Homo sapien
ccctccagtacgcctggcagatttt

SEQ ID NO: 2222408 - DNA, 25 bp, Homo sapien
cgccctccagtacgcctggcagatt

SEQ ID NO: 2222409 - DNA, 25 bp, Homo sapien
gaaattctgacccacttccatataa

SEQ ID NO: 2222410 - DNA, 25 bp, Homo sapien
gccttcctggacataacttcactta

SEQ ID NO: 2222411 - DNA, 25 bp, Homo sapien
ttactgtcttggatcgccttcctgg

SEQ ID NO: 2222412 - DNA, 25 bp, Homo sapien
gaacttagcacagtattcgtgacag

SEQ ID NO: 2222413 - DNA, 25 bp, Homo sapien
caaactcgtagcctgtctgaagact

SEQ ID NO: 2222414 - DNA, 25 bp, Homo sapien
tgaagactagctactagctccttgg

SEQ ID NO: 2222415 - DNA, 25 bp, Homo sapien
tcaccagacccaagggcggagtggt

SEQ ID NO: 2222416 - DNA, 25 bp, Homo sapien
tatgtatgttacctgaagaagagca

SEQ ID NO: 2222417 - DNA, 25 bp, Homo sapien
tagacacgggtactgtggtagttgt

SEQ ID NO: 2222418 - DNA, 25 bp, Homo sapien
tagaggtacagatgttgagttccca

SEQ ID NO: 2222419 - DNA, 25 bp, Homo sapien
ctgtggtagttgtagaggtacagat

SEQ ID NO: 2222420 - DNA, 25 bp, Homo sapien
ctagacacgggtactgtggtagttg

SEQ ID NO: 2222421 - DNA, 25 bp, Homo sapien
gggttattaatacacttcataagca

SEQ ID NO: 2222422 - DNA, 25 bp, Homo sapien
ctggggttattaatacacttcataa

SEQ ID NO: 2222423 - DNA, 25 bp, Homo sapien
ggggttattaatacacttcataagc

SEQ ID NO: 2222424 - DNA, 25 bp, Homo sapien
tggggttattaatacacttcataag

SEQ ID NO: 2222425 - DNA, 25 bp, Homo sapien
aaagacccactcgaggctgcgtgtc

SEQ ID NO: 2222426 - DNA, 25 bp, Homo sapien
aagctggctctagaccacgcgttcc

SEQ ID NO: 2222427 - DNA, 25 bp, Homo sapien
gcgttccttttcacgtgaccagtcg

SEQ ID NO: 2222428 - DNA, 25 bp, Homo sapien
tgaccagtcgctctctttcccgtgg

SEQ ID NO: 2222429 - DNA, 25 bp, Homo sapien
tggcttcccgtcgtcctttctcctg

SEQ ID NO: 2222430 - DNA, 25 bp, Homo sapien
cttcccgtcgtcctttctcctggag

SEQ ID NO: 2222431 - DNA, 25 bp, Homo sapien
taagtcctacattggcttcccgtcg

SEQ ID NO: 2222432 - DNA, 25 bp, Homo sapien
ctacattggcttcccgtcgtccttt

SEQ ID NO: 2222433 - DNA, 25 bp, Homo sapien
ctcccctaacaggggatagaggagg

SEQ ID NO: 2222434 - DNA, 25 bp, Homo sapien
gtaccctcttggagagaatgtcctg

SEQ ID NO: 2222435 - DNA, 25 bp, Homo sapien
tcttgtaccctcttggagagaatgt

SEQ ID NO: 2222436 - DNA, 25 bp, Homo sapien
tgtgtcactttcttgtaccctcttg

SEQ ID NO: 2222437 - DNA, 25 bp, Homo sapien
tcactttcttgtaccctcttggaga

SEQ ID NO: 2222438 - DNA, 25 bp, Homo sapien
aagccagggttatagacttcatctc

SEQ ID NO: 2222439 - DNA, 25 bp, Homo sapien
ccacagttttccgaatgcagtttgt

SEQ ID NO: 2222440 - DNA, 25 bp, Homo sapien
tctttggagtcattaggtatgccac

SEQ ID NO: 2222441 - DNA, 25 bp, Homo sapien
taggtatgccactaactctgctcca

SEQ ID NO: 2222442 - DNA, 25 bp, Homo sapien
attgttgtgtttttgcttgaggaca

SEQ ID NO: 2222443 - DNA, 25 bp, Homo sapien
tgttgtgtttttgcttgaggacagt

SEQ ID NO: 2222444 - DNA, 25 bp, Homo sapien
gacagtgccacactgctgctgccat

SEQ ID NO: 2222445 - DNA, 25 bp, Homo sapien
tgtgtttttgcttgaggacagtgcc

SEQ ID NO: 2222446 - DNA, 25 bp, Homo sapien
gacctcgggtgatctgctcccctca

SEQ ID NO: 2222447 - DNA, 25 bp, Homo sapien
cctcgggtgatctgctcccctcagc

SEQ ID NO: 2222448 - DNA, 25 bp, Homo sapien
acctcgggtgatctgctcccctcag

SEQ ID NO: 2222449 - DNA, 25 bp, Homo sapien
cctcagaggtcaaggagctgatcct

SEQ ID NO: 2222450 - DNA, 25 bp, Homo sapien
gatcctatattggtatgaggaatgg

SEQ ID NO: 2222451 - DNA, 25 bp, Homo sapien
gtacagttatgctcagatgaacact

SEQ ID NO: 2222452 - DNA, 25 bp, Homo sapien
acagttatgctcagatgaacactgg

SEQ ID NO: 2222453 - DNA, 25 bp, Homo sapien
tggtcgtggcttagcatgttcctcc

SEQ ID NO: 2222454 - DNA, 25 bp, Homo sapien
attggtcgtggcttagcatgttcct

SEQ ID NO: 2222455 - DNA, 25 bp, Homo sapien
ttggtcgtggcttagcatgttcctc

SEQ ID NO: 2222456 - DNA, 25 bp, Homo sapien
gctgcaatcagtacacgtttcccct

SEQ ID NO: 2222457 - DNA, 25 bp, Homo sapien
ggctgcaatcagtacacgtttcccc

SEQ ID NO: 2222458 - DNA, 25 bp, Homo sapien
ttctgctttattgagaccggttaga

SEQ ID NO: 2222459 - DNA, 25 bp, Homo sapien
cgccaagtcctcaccactggcagcc

SEQ ID NO: 2222460 - DNA, 25 bp, Homo sapien
tagtgccgctcattgaggcgccaag

SEQ ID NO: 2222461 - DNA, 25 bp, Homo sapien
tgagaccggttagacccccatagtg

SEQ ID NO: 2222462 - DNA, 25 bp, Homo sapien
gccgcgcttcgcctcctcgtggccc

SEQ ID NO: 2222463 - DNA, 25 bp, Homo sapien
ccgcgcttcgcctcctcgtggcccg

SEQ ID NO: 2222464 - DNA, 25 bp, Homo sapien
cccgccgcgcttcgcctcctcgtgg

SEQ ID NO: 2222465 - DNA, 25 bp, Homo sapien
ttgcgccttttccaaggcagccctg

SEQ ID NO: 2222466 - DNA, 25 bp, Homo sapien
gttcgcagcgtcacccggatcttcg

SEQ ID NO: 2222467 - DNA, 25 bp, Homo sapien
gcatttgcattgatcctggtagggc

SEQ ID NO: 2222468 - DNA, 25 bp, Homo sapien
ctgggtctcgcacattcttcacgtc

SEQ ID NO: 2222469 - DNA, 25 bp, Homo sapien
caagattcagctagtggccaagaga

SEQ ID NO: 2222470 - DNA, 25 bp, Homo sapien
caagagatgcagtgccaggaaccct

SEQ ID NO: 2222471 - DNA, 25 bp, Homo sapien
ggaacccttaaacagttgcacagca

SEQ ID NO: 2222472 - DNA, 25 bp, Homo sapien
tgtgcacagcccctaagtcaactta

SEQ ID NO: 2222473 - DNA, 25 bp, Homo sapien
tacttgatgccctctaggcagggtg

SEQ ID NO: 2222474 - DNA, 25 bp, Homo sapien
gagttatccctgcaggagtccttag

SEQ ID NO: 2222475 - DNA, 25 bp, Homo sapien
tatttcataccatggaggaaggctc

SEQ ID NO: 2222476 - DNA, 25 bp, Homo sapien
tcaagggcctactttatggcagaca

SEQ ID NO: 2222477 - DNA, 25 bp, Homo sapien
attgggaaacctatgcagagtgcac

SEQ ID NO: 2222478 - DNA, 25 bp, Homo sapien
gggtaaaacccaactgctctgacat

SEQ ID NO: 2222479 - DNA, 25 bp, Homo sapien
cacacagttggtaaatgatggagct

SEQ ID NO: 2222480 - DNA, 25 bp, Homo sapien
tgatctgaattataccaatagcggg

SEQ ID NO: 2222481 - DNA, 25 bp, Homo sapien
gggcccaatcattgaaggattaatc

SEQ ID NO: 2222482 - DNA, 25 bp, Homo sapien
gcccaatcattgaaggattaatcag

SEQ ID NO: 2222483 - DNA, 25 bp, Homo sapien
cgaaaccatgttggtggtaataaga

SEQ ID NO: 2222484 - DNA, 25 bp, Homo sapien
gtgttctgtgacgaaaccatgttgg

SEQ ID NO: 2222485 - DNA, 25 bp, Homo sapien
taaatctttggcttgtcactgacat

SEQ ID NO: 2222486 - DNA, 25 bp, Homo sapien
cacttaatcgtggaactagtctccc

SEQ ID NO: 2222487 - DNA, 25 bp, Homo sapien
taatcgtggaactagtctcccttgg

SEQ ID NO: 2222488 - DNA, 25 bp, Homo sapien
gcaccaacacttaatcgtggaacta

SEQ ID NO: 2222489 - DNA, 25 bp, Homo sapien
ctaacagcaccaacacttaatcgtg

SEQ ID NO: 2222490 - DNA, 25 bp, Homo sapien
catatggcttaatcagtggcaaagg

SEQ ID NO: 2222491 - DNA, 25 bp, Homo sapien
gtctaggtcctgcatatggcttaat

SEQ ID NO: 2222492 - DNA, 25 bp, Homo sapien
aattaaggacttcagcctatagttt

SEQ ID NO: 2222493 - DNA, 25 bp, Homo sapien
cctgcatatggcttaatcagtggca

SEQ ID NO: 2222494 - DNA, 25 bp, Homo sapien
taacttcaaatcaaagtttgctcac

SEQ ID NO: 2222495 - DNA, 25 bp, Homo sapien
aaaagattggtcagcacgacactgg

SEQ ID NO: 2222496 - DNA, 25 bp, Homo sapien
ggtaaaagattggtcagcacgacac

SEQ ID NO: 2222497 - DNA, 25 bp, Homo sapien
taaaagattggtcagcacgacactg

SEQ ID NO: 2222498 - DNA, 25 bp, Homo sapien
gaggtaaaagattggtcagcacgac

SEQ ID NO: 2222499 - DNA, 25 bp, Homo sapien
catttgatttataacccttggttca

SEQ ID NO: 2222500 - DNA, 25 bp, Homo sapien
ccaagtgagtcagtgatcacacgaa

SEQ ID NO: 2222501 - DNA, 25 bp, Homo sapien
cctcccaagtgagtcagtgatcaca

SEQ ID NO: 2222502 - DNA, 25 bp, Homo sapien
gagtcagtgatcacacgaaatcgca

SEQ ID NO: 2222503 - DNA, 25 bp, Homo sapien
agtgagtcagtgatcacacgaaatc

SEQ ID NO: 2222504 - DNA, 25 bp, Homo sapien
ggcttctccagcagaggtaagtagc

SEQ ID NO: 2222505 - DNA, 25 bp, Homo sapien
ttctccagcagaggtaagtagctcc

SEQ ID NO: 2222506 - DNA, 25 bp, Homo sapien
tctccagcagaggtaagtagctcca

SEQ ID NO: 2222507 - DNA, 25 bp, Homo sapien
gcttctccagcagaggtaagtagct

SEQ ID NO: 2222508 - DNA, 25 bp, Homo sapien
cggcgggttaaggtagcatcagaac

SEQ ID NO: 2222509 - DNA, 25 bp, Homo sapien
caagacttggcccaagcggcgagat

SEQ ID NO: 2222510 - DNA, 25 bp, Homo sapien
tcagggctggcagatagctagagac

SEQ ID NO: 2222511 - DNA, 25 bp, Homo sapien
tgacggccctgactagactgaaacg

SEQ ID NO: 2222512 - DNA, 25 bp, Homo sapien
atctctcggagcgttcttgggaggc

SEQ ID NO: 2222513 - DNA, 25 bp, Homo sapien
gcatctctcggagcgttcttgggag

SEQ ID NO: 2222514 - DNA, 25 bp, Homo sapien
tgggaggcgccatcttgcccgactc

SEQ ID NO: 2222515 - DNA, 25 bp, Homo sapien
cttgggaggcgccatcttgcccgac

SEQ ID NO: 2222516 - DNA, 25 bp, Homo sapien
tcgtcatccgcggagacagaggaga

SEQ ID NO: 2222517 - DNA, 25 bp, Homo sapien
gccactcgtcatccgcggagacaga

SEQ ID NO: 2222518 - DNA, 25 bp, Homo sapien
tatccagccactcgtcatccgcgga

SEQ ID NO: 2222519 - DNA, 25 bp, Homo sapien
tccagccactcgtcatccgcggaga

SEQ ID NO: 2222520 - DNA, 25 bp, Homo sapien
tcatcagaatcagcagtccacctgg

SEQ ID NO: 2222521 - DNA, 25 bp, Homo sapien
gactcatcagaatcagcagtccacc

SEQ ID NO: 2222522 - DNA, 25 bp, Homo sapien
atcagaatcagcagtccacctggcc

SEQ ID NO: 2222523 - DNA, 25 bp, Homo sapien
tcagactcatcagaatcagcagtcc

SEQ ID NO: 2222524 - DNA, 25 bp, Homo sapien
ttacattggaggaactgtcaggttt

SEQ ID NO: 2222525 - DNA, 25 bp, Homo sapien
acattggaggaactgtcaggtttac

SEQ ID NO: 2222526 - DNA, 25 bp, Homo sapien
tacattggaggaactgtcaggttta

SEQ ID NO: 2222527 - DNA, 25 bp, Homo sapien
gaatgagacctttaacttcatagct

SEQ ID NO: 2222528 - DNA, 25 bp, Homo sapien
tttaacttcatagctcaagcaaggg

SEQ ID NO: 2222529 - DNA, 25 bp, Homo sapien
cttcatagctcaagcaagggcctgt

SEQ ID NO: 2222530 - DNA, 25 bp, Homo sapien
tagcctgtaatcagtgatttcagca

SEQ ID NO: 2222531 - DNA, 25 bp, Homo sapien
ctgtggattctacgggaattaattt

SEQ ID NO: 2222532 - DNA, 25 bp, Homo sapien
actgtggattctacgggaattaatt

SEQ ID NO: 2222533 - DNA, 25 bp, Homo sapien
ttaatttactcaatctgtatttcac

SEQ ID NO: 2222534 - DNA, 25 bp, Homo sapien
gattctacgggaattaatttactca

SEQ ID NO: 2222535 - DNA, 25 bp, Homo sapien
gtgtcatcttggttaccgtttgctt

SEQ ID NO: 2222536 - DNA, 25 bp, Homo sapien
tgtgtcatcttggttaccgtttgct

SEQ ID NO: 2222537 - DNA, 25 bp, Homo sapien
tgcttttttgacatatacaagttct

SEQ ID NO: 2222538 - DNA, 25 bp, Homo sapien
cttttttgacatatacaagttcttc

SEQ ID NO: 2222539 - DNA, 25 bp, Homo sapien
gagtaggtgtttgaatagtcaatat

SEQ ID NO: 2222540 - DNA, 25 bp, Homo sapien
gtaggtgtttgaatagtcaatatat

SEQ ID NO: 2222541 - DNA, 25 bp, Homo sapien
aagagtaggtgtttgaatagtcaat

SEQ ID NO: 2222542 - DNA, 25 bp, Homo sapien
agagtaggtgtttgaatagtcaata

SEQ ID NO: 2222543 - DNA, 25 bp, Homo sapien
acttctaaactgtaacttgaaatgt

SEQ ID NO: 2222544 - DNA, 25 bp, Homo sapien
ttctaaactgtaacttgaaatgtat

SEQ ID NO: 2222545 - DNA, 25 bp, Homo sapien
cttctaaactgtaacttgaaatgta

SEQ ID NO: 2222546 - DNA, 25 bp, Homo sapien
atgttccaccattatctttggatgg

SEQ ID NO: 2222547 - DNA, 25 bp, Homo sapien
gatccggttttatctggacaggttg

SEQ ID NO: 2222548 - DNA, 25 bp, Homo sapien
tatatatggttttctaggggatccg

SEQ ID NO: 2222549 - DNA, 25 bp, Homo sapien
gcatggacctttccctttatatatg

SEQ ID NO: 2222550 - DNA, 25 bp, Homo sapien
ccggttttatctggacaggttgtat

SEQ ID NO: 2222551 - DNA, 25 bp, Homo sapien
tctccattgtatttcggcttaaaat

SEQ ID NO: 2222552 - DNA, 25 bp, Homo sapien
tcttgtagtgcatgaaaggtcttct

SEQ ID NO: 2222553 - DNA, 25 bp, Homo sapien
ctctgaagacttcttgtagtgcatg

SEQ ID NO: 2222554 - DNA, 25 bp, Homo sapien
tgcatgaaaggtcttctccattgta

SEQ ID NO: 2222555 - DNA, 25 bp, Homo sapien
gcacaccagtctactgacaacagat

SEQ ID NO: 2222556 - DNA, 25 bp, Homo sapien
tgcttcttttagcttaggaggtgga

SEQ ID NO: 2222557 - DNA, 25 bp, Homo sapien
tgttggggcacaccagtctactgac

SEQ ID NO: 2222558 - DNA, 25 bp, Homo sapien
gtcatttgggtttgtgttggggcac

SEQ ID NO: 2222559 - DNA, 25 bp, Homo sapien
gctcttggatctgttaatgagtctg

SEQ ID NO: 2222560 - DNA, 25 bp, Homo sapien
catcttggggttatgaaactaacca

SEQ ID NO: 2222561 - DNA, 25 bp, Homo sapien
tggatctgttaatgagtctgggtgc

SEQ ID NO: 2222562 - DNA, 25 bp, Homo sapien
tctgttaatgagtctgggtgcaagt

SEQ ID NO: 2222563 - DNA, 25 bp, Homo sapien
aacacagttgtgtgttctgagcctc

SEQ ID NO: 2222564 - DNA, 25 bp, Homo sapien
cagttgtgtgttctgagcctcttat

SEQ ID NO: 2222565 - DNA, 25 bp, Homo sapien
gttgtgtgttctgagcctcttatgg

SEQ ID NO: 2222566 - DNA, 25 bp, Homo sapien
tgtgttctgagcctcttatggttgt

SEQ ID NO: 2222567 - DNA, 25 bp, Homo sapien
ggccaggtcacaggtatattaaaaa

SEQ ID NO: 2222568 - DNA, 25 bp, Homo sapien
taactgtaagcaatagagaccaggt

SEQ ID NO: 2222569 - DNA, 25 bp, Homo sapien
tactatgccttagaggtcctttcca

SEQ ID NO: 2222570 - DNA, 25 bp, Homo sapien
taagagcatagaaacggccaggtca

SEQ ID NO: 2222571 - DNA, 25 bp, Homo sapien
catattatatttcagccgtagatga

SEQ ID NO: 2222572 - DNA, 25 bp, Homo sapien
gcaaaagcttgtccacgcatattat

SEQ ID NO: 2222573 - DNA, 25 bp, Homo sapien
caaacttaaaggacacactacactt

SEQ ID NO: 2222574 - DNA, 25 bp, Homo sapien
ccgtagatgagttgttgtggctgtt

SEQ ID NO: 2222575 - DNA, 25 bp, Homo sapien
tactacaaagaagggtgacagtacg

SEQ ID NO: 2222576 - DNA, 25 bp, Homo sapien
gccctaatttgcctagcgaatcagt

SEQ ID NO: 2222577 - DNA, 25 bp, Homo sapien
tatgtcatggatggagagaaatctc

SEQ ID NO: 2222578 - DNA, 25 bp, Homo sapien
taattcagttcatagttgtggaccg

SEQ ID NO: 2222579 - DNA, 25 bp, Homo sapien
cttatttgggaaactattttcattg

SEQ ID NO: 2222580 - DNA, 25 bp, Homo sapien
cattggtttggactggaaatgggtt

SEQ ID NO: 2222581 - DNA, 25 bp, Homo sapien
tgtaaatgatttgacaaaatactta

SEQ ID NO: 2222582 - DNA, 25 bp, Homo sapien
tttcattggtttggactggaaatgg

SEQ ID NO: 2222583 - DNA, 25 bp, Homo sapien
gactaaaaaggcagcggtcacgacc

SEQ ID NO: 2222584 - DNA, 25 bp, Homo sapien
ttctttctgggtacataagtcacgc

SEQ ID NO: 2222585 - DNA, 25 bp, Homo sapien
cagagacaaggttatgaccacggac

SEQ ID NO: 2222586 - DNA, 25 bp, Homo sapien
taagtcacgctggacaaagaatgct

SEQ ID NO: 2222587 - DNA, 25 bp, Homo sapien
tggaaaaacaattgcaatgcaccgg

SEQ ID NO: 2222588 - DNA, 25 bp, Homo sapien
tgaacataatagaccacacggagag

SEQ ID NO: 2222589 - DNA, 25 bp, Homo sapien
tacaaagcataggtgctgaggcggc

SEQ ID NO: 2222590 - DNA, 25 bp, Homo sapien
tgcaccggaaaaagctcatggctgt

SEQ ID NO: 2222591 - DNA, 25 bp, Homo sapien
tttctctacgaatgtctgctttgtg

SEQ ID NO: 2222592 - DNA, 25 bp, Homo sapien
ttctctacgaatgtctgctttgtgc

SEQ ID NO: 2222593 - DNA, 25 bp, Homo sapien
gtttctctacgaatgtctgctttgt

SEQ ID NO: 2222594 - DNA, 25 bp, Homo sapien
tctttctggcactggagtaccttca

SEQ ID NO: 2222595 - DNA, 25 bp, Homo sapien
tggagtaccttcacaaatgttcctt

SEQ ID NO: 2222596 - DNA, 25 bp, Homo sapien
caatgccttttacggtgtaatatta

SEQ ID NO: 2222597 - DNA, 25 bp, Homo sapien
ggtgtaatattagaggaagcccacg

SEQ ID NO: 2222598 - DNA, 25 bp, Homo sapien
ccaatactgggctctaccattgtta

SEQ ID NO: 2222599 - DNA, 25 bp, Homo sapien
ccttgaggactcttgtctctgacag

SEQ ID NO: 2222600 - DNA, 25 bp, Homo sapien
cttgtctctgacaggagctctgcca

SEQ ID NO: 2222601 - DNA, 25 bp, Homo sapien
tctgccaatactgggctctaccatt

SEQ ID NO: 2222602 - DNA, 25 bp, Homo sapien
tctggatgctcccttgttggatgca

SEQ ID NO: 2222603 - DNA, 25 bp, Homo sapien
tatatatctggatgctcccttgttg

SEQ ID NO: 2222604 - DNA, 25 bp, Homo sapien
taataagtagggagataatcctgtc

SEQ ID NO: 2222605 - DNA, 25 bp, Homo sapien
agtctccaataattattgtactggg

SEQ ID NO: 2222606 - DNA, 25 bp, Homo sapien
ccacaatggttggactgctttacaa

SEQ ID NO: 2222607 - DNA, 25 bp, Homo sapien
taaataatcaagaggtgaacctggc

SEQ ID NO: 2222608 - DNA, 25 bp, Homo sapien
acaaagacggcatagcggtggctca

SEQ ID NO: 2222609 - DNA, 25 bp, Homo sapien
tagagcatctaatttcccagggtgg

SEQ ID NO: 2222610 - DNA, 25 bp, Homo sapien
aattaatccttgttggcgagctgca

SEQ ID NO: 2222611 - DNA, 25 bp, Homo sapien
cagtatcttgataccctgtagggtc

SEQ ID NO: 2222612 - DNA, 25 bp, Homo sapien
tagggtcgtaaaagcacagtccatt

SEQ ID NO: 2222613 - DNA, 25 bp, Homo sapien
taaattcgatctaccagtccttgca

SEQ ID NO: 2222614 - DNA, 25 bp, Homo sapien
cataacaataaattgcctccattgg

SEQ ID NO: 2222615 - DNA, 25 bp, Homo sapien
gcttgctgtcaatggtcctgtgttg

SEQ ID NO: 2222616 - DNA, 25 bp, Homo sapien
gggatcaggcaagtgttcttggcct

SEQ ID NO: 2222617 - DNA, 25 bp, Homo sapien
gcctccattggattaaaactgttgt

SEQ ID NO: 2222618 - DNA, 25 bp, Homo sapien
ctgtctgctgctgtctctctactct

SEQ ID NO: 2222619 - DNA, 25 bp, Homo sapien
gctgctgtctctctactcttgctca

SEQ ID NO: 2222620 - DNA, 25 bp, Homo sapien
tctgctgctgtctctctactcttgc

SEQ ID NO: 2222621 - DNA, 25 bp, Homo sapien
gtctgctgctgtctctctactcttg

SEQ ID NO: 2222622 - DNA, 25 bp, Homo sapien
gaaatctccatgtagcctagattgg

SEQ ID NO: 2222623 - DNA, 25 bp, Homo sapien
gattgtattttacaccagaggtaca

SEQ ID NO: 2222624 - DNA, 25 bp, Homo sapien
tgtagcctagattggcagagaaatc

SEQ ID NO: 2222625 - DNA, 25 bp, Homo sapien
tctagattgtattttacaccagagg

SEQ ID NO: 2222626 - DNA, 25 bp, Homo sapien
ctacttcctttagaggagagcctgt

SEQ ID NO: 2222627 - DNA, 25 bp, Homo sapien
gcattctacttttatctctaaggca

SEQ ID NO: 2222628 - DNA, 25 bp, Homo sapien
tctgatactgagaatgatgcaaagt

SEQ ID NO: 2222629 - DNA, 25 bp, Homo sapien
gcctgtgaccacatgaagattttca

SEQ ID NO: 2222630 - DNA, 25 bp, Homo sapien
ttttacagttgcagacgtaactgag

SEQ ID NO: 2222631 - DNA, 25 bp, Homo sapien
ctgagagccgcgctgatctcctcgt

SEQ ID NO: 2222632 - DNA, 25 bp, Homo sapien
tccttcactgcctgtaaggctaagc

SEQ ID NO: 2222633 - DNA, 25 bp, Homo sapien
cctgtaaggctaagctgaccttttt

SEQ ID NO: 2222634 - DNA, 25 bp, Homo sapien
caaaattaactctgtgtcatgtata

SEQ ID NO: 2222635 - DNA, 25 bp, Homo sapien
caccaaaattaactctgtgtcatgt

SEQ ID NO: 2222636 - DNA, 25 bp, Homo sapien
cagtggaaaccctttgatttctgtc

SEQ ID NO: 2222637 - DNA, 25 bp, Homo sapien
ctcagtcagtggaaaccctttgatt

SEQ ID NO: 2222638 - DNA, 25 bp, Homo sapien
atctagatcaaaatttactgccaga

SEQ ID NO: 2222639 - DNA, 25 bp, Homo sapien
caaaatttactgccagaatatccat

SEQ ID NO: 2222640 - DNA, 25 bp, Homo sapien
tctagatcaaaatttactgccagaa

SEQ ID NO: 2222641 - DNA, 25 bp, Homo sapien
ctagatcaaaatttactgccagaat

SEQ ID NO: 2222642 - DNA, 25 bp, Homo sapien
taacagaagacaggttgccaggaac

SEQ ID NO: 2222643 - DNA, 25 bp, Homo sapien
caaagtcatcaggttcagtctatca

SEQ ID NO: 2222644 - DNA, 25 bp, Homo sapien
aaaacagttccgcaggatgcagagt

SEQ ID NO: 2222645 - DNA, 25 bp, Homo sapien
gcagagtcgttgtacaggtagcctt

SEQ ID NO: 2222646 - DNA, 25 bp, Homo sapien
taataagtggatggccgtcgacagt

SEQ ID NO: 2222647 - DNA, 25 bp, Homo sapien
gacacagtgcgggtactccattcta

SEQ ID NO: 2222648 - DNA, 25 bp, Homo sapien
tcaaactggagctcttcaacatggt

SEQ ID NO: 2222649 - DNA, 25 bp, Homo sapien
taatcagagggtatcgtggtgcatg

SEQ ID NO: 2222650 - DNA, 25 bp, Homo sapien
caacagtaagccatagtgtatgaga

SEQ ID NO: 2222651 - DNA, 25 bp, Homo sapien
tatgagacatggatattggaagaga

SEQ ID NO: 2222652 - DNA, 25 bp, Homo sapien
agagggggacgcatatttgtagatt

SEQ ID NO: 2222653 - DNA, 25 bp, Homo sapien
tgtagattggcccacgtggggtccc

SEQ ID NO: 2222654 - DNA, 25 bp, Homo sapien
cataagcggcctttgtgccaacgga

SEQ ID NO: 2222655 - DNA, 25 bp, Homo sapien
tgaccaggataaccacagtagaggc

SEQ ID NO: 2222656 - DNA, 25 bp, Homo sapien
tcttccaggctgatgcactgagtga

SEQ ID NO: 2222657 - DNA, 25 bp, Homo sapien
gcagcctgcataggttggttttcag

SEQ ID NO: 2222658 - DNA, 25 bp, Homo sapien
gaagtgggttgctacatgaccctcc

SEQ ID NO: 2222659 - DNA, 25 bp, Homo sapien
tatccagtaagagctggaaccacca

SEQ ID NO: 2222660 - DNA, 25 bp, Homo sapien
tatcaaaagtatcctggagcacagg

SEQ ID NO: 2222661 - DNA, 25 bp, Homo sapien
gaccttcttgaaattggatccagag

SEQ ID NO: 2222662 - DNA, 25 bp, Homo sapien
taactatacagctgaaccaggaact

SEQ ID NO: 2222663 - DNA, 25 bp, Homo sapien
agaagcaattgccaacaaagctcac

SEQ ID NO: 2222664 - DNA, 25 bp, Homo sapien
gcaattgccaacaaagctcaccagg

SEQ ID NO: 2222665 - DNA, 25 bp, Homo sapien
caggtgccctctgactctcatgtaa

SEQ ID NO: 2222666 - DNA, 25 bp, Homo sapien
atctgtagcctctaacccaataggg

SEQ ID NO: 2222667 - DNA, 25 bp, Homo sapien
caataggggcctgtggaaactctga

SEQ ID NO: 2222668 - DNA, 25 bp, Homo sapien
aaatctgtagcctctaacccaatag

SEQ ID NO: 2222669 - DNA, 25 bp, Homo sapien
tgggaatctccactgaaggttaaag

SEQ ID NO: 2222670 - DNA, 25 bp, Homo sapien
tgctgagagttctaggaattcctgg

SEQ ID NO: 2222671 - DNA, 25 bp, Homo sapien
ggaggtggaagctcaaggaactcta

SEQ ID NO: 2222672 - DNA, 25 bp, Homo sapien
gctgctgagagttctaggaattcct

SEQ ID NO: 2222673 - DNA, 25 bp, Homo sapien
aagctcaaggaactctagctgtgct

SEQ ID NO: 2222674 - DNA, 25 bp, Homo sapien
cctctgaggactttcggagtagatc

SEQ ID NO: 2222675 - DNA, 25 bp, Homo sapien
caagactgttgggatctcatgggcc

SEQ ID NO: 2222676 - DNA, 25 bp, Homo sapien
tttcagaacaatataggaggctgct

SEQ ID NO: 2222677 - DNA, 25 bp, Homo sapien
tactccttggctgcttgggacttct

SEQ ID NO: 2222678 - DNA, 25 bp, Homo sapien
tccggagctcggcaagaaggagcct

SEQ ID NO: 2222679 - DNA, 25 bp, Homo sapien
tttgacaatttgctaccaagagaga

SEQ ID NO: 2222680 - DNA, 25 bp, Homo sapien
gccccgccaaggctgattatcaaga

SEQ ID NO: 2222681 - DNA, 25 bp, Homo sapien
aggaaatgggtatgatttgacaatt

SEQ ID NO: 2222682 - DNA, 25 bp, Homo sapien
attcagagacttagtccaggagctt

SEQ ID NO: 2222683 - DNA, 25 bp, Homo sapien
tcagagacttagtccaggagcttgg

SEQ ID NO: 2222684 - DNA, 25 bp, Homo sapien
cagagacttagtccaggagcttggc

SEQ ID NO: 2222685 - DNA, 25 bp, Homo sapien
gagacttagtccaggagcttggctg

SEQ ID NO: 2222686 - DNA, 25 bp, Homo sapien
tcacggctgaactgtaatgcaccag

SEQ ID NO: 2222687 - DNA, 25 bp, Homo sapien
cacagtgatctcatactctccacat

SEQ ID NO: 2222688 - DNA, 25 bp, Homo sapien
tttaacaaagattgatgttcacggc

SEQ ID NO: 2222689 - DNA, 25 bp, Homo sapien
caagacggacattttgtaaagaatc

SEQ ID NO: 2222690 - DNA, 25 bp, Homo sapien
tgagatgtaactaaagggaaaatct

SEQ ID NO: 2222691 - DNA, 25 bp, Homo sapien
tgtaactaaagggaaaatcttgctg

SEQ ID NO: 2222692 - DNA, 25 bp, Homo sapien
atctcttccaggatggatttacatt

SEQ ID NO: 2222693 - DNA, 25 bp, Homo sapien
tccaggatggatttacattttctca

SEQ ID NO: 2222694 - DNA, 25 bp, Homo sapien
atgagttgctaataatacaatttcc

SEQ ID NO: 2222695 - DNA, 25 bp, Homo sapien
agttttaagccaagggaatgagttg

SEQ ID NO: 2222696 - DNA, 25 bp, Homo sapien
caagggaatgagttgctaataatac

SEQ ID NO: 2222697 - DNA, 25 bp, Homo sapien
taagccaagggaatgagttgctaat

SEQ ID NO: 2222698 - DNA, 25 bp, Homo sapien
ctgatcctggtgctgtggacccacg

SEQ ID NO: 2222699 - DNA, 25 bp, Homo sapien
gattatatgttgcacgtctaactgc

SEQ ID NO: 2222700 - DNA, 25 bp, Homo sapien
ttgcaagacccattcctttgtgtgt

SEQ ID NO: 2222701 - DNA, 25 bp, Homo sapien
gacccacgtgtccaacggtgattat

SEQ ID NO: 2222702 - DNA, 25 bp, Homo sapien
tccagtctttctacaaaaagggctc

SEQ ID NO: 2222703 - DNA, 25 bp, Homo sapien
tccattagacgaagctgttcttttt

SEQ ID NO: 2222704 - DNA, 25 bp, Homo sapien
aatatccttgttccattagacgaag

SEQ ID NO: 2222705 - DNA, 25 bp, Homo sapien
ccagtctttctacaaaaagggctct

SEQ ID NO: 2222706 - DNA, 25 bp, Homo sapien
agtggcacttaagccattaattctt

SEQ ID NO: 2222707 - DNA, 25 bp, Homo sapien
tcaagtggcacttaagccattaatt

SEQ ID NO: 2222708 - DNA, 25 bp, Homo sapien
caagtggcacttaagccattaattc

SEQ ID NO: 2222709 - DNA, 25 bp, Homo sapien
aagtggcacttaagccattaattct

SEQ ID NO: 2222710 - DNA, 25 bp, Homo sapien
tctactttagtagggctgatgcaat

SEQ ID NO: 2222711 - DNA, 25 bp, Homo sapien
ggctgatgcaatctttggccccatc

SEQ ID NO: 2222712 - DNA, 25 bp, Homo sapien
gatgcaatctttggccccatcatgt

SEQ ID NO: 2222713 - DNA, 25 bp, Homo sapien
tagtagggctgatgcaatctttggc

SEQ ID NO: 2222714 - DNA, 25 bp, Homo sapien
agccttaatatagggagtgcctgac

SEQ ID NO: 2222715 - DNA, 25 bp, Homo sapien
cacatttaagccttaatatagggag

SEQ ID NO: 2222716 - DNA, 25 bp, Homo sapien
tttggcttcacatttaagccttaat

SEQ ID NO: 2222717 - DNA, 25 bp, Homo sapien
tgtccacagttttggtttgttctgg

SEQ ID NO: 2222718 - DNA, 25 bp, Homo sapien
gcctttggtcactttgattagttca

SEQ ID NO: 2222719 - DNA, 25 bp, Homo sapien
ggtcactttgattagttcacagtac

SEQ ID NO: 2222720 - DNA, 25 bp, Homo sapien
tgattagttcacagtaccagcccca

SEQ ID NO: 2222721 - DNA, 25 bp, Homo sapien
agttcacagtaccagccccagagct

SEQ ID NO: 2222722 - DNA, 25 bp, Homo sapien
cttctgttcattcacttgctcaaac

SEQ ID NO: 2222723 - DNA, 25 bp, Homo sapien
tttagttgactttgtgtccttgctt

SEQ ID NO: 2222724 - DNA, 25 bp, Homo sapien
gcttctgttcattcacttgctcaaa

SEQ ID NO: 2222725 - DNA, 25 bp, Homo sapien
aatttagttgactttgtgtccttgc

SEQ ID NO: 2222726 - DNA, 25 bp, Homo sapien
tggggtggagaattccgtaaatgtc

SEQ ID NO: 2222727 - DNA, 25 bp, Homo sapien
gggtggagaattccgtaaatgtcta

SEQ ID NO: 2222728 - DNA, 25 bp, Homo sapien
gcaatgtggtgctgaaaggaacata

SEQ ID NO: 2222729 - DNA, 25 bp, Homo sapien
tgaaaggaacatatattctgttgat

SEQ ID NO: 2222730 - DNA, 25 bp, Homo sapien
tctccaggatggcatttggcaatag

SEQ ID NO: 2222731 - DNA, 25 bp, Homo sapien
ttcttgtgtagttgaggtgggatca

SEQ ID NO: 2222732 - DNA, 25 bp, Homo sapien
ttggcaatagagagcccacgaatat

SEQ ID NO: 2222733 - DNA, 25 bp, Homo sapien
gagagccctctgtcatgtttcatgg

SEQ ID NO: 2222734 - DNA, 25 bp, Homo sapien
ctccttctgactccccccacttcat

SEQ ID NO: 2222735 - DNA, 25 bp, Homo sapien
tctaatggcacttccttacgagggt

SEQ ID NO: 2222736 - DNA, 25 bp, Homo sapien
taaaaagatctctcactgggaaaag

SEQ ID NO: 2222737 - DNA, 25 bp, Homo sapien
cacaccctgctatgtctgtggagaa

SEQ ID NO: 2222738 - DNA, 25 bp, Homo sapien
cctactctgaggagatgactttgga

SEQ ID NO: 2222739 - DNA, 25 bp, Homo sapien
acatgcatcagccttcagaggtgct

SEQ ID NO: 2222740 - DNA, 25 bp, Homo sapien
gaagtatctcaacatatataccagc

SEQ ID NO: 2222741 - DNA, 25 bp, Homo sapien
ctagtgtgcttctacctgaagtatc

SEQ ID NO: 2222742 - DNA, 25 bp, Homo sapien
gcttcctgacatgcatcagccttca

SEQ ID NO: 2222743 - DNA, 25 bp, Homo sapien
ggtaatactgatgacctataagtta

SEQ ID NO: 2222744 - DNA, 25 bp, Homo sapien
actctatttgaagtgtcaggccaaa

SEQ ID NO: 2222745 - DNA, 25 bp, Homo sapien
acttggccccaatgacatatttctg

SEQ ID NO: 2222746 - DNA, 25 bp, Homo sapien
tggccttgagcaatctcccaacctt

SEQ ID NO: 2222747 - DNA, 25 bp, Homo sapien
aaaaaactagcatcagagtgaactg

SEQ ID NO: 2222748 - DNA, 25 bp, Homo sapien
taatatatgccttttgattagaaaa

SEQ ID NO: 2222749 - DNA, 25 bp, Homo sapien
taaattcttagatctaaagtgagtc

SEQ ID NO: 2222750 - DNA, 25 bp, Homo sapien
gtccagcatccagagtctacaagga

SEQ ID NO: 2222751 - DNA, 25 bp, Homo sapien
cattggaaatgcaaggtagttcatt

SEQ ID NO: 2222752 - DNA, 25 bp, Homo sapien
ccattggaaatgcaaggtagttcat

SEQ ID NO: 2222753 - DNA, 25 bp, Homo sapien
tggaaatgcaaggtagttcattttc

SEQ ID NO: 2222754 - DNA, 25 bp, Homo sapien
gaaatgcaaggtagttcattttctt

SEQ ID NO: 2222755 - DNA, 25 bp, Homo sapien
aggccatggagccttggggatccaa

SEQ ID NO: 2222756 - DNA, 25 bp, Homo sapien
tctttaggccatggagccttgggga

SEQ ID NO: 2222757 - DNA, 25 bp, Homo sapien
tttaggccatggagccttggggatc

SEQ ID NO: 2222758 - DNA, 25 bp, Homo sapien
ctctttaggccatggagccttgggg

SEQ ID NO: 2222759 - DNA, 25 bp, Homo sapien
actacagctaccatgtgattcagca

SEQ ID NO: 2222760 - DNA, 25 bp, Homo sapien
catcattgatcgtcggagaaatgta

SEQ ID NO: 2222761 - DNA, 25 bp, Homo sapien
aacaaatacatgaccaggtgctcaa

SEQ ID NO: 2222762 - DNA, 25 bp, Homo sapien
tattctacaagcacaagcaagagag

SEQ ID NO: 2222763 - DNA, 25 bp, Homo sapien
caacggatggaatttattgtcagga

SEQ ID NO: 2222764 - DNA, 25 bp, Homo sapien
taagtcaggttaattacagagcacc

SEQ ID NO: 2222765 - DNA, 25 bp, Homo sapien
gtgcattccacaatacagatagtag

SEQ ID NO: 2222766 - DNA, 25 bp, Homo sapien
gcattcagcacctacacaattttgt

SEQ ID NO: 2222767 - DNA, 25 bp, Homo sapien
catgctgctttcagaaatctaaacc

SEQ ID NO: 2222768 - DNA, 25 bp, Homo sapien
tcatgctgctttcagaaatctaaac

SEQ ID NO: 2222769 - DNA, 25 bp, Homo sapien
gacaagagcttgcagtggttagtag

SEQ ID NO: 2222770 - DNA, 25 bp, Homo sapien
gagtatcccataaaccttaatgtta

SEQ ID NO: 2222771 - DNA, 25 bp, Homo sapien
ttcttattaccaaggacactctatc

SEQ ID NO: 2222772 - DNA, 25 bp, Homo sapien
tagagtaaatgcatgagtaaatatc

SEQ ID NO: 2222773 - DNA, 25 bp, Homo sapien
ttatcaatggcacgtttgttgaaac

SEQ ID NO: 2222774 - DNA, 25 bp, Homo sapien
gggaagtgtctaatcttccagcatt

SEQ ID NO: 2222775 - DNA, 25 bp, Homo sapien
gacagatcttggtctcaacaataaa

SEQ ID NO: 2222776 - DNA, 25 bp, Homo sapien
tactcttgacagatcttggtctcaa

SEQ ID NO: 2222777 - DNA, 25 bp, Homo sapien
acataagtttgaggcagatatctgc

SEQ ID NO: 2222778 - DNA, 25 bp, Homo sapien
ctctgcgacgaaggcggaaggactt

SEQ ID NO: 2222779 - DNA, 25 bp, Homo sapien
tccacagcaactaggtcttctcgaa

SEQ ID NO: 2222780 - DNA, 25 bp, Homo sapien
gatgccaaggttactaacatcacga

SEQ ID NO: 2222781 - DNA, 25 bp, Homo sapien
aatgttttggacaaattcattattt

SEQ ID NO: 2222782 - DNA, 25 bp, Homo sapien
tcaataaaataaaatgttttggaca

SEQ ID NO: 2222783 - DNA, 25 bp, Homo sapien
aataaaatgttttggacaaattcat

SEQ ID NO: 2222784 - DNA, 25 bp, Homo sapien
taaaatgttttggacaaattcatta

SEQ ID NO: 2222785 - DNA, 25 bp, Homo sapien
ttggaaatgcttatataaaaatttg

SEQ ID NO: 2222786 - DNA, 25 bp, Homo sapien
aatgcttatataaaaatttgacttc

SEQ ID NO: 2222787 - DNA, 25 bp, Homo sapien
gcttatataaaaatttgacttccaa

SEQ ID NO: 2222788 - DNA, 25 bp, Homo sapien
ggaaatgcttatataaaaatttgac

SEQ ID NO: 2222789 - DNA, 25 bp, Homo sapien
gagctctaccagattttttggaggc

SEQ ID NO: 2222790 - DNA, 25 bp, Homo sapien
ccccagcaacaagtccaggtaagca

SEQ ID NO: 2222791 - DNA, 25 bp, Homo sapien
catcagatagcagttccccagcaac

SEQ ID NO: 2222792 - DNA, 25 bp, Homo sapien
ttttggaggcataacaatagaagta

SEQ ID NO: 2222793 - DNA, 25 bp, Homo sapien
aaaggctttgcctcaaaaacatgtg

SEQ ID NO: 2222794 - DNA, 25 bp, Homo sapien
gaatttaatacctgccaatgaagta

SEQ ID NO: 2222795 - DNA, 25 bp, Homo sapien
tccaactaccattagattaagcggc

SEQ ID NO: 2222796 - DNA, 25 bp, Homo sapien
acagaaggcattaacattgcgaatt

SEQ ID NO: 2222797 - DNA, 25 bp, Homo sapien
tcacaggcaggaagttaggctctcc

SEQ ID NO: 2222798 - DNA, 25 bp, Homo sapien
ccacgaagggaatttgcaggatcct

SEQ ID NO: 2222799 - DNA, 25 bp, Homo sapien
tcaaaaaagcacatctctccacggt

SEQ ID NO: 2222800 - DNA, 25 bp, Homo sapien
ataattgctgcagggtcactatcag

SEQ ID NO: 2222801 - DNA, 25 bp, Homo sapien
cttgggcatgaagtacttgtaaatg

SEQ ID NO: 2222802 - DNA, 25 bp, Homo sapien
tgggcatgaagtacttgtaaatgca

SEQ ID NO: 2222803 - DNA, 25 bp, Homo sapien
ttgggcatgaagtacttgtaaatgc

SEQ ID NO: 2222804 - DNA, 25 bp, Homo sapien
gggcatgaagtacttgtaaatgcag

SEQ ID NO: 2222805 - DNA, 25 bp, Homo sapien
taagcatacatctcccagaggagcc

SEQ ID NO: 2222806 - DNA, 25 bp, Homo sapien
tgaatgaaaggcctaagagagtaag

SEQ ID NO: 2222807 - DNA, 25 bp, Homo sapien
tttttcctgggtggcaactcggagc

SEQ ID NO: 2222808 - DNA, 25 bp, Homo sapien
tttcctgggtggcaactcggagctc

SEQ ID NO: 2222809 - DNA, 25 bp, Homo sapien
tggtgtgagctggaacagacagaac

SEQ ID NO: 2222810 - DNA, 25 bp, Homo sapien
acagctggtgtgagctggaacagac

SEQ ID NO: 2222811 - DNA, 25 bp, Homo sapien
agctggaacagacagaacatggcac

SEQ ID NO: 2222812 - DNA, 25 bp, Homo sapien
tggaacagacagaacatggcacgac

SEQ ID NO: 2222813 - DNA, 25 bp, Homo sapien
ccccatcccgccctgggacagctac

SEQ ID NO: 2222814 - DNA, 25 bp, Homo sapien
cccccatcccgccctgggacagcta

SEQ ID NO: 2222815 - DNA, 25 bp, Homo sapien
tcccccatcccgccctgggacagct

SEQ ID NO: 2222816 - DNA, 25 bp, Homo sapien
cctcccccatcccgccctgggacag

SEQ ID NO: 2222817 - DNA, 25 bp, Homo sapien
gggtattgaaggcgattttcaccat

SEQ ID NO: 2222818 - DNA, 25 bp, Homo sapien
tgagttctgaccgtgcggctcagga

SEQ ID NO: 2222819 - DNA, 25 bp, Homo sapien
cttgccggtcagtatctgagttctg

SEQ ID NO: 2222820 - DNA, 25 bp, Homo sapien
tcaggagggcctccacgtcttgccg

SEQ ID NO: 2222821 - DNA, 25 bp, Homo sapien
taaggcgctgctggaatcagcgtcc

SEQ ID NO: 2222822 - DNA, 25 bp, Homo sapien
gctgcgcggtaaggcgctgctggaa

SEQ ID NO: 2222823 - DNA, 25 bp, Homo sapien
agtgaatcttcgggctgcgcggtaa

SEQ ID NO: 2222824 - DNA, 25 bp, Homo sapien
aatcttcgggctgcgcggtaaggcg

SEQ ID NO: 2222825 - DNA, 25 bp, Homo sapien
cctgttagcccaaacagcacttact

SEQ ID NO: 2222826 - DNA, 25 bp, Homo sapien
tctaacactactgcaagccgaggtc

SEQ ID NO: 2222827 - DNA, 25 bp, Homo sapien
tacttatgacgcagtcccaaactgg

SEQ ID NO: 2222828 - DNA, 25 bp, Homo sapien
tgcaagaggagatcctgttagccca

SEQ ID NO: 2222829 - DNA, 25 bp, Homo sapien
tgcacctcaggcatactcccaccca

SEQ ID NO: 2222830 - DNA, 25 bp, Homo sapien
gaaggaagcctgctgtgtcgtgtct

SEQ ID NO: 2222831 - DNA, 25 bp, Homo sapien
tgcaacttcagataagagcaagaca

SEQ ID NO: 2222832 - DNA, 25 bp, Homo sapien
agcctgctgtgtcgtgtctttctgc

SEQ ID NO: 2222833 - DNA, 25 bp, Homo sapien
gcactggtacacagtttataaatag

SEQ ID NO: 2222834 - DNA, 25 bp, Homo sapien
ctgactggggtagcactggtacaca

SEQ ID NO: 2222835 - DNA, 25 bp, Homo sapien
gggtagcactggtacacagtttata

SEQ ID NO: 2222836 - DNA, 25 bp, Homo sapien
ttgctgactggggtagcactggtac

SEQ ID NO: 2222837 - DNA, 25 bp, Homo sapien
tccactatggtctgtgctagtctgg

SEQ ID NO: 2222838 - DNA, 25 bp, Homo sapien
tctgtgctagtctggcccggtgatc

SEQ ID NO: 2222839 - DNA, 25 bp, Homo sapien
ttgtgacatctccactatggtctgt

SEQ ID NO: 2222840 - DNA, 25 bp, Homo sapien
tatggtctgtgctagtctggcccgg

SEQ ID NO: 2222841 - DNA, 25 bp, Homo sapien
gaaatatccgatcttattgccttta

SEQ ID NO: 2222842 - DNA, 25 bp, Homo sapien
caagcttttgccagtccttttactt

SEQ ID NO: 2222843 - DNA, 25 bp, Homo sapien
tgctaccaccaagcttttgccagtc

SEQ ID NO: 2222844 - DNA, 25 bp, Homo sapien
cttccttggaaatatccgatcttat

SEQ ID NO: 2222845 - DNA, 25 bp, Homo sapien
cctcataaaatatgtcggtcctgtt

SEQ ID NO: 2222846 - DNA, 25 bp, Homo sapien
tatgtcggtcctgttatctgtctct

SEQ ID NO: 2222847 - DNA, 25 bp, Homo sapien
ctactcaggagagtccaacatccat

SEQ ID NO: 2222848 - DNA, 25 bp, Homo sapien
tcaggagagtccaacatccattcct

SEQ ID NO: 2222849 - DNA, 25 bp, Homo sapien
ggtcatgtgataagaacccagttgt

SEQ ID NO: 2222850 - DNA, 25 bp, Homo sapien
taagaggtatctttccaatcccgca

SEQ ID NO: 2222851 - DNA, 25 bp, Homo sapien
caacagcttcaggtgtgcatgggat

SEQ ID NO: 2222852 - DNA, 25 bp, Homo sapien
tcttctgagggtagagaaaactaca

SEQ ID NO: 2222853 - DNA, 25 bp, Homo sapien
ggtttgctgtgctcatcgcagaggt

SEQ ID NO: 2222854 - DNA, 25 bp, Homo sapien
ctgtgctcatcgcagaggtattcat

SEQ ID NO: 2222855 - DNA, 25 bp, Homo sapien
tttgctgtgctcatcgcagaggtat

SEQ ID NO: 2222856 - DNA, 25 bp, Homo sapien
tgctgtgctcatcgcagaggtattc

SEQ ID NO: 2222857 - DNA, 25 bp, Homo sapien
cccgtgttctactcttctggttagc

SEQ ID NO: 2222858 - DNA, 25 bp, Homo sapien
gttctactcttctggttagcaagaa

SEQ ID NO: 2222859 - DNA, 25 bp, Homo sapien
cttacccgtgttctactcttctggt

SEQ ID NO: 2222860 - DNA, 25 bp, Homo sapien
cgtgttctactcttctggttagcaa

SEQ ID NO: 2222861 - DNA, 25 bp, Homo sapien
tagcaggggcaaggtgttgattgag

SEQ ID NO: 2222862 - DNA, 25 bp, Homo sapien
ttgattgagcctgtgcataatctcc

SEQ ID NO: 2222863 - DNA, 25 bp, Homo sapien
gattgagcctgtgcataatctccat

SEQ ID NO: 2222864 - DNA, 25 bp, Homo sapien
tgttgattgagcctgtgcataatct

SEQ ID NO: 2222865 - DNA, 25 bp, Homo sapien
tatcctccaatacgataggctggag

SEQ ID NO: 2222866 - DNA, 25 bp, Homo sapien
aatacgataggctggagttcctgca

SEQ ID NO: 2222867 - DNA, 25 bp, Homo sapien
gttcctgcataaccatcattttgat

SEQ ID NO: 2222868 - DNA, 25 bp, Homo sapien
ttattggtcatatcctccaatacga

SEQ ID NO: 2222869 - DNA, 25 bp, Homo sapien
ctttttgcaaggttcgttgcttcct

SEQ ID NO: 2222870 - DNA, 25 bp, Homo sapien
ggccgctgatactggtgtatgcttc

SEQ ID NO: 2222871 - DNA, 25 bp, Homo sapien
ctgcttgattgattcggccgctgat

SEQ ID NO: 2222872 - DNA, 25 bp, Homo sapien
ttgattcggccgctgatactggtgt

SEQ ID NO: 2222873 - DNA, 25 bp, Homo sapien
tcttgccctgtacaattagaggaag

SEQ ID NO: 2222874 - DNA, 25 bp, Homo sapien
tatcgtagggcagaaacaagttgcc

SEQ ID NO: 2222875 - DNA, 25 bp, Homo sapien
ggcagaaacaagttgccagagaggc

SEQ ID NO: 2222876 - DNA, 25 bp, Homo sapien
tcagagagacttatcgtagggcaga

SEQ ID NO: 2222877 - DNA, 25 bp, Homo sapien
taatatctgcatctggctagtcagt

SEQ ID NO: 2222878 - DNA, 25 bp, Homo sapien
catgttactctaagctgttcctttg

SEQ ID NO: 2222879 - DNA, 25 bp, Homo sapien
tgtcacaaaacctttgccagggcct

SEQ ID NO: 2222880 - DNA, 25 bp, Homo sapien
gaatgtaattagttccctcttgcta

SEQ ID NO: 2222881 - DNA, 25 bp, Homo sapien
tagacaccagagaacagacatatgc

SEQ ID NO: 2222882 - DNA, 25 bp, Homo sapien
gactgctttttattgatccagttgc

SEQ ID NO: 2222883 - DNA, 25 bp, Homo sapien
cagttgccttcaccactgggtatag

SEQ ID NO: 2222884 - DNA, 25 bp, Homo sapien
cagacatatgcaagatgatttaaag

SEQ ID NO: 2222885 - DNA, 25 bp, Homo sapien
ctgcttcctcgggtacgactttgta

SEQ ID NO: 2222886 - DNA, 25 bp, Homo sapien
ctgtgagtggtatcgccccagaact

SEQ ID NO: 2222887 - DNA, 25 bp, Homo sapien
tcctcgggtacgactttgtaggagc

SEQ ID NO: 2222888 - DNA, 25 bp, Homo sapien
ctctgtcaaagtctcctgaatcttg

SEQ ID NO: 2222889 - DNA, 25 bp, Homo sapien
tgctgcgtctacccaggcagtatac

SEQ ID NO: 2222890 - DNA, 25 bp, Homo sapien
ccagcagaccgcactgctgcgtcta

SEQ ID NO: 2222891 - DNA, 25 bp, Homo sapien
cccaggcagtatacatctagccctt

SEQ ID NO: 2222892 - DNA, 25 bp, Homo sapien
catctagcccttcacatgtaatcat

SEQ ID NO: 2222893 - DNA, 25 bp, Homo sapien
tgctctggctctaggccactcttct

SEQ ID NO: 2222894 - DNA, 25 bp, Homo sapien
tgctggagtccaaccccggaagtag

SEQ ID NO: 2222895 - DNA, 25 bp, Homo sapien
gggccagaacaccacgttctcttgt

SEQ ID NO: 2222896 - DNA, 25 bp, Homo sapien
acagcaggtcttctgtgggagaagt

SEQ ID NO: 2222897 - DNA, 25 bp, Homo sapien
attcttttgtgaggttgaagcatgt

SEQ ID NO: 2222898 - DNA, 25 bp, Homo sapien
cattcttttgtgaggttgaagcatg

SEQ ID NO: 2222899 - DNA, 25 bp, Homo sapien
tcattcttttgtgaggttgaagcat

SEQ ID NO: 2222900 - DNA, 25 bp, Homo sapien
cttccacccattgaggcctttgtcc

SEQ ID NO: 2222901 - DNA, 25 bp, Homo sapien
ttccacccattgaggcctttgtcca

SEQ ID NO: 2222902 - DNA, 25 bp, Homo sapien
tccacccattgaggcctttgtccat

SEQ ID NO: 2222903 - DNA, 25 bp, Homo sapien
tagctttcttattattactatctct

SEQ ID NO: 2222904 - DNA, 25 bp, Homo sapien
ttgtatactggggcaagtcacttcc

SEQ ID NO: 2222905 - DNA, 25 bp, Homo sapien
agtcacttcccctcgctgggataca

SEQ ID NO: 2222906 - DNA, 25 bp, Homo sapien
ttgttggcctgcatccctccatatc

SEQ ID NO: 2222907 - DNA, 25 bp, Homo sapien
gctagaggtccactccagatgctgt

SEQ ID NO: 2222908 - DNA, 25 bp, Homo sapien
tccagatgctgtttgcctgggtacc

SEQ ID NO: 2222909 - DNA, 25 bp, Homo sapien
ctccagatgctgtttgcctgggtac

SEQ ID NO: 2222910 - DNA, 25 bp, Homo sapien
agaggtccactccagatgctgtttg

SEQ ID NO: 2222911 - DNA, 25 bp, Homo sapien
aatgggatcctacttgtaagcaagg

SEQ ID NO: 2222912 - DNA, 25 bp, Homo sapien
tttagttgccaagctcccaaagcca

SEQ ID NO: 2222913 - DNA, 25 bp, Homo sapien
agcaaggagaccatatattagggcc

SEQ ID NO: 2222914 - DNA, 25 bp, Homo sapien
tcactattacctggacctgggaggt

SEQ ID NO: 2222915 - DNA, 25 bp, Homo sapien
gaagggcagctataggctataggcc

SEQ ID NO: 2222916 - DNA, 25 bp, Homo sapien
ttaaaatgttcaccagggaagggca

SEQ ID NO: 2222917 - DNA, 25 bp, Homo sapien
agggaagggcagctataggctatag

SEQ ID NO: 2222918 - DNA, 25 bp, Homo sapien
agggcagctataggctataggcctt

SEQ ID NO: 2222919 - DNA, 25 bp, Homo sapien
cttgttgctgcctccgggaattggt

SEQ ID NO: 2222920 - DNA, 25 bp, Homo sapien
cagaagcagtggtagtgacaactgc

SEQ ID NO: 2222921 - DNA, 25 bp, Homo sapien
ctccgggaattggtctctcagagga

SEQ ID NO: 2222922 - DNA, 25 bp, Homo sapien
gtggtagtgacaactgccaaaagct

SEQ ID NO: 2222923 - DNA, 25 bp, Homo sapien
gggagttgtggagcatgcagcctgc

SEQ ID NO: 2222924 - DNA, 25 bp, Homo sapien
tactattcgatatctcagctgtggc

SEQ ID NO: 2222925 - DNA, 25 bp, Homo sapien
agaaggtggcaagcccccatttggc

SEQ ID NO: 2222926 - DNA, 25 bp, Homo sapien
tgctggaggcatgcgaaagtgctcc

SEQ ID NO: 2222927 - DNA, 25 bp, Homo sapien
caaactggtgcatctatactgtgga

SEQ ID NO: 2222928 - DNA, 25 bp, Homo sapien
gaaaggtgttcaatatgcgtagcca

SEQ ID NO: 2222929 - DNA, 25 bp, Homo sapien
tatggcccagtaatttgcactttgg

SEQ ID NO: 2222930 - DNA, 25 bp, Homo sapien
caacagtgacagtacaaaatgcagg

SEQ ID NO: 2222931 - DNA, 25 bp, Homo sapien
gatccatgcatagttagccttgtaa

SEQ ID NO: 2222932 - DNA, 25 bp, Homo sapien
agtcatcatccctgttctaacggca

SEQ ID NO: 2222933 - DNA, 25 bp, Homo sapien
gaaatctgattgtcattgcccctaa

SEQ ID NO: 2222934 - DNA, 25 bp, Homo sapien
gacaatggctcccttttactgagga

SEQ ID NO: 2222935 - DNA, 25 bp, Homo sapien
tgagcctgtgggtgttgctaaatga

SEQ ID NO: 2222936 - DNA, 25 bp, Homo sapien
cagtgctccaatgtcggctgaatat

SEQ ID NO: 2222937 - DNA, 25 bp, Homo sapien
tcccttatgactgggcatgtggtca

SEQ ID NO: 2222938 - DNA, 25 bp, Homo sapien
tgaagtcttcgtaggtcaaaaagaa

SEQ ID NO: 2222939 - DNA, 25 bp, Homo sapien
gatggaggcatgctgtgtttctgca

SEQ ID NO: 2222940 - DNA, 25 bp, Homo sapien
catgacagggagataggccacacct

SEQ ID NO: 2222941 - DNA, 25 bp, Homo sapien
taggctgcaggacttccatgggcag

SEQ ID NO: 2222942 - DNA, 25 bp, Homo sapien
acctttcccaggtggaacctgcaga

SEQ ID NO: 2222943 - DNA, 25 bp, Homo sapien
aggtcagcttgaccagtatttcttt

SEQ ID NO: 2222944 - DNA, 25 bp, Homo sapien
ggtcagcttgaccagtatttctttt

SEQ ID NO: 2222945 - DNA, 25 bp, Homo sapien
aaggtcagcttgaccagtatttctt

SEQ ID NO: 2222946 - DNA, 25 bp, Homo sapien
tcttcctctggtaggattttcagct

SEQ ID NO: 2222947 - DNA, 25 bp, Homo sapien
cttcctctggtaggattttcagctg

SEQ ID NO: 2222948 - DNA, 25 bp, Homo sapien
tcctctggtaggattttcagctgaa

SEQ ID NO: 2222949 - DNA, 25 bp, Homo sapien
gctcttcctctggtaggattttcag

SEQ ID NO: 2222950 - DNA, 25 bp, Homo sapien
ttcttcctcacaagcaaggctaact

SEQ ID NO: 2222951 - DNA, 25 bp, Homo sapien
atctgcctggaaggcaatacaaact

SEQ ID NO: 2222952 - DNA, 25 bp, Homo sapien
tcttcctcacaagcaaggctaactg

SEQ ID NO: 2222953 - DNA, 25 bp, Homo sapien
cctggaaggcaatacaaacttcttc

SEQ ID NO: 2222954 - DNA, 25 bp, Homo sapien
caagttcttcttgtaaactgtgttc

SEQ ID NO: 2222955 - DNA, 25 bp, Homo sapien
ttcagcagtaagacagaatccaact

SEQ ID NO: 2222956 - DNA, 25 bp, Homo sapien
ttcagcttcagcagtaagacagaat

SEQ ID NO: 2222957 - DNA, 25 bp, Homo sapien
taagacagaatccaactgtgttttc

SEQ ID NO: 2222958 - DNA, 25 bp, Homo sapien
gcagtaagacagaatccaactgtgt

SEQ ID NO: 2222959 - DNA, 25 bp, Homo sapien
tagggcggctctgataatagtgcac

SEQ ID NO: 2222960 - DNA, 25 bp, Homo sapien
taaaggaacaacagcacgaaacagg

SEQ ID NO: 2222961 - DNA, 25 bp, Homo sapien
gcaaacaggccaaagctcaggagag

SEQ ID NO: 2222962 - DNA, 25 bp, Homo sapien
tagaggtaggcaacaatcggagagc

SEQ ID NO: 2222963 - DNA, 25 bp, Homo sapien
tacctgtttcatggaagcaacaatt

SEQ ID NO: 2222964 - DNA, 25 bp, Homo sapien
caattgtgccaagagaatctatctg

SEQ ID NO: 2222965 - DNA, 25 bp, Homo sapien
cctgtggtagttgcatattgagatc

SEQ ID NO: 2222966 - DNA, 25 bp, Homo sapien
gtttcatggaagcaacaattgtgcc

SEQ ID NO: 2222967 - DNA, 25 bp, Homo sapien
aagcaactttaaatttcatgtggaa

SEQ ID NO: 2222968 - DNA, 25 bp, Homo sapien
aaaaagcaactttaaatttcatgtg

SEQ ID NO: 2222969 - DNA, 25 bp, Homo sapien
aggaaataagacaggaaacaaatgg

SEQ ID NO: 2222970 - DNA, 25 bp, Homo sapien
ggtaccaaaatagatatatagacaa

SEQ ID NO: 2222971 - DNA, 25 bp, Homo sapien
tgtatgccaactccggtatgaaaat

SEQ ID NO: 2222972 - DNA, 25 bp, Homo sapien
tctctaaaccattggagtgtatgcc

SEQ ID NO: 2222973 - DNA, 25 bp, Homo sapien
tttctgcgtgtctctaaaccattgg

SEQ ID NO: 2222974 - DNA, 25 bp, Homo sapien
cattggagtgtatgccaactccggt

SEQ ID NO: 2222975 - DNA, 25 bp, Homo sapien
cagcatatagaataagaaaatgcgg

SEQ ID NO: 2222976 - DNA, 25 bp, Homo sapien
atatagaataagaaaatgcggattt

SEQ ID NO: 2222977 - DNA, 25 bp, Homo sapien
ctgaagcagcatatagaataagaaa

SEQ ID NO: 2222978 - DNA, 25 bp, Homo sapien
gcatatagaataagaaaatgcggat

SEQ ID NO: 2222979 - DNA, 25 bp, Homo sapien
ctattaagcatttgctttttgcatg

SEQ ID NO: 2222980 - DNA, 25 bp, Homo sapien
tattaagcatttgctttttgcatgg

SEQ ID NO: 2222981 - DNA, 25 bp, Homo sapien
catttgctttttgcatggtttttgg

SEQ ID NO: 2222982 - DNA, 25 bp, Homo sapien
taagcatttgctttttgcatggttt

SEQ ID NO: 2222983 - DNA, 25 bp, Homo sapien
ccatttgttgtgtttgaatatccag

SEQ ID NO: 2222984 - DNA, 25 bp, Homo sapien
gaatatccagtgtttcaaactggtg

SEQ ID NO: 2222985 - DNA, 25 bp, Homo sapien
tgttattagggttgtagagctactc

SEQ ID NO: 2222986 - DNA, 25 bp, Homo sapien
tattagggttgtagagctactcatt

SEQ ID NO: 2222987 - DNA, 25 bp, Homo sapien
tttaccagcaccctgtagcaccctg

SEQ ID NO: 2222988 - DNA, 25 bp, Homo sapien
ttaccagcaccctgtagcaccctgc

SEQ ID NO: 2222989 - DNA, 25 bp, Homo sapien
ctttaccagcaccctgtagcaccct

SEQ ID NO: 2222990 - DNA, 25 bp, Homo sapien
gatttttctggtggattgcattttc

SEQ ID NO: 2222991 - DNA, 25 bp, Homo sapien
cattttcagcatgtattcttgcagc

SEQ ID NO: 2222992 - DNA, 25 bp, Homo sapien
cccattgttactgcattttgacctc

SEQ ID NO: 2222993 - DNA, 25 bp, Homo sapien
tgatttttctggtggattgcatttt

SEQ ID NO: 2222994 - DNA, 25 bp, Homo sapien
cattcctattaagttcttttgcagc

SEQ ID NO: 2222995 - DNA, 25 bp, Homo sapien
ttcctattaagttcttttgcagcaa

SEQ ID NO: 2222996 - DNA, 25 bp, Homo sapien
ttcttggcattcctattaagttctt

SEQ ID NO: 2222997 - DNA, 25 bp, Homo sapien
ttggcattcctattaagttcttttg

SEQ ID NO: 2222998 - DNA, 25 bp, Homo sapien
ataaattaagctatcttctttatct

SEQ ID NO: 2222999 - DNA, 25 bp, Homo sapien
aataaattaagctatcttctttatc

SEQ ID NO: 2223000 - DNA, 25 bp, Homo sapien
tcctgcaggcaatctgagaccaaga

SEQ ID NO: 2223001 - DNA, 25 bp, Homo sapien
tatagggcctagaatgacagagcag

SEQ ID NO: 2223002 - DNA, 25 bp, Homo sapien
gtctctttgttaactgccaatcttc

SEQ ID NO: 2223003 - DNA, 25 bp, Homo sapien
gtaaccagaaagaacacatcgcccc

SEQ ID NO: 2223004 - DNA, 25 bp, Homo sapien
tattcaaggagatgatgcatgagac

SEQ ID NO: 2223005 - DNA, 25 bp, Homo sapien
tacagtaagcctctgactaccgaag

SEQ ID NO: 2223006 - DNA, 25 bp, Homo sapien
gcatgagactcttcgcataactgat

SEQ ID NO: 2223007 - DNA, 25 bp, Homo sapien
tatataaccttatcccaagacggcc

SEQ ID NO: 2223008 - DNA, 25 bp, Homo sapien
aagctttgcaggaggctatatgacc

SEQ ID NO: 2223009 - DNA, 25 bp, Homo sapien
cattaactttgattacagtcaggca

SEQ ID NO: 2223010 - DNA, 25 bp, Homo sapien
cagctttataaggttggcaggtcag

SEQ ID NO: 2223011 - DNA, 25 bp, Homo sapien
tcaaatacttctaaaggttctggga

SEQ ID NO: 2223012 - DNA, 25 bp, Homo sapien
cttgcctctgttctcgcacagtttc

SEQ ID NO: 2223013 - DNA, 25 bp, Homo sapien
ttcccaacaatttcaaagaggacga

SEQ ID NO: 2223014 - DNA, 25 bp, Homo sapien
tctgttctcgcacagtttcccaaca

SEQ ID NO: 2223015 - DNA, 25 bp, Homo sapien
caacaatttcaaagaggacgaattc

SEQ ID NO: 2223016 - DNA, 25 bp, Homo sapien
gaccaaaaaggtcactaccaggcac

SEQ ID NO: 2223017 - DNA, 25 bp, Homo sapien
tccacagctagaccaaaaaggtcac

SEQ ID NO: 2223018 - DNA, 25 bp, Homo sapien
cacagctagaccaaaaaggtcacta

SEQ ID NO: 2223019 - DNA, 25 bp, Homo sapien
gctagaccaaaaaggtcactaccag

SEQ ID NO: 2223020 - DNA, 25 bp, Homo sapien
tcccacgacttttcgcgggaggcga

SEQ ID NO: 2223021 - DNA, 25 bp, Homo sapien
ggcacgcgcagctactaggtttgca

SEQ ID NO: 2223022 - DNA, 25 bp, Homo sapien
gctagtcctgaatagccggcacgcg

SEQ ID NO: 2223023 - DNA, 25 bp, Homo sapien
ggatactccccatattcgacgtggt

SEQ ID NO: 2223024 - DNA, 25 bp, Homo sapien
taacacttctcatctatctaactgg

SEQ ID NO: 2223025 - DNA, 25 bp, Homo sapien
ggagtttcactagctggaggtaaga

SEQ ID NO: 2223026 - DNA, 25 bp, Homo sapien
gcttttagacaacccataattcaag

SEQ ID NO: 2223027 - DNA, 25 bp, Homo sapien
catgtgtttggcaagcatattctct

SEQ ID NO: 2223028 - DNA, 25 bp, Homo sapien
tgagtgattgttgatagaaggattc

SEQ ID NO: 2223029 - DNA, 25 bp, Homo sapien
catatgagtgattgttgatagaagg

SEQ ID NO: 2223030 - DNA, 25 bp, Homo sapien
taattttccaaacatatgagtgatt

SEQ ID NO: 2223031 - DNA, 25 bp, Homo sapien
ccaaacatatgagtgattgttgata

SEQ ID NO: 2223032 - DNA, 25 bp, Homo sapien
agccctctctgtagcaaatcttggc

SEQ ID NO: 2223033 - DNA, 25 bp, Homo sapien
ccagagttgcctggttagagcttac

SEQ ID NO: 2223034 - DNA, 25 bp, Homo sapien
ctttctattgccagagttgcctggt

SEQ ID NO: 2223035 - DNA, 25 bp, Homo sapien
ttggctctctctttagccagcttag

SEQ ID NO: 2223036 - DNA, 25 bp, Homo sapien
ctttcaccatgaccaaactgaagaa

SEQ ID NO: 2223037 - DNA, 25 bp, Homo sapien
tctgcagggtttccataagggtccc

SEQ ID NO: 2223038 - DNA, 25 bp, Homo sapien
ctctaattctcttgtcactctggct

SEQ ID NO: 2223039 - DNA, 25 bp, Homo sapien
catgaccaaactgaagaaagaccat

SEQ ID NO: 2223040 - DNA, 25 bp, Homo sapien
tgatgggatgggtttgaggagagca

SEQ ID NO: 2223041 - DNA, 25 bp, Homo sapien
tagtttttctccttgatgggatggg

SEQ ID NO: 2223042 - DNA, 25 bp, Homo sapien
cagcagttggtgaggtaagttttaa

SEQ ID NO: 2223043 - DNA, 25 bp, Homo sapien
acgctaacaccacacccctgtagtt

SEQ ID NO: 2223044 - DNA, 25 bp, Homo sapien
gttgtacttcagagtattctcagcg

SEQ ID NO: 2223045 - DNA, 25 bp, Homo sapien
gcttgaaagcctgttgtacttcaga

SEQ ID NO: 2223046 - DNA, 25 bp, Homo sapien
ttctcagcgattcccttcaaaaggg

SEQ ID NO: 2223047 - DNA, 25 bp, Homo sapien
ggagatttctctggccagcttgctt

SEQ ID NO: 2223048 - DNA, 25 bp, Homo sapien
gcaagggccacacattgcctttggt

SEQ ID NO: 2223049 - DNA, 25 bp, Homo sapien
cacaaataaagatccagcaagggcc

SEQ ID NO: 2223050 - DNA, 25 bp, Homo sapien
tgtacccatgcctcagctcaggttg

SEQ ID NO: 2223051 - DNA, 25 bp, Homo sapien
ccccaaaaggtctcaggaatgtaat

SEQ ID NO: 2223052 - DNA, 25 bp, Homo sapien
ttgtcatcctttggaggagacgagg

SEQ ID NO: 2223053 - DNA, 25 bp, Homo sapien
gagttgtcatcctttggaggagacg

SEQ ID NO: 2223054 - DNA, 25 bp, Homo sapien
catcctttggaggagacgaggtgtt

SEQ ID NO: 2223055 - DNA, 25 bp, Homo sapien
tcatcctttggaggagacgaggtgt

SEQ ID NO: 2223056 - DNA, 25 bp, Homo sapien
gaagaattttcagcggacggtgatg

SEQ ID NO: 2223057 - DNA, 25 bp, Homo sapien
aatccctgaggagtgatgggcagta

SEQ ID NO: 2223058 - DNA, 25 bp, Homo sapien
tcaagaaatccctgaggagtgatgg

SEQ ID NO: 2223059 - DNA, 25 bp, Homo sapien
gatgggcagtagaagaattttcagc

SEQ ID NO: 2223060 - DNA, 25 bp, Homo sapien
ccaccacctgctctaccattacggc

SEQ ID NO: 2223061 - DNA, 25 bp, Homo sapien
catgccaggaccaccacctcttgga

SEQ ID NO: 2223062 - DNA, 25 bp, Homo sapien
atgccaggaccaccacctcttggac

SEQ ID NO: 2223063 - DNA, 25 bp, Homo sapien
ctgctctaccattacggcctcctgg

SEQ ID NO: 2223064 - DNA, 25 bp, Homo sapien
ccccgaagattgagatccactgtat

SEQ ID NO: 2223065 - DNA, 25 bp, Homo sapien
tgtacataatgacaacatcttcact

SEQ ID NO: 2223066 - DNA, 25 bp, Homo sapien
aagccatgtcagcaagggactgtca

SEQ ID NO: 2223067 - DNA, 25 bp, Homo sapien
tcttcactagactgagtgctcaagg

SEQ ID NO: 2223068 - DNA, 25 bp, Homo sapien
ctgctgcgtggatatccatggattt

SEQ ID NO: 2223069 - DNA, 25 bp, Homo sapien
ggggctgctgcgtggatatccatgg

SEQ ID NO: 2223070 - DNA, 25 bp, Homo sapien
gctgctgcgtggatatccatggatt

SEQ ID NO: 2223071 - DNA, 25 bp, Homo sapien
ggctgctgcgtggatatccatggat

SEQ ID NO: 2223072 - DNA, 25 bp, Homo sapien
cactgtcactttgagagcgtccagc

SEQ ID NO: 2223073 - DNA, 25 bp, Homo sapien
tctgactgcaggaaagacacatcac

SEQ ID NO: 2223074 - DNA, 25 bp, Homo sapien
gacacatcacatttcggagccaggt

SEQ ID NO: 2223075 - DNA, 25 bp, Homo sapien
tgtagcttgtagagggtcccatcca

SEQ ID NO: 2223076 - DNA, 25 bp, Homo sapien
caggcagtcactctcaatctgagac

SEQ ID NO: 2223077 - DNA, 25 bp, Homo sapien
ccaggcagtcactctcaatctgaga

SEQ ID NO: 2223078 - DNA, 25 bp, Homo sapien
tgaaatcgatgagaatgttaccgac

SEQ ID NO: 2223079 - DNA, 25 bp, Homo sapien
ttggtgaaatcgatgagaatgttac

SEQ ID NO: 2223080 - DNA, 25 bp, Homo sapien
ggtgaaatcgatgagaatgttaccg

SEQ ID NO: 2223081 - DNA, 25 bp, Homo sapien
gcttggtgaaatcgatgagaatgtt

SEQ ID NO: 2223082 - DNA, 25 bp, Homo sapien
aaggccccccattccatgttcacac

SEQ ID NO: 2223083 - DNA, 25 bp, Homo sapien
atgttcacacacatccgcccctctt

SEQ ID NO: 2223084 - DNA, 25 bp, Homo sapien
tgagtgaaagctcatccacagccac

SEQ ID NO: 2223085 - DNA, 25 bp, Homo sapien
gcttgccggggttgagtgaaagctc

SEQ ID NO: 2223086 - DNA, 25 bp, Homo sapien
ttcaaagccacaggtcatcatagtt

SEQ ID NO: 2223087 - DNA, 25 bp, Homo sapien
agccacaggtcatcatagttctgac

SEQ ID NO: 2223088 - DNA, 25 bp, Homo sapien
aagccacaggtcatcatagttctga

SEQ ID NO: 2223089 - DNA, 25 bp, Homo sapien
caaagccacaggtcatcatagttct

SEQ ID NO: 2223090 - DNA, 25 bp, Homo sapien
caggtcaaactcctctcgccagtgg

SEQ ID NO: 2223091 - DNA, 25 bp, Homo sapien
aactcctctcgccagtggatcgctt

SEQ ID NO: 2223092 - DNA, 25 bp, Homo sapien
cagtggatcgcttccttcagcaggg

SEQ ID NO: 2223093 - DNA, 25 bp, Homo sapien
tcaaactcctctcgccagtggatcg

SEQ ID NO: 2223094 - DNA, 25 bp, Homo sapien
tctgctggcaggggaaggagaaggt

SEQ ID NO: 2223095 - DNA, 25 bp, Homo sapien
aggagaaggtaaaacccagaggcag

SEQ ID NO: 2223096 - DNA, 25 bp, Homo sapien
tctcgtccaggctgttctgctggca

SEQ ID NO: 2223097 - DNA, 25 bp, Homo sapien
tagaggaggatgctctcgtccaggc

SEQ ID NO: 2223098 - DNA, 25 bp, Homo sapien
ccatgtactccaggaagtcctcgat

SEQ ID NO: 2223099 - DNA, 25 bp, Homo sapien
ttcatgcccatgtactccaggaagt

SEQ ID NO: 2223100 - DNA, 25 bp, Homo sapien
gcccttcatgcccatgtactccagg

SEQ ID NO: 2223101 - DNA, 25 bp, Homo sapien
ccttcatgcccatgtactccaggaa

SEQ ID NO: 2223102 - DNA, 25 bp, Homo sapien
gtggtcaaagagctcgtccccggtg

SEQ ID NO: 2223103 - DNA, 25 bp, Homo sapien
tggtcaaagagctcgtccccggtgc

SEQ ID NO: 2223104 - DNA, 25 bp, Homo sapien
tgtggtcaaagagctcgtccccggt

SEQ ID NO: 2223105 - DNA, 25 bp, Homo sapien
ggtcaaagagctcgtccccggtgcc

SEQ ID NO: 2223106 - DNA, 25 bp, Homo sapien
ctcctgcgggatgccatagatcttg

SEQ ID NO: 2223107 - DNA, 25 bp, Homo sapien
cgggatgccatagatcttgttgtgc

SEQ ID NO: 2223108 - DNA, 25 bp, Homo sapien
tcttgttgtgcatctccactccact

SEQ ID NO: 2223109 - DNA, 25 bp, Homo sapien
cctgcgggatgccatagatcttgtt

SEQ ID NO: 2223110 - DNA, 25 bp, Homo sapien
cagcaggacccggaaatttgttcct

SEQ ID NO: 2223111 - DNA, 25 bp, Homo sapien
tctgtgccgtcaggggtggcacaca

SEQ ID NO: 2223112 - DNA, 25 bp, Homo sapien
ctttctctgtgccgtcaggggtggc

SEQ ID NO: 2223113 - DNA, 25 bp, Homo sapien
tggcacacacgtaggtgggaagcat

SEQ ID NO: 2223114 - DNA, 25 bp, Homo sapien
gtggcacacacgtaggtgggaagca

SEQ ID NO: 2223115 - DNA, 25 bp, Homo sapien
ttgacgggggcactggcgtgagtct

SEQ ID NO: 2223116 - DNA, 25 bp, Homo sapien
gacgggggcactggcgtgagtctcc

SEQ ID NO: 2223117 - DNA, 25 bp, Homo sapien
gggggcactggcgtgagtctccttg

SEQ ID NO: 2223118 - DNA, 25 bp, Homo sapien
ggcactggcgtgagtctccttgctc

SEQ ID NO: 2223119 - DNA, 25 bp, Homo sapien
aagcagacatagcagtcgggcacca

SEQ ID NO: 2223120 - DNA, 25 bp, Homo sapien
ggaagcagacatagcagtcgggcac

SEQ ID NO: 2223121 - DNA, 25 bp, Homo sapien
aatagtagagcgaagctgctcctca

SEQ ID NO: 2223122 - DNA, 25 bp, Homo sapien
tagtagagcgaagctgctcctcacc

SEQ ID NO: 2223123 - DNA, 25 bp, Homo sapien
aaacagttgcttccccaggttcagt

SEQ ID NO: 2223124 - DNA, 25 bp, Homo sapien
tcaaacagttgcttccccaggttca

SEQ ID NO: 2223125 - DNA, 25 bp, Homo sapien
ctcaaacagttgcttccccaggttc

SEQ ID NO: 2223126 - DNA, 25 bp, Homo sapien
caaacagttgcttccccaggttcag

SEQ ID NO: 2223127 - DNA, 25 bp, Homo sapien
ttgagcgagccatcgtccccgaagg

SEQ ID NO: 2223128 - DNA, 25 bp, Homo sapien
tgagcgagccatcgtccccgaaggc

SEQ ID NO: 2223129 - DNA, 25 bp, Homo sapien
cgcatctcttccatgtagcaggcgt

SEQ ID NO: 2223130 - DNA, 25 bp, Homo sapien
tggcgcatctcttccatgtagcagg

SEQ ID NO: 2223131 - DNA, 25 bp, Homo sapien
tctcctctggatggccttccggatc

SEQ ID NO: 2223132 - DNA, 25 bp, Homo sapien
gacttgaatcccttggtccatgaga

SEQ ID NO: 2223133 - DNA, 25 bp, Homo sapien
cagccacaatgtcgatatcaaagtc

SEQ ID NO: 2223134 - DNA, 25 bp, Homo sapien
cttccggatcagagccacaacgtct

SEQ ID NO: 2223135 - DNA, 25 bp, Homo sapien
gttagccagccattcgacaatgtgg

SEQ ID NO: 2223136 - DNA, 25 bp, Homo sapien
cttgtctttgatttgtagcttatcc

SEQ ID NO: 2223137 - DNA, 25 bp, Homo sapien
tggcggcaggggaacgagaaggtaa

SEQ ID NO: 2223138 - DNA, 25 bp, Homo sapien
ttgtagcttatccatgaagttagcc

SEQ ID NO: 2223139 - DNA, 25 bp, Homo sapien
atgatgtcctcggggatggcataga

SEQ ID NO: 2223140 - DNA, 25 bp, Homo sapien
catagatctggttctccatctccac

SEQ ID NO: 2223141 - DNA, 25 bp, Homo sapien
tggcatagatctggttctccatctc

SEQ ID NO: 2223142 - DNA, 25 bp, Homo sapien
gatgtcctcggggatggcatagatc

SEQ ID NO: 2223143 - DNA, 25 bp, Homo sapien
tctccaagagggtctcatcagagag

SEQ ID NO: 2223144 - DNA, 25 bp, Homo sapien
cattgtccgttactttcacccaaag

SEQ ID NO: 2223145 - DNA, 25 bp, Homo sapien
ttgcggaaccgcttagagatctcca

SEQ ID NO: 2223146 - DNA, 25 bp, Homo sapien
tctggagcccattgtccgttacttt

SEQ ID NO: 2223147 - DNA, 25 bp, Homo sapien
cttgaagaagtaggcaagcaaatgc

SEQ ID NO: 2223148 - DNA, 25 bp, Homo sapien
aggcaagcaaatgcgaggcaaccat

SEQ ID NO: 2223149 - DNA, 25 bp, Homo sapien
gaagtaggcaagcaaatgcgaggca

SEQ ID NO: 2223150 - DNA, 25 bp, Homo sapien
tgaagaagtaggcaagcaaatgcga

SEQ ID NO: 2223151 - DNA, 25 bp, Homo sapien
cgacggcgcagagttggaaaaccga

SEQ ID NO: 2223152 - DNA, 25 bp, Homo sapien
aggcgggggcacgagccgggaggcg

SEQ ID NO: 2223153 - DNA, 25 bp, Homo sapien
tgccgcgacccgacggcgcagagtt

SEQ ID NO: 2223154 - DNA, 25 bp, Homo sapien
cgaggcgggggcacgagccgggagg

SEQ ID NO: 2223155 - DNA, 25 bp, Homo sapien
cctaaattacagaacttgttattga

SEQ ID NO: 2223156 - DNA, 25 bp, Homo sapien
agggtgtgtgtgtgtccaggaattt

SEQ ID NO: 2223157 - DNA, 25 bp, Homo sapien
tgatctattcagggatttgacttcc

SEQ ID NO: 2223158 - DNA, 25 bp, Homo sapien
atctattcagggatttgacttcctc

SEQ ID NO: 2223159 - DNA, 25 bp, Homo sapien
gtatgggctattttctgattctcag

SEQ ID NO: 2223160 - DNA, 25 bp, Homo sapien
cagtaccacatagtgctccttatag

SEQ ID NO: 2223161 - DNA, 25 bp, Homo sapien
tgcctaatctaagataacaagtatt

SEQ ID NO: 2223162 - DNA, 25 bp, Homo sapien
tatatgtggtgtgatgtagtggtcc

SEQ ID NO: 2223163 - DNA, 25 bp, Homo sapien
gaacacgttagcagtttccttgact

SEQ ID NO: 2223164 - DNA, 25 bp, Homo sapien
ttctaactagaattgcaacatgaca

SEQ ID NO: 2223165 - DNA, 25 bp, Homo sapien
tagatgaataatactcaagggtaac

SEQ ID NO: 2223166 - DNA, 25 bp, Homo sapien
actgcaaagatgctgaccaggcaag

SEQ ID NO: 2223167 - DNA, 25 bp, Homo sapien
caggctgttattgaatgcaccaagc

SEQ ID NO: 2223168 - DNA, 25 bp, Homo sapien
tgttcctgttagagcattcagatca

SEQ ID NO: 2223169 - DNA, 25 bp, Homo sapien
tcttgaacctagtggaatgtttgcc

SEQ ID NO: 2223170 - DNA, 25 bp, Homo sapien
tgtcaggtacatataactcagctgt

SEQ ID NO: 2223171 - DNA, 25 bp, Homo sapien
caagaaagacctaagagttacatgt

SEQ ID NO: 2223172 - DNA, 25 bp, Homo sapien
tctctaaagctgaataggtaactcc

SEQ ID NO: 2223173 - DNA, 25 bp, Homo sapien
tattatcctaaaagtgacccaaaga

SEQ ID NO: 2223174 - DNA, 25 bp, Homo sapien
ggaagaagcatcctagtttctcaga

SEQ ID NO: 2223175 - DNA, 25 bp, Homo sapien
tagtttaacggacattttgcccata

SEQ ID NO: 2223176 - DNA, 25 bp, Homo sapien
gcttataatgactgataactgccaa

SEQ ID NO: 2223177 - DNA, 25 bp, Homo sapien
caacttaattctaaactgcagggcc

SEQ ID NO: 2223178 - DNA, 25 bp, Homo sapien
tgattgccatcaccacagtattgtt

SEQ ID NO: 2223179 - DNA, 25 bp, Homo sapien
taattgtttaaaaggctggacagca

SEQ ID NO: 2223180 - DNA, 25 bp, Homo sapien
tcataaagcctcacgttccacaaaa

SEQ ID NO: 2223181 - DNA, 25 bp, Homo sapien
gaaagaaacctgagtgctacccata

SEQ ID NO: 2223182 - DNA, 25 bp, Homo sapien
tatgatgcaagtctcccttttatgg

SEQ ID NO: 2223183 - DNA, 25 bp, Homo sapien
ggctgagttaaatatctgagcgcac

SEQ ID NO: 2223184 - DNA, 25 bp, Homo sapien
tactttgttactttgcatctgcggg

SEQ ID NO: 2223185 - DNA, 25 bp, Homo sapien
gttgtgcagaatgagatttctaatt

SEQ ID NO: 2223186 - DNA, 25 bp, Homo sapien
aatatctgagcgcacagttgtgcag

SEQ ID NO: 2223187 - DNA, 25 bp, Homo sapien
gaagaattccaacacaagcctgatt

SEQ ID NO: 2223188 - DNA, 25 bp, Homo sapien
gagaagaattccaacacaagcctga

SEQ ID NO: 2223189 - DNA, 25 bp, Homo sapien
tagagaagaattccaacacaagcct

SEQ ID NO: 2223190 - DNA, 25 bp, Homo sapien
ttatagagaagaattccaacacaag

SEQ ID NO: 2223191 - DNA, 25 bp, Homo sapien
tggctggacccagattttacgtagg

SEQ ID NO: 2223192 - DNA, 25 bp, Homo sapien
ggtatatgacaaaacctggactggt

SEQ ID NO: 2223193 - DNA, 25 bp, Homo sapien
caaaaagttggcagactgtcctcca

SEQ ID NO: 2223194 - DNA, 25 bp, Homo sapien
gctctcacgggcctaaatataacag

SEQ ID NO: 2223195 - DNA, 25 bp, Homo sapien
tgttctaagaaagcctaaggtggta

SEQ ID NO: 2223196 - DNA, 25 bp, Homo sapien
tatcccatgagcctgatctaagtgc

SEQ ID NO: 2223197 - DNA, 25 bp, Homo sapien
tatggaaccatgtgcactctactgc

SEQ ID NO: 2223198 - DNA, 25 bp, Homo sapien
gaaccctttggaatgatatgagcag

SEQ ID NO: 2223199 - DNA, 25 bp, Homo sapien
ttaataattccatcccatgagatgg

SEQ ID NO: 2223200 - DNA, 25 bp, Homo sapien
ctggctttttctgtcattttacgca

SEQ ID NO: 2223201 - DNA, 25 bp, Homo sapien
tggctttttctgtcattttacgcac

SEQ ID NO: 2223202 - DNA, 25 bp, Homo sapien
cctggctttttctgtcattttacgc

SEQ ID NO: 2223203 - DNA, 25 bp, Homo sapien
gttttaattcgaggcagtctactga

SEQ ID NO: 2223204 - DNA, 25 bp, Homo sapien
gatgtaccaagattcagaggatcct

SEQ ID NO: 2223205 - DNA, 25 bp, Homo sapien
ctactgaaacgtcctgaaaacatgg

SEQ ID NO: 2223206 - DNA, 25 bp, Homo sapien
tcattatataaaacagtcctcctgc

SEQ ID NO: 2223207 - DNA, 25 bp, Homo sapien
ctctgaggtggataaatgagatttc

SEQ ID NO: 2223208 - DNA, 25 bp, Homo sapien
ggatcctaactctccactctctgag

SEQ ID NO: 2223209 - DNA, 25 bp, Homo sapien
attcagagtcagagtcagaaccaca

SEQ ID NO: 2223210 - DNA, 25 bp, Homo sapien
gctataatcatggtctccatctacg

SEQ ID NO: 2223211 - DNA, 25 bp, Homo sapien
aagagtactgatgaatgtgagaaca

SEQ ID NO: 2223212 - DNA, 25 bp, Homo sapien
gcttttgaagggtggtcgggacaga

SEQ ID NO: 2223213 - DNA, 25 bp, Homo sapien
gtactgatgaatgtgagaacagctt

SEQ ID NO: 2223214 - DNA, 25 bp, Homo sapien
cagacaccgtactataaaggataaa

SEQ ID NO: 2223215 - DNA, 25 bp, Homo sapien
catggctatttccacttcggctata

SEQ ID NO: 2223216 - DNA, 25 bp, Homo sapien
catcaagtagatatagtgaaagccc

SEQ ID NO: 2223217 - DNA, 25 bp, Homo sapien
cgaagctcgatgaagaaaatggccc

SEQ ID NO: 2223218 - DNA, 25 bp, Homo sapien
tttaactggcaaaactctattccga

SEQ ID NO: 2223219 - DNA, 25 bp, Homo sapien
atgagaaaggagagctagtcctggc

SEQ ID NO: 2223220 - DNA, 25 bp, Homo sapien
gagatactgaggtattctggtcatt

SEQ ID NO: 2223221 - DNA, 25 bp, Homo sapien
catgagatactgaggtattctggtc

SEQ ID NO: 2223222 - DNA, 25 bp, Homo sapien
agctagtcctggcatgagatactga

SEQ ID NO: 2223223 - DNA, 25 bp, Homo sapien
tctgggatagtaaaacccacataaa

SEQ ID NO: 2223224 - DNA, 25 bp, Homo sapien
caggtattagctggccaaagaagaa

SEQ ID NO: 2223225 - DNA, 25 bp, Homo sapien
tctacataggcataagagtttagga

SEQ ID NO: 2223226 - DNA, 25 bp, Homo sapien
caaagaggtatcaaggtcaggtatt

SEQ ID NO: 2223227 - DNA, 25 bp, Homo sapien
aacaaaaaatgttgcatcaatgtaa

SEQ ID NO: 2223228 - DNA, 25 bp, Homo sapien
agaacaaaaaatgttgcatcaatgt

SEQ ID NO: 2223229 - DNA, 25 bp, Homo sapien
acaaaaaatgttgcatcaatgtaat

SEQ ID NO: 2223230 - DNA, 25 bp, Homo sapien
gaacaaaaaatgttgcatcaatgta

SEQ ID NO: 2223231 - DNA, 25 bp, Homo sapien
ataaggcagataatcgcagcatcat

SEQ ID NO: 2223232 - DNA, 25 bp, Homo sapien
ttttctgtaccgtggccttctcctc

SEQ ID NO: 2223233 - DNA, 25 bp, Homo sapien
ccactactagataatgaactgctgc

SEQ ID NO: 2223234 - DNA, 25 bp, Homo sapien
ctaggtgctccactactagataatg

SEQ ID NO: 2223235 - DNA, 25 bp, Homo sapien
ggtataaacatgcctagaccaatat

SEQ ID NO: 2223236 - DNA, 25 bp, Homo sapien
cagaaattatatagtcttaactagt

SEQ ID NO: 2223237 - DNA, 25 bp, Homo sapien
aaaggtataaacatgcctagaccaa

SEQ ID NO: 2223238 - DNA, 25 bp, Homo sapien
agaaattatatagtcttaactagtt

SEQ ID NO: 2223239 - DNA, 25 bp, Homo sapien
tatttggcgaacatccttataaaat

SEQ ID NO: 2223240 - DNA, 25 bp, Homo sapien
gttgttgaatatttggcgaacatcc

SEQ ID NO: 2223241 - DNA, 25 bp, Homo sapien
attagaggtataagctttggagttg

SEQ ID NO: 2223242 - DNA, 25 bp, Homo sapien
gaggtataagctttggagttgttga

SEQ ID NO: 2223243 - DNA, 25 bp, Homo sapien
catagtttcctgcttccaaagtttc

SEQ ID NO: 2223244 - DNA, 25 bp, Homo sapien
ggagtatctataacatcttgataat

SEQ ID NO: 2223245 - DNA, 25 bp, Homo sapien
tctttcacagtgctgaagtccacag

SEQ ID NO: 2223246 - DNA, 25 bp, Homo sapien
tgctgaagtccacaggagtatctat

SEQ ID NO: 2223247 - DNA, 25 bp, Homo sapien
tggaacaacagactctgaggattct

SEQ ID NO: 2223248 - DNA, 25 bp, Homo sapien
aagagatgaatcttgttgtctttct

SEQ ID NO: 2223249 - DNA, 25 bp, Homo sapien
aaagagatgaatcttgttgtctttc

SEQ ID NO: 2223250 - DNA, 25 bp, Homo sapien
ttctggaacaacagactctgaggat

SEQ ID NO: 2223251 - DNA, 25 bp, Homo sapien
gtgagaaaattgctcttatctagat

SEQ ID NO: 2223252 - DNA, 25 bp, Homo sapien
catttatgggaaattatcatactga

SEQ ID NO: 2223253 - DNA, 25 bp, Homo sapien
cacactaatcacactactactttca

SEQ ID NO: 2223254 - DNA, 25 bp, Homo sapien
tatctagattttagcatggacattt

SEQ ID NO: 2223255 - DNA, 25 bp, Homo sapien
taaatgaggctcaatagttccttgc

SEQ ID NO: 2223256 - DNA, 25 bp, Homo sapien
gatcagctggctgtcgaaatggctc

SEQ ID NO: 2223257 - DNA, 25 bp, Homo sapien
gcatcaggattacactttaaagact

SEQ ID NO: 2223258 - DNA, 25 bp, Homo sapien
cgaaatggctccgagtcttcacgtt

SEQ ID NO: 2223259 - DNA, 25 bp, Homo sapien
tgttaatatacctatctgtatgtgt

SEQ ID NO: 2223260 - DNA, 25 bp, Homo sapien
aaagatctttccttaactcagttga

SEQ ID NO: 2223261 - DNA, 25 bp, Homo sapien
tgattttctcataagtccctaatgt

SEQ ID NO: 2223262 - DNA, 25 bp, Homo sapien
ttaatagagttatatctaaaagatc

SEQ ID NO: 2223263 - DNA, 25 bp, Homo sapien
ggaccgtctgaatctaaatcaacaa

SEQ ID NO: 2223264 - DNA, 25 bp, Homo sapien
atgaagtaccaggaccgtctgaatc

SEQ ID NO: 2223265 - DNA, 25 bp, Homo sapien
gtaccaggaccgtctgaatctaaat

SEQ ID NO: 2223266 - DNA, 25 bp, Homo sapien
caggaccgtctgaatctaaatcaac

SEQ ID NO: 2223267 - DNA, 25 bp, Homo sapien
ctcctctgcatcagtactgtttcgt

SEQ ID NO: 2223268 - DNA, 25 bp, Homo sapien
atccagtatatcagtacagctctga

SEQ ID NO: 2223269 - DNA, 25 bp, Homo sapien
tccagtatatcagtacagctctgat

SEQ ID NO: 2223270 - DNA, 25 bp, Homo sapien
gcatcagtactgtttcgttcttctg

SEQ ID NO: 2223271 - DNA, 25 bp, Homo sapien
ccaataaatcgaagtaagacatcag

SEQ ID NO: 2223272 - DNA, 25 bp, Homo sapien
actgtctggctcattgaaagtcctg

SEQ ID NO: 2223273 - DNA, 25 bp, Homo sapien
gaaagtcctggcattatgttcaata

SEQ ID NO: 2223274 - DNA, 25 bp, Homo sapien
tgctttaactataggactgtctggc

SEQ ID NO: 2223275 - DNA, 25 bp, Homo sapien
caagtctccgcctgatggtattgag

SEQ ID NO: 2223276 - DNA, 25 bp, Homo sapien
tgtaaaagcgattttcaagtctccg

SEQ ID NO: 2223277 - DNA, 25 bp, Homo sapien
tgaggtcagttggataagcaactac

SEQ ID NO: 2223278 - DNA, 25 bp, Homo sapien
ggcactgagatccactggaacagca

SEQ ID NO: 2223279 - DNA, 25 bp, Homo sapien
aaattatgaaaatcaaataaggtag

SEQ ID NO: 2223280 - DNA, 25 bp, Homo sapien
ctacaaaattatgaaaatcaaataa

SEQ ID NO: 2223281 - DNA, 25 bp, Homo sapien
caaaattatgaaaatcaaataaggt

SEQ ID NO: 2223282 - DNA, 25 bp, Homo sapien
acaaaattatgaaaatcaaataagg

SEQ ID NO: 2223283 - DNA, 25 bp, Homo sapien
gtggttgatgccctgaataacccgt

SEQ ID NO: 2223284 - DNA, 25 bp, Homo sapien
tgtatagcaaagcagtcaattcttc

SEQ ID NO: 2223285 - DNA, 25 bp, Homo sapien
ccagggaaagaaggtggttgatgcc

SEQ ID NO: 2223286 - DNA, 25 bp, Homo sapien
ccgttcacattcttcgtctctggaa

SEQ ID NO: 2223287 - DNA, 25 bp, Homo sapien
agacaggaacaccagcaccaacttc

SEQ ID NO: 2223288 - DNA, 25 bp, Homo sapien
ctgggagacaggaacaccagcacca

SEQ ID NO: 2223289 - DNA, 25 bp, Homo sapien
ggagacaggaacaccagcaccaact

SEQ ID NO: 2223290 - DNA, 25 bp, Homo sapien
tgggagacaggaacaccagcaccaa

SEQ ID NO: 2223291 - DNA, 25 bp, Homo sapien
ggctccatatcccatgggctcatct

SEQ ID NO: 2223292 - DNA, 25 bp, Homo sapien
atctattatactgcggaatctatca

SEQ ID NO: 2223293 - DNA, 25 bp, Homo sapien
tggttgaaaaggctgctgactctcc

SEQ ID NO: 2223294 - DNA, 25 bp, Homo sapien
aaccaccaggcgtcatctattatac

SEQ ID NO: 2223295 - DNA, 25 bp, Homo sapien
ccaccaggcgtcatctattatactg

SEQ ID NO: 2223296 - DNA, 25 bp, Homo sapien
ataaaactgatgtagcacaaggaag

SEQ ID NO: 2223297 - DNA, 25 bp, Homo sapien
aatgacatccggcatgtcatgatac

SEQ ID NO: 2223298 - DNA, 25 bp, Homo sapien
caaggaagtcaatgacatccggcat

SEQ ID NO: 2223299 - DNA, 25 bp, Homo sapien
ttataaaactgatgtagcacaagga

SEQ ID NO: 2223300 - DNA, 25 bp, Homo sapien
cattttgcctgaaattgggtccaga

SEQ ID NO: 2223301 - DNA, 25 bp, Homo sapien
cacagtgtgggtgggccaacctcat

SEQ ID NO: 2223302 - DNA, 25 bp, Homo sapien
gattcctacaatcttaacaaactct

SEQ ID NO: 2223303 - DNA, 25 bp, Homo sapien
ccagaaatgcaagcttcaagcagca

SEQ ID NO: 2223304 - DNA, 25 bp, Homo sapien
taaattaacactgtatattttcgat

SEQ ID NO: 2223305 - DNA, 25 bp, Homo sapien
cactgtatattttcgatttccttac

SEQ ID NO: 2223306 - DNA, 25 bp, Homo sapien
cttacagcccgaacataagcttcat

SEQ ID NO: 2223307 - DNA, 25 bp, Homo sapien
atttccttacagcccgaacataagc

SEQ ID NO: 2223308 - DNA, 25 bp, Homo sapien
gggcaaaccattcttcattaggctc

SEQ ID NO: 2223309 - DNA, 25 bp, Homo sapien
gaacgtcggggtatagtatccaaga

SEQ ID NO: 2223310 - DNA, 25 bp, Homo sapien
cattcttcattaggctcacctgcta

SEQ ID NO: 2223311 - DNA, 25 bp, Homo sapien
acctgctatagaaaccagtcctcct

SEQ ID NO: 2223312 - DNA, 25 bp, Homo sapien
agagctgctgcatattttacgtgtt

SEQ ID NO: 2223313 - DNA, 25 bp, Homo sapien
ggggttgtaaatttattccagcatc

SEQ ID NO: 2223314 - DNA, 25 bp, Homo sapien
catattttacgtgttgtctgtctgg

SEQ ID NO: 2223315 - DNA, 25 bp, Homo sapien
tctagtctgcttaggtttcttctgc

SEQ ID NO: 2223316 - DNA, 25 bp, Homo sapien
aagcgtcacttgtgccaacagtttc

SEQ ID NO: 2223317 - DNA, 25 bp, Homo sapien
cgaagcgtcacttgtgccaacagtt

SEQ ID NO: 2223318 - DNA, 25 bp, Homo sapien
agcgtcacttgtgccaacagtttca

SEQ ID NO: 2223319 - DNA, 25 bp, Homo sapien
gaagcgtcacttgtgccaacagttt

SEQ ID NO: 2223320 - DNA, 25 bp, Homo sapien
tagtttaagaactgtgaatggggcc

SEQ ID NO: 2223321 - DNA, 25 bp, Homo sapien
gtttaagaactgtgaatggggccag

SEQ ID NO: 2223322 - DNA, 25 bp, Homo sapien
aatagtttaagaactgtgaatgggg

SEQ ID NO: 2223323 - DNA, 25 bp, Homo sapien
atgtaggacatctttgataatagtt

SEQ ID NO: 2223324 - DNA, 25 bp, Homo sapien
gattagatagccaaccagttctgaa

SEQ ID NO: 2223325 - DNA, 25 bp, Homo sapien
tgtctcaacgtcaaactcttgctgg

SEQ ID NO: 2223326 - DNA, 25 bp, Homo sapien
gtgacccttaaacccaaatggatga

SEQ ID NO: 2223327 - DNA, 25 bp, Homo sapien
ggcatatttgataccctcaccaaga

SEQ ID NO: 2223328 - DNA, 25 bp, Homo sapien
tgtgtcctgcgtaaagaacgcccac

SEQ ID NO: 2223329 - DNA, 25 bp, Homo sapien
gacatgatgcctgtgaattatgctc

SEQ ID NO: 2223330 - DNA, 25 bp, Homo sapien
tgctctatgttggaccgtgtttggt

SEQ ID NO: 2223331 - DNA, 25 bp, Homo sapien
tggtaagtatgctgacgtttgcgct

SEQ ID NO: 2223332 - DNA, 25 bp, Homo sapien
taaacaaggttcagccacagttggt

SEQ ID NO: 2223333 - DNA, 25 bp, Homo sapien
tgaaaagtctgggttgcaaagtccc

SEQ ID NO: 2223334 - DNA, 25 bp, Homo sapien
catattggtatctcaattgcagggc

SEQ ID NO: 2223335 - DNA, 25 bp, Homo sapien
cattgaaaagggcaccatcggagct

SEQ ID NO: 2223336 - DNA, 25 bp, Homo sapien
ctttgagtagtgtaagatggctttt

SEQ ID NO: 2223337 - DNA, 25 bp, Homo sapien
ttgagtagtgtaagatggctttttc

SEQ ID NO: 2223338 - DNA, 25 bp, Homo sapien
tttgagtagtgtaagatggcttttt

SEQ ID NO: 2223339 - DNA, 25 bp, Homo sapien
cctttgagtagtgtaagatggcttt

SEQ ID NO: 2223340 - DNA, 25 bp, Homo sapien
caccttttgcagttcgacattcttc

SEQ ID NO: 2223341 - DNA, 25 bp, Homo sapien
tttctatgtcaccttttgcagttcg

SEQ ID NO: 2223342 - DNA, 25 bp, Homo sapien
tctatgtcaccttttgcagttcgac

SEQ ID NO: 2223343 - DNA, 25 bp, Homo sapien
tgcagttcgacattcttcctgtacc

SEQ ID NO: 2223344 - DNA, 25 bp, Homo sapien
tatttgttacgaagtgaactcactg

SEQ ID NO: 2223345 - DNA, 25 bp, Homo sapien
tcacccaatgaagcctacctaaatg

SEQ ID NO: 2223346 - DNA, 25 bp, Homo sapien
tccaatgttagggtccatatatcac

SEQ ID NO: 2223347 - DNA, 25 bp, Homo sapien
ccagttgctgtggagtatctgaaag

SEQ ID NO: 2223348 - DNA, 25 bp, Homo sapien
tttgactactatgtcttcgaagcct

SEQ ID NO: 2223349 - DNA, 25 bp, Homo sapien
tatttagttcattgaccaccactct

SEQ ID NO: 2223350 - DNA, 25 bp, Homo sapien
tgctccacgccatgagatctctttc

SEQ ID NO: 2223351 - DNA, 25 bp, Homo sapien
ggctccgaggagcattgttatgcat

SEQ ID NO: 2223352 - DNA, 25 bp, Homo sapien
cagagtatgctctattaactggtaa

SEQ ID NO: 2223353 - DNA, 25 bp, Homo sapien
gcagctccctgattattccatcaag

SEQ ID NO: 2223354 - DNA, 25 bp, Homo sapien
catcttggtcattggtttgctgccc

SEQ ID NO: 2223355 - DNA, 25 bp, Homo sapien
aattagtctcaggtcttgttctctc

SEQ ID NO: 2223356 - DNA, 25 bp, Homo sapien
gataatccgtgtggaagaacatctg

SEQ ID NO: 2223357 - DNA, 25 bp, Homo sapien
tcacgaataagaggacgataatccg

SEQ ID NO: 2223358 - DNA, 25 bp, Homo sapien
ccagctgtggtataagctgttcatc

SEQ ID NO: 2223359 - DNA, 25 bp, Homo sapien
ccaaccgttggaattttgtgggatg

SEQ ID NO: 2223360 - DNA, 25 bp, Homo sapien
ctctacagcaaaatttaaatatgct

SEQ ID NO: 2223361 - DNA, 25 bp, Homo sapien
tatactctacagcaaaatttaaata

SEQ ID NO: 2223362 - DNA, 25 bp, Homo sapien
ttatactctacagcaaaatttaaat

SEQ ID NO: 2223363 - DNA, 25 bp, Homo sapien
tacagcaaaatttaaatatgctaac

SEQ ID NO: 2223364 - DNA, 25 bp, Homo sapien
atcaaacaccgcaccatggccttgg

SEQ ID NO: 2223365 - DNA, 25 bp, Homo sapien
agcaaatgtccatgagaatctgtgc

SEQ ID NO: 2223366 - DNA, 25 bp, Homo sapien
cttttcgtagtatttactgcatcca

SEQ ID NO: 2223367 - DNA, 25 bp, Homo sapien
tttacaatcaaacaccgcaccatgg

SEQ ID NO: 2223368 - DNA, 25 bp, Homo sapien
ctagaacgaatacttcatcatcatg

SEQ ID NO: 2223369 - DNA, 25 bp, Homo sapien
catgttaaagtaattccgaattttg

SEQ ID NO: 2223370 - DNA, 25 bp, Homo sapien
gacctgctgaaagtatgatcctttg

SEQ ID NO: 2223371 - DNA, 25 bp, Homo sapien
aatggatgggcttctagaacgaata

SEQ ID NO: 2223372 - DNA, 25 bp, Homo sapien
aaattgttcactgcagtaataactg

SEQ ID NO: 2223373 - DNA, 25 bp, Homo sapien
agataatgtatgaagaagctgtcct

SEQ ID NO: 2223374 - DNA, 25 bp, Homo sapien
ccaggccaccatagtcaccttaagt

SEQ ID NO: 2223375 - DNA, 25 bp, Homo sapien
tgtggtatcatagcgatcccaggcc

SEQ ID NO: 2223376 - DNA, 25 bp, Homo sapien
gttccatctcgacttccactaacaa

SEQ ID NO: 2223377 - DNA, 25 bp, Homo sapien
attcttgttgctgatactgccaaat

SEQ ID NO: 2223378 - DNA, 25 bp, Homo sapien
aattcttgccgttccatctcgactt

SEQ ID NO: 2223379 - DNA, 25 bp, Homo sapien
ccaaattcttgccgttccatctcga

SEQ ID NO: 2223380 - DNA, 25 bp, Homo sapien
taatttataatctcatcacaagttg

SEQ ID NO: 2223381 - DNA, 25 bp, Homo sapien
tctcatcacaagttgtagaagtgtc

SEQ ID NO: 2223382 - DNA, 25 bp, Homo sapien
acaagttgtagaagtgtccattttc

SEQ ID NO: 2223383 - DNA, 25 bp, Homo sapien
ggcaatattgggattatcatttttc

SEQ ID NO: 2223384 - DNA, 25 bp, Homo sapien
aagaccatcctggtgaaacaccgtc

SEQ ID NO: 2223385 - DNA, 25 bp, Homo sapien
gagcaagacaccgtctcaaaaaaaa

SEQ ID NO: 2223386 - DNA, 25 bp, Homo sapien
agagcaagacaccgtctcaaaaaaa

SEQ ID NO: 2223387 - DNA, 25 bp, Homo sapien
atcaagaccatcctggtgaaacacc

SEQ ID NO: 2223388 - DNA, 25 bp, Homo sapien
gaaaggacgacctgataggctatgg

SEQ ID NO: 2223389 - DNA, 25 bp, Homo sapien
gctttgaacctaaataactggacag

SEQ ID NO: 2223390 - DNA, 25 bp, Homo sapien
cacttgactgacgtgggtgctaaca

SEQ ID NO: 2223391 - DNA, 25 bp, Homo sapien
tcatagaagtagctgcatctgaggg

SEQ ID NO: 2223392 - DNA, 25 bp, Homo sapien
ctgtctccattgttacagaactgaa

SEQ ID NO: 2223393 - DNA, 25 bp, Homo sapien
tccattgttacagaactgaacagca

SEQ ID NO: 2223394 - DNA, 25 bp, Homo sapien
cattgttacagaactgaacagcaac

SEQ ID NO: 2223395 - DNA, 25 bp, Homo sapien
tctccattgttacagaactgaacag

SEQ ID NO: 2223396 - DNA, 25 bp, Homo sapien
cagtactaccagttgtaatgaacat

SEQ ID NO: 2223397 - DNA, 25 bp, Homo sapien
tcagtactaccagttgtaatgaaca

SEQ ID NO: 2223398 - DNA, 25 bp, Homo sapien
aagatgaacaagatatctggactcc

SEQ ID NO: 2223399 - DNA, 25 bp, Homo sapien
ctcagtaaatttcaccgggcgatct

SEQ ID NO: 2223400 - DNA, 25 bp, Homo sapien
tctggactccaggtctggatctctc

SEQ ID NO: 2223401 - DNA, 25 bp, Homo sapien
ggatctctcagtaaatttcaccggg

SEQ ID NO: 2223402 - DNA, 25 bp, Homo sapien
atctgtttgtgcctttagttgatgg

SEQ ID NO: 2223403 - DNA, 25 bp, Homo sapien
caccagtagaagtgaggtatctgtt

SEQ ID NO: 2223404 - DNA, 25 bp, Homo sapien
tccatcagcaccagtagaagtgagg

SEQ ID NO: 2223405 - DNA, 25 bp, Homo sapien
ctgtttgtgcctttagttgatggac

SEQ ID NO: 2223406 - DNA, 25 bp, Homo sapien
ctgtatggaagtaatagaagctgaa

SEQ ID NO: 2223407 - DNA, 25 bp, Homo sapien
cctgaaggactgcaacgggtgcaca

SEQ ID NO: 2223408 - DNA, 25 bp, Homo sapien
tagaagctgaatggccctgaaggac

SEQ ID NO: 2223409 - DNA, 25 bp, Homo sapien
cacaagttcgaagacaccatactct

SEQ ID NO: 2223410 - DNA, 25 bp, Homo sapien
tgtcagaaatttcagcagagtgtcc

SEQ ID NO: 2223411 - DNA, 25 bp, Homo sapien
gctgcctgcagcaataagagtgttt

SEQ ID NO: 2223412 - DNA, 25 bp, Homo sapien
cacgaagtgtagcaagaaggcgtcc

SEQ ID NO: 2223413 - DNA, 25 bp, Homo sapien
tcatagttaacagccatgtcagaaa

SEQ ID NO: 2223414 - DNA, 25 bp, Homo sapien
tacactgagtgacacattaacaaac

SEQ ID NO: 2223415 - DNA, 25 bp, Homo sapien
gtgacgcatttagagccattaagtc

SEQ ID NO: 2223416 - DNA, 25 bp, Homo sapien
gaaaactggcagcaattacactgag

SEQ ID NO: 2223417 - DNA, 25 bp, Homo sapien
taacatccaaatacttatgtgacgc

SEQ ID NO: 2223418 - DNA, 25 bp, Homo sapien
attcttctcccgcttcggtcaaatg

SEQ ID NO: 2223419 - DNA, 25 bp, Homo sapien
cagatgacaagtgccccagaattct

SEQ ID NO: 2223420 - DNA, 25 bp, Homo sapien
acagtagacagatgacaagtgcccc

SEQ ID NO: 2223421 - DNA, 25 bp, Homo sapien
cccgcttcggtcaaatgctacacag

SEQ ID NO: 2223422 - DNA, 25 bp, Homo sapien
caaagcgactacagccggttaattg

SEQ ID NO: 2223423 - DNA, 25 bp, Homo sapien
ggaaaatatgaccaaagcgactaca

SEQ ID NO: 2223424 - DNA, 25 bp, Homo sapien
aaagcgactacagccggttaattgc

SEQ ID NO: 2223425 - DNA, 25 bp, Homo sapien
atgaagggaaaatatgaccaaagcg

SEQ ID NO: 2223426 - DNA, 25 bp, Homo sapien
ctatccaccatatgtatgactgccc

SEQ ID NO: 2223427 - DNA, 25 bp, Homo sapien
ctcacacctatccaccatatgtatg

SEQ ID NO: 2223428 - DNA, 25 bp, Homo sapien
cacacctatccaccatatgtatgac

SEQ ID NO: 2223429 - DNA, 25 bp, Homo sapien
cacctatccaccatatgtatgactg

SEQ ID NO: 2223430 - DNA, 25 bp, Homo sapien
ccacgtggattctgctcatgctaaa

SEQ ID NO: 2223431 - DNA, 25 bp, Homo sapien
tacactaaaagtgcttaacacccca

SEQ ID NO: 2223432 - DNA, 25 bp, Homo sapien
taaaaatttacagccacccacttgc

SEQ ID NO: 2223433 - DNA, 25 bp, Homo sapien
gaggctctccctgtagttaacaatg

SEQ ID NO: 2223434 - DNA, 25 bp, Homo sapien
caatgaagtctttctttcaggcaaa

SEQ ID NO: 2223435 - DNA, 25 bp, Homo sapien
aagtctttctttcaggcaaaggcag

SEQ ID NO: 2223436 - DNA, 25 bp, Homo sapien
gcaaaggcagatccactggccattt

SEQ ID NO: 2223437 - DNA, 25 bp, Homo sapien
aattttaagagcaatgaagtctttc

SEQ ID NO: 2223438 - DNA, 25 bp, Homo sapien
caaagtgctgggataacagacatga

SEQ ID NO: 2223439 - DNA, 25 bp, Homo sapien
gtgctgggataacagacatgagcca

SEQ ID NO: 2223440 - DNA, 25 bp, Homo sapien
acaggcggctgccaccacgtctagc

SEQ ID NO: 2223441 - DNA, 25 bp, Homo sapien
aagtgctgggataacagacatgagc

SEQ ID NO: 2223442 - DNA, 25 bp, Homo sapien
tatttgtaagtattctgctgaaccc

SEQ ID NO: 2223443 - DNA, 25 bp, Homo sapien
tatgatagtctaatgtgcactggaa

SEQ ID NO: 2223444 - DNA, 25 bp, Homo sapien
taaaagcctccaattatatcacgaa

SEQ ID NO: 2223445 - DNA, 25 bp, Homo sapien
tgctaatgaacagtaacagggataa

SEQ ID NO: 2223446 - DNA, 25 bp, Homo sapien
gaaagaataatgaacgttgacctaa

SEQ ID NO: 2223447 - DNA, 25 bp, Homo sapien
gaaaattggtaaacagggtgtcatc

SEQ ID NO: 2223448 - DNA, 25 bp, Homo sapien
ggcattaaactatcaaacgtttaga

SEQ ID NO: 2223449 - DNA, 25 bp, Homo sapien
cagaatatggggctaggcaaagaat

SEQ ID NO: 2223450 - DNA, 25 bp, Homo sapien
tattttcaaccttagctccaggcct

SEQ ID NO: 2223451 - DNA, 25 bp, Homo sapien
acagttcctgagtgatcttacctac

SEQ ID NO: 2223452 - DNA, 25 bp, Homo sapien
cccgtcttacctggatgtatcataa

SEQ ID NO: 2223453 - DNA, 25 bp, Homo sapien
gcagtgtactggcacatcggctcac

SEQ ID NO: 2223454 - DNA, 25 bp, Homo sapien
aggtaactatcatatctgctgggaa

SEQ ID NO: 2223455 - DNA, 25 bp, Homo sapien
caggtaactatcatatctgctggga

SEQ ID NO: 2223456 - DNA, 25 bp, Homo sapien
aaccaaagccaggtaactatcatat

SEQ ID NO: 2223457 - DNA, 25 bp, Homo sapien
gccaggtaactatcatatctgctgg

SEQ ID NO: 2223458 - DNA, 25 bp, Homo sapien
tactgttcatagatcaggcttcttg

SEQ ID NO: 2223459 - DNA, 25 bp, Homo sapien
taagtcaagaatatggaggtgcagt

SEQ ID NO: 2223460 - DNA, 25 bp, Homo sapien
tcaaaaatagtacaaggctcagcca

SEQ ID NO: 2223461 - DNA, 25 bp, Homo sapien
gagtgccttcagcaaaagattaaga

SEQ ID NO: 2223462 - DNA, 25 bp, Homo sapien
gctgtacgtaattaagcagagctaa

SEQ ID NO: 2223463 - DNA, 25 bp, Homo sapien
taagcagagctaaaataaccttgga

SEQ ID NO: 2223464 - DNA, 25 bp, Homo sapien
cttcaaatacaaagagtttttcaga

SEQ ID NO: 2223465 - DNA, 25 bp, Homo sapien
gaaaacaagctgtacgtaattaagc

SEQ ID NO: 2223466 - DNA, 25 bp, Homo sapien
gccaaaaacactggaaagtggccag

SEQ ID NO: 2223467 - DNA, 25 bp, Homo sapien
taagtagagaggacaataatagact

SEQ ID NO: 2223468 - DNA, 25 bp, Homo sapien
tagaaaacagaacgtggtcgggcat

SEQ ID NO: 2223469 - DNA, 25 bp, Homo sapien
caatcctctgattggttaaagtgta

SEQ ID NO: 2223470 - DNA, 25 bp, Homo sapien
ttcacataatttacaggtagttctg

SEQ ID NO: 2223471 - DNA, 25 bp, Homo sapien
tgcagagccgcaaaagcagacccat

SEQ ID NO: 2223472 - DNA, 25 bp, Homo sapien
atttacaggtagttctggaggtctg

SEQ ID NO: 2223473 - DNA, 25 bp, Homo sapien
gacccattccatagtgtactcttac

SEQ ID NO: 2223474 - DNA, 25 bp, Homo sapien
taataatgtctgtaccccaggaaca

SEQ ID NO: 2223475 - DNA, 25 bp, Homo sapien
ctttggcatcccgtagcagagactg

SEQ ID NO: 2223476 - DNA, 25 bp, Homo sapien
gactgccgaccaacacctaataatg

SEQ ID NO: 2223477 - DNA, 25 bp, Homo sapien
tttatctagtaaaggaccaattctc

SEQ ID NO: 2223478 - DNA, 25 bp, Homo sapien
ctgaattaccatacttcagaatcat

SEQ ID NO: 2223479 - DNA, 25 bp, Homo sapien
cactaatccggaactccgggctgtt

SEQ ID NO: 2223480 - DNA, 25 bp, Homo sapien
tcaggccaggaccaaccagaaacca

SEQ ID NO: 2223481 - DNA, 25 bp, Homo sapien
ccactaatccggaactccgggctgt

SEQ ID NO: 2223482 - DNA, 25 bp, Homo sapien
tccactaatccggaactccgggctg

SEQ ID NO: 2223483 - DNA, 25 bp, Homo sapien
aacaagcagggccaaggggagggca

SEQ ID NO: 2223484 - DNA, 25 bp, Homo sapien
tcgggtggaaacaagcagggccaag

SEQ ID NO: 2223485 - DNA, 25 bp, Homo sapien
aagcagggccaaggggagggcaagg

SEQ ID NO: 2223486 - DNA, 25 bp, Homo sapien
cgggtggaaacaagcagggccaagg

SEQ ID NO: 2223487 - DNA, 25 bp, Homo sapien
gcaccgagctctagaacctcgtcgg

SEQ ID NO: 2223488 - DNA, 25 bp, Homo sapien
tctttggctctgcaccgagctctag

SEQ ID NO: 2223489 - DNA, 25 bp, Homo sapien
cctttttccgactagcagggatggg

SEQ ID NO: 2223490 - DNA, 25 bp, Homo sapien
gggcagtcgttctttggctctgcac

SEQ ID NO: 2223491 - DNA, 25 bp, Homo sapien
tcccctcccaatctaagcggcgcgg

SEQ ID NO: 2223492 - DNA, 25 bp, Homo sapien
ttcccctcccaatctaagcggcgcg

SEQ ID NO: 2223493 - DNA, 25 bp, Homo sapien
cccaatctaagcggcgcggaatcag

SEQ ID NO: 2223494 - DNA, 25 bp, Homo sapien
tcccaatctaagcggcgcggaatca

SEQ ID NO: 2223495 - DNA, 25 bp, Homo sapien
gctcagagctagacaagtatatggg

SEQ ID NO: 2223496 - DNA, 25 bp, Homo sapien
tttctctcggcctgatagctattgg

SEQ ID NO: 2223497 - DNA, 25 bp, Homo sapien
aactggacccaacctgtgtcccagt

SEQ ID NO: 2223498 - DNA, 25 bp, Homo sapien
gacgagttaagaccccagcgttgtc

SEQ ID NO: 2223499 - DNA, 25 bp, Homo sapien
gctcctcgagctcctgcactagcac

SEQ ID NO: 2223500 - DNA, 25 bp, Homo sapien
atgctcctcgagctcctgcactagc

SEQ ID NO: 2223501 - DNA, 25 bp, Homo sapien
ctgatgctcctcgagctcctgcact

SEQ ID NO: 2223502 - DNA, 25 bp, Homo sapien
gatgctcctcgagctcctgcactag

SEQ ID NO: 2223503 - DNA, 25 bp, Homo sapien
ctcaacggaactgctcgtcccgctg

SEQ ID NO: 2223504 - DNA, 25 bp, Homo sapien
cctcgatttccccactgggaccatt

SEQ ID NO: 2223505 - DNA, 25 bp, Homo sapien
cattcaccacgactcccagatctct

SEQ ID NO: 2223506 - DNA, 25 bp, Homo sapien
tgggaccattcaccacgactcccag

SEQ ID NO: 2223507 - DNA, 25 bp, Homo sapien
gaacctagcgatcaggtaatacagc

SEQ ID NO: 2223508 - DNA, 25 bp, Homo sapien
tgcaagaacctagcgatcaggtaat

SEQ ID NO: 2223509 - DNA, 25 bp, Homo sapien
ctgagcggatttgttgcagggtcca

SEQ ID NO: 2223510 - DNA, 25 bp, Homo sapien
agggtccagactgcaagaacctagc

SEQ ID NO: 2223511 - DNA, 25 bp, Homo sapien
ttcgatctgggtaggtgctgccgcc

SEQ ID NO: 2223512 - DNA, 25 bp, Homo sapien
cgatctgggtaggtgctgccgccat

SEQ ID NO: 2223513 - DNA, 25 bp, Homo sapien
gcttcgatctgggtaggtgctgccg

SEQ ID NO: 2223514 - DNA, 25 bp, Homo sapien
cggcttcgatctgggtaggtgctgc

SEQ ID NO: 2223515 - DNA, 25 bp, Homo sapien
gctgcctctattgtggtgaagcccc

SEQ ID NO: 2223516 - DNA, 25 bp, Homo sapien
tcgtcctagtttcgctctctctcga

SEQ ID NO: 2223517 - DNA, 25 bp, Homo sapien
cgacccatagatattctagcccaag

SEQ ID NO: 2223518 - DNA, 25 bp, Homo sapien
gctctctctcgaattcatcgcatca

SEQ ID NO: 2223519 - DNA, 25 bp, Homo sapien
atatgttctctgtctataatggaaa

SEQ ID NO: 2223520 - DNA, 25 bp, Homo sapien
aatatgttctctgtctataatggaa

SEQ ID NO: 2223521 - DNA, 25 bp, Homo sapien
aaaatatgttctctgtctataatgg

SEQ ID NO: 2223522 - DNA, 25 bp, Homo sapien
ccaaaatatgttctctgtctataat

SEQ ID NO: 2223523 - DNA, 25 bp, Homo sapien
tgggagaatccaagttgtcaacaag

SEQ ID NO: 2223524 - DNA, 25 bp, Homo sapien
ggagaaagtggctttggcacaacct

SEQ ID NO: 2223525 - DNA, 25 bp, Homo sapien
aaggctgttgggtgtcataggtcac

SEQ ID NO: 2223526 - DNA, 25 bp, Homo sapien
tttggcacaacctccagttcagaag

SEQ ID NO: 2223527 - DNA, 25 bp, Homo sapien
gaccatgatggcttccttcgcaacc

SEQ ID NO: 2223528 - DNA, 25 bp, Homo sapien
caaactcagacttagcaggcctggt

SEQ ID NO: 2223529 - DNA, 25 bp, Homo sapien
taggctctttttcaggaccatgatg

SEQ ID NO: 2223530 - DNA, 25 bp, Homo sapien
tcgcaaccccactcatcttgggatg

SEQ ID NO: 2223531 - DNA, 25 bp, Homo sapien
ccaggcagagagtttggccacagca

SEQ ID NO: 2223532 - DNA, 25 bp, Homo sapien
tccaggcagagagtttggccacagc

SEQ ID NO: 2223533 - DNA, 25 bp, Homo sapien
ggcagagagtttggccacagcattg

SEQ ID NO: 2223534 - DNA, 25 bp, Homo sapien
gagagtttggccacagcattggttt

SEQ ID NO: 2223535 - DNA, 25 bp, Homo sapien
caggacacccctgatgtgtgcctag

SEQ ID NO: 2223536 - DNA, 25 bp, Homo sapien
ccaggacacccctgatgtgtgccta

SEQ ID NO: 2223537 - DNA, 25 bp, Homo sapien
acagcaactcccatcacatgtcagg

SEQ ID NO: 2223538 - DNA, 25 bp, Homo sapien
ccagaggtacagaagaaacgcattt

SEQ ID NO: 2223539 - DNA, 25 bp, Homo sapien
tcagtggtagactcggggagaactt

SEQ ID NO: 2223540 - DNA, 25 bp, Homo sapien
tggcccctttgaggtgccaggtttc

SEQ ID NO: 2223541 - DNA, 25 bp, Homo sapien
ctagagatggctgcgagtggaagct

SEQ ID NO: 2223542 - DNA, 25 bp, Homo sapien
gcagagatgtttagaataccaagaa

SEQ ID NO: 2223543 - DNA, 25 bp, Homo sapien
cagggtgattctcattgggaacgca

SEQ ID NO: 2223544 - DNA, 25 bp, Homo sapien
aacgcagaagggcattggcaccagg

SEQ ID NO: 2223545 - DNA, 25 bp, Homo sapien
cataagcttgagctagagccatcca

SEQ ID NO: 2223546 - DNA, 25 bp, Homo sapien
tcagctaaggccaacaaatcagtca

SEQ ID NO: 2223547 - DNA, 25 bp, Homo sapien
cctagaggaaggcttattggcggac

SEQ ID NO: 2223548 - DNA, 25 bp, Homo sapien
aatgataacgagaaggtccctgtgg

SEQ ID NO: 2223549 - DNA, 25 bp, Homo sapien
cagtgccctggatgtttgcaataca

SEQ ID NO: 2223550 - DNA, 25 bp, Homo sapien
gctaagttcaggacatagtccattt

SEQ ID NO: 2223551 - DNA, 25 bp, Homo sapien
ccatttatagatggagcagttaatg

SEQ ID NO: 2223552 - DNA, 25 bp, Homo sapien
aaactgctaagttcaggacatagtc

SEQ ID NO: 2223553 - DNA, 25 bp, Homo sapien
atttatagatggagcagttaatgcc

SEQ ID NO: 2223554 - DNA, 25 bp, Homo sapien
tatagttttttgcaagtaccgtcag

SEQ ID NO: 2223555 - DNA, 25 bp, Homo sapien
taccgtcagatcaactgcgcaaaag

SEQ ID NO: 2223556 - DNA, 25 bp, Homo sapien
tcactaagcagaggtagatacctgg

SEQ ID NO: 2223557 - DNA, 25 bp, Homo sapien
tagccttaagcatcggagagaagtt

SEQ ID NO: 2223558 - DNA, 25 bp, Homo sapien
ctcttccctgaatcctacaccaata

SEQ ID NO: 2223559 - DNA, 25 bp, Homo sapien
tccctgaatcctacaccaatagcca

SEQ ID NO: 2223560 - DNA, 25 bp, Homo sapien
ctgaatcctacaccaatagccaggt

SEQ ID NO: 2223561 - DNA, 25 bp, Homo sapien
tcttccctgaatcctacaccaatag

SEQ ID NO: 2223562 - DNA, 25 bp, Homo sapien
ttagacttctgagtcttagtcccct

SEQ ID NO: 2223563 - DNA, 25 bp, Homo sapien
ctacttgctgatagcttacttagac

SEQ ID NO: 2223564 - DNA, 25 bp, Homo sapien
ttgctgatagcttacttagacttct

SEQ ID NO: 2223565 - DNA, 25 bp, Homo sapien
tctgagtcttagtcccctgaattcc

SEQ ID NO: 2223566 - DNA, 25 bp, Homo sapien
aaccccgtggacagctataagccat

SEQ ID NO: 2223567 - DNA, 25 bp, Homo sapien
gcaccaggctgttgtgcacttttaa

SEQ ID NO: 2223568 - DNA, 25 bp, Homo sapien
gaaagactagacgtttcaaactgga

SEQ ID NO: 2223569 - DNA, 25 bp, Homo sapien
tacataacacagacagtaatttgag

SEQ ID NO: 2223570 - DNA, 25 bp, Homo sapien
tgaactagaggtgcactgaccaagg

SEQ ID NO: 2223571 - DNA, 25 bp, Homo sapien
gaagaaggtagattgatgtctacag

SEQ ID NO: 2223572 - DNA, 25 bp, Homo sapien
cttatttgaactagaggtgcactga

SEQ ID NO: 2223573 - DNA, 25 bp, Homo sapien
tgcactgaccaaggaagaaggtaga

SEQ ID NO: 2223574 - DNA, 25 bp, Homo sapien
taagttaagcgacacataaggaaac

SEQ ID NO: 2223575 - DNA, 25 bp, Homo sapien
gcccatcaacaaacataatgtggta

SEQ ID NO: 2223576 - DNA, 25 bp, Homo sapien
tacagtagtggatcgctgcagccta

SEQ ID NO: 2223577 - DNA, 25 bp, Homo sapien
aggcgggaacccatcctagacagga

SEQ ID NO: 2223578 - DNA, 25 bp, Homo sapien
gaagagactgctaattggtgctttg

SEQ ID NO: 2223579 - DNA, 25 bp, Homo sapien
ggcgaaaatgggaagagactgctaa

SEQ ID NO: 2223580 - DNA, 25 bp, Homo sapien
taagttgggcgaaaatgggaagaga

SEQ ID NO: 2223581 - DNA, 25 bp, Homo sapien
aatgggaagagactgctaattggtg

SEQ ID NO: 2223582 - DNA, 25 bp, Homo sapien
accttctttataaaagcaacctgca

SEQ ID NO: 2223583 - DNA, 25 bp, Homo sapien
gtgtattcacatataatcaaaactg

SEQ ID NO: 2223584 - DNA, 25 bp, Homo sapien
gacatataacttacacaacacgaaa

SEQ ID NO: 2223585 - DNA, 25 bp, Homo sapien
gaaactttatggctaataatcaata

SEQ ID NO: 2223586 - DNA, 25 bp, Homo sapien
ttaaacaatactctgtggctcctct

SEQ ID NO: 2223587 - DNA, 25 bp, Homo sapien
taaacaatactctgtggctcctctt

SEQ ID NO: 2223588 - DNA, 25 bp, Homo sapien
tcattttttacttctgctgccactg

SEQ ID NO: 2223589 - DNA, 25 bp, Homo sapien
cagcttcccctttctcttcgttttg

SEQ ID NO: 2223590 - DNA, 25 bp, Homo sapien
tttctgtggcatcttcaatattttc

SEQ ID NO: 2223591 - DNA, 25 bp, Homo sapien
ccctttctcttcgttttgatcttct

SEQ ID NO: 2223592 - DNA, 25 bp, Homo sapien
tttcaaatagataaaactgttaaca

SEQ ID NO: 2223593 - DNA, 25 bp, Homo sapien
atagataaaactgttaacattagaa

SEQ ID NO: 2223594 - DNA, 25 bp, Homo sapien
tagataaaactgttaacattagaaa

SEQ ID NO: 2223595 - DNA, 25 bp, Homo sapien
caaatagataaaactgttaacatta

SEQ ID NO: 2223596 - DNA, 25 bp, Homo sapien
actgcttgggcacttgtatctatgt

SEQ ID NO: 2223597 - DNA, 25 bp, Homo sapien
tcattgtagtcttcttcaacaactg

SEQ ID NO: 2223598 - DNA, 25 bp, Homo sapien
cattgtagtcttcttcaacaactgc

SEQ ID NO: 2223599 - DNA, 25 bp, Homo sapien
ttcagcaactgcttgggcacttgta

SEQ ID NO: 2223600 - DNA, 25 bp, Homo sapien
taggcttcacctctggtgtaactgg

SEQ ID NO: 2223601 - DNA, 25 bp, Homo sapien
ttttaggcttcacctctggtgtaac

SEQ ID NO: 2223602 - DNA, 25 bp, Homo sapien
ggcttcacctctggtgtaactggca

SEQ ID NO: 2223603 - DNA, 25 bp, Homo sapien
tcttttaggcttcacctctggtgta

SEQ ID NO: 2223604 - DNA, 25 bp, Homo sapien
acaacctggcagatcttctctttgg

SEQ ID NO: 2223605 - DNA, 25 bp, Homo sapien
gacaacctggcagatcttctctttg

SEQ ID NO: 2223606 - DNA, 25 bp, Homo sapien
cagacaacctggcagatcttctctt

SEQ ID NO: 2223607 - DNA, 25 bp, Homo sapien
agcagacaacctggcagatcttctc

SEQ ID NO: 2223608 - DNA, 25 bp, Homo sapien
ctcctgcctcatatcaccttgacct

SEQ ID NO: 2223609 - DNA, 25 bp, Homo sapien
tcctgcctcatatcaccttgacctg

SEQ ID NO: 2223610 - DNA, 25 bp, Homo sapien
ctgcctcatatcaccttgacctgca

SEQ ID NO: 2223611 - DNA, 25 bp, Homo sapien
gcctcatatcaccttgacctgcagc

SEQ ID NO: 2223612 - DNA, 25 bp, Homo sapien
tttcaatgaactaactgcagcacga

SEQ ID NO: 2223613 - DNA, 25 bp, Homo sapien
tgttgtagctctctataggagatct

SEQ ID NO: 2223614 - DNA, 25 bp, Homo sapien
tataggagatcttagtcagcagaaa

SEQ ID NO: 2223615 - DNA, 25 bp, Homo sapien
tcactgcctgactgctccaagagca

SEQ ID NO: 2223616 - DNA, 25 bp, Homo sapien
aagcaattgggaaaggattctttat

SEQ ID NO: 2223617 - DNA, 25 bp, Homo sapien
tacgccttatacagaaattaattca

SEQ ID NO: 2223618 - DNA, 25 bp, Homo sapien
taataaatggtgttgggagaactgg

SEQ ID NO: 2223619 - DNA, 25 bp, Homo sapien
ccttacgccttatacagaaattaat

SEQ ID NO: 2223620 - DNA, 25 bp, Homo sapien
ggtctttattgtctccgacaacttg

SEQ ID NO: 2223621 - DNA, 25 bp, Homo sapien
gacaacttgctcgtcttggagaggg

SEQ ID NO: 2223622 - DNA, 25 bp, Homo sapien
ctttcagaatagatatcactaggca

SEQ ID NO: 2223623 - DNA, 25 bp, Homo sapien
gggactgaataccactttcagaata

SEQ ID NO: 2223624 - DNA, 25 bp, Homo sapien
ggtggtgatgttctctgagtatcat

SEQ ID NO: 2223625 - DNA, 25 bp, Homo sapien
ttgtattccaatgttcaagggcagg

SEQ ID NO: 2223626 - DNA, 25 bp, Homo sapien
tcgaaggtccaagagtcccaaagct

SEQ ID NO: 2223627 - DNA, 25 bp, Homo sapien
tgaagaacttgtattccaatgttca

SEQ ID NO: 2223628 - DNA, 25 bp, Homo sapien
ctgtggtcgaaggtccaagagtccc

SEQ ID NO: 2223629 - DNA, 25 bp, Homo sapien
catagcagtgtccacttgagaaggg

SEQ ID NO: 2223630 - DNA, 25 bp, Homo sapien
gggtgagagcatagcagtgtccact

SEQ ID NO: 2223631 - DNA, 25 bp, Homo sapien
tggagactcttagttctgagtgagg

SEQ ID NO: 2223632 - DNA, 25 bp, Homo sapien
ctggagactcttagttctgagtgag

SEQ ID NO: 2223633 - DNA, 25 bp, Homo sapien
ctcagggaaggaatcgtcaaaaatc

SEQ ID NO: 2223634 - DNA, 25 bp, Homo sapien
tgagcaggaagttatgcgcagtact

SEQ ID NO: 2223635 - DNA, 25 bp, Homo sapien
tagtctccgcgtgaaaaggtccttc

SEQ ID NO: 2223636 - DNA, 25 bp, Homo sapien
aggatctgtcttcttatttgcatat

SEQ ID NO: 2223637 - DNA, 25 bp, Homo sapien
gcagccgctgttcccaggatggtga

SEQ ID NO: 2223638 - DNA, 25 bp, Homo sapien
gaactgcagcgcttagagagctcgg

SEQ ID NO: 2223639 - DNA, 25 bp, Homo sapien
cctctggctctacagcggtaaggag

SEQ ID NO: 2223640 - DNA, 25 bp, Homo sapien
tttggaagactcatgcatccccgat

SEQ ID NO: 2223641 - DNA, 25 bp, Homo sapien
tggtctgttacatcaagtggagaac

SEQ ID NO: 2223642 - DNA, 25 bp, Homo sapien
tactaaggataattctggtggtctg

SEQ ID NO: 2223643 - DNA, 25 bp, Homo sapien
caatcaaagttataagagctcagcc

SEQ ID NO: 2223644 - DNA, 25 bp, Homo sapien
ggctattgcctgtgtgatttgagta

SEQ ID NO: 2223645 - DNA, 25 bp, Homo sapien
taaaggtagacctggcacaatggct

SEQ ID NO: 2223646 - DNA, 25 bp, Homo sapien
gtaaaggtagacctggcacaatggc

SEQ ID NO: 2223647 - DNA, 25 bp, Homo sapien
taattttaacttctcaaaggattca

SEQ ID NO: 2223648 - DNA, 25 bp, Homo sapien
ttaacttctcaaaggattcagtagt

SEQ ID NO: 2223649 - DNA, 25 bp, Homo sapien
tgattaagggctcgttagattccat

SEQ ID NO: 2223650 - DNA, 25 bp, Homo sapien
ctttgattaagggctcgttagattc

SEQ ID NO: 2223651 - DNA, 25 bp, Homo sapien
aactttgattaagggctcgttagat

SEQ ID NO: 2223652 - DNA, 25 bp, Homo sapien
ttgattaagggctcgttagattcca

SEQ ID NO: 2223653 - DNA, 25 bp, Homo sapien
gaacagtggccattaggctcaatgt

SEQ ID NO: 2223654 - DNA, 25 bp, Homo sapien
gggtaagaacagtggccattaggct

SEQ ID NO: 2223655 - DNA, 25 bp, Homo sapien
gccattaggctcaatgtgtactcag

SEQ ID NO: 2223656 - DNA, 25 bp, Homo sapien
ttaggctcaatgtgtactcagggac

SEQ ID NO: 2223657 - DNA, 25 bp, Homo sapien
caagccatcctgtatacaccaatga

SEQ ID NO: 2223658 - DNA, 25 bp, Homo sapien
ttgaacattatggtgattatggtga

SEQ ID NO: 2223659 - DNA, 25 bp, Homo sapien
tatcgtagaaatagtgttgttacct

SEQ ID NO: 2223660 - DNA, 25 bp, Homo sapien
tatattaataagtagatatcgtaga

SEQ ID NO: 2223661 - DNA, 25 bp, Homo sapien
tgtattagtctaagcagtgagaatc

SEQ ID NO: 2223662 - DNA, 25 bp, Homo sapien
gaagagatgcctttgtttcatgaga

SEQ ID NO: 2223663 - DNA, 25 bp, Homo sapien
gcctctattccagcaaaaagtagaa

SEQ ID NO: 2223664 - DNA, 25 bp, Homo sapien
tataaaacaggttggcgatcatttc

SEQ ID NO: 2223665 - DNA, 25 bp, Homo sapien
aagtgaattactcagtcttgatttc

SEQ ID NO: 2223666 - DNA, 25 bp, Homo sapien
taagtgaattactcagtcttgattt

SEQ ID NO: 2223667 - DNA, 25 bp, Homo sapien
agtgaattactcagtcttgatttct

SEQ ID NO: 2223668 - DNA, 25 bp, Homo sapien
tttaagtgaattactcagtcttgat

SEQ ID NO: 2223669 - DNA, 25 bp, Homo sapien
ctttaaaactgatagaaacatctgt

SEQ ID NO: 2223670 - DNA, 25 bp, Homo sapien
aattctagtaacttcttcttgtctc

SEQ ID NO: 2223671 - DNA, 25 bp, Homo sapien
catactttatattgtaactctctaa

SEQ ID NO: 2223672 - DNA, 25 bp, Homo sapien
gaaacatctgttaattcatacttta

SEQ ID NO: 2223673 - DNA, 25 bp, Homo sapien
tccatagcagctgatatgaagctgc

SEQ ID NO: 2223674 - DNA, 25 bp, Homo sapien
gatatgagaagtacaagcacgcagc

SEQ ID NO: 2223675 - DNA, 25 bp, Homo sapien
attccacactggtagttctgtctgc

SEQ ID NO: 2223676 - DNA, 25 bp, Homo sapien
gaatcttggcaactctggctccgcc

SEQ ID NO: 2223677 - DNA, 25 bp, Homo sapien
agcctatataaggagagcctaggcc

SEQ ID NO: 2223678 - DNA, 25 bp, Homo sapien
ctatgcgtgtgtagaagtacgctca

SEQ ID NO: 2223679 - DNA, 25 bp, Homo sapien
tgtgtagaagtacgctcatatgcct

SEQ ID NO: 2223680 - DNA, 25 bp, Homo sapien
gaagaaacagcctatataaggagag

SEQ ID NO: 2223681 - DNA, 25 bp, Homo sapien
aaatgctattgaagtgttcactgtc

SEQ ID NO: 2223682 - DNA, 25 bp, Homo sapien
tctgaatcgatatggtaccttgaag

SEQ ID NO: 2223683 - DNA, 25 bp, Homo sapien
gaatctcacaaatatcataggttgt

SEQ ID NO: 2223684 - DNA, 25 bp, Homo sapien
tcactgtctgaatcgatatggtacc

SEQ ID NO: 2223685 - DNA, 25 bp, Homo sapien
gacagagagcatgccgtttaattgt

SEQ ID NO: 2223686 - DNA, 25 bp, Homo sapien
tatacacgtgccaagtttgaacttg

SEQ ID NO: 2223687 - DNA, 25 bp, Homo sapien
ccagtttggttcaaagacagagagc

SEQ ID NO: 2223688 - DNA, 25 bp, Homo sapien
aagtttgaacttggtctgtatctac

SEQ ID NO: 2223689 - DNA, 25 bp, Homo sapien
tttccatttttaagattgtcagtac

SEQ ID NO: 2223690 - DNA, 25 bp, Homo sapien
gatatttccatttttaagattgtca

SEQ ID NO: 2223691 - DNA, 25 bp, Homo sapien
tatttccatttttaagattgtcagt

SEQ ID NO: 2223692 - DNA, 25 bp, Homo sapien
tagatatttccatttttaagattgt

SEQ ID NO: 2223693 - DNA, 25 bp, Homo sapien
catccatgtttcctgtcagccttta

SEQ ID NO: 2223694 - DNA, 25 bp, Homo sapien
tcatccatgtttcctgtcagccttt

SEQ ID NO: 2223695 - DNA, 25 bp, Homo sapien
ccatgtttcctgtcagcctttatta

SEQ ID NO: 2223696 - DNA, 25 bp, Homo sapien
tccatgtttcctgtcagcctttatt

SEQ ID NO: 2223697 - DNA, 25 bp, Homo sapien
tctgctagttctgctttgccattcc

SEQ ID NO: 2223698 - DNA, 25 bp, Homo sapien
gctagttctgctttgccattcctca

SEQ ID NO: 2223699 - DNA, 25 bp, Homo sapien
tgctagttctgctttgccattcctc

SEQ ID NO: 2223700 - DNA, 25 bp, Homo sapien
cttctgctagttctgctttgccatt

SEQ ID NO: 2223701 - DNA, 25 bp, Homo sapien
atcttcacgcgtaacattgtgttac

SEQ ID NO: 2223702 - DNA, 25 bp, Homo sapien
ttttatcttcacgcgtaacattgtg

SEQ ID NO: 2223703 - DNA, 25 bp, Homo sapien
ttatcttcacgcgtaacattgtgtt

SEQ ID NO: 2223704 - DNA, 25 bp, Homo sapien
attttatcttcacgcgtaacattgt

SEQ ID NO: 2223705 - DNA, 25 bp, Homo sapien
tctggactgcgtatatgtgagtgct

SEQ ID NO: 2223706 - DNA, 25 bp, Homo sapien
agcagtttctggactgcgtatatgt

SEQ ID NO: 2223707 - DNA, 25 bp, Homo sapien
tgtgagtgctagtgaaaaggcatca

SEQ ID NO: 2223708 - DNA, 25 bp, Homo sapien
gtccttgctgtccataaagcagttt

SEQ ID NO: 2223709 - DNA, 25 bp, Homo sapien
gatgctgttaacctcttgtgtctgc

SEQ ID NO: 2223710 - DNA, 25 bp, Homo sapien
gccgtcaactatcctagcagatgct

SEQ ID NO: 2223711 - DNA, 25 bp, Homo sapien
ggcagctaattgcaccttcaaaaca

SEQ ID NO: 2223712 - DNA, 25 bp, Homo sapien
cctgggtaattttgccgtcaactat

SEQ ID NO: 2223713 - DNA, 25 bp, Homo sapien
taggttcttgttttctctccaccat

SEQ ID NO: 2223714 - DNA, 25 bp, Homo sapien
tgataggttcttgttttctctccac

SEQ ID NO: 2223715 - DNA, 25 bp, Homo sapien
ctgataggttcttgttttctctcca

SEQ ID NO: 2223716 - DNA, 25 bp, Homo sapien
gataggttcttgttttctctccacc

SEQ ID NO: 2223717 - DNA, 25 bp, Homo sapien
ccttgacgaagtgggcacagtgacc

SEQ ID NO: 2223718 - DNA, 25 bp, Homo sapien
cacagtgaccgagccactggccagg

SEQ ID NO: 2223719 - DNA, 25 bp, Homo sapien
tgaccattgggagtgtcagccccag

SEQ ID NO: 2223720 - DNA, 25 bp, Homo sapien
agagcctccttctaaggcgcaggaa

SEQ ID NO: 2223721 - DNA, 25 bp, Homo sapien
aggcccagcccccatgctctgtgta

SEQ ID NO: 2223722 - DNA, 25 bp, Homo sapien
ccagcccccatgctctgtgtacaag

SEQ ID NO: 2223723 - DNA, 25 bp, Homo sapien
gccccagttttgcaccccaggccca

SEQ ID NO: 2223724 - DNA, 25 bp, Homo sapien
gcccccatgctctgtgtacaagcat

SEQ ID NO: 2223725 - DNA, 25 bp, Homo sapien
ccagttttgcacaagggagacaaat

SEQ ID NO: 2223726 - DNA, 25 bp, Homo sapien
tttgtccgaatttcttctccttcca

SEQ ID NO: 2223727 - DNA, 25 bp, Homo sapien
tgcacaagggagacaaattcctttt

SEQ ID NO: 2223728 - DNA, 25 bp, Homo sapien
cacaagggagacaaattcctttttg

SEQ ID NO: 2223729 - DNA, 25 bp, Homo sapien
cagggtttagaatgttccgataata

SEQ ID NO: 2223730 - DNA, 25 bp, Homo sapien
tcagggtttagaatgttccgataat

SEQ ID NO: 2223731 - DNA, 25 bp, Homo sapien
tacagtttccttgcgagtttcttcg

SEQ ID NO: 2223732 - DNA, 25 bp, Homo sapien
tccttgcgagtttcttcgttgcacc

SEQ ID NO: 2223733 - DNA, 25 bp, Homo sapien
ttacagtttccttgcgagtttcttc

SEQ ID NO: 2223734 - DNA, 25 bp, Homo sapien
gagtttcttcgttgcaccaaagctt

SEQ ID NO: 2223735 - DNA, 25 bp, Homo sapien
tctttgttgactgctcccttatggc

SEQ ID NO: 2223736 - DNA, 25 bp, Homo sapien
tatggctagataggacagaatttct

SEQ ID NO: 2223737 - DNA, 25 bp, Homo sapien
gactgctcccttatggctagatagg

SEQ ID NO: 2223738 - DNA, 25 bp, Homo sapien
gctcccttatggctagataggacag

SEQ ID NO: 2223739 - DNA, 25 bp, Homo sapien
gtgtaccctactgcctgcttgtctg

SEQ ID NO: 2223740 - DNA, 25 bp, Homo sapien
tgctcttatgccaggcacccatgtg

SEQ ID NO: 2223741 - DNA, 25 bp, Homo sapien
gcttgtctgttatccctagggatgt

SEQ ID NO: 2223742 - DNA, 25 bp, Homo sapien
ctagggatgtatctgccctttccag

SEQ ID NO: 2223743 - DNA, 25 bp, Homo sapien
tccttggcttgatcattgacatact

SEQ ID NO: 2223744 - DNA, 25 bp, Homo sapien
cttggcttgatcattgacatactgt

SEQ ID NO: 2223745 - DNA, 25 bp, Homo sapien
ccttggcttgatcattgacatactg

SEQ ID NO: 2223746 - DNA, 25 bp, Homo sapien
ctccttggcttgatcattgacatac

SEQ ID NO: 2223747 - DNA, 25 bp, Homo sapien
gcatgtcatccatgtacagaggcca

SEQ ID NO: 2223748 - DNA, 25 bp, Homo sapien
aattttttgtatatatgctgccaaa

SEQ ID NO: 2223749 - DNA, 25 bp, Homo sapien
ttgtatatatgctgccaaagtgggc

SEQ ID NO: 2223750 - DNA, 25 bp, Homo sapien
gctaatcttctttgtgttgttttaa

SEQ ID NO: 2223751 - DNA, 25 bp, Homo sapien
gattcttccttgtaaatggaataaa

SEQ ID NO: 2223752 - DNA, 25 bp, Homo sapien
tgaaagattcttccttgtaaatgga

SEQ ID NO: 2223753 - DNA, 25 bp, Homo sapien
gatttgaccatgaaagattcttcct

SEQ ID NO: 2223754 - DNA, 25 bp, Homo sapien
tcagacaagtgatttgaccatgaaa

SEQ ID NO: 2223755 - DNA, 25 bp, Homo sapien
gagtgataccagatttaaaatcaaa

SEQ ID NO: 2223756 - DNA, 25 bp, Homo sapien
aacacataaacgcatttaagcttca

SEQ ID NO: 2223757 - DNA, 25 bp, Homo sapien
tttgtggacattcttcatagagtga

SEQ ID NO: 2223758 - DNA, 25 bp, Homo sapien
tcttatccagaatcttttgtggaca

SEQ ID NO: 2223759 - DNA, 25 bp, Homo sapien
tattgctgttgtaggacatatgtga

SEQ ID NO: 2223760 - DNA, 25 bp, Homo sapien
ttattgctgttgtaggacatatgtg

SEQ ID NO: 2223761 - DNA, 25 bp, Homo sapien
tgctgttgtaggacatatgtgatgt

SEQ ID NO: 2223762 - DNA, 25 bp, Homo sapien
ttgctgttgtaggacatatgtgatg

SEQ ID NO: 2223763 - DNA, 25 bp, Homo sapien
gagtgcctggacaatatgccaagag

SEQ ID NO: 2223764 - DNA, 25 bp, Homo sapien
tcctatgtgagctacccacagcagg

SEQ ID NO: 2223765 - DNA, 25 bp, Homo sapien
tgctactagcacaaggcacatttgt

SEQ ID NO: 2223766 - DNA, 25 bp, Homo sapien
tgtattcagtaaccagtcagtcaat

SEQ ID NO: 2223767 - DNA, 25 bp, Homo sapien
ctatgtgtgcaggattgcttgcata

SEQ ID NO: 2223768 - DNA, 25 bp, Homo sapien
cctatgtgtgcaggattgcttgcat

SEQ ID NO: 2223769 - DNA, 25 bp, Homo sapien
gctgatagaggctggaactaaattt

SEQ ID NO: 2223770 - DNA, 25 bp, Homo sapien
gaggctggaactaaatttcagggcc

SEQ ID NO: 2223771 - DNA, 25 bp, Homo sapien
agggccccttcggaaactgccatgg

SEQ ID NO: 2223772 - DNA, 25 bp, Homo sapien
ttcagggccccttcggaaactgcca

SEQ ID NO: 2223773 - DNA, 25 bp, Homo sapien
tatgaaatcagataactacaatgac

SEQ ID NO: 2223774 - DNA, 25 bp, Homo sapien
actgctactatgaaatcagataact

SEQ ID NO: 2223775 - DNA, 25 bp, Homo sapien
gctactatgaaatcagataactaca

SEQ ID NO: 2223776 - DNA, 25 bp, Homo sapien
tcagataactacaatgacaacatta

SEQ ID NO: 2223777 - DNA, 25 bp, Homo sapien
catggtggcttttaatcctcctcca

SEQ ID NO: 2223778 - DNA, 25 bp, Homo sapien
atcttgtacatatcctccatcataa

SEQ ID NO: 2223779 - DNA, 25 bp, Homo sapien
taatctgccggatcatctttcatgg

SEQ ID NO: 2223780 - DNA, 25 bp, Homo sapien
catcataaccaccataatctgccgg

SEQ ID NO: 2223781 - DNA, 25 bp, Homo sapien
cacctgggatgtcacggtgatattt

SEQ ID NO: 2223782 - DNA, 25 bp, Homo sapien
gtaacggaattcataactctcttag

SEQ ID NO: 2223783 - DNA, 25 bp, Homo sapien
cataactctcttagcaactacgtgc

SEQ ID NO: 2223784 - DNA, 25 bp, Homo sapien
cctttcgatggtcactgccccttac

SEQ ID NO: 2223785 - DNA, 25 bp, Homo sapien
caagtttctcagcttttctgatcac

SEQ ID NO: 2223786 - DNA, 25 bp, Homo sapien
tcacaagctttttcacgggtgccat

SEQ ID NO: 2223787 - DNA, 25 bp, Homo sapien
ttcatcacaagctttttcacgggtg

SEQ ID NO: 2223788 - DNA, 25 bp, Homo sapien
catcacaagctttttcacgggtgcc

SEQ ID NO: 2223789 - DNA, 25 bp, Homo sapien
ccttcatcacaagctttttcacggg

SEQ ID NO: 2223790 - DNA, 25 bp, Homo sapien
gctttcaatccaaatggtgcatatt

SEQ ID NO: 2223791 - DNA, 25 bp, Homo sapien
atccaaatggtgcatattctccacg

SEQ ID NO: 2223792 - DNA, 25 bp, Homo sapien
ccaaatggtgcatattctccacggg

SEQ ID NO: 2223793 - DNA, 25 bp, Homo sapien
tcaatccaaatggtgcatattctcc

SEQ ID NO: 2223794 - DNA, 25 bp, Homo sapien
aatatgtccacataacagacctgca

SEQ ID NO: 2223795 - DNA, 25 bp, Homo sapien
tgaatattccacaggctcacacgta

SEQ ID NO: 2223796 - DNA, 25 bp, Homo sapien
gttagagataagcaatgggtacaca

SEQ ID NO: 2223797 - DNA, 25 bp, Homo sapien
gggtagaagcggcacaagcgttcaa

SEQ ID NO: 2223798 - DNA, 25 bp, Homo sapien
tctgcggattttgaagaccatggga

SEQ ID NO: 2223799 - DNA, 25 bp, Homo sapien
gacaagccatgtacctcagttagaa

SEQ ID NO: 2223800 - DNA, 25 bp, Homo sapien
cgtagtatttgatctggaatgcacc

SEQ ID NO: 2223801 - DNA, 25 bp, Homo sapien
tccaagagggctgcactcactgtct

SEQ ID NO: 2223802 - DNA, 25 bp, Homo sapien
tttttgctagaatggaaatgctcaa

SEQ ID NO: 2223803 - DNA, 25 bp, Homo sapien
tagaatggaaatgctcaactcttcc

SEQ ID NO: 2223804 - DNA, 25 bp, Homo sapien
gcatttttgctagaatggaaatgct

SEQ ID NO: 2223805 - DNA, 25 bp, Homo sapien
ttgctagaatggaaatgctcaactc

SEQ ID NO: 2223806 - DNA, 25 bp, Homo sapien
tcagttccttgcacagaacttgtat

SEQ ID NO: 2223807 - DNA, 25 bp, Homo sapien
ccttgcacagaacttgtatagccaa

SEQ ID NO: 2223808 - DNA, 25 bp, Homo sapien
ttccttgcacagaacttgtatagcc

SEQ ID NO: 2223809 - DNA, 25 bp, Homo sapien
ttgcacagaacttgtatagccaaca

SEQ ID NO: 2223810 - DNA, 25 bp, Homo sapien
aacaggttccatggctctaggaggc

SEQ ID NO: 2223811 - DNA, 25 bp, Homo sapien
tcccacgacacgaggaaggcttgtt

SEQ ID NO: 2223812 - DNA, 25 bp, Homo sapien
taaagacctggcatccatagcaaag

SEQ ID NO: 2223813 - DNA, 25 bp, Homo sapien
gatctggtcatttggcgacgtccca

SEQ ID NO: 2223814 - DNA, 25 bp, Homo sapien
ttattgttgctcatggtctatcaat

SEQ ID NO: 2223815 - DNA, 25 bp, Homo sapien
tattgttgctcatggtctatcaatt

SEQ ID NO: 2223816 - DNA, 25 bp, Homo sapien
ggttattgttgctcatggtctatca

SEQ ID NO: 2223817 - DNA, 25 bp, Homo sapien
gttattgttgctcatggtctatcaa

SEQ ID NO: 2223818 - DNA, 25 bp, Homo sapien
cacattccaataagaatcgatgttc

SEQ ID NO: 2223819 - DNA, 25 bp, Homo sapien
tccacattccaataagaatcgatgt

SEQ ID NO: 2223820 - DNA, 25 bp, Homo sapien
gcttccacattccaataagaatcga

SEQ ID NO: 2223821 - DNA, 25 bp, Homo sapien
cattccaataagaatcgatgttcat

SEQ ID NO: 2223822 - DNA, 25 bp, Homo sapien
tctggcaaaatctgcactggctgct

SEQ ID NO: 2223823 - DNA, 25 bp, Homo sapien
ttctgagagctgtgctatctaccag

SEQ ID NO: 2223824 - DNA, 25 bp, Homo sapien
agctgctgaaaggtacatggtaagt

SEQ ID NO: 2223825 - DNA, 25 bp, Homo sapien
gaactgcaacagatgttcggatcca

SEQ ID NO: 2223826 - DNA, 25 bp, Homo sapien
atctgctgagtctgcatcaactgct

SEQ ID NO: 2223827 - DNA, 25 bp, Homo sapien
catctgctgagtctgcatcaactgc

SEQ ID NO: 2223828 - DNA, 25 bp, Homo sapien
aagggattgagagcccgtttgcttc

SEQ ID NO: 2223829 - DNA, 25 bp, Homo sapien
ctgagcttccattccaactactgct

SEQ ID NO: 2223830 - DNA, 25 bp, Homo sapien
tactgctatagccatggctgagtta

SEQ ID NO: 2223831 - DNA, 25 bp, Homo sapien
ctgagttaaagggattgagagcccg

SEQ ID NO: 2223832 - DNA, 25 bp, Homo sapien
cttcattgccgcagatgtcttttac

SEQ ID NO: 2223833 - DNA, 25 bp, Homo sapien
atcctgtaccacttcattgccgcag

SEQ ID NO: 2223834 - DNA, 25 bp, Homo sapien
taccacttcattgccgcagatgtct

SEQ ID NO: 2223835 - DNA, 25 bp, Homo sapien
aaagccatcctgtaccacttcattg

SEQ ID NO: 2223836 - DNA, 25 bp, Homo sapien
tctgctgtgtatgtcagaattcctc

SEQ ID NO: 2223837 - DNA, 25 bp, Homo sapien
cttttacctttgaccgacgaggctg

SEQ ID NO: 2223838 - DNA, 25 bp, Homo sapien
tttctgctgtgtatgtcagaattcc

SEQ ID NO: 2223839 - DNA, 25 bp, Homo sapien
gctgatttggaggtcctttctgctg

SEQ ID NO: 2223840 - DNA, 25 bp, Homo sapien
taggcttatttgttctaaggattcc

SEQ ID NO: 2223841 - DNA, 25 bp, Homo sapien
acactccctcgagaagacagctgct

SEQ ID NO: 2223842 - DNA, 25 bp, Homo sapien
aataaacactccctcgagaagacag

SEQ ID NO: 2223843 - DNA, 25 bp, Homo sapien
ttttccaaagccccaagggctgcag

SEQ ID NO: 2223844 - DNA, 25 bp, Homo sapien
aggatggcctcctaaaggatgcagg

SEQ ID NO: 2223845 - DNA, 25 bp, Homo sapien
tggcctcctaaaggatgcaggttcc

SEQ ID NO: 2223846 - DNA, 25 bp, Homo sapien
tgatatccctggcttgactgcagga

SEQ ID NO: 2223847 - DNA, 25 bp, Homo sapien
agaggacagggatgcctgatatccc

SEQ ID NO: 2223848 - DNA, 25 bp, Homo sapien
aaaaaacaacttctcattcaggcac

SEQ ID NO: 2223849 - DNA, 25 bp, Homo sapien
aaaaaaacaacttctcattcaggca

SEQ ID NO: 2223850 - DNA, 25 bp, Homo sapien
ccatgaatggtttaagtgacagtgc

SEQ ID NO: 2223851 - DNA, 25 bp, Homo sapien
cctctggagtctttgaatctttgct

SEQ ID NO: 2223852 - DNA, 25 bp, Homo sapien
tgtccctgatgccattagactcctc

SEQ ID NO: 2223853 - DNA, 25 bp, Homo sapien
catgcatagttgccggaggtgttct

SEQ ID NO: 2223854 - DNA, 25 bp, Homo sapien
gacacacaaaagtaatagtatgtgt

SEQ ID NO: 2223855 - DNA, 25 bp, Homo sapien
aagtaatagtatgtgtttcctccat

SEQ ID NO: 2223856 - DNA, 25 bp, Homo sapien
cacaaaagtaatagtatgtgtttcc

SEQ ID NO: 2223857 - DNA, 25 bp, Homo sapien
aagacacacaaaagtaatagtatgt

SEQ ID NO: 2223858 - DNA, 25 bp, Homo sapien
tcagagccattccaaaacttgggct

SEQ ID NO: 2223859 - DNA, 25 bp, Homo sapien
ccattccaaaacttgggctgagaaa

SEQ ID NO: 2223860 - DNA, 25 bp, Homo sapien
gagccattccaaaacttgggctgag

SEQ ID NO: 2223861 - DNA, 25 bp, Homo sapien
gccattccaaaacttgggctgagaa

SEQ ID NO: 2223862 - DNA, 25 bp, Homo sapien
tttgcactccctccacagtagattt

SEQ ID NO: 2223863 - DNA, 25 bp, Homo sapien
ttgcactccctccacagtagatttt

SEQ ID NO: 2223864 - DNA, 25 bp, Homo sapien
gttcacacacgatgtcttctttctg

SEQ ID NO: 2223865 - DNA, 25 bp, Homo sapien
caaacttctctgtgactgaatattt

SEQ ID NO: 2223866 - DNA, 25 bp, Homo sapien
aatgttcacacacgatgtcttcttt

SEQ ID NO: 2223867 - DNA, 25 bp, Homo sapien
aaaatgttcacacacgatgtcttct

SEQ ID NO: 2223868 - DNA, 25 bp, Homo sapien
acaatcagaaatggcaaaggggact

SEQ ID NO: 2223869 - DNA, 25 bp, Homo sapien
acaaacacctctatgaacacaacct

SEQ ID NO: 2223870 - DNA, 25 bp, Homo sapien
taaataagattgatagatcacaggc

SEQ ID NO: 2223871 - DNA, 25 bp, Homo sapien
acctctatgaacacaacctggaaaa

SEQ ID NO: 2223872 - DNA, 25 bp, Homo sapien
tcttagccccaggttaagcaccagc

SEQ ID NO: 2223873 - DNA, 25 bp, Homo sapien
tgattgcagttctacacagctgtgc

SEQ ID NO: 2223874 - DNA, 25 bp, Homo sapien
cattgatgcagaaagtatagccctc

SEQ ID NO: 2223875 - DNA, 25 bp, Homo sapien
tcccacagctactggcgggtggaaa

SEQ ID NO: 2223876 - DNA, 25 bp, Homo sapien
gcacaggagtagtgaatagatgaaa

SEQ ID NO: 2223877 - DNA, 25 bp, Homo sapien
tctgggttgtataatcctattgcac

SEQ ID NO: 2223878 - DNA, 25 bp, Homo sapien
aacaaccaattgcaaaatcgatcat

SEQ ID NO: 2223879 - DNA, 25 bp, Homo sapien
ttggcaggttgagggaaactaaaca

SEQ ID NO: 2223880 - DNA, 25 bp, Homo sapien
ccgaagggaactcttctcggggcag

SEQ ID NO: 2223881 - DNA, 25 bp, Homo sapien
tgatgtattcacaggcagctggaaa

SEQ ID NO: 2223882 - DNA, 25 bp, Homo sapien
aacacccacgatggcctgactgatg

SEQ ID NO: 2223883 - DNA, 25 bp, Homo sapien
gggagctaaatcgattcctcaaatc

SEQ ID NO: 2223884 - DNA, 25 bp, Homo sapien
caacgcagttataggagcaagcatc

SEQ ID NO: 2223885 - DNA, 25 bp, Homo sapien
agaaactgagactggacggacacga

SEQ ID NO: 2223886 - DNA, 25 bp, Homo sapien
ttgcaacggcaaaaatgtgatccct

SEQ ID NO: 2223887 - DNA, 25 bp, Homo sapien
tagtgagggtctctattgtcccagc

SEQ ID NO: 2223888 - DNA, 25 bp, Homo sapien
caataagggaactctgatgccgtct

SEQ ID NO: 2223889 - DNA, 25 bp, Homo sapien
tagtaatcaaatgtacggccgccac

SEQ ID NO: 2223890 - DNA, 25 bp, Homo sapien
tacctattcgtagtgggtctgcaga

SEQ ID NO: 2223891 - DNA, 25 bp, Homo sapien
gataagcctctacaataagacgtgg

SEQ ID NO: 2223892 - DNA, 25 bp, Homo sapien
cgacctcccgcaccgctattggccg

SEQ ID NO: 2223893 - DNA, 25 bp, Homo sapien
cgcaccgctattggccgggcttact

SEQ ID NO: 2223894 - DNA, 25 bp, Homo sapien
gctattggccgggcttactcctggc

SEQ ID NO: 2223895 - DNA, 25 bp, Homo sapien
cgctgcgattggccgtggtgggtgc

SEQ ID NO: 2223896 - DNA, 25 bp, Homo sapien
agatgtcaaaggctgaagctgctcc

SEQ ID NO: 2223897 - DNA, 25 bp, Homo sapien
gtagatgtcaaaggctgaagctgct

SEQ ID NO: 2223898 - DNA, 25 bp, Homo sapien
cgtagatgtcaaaggctgaagctgc

SEQ ID NO: 2223899 - DNA, 25 bp, Homo sapien
atgtcaaaggctgaagctgctccct

SEQ ID NO: 2223900 - DNA, 25 bp, Homo sapien
gcttcaccgtgagcggcatgctgga

SEQ ID NO: 2223901 - DNA, 25 bp, Homo sapien
aatcaagttgggcttcacgcaggcc

SEQ ID NO: 2223902 - DNA, 25 bp, Homo sapien
ttgacaagatcgctgcacagggccg

SEQ ID NO: 2223903 - DNA, 25 bp, Homo sapien
tgattacttgcagggagttcccagc

SEQ ID NO: 2223904 - DNA, 25 bp, Homo sapien
gagataatttgtatctaatcgacca

SEQ ID NO: 2223905 - DNA, 25 bp, Homo sapien
tactacttcgttgagctgatggctt

SEQ ID NO: 2223906 - DNA, 25 bp, Homo sapien
tgtatctaatcgaccactccatgtt

SEQ ID NO: 2223907 - DNA, 25 bp, Homo sapien
ttattattactacttcgttgagctg

SEQ ID NO: 2223908 - DNA, 25 bp, Homo sapien
tagccacttgccaacataattggcc

SEQ ID NO: 2223909 - DNA, 25 bp, Homo sapien
ttaaggatattcagtggcaaagtgc

SEQ ID NO: 2223910 - DNA, 25 bp, Homo sapien
gctcctggtgtgcataattagccac

SEQ ID NO: 2223911 - DNA, 25 bp, Homo sapien
agtgcaggtgcacttttgggaccca

SEQ ID NO: 2223912 - DNA, 25 bp, Homo sapien
gagtcgattgatctagggtgggcac

SEQ ID NO: 2223913 - DNA, 25 bp, Homo sapien
cagagtcgattgatctagggtgggc

SEQ ID NO: 2223914 - DNA, 25 bp, Homo sapien
agagtcgattgatctagggtgggca

SEQ ID NO: 2223915 - DNA, 25 bp, Homo sapien
agtcgattgatctagggtgggcacc

SEQ ID NO: 2223916 - DNA, 25 bp, Homo sapien
gacacatagctgaagccaacattag

SEQ ID NO: 2223917 - DNA, 25 bp, Homo sapien
cagtcggagtaaggacacatagctg

SEQ ID NO: 2223918 - DNA, 25 bp, Homo sapien
gaggaccagtcggagtaaggacaca

SEQ ID NO: 2223919 - DNA, 25 bp, Homo sapien
aatgaggaccagtcggagtaaggac

SEQ ID NO: 2223920 - DNA, 25 bp, Homo sapien
tcaggaaaagtgaactaactgggaa

SEQ ID NO: 2223921 - DNA, 25 bp, Homo sapien
gcttcaggaaaagtgaactaactgg

SEQ ID NO: 2223922 - DNA, 25 bp, Homo sapien
ataggagtgtggcttcaggaaaagt

SEQ ID NO: 2223923 - DNA, 25 bp, Homo sapien
gagtgtggcttcaggaaaagtgaac

SEQ ID NO: 2223924 - DNA, 25 bp, Homo sapien
aatgtttctcactgtgggaatattc

SEQ ID NO: 2223925 - DNA, 25 bp, Homo sapien
tatctcggttgagttggaaattctc

SEQ ID NO: 2223926 - DNA, 25 bp, Homo sapien
caagaggatgactagctaaaagttc

SEQ ID NO: 2223927 - DNA, 25 bp, Homo sapien
cactttctgaagattatgactttca

SEQ ID NO: 2223928 - DNA, 25 bp, Homo sapien
gagatccaggtcgtctggcatccat

SEQ ID NO: 2223929 - DNA, 25 bp, Homo sapien
agctggaatactgccctttagctga

SEQ ID NO: 2223930 - DNA, 25 bp, Homo sapien
actgccctttagctgagatccaggt

SEQ ID NO: 2223931 - DNA, 25 bp, Homo sapien
cctttagctgagatccaggtcgtct

SEQ ID NO: 2223932 - DNA, 25 bp, Homo sapien
caacccagtgttcgtattgtgcttt

SEQ ID NO: 2223933 - DNA, 25 bp, Homo sapien
tctaaaccacttcaactctttgcag

SEQ ID NO: 2223934 - DNA, 25 bp, Homo sapien
cctggcaacccagtgttcgtattgt

SEQ ID NO: 2223935 - DNA, 25 bp, Homo sapien
atgtctaaaccacttcaactctttg

SEQ ID NO: 2223936 - DNA, 25 bp, Homo sapien
gaataactggtcaaatctggttgcc

SEQ ID NO: 2223937 - DNA, 25 bp, Homo sapien
cccttaggattagctttcaacagag

SEQ ID NO: 2223938 - DNA, 25 bp, Homo sapien
ttcaacagagcttccattccaggcc

SEQ ID NO: 2223939 - DNA, 25 bp, Homo sapien
caggcccggaagaaacctttgatat

SEQ ID NO: 2223940 - DNA, 25 bp, Homo sapien
ccaatttaagctttacagaatactg

SEQ ID NO: 2223941 - DNA, 25 bp, Homo sapien
gttataaagatctattcaaaaccat

SEQ ID NO: 2223942 - DNA, 25 bp, Homo sapien
gagaatcttgtatttatggcatcag

SEQ ID NO: 2223943 - DNA, 25 bp, Homo sapien
tgtcccatgggtaatactattgtct

SEQ ID NO: 2223944 - DNA, 25 bp, Homo sapien
tgatcaaaatacttaactgtccttt

SEQ ID NO: 2223945 - DNA, 25 bp, Homo sapien
gtgatcaaaatacttaactgtcctt

SEQ ID NO: 2223946 - DNA, 25 bp, Homo sapien
gatactaaatgtggcagggttcaac

SEQ ID NO: 2223947 - DNA, 25 bp, Homo sapien
ctaaatgtggcagggttcaacaaat

SEQ ID NO: 2223948 - DNA, 25 bp, Homo sapien
catgacacttgtccggttgttgaat

SEQ ID NO: 2223949 - DNA, 25 bp, Homo sapien
catatttcctcatgccagatctcaa

SEQ ID NO: 2223950 - DNA, 25 bp, Homo sapien
cagtattttagaccagtttccctct

SEQ ID NO: 2223951 - DNA, 25 bp, Homo sapien
tcttttaacatgacacttgtccggt

SEQ ID NO: 2223952 - DNA, 25 bp, Homo sapien
tcaggagttaccggttgactctttg

SEQ ID NO: 2223953 - DNA, 25 bp, Homo sapien
ccggttgactctttgaaacaggtat

SEQ ID NO: 2223954 - DNA, 25 bp, Homo sapien
ctgtctttttctagctcgatgtttt

SEQ ID NO: 2223955 - DNA, 25 bp, Homo sapien
ctcgatgtttttcaggagttaccgg

SEQ ID NO: 2223956 - DNA, 25 bp, Homo sapien
tgttgctcggctccatgttgcatct

SEQ ID NO: 2223957 - DNA, 25 bp, Homo sapien
cttgttgctcggctccatgttgcat

SEQ ID NO: 2223958 - DNA, 25 bp, Homo sapien
tgctcggctccatgttgcatcttag

SEQ ID NO: 2223959 - DNA, 25 bp, Homo sapien
gttgctcggctccatgttgcatctt

SEQ ID NO: 2223960 - DNA, 25 bp, Homo sapien
tgaggattcagttaccgcagactgt

SEQ ID NO: 2223961 - DNA, 25 bp, Homo sapien
aaggatactgtaccctctgaggatt

SEQ ID NO: 2223962 - DNA, 25 bp, Homo sapien
caataaggatactgtaccctctgag

SEQ ID NO: 2223963 - DNA, 25 bp, Homo sapien
taccgcagactgtttgtcactaaca

SEQ ID NO: 2223964 - DNA, 25 bp, Homo sapien
tcattagaaaggttgatgatttttc

SEQ ID NO: 2223965 - DNA, 25 bp, Homo sapien
agaaaggttgatgatttttcactta

SEQ ID NO: 2223966 - DNA, 25 bp, Homo sapien
ttcattagaaaggttgatgattttt

SEQ ID NO: 2223967 - DNA, 25 bp, Homo sapien
cttcattagaaaggttgatgatttt

SEQ ID NO: 2223968 - DNA, 25 bp, Homo sapien
agtgttgaaaaaaggaatgaaatgt

SEQ ID NO: 2223969 - DNA, 25 bp, Homo sapien
tgttgaaaaaaggaatgaaatgtat

SEQ ID NO: 2223970 - DNA, 25 bp, Homo sapien
tgaaaaaaggaatgaaatgtatctt

SEQ ID NO: 2223971 - DNA, 25 bp, Homo sapien
gttgaaaaaaggaatgaaatgtatc

SEQ ID NO: 2223972 - DNA, 25 bp, Homo sapien
atttgcttttcaaaggcatataaga

SEQ ID NO: 2223973 - DNA, 25 bp, Homo sapien
ttgcttttcaaaggcatataagaat

SEQ ID NO: 2223974 - DNA, 25 bp, Homo sapien
gcttttcaaaggcatataagaattt

SEQ ID NO: 2223975 - DNA, 25 bp, Homo sapien
tttcaaaggcatataagaatttgga

SEQ ID NO: 2223976 - DNA, 25 bp, Homo sapien
gccattttccatacagctatagcct

SEQ ID NO: 2223977 - DNA, 25 bp, Homo sapien
tcttcatgaagtttgtcatgttcct

SEQ ID NO: 2223978 - DNA, 25 bp, Homo sapien
aaagttgccattttccatacagcta

SEQ ID NO: 2223979 - DNA, 25 bp, Homo sapien
ccatacagctatagcctgaatttta

SEQ ID NO: 2223980 - DNA, 25 bp, Homo sapien
gattccaagggtgtaattcgttcat

SEQ ID NO: 2223981 - DNA, 25 bp, Homo sapien
tccaagggtgtaattcgttcatcat

SEQ ID NO: 2223982 - DNA, 25 bp, Homo sapien
agggtgtaattcgttcatcattttc

SEQ ID NO: 2223983 - DNA, 25 bp, Homo sapien
caagggtgtaattcgttcatcattt

SEQ ID NO: 2223984 - DNA, 25 bp, Homo sapien
gaagtcctccgagcggccatcgcgg

SEQ ID NO: 2223985 - DNA, 25 bp, Homo sapien
cctgcggaagtcctccgagcggcca

SEQ ID NO: 2223986 - DNA, 25 bp, Homo sapien
cgggtcctgcggaagtcctccgagc

SEQ ID NO: 2223987 - DNA, 25 bp, Homo sapien
tgcggaagtcctccgagcggccatc

SEQ ID NO: 2223988 - DNA, 25 bp, Homo sapien
gcctcggccactaggccctcgtcct

SEQ ID NO: 2223989 - DNA, 25 bp, Homo sapien
cctcggcctcggccactaggccctc

SEQ ID NO: 2223990 - DNA, 25 bp, Homo sapien
gagaggcagaggaaatcgagcatcc

SEQ ID NO: 2223991 - DNA, 25 bp, Homo sapien
agaggcagaggaaatcgagcatcca

SEQ ID NO: 2223992 - DNA, 25 bp, Homo sapien
tctctccgtttctgccatctcctcc

SEQ ID NO: 2223993 - DNA, 25 bp, Homo sapien
acagctcctcctcgtttctctccgt

SEQ ID NO: 2223994 - DNA, 25 bp, Homo sapien
ccatctcctcctcggtagggtcggc

SEQ ID NO: 2223995 - DNA, 25 bp, Homo sapien
ttcctggcattcgaacagctcctcc

SEQ ID NO: 2223996 - DNA, 25 bp, Homo sapien
tatgcataaatgtctgcctgctccc

SEQ ID NO: 2223997 - DNA, 25 bp, Homo sapien
ccttattctagtacgacttgcatta

SEQ ID NO: 2223998 - DNA, 25 bp, Homo sapien
agtacgacttgcattattaatatgc

SEQ ID NO: 2223999 - DNA, 25 bp, Homo sapien
gcctgctcccactaagccataagta

SEQ ID NO: 2224000 - DNA, 25 bp, Homo sapien
gttacactctttttcataaatggac

SEQ ID NO: 2224001 - DNA, 25 bp, Homo sapien
attgttacactctttttcataaatg

SEQ ID NO: 2224002 - DNA, 25 bp, Homo sapien
tgttacactctttttcataaatgga

SEQ ID NO: 2224003 - DNA, 25 bp, Homo sapien
tacactctttttcataaatggacat

SEQ ID NO: 2224004 - DNA, 25 bp, Homo sapien
ctttttcttgttcataagcatacat

SEQ ID NO: 2224005 - DNA, 25 bp, Homo sapien
tctttttcttgttcataagcataca

SEQ ID NO: 2224006 - DNA, 25 bp, Homo sapien
tgtgtcctgaattgtattctctagg

SEQ ID NO: 2224007 - DNA, 25 bp, Homo sapien
gtgtcctgaattgtattctctaggt

SEQ ID NO: 2224008 - DNA, 25 bp, Homo sapien
tgatttaaagaagtactcatcttca

SEQ ID NO: 2224009 - DNA, 25 bp, Homo sapien
taaagaagtactcatcttcatcgtt

SEQ ID NO: 2224010 - DNA, 25 bp, Homo sapien
acacaaatcataataacctggaaac

SEQ ID NO: 2224011 - DNA, 25 bp, Homo sapien
tactctggtaacacaaatcataata

SEQ ID NO: 2224012 - DNA, 25 bp, Homo sapien
aacagcagtattaaccacctttttg

SEQ ID NO: 2224013 - DNA, 25 bp, Homo sapien
tggtggcagtgtctaagaaaacagc

SEQ ID NO: 2224014 - DNA, 25 bp, Homo sapien
caatttctttaatgtgtttggtggc

SEQ ID NO: 2224015 - DNA, 25 bp, Homo sapien
agatgcctgccaaccaactgttagt

SEQ ID NO: 2224016 - DNA, 25 bp, Homo sapien
actgattatggtcccatggattttc

SEQ ID NO: 2224017 - DNA, 25 bp, Homo sapien
ccactgattatggtcccatggattt

SEQ ID NO: 2224018 - DNA, 25 bp, Homo sapien
ctaaaagcatccactgattatggtc

SEQ ID NO: 2224019 - DNA, 25 bp, Homo sapien
aaaagcatccactgattatggtccc

SEQ ID NO: 2224020 - DNA, 25 bp, Homo sapien
cggttgatccccaattaattctgta

SEQ ID NO: 2224021 - DNA, 25 bp, Homo sapien
ggttgatccccaattaattctgtag

SEQ ID NO: 2224022 - DNA, 25 bp, Homo sapien
tccggttgatccccaattaattctg

SEQ ID NO: 2224023 - DNA, 25 bp, Homo sapien
tctccggttgatccccaattaattc

SEQ ID NO: 2224024 - DNA, 25 bp, Homo sapien
ttccaaatcactctccgtccatatt

SEQ ID NO: 2224025 - DNA, 25 bp, Homo sapien
ctgtttccaaatcactctccgtcca

SEQ ID NO: 2224026 - DNA, 25 bp, Homo sapien
aaatcactctccgtccatatttcat

SEQ ID NO: 2224027 - DNA, 25 bp, Homo sapien
aatcactctccgtccatatttcatc

SEQ ID NO: 2224028 - DNA, 25 bp, Homo sapien
gaactactggatttggtcttacatg

SEQ ID NO: 2224029 - DNA, 25 bp, Homo sapien
aactgtggttgcttcataaagccta

SEQ ID NO: 2224030 - DNA, 25 bp, Homo sapien
gtgcttgggatgtgttggcaaacca

SEQ ID NO: 2224031 - DNA, 25 bp, Homo sapien
tttaggaattcaaaagtgcttggga

SEQ ID NO: 2224032 - DNA, 25 bp, Homo sapien
tgtgaatacaaagcaaaccctaact

SEQ ID NO: 2224033 - DNA, 25 bp, Homo sapien
taactagacagttggaattacagca

SEQ ID NO: 2224034 - DNA, 25 bp, Homo sapien
cattctctataattgtccacgtaaa

SEQ ID NO: 2224035 - DNA, 25 bp, Homo sapien
tccacagaagctctattgtccagcg

SEQ ID NO: 2224036 - DNA, 25 bp, Homo sapien
tgttagattgcctgaagatccagca

SEQ ID NO: 2224037 - DNA, 25 bp, Homo sapien
tggaatccctttgagccaaacagag

SEQ ID NO: 2224038 - DNA, 25 bp, Homo sapien
gaacaaggagtaaggatcacacaga

SEQ ID NO: 2224039 - DNA, 25 bp, Homo sapien
tattagatactctgaccctgggaca

SEQ ID NO: 2224040 - DNA, 25 bp, Homo sapien
ccaaactggacaggattaggcatcc

SEQ ID NO: 2224041 - DNA, 25 bp, Homo sapien
caattatcgggtacatccagtagca

SEQ ID NO: 2224042 - DNA, 25 bp, Homo sapien
tatacactgtcagtcctcactgggt

SEQ ID NO: 2224043 - DNA, 25 bp, Homo sapien
tagttaagcattgatagaagtccca

SEQ ID NO: 2224044 - DNA, 25 bp, Homo sapien
tccagtttggcctaggaacaccaca

SEQ ID NO: 2224045 - DNA, 25 bp, Homo sapien
tgcacaagtccactacagcaagatg

SEQ ID NO: 2224046 - DNA, 25 bp, Homo sapien
tagtacacctaacacgcacaagtag

SEQ ID NO: 2224047 - DNA, 25 bp, Homo sapien
taacaccaggatagtgtcaacacca

SEQ ID NO: 2224048 - DNA, 25 bp, Homo sapien
tgatgttcgctttttcatgctccgt

SEQ ID NO: 2224049 - DNA, 25 bp, Homo sapien
ggctctaggactggttgaaaggtct

SEQ ID NO: 2224050 - DNA, 25 bp, Homo sapien
gcttgaagcagctacaggctctagg

SEQ ID NO: 2224051 - DNA, 25 bp, Homo sapien
ccgtcgctgggctaagcttgaagca

SEQ ID NO: 2224052 - DNA, 25 bp, Homo sapien
catttggcaactggtctctgtgagt

SEQ ID NO: 2224053 - DNA, 25 bp, Homo sapien
ctgtgagttatccatgagtgcttta

SEQ ID NO: 2224054 - DNA, 25 bp, Homo sapien
cagtataccgctgatgtgggtccat

SEQ ID NO: 2224055 - DNA, 25 bp, Homo sapien
atttctctttggctgatcatttggc

SEQ ID NO: 2224056 - DNA, 25 bp, Homo sapien
tcaggtcctcttgatacaaaaatct

SEQ ID NO: 2224057 - DNA, 25 bp, Homo sapien
cacaggagttctaaagtcgcccact

SEQ ID NO: 2224058 - DNA, 25 bp, Homo sapien
ggtggagagttccaaagatacctat

SEQ ID NO: 2224059 - DNA, 25 bp, Homo sapien
taaatgccgcctagcaatgagaaga

SEQ ID NO: 2224060 - DNA, 25 bp, Homo sapien
taatctatgtctgatgggcagcaaa

SEQ ID NO: 2224061 - DNA, 25 bp, Homo sapien
taaaaggttctcatagctcctacaa

SEQ ID NO: 2224062 - DNA, 25 bp, Homo sapien
gagaagttttccagattaccaggct

SEQ ID NO: 2224063 - DNA, 25 bp, Homo sapien
gaactaaagtcacccgatccataaa

SEQ ID NO: 2224064 - DNA, 25 bp, Homo sapien
taaaatgtgttctacttcaaattgt

SEQ ID NO: 2224065 - DNA, 25 bp, Homo sapien
aatgtgttctacttcaaattgtagc

SEQ ID NO: 2224066 - DNA, 25 bp, Homo sapien
ttcaaattgtagcttaaaagcttct

SEQ ID NO: 2224067 - DNA, 25 bp, Homo sapien
aaattgtagcttaaaagcttctggg

SEQ ID NO: 2224068 - DNA, 25 bp, Homo sapien
gtatctcttcaggagtatcattggg

SEQ ID NO: 2224069 - DNA, 25 bp, Homo sapien
tttgctccgtctgaaatattgtccc

SEQ ID NO: 2224070 - DNA, 25 bp, Homo sapien
attttccattgcctatacgcagcag

SEQ ID NO: 2224071 - DNA, 25 bp, Homo sapien
tggggccattagcaaatggagtgta

SEQ ID NO: 2224072 - DNA, 25 bp, Homo sapien
aaggactcctaaactccagatatca

SEQ ID NO: 2224073 - DNA, 25 bp, Homo sapien
catcatatccctgttgcataagaac

SEQ ID NO: 2224074 - DNA, 25 bp, Homo sapien
tcctaaactccagatatcacaagca

SEQ ID NO: 2224075 - DNA, 25 bp, Homo sapien
agcatcatatccctgttgcataaga

SEQ ID NO: 2224076 - DNA, 25 bp, Homo sapien
aaaagaatgaaaggcaaatggtgaa

SEQ ID NO: 2224077 - DNA, 25 bp, Homo sapien
ggaaaagaatgaaaggcaaatggtg

SEQ ID NO: 2224078 - DNA, 25 bp, Homo sapien
gaatgaaaggcaaatggtgaagttt

SEQ ID NO: 2224079 - DNA, 25 bp, Homo sapien
aagaatgaaaggcaaatggtgaagt

SEQ ID NO: 2224080 - DNA, 25 bp, Homo sapien
taggtttaagatcacgatgaacaac

SEQ ID NO: 2224081 - DNA, 25 bp, Homo sapien
gcagtgtagcatggagttaagagaa

SEQ ID NO: 2224082 - DNA, 25 bp, Homo sapien
tctgcactggctgattcatccatgt

SEQ ID NO: 2224083 - DNA, 25 bp, Homo sapien
tctcctcgaagttgttttgcaaacc

SEQ ID NO: 2224084 - DNA, 25 bp, Homo sapien
tgagaatacggtcaagtaactctcc

SEQ ID NO: 2224085 - DNA, 25 bp, Homo sapien
tagtcaactgtcttacttattacat

SEQ ID NO: 2224086 - DNA, 25 bp, Homo sapien
ctagcctcccgttccgagaaacatt

SEQ ID NO: 2224087 - DNA, 25 bp, Homo sapien
catatagtatatcactagcctcccg

SEQ ID NO: 2224088 - DNA, 25 bp, Homo sapien
gaagggtctcgcttacttttgtcaa

SEQ ID NO: 2224089 - DNA, 25 bp, Homo sapien
cttctgaagggtctcgcttactttt

SEQ ID NO: 2224090 - DNA, 25 bp, Homo sapien
aataatgttgggatgttgtccatag

SEQ ID NO: 2224091 - DNA, 25 bp, Homo sapien
agcgcatcaatatttcaatctcttc

SEQ ID NO: 2224092 - DNA, 25 bp, Homo sapien
taggagccaacaccaatatcctcct

SEQ ID NO: 2224093 - DNA, 25 bp, Homo sapien
tagttgcatgtatgcatcgcttgca

SEQ ID NO: 2224094 - DNA, 25 bp, Homo sapien
gcatgtatgcatcgcttgcaaacag

SEQ ID NO: 2224095 - DNA, 25 bp, Homo sapien
attccatgttggtagttgcatgtat

SEQ ID NO: 2224096 - DNA, 25 bp, Homo sapien
gcacttgtgataggagtgattttat

SEQ ID NO: 2224097 - DNA, 25 bp, Homo sapien
ctttgaagagctgatgagcatttgc

SEQ ID NO: 2224098 - DNA, 25 bp, Homo sapien
ggtaatacatttgcacttgtgatag

SEQ ID NO: 2224099 - DNA, 25 bp, Homo sapien
tgaatcctttgaagagctgatgagc

SEQ ID NO: 2224100 - DNA, 25 bp, Homo sapien
tttaggtgtttttgcagtaaattca

SEQ ID NO: 2224101 - DNA, 25 bp, Homo sapien
aggtgtttttgcagtaaattcagga

SEQ ID NO: 2224102 - DNA, 25 bp, Homo sapien
taggtgtttttgcagtaaattcagg

SEQ ID NO: 2224103 - DNA, 25 bp, Homo sapien
gaagcaggtttgaaaggaggttgaa

SEQ ID NO: 2224104 - DNA, 25 bp, Homo sapien
cccagcggccctgctcccaactatt

SEQ ID NO: 2224105 - DNA, 25 bp, Homo sapien
gcccagcggccctgctcccaactat

SEQ ID NO: 2224106 - DNA, 25 bp, Homo sapien
ttcgaccacataagcattctgcagg

SEQ ID NO: 2224107 - DNA, 25 bp, Homo sapien
caccagagcgttctgtgataatctg

SEQ ID NO: 2224108 - DNA, 25 bp, Homo sapien
cctgtgatgggccttgggacttcga

SEQ ID NO: 2224109 - DNA, 25 bp, Homo sapien
tgtgatcagccatgggaatcccacc

SEQ ID NO: 2224110 - DNA, 25 bp, Homo sapien
atcccagtcaatatttgcaaaaaac

SEQ ID NO: 2224111 - DNA, 25 bp, Homo sapien
agtcaatatttgcaaaaaacagatg

SEQ ID NO: 2224112 - DNA, 25 bp, Homo sapien
cccagtcaatatttgcaaaaaacag

SEQ ID NO: 2224113 - DNA, 25 bp, Homo sapien
tcaatatttgcaaaaaacagatgtc

SEQ ID NO: 2224114 - DNA, 25 bp, Homo sapien
cttttgaataacatccttagaagac

SEQ ID NO: 2224115 - DNA, 25 bp, Homo sapien
agaaattgaggcattccaagttttg

SEQ ID NO: 2224116 - DNA, 25 bp, Homo sapien
gactttgtgcttcagcactaagaaa

SEQ ID NO: 2224117 - DNA, 25 bp, Homo sapien
ccttagaagactttgtgcttcagca

SEQ ID NO: 2224118 - DNA, 25 bp, Homo sapien
tgaaatggcagagtaccagtaagca

SEQ ID NO: 2224119 - DNA, 25 bp, Homo sapien
aaatggcagagtaccagtaagcatt

SEQ ID NO: 2224120 - DNA, 25 bp, Homo sapien
gaaatggcagagtaccagtaagcat

SEQ ID NO: 2224121 - DNA, 25 bp, Homo sapien
gaatggcctctcctatttactactt

SEQ ID NO: 2224122 - DNA, 25 bp, Homo sapien
ggaatggcctctcctatttactact

SEQ ID NO: 2224123 - DNA, 25 bp, Homo sapien
cataagaacaccatatgaccaccaa

SEQ ID NO: 2224124 - DNA, 25 bp, Homo sapien
cacaaaatgagtaagccttcttttc

SEQ ID NO: 2224125 - DNA, 25 bp, Homo sapien
tactgactccttgctgagtccaaaa

SEQ ID NO: 2224126 - DNA, 25 bp, Homo sapien
taccacaaaatgagtaagccttctt

SEQ ID NO: 2224127 - DNA, 25 bp, Homo sapien
tttcttgatctactgactccttgct

SEQ ID NO: 2224128 - DNA, 25 bp, Homo sapien
taacagtattaccaaaaaatgtgtc

SEQ ID NO: 2224129 - DNA, 25 bp, Homo sapien
acagtattaccaaaaaatgtgtctg

SEQ ID NO: 2224130 - DNA, 25 bp, Homo sapien
aataacagtattaccaaaaaatgtg

SEQ ID NO: 2224131 - DNA, 25 bp, Homo sapien
cagtattaccaaaaaatgtgtctga

SEQ ID NO: 2224132 - DNA, 25 bp, Homo sapien
gtatgtaataagcaagaagaaatca

SEQ ID NO: 2224133 - DNA, 25 bp, Homo sapien
ggcaagcctcatggtattctcaaac

SEQ ID NO: 2224134 - DNA, 25 bp, Homo sapien
aatattattatgctgtcattgtggg

SEQ ID NO: 2224135 - DNA, 25 bp, Homo sapien
taagaggtattagatcatattggca

SEQ ID NO: 2224136 - DNA, 25 bp, Homo sapien
gaaactaaatcacagcaccacagaa

SEQ ID NO: 2224137 - DNA, 25 bp, Homo sapien
cacccataaagatacatacagactg

SEQ ID NO: 2224138 - DNA, 25 bp, Homo sapien
ggcatgagtaagtcccgatttatta

SEQ ID NO: 2224139 - DNA, 25 bp, Homo sapien
gaaaccacaaaggagcaggagtagt

SEQ ID NO: 2224140 - DNA, 25 bp, Homo sapien
gatatgtcctatttcatcaagcaaa

SEQ ID NO: 2224141 - DNA, 25 bp, Homo sapien
ctgttaatttgatatgtcctatttc

SEQ ID NO: 2224142 - DNA, 25 bp, Homo sapien
ttaatttgatatgtcctatttcatc

SEQ ID NO: 2224143 - DNA, 25 bp, Homo sapien
tttgatatgtcctatttcatcaagc

SEQ ID NO: 2224144 - DNA, 25 bp, Homo sapien
taaacaattcctaattggtgcagat

SEQ ID NO: 2224145 - DNA, 25 bp, Homo sapien
gcagatgatccaaagcaagggccag

SEQ ID NO: 2224146 - DNA, 25 bp, Homo sapien
tctgcgaggtagaatttcacatctt

SEQ ID NO: 2224147 - DNA, 25 bp, Homo sapien
caagggccagttctgcgaggtagaa

SEQ ID NO: 2224148 - DNA, 25 bp, Homo sapien
cctgagaaaatccagtattaagtac

SEQ ID NO: 2224149 - DNA, 25 bp, Homo sapien
ttgtgaaaacatctcctcccctgag

SEQ ID NO: 2224150 - DNA, 25 bp, Homo sapien
ctctttggataatcttgtgaaaaca

SEQ ID NO: 2224151 - DNA, 25 bp, Homo sapien
agtattaagtacagtttcccttcag

SEQ ID NO: 2224152 - DNA, 25 bp, Homo sapien
tttacttccaccagtatatccctct

SEQ ID NO: 2224153 - DNA, 25 bp, Homo sapien
catagtgcaatttgacaataaatgg

SEQ ID NO: 2224154 - DNA, 25 bp, Homo sapien
ctccatctttgtccgaactctgtct

SEQ ID NO: 2224155 - DNA, 25 bp, Homo sapien
aaatggatgatttacttccaccagt

SEQ ID NO: 2224156 - DNA, 25 bp, Homo sapien
caggaccggtcttctttctaacaag

SEQ ID NO: 2224157 - DNA, 25 bp, Homo sapien
ggctttttttaacaccttcattgca

SEQ ID NO: 2224158 - DNA, 25 bp, Homo sapien
ctttttttaacaccttcattgcata

SEQ ID NO: 2224159 - DNA, 25 bp, Homo sapien
gctttttttaacaccttcattgcat

SEQ ID NO: 2224160 - DNA, 25 bp, Homo sapien
ccttaacatgatgagtaatagggat

SEQ ID NO: 2224161 - DNA, 25 bp, Homo sapien
tgagtaatagggatttctttaacaa

SEQ ID NO: 2224162 - DNA, 25 bp, Homo sapien
caactcaaactgtgcaggatctgct

SEQ ID NO: 2224163 - DNA, 25 bp, Homo sapien
tgaccaagaaccttgagcaactcaa

SEQ ID NO: 2224164 - DNA, 25 bp, Homo sapien
tataaacttcttccatattatccat

SEQ ID NO: 2224165 - DNA, 25 bp, Homo sapien
actgtgaagaatataaacttcttcc

SEQ ID NO: 2224166 - DNA, 25 bp, Homo sapien
atataaacttcttccatattatcca

SEQ ID NO: 2224167 - DNA, 25 bp, Homo sapien
gaagaatataaacttcttccatatt

SEQ ID NO: 2224168 - DNA, 25 bp, Homo sapien
tctccctcttccattggctcatcaa

SEQ ID NO: 2224169 - DNA, 25 bp, Homo sapien
ccctcttccattggctcatcaacca

SEQ ID NO: 2224170 - DNA, 25 bp, Homo sapien
atgacaagaatctgcttctccctct

SEQ ID NO: 2224171 - DNA, 25 bp, Homo sapien
ttctccctcttccattggctcatca

SEQ ID NO: 2224172 - DNA, 25 bp, Homo sapien
ctctcccatctaactcctttcctac

SEQ ID NO: 2224173 - DNA, 25 bp, Homo sapien
tctctctcccatctaactcctttcc

SEQ ID NO: 2224174 - DNA, 25 bp, Homo sapien
aatctctctcccatctaactccttt

SEQ ID NO: 2224175 - DNA, 25 bp, Homo sapien
ctaaatctctctcccatctaactcc

SEQ ID NO: 2224176 - DNA, 25 bp, Homo sapien
caatttccactcgagtatttttcca

SEQ ID NO: 2224177 - DNA, 25 bp, Homo sapien
tgttaaatctctacaatacctaaaa

SEQ ID NO: 2224178 - DNA, 25 bp, Homo sapien
tacttcatagggattaacaatttcc

SEQ ID NO: 2224179 - DNA, 25 bp, Homo sapien
gctgaggtagagagacccattgtta

SEQ ID NO: 2224180 - DNA, 25 bp, Homo sapien
tgtatggtggcctctactggagtag

SEQ ID NO: 2224181 - DNA, 25 bp, Homo sapien
ccaactatttttaggaggtgtatgg

SEQ ID NO: 2224182 - DNA, 25 bp, Homo sapien
agtacgcagtcgattaagttatcag

SEQ ID NO: 2224183 - DNA, 25 bp, Homo sapien
tatcctactgtgaatcaatttcacc

SEQ ID NO: 2224184 - DNA, 25 bp, Homo sapien
ttgttgcactgggttcgtaaagcgt

SEQ ID NO: 2224185 - DNA, 25 bp, Homo sapien
tgcactgggttcgtaaagcgtccgg

SEQ ID NO: 2224186 - DNA, 25 bp, Homo sapien
gtgtgtttgttgcactgggttcgta

SEQ ID NO: 2224187 - DNA, 25 bp, Homo sapien
tgtttgttgcactgggttcgtaaag

SEQ ID NO: 2224188 - DNA, 25 bp, Homo sapien
tcaacagcgagctggagtccgcagc

SEQ ID NO: 2224189 - DNA, 25 bp, Homo sapien
gccgccgctgaacacttccatttct

SEQ ID NO: 2224190 - DNA, 25 bp, Homo sapien
gccgccgccgctgaacacttccatt

SEQ ID NO: 2224191 - DNA, 25 bp, Homo sapien
ccgccgccgctgaacacttccattt

SEQ ID NO: 2224192 - DNA, 25 bp, Homo sapien
cgccgccgctgaacacttccatttc

SEQ ID NO: 2224193 - DNA, 25 bp, Homo sapien
gagcactcaaacaggagctgccgcc

SEQ ID NO: 2224194 - DNA, 25 bp, Homo sapien
tgccgcctaccgctggcgcggccgc

SEQ ID NO: 2224195 - DNA, 25 bp, Homo sapien
gcactcaaacaggagctgccgccta

SEQ ID NO: 2224196 - DNA, 25 bp, Homo sapien
aacaggagctgccgcctaccgctgg

SEQ ID NO: 2224197 - DNA, 25 bp, Homo sapien
tgccttctgtaagccaggctgtttt

SEQ ID NO: 2224198 - DNA, 25 bp, Homo sapien
gacttctccttgaatttatattcaa

SEQ ID NO: 2224199 - DNA, 25 bp, Homo sapien
ttatattcaatgtccacaggagagg

SEQ ID NO: 2224200 - DNA, 25 bp, Homo sapien
caggagaggacaaatgtctttgcct

SEQ ID NO: 2224201 - DNA, 25 bp, Homo sapien
gaagacacagaagatgtcaattctc

SEQ ID NO: 2224202 - DNA, 25 bp, Homo sapien
taatgagcagcttcttacaagccag

SEQ ID NO: 2224203 - DNA, 25 bp, Homo sapien
ttcctttggattttagctgatgtac

SEQ ID NO: 2224204 - DNA, 25 bp, Homo sapien
ggcagagatcgtgaaatatgtttcc

SEQ ID NO: 2224205 - DNA, 25 bp, Homo sapien
ggcttacaaataggctcagtggagg

SEQ ID NO: 2224206 - DNA, 25 bp, Homo sapien
tccaagccacgtagatcaagggttg

SEQ ID NO: 2224207 - DNA, 25 bp, Homo sapien
caatcacatgttcctctctaaggct

SEQ ID NO: 2224208 - DNA, 25 bp, Homo sapien
gatcgacatgtagggcagtttcctc

SEQ ID NO: 2224209 - DNA, 25 bp, Homo sapien
atgcaaggcaccatggacgaagaga

SEQ ID NO: 2224210 - DNA, 25 bp, Homo sapien
ggcaccatggacgaagagataaaag

SEQ ID NO: 2224211 - DNA, 25 bp, Homo sapien
caccatggacgaagagataaaagaa

SEQ ID NO: 2224212 - DNA, 25 bp, Homo sapien
caaggcaccatggacgaagagataa

SEQ ID NO: 2224213 - DNA, 25 bp, Homo sapien
aaatgactggctgtgatcagaaacc

SEQ ID NO: 2224214 - DNA, 25 bp, Homo sapien
cacaagggtgtgagacttctgttca

SEQ ID NO: 2224215 - DNA, 25 bp, Homo sapien
gagtgccaaacctggtgtcccctag

SEQ ID NO: 2224216 - DNA, 25 bp, Homo sapien
agaaaccagcctagtggccctcaca

SEQ ID NO: 2224217 - DNA, 25 bp, Homo sapien
attatgagagttaccaatccacaat

SEQ ID NO: 2224218 - DNA, 25 bp, Homo sapien
gtgtgattatgagagttaccaatcc

SEQ ID NO: 2224219 - DNA, 25 bp, Homo sapien
tgattatgagagttaccaatccaca

SEQ ID NO: 2224220 - DNA, 25 bp, Homo sapien
gtgattatgagagttaccaatccac

SEQ ID NO: 2224221 - DNA, 25 bp, Homo sapien
aaattttctccagggacagtatgac

SEQ ID NO: 2224222 - DNA, 25 bp, Homo sapien
tcagccctggggaggcaaattttct

SEQ ID NO: 2224223 - DNA, 25 bp, Homo sapien
gcaaattttctccagggacagtatg

SEQ ID NO: 2224224 - DNA, 25 bp, Homo sapien
ttttctccagggacagtatgacatt

SEQ ID NO: 2224225 - DNA, 25 bp, Homo sapien
tagttttggcatatctgcagaatct

SEQ ID NO: 2224226 - DNA, 25 bp, Homo sapien
agttttggcatatctgcagaatctg

SEQ ID NO: 2224227 - DNA, 25 bp, Homo sapien
aatagttttggcatatctgcagaat

SEQ ID NO: 2224228 - DNA, 25 bp, Homo sapien
gttttggcatatctgcagaatctgc

SEQ ID NO: 2224229 - DNA, 25 bp, Homo sapien
agcccgttgtcactggactgtagga

SEQ ID NO: 2224230 - DNA, 25 bp, Homo sapien
aacgtaagatgtgttgttcagcccg

SEQ ID NO: 2224231 - DNA, 25 bp, Homo sapien
tgccactggactgtagaacgtaaga

SEQ ID NO: 2224232 - DNA, 25 bp, Homo sapien
taggaaagtagatgtattttccagc

SEQ ID NO: 2224233 - DNA, 25 bp, Homo sapien
cacaactgtaatacggaagaagggc

SEQ ID NO: 2224234 - DNA, 25 bp, Homo sapien
tacagggtataattgggtctcagcc

SEQ ID NO: 2224235 - DNA, 25 bp, Homo sapien
ggaaatgggctgaatccgattccca

SEQ ID NO: 2224236 - DNA, 25 bp, Homo sapien
tacagagcatagcttggtgaagagc

SEQ ID NO: 2224237 - DNA, 25 bp, Homo sapien
taaagcagacatagaaatgtagttg

SEQ ID NO: 2224238 - DNA, 25 bp, Homo sapien
gacatagaaatgtagttgaaagaaa

SEQ ID NO: 2224239 - DNA, 25 bp, Homo sapien
agcagacatagaaatgtagttgaaa

SEQ ID NO: 2224240 - DNA, 25 bp, Homo sapien
aaaactgcttggctgttctaagctt

SEQ ID NO: 2224241 - DNA, 25 bp, Homo sapien
tcagatagtaaggtctgttttaata

SEQ ID NO: 2224242 - DNA, 25 bp, Homo sapien
caatgactatgaagcagaccctagg

SEQ ID NO: 2224243 - DNA, 25 bp, Homo sapien
gacactgtgggcttagggagaaact

SEQ ID NO: 2224244 - DNA, 25 bp, Homo sapien
gaccctaggagagacttgaaggcct

SEQ ID NO: 2224245 - DNA, 25 bp, Homo sapien
tctcaaaattgtggactaggaatcc

SEQ ID NO: 2224246 - DNA, 25 bp, Homo sapien
gacttcctgtttcataacatgtaag

SEQ ID NO: 2224247 - DNA, 25 bp, Homo sapien
acttcctgtttcataacatgtaaga

SEQ ID NO: 2224248 - DNA, 25 bp, Homo sapien
tgacttcctgtttcataacatgtaa

SEQ ID NO: 2224249 - DNA, 25 bp, Homo sapien
actggaatgtcaatcgtatcaatac

SEQ ID NO: 2224250 - DNA, 25 bp, Homo sapien
tgaagaatccccatcaagactaatt

SEQ ID NO: 2224251 - DNA, 25 bp, Homo sapien
tgtgtaacacttcatctaacccagg

SEQ ID NO: 2224252 - DNA, 25 bp, Homo sapien
ggtatacaaatttactactggaatg

SEQ ID NO: 2224253 - DNA, 25 bp, Homo sapien
cctgagaaaaagtgtaagtggatga

SEQ ID NO: 2224254 - DNA, 25 bp, Homo sapien
caagactaatcaagctgtagcaact

SEQ ID NO: 2224255 - DNA, 25 bp, Homo sapien
ggttagataatagaagaacaccagc

SEQ ID NO: 2224256 - DNA, 25 bp, Homo sapien
ttccagagttccatcagttaaaaaa

SEQ ID NO: 2224257 - DNA, 25 bp, Homo sapien
ttcttcacagaatacgtccgtttca

SEQ ID NO: 2224258 - DNA, 25 bp, Homo sapien
gaatacgtccgtttcaacaatgtgt

SEQ ID NO: 2224259 - DNA, 25 bp, Homo sapien
ttcacagaatacgtccgtttcaaca

SEQ ID NO: 2224260 - DNA, 25 bp, Homo sapien
cagaatacgtccgtttcaacaatgt

SEQ ID NO: 2224261 - DNA, 25 bp, Homo sapien
gccaaaagactgtatcatatattcc

SEQ ID NO: 2224262 - DNA, 25 bp, Homo sapien
cacctgttacgaagccaaaagactg

SEQ ID NO: 2224263 - DNA, 25 bp, Homo sapien
aaatgcacacctgttacgaagccaa

SEQ ID NO: 2224264 - DNA, 25 bp, Homo sapien
gaatgcagttatcttgaaatgcaca

SEQ ID NO: 2224265 - DNA, 25 bp, Homo sapien
caaagaagatacactgaatgaggta

SEQ ID NO: 2224266 - DNA, 25 bp, Homo sapien
tgaaatccatttcctctaattcagg

SEQ ID NO: 2224267 - DNA, 25 bp, Homo sapien
ctctaattcaggaggtaaatctgac

SEQ ID NO: 2224268 - DNA, 25 bp, Homo sapien
tccagtgaggcatgattgaaatcca

SEQ ID NO: 2224269 - DNA, 25 bp, Homo sapien
tcaagcttctaacaaaagtctgaag

SEQ ID NO: 2224270 - DNA, 25 bp, Homo sapien
ctttcattgctaatatcaagcttct

SEQ ID NO: 2224271 - DNA, 25 bp, Homo sapien
tccttatcatcagctttcattgcta

SEQ ID NO: 2224272 - DNA, 25 bp, Homo sapien
gaatctcgagctcattttcaatgaa

SEQ ID NO: 2224273 - DNA, 25 bp, Homo sapien
tgttctacttcagaattacttatca

SEQ ID NO: 2224274 - DNA, 25 bp, Homo sapien
acttgttctacttcagaattactta

SEQ ID NO: 2224275 - DNA, 25 bp, Homo sapien
tttacttgttctacttcagaattac

SEQ ID NO: 2224276 - DNA, 25 bp, Homo sapien
gagtttacttgttctacttcagaat

SEQ ID NO: 2224277 - DNA, 25 bp, Homo sapien
gagcccttgcatcattcggaacaac

SEQ ID NO: 2224278 - DNA, 25 bp, Homo sapien
ggtcctcttccttatgagcccttgc

SEQ ID NO: 2224279 - DNA, 25 bp, Homo sapien
catggtggtcctcttccttatgagc

SEQ ID NO: 2224280 - DNA, 25 bp, Homo sapien
tggttactgcatggtggtcctcttc

SEQ ID NO: 2224281 - DNA, 25 bp, Homo sapien
tttcatttcgcaaaactttcttgag

SEQ ID NO: 2224282 - DNA, 25 bp, Homo sapien
ttcatttcgcaaaactttcttgaga

SEQ ID NO: 2224283 - DNA, 25 bp, Homo sapien
aaaggctattattagaagattcagc

SEQ ID NO: 2224284 - DNA, 25 bp, Homo sapien
caaaggctattattagaagattcag

SEQ ID NO: 2224285 - DNA, 25 bp, Homo sapien
aaggctattattagaagattcagca

SEQ ID NO: 2224286 - DNA, 25 bp, Homo sapien
gagcttccttcagacaaacagatgg

SEQ ID NO: 2224287 - DNA, 25 bp, Homo sapien
cttgagagcttccttcagacaaaca

SEQ ID NO: 2224288 - DNA, 25 bp, Homo sapien
agcttccttcagacaaacagatgga

SEQ ID NO: 2224289 - DNA, 25 bp, Homo sapien
gagagcttccttcagacaaacagat

SEQ ID NO: 2224290 - DNA, 25 bp, Homo sapien
cctctcctggtgtgagtgcagataa

SEQ ID NO: 2224291 - DNA, 25 bp, Homo sapien
catttctgtcattatcctctcctac

SEQ ID NO: 2224292 - DNA, 25 bp, Homo sapien
cttggaggtggaacttcaatcccca

SEQ ID NO: 2224293 - DNA, 25 bp, Homo sapien
ataaagaaccagactcaggctgctc

SEQ ID NO: 2224294 - DNA, 25 bp, Homo sapien
cttaagggtggctaagtctcggtca

SEQ ID NO: 2224295 - DNA, 25 bp, Homo sapien
tcccaatacttcttaagggtggcta

SEQ ID NO: 2224296 - DNA, 25 bp, Homo sapien
ccaatacttcttaagggtggctaag

SEQ ID NO: 2224297 - DNA, 25 bp, Homo sapien
tacttcttaagggtggctaagtctc

SEQ ID NO: 2224298 - DNA, 25 bp, Homo sapien
tgtcaatcacaatgctctgctaggg

SEQ ID NO: 2224299 - DNA, 25 bp, Homo sapien
tcaactgacattgctcggctaacat

SEQ ID NO: 2224300 - DNA, 25 bp, Homo sapien
tattctaaacctagcaggaagtatc

SEQ ID NO: 2224301 - DNA, 25 bp, Homo sapien
gcattgaatgaagatagctacactt

SEQ ID NO: 2224302 - DNA, 25 bp, Homo sapien
acttaacaggagaatcacaggtacc

SEQ ID NO: 2224303 - DNA, 25 bp, Homo sapien
tatgtggagcacatcgtaagggctt

SEQ ID NO: 2224304 - DNA, 25 bp, Homo sapien
tagcaacctagtaaacatgagcctt

SEQ ID NO: 2224305 - DNA, 25 bp, Homo sapien
tcagtgcaaaacagtgggaatccag

SEQ ID NO: 2224306 - DNA, 25 bp, Homo sapien
ttctagaattgaacagcaatctgcg

SEQ ID NO: 2224307 - DNA, 25 bp, Homo sapien
tctgcggcaagctcctgcaatatgg

SEQ ID NO: 2224308 - DNA, 25 bp, Homo sapien
aagctcctgcaatatggcatctggt

SEQ ID NO: 2224309 - DNA, 25 bp, Homo sapien
gaacagcaatctgcggcaagctcct

SEQ ID NO: 2224310 - DNA, 25 bp, Homo sapien
gcctaacttactcatgtttgaaaga

SEQ ID NO: 2224311 - DNA, 25 bp, Homo sapien
gataatccatgtgattaaattgtct

SEQ ID NO: 2224312 - DNA, 25 bp, Homo sapien
taataacttgtgggttaattcataa

SEQ ID NO: 2224313 - DNA, 25 bp, Homo sapien
agcaaacaggatgtgcctaacttac

SEQ ID NO: 2224314 - DNA, 25 bp, Homo sapien
tacatatcagtagaatagctggatg

SEQ ID NO: 2224315 - DNA, 25 bp, Homo sapien
caaggctttgtatggatatgtgcta

SEQ ID NO: 2224316 - DNA, 25 bp, Homo sapien
cattgttgggcatatcaacagttca

SEQ ID NO: 2224317 - DNA, 25 bp, Homo sapien
ctggcagtctcagggttccaattct

SEQ ID NO: 2224318 - DNA, 25 bp, Homo sapien
gagttgccaggctcacttcatgttg

SEQ ID NO: 2224319 - DNA, 25 bp, Homo sapien
taaaggaattagacaatcttggcca

SEQ ID NO: 2224320 - DNA, 25 bp, Homo sapien
gggaatgagcctaccaaagctttct

SEQ ID NO: 2224321 - DNA, 25 bp, Homo sapien
taattcctggagtccctaatgtgtc

SEQ ID NO: 2224322 - DNA, 25 bp, Homo sapien
gagaaaactgcccatggattatatg

SEQ ID NO: 2224323 - DNA, 25 bp, Homo sapien
cagttgtatcagaaatctagagcac

SEQ ID NO: 2224324 - DNA, 25 bp, Homo sapien
cctatcaaggttcagttttgccagc

SEQ ID NO: 2224325 - DNA, 25 bp, Homo sapien
gattatatggtgtgctgagtactac

SEQ ID NO: 2224326 - DNA, 25 bp, Homo sapien
ccaaggcacagtaaggtttcctgaa

SEQ ID NO: 2224327 - DNA, 25 bp, Homo sapien
aaggcacagtaaggtttcctgaaat

SEQ ID NO: 2224328 - DNA, 25 bp, Homo sapien
tccaaggcacagtaaggtttcctga

SEQ ID NO: 2224329 - DNA, 25 bp, Homo sapien
caaggcacagtaaggtttcctgaaa

SEQ ID NO: 2224330 - DNA, 25 bp, Homo sapien
ttattcaaagcattctgggaacttt

SEQ ID NO: 2224331 - DNA, 25 bp, Homo sapien
ttatcagttcatgcctcacccagag

SEQ ID NO: 2224332 - DNA, 25 bp, Homo sapien
tataaactcattacaatgatgttga

SEQ ID NO: 2224333 - DNA, 25 bp, Homo sapien
actcattacaatgatgttgacatta

SEQ ID NO: 2224334 - DNA, 25 bp, Homo sapien
ctaagctctgatccaagagtgttgg

SEQ ID NO: 2224335 - DNA, 25 bp, Homo sapien
agagtgttggtgatagagcttcagc

SEQ ID NO: 2224336 - DNA, 25 bp, Homo sapien
acaccttggagggtaaaactccatg

SEQ ID NO: 2224337 - DNA, 25 bp, Homo sapien
tggagggtaaaactccatggattcc

SEQ ID NO: 2224338 - DNA, 25 bp, Homo sapien
ttctcagctcgaagggaactgccac

SEQ ID NO: 2224339 - DNA, 25 bp, Homo sapien
cctacttgatgaactggctggactg

SEQ ID NO: 2224340 - DNA, 25 bp, Homo sapien
tgtctggagctgacaaagaggttcc

SEQ ID NO: 2224341 - DNA, 25 bp, Homo sapien
caattttacaaggtcggtggcacac

SEQ ID NO: 2224342 - DNA, 25 bp, Homo sapien
tttcttctcttattgccaacccacg

SEQ ID NO: 2224343 - DNA, 25 bp, Homo sapien
ctttcttctcttattgccaacccac

SEQ ID NO: 2224344 - DNA, 25 bp, Homo sapien
ttcttctcttattgccaacccacgt

SEQ ID NO: 2224345 - DNA, 25 bp, Homo sapien
cagcttagtctcctgtgcacactgt

SEQ ID NO: 2224346 - DNA, 25 bp, Homo sapien
tcctttgttgttctacagtaaatac

SEQ ID NO: 2224347 - DNA, 25 bp, Homo sapien
ttttcataataacgctgtaaaatcc

SEQ ID NO: 2224348 - DNA, 25 bp, Homo sapien
tgcacactgtaatatgagctgaaag

SEQ ID NO: 2224349 - DNA, 25 bp, Homo sapien
ccatatatggtcacttcatattctg

SEQ ID NO: 2224350 - DNA, 25 bp, Homo sapien
tattctgactgccatcctcaatctg

SEQ ID NO: 2224351 - DNA, 25 bp, Homo sapien
tcatattctgactgccatcctcaat

SEQ ID NO: 2224352 - DNA, 25 bp, Homo sapien
cttcatattctgactgccatcctca

SEQ ID NO: 2224353 - DNA, 25 bp, Homo sapien
gtagaatggtagttatcaaggctgg

SEQ ID NO: 2224354 - DNA, 25 bp, Homo sapien
tatcttgaagatatatctgcactcc

SEQ ID NO: 2224355 - DNA, 25 bp, Homo sapien
atactgcgcgatctcacatatgtgg

SEQ ID NO: 2224356 - DNA, 25 bp, Homo sapien
tcttgtaatttgcaactacataggg

SEQ ID NO: 2224357 - DNA, 25 bp, Homo sapien
aacaatactgaattcaaaatgtttc

SEQ ID NO: 2224358 - DNA, 25 bp, Homo sapien
acaatactgaattcaaaatgtttct

SEQ ID NO: 2224359 - DNA, 25 bp, Homo sapien
aggctccatatcacaaacaatactg

SEQ ID NO: 2224360 - DNA, 25 bp, Homo sapien
ctgaggctccatatcacaaacaata

SEQ ID NO: 2224361 - DNA, 25 bp, Homo sapien
gaccaacgatgaataagctttcaca

SEQ ID NO: 2224362 - DNA, 25 bp, Homo sapien
cattggagggtctcttgcctgacca

SEQ ID NO: 2224363 - DNA, 25 bp, Homo sapien
gaaggccacccagtaaatagagatc

SEQ ID NO: 2224364 - DNA, 25 bp, Homo sapien
tctgggatagtgttccctcccttga

SEQ ID NO: 2224365 - DNA, 25 bp, Homo sapien
cacaatggacttcattctgagtctt

SEQ ID NO: 2224366 - DNA, 25 bp, Homo sapien
tcattgtcacctcaaatcagagctc

SEQ ID NO: 2224367 - DNA, 25 bp, Homo sapien
aaggttcaaaatcattgtcacctca

SEQ ID NO: 2224368 - DNA, 25 bp, Homo sapien
tctgagcctccacaatggacttcat

SEQ ID NO: 2224369 - DNA, 25 bp, Homo sapien
cattgtatccctatccgcagctcgt

SEQ ID NO: 2224370 - DNA, 25 bp, Homo sapien
agcaaggtccttcgctctctggcaa

SEQ ID NO: 2224371 - DNA, 25 bp, Homo sapien
gtccagaagcgcgtcccaaacatcg

SEQ ID NO: 2224372 - DNA, 25 bp, Homo sapien
aacatcgctctctctccgagcaagg

SEQ ID NO: 2224373 - DNA, 25 bp, Homo sapien
tgcggttacgaaaggaatcagcgga

SEQ ID NO: 2224374 - DNA, 25 bp, Homo sapien
ttcagcgagatttttcctgggtctc

SEQ ID NO: 2224375 - DNA, 25 bp, Homo sapien
aggaatcagcggaacccagatcagg

SEQ ID NO: 2224376 - DNA, 25 bp, Homo sapien
ggcaggcggattcagcgagattttt

SEQ ID NO: 2224377 - DNA, 25 bp, Homo sapien
tatggcaacccacattggttttgtc

SEQ ID NO: 2224378 - DNA, 25 bp, Homo sapien
tgcacagttgatgcttatggcaacc

SEQ ID NO: 2224379 - DNA, 25 bp, Homo sapien
tatcacctatagttatgcacagttg

SEQ ID NO: 2224380 - DNA, 25 bp, Homo sapien
taagatcttgtgtagcaataccaaa

SEQ ID NO: 2224381 - DNA, 25 bp, Homo sapien
taaagactcatggattagatctatt

SEQ ID NO: 2224382 - DNA, 25 bp, Homo sapien
tctatttttacatcagtgccttctt

SEQ ID NO: 2224383 - DNA, 25 bp, Homo sapien
ttttaaagactcatggattagatct

SEQ ID NO: 2224384 - DNA, 25 bp, Homo sapien
ttttagtgaattactctggatgttc

SEQ ID NO: 2224385 - DNA, 25 bp, Homo sapien
cttctatctaaagggccatgcacag

SEQ ID NO: 2224386 - DNA, 25 bp, Homo sapien
tgccttctatctaaagggccatgca

SEQ ID NO: 2224387 - DNA, 25 bp, Homo sapien
cactgtgccttctatctaaagggcc

SEQ ID NO: 2224388 - DNA, 25 bp, Homo sapien
ccacactgtgccttctatctaaagg

SEQ ID NO: 2224389 - DNA, 25 bp, Homo sapien
cttttgaatttagagacagctgcat

SEQ ID NO: 2224390 - DNA, 25 bp, Homo sapien
tccactctgagatacctcttttgaa

SEQ ID NO: 2224391 - DNA, 25 bp, Homo sapien
ctagtgaagcactgagttgtgggct

SEQ ID NO: 2224392 - DNA, 25 bp, Homo sapien
gattctttctaccaattgccattga

SEQ ID NO: 2224393 - DNA, 25 bp, Homo sapien
tcacattggtaactctgatctttaa

SEQ ID NO: 2224394 - DNA, 25 bp, Homo sapien
ctggaagcattatagtagtatgtgg

SEQ ID NO: 2224395 - DNA, 25 bp, Homo sapien
tctgatctttaagagcccatggcct

SEQ ID NO: 2224396 - DNA, 25 bp, Homo sapien
tagtagtatgtggtaatcacattgg

SEQ ID NO: 2224397 - DNA, 25 bp, Homo sapien
acaaacacatagacgtgcatgcaca

SEQ ID NO: 2224398 - DNA, 25 bp, Homo sapien
gatggcactcatgggtaagagctag

SEQ ID NO: 2224399 - DNA, 25 bp, Homo sapien
taagagctagctgtggcctacatgg

SEQ ID NO: 2224400 - DNA, 25 bp, Homo sapien
tacatggcgggctgtatacttgatc

SEQ ID NO: 2224401 - DNA, 25 bp, Homo sapien
tagcaggtgcgaccgtagagaatac

SEQ ID NO: 2224402 - DNA, 25 bp, Homo sapien
tgtgagtcctgaaaaaggccattct

SEQ ID NO: 2224403 - DNA, 25 bp, Homo sapien
ggccattctgtgagtcgttcaaaga

SEQ ID NO: 2224404 - DNA, 25 bp, Homo sapien
gtgagtcctgaaaaaggccattctg

SEQ ID NO: 2224405 - DNA, 25 bp, Homo sapien
tctgtgagtcgttcaaagaaacctg

SEQ ID NO: 2224406 - DNA, 25 bp, Homo sapien
tgtcatttgttttggcaggtttgcc

SEQ ID NO: 2224407 - DNA, 25 bp, Homo sapien
tccatgtcatttgttttggcaggtt

SEQ ID NO: 2224408 - DNA, 25 bp, Homo sapien
tctcttccatgtcatttgttttggc

SEQ ID NO: 2224409 - DNA, 25 bp, Homo sapien
catttgttttggcaggtttgccttc

SEQ ID NO: 2224410 - DNA, 25 bp, Homo sapien
catttgtcccgtgatgtggaggagt

SEQ ID NO: 2224411 - DNA, 25 bp, Homo sapien
tgtaacttttacatttgtcccgtga

SEQ ID NO: 2224412 - DNA, 25 bp, Homo sapien
tattgccctgaaagagcttgtaact

SEQ ID NO: 2224413 - DNA, 25 bp, Homo sapien
ctgtgtgtaagatattgccctgaaa

SEQ ID NO: 2224414 - DNA, 25 bp, Homo sapien
tgtcagcaaaccctaagggaatgca

SEQ ID NO: 2224415 - DNA, 25 bp, Homo sapien
tccttcttaactttcaaattgtcag

SEQ ID NO: 2224416 - DNA, 25 bp, Homo sapien
ctccttcttaactttcaaattgtca

SEQ ID NO: 2224417 - DNA, 25 bp, Homo sapien
aaggagttcctcgaactggcccgcg

SEQ ID NO: 2224418 - DNA, 25 bp, Homo sapien
caagggttgcggactatggccctaa

SEQ ID NO: 2224419 - DNA, 25 bp, Homo sapien
gggacgatatgctccactggcaggc

SEQ ID NO: 2224420 - DNA, 25 bp, Homo sapien
tcggtcaccatacgctacaggcatc

SEQ ID NO: 2224421 - DNA, 25 bp, Homo sapien
gctcaatcatatggcaggaacagtc

SEQ ID NO: 2224422 - DNA, 25 bp, Homo sapien
aattttggagtactgcacctgaggc

SEQ ID NO: 2224423 - DNA, 25 bp, Homo sapien
cacctgaggcccttggtgaattaca

SEQ ID NO: 2224424 - DNA, 25 bp, Homo sapien
tcaagactgtggtggagtgctcaaa

SEQ ID NO: 2224425 - DNA, 25 bp, Homo sapien
gcctataaggaactttctcaacgcg

SEQ ID NO: 2224426 - DNA, 25 bp, Homo sapien
agcctataaggaactttctcaacgc

SEQ ID NO: 2224427 - DNA, 25 bp, Homo sapien
taaggaactttctcaacgcgtctac

SEQ ID NO: 2224428 - DNA, 25 bp, Homo sapien
tataaggaactttctcaacgcgtct

SEQ ID NO: 2224429 - DNA, 25 bp, Homo sapien
gctagtctgtggagccttagccacc

SEQ ID NO: 2224430 - DNA, 25 bp, Homo sapien
tgtggagccttagccacccctcttt

SEQ ID NO: 2224431 - DNA, 25 bp, Homo sapien
ctgctagtctgtggagccttagcca

SEQ ID NO: 2224432 - DNA, 25 bp, Homo sapien
agtctgtggagccttagccacccct

SEQ ID NO: 2224433 - DNA, 25 bp, Homo sapien
tcagggtaagcgaaaaccaacttgc

SEQ ID NO: 2224434 - DNA, 25 bp, Homo sapien
aagggttgtagacatggcggccatc

SEQ ID NO: 2224435 - DNA, 25 bp, Homo sapien
tctccgtctgaaaaccttggccgaa

SEQ ID NO: 2224436 - DNA, 25 bp, Homo sapien
cctaagggaagcctagtcgaactga

SEQ ID NO: 2224437 - DNA, 25 bp, Homo sapien
gcctttacttgggagtccgtgtaca

SEQ ID NO: 2224438 - DNA, 25 bp, Homo sapien
ttctgtgctcgaataacctgttcct

SEQ ID NO: 2224439 - DNA, 25 bp, Homo sapien
tccgtgtacagtgagtgactcagct

SEQ ID NO: 2224440 - DNA, 25 bp, Homo sapien
cagcagtgcgctggtttacacatag

SEQ ID NO: 2224441 - DNA, 25 bp, Homo sapien
ctagtgtagtgcaatatttcttctg

SEQ ID NO: 2224442 - DNA, 25 bp, Homo sapien
tcttctgatcttcagatctcagttt

SEQ ID NO: 2224443 - DNA, 25 bp, Homo sapien
gtgtagtgcaatatttcttctgatc

SEQ ID NO: 2224444 - DNA, 25 bp, Homo sapien
cagatctcagtttaattctcacttt

SEQ ID NO: 2224445 - DNA, 25 bp, Homo sapien
gtagagcttttccatcatgcatttg

SEQ ID NO: 2224446 - DNA, 25 bp, Homo sapien
ttcggagactaaatagccaaactca

SEQ ID NO: 2224447 - DNA, 25 bp, Homo sapien
catggtagttgccagattttttgtg

SEQ ID NO: 2224448 - DNA, 25 bp, Homo sapien
taagggcaaaatcgaatttcctaca

SEQ ID NO: 2224449 - DNA, 25 bp, Homo sapien
tcatgtccccctcatggtagttgcc

SEQ ID NO: 2224450 - DNA, 25 bp, Homo sapien
catctctacctatttgagagggcca

SEQ ID NO: 2224451 - DNA, 25 bp, Homo sapien
tactgcttagcaatccttctactgg

SEQ ID NO: 2224452 - DNA, 25 bp, Homo sapien
gagagggccatatgctacacaggct

SEQ ID NO: 2224453 - DNA, 25 bp, Homo sapien
gactgtgcctcctatttcatagaga

SEQ ID NO: 2224454 - DNA, 25 bp, Homo sapien
ccatatctctctagtgctgtagacc

SEQ ID NO: 2224455 - DNA, 25 bp, Homo sapien
tatattcacctaacatcccatagat

SEQ ID NO: 2224456 - DNA, 25 bp, Homo sapien
tcccatagatatgccaatgtcaatg

SEQ ID NO: 2224457 - DNA, 25 bp, Homo sapien
aggctaatttgctcactgtcaatct

SEQ ID NO: 2224458 - DNA, 25 bp, Homo sapien
gctgtgttgggatgagttgttacaa

SEQ ID NO: 2224459 - DNA, 25 bp, Homo sapien
gatgatcacttgctgtattgtacaa

SEQ ID NO: 2224460 - DNA, 25 bp, Homo sapien
caggtgacagtcaaatgttggaggc

SEQ ID NO: 2224461 - DNA, 25 bp, Homo sapien
aaactgctgttagactcaggtgaca

SEQ ID NO: 2224462 - DNA, 25 bp, Homo sapien
taaagcccctcgactagtatagtag

SEQ ID NO: 2224463 - DNA, 25 bp, Homo sapien
ggttccaaatgacgacaagaaagtg

SEQ ID NO: 2224464 - DNA, 25 bp, Homo sapien
tagtagttgatagaagcctggttcc

SEQ ID NO: 2224465 - DNA, 25 bp, Homo sapien
cagttacattgagttgtgatggcta

SEQ ID NO: 2224466 - DNA, 25 bp, Homo sapien
ctgacttagcctcttcagcatttca

SEQ ID NO: 2224467 - DNA, 25 bp, Homo sapien
tgacttagcctcttcagcatttcag

SEQ ID NO: 2224468 - DNA, 25 bp, Homo sapien
taagcttgtgtgacataaaagtcct

SEQ ID NO: 2224469 - DNA, 25 bp, Homo sapien
gtgtgacataaaagtcctctaggta

SEQ ID NO: 2224470 - DNA, 25 bp, Homo sapien
cttggtaagcttgtgtgacataaaa

SEQ ID NO: 2224471 - DNA, 25 bp, Homo sapien
gcttgtgtgacataaaagtcctcta

SEQ ID NO: 2224472 - DNA, 25 bp, Homo sapien
tagtacatggcaaatccaacagtca

SEQ ID NO: 2224473 - DNA, 25 bp, Homo sapien
tcgtatgtaaagtagtacatggcaa

SEQ ID NO: 2224474 - DNA, 25 bp, Homo sapien
cttgccagtccatgagtcgtatgta

SEQ ID NO: 2224475 - DNA, 25 bp, Homo sapien
catggcaaatccaacagtcagtttg

SEQ ID NO: 2224476 - DNA, 25 bp, Homo sapien
gtttttgttgatcgtttacttctgc

SEQ ID NO: 2224477 - DNA, 25 bp, Homo sapien
gttgatcgtttacttctgcaatcag

SEQ ID NO: 2224478 - DNA, 25 bp, Homo sapien
ttgttgatcgtttacttctgcaatc

SEQ ID NO: 2224479 - DNA, 25 bp, Homo sapien
ttttgttgatcgtttacttctgcaa

SEQ ID NO: 2224480 - DNA, 25 bp, Homo sapien
actccattgcatctagcatgttttc

SEQ ID NO: 2224481 - DNA, 25 bp, Homo sapien
gctgctgttaactccattgcatcta

SEQ ID NO: 2224482 - DNA, 25 bp, Homo sapien
gttaactccattgcatctagcatgt

SEQ ID NO: 2224483 - DNA, 25 bp, Homo sapien
gctgttaactccattgcatctagca

SEQ ID NO: 2224484 - DNA, 25 bp, Homo sapien
ttcccatatgcctggttggcccctg

SEQ ID NO: 2224485 - DNA, 25 bp, Homo sapien
tgactcaggcctggttggctcagca

SEQ ID NO: 2224486 - DNA, 25 bp, Homo sapien
tagtgcctggttgtctcatgcctag

SEQ ID NO: 2224487 - DNA, 25 bp, Homo sapien
ttaatcagtcgcaaaatttctgggc

SEQ ID NO: 2224488 - DNA, 25 bp, Homo sapien
cactcaggactagttcgctcaggct

SEQ ID NO: 2224489 - DNA, 25 bp, Homo sapien
ggcttatgcttgcttcactcaggac

SEQ ID NO: 2224490 - DNA, 25 bp, Homo sapien
cctgcttggctcgtgcttgattgtc

SEQ ID NO: 2224491 - DNA, 25 bp, Homo sapien
gactgtctcatgtctagttgccaca

SEQ ID NO: 2224492 - DNA, 25 bp, Homo sapien
tcatgtctgggtggcttgggacttg

SEQ ID NO: 2224493 - DNA, 25 bp, Homo sapien
tctggttgccttatgcctggttggc

SEQ ID NO: 2224494 - DNA, 25 bp, Homo sapien
cctatttggcttgtgcctaattggc

SEQ ID NO: 2224495 - DNA, 25 bp, Homo sapien
tggctgatgcctggttgttgcacgc

SEQ ID NO: 2224496 - DNA, 25 bp, Homo sapien
tcttgttgcagcatgcctggttggc

SEQ ID NO: 2224497 - DNA, 25 bp, Homo sapien
tagttgctgcatcactggttggctc

SEQ ID NO: 2224498 - DNA, 25 bp, Homo sapien
gctttgctcaggactagttggctca

SEQ ID NO: 2224499 - DNA, 25 bp, Homo sapien
tgcctgcttggttcgagtctgataa

SEQ ID NO: 2224500 - DNA, 25 bp, Homo sapien
tggctgatggctgtcttgatggaac

SEQ ID NO: 2224501 - DNA, 25 bp, Homo sapien
gatggaacagaatcccttaactgtg

SEQ ID NO: 2224502 - DNA, 25 bp, Homo sapien
gcccagttgattcctgctttgttga

SEQ ID NO: 2224503 - DNA, 25 bp, Homo sapien
tggctgtcttgatggaacagaatcc

SEQ ID NO: 2224504 - DNA, 25 bp, Homo sapien
tggcaaaacgggtagtaggctgagg

SEQ ID NO: 2224505 - DNA, 25 bp, Homo sapien
ctggcaaaacgggtagtaggctgag

SEQ ID NO: 2224506 - DNA, 25 bp, Homo sapien
cagaacctggcaaaacgggtagtag

SEQ ID NO: 2224507 - DNA, 25 bp, Homo sapien
gagcagaacctggcaaaacgggtag

SEQ ID NO: 2224508 - DNA, 25 bp, Homo sapien
cagtcttgtatttgcggtagtgcat

SEQ ID NO: 2224509 - DNA, 25 bp, Homo sapien
aagggatgaggagcctggactgagt

SEQ ID NO: 2224510 - DNA, 25 bp, Homo sapien
gcagtgatagaactagtgtagccaa

SEQ ID NO: 2224511 - DNA, 25 bp, Homo sapien
ttcattgctgtaggagtaggtgcga

SEQ ID NO: 2224512 - DNA, 25 bp, Homo sapien
ggtatggaactggaagcctaggcct

SEQ ID NO: 2224513 - DNA, 25 bp, Homo sapien
aacactcaggttgcaggtatggaac

SEQ ID NO: 2224514 - DNA, 25 bp, Homo sapien
aatgattgccaagctcctttttaga

SEQ ID NO: 2224515 - DNA, 25 bp, Homo sapien
tataacacagctacatttgacccat

SEQ ID NO: 2224516 - DNA, 25 bp, Homo sapien
ttcacaattggagcgagacaactgc

SEQ ID NO: 2224517 - DNA, 25 bp, Homo sapien
gacaactgctatcaatacagcatgg

SEQ ID NO: 2224518 - DNA, 25 bp, Homo sapien
cacagtcctattgtgactatggtaa

SEQ ID NO: 2224519 - DNA, 25 bp, Homo sapien
gagttgatgcaaatagtgttataac

SEQ ID NO: 2224520 - DNA, 25 bp, Homo sapien
gaacatcagacaccgtggggcctgt

SEQ ID NO: 2224521 - DNA, 25 bp, Homo sapien
gatacccattatttatgcaattgtg

SEQ ID NO: 2224522 - DNA, 25 bp, Homo sapien
gcttccagcacgttcacataaatgt

SEQ ID NO: 2224523 - DNA, 25 bp, Homo sapien
ggtgtagtgccaatgaagaaatctg

SEQ ID NO: 2224524 - DNA, 25 bp, Homo sapien
aaatcagtgctgtccctataaaaac

SEQ ID NO: 2224525 - DNA, 25 bp, Homo sapien
taaaatgtgcacctttagcagatgc

SEQ ID NO: 2224526 - DNA, 25 bp, Homo sapien
gcattctacccctgaacgcctaagt

SEQ ID NO: 2224527 - DNA, 25 bp, Homo sapien
cataaggaatcaaccaccatgacac

SEQ ID NO: 2224528 - DNA, 25 bp, Homo sapien
gcagagatcacgtagcaagagagga

SEQ ID NO: 2224529 - DNA, 25 bp, Homo sapien
acttactactgagagagtggctcca

SEQ ID NO: 2224530 - DNA, 25 bp, Homo sapien
taacaccatatgcatgccaccaagg

SEQ ID NO: 2224531 - DNA, 25 bp, Homo sapien
tctgagcacctgtggatataacacc

SEQ ID NO: 2224532 - DNA, 25 bp, Homo sapien
catgggttgcagtccaatgcttaca

SEQ ID NO: 2224533 - DNA, 25 bp, Homo sapien
tagtcttgactattagcgcctggct

SEQ ID NO: 2224534 - DNA, 25 bp, Homo sapien
taactcagaatagttttcaacatgt

SEQ ID NO: 2224535 - DNA, 25 bp, Homo sapien
ctatgtaattatgggatccgtgtga

SEQ ID NO: 2224536 - DNA, 25 bp, Homo sapien
tcctgcccagagtaactcagaatag

SEQ ID NO: 2224537 - DNA, 25 bp, Homo sapien
aagcctggtactgtgccaaactcct

SEQ ID NO: 2224538 - DNA, 25 bp, Homo sapien
aagggaacaatggaagtggcgtcca

SEQ ID NO: 2224539 - DNA, 25 bp, Homo sapien
tagggcgaagggaacaatggaagtg

SEQ ID NO: 2224540 - DNA, 25 bp, Homo sapien
ccagcgtgtagcgtagggcgaaggg

SEQ ID NO: 2224541 - DNA, 25 bp, Homo sapien
tagcgtagggcgaagggaacaatgg

SEQ ID NO: 2224542 - DNA, 25 bp, Homo sapien
tagagccgtcgttgagaccgtcggt

SEQ ID NO: 2224543 - DNA, 25 bp, Homo sapien
cgccccctgaccgagctaatagtaa

SEQ ID NO: 2224544 - DNA, 25 bp, Homo sapien
agccccagggagctagagccgtcgt

SEQ ID NO: 2224545 - DNA, 25 bp, Homo sapien
aagtgaagaatgcagcgtccccctg

SEQ ID NO: 2224546 - DNA, 25 bp, Homo sapien
aagagggctgcgtccaaagctgcaa

SEQ ID NO: 2224547 - DNA, 25 bp, Homo sapien
gaaacttggcatggtcgtgggaaaa

SEQ ID NO: 2224548 - DNA, 25 bp, Homo sapien
gctgcaatactgctacttgccaggg

SEQ ID NO: 2224549 - DNA, 25 bp, Homo sapien
cgtgtgtgcattctgctcgaaatga

SEQ ID NO: 2224550 - DNA, 25 bp, Homo sapien
ttgttctgccgccttaccatttctc

SEQ ID NO: 2224551 - DNA, 25 bp, Homo sapien
actactttcgcattctcttgttctg

SEQ ID NO: 2224552 - DNA, 25 bp, Homo sapien
ctctgcaaatactactttcgcattc

SEQ ID NO: 2224553 - DNA, 25 bp, Homo sapien
attctcttgttctgccgccttacca

SEQ ID NO: 2224554 - DNA, 25 bp, Homo sapien
ctaggcagccactaatctttgtctg

SEQ ID NO: 2224555 - DNA, 25 bp, Homo sapien
atcatatatggtcgttgtgtctggc

SEQ ID NO: 2224556 - DNA, 25 bp, Homo sapien
cattcgttttcactgccaatgatat

SEQ ID NO: 2224557 - DNA, 25 bp, Homo sapien
tcagatacattcacataccattcca

SEQ ID NO: 2224558 - DNA, 25 bp, Homo sapien
tgatgagagggagcttcaacgccat

SEQ ID NO: 2224559 - DNA, 25 bp, Homo sapien
catttgttggccgttcacagcaaga

SEQ ID NO: 2224560 - DNA, 25 bp, Homo sapien
taggaagattcatcagtgcaggcac

SEQ ID NO: 2224561 - DNA, 25 bp, Homo sapien
caaggagccgaagatgcacaagtgc

SEQ ID NO: 2224562 - DNA, 25 bp, Homo sapien
gctttgctatagcaagcaaacccac

SEQ ID NO: 2224563 - DNA, 25 bp, Homo sapien
ttccagcaatgacaaaagttttgtg

SEQ ID NO: 2224564 - DNA, 25 bp, Homo sapien
tcatcagtcacttagtcattgagcc

SEQ ID NO: 2224565 - DNA, 25 bp, Homo sapien
tgctgagatctaaggtgaagtctat

SEQ ID NO: 2224566 - DNA, 25 bp, Homo sapien
tacttggactttcacacaaaccatg

SEQ ID NO: 2224567 - DNA, 25 bp, Homo sapien
gaaattagataaataggcactcctc

SEQ ID NO: 2224568 - DNA, 25 bp, Homo sapien
gagagtgatgcttgttagctccaac

SEQ ID NO: 2224569 - DNA, 25 bp, Homo sapien
ggcactcctcacctgacaactttga

SEQ ID NO: 2224570 - DNA, 25 bp, Homo sapien
taactgcccctgaatttttgacact

SEQ ID NO: 2224571 - DNA, 25 bp, Homo sapien
tatcttttagtcatcaggcctactg

SEQ ID NO: 2224572 - DNA, 25 bp, Homo sapien
tttgtacacattaagcatccccagt

SEQ ID NO: 2224573 - DNA, 25 bp, Homo sapien
gaatagttagcagaggagaaactcc

SEQ ID NO: 2224574 - DNA, 25 bp, Homo sapien
tttaaaaggctgtacatatatcgtc

SEQ ID NO: 2224575 - DNA, 25 bp, Homo sapien
tctgttttctcaatcacaatagtct

SEQ ID NO: 2224576 - DNA, 25 bp, Homo sapien
caatagtctgtgtttcactacctgg

SEQ ID NO: 2224577 - DNA, 25 bp, Homo sapien
tagtcatcatataggaggcctagga

SEQ ID NO: 2224578 - DNA, 25 bp, Homo sapien
acctggtggtatatattcgtagtca

SEQ ID NO: 2224579 - DNA, 25 bp, Homo sapien
tcccagcagtctcaccaagataagg

SEQ ID NO: 2224580 - DNA, 25 bp, Homo sapien
taaatataggcaaaggcacccagag

SEQ ID NO: 2224581 - DNA, 25 bp, Homo sapien
tacttttacaccgttggcaggactg

SEQ ID NO: 2224582 - DNA, 25 bp, Homo sapien
tatgggccctacaagtgcctagctc

SEQ ID NO: 2224583 - DNA, 25 bp, Homo sapien
gtcacatgactcactggcgcaaggg

SEQ ID NO: 2224584 - DNA, 25 bp, Homo sapien
ttgaacaaaaagttgctctggtcca

SEQ ID NO: 2224585 - DNA, 25 bp, Homo sapien
aaatgtaacctctaacaaattgttg

SEQ ID NO: 2224586 - DNA, 25 bp, Homo sapien
agctggacagaccatcaacacaggt

SEQ ID NO: 2224587 - DNA, 25 bp, Homo sapien
caccagtggagggttggttatgaga

SEQ ID NO: 2224588 - DNA, 25 bp, Homo sapien
gttggttatgagaggaatatatttc

SEQ ID NO: 2224589 - DNA, 25 bp, Homo sapien
tttcttgccgcaacttggagagttc

SEQ ID NO: 2224590 - DNA, 25 bp, Homo sapien
gtaatagtagtccttccaccagtgg

SEQ ID NO: 2224591 - DNA, 25 bp, Homo sapien
catctttatggtactggtttaattg

SEQ ID NO: 2224592 - DNA, 25 bp, Homo sapien
ctctttgaaacatctttatggtact

SEQ ID NO: 2224593 - DNA, 25 bp, Homo sapien
ctcttccagcaagcttgtcagttca

SEQ ID NO: 2224594 - DNA, 25 bp, Homo sapien
gcttgtcagttcatgaagcttaaat

SEQ ID NO: 2224595 - DNA, 25 bp, Homo sapien
tttaccatctccgtgtagtggttgc

SEQ ID NO: 2224596 - DNA, 25 bp, Homo sapien
gcctgcaacattgggcctgtgcaag

SEQ ID NO: 2224597 - DNA, 25 bp, Homo sapien
aatctcatccattttagcctgcaac

SEQ ID NO: 2224598 - DNA, 25 bp, Homo sapien
catctccgtgtagtggttgccaatc

SEQ ID NO: 2224599 - DNA, 25 bp, Homo sapien
tttgattctcttgctctaaattacg

SEQ ID NO: 2224600 - DNA, 25 bp, Homo sapien
tccatgtctgatagtgtatgtcgaa

SEQ ID NO: 2224601 - DNA, 25 bp, Homo sapien
ctaaattacgtttacaatattccag

SEQ ID NO: 2224602 - DNA, 25 bp, Homo sapien
tccagttcttttagtctgtattcca

SEQ ID NO: 2224603 - DNA, 25 bp, Homo sapien
cattttgaacttgagtcttgaagtc

SEQ ID NO: 2224604 - DNA, 25 bp, Homo sapien
atgcctggcattttgaacttgagtc

SEQ ID NO: 2224605 - DNA, 25 bp, Homo sapien
caatgcctggcattttgaacttgag

SEQ ID NO: 2224606 - DNA, 25 bp, Homo sapien
ttgaacttgagtcttgaagtccttg

SEQ ID NO: 2224607 - DNA, 25 bp, Homo sapien
cactgatgccaagagttcttcgtac

SEQ ID NO: 2224608 - DNA, 25 bp, Homo sapien
cttcgtactcttttaattgagtgtc

SEQ ID NO: 2224609 - DNA, 25 bp, Homo sapien
ggtgattatttgctctcactgatgc

SEQ ID NO: 2224610 - DNA, 25 bp, Homo sapien
tgagtgtctttgaatgataaatctt

SEQ ID NO: 2224611 - DNA, 25 bp, Homo sapien
ccgtatgttgctaaatgtggacagc

SEQ ID NO: 2224612 - DNA, 25 bp, Homo sapien
ggagtgacttatcagacatacccct

SEQ ID NO: 2224613 - DNA, 25 bp, Homo sapien
taaatgtggacagcactagtcggag

SEQ ID NO: 2224614 - DNA, 25 bp, Homo sapien
gtccaagctcctcccgtatgttgct

SEQ ID NO: 2224615 - DNA, 25 bp, Homo sapien
gagatcaaacaagatcagacatgtt

SEQ ID NO: 2224616 - DNA, 25 bp, Homo sapien
caaacaagatcagacatgttcaggg

SEQ ID NO: 2224617 - DNA, 25 bp, Homo sapien
atcaaacaagatcagacatgttcag

SEQ ID NO: 2224618 - DNA, 25 bp, Homo sapien
tagccaggctcaatcctgcttagct

SEQ ID NO: 2224619 - DNA, 25 bp, Homo sapien
ctgttttgtaaactctgataatcct

SEQ ID NO: 2224620 - DNA, 25 bp, Homo sapien
ctgcagaatgtagcgtatttgctgt

SEQ ID NO: 2224621 - DNA, 25 bp, Homo sapien
aaactctgataatcctttaggaatc

SEQ ID NO: 2224622 - DNA, 25 bp, Homo sapien
gaatcaatgattcaatgtcttccga

SEQ ID NO: 2224623 - DNA, 25 bp, Homo sapien
ctcatctgtagactcaaagtcctgt

SEQ ID NO: 2224624 - DNA, 25 bp, Homo sapien
tcatctgtagactcaaagtcctgtt

SEQ ID NO: 2224625 - DNA, 25 bp, Homo sapien
catctgtagactcaaagtcctgttt

SEQ ID NO: 2224626 - DNA, 25 bp, Homo sapien
atctgtagactcaaagtcctgtttg

SEQ ID NO: 2224627 - DNA, 25 bp, Homo sapien
ctcttcatagctctctatgaacttt

SEQ ID NO: 2224628 - DNA, 25 bp, Homo sapien
tgttgttatctaaatctcttcatag

SEQ ID NO: 2224629 - DNA, 25 bp, Homo sapien
tatgtatcttggtgtgcctgtgttg

SEQ ID NO: 2224630 - DNA, 25 bp, Homo sapien
ggagtgtagcagtctcccactgtta

SEQ ID NO: 2224631 - DNA, 25 bp, Homo sapien
gaatgttaggaacttgccacactgg

SEQ ID NO: 2224632 - DNA, 25 bp, Homo sapien
tataaggtgagtacagtcgattggc

SEQ ID NO: 2224633 - DNA, 25 bp, Homo sapien
caggctttgatatgtggcccctgaa

SEQ ID NO: 2224634 - DNA, 25 bp, Homo sapien
gagaggccgaattcttcctggaccg

SEQ ID NO: 2224635 - DNA, 25 bp, Homo sapien
ggagaaaagacaagatatacaagag

SEQ ID NO: 2224636 - DNA, 25 bp, Homo sapien
tacaagagattaagagagaatacat

SEQ ID NO: 2224637 - DNA, 25 bp, Homo sapien
tagtatatatggtgtcatcccattt

SEQ ID NO: 2224638 - DNA, 25 bp, Homo sapien
gcagttgagggtgacagtaagataa

SEQ ID NO: 2224639 - DNA, 25 bp, Homo sapien
cagtgatatagatccgtattcttac

SEQ ID NO: 2224640 - DNA, 25 bp, Homo sapien
ggggtccaatttttcagggccatca

SEQ ID NO: 2224641 - DNA, 25 bp, Homo sapien
gcaaatgttctaataagcagtgata

SEQ ID NO: 2224642 - DNA, 25 bp, Homo sapien
ttacggctcagatcagcaagcaact

SEQ ID NO: 2224643 - DNA, 25 bp, Homo sapien
tcaaggaggaactatcaatgggctc

SEQ ID NO: 2224644 - DNA, 25 bp, Homo sapien
cataagtgacccaaattcaaggagg

SEQ ID NO: 2224645 - DNA, 25 bp, Homo sapien
cagagttaagacaagaacccaggtc

SEQ ID NO: 2224646 - DNA, 25 bp, Homo sapien
tgagaatctcatgacctggccttaa

SEQ ID NO: 2224647 - DNA, 25 bp, Homo sapien
agaatcaggttgttgccagtgtgca

SEQ ID NO: 2224648 - DNA, 25 bp, Homo sapien
aatctggcttgatccactatggcac

SEQ ID NO: 2224649 - DNA, 25 bp, Homo sapien
cttggatttgctggctagaatcagg

SEQ ID NO: 2224650 - DNA, 25 bp, Homo sapien
tgtgatggcttggatttgctggcta

SEQ ID NO: 2224651 - DNA, 25 bp, Homo sapien
ggataatgtgatgatggcattgagc

SEQ ID NO: 2224652 - DNA, 25 bp, Homo sapien
gttggataatgtgatgatggcattg

SEQ ID NO: 2224653 - DNA, 25 bp, Homo sapien
ctgttggataatgtgatgatggcat

SEQ ID NO: 2224654 - DNA, 25 bp, Homo sapien
tggataatgtgatgatggcattgag

SEQ ID NO: 2224655 - DNA, 25 bp, Homo sapien
ttcctcttaggaattgagacagtgg

SEQ ID NO: 2224656 - DNA, 25 bp, Homo sapien
tcctcttaggaattgagacagtggt

SEQ ID NO: 2224657 - DNA, 25 bp, Homo sapien
cctcttaggaattgagacagtggtt

SEQ ID NO: 2224658 - DNA, 25 bp, Homo sapien
tcaggattttgtactacatatttcc

SEQ ID NO: 2224659 - DNA, 25 bp, Homo sapien
tgtggatatgtagtaagtttcactg

SEQ ID NO: 2224660 - DNA, 25 bp, Homo sapien
catatttcctaatagtggtctgtgg

SEQ ID NO: 2224661 - DNA, 25 bp, Homo sapien
ggtctgtggatatgtagtaagtttc

SEQ ID NO: 2224662 - DNA, 25 bp, Homo sapien
ttgggttatatgtagagtacttggg

SEQ ID NO: 2224663 - DNA, 25 bp, Homo sapien
tattttgggttatatgtagagtact

SEQ ID NO: 2224664 - DNA, 25 bp, Homo sapien
tgtagagtacttggggcacatgtag

SEQ ID NO: 2224665 - DNA, 25 bp, Homo sapien
cttggggcacatgtagatattttta

SEQ ID NO: 2224666 - DNA, 25 bp, Homo sapien
gggctcttagagtaaccatcaaccg

SEQ ID NO: 2224667 - DNA, 25 bp, Homo sapien
gagtaaccatcaaccgaacagtgta

SEQ ID NO: 2224668 - DNA, 25 bp, Homo sapien
cttagagtaaccatcaaccgaacag

SEQ ID NO: 2224669 - DNA, 25 bp, Homo sapien
accatcaaccgaacagtgtacattg

SEQ ID NO: 2224670 - DNA, 25 bp, Homo sapien
tgagaatggtcgctccaaaccaaat

SEQ ID NO: 2224671 - DNA, 25 bp, Homo sapien
gcttggcttgactgatggtagcagt

SEQ ID NO: 2224672 - DNA, 25 bp, Homo sapien
gggagagcacttcccgtgagttgaa

SEQ ID NO: 2224673 - DNA, 25 bp, Homo sapien
actgtaggtcctcactcgctcatac

SEQ ID NO: 2224674 - DNA, 25 bp, Homo sapien
tggtcagcaagggacctcccagatg

SEQ ID NO: 2224675 - DNA, 25 bp, Homo sapien
tcagcaagggacctcccagatgttc

SEQ ID NO: 2224676 - DNA, 25 bp, Homo sapien
ggtcagcaagggacctcccagatgt

SEQ ID NO: 2224677 - DNA, 25 bp, Homo sapien
agcaagggacctcccagatgttcta

SEQ ID NO: 2224678 - DNA, 25 bp, Homo sapien
gcaggtctggcagctacagaggaag

SEQ ID NO: 2224679 - DNA, 25 bp, Homo sapien
ggagatagctacaaggctgcccagc

SEQ ID NO: 2224680 - DNA, 25 bp, Homo sapien
cctgtgacattgctccaggaaatgg

SEQ ID NO: 2224681 - DNA, 25 bp, Homo sapien
gaaatggtactgacacgcccttagg

SEQ ID NO: 2224682 - DNA, 25 bp, Homo sapien
ggcggattcacttagcaggtttaca

SEQ ID NO: 2224683 - DNA, 25 bp, Homo sapien
taggacctagtatactaccaccatt

SEQ ID NO: 2224684 - DNA, 25 bp, Homo sapien
aaatccagaatactctcattcaaag

SEQ ID NO: 2224685 - DNA, 25 bp, Homo sapien
gctatgcaatatacttcagcaccac

SEQ ID NO: 2224686 - DNA, 25 bp, Homo sapien
tgtgtatatgtgcaataggacctag

SEQ ID NO: 2224687 - DNA, 25 bp, Homo sapien
cataaccaattcctggcatctcaag

SEQ ID NO: 2224688 - DNA, 25 bp, Homo sapien
tttgttcataaccaattcctggcat

SEQ ID NO: 2224689 - DNA, 25 bp, Homo sapien
tggcatctcaagtatgccaatcttg

SEQ ID NO: 2224690 - DNA, 25 bp, Homo sapien
gcatctcaagtatgccaatcttgcc

SEQ ID NO: 2224691 - DNA, 25 bp, Homo sapien
gagatttcagtgtaacaaatgtacc

SEQ ID NO: 2224692 - DNA, 25 bp, Homo sapien
ggctgtccacagcttccaattcggg

SEQ ID NO: 2224693 - DNA, 25 bp, Homo sapien
gaatagctgtgtctagcctgctggg

SEQ ID NO: 2224694 - DNA, 25 bp, Homo sapien
tagaaacactgtgaggagatttcag

SEQ ID NO: 2224695 - DNA, 25 bp, Homo sapien
tttgaaataatgttggaacaaagaa

SEQ ID NO: 2224696 - DNA, 25 bp, Homo sapien
cctgaccttcagtggataaacaata

SEQ ID NO: 2224697 - DNA, 25 bp, Homo sapien
tggttttattttgttcttctatcat

SEQ ID NO: 2224698 - DNA, 25 bp, Homo sapien
cttcatcatagttcttggttttatt

SEQ ID NO: 2224699 - DNA, 25 bp, Homo sapien
atcatagttcttggttttattttgt

SEQ ID NO: 2224700 - DNA, 25 bp, Homo sapien
ttggttttattttgttcttctatca

SEQ ID NO: 2224701 - DNA, 25 bp, Homo sapien
ggtaaggactttgtgcagaccagtt

SEQ ID NO: 2224702 - DNA, 25 bp, Homo sapien
tacaggaatgtgcaacactagatgg

SEQ ID NO: 2224703 - DNA, 25 bp, Homo sapien
caggactggaaaggtcactacgacc

SEQ ID NO: 2224704 - DNA, 25 bp, Homo sapien
tactgctaatgttcgggtaaggact

SEQ ID NO: 2224705 - DNA, 25 bp, Homo sapien
taggatgctaacagaaacataaggg

SEQ ID NO: 2224706 - DNA, 25 bp, Homo sapien
gaatataggaggtaatagggacagc

SEQ ID NO: 2224707 - DNA, 25 bp, Homo sapien
tagggacagctttaccattagcatc

SEQ ID NO: 2224708 - DNA, 25 bp, Homo sapien
gggaatgaagaggacaatttccatt

SEQ ID NO: 2224709 - DNA, 25 bp, Homo sapien
tccccctcaccagatctaatgttga

SEQ ID NO: 2224710 - DNA, 25 bp, Homo sapien
ccccctcaccagatctaatgttgac

SEQ ID NO: 2224711 - DNA, 25 bp, Homo sapien
ttccccctcaccagatctaatgttg

SEQ ID NO: 2224712 - DNA, 25 bp, Homo sapien
ctgatgagcaatgaaattaagatgt

SEQ ID NO: 2224713 - DNA, 25 bp, Homo sapien
tcagtgaaagggttattgtccattc

SEQ ID NO: 2224714 - DNA, 25 bp, Homo sapien
gaaagggttattgtccattctctca

SEQ ID NO: 2224715 - DNA, 25 bp, Homo sapien
ggttattgtccattctctcaaggtt

SEQ ID NO: 2224716 - DNA, 25 bp, Homo sapien
aactcagtgaaagggttattgtcca

SEQ ID NO: 2224717 - DNA, 25 bp, Homo sapien
aataccattctcgacatcagtgcag

SEQ ID NO: 2224718 - DNA, 25 bp, Homo sapien
cattctcgacatcagtgcaggcaat

SEQ ID NO: 2224719 - DNA, 25 bp, Homo sapien
gacccctacctttcattatgtacaa

SEQ ID NO: 2224720 - DNA, 25 bp, Homo sapien
ggtgctggtataattggctggccat

SEQ ID NO: 2224721 - DNA, 25 bp, Homo sapien
aagaatgatgatggtgacgatgttt

SEQ ID NO: 2224722 - DNA, 25 bp, Homo sapien
atcttttagctgtttggcatgtttg

SEQ ID NO: 2224723 - DNA, 25 bp, Homo sapien
atggtgacgatgttttaaaaccagg

SEQ ID NO: 2224724 - DNA, 25 bp, Homo sapien
tagccatttgttatactgttaagac

SEQ ID NO: 2224725 - DNA, 25 bp, Homo sapien
gagtgctctaaggtcaaaagtactt

SEQ ID NO: 2224726 - DNA, 25 bp, Homo sapien
atatcttgatctacattggaattct

SEQ ID NO: 2224727 - DNA, 25 bp, Homo sapien
gcaatatcttgatctacattggaat

SEQ ID NO: 2224728 - DNA, 25 bp, Homo sapien
ttaattagagtgctctaaggtcaaa

SEQ ID NO: 2224729 - DNA, 25 bp, Homo sapien
tcgttactatggtctgggatgccag

SEQ ID NO: 2224730 - DNA, 25 bp, Homo sapien
ttttgctgacaagcctgttcactct

SEQ ID NO: 2224731 - DNA, 25 bp, Homo sapien
gctgacaagcctgttcactcttcat

SEQ ID NO: 2224732 - DNA, 25 bp, Homo sapien
accctctcgttactatggtctggga

SEQ ID NO: 2224733 - DNA, 25 bp, Homo sapien
tgaatgacttgcaccacatactgcc

SEQ ID NO: 2224734 - DNA, 25 bp, Homo sapien
catgtgaatgacttgcaccacatac

SEQ ID NO: 2224735 - DNA, 25 bp, Homo sapien
gggcacttgctcatgcgcttgctac

SEQ ID NO: 2224736 - DNA, 25 bp, Homo sapien
cttgctcatgcgcttgctacacttg

SEQ ID NO: 2224737 - DNA, 25 bp, Homo sapien
gggcaaggccaatatccggtacatt

SEQ ID NO: 2224738 - DNA, 25 bp, Homo sapien
aatgtgcatgctgcattcaagcggc

SEQ ID NO: 2224739 - DNA, 25 bp, Homo sapien
tgtggttattctaggcctaccctga

SEQ ID NO: 2224740 - DNA, 25 bp, Homo sapien
tccaggtaactatggcagtgacaga

SEQ ID NO: 2224741 - DNA, 25 bp, Homo sapien
tcctgacagacaatataggccagat

SEQ ID NO: 2224742 - DNA, 25 bp, Homo sapien
gaatctgtgacctgccacagctggc

SEQ ID NO: 2224743 - DNA, 25 bp, Homo sapien
tataatgtgatcctactgtccctga

SEQ ID NO: 2224744 - DNA, 25 bp, Homo sapien
gcttgaactatatctgcagtgggta

SEQ ID NO: 2224745 - DNA, 25 bp, Homo sapien
tttataggcaattataagtctcaac

SEQ ID NO: 2224746 - DNA, 25 bp, Homo sapien
ggcaattataagtctcaactattgc

SEQ ID NO: 2224747 - DNA, 25 bp, Homo sapien
ataaagtagaccatcagagcttggc

SEQ ID NO: 2224748 - DNA, 25 bp, Homo sapien
tgcagcttagtttgctgcctatgta

SEQ ID NO: 2224749 - DNA, 25 bp, Homo sapien
tatatatggagaaacgtaggctcag

SEQ ID NO: 2224750 - DNA, 25 bp, Homo sapien
tatttcctgcgtgagacttttgaga

SEQ ID NO: 2224751 - DNA, 25 bp, Homo sapien
tcatctgctagtcacacaagtttgg

SEQ ID NO: 2224752 - DNA, 25 bp, Homo sapien
tccaaagtggtaagcaaaattgtcc

SEQ ID NO: 2224753 - DNA, 25 bp, Homo sapien
ctcctctaggtttccaaggtttgtg

SEQ ID NO: 2224754 - DNA, 25 bp, Homo sapien
ttccttgaaagtctccgagttagcc

SEQ ID NO: 2224755 - DNA, 25 bp, Homo sapien
ggctgtaaactgtctccatcaagga

SEQ ID NO: 2224756 - DNA, 25 bp, Homo sapien
gagttagcctctggtatggcactgg

SEQ ID NO: 2224757 - DNA, 25 bp, Homo sapien
caggctacagtacttaatcagaata

SEQ ID NO: 2224758 - DNA, 25 bp, Homo sapien
tgtgtgcatttctggcattaactaa

SEQ ID NO: 2224759 - DNA, 25 bp, Homo sapien
gaaatcggtttaaaatgtgtgtgca

SEQ ID NO: 2224760 - DNA, 25 bp, Homo sapien
gaacttccgtaagtctgttttcaga

SEQ ID NO: 2224761 - DNA, 25 bp, Homo sapien
ggtaaatcattataacagctcctgc

SEQ ID NO: 2224762 - DNA, 25 bp, Homo sapien
cctgctgatgtctgacgaatctctc

SEQ ID NO: 2224763 - DNA, 25 bp, Homo sapien
gcagacataaacgttggatggtaaa

SEQ ID NO: 2224764 - DNA, 25 bp, Homo sapien
atcatttcctaaaccacaatctggg

SEQ ID NO: 2224765 - DNA, 25 bp, Homo sapien
aattcttggcttttctacttgttca

SEQ ID NO: 2224766 - DNA, 25 bp, Homo sapien
gtaaagagcccacagaattcttggc

SEQ ID NO: 2224767 - DNA, 25 bp, Homo sapien
gagcccacagaattcttggcttttc

SEQ ID NO: 2224768 - DNA, 25 bp, Homo sapien
attgaagtaaagagcccacagaatt

SEQ ID NO: 2224769 - DNA, 25 bp, Homo sapien
taagccatgactagacatagtagga

SEQ ID NO: 2224770 - DNA, 25 bp, Homo sapien
ggaaatcagagcttcgtatgtaaac

SEQ ID NO: 2224771 - DNA, 25 bp, Homo sapien
tgtttcaaatggacaaaccaacttg

SEQ ID NO: 2224772 - DNA, 25 bp, Homo sapien
tgtgtagcctattaccgattaagcc

SEQ ID NO: 2224773 - DNA, 25 bp, Homo sapien
ttctgcacaactgattctaaatctt

SEQ ID NO: 2224774 - DNA, 25 bp, Homo sapien
ctgcacaactgattctaaatcttct

SEQ ID NO: 2224775 - DNA, 25 bp, Homo sapien
tctgcacaactgattctaaatcttc

SEQ ID NO: 2224776 - DNA, 25 bp, Homo sapien
tcagtatatggaacaaacaatttct

SEQ ID NO: 2224777 - DNA, 25 bp, Homo sapien
aagatgtgcaagtcaaatgaaccaa

SEQ ID NO: 2224778 - DNA, 25 bp, Homo sapien
gaagatgtgcaagtcaaatgaacca

SEQ ID NO: 2224779 - DNA, 25 bp, Homo sapien
gatgtgcaagtcaaatgaaccaaat

SEQ ID NO: 2224780 - DNA, 25 bp, Homo sapien
agatgtgcaagtcaaatgaaccaaa

SEQ ID NO: 2224781 - DNA, 25 bp, Homo sapien
gctgatttaagaatggacgaatttg

SEQ ID NO: 2224782 - DNA, 25 bp, Homo sapien
ttcacaaatttctaccccatgctca

SEQ ID NO: 2224783 - DNA, 25 bp, Homo sapien
ccccatgctcaatgggaagtaaaag

SEQ ID NO: 2224784 - DNA, 25 bp, Homo sapien
caaacctgattagtcaacactaaaa

SEQ ID NO: 2224785 - DNA, 25 bp, Homo sapien
aggtgcctttcatgcatgtcatcgt

SEQ ID NO: 2224786 - DNA, 25 bp, Homo sapien
aatgacccgaacagcaaaagttcct

SEQ ID NO: 2224787 - DNA, 25 bp, Homo sapien
gaagaacataactcaatgacccgaa

SEQ ID NO: 2224788 - DNA, 25 bp, Homo sapien
cctttcatgcatgtcatcgttgaag

SEQ ID NO: 2224789 - DNA, 25 bp, Homo sapien
gatctatctgtaatcagcactgccc

SEQ ID NO: 2224790 - DNA, 25 bp, Homo sapien
taggacagatctatctgtaatcagc

SEQ ID NO: 2224791 - DNA, 25 bp, Homo sapien
gacagatctatctgtaatcagcact

SEQ ID NO: 2224792 - DNA, 25 bp, Homo sapien
tttaggacagatctatctgtaatca

SEQ ID NO: 2224793 - DNA, 25 bp, Homo sapien
tgctcagagattattctctgaccaa

SEQ ID NO: 2224794 - DNA, 25 bp, Homo sapien
ggaaagtaactgtcctccacgagga

SEQ ID NO: 2224795 - DNA, 25 bp, Homo sapien
tcagagattattctctgaccaaact

SEQ ID NO: 2224796 - DNA, 25 bp, Homo sapien
tgtcctccacgaggaaatgctcaga

SEQ ID NO: 2224797 - DNA, 25 bp, Homo sapien
gattctttgtccactacaaggcact

SEQ ID NO: 2224798 - DNA, 25 bp, Homo sapien
tccactacaaggcactgtactgaat

SEQ ID NO: 2224799 - DNA, 25 bp, Homo sapien
ctgaatggcgaagacaataaattcc

SEQ ID NO: 2224800 - DNA, 25 bp, Homo sapien
aatggcgaagacaataaattccacc

SEQ ID NO: 2224801 - DNA, 25 bp, Homo sapien
tctctgtggtttctggcctgtttct

SEQ ID NO: 2224802 - DNA, 25 bp, Homo sapien
gtggtttctggcctgtttcttgaaa

SEQ ID NO: 2224803 - DNA, 25 bp, Homo sapien
tctgtggtttctggcctgtttcttg

SEQ ID NO: 2224804 - DNA, 25 bp, Homo sapien
ttctctgtggtttctggcctgtttc

SEQ ID NO: 2224805 - DNA, 25 bp, Homo sapien
aaaggcctgccactacaccagttta

SEQ ID NO: 2224806 - DNA, 25 bp, Homo sapien
actacaaaggcctgccactacacca

SEQ ID NO: 2224807 - DNA, 25 bp, Homo sapien
ggcctgccactacaccagtttaatt

SEQ ID NO: 2224808 - DNA, 25 bp, Homo sapien
tacaaaggcctgccactacaccagt

SEQ ID NO: 2224809 - DNA, 25 bp, Homo sapien
tcttaatctagccagccttccgttg

SEQ ID NO: 2224810 - DNA, 25 bp, Homo sapien
ttgcatatcagtttaaggcctcctg

SEQ ID NO: 2224811 - DNA, 25 bp, Homo sapien
tctgagacactaatagagacactat

SEQ ID NO: 2224812 - DNA, 25 bp, Homo sapien
tgagattataaccatgcgccacata

SEQ ID NO: 2224813 - DNA, 25 bp, Homo sapien
tgcttacaccaacaaggaaagtgat

SEQ ID NO: 2224814 - DNA, 25 bp, Homo sapien
taaaatgtaggaagacatgcaacca

SEQ ID NO: 2224815 - DNA, 25 bp, Homo sapien
ggcatatacatcctcataccagaca

SEQ ID NO: 2224816 - DNA, 25 bp, Homo sapien
ggctatatcatacagtctaggcata

SEQ ID NO: 2224817 - DNA, 25 bp, Homo sapien
agaatgcaaggatatgacttccaag

SEQ ID NO: 2224818 - DNA, 25 bp, Homo sapien
tgagaacatgctgtaactggctgtg

SEQ ID NO: 2224819 - DNA, 25 bp, Homo sapien
ccatttataatagtagccttgatga

SEQ ID NO: 2224820 - DNA, 25 bp, Homo sapien
aatgcaaggatatgacttccaagtg

SEQ ID NO: 2224821 - DNA, 25 bp, Homo sapien
ttcataaaatgtgatctcttcatat

SEQ ID NO: 2224822 - DNA, 25 bp, Homo sapien
agaaacactgggggagttctccttg

SEQ ID NO: 2224823 - DNA, 25 bp, Homo sapien
ttgagaccatctatggtgctgctgg

SEQ ID NO: 2224824 - DNA, 25 bp, Homo sapien
atattcataaaatgtgatctcttca

SEQ ID NO: 2224825 - DNA, 25 bp, Homo sapien
tttcattagcattcgcttttctacc

SEQ ID NO: 2224826 - DNA, 25 bp, Homo sapien
ttcattagcattcgcttttctacca

SEQ ID NO: 2224827 - DNA, 25 bp, Homo sapien
tcattagcattcgcttttctaccat

SEQ ID NO: 2224828 - DNA, 25 bp, Homo sapien
aatttcattagcattcgcttttcta

SEQ ID NO: 2224829 - DNA, 25 bp, Homo sapien
gctattaaagacatctgctctggaa

SEQ ID NO: 2224830 - DNA, 25 bp, Homo sapien
aagacatctgctctggaacacggaa

SEQ ID NO: 2224831 - DNA, 25 bp, Homo sapien
gtttgctattaaagacatctgctct

SEQ ID NO: 2224832 - DNA, 25 bp, Homo sapien
agtaagttgtttgctattaaagaca

SEQ ID NO: 2224833 - DNA, 25 bp, Homo sapien
tcgactaacattagatttgattaga

SEQ ID NO: 2224834 - DNA, 25 bp, Homo sapien
tcgtccttctcgaaatgcaagaatc

SEQ ID NO: 2224835 - DNA, 25 bp, Homo sapien
ttttaaactctgcatatcgactaac

SEQ ID NO: 2224836 - DNA, 25 bp, Homo sapien
ccactcgtccttctcgaaatgcaag

SEQ ID NO: 2224837 - DNA, 25 bp, Homo sapien
taatgactcatcctccgtaggcagg

SEQ ID NO: 2224838 - DNA, 25 bp, Homo sapien
tcagcaccatttacttctagcgcat

SEQ ID NO: 2224839 - DNA, 25 bp, Homo sapien
gcagatgtcacaagagcatgatttt

SEQ ID NO: 2224840 - DNA, 25 bp, Homo sapien
ctgtggtatcttctgctataggcac

SEQ ID NO: 2224841 - DNA, 25 bp, Homo sapien
ttctgcattcacatgacaaaagccc

SEQ ID NO: 2224842 - DNA, 25 bp, Homo sapien
aacctgtatacctaggttttctgca

SEQ ID NO: 2224843 - DNA, 25 bp, Homo sapien
tagcatcgctattaacagcattaag

SEQ ID NO: 2224844 - DNA, 25 bp, Homo sapien
caacagtcaactcaaaacctgtata

SEQ ID NO: 2224845 - DNA, 25 bp, Homo sapien
gcaatcttcaccctcactactgggt

SEQ ID NO: 2224846 - DNA, 25 bp, Homo sapien
gaaacaacgttcagtacaatgcaga

SEQ ID NO: 2224847 - DNA, 25 bp, Homo sapien
aacaagcaacgatattttacctaag

SEQ ID NO: 2224848 - DNA, 25 bp, Homo sapien
tcttctcactaaagaaactagatga

SEQ ID NO: 2224849 - DNA, 25 bp, Homo sapien
ccatagcttcctaacactgggagtt

SEQ ID NO: 2224850 - DNA, 25 bp, Homo sapien
aacaggttacagcagttgccacaaa

SEQ ID NO: 2224851 - DNA, 25 bp, Homo sapien
cacagtaaggtgagtatagctaaca

SEQ ID NO: 2224852 - DNA, 25 bp, Homo sapien
tattagaatgctatcggtgtgtccg

SEQ ID NO: 2224853 - DNA, 25 bp, Homo sapien
aaatggcccaaagtctgctttcagc

SEQ ID NO: 2224854 - DNA, 25 bp, Homo sapien
agcttgccgatgctgtcttctcctt

SEQ ID NO: 2224855 - DNA, 25 bp, Homo sapien
caatgccacataaatctttattgtt

SEQ ID NO: 2224856 - DNA, 25 bp, Homo sapien
cttctaaagaagagtgaaaaagtca

SEQ ID NO: 2224857 - DNA, 25 bp, Homo sapien
atgccacataaatctttattgttgg

SEQ ID NO: 2224858 - DNA, 25 bp, Homo sapien
tttattgttggcttcttctaaagaa

SEQ ID NO: 2224859 - DNA, 25 bp, Homo sapien
ccttcctgctaagagcaatggcttc

SEQ ID NO: 2224860 - DNA, 25 bp, Homo sapien
ttgtccttcctgctaagagcaatgg

SEQ ID NO: 2224861 - DNA, 25 bp, Homo sapien
gtcttgccacactggactgtcactt

SEQ ID NO: 2224862 - DNA, 25 bp, Homo sapien
ttgccacactggactgtcacttaca

SEQ ID NO: 2224863 - DNA, 25 bp, Homo sapien
tagccaggacaatagtcctgaaaag

SEQ ID NO: 2224864 - DNA, 25 bp, Homo sapien
gccaggacaatagtcctgaaaagct

SEQ ID NO: 2224865 - DNA, 25 bp, Homo sapien
cctttagccaggacaatagtcctga

SEQ ID NO: 2224866 - DNA, 25 bp, Homo sapien
tttagccaggacaatagtcctgaaa

SEQ ID NO: 2224867 - DNA, 25 bp, Homo sapien
gatgagcccccaagtacacttgatc

SEQ ID NO: 2224868 - DNA, 25 bp, Homo sapien
tgtatgatgagcccccaagtacact

SEQ ID NO: 2224869 - DNA, 25 bp, Homo sapien
cccaagtacacttgatcccacctac

SEQ ID NO: 2224870 - DNA, 25 bp, Homo sapien
tatgatgagcccccaagtacacttg

SEQ ID NO: 2224871 - DNA, 25 bp, Homo sapien
tggttctggttgggagggattcttg

SEQ ID NO: 2224872 - DNA, 25 bp, Homo sapien
tccattttcatttttgcttctctgt

SEQ ID NO: 2224873 - DNA, 25 bp, Homo sapien
tctggttctggttgggagggattct

SEQ ID NO: 2224874 - DNA, 25 bp, Homo sapien
tttccattttcatttttgcttctct

SEQ ID NO: 2224875 - DNA, 25 bp, Homo sapien
ccagcacacttctgcaagcaattaa

SEQ ID NO: 2224876 - DNA, 25 bp, Homo sapien
cagtccagtgccagtcaggcattgc

SEQ ID NO: 2224877 - DNA, 25 bp, Homo sapien
tgcaagcaattaacacagtccagtg

SEQ ID NO: 2224878 - DNA, 25 bp, Homo sapien
ggcattgctacattcactgacaacc

SEQ ID NO: 2224879 - DNA, 25 bp, Homo sapien
ccaatggttgtagggatagttgcca

SEQ ID NO: 2224880 - DNA, 25 bp, Homo sapien
gtagggatagttgccatttcaaagt

SEQ ID NO: 2224881 - DNA, 25 bp, Homo sapien
ttgtagggatagttgccatttcaaa

SEQ ID NO: 2224882 - DNA, 25 bp, Homo sapien
tggttgtagggatagttgccatttc

SEQ ID NO: 2224883 - DNA, 25 bp, Homo sapien
caatgacatgtaggaaaacggatgc

SEQ ID NO: 2224884 - DNA, 25 bp, Homo sapien
tttattgttcacctcgatacccagg

SEQ ID NO: 2224885 - DNA, 25 bp, Homo sapien
tagggtatcccacttgagtgccaca

SEQ ID NO: 2224886 - DNA, 25 bp, Homo sapien
aaacggatgccaatacaatgtcaag

SEQ ID NO: 2224887 - DNA, 25 bp, Homo sapien
atataggttgtatatacccacacac

SEQ ID NO: 2224888 - DNA, 25 bp, Homo sapien
ggtttccaagcctcttggagaatta

SEQ ID NO: 2224889 - DNA, 25 bp, Homo sapien
catttggtttattctcaaagatcac

SEQ ID NO: 2224890 - DNA, 25 bp, Homo sapien
aatctattggctgacttttacaacc

SEQ ID NO: 2224891 - DNA, 25 bp, Homo sapien
acatgcagaactctccggccacttc

SEQ ID NO: 2224892 - DNA, 25 bp, Homo sapien
aacatgcagaactctccggccactt

SEQ ID NO: 2224893 - DNA, 25 bp, Homo sapien
tcaacatgcagaactctccggccac

SEQ ID NO: 2224894 - DNA, 25 bp, Homo sapien
aatcaacatgcagaactctccggcc

SEQ ID NO: 2224895 - DNA, 25 bp, Homo sapien
gcagacttcaccttgtgaatgaggg

SEQ ID NO: 2224896 - DNA, 25 bp, Homo sapien
gaatgaggggatagtcccacactga

SEQ ID NO: 2224897 - DNA, 25 bp, Homo sapien
ggaagcttggcagaccattctgaga

SEQ ID NO: 2224898 - DNA, 25 bp, Homo sapien
ggagtaactgctgggaacctaatcc

SEQ ID NO: 2224899 - DNA, 25 bp, Homo sapien
gaaggtttgcaagctgacacagatg

SEQ ID NO: 2224900 - DNA, 25 bp, Homo sapien
aaaattaagctaacctactctgcag

SEQ ID NO: 2224901 - DNA, 25 bp, Homo sapien
actccaaaagatgtgagcagtgtgc

SEQ ID NO: 2224902 - DNA, 25 bp, Homo sapien
gatgcctgtgccttagcctatagag

SEQ ID NO: 2224903 - DNA, 25 bp, Homo sapien
tgcaggctgaatgtctacatggtct

SEQ ID NO: 2224904 - DNA, 25 bp, Homo sapien
tcagcatcgaccagatcaaccccta

SEQ ID NO: 2224905 - DNA, 25 bp, Homo sapien
gcaatcagcatcgaccagatcaacc

SEQ ID NO: 2224906 - DNA, 25 bp, Homo sapien
ctcagcaatcagcatcgaccagatc

SEQ ID NO: 2224907 - DNA, 25 bp, Homo sapien
cagcaatcagcatcgaccagatcaa

SEQ ID NO: 2224908 - DNA, 25 bp, Homo sapien
tcaaatggcgataagcactgcgggt

SEQ ID NO: 2224909 - DNA, 25 bp, Homo sapien
tggcgataagcactgcgggtcccag

SEQ ID NO: 2224910 - DNA, 25 bp, Homo sapien
aactcccgcgctgactccggactac

SEQ ID NO: 2224911 - DNA, 25 bp, Homo sapien
cagcccctccctgtaactgccaact

SEQ ID NO: 2224912 - DNA, 25 bp, Homo sapien
tcgacccacgatgtttgtcccaaaa

SEQ ID NO: 2224913 - DNA, 25 bp, Homo sapien
tctcgacccacgatgtttgtcccaa

SEQ ID NO: 2224914 - DNA, 25 bp, Homo sapien
cacgatgtttgtcccaaaactcgcc

SEQ ID NO: 2224915 - DNA, 25 bp, Homo sapien
tcccactctcgacccacgatgtttg

SEQ ID NO: 2224916 - DNA, 25 bp, Homo sapien
ccgtccctattacgatcacatcaaa

SEQ ID NO: 2224917 - DNA, 25 bp, Homo sapien
tcaaactccgaagggagagtatccg

SEQ ID NO: 2224918 - DNA, 25 bp, Homo sapien
tattacgatcacatcaaactccgaa

SEQ ID NO: 2224919 - DNA, 25 bp, Homo sapien
tcacatcaaactccgaagggagagt

SEQ ID NO: 2224920 - DNA, 25 bp, Homo sapien
tacccactggtaatctctattatgg

SEQ ID NO: 2224921 - DNA, 25 bp, Homo sapien
cacagatagcaatccttgtgcacca

SEQ ID NO: 2224922 - DNA, 25 bp, Homo sapien
gcggtggcattcctgaacactgaga

SEQ ID NO: 2224923 - DNA, 25 bp, Homo sapien
tatggaataggaaccatagcatggc

SEQ ID NO: 2224924 - DNA, 25 bp, Homo sapien
gggacgcggaataaacaacgtgaga

SEQ ID NO: 2224925 - DNA, 25 bp, Homo sapien
acgcggaataaacaacgtgagacag

SEQ ID NO: 2224926 - DNA, 25 bp, Homo sapien
caactggcttgttttattggagaag

SEQ ID NO: 2224927 - DNA, 25 bp, Homo sapien
tggagaaggggacgcggaataaaca

SEQ ID NO: 2224928 - DNA, 25 bp, Homo sapien
taaggtgcatggctatgtcactcat

SEQ ID NO: 2224929 - DNA, 25 bp, Homo sapien
aggataaggtgcatggctatgtcac

SEQ ID NO: 2224930 - DNA, 25 bp, Homo sapien
aagtcattgtcgaattgcaatcaga

SEQ ID NO: 2224931 - DNA, 25 bp, Homo sapien
gggatggacaagtcattgtcgaatt

SEQ ID NO: 2224932 - DNA, 25 bp, Homo sapien
ggtcggccatggctcgtcgcttcac

SEQ ID NO: 2224933 - DNA, 25 bp, Homo sapien
atacagcgctggtagccgtctgccg

SEQ ID NO: 2224934 - DNA, 25 bp, Homo sapien
tgcgccatcatacagcgctggtagc

SEQ ID NO: 2224935 - DNA, 25 bp, Homo sapien
atggctcgtcgcttcacatcttcgg

SEQ ID NO: 2224936 - DNA, 25 bp, Homo sapien
gcttccagggcaacggctttccgtg

SEQ ID NO: 2224937 - DNA, 25 bp, Homo sapien
ttcatcgcttccagggcaacggctt

SEQ ID NO: 2224938 - DNA, 25 bp, Homo sapien
cagggcaacggctttccgtgtataa

SEQ ID NO: 2224939 - DNA, 25 bp, Homo sapien
tcgcttccagggcaacggctttccg

SEQ ID NO: 2224940 - DNA, 25 bp, Homo sapien
tgttatagaaatggatggcatcctt

SEQ ID NO: 2224941 - DNA, 25 bp, Homo sapien
gctctgccagagacttgttatagaa

SEQ ID NO: 2224942 - DNA, 25 bp, Homo sapien
gaagtaggagttgccaattcgagca

SEQ ID NO: 2224943 - DNA, 25 bp, Homo sapien
caggcagctcgattgctgtataatt

SEQ ID NO: 2224944 - DNA, 25 bp, Homo sapien
tctccccacttcaatggacttctca

SEQ ID NO: 2224945 - DNA, 25 bp, Homo sapien
gcaatctgtagatagtcttctctgt

SEQ ID NO: 2224946 - DNA, 25 bp, Homo sapien
ctttggcaatctgtagatagtcttc

SEQ ID NO: 2224947 - DNA, 25 bp, Homo sapien
tctgtagatagtcttctctgttttc

SEQ ID NO: 2224948 - DNA, 25 bp, Homo sapien
gggatctcgtagttttgtgcccaga

SEQ ID NO: 2224949 - DNA, 25 bp, Homo sapien
cgatcgacctcaaggaggacactga

SEQ ID NO: 2224950 - DNA, 25 bp, Homo sapien
tgaaggtgttgcaacctgttcctcc

SEQ ID NO: 2224951 - DNA, 25 bp, Homo sapien
tctcctcgtaggttcacttggcttc

SEQ ID NO: 2224952 - DNA, 25 bp, Homo sapien
cttttaggtcgacggtcttgcagcc

SEQ ID NO: 2224953 - DNA, 25 bp, Homo sapien
ttgtcgatgttttccacgcccaggg

SEQ ID NO: 2224954 - DNA, 25 bp, Homo sapien
tcttgcagccgtccttgtaagcctt

SEQ ID NO: 2224955 - DNA, 25 bp, Homo sapien
ttcttggcataggtggcagaacagt

SEQ ID NO: 2224956 - DNA, 25 bp, Homo sapien
cccggaaccccgctgaatcgaatct

SEQ ID NO: 2224957 - DNA, 25 bp, Homo sapien
agtatcggaatactcttcaatatca

SEQ ID NO: 2224958 - DNA, 25 bp, Homo sapien
tcagtatcggaatactcttcaatat

SEQ ID NO: 2224959 - DNA, 25 bp, Homo sapien
ctcagtatcggaatactcttcaata

SEQ ID NO: 2224960 - DNA, 25 bp, Homo sapien
cagtatcggaatactcttcaatatc

SEQ ID NO: 2224961 - DNA, 25 bp, Homo sapien
agcgctcgggcgcagaagggctggg

SEQ ID NO: 2224962 - DNA, 25 bp, Homo sapien
ccattcggagcgctcgggcgcagaa

SEQ ID NO: 2224963 - DNA, 25 bp, Homo sapien
ccagtctccggagggggtgtggtgg

SEQ ID NO: 2224964 - DNA, 25 bp, Homo sapien
ggctgtgggacgctgccagtctccg

SEQ ID NO: 2224965 - DNA, 25 bp, Homo sapien
ctcaatacacatgaggttgccagga

SEQ ID NO: 2224966 - DNA, 25 bp, Homo sapien
tacacatgaggttgccaggaaccat

SEQ ID NO: 2224967 - DNA, 25 bp, Homo sapien
cagccttctgatccactgccttgat

SEQ ID NO: 2224968 - DNA, 25 bp, Homo sapien
agcagccttctgatccactgccttg

SEQ ID NO: 2224969 - DNA, 25 bp, Homo sapien
cttcaagaatttagagccatcttcc

SEQ ID NO: 2224970 - DNA, 25 bp, Homo sapien
caagaatttagagccatcttccagc

SEQ ID NO: 2224971 - DNA, 25 bp, Homo sapien
agaatttagagccatcttccagctt

SEQ ID NO: 2224972 - DNA, 25 bp, Homo sapien
aatttagagccatcttccagcttct

SEQ ID NO: 2224973 - DNA, 25 bp, Homo sapien
tccagtacaggagtatagccagcac

SEQ ID NO: 2224974 - DNA, 25 bp, Homo sapien
gtacaggagtatagccagcactgat

SEQ ID NO: 2224975 - DNA, 25 bp, Homo sapien
ggcaatccagtacaggagtatagcc

SEQ ID NO: 2224976 - DNA, 25 bp, Homo sapien
aatccagtacaggagtatagccagc

SEQ ID NO: 2224977 - DNA, 25 bp, Homo sapien
cctgagcagtgatgccggctgcttt

SEQ ID NO: 2224978 - DNA, 25 bp, Homo sapien
gagcagtgatgccggctgctttcat

SEQ ID NO: 2224979 - DNA, 25 bp, Homo sapien
cagtgatgccggctgctttcattgg

SEQ ID NO: 2224980 - DNA, 25 bp, Homo sapien
ctgagcagtgatgccggctgctttc

SEQ ID NO: 2224981 - DNA, 25 bp, Homo sapien
accagcaatgttgccacaacgaaca

SEQ ID NO: 2224982 - DNA, 25 bp, Homo sapien
tcaccagcaatgttgccacaacgaa

SEQ ID NO: 2224983 - DNA, 25 bp, Homo sapien
cagcaatgttgccacaacgaacatc

SEQ ID NO: 2224984 - DNA, 25 bp, Homo sapien
gtcaccagcaatgttgccacaacga

SEQ ID NO: 2224985 - DNA, 25 bp, Homo sapien
tgaagccctcattgttcccaggaat

SEQ ID NO: 2224986 - DNA, 25 bp, Homo sapien
gaagccctcattgttcccaggaata

SEQ ID NO: 2224987 - DNA, 25 bp, Homo sapien
atattgaagccctcattgttcccag

SEQ ID NO: 2224988 - DNA, 25 bp, Homo sapien
tcttgatattgaagccctcattgtt

SEQ ID NO: 2224989 - DNA, 25 bp, Homo sapien
agcttcctggtgcatttcaacagac

SEQ ID NO: 2224990 - DNA, 25 bp, Homo sapien
aaagcttcctggtgcatttcaacag

SEQ ID NO: 2224991 - DNA, 25 bp, Homo sapien
caaagcttcctggtgcatttcaaca

SEQ ID NO: 2224992 - DNA, 25 bp, Homo sapien
tcaaagcttcctggtgcatttcaac

SEQ ID NO: 2224993 - DNA, 25 bp, Homo sapien
agaacaccagtcttcacttgaccac

SEQ ID NO: 2224994 - DNA, 25 bp, Homo sapien
aaggcacgttagcagttgcctccag

SEQ ID NO: 2224995 - DNA, 25 bp, Homo sapien
cccttgaacgaaggcacgttagcag

SEQ ID NO: 2224996 - DNA, 25 bp, Homo sapien
ccaagtacagtaccaatgccaccaa

SEQ ID NO: 2224997 - DNA, 25 bp, Homo sapien
tgcagactcccattagatcctatca

SEQ ID NO: 2224998 - DNA, 25 bp, Homo sapien
ggttttggtcagcatttgcagactc

SEQ ID NO: 2224999 - DNA, 25 bp, Homo sapien
cattcacctggcatcttaatagagt

SEQ ID NO: 2225000 - DNA, 25 bp, Homo sapien
ctggagaatagtgagggaagccata

SEQ ID NO: 2225001 - DNA, 25 bp, Homo sapien
aagttgccgtatgagttccatttgc

SEQ ID NO: 2225002 - DNA, 25 bp, Homo sapien
tatgccccacaatgggatttggtaa

SEQ ID NO: 2225003 - DNA, 25 bp, Homo sapien
tgtttatgacaaccatcagtcttct

SEQ ID NO: 2225004 - DNA, 25 bp, Homo sapien
tggtaaagccattacaagttgccgt

SEQ ID NO: 2225005 - DNA, 25 bp, Homo sapien
agggcactgaagctttcaccttaat

SEQ ID NO: 2225006 - DNA, 25 bp, Homo sapien
ttcaccttaattctgtggtgatgta

SEQ ID NO: 2225007 - DNA, 25 bp, Homo sapien
gggcactgaagctttcaccttaatt

SEQ ID NO: 2225008 - DNA, 25 bp, Homo sapien
aaaatgcctattatcgtactggtca

SEQ ID NO: 2225009 - DNA, 25 bp, Homo sapien
caattctcctgtgggtacaacgtag

SEQ ID NO: 2225010 - DNA, 25 bp, Homo sapien
ttcctacagccagttgaaaatgcct

SEQ ID NO: 2225011 - DNA, 25 bp, Homo sapien
ccatgaaggtcttagccataaggcc

SEQ ID NO: 2225012 - DNA, 25 bp, Homo sapien
agcatggaaggataattaaggatcc

SEQ ID NO: 2225013 - DNA, 25 bp, Homo sapien
catggaaggataattaaggatccca

SEQ ID NO: 2225014 - DNA, 25 bp, Homo sapien
gcatggaaggataattaaggatccc

SEQ ID NO: 2225015 - DNA, 25 bp, Homo sapien
aaactcttcagtagtgttccacatt

SEQ ID NO: 2225016 - DNA, 25 bp, Homo sapien
taattcaagggcataactgaaactc

SEQ ID NO: 2225017 - DNA, 25 bp, Homo sapien
aggaaaccttgatcaactgccatat

SEQ ID NO: 2225018 - DNA, 25 bp, Homo sapien
gatcaactgccatattaattcaagg

SEQ ID NO: 2225019 - DNA, 25 bp, Homo sapien
ggcaagataaaacaatacaagaagc

SEQ ID NO: 2225020 - DNA, 25 bp, Homo sapien
aggaagtcatggcaagataaaacaa

SEQ ID NO: 2225021 - DNA, 25 bp, Homo sapien
gaagtcatggcaagataaaacaata

SEQ ID NO: 2225022 - DNA, 25 bp, Homo sapien
agtcatggcaagataaaacaataca

SEQ ID NO: 2225023 - DNA, 25 bp, Homo sapien
caaaggcgctctgacttattcaggt

SEQ ID NO: 2225024 - DNA, 25 bp, Homo sapien
tcaaaggcgctctgacttattcagg

SEQ ID NO: 2225025 - DNA, 25 bp, Homo sapien
aaaggcgctctgacttattcaggtt

SEQ ID NO: 2225026 - DNA, 25 bp, Homo sapien
tttgtgtataaggtgctattccagg

SEQ ID NO: 2225027 - DNA, 25 bp, Homo sapien
cggtggtaggcttaaagatgaaatt

SEQ ID NO: 2225028 - DNA, 25 bp, Homo sapien
gaaattagtaagtcccacatagccc

SEQ ID NO: 2225029 - DNA, 25 bp, Homo sapien
gctattccaggaacggtggtaggct

SEQ ID NO: 2225030 - DNA, 25 bp, Homo sapien
ttatagtctaggagtaatggaaact

SEQ ID NO: 2225031 - DNA, 25 bp, Homo sapien
cgtcatggaccttgatgttgtgaaa

SEQ ID NO: 2225032 - DNA, 25 bp, Homo sapien
ggtttggctctctacagcgtcatgg

SEQ ID NO: 2225033 - DNA, 25 bp, Homo sapien
cagagtgaagggcatattatctggg

SEQ ID NO: 2225034 - DNA, 25 bp, Homo sapien
gcatctgtggctatcaaggacttgg

SEQ ID NO: 2225035 - DNA, 25 bp, Homo sapien
tgggcatctcctacactagcatctg

SEQ ID NO: 2225036 - DNA, 25 bp, Homo sapien
catactttttggtactgagtccatc

SEQ ID NO: 2225037 - DNA, 25 bp, Homo sapien
ttcataatgcaatgcaagactgtgg

SEQ ID NO: 2225038 - DNA, 25 bp, Homo sapien
tataagccttctgaactgcgcccat

SEQ ID NO: 2225039 - DNA, 25 bp, Homo sapien
ttttttgcaggttataagccttctg

SEQ ID NO: 2225040 - DNA, 25 bp, Homo sapien
tttgcaggttataagccttctgaac

SEQ ID NO: 2225041 - DNA, 25 bp, Homo sapien
caggttataagccttctgaactgcg

SEQ ID NO: 2225042 - DNA, 25 bp, Homo sapien
aaagctctgacaagcgaggcctgca

SEQ ID NO: 2225043 - DNA, 25 bp, Homo sapien
caaatatctagtgtacatgaaacgg

SEQ ID NO: 2225044 - DNA, 25 bp, Homo sapien
gcaaaattaggccaaccactgctac

SEQ ID NO: 2225045 - DNA, 25 bp, Homo sapien
gaaacggtaatcattgctttccagt

SEQ ID NO: 2225046 - DNA, 25 bp, Homo sapien
taaatattgttaactggccagctgt

SEQ ID NO: 2225047 - DNA, 25 bp, Homo sapien
ggcaagtacagtgccgtgcttattg

SEQ ID NO: 2225048 - DNA, 25 bp, Homo sapien
cgtgcttattgtaggtgtccggtaa

SEQ ID NO: 2225049 - DNA, 25 bp, Homo sapien
gttcacagtatttgtagtagacgag

SEQ ID NO: 2225050 - DNA, 25 bp, Homo sapien
tcttgtcttccttactaatactcat

SEQ ID NO: 2225051 - DNA, 25 bp, Homo sapien
taaatggtactgtgagttggtcctt

SEQ ID NO: 2225052 - DNA, 25 bp, Homo sapien
ccttcagggctttgatatcagtcaa

SEQ ID NO: 2225053 - DNA, 25 bp, Homo sapien
gaatgtgacagacaagatttagccc

SEQ ID NO: 2225054 - DNA, 25 bp, Homo sapien
gatgtagatacttagagacagcttg

SEQ ID NO: 2225055 - DNA, 25 bp, Homo sapien
gtagatacttagagacagcttgcac

SEQ ID NO: 2225056 - DNA, 25 bp, Homo sapien
ttacaagatgtagatacttagagac

SEQ ID NO: 2225057 - DNA, 25 bp, Homo sapien
tacaagatgtagatacttagagaca

SEQ ID NO: 2225058 - DNA, 25 bp, Homo sapien
gctgttgtcccttctgaacatgcat

SEQ ID NO: 2225059 - DNA, 25 bp, Homo sapien
agcattgggctaatagccctttttc

SEQ ID NO: 2225060 - DNA, 25 bp, Homo sapien
gcattgggctaatagccctttttcc

SEQ ID NO: 2225061 - DNA, 25 bp, Homo sapien
cagcattgggctaatagcccttttt

SEQ ID NO: 2225062 - DNA, 25 bp, Homo sapien
tcctggatactctgcactctatggt

SEQ ID NO: 2225063 - DNA, 25 bp, Homo sapien
tagaggcaagctgatcctgccaagt

SEQ ID NO: 2225064 - DNA, 25 bp, Homo sapien
catacaccatgcatttcctggatac

SEQ ID NO: 2225065 - DNA, 25 bp, Homo sapien
gatattccaacattgtagttcccct

SEQ ID NO: 2225066 - DNA, 25 bp, Homo sapien
atgtctctgctctcaagcaagaaac

SEQ ID NO: 2225067 - DNA, 25 bp, Homo sapien
tgcatcaacattactatcactacag

SEQ ID NO: 2225068 - DNA, 25 bp, Homo sapien
tgtctctgctctcaagcaagaaaca

SEQ ID NO: 2225069 - DNA, 25 bp, Homo sapien
tactatcactacagtcatagtccag

SEQ ID NO: 2225070 - DNA, 25 bp, Homo sapien
cattagggttccattataagtgact

SEQ ID NO: 2225071 - DNA, 25 bp, Homo sapien
gtgactagacactattctccttctg

SEQ ID NO: 2225072 - DNA, 25 bp, Homo sapien
taatcctgccttgtaagcttttcca

SEQ ID NO: 2225073 - DNA, 25 bp, Homo sapien
agcttttccataagaagtcattagg

SEQ ID NO: 2225074 - DNA, 25 bp, Homo sapien
ccaaagcaaacatgaaggcagattc

SEQ ID NO: 2225075 - DNA, 25 bp, Homo sapien
aatggctaacatatgatactgcgtc

SEQ ID NO: 2225076 - DNA, 25 bp, Homo sapien
cgcatgttccttaaggttatccaaa

SEQ ID NO: 2225077 - DNA, 25 bp, Homo sapien
atgatactgcgtctggaatttattc

SEQ ID NO: 2225078 - DNA, 25 bp, Homo sapien
gttcttatggttgggtcagcttgcc

SEQ ID NO: 2225079 - DNA, 25 bp, Homo sapien
gatgggtgaactggaattggctctg

SEQ ID NO: 2225080 - DNA, 25 bp, Homo sapien
gtctggataactgctattcactggg

SEQ ID NO: 2225081 - DNA, 25 bp, Homo sapien
gctttctgggcataaccgttcttat

SEQ ID NO: 2225082 - DNA, 25 bp, Homo sapien
ttattcatgtcgttatggagcaaat

SEQ ID NO: 2225083 - DNA, 25 bp, Homo sapien
ttcctactgagcaaattctcccaag

SEQ ID NO: 2225084 - DNA, 25 bp, Homo sapien
tttcctactgagcaaattctcccaa

SEQ ID NO: 2225085 - DNA, 25 bp, Homo sapien
tcatgtcgttatggagcaaataaaa

SEQ ID NO: 2225086 - DNA, 25 bp, Homo sapien
ctggaactcttggttctcgcactga

SEQ ID NO: 2225087 - DNA, 25 bp, Homo sapien
ccctggaactcttggttctcgcact

SEQ ID NO: 2225088 - DNA, 25 bp, Homo sapien
gaccctggaactcttggttctcgca

SEQ ID NO: 2225089 - DNA, 25 bp, Homo sapien
cctggaactcttggttctcgcactg

SEQ ID NO: 2225090 - DNA, 25 bp, Homo sapien
ttttcacaacctctatatctagaaa

SEQ ID NO: 2225091 - DNA, 25 bp, Homo sapien
tacaaattggcccattatgcatgtt

SEQ ID NO: 2225092 - DNA, 25 bp, Homo sapien
ttcctgaatctatgttacaaattgg

SEQ ID NO: 2225093 - DNA, 25 bp, Homo sapien
ccaactggttgatatatgtctttaa

SEQ ID NO: 2225094 - DNA, 25 bp, Homo sapien
gacttaacttcacttggagacctaa

SEQ ID NO: 2225095 - DNA, 25 bp, Homo sapien
cttggagacctaaaaaccctctcag

SEQ ID NO: 2225096 - DNA, 25 bp, Homo sapien
ttttgcaagcttagcactgacaagt

SEQ ID NO: 2225097 - DNA, 25 bp, Homo sapien
tttactccccagtcaaacttcacag

SEQ ID NO: 2225098 - DNA, 25 bp, Homo sapien
tttggattctggtattcttcatggg

SEQ ID NO: 2225099 - DNA, 25 bp, Homo sapien
ttacattaattcatatcgatgtgac

SEQ ID NO: 2225100 - DNA, 25 bp, Homo sapien
agcatttggattctggtattcttca

SEQ ID NO: 2225101 - DNA, 25 bp, Homo sapien
catatcgatgtgacatttcagtaat

SEQ ID NO: 2225102 - DNA, 25 bp, Homo sapien
aaagcaattataggactcttctggt

SEQ ID NO: 2225103 - DNA, 25 bp, Homo sapien
tcccatggatggttaggacttctaa

SEQ ID NO: 2225104 - DNA, 25 bp, Homo sapien
aaagcccacttaattgacccatcag

SEQ ID NO: 2225105 - DNA, 25 bp, Homo sapien
gcactggcttaacatcaatggacat

SEQ ID NO: 2225106 - DNA, 25 bp, Homo sapien
gggataggattgcttgtcatttcaa

SEQ ID NO: 2225107 - DNA, 25 bp, Homo sapien
catttcaatgctaccccttgacaac

SEQ ID NO: 2225108 - DNA, 25 bp, Homo sapien
cttcaagtttactgggataggattg

SEQ ID NO: 2225109 - DNA, 25 bp, Homo sapien
ttgtcatttcaatgctaccccttga

SEQ ID NO: 2225110 - DNA, 25 bp, Homo sapien
cacagtgctcaacatcaaagattcc

SEQ ID NO: 2225111 - DNA, 25 bp, Homo sapien
tcacggaagccttgcaacttttatc

SEQ ID NO: 2225112 - DNA, 25 bp, Homo sapien
ccctcacagtgctcaacatcaaaga

SEQ ID NO: 2225113 - DNA, 25 bp, Homo sapien
aacttttatcgcagagccctcacag

SEQ ID NO: 2225114 - DNA, 25 bp, Homo sapien
tgaacagcagaaaggcctttttcat

SEQ ID NO: 2225115 - DNA, 25 bp, Homo sapien
cagcagaaaggcctttttcatccat

SEQ ID NO: 2225116 - DNA, 25 bp, Homo sapien
aaacaggcagacctgaacagcagaa

SEQ ID NO: 2225117 - DNA, 25 bp, Homo sapien
gaaacaggcagacctgaacagcaga

SEQ ID NO: 2225118 - DNA, 25 bp, Homo sapien
ggcagtcctttcatgcatgctgact

SEQ ID NO: 2225119 - DNA, 25 bp, Homo sapien
tttctcagggtttggcagtcctttc

SEQ ID NO: 2225120 - DNA, 25 bp, Homo sapien
ctttcagttcttcaaaaacactcac

SEQ ID NO: 2225121 - DNA, 25 bp, Homo sapien
actttcagttcttcaaaaacactca

SEQ ID NO: 2225122 - DNA, 25 bp, Homo sapien
tccatagccccaaggcatctggcag

SEQ ID NO: 2225123 - DNA, 25 bp, Homo sapien
gtaaatcctgtcctattctggctag

SEQ ID NO: 2225124 - DNA, 25 bp, Homo sapien
ttcccttgacaggagtaaatcctgt

SEQ ID NO: 2225125 - DNA, 25 bp, Homo sapien
ggctagttgcctgccacttgctcca

SEQ ID NO: 2225126 - DNA, 25 bp, Homo sapien
cagagcacactgtagaatattgttc

SEQ ID NO: 2225127 - DNA, 25 bp, Homo sapien
tcagcgttcagagtattttgtgcat

SEQ ID NO: 2225128 - DNA, 25 bp, Homo sapien
gtagaatattgttctccttgacagg

SEQ ID NO: 2225129 - DNA, 25 bp, Homo sapien
cagagtattttgtgcattgcttatt

SEQ ID NO: 2225130 - DNA, 25 bp, Homo sapien
tgataatttagcaggcccagctgca

SEQ ID NO: 2225131 - DNA, 25 bp, Homo sapien
cctgctttaagttgagctgatgata

SEQ ID NO: 2225132 - DNA, 25 bp, Homo sapien
cactcagcgcatatttttcctgctt

SEQ ID NO: 2225133 - DNA, 25 bp, Homo sapien
tttcactcagcgcatatttttcctg

SEQ ID NO: 2225134 - DNA, 25 bp, Homo sapien
tctttatcattcttaaattgtcact

SEQ ID NO: 2225135 - DNA, 25 bp, Homo sapien
ttcttctctgaataagggccaattt

SEQ ID NO: 2225136 - DNA, 25 bp, Homo sapien
tccagccaagtgctctttatcattc

SEQ ID NO: 2225137 - DNA, 25 bp, Homo sapien
taaattgtcactagttctctgaaac

SEQ ID NO: 2225138 - DNA, 25 bp, Homo sapien
ctttcttgctgtctggaatgttgac

SEQ ID NO: 2225139 - DNA, 25 bp, Homo sapien
atgttgacagtaggccaaacagaca

SEQ ID NO: 2225140 - DNA, 25 bp, Homo sapien
tgccacccactttcttgctgtctgg

SEQ ID NO: 2225141 - DNA, 25 bp, Homo sapien
tggaatgttgacagtaggccaaaca

SEQ ID NO: 2225142 - DNA, 25 bp, Homo sapien
gattttcactgttcctatttggatg

SEQ ID NO: 2225143 - DNA, 25 bp, Homo sapien
gtttgtttctatgtgctgctagatt

SEQ ID NO: 2225144 - DNA, 25 bp, Homo sapien
gactgaagtcttcttttacgttgtg

SEQ ID NO: 2225145 - DNA, 25 bp, Homo sapien
gactgtgtggttttctaggtaaaga

SEQ ID NO: 2225146 - DNA, 25 bp, Homo sapien
ctgtatcaagcaaactaaagtttga

SEQ ID NO: 2225147 - DNA, 25 bp, Homo sapien
gtatcaagcaaactaaagtttgata

SEQ ID NO: 2225148 - DNA, 25 bp, Homo sapien
tgtatcaagcaaactaaagtttgat

SEQ ID NO: 2225149 - DNA, 25 bp, Homo sapien
gatccaggtagttatcaagtagtgt

SEQ ID NO: 2225150 - DNA, 25 bp, Homo sapien
acttcaagatccaggtagttatcaa

SEQ ID NO: 2225151 - DNA, 25 bp, Homo sapien
caggtagttatcaagtagtgtgtta

SEQ ID NO: 2225152 - DNA, 25 bp, Homo sapien
caagatccaggtagttatcaagtag

SEQ ID NO: 2225153 - DNA, 25 bp, Homo sapien
caataggattgaaatagctcaaggt

SEQ ID NO: 2225154 - DNA, 25 bp, Homo sapien
tagctcaaggtgtcaacttctgaca

SEQ ID NO: 2225155 - DNA, 25 bp, Homo sapien
tctaacaataggattgaaatagctc

SEQ ID NO: 2225156 - DNA, 25 bp, Homo sapien
gattgaaatagctcaaggtgtcaac

SEQ ID NO: 2225157 - DNA, 25 bp, Homo sapien
tctgtcacatccacagttccataat

SEQ ID NO: 2225158 - DNA, 25 bp, Homo sapien
tggctctgtcacatccacagttcca

SEQ ID NO: 2225159 - DNA, 25 bp, Homo sapien
gtcacatccacagttccataatttc

SEQ ID NO: 2225160 - DNA, 25 bp, Homo sapien
aatggctctgtcacatccacagttc

SEQ ID NO: 2225161 - DNA, 25 bp, Homo sapien
taagtaaaatatccctgctctaagt

SEQ ID NO: 2225162 - DNA, 25 bp, Homo sapien
agtaaaatatccctgctctaagtag

SEQ ID NO: 2225163 - DNA, 25 bp, Homo sapien
aataagtaaaatatccctgctctaa

SEQ ID NO: 2225164 - DNA, 25 bp, Homo sapien
aaatatccctgctctaagtagttac

SEQ ID NO: 2225165 - DNA, 25 bp, Homo sapien
tatgtgtaatatgtacttggatttc

SEQ ID NO: 2225166 - DNA, 25 bp, Homo sapien
tgtgtaatatgtacttggatttcta

SEQ ID NO: 2225167 - DNA, 25 bp, Homo sapien
gtgtaatatgtacttggatttctag

SEQ ID NO: 2225168 - DNA, 25 bp, Homo sapien
aactcctactgtggtatgtgtaata

SEQ ID NO: 2225169 - DNA, 25 bp, Homo sapien
ctgatggtacactcaaggtggggct

SEQ ID NO: 2225170 - DNA, 25 bp, Homo sapien
ggctccctaggcccctccctcttca

SEQ ID NO: 2225171 - DNA, 25 bp, Homo sapien
gctccctaggcccctccctcttcaa

SEQ ID NO: 2225172 - DNA, 25 bp, Homo sapien
atggtacactcaaggtggggctccc

SEQ ID NO: 2225173 - DNA, 25 bp, Homo sapien
gactgagagtggcaaggacccccca

SEQ ID NO: 2225174 - DNA, 25 bp, Homo sapien
gcaaggaccccccaggagtgagggc

SEQ ID NO: 2225175 - DNA, 25 bp, Homo sapien
gattcagtttggtgagggactgaga

SEQ ID NO: 2225176 - DNA, 25 bp, Homo sapien
tggtgagggactgagagtggcaagg

SEQ ID NO: 2225177 - DNA, 25 bp, Homo sapien
ttactccttggaggccacgtgggcc

SEQ ID NO: 2225178 - DNA, 25 bp, Homo sapien
aattcatcgtcataccaggaaatga

SEQ ID NO: 2225179 - DNA, 25 bp, Homo sapien
tagccaaattcatcgtcataccagg

SEQ ID NO: 2225180 - DNA, 25 bp, Homo sapien
cgtgggccatgaggtccaccacact

SEQ ID NO: 2225181 - DNA, 25 bp, Homo sapien
gaaagatggaggatattggtgtcag

SEQ ID NO: 2225182 - DNA, 25 bp, Homo sapien
aagatggaggatattggtgtcagcc

SEQ ID NO: 2225183 - DNA, 25 bp, Homo sapien
tgagatgtgaagagatggctaggaa

SEQ ID NO: 2225184 - DNA, 25 bp, Homo sapien
aggaaagatggaggatattggtgtc

SEQ ID NO: 2225185 - DNA, 25 bp, Homo sapien
tccccggtagccttctccacagagg

SEQ ID NO: 2225186 - DNA, 25 bp, Homo sapien
ggtccccggtagccttctccacaga

SEQ ID NO: 2225187 - DNA, 25 bp, Homo sapien
cccggtagccttctccacagaggat

SEQ ID NO: 2225188 - DNA, 25 bp, Homo sapien
ccttctccacagaggatactagcat

SEQ ID NO: 2225189 - DNA, 25 bp, Homo sapien
ttgcatgctcgggatgcgagtatcg

SEQ ID NO: 2225190 - DNA, 25 bp, Homo sapien
gtttataaaactcattgcatgctcg

SEQ ID NO: 2225191 - DNA, 25 bp, Homo sapien
ggcctgcattggcaatccaaggaag

SEQ ID NO: 2225192 - DNA, 25 bp, Homo sapien
taagatgtggcctgcattggcaatc

SEQ ID NO: 2225193 - DNA, 25 bp, Homo sapien
gcatcaatggaatatttacccacca

SEQ ID NO: 2225194 - DNA, 25 bp, Homo sapien
aaggcttggataaaggcctgaggcc

SEQ ID NO: 2225195 - DNA, 25 bp, Homo sapien
gcctccctgattccaaccagagcat

SEQ ID NO: 2225196 - DNA, 25 bp, Homo sapien
tcaatgggactcaataaggcttgga

SEQ ID NO: 2225197 - DNA, 25 bp, Homo sapien
ctgctgtacaattgtacccgttacc

SEQ ID NO: 2225198 - DNA, 25 bp, Homo sapien
cccgttacctgctgttttttcacag

SEQ ID NO: 2225199 - DNA, 25 bp, Homo sapien
tgtacaattgtacccgttacctgct

SEQ ID NO: 2225200 - DNA, 25 bp, Homo sapien
caattgtacccgttacctgctgttt

SEQ ID NO: 2225201 - DNA, 25 bp, Homo sapien
ctgcttaagagcctatgcaagaaca

SEQ ID NO: 2225202 - DNA, 25 bp, Homo sapien
tgatgtttattttccatcaaccatt

SEQ ID NO: 2225203 - DNA, 25 bp, Homo sapien
catcaaccatttttccatgctgctt

SEQ ID NO: 2225204 - DNA, 25 bp, Homo sapien
catgctgcttaagagcctatgcaag

SEQ ID NO: 2225205 - DNA, 25 bp, Homo sapien
aagaccagtcagtggttgctcctac

SEQ ID NO: 2225206 - DNA, 25 bp, Homo sapien
ttaagaccagtcagtggttgctcct

SEQ ID NO: 2225207 - DNA, 25 bp, Homo sapien
taagaccagtcagtggttgctccta

SEQ ID NO: 2225208 - DNA, 25 bp, Homo sapien
ccctgaagttcctccctggtcattg

SEQ ID NO: 2225209 - DNA, 25 bp, Homo sapien
acgggaaatggtgccacgcatgcgc

SEQ ID NO: 2225210 - DNA, 25 bp, Homo sapien
gcatgcgcagaacttcccgagccag

SEQ ID NO: 2225211 - DNA, 25 bp, Homo sapien
cctcccatgggtgttcacgggaaat

SEQ ID NO: 2225212 - DNA, 25 bp, Homo sapien
gacctcccatgggtgttcacgggaa

SEQ ID NO: 2225213 - DNA, 25 bp, Homo sapien
agccctggggtcactaaccacaaga

SEQ ID NO: 2225214 - DNA, 25 bp, Homo sapien
ggtcactaaccacaagaagccgtgg

SEQ ID NO: 2225215 - DNA, 25 bp, Homo sapien
cagccctggggtcactaaccacaag

SEQ ID NO: 2225216 - DNA, 25 bp, Homo sapien
ctggggtcactaaccacaagaagcc

SEQ ID NO: 2225217 - DNA, 25 bp, Homo sapien
ggcaacaatagcacgagctgtcagc

SEQ ID NO: 2225218 - DNA, 25 bp, Homo sapien
tcctcttcagatttatgatatagat

SEQ ID NO: 2225219 - DNA, 25 bp, Homo sapien
caatggcaacaatagcacgagctgt

SEQ ID NO: 2225220 - DNA, 25 bp, Homo sapien
cctcttcagatttatgatatagatg

SEQ ID NO: 2225221 - DNA, 25 bp, Homo sapien
ttccttttatagatgtactgttcca

SEQ ID NO: 2225222 - DNA, 25 bp, Homo sapien
tccttttatagatgtactgttccat

SEQ ID NO: 2225223 - DNA, 25 bp, Homo sapien
ctcctccttcatttgcaggacatca

SEQ ID NO: 2225224 - DNA, 25 bp, Homo sapien
ctgcaaggaacttaaggacatcctc

SEQ ID NO: 2225225 - DNA, 25 bp, Homo sapien
gaacttaaggacatcctcctccttc

SEQ ID NO: 2225226 - DNA, 25 bp, Homo sapien
ttgcaggacatcaagggctccggac

SEQ ID NO: 2225227 - DNA, 25 bp, Homo sapien
cgggaatctagaacaaccccctatg

SEQ ID NO: 2225228 - DNA, 25 bp, Homo sapien
catttggcaggcctactctgagtaa

SEQ ID NO: 2225229 - DNA, 25 bp, Homo sapien
taacaagagtgccatgctacaacca

SEQ ID NO: 2225230 - DNA, 25 bp, Homo sapien
cagaagtagtgagcaatctccagct

SEQ ID NO: 2225231 - DNA, 25 bp, Homo sapien
tatggcatgactgctcagcgttgtc

SEQ ID NO: 2225232 - DNA, 25 bp, Homo sapien
ggtgttatctgtgggtgagttcatc

SEQ ID NO: 2225233 - DNA, 25 bp, Homo sapien
tatctgtgggtgagttcatctgtcc

SEQ ID NO: 2225234 - DNA, 25 bp, Homo sapien
cagtggcagcatttgtaggtaggag

SEQ ID NO: 2225235 - DNA, 25 bp, Homo sapien
ttgggggttgcagaattactgccag

SEQ ID NO: 2225236 - DNA, 25 bp, Homo sapien
gtccctcaaggtcttagcttattcc

SEQ ID NO: 2225237 - DNA, 25 bp, Homo sapien
tcaaggtcttagcttattccagcat

SEQ ID NO: 2225238 - DNA, 25 bp, Homo sapien
caacagtccctcaaggtcttagctt

SEQ ID NO: 2225239 - DNA, 25 bp, Homo sapien
cattaacccaacaagttcaagtcca

SEQ ID NO: 2225240 - DNA, 25 bp, Homo sapien
gaggactgatcttaactgattcctg

SEQ ID NO: 2225241 - DNA, 25 bp, Homo sapien
ctgccattagatgaaggataagacg

SEQ ID NO: 2225242 - DNA, 25 bp, Homo sapien
gggactcttacaaggacagagttca

SEQ ID NO: 2225243 - DNA, 25 bp, Homo sapien
aggacagagttcattccctcctcta

SEQ ID NO: 2225244 - DNA, 25 bp, Homo sapien
cctagagaggttccctcagcctgtg

SEQ ID NO: 2225245 - DNA, 25 bp, Homo sapien
gagagagctaagtatgatcacaact

SEQ ID NO: 2225246 - DNA, 25 bp, Homo sapien
agagctaagtatgatcacaacttcc

SEQ ID NO: 2225247 - DNA, 25 bp, Homo sapien
ccatgcctagagaggttccctcagc

SEQ ID NO: 2225248 - DNA, 25 bp, Homo sapien
tcacagatgtagtggctgatgggag

SEQ ID NO: 2225249 - DNA, 25 bp, Homo sapien
cttccatgagggttgtgatattttc

SEQ ID NO: 2225250 - DNA, 25 bp, Homo sapien
ttccatgagggttgtgatattttca

SEQ ID NO: 2225251 - DNA, 25 bp, Homo sapien
gacttccatgagggttgtgatattt

SEQ ID NO: 2225252 - DNA, 25 bp, Homo sapien
tccatgagggttgtgatattttcaa

SEQ ID NO: 2225253 - DNA, 25 bp, Homo sapien
ctaatagagtctcctgggatttaca

SEQ ID NO: 2225254 - DNA, 25 bp, Homo sapien
ggctcttgcgaatttagaacaatca

SEQ ID NO: 2225255 - DNA, 25 bp, Homo sapien
taatcaccaaatgtgatgttagagg

SEQ ID NO: 2225256 - DNA, 25 bp, Homo sapien
aacatcattattatacagaatgtgg

SEQ ID NO: 2225257 - DNA, 25 bp, Homo sapien
aatctagagtccagatgttgtttgg

SEQ ID NO: 2225258 - DNA, 25 bp, Homo sapien
atctagagtccagatgttgtttgga

SEQ ID NO: 2225259 - DNA, 25 bp, Homo sapien
aaatctagagtccagatgttgtttg

SEQ ID NO: 2225260 - DNA, 25 bp, Homo sapien
caaatctagagtccagatgttgttt

SEQ ID NO: 2225261 - DNA, 25 bp, Homo sapien
gcctgcgtcattggcgtatggattc

SEQ ID NO: 2225262 - DNA, 25 bp, Homo sapien
ccaactatgcctgcgtcattggcgt

SEQ ID NO: 2225263 - DNA, 25 bp, Homo sapien
tgtagccttttccaactatgcctgc

SEQ ID NO: 2225264 - DNA, 25 bp, Homo sapien
ttgtagccttttccaactatgcctg

SEQ ID NO: 2225265 - DNA, 25 bp, Homo sapien
aagatctggttgatactggtgacac

SEQ ID NO: 2225266 - DNA, 25 bp, Homo sapien
gtaagctgacagaaatttaagcagc

SEQ ID NO: 2225267 - DNA, 25 bp, Homo sapien
aaaggatactctggtaagatctggt

SEQ ID NO: 2225268 - DNA, 25 bp, Homo sapien
caaataatcacaggagatatgggca

SEQ ID NO: 2225269 - DNA, 25 bp, Homo sapien
cttagttgtgatataggcaacactc

SEQ ID NO: 2225270 - DNA, 25 bp, Homo sapien
tagttgtgatataggcaacactcat

SEQ ID NO: 2225271 - DNA, 25 bp, Homo sapien
ttagttgtgatataggcaacactca

SEQ ID NO: 2225272 - DNA, 25 bp, Homo sapien
tggttccctcttacacttcaggagt

SEQ ID NO: 2225273 - DNA, 25 bp, Homo sapien
gtcttgtaagagttggtcatttctg

SEQ ID NO: 2225274 - DNA, 25 bp, Homo sapien
cataagttacattgattataagtct

SEQ ID NO: 2225275 - DNA, 25 bp, Homo sapien
tcccaaactttgtaggtatgccatc

SEQ ID NO: 2225276 - DNA, 25 bp, Homo sapien
gcagtctggttgcagtaatgaggct

SEQ ID NO: 2225277 - DNA, 25 bp, Homo sapien
tatgttaacgtgaagggatttaaca

SEQ ID NO: 2225278 - DNA, 25 bp, Homo sapien
tccttcaacatcagggacagatatg

SEQ ID NO: 2225279 - DNA, 25 bp, Homo sapien
gaggctacagggtttagttccagga

SEQ ID NO: 2225280 - DNA, 25 bp, Homo sapien
taatcaagttgctgattagtgacat

SEQ ID NO: 2225281 - DNA, 25 bp, Homo sapien
gaagtcaactccataatcaagttgc

SEQ ID NO: 2225282 - DNA, 25 bp, Homo sapien
ttgctgattagtgacatatggttgc

SEQ ID NO: 2225283 - DNA, 25 bp, Homo sapien
tatgtagcctctgaagtcaactcca

SEQ ID NO: 2225284 - DNA, 25 bp, Homo sapien
agcacagaaacgttgaaaatttagg

SEQ ID NO: 2225285 - DNA, 25 bp, Homo sapien
tcataacatacaagcacagaaacgt

SEQ ID NO: 2225286 - DNA, 25 bp, Homo sapien
tcatcggtagttcataacatacaag

SEQ ID NO: 2225287 - DNA, 25 bp, Homo sapien
tacaagcacagaaacgttgaaaatt

SEQ ID NO: 2225288 - DNA, 25 bp, Homo sapien
ctggttcaatttccaagcttctcat

SEQ ID NO: 2225289 - DNA, 25 bp, Homo sapien
aaatactaatatctgaaacatccca

SEQ ID NO: 2225290 - DNA, 25 bp, Homo sapien
atactaatatctgaaacatcccaca

SEQ ID NO: 2225291 - DNA, 25 bp, Homo sapien
aatactaatatctgaaacatcccac

SEQ ID NO: 2225292 - DNA, 25 bp, Homo sapien
aaaatactaatatctgaaacatccc

SEQ ID NO: 2225293 - DNA, 25 bp, Homo sapien
atcttgtagctgactatcttgttcc

SEQ ID NO: 2225294 - DNA, 25 bp, Homo sapien
actatcttgttccagtcgattttgg

SEQ ID NO: 2225295 - DNA, 25 bp, Homo sapien
ggccttgaacgtggtatctgacagt

SEQ ID NO: 2225296 - DNA, 25 bp, Homo sapien
gcaggtaactggaagctgccggcac

SEQ ID NO: 2225297 - DNA, 25 bp, Homo sapien
acagcgaatcctgtacatctttatg

SEQ ID NO: 2225298 - DNA, 25 bp, Homo sapien
tgggcttcattcgaaacagcgaatc

SEQ ID NO: 2225299 - DNA, 25 bp, Homo sapien
tttgggcttcattcgaaacagcgaa

SEQ ID NO: 2225300 - DNA, 25 bp, Homo sapien
agtttgggcttcattcgaaacagcg

SEQ ID NO: 2225301 - DNA, 25 bp, Homo sapien
tgaacgatgccaacttcataatagt

SEQ ID NO: 2225302 - DNA, 25 bp, Homo sapien
caactgaacgatgccaacttcataa

SEQ ID NO: 2225303 - DNA, 25 bp, Homo sapien
actgaacgatgccaacttcataata

SEQ ID NO: 2225304 - DNA, 25 bp, Homo sapien
ctgaacgatgccaacttcataatag

SEQ ID NO: 2225305 - DNA, 25 bp, Homo sapien
ttgatagttttagcatagacagtac

SEQ ID NO: 2225306 - DNA, 25 bp, Homo sapien
gatagttttagcatagacagtacag

SEQ ID NO: 2225307 - DNA, 25 bp, Homo sapien
gttaattgatagttttagcatagac

SEQ ID NO: 2225308 - DNA, 25 bp, Homo sapien
ctgttgttaattgatagttttagca

SEQ ID NO: 2225309 - DNA, 25 bp, Homo sapien
aagcacagtgacaggattctctcca

SEQ ID NO: 2225310 - DNA, 25 bp, Homo sapien
tcttaaagcacagtgacaggattct

SEQ ID NO: 2225311 - DNA, 25 bp, Homo sapien
ataggctcttaaagcacagtgacag

SEQ ID NO: 2225312 - DNA, 25 bp, Homo sapien
taaagcacagtgacaggattctctc

SEQ ID NO: 2225313 - DNA, 25 bp, Homo sapien
cactgtgctgtgtaattaagacctg

SEQ ID NO: 2225314 - DNA, 25 bp, Homo sapien
tgtgctgccccttccgaggagactg

SEQ ID NO: 2225315 - DNA, 25 bp, Homo sapien
aagtagtagccgaacatcattgaat

SEQ ID NO: 2225316 - DNA, 25 bp, Homo sapien
tccgaggagactgtcattattaagt

SEQ ID NO: 2225317 - DNA, 25 bp, Homo sapien
gtggtgaatttagcagccatgccta

SEQ ID NO: 2225318 - DNA, 25 bp, Homo sapien
tccgtcacacaatcatcgaagtcgt

SEQ ID NO: 2225319 - DNA, 25 bp, Homo sapien
gtcacacaatcatcgaagtcgtcca

SEQ ID NO: 2225320 - DNA, 25 bp, Homo sapien
cgtcacacaatcatcgaagtcgtcc

SEQ ID NO: 2225321 - DNA, 25 bp, Homo sapien
tcacacaatcatcgaagtcgtccat

SEQ ID NO: 2225322 - DNA, 25 bp, Homo sapien
tggtagaactttctagggtagaagc

SEQ ID NO: 2225323 - DNA, 25 bp, Homo sapien
ttctgaatcttaggagagaaatctc

SEQ ID NO: 2225324 - DNA, 25 bp, Homo sapien
aacagaagtttggtgaaacagggat

SEQ ID NO: 2225325 - DNA, 25 bp, Homo sapien
gatattctgaatcttaggagagaaa

SEQ ID NO: 2225326 - DNA, 25 bp, Homo sapien
ttcatgagtccataaattttaatcg

SEQ ID NO: 2225327 - DNA, 25 bp, Homo sapien
caggacttagtaaatatgtctgagt

SEQ ID NO: 2225328 - DNA, 25 bp, Homo sapien
catgagtccataaattttaatcgta

SEQ ID NO: 2225329 - DNA, 25 bp, Homo sapien
tctgagttgataatattggtatctt

SEQ ID NO: 2225330 - DNA, 25 bp, Homo sapien
gcctgcaactgtagagatgtgcaca

SEQ ID NO: 2225331 - DNA, 25 bp, Homo sapien
tgctcgcatccacagttagtgcctg

SEQ ID NO: 2225332 - DNA, 25 bp, Homo sapien
gcctgcataaataactgatcctgct

SEQ ID NO: 2225333 - DNA, 25 bp, Homo sapien
gactcctgtaaccagcacgtagctg

SEQ ID NO: 2225334 - DNA, 25 bp, Homo sapien
gaatccacgctaaggtggtctcaga

SEQ ID NO: 2225335 - DNA, 25 bp, Homo sapien
agtgatatggacaaatgaatccacg

SEQ ID NO: 2225336 - DNA, 25 bp, Homo sapien
ggtactgctataaaggtacttggaa

SEQ ID NO: 2225337 - DNA, 25 bp, Homo sapien
ggacaaatgaatccacgctaaggtg

SEQ ID NO: 2225338 - DNA, 25 bp, Homo sapien
tatggagcatgacattgaagataac

SEQ ID NO: 2225339 - DNA, 25 bp, Homo sapien
ttgctttatggagcatgacattgaa

SEQ ID NO: 2225340 - DNA, 25 bp, Homo sapien
ctttatggagcatgacattgaagat

SEQ ID NO: 2225341 - DNA, 25 bp, Homo sapien
gctttatggagcatgacattgaaga

SEQ ID NO: 2225342 - DNA, 25 bp, Homo sapien
cagttagtttgtatttatccacaaa

SEQ ID NO: 2225343 - DNA, 25 bp, Homo sapien
cacaaagtatggctttttcaaaatt

SEQ ID NO: 2225344 - DNA, 25 bp, Homo sapien
tgtatttatccacaaagtatggctt

SEQ ID NO: 2225345 - DNA, 25 bp, Homo sapien
ttatccacaaagtatggctttttca

SEQ ID NO: 2225346 - DNA, 25 bp, Homo sapien
gttttcccagagtcataaacactgg

SEQ ID NO: 2225347 - DNA, 25 bp, Homo sapien
actggcttgtttcaattcaatgggc

SEQ ID NO: 2225348 - DNA, 25 bp, Homo sapien
aatgggcagattttcatgttgaatt

SEQ ID NO: 2225349 - DNA, 25 bp, Homo sapien
ggtgaagctcttcttcaggaactac

SEQ ID NO: 2225350 - DNA, 25 bp, Homo sapien
ttttggtaaatttttagcttcagca

SEQ ID NO: 2225351 - DNA, 25 bp, Homo sapien
atctgacactgggttaggaatccca

SEQ ID NO: 2225352 - DNA, 25 bp, Homo sapien
cagagccttgtcctcccactcaaac

SEQ ID NO: 2225353 - DNA, 25 bp, Homo sapien
cactgggttaggaatcccagagcct

SEQ ID NO: 2225354 - DNA, 25 bp, Homo sapien
ttgtcctcccactcaaaccagcagg

SEQ ID NO: 2225355 - DNA, 25 bp, Homo sapien
attattggtctattcgaggacttct

SEQ ID NO: 2225356 - DNA, 25 bp, Homo sapien
ttggtttgcaggttataaattactg

SEQ ID NO: 2225357 - DNA, 25 bp, Homo sapien
gtttgcaggttataaattactgcct

SEQ ID NO: 2225358 - DNA, 25 bp, Homo sapien
tattattggtctattcgaggacttc

SEQ ID NO: 2225359 - DNA, 25 bp, Homo sapien
ttagcgttccacagatttgccatgt

SEQ ID NO: 2225360 - DNA, 25 bp, Homo sapien
ctttctgttgcaagtttaggagcct

SEQ ID NO: 2225361 - DNA, 25 bp, Homo sapien
tctgttgcaagtttaggagcctaag

SEQ ID NO: 2225362 - DNA, 25 bp, Homo sapien
cagctttcatggactatttctttct

SEQ ID NO: 2225363 - DNA, 25 bp, Homo sapien
aggagcctaagtgttgcttttgtct

SEQ ID NO: 2225364 - DNA, 25 bp, Homo sapien
gttctgtctactagtcctgtcagga

SEQ ID NO: 2225365 - DNA, 25 bp, Homo sapien
tccattgtcccttaaaatcttcagt

SEQ ID NO: 2225366 - DNA, 25 bp, Homo sapien
caaagcaatgggctttcctatttct

SEQ ID NO: 2225367 - DNA, 25 bp, Homo sapien
cagtcttatcttttactatgtaggg

SEQ ID NO: 2225368 - DNA, 25 bp, Homo sapien
actgtggctctcttcagaaactgaa

SEQ ID NO: 2225369 - DNA, 25 bp, Homo sapien
aactgaatcagttacaggtactgcc

SEQ ID NO: 2225370 - DNA, 25 bp, Homo sapien
caggtactgccatatttgaaataac

SEQ ID NO: 2225371 - DNA, 25 bp, Homo sapien
acagccggggtaccagtatattcac

SEQ ID NO: 2225372 - DNA, 25 bp, Homo sapien
accaagtaaaagccaaggagtcagt

SEQ ID NO: 2225373 - DNA, 25 bp, Homo sapien
ccaagtaaaagccaaggagtcagta

SEQ ID NO: 2225374 - DNA, 25 bp, Homo sapien
caagtaaaagccaaggagtcagtaa

SEQ ID NO: 2225375 - DNA, 25 bp, Homo sapien
tttctctcaagtactggcacctcct

SEQ ID NO: 2225376 - DNA, 25 bp, Homo sapien
tccacctaaagcgtcattctcacta

SEQ ID NO: 2225377 - DNA, 25 bp, Homo sapien
ctaataccgtgaaggttgtctggga

SEQ ID NO: 2225378 - DNA, 25 bp, Homo sapien
cactactgaggagatagctattgtt

SEQ ID NO: 2225379 - DNA, 25 bp, Homo sapien
tctgtatcccacaatgatgacagcc

SEQ ID NO: 2225380 - DNA, 25 bp, Homo sapien
ctgctctgtatcccacaatgatgac

SEQ ID NO: 2225381 - DNA, 25 bp, Homo sapien
tccaaactgctctgtatcccacaat

SEQ ID NO: 2225382 - DNA, 25 bp, Homo sapien
gctctgtatcccacaatgatgacag

SEQ ID NO: 2225383 - DNA, 25 bp, Homo sapien
gaatggacctcctcttaagccaggg

SEQ ID NO: 2225384 - DNA, 25 bp, Homo sapien
tactagcccaggaataataaggatc

SEQ ID NO: 2225385 - DNA, 25 bp, Homo sapien
gacatgtctcattatacctctccgg

SEQ ID NO: 2225386 - DNA, 25 bp, Homo sapien
gatggcaatgcctcctgtaaactaa

SEQ ID NO: 2225387 - DNA, 25 bp, Homo sapien
gctatcaccagtcaatctatttgga

SEQ ID NO: 2225388 - DNA, 25 bp, Homo sapien
cacacgtctgtgtgtttacactcat

SEQ ID NO: 2225389 - DNA, 25 bp, Homo sapien
gaatgtttgctacaagttcatgaac

SEQ ID NO: 2225390 - DNA, 25 bp, Homo sapien
cactcatagtgggtcatggtgggta

SEQ ID NO: 2225391 - DNA, 25 bp, Homo sapien
tgtgcgctcatctggcccaaagttt

SEQ ID NO: 2225392 - DNA, 25 bp, Homo sapien
caccatgggtacaactgtgcgctca

SEQ ID NO: 2225393 - DNA, 25 bp, Homo sapien
cagttgttccgtcataagtgctagc

SEQ ID NO: 2225394 - DNA, 25 bp, Homo sapien
ctagccatggagtagagatgctcca

SEQ ID NO: 2225395 - DNA, 25 bp, Homo sapien
tgaatagtattgttgaatggctgct

SEQ ID NO: 2225396 - DNA, 25 bp, Homo sapien
atagtattgttgaatggctgctttt

SEQ ID NO: 2225397 - DNA, 25 bp, Homo sapien
aatagtattgttgaatggctgcttt

SEQ ID NO: 2225398 - DNA, 25 bp, Homo sapien
gaatagtattgttgaatggctgctt

SEQ ID NO: 2225399 - DNA, 25 bp, Homo sapien
gataaggatccagtatcactctgct

SEQ ID NO: 2225400 - DNA, 25 bp, Homo sapien
gatcccctggaaacaacgtaagctg

SEQ ID NO: 2225401 - DNA, 25 bp, Homo sapien
agtagtccctgatatgtctgattca

SEQ ID NO: 2225402 - DNA, 25 bp, Homo sapien
tgagagccggtgtccagtagtccct

SEQ ID NO: 2225403 - DNA, 25 bp, Homo sapien
cactgctctaacatgctgaagaaat

SEQ ID NO: 2225404 - DNA, 25 bp, Homo sapien
tgctctaacatgctgaagaaatcat

SEQ ID NO: 2225405 - DNA, 25 bp, Homo sapien
actgctctaacatgctgaagaaatc

SEQ ID NO: 2225406 - DNA, 25 bp, Homo sapien
tcactgctctaacatgctgaagaaa

SEQ ID NO: 2225407 - DNA, 25 bp, Homo sapien
gagctctccggtccttattatccca

SEQ ID NO: 2225408 - DNA, 25 bp, Homo sapien
gctctccggtccttattatcccaat

SEQ ID NO: 2225409 - DNA, 25 bp, Homo sapien
tctccggtccttattatcccaataa

SEQ ID NO: 2225410 - DNA, 25 bp, Homo sapien
tattatcccaataaacttcatcatc

SEQ ID NO: 2225411 - DNA, 25 bp, Homo sapien
gatgagagtaaaactcctgtttaac

SEQ ID NO: 2225412 - DNA, 25 bp, Homo sapien
tgagagtaaaactcctgtttaacaa

SEQ ID NO: 2225413 - DNA, 25 bp, Homo sapien
cctgtgatgagagtaaaactcctgt

SEQ ID NO: 2225414 - DNA, 25 bp, Homo sapien
tgtgatgagagtaaaactcctgttt

SEQ ID NO: 2225415 - DNA, 25 bp, Homo sapien
cagatgttccataacgctgtctgct

SEQ ID NO: 2225416 - DNA, 25 bp, Homo sapien
tgttccataacgctgtctgcttggg

SEQ ID NO: 2225417 - DNA, 25 bp, Homo sapien
tccgcgtgttttgcggagccgcagt

SEQ ID NO: 2225418 - DNA, 25 bp, Homo sapien
acttggcccgggcagaattaaggca

SEQ ID NO: 2225419 - DNA, 25 bp, Homo sapien
tggacccccgaccagccgcgaggca

SEQ ID NO: 2225420 - DNA, 25 bp, Homo sapien
ctggacccccgaccagccgcgaggc

SEQ ID NO: 2225421 - DNA, 25 bp, Homo sapien
gacccccgaccagccgcgaggcagg

SEQ ID NO: 2225422 - DNA, 25 bp, Homo sapien
ggacccccgaccagccgcgaggcag

SEQ ID NO: 2225423 - DNA, 25 bp, Homo sapien
taggtctcactggacaaaattgggt

SEQ ID NO: 2225424 - DNA, 25 bp, Homo sapien
gaataccaatatagctctaccagag

SEQ ID NO: 2225425 - DNA, 25 bp, Homo sapien
gattaaatcaatcactgggaagaga

SEQ ID NO: 2225426 - DNA, 25 bp, Homo sapien
taccagagagaatcaaggagcaacg

SEQ ID NO: 2225427 - DNA, 25 bp, Homo sapien
ctatcgctgtccaaaagagtttcca

SEQ ID NO: 2225428 - DNA, 25 bp, Homo sapien
ttatcccacttctatcgctgtccaa

SEQ ID NO: 2225429 - DNA, 25 bp, Homo sapien
tcgctgtccaaaagagtttccataa

SEQ ID NO: 2225430 - DNA, 25 bp, Homo sapien
cacttctatcgctgtccaaaagagt

SEQ ID NO: 2225431 - DNA, 25 bp, Homo sapien
tcaagttttcgagagagaatgatga

SEQ ID NO: 2225432 - DNA, 25 bp, Homo sapien
cctcgagcatataaccaggttgttg

SEQ ID NO: 2225433 - DNA, 25 bp, Homo sapien
ctgaaaatcaagttttcgagagaga

SEQ ID NO: 2225434 - DNA, 25 bp, Homo sapien
gaaaaagcttggcatgaagtgcctc

SEQ ID NO: 2225435 - DNA, 25 bp, Homo sapien
taaccagatcttgtgcaaacgctat

SEQ ID NO: 2225436 - DNA, 25 bp, Homo sapien
caatgcctccaagttttatgctaaa

SEQ ID NO: 2225437 - DNA, 25 bp, Homo sapien
cttatgagcataggtagatggaagc

SEQ ID NO: 2225438 - DNA, 25 bp, Homo sapien
ccagtccatatcttgaacactgctg

SEQ ID NO: 2225439 - DNA, 25 bp, Homo sapien
tttggatcacacatgttcatgtggg

SEQ ID NO: 2225440 - DNA, 25 bp, Homo sapien
gatcacacatgttcatgtggggatg

SEQ ID NO: 2225441 - DNA, 25 bp, Homo sapien
ttggatcacacatgttcatgtgggg

SEQ ID NO: 2225442 - DNA, 25 bp, Homo sapien
tggatcacacatgttcatgtgggga

SEQ ID NO: 2225443 - DNA, 25 bp, Homo sapien
catattgtctcagttgaaattggaa

SEQ ID NO: 2225444 - DNA, 25 bp, Homo sapien
ccatatcttgaccatattgtctcag

SEQ ID NO: 2225445 - DNA, 25 bp, Homo sapien
cttgaccatattgtctcagttgaaa

SEQ ID NO: 2225446 - DNA, 25 bp, Homo sapien
gaccatattgtctcagttgaaattg

SEQ ID NO: 2225447 - DNA, 25 bp, Homo sapien
tggcatctgagcatcagcttttgct

SEQ ID NO: 2225448 - DNA, 25 bp, Homo sapien
ctgagtcttcaaacaagtgtgatgt

SEQ ID NO: 2225449 - DNA, 25 bp, Homo sapien
agctctgagtcttcaaacaagtgtg

SEQ ID NO: 2225450 - DNA, 25 bp, Homo sapien
ggcatctgagcatcagcttttgctt

SEQ ID NO: 2225451 - DNA, 25 bp, Homo sapien
ggctgtttgatgcttcacgcacagc

SEQ ID NO: 2225452 - DNA, 25 bp, Homo sapien
gctgtttgatgcttcacgcacagca

SEQ ID NO: 2225453 - DNA, 25 bp, Homo sapien
tcagttacgccctacatggctgttt

SEQ ID NO: 2225454 - DNA, 25 bp, Homo sapien
cagttacgccctacatggctgtttg

SEQ ID NO: 2225455 - DNA, 25 bp, Homo sapien
tttccttgaaatgcgatttggtttc

SEQ ID NO: 2225456 - DNA, 25 bp, Homo sapien
tccttgaaatgcgatttggtttctt

SEQ ID NO: 2225457 - DNA, 25 bp, Homo sapien
tctttccttgaaatgcgatttggtt

SEQ ID NO: 2225458 - DNA, 25 bp, Homo sapien
cttgaaatgcgatttggtttcttct

SEQ ID NO: 2225459 - DNA, 25 bp, Homo sapien
aaggaaaatctggattcaaggtgtc

SEQ ID NO: 2225460 - DNA, 25 bp, Homo sapien
tctggattcaaggtgtcagtaatgg

SEQ ID NO: 2225461 - DNA, 25 bp, Homo sapien
caaggtgtcagtaatggtagtagtc

SEQ ID NO: 2225462 - DNA, 25 bp, Homo sapien
gaaaatctggattcaaggtgtcagt

SEQ ID NO: 2225463 - DNA, 25 bp, Homo sapien
ccaggatgccccaggtactacatgg

SEQ ID NO: 2225464 - DNA, 25 bp, Homo sapien
gtggtacccgctgccagcgccagga

SEQ ID NO: 2225465 - DNA, 25 bp, Homo sapien
atggtgcagtctgcgccactgctgc

SEQ ID NO: 2225466 - DNA, 25 bp, Homo sapien
gtactacatggtgcagtctgcgcca

SEQ ID NO: 2225467 - DNA, 25 bp, Homo sapien
tttgtctgtgttattatctacaagc

SEQ ID NO: 2225468 - DNA, 25 bp, Homo sapien
tgtgttattatctacaagcaaaatc

SEQ ID NO: 2225469 - DNA, 25 bp, Homo sapien
gtctgtgttattatctacaagcaaa

SEQ ID NO: 2225470 - DNA, 25 bp, Homo sapien
ctagtctttgtctgtgttattatct

SEQ ID NO: 2225471 - DNA, 25 bp, Homo sapien
ccagatatcccacattaatctctat

SEQ ID NO: 2225472 - DNA, 25 bp, Homo sapien
cccacattaatctctattactacca

SEQ ID NO: 2225473 - DNA, 25 bp, Homo sapien
cacattaatctctattactaccagt

SEQ ID NO: 2225474 - DNA, 25 bp, Homo sapien
gatatcccacattaatctctattac

SEQ ID NO: 2225475 - DNA, 25 bp, Homo sapien
tataggtcctatgggtaactagtac

SEQ ID NO: 2225476 - DNA, 25 bp, Homo sapien
cgcctggcccagattactgtttatt

SEQ ID NO: 2225477 - DNA, 25 bp, Homo sapien
tcttctcccatggatggagaccaca

SEQ ID NO: 2225478 - DNA, 25 bp, Homo sapien
gtagaaaccgttctgataccattgc

SEQ ID NO: 2225479 - DNA, 25 bp, Homo sapien
taatattgttgatgcattcttgatt

SEQ ID NO: 2225480 - DNA, 25 bp, Homo sapien
tataatattgttgatgcattcttga

SEQ ID NO: 2225481 - DNA, 25 bp, Homo sapien
atattgttgatgcattcttgatttg

SEQ ID NO: 2225482 - DNA, 25 bp, Homo sapien
ataatattgttgatgcattcttgat

SEQ ID NO: 2225483 - DNA, 25 bp, Homo sapien
aatcatgatgatggctgattttctc

SEQ ID NO: 2225484 - DNA, 25 bp, Homo sapien
actgagtacggggatgtgacccaca

SEQ ID NO: 2225485 - DNA, 25 bp, Homo sapien
gtgacccacatcaaatgtaatcatg

SEQ ID NO: 2225486 - DNA, 25 bp, Homo sapien
gcattgttttcactgagtacgggga

SEQ ID NO: 2225487 - DNA, 25 bp, Homo sapien
ctctgttcaaagcccacctgaatgt

SEQ ID NO: 2225488 - DNA, 25 bp, Homo sapien
attcagttctctgttcaaagcccac

SEQ ID NO: 2225489 - DNA, 25 bp, Homo sapien
ttcagttctctgttcaaagcccacc

SEQ ID NO: 2225490 - DNA, 25 bp, Homo sapien
tcagttctctgttcaaagcccacct

SEQ ID NO: 2225491 - DNA, 25 bp, Homo sapien
tacagcaatgtcctatgcccaggaa

SEQ ID NO: 2225492 - DNA, 25 bp, Homo sapien
aaagctgtaagagcacagaagcctc

SEQ ID NO: 2225493 - DNA, 25 bp, Homo sapien
tagtaggccccagtacagcaatgtc

SEQ ID NO: 2225494 - DNA, 25 bp, Homo sapien
ctagctatagtaggccccagtacag

SEQ ID NO: 2225495 - DNA, 25 bp, Homo sapien
tagatatgaaagaatgtcccggaga

SEQ ID NO: 2225496 - DNA, 25 bp, Homo sapien
agatatgaaagaatgtcccggagag

SEQ ID NO: 2225497 - DNA, 25 bp, Homo sapien
ctagatatgaaagaatgtcccggag

SEQ ID NO: 2225498 - DNA, 25 bp, Homo sapien
ctcccttaaatgctaaatgttcaaa

SEQ ID NO: 2225499 - DNA, 25 bp, Homo sapien
aggatctctggtcctggttccctgg

SEQ ID NO: 2225500 - DNA, 25 bp, Homo sapien
ggttccctgggctctgaagagttta

SEQ ID NO: 2225501 - DNA, 25 bp, Homo sapien
tttcaacattagtctcaggatctct

SEQ ID NO: 2225502 - DNA, 25 bp, Homo sapien
cattagtctcaggatctctggtcct

SEQ ID NO: 2225503 - DNA, 25 bp, Homo sapien
catggttttcactaatgtcaaattg

SEQ ID NO: 2225504 - DNA, 25 bp, Homo sapien
ttttcactaatgtcaaattgaatgg

SEQ ID NO: 2225505 - DNA, 25 bp, Homo sapien
ctaatgtcaaattgaatggtaagat

SEQ ID NO: 2225506 - DNA, 25 bp, Homo sapien
aatgtcaaattgaatggtaagatgt

SEQ ID NO: 2225507 - DNA, 25 bp, Homo sapien
agacaccaggagggttggccagtgt

SEQ ID NO: 2225508 - DNA, 25 bp, Homo sapien
ttttccgtgacagacaccaggaggg

SEQ ID NO: 2225509 - DNA, 25 bp, Homo sapien
caacagtaacagaactttgtagttt

SEQ ID NO: 2225510 - DNA, 25 bp, Homo sapien
cagtaacagaactttgtagttttct

SEQ ID NO: 2225511 - DNA, 25 bp, Homo sapien
agtaacagaactttgtagttttctg

SEQ ID NO: 2225512 - DNA, 25 bp, Homo sapien
cacaacagtaacagaactttgtagt

SEQ ID NO: 2225513 - DNA, 25 bp, Homo sapien
ggagtgtgctggatgtctctataat

SEQ ID NO: 2225514 - DNA, 25 bp, Homo sapien
tggagtgtgctggatgtctctataa

SEQ ID NO: 2225515 - DNA, 25 bp, Homo sapien
aatggagtgtgctggatgtctctat

SEQ ID NO: 2225516 - DNA, 25 bp, Homo sapien
gagtgtgctggatgtctctataatt

SEQ ID NO: 2225517 - DNA, 25 bp, Homo sapien
tttgatagagaataagcatttacat

SEQ ID NO: 2225518 - DNA, 25 bp, Homo sapien
atttcaggtatcagtcatttatcaa

SEQ ID NO: 2225519 - DNA, 25 bp, Homo sapien
tgatagagaataagcatttacattt

SEQ ID NO: 2225520 - DNA, 25 bp, Homo sapien
caggtatcagtcatttatcaatgtg

SEQ ID NO: 2225521 - DNA, 25 bp, Homo sapien
aaattcaggctaaggtggtctcatc

SEQ ID NO: 2225522 - DNA, 25 bp, Homo sapien
ggtactcctataaagatccctgaaa

SEQ ID NO: 2225523 - DNA, 25 bp, Homo sapien
ctttgaaaacttcgcagcttggtga

SEQ ID NO: 2225524 - DNA, 25 bp, Homo sapien
gggacttaatgggaactggagcata

SEQ ID NO: 2225525 - DNA, 25 bp, Homo sapien
tctgatcaagtgctgtccaattggg

SEQ ID NO: 2225526 - DNA, 25 bp, Homo sapien
ggcctgatcatcctcctttgactga

SEQ ID NO: 2225527 - DNA, 25 bp, Homo sapien
tccaattgggcagggagactctaca

SEQ ID NO: 2225528 - DNA, 25 bp, Homo sapien
gacacacaggcatctcatattcggg

SEQ ID NO: 2225529 - DNA, 25 bp, Homo sapien
gcctgagtctggaacattcccctct

SEQ ID NO: 2225530 - DNA, 25 bp, Homo sapien
atgtgacatacttcctgtcttttag

SEQ ID NO: 2225531 - DNA, 25 bp, Homo sapien
tttagattgttcagtcaacggcctg

SEQ ID NO: 2225532 - DNA, 25 bp, Homo sapien
tcccctctatggaagctaggaccaa

SEQ ID NO: 2225533 - DNA, 25 bp, Homo sapien
cttctagagcatttgtaaagggtat

SEQ ID NO: 2225534 - DNA, 25 bp, Homo sapien
cacaatacagatcttctagagcatt

SEQ ID NO: 2225535 - DNA, 25 bp, Homo sapien
agagcatttgtaaagggtattttgg

SEQ ID NO: 2225536 - DNA, 25 bp, Homo sapien
attctacacaatacagatcttctag

SEQ ID NO: 2225537 - DNA, 25 bp, Homo sapien
tgaactatttgatgtgggatacata

SEQ ID NO: 2225538 - DNA, 25 bp, Homo sapien
gctgaactatttgatgtgggataca

SEQ ID NO: 2225539 - DNA, 25 bp, Homo sapien
ctgaactatttgatgtgggatacat

SEQ ID NO: 2225540 - DNA, 25 bp, Homo sapien
gaactatttgatgtgggatacatac

SEQ ID NO: 2225541 - DNA, 25 bp, Homo sapien
tggatgctttataaccaagttgtaa

SEQ ID NO: 2225542 - DNA, 25 bp, Homo sapien
ggtcccgttcctgtagcagcttcat

SEQ ID NO: 2225543 - DNA, 25 bp, Homo sapien
tattaggtcccgttcctgtagcagc

SEQ ID NO: 2225544 - DNA, 25 bp, Homo sapien
tttattaggtcccgttcctgtagca

SEQ ID NO: 2225545 - DNA, 25 bp, Homo sapien
ttaggtcccgttcctgtagcagctt

SEQ ID NO: 2225546 - DNA, 25 bp, Homo sapien
aaattctcgacatcgaggcattcct

SEQ ID NO: 2225547 - DNA, 25 bp, Homo sapien
gcaaaacataatctggctccttttc

SEQ ID NO: 2225548 - DNA, 25 bp, Homo sapien
tctcgacatcgaggcattcctcttt

SEQ ID NO: 2225549 - DNA, 25 bp, Homo sapien
cctctttctgaaagcaaaacataat

SEQ ID NO: 2225550 - DNA, 25 bp, Homo sapien
ctgttgaatttgcgccaggcagcta

SEQ ID NO: 2225551 - DNA, 25 bp, Homo sapien
gcgccaggcagctaatagggttcat

SEQ ID NO: 2225552 - DNA, 25 bp, Homo sapien
tttgcgccaggcagctaatagggtt

SEQ ID NO: 2225553 - DNA, 25 bp, Homo sapien
gaatttgcgccaggcagctaatagg

SEQ ID NO: 2225554 - DNA, 25 bp, Homo sapien
tcctactgacactcgagtaacaaag

SEQ ID NO: 2225555 - DNA, 25 bp, Homo sapien
ctgacactcgagtaacaaagctttt

SEQ ID NO: 2225556 - DNA, 25 bp, Homo sapien
tactgacactcgagtaacaaagctt

SEQ ID NO: 2225557 - DNA, 25 bp, Homo sapien
cgcttcttggagagttttttgctat

SEQ ID NO: 2225558 - DNA, 25 bp, Homo sapien
atgtggtggtccactttctttaata

SEQ ID NO: 2225559 - DNA, 25 bp, Homo sapien
tggtccactttctttaataacctca

SEQ ID NO: 2225560 - DNA, 25 bp, Homo sapien
tgtggtggtccactttctttaataa

SEQ ID NO: 2225561 - DNA, 25 bp, Homo sapien
tccactttctttaataacctcagaa

SEQ ID NO: 2225562 - DNA, 25 bp, Homo sapien
gttcaatctgcagtgcttggatgtc

SEQ ID NO: 2225563 - DNA, 25 bp, Homo sapien
ttcaatctgcagtgcttggatgtct

SEQ ID NO: 2225564 - DNA, 25 bp, Homo sapien
ggttcaatctgcagtgcttggatgt

SEQ ID NO: 2225565 - DNA, 25 bp, Homo sapien
ttggatctaatggcctgtggatggc

SEQ ID NO: 2225566 - DNA, 25 bp, Homo sapien
ctgattatacatgacttgaaagttg

SEQ ID NO: 2225567 - DNA, 25 bp, Homo sapien
gctctattatttgggaatggctttg

SEQ ID NO: 2225568 - DNA, 25 bp, Homo sapien
tgaaagttgtaattagctctattat

SEQ ID NO: 2225569 - DNA, 25 bp, Homo sapien
tcggattcccatgtctgctcaccaa

SEQ ID NO: 2225570 - DNA, 25 bp, Homo sapien
cggattcccatgtctgctcaccaag

SEQ ID NO: 2225571 - DNA, 25 bp, Homo sapien
ggattcccatgtctgctcaccaaga

SEQ ID NO: 2225572 - DNA, 25 bp, Homo sapien
attcccatgtctgctcaccaagact

SEQ ID NO: 2225573 - DNA, 25 bp, Homo sapien
tttgtcgttgttattcaccagcaag

SEQ ID NO: 2225574 - DNA, 25 bp, Homo sapien
cttctctttgtattgcatacagcat

SEQ ID NO: 2225575 - DNA, 25 bp, Homo sapien
tatgagctgatttactgtaagggac

SEQ ID NO: 2225576 - DNA, 25 bp, Homo sapien
tacataagaatatgagctgatttac

SEQ ID NO: 2225577 - DNA, 25 bp, Homo sapien
taagcagcaaaatagacctcataca

SEQ ID NO: 2225578 - DNA, 25 bp, Homo sapien
gacatgactaatccagggtccatct

SEQ ID NO: 2225579 - DNA, 25 bp, Homo sapien
cattcctcctgtgatagccaaattt

SEQ ID NO: 2225580 - DNA, 25 bp, Homo sapien
aatttctcttgtgttggaggtttgc

SEQ ID NO: 2225581 - DNA, 25 bp, Homo sapien
tgctttcctttatccgtgcagtgaa

SEQ ID NO: 2225582 - DNA, 25 bp, Homo sapien
taataactgaggatgcaatcactga

SEQ ID NO: 2225583 - DNA, 25 bp, Homo sapien
tcatcttgggttaggccaagctgat

SEQ ID NO: 2225584 - DNA, 25 bp, Homo sapien
cttgggttaggccaagctgatgtat

SEQ ID NO: 2225585 - DNA, 25 bp, Homo sapien
tgggttaggccaagctgatgtatga

SEQ ID NO: 2225586 - DNA, 25 bp, Homo sapien
gggttaggccaagctgatgtatgaa

SEQ ID NO: 2225587 - DNA, 25 bp, Homo sapien
gtcatctgagcatgaatgtggaatg

SEQ ID NO: 2225588 - DNA, 25 bp, Homo sapien
caccactactgctatattcttcatt

SEQ ID NO: 2225589 - DNA, 25 bp, Homo sapien
gtttggcatcactcagatttccata

SEQ ID NO: 2225590 - DNA, 25 bp, Homo sapien
gaatcctttacgcttctttcactca

SEQ ID NO: 2225591 - DNA, 25 bp, Homo sapien
gcagacctaccttcccacagcagtc

SEQ ID NO: 2225592 - DNA, 25 bp, Homo sapien
tcttcgcagacctaccttcccacag

SEQ ID NO: 2225593 - DNA, 25 bp, Homo sapien
ccacatttcactcttcgcagaccta

SEQ ID NO: 2225594 - DNA, 25 bp, Homo sapien
catttcactcttcgcagacctacct

SEQ ID NO: 2225595 - DNA, 25 bp, Homo sapien
cttttttgatcaagtttatgaattt

SEQ ID NO: 2225596 - DNA, 25 bp, Homo sapien
atgaatttttaatgatcttgctcca

SEQ ID NO: 2225597 - DNA, 25 bp, Homo sapien
tttttaatgatcttgctccacccag

SEQ ID NO: 2225598 - DNA, 25 bp, Homo sapien
atcttgctccacccagaacagtcat

SEQ ID NO: 2225599 - DNA, 25 bp, Homo sapien
taagtctcttgaggatatattgtca

SEQ ID NO: 2225600 - DNA, 25 bp, Homo sapien
ttcaaaattctggaacctggaatat

SEQ ID NO: 2225601 - DNA, 25 bp, Homo sapien
tagttcacagactctttcaaaattc

SEQ ID NO: 2225602 - DNA, 25 bp, Homo sapien
caaaattctggaacctggaatataa

SEQ ID NO: 2225603 - DNA, 25 bp, Homo sapien
ataattaggcaccaaagctcttgca

SEQ ID NO: 2225604 - DNA, 25 bp, Homo sapien
tagacataattaggcaccaaagctc

SEQ ID NO: 2225605 - DNA, 25 bp, Homo sapien
gatgtggctcttgtgtccaccactc

SEQ ID NO: 2225606 - DNA, 25 bp, Homo sapien
tgctagcactgatgtggctcttgtg

SEQ ID NO: 2225607 - DNA, 25 bp, Homo sapien
tctcaggctgtgtacctggttttca

SEQ ID NO: 2225608 - DNA, 25 bp, Homo sapien
tcacattctattctcaggctgtgta

SEQ ID NO: 2225609 - DNA, 25 bp, Homo sapien
gctgtgtacctggttttcataaatt

SEQ ID NO: 2225610 - DNA, 25 bp, Homo sapien
ttcacattctattctcaggctgtgt

SEQ ID NO: 2225611 - DNA, 25 bp, Homo sapien
tcgtcatcttctagaccccagctaa

SEQ ID NO: 2225612 - DNA, 25 bp, Homo sapien
gtcttcgtcatcttctagaccccag

SEQ ID NO: 2225613 - DNA, 25 bp, Homo sapien
tcttctagaccccagctaactgtgc

SEQ ID NO: 2225614 - DNA, 25 bp, Homo sapien
tagaccccagctaactgtgccatct

SEQ ID NO: 2225615 - DNA, 25 bp, Homo sapien
acaatgcttatttcaagttgcctga

SEQ ID NO: 2225616 - DNA, 25 bp, Homo sapien
tcaagttgcctgagtttattgacaa

SEQ ID NO: 2225617 - DNA, 25 bp, Homo sapien
cctgagtttattgacaatgctgggc

SEQ ID NO: 2225618 - DNA, 25 bp, Homo sapien
acaatgctgggctgttgtgccacct

SEQ ID NO: 2225619 - DNA, 25 bp, Homo sapien
taatcgatatacttctgggttttgt

SEQ ID NO: 2225620 - DNA, 25 bp, Homo sapien
ttcagcgtgaacatcatagccatca

SEQ ID NO: 2225621 - DNA, 25 bp, Homo sapien
tcaggaacaaccttagcagttttcc

SEQ ID NO: 2225622 - DNA, 25 bp, Homo sapien
caggaacaaccttagcagttttcca

SEQ ID NO: 2225623 - DNA, 25 bp, Homo sapien
acaaccttcagcgtgaacatcatag

SEQ ID NO: 2225624 - DNA, 25 bp, Homo sapien
aatttcttactggatcaatcttgtg

SEQ ID NO: 2225625 - DNA, 25 bp, Homo sapien
ttctgattggtagggttcttattac

SEQ ID NO: 2225626 - DNA, 25 bp, Homo sapien
gggaggcattcctctaacacacttt

SEQ ID NO: 2225627 - DNA, 25 bp, Homo sapien
tgtgagactgtgtatttctaaggat

SEQ ID NO: 2225628 - DNA, 25 bp, Homo sapien
cttggcaaacagacatgggcagttt

SEQ ID NO: 2225629 - DNA, 25 bp, Homo sapien
tcttggcaaacagacatgggcagtt

SEQ ID NO: 2225630 - DNA, 25 bp, Homo sapien
ttcttggcaaacagacatgggcagt

SEQ ID NO: 2225631 - DNA, 25 bp, Homo sapien
tttcttggcaaacagacatgggcag

SEQ ID NO: 2225632 - DNA, 25 bp, Homo sapien
ttttacatcgttgtcatgtttgcac

SEQ ID NO: 2225633 - DNA, 25 bp, Homo sapien
cattttacatcgttgtcatgtttgc

SEQ ID NO: 2225634 - DNA, 25 bp, Homo sapien
tttacatcgttgtcatgtttgcaca

SEQ ID NO: 2225635 - DNA, 25 bp, Homo sapien
tcattttacatcgttgtcatgtttg

SEQ ID NO: 2225636 - DNA, 25 bp, Homo sapien
gacacttagaactttgtactagtaa

SEQ ID NO: 2225637 - DNA, 25 bp, Homo sapien
tagtaaaggtgacatgatatggcca

SEQ ID NO: 2225638 - DNA, 25 bp, Homo sapien
caccaagtatgacggcgaacttctt

SEQ ID NO: 2225639 - DNA, 25 bp, Homo sapien
tcaaaacatccaccaagtatgacgg

SEQ ID NO: 2225640 - DNA, 25 bp, Homo sapien
tcaaaatgattcaggcagttaagct

SEQ ID NO: 2225641 - DNA, 25 bp, Homo sapien
gattcaggcagttaagctgaattga

SEQ ID NO: 2225642 - DNA, 25 bp, Homo sapien
gcagttaagctgaattgagatcagt

SEQ ID NO: 2225643 - DNA, 25 bp, Homo sapien
tgaattgagatcagttctgtctccc

SEQ ID NO: 2225644 - DNA, 25 bp, Homo sapien
tgttatctttgccagggggcattct

SEQ ID NO: 2225645 - DNA, 25 bp, Homo sapien
catgttatctttgccagggggcatt

SEQ ID NO: 2225646 - DNA, 25 bp, Homo sapien
ttatctttgccagggggcattctaa

SEQ ID NO: 2225647 - DNA, 25 bp, Homo sapien
tgcatgttatctttgccagggggca

SEQ ID NO: 2225648 - DNA, 25 bp, Homo sapien
cattggttcctttagaatatatact

SEQ ID NO: 2225649 - DNA, 25 bp, Homo sapien
gctcagtactaaacttctgcagtag

SEQ ID NO: 2225650 - DNA, 25 bp, Homo sapien
aactgctgaagtttacttctagtct

SEQ ID NO: 2225651 - DNA, 25 bp, Homo sapien
ggtaacccagtgtcatagaagtcac

SEQ ID NO: 2225652 - DNA, 25 bp, Homo sapien
tgaagtttacttctagtctgaaagg

SEQ ID NO: 2225653 - DNA, 25 bp, Homo sapien
ttggggcctcaaactccaaagccat

SEQ ID NO: 2225654 - DNA, 25 bp, Homo sapien
tttctcatttttgttacttccacaa

SEQ ID NO: 2225655 - DNA, 25 bp, Homo sapien
tttggggcctcaaactccaaagcca

SEQ ID NO: 2225656 - DNA, 25 bp, Homo sapien
catttttgttacttccacaattatt

SEQ ID NO: 2225657 - DNA, 25 bp, Homo sapien
agaaaccgaggactttttggctgct

SEQ ID NO: 2225658 - DNA, 25 bp, Homo sapien
tgcatcaggtaggagcttgaggctt

SEQ ID NO: 2225659 - DNA, 25 bp, Homo sapien
gcagctgtcttagaaaccgaggact

SEQ ID NO: 2225660 - DNA, 25 bp, Homo sapien
ccttttagtcaacttggcagctgtc

SEQ ID NO: 2225661 - DNA, 25 bp, Homo sapien
tgattaaataccagaacaggtagct

SEQ ID NO: 2225662 - DNA, 25 bp, Homo sapien
ttgattaaataccagaacaggtagc

SEQ ID NO: 2225663 - DNA, 25 bp, Homo sapien
tttgattaaataccagaacaggtag

SEQ ID NO: 2225664 - DNA, 25 bp, Homo sapien
gattaaataccagaacaggtagctc

SEQ ID NO: 2225665 - DNA, 25 bp, Homo sapien
tgagttccagtgaggcaacttcttt

SEQ ID NO: 2225666 - DNA, 25 bp, Homo sapien
gagttccagtgaggcaacttctttc

SEQ ID NO: 2225667 - DNA, 25 bp, Homo sapien
ttgagttccagtgaggcaacttctt

SEQ ID NO: 2225668 - DNA, 25 bp, Homo sapien
gtatgaggacaagtgacactagtac

SEQ ID NO: 2225669 - DNA, 25 bp, Homo sapien
ttatgtatgaggacaagtgacacta

SEQ ID NO: 2225670 - DNA, 25 bp, Homo sapien
tatgtatgaggacaagtgacactag

SEQ ID NO: 2225671 - DNA, 25 bp, Homo sapien
tgtatgaggacaagtgacactagta

SEQ ID NO: 2225672 - DNA, 25 bp, Homo sapien
ggatggggcaccaatatttgctgtt

SEQ ID NO: 2225673 - DNA, 25 bp, Homo sapien
atttcccactggacaatgtgttttg

SEQ ID NO: 2225674 - DNA, 25 bp, Homo sapien
tttgcactgaattgaggatggggca

SEQ ID NO: 2225675 - DNA, 25 bp, Homo sapien
aaagttttcggtacttctcaggcat

SEQ ID NO: 2225676 - DNA, 25 bp, Homo sapien
tatttgtgatagatgtttttctgat

SEQ ID NO: 2225677 - DNA, 25 bp, Homo sapien
tatctaccaactgtaatcataggga

SEQ ID NO: 2225678 - DNA, 25 bp, Homo sapien
caactgtaatcatagggacttgttc

SEQ ID NO: 2225679 - DNA, 25 bp, Homo sapien
gtttttctgatatctaccaactgta

SEQ ID NO: 2225680 - DNA, 25 bp, Homo sapien
tctccctgcaaataaatggctgcag

SEQ ID NO: 2225681 - DNA, 25 bp, Homo sapien
ggcaaacctcaggatgcagtctttc

SEQ ID NO: 2225682 - DNA, 25 bp, Homo sapien
tgtgaagagcctgtaagaaattctg

SEQ ID NO: 2225683 - DNA, 25 bp, Homo sapien
gaaattctgacaaggcaaacctcag

SEQ ID NO: 2225684 - DNA, 25 bp, Homo sapien
gtctctgtgtctgatattgcactgg

SEQ ID NO: 2225685 - DNA, 25 bp, Homo sapien
tctgtgtctgatattgcactggcca

SEQ ID NO: 2225686 - DNA, 25 bp, Homo sapien
ctctgtgtctgatattgcactggcc

SEQ ID NO: 2225687 - DNA, 25 bp, Homo sapien
ctgtgtctgatattgcactggccat

SEQ ID NO: 2225688 - DNA, 25 bp, Homo sapien
gtgcctctgatatcctatcctgctg

SEQ ID NO: 2225689 - DNA, 25 bp, Homo sapien
tgatatcctatcctgctgactgtgc

SEQ ID NO: 2225690 - DNA, 25 bp, Homo sapien
gtgcccttcatatgtgcctctgata

SEQ ID NO: 2225691 - DNA, 25 bp, Homo sapien
tcatatgtgcctctgatatcctatc

SEQ ID NO: 2225692 - DNA, 25 bp, Homo sapien
ttattaactgcagataagctgtgtc

SEQ ID NO: 2225693 - DNA, 25 bp, Homo sapien
tgccggttattaactgcagataagc

SEQ ID NO: 2225694 - DNA, 25 bp, Homo sapien
ctttctctgccggttattaactgca

SEQ ID NO: 2225695 - DNA, 25 bp, Homo sapien
taagttgatgttcttatatccttct

SEQ ID NO: 2225696 - DNA, 25 bp, Homo sapien
tcgctcaaacgccactaggtggcct

SEQ ID NO: 2225697 - DNA, 25 bp, Homo sapien
aaaatcttgctatttgtcccgtctc

SEQ ID NO: 2225698 - DNA, 25 bp, Homo sapien
tattgggccggcctcttcactttaa

SEQ ID NO: 2225699 - DNA, 25 bp, Homo sapien
ctcccgagggcctatattgggccgg

SEQ ID NO: 2225700 - DNA, 25 bp, Homo sapien
ttactgttgaagtttcttcctagag

SEQ ID NO: 2225701 - DNA, 25 bp, Homo sapien
ctgttgaagtttcttcctagagttt

SEQ ID NO: 2225702 - DNA, 25 bp, Homo sapien
tcattttactgttgaagtttcttcc

SEQ ID NO: 2225703 - DNA, 25 bp, Homo sapien
ttcttctttcacattattacatttt

SEQ ID NO: 2225704 - DNA, 25 bp, Homo sapien
ccaacttttaccactgaaagtccag

SEQ ID NO: 2225705 - DNA, 25 bp, Homo sapien
tagactttccaacttttaccactga

SEQ ID NO: 2225706 - DNA, 25 bp, Homo sapien
tccaacttttaccactgaaagtcca

SEQ ID NO: 2225707 - DNA, 25 bp, Homo sapien
cgtagacaacaagatagagcaagcc

SEQ ID NO: 2225708 - DNA, 25 bp, Homo sapien
cacggtggccgtagacaacaagata

SEQ ID NO: 2225709 - DNA, 25 bp, Homo sapien
aagatagagcaagccacggatccct

SEQ ID NO: 2225710 - DNA, 25 bp, Homo sapien
cacggatccctggatgtgatgaaga

SEQ ID NO: 2225711 - DNA, 25 bp, Homo sapien
tggagtgcaacaacaccctcttgaa

SEQ ID NO: 2225712 - DNA, 25 bp, Homo sapien
gcagatactagagctgatggagatg

SEQ ID NO: 2225713 - DNA, 25 bp, Homo sapien
gagatgaactcctagctggagtgca

SEQ ID NO: 2225714 - DNA, 25 bp, Homo sapien
acaccctcttgaaaaccctggcgag

SEQ ID NO: 2225715 - DNA, 25 bp, Homo sapien
acacatgaagtcatttgaatgccat

SEQ ID NO: 2225716 - DNA, 25 bp, Homo sapien
gacacatgaagtcatttgaatgcca

SEQ ID NO: 2225717 - DNA, 25 bp, Homo sapien
acatgaagtcatttgaatgccatac

SEQ ID NO: 2225718 - DNA, 25 bp, Homo sapien
cacatgaagtcatttgaatgccata

SEQ ID NO: 2225719 - DNA, 25 bp, Homo sapien
tgacttcatagaatggggttaacgg

SEQ ID NO: 2225720 - DNA, 25 bp, Homo sapien
catagaatggggttaacggaccagt

SEQ ID NO: 2225721 - DNA, 25 bp, Homo sapien
gacttcatagaatggggttaacgga

SEQ ID NO: 2225722 - DNA, 25 bp, Homo sapien
ttcatagaatggggttaacggacca

SEQ ID NO: 2225723 - DNA, 25 bp, Homo sapien
tgggcggtcttcgatcccccgcgcg

SEQ ID NO: 2225724 - DNA, 25 bp, Homo sapien
cttgggtatctgggcggtcttcgat

SEQ ID NO: 2225725 - DNA, 25 bp, Homo sapien
ggtatctgggcggtcttcgatcccc

SEQ ID NO: 2225726 - DNA, 25 bp, Homo sapien
tgggtatctgggcggtcttcgatcc

SEQ ID NO: 2225727 - DNA, 25 bp, Homo sapien
gaagttcttcaccttcaggtgtttc

SEQ ID NO: 2225728 - DNA, 25 bp, Homo sapien
ttcagtgtctgccactggaagttct

SEQ ID NO: 2225729 - DNA, 25 bp, Homo sapien
attttcagtgtctgccactggaagt

SEQ ID NO: 2225730 - DNA, 25 bp, Homo sapien
tcagtgtctgccactggaagttctt

SEQ ID NO: 2225731 - DNA, 25 bp, Homo sapien
ctccatgggcactatatgtcctctt

SEQ ID NO: 2225732 - DNA, 25 bp, Homo sapien
catgggcactatatgtcctcttgcc

SEQ ID NO: 2225733 - DNA, 25 bp, Homo sapien
tcctcttgccaaccatgccaacttt

SEQ ID NO: 2225734 - DNA, 25 bp, Homo sapien
catgccaacttttggggcaagtggg

SEQ ID NO: 2225735 - DNA, 25 bp, Homo sapien
tgggtccaattcgtcttcaaagaac

SEQ ID NO: 2225736 - DNA, 25 bp, Homo sapien
cagcaccttgaatgggtccaattcg

SEQ ID NO: 2225737 - DNA, 25 bp, Homo sapien
gaatgggtccaattcgtcttcaaag

SEQ ID NO: 2225738 - DNA, 25 bp, Homo sapien
cttgaatgggtccaattcgtcttca

SEQ ID NO: 2225739 - DNA, 25 bp, Homo sapien
tctcaccaaagtgagtttctgtgcc

SEQ ID NO: 2225740 - DNA, 25 bp, Homo sapien
ctcaccaaagtgagtttctgtgcct

SEQ ID NO: 2225741 - DNA, 25 bp, Homo sapien
cagaaaagattgtaatactgggcac

SEQ ID NO: 2225742 - DNA, 25 bp, Homo sapien
agaaaagattgtaatactgggcaca

SEQ ID NO: 2225743 - DNA, 25 bp, Homo sapien
ataatgattgtgcaacactctttca

SEQ ID NO: 2225744 - DNA, 25 bp, Homo sapien
catataatgattgtgcaacactctt

SEQ ID NO: 2225745 - DNA, 25 bp, Homo sapien
ttcatataatgattgtgcaacactc

SEQ ID NO: 2225746 - DNA, 25 bp, Homo sapien
acttcatataatgattgtgcaacac

SEQ ID NO: 2225747 - DNA, 25 bp, Homo sapien
gcagaaatacataagcccaatggct

SEQ ID NO: 2225748 - DNA, 25 bp, Homo sapien
tgcctcatttacttccaatatcaaa

SEQ ID NO: 2225749 - DNA, 25 bp, Homo sapien
aatacataagcccaatggcttaatg

SEQ ID NO: 2225750 - DNA, 25 bp, Homo sapien
tacataagcccaatggcttaatgcc

SEQ ID NO: 2225751 - DNA, 25 bp, Homo sapien
aattgttaccattctccaggtcatt

SEQ ID NO: 2225752 - DNA, 25 bp, Homo sapien
tgttaccattctccaggtcattcat

SEQ ID NO: 2225753 - DNA, 25 bp, Homo sapien
ttgttaccattctccaggtcattca

SEQ ID NO: 2225754 - DNA, 25 bp, Homo sapien
taattgttaccattctccaggtcat

SEQ ID NO: 2225755 - DNA, 25 bp, Homo sapien
aatgacagctagtttctctaaccag

SEQ ID NO: 2225756 - DNA, 25 bp, Homo sapien
tcaggaatgaaagccgaatatttta

SEQ ID NO: 2225757 - DNA, 25 bp, Homo sapien
gatggagtgccaaaaatagtttgca

SEQ ID NO: 2225758 - DNA, 25 bp, Homo sapien
cagtggtcaaacctcggtggagtaa

SEQ ID NO: 2225759 - DNA, 25 bp, Homo sapien
acccaaatctctgggacgcattcaa

SEQ ID NO: 2225760 - DNA, 25 bp, Homo sapien
gatccaaaattgacaccctagtatc

SEQ ID NO: 2225761 - DNA, 25 bp, Homo sapien
acatacccaaatctctgggacgcat

SEQ ID NO: 2225762 - DNA, 25 bp, Homo sapien
tacccaaatctctgggacgcattca

SEQ ID NO: 2225763 - DNA, 25 bp, Homo sapien
tagcaacgggtactacagtgtcccc

SEQ ID NO: 2225764 - DNA, 25 bp, Homo sapien
ggatcatgaccctcagcgaagcagg

SEQ ID NO: 2225765 - DNA, 25 bp, Homo sapien
cttggagtaaaacgcagatctggtc

SEQ ID NO: 2225766 - DNA, 25 bp, Homo sapien
tggtcgatccactacaagaacactg

SEQ ID NO: 2225767 - DNA, 25 bp, Homo sapien
ttagcgctgcaaccaggaaacaacc

SEQ ID NO: 2225768 - DNA, 25 bp, Homo sapien
gaacgctgagcacacctgagaacat

SEQ ID NO: 2225769 - DNA, 25 bp, Homo sapien
cgctgcaaccaggaaacaacctgag

SEQ ID NO: 2225770 - DNA, 25 bp, Homo sapien
ctgaggagcatgcagagaattccga

SEQ ID NO: 2225771 - DNA, 25 bp, Homo sapien
ttccctttcatgacgtatagctggc

SEQ ID NO: 2225772 - DNA, 25 bp, Homo sapien
tgttttggtttggacgcaggtgaga

SEQ ID NO: 2225773 - DNA, 25 bp, Homo sapien
cctttgatgaaaagcttccctttca

SEQ ID NO: 2225774 - DNA, 25 bp, Homo sapien
tatagctggcagcaaacttaaagtt

SEQ ID NO: 2225775 - DNA, 25 bp, Homo sapien
catccctgcatcatctctgaacctt

SEQ ID NO: 2225776 - DNA, 25 bp, Homo sapien
ctcaccccattttctacacacatcc

SEQ ID NO: 2225777 - DNA, 25 bp, Homo sapien
accccattttctacacacatccctg

SEQ ID NO: 2225778 - DNA, 25 bp, Homo sapien
tctctgaaccttacatcatgtaaca

SEQ ID NO: 2225779 - DNA, 25 bp, Homo sapien
gctgtcatcaagcttacatagggtg

SEQ ID NO: 2225780 - DNA, 25 bp, Homo sapien
tcaactattacttgcacaaacttga

SEQ ID NO: 2225781 - DNA, 25 bp, Homo sapien
aagaattgtctaacagcagaaacgc

SEQ ID NO: 2225782 - DNA, 25 bp, Homo sapien
gttttaatttagcagagcgactctc

SEQ ID NO: 2225783 - DNA, 25 bp, Homo sapien
tttcccaaatgatcacagatccagt

SEQ ID NO: 2225784 - DNA, 25 bp, Homo sapien
aatcacccagtatccctgatatcat

SEQ ID NO: 2225785 - DNA, 25 bp, Homo sapien
tcgtttctaaactataatcacccag

SEQ ID NO: 2225786 - DNA, 25 bp, Homo sapien
tccttgtcatatccagtacattctg

SEQ ID NO: 2225787 - DNA, 25 bp, Homo sapien
catccaataaactcggtgagagcca

SEQ ID NO: 2225788 - DNA, 25 bp, Homo sapien
aaaacatccaataaactcggtgaga

SEQ ID NO: 2225789 - DNA, 25 bp, Homo sapien
atccaataaactcggtgagagccat

SEQ ID NO: 2225790 - DNA, 25 bp, Homo sapien
aacatccaataaactcggtgagagc

SEQ ID NO: 2225791 - DNA, 25 bp, Homo sapien
aaagaggtaaagatgaactgggctg

SEQ ID NO: 2225792 - DNA, 25 bp, Homo sapien
ctggtgcaagggctaaaaaacgcaa

SEQ ID NO: 2225793 - DNA, 25 bp, Homo sapien
caggcttcagggtcaatcaaatact

SEQ ID NO: 2225794 - DNA, 25 bp, Homo sapien
gctaaaaaacgcaacacaggaagga

SEQ ID NO: 2225795 - DNA, 25 bp, Homo sapien
ggatgaatcgaaggtcagcttcagt

SEQ ID NO: 2225796 - DNA, 25 bp, Homo sapien
gaatcgaaggtcagcttcagtccac

SEQ ID NO: 2225797 - DNA, 25 bp, Homo sapien
cttaggtaagaaggatgaatcgaag

SEQ ID NO: 2225798 - DNA, 25 bp, Homo sapien
tgaatcgaaggtcagcttcagtcca

SEQ ID NO: 2225799 - DNA, 25 bp, Homo sapien
gtgcaagctgatcttccacagtcat

SEQ ID NO: 2225800 - DNA, 25 bp, Homo sapien
agccatcttatgcttagaggtggtg

SEQ ID NO: 2225801 - DNA, 25 bp, Homo sapien
gccatcttatgcttagaggtggtgg

SEQ ID NO: 2225802 - DNA, 25 bp, Homo sapien
tggcagtgggctaggaggcggctat

SEQ ID NO: 2225803 - DNA, 25 bp, Homo sapien
agtgggctaggaggcggctatggcc

SEQ ID NO: 2225804 - DNA, 25 bp, Homo sapien
ttttgatcagtctgctatggccact

SEQ ID NO: 2225805 - DNA, 25 bp, Homo sapien
ctaaatgatctttgcctttctaact

SEQ ID NO: 2225806 - DNA, 25 bp, Homo sapien
tgttgttctttgcatttaagttatg

SEQ ID NO: 2225807 - DNA, 25 bp, Homo sapien
ccctcatactttttgatttcatggg

SEQ ID NO: 2225808 - DNA, 25 bp, Homo sapien
tgttgttgttctttgcatttaagtt

SEQ ID NO: 2225809 - DNA, 25 bp, Homo sapien
tgttctttgcatttaagttatgcat

SEQ ID NO: 2225810 - DNA, 25 bp, Homo sapien
tatggatttgttgtcagacttcctg

SEQ ID NO: 2225811 - DNA, 25 bp, Homo sapien
agtatggatttgttgtcagacttcc

SEQ ID NO: 2225812 - DNA, 25 bp, Homo sapien
ggatttgttgtcagacttcctgtct

SEQ ID NO: 2225813 - DNA, 25 bp, Homo sapien
tacaatgataacagaaggctgtgaa

SEQ ID NO: 2225814 - DNA, 25 bp, Homo sapien
tgagccaggtgtcttcaactgcagg

SEQ ID NO: 2225815 - DNA, 25 bp, Homo sapien
taaacctcagtgagactgtggttgc

SEQ ID NO: 2225816 - DNA, 25 bp, Homo sapien
tcaaacttaaagcaagctgtgagcc

SEQ ID NO: 2225817 - DNA, 25 bp, Homo sapien
caactgcaggtcatatgctgagcta

SEQ ID NO: 2225818 - DNA, 25 bp, Homo sapien
cttccaagcttgtcactatttcttc

SEQ ID NO: 2225819 - DNA, 25 bp, Homo sapien
caagcttgtcactatttcttccata

SEQ ID NO: 2225820 - DNA, 25 bp, Homo sapien
tgtcactatttcttccatatatcct

SEQ ID NO: 2225821 - DNA, 25 bp, Homo sapien
gcttgtcactatttcttccatatat

SEQ ID NO: 2225822 - DNA, 25 bp, Homo sapien
ctcagtgggggtgctttttgagcca

SEQ ID NO: 2225823 - DNA, 25 bp, Homo sapien
aggtgctcagtgggggtgctttttg

SEQ ID NO: 2225824 - DNA, 25 bp, Homo sapien
agataagggtggggccgtttgatag

SEQ ID NO: 2225825 - DNA, 25 bp, Homo sapien
gtgggggtgctttttgagccaggat

SEQ ID NO: 2225826 - DNA, 25 bp, Homo sapien
cttccggccatctggtcgtatccgt

SEQ ID NO: 2225827 - DNA, 25 bp, Homo sapien
ttacttccggccatctggtcgtatc

SEQ ID NO: 2225828 - DNA, 25 bp, Homo sapien
cggccatctggtcgtatccgtgcaa

SEQ ID NO: 2225829 - DNA, 25 bp, Homo sapien
ccggccatctggtcgtatccgtgca

SEQ ID NO: 2225830 - DNA, 25 bp, Homo sapien
agcggcagcctctgtacgcagacct

SEQ ID NO: 2225831 - DNA, 25 bp, Homo sapien
gcggcagcctctgtacgcagacctg

SEQ ID NO: 2225832 - DNA, 25 bp, Homo sapien
agcctctgtacgcagacctgagggc

SEQ ID NO: 2225833 - DNA, 25 bp, Homo sapien
ccagatttccggcatgtgtaacaag

SEQ ID NO: 2225834 - DNA, 25 bp, Homo sapien
ctgggctgcgggcgttccttggccc

SEQ ID NO: 2225835 - DNA, 25 bp, Homo sapien
ccggtaagccaagaaggagtcagtc

SEQ ID NO: 2225836 - DNA, 25 bp, Homo sapien
gatttccggcatgtgtaacaagttc

SEQ ID NO: 2225837 - DNA, 25 bp, Homo sapien
gaacgcctggctgctacagttcagg

SEQ ID NO: 2225838 - DNA, 25 bp, Homo sapien
cgcttagattttaggtcaggtgaga

SEQ ID NO: 2225839 - DNA, 25 bp, Homo sapien
ccaggaaagcgagacttgccaccaa

SEQ ID NO: 2225840 - DNA, 25 bp, Homo sapien
agttcttaagaatacaggctaaggg

SEQ ID NO: 2225841 - DNA, 25 bp, Homo sapien
tgaggtcctaggtggatcttacgga

SEQ ID NO: 2225842 - DNA, 25 bp, Homo sapien
gggaggtccctcgatctgagtcacg

SEQ ID NO: 2225843 - DNA, 25 bp, Homo sapien
ggaggtccctcgatctgagtcacgg

SEQ ID NO: 2225844 - DNA, 25 bp, Homo sapien
ggatcttacggagcaaaaagcagga

SEQ ID NO: 2225845 - DNA, 25 bp, Homo sapien
gaggtgttgtagaaggtctcaatgt

SEQ ID NO: 2225846 - DNA, 25 bp, Homo sapien
agatgtctatcccttggctcccttc

SEQ ID NO: 2225847 - DNA, 25 bp, Homo sapien
gaaggtctcaatgtctcgaagagtc

SEQ ID NO: 2225848 - DNA, 25 bp, Homo sapien
tcagccccccgagattgagccctgg

SEQ ID NO: 2225849 - DNA, 25 bp, Homo sapien
ggtcagtggtaatcaaaactctgct

SEQ ID NO: 2225850 - DNA, 25 bp, Homo sapien
tgtccacctcgactgattctgtgga

SEQ ID NO: 2225851 - DNA, 25 bp, Homo sapien
atctttacggccaaactgtccacct

SEQ ID NO: 2225852 - DNA, 25 bp, Homo sapien
atgttaatagccacatctttacggc

SEQ ID NO: 2225853 - DNA, 25 bp, Homo sapien
tggtccatatctccatgcatggcgg

SEQ ID NO: 2225854 - DNA, 25 bp, Homo sapien
tccatatctccatgcatggcggaga

SEQ ID NO: 2225855 - DNA, 25 bp, Homo sapien
gtgatcacgtctcgctccttttggt

SEQ ID NO: 2225856 - DNA, 25 bp, Homo sapien
ctcgtgatcacgtctcgctcctttt

SEQ ID NO: 2225857 - DNA, 25 bp, Homo sapien
attggtgcccctgatacaggcatga

SEQ ID NO: 2225858 - DNA, 25 bp, Homo sapien
gtccaccttcctccgggtattgatg

SEQ ID NO: 2225859 - DNA, 25 bp, Homo sapien
ccttcctccgggtattgatgaagat

SEQ ID NO: 2225860 - DNA, 25 bp, Homo sapien
aaacacacagctaggggtacccacg

SEQ ID NO: 2225861 - DNA, 25 bp, Homo sapien
agtcccagatcaggcttgagcgatt

SEQ ID NO: 2225862 - DNA, 25 bp, Homo sapien
cccagtcccagatcaggcttgagcg

SEQ ID NO: 2225863 - DNA, 25 bp, Homo sapien
tcccagatcaggcttgagcgattac

SEQ ID NO: 2225864 - DNA, 25 bp, Homo sapien
ccagtcccagatcaggcttgagcga

SEQ ID NO: 2225865 - DNA, 25 bp, Homo sapien
cataggcatagatgtcacggagaag

SEQ ID NO: 2225866 - DNA, 25 bp, Homo sapien
caaaaccataggcatagatgtcacg

SEQ ID NO: 2225867 - DNA, 25 bp, Homo sapien
tctcgatgacgccttcgggctccat

SEQ ID NO: 2225868 - DNA, 25 bp, Homo sapien
attataacccctgatacaaggtaga

SEQ ID NO: 2225869 - DNA, 25 bp, Homo sapien
caggaatcctggcttacagacatga

SEQ ID NO: 2225870 - DNA, 25 bp, Homo sapien
atcaggaatcctggcttacagacat

SEQ ID NO: 2225871 - DNA, 25 bp, Homo sapien
ggatcaggaatcctggcttacagac

SEQ ID NO: 2225872 - DNA, 25 bp, Homo sapien
aggaatcctggcttacagacatgat

SEQ ID NO: 2225873 - DNA, 25 bp, Homo sapien
atgtcacatactttttgaagtacat

SEQ ID NO: 2225874 - DNA, 25 bp, Homo sapien
gaaccagaccttataggcaacaaat

SEQ ID NO: 2225875 - DNA, 25 bp, Homo sapien
tttgaagtacattattgggtataga

SEQ ID NO: 2225876 - DNA, 25 bp, Homo sapien
ccttataggcaacaaattacccatg

SEQ ID NO: 2225877 - DNA, 25 bp, Homo sapien
aaattcctgtcccaatcctcaccca

SEQ ID NO: 2225878 - DNA, 25 bp, Homo sapien
aattcctgtcccaatcctcacccac

SEQ ID NO: 2225879 - DNA, 25 bp, Homo sapien
taacagatgtgtcgattgtgtagac

SEQ ID NO: 2225880 - DNA, 25 bp, Homo sapien
actaacagatgtgtcgattgtgtag

SEQ ID NO: 2225881 - DNA, 25 bp, Homo sapien
ttccaatttttgaatgggccttctg

SEQ ID NO: 2225882 - DNA, 25 bp, Homo sapien
attccaatttttgaatgggccttct

SEQ ID NO: 2225883 - DNA, 25 bp, Homo sapien
cttctactattcctctggtgatcat

SEQ ID NO: 2225884 - DNA, 25 bp, Homo sapien
tcttctactattcctctggtgatca

SEQ ID NO: 2225885 - DNA, 25 bp, Homo sapien
attgtttatcttctactattcctct

SEQ ID NO: 2225886 - DNA, 25 bp, Homo sapien
aattgtttatcttctactattcctc

SEQ ID NO: 2225887 - DNA, 25 bp, Homo sapien
cattgtagctttgatgatggcagtt

SEQ ID NO: 2225888 - DNA, 25 bp, Homo sapien
tgtagctttgatgatggcagttatc

SEQ ID NO: 2225889 - DNA, 25 bp, Homo sapien
caagatctcatcattgtagctttga

SEQ ID NO: 2225890 - DNA, 25 bp, Homo sapien
tcaagatctcatcattgtagctttg

SEQ ID NO: 2225891 - DNA, 25 bp, Homo sapien
aatgggaatagaagattgtgaggcc

SEQ ID NO: 2225892 - DNA, 25 bp, Homo sapien
ggaatagaagattgtgaggccagca

SEQ ID NO: 2225893 - DNA, 25 bp, Homo sapien
tagaagattgtgaggccagcatact

SEQ ID NO: 2225894 - DNA, 25 bp, Homo sapien
agattgtgaggccagcatactccat

SEQ ID NO: 2225895 - DNA, 25 bp, Homo sapien
ggcacattcaaatgcgcaagaagga

SEQ ID NO: 2225896 - DNA, 25 bp, Homo sapien
caaatgcgcaagaaggaatttgatt

SEQ ID NO: 2225897 - DNA, 25 bp, Homo sapien
actttaggacgccaaaagtcctgat

SEQ ID NO: 2225898 - DNA, 25 bp, Homo sapien
tcaaagaagagttgccagtagggca

SEQ ID NO: 2225899 - DNA, 25 bp, Homo sapien
cagattggttctggtccgaggcaaa

SEQ ID NO: 2225900 - DNA, 25 bp, Homo sapien
tccaggtatggtgcagattggttct

SEQ ID NO: 2225901 - DNA, 25 bp, Homo sapien
tggctgaacaggctgagaaccttca

SEQ ID NO: 2225902 - DNA, 25 bp, Homo sapien
ggcaaagttggctatcacctcaagt

SEQ ID NO: 2225903 - DNA, 25 bp, Homo sapien
cataaagttgttggaaatacgatag

SEQ ID NO: 2225904 - DNA, 25 bp, Homo sapien
ttgttagtaacataaagttgttgga

SEQ ID NO: 2225905 - DNA, 25 bp, Homo sapien
tgaagacgttccaactttccactca

SEQ ID NO: 2225906 - DNA, 25 bp, Homo sapien
ttccactcatattgatactctcacc

SEQ ID NO: 2225907 - DNA, 25 bp, Homo sapien
agaactgtgacacctctaactccta

SEQ ID NO: 2225908 - DNA, 25 bp, Homo sapien
gccatttgcctttttgtgtagaaga

SEQ ID NO: 2225909 - DNA, 25 bp, Homo sapien
catgagggatattatcgaggacctc

SEQ ID NO: 2225910 - DNA, 25 bp, Homo sapien
ccccattgacagtaggtgattcaga

SEQ ID NO: 2225911 - DNA, 25 bp, Homo sapien
cttgcccaattgtgtgtgctgtgag

SEQ ID NO: 2225912 - DNA, 25 bp, Homo sapien
ctaaagtgattatctcttgcccaat

SEQ ID NO: 2225913 - DNA, 25 bp, Homo sapien
gctgtgagaattcagtgggtgtcct

SEQ ID NO: 2225914 - DNA, 25 bp, Homo sapien
tgtcctccaccaatgcaagtgctct

SEQ ID NO: 2225915 - DNA, 25 bp, Homo sapien
cgtagtagcgctcatgggattacca

SEQ ID NO: 2225916 - DNA, 25 bp, Homo sapien
gattaccatggacagcctcttgagt

SEQ ID NO: 2225917 - DNA, 25 bp, Homo sapien
tcatgggattaccatggacagcctc

SEQ ID NO: 2225918 - DNA, 25 bp, Homo sapien
tcagtccgtagtagcgctcatggga

SEQ ID NO: 2225919 - DNA, 25 bp, Homo sapien
gagtgccagtttccaactgtagatt

SEQ ID NO: 2225920 - DNA, 25 bp, Homo sapien
tagattacccttgtagaatgtattc

SEQ ID NO: 2225921 - DNA, 25 bp, Homo sapien
tgtttggagtgccagtttccaactg

SEQ ID NO: 2225922 - DNA, 25 bp, Homo sapien
cccttgtagaatgtattcttcacag

SEQ ID NO: 2225923 - DNA, 25 bp, Homo sapien
accaaatttcatgcgtgtccgtgtg

SEQ ID NO: 2225924 - DNA, 25 bp, Homo sapien
caaatttcatgcgtgtccgtgtgaa

SEQ ID NO: 2225925 - DNA, 25 bp, Homo sapien
tgaggtcctaggtggatcttatgga

SEQ ID NO: 2225926 - DNA, 25 bp, Homo sapien
cttatggagcaaaaagcaggaggac

SEQ ID NO: 2225927 - DNA, 25 bp, Homo sapien
cctcttccatattggtacccctaat

SEQ ID NO: 2225928 - DNA, 25 bp, Homo sapien
tattggtacccctaatgactgtcag

SEQ ID NO: 2225929 - DNA, 25 bp, Homo sapien
tacccctaatgactgtcagaaaacg

SEQ ID NO: 2225930 - DNA, 25 bp, Homo sapien
gactgtcagaaaacgcaggatgaga

SEQ ID NO: 2225931 - DNA, 25 bp, Homo sapien
taaaaagcagggataaagatgacat

SEQ ID NO: 2225932 - DNA, 25 bp, Homo sapien
cttcagtctgtaattccacaaaatg

SEQ ID NO: 2225933 - DNA, 25 bp, Homo sapien
gacatttcttcagtctgtaattcca

SEQ ID NO: 2225934 - DNA, 25 bp, Homo sapien
gcaaagcagtctcagtgacaatagt

SEQ ID NO: 2225935 - DNA, 25 bp, Homo sapien
ggatcctgattatctttatcttgag

SEQ ID NO: 2225936 - DNA, 25 bp, Homo sapien
gtttggtgaactttaagcagggatc

SEQ ID NO: 2225937 - DNA, 25 bp, Homo sapien
tgttcatgtttggtgaactttaagc

SEQ ID NO: 2225938 - DNA, 25 bp, Homo sapien
cagggatcctgattatctttatctt

SEQ ID NO: 2225939 - DNA, 25 bp, Homo sapien
gggaatgagaccacggccgtagaat

SEQ ID NO: 2225940 - DNA, 25 bp, Homo sapien
tgagaccacggccgtagaattaaaa

SEQ ID NO: 2225941 - DNA, 25 bp, Homo sapien
ctggtcttctacttaatgggaatga

SEQ ID NO: 2225942 - DNA, 25 bp, Homo sapien
ggtcttctacttaatgggaatgaga

SEQ ID NO: 2225943 - DNA, 25 bp, Homo sapien
gcttgcatctataatcaggaatctg

SEQ ID NO: 2225944 - DNA, 25 bp, Homo sapien
aatctgaaagtaatgtgctctaggc

SEQ ID NO: 2225945 - DNA, 25 bp, Homo sapien
tctcgaatgggctttgcatgcacag

SEQ ID NO: 2225946 - DNA, 25 bp, Homo sapien
tcaaggcgtttgaaggaaatcgaaa

SEQ ID NO: 2225947 - DNA, 25 bp, Homo sapien
tatatccacctggacctttcctcat

SEQ ID NO: 2225948 - DNA, 25 bp, Homo sapien
gaagattatatccacctggaccttt

SEQ ID NO: 2225949 - DNA, 25 bp, Homo sapien
gaggctaatgaatgatgatgtttga

SEQ ID NO: 2225950 - DNA, 25 bp, Homo sapien
gactatgaggctaatgaatgatgat

SEQ ID NO: 2225951 - DNA, 25 bp, Homo sapien
tatggaagaggtttgttcacactga

SEQ ID NO: 2225952 - DNA, 25 bp, Homo sapien
ttgggtatggaagaggtttgttcac

SEQ ID NO: 2225953 - DNA, 25 bp, Homo sapien
gaggtttgttcacactgacttactg

SEQ ID NO: 2225954 - DNA, 25 bp, Homo sapien
gaagaggtttgttcacactgactta

SEQ ID NO: 2225955 - DNA, 25 bp, Homo sapien
tatggaagaggtttgttcacactga

SEQ ID NO: 2225956 - DNA, 25 bp, Homo sapien
ttgggtatggaagaggtttgttcac

SEQ ID NO: 2225957 - DNA, 25 bp, Homo sapien
gaagaggtttgttcacactgactta

SEQ ID NO: 2225958 - DNA, 25 bp, Homo sapien
gaggtttgttcacactgacttactg

SEQ ID NO: 2225959 - DNA, 25 bp, Homo sapien
tggagaataagctatttccagttgc

SEQ ID NO: 2225960 - DNA, 25 bp, Homo sapien
taagctatttccagttgccctacaa

SEQ ID NO: 2225961 - DNA, 25 bp, Homo sapien
tcatttggagaataagctatttcca

SEQ ID NO: 2225962 - DNA, 25 bp, Homo sapien
tgccctacaactgaaacgataattt

SEQ ID NO: 2225963 - DNA, 25 bp, Homo sapien
caatgcctgcatcgttctgcatatt

SEQ ID NO: 2225964 - DNA, 25 bp, Homo sapien
gcatattgacaatgcccgtcttgct

SEQ ID NO: 2225965 - DNA, 25 bp, Homo sapien
ggagaacgacatccatgggctccgc

SEQ ID NO: 2225966 - DNA, 25 bp, Homo sapien
gtatgagacacagctggcgatgcgc

SEQ ID NO: 2225967 - DNA, 25 bp, Homo sapien
tgtgacatcactataccctatatgg

SEQ ID NO: 2225968 - DNA, 25 bp, Homo sapien
taaacattcgaaattatcaccactg

SEQ ID NO: 2225969 - DNA, 25 bp, Homo sapien
cctccttgaggtagaattgagcact

SEQ ID NO: 2225970 - DNA, 25 bp, Homo sapien
tgtcataccagctaagataaattta

SEQ ID NO: 2225971 - DNA, 25 bp, Homo sapien
tatgtgaatttaaagaaagggtagc

SEQ ID NO: 2225972 - DNA, 25 bp, Homo sapien
tcatagatctcaaggaagttgctgg

SEQ ID NO: 2225973 - DNA, 25 bp, Homo sapien
gctcatagatctcaaggaagttgct

SEQ ID NO: 2225974 - DNA, 25 bp, Homo sapien
acagtctgcccgttgctcatagatc

SEQ ID NO: 2225975 - DNA, 25 bp, Homo sapien
ctgggggaccggtaggcgtcattca

SEQ ID NO: 2225976 - DNA, 25 bp, Homo sapien
ataaaaaggccattatagcttttgg

SEQ ID NO: 2225977 - DNA, 25 bp, Homo sapien
gctcctgctgtccaaatgcatgctt

SEQ ID NO: 2225978 - DNA, 25 bp, Homo sapien
aattttaacagcatagttggagagc

SEQ ID NO: 2225979 - DNA, 25 bp, Homo sapien
tcagtagggtagaattttaacagca

SEQ ID NO: 2225980 - DNA, 25 bp, Homo sapien
tacacaagtgtacagttatattttc

SEQ ID NO: 2225981 - DNA, 25 bp, Homo sapien
attcatatactctgttgtttttaaa

SEQ ID NO: 2225982 - DNA, 25 bp, Homo sapien
gtttaagttctaccatatgcaataa

SEQ ID NO: 2225983 - DNA, 25 bp, Homo sapien
taaatgatagagtttaagttctacc

SEQ ID NO: 2225984 - DNA, 25 bp, Homo sapien
tttctttgtttcaagttgtaatcaa

SEQ ID NO: 2225985 - DNA, 25 bp, Homo sapien
ttttctttgtttcaagttgtaatca

SEQ ID NO: 2225986 - DNA, 25 bp, Homo sapien
caagttgtaatcaaagcttgtgtat

SEQ ID NO: 2225987 - DNA, 25 bp, Homo sapien
tgtaatcaaagcttgtgtataagat

SEQ ID NO: 2225988 - DNA, 25 bp, Homo sapien
gctttccgttcacggatatttttgc

SEQ ID NO: 2225989 - DNA, 25 bp, Homo sapien
cgttcacggatatttttgcggtctt

SEQ ID NO: 2225990 - DNA, 25 bp, Homo sapien
gcacccgttcaatgtagatagcata

SEQ ID NO: 2225991 - DNA, 25 bp, Homo sapien
tccgttcacggatatttttgcggtc

SEQ ID NO: 2225992 - DNA, 25 bp, Homo sapien
aaccttgactattttgccaatttgt

SEQ ID NO: 2225993 - DNA, 25 bp, Homo sapien
tgactattttgccaatttgttgacc

SEQ ID NO: 2225994 - DNA, 25 bp, Homo sapien
ccttgactattttgccaatttgttg

SEQ ID NO: 2225995 - DNA, 25 bp, Homo sapien
cttgactattttgccaatttgttga

SEQ ID NO: 2225996 - DNA, 25 bp, Homo sapien
ttttgcgactcttccttcagttgga

SEQ ID NO: 2225997 - DNA, 25 bp, Homo sapien
gggaagacaatcttcccgtgaatgt

SEQ ID NO: 2225998 - DNA, 25 bp, Homo sapien
caatcttcccgtgaatgtaggaagg

SEQ ID NO: 2225999 - DNA, 25 bp, Homo sapien
ggatcacccgttatacttctgtttc

SEQ ID NO: 2226000 - DNA, 25 bp, Homo sapien
tggcccagtccagatggattctaaa

SEQ ID NO: 2226001 - DNA, 25 bp, Homo sapien
gaagaactcgatatggcccagtcca

SEQ ID NO: 2226002 - DNA, 25 bp, Homo sapien
tccagatggattctaaaggcctttc

SEQ ID NO: 2226003 - DNA, 25 bp, Homo sapien
gtggtaggaagaactcgatatggcc

SEQ ID NO: 2226004 - DNA, 25 bp, Homo sapien
taacaccaccttgtatcccaaattc

SEQ ID NO: 2226005 - DNA, 25 bp, Homo sapien
agtccctgaaaggtatgattccaca

SEQ ID NO: 2226006 - DNA, 25 bp, Homo sapien
tcatcccttttaacaccaccttgta

SEQ ID NO: 2226007 - DNA, 25 bp, Homo sapien
ccacattccctatttatgctcagaa

SEQ ID NO: 2226008 - DNA, 25 bp, Homo sapien
caagtaagatcatctagagtctcaa

SEQ ID NO: 2226009 - DNA, 25 bp, Homo sapien
ggatgaagttggaggtggatctata

SEQ ID NO: 2226010 - DNA, 25 bp, Homo sapien
tggatctataaggtgggagtggaag

SEQ ID NO: 2226011 - DNA, 25 bp, Homo sapien
gctcagatactagctgggatgaagt

SEQ ID NO: 2226012 - DNA, 25 bp, Homo sapien
cttttatcagagtaactgaagggtg

SEQ ID NO: 2226013 - DNA, 25 bp, Homo sapien
ttatcagagtaactgaagggtgttg

SEQ ID NO: 2226014 - DNA, 25 bp, Homo sapien
ttttatcagagtaactgaagggtgt

SEQ ID NO: 2226015 - DNA, 25 bp, Homo sapien
acttttatcagagtaactgaagggt

SEQ ID NO: 2226016 - DNA, 25 bp, Homo sapien
gtaaattagtttggcctctgtagaa

SEQ ID NO: 2226017 - DNA, 25 bp, Homo sapien
tataccacggaatatgccatagaat

SEQ ID NO: 2226018 - DNA, 25 bp, Homo sapien
cattcactcatatgcttattgcagc

SEQ ID NO: 2226019 - DNA, 25 bp, Homo sapien
tttccatcagtggtagattcgctga

SEQ ID NO: 2226020 - DNA, 25 bp, Homo sapien
taaagttcacaaattgctgtcacag

SEQ ID NO: 2226021 - DNA, 25 bp, Homo sapien
gaaatctcaagttgtactaacgtca

SEQ ID NO: 2226022 - DNA, 25 bp, Homo sapien
gctgtcacagccatgccgtggctat

SEQ ID NO: 2226023 - DNA, 25 bp, Homo sapien
cttcgggtgtcgattattaacagac

SEQ ID NO: 2226024 - DNA, 25 bp, Homo sapien
ggagctctacacttccgtgacagtg

SEQ ID NO: 2226025 - DNA, 25 bp, Homo sapien
gtttgggttcagactctacacagca

SEQ ID NO: 2226026 - DNA, 25 bp, Homo sapien
tgttgcaaggacgacctggtgctcc

SEQ ID NO: 2226027 - DNA, 25 bp, Homo sapien
cattgttttgcaactcgctggagac

SEQ ID NO: 2226028 - DNA, 25 bp, Homo sapien
tcatttccatatagatgtgcccttg

SEQ ID NO: 2226029 - DNA, 25 bp, Homo sapien
agacagccttaggagccacgtaccc

SEQ ID NO: 2226030 - DNA, 25 bp, Homo sapien
ctgcaggtagccagacagccttagg

SEQ ID NO: 2226031 - DNA, 25 bp, Homo sapien
aggtagccagacagccttaggagcc

SEQ ID NO: 2226032 - DNA, 25 bp, Homo sapien
gacagccttaggagccacgtaccca

SEQ ID NO: 2226033 - DNA, 25 bp, Homo sapien
cagactatctagtcctcctcctagg

SEQ ID NO: 2226034 - DNA, 25 bp, Homo sapien
tgaaggagcaaaggttgcaggcacc

SEQ ID NO: 2226035 - DNA, 25 bp, Homo sapien
gactatctagtcctcctcctaggag

SEQ ID NO: 2226036 - DNA, 25 bp, Homo sapien
ccgatgatgggatgaaggattgtcc

SEQ ID NO: 2226037 - DNA, 25 bp, Homo sapien
caataggttccgtctcctgagagat

SEQ ID NO: 2226038 - DNA, 25 bp, Homo sapien
cactggaaggcttacgatacacaga

SEQ ID NO: 2226039 - DNA, 25 bp, Homo sapien
ggcagattagctcctccaacgcagt

SEQ ID NO: 2226040 - DNA, 25 bp, Homo sapien
gtttaaaagactccccagaagatca

SEQ ID NO: 2226041 - DNA, 25 bp, Homo sapien
agcccaataagtatagccccgttct

SEQ ID NO: 2226042 - DNA, 25 bp, Homo sapien
cccaataagtatagccccgttctcg

SEQ ID NO: 2226043 - DNA, 25 bp, Homo sapien
gcccaataagtatagccccgttctc

SEQ ID NO: 2226044 - DNA, 25 bp, Homo sapien
gagcccaataagtatagccccgttc

SEQ ID NO: 2226045 - DNA, 25 bp, Homo sapien
ggactagctcttgtgttttggtggt

SEQ ID NO: 2226046 - DNA, 25 bp, Homo sapien
gctggactagctcttgtgttttggt

SEQ ID NO: 2226047 - DNA, 25 bp, Homo sapien
gctcttgtgttttggtggtttcttg

SEQ ID NO: 2226048 - DNA, 25 bp, Homo sapien
ctgctggactagctcttgtgttttg

SEQ ID NO: 2226049 - DNA, 25 bp, Homo sapien
ttcattatggcagtaagcagagtga

SEQ ID NO: 2226050 - DNA, 25 bp, Homo sapien
tcattatggcagtaagcagagtgag

SEQ ID NO: 2226051 - DNA, 25 bp, Homo sapien
cttcattatggcagtaagcagagtg

SEQ ID NO: 2226052 - DNA, 25 bp, Homo sapien
tcatccagcgagtctaagttctcac

SEQ ID NO: 2226053 - DNA, 25 bp, Homo sapien
atagagtggcaatgatactttcata

SEQ ID NO: 2226054 - DNA, 25 bp, Homo sapien
cggaagatgtccctgatgacaacaa

SEQ ID NO: 2226055 - DNA, 25 bp, Homo sapien
ggaagatgtccctgatgacaacaat

SEQ ID NO: 2226056 - DNA, 25 bp, Homo sapien
agcaatgtgcttacacagtgctctg

SEQ ID NO: 2226057 - DNA, 25 bp, Homo sapien
cttgattagatcaagcaatgtgctt

SEQ ID NO: 2226058 - DNA, 25 bp, Homo sapien
cacagtgctctgcagattgctccac

SEQ ID NO: 2226059 - DNA, 25 bp, Homo sapien
agatcaagcaatgtgcttacacagt

SEQ ID NO: 2226060 - DNA, 25 bp, Homo sapien
ctctagtttaacatagatgggatca

SEQ ID NO: 2226061 - DNA, 25 bp, Homo sapien
tgatgtccaacttctctagtttaac

SEQ ID NO: 2226062 - DNA, 25 bp, Homo sapien
gatttcctgcttcaagatttcaggc

SEQ ID NO: 2226063 - DNA, 25 bp, Homo sapien
tttaacatagatgggatcattgtac

SEQ ID NO: 2226064 - DNA, 25 bp, Homo sapien
tgttcctcagggagacatagtgcac

SEQ ID NO: 2226065 - DNA, 25 bp, Homo sapien
gacaattaagttgatgttcctcagg

SEQ ID NO: 2226066 - DNA, 25 bp, Homo sapien
agttgatgttcctcagggagacata

SEQ ID NO: 2226067 - DNA, 25 bp, Homo sapien
taagttgatgttcctcagggagaca

SEQ ID NO: 2226068 - DNA, 25 bp, Homo sapien
caagtggaggggctaacttcttcag

SEQ ID NO: 2226069 - DNA, 25 bp, Homo sapien
acttttaccgctgaaagcaccactg

SEQ ID NO: 2226070 - DNA, 25 bp, Homo sapien
cagcagcatattgtagtagtcagaa

SEQ ID NO: 2226071 - DNA, 25 bp, Homo sapien
taggtaacaattctagaaacttcat

SEQ ID NO: 2226072 - DNA, 25 bp, Homo sapien
tagacaggcagtccagcatgaaaat

SEQ ID NO: 2226073 - DNA, 25 bp, Homo sapien
agggttgtaattagacaggcagtcc

SEQ ID NO: 2226074 - DNA, 25 bp, Homo sapien
agccttccgatcatttttagggttg

SEQ ID NO: 2226075 - DNA, 25 bp, Homo sapien
tctgagccttccgatcatttttagg

SEQ ID NO: 2226076 - DNA, 25 bp, Homo sapien
acttattcagggctgtccgcagctt

SEQ ID NO: 2226077 - DNA, 25 bp, Homo sapien
gccccttcagtgcacttattcaggg

SEQ ID NO: 2226078 - DNA, 25 bp, Homo sapien
tattaatgtactgtgtgttcagatt

SEQ ID NO: 2226079 - DNA, 25 bp, Homo sapien
tccgcagcttattaatgtactgtgt

SEQ ID NO: 2226080 - DNA, 25 bp, Homo sapien
gatgcaccccatggttctgactgcc

SEQ ID NO: 2226081 - DNA, 25 bp, Homo sapien
catggttctgactgccaaggctcga

SEQ ID NO: 2226082 - DNA, 25 bp, Homo sapien
cattggatttgaatctgctatgaga

SEQ ID NO: 2226083 - DNA, 25 bp, Homo sapien
tctgactgccaaggctcgaatcaaa

SEQ ID NO: 2226084 - DNA, 25 bp, Homo sapien
gagcaataatctttcatacataagc

SEQ ID NO: 2226085 - DNA, 25 bp, Homo sapien
gcaataatctttcatacataagcat

SEQ ID NO: 2226086 - DNA, 25 bp, Homo sapien
cgatagcagccagttttttattgtt

SEQ ID NO: 2226087 - DNA, 25 bp, Homo sapien
tttattgtttgccttatccatcatc

SEQ ID NO: 2226088 - DNA, 25 bp, Homo sapien
cttcgatagcagccagttttttatt

SEQ ID NO: 2226089 - DNA, 25 bp, Homo sapien
tattgtttgccttatccatcatctc

SEQ ID NO: 2226090 - DNA, 25 bp, Homo sapien
ctttcctcacttgacggtttgtctg

SEQ ID NO: 2226091 - DNA, 25 bp, Homo sapien
gatcactttcctcacttgacggttt

SEQ ID NO: 2226092 - DNA, 25 bp, Homo sapien
ttcctcacttgacggtttgtctgcc

SEQ ID NO: 2226093 - DNA, 25 bp, Homo sapien
cactttcctcacttgacggtttgtc

SEQ ID NO: 2226094 - DNA, 25 bp, Homo sapien
gcccaaagctcattcactttgcggg

SEQ ID NO: 2226095 - DNA, 25 bp, Homo sapien
ccaaagctcattcactttgcggggg

SEQ ID NO: 2226096 - DNA, 25 bp, Homo sapien
aggcccaaagctcattcactttgcg

SEQ ID NO: 2226097 - DNA, 25 bp, Homo sapien
ttcacaaaggcccaaagctcattca

SEQ ID NO: 2226098 - DNA, 25 bp, Homo sapien
tcattattctcgagtctctggaaag

SEQ ID NO: 2226099 - DNA, 25 bp, Homo sapien
tattctcgagtctctggaaaggcct

SEQ ID NO: 2226100 - DNA, 25 bp, Homo sapien
ttattctcgagtctctggaaaggcc

SEQ ID NO: 2226101 - DNA, 25 bp, Homo sapien
ctcttcattattctcgagtctctgg

SEQ ID NO: 2226102 - DNA, 25 bp, Homo sapien
cagcatattgttgccatggcttaca

SEQ ID NO: 2226103 - DNA, 25 bp, Homo sapien
gagaagagtgccattatctgcaaat

SEQ ID NO: 2226104 - DNA, 25 bp, Homo sapien
cctctggagtcagcatattgttgcc

SEQ ID NO: 2226105 - DNA, 25 bp, Homo sapien
tgttgccatggcttacactgagaag

SEQ ID NO: 2226106 - DNA, 25 bp, Homo sapien
ttgaaacagaaagaccaatcctctg

SEQ ID NO: 2226107 - DNA, 25 bp, Homo sapien
accaatcctctggggtcacattgag

SEQ ID NO: 2226108 - DNA, 25 bp, Homo sapien
cttgaaacagaaagaccaatcctct

SEQ ID NO: 2226109 - DNA, 25 bp, Homo sapien
aatcctctggggtcacattgagcat

SEQ ID NO: 2226110 - DNA, 25 bp, Homo sapien
taagcatgtagatccatgctaatat

SEQ ID NO: 2226111 - DNA, 25 bp, Homo sapien
gcatgtagatccatgctaatataga

SEQ ID NO: 2226112 - DNA, 25 bp, Homo sapien
tagatccatgctaatatagatgtca

SEQ ID NO: 2226113 - DNA, 25 bp, Homo sapien
aattttaagcatgtagatccatgct

SEQ ID NO: 2226114 - DNA, 25 bp, Homo sapien
catgaagtatgctttgttcggattc

SEQ ID NO: 2226115 - DNA, 25 bp, Homo sapien
gctttgttcggattcttttctatta

SEQ ID NO: 2226116 - DNA, 25 bp, Homo sapien
atgcatctgcagcatgaagtatgct

SEQ ID NO: 2226117 - DNA, 25 bp, Homo sapien
catctgcagcatgaagtatgctttg

SEQ ID NO: 2226118 - DNA, 25 bp, Homo sapien
cccaaccctggcatccggataattt

SEQ ID NO: 2226119 - DNA, 25 bp, Homo sapien
tgtggatctctggaggtttgctccc

SEQ ID NO: 2226120 - DNA, 25 bp, Homo sapien
tgctccccttcactaggattgtaag

SEQ ID NO: 2226121 - DNA, 25 bp, Homo sapien
tccggataatttgaatgtggatctc

SEQ ID NO: 2226122 - DNA, 25 bp, Homo sapien
aactgggagcagtgcccactttggg

SEQ ID NO: 2226123 - DNA, 25 bp, Homo sapien
gaactgggagcagtgcccactttgg

SEQ ID NO: 2226124 - DNA, 25 bp, Homo sapien
aacattcaccccactgagggcgctg

SEQ ID NO: 2226125 - DNA, 25 bp, Homo sapien
attcaccccactgagggcgctgggt

SEQ ID NO: 2226126 - DNA, 25 bp, Homo sapien
accgatcctgacactcctgactgct

SEQ ID NO: 2226127 - DNA, 25 bp, Homo sapien
tgcaattcgcttctagaggcactcc

SEQ ID NO: 2226128 - DNA, 25 bp, Homo sapien
tgcatcagggtgaccaccgatcctg

SEQ ID NO: 2226129 - DNA, 25 bp, Homo sapien
tgggaccgggacctgcaattcgctt

SEQ ID NO: 2226130 - DNA, 25 bp, Homo sapien
gagaagggctaaatactttgaagct

SEQ ID NO: 2226131 - DNA, 25 bp, Homo sapien
tgtaatgtgactgtcactaagcctc

SEQ ID NO: 2226132 - DNA, 25 bp, Homo sapien
gctgatcatccaaagtattgacagg

SEQ ID NO: 2226133 - DNA, 25 bp, Homo sapien
gtgactgtcactaagcctccaaatg

SEQ ID NO: 2226134 - DNA, 25 bp, Homo sapien
tccacctttggtgtgactgacctaa

SEQ ID NO: 2226135 - DNA, 25 bp, Homo sapien
acactccacctttggtgtgactgac

SEQ ID NO: 2226136 - DNA, 25 bp, Homo sapien
tgtgactgacctaaaaacagttggt

SEQ ID NO: 2226137 - DNA, 25 bp, Homo sapien
tttggtgtgactgacctaaaaacag

SEQ ID NO: 2226138 - DNA, 25 bp, Homo sapien
taaacccttagtcttatgggctgga

SEQ ID NO: 2226139 - DNA, 25 bp, Homo sapien
aactggcacttagacactttttagg

SEQ ID NO: 2226140 - DNA, 25 bp, Homo sapien
cagcctagatagaataaactggcac

SEQ ID NO: 2226141 - DNA, 25 bp, Homo sapien
catacacaaggtctcagttgaatca

SEQ ID NO: 2226142 - DNA, 25 bp, Homo sapien
tccagtatagtaatagattgatttc

SEQ ID NO: 2226143 - DNA, 25 bp, Homo sapien
taatgtttgccaaattgatagtagg

SEQ ID NO: 2226144 - DNA, 25 bp, Homo sapien
ggtaccattgacttctccagtatag

SEQ ID NO: 2226145 - DNA, 25 bp, Homo sapien
agtaatagattgatttcaggatgac

SEQ ID NO: 2226146 - DNA, 25 bp, Homo sapien
gatagcatcttctcgtggttccagc

SEQ ID NO: 2226147 - DNA, 25 bp, Homo sapien
tctgcattgatgatttgaaaccgcc

SEQ ID NO: 2226148 - DNA, 25 bp, Homo sapien
tacttctgaatcataggcccgagct

SEQ ID NO: 2226149 - DNA, 25 bp, Homo sapien
gagaacttcaggctaacatccgaca

SEQ ID NO: 2226150 - DNA, 25 bp, Homo sapien
ctatccacgaaatttgttcccaacg

SEQ ID NO: 2226151 - DNA, 25 bp, Homo sapien
ttctggaaggctcaggtaccctctt

SEQ ID NO: 2226152 - DNA, 25 bp, Homo sapien
tcactagtcgagctagccatctcct

SEQ ID NO: 2226153 - DNA, 25 bp, Homo sapien
tccccagaatcactagtcgagctag

SEQ ID NO: 2226154 - DNA, 25 bp, Homo sapien
gagctagccatctcctcttcggcaa

SEQ ID NO: 2226155 - DNA, 25 bp, Homo sapien
tgctagagctactgctgtcagattc

SEQ ID NO: 2226156 - DNA, 25 bp, Homo sapien
cccatgggcgacaggttccgagacc

SEQ ID NO: 2226157 - DNA, 25 bp, Homo sapien
agatgtaccgcagccgaatggcgca

SEQ ID NO: 2226158 - DNA, 25 bp, Homo sapien
atggcgcagtatgagaccccgagat

SEQ ID NO: 2226159 - DNA, 25 bp, Homo sapien
tgcagctagagtgccgagatgtacc

SEQ ID NO: 2226160 - DNA, 25 bp, Homo sapien
tacaaactctaccagggagaccgcg

SEQ ID NO: 2226161 - DNA, 25 bp, Homo sapien
ctctcagaaaaaaagtagttgttct

SEQ ID NO: 2226162 - DNA, 25 bp, Homo sapien
ctcctctcagaaaaaaagtagttgt

SEQ ID NO: 2226163 - DNA, 25 bp, Homo sapien
tctcagaaaaaaagtagttgttctc

SEQ ID NO: 2226164 - DNA, 25 bp, Homo sapien
cagaaaaaaagtagttgttctccat

SEQ ID NO: 2226165 - DNA, 25 bp, Homo sapien
gagattctgtttaattcagtaagac

SEQ ID NO: 2226166 - DNA, 25 bp, Homo sapien
acttatgcttactggactgaaattt

SEQ ID NO: 2226167 - DNA, 25 bp, Homo sapien
ttactggactgaaatttgaagtcat

SEQ ID NO: 2226168 - DNA, 25 bp, Homo sapien
tgtttaattcagtaagacttatgct

SEQ ID NO: 2226169 - DNA, 25 bp, Homo sapien
ggctagggcaagacaaaatggctgc

SEQ ID NO: 2226170 - DNA, 25 bp, Homo sapien
ataactgatttgggttggggctagg

SEQ ID NO: 2226171 - DNA, 25 bp, Homo sapien
caggcagctcgataaaaataactga

SEQ ID NO: 2226172 - DNA, 25 bp, Homo sapien
ttggggctagggcaagacaaaatgg

SEQ ID NO: 2226173 - DNA, 25 bp, Homo sapien
gaaccattctaaacagaccctgatg

SEQ ID NO: 2226174 - DNA, 25 bp, Homo sapien
gaccctgatgttgtttgattaagaa

SEQ ID NO: 2226175 - DNA, 25 bp, Homo sapien
atttttgccagagcagcagccgtcc

SEQ ID NO: 2226176 - DNA, 25 bp, Homo sapien
gaagggcaagtgtttgctaatcact

SEQ ID NO: 2226177 - DNA, 25 bp, Homo sapien
tgcctactctgaatgtaatatgtac

SEQ ID NO: 2226178 - DNA, 25 bp, Homo sapien
gtactgtgatgttcccaacaccaat

SEQ ID NO: 2226179 - DNA, 25 bp, Homo sapien
ctgaacttaagtgtagcctgcattt

SEQ ID NO: 2226180 - DNA, 25 bp, Homo sapien
gattccaagcgtatatccatcttag

SEQ ID NO: 2226181 - DNA, 25 bp, Homo sapien
tgtactgccagggaaatagtccttt

SEQ ID NO: 2226182 - DNA, 25 bp, Homo sapien
ctgttgtactgccagggaaatagtc

SEQ ID NO: 2226183 - DNA, 25 bp, Homo sapien
tgttgtactgccagggaaatagtcc

SEQ ID NO: 2226184 - DNA, 25 bp, Homo sapien
gttgtactgccagggaaatagtcct

SEQ ID NO: 2226185 - DNA, 25 bp, Homo sapien
gacattcgcagaaacagaggatatt

SEQ ID NO: 2226186 - DNA, 25 bp, Homo sapien
ttggatgctggatatgtgtatgctg

SEQ ID NO: 2226187 - DNA, 25 bp, Homo sapien
tatgtgtatgctgaatgacattcgc

SEQ ID NO: 2226188 - DNA, 25 bp, Homo sapien
gcagaaacagaggatatttccaatc

SEQ ID NO: 2226189 - DNA, 25 bp, Homo sapien
gaagacctctcatctcttggcacca

SEQ ID NO: 2226190 - DNA, 25 bp, Homo sapien
tcagtcatggccctggttacaaaga

SEQ ID NO: 2226191 - DNA, 25 bp, Homo sapien
tccagacgggaagaatcaccaacac

SEQ ID NO: 2226192 - DNA, 25 bp, Homo sapien
atctgaatgcctttggattaaacat

SEQ ID NO: 2226193 - DNA, 25 bp, Homo sapien
cactgagcactgagctcatggggca

SEQ ID NO: 2226194 - DNA, 25 bp, Homo sapien
agcactgagctcatggggcaattct

SEQ ID NO: 2226195 - DNA, 25 bp, Homo sapien
caactccttctttactcaaattcat

SEQ ID NO: 2226196 - DNA, 25 bp, Homo sapien
ctgtctttgttccttcaactccttc

SEQ ID NO: 2226197 - DNA, 25 bp, Homo sapien
actcagacagtgtggtaacttcaca

SEQ ID NO: 2226198 - DNA, 25 bp, Homo sapien
tctggaattgggtctagttgcatca

SEQ ID NO: 2226199 - DNA, 25 bp, Homo sapien
tcataggtaaggcagaactcagaca

SEQ ID NO: 2226200 - DNA, 25 bp, Homo sapien
gcatcatctcagcacagtactgaat

SEQ ID NO: 2226201 - DNA, 25 bp, Homo sapien
gacgcttcaaggctggtctgactca

SEQ ID NO: 2226202 - DNA, 25 bp, Homo sapien
caaggctggtctgactcatcaacac

SEQ ID NO: 2226203 - DNA, 25 bp, Homo sapien
cacacacatgaacagacgcttcaag

SEQ ID NO: 2226204 - DNA, 25 bp, Homo sapien
gtctgactcatcaacacctttttgg

SEQ ID NO: 2226205 - DNA, 25 bp, Homo sapien
cgatataagtatgcctcctagaaga

SEQ ID NO: 2226206 - DNA, 25 bp, Homo sapien
aatagtgtattactgagtccgatat

SEQ ID NO: 2226207 - DNA, 25 bp, Homo sapien
gtccgatataagtatgcctcctaga

SEQ ID NO: 2226208 - DNA, 25 bp, Homo sapien
aaaatcttttttggcatgaatattc

SEQ ID NO: 2226209 - DNA, 25 bp, Homo sapien
cttctctaaattattccaattatag

SEQ ID NO: 2226210 - DNA, 25 bp, Homo sapien
ccatgaattaatgtgtcatctttgt

SEQ ID NO: 2226211 - DNA, 25 bp, Homo sapien
atgaattaatgtgtcatctttgtgc

SEQ ID NO: 2226212 - DNA, 25 bp, Homo sapien
atggtaatcttctctaaattattcc

SEQ ID NO: 2226213 - DNA, 25 bp, Homo sapien
ctagatttcccatattggtttgctt

SEQ ID NO: 2226214 - DNA, 25 bp, Homo sapien
tgagcaattggcttagacaggatcc

SEQ ID NO: 2226215 - DNA, 25 bp, Homo sapien
ttggctgctgagcaattggcttaga

SEQ ID NO: 2226216 - DNA, 25 bp, Homo sapien
tcccatattggtttgctttcatttg

SEQ ID NO: 2226217 - DNA, 25 bp, Homo sapien
gaggcttcagctatagttttatcca

SEQ ID NO: 2226218 - DNA, 25 bp, Homo sapien
ttagctatggcaggtccaagtgaag

SEQ ID NO: 2226219 - DNA, 25 bp, Homo sapien
ttttagctatggcaggtccaagtga

SEQ ID NO: 2226220 - DNA, 25 bp, Homo sapien
ggtccaagtgaagaggcttcagcta

SEQ ID NO: 2226221 - DNA, 25 bp, Homo sapien
atattgatggagactgtttatcagc

SEQ ID NO: 2226222 - DNA, 25 bp, Homo sapien
tattgatggagactgtttatcagct

SEQ ID NO: 2226223 - DNA, 25 bp, Homo sapien
attgatggagactgtttatcagctg

SEQ ID NO: 2226224 - DNA, 25 bp, Homo sapien
gatattgatggagactgtttatcag

SEQ ID NO: 2226225 - DNA, 25 bp, Homo sapien
ataccttctgaagtacccgcctgag

SEQ ID NO: 2226226 - DNA, 25 bp, Homo sapien
ttctgaagtacccgcctgaggctgt

SEQ ID NO: 2226227 - DNA, 25 bp, Homo sapien
taccttctgaagtacccgcctgagg

SEQ ID NO: 2226228 - DNA, 25 bp, Homo sapien
ccttctgaagtacccgcctgaggct

SEQ ID NO: 2226229 - DNA, 25 bp, Homo sapien
ctgggctttgttttaggctacttat

SEQ ID NO: 2226230 - DNA, 25 bp, Homo sapien
tctgctttagcttttggagggtgta

SEQ ID NO: 2226231 - DNA, 25 bp, Homo sapien
cagaggtgactgttggtctgttcac

SEQ ID NO: 2226232 - DNA, 25 bp, Homo sapien
tgtgtccagaacttacctatttctt

SEQ ID NO: 2226233 - DNA, 25 bp, Homo sapien
acagtaggcaagcagagctgagaac

SEQ ID NO: 2226234 - DNA, 25 bp, Homo sapien
cacgcaatccgaaaggctggtctca

SEQ ID NO: 2226235 - DNA, 25 bp, Homo sapien
tggtctcacttccaccgtgcccctt

SEQ ID NO: 2226236 - DNA, 25 bp, Homo sapien
tccgaacagcgccaagtctgtttcc

SEQ ID NO: 2226237 - DNA, 25 bp, Homo sapien
aaaattcctaatgcaagcctccata

SEQ ID NO: 2226238 - DNA, 25 bp, Homo sapien
tgggtcctgtacaagcagtccactt

SEQ ID NO: 2226239 - DNA, 25 bp, Homo sapien
gcctccatacgctgagctgtctgtt

SEQ ID NO: 2226240 - DNA, 25 bp, Homo sapien
tgaagttgttctggaactaaaattc

SEQ ID NO: 2226241 - DNA, 25 bp, Homo sapien
tccatagcatctttatgttccataa

SEQ ID NO: 2226242 - DNA, 25 bp, Homo sapien
tccataacagccttttggtaatttc

SEQ ID NO: 2226243 - DNA, 25 bp, Homo sapien
gcatctttatgttccataacagcct

SEQ ID NO: 2226244 - DNA, 25 bp, Homo sapien
tttatgttccataacagccttttgg

SEQ ID NO: 2226245 - DNA, 25 bp, Homo sapien
gtgcccacataggatcataaaccca

SEQ ID NO: 2226246 - DNA, 25 bp, Homo sapien
tggaaccctataatgccaccctttc

SEQ ID NO: 2226247 - DNA, 25 bp, Homo sapien
acaatatccaggagaagtgcccaca

SEQ ID NO: 2226248 - DNA, 25 bp, Homo sapien
tgttagacatggttgtggaacccta

SEQ ID NO: 2226249 - DNA, 25 bp, Homo sapien
tgcaattatgaagtctacaagtaca

SEQ ID NO: 2226250 - DNA, 25 bp, Homo sapien
gccatacataacaagcattcataaa

SEQ ID NO: 2226251 - DNA, 25 bp, Homo sapien
tattgtacccacaagatgatttatc

SEQ ID NO: 2226252 - DNA, 25 bp, Homo sapien
cttctgaccctaagtatttgaaaag

SEQ ID NO: 2226253 - DNA, 25 bp, Homo sapien
gcatgtttgggcaaccctcctgtgc

SEQ ID NO: 2226254 - DNA, 25 bp, Homo sapien
gcatgctggccaactcctttcagta

SEQ ID NO: 2226255 - DNA, 25 bp, Homo sapien
tcctcagactaaggggccattagtc

SEQ ID NO: 2226256 - DNA, 25 bp, Homo sapien
ctgggggcatgtttgggcaaccctc

SEQ ID NO: 2226257 - DNA, 25 bp, Homo sapien
gaataaagacatctaaagctctgcc

SEQ ID NO: 2226258 - DNA, 25 bp, Homo sapien
cccagggggattgtggaccataaga

SEQ ID NO: 2226259 - DNA, 25 bp, Homo sapien
ggaaggcccttattactctgatggg

SEQ ID NO: 2226260 - DNA, 25 bp, Homo sapien
agggaactccctgtctaagggcatt

SEQ ID NO: 2226261 - DNA, 25 bp, Homo sapien
caggacatcctgattatacacttga

SEQ ID NO: 2226262 - DNA, 25 bp, Homo sapien
cagaagttacaagtgggtttatcaa

SEQ ID NO: 2226263 - DNA, 25 bp, Homo sapien
taaacatagctatctgggattcagg

SEQ ID NO: 2226264 - DNA, 25 bp, Homo sapien
tagtgagtttattccagctcaaagc

SEQ ID NO: 2226265 - DNA, 25 bp, Homo sapien
tcaaggagcaatatacatgcacaag

SEQ ID NO: 2226266 - DNA, 25 bp, Homo sapien
ccaggctggaccaagtatcacttct

SEQ ID NO: 2226267 - DNA, 25 bp, Homo sapien
ggctaaactgctgccaaatctaatt

SEQ ID NO: 2226268 - DNA, 25 bp, Homo sapien
tagagacgagatgtcactacattgc

SEQ ID NO: 2226269 - DNA, 25 bp, Homo sapien
gcaaagctgtccttggtgtggtggg

SEQ ID NO: 2226270 - DNA, 25 bp, Homo sapien
ggagggaattcgcatctgtaaagaa

SEQ ID NO: 2226271 - DNA, 25 bp, Homo sapien
tgttccgagttatccctgagggcta

SEQ ID NO: 2226272 - DNA, 25 bp, Homo sapien
gagattaactaagagcctagtgcct

SEQ ID NO: 2226273 - DNA, 25 bp, Homo sapien
gaaactctcaattaaatgacactga

SEQ ID NO: 2226274 - DNA, 25 bp, Homo sapien
tataaacttgtaaggacatggagca

SEQ ID NO: 2226275 - DNA, 25 bp, Homo sapien
ctgaaacattctaactttcctggtg

SEQ ID NO: 2226276 - DNA, 25 bp, Homo sapien
aataagagtggcgatagtaggtatc

SEQ ID NO: 2226277 - DNA, 25 bp, Homo sapien
tggtcacgttttctcataggtattt

SEQ ID NO: 2226278 - DNA, 25 bp, Homo sapien
gatagttagctattgtacacaaatg

SEQ ID NO: 2226279 - DNA, 25 bp, Homo sapien
tattccattagtgtatgtatctatc

SEQ ID NO: 2226280 - DNA, 25 bp, Homo sapien
gctttgattttgtgctcaagattgc

SEQ ID NO: 2226281 - DNA, 25 bp, Homo sapien
tttgtgactatcaataaagctgcca

SEQ ID NO: 2226282 - DNA, 25 bp, Homo sapien
tgtacccctgtttatctatgcactg

SEQ ID NO: 2226283 - DNA, 25 bp, Homo sapien
tcgtgctgctttcttctagtcaacc

SEQ ID NO: 2226284 - DNA, 25 bp, Homo sapien
tgtggtcagagtaacatccactctg

SEQ ID NO: 2226285 - DNA, 25 bp, Homo sapien
aaagcgtttcctttcagggcagtga

SEQ ID NO: 2226286 - DNA, 25 bp, Homo sapien
cagtaccaggtgtttcccaaagcgt

SEQ ID NO: 2226287 - DNA, 25 bp, Homo sapien
gatccatagggagttctgccaggcc

SEQ ID NO: 2226288 - DNA, 25 bp, Homo sapien
cagtgatttctaccaggaccgaggc

SEQ ID NO: 2226289 - DNA, 25 bp, Homo sapien
caggcagggccttacacaattatgg

SEQ ID NO: 2226290 - DNA, 25 bp, Homo sapien
gggatgcaattggagaacacgtatg

SEQ ID NO: 2226291 - DNA, 25 bp, Homo sapien
tctcatataacagttcaaaggcagg

SEQ ID NO: 2226292 - DNA, 25 bp, Homo sapien
taaggtactgtactatgactaaagc

SEQ ID NO: 2226293 - DNA, 25 bp, Homo sapien
tctgaacggatatgaaaatttgcaa

SEQ ID NO: 2226294 - DNA, 25 bp, Homo sapien
aaactagcataattcgttagagccc

SEQ ID NO: 2226295 - DNA, 25 bp, Homo sapien
gagatagtatgtctgcctattagac

SEQ ID NO: 2226296 - DNA, 25 bp, Homo sapien
ctgcattcagacaaaggagatagta

SEQ ID NO: 2226297 - DNA, 25 bp, Homo sapien
ggatagcaatgtatggattctgcca

SEQ ID NO: 2226298 - DNA, 25 bp, Homo sapien
tagtaatgttttgcgtctcctggaa

SEQ ID NO: 2226299 - DNA, 25 bp, Homo sapien
tgcacacttacactggtgaaagact

SEQ ID NO: 2226300 - DNA, 25 bp, Homo sapien
gatttcctgaccattacaagcctcc

SEQ ID NO: 2226301 - DNA, 25 bp, Homo sapien
ggactttatgtccataccccactgt

SEQ ID NO: 2226302 - DNA, 25 bp, Homo sapien
gaatgagttgtactgtttctgcaaa

SEQ ID NO: 2226303 - DNA, 25 bp, Homo sapien
ttttgacaagtattgcattgaagct

SEQ ID NO: 2226304 - DNA, 25 bp, Homo sapien
gcttcttttggctattcaaggtccc

SEQ ID NO: 2226305 - DNA, 25 bp, Homo sapien
ttatttaatttgttggttgaggtca

SEQ ID NO: 2226306 - DNA, 25 bp, Homo sapien
taaaaaacattctacccatagcact

SEQ ID NO: 2226307 - DNA, 25 bp, Homo sapien
catcttcttaaattccagtaactct

SEQ ID NO: 2226308 - DNA, 25 bp, Homo sapien
atttgttggttgaggtcatgttttc

SEQ ID NO: 2226309 - DNA, 25 bp, Homo sapien
caattgtttttatagggttactgtg

SEQ ID NO: 2226310 - DNA, 25 bp, Homo sapien
caactgacttatctgatttaagtcc

SEQ ID NO: 2226311 - DNA, 25 bp, Homo sapien
gatgacagggttaaatcaactgact

SEQ ID NO: 2226312 - DNA, 25 bp, Homo sapien
gctgagtcacaaatttggtttcctg

SEQ ID NO: 2226313 - DNA, 25 bp, Homo sapien
tttgaaacagtctctagaggtgact

SEQ ID NO: 2226314 - DNA, 25 bp, Homo sapien
attgccatctttaaccattgctttc

SEQ ID NO: 2226315 - DNA, 25 bp, Homo sapien
cagtctctagaggtgactctaagta

SEQ ID NO: 2226316 - DNA, 25 bp, Homo sapien
tgccatctttaaccattgctttcat

SEQ ID NO: 2226317 - DNA, 25 bp, Homo sapien
ggaggaaattactatactggctgtg

SEQ ID NO: 2226318 - DNA, 25 bp, Homo sapien
gggaaattggagtattactccacaa

SEQ ID NO: 2226319 - DNA, 25 bp, Homo sapien
tgaaaagtaagactgcttctaggtc

SEQ ID NO: 2226320 - DNA, 25 bp, Homo sapien
taggtcaccttgagctccttgtgcc

SEQ ID NO: 2226321 - DNA, 25 bp, Homo sapien
ttagcttccaaaggtataataaatc

SEQ ID NO: 2226322 - DNA, 25 bp, Homo sapien
caaaggtataataaatccatactgc

SEQ ID NO: 2226323 - DNA, 25 bp, Homo sapien
atcaaatgtgataaaccactggcat

SEQ ID NO: 2226324 - DNA, 25 bp, Homo sapien
tcaaatgtgataaaccactggcatt

SEQ ID NO: 2226325 - DNA, 25 bp, Homo sapien
catttctggaagctaatgtttgcca

SEQ ID NO: 2226326 - DNA, 25 bp, Homo sapien
ttttgcctagaatctctcctaaatt

SEQ ID NO: 2226327 - DNA, 25 bp, Homo sapien
tctcatttctggaagctaatgtttg

SEQ ID NO: 2226328 - DNA, 25 bp, Homo sapien
tctctcctaaattaattcgtttctc

SEQ ID NO: 2226329 - DNA, 25 bp, Homo sapien
caggttgagtgctgacccagggtga

SEQ ID NO: 2226330 - DNA, 25 bp, Homo sapien
ccagggtgaagtacaacttcctgtt

SEQ ID NO: 2226331 - DNA, 25 bp, Homo sapien
gcaggttacagagtcttatttgaaa

SEQ ID NO: 2226332 - DNA, 25 bp, Homo sapien
cctgtggagcaggttacagagtctt

SEQ ID NO: 2226333 - DNA, 25 bp, Homo sapien
aatttatgggaacaaggcctctgaa

SEQ ID NO: 2226334 - DNA, 25 bp, Homo sapien
gactttatttgtctaacagggccac

SEQ ID NO: 2226335 - DNA, 25 bp, Homo sapien
ccaagccgaatggtaagagcaatgg

SEQ ID NO: 2226336 - DNA, 25 bp, Homo sapien
gcaatttgtactagctggcatgaga

SEQ ID NO: 2226337 - DNA, 25 bp, Homo sapien
aaccaggtaatgcaataaatgctgc

SEQ ID NO: 2226338 - DNA, 25 bp, Homo sapien
ctgcaggtagcctaaaaccaggtaa

SEQ ID NO: 2226339 - DNA, 25 bp, Homo sapien
gaaatgccttaacagccttagctgc

SEQ ID NO: 2226340 - DNA, 25 bp, Homo sapien
taatctactcctatcccagttggac

SEQ ID NO: 2226341 - DNA, 25 bp, Homo sapien
tatggattaatctcaatttaacttg

SEQ ID NO: 2226342 - DNA, 25 bp, Homo sapien
ttcttaggatagagtttcataacag

SEQ ID NO: 2226343 - DNA, 25 bp, Homo sapien
gatagagtttcataacagggaagta

SEQ ID NO: 2226344 - DNA, 25 bp, Homo sapien
tcctcaaattattgttccccttgta

SEQ ID NO: 2226345 - DNA, 25 bp, Homo sapien
agcggggtggggagagtgcttcaca

SEQ ID NO: 2226346 - DNA, 25 bp, Homo sapien
catcttcacatgaccagcggggtgg

SEQ ID NO: 2226347 - DNA, 25 bp, Homo sapien
accatggttgaaggcaaaagggaag

SEQ ID NO: 2226348 - DNA, 25 bp, Homo sapien
gcacatcttcacatgaccagcgggg

SEQ ID NO: 2226349 - DNA, 25 bp, Homo sapien
taagatccagcaatgagccgagttc

SEQ ID NO: 2226350 - DNA, 25 bp, Homo sapien
gatccagcaatgagccgagttcgca

SEQ ID NO: 2226351 - DNA, 25 bp, Homo sapien
cgtaagatccagcaatgagccgagt

SEQ ID NO: 2226352 - DNA, 25 bp, Homo sapien
aagatccagcaatgagccgagttcg

SEQ ID NO: 2226353 - DNA, 25 bp, Homo sapien
gaaataatgaagtgctgacgcatgc

SEQ ID NO: 2226354 - DNA, 25 bp, Homo sapien
gccaggcacggtatgagacaattta

SEQ ID NO: 2226355 - DNA, 25 bp, Homo sapien
cagttgagtggtttatagtgtattc

SEQ ID NO: 2226356 - DNA, 25 bp, Homo sapien
gacaagatacagattgccaggcacg

SEQ ID NO: 2226357 - DNA, 25 bp, Homo sapien
tgacactagctgtggatctatctaa

SEQ ID NO: 2226358 - DNA, 25 bp, Homo sapien
gatgcatattccttctataacccag

SEQ ID NO: 2226359 - DNA, 25 bp, Homo sapien
atatgggttttattgtgttgatgca

SEQ ID NO: 2226360 - DNA, 25 bp, Homo sapien
gaaattgtttttcggcatcagttga

SEQ ID NO: 2226361 - DNA, 25 bp, Homo sapien
ccagcacggtaatgggtctagtcca

SEQ ID NO: 2226362 - DNA, 25 bp, Homo sapien
tcagcatgtgttgcatcctgccaag

SEQ ID NO: 2226363 - DNA, 25 bp, Homo sapien
caaagttgggactatgctgggtcac

SEQ ID NO: 2226364 - DNA, 25 bp, Homo sapien
gggagtgccacaagtccagtagtga

SEQ ID NO: 2226365 - DNA, 25 bp, Homo sapien
gctagtcctgcctttcagtccccct

SEQ ID NO: 2226366 - DNA, 25 bp, Homo sapien
tgtgttttaaaggtggaggcggtca

SEQ ID NO: 2226367 - DNA, 25 bp, Homo sapien
tgcccttgccagcttgaatgcctgg

SEQ ID NO: 2226368 - DNA, 25 bp, Homo sapien
caaagggggttgcccttgccagctt

SEQ ID NO: 2226369 - DNA, 25 bp, Homo sapien
ggcacaactgaccaatcctagagaa

SEQ ID NO: 2226370 - DNA, 25 bp, Homo sapien
taactgtcttgaggaaattccaaga

SEQ ID NO: 2226371 - DNA, 25 bp, Homo sapien
gaagcacagaccgaaaagactataa

SEQ ID NO: 2226372 - DNA, 25 bp, Homo sapien
catccaggaaaatatactaaggcac

SEQ ID NO: 2226373 - DNA, 25 bp, Homo sapien
aaatccataagaaatttctggagaa

SEQ ID NO: 2226374 - DNA, 25 bp, Homo sapien
tctaagaaagatgtctcctaaaaga

SEQ ID NO: 2226375 - DNA, 25 bp, Homo sapien
agaaagatgtctcctaaaagataca

SEQ ID NO: 2226376 - DNA, 25 bp, Homo sapien
aatagtctctagtctacataaaatc

SEQ ID NO: 2226377 - DNA, 25 bp, Homo sapien
catcaccagaccgagaaggtacagc

SEQ ID NO: 2226378 - DNA, 25 bp, Homo sapien
ttcatcaccagaccgagaaggtaca

SEQ ID NO: 2226379 - DNA, 25 bp, Homo sapien
accagaccgagaaggtacagcctgg

SEQ ID NO: 2226380 - DNA, 25 bp, Homo sapien
tcaccagaccgagaaggtacagcct

SEQ ID NO: 2226381 - DNA, 25 bp, Homo sapien
aaagtgttgaaaacgtatgctgaca

SEQ ID NO: 2226382 - DNA, 25 bp, Homo sapien
caaaaagattgaactatatgctgtc

SEQ ID NO: 2226383 - DNA, 25 bp, Homo sapien
gagaggtggctacagtaatatcaga

SEQ ID NO: 2226384 - DNA, 25 bp, Homo sapien
gaggctcgctttatatataatcaca

SEQ ID NO: 2226385 - DNA, 25 bp, Homo sapien
tatattaacctcactccaaaggtga

SEQ ID NO: 2226386 - DNA, 25 bp, Homo sapien
aaaaaatcaccccagcatctcagct

SEQ ID NO: 2226387 - DNA, 25 bp, Homo sapien
catctcagctagattataaaatgtg

SEQ ID NO: 2226388 - DNA, 25 bp, Homo sapien
actacaatgctaaatgacgctgaca

SEQ ID NO: 2226389 - DNA, 25 bp, Homo sapien
atgttcaatacctctgttgttgcca

SEQ ID NO: 2226390 - DNA, 25 bp, Homo sapien
aaatgatttgagtcctgaacgtagg

SEQ ID NO: 2226391 - DNA, 25 bp, Homo sapien
taaccagtgcctgcaactgctctgt

SEQ ID NO: 2226392 - DNA, 25 bp, Homo sapien
tgagagcagtctatcaggcattgtg

SEQ ID NO: 2226393 - DNA, 25 bp, Homo sapien
caaatagttagaatccctcctaggg

SEQ ID NO: 2226394 - DNA, 25 bp, Homo sapien
gatgcagacgaagccaccaaatagc

SEQ ID NO: 2226395 - DNA, 25 bp, Homo sapien
caatgcctgtatgctcaatgttaaa

SEQ ID NO: 2226396 - DNA, 25 bp, Homo sapien
ctcaagactgggtgatcgatcaaga

SEQ ID NO: 2226397 - DNA, 25 bp, Homo sapien
cctgagttccaaaaggcagtaggga

SEQ ID NO: 2226398 - DNA, 25 bp, Homo sapien
gccatctcaggtcgatgacatctga

SEQ ID NO: 2226399 - DNA, 25 bp, Homo sapien
gcgccaggagccatctcaggtcgat

SEQ ID NO: 2226400 - DNA, 25 bp, Homo sapien
tccttgcgccaggagccatctcagg

SEQ ID NO: 2226401 - DNA, 25 bp, Homo sapien
caggagccatctcaggtcgatgaca

SEQ ID NO: 2226402 - DNA, 25 bp, Homo sapien
ctgagtaattattgaccgaagtctt

SEQ ID NO: 2226403 - DNA, 25 bp, Homo sapien
ctggagatgtccagtcatatgtcca

SEQ ID NO: 2226404 - DNA, 25 bp, Homo sapien
ggagatgtccagtcatatgtccatc

SEQ ID NO: 2226405 - DNA, 25 bp, Homo sapien
gactggagatgtccagtcatatgtc

SEQ ID NO: 2226406 - DNA, 25 bp, Homo sapien
ctgttgatgactgactggagatgtc

SEQ ID NO: 2226407 - DNA, 25 bp, Homo sapien
agaagatactgaatgactcgacatt

SEQ ID NO: 2226408 - DNA, 25 bp, Homo sapien
gatactgaatgactcgacattgcta

SEQ ID NO: 2226409 - DNA, 25 bp, Homo sapien
aagatactgaatgactcgacattgc

SEQ ID NO: 2226410 - DNA, 25 bp, Homo sapien
ctgaatgactcgacattgctaatga

SEQ ID NO: 2226411 - DNA, 25 bp, Homo sapien
aaggcagaacaggagttgaagcctg

SEQ ID NO: 2226412 - DNA, 25 bp, Homo sapien
ctaaggcagaacaggagttgaagcc

SEQ ID NO: 2226413 - DNA, 25 bp, Homo sapien
gcaacaagaaaacattgtctttctt

SEQ ID NO: 2226414 - DNA, 25 bp, Homo sapien
gcagaacaggagttgaagcctgagc

SEQ ID NO: 2226415 - DNA, 25 bp, Homo sapien
cccaggtagatctatcaagtggcct

SEQ ID NO: 2226416 - DNA, 25 bp, Homo sapien
gccacgtggaagtaaagtagcagct

SEQ ID NO: 2226417 - DNA, 25 bp, Homo sapien
tacactgggcactcgaattgagggc

SEQ ID NO: 2226418 - DNA, 25 bp, Homo sapien
gaatattctgagatggtgaacctcc

SEQ ID NO: 2226419 - DNA, 25 bp, Homo sapien
caccaaattctggtttgaaacacca

SEQ ID NO: 2226420 - DNA, 25 bp, Homo sapien
gattggattttcttggacgttgata

SEQ ID NO: 2226421 - DNA, 25 bp, Homo sapien
ggacgttgatacctgccttcaccaa

SEQ ID NO: 2226422 - DNA, 25 bp, Homo sapien
tctgctcttccttagacgagcctct

SEQ ID NO: 2226423 - DNA, 25 bp, Homo sapien
ggtcattactatgtggatttccaga

SEQ ID NO: 2226424 - DNA, 25 bp, Homo sapien
ctgggtcattactatgtggatttcc

SEQ ID NO: 2226425 - DNA, 25 bp, Homo sapien
gtcattactatgtggatttccagaa

SEQ ID NO: 2226426 - DNA, 25 bp, Homo sapien
gggtcattactatgtggatttccag

SEQ ID NO: 2226427 - DNA, 25 bp, Homo sapien
gttgatgttaagaaggtagttagga

SEQ ID NO: 2226428 - DNA, 25 bp, Homo sapien
taacactcttcatcgcactggatag

SEQ ID NO: 2226429 - DNA, 25 bp, Homo sapien
taagaaggtagttaggatatgtctg

SEQ ID NO: 2226430 - DNA, 25 bp, Homo sapien
cactggatagttaaggttgatgtta

SEQ ID NO: 2226431 - DNA, 25 bp, Homo sapien
tggttctataggagatttgcatgtg

SEQ ID NO: 2226432 - DNA, 25 bp, Homo sapien
tggtggttctataggagatttgcat

SEQ ID NO: 2226433 - DNA, 25 bp, Homo sapien
gttctataggagatttgcatgtgag

SEQ ID NO: 2226434 - DNA, 25 bp, Homo sapien
tataggagatttgcatgtgagtcag

SEQ ID NO: 2226435 - DNA, 25 bp, Homo sapien
caagtccaaagatagtctgtagatg

SEQ ID NO: 2226436 - DNA, 25 bp, Homo sapien
atctgacaggtagccttgcgggttg

SEQ ID NO: 2226437 - DNA, 25 bp, Homo sapien
ttgcagctcaagtccaaagatagtc

SEQ ID NO: 2226438 - DNA, 25 bp, Homo sapien
caaaatctgacaggtagccttgcgg

SEQ ID NO: 2226439 - DNA, 25 bp, Homo sapien
tagtgtatgtgaggtgttttcctac

SEQ ID NO: 2226440 - DNA, 25 bp, Homo sapien
gttttcctaccagcgatttcaggca

SEQ ID NO: 2226441 - DNA, 25 bp, Homo sapien
cactatatacactaccctctcatta

SEQ ID NO: 2226442 - DNA, 25 bp, Homo sapien
gaatcttccacttgtctagcatacc

SEQ ID NO: 2226443 - DNA, 25 bp, Homo sapien
tataggtgggtacatgactgtctac

SEQ ID NO: 2226444 - DNA, 25 bp, Homo sapien
aaaacagctagatattggatgtcac

SEQ ID NO: 2226445 - DNA, 25 bp, Homo sapien
ttcaaatgaacactgagcaaggcca

SEQ ID NO: 2226446 - DNA, 25 bp, Homo sapien
tgagcacatctgttaatagtcactg

SEQ ID NO: 2226447 - DNA, 25 bp, Homo sapien
aataaaggattatctgtgtcactca

SEQ ID NO: 2226448 - DNA, 25 bp, Homo sapien
aatacatgagatactggatctggca

SEQ ID NO: 2226449 - DNA, 25 bp, Homo sapien
tcagtaaccatacactgatgctttc

SEQ ID NO: 2226450 - DNA, 25 bp, Homo sapien
gatctggcagaagagctttgtaaac

SEQ ID NO: 2226451 - DNA, 25 bp, Homo sapien
tctgtaatgtaagtctgcccactct

SEQ ID NO: 2226452 - DNA, 25 bp, Homo sapien
ccactcttgtgaggtatcatcctga

SEQ ID NO: 2226453 - DNA, 25 bp, Homo sapien
acttccaaagactggctggcaacca

SEQ ID NO: 2226454 - DNA, 25 bp, Homo sapien
gagtactactgtcaaacgaatttcc

SEQ ID NO: 2226455 - DNA, 25 bp, Homo sapien
attacttaacagatgatagaggtcc

SEQ ID NO: 2226456 - DNA, 25 bp, Homo sapien
gaggtccacagtcctttatctgaaa

SEQ ID NO: 2226457 - DNA, 25 bp, Homo sapien
aattttgtgcatataccatactaca

SEQ ID NO: 2226458 - DNA, 25 bp, Homo sapien
gggcaagatgtttcagaattatgaa

SEQ ID NO: 2226459 - DNA, 25 bp, Homo sapien
gcatcagcaaatctatcatccagaa

SEQ ID NO: 2226460 - DNA, 25 bp, Homo sapien
agcaaatctatcatccagaatcttg

SEQ ID NO: 2226461 - DNA, 25 bp, Homo sapien
gcaaatctatcatccagaatcttga

SEQ ID NO: 2226462 - DNA, 25 bp, Homo sapien
gcagcatcagcaaatctatcatcca

SEQ ID NO: 2226463 - DNA, 25 bp, Homo sapien
ttggaagaccaagtcctaaaggatc

SEQ ID NO: 2226464 - DNA, 25 bp, Homo sapien
catccttatctgtgagcttcttata

SEQ ID NO: 2226465 - DNA, 25 bp, Homo sapien
tgtccacaacttcacttggaagacc

SEQ ID NO: 2226466 - DNA, 25 bp, Homo sapien
gctttgactaaatgaaccctgatga

SEQ ID NO: 2226467 - DNA, 25 bp, Homo sapien
ttcccaatgaacttctccagttcac

SEQ ID NO: 2226468 - DNA, 25 bp, Homo sapien
caatgaacttctccagttcacgtac

SEQ ID NO: 2226469 - DNA, 25 bp, Homo sapien
ccaatgaacttctccagttcacgta

SEQ ID NO: 2226470 - DNA, 25 bp, Homo sapien
tcccaatgaacttctccagttcacg

SEQ ID NO: 2226471 - DNA, 25 bp, Homo sapien
tgctgagtcttgaggtccaagttta

SEQ ID NO: 2226472 - DNA, 25 bp, Homo sapien
gagtcttgaggtccaagtttatctg

SEQ ID NO: 2226473 - DNA, 25 bp, Homo sapien
gtgctgagtcttgaggtccaagttt

SEQ ID NO: 2226474 - DNA, 25 bp, Homo sapien
agtcttgaggtccaagtttatctgc

SEQ ID NO: 2226475 - DNA, 25 bp, Homo sapien
ttttattgatggttaaagtatgcat

SEQ ID NO: 2226476 - DNA, 25 bp, Homo sapien
cttttattgatggttaaagtatgca

SEQ ID NO: 2226477 - DNA, 25 bp, Homo sapien
gctgctgtcacacgcattctcctta

SEQ ID NO: 2226478 - DNA, 25 bp, Homo sapien
ccttatcctcaaaggtatttagatg

SEQ ID NO: 2226479 - DNA, 25 bp, Homo sapien
cctcaaaggtatttagatgcacata

SEQ ID NO: 2226480 - DNA, 25 bp, Homo sapien
tgttcatgtgaaggtagccctcttg

SEQ ID NO: 2226481 - DNA, 25 bp, Homo sapien
cacatgcatggctctgggtacttct

SEQ ID NO: 2226482 - DNA, 25 bp, Homo sapien
tgtggcaataagaacccgctcaaga

SEQ ID NO: 2226483 - DNA, 25 bp, Homo sapien
cctccttctgggctatgagagtcca

SEQ ID NO: 2226484 - DNA, 25 bp, Homo sapien
gggcacctgcccacaatctataggg

SEQ ID NO: 2226485 - DNA, 25 bp, Homo sapien
gtgggagttttagtcatttggatga

SEQ ID NO: 2226486 - DNA, 25 bp, Homo sapien
ctgtgggagttttagtcatttggat

SEQ ID NO: 2226487 - DNA, 25 bp, Homo sapien
tggatgataatttctattccacgga

SEQ ID NO: 2226488 - DNA, 25 bp, Homo sapien
tgataatttctattccacggaaaca

SEQ ID NO: 2226489 - DNA, 25 bp, Homo sapien
tagcggcaggttaaatcagctcccc

SEQ ID NO: 2226490 - DNA, 25 bp, Homo sapien
tcttgtagaaaagcatagcggcagg

SEQ ID NO: 2226491 - DNA, 25 bp, Homo sapien
tcaaaaggatcataccagcagctac

SEQ ID NO: 2226492 - DNA, 25 bp, Homo sapien
ggaaactaaatccttgtggctgacc

SEQ ID NO: 2226493 - DNA, 25 bp, Homo sapien
ttttgataaacagtttaggttcatc

SEQ ID NO: 2226494 - DNA, 25 bp, Homo sapien
aacagtttaggttcatcaaaaatga

SEQ ID NO: 2226495 - DNA, 25 bp, Homo sapien
aaacagtttaggttcatcaaaaatg

SEQ ID NO: 2226496 - DNA, 25 bp, Homo sapien
gataaacagtttaggttcatcaaaa

SEQ ID NO: 2226497 - DNA, 25 bp, Homo sapien
gttttcgatattgtatccatgaagg

SEQ ID NO: 2226498 - DNA, 25 bp, Homo sapien
gaaaaagttttcgatattgtatcca

SEQ ID NO: 2226499 - DNA, 25 bp, Homo sapien
caagtccttgaatgccatctgaaaa

SEQ ID NO: 2226500 - DNA, 25 bp, Homo sapien
aagaaacaagtccttgaatgccatc

SEQ ID NO: 2226501 - DNA, 25 bp, Homo sapien
gaaactgtggcaaaatctcagactc

SEQ ID NO: 2226502 - DNA, 25 bp, Homo sapien
atgaaactgtggcaaaatctcagac

SEQ ID NO: 2226503 - DNA, 25 bp, Homo sapien
ttttatgaaactgtggcaaaatctc

SEQ ID NO: 2226504 - DNA, 25 bp, Homo sapien
ttatgaaactgtggcaaaatctcag

SEQ ID NO: 2226505 - DNA, 25 bp, Homo sapien
gttgtatttccacatctgcatacat

SEQ ID NO: 2226506 - DNA, 25 bp, Homo sapien
tctttccttgaatatgcgtgagcct

SEQ ID NO: 2226507 - DNA, 25 bp, Homo sapien
tcaaaaaatgccacctagtagtagt

SEQ ID NO: 2226508 - DNA, 25 bp, Homo sapien
tacgtggtggtctacatatactatg

SEQ ID NO: 2226509 - DNA, 25 bp, Homo sapien
gaaaaagtgacggacaatagatacc

SEQ ID NO: 2226510 - DNA, 25 bp, Homo sapien
tgctaaagacagtaatcgcaaaaag

SEQ ID NO: 2226511 - DNA, 25 bp, Homo sapien
gtaatcgcaaaaagaaagcttcctg

SEQ ID NO: 2226512 - DNA, 25 bp, Homo sapien
tggccgcttattctttgctaaagac

SEQ ID NO: 2226513 - DNA, 25 bp, Homo sapien
tcagcaagcaaatggccgcttattc

SEQ ID NO: 2226514 - DNA, 25 bp, Homo sapien
tctagcaacaataatactaggtttc

SEQ ID NO: 2226515 - DNA, 25 bp, Homo sapien
gacatcatggttaccatagaaataa

SEQ ID NO: 2226516 - DNA, 25 bp, Homo sapien
aataaaaatctagcaacaataatac

SEQ ID NO: 2226517 - DNA, 25 bp, Homo sapien
tgacatcatggttaccatagaaata

SEQ ID NO: 2226518 - DNA, 25 bp, Homo sapien
ggtggacatcttggcattatgctag

SEQ ID NO: 2226519 - DNA, 25 bp, Homo sapien
tatgctagttgttgttggagtaaac

SEQ ID NO: 2226520 - DNA, 25 bp, Homo sapien
ggcattatgctagttgttgttggag

SEQ ID NO: 2226521 - DNA, 25 bp, Homo sapien
ttgttggagtaaacttgatgctgcc

SEQ ID NO: 2226522 - DNA, 25 bp, Homo sapien
cctggccatgttctaaactgagata

SEQ ID NO: 2226523 - DNA, 25 bp, Homo sapien
ggcatcatgggcctggccatgttct

SEQ ID NO: 2226524 - DNA, 25 bp, Homo sapien
ctaaactgagatacacaattggcat

SEQ ID NO: 2226525 - DNA, 25 bp, Homo sapien
cactcttatgtgagttggcatcatg

SEQ ID NO: 2226526 - DNA, 25 bp, Homo sapien
tgaagacagcatgttggaggagacc

SEQ ID NO: 2226527 - DNA, 25 bp, Homo sapien
gcagaagcactttaatcctagaggg

SEQ ID NO: 2226528 - DNA, 25 bp, Homo sapien
tcatgggctgagatacggaagtcac

SEQ ID NO: 2226529 - DNA, 25 bp, Homo sapien
gaagagcacattctaccacatgtgg

SEQ ID NO: 2226530 - DNA, 25 bp, Homo sapien
gagcaacagaaatgaccgacagatc

SEQ ID NO: 2226531 - DNA, 25 bp, Homo sapien
tcggaatgacaggtcgctttaaggg

SEQ ID NO: 2226532 - DNA, 25 bp, Homo sapien
caacagaaatgaccgacagatccct

SEQ ID NO: 2226533 - DNA, 25 bp, Homo sapien
ggaatgacaggtcgctttaagggcc

SEQ ID NO: 2226534 - DNA, 25 bp, Homo sapien
gaagggcttgcagagtgctgacaat

SEQ ID NO: 2226535 - DNA, 25 bp, Homo sapien
tgtccacaggattcacagccgtctc

SEQ ID NO: 2226536 - DNA, 25 bp, Homo sapien
atgtccacaggattcacagccgtct

SEQ ID NO: 2226537 - DNA, 25 bp, Homo sapien
ggcttgcagagtgctgacaatgtcc

SEQ ID NO: 2226538 - DNA, 25 bp, Homo sapien
gaaattacgcagttagcggagaagt

SEQ ID NO: 2226539 - DNA, 25 bp, Homo sapien
gccttggaaattacgcagttagcgg

SEQ ID NO: 2226540 - DNA, 25 bp, Homo sapien
ttggaaattacgcagttagcggaga

SEQ ID NO: 2226541 - DNA, 25 bp, Homo sapien
ccttggaaattacgcagttagcgga

SEQ ID NO: 2226542 - DNA, 25 bp, Homo sapien
ttataagccccagatctgagagtgg

SEQ ID NO: 2226543 - DNA, 25 bp, Homo sapien
tagccctgtctcatgtactgaggca

SEQ ID NO: 2226544 - DNA, 25 bp, Homo sapien
aaatatccaatcaggtgacagccag

SEQ ID NO: 2226545 - DNA, 25 bp, Homo sapien
tgacagccagtgttgtccgcctctg

SEQ ID NO: 2226546 - DNA, 25 bp, Homo sapien
tgtggtccagaaaaagtttggccag

SEQ ID NO: 2226547 - DNA, 25 bp, Homo sapien
caggttttggcagtagatcttgttt

SEQ ID NO: 2226548 - DNA, 25 bp, Homo sapien
tccagaaaaagtttggccagcaggc

SEQ ID NO: 2226549 - DNA, 25 bp, Homo sapien
agtttggccagcaggcacaggtttt

SEQ ID NO: 2226550 - DNA, 25 bp, Homo sapien
gaacctttgcgatatatctcatcac

SEQ ID NO: 2226551 - DNA, 25 bp, Homo sapien
tgtgatttggccttgcagccttaac

SEQ ID NO: 2226552 - DNA, 25 bp, Homo sapien
gtcccagccgtgcatattcttcagg

SEQ ID NO: 2226553 - DNA, 25 bp, Homo sapien
gaattcacacatatagagacgtccc

SEQ ID NO: 2226554 - DNA, 25 bp, Homo sapien
gtgttcccataggtctgtctgtgtt

SEQ ID NO: 2226555 - DNA, 25 bp, Homo sapien
tgttcccataggtctgtctgtgttc

SEQ ID NO: 2226556 - DNA, 25 bp, Homo sapien
tgtgttcccataggtctgtctgtgt

SEQ ID NO: 2226557 - DNA, 25 bp, Homo sapien
gctatgcgcatctgcacttttatta

SEQ ID NO: 2226558 - DNA, 25 bp, Homo sapien
ctgctatgcgcatctgcacttttat

SEQ ID NO: 2226559 - DNA, 25 bp, Homo sapien
cacctgcatttttatgatagagttt

SEQ ID NO: 2226560 - DNA, 25 bp, Homo sapien
gcacacctgcatttttatgatagag

SEQ ID NO: 2226561 - DNA, 25 bp, Homo sapien
tgccacgactgactaccccttgagt

SEQ ID NO: 2226562 - DNA, 25 bp, Homo sapien
cacgactgactaccccttgagtttc

SEQ ID NO: 2226563 - DNA, 25 bp, Homo sapien
tcattcactgccacgactgactacc

SEQ ID NO: 2226564 - DNA, 25 bp, Homo sapien
gactgactaccccttgagtttcaag

SEQ ID NO: 2226565 - DNA, 25 bp, Homo sapien
tcatactggtcacagtctcccaaat

SEQ ID NO: 2226566 - DNA, 25 bp, Homo sapien
tactggtcacagtctcccaaattgg

SEQ ID NO: 2226567 - DNA, 25 bp, Homo sapien
tttagcagagatagtttggtgaagt

SEQ ID NO: 2226568 - DNA, 25 bp, Homo sapien
tcagagtttagcagagatagtttgg

SEQ ID NO: 2226569 - DNA, 25 bp, Homo sapien
cctggagtgcttacatgggaaaaaa

SEQ ID NO: 2226570 - DNA, 25 bp, Homo sapien
taacctgccactatctcaggacgag

SEQ ID NO: 2226571 - DNA, 25 bp, Homo sapien
tgtaaaaaagccataacggtgccta

SEQ ID NO: 2226572 - DNA, 25 bp, Homo sapien
gacgagggccctgagaatgacagct

SEQ ID NO: 2226573 - DNA, 25 bp, Homo sapien
ttctttcggattataactctacttc

SEQ ID NO: 2226574 - DNA, 25 bp, Homo sapien
tctaggtttttgaatagtgtctctt

SEQ ID NO: 2226575 - DNA, 25 bp, Homo sapien
ttctaggtttttgaatagtgtctct

SEQ ID NO: 2226576 - DNA, 25 bp, Homo sapien
gagcttctgattaggaaaaaccaag

SEQ ID NO: 2226577 - DNA, 25 bp, Homo sapien
cagtcacatctagtgtagaaatcca

SEQ ID NO: 2226578 - DNA, 25 bp, Homo sapien
attcaggagcttctgattaggaaaa

SEQ ID NO: 2226579 - DNA, 25 bp, Homo sapien
tgtccagtcacatctagtgtagaaa

SEQ ID NO: 2226580 - DNA, 25 bp, Homo sapien
taggaatcaataatgcactgggaag

SEQ ID NO: 2226581 - DNA, 25 bp, Homo sapien
ctggtagtgatcaccactggcagaa

SEQ ID NO: 2226582 - DNA, 25 bp, Homo sapien
tacttgcaaggacatactggtagtg

SEQ ID NO: 2226583 - DNA, 25 bp, Homo sapien
gaatcaataatgcactgggaagtat

SEQ ID NO: 2226584 - DNA, 25 bp, Homo sapien
tcatattagtggaggggggctttta

SEQ ID NO: 2226585 - DNA, 25 bp, Homo sapien
tgctgccctttctgtctgctgccac

SEQ ID NO: 2226586 - DNA, 25 bp, Homo sapien
gtctgctgccactctttcaaacaca

SEQ ID NO: 2226587 - DNA, 25 bp, Homo sapien
ctgccactctttcaaacacagctgc

SEQ ID NO: 2226588 - DNA, 25 bp, Homo sapien
ctgtctgctgccactctttcaaaca

SEQ ID NO: 2226589 - DNA, 25 bp, Homo sapien
ccctgaaaatcttggaacttcgagt

SEQ ID NO: 2226590 - DNA, 25 bp, Homo sapien
gagtttatgccaaattcgggagtca

SEQ ID NO: 2226591 - DNA, 25 bp, Homo sapien
tatcccgaactaaagagtccacagg

SEQ ID NO: 2226592 - DNA, 25 bp, Homo sapien
gggatgtcgagtttccaaagcctca

SEQ ID NO: 2226593 - DNA, 25 bp, Homo sapien
acatagatgatgaagacagaaacat

SEQ ID NO: 2226594 - DNA, 25 bp, Homo sapien
aacatagatgatgaagacagaaaca

SEQ ID NO: 2226595 - DNA, 25 bp, Homo sapien
caacatagatgatgaagacagaaac

SEQ ID NO: 2226596 - DNA, 25 bp, Homo sapien
ctgggctatactgagaagtttattg

SEQ ID NO: 2226597 - DNA, 25 bp, Homo sapien
gagaagtttattgaggcagtgtaat

SEQ ID NO: 2226598 - DNA, 25 bp, Homo sapien
tttattgaggcagtgtaatttcttc

SEQ ID NO: 2226599 - DNA, 25 bp, Homo sapien
tgggctatactgagaagtttattga

SEQ ID NO: 2226600 - DNA, 25 bp, Homo sapien
aatcattttagagtggtcaaactac

SEQ ID NO: 2226601 - DNA, 25 bp, Homo sapien
cattttagagtggtcaaactacaat

SEQ ID NO: 2226602 - DNA, 25 bp, Homo sapien
tcattttagagtggtcaaactacaa

SEQ ID NO: 2226603 - DNA, 25 bp, Homo sapien
tttagagtggtcaaactacaatata

SEQ ID NO: 2226604 - DNA, 25 bp, Homo sapien
cttgtgctttctcccgtgttaaatt

SEQ ID NO: 2226605 - DNA, 25 bp, Homo sapien
tgtgctttctcccgtgttaaattac

SEQ ID NO: 2226606 - DNA, 25 bp, Homo sapien
tcttgagcttccaatgactgcatat

SEQ ID NO: 2226607 - DNA, 25 bp, Homo sapien
ttgtgctttctcccgtgttaaatta

SEQ ID NO: 2226608 - DNA, 25 bp, Homo sapien
tgttccaaatgtctccgtacagttc

SEQ ID NO: 2226609 - DNA, 25 bp, Homo sapien
ccaaatgtctccgtacagttcctgg

SEQ ID NO: 2226610 - DNA, 25 bp, Homo sapien
gtctccgtacagttcctgggtctga

SEQ ID NO: 2226611 - DNA, 25 bp, Homo sapien
aatgtctccgtacagttcctgggtc

SEQ ID NO: 2226612 - DNA, 25 bp, Homo sapien
tatggctgcttttctaaattggttg

SEQ ID NO: 2226613 - DNA, 25 bp, Homo sapien
ggctgcttttctaaattggttgaag

SEQ ID NO: 2226614 - DNA, 25 bp, Homo sapien
cttttctatggctgcttttctaaat

SEQ ID NO: 2226615 - DNA, 25 bp, Homo sapien
ttttctatggctgcttttctaaatt

SEQ ID NO: 2226616 - DNA, 25 bp, Homo sapien
gaggacttcagtatacctgatggtt

SEQ ID NO: 2226617 - DNA, 25 bp, Homo sapien
aggacttcagtatacctgatggttt

SEQ ID NO: 2226618 - DNA, 25 bp, Homo sapien
tgaggacttcagtatacctgatggt

SEQ ID NO: 2226619 - DNA, 25 bp, Homo sapien
ctgaggacttcagtatacctgatgg

SEQ ID NO: 2226620 - DNA, 25 bp, Homo sapien
atagttgtgtcattatcaccaggtg

SEQ ID NO: 2226621 - DNA, 25 bp, Homo sapien
tctgcacaggatcttgacattcaaa

SEQ ID NO: 2226622 - DNA, 25 bp, Homo sapien
aattctaacatagttgtgtcattat

SEQ ID NO: 2226623 - DNA, 25 bp, Homo sapien
acatagttgtgtcattatcaccagg

SEQ ID NO: 2226624 - DNA, 25 bp, Homo sapien
cagttatgccattcgaaagctgctc

SEQ ID NO: 2226625 - DNA, 25 bp, Homo sapien
tatgccattcgaaagctgctcagaa

SEQ ID NO: 2226626 - DNA, 25 bp, Homo sapien
gttatgccattcgaaagctgctcag

SEQ ID NO: 2226627 - DNA, 25 bp, Homo sapien
cacagttatgccattcgaaagctgc

SEQ ID NO: 2226628 - DNA, 25 bp, Homo sapien
caggaaggtgtgtacagttaagtct

SEQ ID NO: 2226629 - DNA, 25 bp, Homo sapien
tcaacttcagaactcatggttggtc

SEQ ID NO: 2226630 - DNA, 25 bp, Homo sapien
gagtccctctgcctcgatttttgga

SEQ ID NO: 2226631 - DNA, 25 bp, Homo sapien
agctcttcgggtttgatcttctgta

SEQ ID NO: 2226632 - DNA, 25 bp, Homo sapien
acagttccaccaacgtgtaaaatgt

SEQ ID NO: 2226633 - DNA, 25 bp, Homo sapien
tacagttccaccaacgtgtaaaatg

SEQ ID NO: 2226634 - DNA, 25 bp, Homo sapien
cagttccaccaacgtgtaaaatgtt

SEQ ID NO: 2226635 - DNA, 25 bp, Homo sapien
tcccttcaggcttgtagcatgatgc

SEQ ID NO: 2226636 - DNA, 25 bp, Homo sapien
tctgtcagtagaccttcccttcagg

SEQ ID NO: 2226637 - DNA, 25 bp, Homo sapien
caggcactggtttggtatgtcaagg

SEQ ID NO: 2226638 - DNA, 25 bp, Homo sapien
tgagaagtccataggtaggccaggc

SEQ ID NO: 2226639 - DNA, 25 bp, Homo sapien
ttggtgccatacttcgtgtatatcc

SEQ ID NO: 2226640 - DNA, 25 bp, Homo sapien
tacttcgtgtatatcctgcagaacc

SEQ ID NO: 2226641 - DNA, 25 bp, Homo sapien
ccttctgtcatgggtggaagcttca

SEQ ID NO: 2226642 - DNA, 25 bp, Homo sapien
gccatacttcgtgtatatcctgcag

SEQ ID NO: 2226643 - DNA, 25 bp, Homo sapien
acataagagattctgacaaagcaga

SEQ ID NO: 2226644 - DNA, 25 bp, Homo sapien
tcaggaccaaagcagaaggcactgc

SEQ ID NO: 2226645 - DNA, 25 bp, Homo sapien
ccaaagcagaaggcactgccgagat

SEQ ID NO: 2226646 - DNA, 25 bp, Homo sapien
ctgtcaggaccaaagcagaaggcac

SEQ ID NO: 2226647 - DNA, 25 bp, Homo sapien
accaaagcagaaggcactgccgaga

SEQ ID NO: 2226648 - DNA, 25 bp, Homo sapien
agctggatgcagttgtttaaacagc

SEQ ID NO: 2226649 - DNA, 25 bp, Homo sapien
acagctggatgcagttgtttaaaca

SEQ ID NO: 2226650 - DNA, 25 bp, Homo sapien
catagccacatgacagctggatgca

SEQ ID NO: 2226651 - DNA, 25 bp, Homo sapien
ctcacatagccacatgacagctgga

SEQ ID NO: 2226652 - DNA, 25 bp, Homo sapien
agtatactgtgggagaccaaatgga

SEQ ID NO: 2226653 - DNA, 25 bp, Homo sapien
tatactgtgggagaccaaatggaaa

SEQ ID NO: 2226654 - DNA, 25 bp, Homo sapien
agtttctaaacagagctgagaagta

SEQ ID NO: 2226655 - DNA, 25 bp, Homo sapien
acagagctgagaagtatactgtggg

SEQ ID NO: 2226656 - DNA, 25 bp, Homo sapien
tgcgtttgaggcagcctcgagctcc

SEQ ID NO: 2226657 - DNA, 25 bp, Homo sapien
ctcgagctccacagattacaacagg

SEQ ID NO: 2226658 - DNA, 25 bp, Homo sapien
actgaatattagttgcgtttgaggc

SEQ ID NO: 2226659 - DNA, 25 bp, Homo sapien
agctttggcaatttatctttactga

SEQ ID NO: 2226660 - DNA, 25 bp, Homo sapien
cttcaggtgggatgtacatggagaa

SEQ ID NO: 2226661 - DNA, 25 bp, Homo sapien
agccaaaggcaccctggtgatcaat

SEQ ID NO: 2226662 - DNA, 25 bp, Homo sapien
aggtgggatgtacatggagaagtga

SEQ ID NO: 2226663 - DNA, 25 bp, Homo sapien
caccaaagcagagacggagatgtag

SEQ ID NO: 2226664 - DNA, 25 bp, Homo sapien
taacagtaaaggatagagtcagctc

SEQ ID NO: 2226665 - DNA, 25 bp, Homo sapien
caaggtaagagaagggtagactgtt

SEQ ID NO: 2226666 - DNA, 25 bp, Homo sapien
tagtcaaatgacatcaggagtaggt

SEQ ID NO: 2226667 - DNA, 25 bp, Homo sapien
cctgaattactccatggttccattc

SEQ ID NO: 2226668 - DNA, 25 bp, Homo sapien
tcctgaattactccatggttccatt

SEQ ID NO: 2226669 - DNA, 25 bp, Homo sapien
tattatacttagagtccacttccct

SEQ ID NO: 2226670 - DNA, 25 bp, Homo sapien
acttgagtttgttgagcctggccta

SEQ ID NO: 2226671 - DNA, 25 bp, Homo sapien
tgcaggctccttgctaaaggatcca

SEQ ID NO: 2226672 - DNA, 25 bp, Homo sapien
ctggcctagaatacaatctgatata

SEQ ID NO: 2226673 - DNA, 25 bp, Homo sapien
gggctaatccttaatatctggcagt

SEQ ID NO: 2226674 - DNA, 25 bp, Homo sapien
cattactggtgttcctgctactcag

SEQ ID NO: 2226675 - DNA, 25 bp, Homo sapien
cagacttaagccacattaaaatgag

SEQ ID NO: 2226676 - DNA, 25 bp, Homo sapien
tcagtgatgcactgaattctggttc

SEQ ID NO: 2226677 - DNA, 25 bp, Homo sapien
tagcctcaagaagcacacagtctga

SEQ ID NO: 2226678 - DNA, 25 bp, Homo sapien
ccctatctactattgcatgaagcca

SEQ ID NO: 2226679 - DNA, 25 bp, Homo sapien
gaaatacagggtccttagcctcaag

SEQ ID NO: 2226680 - DNA, 25 bp, Homo sapien
tgtgttcagcaaccaacagatcttc

SEQ ID NO: 2226681 - DNA, 25 bp, Homo sapien
gaagctatttagatttgaagacctt

SEQ ID NO: 2226682 - DNA, 25 bp, Homo sapien
gcagaagctatttagatttgaagac

SEQ ID NO: 2226683 - DNA, 25 bp, Homo sapien
agaagctatttagatttgaagacct

SEQ ID NO: 2226684 - DNA, 25 bp, Homo sapien
cagaagctatttagatttgaagacc

SEQ ID NO: 2226685 - DNA, 25 bp, Homo sapien
gacacctgatgccagacaaacctaa

SEQ ID NO: 2226686 - DNA, 25 bp, Homo sapien
acacctgatgccagacaaacctaaa

SEQ ID NO: 2226687 - DNA, 25 bp, Homo sapien
tgtttcttccctccgtcagacacct

SEQ ID NO: 2226688 - DNA, 25 bp, Homo sapien
tccgtttctaagctgaaacttagag

SEQ ID NO: 2226689 - DNA, 25 bp, Homo sapien
ttagaggagcatgcaacactacttg

SEQ ID NO: 2226690 - DNA, 25 bp, Homo sapien
tcaagaaacagttccgtttctaagc

SEQ ID NO: 2226691 - DNA, 25 bp, Homo sapien
tgcaacactacttgtgtgctcctca

SEQ ID NO: 2226692 - DNA, 25 bp, Homo sapien
cattgtgtaagcttggtcagtcgcc

SEQ ID NO: 2226693 - DNA, 25 bp, Homo sapien
tggtaggattttgctgagcaagtca

SEQ ID NO: 2226694 - DNA, 25 bp, Homo sapien
tgtgaaagcacattgtgtaagcttg

SEQ ID NO: 2226695 - DNA, 25 bp, Homo sapien
gtcagtcgccagaagtggtaggatt

SEQ ID NO: 2226696 - DNA, 25 bp, Homo sapien
tttggctgacatccctttgaccatt

SEQ ID NO: 2226697 - DNA, 25 bp, Homo sapien
cctttggctgacatccctttgacca

SEQ ID NO: 2226698 - DNA, 25 bp, Homo sapien
tgacatccctttgaccatttcactg

SEQ ID NO: 2226699 - DNA, 25 bp, Homo sapien
ggctgacatccctttgaccatttca

SEQ ID NO: 2226700 - DNA, 25 bp, Homo sapien
cttcatgtggggataggattccagc

SEQ ID NO: 2226701 - DNA, 25 bp, Homo sapien
gcaagacttctgaactactggcagg

SEQ ID NO: 2226702 - DNA, 25 bp, Homo sapien
agacttctgaactactggcaggcat

SEQ ID NO: 2226703 - DNA, 25 bp, Homo sapien
ccagcaagacttctgaactactggc

SEQ ID NO: 2226704 - DNA, 25 bp, Homo sapien
aatcagcagaataccacttcactag

SEQ ID NO: 2226705 - DNA, 25 bp, Homo sapien
cctattggttctgtacaaatcagca

SEQ ID NO: 2226706 - DNA, 25 bp, Homo sapien
cacttcactagctccaggagcaaag

SEQ ID NO: 2226707 - DNA, 25 bp, Homo sapien
tagccatttttactagtcctattgg

SEQ ID NO: 2226708 - DNA, 25 bp, Homo sapien
gaagtcactgaatgcttatagtctt

SEQ ID NO: 2226709 - DNA, 25 bp, Homo sapien
ttgatcgataattaattgataaacg

SEQ ID NO: 2226710 - DNA, 25 bp, Homo sapien
gataattaattgataaacgttgtcc

SEQ ID NO: 2226711 - DNA, 25 bp, Homo sapien
gcttatagtcttttatttgatcgat

SEQ ID NO: 2226712 - DNA, 25 bp, Homo sapien
acaacatggtgagggattaaaggag

SEQ ID NO: 2226713 - DNA, 25 bp, Homo sapien
cattttgatggtgtgaagcaacaac

SEQ ID NO: 2226714 - DNA, 25 bp, Homo sapien
aaggagtgaaattttgatgcaggcc

SEQ ID NO: 2226715 - DNA, 25 bp, Homo sapien
tggatttggaatcaagctcaccctt

SEQ ID NO: 2226716 - DNA, 25 bp, Homo sapien
actgtgaacaatcattcgagataac

SEQ ID NO: 2226717 - DNA, 25 bp, Homo sapien
aacaatcattcgagataacttacta

SEQ ID NO: 2226718 - DNA, 25 bp, Homo sapien
acaatcattcgagataacttactac

SEQ ID NO: 2226719 - DNA, 25 bp, Homo sapien
gtgaacaatcattcgagataactta

SEQ ID NO: 2226720 - DNA, 25 bp, Homo sapien
tgtgtttcatttgacttcatcacgc

SEQ ID NO: 2226721 - DNA, 25 bp, Homo sapien
ctatgctggctcttcttcatgtttg

SEQ ID NO: 2226722 - DNA, 25 bp, Homo sapien
tattgttctccccagttgtgtttca

SEQ ID NO: 2226723 - DNA, 25 bp, Homo sapien
catgtttgtatctgtcatcttctct

SEQ ID NO: 2226724 - DNA, 25 bp, Homo sapien
tgtgaaggtgtatttgctgctggaa

SEQ ID NO: 2226725 - DNA, 25 bp, Homo sapien
cttgtgaaggtgtatttgctgctgg

SEQ ID NO: 2226726 - DNA, 25 bp, Homo sapien
gaaggtgtatttgctgctggaacca

SEQ ID NO: 2226727 - DNA, 25 bp, Homo sapien
tgaaggtgtatttgctgctggaacc

SEQ ID NO: 2226728 - DNA, 25 bp, Homo sapien
catacccataatcagtcagaatcca

SEQ ID NO: 2226729 - DNA, 25 bp, Homo sapien
gagtgtgaaactagcacaacaactt

SEQ ID NO: 2226730 - DNA, 25 bp, Homo sapien
ccattcgtcaattgatggatgtttg

SEQ ID NO: 2226731 - DNA, 25 bp, Homo sapien
ctagcacaacaactttgagaacagt

SEQ ID NO: 2226732 - DNA, 25 bp, Homo sapien
tgatcttggcttactgcaacctccg

SEQ ID NO: 2226733 - DNA, 25 bp, Homo sapien
ctcactctgtccctcagactggagt

SEQ ID NO: 2226734 - DNA, 25 bp, Homo sapien
actctgtccctcagactggagtaca

SEQ ID NO: 2226735 - DNA, 25 bp, Homo sapien
gtggcatgatcttggcttactgcaa

SEQ ID NO: 2226736 - DNA, 25 bp, Homo sapien
tagctgttgaaacttctaagaagtc

SEQ ID NO: 2226737 - DNA, 25 bp, Homo sapien
tagaaggagggcgagagaactctct

SEQ ID NO: 2226738 - DNA, 25 bp, Homo sapien
actatatactgtattcccctctgaa

SEQ ID NO: 2226739 - DNA, 25 bp, Homo sapien
attctattcatgaggtctctccacc

SEQ ID NO: 2226740 - DNA, 25 bp, Homo sapien
tattacaagtaggagtcccactgtc

SEQ ID NO: 2226741 - DNA, 25 bp, Homo sapien
ttcccgtctgctcttcgtattacaa

SEQ ID NO: 2226742 - DNA, 25 bp, Homo sapien
tcttcgtattacaagtaggagtccc

SEQ ID NO: 2226743 - DNA, 25 bp, Homo sapien
ctttggtacagatgtgaagagtaaa

SEQ ID NO: 2226744 - DNA, 25 bp, Homo sapien
aatgattccagggcttttcccaact

SEQ ID NO: 2226745 - DNA, 25 bp, Homo sapien
tcataaaagttgctgttggcaatga

SEQ ID NO: 2226746 - DNA, 25 bp, Homo sapien
cataaaagttgctgttggcaatgat

SEQ ID NO: 2226747 - DNA, 25 bp, Homo sapien
cttgtacaaatgagcctagaggcat

SEQ ID NO: 2226748 - DNA, 25 bp, Homo sapien
ttcttgtacaaatgagcctagaggc

SEQ ID NO: 2226749 - DNA, 25 bp, Homo sapien
gaaattcttgtacaaatgagcctag

SEQ ID NO: 2226750 - DNA, 25 bp, Homo sapien
gaataagaaattcttgtacaaatga

SEQ ID NO: 2226751 - DNA, 25 bp, Homo sapien
cttcattccagggtccatgttctgc

SEQ ID NO: 2226752 - DNA, 25 bp, Homo sapien
gggtccatgttctgcaataagcttg

SEQ ID NO: 2226753 - DNA, 25 bp, Homo sapien
gcttggccctcttacatttctttct

SEQ ID NO: 2226754 - DNA, 25 bp, Homo sapien
tctcttgaagtagccttttcctgtg

SEQ ID NO: 2226755 - DNA, 25 bp, Homo sapien
ctgacacacagggaaggattatgcg

SEQ ID NO: 2226756 - DNA, 25 bp, Homo sapien
gcttgcttgaaattacacgtgggac

SEQ ID NO: 2226757 - DNA, 25 bp, Homo sapien
aacagggctcccctcgtgtgggact

SEQ ID NO: 2226758 - DNA, 25 bp, Homo sapien
tcttgagaacagtaactacggtggt

SEQ ID NO: 2226759 - DNA, 25 bp, Homo sapien
tctttgatattcctcgtatgtcaca

SEQ ID NO: 2226760 - DNA, 25 bp, Homo sapien
ggatcttggctctgatccttgtgtg

SEQ ID NO: 2226761 - DNA, 25 bp, Homo sapien
tcatccatgcattcaggatcttggc

SEQ ID NO: 2226762 - DNA, 25 bp, Homo sapien
attcctcgtatgtcacatttgctca

SEQ ID NO: 2226763 - DNA, 25 bp, Homo sapien
cataattgccctatcaatggtcaca

SEQ ID NO: 2226764 - DNA, 25 bp, Homo sapien
gtcacatattgataccagggtccat

SEQ ID NO: 2226765 - DNA, 25 bp, Homo sapien
tcatcatagaaagtatggacaatcc

SEQ ID NO: 2226766 - DNA, 25 bp, Homo sapien
cattaatcttcgtacttccagctcc

SEQ ID NO: 2226767 - DNA, 25 bp, Homo sapien
ctccattgccaggtgtagggccgcc

SEQ ID NO: 2226768 - DNA, 25 bp, Homo sapien
attgccaggtgtagggccgcctcca

SEQ ID NO: 2226769 - DNA, 25 bp, Homo sapien
acctccattgccaggtgtagggccg

SEQ ID NO: 2226770 - DNA, 25 bp, Homo sapien
tccattgccaggtgtagggccgcct

SEQ ID NO: 2226771 - DNA, 25 bp, Homo sapien
tcttcctcctccaccacctccttta

SEQ ID NO: 2226772 - DNA, 25 bp, Homo sapien
ctcttcctcctccaccacctccttt

SEQ ID NO: 2226773 - DNA, 25 bp, Homo sapien
tggaatgatggggataccaccacca

SEQ ID NO: 2226774 - DNA, 25 bp, Homo sapien
cctcctcccccaggaatatcactta

SEQ ID NO: 2226775 - DNA, 25 bp, Homo sapien
cccccaggaatatcacttaatctac

SEQ ID NO: 2226776 - DNA, 25 bp, Homo sapien
ctggaatgatggggataccaccacc

SEQ ID NO: 2226777 - DNA, 25 bp, Homo sapien
caaaagagtggtaaagtgtaattca

SEQ ID NO: 2226778 - DNA, 25 bp, Homo sapien
ccttgcttggttgctcaatacagtc

SEQ ID NO: 2226779 - DNA, 25 bp, Homo sapien
atatttagtgaactaatgaaaagac

SEQ ID NO: 2226780 - DNA, 25 bp, Homo sapien
caatacagtcttctatatttagtga

SEQ ID NO: 2226781 - DNA, 25 bp, Homo sapien
cgcgcctggccagtagattagtttt

SEQ ID NO: 2226782 - DNA, 25 bp, Homo sapien
tgggaaattgtaacattgctgtata

SEQ ID NO: 2226783 - DNA, 25 bp, Homo sapien
tagttccagagtatatcttgcatga

SEQ ID NO: 2226784 - DNA, 25 bp, Homo sapien
tattaatggcagttaaactagttcc

SEQ ID NO: 2226785 - DNA, 25 bp, Homo sapien
ggaagaatattccaactgtactatt

SEQ ID NO: 2226786 - DNA, 25 bp, Homo sapien
tagtgggttgtctgagctttgcaac

SEQ ID NO: 2226787 - DNA, 25 bp, Homo sapien
tggcagagaggtattttagcaccat

SEQ ID NO: 2226788 - DNA, 25 bp, Homo sapien
tttgcaactttatccaggaccatgg

SEQ ID NO: 2226789 - DNA, 25 bp, Homo sapien
aatgactcgtgtaaatatgtgtcgg

SEQ ID NO: 2226790 - DNA, 25 bp, Homo sapien
aaaagcctcatgtatggaggttgca

SEQ ID NO: 2226791 - DNA, 25 bp, Homo sapien
tatgctgaccttacatcaaagttac

SEQ ID NO: 2226792 - DNA, 25 bp, Homo sapien
gggtggctttgtaacacatcttcct

SEQ ID NO: 2226793 - DNA, 25 bp, Homo sapien
aaacatttggtaataccttcaaatg

SEQ ID NO: 2226794 - DNA, 25 bp, Homo sapien
catatctacacatattccagagcca

SEQ ID NO: 2226795 - DNA, 25 bp, Homo sapien
accttcaaatgaacatccagcgtat

SEQ ID NO: 2226796 - DNA, 25 bp, Homo sapien
gaacatccagcgtattcatatctac

SEQ ID NO: 2226797 - DNA, 25 bp, Homo sapien
atgccatgtctgtgatactagcatg

SEQ ID NO: 2226798 - DNA, 25 bp, Homo sapien
gccatgtctgtgatactagcatgca

SEQ ID NO: 2226799 - DNA, 25 bp, Homo sapien
ccatgtctgtgatactagcatgcat

SEQ ID NO: 2226800 - DNA, 25 bp, Homo sapien
atgtctgtgatactagcatgcattt

SEQ ID NO: 2226801 - DNA, 25 bp, Homo sapien
ctctatttaattgtctgccaccagg

SEQ ID NO: 2226802 - DNA, 25 bp, Homo sapien
tctctatttaattgtctgccaccag

SEQ ID NO: 2226803 - DNA, 25 bp, Homo sapien
tctatttaattgtctgccaccaggg

SEQ ID NO: 2226804 - DNA, 25 bp, Homo sapien
tctaaccatcggtagctttgtgaag

SEQ ID NO: 2226805 - DNA, 25 bp, Homo sapien
aatttctagttctaaccatcggtag

SEQ ID NO: 2226806 - DNA, 25 bp, Homo sapien
accatcggtagctttgtgaagtgaa

SEQ ID NO: 2226807 - DNA, 25 bp, Homo sapien
tctagttctaaccatcggtagcttt

SEQ ID NO: 2226808 - DNA, 25 bp, Homo sapien
tcagtacagagggtcaaggccacat

SEQ ID NO: 2226809 - DNA, 25 bp, Homo sapien
tgtagatacttaacctgccaccctc

SEQ ID NO: 2226810 - DNA, 25 bp, Homo sapien
tgggactgttgcgtctcacttcaaa

SEQ ID NO: 2226811 - DNA, 25 bp, Homo sapien
catctggtttccttgggccgaatgg

SEQ ID NO: 2226812 - DNA, 25 bp, Homo sapien
caattgcatatcttttatagatgtc

SEQ ID NO: 2226813 - DNA, 25 bp, Homo sapien
aatactcatcgttgagaattataga

SEQ ID NO: 2226814 - DNA, 25 bp, Homo sapien
cttttatagatgtcagaatgattag

SEQ ID NO: 2226815 - DNA, 25 bp, Homo sapien
gaatgattagatttagcgtctgcaa

SEQ ID NO: 2226816 - DNA, 25 bp, Homo sapien
ttagaagattggcaaggacaagtta

SEQ ID NO: 2226817 - DNA, 25 bp, Homo sapien
gaagattggcaaggacaagttaaaa

SEQ ID NO: 2226818 - DNA, 25 bp, Homo sapien
cttagaagattggcaaggacaagtt

SEQ ID NO: 2226819 - DNA, 25 bp, Homo sapien
tagaagattggcaaggacaagttaa

SEQ ID NO: 2226820 - DNA, 25 bp, Homo sapien
aatgttaacttcatgttctgagtcc

SEQ ID NO: 2226821 - DNA, 25 bp, Homo sapien
catgttctgagtccatcatttctct

SEQ ID NO: 2226822 - DNA, 25 bp, Homo sapien
cttcatgttctgagtccatcatttc

SEQ ID NO: 2226823 - DNA, 25 bp, Homo sapien
taacttcatgttctgagtccatcat

SEQ ID NO: 2226824 - DNA, 25 bp, Homo sapien
tcatcaaagcaaatcctaaaggtac

SEQ ID NO: 2226825 - DNA, 25 bp, Homo sapien
gaagcgggaattgggtcttctgact

SEQ ID NO: 2226826 - DNA, 25 bp, Homo sapien
tgtatctttataatgaccccaccag

SEQ ID NO: 2226827 - DNA, 25 bp, Homo sapien
cctgaagactcctgtgagggaaact

SEQ ID NO: 2226828 - DNA, 25 bp, Homo sapien
gccgttccgctgatagtaattcttc

SEQ ID NO: 2226829 - DNA, 25 bp, Homo sapien
tcttttttacatatgctttccggat

SEQ ID NO: 2226830 - DNA, 25 bp, Homo sapien
gatgagtcactttaatggtatgccg

SEQ ID NO: 2226831 - DNA, 25 bp, Homo sapien
tacatatgctttccggatgagtcac

SEQ ID NO: 2226832 - DNA, 25 bp, Homo sapien
cttgtatttgctgtctttccctcat

SEQ ID NO: 2226833 - DNA, 25 bp, Homo sapien
cctcttgtatttgctgtctttccct

SEQ ID NO: 2226834 - DNA, 25 bp, Homo sapien
tcttgtatttgctgtctttccctca

SEQ ID NO: 2226835 - DNA, 25 bp, Homo sapien
ctcttgtatttgctgtctttccctc

SEQ ID NO: 2226836 - DNA, 25 bp, Homo sapien
tgaaaaatactagagatgggaactt

SEQ ID NO: 2226837 - DNA, 25 bp, Homo sapien
tttgagggcaggctgaatctttgtg

SEQ ID NO: 2226838 - DNA, 25 bp, Homo sapien
tgtacgttcatttgtgtttgctggg

SEQ ID NO: 2226839 - DNA, 25 bp, Homo sapien
tgggaacttttaccatagatattgg

SEQ ID NO: 2226840 - DNA, 25 bp, Homo sapien
tttcttctactgttggcttatagcc

SEQ ID NO: 2226841 - DNA, 25 bp, Homo sapien
tgagtctttgttgctcatttagaaa

SEQ ID NO: 2226842 - DNA, 25 bp, Homo sapien
ttatagccacacaacagcttgcaac

SEQ ID NO: 2226843 - DNA, 25 bp, Homo sapien
cacacaacagcttgcaacattgagt

SEQ ID NO: 2226844 - DNA, 25 bp, Homo sapien
ctggactccttattttatttctctc

SEQ ID NO: 2226845 - DNA, 25 bp, Homo sapien
acaaaaaataggaccatgattccat

SEQ ID NO: 2226846 - DNA, 25 bp, Homo sapien
atcctttgtactagatgatctttcc

SEQ ID NO: 2226847 - DNA, 25 bp, Homo sapien
caaaaaataggaccatgattccatt

SEQ ID NO: 2226848 - DNA, 25 bp, Homo sapien
ggatcctttgtactagatgatcttt

SEQ ID NO: 2226849 - DNA, 25 bp, Homo sapien
caaaacgatactgtcagtgttaggc

SEQ ID NO: 2226850 - DNA, 25 bp, Homo sapien
gaatcacacggtattatagctagag

SEQ ID NO: 2226851 - DNA, 25 bp, Homo sapien
tatatctctcacaaatgtatcattg

SEQ ID NO: 2226852 - DNA, 25 bp, Homo sapien
gcctttacttagcacttcaaaacga

SEQ ID NO: 2226853 - DNA, 25 bp, Homo sapien
tgacacatcctttactgtggttaag

SEQ ID NO: 2226854 - DNA, 25 bp, Homo sapien
tctttgagtcaaaacagggtacatg

SEQ ID NO: 2226855 - DNA, 25 bp, Homo sapien
aaatgacacgataattctttgagtc

SEQ ID NO: 2226856 - DNA, 25 bp, Homo sapien
ggttaagactccatggcatagaaca

SEQ ID NO: 2226857 - DNA, 25 bp, Homo sapien
atgtggctggtgaaaataagtggaa

SEQ ID NO: 2226858 - DNA, 25 bp, Homo sapien
ttatgtctataatagcatgtgaaga

SEQ ID NO: 2226859 - DNA, 25 bp, Homo sapien
tgtttcttcagtttccgggcaggct

SEQ ID NO: 2226860 - DNA, 25 bp, Homo sapien
ggaagaatatacatctcgggctgtt

SEQ ID NO: 2226861 - DNA, 25 bp, Homo sapien
tggttgcagttaaagtggattcccg

SEQ ID NO: 2226862 - DNA, 25 bp, Homo sapien
agaaaggtgagagagttagctttcc

SEQ ID NO: 2226863 - DNA, 25 bp, Homo sapien
gaaaggtgagagagttagctttcct

SEQ ID NO: 2226864 - DNA, 25 bp, Homo sapien
gcagttaaagtggattcccgaatct

SEQ ID NO: 2226865 - DNA, 25 bp, Homo sapien
gaggccttataaatatgcagtgcac

SEQ ID NO: 2226866 - DNA, 25 bp, Homo sapien
caaggtatttggaagcctgctaggg

SEQ ID NO: 2226867 - DNA, 25 bp, Homo sapien
gccttataaatatgcagtgcacttc

SEQ ID NO: 2226868 - DNA, 25 bp, Homo sapien
caagcagattgcaacaaacaaggta

SEQ ID NO: 2226869 - DNA, 25 bp, Homo sapien
ataaattggatgtatacgtttgatg

SEQ ID NO: 2226870 - DNA, 25 bp, Homo sapien
gagttgttttcgtataaattggatg

SEQ ID NO: 2226871 - DNA, 25 bp, Homo sapien
acgtttgatgtcctcattgtgttca

SEQ ID NO: 2226872 - DNA, 25 bp, Homo sapien
taattggatgagttgttttcgtata

SEQ ID NO: 2226873 - DNA, 25 bp, Homo sapien
tttgatgggtttgttgatagcatga

SEQ ID NO: 2226874 - DNA, 25 bp, Homo sapien
tatgctgatatagtcattgcaatgt

SEQ ID NO: 2226875 - DNA, 25 bp, Homo sapien
cactatgatttgtgtttattatagc

SEQ ID NO: 2226876 - DNA, 25 bp, Homo sapien
agcatgattcctgctgtcactatga

SEQ ID NO: 2226877 - DNA, 25 bp, Homo sapien
ccaggtatcctggaacaacatctcg

SEQ ID NO: 2226878 - DNA, 25 bp, Homo sapien
catttccttgcaatccgtttatcat

SEQ ID NO: 2226879 - DNA, 25 bp, Homo sapien
tgccaggtatcctggaacaacatct

SEQ ID NO: 2226880 - DNA, 25 bp, Homo sapien
aggtatcctggaacaacatctcgtt

SEQ ID NO: 2226881 - DNA, 25 bp, Homo sapien
aaggaactagctttaagctttgaat

SEQ ID NO: 2226882 - DNA, 25 bp, Homo sapien
taaaggaactagctttaagctttga

SEQ ID NO: 2226883 - DNA, 25 bp, Homo sapien
tcattgaaactgttagcacagactg

SEQ ID NO: 2226884 - DNA, 25 bp, Homo sapien
tgttcaataaaactagattccccag

SEQ ID NO: 2226885 - DNA, 25 bp, Homo sapien
tcatcctttataatcattgaaactg

SEQ ID NO: 2226886 - DNA, 25 bp, Homo sapien
tggcaaaattcacactgagtacagt

SEQ ID NO: 2226887 - DNA, 25 bp, Homo sapien
ctgtagttagatatttccagaatat

SEQ ID NO: 2226888 - DNA, 25 bp, Homo sapien
tgtagttagatatttccagaatatc

SEQ ID NO: 2226889 - DNA, 25 bp, Homo sapien
tgctgccatgcaacctgatctccat

SEQ ID NO: 2226890 - DNA, 25 bp, Homo sapien
tgtacttcttactgctgccatgcaa

SEQ ID NO: 2226891 - DNA, 25 bp, Homo sapien
tactgctgccatgcaacctgatctc

SEQ ID NO: 2226892 - DNA, 25 bp, Homo sapien
tcttactgctgccatgcaacctgat

SEQ ID NO: 2226893 - DNA, 25 bp, Homo sapien
ttttgtagttgttgtcactctctcc

SEQ ID NO: 2226894 - DNA, 25 bp, Homo sapien
gcaaatgccctttggctgctgatcg

SEQ ID NO: 2226895 - DNA, 25 bp, Homo sapien
tctgggtattcaggagcaaatgccc

SEQ ID NO: 2226896 - DNA, 25 bp, Homo sapien
ccaaatgccaggaaatctgggtatt

SEQ ID NO: 2226897 - DNA, 25 bp, Homo sapien
gatttagagattgggctgctttcca

SEQ ID NO: 2226898 - DNA, 25 bp, Homo sapien
ctgcagtcccatataggatttggtg

SEQ ID NO: 2226899 - DNA, 25 bp, Homo sapien
ggttgcaattgtgaaaaatttcagt

SEQ ID NO: 2226900 - DNA, 25 bp, Homo sapien
ggatttggtgacatggttgcaattg

SEQ ID NO: 2226901 - DNA, 25 bp, Homo sapien
gagatttgcacataacagtcttttt

SEQ ID NO: 2226902 - DNA, 25 bp, Homo sapien
tgaccgctttgtaaccaactgtaag

SEQ ID NO: 2226903 - DNA, 25 bp, Homo sapien
gagattctcttcaccaccatgctgg

SEQ ID NO: 2226904 - DNA, 25 bp, Homo sapien
actgtaagtttaatatccaaggaga

SEQ ID NO: 2226905 - DNA, 25 bp, Homo sapien
cagcagtttctcctatgattctccc

SEQ ID NO: 2226906 - DNA, 25 bp, Homo sapien
gtcacttatacaactaaactcaagg

SEQ ID NO: 2226907 - DNA, 25 bp, Homo sapien
ctttttgtataaaccatccacctga

SEQ ID NO: 2226908 - DNA, 25 bp, Homo sapien
tctgccaaaagggagtcacttatac

SEQ ID NO: 2226909 - DNA, 25 bp, Homo sapien
gatctttcataagaggaactttaaa

SEQ ID NO: 2226910 - DNA, 25 bp, Homo sapien
tctgttgcaatcgtagttgattggt

SEQ ID NO: 2226911 - DNA, 25 bp, Homo sapien
cgtagttgattggttgatgaagtat

SEQ ID NO: 2226912 - DNA, 25 bp, Homo sapien
cacttgtaccataataagtggaaat

SEQ ID NO: 2226913 - DNA, 25 bp, Homo sapien
gatcaacgaagaaatactcctcagt

SEQ ID NO: 2226914 - DNA, 25 bp, Homo sapien
gatcacagtattcctctggcaccag

SEQ ID NO: 2226915 - DNA, 25 bp, Homo sapien
tgtgatcacagtattcctctggcac

SEQ ID NO: 2226916 - DNA, 25 bp, Homo sapien
caaatccttccaacacccctgatca

SEQ ID NO: 2226917 - DNA, 25 bp, Homo sapien
catctgggctccttggaattttctg

SEQ ID NO: 2226918 - DNA, 25 bp, Homo sapien
ctgaatgaggctggcatctgggctc

SEQ ID NO: 2226919 - DNA, 25 bp, Homo sapien
gaatgaggctggcatctgggctcct

SEQ ID NO: 2226920 - DNA, 25 bp, Homo sapien
ctggcatctgggctccttggaattt

SEQ ID NO: 2226921 - DNA, 25 bp, Homo sapien
tcaagctagaccctgaaggatgggt

SEQ ID NO: 2226922 - DNA, 25 bp, Homo sapien
gatgggtaacatttggctgagcaga

SEQ ID NO: 2226923 - DNA, 25 bp, Homo sapien
gcagaggtgaaactatccaagtaaa

SEQ ID NO: 2226924 - DNA, 25 bp, Homo sapien
taaaagggaataacatcagcagtag

SEQ ID NO: 2226925 - DNA, 25 bp, Homo sapien
catcatgatttgtgagcaacccgat

SEQ ID NO: 2226926 - DNA, 25 bp, Homo sapien
tcctgatgcattgcttcctggtggg

SEQ ID NO: 2226927 - DNA, 25 bp, Homo sapien
tctttgggcttgttgcactgtcatg

SEQ ID NO: 2226928 - DNA, 25 bp, Homo sapien
cccgatatataaataaggtggtgag

SEQ ID NO: 2226929 - DNA, 25 bp, Homo sapien
cagctgtctctgatacatagacaga

SEQ ID NO: 2226930 - DNA, 25 bp, Homo sapien
gtgtcttattcctttacttcagtga

SEQ ID NO: 2226931 - DNA, 25 bp, Homo sapien
gtccactggttctaatatttactag

SEQ ID NO: 2226932 - DNA, 25 bp, Homo sapien
tagtccactgtgtaaaactcttgaa

SEQ ID NO: 2226933 - DNA, 25 bp, Homo sapien
caagctctgcttaagctttgatttc

SEQ ID NO: 2226934 - DNA, 25 bp, Homo sapien
ttcacaagctctgcttaagctttga

SEQ ID NO: 2226935 - DNA, 25 bp, Homo sapien
tttcacaagctctgcttaagctttg

SEQ ID NO: 2226936 - DNA, 25 bp, Homo sapien
cacaagctctgcttaagctttgatt

SEQ ID NO: 2226937 - DNA, 25 bp, Homo sapien
cgatttagctgtggcagtcattcca

SEQ ID NO: 2226938 - DNA, 25 bp, Homo sapien
ttctgggccataaaagaactgccat

SEQ ID NO: 2226939 - DNA, 25 bp, Homo sapien
tttggtttgtagctggagtgcctcc

SEQ ID NO: 2226940 - DNA, 25 bp, Homo sapien
tggttgggaagcaccttggtcatca

SEQ ID NO: 2226941 - DNA, 25 bp, Homo sapien
ccaagagccaggatataatgcatta

SEQ ID NO: 2226942 - DNA, 25 bp, Homo sapien
caagagccaggatataatgcattaa

SEQ ID NO: 2226943 - DNA, 25 bp, Homo sapien
aagagccaggatataatgcattaaa

SEQ ID NO: 2226944 - DNA, 25 bp, Homo sapien
agagccaggatataatgcattaaat

SEQ ID NO: 2226945 - DNA, 25 bp, Homo sapien
gattctgacaggaaacgctagacac

SEQ ID NO: 2226946 - DNA, 25 bp, Homo sapien
actgtgtgatttagctaaactacct

SEQ ID NO: 2226947 - DNA, 25 bp, Homo sapien
taaactaccttagcatgcctagtga

SEQ ID NO: 2226948 - DNA, 25 bp, Homo sapien
gtaattcatagcctccaatgtagag

SEQ ID NO: 2226949 - DNA, 25 bp, Homo sapien
atcagctctgctgcacatttcctca

SEQ ID NO: 2226950 - DNA, 25 bp, Homo sapien
ttccttgtctgttctcctacacaat

SEQ ID NO: 2226951 - DNA, 25 bp, Homo sapien
attatcagctctgctgcacatttcc

SEQ ID NO: 2226952 - DNA, 25 bp, Homo sapien
gttctcctacacaatattatcagct

SEQ ID NO: 2226953 - DNA, 25 bp, Homo sapien
gtacttctgacccttcaattttcat

SEQ ID NO: 2226954 - DNA, 25 bp, Homo sapien
ctggacatgaatgtacttctgaccc

SEQ ID NO: 2226955 - DNA, 25 bp, Homo sapien
catgaatgtacttctgacccttcaa

SEQ ID NO: 2226956 - DNA, 25 bp, Homo sapien
tttcttgttgcccattaaaatgaga

SEQ ID NO: 2226957 - DNA, 25 bp, Homo sapien
atctcttcaaaatatggcagtaaac

SEQ ID NO: 2226958 - DNA, 25 bp, Homo sapien
tatctcttcaaaatatggcagtaaa

SEQ ID NO: 2226959 - DNA, 25 bp, Homo sapien
gaaatgctatctatctcttcaaaat

SEQ ID NO: 2226960 - DNA, 25 bp, Homo sapien
ctggaaatgctatctatctcttcaa

SEQ ID NO: 2226961 - DNA, 25 bp, Homo sapien
ggttcttggcttccaagttgcctta

SEQ ID NO: 2226962 - DNA, 25 bp, Homo sapien
cttccaagttgccttattgacaagc

SEQ ID NO: 2226963 - DNA, 25 bp, Homo sapien
gaacacgctgttacagaactggtta

SEQ ID NO: 2226964 - DNA, 25 bp, Homo sapien
ctaactaggttgcttgaacacgctg

SEQ ID NO: 2226965 - DNA, 25 bp, Homo sapien
caaggaccctggcttttgaggagag

SEQ ID NO: 2226966 - DNA, 25 bp, Homo sapien
accctggcttttgaggagaggtcca

SEQ ID NO: 2226967 - DNA, 25 bp, Homo sapien
ggaccctggcttttgaggagaggtc

SEQ ID NO: 2226968 - DNA, 25 bp, Homo sapien
ccctggcttttgaggagaggtccat

SEQ ID NO: 2226969 - DNA, 25 bp, Homo sapien
caaatgacatctttgtgcctgttgt

SEQ ID NO: 2226970 - DNA, 25 bp, Homo sapien
cacaaatgacatctttgtgcctgtt

SEQ ID NO: 2226971 - DNA, 25 bp, Homo sapien
tgacatctttgtgcctgttgttcgg

SEQ ID NO: 2226972 - DNA, 25 bp, Homo sapien
aatgacatctttgtgcctgttgttc

SEQ ID NO: 2226973 - DNA, 25 bp, Homo sapien
taagagcttaaacagtgcttctgta

SEQ ID NO: 2226974 - DNA, 25 bp, Homo sapien
aagcctgagctgtagaattaatttt

SEQ ID NO: 2226975 - DNA, 25 bp, Homo sapien
ctgaaatgtaaccaatatttaagag

SEQ ID NO: 2226976 - DNA, 25 bp, Homo sapien
tagaacttgtagtatgaaatatgac

SEQ ID NO: 2226977 - DNA, 25 bp, Homo sapien
tcatcaaataataccacgtctaaac

SEQ ID NO: 2226978 - DNA, 25 bp, Homo sapien
taccacgtctaaactggcagattct

SEQ ID NO: 2226979 - DNA, 25 bp, Homo sapien
gtctcacacccaaagataattcatc

SEQ ID NO: 2226980 - DNA, 25 bp, Homo sapien
tcacagtgtgactagtagcaccacc

SEQ ID NO: 2226981 - DNA, 25 bp, Homo sapien
tccttctattcttatgatttgccat

SEQ ID NO: 2226982 - DNA, 25 bp, Homo sapien
cttgattccagttgtaacttactaa

SEQ ID NO: 2226983 - DNA, 25 bp, Homo sapien
tctgacatattgaccaccctgctgg

SEQ ID NO: 2226984 - DNA, 25 bp, Homo sapien
cagttgtaacttactaatccttcta

SEQ ID NO: 2226985 - DNA, 25 bp, Homo sapien
ccctttgaaagtgatgatagaatac

SEQ ID NO: 2226986 - DNA, 25 bp, Homo sapien
ttgaaagtgatgatagaatactggg

SEQ ID NO: 2226987 - DNA, 25 bp, Homo sapien
tagaatactggggatggatcagaga

SEQ ID NO: 2226988 - DNA, 25 bp, Homo sapien
ctttgaaagtgatgatagaatactg

SEQ ID NO: 2226989 - DNA, 25 bp, Homo sapien
tatagatccaaaatcagcagcttca

SEQ ID NO: 2226990 - DNA, 25 bp, Homo sapien
ataaacagtgagttcttgattttta

SEQ ID NO: 2226991 - DNA, 25 bp, Homo sapien
tctcatatagatccaaaatcagcag

SEQ ID NO: 2226992 - DNA, 25 bp, Homo sapien
tatttctcatatagatccaaaatca

SEQ ID NO: 2226993 - DNA, 25 bp, Homo sapien
gattagcctgcatgagctatctggc

SEQ ID NO: 2226994 - DNA, 25 bp, Homo sapien
ggcttgcccatttcaagtgctgtga

SEQ ID NO: 2226995 - DNA, 25 bp, Homo sapien
tattaccaacaagatagtaccccag

SEQ ID NO: 2226996 - DNA, 25 bp, Homo sapien
tattctatgccggagaaatcatcct

SEQ ID NO: 2226997 - DNA, 25 bp, Homo sapien
gggataaacattcgaactatggaaa

SEQ ID NO: 2226998 - DNA, 25 bp, Homo sapien
caaaggttgagtcagagaaacatag

SEQ ID NO: 2226999 - DNA, 25 bp, Homo sapien
gaagtgtgctaccttctaagtgtca

SEQ ID NO: 2227000 - DNA, 25 bp, Homo sapien
tcttggaagacggaaggatatgttg

SEQ ID NO: 2227001 - DNA, 25 bp, Homo sapien
taacaatagcaaagttaccaaattc

SEQ ID NO: 2227002 - DNA, 25 bp, Homo sapien
gagcaagattattcttgtaggtaac

SEQ ID NO: 2227003 - DNA, 25 bp, Homo sapien
cattaatgtaatacttccatctaat

SEQ ID NO: 2227004 - DNA, 25 bp, Homo sapien
catctaatcaaccatccatgttcca

SEQ ID NO: 2227005 - DNA, 25 bp, Homo sapien
tatagcattttctcctccaatgcaa

SEQ ID NO: 2227006 - DNA, 25 bp, Homo sapien
tgcatcgagttgttatgtcttctta

SEQ ID NO: 2227007 - DNA, 25 bp, Homo sapien
ggaacagttcctcataccattgcat

SEQ ID NO: 2227008 - DNA, 25 bp, Homo sapien
tcacacattgcatcgagttgttatg

SEQ ID NO: 2227009 - DNA, 25 bp, Homo sapien
ggtgctgtcagatttaatgtctgat

SEQ ID NO: 2227010 - DNA, 25 bp, Homo sapien
aggatcaaggtgctgtcagatttaa

SEQ ID NO: 2227011 - DNA, 25 bp, Homo sapien
gctgtcagatttaatgtctgatgag

SEQ ID NO: 2227012 - DNA, 25 bp, Homo sapien
gatttaatgtctgatgagtgtttgc

SEQ ID NO: 2227013 - DNA, 25 bp, Homo sapien
tctgtcccttttaggcccagttgga

SEQ ID NO: 2227014 - DNA, 25 bp, Homo sapien
gagggtcctcacagatttttcctga

SEQ ID NO: 2227015 - DNA, 25 bp, Homo sapien
ttcacacattcagaaaagagggtcc

SEQ ID NO: 2227016 - DNA, 25 bp, Homo sapien
tgggtcttctacgtatgtcacattg

SEQ ID NO: 2227017 - DNA, 25 bp, Homo sapien
aaatgccttctatggttcacagtgc

SEQ ID NO: 2227018 - DNA, 25 bp, Homo sapien
taatcgatcccaactctgtgctctg

SEQ ID NO: 2227019 - DNA, 25 bp, Homo sapien
ggagattgtgtccataccaagccac

SEQ ID NO: 2227020 - DNA, 25 bp, Homo sapien
tctaaaagctattgtctgcacaggc

SEQ ID NO: 2227021 - DNA, 25 bp, Homo sapien
taggaagagccgtggtatctaaggt

SEQ ID NO: 2227022 - DNA, 25 bp, Homo sapien
taaagactcctatagttttgcatct

SEQ ID NO: 2227023 - DNA, 25 bp, Homo sapien
gatcgcgtttcaagacagtccggct

SEQ ID NO: 2227024 - DNA, 25 bp, Homo sapien
tttgcatctatacctctccaggaag

SEQ ID NO: 2227025 - DNA, 25 bp, Homo sapien
gtgctgtaggtaatgcaatgataaa

SEQ ID NO: 2227026 - DNA, 25 bp, Homo sapien
tatacagtgttcttagaataagatg

SEQ ID NO: 2227027 - DNA, 25 bp, Homo sapien
taggtaatgcaatgataaatacttc

SEQ ID NO: 2227028 - DNA, 25 bp, Homo sapien
ttggcaaatggtttatacagtgttc

SEQ ID NO: 2227029 - DNA, 25 bp, Homo sapien
catgatttagggacaccttgaggct

SEQ ID NO: 2227030 - DNA, 25 bp, Homo sapien
tgaatcttcgactctgggcacatga

SEQ ID NO: 2227031 - DNA, 25 bp, Homo sapien
tgggcacatgatttagggacacctt

SEQ ID NO: 2227032 - DNA, 25 bp, Homo sapien
caaactgaatcttcgactctgggca

SEQ ID NO: 2227033 - DNA, 25 bp, Homo sapien
ttcacagataccaggtaaaacgttg

SEQ ID NO: 2227034 - DNA, 25 bp, Homo sapien
cacagataccaggtaaaacgttgtt

SEQ ID NO: 2227035 - DNA, 25 bp, Homo sapien
aggtttccatcccagaccgtattag

SEQ ID NO: 2227036 - DNA, 25 bp, Homo sapien
catttccataggcaattgggccagg

SEQ ID NO: 2227037 - DNA, 25 bp, Homo sapien
taatgcttaactgcacacttgatag

SEQ ID NO: 2227038 - DNA, 25 bp, Homo sapien
taggtaatgcttaactgcacacttg

SEQ ID NO: 2227039 - DNA, 25 bp, Homo sapien
tatatttaggtaatgcttaactgca

SEQ ID NO: 2227040 - DNA, 25 bp, Homo sapien
gcttaactgcacacttgatagacat

SEQ ID NO: 2227041 - DNA, 25 bp, Homo sapien
tttctgggcctcgagaacaacctgg

SEQ ID NO: 2227042 - DNA, 25 bp, Homo sapien
tatccaaatgggttcagctgaccca

SEQ ID NO: 2227043 - DNA, 25 bp, Homo sapien
acttgcatagccactagagagaaac

SEQ ID NO: 2227044 - DNA, 25 bp, Homo sapien
ttatccacgtcataaaaaacacggc

SEQ ID NO: 2227045 - DNA, 25 bp, Homo sapien
aggcatttctatttgtaccgcttct

SEQ ID NO: 2227046 - DNA, 25 bp, Homo sapien
ttctttggcatgaggagaatggctt

SEQ ID NO: 2227047 - DNA, 25 bp, Homo sapien
taccgcttctttggcatgaggagaa

SEQ ID NO: 2227048 - DNA, 25 bp, Homo sapien
tatttgtaccgcttctttggcatga

SEQ ID NO: 2227049 - DNA, 25 bp, Homo sapien
gtgtgccatgaacacgggcccatga

SEQ ID NO: 2227050 - DNA, 25 bp, Homo sapien
tgatggaggtacatggtccaaagtc

SEQ ID NO: 2227051 - DNA, 25 bp, Homo sapien
aggatccctgtgtgccatgaacacg

SEQ ID NO: 2227052 - DNA, 25 bp, Homo sapien
cttgagaatcgcactgtgctgagag

SEQ ID NO: 2227053 - DNA, 25 bp, Homo sapien
catggtatgaggagtctgccaagtg

SEQ ID NO: 2227054 - DNA, 25 bp, Homo sapien
gtatgaggagtctgccaagtgtaag

SEQ ID NO: 2227055 - DNA, 25 bp, Homo sapien
cacatggtatgaggagtctgccaag

SEQ ID NO: 2227056 - DNA, 25 bp, Homo sapien
gacacatggtatgaggagtctgcca

SEQ ID NO: 2227057 - DNA, 25 bp, Homo sapien
gctataggagtggattccatattct

SEQ ID NO: 2227058 - DNA, 25 bp, Homo sapien
ttctttatctacagaactgctatag

SEQ ID NO: 2227059 - DNA, 25 bp, Homo sapien
taggagtggattccatattcttcaa

SEQ ID NO: 2227060 - DNA, 25 bp, Homo sapien
gaactgctataggagtggattccat

SEQ ID NO: 2227061 - DNA, 25 bp, Homo sapien
taaattggcttgacgggtggacact

SEQ ID NO: 2227062 - DNA, 25 bp, Homo sapien
gatgcattctttggccttaaattgg

SEQ ID NO: 2227063 - DNA, 25 bp, Homo sapien
tctgatgatacagatatgctccatt

SEQ ID NO: 2227064 - DNA, 25 bp, Homo sapien
cagactcctcaatgctttgggccaa

SEQ ID NO: 2227065 - DNA, 25 bp, Homo sapien
ttgctcttggcaggattgttgtttt

SEQ ID NO: 2227066 - DNA, 25 bp, Homo sapien
tgctcttggcaggattgttgttttc

SEQ ID NO: 2227067 - DNA, 25 bp, Homo sapien
agtttagttcccactctctcatcgg

SEQ ID NO: 2227068 - DNA, 25 bp, Homo sapien
tagttcccactctctcatcggaaga

SEQ ID NO: 2227069 - DNA, 25 bp, Homo sapien
tgaaggcagaatacagtttagttcc

SEQ ID NO: 2227070 - DNA, 25 bp, Homo sapien
ctcatcggaagaccggctcagcaaa

SEQ ID NO: 2227071 - DNA, 25 bp, Homo sapien
cattttgatcaataataacagtctc

SEQ ID NO: 2227072 - DNA, 25 bp, Homo sapien
gaatgatgctcattttgatcaataa

SEQ ID NO: 2227073 - DNA, 25 bp, Homo sapien
tttgatcaataataacagtctcccg

SEQ ID NO: 2227074 - DNA, 25 bp, Homo sapien
gatcaataataacagtctcccgccc

SEQ ID NO: 2227075 - DNA, 25 bp, Homo sapien
tactctggcatctcttggctaccct

SEQ ID NO: 2227076 - DNA, 25 bp, Homo sapien
ccaggtccaacagacttcattgatg

SEQ ID NO: 2227077 - DNA, 25 bp, Homo sapien
tgatgactcagtgaagaacataaac

SEQ ID NO: 2227078 - DNA, 25 bp, Homo sapien
tctccatactctggcatctcttggc

SEQ ID NO: 2227079 - DNA, 25 bp, Homo sapien
cttaagttgatttgcccagccaggc

SEQ ID NO: 2227080 - DNA, 25 bp, Homo sapien
tctctgggccattggagcagcatgg

SEQ ID NO: 2227081 - DNA, 25 bp, Homo sapien
gactttgtcgttcacactggtccag

SEQ ID NO: 2227082 - DNA, 25 bp, Homo sapien
ggtccagatggtgctgtccaaaacc

SEQ ID NO: 2227083 - DNA, 25 bp, Homo sapien
aacaattgtgaatgtttttcagtaa

SEQ ID NO: 2227084 - DNA, 25 bp, Homo sapien
taaattttagtatgtctacttgtct

SEQ ID NO: 2227085 - DNA, 25 bp, Homo sapien
tctgccagcatcaataaacaattgt

SEQ ID NO: 2227086 - DNA, 25 bp, Homo sapien
tactgtcagataaatgtagagccca

SEQ ID NO: 2227087 - DNA, 25 bp, Homo sapien
actctacccgaaaacataaatccat

SEQ ID NO: 2227088 - DNA, 25 bp, Homo sapien
agggcctcagactgttcatactgca

SEQ ID NO: 2227089 - DNA, 25 bp, Homo sapien
gtgtactatcatctatgaatttaat

SEQ ID NO: 2227090 - DNA, 25 bp, Homo sapien
ttaagtgtactatcatctatgaatt

SEQ ID NO: 2227091 - DNA, 25 bp, Homo sapien
aagtgtactatcatctatgaattta

SEQ ID NO: 2227092 - DNA, 25 bp, Homo sapien
ctttaagtgtactatcatctatgaa

SEQ ID NO: 2227093 - DNA, 25 bp, Homo sapien
cttcttggtagtgctctaccaccct

SEQ ID NO: 2227094 - DNA, 25 bp, Homo sapien
gtgctccttcttggtagtgctctac

SEQ ID NO: 2227095 - DNA, 25 bp, Homo sapien
atgtgctccttcttggtagtgctct

SEQ ID NO: 2227096 - DNA, 25 bp, Homo sapien
tcttggtagtgctctaccacccttt

SEQ ID NO: 2227097 - DNA, 25 bp, Homo sapien
tgcttcctctagacgttttaccctc

SEQ ID NO: 2227098 - DNA, 25 bp, Homo sapien
cctccaggtgttcttaacaccatca

SEQ ID NO: 2227099 - DNA, 25 bp, Homo sapien
caaggagcctgagtactgggaatga

SEQ ID NO: 2227100 - DNA, 25 bp, Homo sapien
gagtgagaccccatactggggcaaa

SEQ ID NO: 2227101 - DNA, 25 bp, Homo sapien
gcttcaatttctgtcttctgcgatg

SEQ ID NO: 2227102 - DNA, 25 bp, Homo sapien
gtcttctgcgatgcaaatgattcat

SEQ ID NO: 2227103 - DNA, 25 bp, Homo sapien
tggcttcaatttctgtcttctgcga

SEQ ID NO: 2227104 - DNA, 25 bp, Homo sapien
cttcagtaacagccaaacatgttgg

SEQ ID NO: 2227105 - DNA, 25 bp, Homo sapien
atccaactgtgactactgatcctag

SEQ ID NO: 2227106 - DNA, 25 bp, Homo sapien
gcctgaaatccaactgtgactactg

SEQ ID NO: 2227107 - DNA, 25 bp, Homo sapien
actactgatcctagttcctgttctg

SEQ ID NO: 2227108 - DNA, 25 bp, Homo sapien
tttcagcctgaaatccaactgtgac

SEQ ID NO: 2227109 - DNA, 25 bp, Homo sapien
tatagtatgtaacactttgggatca

SEQ ID NO: 2227110 - DNA, 25 bp, Homo sapien
tcccagagaattcatcgaagttgta

SEQ ID NO: 2227111 - DNA, 25 bp, Homo sapien
tctatcgccatgaggatcccttaca

SEQ ID NO: 2227112 - DNA, 25 bp, Homo sapien
tgcacactgatctgagacaatccaa

SEQ ID NO: 2227113 - DNA, 25 bp, Homo sapien
catttcaccttttcgtgaatcagga

SEQ ID NO: 2227114 - DNA, 25 bp, Homo sapien
tttcaccttttcgtgaatcaggata

SEQ ID NO: 2227115 - DNA, 25 bp, Homo sapien
caccttttcgtgaatcaggataagt

SEQ ID NO: 2227116 - DNA, 25 bp, Homo sapien
tcaccttttcgtgaatcaggataag

SEQ ID NO: 2227117 - DNA, 25 bp, Homo sapien
gaccaaatcctttggagagcctgac

SEQ ID NO: 2227118 - DNA, 25 bp, Homo sapien
ccaaatcctttggagagcctgacag

SEQ ID NO: 2227119 - DNA, 25 bp, Homo sapien
aaatcctttggagagcctgacagtt

SEQ ID NO: 2227120 - DNA, 25 bp, Homo sapien
caaatcctttggagagcctgacagt

SEQ ID NO: 2227121 - DNA, 25 bp, Homo sapien
tcattgagagaacaggattcgagtt

SEQ ID NO: 2227122 - DNA, 25 bp, Homo sapien
tcagagtctgataggctaaacaggg

SEQ ID NO: 2227123 - DNA, 25 bp, Homo sapien
tgggtttccccgtatctgatctgca

SEQ ID NO: 2227124 - DNA, 25 bp, Homo sapien
aaatgtgcttctagatccttgcagc

SEQ ID NO: 2227125 - DNA, 25 bp, Homo sapien
acattctatctctgtgttgtgaaca

SEQ ID NO: 2227126 - DNA, 25 bp, Homo sapien
ttttgagaacagagcccattactgt

SEQ ID NO: 2227127 - DNA, 25 bp, Homo sapien
gtatcttgacaagggacagtctcca

SEQ ID NO: 2227128 - DNA, 25 bp, Homo sapien
accatacacttagtggtcacaggac

SEQ ID NO: 2227129 - DNA, 25 bp, Homo sapien
ctccaaggtacccaattctctctaa

SEQ ID NO: 2227130 - DNA, 25 bp, Homo sapien
agtatgtcccctatattggcagtca

SEQ ID NO: 2227131 - DNA, 25 bp, Homo sapien
aaggtacccaattctctctaacgct

SEQ ID NO: 2227132 - DNA, 25 bp, Homo sapien
ccataaagagggttcagtatcatct

SEQ ID NO: 2227133 - DNA, 25 bp, Homo sapien
gggattacgacatcctcagagggct

SEQ ID NO: 2227134 - DNA, 25 bp, Homo sapien
attacgacatcctcagagggcttac

SEQ ID NO: 2227135 - DNA, 25 bp, Homo sapien
tcacttggggattacgacatcctca

SEQ ID NO: 2227136 - DNA, 25 bp, Homo sapien
tggggattacgacatcctcagaggg

SEQ ID NO: 2227137 - DNA, 25 bp, Homo sapien
caggaagctatcgtgcagaaaatga

SEQ ID NO: 2227138 - DNA, 25 bp, Homo sapien
gaaaatgagtaagacatattctttg

SEQ ID NO: 2227139 - DNA, 25 bp, Homo sapien
tactggttgggctctatgcaggaag

SEQ ID NO: 2227140 - DNA, 25 bp, Homo sapien
catttgtggaacacgtactggttgg

SEQ ID NO: 2227141 - DNA, 25 bp, Homo sapien
tctttgcaacaaacgttcatctgct

SEQ ID NO: 2227142 - DNA, 25 bp, Homo sapien
gaatgtactcgatgccttttgctgc

SEQ ID NO: 2227143 - DNA, 25 bp, Homo sapien
catctgcttcatagggtggcgatac

SEQ ID NO: 2227144 - DNA, 25 bp, Homo sapien
ggcgataccttgctgaggcctctgc

SEQ ID NO: 2227145 - DNA, 25 bp, Homo sapien
gatcagacgttgatccttctcattc

SEQ ID NO: 2227146 - DNA, 25 bp, Homo sapien
tatagatcagacgttgatccttctc

SEQ ID NO: 2227147 - DNA, 25 bp, Homo sapien
atagatcagacgttgatccttctca

SEQ ID NO: 2227148 - DNA, 25 bp, Homo sapien
tagatcagacgttgatccttctcat

SEQ ID NO: 2227149 - DNA, 25 bp, Homo sapien
agaagtagctgaacaatagcaactc

SEQ ID NO: 2227150 - DNA, 25 bp, Homo sapien
gaagtagctgaacaatagcaactct

SEQ ID NO: 2227151 - DNA, 25 bp, Homo sapien
aagaagtagctgaacaatagcaact

SEQ ID NO: 2227152 - DNA, 25 bp, Homo sapien
ggagatggcttccagcgctgtagaa

SEQ ID NO: 2227153 - DNA, 25 bp, Homo sapien
cctgctataaggatatgtgtttcta

SEQ ID NO: 2227154 - DNA, 25 bp, Homo sapien
tattcatgtttctattgtccgatcc

SEQ ID NO: 2227155 - DNA, 25 bp, Homo sapien
tagaatttcgatacctgctataagg

SEQ ID NO: 2227156 - DNA, 25 bp, Homo sapien
tcttggcactttgaagagcagctag

SEQ ID NO: 2227157 - DNA, 25 bp, Homo sapien
gagcagctagcttatgagctttcaa

SEQ ID NO: 2227158 - DNA, 25 bp, Homo sapien
taagatgatgctgtaatctcagtat

SEQ ID NO: 2227159 - DNA, 25 bp, Homo sapien
taaatgccattgtctacttcagcaa

SEQ ID NO: 2227160 - DNA, 25 bp, Homo sapien
caagtattaattgcaatgtagaaga

SEQ ID NO: 2227161 - DNA, 25 bp, Homo sapien
gcaatgtagaagaagaatatggaga

SEQ ID NO: 2227162 - DNA, 25 bp, Homo sapien
ctcgcttccttgcaagtattaattg

SEQ ID NO: 2227163 - DNA, 25 bp, Homo sapien
cgcttccttgcaagtattaattgca

SEQ ID NO: 2227164 - DNA, 25 bp, Homo sapien
ttatcataaggcctcaataagtcat

SEQ ID NO: 2227165 - DNA, 25 bp, Homo sapien
cttaggtttacagacctagttggct

SEQ ID NO: 2227166 - DNA, 25 bp, Homo sapien
tcataaggcctcaataagtcattta

SEQ ID NO: 2227167 - DNA, 25 bp, Homo sapien
ttacagacctagttggcttattcat

SEQ ID NO: 2227168 - DNA, 25 bp, Homo sapien
cctgtatatcagacaaagttacact

SEQ ID NO: 2227169 - DNA, 25 bp, Homo sapien
tctgacacctgtatatcagacaaag

SEQ ID NO: 2227170 - DNA, 25 bp, Homo sapien
tagcacacaccataaagatgtgttg

SEQ ID NO: 2227171 - DNA, 25 bp, Homo sapien
gtttcttccattagcacacaccata

SEQ ID NO: 2227172 - DNA, 25 bp, Homo sapien
gctttccatgctggcccgattttca

SEQ ID NO: 2227173 - DNA, 25 bp, Homo sapien
gtctgcctgaattcccacttcttat

SEQ ID NO: 2227174 - DNA, 25 bp, Homo sapien
cgtctgcctgaattcccacttctta

SEQ ID NO: 2227175 - DNA, 25 bp, Homo sapien
atgctggcccgattttcagatttca

SEQ ID NO: 2227176 - DNA, 25 bp, Homo sapien
tgtcacgtgtcttaggaggaatccc

SEQ ID NO: 2227177 - DNA, 25 bp, Homo sapien
atgtcacgtgtcttaggaggaatcc

SEQ ID NO: 2227178 - DNA, 25 bp, Homo sapien
gatgtcacgtgtcttaggaggaatc

SEQ ID NO: 2227179 - DNA, 25 bp, Homo sapien
tcagtaacagtgtcttctcgaatgc

SEQ ID NO: 2227180 - DNA, 25 bp, Homo sapien
agctttcagtaacagtgtcttctcg

SEQ ID NO: 2227181 - DNA, 25 bp, Homo sapien
cagtgtcttctcgaatgctgattca

SEQ ID NO: 2227182 - DNA, 25 bp, Homo sapien
tcttctcgaatgctgattcagtgct

SEQ ID NO: 2227183 - DNA, 25 bp, Homo sapien
gaactgaaatttgccagcagacaaa

SEQ ID NO: 2227184 - DNA, 25 bp, Homo sapien
tgccagcagacaaacagtttctgag

SEQ ID NO: 2227185 - DNA, 25 bp, Homo sapien
ccagcagacaaacagtttctgagag

SEQ ID NO: 2227186 - DNA, 25 bp, Homo sapien
tgaactgaaatttgccagcagacaa

SEQ ID NO: 2227187 - DNA, 25 bp, Homo sapien
ggatgtgaccagctgctactcgtat

SEQ ID NO: 2227188 - DNA, 25 bp, Homo sapien
cccacagcttgatcctggatgtgac

SEQ ID NO: 2227189 - DNA, 25 bp, Homo sapien
tctcccacagcttgatcctggatgt

SEQ ID NO: 2227190 - DNA, 25 bp, Homo sapien
tgtgaccagctgctactcgtatctc

SEQ ID NO: 2227191 - DNA, 25 bp, Homo sapien
tggcaatgggggatgagaagttgtc

SEQ ID NO: 2227192 - DNA, 25 bp, Homo sapien
ctgtggcaatgggggatgagaagtt

SEQ ID NO: 2227193 - DNA, 25 bp, Homo sapien
ggcaatgggggatgagaagttgtct

SEQ ID NO: 2227194 - DNA, 25 bp, Homo sapien
gtggcaatgggggatgagaagttgt

SEQ ID NO: 2227195 - DNA, 25 bp, Homo sapien
gaggcaaacatttgaaactaaagca

SEQ ID NO: 2227196 - DNA, 25 bp, Homo sapien
agcctgggaattacaagtccatttt

SEQ ID NO: 2227197 - DNA, 25 bp, Homo sapien
ggaagcctgggaattacaagtccat

SEQ ID NO: 2227198 - DNA, 25 bp, Homo sapien
atggaagcctgggaattacaagtcc

SEQ ID NO: 2227199 - DNA, 25 bp, Homo sapien
gaagcctgggaattacaagtccatt

SEQ ID NO: 2227200 - DNA, 25 bp, Homo sapien
ctgctgttacatctgcatttgacat

SEQ ID NO: 2227201 - DNA, 25 bp, Homo sapien
caaggcaacttgtagcaaagtggaa

SEQ ID NO: 2227202 - DNA, 25 bp, Homo sapien
tctccgtgcttggttgtcttcacat

SEQ ID NO: 2227203 - DNA, 25 bp, Homo sapien
tgctccttcctctaataaagcactg

SEQ ID NO: 2227204 - DNA, 25 bp, Homo sapien
cactggtctggatattttcttggtc

SEQ ID NO: 2227205 - DNA, 25 bp, Homo sapien
ccacagccccatacagggtgttcgt

SEQ ID NO: 2227206 - DNA, 25 bp, Homo sapien
cagccccatacagggtgttcgtagc

SEQ ID NO: 2227207 - DNA, 25 bp, Homo sapien
gccccatacagggtgttcgtagctt

SEQ ID NO: 2227208 - DNA, 25 bp, Homo sapien
ttcacttgccaagccaggtacaaag

SEQ ID NO: 2227209 - DNA, 25 bp, Homo sapien
ccccaatcctgtgcccagcaaccac

SEQ ID NO: 2227210 - DNA, 25 bp, Homo sapien
ccaatcctgtgcccagcaaccactt

SEQ ID NO: 2227211 - DNA, 25 bp, Homo sapien
atcctgtgcccagcaaccacttcat

SEQ ID NO: 2227212 - DNA, 25 bp, Homo sapien
tcccccaatcctgtgcccagcaacc

SEQ ID NO: 2227213 - DNA, 25 bp, Homo sapien
ctactggcacccgccactatgccag

SEQ ID NO: 2227214 - DNA, 25 bp, Homo sapien
actactggcacccgccactatgcca

SEQ ID NO: 2227215 - DNA, 25 bp, Homo sapien
actggcacccgccactatgccaggc

SEQ ID NO: 2227216 - DNA, 25 bp, Homo sapien
tcaagttacaatgggtagtttcatc

SEQ ID NO: 2227217 - DNA, 25 bp, Homo sapien
ttaggattctatgaacaacttctgc

SEQ ID NO: 2227218 - DNA, 25 bp, Homo sapien
gaagccagtgcaaatctacagagat

SEQ ID NO: 2227219 - DNA, 25 bp, Homo sapien
tgttaacaatcttacgaagccagtg

SEQ ID NO: 2227220 - DNA, 25 bp, Homo sapien
tattcttgtagactctgaatgggtg

SEQ ID NO: 2227221 - DNA, 25 bp, Homo sapien
tagactctgaatgggtgtctgtgat

SEQ ID NO: 2227222 - DNA, 25 bp, Homo sapien
taattcaggctttattcttgtagac

SEQ ID NO: 2227223 - DNA, 25 bp, Homo sapien
caggctttattcttgtagactctga

SEQ ID NO: 2227224 - DNA, 25 bp, Homo sapien
agttttatagtgatctgctttgcat

SEQ ID NO: 2227225 - DNA, 25 bp, Homo sapien
taaagttttatagtgatctgctttg

SEQ ID NO: 2227226 - DNA, 25 bp, Homo sapien
gctgctaagaaccataacttctaca

SEQ ID NO: 2227227 - DNA, 25 bp, Homo sapien
gctaagaaccataacttctacagaa

SEQ ID NO: 2227228 - DNA, 25 bp, Homo sapien
gaagcaatgagaaggattagtggat

SEQ ID NO: 2227229 - DNA, 25 bp, Homo sapien
gatataagctctatccacaggcttc

SEQ ID NO: 2227230 - DNA, 25 bp, Homo sapien
cactttggagggtgcaactgaacta

SEQ ID NO: 2227231 - DNA, 25 bp, Homo sapien
gattagtggattgctttctctccct

SEQ ID NO: 2227232 - DNA, 25 bp, Homo sapien
gcaacttcggattccagttctttta

SEQ ID NO: 2227233 - DNA, 25 bp, Homo sapien
aaatgttgaggtgaagtaagacatc

SEQ ID NO: 2227234 - DNA, 25 bp, Homo sapien
tcacaacagtttaaatgttgaggtg

SEQ ID NO: 2227235 - DNA, 25 bp, Homo sapien
cttggaggactcagtggtagaaaga

SEQ ID NO: 2227236 - DNA, 25 bp, Homo sapien
gatctcgaggtagtcttcaagctgg

SEQ ID NO: 2227237 - DNA, 25 bp, Homo sapien
tgtaggaaggtgtagaaaggcccca

SEQ ID NO: 2227238 - DNA, 25 bp, Homo sapien
caaatagtgagtttccccaaggatc

SEQ ID NO: 2227239 - DNA, 25 bp, Homo sapien
cccaaggatctgtgtggttaatgtc

SEQ ID NO: 2227240 - DNA, 25 bp, Homo sapien
tttattgttagtgaacttagaaatg

SEQ ID NO: 2227241 - DNA, 25 bp, Homo sapien
ttattgttagtgaacttagaaatgc

SEQ ID NO: 2227242 - DNA, 25 bp, Homo sapien
attgttagtgaacttagaaatgcca

SEQ ID NO: 2227243 - DNA, 25 bp, Homo sapien
tattgttagtgaacttagaaatgcc

SEQ ID NO: 2227244 - DNA, 25 bp, Homo sapien
acaagcttggctattggtggtccat

SEQ ID NO: 2227245 - DNA, 25 bp, Homo sapien
ctgggttagattcaggccactcaaa

SEQ ID NO: 2227246 - DNA, 25 bp, Homo sapien
ttcaggccactcaaatatgactggg

SEQ ID NO: 2227247 - DNA, 25 bp, Homo sapien
gggatgggtcatctagtacaagctt

SEQ ID NO: 2227248 - DNA, 25 bp, Homo sapien
tcaatttaaaagtggatgaggagct

SEQ ID NO: 2227249 - DNA, 25 bp, Homo sapien
taaaagtggatgaggagctagttcc

SEQ ID NO: 2227250 - DNA, 25 bp, Homo sapien
aatttaaaagtggatgaggagctag

SEQ ID NO: 2227251 - DNA, 25 bp, Homo sapien
tttaaaagtggatgaggagctagtt

SEQ ID NO: 2227252 - DNA, 25 bp, Homo sapien
ttcacaatcttagcctttattgtcc

SEQ ID NO: 2227253 - DNA, 25 bp, Homo sapien
tgtcttcttcacaatcttagccttt

SEQ ID NO: 2227254 - DNA, 25 bp, Homo sapien
cttcacaatcttagcctttattgtc

SEQ ID NO: 2227255 - DNA, 25 bp, Homo sapien
ctgtcttcttcacaatcttagcctt

SEQ ID NO: 2227256 - DNA, 25 bp, Homo sapien
agaagagtcatcagtgtggcctagt

SEQ ID NO: 2227257 - DNA, 25 bp, Homo sapien
agagcaaagcttctacaatatccct

SEQ ID NO: 2227258 - DNA, 25 bp, Homo sapien
gaagagtcatcagtgtggcctagtg

SEQ ID NO: 2227259 - DNA, 25 bp, Homo sapien
ttacactactggaaggtcaagtaag

SEQ ID NO: 2227260 - DNA, 25 bp, Homo sapien
caggctggctgatgtacccaagaca

SEQ ID NO: 2227261 - DNA, 25 bp, Homo sapien
ttataatgacctgctaaaattccta

SEQ ID NO: 2227262 - DNA, 25 bp, Homo sapien
gagaaaatagtaccagaagtacaga

SEQ ID NO: 2227263 - DNA, 25 bp, Homo sapien
tacagatggaattataatgacctgc

SEQ ID NO: 2227264 - DNA, 25 bp, Homo sapien
catgtctcattagtgaatccccagg

SEQ ID NO: 2227265 - DNA, 25 bp, Homo sapien
cacactgtgtatcacactgtacagg

SEQ ID NO: 2227266 - DNA, 25 bp, Homo sapien
tcttcggtgacctatcacactgtgt

SEQ ID NO: 2227267 - DNA, 25 bp, Homo sapien
tattggaaccaatgatcttcggtga

SEQ ID NO: 2227268 - DNA, 25 bp, Homo sapien
ctgatcaaatctaagaaggcgttct

SEQ ID NO: 2227269 - DNA, 25 bp, Homo sapien
atcaaatctaagaaggcgttctttt

SEQ ID NO: 2227270 - DNA, 25 bp, Homo sapien
tctaagaaggcgttctttttcttca

SEQ ID NO: 2227271 - DNA, 25 bp, Homo sapien
tgatcaaatctaagaaggcgttctt

SEQ ID NO: 2227272 - DNA, 25 bp, Homo sapien
gttttatcttctctgacattaccat

SEQ ID NO: 2227273 - DNA, 25 bp, Homo sapien
ccttaattgtccatcgccagccaaa

SEQ ID NO: 2227274 - DNA, 25 bp, Homo sapien
tctttataatattttgtccatgtcc

SEQ ID NO: 2227275 - DNA, 25 bp, Homo sapien
tctgtactctgtaggagccttgtgt

SEQ ID NO: 2227276 - DNA, 25 bp, Homo sapien
atgggcctcttcattggcccgtttt

SEQ ID NO: 2227277 - DNA, 25 bp, Homo sapien
cctcttcattggcccgttttcccat

SEQ ID NO: 2227278 - DNA, 25 bp, Homo sapien
gcctcttcattggcccgttttccca

SEQ ID NO: 2227279 - DNA, 25 bp, Homo sapien
tgggcctcttcattggcccgttttc

SEQ ID NO: 2227280 - DNA, 25 bp, Homo sapien
cgatcagtcgcattgtggtttttat

SEQ ID NO: 2227281 - DNA, 25 bp, Homo sapien
ttcaccacgatcagtcgcattgtgg

SEQ ID NO: 2227282 - DNA, 25 bp, Homo sapien
gacattcaccacgatcagtcgcatt

SEQ ID NO: 2227283 - DNA, 25 bp, Homo sapien
cctggagacattcaccacgatcagt

SEQ ID NO: 2227284 - DNA, 25 bp, Homo sapien
cttgaatattctcatttcttcccat

SEQ ID NO: 2227285 - DNA, 25 bp, Homo sapien
tgacaggcacatgaggaacaagatg

SEQ ID NO: 2227286 - DNA, 25 bp, Homo sapien
cgtttcttagaaacaccgatggcaa

SEQ ID NO: 2227287 - DNA, 25 bp, Homo sapien
aaacaccgatggcaaaaatgtgaga

SEQ ID NO: 2227288 - DNA, 25 bp, Homo sapien
ggaacaagatgtactcctcgtttct

SEQ ID NO: 2227289 - DNA, 25 bp, Homo sapien
aagctttacaagaatgttggggcct

SEQ ID NO: 2227290 - DNA, 25 bp, Homo sapien
agtagattgagcagctttcccccat

SEQ ID NO: 2227291 - DNA, 25 bp, Homo sapien
tttcccccatgcaatgccagactta

SEQ ID NO: 2227292 - DNA, 25 bp, Homo sapien
tagcagtagattgagcagctttccc

SEQ ID NO: 2227293 - DNA, 25 bp, Homo sapien
gaacatctggcctcacgcgttcctg

SEQ ID NO: 2227294 - DNA, 25 bp, Homo sapien
agcctcaacgtctcaaatcactggg

SEQ ID NO: 2227295 - DNA, 25 bp, Homo sapien
tcatgaacatatcttgctgcagcca

SEQ ID NO: 2227296 - DNA, 25 bp, Homo sapien
tttgtatgatggctgtgtaacctgc

SEQ ID NO: 2227297 - DNA, 25 bp, Homo sapien
ttatggaatatgatctggttcctgg

SEQ ID NO: 2227298 - DNA, 25 bp, Homo sapien
gacattggcaggcacagtgcagcca

SEQ ID NO: 2227299 - DNA, 25 bp, Homo sapien
caaagtgtgaacaattttctatggc

SEQ ID NO: 2227300 - DNA, 25 bp, Homo sapien
tacactcaaagagatgctggctctg

SEQ ID NO: 2227301 - DNA, 25 bp, Homo sapien
tcttttagctcaagtagaattccag

SEQ ID NO: 2227302 - DNA, 25 bp, Homo sapien
ttttagctcaagtagaattccagag

SEQ ID NO: 2227303 - DNA, 25 bp, Homo sapien
gtcttttagctcaagtagaattcca

SEQ ID NO: 2227304 - DNA, 25 bp, Homo sapien
tttagctcaagtagaattccagaga

SEQ ID NO: 2227305 - DNA, 25 bp, Homo sapien
tgggtgtaggtggatgctgatttct

SEQ ID NO: 2227306 - DNA, 25 bp, Homo sapien
cttttgctaggggtgtgggtgtagg

SEQ ID NO: 2227307 - DNA, 25 bp, Homo sapien
tgtgggtgtaggtggatgctgattt

SEQ ID NO: 2227308 - DNA, 25 bp, Homo sapien
tcattcttttgctaggggtgtgggt

SEQ ID NO: 2227309 - DNA, 25 bp, Homo sapien
ggatgcgttcccatttgtttgtatc

SEQ ID NO: 2227310 - DNA, 25 bp, Homo sapien
ctttcatctccttgattaggtatat

SEQ ID NO: 2227311 - DNA, 25 bp, Homo sapien
tcatctccttgattaggtatattcc

SEQ ID NO: 2227312 - DNA, 25 bp, Homo sapien
ttgattgcttttggcagaatgatca

SEQ ID NO: 2227313 - DNA, 25 bp, Homo sapien
ttagggttttcgaagtaatcgatca

SEQ ID NO: 2227314 - DNA, 25 bp, Homo sapien
ggactctcaacttgattgctgttgg

SEQ ID NO: 2227315 - DNA, 25 bp, Homo sapien
gggttcacttcttgatttggactct

SEQ ID NO: 2227316 - DNA, 25 bp, Homo sapien
cgaagtaatcgatcatatcgtcagc

SEQ ID NO: 2227317 - DNA, 25 bp, Homo sapien
tgcttggcatgcccttttcttcact

SEQ ID NO: 2227318 - DNA, 25 bp, Homo sapien
ttcacttctgtgtagctggctcctc

SEQ ID NO: 2227319 - DNA, 25 bp, Homo sapien
cacttctgtgtagctggctcctcat

SEQ ID NO: 2227320 - DNA, 25 bp, Homo sapien
cttcacttctgtgtagctggctcct

SEQ ID NO: 2227321 - DNA, 25 bp, Homo sapien
tgtggacatgaatactgagaaagaa

SEQ ID NO: 2227322 - DNA, 25 bp, Homo sapien
caacagtcatctcagggctggtgtt

SEQ ID NO: 2227323 - DNA, 25 bp, Homo sapien
gaaataggcttcagagagatctgcc

SEQ ID NO: 2227324 - DNA, 25 bp, Homo sapien
ggctggtgttgatgtggacatgaat

SEQ ID NO: 2227325 - DNA, 25 bp, Homo sapien
gagcccagagctctacaatcaatcg

SEQ ID NO: 2227326 - DNA, 25 bp, Homo sapien
caatcaatcgccattgtggaaagat

SEQ ID NO: 2227327 - DNA, 25 bp, Homo sapien
tggaaagatatattgtaactgtcgg

SEQ ID NO: 2227328 - DNA, 25 bp, Homo sapien
gtaactgtcggagccagtctgctaa

SEQ ID NO: 2227329 - DNA, 25 bp, Homo sapien
gcagctgccgcatcccctgcatgat

SEQ ID NO: 2227330 - DNA, 25 bp, Homo sapien
gccgcatcccctgcatgataaaatt

SEQ ID NO: 2227331 - DNA, 25 bp, Homo sapien
ctgccgcatcccctgcatgataaaa

SEQ ID NO: 2227332 - DNA, 25 bp, Homo sapien
gcatcccctgcatgataaaattagt

SEQ ID NO: 2227333 - DNA, 25 bp, Homo sapien
taccaaacagatatataaaccaatg

SEQ ID NO: 2227334 - DNA, 25 bp, Homo sapien
tcctaagcaaaaagctggaggcatc

SEQ ID NO: 2227335 - DNA, 25 bp, Homo sapien
atcctaagcaaaaagctggaggcat

SEQ ID NO: 2227336 - DNA, 25 bp, Homo sapien
acagcatggtattggtaccaaacag

SEQ ID NO: 2227337 - DNA, 25 bp, Homo sapien
gcccattggagcagctttcccacaa

SEQ ID NO: 2227338 - DNA, 25 bp, Homo sapien
tagttgccactcagctgttaagccc

SEQ ID NO: 2227339 - DNA, 25 bp, Homo sapien
ctagggatgtagtagttgccactca

SEQ ID NO: 2227340 - DNA, 25 bp, Homo sapien
gctgttaagcccattggagcagctt

SEQ ID NO: 2227341 - DNA, 25 bp, Homo sapien
agctctgccaaaactcctgccaaat

SEQ ID NO: 2227342 - DNA, 25 bp, Homo sapien
aaactcctgccaaatttgttgtcac

SEQ ID NO: 2227343 - DNA, 25 bp, Homo sapien
taaccttgaggacacccagctctgc

SEQ ID NO: 2227344 - DNA, 25 bp, Homo sapien
ttaaccttgaggacacccagctctg

SEQ ID NO: 2227345 - DNA, 25 bp, Homo sapien
tctcttcgaagtctcagctgctctg

SEQ ID NO: 2227346 - DNA, 25 bp, Homo sapien
cttgtctcagcagttcaatgttgcc

SEQ ID NO: 2227347 - DNA, 25 bp, Homo sapien
gcccaaattcgctaaatactgctga

SEQ ID NO: 2227348 - DNA, 25 bp, Homo sapien
tagtagcactccatcagactcattg

SEQ ID NO: 2227349 - DNA, 25 bp, Homo sapien
tcaaccatggagctaattatacacc

SEQ ID NO: 2227350 - DNA, 25 bp, Homo sapien
tatacacctatatccctcagaggga

SEQ ID NO: 2227351 - DNA, 25 bp, Homo sapien
gaactcatccgttattcccaacctg

SEQ ID NO: 2227352 - DNA, 25 bp, Homo sapien
agaaaatgtgaagtggtagtcttac

SEQ ID NO: 2227353 - DNA, 25 bp, Homo sapien
taatctctgcatgtgcccgtattcc

SEQ ID NO: 2227354 - DNA, 25 bp, Homo sapien
ttggaacaaccacctcagcagaagc

SEQ ID NO: 2227355 - DNA, 25 bp, Homo sapien
tactccactagtgtctgcacatcga

SEQ ID NO: 2227356 - DNA, 25 bp, Homo sapien
tgtgctgcagaacaaataatcactg

SEQ ID NO: 2227357 - DNA, 25 bp, Homo sapien
cttctagaatgctcacaactgtcat

SEQ ID NO: 2227358 - DNA, 25 bp, Homo sapien
aggtgcttctagaatgctcacaact

SEQ ID NO: 2227359 - DNA, 25 bp, Homo sapien
gtgcttctagaatgctcacaactgt

SEQ ID NO: 2227360 - DNA, 25 bp, Homo sapien
aatgaagttgctaggtgcttctaga

SEQ ID NO: 2227361 - DNA, 25 bp, Homo sapien
ctcctcttattgatgtccagttgca

SEQ ID NO: 2227362 - DNA, 25 bp, Homo sapien
aatcaccctagctgaactcctctta

SEQ ID NO: 2227363 - DNA, 25 bp, Homo sapien
gctgaactcctcttattgatgtcca

SEQ ID NO: 2227364 - DNA, 25 bp, Homo sapien
caatttgccaatcaccctagctgaa

SEQ ID NO: 2227365 - DNA, 25 bp, Homo sapien
tagtgtggtacaaatgcctgaggct

SEQ ID NO: 2227366 - DNA, 25 bp, Homo sapien
ataagaataattgggaacctccagt

SEQ ID NO: 2227367 - DNA, 25 bp, Homo sapien
tgaggctgtagtgccaaccacgaga

SEQ ID NO: 2227368 - DNA, 25 bp, Homo sapien
ctgtagtgccaaccacgagaaaccc

SEQ ID NO: 2227369 - DNA, 25 bp, Homo sapien
cccttccattgacaggtctcagaac

SEQ ID NO: 2227370 - DNA, 25 bp, Homo sapien
tcagtgtagaggtgataatcattcc

SEQ ID NO: 2227371 - DNA, 25 bp, Homo sapien
catatggatatttgttgcccacatc

SEQ ID NO: 2227372 - DNA, 25 bp, Homo sapien
ttttcctaaggtctgcttcagtgta

SEQ ID NO: 2227373 - DNA, 25 bp, Homo sapien
tcattccttgattcactcgaaacat

SEQ ID NO: 2227374 - DNA, 25 bp, Homo sapien
tcagtaacaggtataggcttgtaag

SEQ ID NO: 2227375 - DNA, 25 bp, Homo sapien
aatcagatgaaaggttgagtccagg

SEQ ID NO: 2227376 - DNA, 25 bp, Homo sapien
tgtctgaggcagcaaattcagtaac

SEQ ID NO: 2227377 - DNA, 25 bp, Homo sapien
tgagtccagggacattgtctgaggc

SEQ ID NO: 2227378 - DNA, 25 bp, Homo sapien
cactttggcagcacctttgatggca

SEQ ID NO: 2227379 - DNA, 25 bp, Homo sapien
tcagtctttaaaggatctttgccac

SEQ ID NO: 2227380 - DNA, 25 bp, Homo sapien
tgctgcaggcaagattccacctggt

SEQ ID NO: 2227381 - DNA, 25 bp, Homo sapien
caagattccacctggtggaagagcc

SEQ ID NO: 2227382 - DNA, 25 bp, Homo sapien
gcacagtagattccaacttacccat

SEQ ID NO: 2227383 - DNA, 25 bp, Homo sapien
gctgcggaccaaaaactagcacagt

SEQ ID NO: 2227384 - DNA, 25 bp, Homo sapien
gctcagttttggctgcggaccaaaa

SEQ ID NO: 2227385 - DNA, 25 bp, Homo sapien
aaactagcacagtagattccaactt

SEQ ID NO: 2227386 - DNA, 25 bp, Homo sapien
catcttatacaaatattaactcaag

SEQ ID NO: 2227387 - DNA, 25 bp, Homo sapien
cttacatcttatacaaatattaact

SEQ ID NO: 2227388 - DNA, 25 bp, Homo sapien
aagatggattaaatacttaagtata

SEQ ID NO: 2227389 - DNA, 25 bp, Homo sapien
tcaagatggattaaatacttaagta

SEQ ID NO: 2227390 - DNA, 25 bp, Homo sapien
tctatcccaagttgtatgaagtggg

SEQ ID NO: 2227391 - DNA, 25 bp, Homo sapien
ttctcatatctccttatctttatca

SEQ ID NO: 2227392 - DNA, 25 bp, Homo sapien
tgccaatacctactgcttcaaagac

SEQ ID NO: 2227393 - DNA, 25 bp, Homo sapien
tcaaagactccctttttgacctcta

SEQ ID NO: 2227394 - DNA, 25 bp, Homo sapien
agtgaactttcccaatgtgcccttg

SEQ ID NO: 2227395 - DNA, 25 bp, Homo sapien
gtgaactttcccaatgtgcccttgc

SEQ ID NO: 2227396 - DNA, 25 bp, Homo sapien
ctttcccaatgtgcccttgctgatg

SEQ ID NO: 2227397 - DNA, 25 bp, Homo sapien
gaactttcccaatgtgcccttgctg

SEQ ID NO: 2227398 - DNA, 25 bp, Homo sapien
caggattataatctggtgagtagac

SEQ ID NO: 2227399 - DNA, 25 bp, Homo sapien
gggtaatataaggtccactgcttgt

SEQ ID NO: 2227400 - DNA, 25 bp, Homo sapien
agttccttaaactcattcaccatgg

SEQ ID NO: 2227401 - DNA, 25 bp, Homo sapien
gcttgttcctccatcaaatacaaga

SEQ ID NO: 2227402 - DNA, 25 bp, Homo sapien
tggaaacctggagtagtcacctgaa

SEQ ID NO: 2227403 - DNA, 25 bp, Homo sapien
ctgaacagggttgaactcccattca

SEQ ID NO: 2227404 - DNA, 25 bp, Homo sapien
gggttgaactcccattcaccggcga

SEQ ID NO: 2227405 - DNA, 25 bp, Homo sapien
acagggttgaactcccattcaccgg

SEQ ID NO: 2227406 - DNA, 25 bp, Homo sapien
ggttgaactcccattcaccggcgac

SEQ ID NO: 2227407 - DNA, 25 bp, Homo sapien
gaaaaccatgagcatcaaagctggt

SEQ ID NO: 2227408 - DNA, 25 bp, Homo sapien
tctggacgagactgtaaatgcccac

SEQ ID NO: 2227409 - DNA, 25 bp, Homo sapien
tttccgatagagttttattgaagga

SEQ ID NO: 2227410 - DNA, 25 bp, Homo sapien
gcaaactgccggtattaatattaaa

SEQ ID NO: 2227411 - DNA, 25 bp, Homo sapien
caacaggtcttctagattgctggat

SEQ ID NO: 2227412 - DNA, 25 bp, Homo sapien
acaggtcttctagattgctggattc

SEQ ID NO: 2227413 - DNA, 25 bp, Homo sapien
gcaacaggtcttctagattgctgga

SEQ ID NO: 2227414 - DNA, 25 bp, Homo sapien
ctgcaacaggtcttctagattgctg

SEQ ID NO: 2227415 - DNA, 25 bp, Homo sapien
ctcaaaggatgaggtcctcatcctt

SEQ ID NO: 2227416 - DNA, 25 bp, Homo sapien
atgaggtcctcatcctttgccatgc

SEQ ID NO: 2227417 - DNA, 25 bp, Homo sapien
aagatgcctatatctcgtagatcac

SEQ ID NO: 2227418 - DNA, 25 bp, Homo sapien
caaggaagatgcctatatctcgtag

SEQ ID NO: 2227419 - DNA, 25 bp, Homo sapien
ggcctggcaggccttaacactgtca

SEQ ID NO: 2227420 - DNA, 25 bp, Homo sapien
gcctggcaggccttaacactgtcat

SEQ ID NO: 2227421 - DNA, 25 bp, Homo sapien
cctggcaggccttaacactgtcatt

SEQ ID NO: 2227422 - DNA, 25 bp, Homo sapien
tggcctggcaggccttaacactgtc

SEQ ID NO: 2227423 - DNA, 25 bp, Homo sapien
aaactggtcaagctttagaatttgt

SEQ ID NO: 2227424 - DNA, 25 bp, Homo sapien
aatgagtagtcagatccatggccca

SEQ ID NO: 2227425 - DNA, 25 bp, Homo sapien
caactcctgtaagacgtaaatattt

SEQ ID NO: 2227426 - DNA, 25 bp, Homo sapien
atttgttttgcacctggattttcca

SEQ ID NO: 2227427 - DNA, 25 bp, Homo sapien
agtatcataaagatctcgatcactg

SEQ ID NO: 2227428 - DNA, 25 bp, Homo sapien
ttattgtaaagcattagactgaacc

SEQ ID NO: 2227429 - DNA, 25 bp, Homo sapien
tcacacagaagctgaggataatata

SEQ ID NO: 2227430 - DNA, 25 bp, Homo sapien
tcagaattagaagaccttgcaatca

SEQ ID NO: 2227431 - DNA, 25 bp, Homo sapien
ttagactgaaccattctcagagctc

SEQ ID NO: 2227432 - DNA, 25 bp, Homo sapien
gaatacacatagtctaagggatatt

SEQ ID NO: 2227433 - DNA, 25 bp, Homo sapien
tttaagaatacacatagtctaaggg

SEQ ID NO: 2227434 - DNA, 25 bp, Homo sapien
tctaagggatattagaccaatatcc

SEQ ID NO: 2227435 - DNA, 25 bp, Homo sapien
catagtctaagggatattagaccaa

SEQ ID NO: 2227436 - DNA, 25 bp, Homo sapien
ctatatattagtgccatgtagtact

SEQ ID NO: 2227437 - DNA, 25 bp, Homo sapien
actgtacatctatatcaccatcacc

SEQ ID NO: 2227438 - DNA, 25 bp, Homo sapien
atattagtgccatgtagtactgtac

SEQ ID NO: 2227439 - DNA, 25 bp, Homo sapien
gtactgtacatctatatcaccatca

SEQ ID NO: 2227440 - DNA, 25 bp, Homo sapien
ttaaatgtaagacctaacaccacaa

SEQ ID NO: 2227441 - DNA, 25 bp, Homo sapien
taaatgtaagacctaacaccacaaa

SEQ ID NO: 2227442 - DNA, 25 bp, Homo sapien
caatggcaacaagagacaagattga

SEQ ID NO: 2227443 - DNA, 25 bp, Homo sapien
tggcaacaagagacaagattgacaa

SEQ ID NO: 2227444 - DNA, 25 bp, Homo sapien
gtttgtctccttcatatcaaatgtc

SEQ ID NO: 2227445 - DNA, 25 bp, Homo sapien
taaataagcattttgcaaccgagac

SEQ ID NO: 2227446 - DNA, 25 bp, Homo sapien
ctatgtaggaacaaatgttattctt

SEQ ID NO: 2227447 - DNA, 25 bp, Homo sapien
ttgcaaccgagaccaaataacaatc

SEQ ID NO: 2227448 - DNA, 25 bp, Homo sapien
ctggctgatctaaaagcagtgaatc

SEQ ID NO: 2227449 - DNA, 25 bp, Homo sapien
cccacgttggtttctctgacccagg

SEQ ID NO: 2227450 - DNA, 25 bp, Homo sapien
tgtaaccactgacgtgaacctcaag

SEQ ID NO: 2227451 - DNA, 25 bp, Homo sapien
tgacccaggaatccggaatcacttg

SEQ ID NO: 2227452 - DNA, 25 bp, Homo sapien
cctgtacatagcagtctgtcacctc

SEQ ID NO: 2227453 - DNA, 25 bp, Homo sapien
taaaagtatcattaagttctgtgcc

SEQ ID NO: 2227454 - DNA, 25 bp, Homo sapien
gccgctgttatgatttaattcctgt

SEQ ID NO: 2227455 - DNA, 25 bp, Homo sapien
taattcctgtacatagcagtctgtc

SEQ ID NO: 2227456 - DNA, 25 bp, Homo sapien
tcagagaaagaagtactaagcctgc

SEQ ID NO: 2227457 - DNA, 25 bp, Homo sapien
tatcaagcagaccatacagatttcc

SEQ ID NO: 2227458 - DNA, 25 bp, Homo sapien
tctcatttgaccagccagacattga

SEQ ID NO: 2227459 - DNA, 25 bp, Homo sapien
gacattgagtgtaacaccgttgctt

SEQ ID NO: 2227460 - DNA, 25 bp, Homo sapien
tttatgttccaaatgactggcttcc

SEQ ID NO: 2227461 - DNA, 25 bp, Homo sapien
ttatgttccaaatgactggcttcca

SEQ ID NO: 2227462 - DNA, 25 bp, Homo sapien
gtttgcttgcactgattcttaagtg

SEQ ID NO: 2227463 - DNA, 25 bp, Homo sapien
gttgaacaagaaactgtggatcttc

SEQ ID NO: 2227464 - DNA, 25 bp, Homo sapien
tccaaacctagtgtttgcttgcact

SEQ ID NO: 2227465 - DNA, 25 bp, Homo sapien
cttaagtgccacaacctgtctccag

SEQ ID NO: 2227466 - DNA, 25 bp, Homo sapien
tcatgtgactgttaagcttctgcat

SEQ ID NO: 2227467 - DNA, 25 bp, Homo sapien
ttcatgtgactgttaagcttctgca

SEQ ID NO: 2227468 - DNA, 25 bp, Homo sapien
cataatgattatctttcatgtgact

SEQ ID NO: 2227469 - DNA, 25 bp, Homo sapien
tcttttccataatgattatctttca

SEQ ID NO: 2227470 - DNA, 25 bp, Homo sapien
cagcactaaaccaggcaccttcgac

SEQ ID NO: 2227471 - DNA, 25 bp, Homo sapien
cactaaaccaggcaccttcgaccaa

SEQ ID NO: 2227472 - DNA, 25 bp, Homo sapien
cgaccaaatcacaacctcctctttg

SEQ ID NO: 2227473 - DNA, 25 bp, Homo sapien
aaaccaggcaccttcgaccaaatca

SEQ ID NO: 2227474 - DNA, 25 bp, Homo sapien
agggtcgcgccaagcacgttcccag

SEQ ID NO: 2227475 - DNA, 25 bp, Homo sapien
aagcacgttcccagccggacaactg

SEQ ID NO: 2227476 - DNA, 25 bp, Homo sapien
cagggtcgcgccaagcacgttccca

SEQ ID NO: 2227477 - DNA, 25 bp, Homo sapien
gttcccagccggacaactgtgtacc

SEQ ID NO: 2227478 - DNA, 25 bp, Homo sapien
aggtgcgggacaaggcagtcttcac

SEQ ID NO: 2227479 - DNA, 25 bp, Homo sapien
ggtgcgggacaaggcagtcttcact

SEQ ID NO: 2227480 - DNA, 25 bp, Homo sapien
ccagaaggaggtgcgggacaaggca

SEQ ID NO: 2227481 - DNA, 25 bp, Homo sapien
ctaagccagaaggaggtgcgggaca

SEQ ID NO: 2227482 - DNA, 25 bp, Homo sapien
catggagacagtgacaagtggtaac

SEQ ID NO: 2227483 - DNA, 25 bp, Homo sapien
tcccctggactactgattgaacaca

SEQ ID NO: 2227484 - DNA, 25 bp, Homo sapien
ttccgggaaaggcacctcataactc

SEQ ID NO: 2227485 - DNA, 25 bp, Homo sapien
agctctgaagtagcagaagcttctc

SEQ ID NO: 2227486 - DNA, 25 bp, Homo sapien
tcagcaacaggacggcccgcgcgag

SEQ ID NO: 2227487 - DNA, 25 bp, Homo sapien
cacaaggcgatcgaggctggcacag

SEQ ID NO: 2227488 - DNA, 25 bp, Homo sapien
aaaagagaccaaagcacaaggcgat

SEQ ID NO: 2227489 - DNA, 25 bp, Homo sapien
gagaccaaagcacaaggcgatcgag

SEQ ID NO: 2227490 - DNA, 25 bp, Homo sapien
tagcctgacacctagaacacagtag

SEQ ID NO: 2227491 - DNA, 25 bp, Homo sapien
catatcttcaacagctagcctgaca

SEQ ID NO: 2227492 - DNA, 25 bp, Homo sapien
caaaggtaaaccacgcaagcgattg

SEQ ID NO: 2227493 - DNA, 25 bp, Homo sapien
caactaattcggtgaagaaagtcca

SEQ ID NO: 2227494 - DNA, 25 bp, Homo sapien
gcaggaaatgtaagggtgcctgtca

SEQ ID NO: 2227495 - DNA, 25 bp, Homo sapien
ctccatgaagccattaggcaacttc

SEQ ID NO: 2227496 - DNA, 25 bp, Homo sapien
caggaacttcctgacttagctgaag

SEQ ID NO: 2227497 - DNA, 25 bp, Homo sapien
tatcagctccccaattcatatttcc

SEQ ID NO: 2227498 - DNA, 25 bp, Homo sapien
ttcatgctgtaacatcccatacagt

SEQ ID NO: 2227499 - DNA, 25 bp, Homo sapien
gtaacatcccatacagtcctgccat

SEQ ID NO: 2227500 - DNA, 25 bp, Homo sapien
tcttcaccctgttcatgctgtaaca

SEQ ID NO: 2227501 - DNA, 25 bp, Homo sapien
ctcttcaccctgttcatgctgtaac

SEQ ID NO: 2227502 - DNA, 25 bp, Homo sapien
tcagccatgtatcttctcacctctt

SEQ ID NO: 2227503 - DNA, 25 bp, Homo sapien
ttttcagccatgtatcttctcacct

SEQ ID NO: 2227504 - DNA, 25 bp, Homo sapien
tgccttttcagccatgtatcttctc

SEQ ID NO: 2227505 - DNA, 25 bp, Homo sapien
gccttttcagccatgtatcttctca

SEQ ID NO: 2227506 - DNA, 25 bp, Homo sapien
tctcacttctccatttgaataccat

SEQ ID NO: 2227507 - DNA, 25 bp, Homo sapien
actctcacttctccatttgaatacc

SEQ ID NO: 2227508 - DNA, 25 bp, Homo sapien
atactctcacttctccatttgaata

SEQ ID NO: 2227509 - DNA, 25 bp, Homo sapien
atatgattgctgctaagttaatatc

SEQ ID NO: 2227510 - DNA, 25 bp, Homo sapien
ctgtttgttcgtctactttccccat

SEQ ID NO: 2227511 - DNA, 25 bp, Homo sapien
catttctgtttgttcgtctactttc

SEQ ID NO: 2227512 - DNA, 25 bp, Homo sapien
tctgtttgttcgtctactttcccca

SEQ ID NO: 2227513 - DNA, 25 bp, Homo sapien
ccatttctgtttgttcgtctacttt

SEQ ID NO: 2227514 - DNA, 25 bp, Homo sapien
ttcaagttctctgtacagtgcctta

SEQ ID NO: 2227515 - DNA, 25 bp, Homo sapien
tcaagttctctgtacagtgccttaa

SEQ ID NO: 2227516 - DNA, 25 bp, Homo sapien
caagttctctgtacagtgccttaag

SEQ ID NO: 2227517 - DNA, 25 bp, Homo sapien
tgatgcagcagacgaagaaattttg

SEQ ID NO: 2227518 - DNA, 25 bp, Homo sapien
gcttgattggcttcccattgtagct

SEQ ID NO: 2227519 - DNA, 25 bp, Homo sapien
tagggaccgataccattcactcttc

SEQ ID NO: 2227520 - DNA, 25 bp, Homo sapien
tgtagcttaattaaccaatcgtatt

SEQ ID NO: 2227521 - DNA, 25 bp, Homo sapien
gaaagccaatcatcgtattcataaa

SEQ ID NO: 2227522 - DNA, 25 bp, Homo sapien
tctctggaaagtctcttgagttgag

SEQ ID NO: 2227523 - DNA, 25 bp, Homo sapien
cttgagttgaggctttccgaaagcc

SEQ ID NO: 2227524 - DNA, 25 bp, Homo sapien
tttcaaaggcctcgcttctggactt

SEQ ID NO: 2227525 - DNA, 25 bp, Homo sapien
tgttgtgctgatagatgcacttgcc

SEQ ID NO: 2227526 - DNA, 25 bp, Homo sapien
tatcatcaaatttcccatagtgcat

SEQ ID NO: 2227527 - DNA, 25 bp, Homo sapien
aaatgtgattgctcactggtgatgt

SEQ ID NO: 2227528 - DNA, 25 bp, Homo sapien
taagtttgaccctagactatcatca

SEQ ID NO: 2227529 - DNA, 25 bp, Homo sapien
cagttgccttggaaacaacatgagc

SEQ ID NO: 2227530 - DNA, 25 bp, Homo sapien
tatttggaccatatgcctctagact

SEQ ID NO: 2227531 - DNA, 25 bp, Homo sapien
ccccatattctctgaagactatatt

SEQ ID NO: 2227532 - DNA, 25 bp, Homo sapien
gcctctagacttcttgcattaccag

SEQ ID NO: 2227533 - DNA, 25 bp, Homo sapien
ccaaagacggatgttctccatgaga

SEQ ID NO: 2227534 - DNA, 25 bp, Homo sapien
gacccaggtcattgcaaagagggct

SEQ ID NO: 2227535 - DNA, 25 bp, Homo sapien
taaggggacccaggtcattgcaaag

SEQ ID NO: 2227536 - DNA, 25 bp, Homo sapien
tgaccaaagacggatgttctccatg

SEQ ID NO: 2227537 - DNA, 25 bp, Homo sapien
ccttatatcggctgctaggcctgct

SEQ ID NO: 2227538 - DNA, 25 bp, Homo sapien
aaaacaaccttatatcggctgctag

SEQ ID NO: 2227539 - DNA, 25 bp, Homo sapien
tatcggctgctaggcctgctaaact

SEQ ID NO: 2227540 - DNA, 25 bp, Homo sapien
gctgctaggcctgctaaactttctt

SEQ ID NO: 2227541 - DNA, 25 bp, Homo sapien
ctctcgttgacccaggatgccagga

SEQ ID NO: 2227542 - DNA, 25 bp, Homo sapien
tcgttgacccaggatgccaggaaca

SEQ ID NO: 2227543 - DNA, 25 bp, Homo sapien
tgctggtcctctaacttttcctcct

SEQ ID NO: 2227544 - DNA, 25 bp, Homo sapien
tcttctagttgctggtcctctaact

SEQ ID NO: 2227545 - DNA, 25 bp, Homo sapien
cagcacagccaatcactggcaacat

SEQ ID NO: 2227546 - DNA, 25 bp, Homo sapien
ctcagcacagccaatcactggcaac

SEQ ID NO: 2227547 - DNA, 25 bp, Homo sapien
aagtgcctcagcacagccaatcact

SEQ ID NO: 2227548 - DNA, 25 bp, Homo sapien
ctaagtgcctcagcacagccaatca

SEQ ID NO: 2227549 - DNA, 25 bp, Homo sapien
gatctcttgcaagaatattcaagtt

SEQ ID NO: 2227550 - DNA, 25 bp, Homo sapien
ttcatggaaaaaacggtgcctgacc

SEQ ID NO: 2227551 - DNA, 25 bp, Homo sapien
tcagtaatgtgcccgcatacacctt

SEQ ID NO: 2227552 - DNA, 25 bp, Homo sapien
aaaggtgatatgcaaaggtttgtgg

SEQ ID NO: 2227553 - DNA, 25 bp, Homo sapien
gaagcagtaaaaagaataatctcat

SEQ ID NO: 2227554 - DNA, 25 bp, Homo sapien
tagaagcagtaaaaagaataatctc

SEQ ID NO: 2227555 - DNA, 25 bp, Homo sapien
cttagaagcagtaaaaagaataatc

SEQ ID NO: 2227556 - DNA, 25 bp, Homo sapien
agcagtaaaaagaataatctcatac

SEQ ID NO: 2227557 - DNA, 25 bp, Homo sapien
aaaggactggaaaagtaagtgctgc

SEQ ID NO: 2227558 - DNA, 25 bp, Homo sapien
aaaaggactggaaaagtaagtgctg

SEQ ID NO: 2227559 - DNA, 25 bp, Homo sapien
agtgtaaatctagggagaatttcgg

SEQ ID NO: 2227560 - DNA, 25 bp, Homo sapien
caagtgtaaatctagggagaatttc

SEQ ID NO: 2227561 - DNA, 25 bp, Homo sapien
gtgcactactgtttcatccaagtgt

SEQ ID NO: 2227562 - DNA, 25 bp, Homo sapien
agtgcactactgtttcatccaagtg

SEQ ID NO: 2227563 - DNA, 25 bp, Homo sapien
gggtgggatatcacaattaactgtt

SEQ ID NO: 2227564 - DNA, 25 bp, Homo sapien
tgtaaggggtgggatatcacaatta

SEQ ID NO: 2227565 - DNA, 25 bp, Homo sapien
gggatatcacaattaactgtttctt

SEQ ID NO: 2227566 - DNA, 25 bp, Homo sapien
gtgggatatcacaattaactgtttc

SEQ ID NO: 2227567 - DNA, 25 bp, Homo sapien
gctgctccattagttgatgtagtag

SEQ ID NO: 2227568 - DNA, 25 bp, Homo sapien
gagtaagctgctccattagttgatg

SEQ ID NO: 2227569 - DNA, 25 bp, Homo sapien
taagctgctccattagttgatgtag

SEQ ID NO: 2227570 - DNA, 25 bp, Homo sapien
gatttgagtaagctgctccattagt

SEQ ID NO: 2227571 - DNA, 25 bp, Homo sapien
gctccaacagagtagtccttggagg

SEQ ID NO: 2227572 - DNA, 25 bp, Homo sapien
aagaccattcagtggttgctcctac

SEQ ID NO: 2227573 - DNA, 25 bp, Homo sapien
ttaagaccattcagtggttgctcct

SEQ ID NO: 2227574 - DNA, 25 bp, Homo sapien
taagaccattcagtggttgctccta

SEQ ID NO: 2227575 - DNA, 25 bp, Homo sapien
agcgctccagtcttcaacagggaac

SEQ ID NO: 2227576 - DNA, 25 bp, Homo sapien
ggctgagcgctccagtcttcaacag

SEQ ID NO: 2227577 - DNA, 25 bp, Homo sapien
gctgagcgctccagtcttcaacagg

SEQ ID NO: 2227578 - DNA, 25 bp, Homo sapien
tgagcgctccagtcttcaacaggga

SEQ ID NO: 2227579 - DNA, 25 bp, Homo sapien
gcacagagggcacccgcacaccttc

SEQ ID NO: 2227580 - DNA, 25 bp, Homo sapien
ataggcacagagggcacccgcacac

SEQ ID NO: 2227581 - DNA, 25 bp, Homo sapien
aataggcacagagggcacccgcaca

SEQ ID NO: 2227582 - DNA, 25 bp, Homo sapien
aggcacagagggcacccgcacacct

SEQ ID NO: 2227583 - DNA, 25 bp, Homo sapien
ttcctccttggtcattaccttttca

SEQ ID NO: 2227584 - DNA, 25 bp, Homo sapien
ttggtcattaccttttcagcagcag

SEQ ID NO: 2227585 - DNA, 25 bp, Homo sapien
ttcaggatccctgtagaagtagaga

SEQ ID NO: 2227586 - DNA, 25 bp, Homo sapien
atccctgtagaagtagagatcaggc

SEQ ID NO: 2227587 - DNA, 25 bp, Homo sapien
catgggtgttcatgggaaatggtgc

SEQ ID NO: 2227588 - DNA, 25 bp, Homo sapien
atgggaaatggtgccacgcatgcgc

SEQ ID NO: 2227589 - DNA, 25 bp, Homo sapien
cctcccatgggtgttcatgggaaat

SEQ ID NO: 2227590 - DNA, 25 bp, Homo sapien
gacctcccatgggtgttcatgggaa

SEQ ID NO: 2227591 - DNA, 25 bp, Homo sapien
taggttaacagaagatgcctccatg

SEQ ID NO: 2227592 - DNA, 25 bp, Homo sapien
caagaagccgtgggtcccagaaggc

SEQ ID NO: 2227593 - DNA, 25 bp, Homo sapien
gttaacagaagatgcctccatgaga

SEQ ID NO: 2227594 - DNA, 25 bp, Homo sapien
cagaagatgcctccatgagaggctg

SEQ ID NO: 2227595 - DNA, 25 bp, Homo sapien
agttccaggagtgaagcagccagca

SEQ ID NO: 2227596 - DNA, 25 bp, Homo sapien
ctctggccagtattcctggaagata

SEQ ID NO: 2227597 - DNA, 25 bp, Homo sapien
agcaaacttcagcacggccctctgg

SEQ ID NO: 2227598 - DNA, 25 bp, Homo sapien
ccagtattcctggaagatataacac

SEQ ID NO: 2227599 - DNA, 25 bp, Homo sapien
tttgcaggatatcaagcgctccgga

SEQ ID NO: 2227600 - DNA, 25 bp, Homo sapien
attggtgccacctaaataggttcct

SEQ ID NO: 2227601 - DNA, 25 bp, Homo sapien
gcaggatatcaagcgctccggacat

SEQ ID NO: 2227602 - DNA, 25 bp, Homo sapien
catttgcaggatatcaagcgctccg

SEQ ID NO: 2227603 - DNA, 25 bp, Homo sapien
ttaagttacgatgggaatccagaac

SEQ ID NO: 2227604 - DNA, 25 bp, Homo sapien
ctttaagttacgatgggaatccaga

SEQ ID NO: 2227605 - DNA, 25 bp, Homo sapien
tttaagttacgatgggaatccagaa

SEQ ID NO: 2227606 - DNA, 25 bp, Homo sapien
tgctaccaagtcaaaatctgtcaca

SEQ ID NO: 2227607 - DNA, 25 bp, Homo sapien
gctaccaagtcaaaatctgtcacaa

SEQ ID NO: 2227608 - DNA, 25 bp, Homo sapien
cttccaggttgggctgctaccaagt

SEQ ID NO: 2227609 - DNA, 25 bp, Homo sapien
ccaggttgggctgctaccaagtcaa

SEQ ID NO: 2227610 - DNA, 25 bp, Homo sapien
gggcatctgtcacagtctcatctga

SEQ ID NO: 2227611 - DNA, 25 bp, Homo sapien
gaggcacctcgtcttcccctatgta

SEQ ID NO: 2227612 - DNA, 25 bp, Homo sapien
gaaacttgggagtagaaccctcaga

SEQ ID NO: 2227613 - DNA, 25 bp, Homo sapien
gcatccgtgtgcaagtgtgaaactg

SEQ ID NO: 2227614 - DNA, 25 bp, Homo sapien
caaaagcaatggtcccctggagatt

SEQ ID NO: 2227615 - DNA, 25 bp, Homo sapien
ggtagcagctgagatagccaaactg

SEQ ID NO: 2227616 - DNA, 25 bp, Homo sapien
gaagcacggtagcagctgagatagc

SEQ ID NO: 2227617 - DNA, 25 bp, Homo sapien
gtaaaatgaggaagcacggtagcag

SEQ ID NO: 2227618 - DNA, 25 bp, Homo sapien
acaatcgtcggtgtttgtgcaggtg

SEQ ID NO: 2227619 - DNA, 25 bp, Homo sapien
ctggggctcggctgtatgaatcacc

SEQ ID NO: 2227620 - DNA, 25 bp, Homo sapien
acattttctaaacaatcgtcggtgt

SEQ ID NO: 2227621 - DNA, 25 bp, Homo sapien
ctgtatgaatcaccttgagattctt

SEQ ID NO: 2227622 - DNA, 25 bp, Homo sapien
tgttactgcaccactgaggaaggag

SEQ ID NO: 2227623 - DNA, 25 bp, Homo sapien
tgaactgaaaccactgcacaagaaa

SEQ ID NO: 2227624 - DNA, 25 bp, Homo sapien
tacgcaaaagtgtctgcttccctca

SEQ ID NO: 2227625 - DNA, 25 bp, Homo sapien
ccatatggtgggtgtttatcatcag

SEQ ID NO: 2227626 - DNA, 25 bp, Homo sapien
tccaatgctctgtgaatttccagtc

SEQ ID NO: 2227627 - DNA, 25 bp, Homo sapien
ctccgcattgagagcagatgttctc

SEQ ID NO: 2227628 - DNA, 25 bp, Homo sapien
atagcagccccagctatggccccgc

SEQ ID NO: 2227629 - DNA, 25 bp, Homo sapien
cccgcactccgcattgagagcagat

SEQ ID NO: 2227630 - DNA, 25 bp, Homo sapien
ctgcctttggagacctcaagaggga

SEQ ID NO: 2227631 - DNA, 25 bp, Homo sapien
gggattggtccaggtcaaatatttg

SEQ ID NO: 2227632 - DNA, 25 bp, Homo sapien
tccttggtttatcaaagccagctgc

SEQ ID NO: 2227633 - DNA, 25 bp, Homo sapien
gcttcctcacaacgtgttgggagag

SEQ ID NO: 2227634 - DNA, 25 bp, Homo sapien
gatagagataacaggaagatggaga

SEQ ID NO: 2227635 - DNA, 25 bp, Homo sapien
caggtggatagagataacaggaaga

SEQ ID NO: 2227636 - DNA, 25 bp, Homo sapien
tcaatttaatacaggtggatagaga

SEQ ID NO: 2227637 - DNA, 25 bp, Homo sapien
cagtagatttccttgagatcatttt

SEQ ID NO: 2227638 - DNA, 25 bp, Homo sapien
aaaaggaaacaatgtggcagataac

SEQ ID NO: 2227639 - DNA, 25 bp, Homo sapien
aaggaaacaatgtggcagataacac

SEQ ID NO: 2227640 - DNA, 25 bp, Homo sapien
aaaggaaacaatgtggcagataaca

SEQ ID NO: 2227641 - DNA, 25 bp, Homo sapien
ttcataaaatagacagtggtgattc

SEQ ID NO: 2227642 - DNA, 25 bp, Homo sapien
tcttcataaaatagacagtggtgat

SEQ ID NO: 2227643 - DNA, 25 bp, Homo sapien
cttcataaaatagacagtggtgatt

SEQ ID NO: 2227644 - DNA, 25 bp, Homo sapien
atcttcataaaatagacagtggtga

SEQ ID NO: 2227645 - DNA, 25 bp, Homo sapien
tagcggcattgggaagtactcgagc

SEQ ID NO: 2227646 - DNA, 25 bp, Homo sapien
cagagggaaatttgcagccacacca

SEQ ID NO: 2227647 - DNA, 25 bp, Homo sapien
tgatctatcatggacctgggcagac

SEQ ID NO: 2227648 - DNA, 25 bp, Homo sapien
tatttggccctgtgaaccttgtagc

SEQ ID NO: 2227649 - DNA, 25 bp, Homo sapien
ggtgagcaattaaaacaagaagctc

SEQ ID NO: 2227650 - DNA, 25 bp, Homo sapien
cactagccagtgtggtttctttctc

SEQ ID NO: 2227651 - DNA, 25 bp, Homo sapien
gcttcttcactagccagtgtggttt

SEQ ID NO: 2227652 - DNA, 25 bp, Homo sapien
gctcctgcttcttcactagccagtg

SEQ ID NO: 2227653 - DNA, 25 bp, Homo sapien
tgtcagagtggccaagaatccggca

SEQ ID NO: 2227654 - DNA, 25 bp, Homo sapien
taagcctcgacatcagcagcagtag

SEQ ID NO: 2227655 - DNA, 25 bp, Homo sapien
cttcagagggacgagtagggccatt

SEQ ID NO: 2227656 - DNA, 25 bp, Homo sapien
tagagaacgatatccttcagacgct

SEQ ID NO: 2227657 - DNA, 25 bp, Homo sapien
tggaaaaaagaaaatatcaatttca

SEQ ID NO: 2227658 - DNA, 25 bp, Homo sapien
gaaaatacatttgccatagacctgc

SEQ ID NO: 2227659 - DNA, 25 bp, Homo sapien
aacaatagttaatagtgctctctcc

SEQ ID NO: 2227660 - DNA, 25 bp, Homo sapien
gacctgcaagttttctatactaaca

SEQ ID NO: 2227661 - DNA, 25 bp, Homo sapien
gctctctcctgcactattatcaatc

SEQ ID NO: 2227662 - DNA, 25 bp, Homo sapien
cattatcttgatgtttcagtgtaac

SEQ ID NO: 2227663 - DNA, 25 bp, Homo sapien
ggcgtcataaaaaagtctagcatta

SEQ ID NO: 2227664 - DNA, 25 bp, Homo sapien
gtctagcattatcttgatgtttcag

SEQ ID NO: 2227665 - DNA, 25 bp, Homo sapien
caatagaggcgtcataaaaaagtct

SEQ ID NO: 2227666 - DNA, 25 bp, Homo sapien
tcgagcctttgcacgtaggagtagc

SEQ ID NO: 2227667 - DNA, 25 bp, Homo sapien
cacagctgtgagaactttttctgag

SEQ ID NO: 2227668 - DNA, 25 bp, Homo sapien
gaagtcttggaatctatctgggcca

SEQ ID NO: 2227669 - DNA, 25 bp, Homo sapien
gagaaaggctcttccatctgaagtt

SEQ ID NO: 2227670 - DNA, 25 bp, Homo sapien
gagaatactggatgcctatgctccc

SEQ ID NO: 2227671 - DNA, 25 bp, Homo sapien
ggctggctcttgcatacaccttctg

SEQ ID NO: 2227672 - DNA, 25 bp, Homo sapien
gcacgcagatagatatagtggcact

SEQ ID NO: 2227673 - DNA, 25 bp, Homo sapien
tcctaggcacagagctaattctggc

SEQ ID NO: 2227674 - DNA, 25 bp, Homo sapien
ctgctttacaatagatcatttcacc

SEQ ID NO: 2227675 - DNA, 25 bp, Homo sapien
caaactggaggcagtaaccctttca

SEQ ID NO: 2227676 - DNA, 25 bp, Homo sapien
aatggaaagcagaacaatgccctga

SEQ ID NO: 2227677 - DNA, 25 bp, Homo sapien
cctgtcagtccaatagcctttgaga

SEQ ID NO: 2227678 - DNA, 25 bp, Homo sapien
gccatttaagaaccgtgaagcaaga

SEQ ID NO: 2227679 - DNA, 25 bp, Homo sapien
tatgcagcttttgatacagggaggg

SEQ ID NO: 2227680 - DNA, 25 bp, Homo sapien
gaatcaaaatgacgtctaccaccca

SEQ ID NO: 2227681 - DNA, 25 bp, Homo sapien
gacactctccctatggacctgctgg

SEQ ID NO: 2227682 - DNA, 25 bp, Homo sapien
gttcacacaggttggaaactccata

SEQ ID NO: 2227683 - DNA, 25 bp, Homo sapien
ttcacacaggttggaaactccatag

SEQ ID NO: 2227684 - DNA, 25 bp, Homo sapien
acacaggttggaaactccatagaga

SEQ ID NO: 2227685 - DNA, 25 bp, Homo sapien
ctattgttcacacaggttggaaact

SEQ ID NO: 2227686 - DNA, 25 bp, Homo sapien
ccactcagagctattaagagacagc

SEQ ID NO: 2227687 - DNA, 25 bp, Homo sapien
actcagagctattaagagacagcat

SEQ ID NO: 2227688 - DNA, 25 bp, Homo sapien
agccactcagagctattaagagaca

SEQ ID NO: 2227689 - DNA, 25 bp, Homo sapien
cactcagagctattaagagacagca

SEQ ID NO: 2227690 - DNA, 25 bp, Homo sapien
aatacaccagtagaaagcacaggat

SEQ ID NO: 2227691 - DNA, 25 bp, Homo sapien
ggacaaactgaaacgtattaattca

SEQ ID NO: 2227692 - DNA, 25 bp, Homo sapien
gagctgaatactaaggacaaactga

SEQ ID NO: 2227693 - DNA, 25 bp, Homo sapien
taattcatgggcactggataacaaa

SEQ ID NO: 2227694 - DNA, 25 bp, Homo sapien
ctgggaagccataacaagagctgaa

SEQ ID NO: 2227695 - DNA, 25 bp, Homo sapien
gacatagccaagcattctgaagctt

SEQ ID NO: 2227696 - DNA, 25 bp, Homo sapien
tagccaagcattctgaagcttcact

SEQ ID NO: 2227697 - DNA, 25 bp, Homo sapien
gaagcttcactgagcctaaccacca

SEQ ID NO: 2227698 - DNA, 25 bp, Homo sapien
gagcctaaccaccaagttgaattca

SEQ ID NO: 2227699 - DNA, 25 bp, Homo sapien
aggcatctgagatcccatggaggtc

SEQ ID NO: 2227700 - DNA, 25 bp, Homo sapien
catggaggtcacactggtgttcagc

SEQ ID NO: 2227701 - DNA, 25 bp, Homo sapien
agtatcacaatacaggctccgctgg

SEQ ID NO: 2227702 - DNA, 25 bp, Homo sapien
ggtgttcagcacatcgttgacagca

SEQ ID NO: 2227703 - DNA, 25 bp, Homo sapien
ggttcctgtttccaatggtattgta

SEQ ID NO: 2227704 - DNA, 25 bp, Homo sapien
ccaatggtattgtaaatgcccatgt

SEQ ID NO: 2227705 - DNA, 25 bp, Homo sapien
tgtttccaatggtattgtaaatgcc

SEQ ID NO: 2227706 - DNA, 25 bp, Homo sapien
atggtattgtaaatgcccatgtttc

SEQ ID NO: 2227707 - DNA, 25 bp, Homo sapien
cggctattcacgtagttggagtcaa

SEQ ID NO: 2227708 - DNA, 25 bp, Homo sapien
gattaaatgggctcggctattcacg

SEQ ID NO: 2227709 - DNA, 25 bp, Homo sapien
ctcttgattaaatgggctcggctat

SEQ ID NO: 2227710 - DNA, 25 bp, Homo sapien
cacgtagttggagtcaaaagaatag

SEQ ID NO: 2227711 - DNA, 25 bp, Homo sapien
tcgaaggaagctggtacaccctttc

SEQ ID NO: 2227712 - DNA, 25 bp, Homo sapien
tctcgaaggaagctggtacaccctt

SEQ ID NO: 2227713 - DNA, 25 bp, Homo sapien
ggaagctggtacaccctttcctcat

SEQ ID NO: 2227714 - DNA, 25 bp, Homo sapien
ttctctcgaaggaagctggtacacc

SEQ ID NO: 2227715 - DNA, 25 bp, Homo sapien
tggagtcatacctttgcagttcaga

SEQ ID NO: 2227716 - DNA, 25 bp, Homo sapien
tgctttcccgtgttggagtcatacc

SEQ ID NO: 2227717 - DNA, 25 bp, Homo sapien
cattcggatagagctaggctgctgt

SEQ ID NO: 2227718 - DNA, 25 bp, Homo sapien
tcagatttcagtaattcatatttgg

SEQ ID NO: 2227719 - DNA, 25 bp, Homo sapien
gaaatcttgggtcgctcagaaacac

SEQ ID NO: 2227720 - DNA, 25 bp, Homo sapien
tcctggataagagggcctgaaggac

SEQ ID NO: 2227721 - DNA, 25 bp, Homo sapien
ctagaggcctgaccccattcagtgc

SEQ ID NO: 2227722 - DNA, 25 bp, Homo sapien
cagtgcccaaaagaggaagaaggtc

SEQ ID NO: 2227723 - DNA, 25 bp, Homo sapien
taagccaacaatgtacacattgtgt

SEQ ID NO: 2227724 - DNA, 25 bp, Homo sapien
ccaacaatgtacacattgtgttgct

SEQ ID NO: 2227725 - DNA, 25 bp, Homo sapien
agccaacaatgtacacattgtgttg

SEQ ID NO: 2227726 - DNA, 25 bp, Homo sapien
cttaagccaacaatgtacacattgt

SEQ ID NO: 2227727 - DNA, 25 bp, Homo sapien
tggaacttccaaaacgaccaccaga

SEQ ID NO: 2227728 - DNA, 25 bp, Homo sapien
ttggtgctgggttggaacttccaaa

SEQ ID NO: 2227729 - DNA, 25 bp, Homo sapien
actccttccatttcggcatcaccag

SEQ ID NO: 2227730 - DNA, 25 bp, Homo sapien
gaccaccagataggcaagcagagcc

SEQ ID NO: 2227731 - DNA, 25 bp, Homo sapien
tccaaaagtaggagaaggtcccata

SEQ ID NO: 2227732 - DNA, 25 bp, Homo sapien
tttctctaagggagcacctttggaa

SEQ ID NO: 2227733 - DNA, 25 bp, Homo sapien
cctttggaaggtaggtagctttcat

SEQ ID NO: 2227734 - DNA, 25 bp, Homo sapien
tttcattgatttcgtcagtagcttt

SEQ ID NO: 2227735 - DNA, 25 bp, Homo sapien
cagtgaggtgtaagggaatctaatc

SEQ ID NO: 2227736 - DNA, 25 bp, Homo sapien
gaaggaaatccaatacgaaatagtg

SEQ ID NO: 2227737 - DNA, 25 bp, Homo sapien
gttggtgattaaccagactggtcac

SEQ ID NO: 2227738 - DNA, 25 bp, Homo sapien
ggcagccaaatagggttcgatgtga

SEQ ID NO: 2227739 - DNA, 25 bp, Homo sapien
gcacacagttaagaggggacaatcc

SEQ ID NO: 2227740 - DNA, 25 bp, Homo sapien
cagtaaggggaaaattcaatgaaga

SEQ ID NO: 2227741 - DNA, 25 bp, Homo sapien
aagaagatgaatctccccctggcca

SEQ ID NO: 2227742 - DNA, 25 bp, Homo sapien
ttcattattaggacatgtcaggaag

SEQ ID NO: 2227743 - DNA, 25 bp, Homo sapien
aatggttccctgagattaggccaag

SEQ ID NO: 2227744 - DNA, 25 bp, Homo sapien
ttaggccaagagtttaatgtcaaca

SEQ ID NO: 2227745 - DNA, 25 bp, Homo sapien
gattaggccaagagtttaatgtcaa

SEQ ID NO: 2227746 - DNA, 25 bp, Homo sapien
ggtgggaaatggttccctgagatta

SEQ ID NO: 2227747 - DNA, 25 bp, Homo sapien
cttgagggtacctggtgatcagatg

SEQ ID NO: 2227748 - DNA, 25 bp, Homo sapien
tccaacaacgcccagtgccatggta

SEQ ID NO: 2227749 - DNA, 25 bp, Homo sapien
tgatcagatgtgcaaagaccaagcc

SEQ ID NO: 2227750 - DNA, 25 bp, Homo sapien
ccagttttataaggttttgctccat

SEQ ID NO: 2227751 - DNA, 25 bp, Homo sapien
ctaaccaatatgcctaatgataaca

SEQ ID NO: 2227752 - DNA, 25 bp, Homo sapien
tgataacaagtaaggtttctgcaca

SEQ ID NO: 2227753 - DNA, 25 bp, Homo sapien
tcccggagttggcagagttgctgtc

SEQ ID NO: 2227754 - DNA, 25 bp, Homo sapien
cacaggagctcaagctcccggagtt

SEQ ID NO: 2227755 - DNA, 25 bp, Homo sapien
caagcctctcaattgttcgaagtaa

SEQ ID NO: 2227756 - DNA, 25 bp, Homo sapien
gccagccagtcacgcatcaagaaat

SEQ ID NO: 2227757 - DNA, 25 bp, Homo sapien
tccgtgggggaaaatggctgctcca

SEQ ID NO: 2227758 - DNA, 25 bp, Homo sapien
aatgaggctcacatcaaaggccagc

SEQ ID NO: 2227759 - DNA, 25 bp, Homo sapien
aagaaggagacctgggagaacctca

SEQ ID NO: 2227760 - DNA, 25 bp, Homo sapien
agaaggagacctgggagaacctcac

SEQ ID NO: 2227761 - DNA, 25 bp, Homo sapien
cttttgatgcccataggagtactca

SEQ ID NO: 2227762 - DNA, 25 bp, Homo sapien
caggcagaggcacaccgttgataat

SEQ ID NO: 2227763 - DNA, 25 bp, Homo sapien
cattcaggaaagtgctctcagagcg

SEQ ID NO: 2227764 - DNA, 25 bp, Homo sapien
ggcccctggctgttgaaagagtgat

SEQ ID NO: 2227765 - DNA, 25 bp, Homo sapien
tttgtcttgctcctcgctaatggga

SEQ ID NO: 2227766 - DNA, 25 bp, Homo sapien
cgctaatgggagaaaccgagatgca

SEQ ID NO: 2227767 - DNA, 25 bp, Homo sapien
tataaaacagccgaggagacaagtg

SEQ ID NO: 2227768 - DNA, 25 bp, Homo sapien
gatgcaatgcagacacttgctgttt

SEQ ID NO: 2227769 - DNA, 25 bp, Homo sapien
ttctccattcaggtgtacctacaag

SEQ ID NO: 2227770 - DNA, 25 bp, Homo sapien
caaaggaatttaaaggttagtgcat

SEQ ID NO: 2227771 - DNA, 25 bp, Homo sapien
ttcaggtgtacctacaagcagctgt

SEQ ID NO: 2227772 - DNA, 25 bp, Homo sapien
tgcaaaggaatttaaaggttagtgc

SEQ ID NO: 2227773 - DNA, 25 bp, Homo sapien
taaagcatttatgaggcattgcagc

SEQ ID NO: 2227774 - DNA, 25 bp, Homo sapien
aaatcgccactagcagtcacaggtt

SEQ ID NO: 2227775 - DNA, 25 bp, Homo sapien
tcaccaagaggtggcaaagccttca

SEQ ID NO: 2227776 - DNA, 25 bp, Homo sapien
gaaagggctctcacttctagtcata

SEQ ID NO: 2227777 - DNA, 25 bp, Homo sapien
cagtgacatccactggtaggaacca

SEQ ID NO: 2227778 - DNA, 25 bp, Homo sapien
ctctagaagattgctatttttactg

SEQ ID NO: 2227779 - DNA, 25 bp, Homo sapien
gatcttaatgccacaacacagtctc

SEQ ID NO: 2227780 - DNA, 25 bp, Homo sapien
ggaaagcatcatcaactctagaaga

SEQ ID NO: 2227781 - DNA, 25 bp, Homo sapien
gatatttgaaaacatacagatgcct

SEQ ID NO: 2227782 - DNA, 25 bp, Homo sapien
tgaaaacatacagatgcctgataga

SEQ ID NO: 2227783 - DNA, 25 bp, Homo sapien
ctaccaaccaaccagatatttgaaa

SEQ ID NO: 2227784 - DNA, 25 bp, Homo sapien
catacagatgcctgatagaatttca

SEQ ID NO: 2227785 - DNA, 25 bp, Homo sapien
tctatttcaaagaagccgcggtcgc

SEQ ID NO: 2227786 - DNA, 25 bp, Homo sapien
tcatagttacaaagaggatgcccgc

SEQ ID NO: 2227787 - DNA, 25 bp, Homo sapien
tgatactaaggccaacggtgcccag

SEQ ID NO: 2227788 - DNA, 25 bp, Homo sapien
tcgatctgaaagagctcgcgcgtgc

SEQ ID NO: 2227789 - DNA, 25 bp, Homo sapien
ccgcggcggctccaatgctgaggtt

SEQ ID NO: 2227790 - DNA, 25 bp, Homo sapien
aggccgcgggagaagtcccgcccag

SEQ ID NO: 2227791 - DNA, 25 bp, Homo sapien
gaggccgcgggagaagtcccgccca

SEQ ID NO: 2227792 - DNA, 25 bp, Homo sapien
cggctccaatgctgaggttgcggcg

SEQ ID NO: 2227793 - DNA, 25 bp, Homo sapien
gcggtgcaccggcactgaggctggc

SEQ ID NO: 2227794 - DNA, 25 bp, Homo sapien
gtgcacctggcatgcgcaaagacct

SEQ ID NO: 2227795 - DNA, 25 bp, Homo sapien
ttgaggcgaaggtaaagagggcgga

SEQ ID NO: 2227796 - DNA, 25 bp, Homo sapien
agcctttcaggcactgcccggcccg

SEQ ID NO: 2227797 - DNA, 25 bp, Homo sapien
gagagagtacccgcttggaatgcgc

SEQ ID NO: 2227798 - DNA, 25 bp, Homo sapien
tggaatgcgccctccggggtctggg

SEQ ID NO: 2227799 - DNA, 25 bp, Homo sapien
ctgcggagagagtacccgcttggaa

SEQ ID NO: 2227800 - DNA, 25 bp, Homo sapien
gagagtacccgcttggaatgcgccc

SEQ ID NO: 2227801 - DNA, 25 bp, Homo sapien
tatagggttgagtcggatggcggtc

SEQ ID NO: 2227802 - DNA, 25 bp, Homo sapien
gtgggagcggagttccccccacaga

SEQ ID NO: 2227803 - DNA, 25 bp, Homo sapien
tctgtccaggatccgaggtgggagc

SEQ ID NO: 2227804 - DNA, 25 bp, Homo sapien
ccctcgcgctaaggctggcttcgaa

SEQ ID NO: 2227805 - DNA, 25 bp, Homo sapien
ggatgaaatcgctcagccggaatgc

SEQ ID NO: 2227806 - DNA, 25 bp, Homo sapien
taggaggtttaggatttcggatgaa

SEQ ID NO: 2227807 - DNA, 25 bp, Homo sapien
cactcgggaggtctgtctcgctttc

SEQ ID NO: 2227808 - DNA, 25 bp, Homo sapien
ctgtctgtctcgggctgtgtgtgaa

SEQ ID NO: 2227809 - DNA, 25 bp, Homo sapien
gctgctcctccggatgccgcaaact

SEQ ID NO: 2227810 - DNA, 25 bp, Homo sapien
gtgcccgctcgtccgtctccgcgct

SEQ ID NO: 2227811 - DNA, 25 bp, Homo sapien
gatgccgcaaactactggccgcgga

SEQ ID NO: 2227812 - DNA, 25 bp, Homo sapien
tgtgctgccgtctgtgcccgctcgt

SEQ ID NO: 2227813 - DNA, 25 bp, Homo sapien
catgtgccagtactgggaagcggga

SEQ ID NO: 2227814 - DNA, 25 bp, Homo sapien
ctgccagctccacttgggcggcggt

SEQ ID NO: 2227815 - DNA, 25 bp, Homo sapien
tgtccgcttaggtcgccgacagctg

SEQ ID NO: 2227816 - DNA, 25 bp, Homo sapien
tgggagccggcgccgatgtgcaggg

SEQ ID NO: 2227817 - DNA, 25 bp, Homo sapien
gcctccacggcttgattgagcggga

SEQ ID NO: 2227818 - DNA, 25 bp, Homo sapien
aaggctgtcaggaacccactgatca

SEQ ID NO: 2227819 - DNA, 25 bp, Homo sapien
ataaaagtaaactggcgcctccacg

SEQ ID NO: 2227820 - DNA, 25 bp, Homo sapien
tgtaaactttaaggcgatctgttcc

SEQ ID NO: 2227821 - DNA, 25 bp, Homo sapien
gactgagaaagttattaatcacttc

SEQ ID NO: 2227822 - DNA, 25 bp, Homo sapien
gctgctgccaaactcgtaactgtcc

SEQ ID NO: 2227823 - DNA, 25 bp, Homo sapien
gaaacacaagagatgtgcgggacag

SEQ ID NO: 2227824 - DNA, 25 bp, Homo sapien
cagcatccttgaacaagctatgtcc

SEQ ID NO: 2227825 - DNA, 25 bp, Homo sapien
agaaagctctcccttcaaaggcact

SEQ ID NO: 2227826 - DNA, 25 bp, Homo sapien
attaaatcatggccagccttcccac

SEQ ID NO: 2227827 - DNA, 25 bp, Homo sapien
aggagggtaagggtgacattccaca

SEQ ID NO: 2227828 - DNA, 25 bp, Homo sapien
tccctcatcccaaggaggagggtaa

SEQ ID NO: 2227829 - DNA, 25 bp, Homo sapien
tatctgttcaggttgacaagccctg

SEQ ID NO: 2227830 - DNA, 25 bp, Homo sapien
catgtcacgtatgccactaacagca

SEQ ID NO: 2227831 - DNA, 25 bp, Homo sapien
taaaagtaccaaaggcatgtcacgt

SEQ ID NO: 2227832 - DNA, 25 bp, Homo sapien
cagcacaaggcacagtatctgttca

SEQ ID NO: 2227833 - DNA, 25 bp, Homo sapien
tgtctgttgtctccgggctgaagcc

SEQ ID NO: 2227834 - DNA, 25 bp, Homo sapien
tgaagccagaatggccatagaggac

SEQ ID NO: 2227835 - DNA, 25 bp, Homo sapien
ggtccaagagtttgcatattggtgc

SEQ ID NO: 2227836 - DNA, 25 bp, Homo sapien
gaaaacaatgacttgccagctggga

SEQ ID NO: 2227837 - DNA, 25 bp, Homo sapien
ttggcaacaatcacagaagggctgg

SEQ ID NO: 2227838 - DNA, 25 bp, Homo sapien
gggcgagacaattttgaaaacagga

SEQ ID NO: 2227839 - DNA, 25 bp, Homo sapien
gcagtctcctagcagagcaaaacaa

SEQ ID NO: 2227840 - DNA, 25 bp, Homo sapien
gcagatttggttcctagcaaaatca

SEQ ID NO: 2227841 - DNA, 25 bp, Homo sapien
ctcccatcagcagtacttttaccac

SEQ ID NO: 2227842 - DNA, 25 bp, Homo sapien
cccatcagcagtacttttaccacca

SEQ ID NO: 2227843 - DNA, 25 bp, Homo sapien
tcccatcagcagtacttttaccacc

SEQ ID NO: 2227844 - DNA, 25 bp, Homo sapien
cctgttgctcggagttgagatttct

SEQ ID NO: 2227845 - DNA, 25 bp, Homo sapien
tcccagcactgagattagcagagaa

SEQ ID NO: 2227846 - DNA, 25 bp, Homo sapien
gctcccagcactgagattagcagag

SEQ ID NO: 2227847 - DNA, 25 bp, Homo sapien
cattctcatcaaccagtatttaacc

SEQ ID NO: 2227848 - DNA, 25 bp, Homo sapien
cagattggcatgaactcagaattcc

SEQ ID NO: 2227849 - DNA, 25 bp, Homo sapien
ctcagaattcctccttgaggactgg

SEQ ID NO: 2227850 - DNA, 25 bp, Homo sapien
gattggcatgaactcagaattcctc

SEQ ID NO: 2227851 - DNA, 25 bp, Homo sapien
agattggcatgaactcagaattcct

SEQ ID NO: 2227852 - DNA, 25 bp, Homo sapien
tccaccctcacggtactattgtact

SEQ ID NO: 2227853 - DNA, 25 bp, Homo sapien
ggtgcacagactggaagatataagg

SEQ ID NO: 2227854 - DNA, 25 bp, Homo sapien
catcagggcaaggttttccaaaatc

SEQ ID NO: 2227855 - DNA, 25 bp, Homo sapien
gaagatataaggaacccataaatga

SEQ ID NO: 2227856 - DNA, 25 bp, Homo sapien
catctgccactccagaacttcttgg

SEQ ID NO: 2227857 - DNA, 25 bp, Homo sapien
ctacatctcaatccactatcacagg

SEQ ID NO: 2227858 - DNA, 25 bp, Homo sapien
ggagacattctgagttcccatggaa

SEQ ID NO: 2227859 - DNA, 25 bp, Homo sapien
ttggcttgccgaaaaggtagaaaca

SEQ ID NO: 2227860 - DNA, 25 bp, Homo sapien
cgtactgtcatttcctgtacttcct

SEQ ID NO: 2227861 - DNA, 25 bp, Homo sapien
gtactgtcatttcctgtacttcctg

SEQ ID NO: 2227862 - DNA, 25 bp, Homo sapien
tacttcctgtctctcccatctgcat

SEQ ID NO: 2227863 - DNA, 25 bp, Homo sapien
ctgtacttcctgtctctcccatctg

SEQ ID NO: 2227864 - DNA, 25 bp, Homo sapien
aactccagtgtaatatcagggtcca

SEQ ID NO: 2227865 - DNA, 25 bp, Homo sapien
tccagtgtaatatcagggtccacaa

SEQ ID NO: 2227866 - DNA, 25 bp, Homo sapien
tgtgcccaagtactacaatatccac

SEQ ID NO: 2227867 - DNA, 25 bp, Homo sapien
gggtccacaatgtgcccaagtacta

SEQ ID NO: 2227868 - DNA, 25 bp, Homo sapien
tctccctcgagctcactaatgcctg

SEQ ID NO: 2227869 - DNA, 25 bp, Homo sapien
cctcgagctcactaatgcctgaaat

SEQ ID NO: 2227870 - DNA, 25 bp, Homo sapien
ctctccctcgagctcactaatgcct

SEQ ID NO: 2227871 - DNA, 25 bp, Homo sapien
tccctcgagctcactaatgcctgaa

SEQ ID NO: 2227872 - DNA, 25 bp, Homo sapien
agggcaattcagcatgaaacttgag

SEQ ID NO: 2227873 - DNA, 25 bp, Homo sapien
tgaaacttgagtaagcatctatggg

SEQ ID NO: 2227874 - DNA, 25 bp, Homo sapien
gcaattcagcatgaaacttgagtaa

SEQ ID NO: 2227875 - DNA, 25 bp, Homo sapien
catctatggggtctaaagaggaaga

SEQ ID NO: 2227876 - DNA, 25 bp, Homo sapien
ggagctgacattgctgctatcatga

SEQ ID NO: 2227877 - DNA, 25 bp, Homo sapien
cctgccaaagaggagactagcgatg

SEQ ID NO: 2227878 - DNA, 25 bp, Homo sapien
gactagcgatggagctgacattgct

SEQ ID NO: 2227879 - DNA, 25 bp, Homo sapien
tgctgctatcatgatgtcattcctc

SEQ ID NO: 2227880 - DNA, 25 bp, Homo sapien
cctacgacacctccttcttgaaatt

SEQ ID NO: 2227881 - DNA, 25 bp, Homo sapien
gaataagtacatcctcctacgacac

SEQ ID NO: 2227882 - DNA, 25 bp, Homo sapien
tcaacatgcatctcgggaataagta

SEQ ID NO: 2227883 - DNA, 25 bp, Homo sapien
catctcgggaataagtacatcctcc

SEQ ID NO: 2227884 - DNA, 25 bp, Homo sapien
actttctatagtaatccaggctgga

SEQ ID NO: 2227885 - DNA, 25 bp, Homo sapien
ccaacaccagggaagcataatccat

SEQ ID NO: 2227886 - DNA, 25 bp, Homo sapien
tcaaaagcctcaacattgaccacct

SEQ ID NO: 2227887 - DNA, 25 bp, Homo sapien
gagtacttcaaaagcctcaacattg

SEQ ID NO: 2227888 - DNA, 25 bp, Homo sapien
taaaagtacgtaccactccataggc

SEQ ID NO: 2227889 - DNA, 25 bp, Homo sapien
ccaaccagccattaggtagtctact

SEQ ID NO: 2227890 - DNA, 25 bp, Homo sapien
cactcgggatgacccctttacaaat

SEQ ID NO: 2227891 - DNA, 25 bp, Homo sapien
gtagtctacttttcttacataagga

SEQ ID NO: 2227892 - DNA, 25 bp, Homo sapien
cacccagagaatcgctttgtccatc

SEQ ID NO: 2227893 - DNA, 25 bp, Homo sapien
tttattccctgtgtcgcctacgctg

SEQ ID NO: 2227894 - DNA, 25 bp, Homo sapien
acaggagaacagaaccacggattgg

SEQ ID NO: 2227895 - DNA, 25 bp, Homo sapien
tgggacgtgtctcccctattggctg

SEQ ID NO: 2227896 - DNA, 25 bp, Homo sapien
ttgacagattatttaccagtgaagg

SEQ ID NO: 2227897 - DNA, 25 bp, Homo sapien
cataagaatagtaaaggatatgaaa

SEQ ID NO: 2227898 - DNA, 25 bp, Homo sapien
taagggcaccacacttatgaccaaa

SEQ ID NO: 2227899 - DNA, 25 bp, Homo sapien
aatagtggtttatattggaaacttg

SEQ ID NO: 2227900 - DNA, 25 bp, Homo sapien
ctttggctcctagagtctaacgctg

SEQ ID NO: 2227901 - DNA, 25 bp, Homo sapien
gataaatatggaccttctcattcag

SEQ ID NO: 2227902 - DNA, 25 bp, Homo sapien
tatataaggctcactgtctggctga

SEQ ID NO: 2227903 - DNA, 25 bp, Homo sapien
aacgctgaaagcttactgagataaa

SEQ ID NO: 2227904 - DNA, 25 bp, Homo sapien
ttcccttggttcgatgatgttgtgg

SEQ ID NO: 2227905 - DNA, 25 bp, Homo sapien
cccttggttcgatgatgttgtggag

SEQ ID NO: 2227906 - DNA, 25 bp, Homo sapien
tcattcccttggttcgatgatgttg

SEQ ID NO: 2227907 - DNA, 25 bp, Homo sapien
cattcccttggttcgatgatgttgt

SEQ ID NO: 2227908 - DNA, 25 bp, Homo sapien
gtgatccctctttctaaccagctag

SEQ ID NO: 2227909 - DNA, 25 bp, Homo sapien
caacccacctggaataggccatgga

SEQ ID NO: 2227910 - DNA, 25 bp, Homo sapien
gacctactgcctccagtggaaactg

SEQ ID NO: 2227911 - DNA, 25 bp, Homo sapien
ccatggaaatgagcagacctactgc

SEQ ID NO: 2227912 - DNA, 25 bp, Homo sapien
caaggactgtggcaatcagactaga

SEQ ID NO: 2227913 - DNA, 25 bp, Homo sapien
cagactagacaggttctactaatgg

SEQ ID NO: 2227914 - DNA, 25 bp, Homo sapien
taggagaacactagtcatatgctac

SEQ ID NO: 2227915 - DNA, 25 bp, Homo sapien
tactaatggatgtataaagagactc

SEQ ID NO: 2227916 - DNA, 25 bp, Homo sapien
gaaatgtagggcttagctttctcag

SEQ ID NO: 2227917 - DNA, 25 bp, Homo sapien
tagggcttagctttctcagtggaaa

SEQ ID NO: 2227918 - DNA, 25 bp, Homo sapien
ttttaatacagagttaaggccgcag

SEQ ID NO: 2227919 - DNA, 25 bp, Homo sapien
ggccgcaggcttatatttcacatct

SEQ ID NO: 2227920 - DNA, 25 bp, Homo sapien
actaagacttaaagttgaccataat

SEQ ID NO: 2227921 - DNA, 25 bp, Homo sapien
atcaaaggcacaaacgaaaactaag

SEQ ID NO: 2227922 - DNA, 25 bp, Homo sapien
ttgaccataatattgacaagtcata

SEQ ID NO: 2227923 - DNA, 25 bp, Homo sapien
tcaaaggcacaaacgaaaactaaga

SEQ ID NO: 2227924 - DNA, 25 bp, Homo sapien
ccagtcgtggatgccttagacccaa

SEQ ID NO: 2227925 - DNA, 25 bp, Homo sapien
cagagggatacagggtttcaacgat

SEQ ID NO: 2227926 - DNA, 25 bp, Homo sapien
attgaatcagcccactgcgagcacg

SEQ ID NO: 2227927 - DNA, 25 bp, Homo sapien
catcagtagtcccttccagtcgtgg

SEQ ID NO: 2227928 - DNA, 25 bp, Homo sapien
ttaaaggtagagaggaataggccca

SEQ ID NO: 2227929 - DNA, 25 bp, Homo sapien
aaaggtagagaggaataggcccaca

SEQ ID NO: 2227930 - DNA, 25 bp, Homo sapien
taaaggtagagaggaataggcccac

SEQ ID NO: 2227931 - DNA, 25 bp, Homo sapien
agtaggcgagaaagattccaatcag

SEQ ID NO: 2227932 - DNA, 25 bp, Homo sapien
aggcagtaggcgagaaagattccaa

SEQ ID NO: 2227933 - DNA, 25 bp, Homo sapien
tatttgttatggcacgagagaggca

SEQ ID NO: 2227934 - DNA, 25 bp, Homo sapien
cactatctcatactggttatttgtt

SEQ ID NO: 2227935 - DNA, 25 bp, Homo sapien
ggaaattcctgcaacgactcccatt

SEQ ID NO: 2227936 - DNA, 25 bp, Homo sapien
ccaaaggaaattcctgcaacgactc

SEQ ID NO: 2227937 - DNA, 25 bp, Homo sapien
ttctgactctataatggtcatcacc

SEQ ID NO: 2227938 - DNA, 25 bp, Homo sapien
gactctataatggtcatcaccttta

SEQ ID NO: 2227939 - DNA, 25 bp, Homo sapien
tgtggagtacaatcttcaagtttac

SEQ ID NO: 2227940 - DNA, 25 bp, Homo sapien
aatcggtgacaccacaacaatgcaa

SEQ ID NO: 2227941 - DNA, 25 bp, Homo sapien
atctgtccaatctctataatcggtg

SEQ ID NO: 2227942 - DNA, 25 bp, Homo sapien
catctctctgtggagtacaatcttc

SEQ ID NO: 2227943 - DNA, 25 bp, Homo sapien
gttatactgcttcaaagccttctca

SEQ ID NO: 2227944 - DNA, 25 bp, Homo sapien
taatctcctgtagagttatactgct

SEQ ID NO: 2227945 - DNA, 25 bp, Homo sapien
actgcatggcttctataatctcctg

SEQ ID NO: 2227946 - DNA, 25 bp, Homo sapien
ttttggatcttgtctactgcatggc

SEQ ID NO: 2227947 - DNA, 25 bp, Homo sapien
tacgatggcagcgaccagttcgacc

SEQ ID NO: 2227948 - DNA, 25 bp, Homo sapien
ccaaaaaaacgagagtcagaaacat

SEQ ID NO: 2227949 - DNA, 25 bp, Homo sapien
acaaatcctacgatggcagcgacca

SEQ ID NO: 2227950 - DNA, 25 bp, Homo sapien
ggcagcgaccagttcgaccaaaaaa

SEQ ID NO: 2227951 - DNA, 25 bp, Homo sapien
gtccaagtcagcataaataagatat

SEQ ID NO: 2227952 - DNA, 25 bp, Homo sapien
caagtcagcataaataagatatagc

SEQ ID NO: 2227953 - DNA, 25 bp, Homo sapien
aagtccaagtcagcataaataagat

SEQ ID NO: 2227954 - DNA, 25 bp, Homo sapien
gtcagcataaataagatatagcaca

SEQ ID NO: 2227955 - DNA, 25 bp, Homo sapien
gaagctcggcaggtagcaaaacaac

SEQ ID NO: 2227956 - DNA, 25 bp, Homo sapien
aatgacggtaccagtagcaatgagc

SEQ ID NO: 2227957 - DNA, 25 bp, Homo sapien
aaggtgcccaaaagaataatgacgg

SEQ ID NO: 2227958 - DNA, 25 bp, Homo sapien
cagttttagcatccatgcagaagct

SEQ ID NO: 2227959 - DNA, 25 bp, Homo sapien
tcctctcttacgaagcagtgaaaag

SEQ ID NO: 2227960 - DNA, 25 bp, Homo sapien
gccgggcaagccttgcttgcctttg

SEQ ID NO: 2227961 - DNA, 25 bp, Homo sapien
aaagaaagacactattatgcaagtg

SEQ ID NO: 2227962 - DNA, 25 bp, Homo sapien
tattatgcaagtgagccctcaaagg

SEQ ID NO: 2227963 - DNA, 25 bp, Homo sapien
tcccgtatcgaactcgaacgctggt

SEQ ID NO: 2227964 - DNA, 25 bp, Homo sapien
gagatgcctgagctctttgttcggg

SEQ ID NO: 2227965 - DNA, 25 bp, Homo sapien
gctggtacgtctgggtcccagctca

SEQ ID NO: 2227966 - DNA, 25 bp, Homo sapien
agcgccggcgagatgcctgagctct

SEQ ID NO: 2227967 - DNA, 25 bp, Homo sapien
aaataaaagtgtagattagcagaac

SEQ ID NO: 2227968 - DNA, 25 bp, Homo sapien
taaaagtgtagattagcagaacgct

SEQ ID NO: 2227969 - DNA, 25 bp, Homo sapien
gaaaataaaagtgtagattagcaga

SEQ ID NO: 2227970 - DNA, 25 bp, Homo sapien
ccagaaaataaaagtgtagattagc

SEQ ID NO: 2227971 - DNA, 25 bp, Homo sapien
gactggtttagtctgcagtctccga

SEQ ID NO: 2227972 - DNA, 25 bp, Homo sapien
tttagtctgcagtctccgagacggg

SEQ ID NO: 2227973 - DNA, 25 bp, Homo sapien
ggtttagtctgcagtctccgagacg

SEQ ID NO: 2227974 - DNA, 25 bp, Homo sapien
ctggtttagtctgcagtctccgaga

SEQ ID NO: 2227975 - DNA, 25 bp, Homo sapien
acagagagcgagacgcggagtcccc

SEQ ID NO: 2227976 - DNA, 25 bp, Homo sapien
gcgagacgcggagtccccgagtctc

SEQ ID NO: 2227977 - DNA, 25 bp, Homo sapien
tggaacacagagagcgagacgcgga

SEQ ID NO: 2227978 - DNA, 25 bp, Homo sapien
agcgagacgcggagtccccgagtct

SEQ ID NO: 2227979 - DNA, 25 bp, Homo sapien
gtccacaactgagaagggccggaaa

SEQ ID NO: 2227980 - DNA, 25 bp, Homo sapien
ccacaactgagaagggccggaaaca

SEQ ID NO: 2227981 - DNA, 25 bp, Homo sapien
gagcgtccacaactgagaagggccg

SEQ ID NO: 2227982 - DNA, 25 bp, Homo sapien
gcgtccacaactgagaagggccgga

SEQ ID NO: 2227983 - DNA, 25 bp, Homo sapien
acaattttgtagagggtaaagtatg

SEQ ID NO: 2227984 - DNA, 25 bp, Homo sapien
ctgtacaattttgtagagggtaaag

SEQ ID NO: 2227985 - DNA, 25 bp, Homo sapien
caattttgtagagggtaaagtatgg

SEQ ID NO: 2227986 - DNA, 25 bp, Homo sapien
gtgtcggaaatttcataggtcttca

SEQ ID NO: 2227987 - DNA, 25 bp, Homo sapien
aaggttctagtgtcggaaatttcat

SEQ ID NO: 2227988 - DNA, 25 bp, Homo sapien
tcaagtggagctttcttcattgttt

SEQ ID NO: 2227989 - DNA, 25 bp, Homo sapien
agtggcaacaatttcagagcgcccc

SEQ ID NO: 2227990 - DNA, 25 bp, Homo sapien
cagcgctctgagattgggcctccct

SEQ ID NO: 2227991 - DNA, 25 bp, Homo sapien
cgctctgagattgggcctccctggc

SEQ ID NO: 2227992 - DNA, 25 bp, Homo sapien
agcgctctgagattgggcctccctg

SEQ ID NO: 2227993 - DNA, 25 bp, Homo sapien
cgcagcgctctgagattgggcctcc

SEQ ID NO: 2227994 - DNA, 25 bp, Homo sapien
caggactttgcaaaaccccagtatt

SEQ ID NO: 2227995 - DNA, 25 bp, Homo sapien
tttgcaaaaccccagtattcctctc

SEQ ID NO: 2227996 - DNA, 25 bp, Homo sapien
ctttgcaaaaccccagtattcctct

SEQ ID NO: 2227997 - DNA, 25 bp, Homo sapien
ctgcaggactttgcaaaaccccagt

SEQ ID NO: 2227998 - DNA, 25 bp, Homo sapien
tattctacatcctaccgtctagatg

SEQ ID NO: 2227999 - DNA, 25 bp, Homo sapien
ctattctacatcctaccgtctagat

SEQ ID NO: 2228000 - DNA, 25 bp, Homo sapien
attctacatcctaccgtctagatgt

SEQ ID NO: 2228001 - DNA, 25 bp, Homo sapien
ttcagtgggattgaggccttacgca

SEQ ID NO: 2228002 - DNA, 25 bp, Homo sapien
cagtgggattgaggccttacgcagc

SEQ ID NO: 2228003 - DNA, 25 bp, Homo sapien
tgatctccctatgatttccatattc

SEQ ID NO: 2228004 - DNA, 25 bp, Homo sapien
gtgggattgaggccttacgcagcat

SEQ ID NO: 2228005 - DNA, 25 bp, Homo sapien
tggacattattagtcccctgatgga

SEQ ID NO: 2228006 - DNA, 25 bp, Homo sapien
tagaccaatatcctgaggagttttc

SEQ ID NO: 2228007 - DNA, 25 bp, Homo sapien
ttttggatatgagagatgggtgtcc

SEQ ID NO: 2228008 - DNA, 25 bp, Homo sapien
tgatccatgaacacgggatatctat

SEQ ID NO: 2228009 - DNA, 25 bp, Homo sapien
gcagagtcgtatggtaagtgtacct

SEQ ID NO: 2228010 - DNA, 25 bp, Homo sapien
aagctacttttaactctcgtgtaca

SEQ ID NO: 2228011 - DNA, 25 bp, Homo sapien
tttaactctcgtgtacaggattttg

SEQ ID NO: 2228012 - DNA, 25 bp, Homo sapien
tttcactggcataaatacctttaag

SEQ ID NO: 2228013 - DNA, 25 bp, Homo sapien
ccctgatggatatataagtagtatc

SEQ ID NO: 2228014 - DNA, 25 bp, Homo sapien
gatggatatataagtagtatctcat

SEQ ID NO: 2228015 - DNA, 25 bp, Homo sapien
ctgatggatatataagtagtatctc

SEQ ID NO: 2228016 - DNA, 25 bp, Homo sapien
ctccctgatggatatataagtagta

SEQ ID NO: 2228017 - DNA, 25 bp, Homo sapien
cacatgctactcaccgaagggagga

SEQ ID NO: 2228018 - DNA, 25 bp, Homo sapien
cagctgctgagggtatatgcccgga

SEQ ID NO: 2228019 - DNA, 25 bp, Homo sapien
tagcaacaagctcttctgtctcggg

SEQ ID NO: 2228020 - DNA, 25 bp, Homo sapien
ggaggaaattatcacagcagcctgg

SEQ ID NO: 2228021 - DNA, 25 bp, Homo sapien
aattcttcaagtactcccaggctgc

SEQ ID NO: 2228022 - DNA, 25 bp, Homo sapien
tatgcgcagccctgtattggtcact

SEQ ID NO: 2228023 - DNA, 25 bp, Homo sapien
tgtaggacacccatgtatgcgcagc

SEQ ID NO: 2228024 - DNA, 25 bp, Homo sapien
tatgtccatggcagaacaccacttg

SEQ ID NO: 2228025 - DNA, 25 bp, Homo sapien
tctatgcctggaagagacacacctc

SEQ ID NO: 2228026 - DNA, 25 bp, Homo sapien
gactgctcgagtatactgggaccca

SEQ ID NO: 2228027 - DNA, 25 bp, Homo sapien
tcttagagatgagatgccacgcact

SEQ ID NO: 2228028 - DNA, 25 bp, Homo sapien
cagttgtcctggtgcaaagagccac

SEQ ID NO: 2228029 - DNA, 25 bp, Homo sapien
tattgtcaccacctggcttgtgagg

SEQ ID NO: 2228030 - DNA, 25 bp, Homo sapien
ggtaaatggctagcaggtgatcctg

SEQ ID NO: 2228031 - DNA, 25 bp, Homo sapien
cactgcccagtgcaaggaaggtaac

SEQ ID NO: 2228032 - DNA, 25 bp, Homo sapien
agaaatcctggagaccgagcgaagg

SEQ ID NO: 2228033 - DNA, 25 bp, Homo sapien
gactgcagtccctctcaatggtgtg

SEQ ID NO: 2228034 - DNA, 25 bp, Homo sapien
tacttgtccccttttgagagatgag

SEQ ID NO: 2228035 - DNA, 25 bp, Homo sapien
gcctaaaattcgaggtggagccaca

SEQ ID NO: 2228036 - DNA, 25 bp, Homo sapien
gaggcctcccgtttctgtagcagaa

SEQ ID NO: 2228037 - DNA, 25 bp, Homo sapien
aacactgggccaattgagataacac

SEQ ID NO: 2228038 - DNA, 25 bp, Homo sapien
caaaagagcaagttacagcccggga

SEQ ID NO: 2228039 - DNA, 25 bp, Homo sapien
tatctagaactggaaaaagcttggg

SEQ ID NO: 2228040 - DNA, 25 bp, Homo sapien
cacagtgggatgtagaccatgctct

SEQ ID NO: 2228041 - DNA, 25 bp, Homo sapien
caagaccctgggtactgtcgcatct

SEQ ID NO: 2228042 - DNA, 25 bp, Homo sapien
tctgcttggccattgaggaacggag

SEQ ID NO: 2228043 - DNA, 25 bp, Homo sapien
cattgaggaacggagctgcagagtc

SEQ ID NO: 2228044 - DNA, 25 bp, Homo sapien
ttcttccccagtcgagtccatccag

SEQ ID NO: 2228045 - DNA, 25 bp, Homo sapien
ggcctgtaggcatgttaagaacttt

SEQ ID NO: 2228046 - DNA, 25 bp, Homo sapien
caaagaagaggatccgagactaagc

SEQ ID NO: 2228047 - DNA, 25 bp, Homo sapien
cattttggttgaagcatagtgagca

SEQ ID NO: 2228048 - DNA, 25 bp, Homo sapien
tacaagacggatcagaaaggaacag

SEQ ID NO: 2228049 - DNA, 25 bp, Homo sapien
acgtttactggccttgttcctcatg

SEQ ID NO: 2228050 - DNA, 25 bp, Homo sapien
cctcccaggaagtcattgctggcca

SEQ ID NO: 2228051 - DNA, 25 bp, Homo sapien
tccaggcacatatgctgtagatctt

SEQ ID NO: 2228052 - DNA, 25 bp, Homo sapien
cctcacaccattgtagacaaatgta

SEQ ID NO: 2228053 - DNA, 25 bp, Homo sapien
gggagtaatcaacagcctactcaaa

SEQ ID NO: 2228054 - DNA, 25 bp, Homo sapien
taccacaggcctagcccaagaagat

SEQ ID NO: 2228055 - DNA, 25 bp, Homo sapien
caaagcggacagttatctctctaaa

SEQ ID NO: 2228056 - DNA, 25 bp, Homo sapien
tcaacagcctactcaaagcggacag

SEQ ID NO: 2228057 - DNA, 25 bp, Homo sapien
tgctgaagcagagttcccactacct

SEQ ID NO: 2228058 - DNA, 25 bp, Homo sapien
gcagagttcccactacctctactag

SEQ ID NO: 2228059 - DNA, 25 bp, Homo sapien
gttcccactacctctactagatcat

SEQ ID NO: 2228060 - DNA, 25 bp, Homo sapien
tgaagcagagttcccactacctcta

SEQ ID NO: 2228061 - DNA, 25 bp, Homo sapien
ggcttctttgatccacacctggagc

SEQ ID NO: 2228062 - DNA, 25 bp, Homo sapien
ctttggcagccgtcaagttcttggc

SEQ ID NO: 2228063 - DNA, 25 bp, Homo sapien
ttgacaaagctgtctgaagtccctc

SEQ ID NO: 2228064 - DNA, 25 bp, Homo sapien
ctcctgctttggcagccgtcaagtt

SEQ ID NO: 2228065 - DNA, 25 bp, Homo sapien
cattcactcagcctagtttctagtg

SEQ ID NO: 2228066 - DNA, 25 bp, Homo sapien
ggtctgacctccctgtagtatttca

SEQ ID NO: 2228067 - DNA, 25 bp, Homo sapien
gaagctctctcctgataacctttta

SEQ ID NO: 2228068 - DNA, 25 bp, Homo sapien
gccaattggccatgtcttctcagac

SEQ ID NO: 2228069 - DNA, 25 bp, Homo sapien
tggaggctgggatgtatttcaatga

SEQ ID NO: 2228070 - DNA, 25 bp, Homo sapien
tggcaagccagtcggggactcagca

SEQ ID NO: 2228071 - DNA, 25 bp, Homo sapien
gaaaccaccaactcgcctttgtgtg

SEQ ID NO: 2228072 - DNA, 25 bp, Homo sapien
atttcaatgaaaccaccaactcgcc

SEQ ID NO: 2228073 - DNA, 25 bp, Homo sapien
cctctaacttaggtccttaccaatg

SEQ ID NO: 2228074 - DNA, 25 bp, Homo sapien
ccccataagtttggatcaacatacc

SEQ ID NO: 2228075 - DNA, 25 bp, Homo sapien
gcctgtgttaattggggttcctcta

SEQ ID NO: 2228076 - DNA, 25 bp, Homo sapien
gctaggaaggcataatccccataag

SEQ ID NO: 2228077 - DNA, 25 bp, Homo sapien
tattgaccgtagagaatgacttggg

SEQ ID NO: 2228078 - DNA, 25 bp, Homo sapien
ggcagtagttcatgatggtttacag

SEQ ID NO: 2228079 - DNA, 25 bp, Homo sapien
aatataattatattgaccgtagaga

SEQ ID NO: 2228080 - DNA, 25 bp, Homo sapien
accgtagagaatgacttgggtgcca

SEQ ID NO: 2228081 - DNA, 25 bp, Homo sapien
gatatacacagaaggttagctcgga

SEQ ID NO: 2228082 - DNA, 25 bp, Homo sapien
gaggcagccaccatgactagtttct

SEQ ID NO: 2228083 - DNA, 25 bp, Homo sapien
tactgctacactgtggcccgaggtg

SEQ ID NO: 2228084 - DNA, 25 bp, Homo sapien
tgttaggatacacccagattctgga

SEQ ID NO: 2228085 - DNA, 25 bp, Homo sapien
taaagggaggcaatgatccagtttc

SEQ ID NO: 2228086 - DNA, 25 bp, Homo sapien
aacgaccatgatgccaaactgagaa

SEQ ID NO: 2228087 - DNA, 25 bp, Homo sapien
ccatgtaaagggaggcaatgatcca

SEQ ID NO: 2228088 - DNA, 25 bp, Homo sapien
aagtgtttctgccaaaacgaccatg

SEQ ID NO: 2228089 - DNA, 25 bp, Homo sapien
gaagtcactagtcctgaataccaaa

SEQ ID NO: 2228090 - DNA, 25 bp, Homo sapien
ttagggcacaagacagaacaagttc

SEQ ID NO: 2228091 - DNA, 25 bp, Homo sapien
gatcaggatgtgaacagatacccaa

SEQ ID NO: 2228092 - DNA, 25 bp, Homo sapien
ggtcatgttgcagaggaatagctac

SEQ ID NO: 2228093 - DNA, 25 bp, Homo sapien
tagtgtcccgcttgatgctggtttt

SEQ ID NO: 2228094 - DNA, 25 bp, Homo sapien
ccttggcgggacttgtcaggcagaa

SEQ ID NO: 2228095 - DNA, 25 bp, Homo sapien
tatagtggattaatagtgtcccgct

SEQ ID NO: 2228096 - DNA, 25 bp, Homo sapien
cctcagcgtctcatcatatagtgga

SEQ ID NO: 2228097 - DNA, 25 bp, Homo sapien
agctctgttcaagagtgcccggaca

SEQ ID NO: 2228098 - DNA, 25 bp, Homo sapien
tgtcaaaaatgtcacctcaagccct

SEQ ID NO: 2228099 - DNA, 25 bp, Homo sapien
ccatatagatatgccatggtgacat

SEQ ID NO: 2228100 - DNA, 25 bp, Homo sapien
cagagcatcagtcaggttccagaag

SEQ ID NO: 2228101 - DNA, 25 bp, Homo sapien
tcacatggacaaccagactctgggt

SEQ ID NO: 2228102 - DNA, 25 bp, Homo sapien
ggcttcatcagcataggccagctga

SEQ ID NO: 2228103 - DNA, 25 bp, Homo sapien
gatgttcccgaaatcaccagcttca

SEQ ID NO: 2228104 - DNA, 25 bp, Homo sapien
tgctcatcatgctgccgatcgtact

SEQ ID NO: 2228105 - DNA, 25 bp, Homo sapien
gagtgactaggatggtttccccagg

SEQ ID NO: 2228106 - DNA, 25 bp, Homo sapien
caaggtgcagttaagtccatctggg

SEQ ID NO: 2228107 - DNA, 25 bp, Homo sapien
ttcatgcttatgacagaaccaggcc

SEQ ID NO: 2228108 - DNA, 25 bp, Homo sapien
ccgaatctgctctagggaggtgctt

SEQ ID NO: 2228109 - DNA, 25 bp, Homo sapien
cttctggctagcttctggcgatgta

SEQ ID NO: 2228110 - DNA, 25 bp, Homo sapien
cactttgcatgctgcttctggctag

SEQ ID NO: 2228111 - DNA, 25 bp, Homo sapien
ttcactaggtggtcaatgtcttctt

SEQ ID NO: 2228112 - DNA, 25 bp, Homo sapien
ggcgatgtaacttcactaggtggtc

SEQ ID NO: 2228113 - DNA, 25 bp, Homo sapien
ggcctgggacggatttgcttctgtc

SEQ ID NO: 2228114 - DNA, 25 bp, Homo sapien
tcttctgggcgaagatctatcacag

SEQ ID NO: 2228115 - DNA, 25 bp, Homo sapien
catatccacattgaggcctgggacg

SEQ ID NO: 2228116 - DNA, 25 bp, Homo sapien
accacatcttctgggcgaagatcta

SEQ ID NO: 2228117 - DNA, 25 bp, Homo sapien
tctggtgttcttcttaaatatcatc

SEQ ID NO: 2228118 - DNA, 25 bp, Homo sapien
ttaaatatcatctcaccctcatcca

SEQ ID NO: 2228119 - DNA, 25 bp, Homo sapien
tttctggtgttcttcttaaatatca

SEQ ID NO: 2228120 - DNA, 25 bp, Homo sapien
tcttcttaaatatcatctcaccctc

SEQ ID NO: 2228121 - DNA, 25 bp, Homo sapien
tacttgagatttgggagcagacatc

SEQ ID NO: 2228122 - DNA, 25 bp, Homo sapien
tgagatttgggagcagacatcttct

SEQ ID NO: 2228123 - DNA, 25 bp, Homo sapien
gaggccagatttatccagagagtct

SEQ ID NO: 2228124 - DNA, 25 bp, Homo sapien
ttttctacttgagatttgggagcag

SEQ ID NO: 2228125 - DNA, 25 bp, Homo sapien
tcagcttccaatgcactctttccac

SEQ ID NO: 2228126 - DNA, 25 bp, Homo sapien
ccgagtcagctgtgaagctatccag

SEQ ID NO: 2228127 - DNA, 25 bp, Homo sapien
tgaagctatccagactctcactctc

SEQ ID NO: 2228128 - DNA, 25 bp, Homo sapien
ctggaggtgctatccgagtcagctg

SEQ ID NO: 2228129 - DNA, 25 bp, Homo sapien
gtgtctgatgaaggagggactgtcc

SEQ ID NO: 2228130 - DNA, 25 bp, Homo sapien
catctgtgtctgatgaaggagggac

SEQ ID NO: 2228131 - DNA, 25 bp, Homo sapien
cttctgccgctcctgaatgatcttt

SEQ ID NO: 2228132 - DNA, 25 bp, Homo sapien
ccttctgccgctcctgaatgatctt

SEQ ID NO: 2228133 - DNA, 25 bp, Homo sapien
tcataaaaccagtccccagttgctt

SEQ ID NO: 2228134 - DNA, 25 bp, Homo sapien
gcaaagcgattcactttctggtcat

SEQ ID NO: 2228135 - DNA, 25 bp, Homo sapien
tggcgcagggacatcctgattatct

SEQ ID NO: 2228136 - DNA, 25 bp, Homo sapien
tctcactacctgtgcggtaagcaaa

SEQ ID NO: 2228137 - DNA, 25 bp, Homo sapien
ttgggactcaaacggcccaggctct

SEQ ID NO: 2228138 - DNA, 25 bp, Homo sapien
gcagtcccgacacaccaggtgatta

SEQ ID NO: 2228139 - DNA, 25 bp, Homo sapien
caggtgattacaaccccgacaagta

SEQ ID NO: 2228140 - DNA, 25 bp, Homo sapien
atcactgtagtgttggctgcccctc

SEQ ID NO: 2228141 - DNA, 25 bp, Homo sapien
tttccggacctcttcatctcgctgt

SEQ ID NO: 2228142 - DNA, 25 bp, Homo sapien
gacctcttcatctcgctgtagaaca

SEQ ID NO: 2228143 - DNA, 25 bp, Homo sapien
aagaaaggtccagtaactccgacat

SEQ ID NO: 2228144 - DNA, 25 bp, Homo sapien
atctgctttccggacctcttcatct

SEQ ID NO: 2228145 - DNA, 25 bp, Homo sapien
acaaccagacaaggagagctaccag

SEQ ID NO: 2228146 - DNA, 25 bp, Homo sapien
aacaaccagacaaggagagctacca

SEQ ID NO: 2228147 - DNA, 25 bp, Homo sapien
aaacaaccagacaaggagagctacc

SEQ ID NO: 2228148 - DNA, 25 bp, Homo sapien
ctgggcaacacagggcgactcagtc

SEQ ID NO: 2228149 - DNA, 25 bp, Homo sapien
cctgggcaacacagggcgactcagt

SEQ ID NO: 2228150 - DNA, 25 bp, Homo sapien
tagacaacacgcctctttcacttta

SEQ ID NO: 2228151 - DNA, 25 bp, Homo sapien
tttgaaactagacaacacgcctctt

SEQ ID NO: 2228152 - DNA, 25 bp, Homo sapien
gaaactagacaacacgcctctttca

SEQ ID NO: 2228153 - DNA, 25 bp, Homo sapien
gacaacacgcctctttcactttatt

SEQ ID NO: 2228154 - DNA, 25 bp, Homo sapien
gagaattgactatacgccaaacaag

SEQ ID NO: 2228155 - DNA, 25 bp, Homo sapien
cggcaaagctatacaggttcctgaa

SEQ ID NO: 2228156 - DNA, 25 bp, Homo sapien
gatgttaagcctcttgcacacaccc

SEQ ID NO: 2228157 - DNA, 25 bp, Homo sapien
tatccccaaggagaatatataccct

SEQ ID NO: 2228158 - DNA, 25 bp, Homo sapien
catttctgtacctttggtgcctaga

SEQ ID NO: 2228159 - DNA, 25 bp, Homo sapien
actagattgtaagctgtatgacaga

SEQ ID NO: 2228160 - DNA, 25 bp, Homo sapien
gcactgcctggatcataatatgcac

SEQ ID NO: 2228161 - DNA, 25 bp, Homo sapien
tgtaagctgtatgacagaagggact

SEQ ID NO: 2228162 - DNA, 25 bp, Homo sapien
agagtgcgggttagcgaccccgctc

SEQ ID NO: 2228163 - DNA, 25 bp, Homo sapien
tgcgggttagcgaccccgctcgacg

SEQ ID NO: 2228164 - DNA, 25 bp, Homo sapien
ccgcgatgtcgtaggtccgaagaga

SEQ ID NO: 2228165 - DNA, 25 bp, Homo sapien
gctgactggccaacgccagagaagc

SEQ ID NO: 2228166 - DNA, 25 bp, Homo sapien
agaagtcccagtgccggtttcaagg

SEQ ID NO: 2228167 - DNA, 25 bp, Homo sapien
gctccgggaagatcgcaacccagct

SEQ ID NO: 2228168 - DNA, 25 bp, Homo sapien
gtcacttgcaacaggtgcctccaga

SEQ ID NO: 2228169 - DNA, 25 bp, Homo sapien
ggtgcctccagagatcgagaagtcc

SEQ ID NO: 2228170 - DNA, 25 bp, Homo sapien
ccagtgtgcacagcatgaaattttt

SEQ ID NO: 2228171 - DNA, 25 bp, Homo sapien
cccaccatctatggtgatgttgaag

SEQ ID NO: 2228172 - DNA, 25 bp, Homo sapien
cagtgtgcacagcatgaaatttttc

SEQ ID NO: 2228173 - DNA, 25 bp, Homo sapien
cccaagagcccaccatctatggtga

SEQ ID NO: 2228174 - DNA, 25 bp, Homo sapien
tctggcaagcactgtagggatgcat

SEQ ID NO: 2228175 - DNA, 25 bp, Homo sapien
cactgtagggatgcatagggtcact

SEQ ID NO: 2228176 - DNA, 25 bp, Homo sapien
tgtagggatgcatagggtcactgca

SEQ ID NO: 2228177 - DNA, 25 bp, Homo sapien
tggcaagcactgtagggatgcatag

SEQ ID NO: 2228178 - DNA, 25 bp, Homo sapien
tggagttcaagttttcacaatcgct

SEQ ID NO: 2228179 - DNA, 25 bp, Homo sapien
tagcgatataggtaggagtccacaa

SEQ ID NO: 2228180 - DNA, 25 bp, Homo sapien
ccttaatagtgataaagagctcctc

SEQ ID NO: 2228181 - DNA, 25 bp, Homo sapien
ttcactgtgacgactaacatcccag

SEQ ID NO: 2228182 - DNA, 25 bp, Homo sapien
taagaccatatcaaaagtgacagta

SEQ ID NO: 2228183 - DNA, 25 bp, Homo sapien
tggataagaccatatcaaaagtgac

SEQ ID NO: 2228184 - DNA, 25 bp, Homo sapien
ccatatcaaaagtgacagtaaacat

SEQ ID NO: 2228185 - DNA, 25 bp, Homo sapien
gctgttcacactggataagaccata

SEQ ID NO: 2228186 - DNA, 25 bp, Homo sapien
tgctcaaacctgacgagaccaagta

SEQ ID NO: 2228187 - DNA, 25 bp, Homo sapien
gagtcaaggcttgagaggcacattc

SEQ ID NO: 2228188 - DNA, 25 bp, Homo sapien
tttttctgagaaaggatccatgggc

SEQ ID NO: 2228189 - DNA, 25 bp, Homo sapien
tcacctgggattagttgtataactc

SEQ ID NO: 2228190 - DNA, 25 bp, Homo sapien
tctaggatccagactggaatatcgg

SEQ ID NO: 2228191 - DNA, 25 bp, Homo sapien
cacataagaaaactcccactacaga

SEQ ID NO: 2228192 - DNA, 25 bp, Homo sapien
gccaaagtccgagggccacataaga

SEQ ID NO: 2228193 - DNA, 25 bp, Homo sapien
cagcatttgcgcaggctctttgcca

SEQ ID NO: 2228194 - DNA, 25 bp, Homo sapien
gtttcagacctgtcacgatgtcagt

SEQ ID NO: 2228195 - DNA, 25 bp, Homo sapien
ttcagacctgtcacgatgtcagtgg

SEQ ID NO: 2228196 - DNA, 25 bp, Homo sapien
tgtttcagacctgtcacgatgtcag

SEQ ID NO: 2228197 - DNA, 25 bp, Homo sapien
tctgtttcagacctgtcacgatgtc

SEQ ID NO: 2228198 - DNA, 25 bp, Homo sapien
tattgctgtcccatccggtgaggaa

SEQ ID NO: 2228199 - DNA, 25 bp, Homo sapien
tccctgcagatccagtagaaataga

SEQ ID NO: 2228200 - DNA, 25 bp, Homo sapien
gaagtcaacaggttgttgaaccagg

SEQ ID NO: 2228201 - DNA, 25 bp, Homo sapien
cccatccggtgaggaagagacggta

SEQ ID NO: 2228202 - DNA, 25 bp, Homo sapien
ttttgttttgaggttgtggtctgca

SEQ ID NO: 2228203 - DNA, 25 bp, Homo sapien
agatggatttcaagatagaagcaaa

SEQ ID NO: 2228204 - DNA, 25 bp, Homo sapien
tggatttcaagatagaagcaaaggg

SEQ ID NO: 2228205 - DNA, 25 bp, Homo sapien
tttcaagatagaagcaaagggggtg

SEQ ID NO: 2228206 - DNA, 25 bp, Homo sapien
agcacagccacttcatactggaaaa

SEQ ID NO: 2228207 - DNA, 25 bp, Homo sapien
tcgaaagcccttatgagattttctg

SEQ ID NO: 2228208 - DNA, 25 bp, Homo sapien
ttggtgaatattgttgttcgaaagc

SEQ ID NO: 2228209 - DNA, 25 bp, Homo sapien
tgttcgaaagcccttatgagatttt

SEQ ID NO: 2228210 - DNA, 25 bp, Homo sapien
tgggaattggtgaatattgttgttc

SEQ ID NO: 2228211 - DNA, 25 bp, Homo sapien
cctgctgctcggatatgaatggaga

SEQ ID NO: 2228212 - DNA, 25 bp, Homo sapien
agtcccctgctgctcggatatgaat

SEQ ID NO: 2228213 - DNA, 25 bp, Homo sapien
tgaggggcaattaacaaagatatac

SEQ ID NO: 2228214 - DNA, 25 bp, Homo sapien
gctcggatatgaatggagaagaaat

SEQ ID NO: 2228215 - DNA, 25 bp, Homo sapien
attccaaaactttggatgggtgcat

SEQ ID NO: 2228216 - DNA, 25 bp, Homo sapien
gataactcttatcacagcaagagga

SEQ ID NO: 2228217 - DNA, 25 bp, Homo sapien
gtagtccggtagaagataactctta

SEQ ID NO: 2228218 - DNA, 25 bp, Homo sapien
tcctctttcagggtgacaacataaa

SEQ ID NO: 2228219 - DNA, 25 bp, Homo sapien
tttagttctgtagtccggtagaaga

SEQ ID NO: 2228220 - DNA, 25 bp, Homo sapien
ccttctgctgggagcggtaaaaccg

SEQ ID NO: 2228221 - DNA, 25 bp, Homo sapien
tgaccggtgcaaggatccacttcca

SEQ ID NO: 2228222 - DNA, 25 bp, Homo sapien
aaaaccggaggatcctttcacagat

SEQ ID NO: 2228223 - DNA, 25 bp, Homo sapien
gatataaagaatgaccggtgcaagg

SEQ ID NO: 2228224 - DNA, 25 bp, Homo sapien
tttccatagaacagaaactaaaata

SEQ ID NO: 2228225 - DNA, 25 bp, Homo sapien
tccatagaacagaaactaaaataac

SEQ ID NO: 2228226 - DNA, 25 bp, Homo sapien
ctttccatagaacagaaactaaaat

SEQ ID NO: 2228227 - DNA, 25 bp, Homo sapien
ttccatagaacagaaactaaaataa

SEQ ID NO: 2228228 - DNA, 25 bp, Homo sapien
tcttctttgtggcagctaggccctg

SEQ ID NO: 2228229 - DNA, 25 bp, Homo sapien
catgtcttctttgtggcagctaggc

SEQ ID NO: 2228230 - DNA, 25 bp, Homo sapien
aaacatgtcttctttgtggcagcta

SEQ ID NO: 2228231 - DNA, 25 bp, Homo sapien
tctttgtggcagctaggccctgcca

SEQ ID NO: 2228232 - DNA, 25 bp, Homo sapien
ctgtgtttggctgagttcatgaatc

SEQ ID NO: 2228233 - DNA, 25 bp, Homo sapien
tgtgtttggctgagttcatgaatct

SEQ ID NO: 2228234 - DNA, 25 bp, Homo sapien
tgtttggctgagttcatgaatctgt

SEQ ID NO: 2228235 - DNA, 25 bp, Homo sapien
cactgtgtttggctgagttcatgaa

SEQ ID NO: 2228236 - DNA, 25 bp, Homo sapien
ccgccatagccactgtggtttggtg

SEQ ID NO: 2228237 - DNA, 25 bp, Homo sapien
ggccagagcgtctgccccaaagttt

SEQ ID NO: 2228238 - DNA, 25 bp, Homo sapien
taagctttgattcccaattaacatc

SEQ ID NO: 2228239 - DNA, 25 bp, Homo sapien
tgctaagctttgattcccaattaac

SEQ ID NO: 2228240 - DNA, 25 bp, Homo sapien
tgattgttgtaattgccaaaatcat

SEQ ID NO: 2228241 - DNA, 25 bp, Homo sapien
ccaaaatcattgtagcttccaccac

SEQ ID NO: 2228242 - DNA, 25 bp, Homo sapien
ttgccaaaatcattgtagcttccac

SEQ ID NO: 2228243 - DNA, 25 bp, Homo sapien
gattgttgtaattgccaaaatcatt

SEQ ID NO: 2228244 - DNA, 25 bp, Homo sapien
tcctgatttccacaaccctgtccac

SEQ ID NO: 2228245 - DNA, 25 bp, Homo sapien
tgtcctgatttccacaaccctgtcc

SEQ ID NO: 2228246 - DNA, 25 bp, Homo sapien
gtcctgatttccacaaccctgtcca

SEQ ID NO: 2228247 - DNA, 25 bp, Homo sapien
cacctccacgaccacttcgacctct

SEQ ID NO: 2228248 - DNA, 25 bp, Homo sapien
aatcacttccatttttccaaactgt

SEQ ID NO: 2228249 - DNA, 25 bp, Homo sapien
tccaaactgttcaaagtaatctctt

SEQ ID NO: 2228250 - DNA, 25 bp, Homo sapien
tcaatcacttccatttttccaaact

SEQ ID NO: 2228251 - DNA, 25 bp, Homo sapien
tttccaaactgttcaaagtaatctc

SEQ ID NO: 2228252 - DNA, 25 bp, Homo sapien
accttgtgtggccttgcgttcgtgg

SEQ ID NO: 2228253 - DNA, 25 bp, Homo sapien
cccacagcccctggagcgcttggtg

SEQ ID NO: 2228254 - DNA, 25 bp, Homo sapien
cagtggcgtatgtgacaaacccaca

SEQ ID NO: 2228255 - DNA, 25 bp, Homo sapien
cttgtgtggccttgcgttcgtggct

SEQ ID NO: 2228256 - DNA, 25 bp, Homo sapien
aagagtctgtccttgcccgtagggc

SEQ ID NO: 2228257 - DNA, 25 bp, Homo sapien
gtctgtccttgcccgtagggctctt

SEQ ID NO: 2228258 - DNA, 25 bp, Homo sapien
gagtctgtccttgcccgtagggctc

SEQ ID NO: 2228259 - DNA, 25 bp, Homo sapien
ctgtccttgcccgtagggctcttac

SEQ ID NO: 2228260 - DNA, 25 bp, Homo sapien
ttagggcgcctacagtgggagtcac

SEQ ID NO: 2228261 - DNA, 25 bp, Homo sapien
tcctctgtttgaccccggacaattc

SEQ ID NO: 2228262 - DNA, 25 bp, Homo sapien
tcaaaagactctgcacacttgcgag

SEQ ID NO: 2228263 - DNA, 25 bp, Homo sapien
gggatgcccttcaaacttagggcgc

SEQ ID NO: 2228264 - DNA, 25 bp, Homo sapien
ggctattgtcatgatcactccagtg

SEQ ID NO: 2228265 - DNA, 25 bp, Homo sapien
ccagcaatgctggtgaatgtcacat

SEQ ID NO: 2228266 - DNA, 25 bp, Homo sapien
aatgccgtgaatccctaagccaagg

SEQ ID NO: 2228267 - DNA, 25 bp, Homo sapien
taactcctccggatgaactcagtag

SEQ ID NO: 2228268 - DNA, 25 bp, Homo sapien
tggcctgtcggcttctgctatagca

SEQ ID NO: 2228269 - DNA, 25 bp, Homo sapien
caaagttaaacaggtgtgcaatgat

SEQ ID NO: 2228270 - DNA, 25 bp, Homo sapien
tggatgggatttagccaagaacccc

SEQ ID NO: 2228271 - DNA, 25 bp, Homo sapien
tatagcagtcaaagttaaacaggtg

SEQ ID NO: 2228272 - DNA, 25 bp, Homo sapien
gtaggcagatcatataggccaccag

SEQ ID NO: 2228273 - DNA, 25 bp, Homo sapien
gaaggtgaggttgtgatccaattgc

SEQ ID NO: 2228274 - DNA, 25 bp, Homo sapien
gctttctcagtgtgcggctgcaaaa

SEQ ID NO: 2228275 - DNA, 25 bp, Homo sapien
ccaattgctttctcagtgtgcggct

SEQ ID NO: 2228276 - DNA, 25 bp, Homo sapien
aaggacagcagattgcgacacacag

SEQ ID NO: 2228277 - DNA, 25 bp, Homo sapien
cacaggaagcaggatcagcgtgctg

SEQ ID NO: 2228278 - DNA, 25 bp, Homo sapien
ttcaagcagagagcagacgctcggg

SEQ ID NO: 2228279 - DNA, 25 bp, Homo sapien
cagacgctcgggcacaggccaatgt

SEQ ID NO: 2228280 - DNA, 25 bp, Homo sapien
tgtgtagtagtatttgtcggccttc

SEQ ID NO: 2228281 - DNA, 25 bp, Homo sapien
tgtagtagtatttgtcggccttctc

SEQ ID NO: 2228282 - DNA, 25 bp, Homo sapien
gaaaacattcagccctaaccaaaca

SEQ ID NO: 2228283 - DNA, 25 bp, Homo sapien
gtgtagtagtatttgtcggccttct

SEQ ID NO: 2228284 - DNA, 25 bp, Homo sapien
cagaaacaaaactgaaaaccagtgg

SEQ ID NO: 2228285 - DNA, 25 bp, Homo sapien
gaagattcagcaatccggattctgg

SEQ ID NO: 2228286 - DNA, 25 bp, Homo sapien
ggtttggagcccttctaggcaacag

SEQ ID NO: 2228287 - DNA, 25 bp, Homo sapien
tcaggaatggaacatttgtccagcg

SEQ ID NO: 2228288 - DNA, 25 bp, Homo sapien
tttgtccagcgcagggtctgtgagc

SEQ ID NO: 2228289 - DNA, 25 bp, Homo sapien
gagttcctgggaatgaataagttta

SEQ ID NO: 2228290 - DNA, 25 bp, Homo sapien
cctaccccaagagttcctgggaatg

SEQ ID NO: 2228291 - DNA, 25 bp, Homo sapien
tgtgaaaaacacacacctaccccaa

SEQ ID NO: 2228292 - DNA, 25 bp, Homo sapien
tccttctctggacagaactgtgcta

SEQ ID NO: 2228293 - DNA, 25 bp, Homo sapien
tctccctgatcacttgtgtctgtcc

SEQ ID NO: 2228294 - DNA, 25 bp, Homo sapien
ctccctgatcacttgtgtctgtcct

SEQ ID NO: 2228295 - DNA, 25 bp, Homo sapien
acctgcatgttgtgtcttctccctg

SEQ ID NO: 2228296 - DNA, 25 bp, Homo sapien
ctgacctgcatgttgtgtcttctcc

SEQ ID NO: 2228297 - DNA, 25 bp, Homo sapien
tgaaaaacaggagtgcattgggcat

SEQ ID NO: 2228298 - DNA, 25 bp, Homo sapien
cacacctaagagaggtaaacttgaa

SEQ ID NO: 2228299 - DNA, 25 bp, Homo sapien
tccattagtgtgttataaggcagaa

SEQ ID NO: 2228300 - DNA, 25 bp, Homo sapien
tcactgagagtagggtccagagaga

SEQ ID NO: 2228301 - DNA, 25 bp, Homo sapien
ttagagtcctcttttgatcattcag

SEQ ID NO: 2228302 - DNA, 25 bp, Homo sapien
catcaaaggttcctgttagagtcct

SEQ ID NO: 2228303 - DNA, 25 bp, Homo sapien
cataagtcatataagagctgggagg

SEQ ID NO: 2228304 - DNA, 25 bp, Homo sapien
caagcttactttcgttattgcagga

SEQ ID NO: 2228305 - DNA, 25 bp, Homo sapien
ctctgatttttgctaccattaagta

SEQ ID NO: 2228306 - DNA, 25 bp, Homo sapien
ctctcttcactctgatttttgctac

SEQ ID NO: 2228307 - DNA, 25 bp, Homo sapien
tcttcactctgatttttgctaccat

SEQ ID NO: 2228308 - DNA, 25 bp, Homo sapien
cactctgatttttgctaccattaag

SEQ ID NO: 2228309 - DNA, 25 bp, Homo sapien
catgattttgcttgggtagtccctt

SEQ ID NO: 2228310 - DNA, 25 bp, Homo sapien
catttttataaccaataattccatg

SEQ ID NO: 2228311 - DNA, 25 bp, Homo sapien
ccaacaatcatttttataaccaata

SEQ ID NO: 2228312 - DNA, 25 bp, Homo sapien
tcaattcaattacaccaaggtttct

SEQ ID NO: 2228313 - DNA, 25 bp, Homo sapien
cacgaatctgttgtaaactgcagct

SEQ ID NO: 2228314 - DNA, 25 bp, Homo sapien
agttcacgaatctgttgtaaactgc

SEQ ID NO: 2228315 - DNA, 25 bp, Homo sapien
gaatctgttgtaaactgcagcttcc

SEQ ID NO: 2228316 - DNA, 25 bp, Homo sapien
tcacgaatctgttgtaaactgcagc

SEQ ID NO: 2228317 - DNA, 25 bp, Homo sapien
caccaccaccatggctgccaccaaa

SEQ ID NO: 2228318 - DNA, 25 bp, Homo sapien
atatccaccaccaccatggctgcca

SEQ ID NO: 2228319 - DNA, 25 bp, Homo sapien
tccaccaccaccatggctgccacca

SEQ ID NO: 2228320 - DNA, 25 bp, Homo sapien
ccaccaccatggctgccaccaaagc

SEQ ID NO: 2228321 - DNA, 25 bp, Homo sapien
ttcccacagaaaccacctccacaac

SEQ ID NO: 2228322 - DNA, 25 bp, Homo sapien
acgaccactgacgtttcctccatga

SEQ ID NO: 2228323 - DNA, 25 bp, Homo sapien
cacgaccactgacgtttcctccatg

SEQ ID NO: 2228324 - DNA, 25 bp, Homo sapien
tcattcccacagaaaccacctccac

SEQ ID NO: 2228325 - DNA, 25 bp, Homo sapien
atttcggaatgacaatcttatccat

SEQ ID NO: 2228326 - DNA, 25 bp, Homo sapien
cggaatgacaatcttatccatggag

SEQ ID NO: 2228327 - DNA, 25 bp, Homo sapien
ggaatgacaatcttatccatggagt

SEQ ID NO: 2228328 - DNA, 25 bp, Homo sapien
ttcggaatgacaatcttatccatgg

SEQ ID NO: 2228329 - DNA, 25 bp, Homo sapien
ctgcctcagtcatgatttcaatcac

SEQ ID NO: 2228330 - DNA, 25 bp, Homo sapien
tcttgccactgcctcagtcatgatt

SEQ ID NO: 2228331 - DNA, 25 bp, Homo sapien
tgccactgcctcagtcatgatttca

SEQ ID NO: 2228332 - DNA, 25 bp, Homo sapien
actgcctcagtcatgatttcaatca

SEQ ID NO: 2228333 - DNA, 25 bp, Homo sapien
atctttttcacagttaagtgggcac

SEQ ID NO: 2228334 - DNA, 25 bp, Homo sapien
ctcttagctgatgtttttcagtgtt

SEQ ID NO: 2228335 - DNA, 25 bp, Homo sapien
tttcagtgttttctttaatgccacc

SEQ ID NO: 2228336 - DNA, 25 bp, Homo sapien
gccaccaacaaatatctttttcaca

SEQ ID NO: 2228337 - DNA, 25 bp, Homo sapien
ctcctccacagtggcgtatgtaaca

SEQ ID NO: 2228338 - DNA, 25 bp, Homo sapien
cccctggagcgcttggtgtttggat

SEQ ID NO: 2228339 - DNA, 25 bp, Homo sapien
acagttctccttggttccacaactt

SEQ ID NO: 2228340 - DNA, 25 bp, Homo sapien
ttccatccaccttgtgtggccttgc

SEQ ID NO: 2228341 - DNA, 25 bp, Homo sapien
tctcgtcggttgtttcaaacctcaa

SEQ ID NO: 2228342 - DNA, 25 bp, Homo sapien
caggctctcgtcggttgtttcaaac

SEQ ID NO: 2228343 - DNA, 25 bp, Homo sapien
aacctcaactctccaatgaagagct

SEQ ID NO: 2228344 - DNA, 25 bp, Homo sapien
caaacctcaactctccaatgaagag

SEQ ID NO: 2228345 - DNA, 25 bp, Homo sapien
tgaggcctagatgccattccagaac

SEQ ID NO: 2228346 - DNA, 25 bp, Homo sapien
tcactagggacatctggcaagctgg

SEQ ID NO: 2228347 - DNA, 25 bp, Homo sapien
ggcaagctggctctttataggatca

SEQ ID NO: 2228348 - DNA, 25 bp, Homo sapien
tataggatcacacaaagtctgaggc

SEQ ID NO: 2228349 - DNA, 25 bp, Homo sapien
ggtcatttcacaatacatacagata

SEQ ID NO: 2228350 - DNA, 25 bp, Homo sapien
taagtacgtgagataattatattta

SEQ ID NO: 2228351 - DNA, 25 bp, Homo sapien
ggcaggggagtaatcagcctcccaa

SEQ ID NO: 2228352 - DNA, 25 bp, Homo sapien
tatttaaattagcttgacttggtca

SEQ ID NO: 2228353 - DNA, 25 bp, Homo sapien
gatataaaatgataccaactgccta

SEQ ID NO: 2228354 - DNA, 25 bp, Homo sapien
taactcacaggtcaaagaataagtc

SEQ ID NO: 2228355 - DNA, 25 bp, Homo sapien
gcattaccgtaataccaagtccaga

SEQ ID NO: 2228356 - DNA, 25 bp, Homo sapien
gacaaatacctctcatgaacatagg

SEQ ID NO: 2228357 - DNA, 25 bp, Homo sapien
tcaacatccctcatcagagtagtgc

SEQ ID NO: 2228358 - DNA, 25 bp, Homo sapien
tatgtaatgatatgtacccaccaat

SEQ ID NO: 2228359 - DNA, 25 bp, Homo sapien
gtaggaagattttccatatatcccc

SEQ ID NO: 2228360 - DNA, 25 bp, Homo sapien
gagccaagacagttctattaaatca

SEQ ID NO: 2228361 - DNA, 25 bp, Homo sapien
cttataaggatccttgggattacac

SEQ ID NO: 2228362 - DNA, 25 bp, Homo sapien
gtcattattcttcccgtcttactct

SEQ ID NO: 2228363 - DNA, 25 bp, Homo sapien
gacatggagatcttaagtaggggta

SEQ ID NO: 2228364 - DNA, 25 bp, Homo sapien
ataaggatccttgggattacaccag

SEQ ID NO: 2228365 - DNA, 25 bp, Homo sapien
tgccactgtaaagagaggtccttgc

SEQ ID NO: 2228366 - DNA, 25 bp, Homo sapien
tattctagcgggattctgggccttc

SEQ ID NO: 2228367 - DNA, 25 bp, Homo sapien
caaatgagcagagctagaaggtcac

SEQ ID NO: 2228368 - DNA, 25 bp, Homo sapien
cagttgcaggttccacattagtcag

SEQ ID NO: 2228369 - DNA, 25 bp, Homo sapien
tctgagttctcaaccctggtccgag

SEQ ID NO: 2228370 - DNA, 25 bp, Homo sapien
gacacaatggaggtagtctactaca

SEQ ID NO: 2228371 - DNA, 25 bp, Homo sapien
gctgcaaggcaatcaaggaatgaca

SEQ ID NO: 2228372 - DNA, 25 bp, Homo sapien
cttgcttcagtctcaaagggtggct

SEQ ID NO: 2228373 - DNA, 25 bp, Homo sapien
gttgagcactaggaagggcacagcc

SEQ ID NO: 2228374 - DNA, 25 bp, Homo sapien
tcaaagtggctgagaagagcaccag

SEQ ID NO: 2228375 - DNA, 25 bp, Homo sapien
gaagtgatctccaatgtccgccaga

SEQ ID NO: 2228376 - DNA, 25 bp, Homo sapien
agaggacttctagtggcccaaggcg

SEQ ID NO: 2228377 - DNA, 25 bp, Homo sapien
tgacagataccagggaaaataccat

SEQ ID NO: 2228378 - DNA, 25 bp, Homo sapien
gtgacagataccagggaaaatacca

SEQ ID NO: 2228379 - DNA, 25 bp, Homo sapien
caaatagcatgcacttgaatagact

SEQ ID NO: 2228380 - DNA, 25 bp, Homo sapien
cagcatggaggttctccaaaaaaat

SEQ ID NO: 2228381 - DNA, 25 bp, Homo sapien
attacaaacagaacggccaaacgat

SEQ ID NO: 2228382 - DNA, 25 bp, Homo sapien
tctccgaaggcggtatacaaacggc

SEQ ID NO: 2228383 - DNA, 25 bp, Homo sapien
aagaccaacagaacttcaagaacaa

SEQ ID NO: 2228384 - DNA, 25 bp, Homo sapien
tcaagaccaacagaacttcaagaac

SEQ ID NO: 2228385 - DNA, 25 bp, Homo sapien
caagaccaacagaacttcaagaaca

SEQ ID NO: 2228386 - DNA, 25 bp, Homo sapien
gaccaacagaacttcaagaacaatt

SEQ ID NO: 2228387 - DNA, 25 bp, Homo sapien
tggtattactagcttcttctgggcc

SEQ ID NO: 2228388 - DNA, 25 bp, Homo sapien
tcttctgggcccagagaaggtttat

SEQ ID NO: 2228389 - DNA, 25 bp, Homo sapien
ctactgactgctggtattactagct

SEQ ID NO: 2228390 - DNA, 25 bp, Homo sapien
gctggtattactagcttcttctggg

SEQ ID NO: 2228391 - DNA, 25 bp, Homo sapien
cctctgcagagatcaggctcacata

SEQ ID NO: 2228392 - DNA, 25 bp, Homo sapien
gatctgtgacatacgtttgtaggca

SEQ ID NO: 2228393 - DNA, 25 bp, Homo sapien
tcctcgccatctattagcatcttct

SEQ ID NO: 2228394 - DNA, 25 bp, Homo sapien
cattgcggtgcatagccagggtccg

SEQ ID NO: 2228395 - DNA, 25 bp, Homo sapien
cataaataatgatagcggtttatct

SEQ ID NO: 2228396 - DNA, 25 bp, Homo sapien
ctgataacaggtcccaagaggatta

SEQ ID NO: 2228397 - DNA, 25 bp, Homo sapien
ttagatgcataaataatgatagcgg

SEQ ID NO: 2228398 - DNA, 25 bp, Homo sapien
gatgcataaataatgatagcggttt

SEQ ID NO: 2228399 - DNA, 25 bp, Homo sapien
catgtacaaagcagatgcagcctcc

SEQ ID NO: 2228400 - DNA, 25 bp, Homo sapien
tgaaaccggatccacatttggctcc

SEQ ID NO: 2228401 - DNA, 25 bp, Homo sapien
cactattctttcgatagattctaac

SEQ ID NO: 2228402 - DNA, 25 bp, Homo sapien
gttggctccacggatgacatcttcc

SEQ ID NO: 2228403 - DNA, 25 bp, Homo sapien
ctttctgaatgttgtggtcttgtgt

SEQ ID NO: 2228404 - DNA, 25 bp, Homo sapien
ctgaatgttgtggtcttgtgttcat

SEQ ID NO: 2228405 - DNA, 25 bp, Homo sapien
gtcgaggttctttctgaatgttgtg

SEQ ID NO: 2228406 - DNA, 25 bp, Homo sapien
tgtcgaggttctttctgaatgttgt

SEQ ID NO: 2228407 - DNA, 25 bp, Homo sapien
tcactagttagagcaagaaaccgct

SEQ ID NO: 2228408 - DNA, 25 bp, Homo sapien
aagagaaccctatggccgctacagt

SEQ ID NO: 2228409 - DNA, 25 bp, Homo sapien
gagctctgtcaagtccagtttggga

SEQ ID NO: 2228410 - DNA, 25 bp, Homo sapien
gaaaccgctctcttctagactcaga

SEQ ID NO: 2228411 - DNA, 25 bp, Homo sapien
acttgactcttgattggccccgatt

SEQ ID NO: 2228412 - DNA, 25 bp, Homo sapien
cagagtccaactccagggacgtgaa

SEQ ID NO: 2228413 - DNA, 25 bp, Homo sapien
catacttgctgtgaaacttgaacaa

SEQ ID NO: 2228414 - DNA, 25 bp, Homo sapien
cgattccaatcgtcaacatacttgc

SEQ ID NO: 2228415 - DNA, 25 bp, Homo sapien
gaccagtgtgtcctctcaagtcagc

SEQ ID NO: 2228416 - DNA, 25 bp, Homo sapien
tagctattgctaggctgtagctatc

SEQ ID NO: 2228417 - DNA, 25 bp, Homo sapien
gggattcagttcagtgcctaggtat

SEQ ID NO: 2228418 - DNA, 25 bp, Homo sapien
tgtcctctcaagtcagcggagagct

SEQ ID NO: 2228419 - DNA, 25 bp, Homo sapien
gcccgggagtggagtattgtcacca

SEQ ID NO: 2228420 - DNA, 25 bp, Homo sapien
ctttgccgagtccagggttctcagg

SEQ ID NO: 2228421 - DNA, 25 bp, Homo sapien
gacagaagcagagcgcgctcgctct

SEQ ID NO: 2228422 - DNA, 25 bp, Homo sapien
caccctgtctccgaatgcagtgttg

SEQ ID NO: 2228423 - DNA, 25 bp, Homo sapien
gctgcgagaggtcggcagcttcaaa

SEQ ID NO: 2228424 - DNA, 25 bp, Homo sapien
ttggacgccgtctgctgccagggtc

SEQ ID NO: 2228425 - DNA, 25 bp, Homo sapien
gaggtcgccaaactcttggacgccg

SEQ ID NO: 2228426 - DNA, 25 bp, Homo sapien
tggtctgcgattccagctgcgagag

SEQ ID NO: 2228427 - DNA, 25 bp, Homo sapien
ggacggctgcggccaaacaaaacca

SEQ ID NO: 2228428 - DNA, 25 bp, Homo sapien
ggcgggcgagatgggcgggacggct

SEQ ID NO: 2228429 - DNA, 25 bp, Homo sapien
aaccagccggagagttcccgggcag

SEQ ID NO: 2228430 - DNA, 25 bp, Homo sapien
tgctcgttgtggagtggcgggacaa

SEQ ID NO: 2228431 - DNA, 25 bp, Homo sapien
gcacctatgctagcagctgggctag

SEQ ID NO: 2228432 - DNA, 25 bp, Homo sapien
gaagcagactccgcatcttggtctg

SEQ ID NO: 2228433 - DNA, 25 bp, Homo sapien
tctgaagcagactccgcatcttggt

SEQ ID NO: 2228434 - DNA, 25 bp, Homo sapien
acctatgctagcagctgggctagga

SEQ ID NO: 2228435 - DNA, 25 bp, Homo sapien
ttgagaacaacttcagagagtgttc

SEQ ID NO: 2228436 - DNA, 25 bp, Homo sapien
gaggtcaacactattgagaacaact

SEQ ID NO: 2228437 - DNA, 25 bp, Homo sapien
aggtcaacactattgagaacaactt

SEQ ID NO: 2228438 - DNA, 25 bp, Homo sapien
ttagcctttcctccttcttctccat

SEQ ID NO: 2228439 - DNA, 25 bp, Homo sapien
tttagcctttcctccttcttctcca

SEQ ID NO: 2228440 - DNA, 25 bp, Homo sapien
caaagtcatgcagtcattaccacaa

SEQ ID NO: 2228441 - DNA, 25 bp, Homo sapien
taccacaacttagtgccggaacatt

SEQ ID NO: 2228442 - DNA, 25 bp, Homo sapien
cctcgcagcactaggcaaccatgaa

SEQ ID NO: 2228443 - DNA, 25 bp, Homo sapien
aataactcatatgccatacaattca

SEQ ID NO: 2228444 - DNA, 25 bp, Homo sapien
tgctgtccagcatatgaaccccttt

SEQ ID NO: 2228445 - DNA, 25 bp, Homo sapien
gctttggctaaaggactcccatcag

SEQ ID NO: 2228446 - DNA, 25 bp, Homo sapien
gaatcttggtgggaagcaggtcccc

SEQ ID NO: 2228447 - DNA, 25 bp, Homo sapien
gctcttaaggaggtcacacagtata

SEQ ID NO: 2228448 - DNA, 25 bp, Homo sapien
tcattcagcaaaaagcctagcactc

SEQ ID NO: 2228449 - DNA, 25 bp, Homo sapien
tagcatccactgaaagctagtagca

SEQ ID NO: 2228450 - DNA, 25 bp, Homo sapien
gctagtagcaatctaaaaaggacaa

SEQ ID NO: 2228451 - DNA, 25 bp, Homo sapien
tcacagattaacacaatcagtggga

SEQ ID NO: 2228452 - DNA, 25 bp, Homo sapien
tgaactactttaacagtcacctaac

SEQ ID NO: 2228453 - DNA, 25 bp, Homo sapien
caaagatactgctattatcacatca

SEQ ID NO: 2228454 - DNA, 25 bp, Homo sapien
ccaccctattgagcttccaaagata

SEQ ID NO: 2228455 - DNA, 25 bp, Homo sapien
gggctcctttctgtctatctaatag

SEQ ID NO: 2228456 - DNA, 25 bp, Homo sapien
ataacccagcagtaatactcctagg

SEQ ID NO: 2228457 - DNA, 25 bp, Homo sapien
taacccagcagtaatactcctaggt

SEQ ID NO: 2228458 - DNA, 25 bp, Homo sapien
tgagcagaatatgtctctcattctc

SEQ ID NO: 2228459 - DNA, 25 bp, Homo sapien
cttttacactgagcagaatatgtct

SEQ ID NO: 2228460 - DNA, 25 bp, Homo sapien
tttaataaccacttttacactgagc

SEQ ID NO: 2228461 - DNA, 25 bp, Homo sapien
catttatgagtttctattgcagctt

SEQ ID NO: 2228462 - DNA, 25 bp, Homo sapien
cgggcggcgctcgccggcgcggcgg

SEQ ID NO: 2228463 - DNA, 25 bp, Homo sapien
gcgctcgccggcgcggcggcaaaga

SEQ ID NO: 2228464 - DNA, 25 bp, Homo sapien
ccgggcggcgctcgccggcgcggcg

SEQ ID NO: 2228465 - DNA, 25 bp, Homo sapien
gcggcgctcgccggcgcggcggcaa

SEQ ID NO: 2228466 - DNA, 25 bp, Homo sapien
tattttactctagggcttccacaaa

SEQ ID NO: 2228467 - DNA, 25 bp, Homo sapien
caattattttactctagggcttcca

SEQ ID NO: 2228468 - DNA, 25 bp, Homo sapien
attattttactctagggcttccaca

SEQ ID NO: 2228469 - DNA, 25 bp, Homo sapien
agttcaattattttactctagggct

SEQ ID NO: 2228470 - DNA, 25 bp, Homo sapien
catgcccgtgtcaggagaattaagt

SEQ ID NO: 2228471 - DNA, 25 bp, Homo sapien
tatcaataagcacaccaatagtggt

SEQ ID NO: 2228472 - DNA, 25 bp, Homo sapien
aaatgttgaagtatatccatgcccg

SEQ ID NO: 2228473 - DNA, 25 bp, Homo sapien
tagtggtagcacacattgttgattc

SEQ ID NO: 2228474 - DNA, 25 bp, Homo sapien
cagggttggtacttacagtcagtca

SEQ ID NO: 2228475 - DNA, 25 bp, Homo sapien
gagatgtggccttaacacctttcca

SEQ ID NO: 2228476 - DNA, 25 bp, Homo sapien
gaattgttgcacactacccctcttg

SEQ ID NO: 2228477 - DNA, 25 bp, Homo sapien
taccatttcaggtttggcactacag

SEQ ID NO: 2228478 - DNA, 25 bp, Homo sapien
agtgcaatagcgcaatctccactca

SEQ ID NO: 2228479 - DNA, 25 bp, Homo sapien
acctcctgggttcaagtgattctcc

SEQ ID NO: 2228480 - DNA, 25 bp, Homo sapien
tgcctgagcctcctgagtagctagg

SEQ ID NO: 2228481 - DNA, 25 bp, Homo sapien
actcactgcaacctccacctcctgg

SEQ ID NO: 2228482 - DNA, 25 bp, Homo sapien
tattgggaaacaggatagtcacatg

SEQ ID NO: 2228483 - DNA, 25 bp, Homo sapien
tcaggaaacagtaatcaacggatgc

SEQ ID NO: 2228484 - DNA, 25 bp, Homo sapien
caacggatgctaaaatctttaggga

SEQ ID NO: 2228485 - DNA, 25 bp, Homo sapien
cacatggcattagagtgacatccga

SEQ ID NO: 2228486 - DNA, 25 bp, Homo sapien
gcaacatgaagtacataccatcact

SEQ ID NO: 2228487 - DNA, 25 bp, Homo sapien
cctttactacaagtgagcaactgaa

SEQ ID NO: 2228488 - DNA, 25 bp, Homo sapien
tctgagggccatcaacctaaccatc

SEQ ID NO: 2228489 - DNA, 25 bp, Homo sapien
tgaaataatgtacctcctaatggga

SEQ ID NO: 2228490 - DNA, 25 bp, Homo sapien
ttccttcatgacactgtttttggga

SEQ ID NO: 2228491 - DNA, 25 bp, Homo sapien
tttaaaactttccttcatgacactg

SEQ ID NO: 2228492 - DNA, 25 bp, Homo sapien
cttcatgacactgtttttgggaaaa

SEQ ID NO: 2228493 - DNA, 25 bp, Homo sapien
gattttaaaactttccttcatgaca

SEQ ID NO: 2228494 - DNA, 25 bp, Homo sapien
agatttggttctctacgttacccag

SEQ ID NO: 2228495 - DNA, 25 bp, Homo sapien
tcaagccactagacctaacttcaag

SEQ ID NO: 2228496 - DNA, 25 bp, Homo sapien
tgcccacagaccacttaagtattct

SEQ ID NO: 2228497 - DNA, 25 bp, Homo sapien
tttaatgtgagtctaatcaagccac

SEQ ID NO: 2228498 - DNA, 25 bp, Homo sapien
gaaaggaatccaatatatctagaga

SEQ ID NO: 2228499 - DNA, 25 bp, Homo sapien
ggaaaagaatattccaagctgagga

SEQ ID NO: 2228500 - DNA, 25 bp, Homo sapien
tctctgagggcataactataaacaa

SEQ ID NO: 2228501 - DNA, 25 bp, Homo sapien
tgttgtggcaatctggaaccaaacc

SEQ ID NO: 2228502 - DNA, 25 bp, Homo sapien
gatatacaaactaaccaattcagag

SEQ ID NO: 2228503 - DNA, 25 bp, Homo sapien
gaaactcaagtaacggcagtggcct

SEQ ID NO: 2228504 - DNA, 25 bp, Homo sapien
ggtgtctttcccatgtagtcctatg

SEQ ID NO: 2228505 - DNA, 25 bp, Homo sapien
tagatagcaagggttcagctggaag

SEQ ID NO: 2228506 - DNA, 25 bp, Homo sapien
cctccacgggtgagagttaattggt

SEQ ID NO: 2228507 - DNA, 25 bp, Homo sapien
ccttagggtctctccaataaccaat

SEQ ID NO: 2228508 - DNA, 25 bp, Homo sapien
ttttggagctttttgcctccacact

SEQ ID NO: 2228509 - DNA, 25 bp, Homo sapien
ttggtgctattgctcctagggataa

SEQ ID NO: 2228510 - DNA, 25 bp, Homo sapien
taaactagaaccaaggctgacagca

SEQ ID NO: 2228511 - DNA, 25 bp, Homo sapien
taagcagaaacggaggagacaagac

SEQ ID NO: 2228512 - DNA, 25 bp, Homo sapien
tgatgatcactcagtcaccctgtat

SEQ ID NO: 2228513 - DNA, 25 bp, Homo sapien
aatctaaggttaagtcagccgcggc

SEQ ID NO: 2228514 - DNA, 25 bp, Homo sapien
cagaccagaggcctaatagattctt

SEQ ID NO: 2228515 - DNA, 25 bp, Homo sapien
tccactgtaatgctcccagggtctg

SEQ ID NO: 2228516 - DNA, 25 bp, Homo sapien
tgcaatgtagcaatatgccaaacct

SEQ ID NO: 2228517 - DNA, 25 bp, Homo sapien
taacaaatagcctgctgtcttctag

SEQ ID NO: 2228518 - DNA, 25 bp, Homo sapien
gagcaccagctcacaatgtggggtg

SEQ ID NO: 2228519 - DNA, 25 bp, Homo sapien
caggacaaagggctcgcctaagagc

SEQ ID NO: 2228520 - DNA, 25 bp, Homo sapien
taagagcttcttagcagggtctgga

SEQ ID NO: 2228521 - DNA, 25 bp, Homo sapien
aggtacagcttgctgcaggacaaag

SEQ ID NO: 2228522 - DNA, 25 bp, Homo sapien
tatcccaaccagcaaagtagaagag

SEQ ID NO: 2228523 - DNA, 25 bp, Homo sapien
tcactgtgtgaacataatagagcat

SEQ ID NO: 2228524 - DNA, 25 bp, Homo sapien
gcctgggtaatattcaatacagtca

SEQ ID NO: 2228525 - DNA, 25 bp, Homo sapien
tatgctatagcctatttctcctcag

SEQ ID NO: 2228526 - DNA, 25 bp, Homo sapien
actgagaatgatgataaatcatgct

SEQ ID NO: 2228527 - DNA, 25 bp, Homo sapien
gcactccagcaagatgagactccgt

SEQ ID NO: 2228528 - DNA, 25 bp, Homo sapien
tgagccgagaccatgccactgcact

SEQ ID NO: 2228529 - DNA, 25 bp, Homo sapien
cactgcactccagcaagatgagact

SEQ ID NO: 2228530 - DNA, 25 bp, Homo sapien
agtgagccgagaccatgccactgca

SEQ ID NO: 2228531 - DNA, 25 bp, Homo sapien
caaaaactagcgtgtggatggccct

SEQ ID NO: 2228532 - DNA, 25 bp, Homo sapien
ggatggccctgaagtttcgaatggc

SEQ ID NO: 2228533 - DNA, 25 bp, Homo sapien
ttcgaatggcttgaatcaccttgta

SEQ ID NO: 2228534 - DNA, 25 bp, Homo sapien
cattcctagtggattcaccatggag

SEQ ID NO: 2228535 - DNA, 25 bp, Homo sapien
gtccggcacgggctgggttcaccac

SEQ ID NO: 2228536 - DNA, 25 bp, Homo sapien
gcagtccggcacgggctgggttcac

SEQ ID NO: 2228537 - DNA, 25 bp, Homo sapien
ctttagcagccctggcaaaatcttc

SEQ ID NO: 2228538 - DNA, 25 bp, Homo sapien
agtccggcacgggctgggttcacca

SEQ ID NO: 2228539 - DNA, 25 bp, Homo sapien
aagcccagcagtaagggaaagcttc

SEQ ID NO: 2228540 - DNA, 25 bp, Homo sapien
ggacataactcaagcccagcagtaa

SEQ ID NO: 2228541 - DNA, 25 bp, Homo sapien
gcccagcagtaagggaaagcttcag

SEQ ID NO: 2228542 - DNA, 25 bp, Homo sapien
gacaggcccacaggacataactcaa

SEQ ID NO: 2228543 - DNA, 25 bp, Homo sapien
catagcacagaaacaactgcatccc

SEQ ID NO: 2228544 - DNA, 25 bp, Homo sapien
gcacagaaacaactgcatcccttaa

SEQ ID NO: 2228545 - DNA, 25 bp, Homo sapien
catcccttaatttctacacagactg

SEQ ID NO: 2228546 - DNA, 25 bp, Homo sapien
cctgtgggtcagggatacagtagtt

SEQ ID NO: 2228547 - DNA, 25 bp, Homo sapien
aaggctgcagtccatcttgcatcct

SEQ ID NO: 2228548 - DNA, 25 bp, Homo sapien
cattgaaggctgcagtccatcttgc

SEQ ID NO: 2228549 - DNA, 25 bp, Homo sapien
tgaaggctgcagtccatcttgcatc

SEQ ID NO: 2228550 - DNA, 25 bp, Homo sapien
attgaaggctgcagtccatcttgca

SEQ ID NO: 2228551 - DNA, 25 bp, Homo sapien
ctgctccaacaattcaatcccaagg

SEQ ID NO: 2228552 - DNA, 25 bp, Homo sapien
caatcccaaggacccgagatgtatg

SEQ ID NO: 2228553 - DNA, 25 bp, Homo sapien
tcaatcccaaggacccgagatgtat

SEQ ID NO: 2228554 - DNA, 25 bp, Homo sapien
caacaattcaatcccaaggacccga

SEQ ID NO: 2228555 - DNA, 25 bp, Homo sapien
tgagccagagagaggccaatcacac

SEQ ID NO: 2228556 - DNA, 25 bp, Homo sapien
ctgagccagagagaggccaatcaca

SEQ ID NO: 2228557 - DNA, 25 bp, Homo sapien
cactaccactacctctccccgacca

SEQ ID NO: 2228558 - DNA, 25 bp, Homo sapien
caccactaccactacctctccccga

SEQ ID NO: 2228559 - DNA, 25 bp, Homo sapien
ctccgcaagctacaagggccttggg

SEQ ID NO: 2228560 - DNA, 25 bp, Homo sapien
ctgagcagcatgcagattctgccct

SEQ ID NO: 2228561 - DNA, 25 bp, Homo sapien
cagcatgcagattctgccctgggct

SEQ ID NO: 2228562 - DNA, 25 bp, Homo sapien
cgcaagctacaagggccttgggagc

SEQ ID NO: 2228563 - DNA, 25 bp, Homo sapien
tcttcaaagatgtagggttccccaa

SEQ ID NO: 2228564 - DNA, 25 bp, Homo sapien
aaggatggtgtcagagttcactcca

SEQ ID NO: 2228565 - DNA, 25 bp, Homo sapien
ccacagtccgatacagcatctctgc

SEQ ID NO: 2228566 - DNA, 25 bp, Homo sapien
ggagagatgcggatcttcaagctca

SEQ ID NO: 2228567 - DNA, 25 bp, Homo sapien
tgctgatggctgcaacgggtcatgg

SEQ ID NO: 2228568 - DNA, 25 bp, Homo sapien
ctgatggctgcaacgggtcatggta

SEQ ID NO: 2228569 - DNA, 25 bp, Homo sapien
ctgctgatggctgcaacgggtcatg

SEQ ID NO: 2228570 - DNA, 25 bp, Homo sapien
gctgatggctgcaacgggtcatggt

SEQ ID NO: 2228571 - DNA, 25 bp, Homo sapien
tttcctggaagtaaagtgaggtcaa

SEQ ID NO: 2228572 - DNA, 25 bp, Homo sapien
ctggaagtaaagtgaggtcaagcca

SEQ ID NO: 2228573 - DNA, 25 bp, Homo sapien
cctggaagtaaagtgaggtcaagcc

SEQ ID NO: 2228574 - DNA, 25 bp, Homo sapien
tcctggaagtaaagtgaggtcaagc

SEQ ID NO: 2228575 - DNA, 25 bp, Homo sapien
tcatgaaatacaaggcagggctcca

SEQ ID NO: 2228576 - DNA, 25 bp, Homo sapien
cacgccagtatccaccttcatgaaa

SEQ ID NO: 2228577 - DNA, 25 bp, Homo sapien
ccttggctattggtgcggactgtga

SEQ ID NO: 2228578 - DNA, 25 bp, Homo sapien
aagtgatgatagccattgtgtgccc

SEQ ID NO: 2228579 - DNA, 25 bp, Homo sapien
agagcacatagaaaatgagggagag

SEQ ID NO: 2228580 - DNA, 25 bp, Homo sapien
caaatctaataggaagaatagagag

SEQ ID NO: 2228581 - DNA, 25 bp, Homo sapien
aaatctaataggaagaatagagagc

SEQ ID NO: 2228582 - DNA, 25 bp, Homo sapien
gagagcacatagaaaatgagggaga

SEQ ID NO: 2228583 - DNA, 25 bp, Homo sapien
tagacttgattttggaacctagtaa

SEQ ID NO: 2228584 - DNA, 25 bp, Homo sapien
cagagtggaattatttcaagggaca

SEQ ID NO: 2228585 - DNA, 25 bp, Homo sapien
caagggacacagtaatttgacataa

SEQ ID NO: 2228586 - DNA, 25 bp, Homo sapien
gtgtatcaagtatccagttagtggc

SEQ ID NO: 2228587 - DNA, 25 bp, Homo sapien
agtgtctcagaggtcaggcacggta

SEQ ID NO: 2228588 - DNA, 25 bp, Homo sapien
aaaaaataagtgtctcagaggtcag

SEQ ID NO: 2228589 - DNA, 25 bp, Homo sapien
ccagcatactctgggatacagaagg

SEQ ID NO: 2228590 - DNA, 25 bp, Homo sapien
aatcccagcatactctgggatacag

SEQ ID NO: 2228591 - DNA, 25 bp, Homo sapien
gtttttcagatgattagactgcaca

SEQ ID NO: 2228592 - DNA, 25 bp, Homo sapien
tagactgcacacagacaacgttccc

SEQ ID NO: 2228593 - DNA, 25 bp, Homo sapien
ctgcgccacttgactgtgtttctca

SEQ ID NO: 2228594 - DNA, 25 bp, Homo sapien
cagatgattagactgcacacagaca

SEQ ID NO: 2228595 - DNA, 25 bp, Homo sapien
ctggacctcggttcacagagaaggt

SEQ ID NO: 2228596 - DNA, 25 bp, Homo sapien
ccaggtagaaccccacagtctttgg

SEQ ID NO: 2228597 - DNA, 25 bp, Homo sapien
cccaggtagaaccccacagtctttg

SEQ ID NO: 2228598 - DNA, 25 bp, Homo sapien
ttatttcggtaaccattgatgacag

SEQ ID NO: 2228599 - DNA, 25 bp, Homo sapien
cttatttcggtaaccattgatgaca

SEQ ID NO: 2228600 - DNA, 25 bp, Homo sapien
tatttcggtaaccattgatgacagg

SEQ ID NO: 2228601 - DNA, 25 bp, Homo sapien
caaactacttatgtcaagagccaaa

SEQ ID NO: 2228602 - DNA, 25 bp, Homo sapien
ggcatatgtgaaagtctgtggctaa

SEQ ID NO: 2228603 - DNA, 25 bp, Homo sapien
gtggctaagaagatcaagacagtcc

SEQ ID NO: 2228604 - DNA, 25 bp, Homo sapien
aaagctgtagtctgctaacccctgc

SEQ ID NO: 2228605 - DNA, 25 bp, Homo sapien
agagagcctctcagatttgggtaca

SEQ ID NO: 2228606 - DNA, 25 bp, Homo sapien
ttggatgtaagactctagtctttgt

SEQ ID NO: 2228607 - DNA, 25 bp, Homo sapien
cagccgttgtcacactgactccatt

SEQ ID NO: 2228608 - DNA, 25 bp, Homo sapien
caagagagcctctcagatttgggta

SEQ ID NO: 2228609 - DNA, 25 bp, Homo sapien
tccagagtggtgtcacaacatcagc

SEQ ID NO: 2228610 - DNA, 25 bp, Homo sapien
cagagtggtgtcacaacatcagcca

SEQ ID NO: 2228611 - DNA, 25 bp, Homo sapien
gttcttcatagctcaacctccagag

SEQ ID NO: 2228612 - DNA, 25 bp, Homo sapien
ttcttcatagctcaacctccagagt

SEQ ID NO: 2228613 - DNA, 25 bp, Homo sapien
gctacattagttacactaggaatac

SEQ ID NO: 2228614 - DNA, 25 bp, Homo sapien
caaatccttgtaatgctacattagt

SEQ ID NO: 2228615 - DNA, 25 bp, Homo sapien
tacactaggaatacagaatttcagc

SEQ ID NO: 2228616 - DNA, 25 bp, Homo sapien
aggtggcccctcaaatccttgtaat

SEQ ID NO: 2228617 - DNA, 25 bp, Homo sapien
catttcgtggctatcacacgggtga

SEQ ID NO: 2228618 - DNA, 25 bp, Homo sapien
tgaaatctcccttacatactgtgcc

SEQ ID NO: 2228619 - DNA, 25 bp, Homo sapien
tctggcataccagggaagcagtcct

SEQ ID NO: 2228620 - DNA, 25 bp, Homo sapien
ccagaaagagctgtgaccatcctgg

SEQ ID NO: 2228621 - DNA, 25 bp, Homo sapien
tgtgcagtgggactcttctcttaag

SEQ ID NO: 2228622 - DNA, 25 bp, Homo sapien
ctgtgcagtgggactcttctcttaa

SEQ ID NO: 2228623 - DNA, 25 bp, Homo sapien
cagtgggactcttctcttaaggcct

SEQ ID NO: 2228624 - DNA, 25 bp, Homo sapien
tgcagtgggactcttctcttaaggc

SEQ ID NO: 2228625 - DNA, 25 bp, Homo sapien
gagtccagagtagcccaaataggaa

SEQ ID NO: 2228626 - DNA, 25 bp, Homo sapien
caggctaactctcctgtgctcagag

SEQ ID NO: 2228627 - DNA, 25 bp, Homo sapien
tgcctcaggaattgatcaggaagag

SEQ ID NO: 2228628 - DNA, 25 bp, Homo sapien
tcagagaggttcaaatcaaagagac

SEQ ID NO: 2228629 - DNA, 25 bp, Homo sapien
ggccaaggatcccttttggagcaaa

SEQ ID NO: 2228630 - DNA, 25 bp, Homo sapien
gaccggctccagacactattccttg

SEQ ID NO: 2228631 - DNA, 25 bp, Homo sapien
agctggaccggctccagacactatt

SEQ ID NO: 2228632 - DNA, 25 bp, Homo sapien
atgttcacccaccgacaagggtcct

SEQ ID NO: 2228633 - DNA, 25 bp, Homo sapien
tcttctttaggcaagttctgcccac

SEQ ID NO: 2228634 - DNA, 25 bp, Homo sapien
ccaaacaagcaaatgggttgactgc

SEQ ID NO: 2228635 - DNA, 25 bp, Homo sapien
tgactgctgtgtcgtgtcccgaatg

SEQ ID NO: 2228636 - DNA, 25 bp, Homo sapien
accactaaacttggccggtctgcag

SEQ ID NO: 2228637 - DNA, 25 bp, Homo sapien
cccgcggacagtttggcatagtagg

SEQ ID NO: 2228638 - DNA, 25 bp, Homo sapien
gacagtttggcatagtagggagttt

SEQ ID NO: 2228639 - DNA, 25 bp, Homo sapien
ccgccccgcggacagtttggcatag

SEQ ID NO: 2228640 - DNA, 25 bp, Homo sapien
gccccgcggacagtttggcatagta

SEQ ID NO: 2228641 - DNA, 25 bp, Homo sapien
tcaggttttccgggctatttatcca

SEQ ID NO: 2228642 - DNA, 25 bp, Homo sapien
tcgtaaccaataaatcctcttacaa

SEQ ID NO: 2228643 - DNA, 25 bp, Homo sapien
ttcgtaaccaataaatcctcttaca

SEQ ID NO: 2228644 - DNA, 25 bp, Homo sapien
gaaccttctatggagaccttcctta

SEQ ID NO: 2228645 - DNA, 25 bp, Homo sapien
taaaagcactcatagccctgacacc

SEQ ID NO: 2228646 - DNA, 25 bp, Homo sapien
ttcctggtgcgcaaggcgcctctac

SEQ ID NO: 2228647 - DNA, 25 bp, Homo sapien
ggcaaactaaaaggccagcggatgg

SEQ ID NO: 2228648 - DNA, 25 bp, Homo sapien
cacttggatgccttagaggtacttc

SEQ ID NO: 2228649 - DNA, 25 bp, Homo sapien
tgtatataccctccctgggcatact

SEQ ID NO: 2228650 - DNA, 25 bp, Homo sapien
tccaatgagacaccaagttctgtag

SEQ ID NO: 2228651 - DNA, 25 bp, Homo sapien
catacttagagaatggtaacaccta

SEQ ID NO: 2228652 - DNA, 25 bp, Homo sapien
tcagtcctgttagaagtctgtgagc

SEQ ID NO: 2228653 - DNA, 25 bp, Homo sapien
gccaaccaggatttggcagctgctc

SEQ ID NO: 2228654 - DNA, 25 bp, Homo sapien
cagagttccaagtctcccctagggt

SEQ ID NO: 2228655 - DNA, 25 bp, Homo sapien
gctccactgttacggttgagggaac

SEQ ID NO: 2228656 - DNA, 25 bp, Homo sapien
gcttctttgaattccggaggcggca

SEQ ID NO: 2228657 - DNA, 25 bp, Homo sapien
tttccgtagccagtttcgcaccagg

SEQ ID NO: 2228658 - DNA, 25 bp, Homo sapien
taattggttctacgccagcgtcgtc

SEQ ID NO: 2228659 - DNA, 25 bp, Homo sapien
tacttttaagcaccgcgcgaaatgg

SEQ ID NO: 2228660 - DNA, 25 bp, Homo sapien
cagggaggtgggattgagtaagtgt

SEQ ID NO: 2228661 - DNA, 25 bp, Homo sapien
ctgtaacgtcccactggtttggaca

SEQ ID NO: 2228662 - DNA, 25 bp, Homo sapien
ggaggtgggattgagtaagtgtcat

SEQ ID NO: 2228663 - DNA, 25 bp, Homo sapien
actggtttggacatattcctctcct

SEQ ID NO: 2228664 - DNA, 25 bp, Homo sapien
gcttgcttttggacatgaccttccg

SEQ ID NO: 2228665 - DNA, 25 bp, Homo sapien
tttggacatgaccttccgatatggg

SEQ ID NO: 2228666 - DNA, 25 bp, Homo sapien
tatggggccatggtagctgtgtttt

SEQ ID NO: 2228667 - DNA, 25 bp, Homo sapien
gaaatgtggcttgcttttggacatg

SEQ ID NO: 2228668 - DNA, 25 bp, Homo sapien
tgattctcatgccttcacctctcaa

SEQ ID NO: 2228669 - DNA, 25 bp, Homo sapien
tctcatgccttcacctctcaaatag

SEQ ID NO: 2228670 - DNA, 25 bp, Homo sapien
ttgcgccaccaagcccatctaatat

SEQ ID NO: 2228671 - DNA, 25 bp, Homo sapien
gattctcatgccttcacctctcaaa

SEQ ID NO: 2228672 - DNA, 25 bp, Homo sapien
taaaaaaggatgacacactgtatgg

SEQ ID NO: 2228673 - DNA, 25 bp, Homo sapien
tgaacagttgattccatagacatga

SEQ ID NO: 2228674 - DNA, 25 bp, Homo sapien
tggatttagatttcagccccttctg

SEQ ID NO: 2228675 - DNA, 25 bp, Homo sapien
gcttcttgaagtaaaaaaggatgac

SEQ ID NO: 2228676 - DNA, 25 bp, Homo sapien
taggtattctgctcgatgctccaga

SEQ ID NO: 2228677 - DNA, 25 bp, Homo sapien
tattctgctcgatgctccagatgac

SEQ ID NO: 2228678 - DNA, 25 bp, Homo sapien
ggtgtaggtattctgctcgatgctc

SEQ ID NO: 2228679 - DNA, 25 bp, Homo sapien
tctgctcgatgctccagatgacgcc

SEQ ID NO: 2228680 - DNA, 25 bp, Homo sapien
tcgtagcgctcggccaacttggcct

SEQ ID NO: 2228681 - DNA, 25 bp, Homo sapien
tagcgctcggccaacttggccttct

SEQ ID NO: 2228682 - DNA, 25 bp, Homo sapien
gtagcgctcggccaacttggccttc

SEQ ID NO: 2228683 - DNA, 25 bp, Homo sapien
cgtagcgctcggccaacttggcctt

SEQ ID NO: 2228684 - DNA, 25 bp, Homo sapien
gcatcatacatcatattgaatcttt

SEQ ID NO: 2228685 - DNA, 25 bp, Homo sapien
tacatcatattgaatctttccttct

SEQ ID NO: 2228686 - DNA, 25 bp, Homo sapien
catcatacatcatattgaatctttc

SEQ ID NO: 2228687 - DNA, 25 bp, Homo sapien
atacatcatattgaatctttccttc

SEQ ID NO: 2228688 - DNA, 25 bp, Homo sapien
cactgagttgcgagttgctctggaa

SEQ ID NO: 2228689 - DNA, 25 bp, Homo sapien
agacccactgagttgcgagttgctc

SEQ ID NO: 2228690 - DNA, 25 bp, Homo sapien
tggaaacctggctgaagccaccctt

SEQ ID NO: 2228691 - DNA, 25 bp, Homo sapien
gttgcgagttgctctggaaacctgg

SEQ ID NO: 2228692 - DNA, 25 bp, Homo sapien
tattgaggcctgaccgaagtctggt

SEQ ID NO: 2228693 - DNA, 25 bp, Homo sapien
cagggctcagctcgcagagtccatc

SEQ ID NO: 2228694 - DNA, 25 bp, Homo sapien
tgctggctacaagaactggtcacag

SEQ ID NO: 2228695 - DNA, 25 bp, Homo sapien
gctgtcccctatggcagtattgagg

SEQ ID NO: 2228696 - DNA, 25 bp, Homo sapien
tactctctgagtctgatatttcata

SEQ ID NO: 2228697 - DNA, 25 bp, Homo sapien
ctgtaaaacataaggctaccagatg

SEQ ID NO: 2228698 - DNA, 25 bp, Homo sapien
taaggctaccagatgagtccaacac

SEQ ID NO: 2228699 - DNA, 25 bp, Homo sapien
tactttggttcctctggttatactc

SEQ ID NO: 2228700 - DNA, 25 bp, Homo sapien
catggctgaataatctgctggtacc

SEQ ID NO: 2228701 - DNA, 25 bp, Homo sapien
aatccaaggtttgtgggccacgcca

SEQ ID NO: 2228702 - DNA, 25 bp, Homo sapien
caacataaggcaactgaagggacaa

SEQ ID NO: 2228703 - DNA, 25 bp, Homo sapien
gctagactgcctttagaagcatggc

SEQ ID NO: 2228704 - DNA, 25 bp, Homo sapien
ttcttcagaaaacgctgcaactgtt

SEQ ID NO: 2228705 - DNA, 25 bp, Homo sapien
tcttcagaaaacgctgcaactgttc

SEQ ID NO: 2228706 - DNA, 25 bp, Homo sapien
cacttcttcagaaaacgctgcaact

SEQ ID NO: 2228707 - DNA, 25 bp, Homo sapien
gctgctccagcacagactgaaaatg

SEQ ID NO: 2228708 - DNA, 25 bp, Homo sapien
gtttttcctgtaactcaagctgctc

SEQ ID NO: 2228709 - DNA, 25 bp, Homo sapien
ttgtttttcctgtaactcaagctgc

SEQ ID NO: 2228710 - DNA, 25 bp, Homo sapien
gctccagcacagactgaaaatgatt

SEQ ID NO: 2228711 - DNA, 25 bp, Homo sapien
atgatgagatccttctgtctttgtg

SEQ ID NO: 2228712 - DNA, 25 bp, Homo sapien
cttgagtgtcaggttttccactttc

SEQ ID NO: 2228713 - DNA, 25 bp, Homo sapien
ccactttcatgatgagatccttctg

SEQ ID NO: 2228714 - DNA, 25 bp, Homo sapien
tcatgatgagatccttctgtctttg

SEQ ID NO: 2228715 - DNA, 25 bp, Homo sapien
tgaatcttatggagctttttctcct

SEQ ID NO: 2228716 - DNA, 25 bp, Homo sapien
ctgaatcttatggagctttttctcc

SEQ ID NO: 2228717 - DNA, 25 bp, Homo sapien
tattctgaatcttatggagcttttt

SEQ ID NO: 2228718 - DNA, 25 bp, Homo sapien
tctgaatcttatggagctttttctc

SEQ ID NO: 2228719 - DNA, 25 bp, Homo sapien
catttgccctatactggccagattc

SEQ ID NO: 2228720 - DNA, 25 bp, Homo sapien
tccagatactcttcagaacaatctt

SEQ ID NO: 2228721 - DNA, 25 bp, Homo sapien
gattcaataaactcggcctgcagct

SEQ ID NO: 2228722 - DNA, 25 bp, Homo sapien
ctattgaactggtaccttcatttgc

SEQ ID NO: 2228723 - DNA, 25 bp, Homo sapien
gaacatctcccgaagcatatcatat

SEQ ID NO: 2228724 - DNA, 25 bp, Homo sapien
ttctagaatcactgaacatctcccg

SEQ ID NO: 2228725 - DNA, 25 bp, Homo sapien
ttgttacttctagaatcactgaaca

SEQ ID NO: 2228726 - DNA, 25 bp, Homo sapien
gaatcactgaacatctcccgaagca

SEQ ID NO: 2228727 - DNA, 25 bp, Homo sapien
tgatctgatacccagtcaatacctg

SEQ ID NO: 2228728 - DNA, 25 bp, Homo sapien
aaaatgatctgatacccagtcaata

SEQ ID NO: 2228729 - DNA, 25 bp, Homo sapien
cagtcaatacctgccctatctgaaa

SEQ ID NO: 2228730 - DNA, 25 bp, Homo sapien
atacctgccctatctgaaactcctg

SEQ ID NO: 2228731 - DNA, 25 bp, Homo sapien
ctgacgaggtatgaccctgcttgtg

SEQ ID NO: 2228732 - DNA, 25 bp, Homo sapien
tcctgggatggagccttgactttct

SEQ ID NO: 2228733 - DNA, 25 bp, Homo sapien
tcccgaggatatcaaaaatcctggg

SEQ ID NO: 2228734 - DNA, 25 bp, Homo sapien
gcttgtggctgctcattcccgagga

SEQ ID NO: 2228735 - DNA, 25 bp, Homo sapien
agtgggtagtcaaggaaaacacaga

SEQ ID NO: 2228736 - DNA, 25 bp, Homo sapien
gagtgggtagtcaaggaaaacacag

SEQ ID NO: 2228737 - DNA, 25 bp, Homo sapien
ggagtgggtagtcaaggaaaacaca

SEQ ID NO: 2228738 - DNA, 25 bp, Homo sapien
tggggcagaacagactatgcagaaa

SEQ ID NO: 2228739 - DNA, 25 bp, Homo sapien
actggcacacaaacaccagaggtga

SEQ ID NO: 2228740 - DNA, 25 bp, Homo sapien
ggcttcgtcagcatgtacaaatggg

SEQ ID NO: 2228741 - DNA, 25 bp, Homo sapien
ccagaggtgaggcttcgtcagcatg

SEQ ID NO: 2228742 - DNA, 25 bp, Homo sapien
cttcattttccacgtctggagattc

SEQ ID NO: 2228743 - DNA, 25 bp, Homo sapien
tccgaacgcagcagtctctttactt

SEQ ID NO: 2228744 - DNA, 25 bp, Homo sapien
gcttcagcatccgaacgcagcagtc

SEQ ID NO: 2228745 - DNA, 25 bp, Homo sapien
tttccacgtctggagattcaatgta

SEQ ID NO: 2228746 - DNA, 25 bp, Homo sapien
tttccatttctttgacatcagggac

SEQ ID NO: 2228747 - DNA, 25 bp, Homo sapien
cttttttccatttctttgacatcag

SEQ ID NO: 2228748 - DNA, 25 bp, Homo sapien
tttttccatttctttgacatcaggg

SEQ ID NO: 2228749 - DNA, 25 bp, Homo sapien
ctcagtaaagctgcttttttccatt

SEQ ID NO: 2228750 - DNA, 25 bp, Homo sapien
ctgacattcttaagtggtggcgtaa

SEQ ID NO: 2228751 - DNA, 25 bp, Homo sapien
tctgacattcttaagtggtggcgta

SEQ ID NO: 2228752 - DNA, 25 bp, Homo sapien
tatattaggatcagtagaggcagct

SEQ ID NO: 2228753 - DNA, 25 bp, Homo sapien
tcaccatcagcagtgcacacaagca

SEQ ID NO: 2228754 - DNA, 25 bp, Homo sapien
aaaggtggatatcaccatcagcagt

SEQ ID NO: 2228755 - DNA, 25 bp, Homo sapien
tattaggatcagtagaggcagctgg

SEQ ID NO: 2228756 - DNA, 25 bp, Homo sapien
gtgggacatcttctacttcaacaac

SEQ ID NO: 2228757 - DNA, 25 bp, Homo sapien
ttttatcaagcgttctcaggctttc

SEQ ID NO: 2228758 - DNA, 25 bp, Homo sapien
cacaaggcaagtcaaccagcttagc

SEQ ID NO: 2228759 - DNA, 25 bp, Homo sapien
tcaggctttcaataacacaaggcaa

SEQ ID NO: 2228760 - DNA, 25 bp, Homo sapien
agttgatatcttcccagtgaactct

SEQ ID NO: 2228761 - DNA, 25 bp, Homo sapien
ttaaagttgatatcttcccagtgaa

SEQ ID NO: 2228762 - DNA, 25 bp, Homo sapien
taaagattaaagttgatatcttccc

SEQ ID NO: 2228763 - DNA, 25 bp, Homo sapien
tcttcccagtgaactcttaaacttc

SEQ ID NO: 2228764 - DNA, 25 bp, Homo sapien
cgtgctaggttcctgacagtacaag

SEQ ID NO: 2228765 - DNA, 25 bp, Homo sapien
gagaacgtgctaggttcctgacagt

SEQ ID NO: 2228766 - DNA, 25 bp, Homo sapien
ggttcctgacagtacaagcatgttc

SEQ ID NO: 2228767 - DNA, 25 bp, Homo sapien
tcatcttgacactttgagaacgtgc

SEQ ID NO: 2228768 - DNA, 25 bp, Homo sapien
ttcatcaggaacttcatcctggctt

SEQ ID NO: 2228769 - DNA, 25 bp, Homo sapien
ctggttctcaacttcatcaggaact

SEQ ID NO: 2228770 - DNA, 25 bp, Homo sapien
ttctcaacttcatcaggaacttcat

SEQ ID NO: 2228771 - DNA, 25 bp, Homo sapien
acttcatcaggaacttcatcctggc

SEQ ID NO: 2228772 - DNA, 25 bp, Homo sapien
tcctcactagaatgatgtgtgtaca

SEQ ID NO: 2228773 - DNA, 25 bp, Homo sapien
ttctagacgttaccttagctcctct

SEQ ID NO: 2228774 - DNA, 25 bp, Homo sapien
gaccacttctggtagtactggctaa

SEQ ID NO: 2228775 - DNA, 25 bp, Homo sapien
tagctcctctccaatatgtgtagat

SEQ ID NO: 2228776 - DNA, 25 bp, Homo sapien
aagttgtgataatatcccactacta

SEQ ID NO: 2228777 - DNA, 25 bp, Homo sapien
gtgataatatcccactactattgga

SEQ ID NO: 2228778 - DNA, 25 bp, Homo sapien
ttgtgataatatcccactactattg

SEQ ID NO: 2228779 - DNA, 25 bp, Homo sapien
gttgtgataatatcccactactatt

SEQ ID NO: 2228780 - DNA, 25 bp, Homo sapien
ccgctcctccgggaactggcgccga

SEQ ID NO: 2228781 - DNA, 25 bp, Homo sapien
tggcgccgacaccgaaaaggctggg

SEQ ID NO: 2228782 - DNA, 25 bp, Homo sapien
tcctccgggaactggcgccgacacc

SEQ ID NO: 2228783 - DNA, 25 bp, Homo sapien
gcgccgacaccgaaaaggctgggac

SEQ ID NO: 2228784 - DNA, 25 bp, Homo sapien
ctgtgggttccggacgaaccgcgcg

SEQ ID NO: 2228785 - DNA, 25 bp, Homo sapien
tgggctcccgcgcggaacgtagagg

SEQ ID NO: 2228786 - DNA, 25 bp, Homo sapien
gcggaacgtagaggcgaacgctggg

SEQ ID NO: 2228787 - DNA, 25 bp, Homo sapien
tcccgcgcggaacgtagaggcgaac

SEQ ID NO: 2228788 - DNA, 25 bp, Homo sapien
caatgtcggcgctgctttcataggt

SEQ ID NO: 2228789 - DNA, 25 bp, Homo sapien
tccgcatccgtttgagtgtcctcgt

SEQ ID NO: 2228790 - DNA, 25 bp, Homo sapien
taggtggtttcagacccacggtcga

SEQ ID NO: 2228791 - DNA, 25 bp, Homo sapien
gaatctgggtgccttcgtcgccagc

SEQ ID NO: 2228792 - DNA, 25 bp, Homo sapien
ttttgatgaggcatgtagtgcataa

SEQ ID NO: 2228793 - DNA, 25 bp, Homo sapien
gtgtatgtgcgtacatagtagatgt

SEQ ID NO: 2228794 - DNA, 25 bp, Homo sapien
taacataatcacctccaggtacatc

SEQ ID NO: 2228795 - DNA, 25 bp, Homo sapien
cctaccaccccgttcccagcctctg

SEQ ID NO: 2228796 - DNA, 25 bp, Homo sapien
tttgtagatggtgacagatagggac

SEQ ID NO: 2228797 - DNA, 25 bp, Homo sapien
tgacagatagggacctaatttcatt

SEQ ID NO: 2228798 - DNA, 25 bp, Homo sapien
tcatggtttgaggtattggatttaa

SEQ ID NO: 2228799 - DNA, 25 bp, Homo sapien
tggtttgaggtattggatttaagtc

SEQ ID NO: 2228800 - DNA, 25 bp, Homo sapien
tctagtaactttggattttgtttgc

SEQ ID NO: 2228801 - DNA, 25 bp, Homo sapien
tctataagattcatggttagattat

SEQ ID NO: 2228802 - DNA, 25 bp, Homo sapien
ttagttctctagttctataagattc

SEQ ID NO: 2228803 - DNA, 25 bp, Homo sapien
taagattcatggttagattatttat

SEQ ID NO: 2228804 - DNA, 25 bp, Homo sapien
tagttctctagttctataagattca

SEQ ID NO: 2228805 - DNA, 25 bp, Homo sapien
tgtccaatgctgaaaatgggatatt

SEQ ID NO: 2228806 - DNA, 25 bp, Homo sapien
gggatattgaagacatgattgtgcc

SEQ ID NO: 2228807 - DNA, 25 bp, Homo sapien
tgtatagtttctaaaatccctctcg

SEQ ID NO: 2228808 - DNA, 25 bp, Homo sapien
aaatccctctcgttattgatttcta

SEQ ID NO: 2228809 - DNA, 25 bp, Homo sapien
tactacatggaaatgactgcactcc

SEQ ID NO: 2228810 - DNA, 25 bp, Homo sapien
catgacatatattcgctgagcaagc

SEQ ID NO: 2228811 - DNA, 25 bp, Homo sapien
ggcttccagatactaaccaccagag

SEQ ID NO: 2228812 - DNA, 25 bp, Homo sapien
caacacaacagtaggaaggcttcca

SEQ ID NO: 2228813 - DNA, 25 bp, Homo sapien
agcaatcctcccacttcagcctccc

SEQ ID NO: 2228814 - DNA, 25 bp, Homo sapien
atggggtcttggcatgttgcctagg

SEQ ID NO: 2228815 - DNA, 25 bp, Homo sapien
tcctcccacttcagcctcccaaagt

SEQ ID NO: 2228816 - DNA, 25 bp, Homo sapien
gatggggtcttggcatgttgcctag

SEQ ID NO: 2228817 - DNA, 25 bp, Homo sapien
tactccagctataatgacctcttga

SEQ ID NO: 2228818 - DNA, 25 bp, Homo sapien
gacttactgttattcctgcctgaaa

SEQ ID NO: 2228819 - DNA, 25 bp, Homo sapien
gacctcttgactgttctccacggca

SEQ ID NO: 2228820 - DNA, 25 bp, Homo sapien
gtctcagacacccacaaggttttgt

SEQ ID NO: 2228821 - DNA, 25 bp, Homo sapien
aaacacaaggatctcccctgaaatc

SEQ ID NO: 2228822 - DNA, 25 bp, Homo sapien
taaaggcctctagactctcaggctg

SEQ ID NO: 2228823 - DNA, 25 bp, Homo sapien
tcatcatataggaaagggagatcaa

SEQ ID NO: 2228824 - DNA, 25 bp, Homo sapien
gagatttttacgtatgtggtcccac

SEQ ID NO: 2228825 - DNA, 25 bp, Homo sapien
gatgaactggcttgtatcaatgaag

SEQ ID NO: 2228826 - DNA, 25 bp, Homo sapien
agcccgactgtccaactttggccca

SEQ ID NO: 2228827 - DNA, 25 bp, Homo sapien
ctcagcccgactgtccaactttggc

SEQ ID NO: 2228828 - DNA, 25 bp, Homo sapien
ggcccaggcttgtccatgcacttct

SEQ ID NO: 2228829 - DNA, 25 bp, Homo sapien
cccgactgtccaactttggcccagg

SEQ ID NO: 2228830 - DNA, 25 bp, Homo sapien
cgcgccgggcagcttacagattctt

SEQ ID NO: 2228831 - DNA, 25 bp, Homo sapien
taatgaaggtaaatcccgaggagtc

SEQ ID NO: 2228832 - DNA, 25 bp, Homo sapien
gaatcaaagcactctggtccaaggc

SEQ ID NO: 2228833 - DNA, 25 bp, Homo sapien
tgtccttggcaagcagaacacgttg

SEQ ID NO: 2228834 - DNA, 25 bp, Homo sapien
aaatcaagggttgctgccaggtgcc

SEQ ID NO: 2228835 - DNA, 25 bp, Homo sapien
gaatccccgacgttgtcgcgagtcc

SEQ ID NO: 2228836 - DNA, 25 bp, Homo sapien
ccgaatccccgacgttgtcgcgagt

SEQ ID NO: 2228837 - DNA, 25 bp, Homo sapien
gcgagtcccgcggtacaaggacaga

SEQ ID NO: 2228838 - DNA, 25 bp, Homo sapien
taggtacagtgttcaggtcccagcc

SEQ ID NO: 2228839 - DNA, 25 bp, Homo sapien
ttgagtctctacctcgatgaaatgc

SEQ ID NO: 2228840 - DNA, 25 bp, Homo sapien
gtctctacctcgatgaaatgctgca

SEQ ID NO: 2228841 - DNA, 25 bp, Homo sapien
tgagtctctacctcgatgaaatgct

SEQ ID NO: 2228842 - DNA, 25 bp, Homo sapien
tctctacctcgatgaaatgctgcaa

SEQ ID NO: 2228843 - DNA, 25 bp, Homo sapien
ccttgagatcgcagggcttacagcc

SEQ ID NO: 2228844 - DNA, 25 bp, Homo sapien
gaccaagcttgcagagacgaactcc

SEQ ID NO: 2228845 - DNA, 25 bp, Homo sapien
gattagttggctatcctgggcccct

SEQ ID NO: 2228846 - DNA, 25 bp, Homo sapien
tgtccacttccaaattagcccgcgt

SEQ ID NO: 2228847 - DNA, 25 bp, Homo sapien
taccaaatgcctactcaaagagctg

SEQ ID NO: 2228848 - DNA, 25 bp, Homo sapien
tcccagggaatcaaagaagaggtgc

SEQ ID NO: 2228849 - DNA, 25 bp, Homo sapien
gctgttggacccctttgtgcggcta

SEQ ID NO: 2228850 - DNA, 25 bp, Homo sapien
gaagaggtgcattcccagatgtaga

SEQ ID NO: 2228851 - DNA, 25 bp, Homo sapien
ttttgaaagtgggacgctcatctgc

SEQ ID NO: 2228852 - DNA, 25 bp, Homo sapien
ttgaaagtgggacgctcatctgctt

SEQ ID NO: 2228853 - DNA, 25 bp, Homo sapien
tcatccatgacatctagaatattgc

SEQ ID NO: 2228854 - DNA, 25 bp, Homo sapien
ccatgacatctagaatattgctcag

SEQ ID NO: 2228855 - DNA, 25 bp, Homo sapien
taaatgggcaagtagattcaaggaa

SEQ ID NO: 2228856 - DNA, 25 bp, Homo sapien
gaaataatttaagagatcctaataa

SEQ ID NO: 2228857 - DNA, 25 bp, Homo sapien
taagagatcctaataaagcacttac

SEQ ID NO: 2228858 - DNA, 25 bp, Homo sapien
aaaaagaatgtgtgcagctatcagt

SEQ ID NO: 2228859 - DNA, 25 bp, Homo sapien
tgccagcaactgtacatgatggtat

SEQ ID NO: 2228860 - DNA, 25 bp, Homo sapien
catgccagcaactgtacatgatggt

SEQ ID NO: 2228861 - DNA, 25 bp, Homo sapien
atgccagcaactgtacatgatggta

SEQ ID NO: 2228862 - DNA, 25 bp, Homo sapien
tcatgccagcaactgtacatgatgg

SEQ ID NO: 2228863 - DNA, 25 bp, Homo sapien
gcatcttccccagggagtaaatttc

SEQ ID NO: 2228864 - DNA, 25 bp, Homo sapien
gacgtaggccttgggcaatgtgttc

SEQ ID NO: 2228865 - DNA, 25 bp, Homo sapien
actgttagtaaatctctcatatggc

SEQ ID NO: 2228866 - DNA, 25 bp, Homo sapien
ctgaagccagatgaggcctgtagag

SEQ ID NO: 2228867 - DNA, 25 bp, Homo sapien
gattagaatcagttggttccccgct

SEQ ID NO: 2228868 - DNA, 25 bp, Homo sapien
cagttatagggtctggcagagtgcc

SEQ ID NO: 2228869 - DNA, 25 bp, Homo sapien
gatggagatcaaggtcgtactagac

SEQ ID NO: 2228870 - DNA, 25 bp, Homo sapien
tagtactgaccacactagatggaga

SEQ ID NO: 2228871 - DNA, 25 bp, Homo sapien
gctatacatcaggacttccggtggg

SEQ ID NO: 2228872 - DNA, 25 bp, Homo sapien
gaccaccggactggaaatttggagc

SEQ ID NO: 2228873 - DNA, 25 bp, Homo sapien
gagcttgtgtattcatcatccagga

SEQ ID NO: 2228874 - DNA, 25 bp, Homo sapien
ttgctatacatcaggacttccggtg

SEQ ID NO: 2228875 - DNA, 25 bp, Homo sapien
gcacggtcacaagagtgtcacaaac

SEQ ID NO: 2228876 - DNA, 25 bp, Homo sapien
acttgttgcattaggatttggaggc

SEQ ID NO: 2228877 - DNA, 25 bp, Homo sapien
gcttacgttttcttggcacggtcac

SEQ ID NO: 2228878 - DNA, 25 bp, Homo sapien
gaaagatcggcagaaaacgctagaa

SEQ ID NO: 2228879 - DNA, 25 bp, Homo sapien
agatactttaacaactccttgatcg

SEQ ID NO: 2228880 - DNA, 25 bp, Homo sapien
cgtttaccaaacagtttcgagctgc

SEQ ID NO: 2228881 - DNA, 25 bp, Homo sapien
taacaactccttgatcgtttaccaa

SEQ ID NO: 2228882 - DNA, 25 bp, Homo sapien
tggacaggccgaaatcagatacttt

SEQ ID NO: 2228883 - DNA, 25 bp, Homo sapien
tcccaccacggcagacttcatggag

SEQ ID NO: 2228884 - DNA, 25 bp, Homo sapien
cagaggcacgcctaacttatagtac

SEQ ID NO: 2228885 - DNA, 25 bp, Homo sapien
gaaccaaatgatggccccatgccag

SEQ ID NO: 2228886 - DNA, 25 bp, Homo sapien
gttccaaatccagaatggccactga

SEQ ID NO: 2228887 - DNA, 25 bp, Homo sapien
agctgctgagtctggaagcggtggc

SEQ ID NO: 2228888 - DNA, 25 bp, Homo sapien
catccttgcacatctctagcagctg

SEQ ID NO: 2228889 - DNA, 25 bp, Homo sapien
gctgagtctggaagcggtggcgcat

SEQ ID NO: 2228890 - DNA, 25 bp, Homo sapien
ggcttcacagacatccttgcacatc

SEQ ID NO: 2228891 - DNA, 25 bp, Homo sapien
gcttggtgcagacgccatacaactg

SEQ ID NO: 2228892 - DNA, 25 bp, Homo sapien
ggcgctgcttggtgcagacgccata

SEQ ID NO: 2228893 - DNA, 25 bp, Homo sapien
gctgcttggtgcagacgccatacaa

SEQ ID NO: 2228894 - DNA, 25 bp, Homo sapien
tgcttggtgcagacgccatacaact

SEQ ID NO: 2228895 - DNA, 25 bp, Homo sapien
aggcaaggaactagtcttctccttt

SEQ ID NO: 2228896 - DNA, 25 bp, Homo sapien
ttctcaaccaatatctaaggcacag

SEQ ID NO: 2228897 - DNA, 25 bp, Homo sapien
gtgtgaattcctagactccagcaaa

SEQ ID NO: 2228898 - DNA, 25 bp, Homo sapien
ttagcacttaggactaccgccagtt

SEQ ID NO: 2228899 - DNA, 25 bp, Homo sapien
cccaaatgctactgagatggtacac

SEQ ID NO: 2228900 - DNA, 25 bp, Homo sapien
ggtcctttggatcaatttcccatga

SEQ ID NO: 2228901 - DNA, 25 bp, Homo sapien
gccacgtcgtactggcctctccatt

SEQ ID NO: 2228902 - DNA, 25 bp, Homo sapien
agaaggtcaggtcctttggatcaat

SEQ ID NO: 2228903 - DNA, 25 bp, Homo sapien
tcaggtcctttggatcaatttccca

SEQ ID NO: 2228904 - DNA, 25 bp, Homo sapien
ctaacaataaagtcttggtgtgatt

SEQ ID NO: 2228905 - DNA, 25 bp, Homo sapien
tcatgaatgtataattcttacaata

SEQ ID NO: 2228906 - DNA, 25 bp, Homo sapien
gaagtactaatctgtctttgcttaa

SEQ ID NO: 2228907 - DNA, 25 bp, Homo sapien
aagtcaatctcagaaacgggattca

SEQ ID NO: 2228908 - DNA, 25 bp, Homo sapien
gatagactaagcaacctccccaaat

SEQ ID NO: 2228909 - DNA, 25 bp, Homo sapien
tttaggttcaaggtggccataaggc

SEQ ID NO: 2228910 - DNA, 25 bp, Homo sapien
aggacactccctaaggcaaggccag

SEQ ID NO: 2228911 - DNA, 25 bp, Homo sapien
gcaaggccagcaaaggtagtttttg

SEQ ID NO: 2228912 - DNA, 25 bp, Homo sapien
aaaggtagtttttgcaactggccag

SEQ ID NO: 2228913 - DNA, 25 bp, Homo sapien
ctcaaggacactccctaaggcaagg

SEQ ID NO: 2228914 - DNA, 25 bp, Homo sapien
gcagtggaaggtgcattcttgtttt

SEQ ID NO: 2228915 - DNA, 25 bp, Homo sapien
cagtggaaggtgcattcttgttttg

SEQ ID NO: 2228916 - DNA, 25 bp, Homo sapien
ggatatttgagcctggatatgagtc

SEQ ID NO: 2228917 - DNA, 25 bp, Homo sapien
acactggatatttgagcctggatat

SEQ ID NO: 2228918 - DNA, 25 bp, Homo sapien
atggtgctgaaaaggtgcttctcag

SEQ ID NO: 2228919 - DNA, 25 bp, Homo sapien
ggatggtgctgaaaaggtgcttctc

SEQ ID NO: 2228920 - DNA, 25 bp, Homo sapien
gatggtgctgaaaaggtgcttctca

SEQ ID NO: 2228921 - DNA, 25 bp, Homo sapien
taatgacgtatcaccccttgagggt

SEQ ID NO: 2228922 - DNA, 25 bp, Homo sapien
gaacacacaacataatgacgtatca

SEQ ID NO: 2228923 - DNA, 25 bp, Homo sapien
ctctgaggtgtggaacacacaacat

SEQ ID NO: 2228924 - DNA, 25 bp, Homo sapien
cacaacataatgacgtatcacccct

SEQ ID NO: 2228925 - DNA, 25 bp, Homo sapien
gtctctgacaatgaaacctccttct

SEQ ID NO: 2228926 - DNA, 25 bp, Homo sapien
cactgtatatttgccagctttgctg

SEQ ID NO: 2228927 - DNA, 25 bp, Homo sapien
tatatttgccagctttgctggagtc

SEQ ID NO: 2228928 - DNA, 25 bp, Homo sapien
agtctctgacaatgaaacctccttc

SEQ ID NO: 2228929 - DNA, 25 bp, Homo sapien
cttgctttagcagttgctcagcctg

SEQ ID NO: 2228930 - DNA, 25 bp, Homo sapien
tgactccgagtcatgtgtttggaat

SEQ ID NO: 2228931 - DNA, 25 bp, Homo sapien
tagcagttgctcagcctgactccga

SEQ ID NO: 2228932 - DNA, 25 bp, Homo sapien
ttgctcagcctgactccgagtcatg

SEQ ID NO: 2228933 - DNA, 25 bp, Homo sapien
catttctatggagtcttctgcttca

SEQ ID NO: 2228934 - DNA, 25 bp, Homo sapien
catacatttctatggagtcttctgc

SEQ ID NO: 2228935 - DNA, 25 bp, Homo sapien
catagttactaggaatgtagccttc

SEQ ID NO: 2228936 - DNA, 25 bp, Homo sapien
ttcagtgacatagttactaggaatg

SEQ ID NO: 2228937 - DNA, 25 bp, Homo sapien
atattcatcacccttccgcagctgt

SEQ ID NO: 2228938 - DNA, 25 bp, Homo sapien
aaaatattcatcacccttccgcagc

SEQ ID NO: 2228939 - DNA, 25 bp, Homo sapien
cataaagggccacaacctttttcag

SEQ ID NO: 2228940 - DNA, 25 bp, Homo sapien
ttcatcacccttccgcagctgtaga

SEQ ID NO: 2228941 - DNA, 25 bp, Homo sapien
tgtcttccggtgagaactcccaggt

SEQ ID NO: 2228942 - DNA, 25 bp, Homo sapien
tttgtcttccggtgagaactcccag

SEQ ID NO: 2228943 - DNA, 25 bp, Homo sapien
ttgtcttccggtgagaactcccagg

SEQ ID NO: 2228944 - DNA, 25 bp, Homo sapien
ttttgtcttccggtgagaactccca

SEQ ID NO: 2228945 - DNA, 25 bp, Homo sapien
acaagaagccagtgatgatatggaa

SEQ ID NO: 2228946 - DNA, 25 bp, Homo sapien
gcaaaacaagaagccagtgatgata

SEQ ID NO: 2228947 - DNA, 25 bp, Homo sapien
tgcaaaacaagaagccagtgatgat

SEQ ID NO: 2228948 - DNA, 25 bp, Homo sapien
gaagccagtgatgatatggaatgca

SEQ ID NO: 2228949 - DNA, 25 bp, Homo sapien
gaaccagatcactgttgtaccggat

SEQ ID NO: 2228950 - DNA, 25 bp, Homo sapien
gagatactgcccatcgatccagaag

SEQ ID NO: 2228951 - DNA, 25 bp, Homo sapien
tttggcagcccatagcatttttggc

SEQ ID NO: 2228952 - DNA, 25 bp, Homo sapien
tccaaaatttggcagcccatagcat

SEQ ID NO: 2228953 - DNA, 25 bp, Homo sapien
gtggtgaacttcaagcaactgcccc

SEQ ID NO: 2228954 - DNA, 25 bp, Homo sapien
tttgagcttagtggtgaacttcaag

SEQ ID NO: 2228955 - DNA, 25 bp, Homo sapien
gagatcacatctgacatggaggaga

SEQ ID NO: 2228956 - DNA, 25 bp, Homo sapien
agagagagatcacatctgacatgga

SEQ ID NO: 2228957 - DNA, 25 bp, Homo sapien
tcctcccgtctatctcctcttcctt

SEQ ID NO: 2228958 - DNA, 25 bp, Homo sapien
tccttttcctcccgtctatctcctc

SEQ ID NO: 2228959 - DNA, 25 bp, Homo sapien
tctctctacgtttctcctttctctt

SEQ ID NO: 2228960 - DNA, 25 bp, Homo sapien
tcttcttttctctctacgtttctcc

SEQ ID NO: 2228961 - DNA, 25 bp, Homo sapien
ttttgagctggtgaatccaccgctt

SEQ ID NO: 2228962 - DNA, 25 bp, Homo sapien
agaagacgtagagaggcccttcatc

SEQ ID NO: 2228963 - DNA, 25 bp, Homo sapien
ccgcttccttagttcttcagttggg

SEQ ID NO: 2228964 - DNA, 25 bp, Homo sapien
ggagaagacgtagagaggcccttca

SEQ ID NO: 2228965 - DNA, 25 bp, Homo sapien
caatggtgttcaggttatgtgaact

SEQ ID NO: 2228966 - DNA, 25 bp, Homo sapien
ggcagaatcttcagtcagcaatggt

SEQ ID NO: 2228967 - DNA, 25 bp, Homo sapien
cagacttcagcagttaggattcaga

SEQ ID NO: 2228968 - DNA, 25 bp, Homo sapien
tgaactatctgaaggattcctgaac

SEQ ID NO: 2228969 - DNA, 25 bp, Homo sapien
ataagggaacctttcaatgattgaa

SEQ ID NO: 2228970 - DNA, 25 bp, Homo sapien
gataagggaacctttcaatgattga

SEQ ID NO: 2228971 - DNA, 25 bp, Homo sapien
agggataagggaacctttcaatgat

SEQ ID NO: 2228972 - DNA, 25 bp, Homo sapien
ggataagggaacctttcaatgattg

SEQ ID NO: 2228973 - DNA, 25 bp, Homo sapien
gaaacttgaccgtgttccacgttgc

SEQ ID NO: 2228974 - DNA, 25 bp, Homo sapien
cagcatcaccagtctatttacagag

SEQ ID NO: 2228975 - DNA, 25 bp, Homo sapien
taaccaatatggtagagtgaagaat

SEQ ID NO: 2228976 - DNA, 25 bp, Homo sapien
agattctttataaccaatatggtag

SEQ ID NO: 2228977 - DNA, 25 bp, Homo sapien
caacatctattgaacccttcttact

SEQ ID NO: 2228978 - DNA, 25 bp, Homo sapien
tctcaacatctattgaacccttctt

SEQ ID NO: 2228979 - DNA, 25 bp, Homo sapien
cttctcaacatctattgaacccttc

SEQ ID NO: 2228980 - DNA, 25 bp, Homo sapien
atctattgaacccttcttactgcct

SEQ ID NO: 2228981 - DNA, 25 bp, Homo sapien
gaaacaggcgcttcttgaagtttag

SEQ ID NO: 2228982 - DNA, 25 bp, Homo sapien
tgttgggatcgcttcagaaagatgc

SEQ ID NO: 2228983 - DNA, 25 bp, Homo sapien
tgtgcacggtcaagagaaacaggcg

SEQ ID NO: 2228984 - DNA, 25 bp, Homo sapien
catagtaggagagtttgtgcacggt

SEQ ID NO: 2228985 - DNA, 25 bp, Homo sapien
tgtttcttatgatccagtccagact

SEQ ID NO: 2228986 - DNA, 25 bp, Homo sapien
gccactggtccatcactcaataatg

SEQ ID NO: 2228987 - DNA, 25 bp, Homo sapien
tccagaaggttggtgtgtaacacac

SEQ ID NO: 2228988 - DNA, 25 bp, Homo sapien
tggtagctcttccttaggtgccact

SEQ ID NO: 2228989 - DNA, 25 bp, Homo sapien
ggtctttgatgaggttgatgccatc

SEQ ID NO: 2228990 - DNA, 25 bp, Homo sapien
tttggtctttgatgaggttgatgcc

SEQ ID NO: 2228991 - DNA, 25 bp, Homo sapien
tctttgatgaggttgatgccatctg

SEQ ID NO: 2228992 - DNA, 25 bp, Homo sapien
tttgatgaggttgatgccatctgcc

SEQ ID NO: 2228993 - DNA, 25 bp, Homo sapien
taatcaccagaagggactgccaggg

SEQ ID NO: 2228994 - DNA, 25 bp, Homo sapien
ctaatcaccagaagggactgccagg

SEQ ID NO: 2228995 - DNA, 25 bp, Homo sapien
ggccttgtgctgatgacactcccac

SEQ ID NO: 2228996 - DNA, 25 bp, Homo sapien
cagggccttgtgctgatgacactcc

SEQ ID NO: 2228997 - DNA, 25 bp, Homo sapien
gataaatggcaccagccatgctgtc

SEQ ID NO: 2228998 - DNA, 25 bp, Homo sapien
gctgataaatggcaccagccatgct

SEQ ID NO: 2228999 - DNA, 25 bp, Homo sapien
ccaagcaaggtacattgctgctgct

SEQ ID NO: 2229000 - DNA, 25 bp, Homo sapien
agcccctgccataccccagacccac

SEQ ID NO: 2229001 - DNA, 25 bp, Homo sapien
ctgacttaatgcaggtagcttccca

SEQ ID NO: 2229002 - DNA, 25 bp, Homo sapien
gacttggaaggtgggactcgatcgc

SEQ ID NO: 2229003 - DNA, 25 bp, Homo sapien
ccagatgcattgagatgccaggact

SEQ ID NO: 2229004 - DNA, 25 bp, Homo sapien
ggactcgatcgcagcagacactggc

SEQ ID NO: 2229005 - DNA, 25 bp, Homo sapien
tacagtccagagaggaaggacagtc

SEQ ID NO: 2229006 - DNA, 25 bp, Homo sapien
cagtccagagaggaaggacagtctg

SEQ ID NO: 2229007 - DNA, 25 bp, Homo sapien
cttacagtccagagaggaaggacag

SEQ ID NO: 2229008 - DNA, 25 bp, Homo sapien
gtccagagaggaaggacagtctgag

SEQ ID NO: 2229009 - DNA, 25 bp, Homo sapien
atttccttgccccaaggcactgtat

SEQ ID NO: 2229010 - DNA, 25 bp, Homo sapien
tttccttgccccaaggcactgtatc

SEQ ID NO: 2229011 - DNA, 25 bp, Homo sapien
ctgagggttggccacaggcattcat

SEQ ID NO: 2229012 - DNA, 25 bp, Homo sapien
ctgcctgagggttggccacaggcat

SEQ ID NO: 2229013 - DNA, 25 bp, Homo sapien
tgcctgagggttggccacaggcatt

SEQ ID NO: 2229014 - DNA, 25 bp, Homo sapien
cctgagggttggccacaggcattca

SEQ ID NO: 2229015 - DNA, 25 bp, Homo sapien
tgaacgccactacgtagcagagtcc

SEQ ID NO: 2229016 - DNA, 25 bp, Homo sapien
catttgttgaatggaccaactggcc

SEQ ID NO: 2229017 - DNA, 25 bp, Homo sapien
tggaggaccccttcattcgacccta

SEQ ID NO: 2229018 - DNA, 25 bp, Homo sapien
cagtttgctgcgaaaggtgttccca

SEQ ID NO: 2229019 - DNA, 25 bp, Homo sapien
gcaccaaccccataaagtgacacag

SEQ ID NO: 2229020 - DNA, 25 bp, Homo sapien
ccggactttctgtaagaagtgtggc

SEQ ID NO: 2229021 - DNA, 25 bp, Homo sapien
cccgccggactttctgtaagaagtg

SEQ ID NO: 2229022 - DNA, 25 bp, Homo sapien
gggcaaggattctctgtacgcccag

SEQ ID NO: 2229023 - DNA, 25 bp, Homo sapien
gctatggtgggcaaactaagccgat

SEQ ID NO: 2229024 - DNA, 25 bp, Homo sapien
tggtgggcaaactaagccgattttc

SEQ ID NO: 2229025 - DNA, 25 bp, Homo sapien
tatggtgggcaaactaagccgattt

SEQ ID NO: 2229026 - DNA, 25 bp, Homo sapien
ggctatggtgggcaaactaagccga

SEQ ID NO: 2229027 - DNA, 25 bp, Homo sapien
gagtgcgttgagcccaactgcagat

SEQ ID NO: 2229028 - DNA, 25 bp, Homo sapien
ggccaagtgatccagttctaagtgt

SEQ ID NO: 2229029 - DNA, 25 bp, Homo sapien
ctaagtgtcatcttttattatgaag

SEQ ID NO: 2229030 - DNA, 25 bp, Homo sapien
ttctaagtgtcatcttttattatga

SEQ ID NO: 2229031 - DNA, 25 bp, Homo sapien
aagtgtcatcttttattatgaagac

SEQ ID NO: 2229032 - DNA, 25 bp, Homo sapien
tacagctttgagcttgcaggctcaa

SEQ ID NO: 2229033 - DNA, 25 bp, Homo sapien
tgtctgtggacttggtcttacactc

SEQ ID NO: 2229034 - DNA, 25 bp, Homo sapien
aagtgccagtggtgtggatcatagc

SEQ ID NO: 2229035 - DNA, 25 bp, Homo sapien
agggtctccctctcgtaagtgccag

SEQ ID NO: 2229036 - DNA, 25 bp, Homo sapien
gatttatgtgacttcttaaccttga

SEQ ID NO: 2229037 - DNA, 25 bp, Homo sapien
tgggatttatgtgacttcttaacct

SEQ ID NO: 2229038 - DNA, 25 bp, Homo sapien
ctgaagcaaaacagtgcctgtggga

SEQ ID NO: 2229039 - DNA, 25 bp, Homo sapien
ttatgtgacttcttaaccttgaagt

SEQ ID NO: 2229040 - DNA, 25 bp, Homo sapien
gcaactgcgatggtataagagcgag

SEQ ID NO: 2229041 - DNA, 25 bp, Homo sapien
taagcctgagagaggtcgttcccac

SEQ ID NO: 2229042 - DNA, 25 bp, Homo sapien
taagagcgaggtccaccaatctcct

SEQ ID NO: 2229043 - DNA, 25 bp, Homo sapien
tatcatagctacagcccaggctaag

SEQ ID NO: 2229044 - DNA, 25 bp, Homo sapien
cattagacatgaataaaggagcagc

SEQ ID NO: 2229045 - DNA, 25 bp, Homo sapien
gatggcaattacgtccttatcctga

SEQ ID NO: 2229046 - DNA, 25 bp, Homo sapien
gagggccatctgagttacttgctga

SEQ ID NO: 2229047 - DNA, 25 bp, Homo sapien
aaggagcagccatgatagcccagag

SEQ ID NO: 2229048 - DNA, 25 bp, Homo sapien
aaacattcttaaagttacctagatg

SEQ ID NO: 2229049 - DNA, 25 bp, Homo sapien
cctagatgacccatatggagaaacc

SEQ ID NO: 2229050 - DNA, 25 bp, Homo sapien
aagtactctcacataaagcctcctc

SEQ ID NO: 2229051 - DNA, 25 bp, Homo sapien
tcttaaagttacctagatgacccat

SEQ ID NO: 2229052 - DNA, 25 bp, Homo sapien
taccgcagggtcttgaacaaggagg

SEQ ID NO: 2229053 - DNA, 25 bp, Homo sapien
tcaaaataggaaacaagcctaccgc

SEQ ID NO: 2229054 - DNA, 25 bp, Homo sapien
tcttgaacaaggagggctcaagttt

SEQ ID NO: 2229055 - DNA, 25 bp, Homo sapien
gaaacaagcctaccgcagggtcttg

SEQ ID NO: 2229056 - DNA, 25 bp, Homo sapien
accccctggtccagcaacatcaaca

SEQ ID NO: 2229057 - DNA, 25 bp, Homo sapien
aaccccctggtccagcaacatcaac

SEQ ID NO: 2229058 - DNA, 25 bp, Homo sapien
gtccagtccaagatactctttatac

SEQ ID NO: 2229059 - DNA, 25 bp, Homo sapien
gccagtgattgcagtactgtcggat

SEQ ID NO: 2229060 - DNA, 25 bp, Homo sapien
catcaatgtcagcaaaatttcgcca

SEQ ID NO: 2229061 - DNA, 25 bp, Homo sapien
actgtcggatttctgtataattggg

SEQ ID NO: 2229062 - DNA, 25 bp, Homo sapien
caagtcaacaaatacttccaaatag

SEQ ID NO: 2229063 - DNA, 25 bp, Homo sapien
ggtaacaagtcaacaaatacttcca

SEQ ID NO: 2229064 - DNA, 25 bp, Homo sapien
gacatggtaacaagtcaacaaatac

SEQ ID NO: 2229065 - DNA, 25 bp, Homo sapien
tctagtggggagacatggtaacaag

SEQ ID NO: 2229066 - DNA, 25 bp, Homo sapien
tctgccagtcctattcagggccaag

SEQ ID NO: 2229067 - DNA, 25 bp, Homo sapien
tcacaggagtacacaatgcttctgc

SEQ ID NO: 2229068 - DNA, 25 bp, Homo sapien
tgaaagggccacatataaagaggcc

SEQ ID NO: 2229069 - DNA, 25 bp, Homo sapien
cagggccaaggacatgtgcttataa

SEQ ID NO: 2229070 - DNA, 25 bp, Homo sapien
agggaaagaaatgaatttccagctg

SEQ ID NO: 2229071 - DNA, 25 bp, Homo sapien
gaaagaaatgaatttccagctgggg

SEQ ID NO: 2229072 - DNA, 25 bp, Homo sapien
taagggaaagaaatgaatttccagc

SEQ ID NO: 2229073 - DNA, 25 bp, Homo sapien
ctgtatgagaaaacaatgggtaaaa

SEQ ID NO: 2229074 - DNA, 25 bp, Homo sapien
gagatggggttcagtctgtcatcca

SEQ ID NO: 2229075 - DNA, 25 bp, Homo sapien
ggctacctggaaggttcatgtttaa

SEQ ID NO: 2229076 - DNA, 25 bp, Homo sapien
catgtttaaactagcagcagggaca

SEQ ID NO: 2229077 - DNA, 25 bp, Homo sapien
gcagttgctctgtgcttaaattgtg

SEQ ID NO: 2229078 - DNA, 25 bp, Homo sapien
ctctgtgaccgattgacaacctgga

SEQ ID NO: 2229079 - DNA, 25 bp, Homo sapien
tgtgaccgattgacaacctggactc

SEQ ID NO: 2229080 - DNA, 25 bp, Homo sapien
cagagatggtgtgtatattgaggaa

SEQ ID NO: 2229081 - DNA, 25 bp, Homo sapien
tgaccgattgacaacctggactccc

SEQ ID NO: 2229082 - DNA, 25 bp, Homo sapien
gagccctcttgaattataagtgcac

SEQ ID NO: 2229083 - DNA, 25 bp, Homo sapien
gctaccatggcctcaaagttctttc

SEQ ID NO: 2229084 - DNA, 25 bp, Homo sapien
ttatttccagtattgtgacagggta

SEQ ID NO: 2229085 - DNA, 25 bp, Homo sapien
tagctatggttaggtatgcatggat

SEQ ID NO: 2229086 - DNA, 25 bp, Homo sapien
ggaagcctgcgcaggttttatttcc

SEQ ID NO: 2229087 - DNA, 25 bp, Homo sapien
tagtatccaaaactcccagggaagc

SEQ ID NO: 2229088 - DNA, 25 bp, Homo sapien
cctagcttcagtcctttgctgtgaa

SEQ ID NO: 2229089 - DNA, 25 bp, Homo sapien
aaattttagcagatctactccccag

SEQ ID NO: 2229090 - DNA, 25 bp, Homo sapien
cgtgaggtagcagaaagagagaacc

SEQ ID NO: 2229091 - DNA, 25 bp, Homo sapien
caaggttacttcaccaggtattggg

SEQ ID NO: 2229092 - DNA, 25 bp, Homo sapien
caaactaggcatgtgagctatagcc

SEQ ID NO: 2229093 - DNA, 25 bp, Homo sapien
cccagaactgaggagaaagctagca

SEQ ID NO: 2229094 - DNA, 25 bp, Homo sapien
aattagctagctggcgaatcccatg

SEQ ID NO: 2229095 - DNA, 25 bp, Homo sapien
tccaacagtcatcaatgcagaggta

SEQ ID NO: 2229096 - DNA, 25 bp, Homo sapien
gtactcataacctgcatccttccag

SEQ ID NO: 2229097 - DNA, 25 bp, Homo sapien
gaatcccatgaggaaagcgctgagg

SEQ ID NO: 2229098 - DNA, 25 bp, Homo sapien
tgcacatgaagcgctcccagtgcag

SEQ ID NO: 2229099 - DNA, 25 bp, Homo sapien
cagcccatggtaggcgtccttgcca

SEQ ID NO: 2229100 - DNA, 25 bp, Homo sapien
catggtaggcgtccttgccaatcca

SEQ ID NO: 2229101 - DNA, 25 bp, Homo sapien
tgcagccagcccatggtaggcgtcc

SEQ ID NO: 2229102 - DNA, 25 bp, Homo sapien
gggatgtcccaggaaacgagggcca

SEQ ID NO: 2229103 - DNA, 25 bp, Homo sapien
cgcaagcgcgcagcccagatgtagt

SEQ ID NO: 2229104 - DNA, 25 bp, Homo sapien
ggatgtcccaggaaacgagggccag

SEQ ID NO: 2229105 - DNA, 25 bp, Homo sapien
gagggccaggaagcgaagcgcaagc

SEQ ID NO: 2229106 - DNA, 25 bp, Homo sapien
gggcggaccaatcaccgatgactta

SEQ ID NO: 2229107 - DNA, 25 bp, Homo sapien
cagcataaatttccgcgggtaacct

SEQ ID NO: 2229108 - DNA, 25 bp, Homo sapien
gaccggacagcataaatttccgcgg

SEQ ID NO: 2229109 - DNA, 25 bp, Homo sapien
tcacggtgaccggacagcataaatt

SEQ ID NO: 2229110 - DNA, 25 bp, Homo sapien
cagaagtagttctggtcgtcgtcta

SEQ ID NO: 2229111 - DNA, 25 bp, Homo sapien
aagtagttctggtcgtcgtctaccg

SEQ ID NO: 2229112 - DNA, 25 bp, Homo sapien
gttctggtcgtcgtctaccgtctcg

SEQ ID NO: 2229113 - DNA, 25 bp, Homo sapien
gtgagcagaagtagttctggtcgtc

SEQ ID NO: 2229114 - DNA, 25 bp, Homo sapien
tataatgatggatatggctttgggt

SEQ ID NO: 2229115 - DNA, 25 bp, Homo sapien
cagcggccaggtccctatgataggc

SEQ ID NO: 2229116 - DNA, 25 bp, Homo sapien
tgactatggtggctataatgatgga

SEQ ID NO: 2229117 - DNA, 25 bp, Homo sapien
ggatatggctttgggtctgatagat

SEQ ID NO: 2229118 - DNA, 25 bp, Homo sapien
gggttaccttacagagccactgaga

SEQ ID NO: 2229119 - DNA, 25 bp, Homo sapien
aattggacccgatggcagagttacc

SEQ ID NO: 2229120 - DNA, 25 bp, Homo sapien
tatggaggtcctgctagccagcagc

SEQ ID NO: 2229121 - DNA, 25 bp, Homo sapien
gatgggcttatccaaccagtctagt

SEQ ID NO: 2229122 - DNA, 25 bp, Homo sapien
tccagtatgattggtaaatgggaaa

SEQ ID NO: 2229123 - DNA, 25 bp, Homo sapien
cagtatgattggtaaatgggaaata

SEQ ID NO: 2229124 - DNA, 25 bp, Homo sapien
ttagtatatccagtatgattggtaa

SEQ ID NO: 2229125 - DNA, 25 bp, Homo sapien
tatatccagtatgattggtaaatgg

SEQ ID NO: 2229126 - DNA, 25 bp, Homo sapien
aaacttcggatgcatgttgagaaac

SEQ ID NO: 2229127 - DNA, 25 bp, Homo sapien
taatatcctgtaaggcacgtgagtg

SEQ ID NO: 2229128 - DNA, 25 bp, Homo sapien
cagttttgcattacaggcttgtgat

SEQ ID NO: 2229129 - DNA, 25 bp, Homo sapien
taggagtgtacctaagcagtaagcg

SEQ ID NO: 2229130 - DNA, 25 bp, Homo sapien
caatgtgcctggttagagtattctt

SEQ ID NO: 2229131 - DNA, 25 bp, Homo sapien
tttttttgatatggatcctcatact

SEQ ID NO: 2229132 - DNA, 25 bp, Homo sapien
tgtgagcaatgtgcctggttagagt

SEQ ID NO: 2229133 - DNA, 25 bp, Homo sapien
agcaatgtgcctggttagagtattc

SEQ ID NO: 2229134 - DNA, 25 bp, Homo sapien
gtcccctggcaaagacactgctatg

SEQ ID NO: 2229135 - DNA, 25 bp, Homo sapien
gatggtgacccctccaaaatttgtg

SEQ ID NO: 2229136 - DNA, 25 bp, Homo sapien
gctgctgtgtaaagctcctgaaact

SEQ ID NO: 2229137 - DNA, 25 bp, Homo sapien
aatataatccccaattggccgggtg

SEQ ID NO: 2229138 - DNA, 25 bp, Homo sapien
cacctctttagctgaattgactttc

SEQ ID NO: 2229139 - DNA, 25 bp, Homo sapien
tgcaggagcgggtttgaacgactac

SEQ ID NO: 2229140 - DNA, 25 bp, Homo sapien
gctctttatttagcacctctttagc

SEQ ID NO: 2229141 - DNA, 25 bp, Homo sapien
gactaccttcagatcttctcttggg

SEQ ID NO: 2229142 - DNA, 25 bp, Homo sapien
gggcaggtgcctgggtgcctgggtg

SEQ ID NO: 2229143 - DNA, 25 bp, Homo sapien
tgcctgggtgcctgtgggccttcat

SEQ ID NO: 2229144 - DNA, 25 bp, Homo sapien
gtgcctgggtgcctgtgggccttca

SEQ ID NO: 2229145 - DNA, 25 bp, Homo sapien
tggggagggcaggtgcctgggtgcc

SEQ ID NO: 2229146 - DNA, 25 bp, Homo sapien
gcagacttactgaccaacagtgggt

SEQ ID NO: 2229147 - DNA, 25 bp, Homo sapien
tatatttgtgatatgttaggcagac

SEQ ID NO: 2229148 - DNA, 25 bp, Homo sapien
gaaagagcaatatttatgtcagtaa

SEQ ID NO: 2229149 - DNA, 25 bp, Homo sapien
tatgttatgactacagttttgaaga

SEQ ID NO: 2229150 - DNA, 25 bp, Homo sapien
taatttacacatacacctttttggc

SEQ ID NO: 2229151 - DNA, 25 bp, Homo sapien
tgagagtcaggcagatgaaaggata

SEQ ID NO: 2229152 - DNA, 25 bp, Homo sapien
gagaacatgcacctattttcagtga

SEQ ID NO: 2229153 - DNA, 25 bp, Homo sapien
aaaaatttgtaggccggcgcagtgg

SEQ ID NO: 2229154 - DNA, 25 bp, Homo sapien
ggctggcacctgctactacatttac

SEQ ID NO: 2229155 - DNA, 25 bp, Homo sapien
tacatgggccgcattcaggaagtgg

SEQ ID NO: 2229156 - DNA, 25 bp, Homo sapien
taaaccccaagtcgagattggagca

SEQ ID NO: 2229157 - DNA, 25 bp, Homo sapien
cagaccttggccataaatgaagcag

SEQ ID NO: 2229158 - DNA, 25 bp, Homo sapien
tggttgtggccaatccccagggtga

SEQ ID NO: 2229159 - DNA, 25 bp, Homo sapien
tcctaatgccacttctaaagccggg

SEQ ID NO: 2229160 - DNA, 25 bp, Homo sapien
aacctgtacacaacctcaggctggg

SEQ ID NO: 2229161 - DNA, 25 bp, Homo sapien
taaagccgggactaaggcagaccag

SEQ ID NO: 2229162 - DNA, 25 bp, Homo sapien
gattggctgtatgttcccaaacaaa

SEQ ID NO: 2229163 - DNA, 25 bp, Homo sapien
ggttttgcactctggaagtaatgca

SEQ ID NO: 2229164 - DNA, 25 bp, Homo sapien
caagaaacttcgagccttagcagca

SEQ ID NO: 2229165 - DNA, 25 bp, Homo sapien
cctatgatggtctatagctggacca

SEQ ID NO: 2229166 - DNA, 25 bp, Homo sapien
ggtgccatgtatcagacctttgaga

SEQ ID NO: 2229167 - DNA, 25 bp, Homo sapien
tataaggaaggccagaaaattgggc

SEQ ID NO: 2229168 - DNA, 25 bp, Homo sapien
aaattgggcggctgttgctaagcag

SEQ ID NO: 2229169 - DNA, 25 bp, Homo sapien
taactgggttggcatactggtaaaa

SEQ ID NO: 2229170 - DNA, 25 bp, Homo sapien
caggattgaagattagggtcactac

SEQ ID NO: 2229171 - DNA, 25 bp, Homo sapien
tgctttgcctaatagtcctgggaag

SEQ ID NO: 2229172 - DNA, 25 bp, Homo sapien
cttcagtgggaaactgtaacagcta

SEQ ID NO: 2229173 - DNA, 25 bp, Homo sapien
ggtcactacatcagggaaataattt

SEQ ID NO: 2229174 - DNA, 25 bp, Homo sapien
aattagcattatcccgtgacagtac

SEQ ID NO: 2229175 - DNA, 25 bp, Homo sapien
cattatcccgtgacagtacggtggc

SEQ ID NO: 2229176 - DNA, 25 bp, Homo sapien
tcccgtgacagtacggtggctgatg

SEQ ID NO: 2229177 - DNA, 25 bp, Homo sapien
acagtacggtggctgatgggatttt

SEQ ID NO: 2229178 - DNA, 25 bp, Homo sapien
tgtagtctacgagagaagatactgg

SEQ ID NO: 2229179 - DNA, 25 bp, Homo sapien
tcatgtagtctacgagagaagatac

SEQ ID NO: 2229180 - DNA, 25 bp, Homo sapien
gtagtctacgagagaagatactggg

SEQ ID NO: 2229181 - DNA, 25 bp, Homo sapien
caatctttctcacaatgtcatcgac

SEQ ID NO: 2229182 - DNA, 25 bp, Homo sapien
aatctttctcacaatgtcatcgaca

SEQ ID NO: 2229183 - DNA, 25 bp, Homo sapien
aacttggaagagagaatcctctgtg

SEQ ID NO: 2229184 - DNA, 25 bp, Homo sapien
ataacttggaagagagaatcctctg

SEQ ID NO: 2229185 - DNA, 25 bp, Homo sapien
taacttggaagagagaatcctctgt

SEQ ID NO: 2229186 - DNA, 25 bp, Homo sapien
aagtgctggttgtatctcctggccg

SEQ ID NO: 2229187 - DNA, 25 bp, Homo sapien
ttaggagtaccacagaaagtgctgg

SEQ ID NO: 2229188 - DNA, 25 bp, Homo sapien
ggttgtatctcctggccgtaatcct

SEQ ID NO: 2229189 - DNA, 25 bp, Homo sapien
caggagcaatgtaattaggagtacc

SEQ ID NO: 2229190 - DNA, 25 bp, Homo sapien
ccgtagtcagtgagtttaatgtggc

SEQ ID NO: 2229191 - DNA, 25 bp, Homo sapien
tggccttcagagtccagtaatacat

SEQ ID NO: 2229192 - DNA, 25 bp, Homo sapien
tgagtttaatgtggccttcagagtc

SEQ ID NO: 2229193 - DNA, 25 bp, Homo sapien
cacatgccgtagtcagtgagtttaa

SEQ ID NO: 2229194 - DNA, 25 bp, Homo sapien
tgtccagtttcaaatctctataaat

SEQ ID NO: 2229195 - DNA, 25 bp, Homo sapien
caaatctctataaattatccctcac

SEQ ID NO: 2229196 - DNA, 25 bp, Homo sapien
gtccagtttcaaatctctataaatt

SEQ ID NO: 2229197 - DNA, 25 bp, Homo sapien
gtttcaaatctctataaattatccc

SEQ ID NO: 2229198 - DNA, 25 bp, Homo sapien
gctagactgatttctgcagagtaaa

SEQ ID NO: 2229199 - DNA, 25 bp, Homo sapien
tagactgatttctgcagagtaaaat

SEQ ID NO: 2229200 - DNA, 25 bp, Homo sapien
aatgctagactgatttctgcagagt

SEQ ID NO: 2229201 - DNA, 25 bp, Homo sapien
tgctagactgatttctgcagagtaa

SEQ ID NO: 2229202 - DNA, 25 bp, Homo sapien
attaggtctcctccatttacatact

SEQ ID NO: 2229203 - DNA, 25 bp, Homo sapien
aaaggatgattggatgcctgctcaa

SEQ ID NO: 2229204 - DNA, 25 bp, Homo sapien
ggtctcctccatttacatactctat

SEQ ID NO: 2229205 - DNA, 25 bp, Homo sapien
aggaaaggatgattggatgcctgct

SEQ ID NO: 2229206 - DNA, 25 bp, Homo sapien
ttaatggaaccaacagtactttggc

SEQ ID NO: 2229207 - DNA, 25 bp, Homo sapien
tgaagacctagactggatgaagctt

SEQ ID NO: 2229208 - DNA, 25 bp, Homo sapien
aagacctagactggatgaagctttg

SEQ ID NO: 2229209 - DNA, 25 bp, Homo sapien
tcctgaagacctagactggatgaag

SEQ ID NO: 2229210 - DNA, 25 bp, Homo sapien
cctgaagacctagactggatgaagc

SEQ ID NO: 2229211 - DNA, 25 bp, Homo sapien
gtggcaaagaatgccgcccacattc

SEQ ID NO: 2229212 - DNA, 25 bp, Homo sapien
gaatgccgcccacattcaattgtga

SEQ ID NO: 2229213 - DNA, 25 bp, Homo sapien
atggatgactgatccatgggcatca

SEQ ID NO: 2229214 - DNA, 25 bp, Homo sapien
cacttcttatgaaccaagagtttgc

SEQ ID NO: 2229215 - DNA, 25 bp, Homo sapien
ttggcatccaagtccccatattcag

SEQ ID NO: 2229216 - DNA, 25 bp, Homo sapien
catattcagtctgtgcagatggcac

SEQ ID NO: 2229217 - DNA, 25 bp, Homo sapien
cccatattcagtctgtgcagatggc

SEQ ID NO: 2229218 - DNA, 25 bp, Homo sapien
caagtccccatattcagtctgtgca

SEQ ID NO: 2229219 - DNA, 25 bp, Homo sapien
taaagctttctccagtggcgtgcac

SEQ ID NO: 2229220 - DNA, 25 bp, Homo sapien
ttggcttgaaaagtgtgtccattgg

SEQ ID NO: 2229221 - DNA, 25 bp, Homo sapien
gtccattggcacaataaagctttct

SEQ ID NO: 2229222 - DNA, 25 bp, Homo sapien
ttgaaaagtgtgtccattggcacaa

SEQ ID NO: 2229223 - DNA, 25 bp, Homo sapien
ttcttctaactccaactgagatgat

SEQ ID NO: 2229224 - DNA, 25 bp, Homo sapien
ggacgttctggtacacaagggaaca

SEQ ID NO: 2229225 - DNA, 25 bp, Homo sapien
ggtctccttcctcgtctatccattt

SEQ ID NO: 2229226 - DNA, 25 bp, Homo sapien
tctccttcctcgtctatccatttca

SEQ ID NO: 2229227 - DNA, 25 bp, Homo sapien
cgggtctccttcctcgtctatccat

SEQ ID NO: 2229228 - DNA, 25 bp, Homo sapien
tccttcctcgtctatccatttcatg

SEQ ID NO: 2229229 - DNA, 25 bp, Homo sapien
gttgtcaaaagaacatgtctcgaac

SEQ ID NO: 2229230 - DNA, 25 bp, Homo sapien
gttcgttgtcaaaagaacatgtctc

SEQ ID NO: 2229231 - DNA, 25 bp, Homo sapien
tcgttgtcaaaagaacatgtctcga

SEQ ID NO: 2229232 - DNA, 25 bp, Homo sapien
ctgttcgttgtcaaaagaacatgtc

SEQ ID NO: 2229233 - DNA, 25 bp, Homo sapien
tatcatgatatccccgcggtagtag

SEQ ID NO: 2229234 - DNA, 25 bp, Homo sapien
catgatatccccgcggtagtaggct

SEQ ID NO: 2229235 - DNA, 25 bp, Homo sapien
tcatgatatccccgcggtagtaggc

SEQ ID NO: 2229236 - DNA, 25 bp, Homo sapien
gttatcatgatatccccgcggtagt

SEQ ID NO: 2229237 - DNA, 25 bp, Homo sapien
gcccgcgcctgtcggagaaccgcgg

SEQ ID NO: 2229238 - DNA, 25 bp, Homo sapien
gcgcctgtcggagaaccgcggccat

SEQ ID NO: 2229239 - DNA, 25 bp, Homo sapien
ccgcgcctgtcggagaaccgcggcc

SEQ ID NO: 2229240 - DNA, 25 bp, Homo sapien
cgcccgcgcctgtcggagaaccgcg

SEQ ID NO: 2229241 - DNA, 25 bp, Homo sapien
gatgaaccattttaaggatgccaaa

SEQ ID NO: 2229242 - DNA, 25 bp, Homo sapien
cacaatgatctggtggtgaaagtaa

SEQ ID NO: 2229243 - DNA, 25 bp, Homo sapien
tctacctaaactgacaatgaattgg

SEQ ID NO: 2229244 - DNA, 25 bp, Homo sapien
ggagtctgtcccaaacaatattgag

SEQ ID NO: 2229245 - DNA, 25 bp, Homo sapien
tgggcagccgcgatctctgtggtgc

SEQ ID NO: 2229246 - DNA, 25 bp, Homo sapien
ggtgctgggcattctgcttgttctg

SEQ ID NO: 2229247 - DNA, 25 bp, Homo sapien
agcttgccttccaggtgggttacaa

SEQ ID NO: 2229248 - DNA, 25 bp, Homo sapien
ggtgccctctcggtctcccagggct

SEQ ID NO: 2229249 - DNA, 25 bp, Homo sapien
cacaactttattgatgatacacaca

SEQ ID NO: 2229250 - DNA, 25 bp, Homo sapien
actttattgatgatacacacagatg

SEQ ID NO: 2229251 - DNA, 25 bp, Homo sapien
caatcaaagcacacaactttattga

SEQ ID NO: 2229252 - DNA, 25 bp, Homo sapien
caactttattgatgatacacacaga

SEQ ID NO: 2229253 - DNA, 25 bp, Homo sapien
gtgatcccctcaccacatgaaggag

SEQ ID NO: 2229254 - DNA, 25 bp, Homo sapien
tcaagccgcgatatgcctctggtct

SEQ ID NO: 2229255 - DNA, 25 bp, Homo sapien
taggttcactatccatcaggcgcgt

SEQ ID NO: 2229256 - DNA, 25 bp, Homo sapien
tggtctctgcaaagcggtcccgctt

SEQ ID NO: 2229257 - DNA, 25 bp, Homo sapien
gaagttactcaaagctctgtgggag

SEQ ID NO: 2229258 - DNA, 25 bp, Homo sapien
taaggctggatcttcagtagcaccc

SEQ ID NO: 2229259 - DNA, 25 bp, Homo sapien
gattccgtcccattgtgttcgagag

SEQ ID NO: 2229260 - DNA, 25 bp, Homo sapien
catctgcaaaccaagcgcgttgtgg

SEQ ID NO: 2229261 - DNA, 25 bp, Homo sapien
ggcaggggtttccaggagaatctct

SEQ ID NO: 2229262 - DNA, 25 bp, Homo sapien
caggggtttccaggagaatctctct

SEQ ID NO: 2229263 - DNA, 25 bp, Homo sapien
gggtttccaggagaatctctctgtt

SEQ ID NO: 2229264 - DNA, 25 bp, Homo sapien
ttccaggagaatctctctgtttcca

SEQ ID NO: 2229265 - DNA, 25 bp, Homo sapien
ccttgggctcggcaaacaacagttt

SEQ ID NO: 2229266 - DNA, 25 bp, Homo sapien
gagttgcagcaacgtgacacagtct

SEQ ID NO: 2229267 - DNA, 25 bp, Homo sapien
gctaaatggaaagcccgcatccttg

SEQ ID NO: 2229268 - DNA, 25 bp, Homo sapien
aacaaatttaatccggcctgctgca

SEQ ID NO: 2229269 - DNA, 25 bp, Homo sapien
gaggtccagaacacaactgccattt

SEQ ID NO: 2229270 - DNA, 25 bp, Homo sapien
ctgaatgaaaagacacttggagagg

SEQ ID NO: 2229271 - DNA, 25 bp, Homo sapien
aatgaaaagacacttggagaggtcc

SEQ ID NO: 2229272 - DNA, 25 bp, Homo sapien
aagacacttggagaggtccagaaca

SEQ ID NO: 2229273 - DNA, 25 bp, Homo sapien
ggaatggccgctgttttattgggtg

SEQ ID NO: 2229274 - DNA, 25 bp, Homo sapien
ttattgggtgtgctcggttggcctt

SEQ ID NO: 2229275 - DNA, 25 bp, Homo sapien
tttatgttcataggggaatggccgc

SEQ ID NO: 2229276 - DNA, 25 bp, Homo sapien
ttttattgggtgtgctcggttggcc

SEQ ID NO: 2229277 - DNA, 25 bp, Homo sapien
ccaggttcagtccaatccccatcct

SEQ ID NO: 2229278 - DNA, 25 bp, Homo sapien
gccccaggttcagtccaatccccat

SEQ ID NO: 2229279 - DNA, 25 bp, Homo sapien
ggccccaggttcagtccaatcccca

SEQ ID NO: 2229280 - DNA, 25 bp, Homo sapien
tccagggccgagccatagtttcaaa

SEQ ID NO: 2229281 - DNA, 25 bp, Homo sapien
ctcctggtcatcgtcccactcctct

SEQ ID NO: 2229282 - DNA, 25 bp, Homo sapien
gctcctggtcatcgtcccactcctc

SEQ ID NO: 2229283 - DNA, 25 bp, Homo sapien
agctcctggtcatcgtcccactcct

SEQ ID NO: 2229284 - DNA, 25 bp, Homo sapien
tcagtttgtaaacgcagtagcaggc

SEQ ID NO: 2229285 - DNA, 25 bp, Homo sapien
agtttgtaaacgcagtagcaggcac

SEQ ID NO: 2229286 - DNA, 25 bp, Homo sapien
tggtcagtttgtaaacgcagtagca

SEQ ID NO: 2229287 - DNA, 25 bp, Homo sapien
gtcatctcttcctatggtcagtttg

SEQ ID NO: 2229288 - DNA, 25 bp, Homo sapien
gccccaatcatcagtcctgccgcca

SEQ ID NO: 2229289 - DNA, 25 bp, Homo sapien
agccccaatcatcagtcctgccgcc

SEQ ID NO: 2229290 - DNA, 25 bp, Homo sapien
cagccccaatcatcagtcctgccgc

SEQ ID NO: 2229291 - DNA, 25 bp, Homo sapien
aggacaggagagggccttgctccac

SEQ ID NO: 2229292 - DNA, 25 bp, Homo sapien
tggagggtagcagtcttcagcttct

SEQ ID NO: 2229293 - DNA, 25 bp, Homo sapien
caggtccagggtgagtaaggatgga

SEQ ID NO: 2229294 - DNA, 25 bp, Homo sapien
ggatggagggtagcagtcttcagct

SEQ ID NO: 2229295 - DNA, 25 bp, Homo sapien
ctcttgtagctctcttgtgatgaat

SEQ ID NO: 2229296 - DNA, 25 bp, Homo sapien
gaaacagagtattagggctcgggac

SEQ ID NO: 2229297 - DNA, 25 bp, Homo sapien
tcaggtagtctcctacaccagacct

SEQ ID NO: 2229298 - DNA, 25 bp, Homo sapien
agggtgacagtgtgagtacctctca

SEQ ID NO: 2229299 - DNA, 25 bp, Homo sapien
ctgctatgatagctaggagggtgac

SEQ ID NO: 2229300 - DNA, 25 bp, Homo sapien
cctccacggtgatagaggatagagt

SEQ ID NO: 2229301 - DNA, 25 bp, Homo sapien
aaagtgtagtggatgaactgaggac

SEQ ID NO: 2229302 - DNA, 25 bp, Homo sapien
gagaaatgaaagtgtagtggatgaa

SEQ ID NO: 2229303 - DNA, 25 bp, Homo sapien
aggacacaggtcccaatttctgttt

SEQ ID NO: 2229304 - DNA, 25 bp, Homo sapien
agtggatgaactgaggacacaggtc

SEQ ID NO: 2229305 - DNA, 25 bp, Homo sapien
gccccacttgtcgtccgccatttcc

SEQ ID NO: 2229306 - DNA, 25 bp, Homo sapien
cagcaaaggccgccacacccctttc

SEQ ID NO: 2229307 - DNA, 25 bp, Homo sapien
ctccgccccacttgtcgtccgccat

SEQ ID NO: 2229308 - DNA, 25 bp, Homo sapien
ccgccccacttgtcgtccgccattt

SEQ ID NO: 2229309 - DNA, 25 bp, Homo sapien
gacctggccctctcatatcccagcc

SEQ ID NO: 2229310 - DNA, 25 bp, Homo sapien
acctggccctctcatatcccagccc

SEQ ID NO: 2229311 - DNA, 25 bp, Homo sapien
ctgcaaggttccaaccaaggcagtt

SEQ ID NO: 2229312 - DNA, 25 bp, Homo sapien
ccttctctcgctgaaacttgtgccg

SEQ ID NO: 2229313 - DNA, 25 bp, Homo sapien
ctctcgctgaaacttgtgccgaaac

SEQ ID NO: 2229314 - DNA, 25 bp, Homo sapien
ctccttctctcgctgaaacttgtgc

SEQ ID NO: 2229315 - DNA, 25 bp, Homo sapien
tggacggaccagcacccgggacact

SEQ ID NO: 2229316 - DNA, 25 bp, Homo sapien
gggacggagtgcttggtggacggac

SEQ ID NO: 2229317 - DNA, 25 bp, Homo sapien
ttctcggagtctctggaaacgccat

SEQ ID NO: 2229318 - DNA, 25 bp, Homo sapien
cactagaacctttcttttctcggag

SEQ ID NO: 2229319 - DNA, 25 bp, Homo sapien
agggacccagctgtgatcggcctga

SEQ ID NO: 2229320 - DNA, 25 bp, Homo sapien
gatcggcctgaactcggatctgtgg

SEQ ID NO: 2229321 - DNA, 25 bp, Homo sapien
gatctgtggcgttcttggccctctt

SEQ ID NO: 2229322 - DNA, 25 bp, Homo sapien
aactcggatctgtggcgttcttggc

SEQ ID NO: 2229323 - DNA, 25 bp, Homo sapien
ttcacacgcctgcagagtaataggg

SEQ ID NO: 2229324 - DNA, 25 bp, Homo sapien
tagcaggacttgtgctctaggcggc

SEQ ID NO: 2229325 - DNA, 25 bp, Homo sapien
tgcacggtccgagctagtttccttc

SEQ ID NO: 2229326 - DNA, 25 bp, Homo sapien
gctggtacccagacggaggcgacta

SEQ ID NO: 2229327 - DNA, 25 bp, Homo sapien
caagctactacttgggaaaccacaa

SEQ ID NO: 2229328 - DNA, 25 bp, Homo sapien
tccctgtagacaagctactacttgg

SEQ ID NO: 2229329 - DNA, 25 bp, Homo sapien
ttctttccctgtagacaagctacta

SEQ ID NO: 2229330 - DNA, 25 bp, Homo sapien
cacaaccttagaaggttgtttggtg

SEQ ID NO: 2229331 - DNA, 25 bp, Homo sapien
gtacaagtggcccatagccccaggg

SEQ ID NO: 2229332 - DNA, 25 bp, Homo sapien
gatcgcttgttcctttcagatctgg

SEQ ID NO: 2229333 - DNA, 25 bp, Homo sapien
caaggtgatgagattatcgaagaag

SEQ ID NO: 2229334 - DNA, 25 bp, Homo sapien
tctggtaatcggtggaagggaaaca

SEQ ID NO: 2229335 - DNA, 25 bp, Homo sapien
gggacccgagttggtggatgacgta

SEQ ID NO: 2229336 - DNA, 25 bp, Homo sapien
cgagttggtggatgacgtagccctc

SEQ ID NO: 2229337 - DNA, 25 bp, Homo sapien
acccgagttggtggatgacgtagcc

SEQ ID NO: 2229338 - DNA, 25 bp, Homo sapien
aattggggacccgagttggtggatg

SEQ ID NO: 2229339 - DNA, 25 bp, Homo sapien
cttcttgtcctggtcgttgttcccg

SEQ ID NO: 2229340 - DNA, 25 bp, Homo sapien
tgtcctggtcgttgttcccgtctga

SEQ ID NO: 2229341 - DNA, 25 bp, Homo sapien
tcctggtcgttgttcccgtctgagt

SEQ ID NO: 2229342 - DNA, 25 bp, Homo sapien
ttcccgtctgagtaccagctcccca

SEQ ID NO: 2229343 - DNA, 25 bp, Homo sapien
tgtcccgaatccctgcaggtcagta

SEQ ID NO: 2229344 - DNA, 25 bp, Homo sapien
gtcccgaatccctgcaggtcagtac

SEQ ID NO: 2229345 - DNA, 25 bp, Homo sapien
agaggagaaggaaattgtcccgaat

SEQ ID NO: 2229346 - DNA, 25 bp, Homo sapien
gaaggaaattgtcccgaatccctgc

SEQ ID NO: 2229347 - DNA, 25 bp, Homo sapien
tcgcgggtactgaggcgcctccgtc

SEQ ID NO: 2229348 - DNA, 25 bp, Homo sapien
tgcttgagggcgtagggccgagacc

SEQ ID NO: 2229349 - DNA, 25 bp, Homo sapien
gattccataaagtcggggtgcttga

SEQ ID NO: 2229350 - DNA, 25 bp, Homo sapien
ggccgagaccgtcgcgggtactgag

SEQ ID NO: 2229351 - DNA, 25 bp, Homo sapien
caagacatatgtcccgcttgcagcc

SEQ ID NO: 2229352 - DNA, 25 bp, Homo sapien
gccgcccgctttccaagacatatgt

SEQ ID NO: 2229353 - DNA, 25 bp, Homo sapien
gtcccgcttgcagcccatttcgatg

SEQ ID NO: 2229354 - DNA, 25 bp, Homo sapien
gctttccaagacatatgtcccgctt

SEQ ID NO: 2229355 - DNA, 25 bp, Homo sapien
tcagagactgggaaatgggaatctg

SEQ ID NO: 2229356 - DNA, 25 bp, Homo sapien
agagactgggaaatgggaatctgct

SEQ ID NO: 2229357 - DNA, 25 bp, Homo sapien
ctgcggggtgtttggggaagagctc

SEQ ID NO: 2229358 - DNA, 25 bp, Homo sapien
tgggaaatgggaatctgctgggagc

SEQ ID NO: 2229359 - DNA, 25 bp, Homo sapien
cttgaagcgagggaggaagtttcct

SEQ ID NO: 2229360 - DNA, 25 bp, Homo sapien
gttttcgatctgtcatcctgcaggt

SEQ ID NO: 2229361 - DNA, 25 bp, Homo sapien
tcctccgatcagtagaggtcggtgt

SEQ ID NO: 2229362 - DNA, 25 bp, Homo sapien
tagcaggtggctccgcttgaagcga

SEQ ID NO: 2229363 - DNA, 25 bp, Homo sapien
tctctgcagattggaaagattgttg

SEQ ID NO: 2229364 - DNA, 25 bp, Homo sapien
ggtctctctgcagattggaaagatt

SEQ ID NO: 2229365 - DNA, 25 bp, Homo sapien
ctgcagattggaaagattgttggga

SEQ ID NO: 2229366 - DNA, 25 bp, Homo sapien
tctctctgcagattggaaagattgt

SEQ ID NO: 2229367 - DNA, 25 bp, Homo sapien
ccctagggacatctgaggttgtggt

SEQ ID NO: 2229368 - DNA, 25 bp, Homo sapien
gcttgtcttgaggaggttagtgcaa

SEQ ID NO: 2229369 - DNA, 25 bp, Homo sapien
ggttctagtcaggtccctagggaca

SEQ ID NO: 2229370 - DNA, 25 bp, Homo sapien
gaggttagtgcaagggttctagtca

SEQ ID NO: 2229371 - DNA, 25 bp, Homo sapien
tgaagtggctgaagacgatcaccct

SEQ ID NO: 2229372 - DNA, 25 bp, Homo sapien
gatgataccgttttgtcccctcaag

SEQ ID NO: 2229373 - DNA, 25 bp, Homo sapien
ttattcgtgatctgggtggtctccc

SEQ ID NO: 2229374 - DNA, 25 bp, Homo sapien
tatagtatggtacccaccttgggct

SEQ ID NO: 2229375 - DNA, 25 bp, Homo sapien
caaagagccaggaataacaccttga

SEQ ID NO: 2229376 - DNA, 25 bp, Homo sapien
cactgggctccctctttaataagaa

SEQ ID NO: 2229377 - DNA, 25 bp, Homo sapien
cagccatgactagggaactgctcag

SEQ ID NO: 2229378 - DNA, 25 bp, Homo sapien
tgcataagtgacagtgaaccaattc

SEQ ID NO: 2229379 - DNA, 25 bp, Homo sapien
accccagcctctgaattagctagga

SEQ ID NO: 2229380 - DNA, 25 bp, Homo sapien
tacaggccagtgccagtacacccgg

SEQ ID NO: 2229381 - DNA, 25 bp, Homo sapien
taaaggctgcattgtttccattgta

SEQ ID NO: 2229382 - DNA, 25 bp, Homo sapien
cacccggctggctagaattttcttc

SEQ ID NO: 2229383 - DNA, 25 bp, Homo sapien
gcgtgtcatccttgcgcgggggcca

SEQ ID NO: 2229384 - DNA, 25 bp, Homo sapien
aaaatatatggaatgcttcacgaat

SEQ ID NO: 2229385 - DNA, 25 bp, Homo sapien
tgctaatcttctctgtatcgttaca

SEQ ID NO: 2229386 - DNA, 25 bp, Homo sapien
attttagtatatgtgctgccgaagc

SEQ ID NO: 2229387 - DNA, 25 bp, Homo sapien
cattcataatggacaggtttactgt

SEQ ID NO: 2229388 - DNA, 25 bp, Homo sapien
caaataatagaacagtaggccattc

SEQ ID NO: 2229389 - DNA, 25 bp, Homo sapien
ttactgtcaattcagaagaaccagt

SEQ ID NO: 2229390 - DNA, 25 bp, Homo sapien
tgatgatacacaaatgaagtctttg

SEQ ID NO: 2229391 - DNA, 25 bp, Homo sapien
caagtcttttgacggtacataacca

SEQ ID NO: 2229392 - DNA, 25 bp, Homo sapien
taaaatggttcagcttaaagctggt

SEQ ID NO: 2229393 - DNA, 25 bp, Homo sapien
caattttcaacgcttccacactgca

SEQ ID NO: 2229394 - DNA, 25 bp, Homo sapien
gaaaggatccctttactatatgagc

SEQ ID NO: 2229395 - DNA, 25 bp, Homo sapien
cagatttctgaagcaaggcaaggac

SEQ ID NO: 2229396 - DNA, 25 bp, Homo sapien
tctgcatggcaacgggtcttcttcc

SEQ ID NO: 2229397 - DNA, 25 bp, Homo sapien
aaggaccttcctgagatcgcggaca

SEQ ID NO: 2229398 - DNA, 25 bp, Homo sapien
tattcatgtacacctgaagccggcc

SEQ ID NO: 2229399 - DNA, 25 bp, Homo sapien
gacctggttacacccttgcctccac

SEQ ID NO: 2229400 - DNA, 25 bp, Homo sapien
ggacctggttacacccttgcctcca

SEQ ID NO: 2229401 - DNA, 25 bp, Homo sapien
gcccatccccagttcgtctacttca

SEQ ID NO: 2229402 - DNA, 25 bp, Homo sapien
ccagtcgctgatgtggctttcggta

SEQ ID NO: 2229403 - DNA, 25 bp, Homo sapien
tttgggtaccgctccagtcgctgat

SEQ ID NO: 2229404 - DNA, 25 bp, Homo sapien
tgatgttccaggaaccaccgctgtt

SEQ ID NO: 2229405 - DNA, 25 bp, Homo sapien
tatagccccagtgtgagccccaggg

SEQ ID NO: 2229406 - DNA, 25 bp, Homo sapien
taggggaaccagaagttccaggaga

SEQ ID NO: 2229407 - DNA, 25 bp, Homo sapien
ctaggggaaccagaagttccaggag

SEQ ID NO: 2229408 - DNA, 25 bp, Homo sapien
tgctattgcagaagccattgcagcc

SEQ ID NO: 2229409 - DNA, 25 bp, Homo sapien
caccccgggaggtggtgctattgca

SEQ ID NO: 2229410 - DNA, 25 bp, Homo sapien
tcagctgcctcggtaggcgatgcca

SEQ ID NO: 2229411 - DNA, 25 bp, Homo sapien
tgagcctcagcgctggatgcagctg

SEQ ID NO: 2229412 - DNA, 25 bp, Homo sapien
gacccaaggtcgattgtgaatccgg

SEQ ID NO: 2229413 - DNA, 25 bp, Homo sapien
cccaaggtcgattgtgaatccggct

SEQ ID NO: 2229414 - DNA, 25 bp, Homo sapien
ctgacccaaggtcgattgtgaatcc

SEQ ID NO: 2229415 - DNA, 25 bp, Homo sapien
tgacccaaggtcgattgtgaatccg

SEQ ID NO: 2229416 - DNA, 25 bp, Homo sapien
ggtctggtctctccccctggtgtat

SEQ ID NO: 2229417 - DNA, 25 bp, Homo sapien
agccacagcccggtttttgggcttg

SEQ ID NO: 2229418 - DNA, 25 bp, Homo sapien
cctggtgtatttgtagacacagtac

SEQ ID NO: 2229419 - DNA, 25 bp, Homo sapien
ttgggcttggccattctcttcttgg

SEQ ID NO: 2229420 - DNA, 25 bp, Homo sapien
atccccgccgctacacagccagcat

SEQ ID NO: 2229421 - DNA, 25 bp, Homo sapien
agccagcatcccgaacgcggctcat

SEQ ID NO: 2229422 - DNA, 25 bp, Homo sapien
cacagccagcatcccgaacgcggct

SEQ ID NO: 2229423 - DNA, 25 bp, Homo sapien
agcccctatcactatccccgccgct

SEQ ID NO: 2229424 - DNA, 25 bp, Homo sapien
aaggttaagggatgcctgctcgtcc

SEQ ID NO: 2229425 - DNA, 25 bp, Homo sapien
tattcactgatccagggcgtggaac

SEQ ID NO: 2229426 - DNA, 25 bp, Homo sapien
tgctcgtccgggtgaggctcttcag

SEQ ID NO: 2229427 - DNA, 25 bp, Homo sapien
ttcagtttaggcttacaagttctgc

SEQ ID NO: 2229428 - DNA, 25 bp, Homo sapien
tagggctctggctcacttcgtgtct

SEQ ID NO: 2229429 - DNA, 25 bp, Homo sapien
gacacaatgcttcgttggcgggcta

SEQ ID NO: 2229430 - DNA, 25 bp, Homo sapien
gtctaaccagttctacttagagaag

SEQ ID NO: 2229431 - DNA, 25 bp, Homo sapien
gtgtttgctgattcacagacctagt

SEQ ID NO: 2229432 - DNA, 25 bp, Homo sapien
ctgcagttgcacagagcccaaaagg

SEQ ID NO: 2229433 - DNA, 25 bp, Homo sapien
gctgcagttgcacagagcccaaaag

SEQ ID NO: 2229434 - DNA, 25 bp, Homo sapien
ctgtagctgcagttgcacagagccc

SEQ ID NO: 2229435 - DNA, 25 bp, Homo sapien
cctccaaagattcaaggctgtttct

SEQ ID NO: 2229436 - DNA, 25 bp, Homo sapien
tccaaagattcaaggctgtttctcc

SEQ ID NO: 2229437 - DNA, 25 bp, Homo sapien
aagattcaaggctgtttctccttac

SEQ ID NO: 2229438 - DNA, 25 bp, Homo sapien
ccaaagattcaaggctgtttctcct

SEQ ID NO: 2229439 - DNA, 25 bp, Homo sapien
gttagagcttcatcctaaggacaga

SEQ ID NO: 2229440 - DNA, 25 bp, Homo sapien
agttcagttagagcttcatcctaag

SEQ ID NO: 2229441 - DNA, 25 bp, Homo sapien
ttcagttcagttagagcttcatcct

SEQ ID NO: 2229442 - DNA, 25 bp, Homo sapien
tcagttagagcttcatcctaaggac

SEQ ID NO: 2229443 - DNA, 25 bp, Homo sapien
actgtcgacgttagacaatgaaagc

SEQ ID NO: 2229444 - DNA, 25 bp, Homo sapien
gagcagaaatatagactgtcgacgt

SEQ ID NO: 2229445 - DNA, 25 bp, Homo sapien
tatagactgtcgacgttagacaatg

SEQ ID NO: 2229446 - DNA, 25 bp, Homo sapien
tgaagagcagaaatatagactgtcg

SEQ ID NO: 2229447 - DNA, 25 bp, Homo sapien
tccaggacaagggtctcagtaactg

SEQ ID NO: 2229448 - DNA, 25 bp, Homo sapien
gatggatcagcatccaggacaaggg

SEQ ID NO: 2229449 - DNA, 25 bp, Homo sapien
ttttcgtgtttgcacatcagaatgt

SEQ ID NO: 2229450 - DNA, 25 bp, Homo sapien
tcagtaactgccttttcgtgtttgc

SEQ ID NO: 2229451 - DNA, 25 bp, Homo sapien
aacaaccgccatttctcccgcctgc

SEQ ID NO: 2229452 - DNA, 25 bp, Homo sapien
aaccgccatttctcccgcctgcata

SEQ ID NO: 2229453 - DNA, 25 bp, Homo sapien
ccaacaaccgccatttctcccgcct

SEQ ID NO: 2229454 - DNA, 25 bp, Homo sapien
cacaaatccccccaacaaccgccat

SEQ ID NO: 2229455 - DNA, 25 bp, Homo sapien
tgaacggctgtgtgggccggaggtg

SEQ ID NO: 2229456 - DNA, 25 bp, Homo sapien
gaacggctgtgtgggccggaggtgt

SEQ ID NO: 2229457 - DNA, 25 bp, Homo sapien
gagtgtgccgcccagattgttacca

SEQ ID NO: 2229458 - DNA, 25 bp, Homo sapien
ataccagattctctcagggtccgcc

SEQ ID NO: 2229459 - DNA, 25 bp, Homo sapien
agcagctggtacacccatttcccag

SEQ ID NO: 2229460 - DNA, 25 bp, Homo sapien
ctgcgagttaacaaggcggtttaat

SEQ ID NO: 2229461 - DNA, 25 bp, Homo sapien
tgcgctgccacgtttatttctcttc

SEQ ID NO: 2229462 - DNA, 25 bp, Homo sapien
cttctatgcgctgccacgtttattt

SEQ ID NO: 2229463 - DNA, 25 bp, Homo sapien
tcctcctctcaaaacaggacggaat

SEQ ID NO: 2229464 - DNA, 25 bp, Homo sapien
ctctcaaaacaggacggaatgtggg

SEQ ID NO: 2229465 - DNA, 25 bp, Homo sapien
aaaatgagccgcgtttgagcacctc

SEQ ID NO: 2229466 - DNA, 25 bp, Homo sapien
gcggattcttcgtaaagtctatcaa

SEQ ID NO: 2229467 - DNA, 25 bp, Homo sapien
tgagcacctcaggtctggaaagccg

SEQ ID NO: 2229468 - DNA, 25 bp, Homo sapien
tggaaaggaagtaagcggattcttc

SEQ ID NO: 2229469 - DNA, 25 bp, Homo sapien
cagaggaggacggagaacgacggtc

SEQ ID NO: 2229470 - DNA, 25 bp, Homo sapien
gcgcaatagagttggtacccagagg

SEQ ID NO: 2229471 - DNA, 25 bp, Homo sapien
acctttgcccacgtcagctcctggt

SEQ ID NO: 2229472 - DNA, 25 bp, Homo sapien
tgggttaaacgcacggcagcgagct

SEQ ID NO: 2229473 - DNA, 25 bp, Homo sapien
tttgtgacttgtcaaaggcagggca

SEQ ID NO: 2229474 - DNA, 25 bp, Homo sapien
cattttgtgacttgtcaaaggcagg

SEQ ID NO: 2229475 - DNA, 25 bp, Homo sapien
cagcagaaatggttgacattggtga

SEQ ID NO: 2229476 - DNA, 25 bp, Homo sapien
gcagcagaaatggttgacattggtg

SEQ ID NO: 2229477 - DNA, 25 bp, Homo sapien
tgctaggcttaggatccagtttccc

SEQ ID NO: 2229478 - DNA, 25 bp, Homo sapien
ggtgcatttcatggctgtcctgtct

SEQ ID NO: 2229479 - DNA, 25 bp, Homo sapien
ctgtgctagaggaacagcaatcttt

SEQ ID NO: 2229480 - DNA, 25 bp, Homo sapien
tcaaagctggagttgctaggcttag

SEQ ID NO: 2229481 - DNA, 25 bp, Homo sapien
tgattgtgtcctccaatccaatcat

SEQ ID NO: 2229482 - DNA, 25 bp, Homo sapien
cctttgattgtgtcctccaatccaa

SEQ ID NO: 2229483 - DNA, 25 bp, Homo sapien
ggcagtcctttgattgtgtcctcca

SEQ ID NO: 2229484 - DNA, 25 bp, Homo sapien
ctgaacaggcagtcctttgattgtg

SEQ ID NO: 2229485 - DNA, 25 bp, Homo sapien
gcactttcctctcagaactcttggg

SEQ ID NO: 2229486 - DNA, 25 bp, Homo sapien
gggaacttgtatacacaatggcatg

SEQ ID NO: 2229487 - DNA, 25 bp, Homo sapien
tcacttagctccatatcctgtggct

SEQ ID NO: 2229488 - DNA, 25 bp, Homo sapien
caaagctggtagtctctctggaatg

SEQ ID NO: 2229489 - DNA, 25 bp, Homo sapien
aatccttggtccttggtactgactc

SEQ ID NO: 2229490 - DNA, 25 bp, Homo sapien
aggtaggggattccattcagaatgc

SEQ ID NO: 2229491 - DNA, 25 bp, Homo sapien
gaaatgatcatacgacactagaggt

SEQ ID NO: 2229492 - DNA, 25 bp, Homo sapien
ccattagtggccagaacaaattgga

SEQ ID NO: 2229493 - DNA, 25 bp, Homo sapien
gagggcagtttgtgtcccttagtgc

SEQ ID NO: 2229494 - DNA, 25 bp, Homo sapien
agtttgtgtcccttagtgcaaaatt

SEQ ID NO: 2229495 - DNA, 25 bp, Homo sapien
ttgtgtcccttagtgcaaaattcat

SEQ ID NO: 2229496 - DNA, 25 bp, Homo sapien
ggcagtttgtgtcccttagtgcaaa

SEQ ID NO: 2229497 - DNA, 25 bp, Homo sapien
cagaaacatccacctgaccgactca

SEQ ID NO: 2229498 - DNA, 25 bp, Homo sapien
atccacctgaccgactcacaactgg

SEQ ID NO: 2229499 - DNA, 25 bp, Homo sapien
taatactgtcccccttcgtacatct

SEQ ID NO: 2229500 - DNA, 25 bp, Homo sapien
gaccgactcacaactgggggtatgt

SEQ ID NO: 2229501 - DNA, 25 bp, Homo sapien
cacagacacctagttgatgtttatc

SEQ ID NO: 2229502 - DNA, 25 bp, Homo sapien
cattccaacatcttgtccatcagag

SEQ ID NO: 2229503 - DNA, 25 bp, Homo sapien
atctttgtgctttctggccctgtag

SEQ ID NO: 2229504 - DNA, 25 bp, Homo sapien
gctttctggccctgtagtattttca

SEQ ID NO: 2229505 - DNA, 25 bp, Homo sapien
cttctagaaatttttgaatgccatc

SEQ ID NO: 2229506 - DNA, 25 bp, Homo sapien
tagggtttctatccagtaccgattc

SEQ ID NO: 2229507 - DNA, 25 bp, Homo sapien
taatttttagtaagatgtgaacacc

SEQ ID NO: 2229508 - DNA, 25 bp, Homo sapien
ttctatccagtaccgattctttaat

SEQ ID NO: 2229509 - DNA, 25 bp, Homo sapien
atttttagtaagatgtgaacacctg

SEQ ID NO: 2229510 - DNA, 25 bp, Homo sapien
agtcttttgacattcatcactgaca

SEQ ID NO: 2229511 - DNA, 25 bp, Homo sapien
ctgacattttgaagtagcctttgca

SEQ ID NO: 2229512 - DNA, 25 bp, Homo sapien
catgcatagcttggtaataaaaaac

SEQ ID NO: 2229513 - DNA, 25 bp, Homo sapien
ctgttgcatgcatagcttggtaata

SEQ ID NO: 2229514 - DNA, 25 bp, Homo sapien
gagccctgagaactactcaacagaa

SEQ ID NO: 2229515 - DNA, 25 bp, Homo sapien
cagatatggatgactgagccctgag

SEQ ID NO: 2229516 - DNA, 25 bp, Homo sapien
tcaacagaatccatacgtccaggag

SEQ ID NO: 2229517 - DNA, 25 bp, Homo sapien
tggcagaaacgaaatcgatgatggg

SEQ ID NO: 2229518 - DNA, 25 bp, Homo sapien
tggcatctggatgagtcatactgtt

SEQ ID NO: 2229519 - DNA, 25 bp, Homo sapien
catctggatgagtcatactgttttc

SEQ ID NO: 2229520 - DNA, 25 bp, Homo sapien
ctgtggcatctggatgagtcatact

SEQ ID NO: 2229521 - DNA, 25 bp, Homo sapien
tctggatgagtcatactgttttcag

SEQ ID NO: 2229522 - DNA, 25 bp, Homo sapien
tctgaggtaccagtcaatctgtgtc

SEQ ID NO: 2229523 - DNA, 25 bp, Homo sapien
tgccacaccaacgtttctgcctgga

SEQ ID NO: 2229524 - DNA, 25 bp, Homo sapien
aactgccacaccaacgtttctgcct

SEQ ID NO: 2229525 - DNA, 25 bp, Homo sapien
aatctgtgtcttagcataaggggca

SEQ ID NO: 2229526 - DNA, 25 bp, Homo sapien
atcacccaaagggattgtggagtgc

SEQ ID NO: 2229527 - DNA, 25 bp, Homo sapien
cccaaagggattgtggagtgcagat

SEQ ID NO: 2229528 - DNA, 25 bp, Homo sapien
caaagggattgtggagtgcagattt

SEQ ID NO: 2229529 - DNA, 25 bp, Homo sapien
cacccaaagggattgtggagtgcag

SEQ ID NO: 2229530 - DNA, 25 bp, Homo sapien
ctgaagaaatagttttccagtaagt

SEQ ID NO: 2229531 - DNA, 25 bp, Homo sapien
cctgttacttcactttctacttgaa

SEQ ID NO: 2229532 - DNA, 25 bp, Homo sapien
aatttctgtccctgttacttcactt

SEQ ID NO: 2229533 - DNA, 25 bp, Homo sapien
tctacttgaacatctgaagaaatag

SEQ ID NO: 2229534 - DNA, 25 bp, Homo sapien
ttaagaagcaggattaggtaacttc

SEQ ID NO: 2229535 - DNA, 25 bp, Homo sapien
taattaggaggcaatcttttcttca

SEQ ID NO: 2229536 - DNA, 25 bp, Homo sapien
caatgaactcaacctacttttgtag

SEQ ID NO: 2229537 - DNA, 25 bp, Homo sapien
tcagaacagtcaataaagctaccat

SEQ ID NO: 2229538 - DNA, 25 bp, Homo sapien
ttagtgggaccatggaaaacatctg

SEQ ID NO: 2229539 - DNA, 25 bp, Homo sapien
cattataattagtgggaccatggaa

SEQ ID NO: 2229540 - DNA, 25 bp, Homo sapien
tgggaccatggaaaacatctgaagg

SEQ ID NO: 2229541 - DNA, 25 bp, Homo sapien
gacagaaagtcattataattagtgg

SEQ ID NO: 2229542 - DNA, 25 bp, Homo sapien
gttaaaagcaaagagctgctgattt

SEQ ID NO: 2229543 - DNA, 25 bp, Homo sapien
gtaaggatccgaattcttcctacat

SEQ ID NO: 2229544 - DNA, 25 bp, Homo sapien
tggtaaggatccgaattcttcctac

SEQ ID NO: 2229545 - DNA, 25 bp, Homo sapien
aatggtaaggatccgaattcttcct

SEQ ID NO: 2229546 - DNA, 25 bp, Homo sapien
caatggtaaggatccgaattcttcc

SEQ ID NO: 2229547 - DNA, 25 bp, Homo sapien
aggtagctggcccaaccttaactgt

SEQ ID NO: 2229548 - DNA, 25 bp, Homo sapien
cttagagggaatggagcaggatgtt

SEQ ID NO: 2229549 - DNA, 25 bp, Homo sapien
gtgtcattgcattaagagacagaat

SEQ ID NO: 2229550 - DNA, 25 bp, Homo sapien
gtagctggcccaaccttaactgtgg

SEQ ID NO: 2229551 - DNA, 25 bp, Homo sapien
agggcagactacagaagatactagg

SEQ ID NO: 2229552 - DNA, 25 bp, Homo sapien
taccatgctactcactataaaaaag

SEQ ID NO: 2229553 - DNA, 25 bp, Homo sapien
cttgctccgattaacattaccatgc

SEQ ID NO: 2229554 - DNA, 25 bp, Homo sapien
gcccaagggcagactacagaagata

SEQ ID NO: 2229555 - DNA, 25 bp, Homo sapien
gacggcagacaaatcctcgggttcg

SEQ ID NO: 2229556 - DNA, 25 bp, Homo sapien
tcctcgggttcgagactccatacgc

SEQ ID NO: 2229557 - DNA, 25 bp, Homo sapien
cagacaaatcctcgggttcgagact

SEQ ID NO: 2229558 - DNA, 25 bp, Homo sapien
gggttcgagactccatacgccgact

SEQ ID NO: 2229559 - DNA, 25 bp, Homo sapien
attccacagtctcgattcatggcat

SEQ ID NO: 2229560 - DNA, 25 bp, Homo sapien
ttccacagtctcgattcatggcatc

SEQ ID NO: 2229561 - DNA, 25 bp, Homo sapien
ccacagtctcgattcatggcatcca

SEQ ID NO: 2229562 - DNA, 25 bp, Homo sapien
tccacagtctcgattcatggcatcc

SEQ ID NO: 2229563 - DNA, 25 bp, Homo sapien
attaggccatagatctcagaagaac

SEQ ID NO: 2229564 - DNA, 25 bp, Homo sapien
tctgtacagtggacacctccattga

SEQ ID NO: 2229565 - DNA, 25 bp, Homo sapien
ttacatctgtacagtggacacctcc

SEQ ID NO: 2229566 - DNA, 25 bp, Homo sapien
tgttacatctgtacagtggacacct

SEQ ID NO: 2229567 - DNA, 25 bp, Homo sapien
gttacatctgtacagtggacacctc

SEQ ID NO: 2229568 - DNA, 25 bp, Homo sapien
catgaatcaatagtcccaaaaagag

SEQ ID NO: 2229569 - DNA, 25 bp, Homo sapien
taagccatgaatcaatagtcccaaa

SEQ ID NO: 2229570 - DNA, 25 bp, Homo sapien
gccatgaatcaatagtcccaaaaag

SEQ ID NO: 2229571 - DNA, 25 bp, Homo sapien
aaataagccatgaatcaatagtccc

SEQ ID NO: 2229572 - DNA, 25 bp, Homo sapien
tcatttttcttcaacggccttttga

SEQ ID NO: 2229573 - DNA, 25 bp, Homo sapien
tcaacggccttttgaacttttctca

SEQ ID NO: 2229574 - DNA, 25 bp, Homo sapien
gaagtttcactgcactgaagtaagt

SEQ ID NO: 2229575 - DNA, 25 bp, Homo sapien
gtaagtgctaagtggaaggcctgtc

SEQ ID NO: 2229576 - DNA, 25 bp, Homo sapien
tgaagtaagtgctaagtggaaggcc

SEQ ID NO: 2229577 - DNA, 25 bp, Homo sapien
tggacttgacaaagttattatttcc

SEQ ID NO: 2229578 - DNA, 25 bp, Homo sapien
tatacactcatagacagaatgtaga

SEQ ID NO: 2229579 - DNA, 25 bp, Homo sapien
ctatacactcatagacagaatgtag

SEQ ID NO: 2229580 - DNA, 25 bp, Homo sapien
caatattgagctgtccaagtttctc

SEQ ID NO: 2229581 - DNA, 25 bp, Homo sapien
tcggccggcgattgcggccggtttc

SEQ ID NO: 2229582 - DNA, 25 bp, Homo sapien
aaccagcttcaggtcggccggcgat

SEQ ID NO: 2229583 - DNA, 25 bp, Homo sapien
caggtcggccggcgattgcggccgg

SEQ ID NO: 2229584 - DNA, 25 bp, Homo sapien
ccagcttcaggtcggccggcgattg

SEQ ID NO: 2229585 - DNA, 25 bp, Homo sapien
cactcgcaaggcaaaatgactttta

SEQ ID NO: 2229586 - DNA, 25 bp, Homo sapien
cgcaaggcaaaatgacttttagcag

SEQ ID NO: 2229587 - DNA, 25 bp, Homo sapien
caccactcgcaaggcaaaatgactt

SEQ ID NO: 2229588 - DNA, 25 bp, Homo sapien
caaaatgacttttagcagaagattg

SEQ ID NO: 2229589 - DNA, 25 bp, Homo sapien
cagacaaatatctacgtctaatgtg

SEQ ID NO: 2229590 - DNA, 25 bp, Homo sapien
aaagtaggcaaagactattcagaca

SEQ ID NO: 2229591 - DNA, 25 bp, Homo sapien
gtccccacatcacttattgggtcag

SEQ ID NO: 2229592 - DNA, 25 bp, Homo sapien
acggttcaattgaaatgctgtcccc

SEQ ID NO: 2229593 - DNA, 25 bp, Homo sapien
acttttccatcgcagcagatgtgga

SEQ ID NO: 2229594 - DNA, 25 bp, Homo sapien
tccatcgcagcagatgtggactata

SEQ ID NO: 2229595 - DNA, 25 bp, Homo sapien
tatagagataattgccacctgctgg

SEQ ID NO: 2229596 - DNA, 25 bp, Homo sapien
gactatagagataattgccacctgc

SEQ ID NO: 2229597 - DNA, 25 bp, Homo sapien
gaagctgctgggtatactctgggca

SEQ ID NO: 2229598 - DNA, 25 bp, Homo sapien
gcccacatctacaatagaagctgct

SEQ ID NO: 2229599 - DNA, 25 bp, Homo sapien
cattgcattgtagaagcccacatct

SEQ ID NO: 2229600 - DNA, 25 bp, Homo sapien
ccacattgcattgtagaagcccaca

SEQ ID NO: 2229601 - DNA, 25 bp, Homo sapien
cttgccttctctgcagaagagatgt

SEQ ID NO: 2229602 - DNA, 25 bp, Homo sapien
ctgtgatagaaactaaatgcataac

SEQ ID NO: 2229603 - DNA, 25 bp, Homo sapien
tgtgatagaaactaaatgcataact

SEQ ID NO: 2229604 - DNA, 25 bp, Homo sapien
gccaggtgagatctgggcagttact

SEQ ID NO: 2229605 - DNA, 25 bp, Homo sapien
gggagcctggagcttaattcttcac

SEQ ID NO: 2229606 - DNA, 25 bp, Homo sapien
tgagatctgggcagttactttagat

SEQ ID NO: 2229607 - DNA, 25 bp, Homo sapien
tctgggcagttactttagatccctg

SEQ ID NO: 2229608 - DNA, 25 bp, Homo sapien
gggctctatgccgttgtattgatta

SEQ ID NO: 2229609 - DNA, 25 bp, Homo sapien
cacattgtccacatacgggctctat

SEQ ID NO: 2229610 - DNA, 25 bp, Homo sapien
ggtgggagatgtgatgaaatcacca

SEQ ID NO: 2229611 - DNA, 25 bp, Homo sapien
ccgttgtattgattagtgactggtc

SEQ ID NO: 2229612 - DNA, 25 bp, Homo sapien
agaccatggcatccgagctggctag

SEQ ID NO: 2229613 - DNA, 25 bp, Homo sapien
ggaagaccatggcatccgagctggc

SEQ ID NO: 2229614 - DNA, 25 bp, Homo sapien
catggcatccgagctggctagggaa

SEQ ID NO: 2229615 - DNA, 25 bp, Homo sapien
accatggcatccgagctggctaggg

SEQ ID NO: 2229616 - DNA, 25 bp, Homo sapien
catctgtaggctacacgatgaggct

SEQ ID NO: 2229617 - DNA, 25 bp, Homo sapien
acaggcactgtggttgataagtaac

SEQ ID NO: 2229618 - DNA, 25 bp, Homo sapien
gcatatgacagagttccattgtctc

SEQ ID NO: 2229619 - DNA, 25 bp, Homo sapien
catacaacatgtaacgtcactgttt

SEQ ID NO: 2229620 - DNA, 25 bp, Homo sapien
cagaacaactggctcttcaggtggc

SEQ ID NO: 2229621 - DNA, 25 bp, Homo sapien
tccaaccccagtccttagagtggtc

SEQ ID NO: 2229622 - DNA, 25 bp, Homo sapien
ccttagagtggtcttaggctggtga

SEQ ID NO: 2229623 - DNA, 25 bp, Homo sapien
cccgcctccatcttcttggccctcc

SEQ ID NO: 2229624 - DNA, 25 bp, Homo sapien
atcttcttggccctcctgaaggccc

SEQ ID NO: 2229625 - DNA, 25 bp, Homo sapien
tcttggccctcctgaaggcccagag

SEQ ID NO: 2229626 - DNA, 25 bp, Homo sapien
ccatcttcttggccctcctgaaggc

SEQ ID NO: 2229627 - DNA, 25 bp, Homo sapien
agacctgaccagctctaatgtagtt

SEQ ID NO: 2229628 - DNA, 25 bp, Homo sapien
acctgaccagctctaatgtagttcc

SEQ ID NO: 2229629 - DNA, 25 bp, Homo sapien
aagacctgaccagctctaatgtagt

SEQ ID NO: 2229630 - DNA, 25 bp, Homo sapien
gacctgaccagctctaatgtagttc

SEQ ID NO: 2229631 - DNA, 25 bp, Homo sapien
ccagttgcaatccataagatttcca

SEQ ID NO: 2229632 - DNA, 25 bp, Homo sapien
ttattgactaaagccatcctagtgg

SEQ ID NO: 2229633 - DNA, 25 bp, Homo sapien
aaatcttttcctcagcgactgctcc

SEQ ID NO: 2229634 - DNA, 25 bp, Homo sapien
tacacttaggagtgggattactggg

SEQ ID NO: 2229635 - DNA, 25 bp, Homo sapien
agaccactctagtttcatcccagac

SEQ ID NO: 2229636 - DNA, 25 bp, Homo sapien
tgagaccactctagtttcatcccag

SEQ ID NO: 2229637 - DNA, 25 bp, Homo sapien
ttctgagaccactctagtttcatcc

SEQ ID NO: 2229638 - DNA, 25 bp, Homo sapien
tctgagaccactctagtttcatccc

SEQ ID NO: 2229639 - DNA, 25 bp, Homo sapien
ggatggagaaggcactctgagtctc

SEQ ID NO: 2229640 - DNA, 25 bp, Homo sapien
ctctgagtctcttgggggctggcat

SEQ ID NO: 2229641 - DNA, 25 bp, Homo sapien
gctggcatccctcagaaacagctta

SEQ ID NO: 2229642 - DNA, 25 bp, Homo sapien
gcatccctcagaaacagcttatcat

SEQ ID NO: 2229643 - DNA, 25 bp, Homo sapien
tggaattgcggccagaggtagtgat

SEQ ID NO: 2229644 - DNA, 25 bp, Homo sapien
gccagaggtagtgatgaaggtccac

SEQ ID NO: 2229645 - DNA, 25 bp, Homo sapien
aattgcggccagaggtagtgatgaa

SEQ ID NO: 2229646 - DNA, 25 bp, Homo sapien
cagaggtagtgatgaaggtccacat

SEQ ID NO: 2229647 - DNA, 25 bp, Homo sapien
tcagaaccctgagaccatccttcca

SEQ ID NO: 2229648 - DNA, 25 bp, Homo sapien
cttcagagacaacaaacaccaccac

SEQ ID NO: 2229649 - DNA, 25 bp, Homo sapien
cttgaacactccgttgacagaaaag

SEQ ID NO: 2229650 - DNA, 25 bp, Homo sapien
cttccttgaacactccgttgacaga

SEQ ID NO: 2229651 - DNA, 25 bp, Homo sapien
tccttgaacactccgttgacagaaa

SEQ ID NO: 2229652 - DNA, 25 bp, Homo sapien
tgaacactccgttgacagaaaagca

SEQ ID NO: 2229653 - DNA, 25 bp, Homo sapien
ttcctgaaaaggaagcgctcaggtg

SEQ ID NO: 2229654 - DNA, 25 bp, Homo sapien
aaaaggaagcgctcaggtgctcagg

SEQ ID NO: 2229655 - DNA, 25 bp, Homo sapien
tcctgaaaaggaagcgctcaggtgc

SEQ ID NO: 2229656 - DNA, 25 bp, Homo sapien
cctgaaaaggaagcgctcaggtgct

SEQ ID NO: 2229657 - DNA, 25 bp, Homo sapien
actgagggagtccacgtttcgtgga

SEQ ID NO: 2229658 - DNA, 25 bp, Homo sapien
aagcaggtgttcacggtctggtacc

SEQ ID NO: 2229659 - DNA, 25 bp, Homo sapien
cacgtttcgtggacattttgtgtgc

SEQ ID NO: 2229660 - DNA, 25 bp, Homo sapien
ggtgttcacggtctggtaccacatg

SEQ ID NO: 2229661 - DNA, 25 bp, Homo sapien
cctgcccaatcttctccatcacaca

SEQ ID NO: 2229662 - DNA, 25 bp, Homo sapien
ccaatcttctccatcacacacttac

SEQ ID NO: 2229663 - DNA, 25 bp, Homo sapien
gcccaatcttctccatcacacactt

SEQ ID NO: 2229664 - DNA, 25 bp, Homo sapien
tgcccaatcttctccatcacacact

SEQ ID NO: 2229665 - DNA, 25 bp, Homo sapien
tatattcctgctatccttgaagtac

SEQ ID NO: 2229666 - DNA, 25 bp, Homo sapien
tccttgaagtacttgcacaagttgc

SEQ ID NO: 2229667 - DNA, 25 bp, Homo sapien
ctatccttgaagtacttgcacaagt

SEQ ID NO: 2229668 - DNA, 25 bp, Homo sapien
ccttgaagtacttgcacaagttgct

SEQ ID NO: 2229669 - DNA, 25 bp, Homo sapien
gtgggcatttccaggagttggcctg

SEQ ID NO: 2229670 - DNA, 25 bp, Homo sapien
agtgggtggtccggccagtgtgggc

SEQ ID NO: 2229671 - DNA, 25 bp, Homo sapien
tgggcatttccaggagttggcctgt

SEQ ID NO: 2229672 - DNA, 25 bp, Homo sapien
tgggtggtccggccagtgtgggcat

SEQ ID NO: 2229673 - DNA, 25 bp, Homo sapien
aggagaccctgtcgatctccagagt

SEQ ID NO: 2229674 - DNA, 25 bp, Homo sapien
gaagcaggcctcatcgtggtaagca

SEQ ID NO: 2229675 - DNA, 25 bp, Homo sapien
ggagaagcaggcctcatcgtggtaa

SEQ ID NO: 2229676 - DNA, 25 bp, Homo sapien
cctgtcgatctccagagtcatagat

SEQ ID NO: 2229677 - DNA, 25 bp, Homo sapien
aaatgctttagggtctcagatccag

SEQ ID NO: 2229678 - DNA, 25 bp, Homo sapien
tgcaggaattgcaggactaaatgct

SEQ ID NO: 2229679 - DNA, 25 bp, Homo sapien
gggtctcagatccagtaaagttttc

SEQ ID NO: 2229680 - DNA, 25 bp, Homo sapien
ggactaaatgctttagggtctcaga

SEQ ID NO: 2229681 - DNA, 25 bp, Homo sapien
gcaacccaaatcttgcttggtcctt

SEQ ID NO: 2229682 - DNA, 25 bp, Homo sapien
caacccaaatcttgcttggtccttc

SEQ ID NO: 2229683 - DNA, 25 bp, Homo sapien
ctggtgcggataactctcggccgtc

SEQ ID NO: 2229684 - DNA, 25 bp, Homo sapien
atcactggtgcggataactctcggc

SEQ ID NO: 2229685 - DNA, 25 bp, Homo sapien
acaatcactggtgcggataactctc

SEQ ID NO: 2229686 - DNA, 25 bp, Homo sapien
gtcaacaatcactggtgcggataac

SEQ ID NO: 2229687 - DNA, 25 bp, Homo sapien
cttggggaaacaatcccggatggca

SEQ ID NO: 2229688 - DNA, 25 bp, Homo sapien
aggagtgaagagtcaggccccagct

SEQ ID NO: 2229689 - DNA, 25 bp, Homo sapien
gaggagtgaagagtcaggccccagc

SEQ ID NO: 2229690 - DNA, 25 bp, Homo sapien
ctttttggagcaagagaaggagaac

SEQ ID NO: 2229691 - DNA, 25 bp, Homo sapien
ggcaggaaggcctgtctcagcatga

SEQ ID NO: 2229692 - DNA, 25 bp, Homo sapien
gtcacccagggagcaaaggtgccca

SEQ ID NO: 2229693 - DNA, 25 bp, Homo sapien
aggaagggtgacaggggttgccact

SEQ ID NO: 2229694 - DNA, 25 bp, Homo sapien
tcacccagggagcaaaggtgcccag

SEQ ID NO: 2229695 - DNA, 25 bp, Homo sapien
cccagggagcaaaggtgcccaggaa

SEQ ID NO: 2229696 - DNA, 25 bp, Homo sapien
aacgggttcccttctagccatagct

SEQ ID NO: 2229697 - DNA, 25 bp, Homo sapien
ccgagaaggtgctgcacaacgggtt

SEQ ID NO: 2229698 - DNA, 25 bp, Homo sapien
taggcagactggtccgagaaggtgc

SEQ ID NO: 2229699 - DNA, 25 bp, Homo sapien
agctcttcgagcttcagccctttca

SEQ ID NO: 2229700 - DNA, 25 bp, Homo sapien
cagggtcttgactttgggagccttc

SEQ ID NO: 2229701 - DNA, 25 bp, Homo sapien
tcagggtcttgactttgggagcctt

SEQ ID NO: 2229702 - DNA, 25 bp, Homo sapien
agggtcttgactttgggagccttct

SEQ ID NO: 2229703 - DNA, 25 bp, Homo sapien
ctgtaatgtcagaaaggccatccag

SEQ ID NO: 2229704 - DNA, 25 bp, Homo sapien
cagaaaggccatccagctggtacag

SEQ ID NO: 2229705 - DNA, 25 bp, Homo sapien
taatgtcagaaaggccatccagctg

SEQ ID NO: 2229706 - DNA, 25 bp, Homo sapien
tgtcagaaaggccatccagctggta

SEQ ID NO: 2229707 - DNA, 25 bp, Homo sapien
attatatcaatgtcacggcccatca

SEQ ID NO: 2229708 - DNA, 25 bp, Homo sapien
ttatatcaatgtcacggcccatcaa

SEQ ID NO: 2229709 - DNA, 25 bp, Homo sapien
atatcaatgtcacggcccatcaagt

SEQ ID NO: 2229710 - DNA, 25 bp, Homo sapien
tatatcaatgtcacggcccatcaag

SEQ ID NO: 2229711 - DNA, 25 bp, Homo sapien
agacattgtaccgtttgttcatggt

SEQ ID NO: 2229712 - DNA, 25 bp, Homo sapien
gcctggcttcaacttattcttcaca

SEQ ID NO: 2229713 - DNA, 25 bp, Homo sapien
tcaatgcagaggcagcactagcaac

SEQ ID NO: 2229714 - DNA, 25 bp, Homo sapien
caatgcagaggcagcactagcaacc

SEQ ID NO: 2229715 - DNA, 25 bp, Homo sapien
ggattgaattcattagccatgcctt

SEQ ID NO: 2229716 - DNA, 25 bp, Homo sapien
attgaattcattagccatgccttgt

SEQ ID NO: 2229717 - DNA, 25 bp, Homo sapien
gattgaattcattagccatgccttg

SEQ ID NO: 2229718 - DNA, 25 bp, Homo sapien
ttgaattcattagccatgccttgtc

SEQ ID NO: 2229719 - DNA, 25 bp, Homo sapien
ctcatgttttcatcttgtgtgttcc

SEQ ID NO: 2229720 - DNA, 25 bp, Homo sapien
tgttttcatcttgtgtgttccgcct

SEQ ID NO: 2229721 - DNA, 25 bp, Homo sapien
tttcatcttgtgtgttccgcctcat

SEQ ID NO: 2229722 - DNA, 25 bp, Homo sapien
catgttttcatcttgtgtgttccgc

SEQ ID NO: 2229723 - DNA, 25 bp, Homo sapien
tttgatcttcactatgtcatttcac

SEQ ID NO: 2229724 - DNA, 25 bp, Homo sapien
tatggatttgatcttcactatgtca

SEQ ID NO: 2229725 - DNA, 25 bp, Homo sapien
taatatggatttgatcttcactatg

SEQ ID NO: 2229726 - DNA, 25 bp, Homo sapien
caaatggtaatatggatttgatctt

SEQ ID NO: 2229727 - DNA, 25 bp, Homo sapien
ctgttgcattggattctataaggag

SEQ ID NO: 2229728 - DNA, 25 bp, Homo sapien
cctgttgcattggattctataagga

SEQ ID NO: 2229729 - DNA, 25 bp, Homo sapien
gttgcattggattctataaggagtg

SEQ ID NO: 2229730 - DNA, 25 bp, Homo sapien
ttcctgttgcattggattctataag

SEQ ID NO: 2229731 - DNA, 25 bp, Homo sapien
ctggcagcgtgaaggcagaagttca

SEQ ID NO: 2229732 - DNA, 25 bp, Homo sapien
cagcgtgaaggcagaagttcatacc

SEQ ID NO: 2229733 - DNA, 25 bp, Homo sapien
tgaaggcagaagttcatacccacca

SEQ ID NO: 2229734 - DNA, 25 bp, Homo sapien
gcgtgaaggcagaagttcataccca

SEQ ID NO: 2229735 - DNA, 25 bp, Homo sapien
aggtggcacaatcaggggagaaatc

SEQ ID NO: 2229736 - DNA, 25 bp, Homo sapien
gtctctcagacctagtgttttccag

SEQ ID NO: 2229737 - DNA, 25 bp, Homo sapien
tctcagacctagtgttttccagaac

SEQ ID NO: 2229738 - DNA, 25 bp, Homo sapien
tgctgtctctcagacctagtgtttt

SEQ ID NO: 2229739 - DNA, 25 bp, Homo sapien
cagacctagtgttttccagaacaaa

SEQ ID NO: 2229740 - DNA, 25 bp, Homo sapien
tgtagctcagactcttcagaaggcc

SEQ ID NO: 2229741 - DNA, 25 bp, Homo sapien
aaagatcttctgcacctgtagctca

SEQ ID NO: 2229742 - DNA, 25 bp, Homo sapien
tacaatacttaatcggcagggtctg

SEQ ID NO: 2229743 - DNA, 25 bp, Homo sapien
tccaggatccgtgtaacgcgtaagt

SEQ ID NO: 2229744 - DNA, 25 bp, Homo sapien
ggctttgcctgctgcgtgatggtag

SEQ ID NO: 2229745 - DNA, 25 bp, Homo sapien
tgctgcgtgatggtaggagccatat

SEQ ID NO: 2229746 - DNA, 25 bp, Homo sapien
taggagccatatggctgccgacaca

SEQ ID NO: 2229747 - DNA, 25 bp, Homo sapien
atggtaggagccatatggctgccga

SEQ ID NO: 2229748 - DNA, 25 bp, Homo sapien
tctcttccctgttcaatttgatttc

SEQ ID NO: 2229749 - DNA, 25 bp, Homo sapien
ttcccttacccacaatctctcttcc

SEQ ID NO: 2229750 - DNA, 25 bp, Homo sapien
ctcttccctgttcaatttgatttct

SEQ ID NO: 2229751 - DNA, 25 bp, Homo sapien
cttttcccttacccacaatctctct

SEQ ID NO: 2229752 - DNA, 25 bp, Homo sapien
tctcatgttagtgttgttcagaggc

SEQ ID NO: 2229753 - DNA, 25 bp, Homo sapien
gattaaagtagccatccacctagaa

SEQ ID NO: 2229754 - DNA, 25 bp, Homo sapien
aaaacctaagtgtcctgaagtgaca

SEQ ID NO: 2229755 - DNA, 25 bp, Homo sapien
gaaaatcctagagtagactcatccc

SEQ ID NO: 2229756 - DNA, 25 bp, Homo sapien
tcaaaatccaagaatagactcatcc

SEQ ID NO: 2229757 - DNA, 25 bp, Homo sapien
tctgtcctttcttcaacagatttct

SEQ ID NO: 2229758 - DNA, 25 bp, Homo sapien
tccaagaatagactcatcccaaagc

SEQ ID NO: 2229759 - DNA, 25 bp, Homo sapien
tagactcatcccaaagcatttcctc

SEQ ID NO: 2229760 - DNA, 25 bp, Homo sapien
tgaccttgactctatcctcctctct

SEQ ID NO: 2229761 - DNA, 25 bp, Homo sapien
gttcttctttctcggagggtacatc

SEQ ID NO: 2229762 - DNA, 25 bp, Homo sapien
tctcggagggtacatcatggctttt

SEQ ID NO: 2229763 - DNA, 25 bp, Homo sapien
ttttcgatgcttaagctttcctgaa

SEQ ID NO: 2229764 - DNA, 25 bp, Homo sapien
atctgtatcttcataactctttttc

SEQ ID NO: 2229765 - DNA, 25 bp, Homo sapien
tgtatcttcataactctttttcctt

SEQ ID NO: 2229766 - DNA, 25 bp, Homo sapien
ctaaatctgtatcttcataactctt

SEQ ID NO: 2229767 - DNA, 25 bp, Homo sapien
aaatctgtatcttcataactctttt

SEQ ID NO: 2229768 - DNA, 25 bp, Homo sapien
tgctctttctctggcctttctttgc

SEQ ID NO: 2229769 - DNA, 25 bp, Homo sapien
ctgctctttctctggcctttctttg

SEQ ID NO: 2229770 - DNA, 25 bp, Homo sapien
cttcttctaggtgtcgttttctctt

SEQ ID NO: 2229771 - DNA, 25 bp, Homo sapien
tttctgggaaacagtctctggtgag

SEQ ID NO: 2229772 - DNA, 25 bp, Homo sapien
gattctacactgtatgagccagagt

SEQ ID NO: 2229773 - DNA, 25 bp, Homo sapien
gctggtaagcaatgaggtaactggt

SEQ ID NO: 2229774 - DNA, 25 bp, Homo sapien
gctgattaaggctcaagggtactgg

SEQ ID NO: 2229775 - DNA, 25 bp, Homo sapien
tcctctttgaatgggttggtagcca

SEQ ID NO: 2229776 - DNA, 25 bp, Homo sapien
tattgtatggtgctgcgtatgtccg

SEQ ID NO: 2229777 - DNA, 25 bp, Homo sapien
tcgttggtaggtctgggaagcctca

SEQ ID NO: 2229778 - DNA, 25 bp, Homo sapien
gtatgtccggaaagtctcaaatggg

SEQ ID NO: 2229779 - DNA, 25 bp, Homo sapien
ccttgcatgtgggaccggaacatat

SEQ ID NO: 2229780 - DNA, 25 bp, Homo sapien
ggcaaacataggttctcatactaaa

SEQ ID NO: 2229781 - DNA, 25 bp, Homo sapien
tgggaccggaacatatctaaagatg

SEQ ID NO: 2229782 - DNA, 25 bp, Homo sapien
tctaaagatgtaaaagcaatactac

SEQ ID NO: 2229783 - DNA, 25 bp, Homo sapien
cttactgttgctacatggaggtgca

SEQ ID NO: 2229784 - DNA, 25 bp, Homo sapien
cacacctcttaattgaatgcccaga

SEQ ID NO: 2229785 - DNA, 25 bp, Homo sapien
ttagcatggccaaccaacctttgcc

SEQ ID NO: 2229786 - DNA, 25 bp, Homo sapien
aagttagtagtagtgttagcctctc

SEQ ID NO: 2229787 - DNA, 25 bp, Homo sapien
gccccactctcaggataaaagctga

SEQ ID NO: 2229788 - DNA, 25 bp, Homo sapien
cccactctcaggataaaagctgaaa

SEQ ID NO: 2229789 - DNA, 25 bp, Homo sapien
gatcactgcagtgccttagttacca

SEQ ID NO: 2229790 - DNA, 25 bp, Homo sapien
ctgagatcactgcagtgccttagtt

SEQ ID NO: 2229791 - DNA, 25 bp, Homo sapien
tctctaggagtggaattaggcaccc

SEQ ID NO: 2229792 - DNA, 25 bp, Homo sapien
aaatgaggctgcacactactggcta

SEQ ID NO: 2229793 - DNA, 25 bp, Homo sapien
tgcaaagctaaggactaaacccagg

SEQ ID NO: 2229794 - DNA, 25 bp, Homo sapien
tagaggtttagaagagctgccagtc

SEQ ID NO: 2229795 - DNA, 25 bp, Homo sapien
gaattgctaatgaacgctgggctta

SEQ ID NO: 2229796 - DNA, 25 bp, Homo sapien
tgagagctgcacataatcaaaactg

SEQ ID NO: 2229797 - DNA, 25 bp, Homo sapien
gaatctgcggtgcaacttggcaagt

SEQ ID NO: 2229798 - DNA, 25 bp, Homo sapien
cattttataccagaggaatctgcgg

SEQ ID NO: 2229799 - DNA, 25 bp, Homo sapien
caaatactgaatacctatgtggcac

SEQ ID NO: 2229800 - DNA, 25 bp, Homo sapien
gaggtatgcgagcacaaagaagcag

SEQ ID NO: 2229801 - DNA, 25 bp, Homo sapien
tatgtggcaccaagcatcaggttag

SEQ ID NO: 2229802 - DNA, 25 bp, Homo sapien
catagacgtgcttacaggaacttct

SEQ ID NO: 2229803 - DNA, 25 bp, Homo sapien
ccattcctgtgctaataagatctga

SEQ ID NO: 2229804 - DNA, 25 bp, Homo sapien
cgttatggtagccattcctgtgcta

SEQ ID NO: 2229805 - DNA, 25 bp, Homo sapien
cattcctgtgctaataagatctgag

SEQ ID NO: 2229806 - DNA, 25 bp, Homo sapien
ttagttccatatcgttatggtagcc

SEQ ID NO: 2229807 - DNA, 25 bp, Homo sapien
cagtagctgccatttggatatgtga

SEQ ID NO: 2229808 - DNA, 25 bp, Homo sapien
gacagaaaggtcataagcatacaga

SEQ ID NO: 2229809 - DNA, 25 bp, Homo sapien
ggatgaaaccatgggaatacctaca

SEQ ID NO: 2229810 - DNA, 25 bp, Homo sapien
tggctatgaggcatccaggtgaagc

SEQ ID NO: 2229811 - DNA, 25 bp, Homo sapien
gcagaagtagtaagaggcactcctg

SEQ ID NO: 2229812 - DNA, 25 bp, Homo sapien
caggaatgttgactctgcagaagta

SEQ ID NO: 2229813 - DNA, 25 bp, Homo sapien
tgttgactctgcagaagtagtaaga

SEQ ID NO: 2229814 - DNA, 25 bp, Homo sapien
ggcttcaggaatgttgactctgcag

SEQ ID NO: 2229815 - DNA, 25 bp, Homo sapien
taaacatcatgttgcagagatcaca

SEQ ID NO: 2229816 - DNA, 25 bp, Homo sapien
tggacctttcccacatagtgagact

SEQ ID NO: 2229817 - DNA, 25 bp, Homo sapien
catctctggttgaaatcctgatgga

SEQ ID NO: 2229818 - DNA, 25 bp, Homo sapien
gagcaataagtggagagctaaacat

SEQ ID NO: 2229819 - DNA, 25 bp, Homo sapien
ttgttccccatgcatttgaaaataa

SEQ ID NO: 2229820 - DNA, 25 bp, Homo sapien
aataaaaactaacattttgagcatg

SEQ ID NO: 2229821 - DNA, 25 bp, Homo sapien
aaaactaacattttgagcatgtttt

SEQ ID NO: 2229822 - DNA, 25 bp, Homo sapien
tttgttccccatgcatttgaaaata

SEQ ID NO: 2229823 - DNA, 25 bp, Homo sapien
tagtcataccagtgattagccatgg

SEQ ID NO: 2229824 - DNA, 25 bp, Homo sapien
gcttatgtaactagtcaatggtgga

SEQ ID NO: 2229825 - DNA, 25 bp, Homo sapien
tggagtctaaagatgtgctaggcac

SEQ ID NO: 2229826 - DNA, 25 bp, Homo sapien
taaattgtagttatcacagagcccc

SEQ ID NO: 2229827 - DNA, 25 bp, Homo sapien
ctttgtgattcaaactgtagcatca

SEQ ID NO: 2229828 - DNA, 25 bp, Homo sapien
gattcaaactgtagcatcactccac

SEQ ID NO: 2229829 - DNA, 25 bp, Homo sapien
aaattctttgtgattcaaactgtag

SEQ ID NO: 2229830 - DNA, 25 bp, Homo sapien
tgtgattcaaactgtagcatcactc

SEQ ID NO: 2229831 - DNA, 25 bp, Homo sapien
ctacgaccaatcctactaaaactat

SEQ ID NO: 2229832 - DNA, 25 bp, Homo sapien
ttttgctaccatgacataaacaatc

SEQ ID NO: 2229833 - DNA, 25 bp, Homo sapien
tgttttgctaccatgacataaacaa

SEQ ID NO: 2229834 - DNA, 25 bp, Homo sapien
aaactgcatgagcaagtgatggttg

SEQ ID NO: 2229835 - DNA, 25 bp, Homo sapien
gcaagtgatggttgttttgctacca

SEQ ID NO: 2229836 - DNA, 25 bp, Homo sapien
cttcataatcataagcactttgtag

SEQ ID NO: 2229837 - DNA, 25 bp, Homo sapien
aatcataagcactttgtagctagcc

SEQ ID NO: 2229838 - DNA, 25 bp, Homo sapien
tttgtagctagccagctcagggttc

SEQ ID NO: 2229839 - DNA, 25 bp, Homo sapien
tgtagctagccagctcagggttcat

SEQ ID NO: 2229840 - DNA, 25 bp, Homo sapien
ttgttagggcattgctacacaaacg

SEQ ID NO: 2229841 - DNA, 25 bp, Homo sapien
cacaaacggattaatagctaaataa

SEQ ID NO: 2229842 - DNA, 25 bp, Homo sapien
tactgaataatatggagacaaatga

SEQ ID NO: 2229843 - DNA, 25 bp, Homo sapien
ggtggtcttactatcatttgacttg

SEQ ID NO: 2229844 - DNA, 25 bp, Homo sapien
taacagctacagttcaaaatggatc

SEQ ID NO: 2229845 - DNA, 25 bp, Homo sapien
ttagggcaatctctttaactaggac

SEQ ID NO: 2229846 - DNA, 25 bp, Homo sapien
tctaggtttactgctcaatgtccca

SEQ ID NO: 2229847 - DNA, 25 bp, Homo sapien
tgaaatcctcaagaataacagctac

SEQ ID NO: 2229848 - DNA, 25 bp, Homo sapien
tctgaggcaagggcgggtgtctact

SEQ ID NO: 2229849 - DNA, 25 bp, Homo sapien
gggtgactgtgctcggcgccgccgc

SEQ ID NO: 2229850 - DNA, 25 bp, Homo sapien
ggaggcggcagagacggtagcttcc

SEQ ID NO: 2229851 - DNA, 25 bp, Homo sapien
ctgaggggaagactccgccgccagc

SEQ ID NO: 2229852 - DNA, 25 bp, Homo sapien
aatcggagagctttaagcccgccgg

SEQ ID NO: 2229853 - DNA, 25 bp, Homo sapien
caccaatcggagagctttaagcccg

SEQ ID NO: 2229854 - DNA, 25 bp, Homo sapien
cagtccaccaatcggagagctttaa

SEQ ID NO: 2229855 - DNA, 25 bp, Homo sapien
gctcctcagtccaccaatcggagag

SEQ ID NO: 2229856 - DNA, 25 bp, Homo sapien
agtcaaaagacacagttttgccctg

SEQ ID NO: 2229857 - DNA, 25 bp, Homo sapien
tggctgtccagtgcttattggacaa

SEQ ID NO: 2229858 - DNA, 25 bp, Homo sapien
caaagtcaaaagacacagttttgcc

SEQ ID NO: 2229859 - DNA, 25 bp, Homo sapien
tgcttattggacaaagtcaaaagac

SEQ ID NO: 2229860 - DNA, 25 bp, Homo sapien
cagtagccctaggtaccggttccag

SEQ ID NO: 2229861 - DNA, 25 bp, Homo sapien
gcagaagtcttggattcagtagccc

SEQ ID NO: 2229862 - DNA, 25 bp, Homo sapien
gggctaattactagcaagagcagaa

SEQ ID NO: 2229863 - DNA, 25 bp, Homo sapien
tctgggtcatcacattgaggcatga

SEQ ID NO: 2229864 - DNA, 25 bp, Homo sapien
ttgatgacggccttcatgccctcag

SEQ ID NO: 2229865 - DNA, 25 bp, Homo sapien
gatgtacttgatgacggccttcatg

SEQ ID NO: 2229866 - DNA, 25 bp, Homo sapien
acttgatgacggccttcatgccctc

SEQ ID NO: 2229867 - DNA, 25 bp, Homo sapien
tgtacttgatgacggccttcatgcc

SEQ ID NO: 2229868 - DNA, 25 bp, Homo sapien
cagccaatgactcaaactttggata

SEQ ID NO: 2229869 - DNA, 25 bp, Homo sapien
gatagatgatctgggctgaaccaac

SEQ ID NO: 2229870 - DNA, 25 bp, Homo sapien
tattcacccatggagattgaggagg

SEQ ID NO: 2229871 - DNA, 25 bp, Homo sapien
ggctgaaccaacaagtcttctcgga

SEQ ID NO: 2229872 - DNA, 25 bp, Homo sapien
ttctcacatggtatctaactatgac

SEQ ID NO: 2229873 - DNA, 25 bp, Homo sapien
ggtatctaactatgaccagtgacat

SEQ ID NO: 2229874 - DNA, 25 bp, Homo sapien
tcacatggtatctaactatgaccag

SEQ ID NO: 2229875 - DNA, 25 bp, Homo sapien
tctaactatgaccagtgacatgaaa

SEQ ID NO: 2229876 - DNA, 25 bp, Homo sapien
catcaccagggcaatgtccagagaa

SEQ ID NO: 2229877 - DNA, 25 bp, Homo sapien
taaactatctttggcttggaggcaa

SEQ ID NO: 2229878 - DNA, 25 bp, Homo sapien
tgaagaccccagatctgtagagcca

SEQ ID NO: 2229879 - DNA, 25 bp, Homo sapien
gggtcaaggccaacaccaatagctc

SEQ ID NO: 2229880 - DNA, 25 bp, Homo sapien
gggctggctcagtacctcaagcaat

SEQ ID NO: 2229881 - DNA, 25 bp, Homo sapien
cacatgtgcattgcagagacgtcat

SEQ ID NO: 2229882 - DNA, 25 bp, Homo sapien
tagtcgttcctcctgctaccagtag

SEQ ID NO: 2229883 - DNA, 25 bp, Homo sapien
taccagtagcgttttgacccacctg

SEQ ID NO: 2229884 - DNA, 25 bp, Homo sapien
tcctgtgaggcaagtattaccctta

SEQ ID NO: 2229885 - DNA, 25 bp, Homo sapien
ggtcacaacacagctcacatactta

SEQ ID NO: 2229886 - DNA, 25 bp, Homo sapien
tgtaagcgcaccaaacagttcaatt

SEQ ID NO: 2229887 - DNA, 25 bp, Homo sapien
tcatctgatccaccaggcagtcctg

SEQ ID NO: 2229888 - DNA, 25 bp, Homo sapien
gcactcatgttagaagacccaggaa

SEQ ID NO: 2229889 - DNA, 25 bp, Homo sapien
tagaggacctagcaacagtgcccac

SEQ ID NO: 2229890 - DNA, 25 bp, Homo sapien
gacccaggaacatgatagaggacct

SEQ ID NO: 2229891 - DNA, 25 bp, Homo sapien
actgacctggctcgacctagggaag

SEQ ID NO: 2229892 - DNA, 25 bp, Homo sapien
cttaaggttaaagcattgggcctgg

SEQ ID NO: 2229893 - DNA, 25 bp, Homo sapien
aaggttaaagcattgggcctggcaa

SEQ ID NO: 2229894 - DNA, 25 bp, Homo sapien
taaggttaaagcattgggcctggca

SEQ ID NO: 2229895 - DNA, 25 bp, Homo sapien
ggttaaagcattgggcctggcaaat

SEQ ID NO: 2229896 - DNA, 25 bp, Homo sapien
ttaaaggtatgggatatcgtgtaag

SEQ ID NO: 2229897 - DNA, 25 bp, Homo sapien
aaaggtatgggatatcgtgtaagcc

SEQ ID NO: 2229898 - DNA, 25 bp, Homo sapien
taaaggtatgggatatcgtgtaagc

SEQ ID NO: 2229899 - DNA, 25 bp, Homo sapien
ttgccctcgccttgtggcttgccct

SEQ ID NO: 2229900 - DNA, 25 bp, Homo sapien
gccctcgccttgtggcttgccctca

SEQ ID NO: 2229901 - DNA, 25 bp, Homo sapien
ggcttgccctcgccttgtggcttgc

SEQ ID NO: 2229902 - DNA, 25 bp, Homo sapien
ctcgccttgtggcttgccctcacct

SEQ ID NO: 2229903 - DNA, 25 bp, Homo sapien
tcctcgtctgactttccttcatcat

SEQ ID NO: 2229904 - DNA, 25 bp, Homo sapien
tcttctggctttccctcgttttcca

SEQ ID NO: 2229905 - DNA, 25 bp, Homo sapien
tcccctccgcgtctggcttttcttc

SEQ ID NO: 2229906 - DNA, 25 bp, Homo sapien
cagcctttcgctttccctcgcattc

SEQ ID NO: 2229907 - DNA, 25 bp, Homo sapien
tgtagggtttttccatgtcgagatt

SEQ ID NO: 2229908 - DNA, 25 bp, Homo sapien
ttattgtagggtttttccatgtcga

SEQ ID NO: 2229909 - DNA, 25 bp, Homo sapien
tagggtttttccatgtcgagatttc

SEQ ID NO: 2229910 - DNA, 25 bp, Homo sapien
ggtttttccatgtcgagatttctct

SEQ ID NO: 2229911 - DNA, 25 bp, Homo sapien
tttgcaggcctccaagagcgctggg

SEQ ID NO: 2229912 - DNA, 25 bp, Homo sapien
cctcctgcggctcgctgaagcccgc

SEQ ID NO: 2229913 - DNA, 25 bp, Homo sapien
gcctgggcagctcagacagctgatt

SEQ ID NO: 2229914 - DNA, 25 bp, Homo sapien
gcggctcgctgaagcccgctcgctg

SEQ ID NO: 2229915 - DNA, 25 bp, Homo sapien
ggcctgtgcctcctgcggctcgctg

SEQ ID NO: 2229916 - DNA, 25 bp, Homo sapien
tgatgcccattatcgccaggtgtga

SEQ ID NO: 2229917 - DNA, 25 bp, Homo sapien
agctcacagcatcctcgcaaggcat

SEQ ID NO: 2229918 - DNA, 25 bp, Homo sapien
ccaggtgtgacagctgatcagagag

SEQ ID NO: 2229919 - DNA, 25 bp, Homo sapien
gagggtacccgactttgccaagagc

SEQ ID NO: 2229920 - DNA, 25 bp, Homo sapien
taaccagagtcagcaggtatccact

SEQ ID NO: 2229921 - DNA, 25 bp, Homo sapien
aaacttattctcttacaatgctaga

SEQ ID NO: 2229922 - DNA, 25 bp, Homo sapien
catagtatcttcaaatgtctctctg

SEQ ID NO: 2229923 - DNA, 25 bp, Homo sapien
cttggcttacgtccccttcattcat

SEQ ID NO: 2229924 - DNA, 25 bp, Homo sapien
cttacagactaggtcaaaatgcaat

SEQ ID NO: 2229925 - DNA, 25 bp, Homo sapien
aaaacttacagactaggtcaaaatg

SEQ ID NO: 2229926 - DNA, 25 bp, Homo sapien
gtacaccaggaaaaatgcgaattta

SEQ ID NO: 2229927 - DNA, 25 bp, Homo sapien
tgcgaatttagaaagcagggatttt

SEQ ID NO: 2229928 - DNA, 25 bp, Homo sapien
atgatcatggtgaggagggtcccct

SEQ ID NO: 2229929 - DNA, 25 bp, Homo sapien
gagggtcccctataagaatgcgcag

SEQ ID NO: 2229930 - DNA, 25 bp, Homo sapien
tcatggtgaggagggtcccctataa

SEQ ID NO: 2229931 - DNA, 25 bp, Homo sapien
ccctataagaatgcgcagactgtac

SEQ ID NO: 2229932 - DNA, 25 bp, Homo sapien
tccatctatcatatcaatgttatcg

SEQ ID NO: 2229933 - DNA, 25 bp, Homo sapien
aagcctattgggcacatcctctcca

SEQ ID NO: 2229934 - DNA, 25 bp, Homo sapien
tcatatcaatgttatcgacaagcct

SEQ ID NO: 2229935 - DNA, 25 bp, Homo sapien
caatgttatcgacaagcctattggg

SEQ ID NO: 2229936 - DNA, 25 bp, Homo sapien
ccttgaaatcggctgcacaaacgca

SEQ ID NO: 2229937 - DNA, 25 bp, Homo sapien
tcttagccttgaaatcggctgcaca

SEQ ID NO: 2229938 - DNA, 25 bp, Homo sapien
tgaaatcggctgcacaaacgcactt

SEQ ID NO: 2229939 - DNA, 25 bp, Homo sapien
ttctctcttagccttgaaatcggct

SEQ ID NO: 2229940 - DNA, 25 bp, Homo sapien
actccatcagacattgcccgatggc

SEQ ID NO: 2229941 - DNA, 25 bp, Homo sapien
ggagatctcaaatggtacccattct

SEQ ID NO: 2229942 - DNA, 25 bp, Homo sapien
cgatggccggcctcctaggagatct

SEQ ID NO: 2229943 - DNA, 25 bp, Homo sapien
caaccgctccatttctcgcactaaa

SEQ ID NO: 2229944 - DNA, 25 bp, Homo sapien
gctggctcgcctgccttcagggcaa

SEQ ID NO: 2229945 - DNA, 25 bp, Homo sapien
caacagcgagccgtcacacggccag

SEQ ID NO: 2229946 - DNA, 25 bp, Homo sapien
ttccacctttcctgggcagctggct

SEQ ID NO: 2229947 - DNA, 25 bp, Homo sapien
gggtcagcttctaccactttccacc

SEQ ID NO: 2229948 - DNA, 25 bp, Homo sapien
caactgccaagttatgaatatcagc

SEQ ID NO: 2229949 - DNA, 25 bp, Homo sapien
tagatgttcttggtccacaaggact

SEQ ID NO: 2229950 - DNA, 25 bp, Homo sapien
tgacttggcaacacaaatgatagat

SEQ ID NO: 2229951 - DNA, 25 bp, Homo sapien
ggacttgggcttgttgttagagact

SEQ ID NO: 2229952 - DNA, 25 bp, Homo sapien
gaggtaacaaagtgtggtgaattgg

SEQ ID NO: 2229953 - DNA, 25 bp, Homo sapien
tcaggggggctagggtagaagttca

SEQ ID NO: 2229954 - DNA, 25 bp, Homo sapien
aacaaagtgtggtgaattggtgccc

SEQ ID NO: 2229955 - DNA, 25 bp, Homo sapien
gtaacaaagtgtggtgaattggtgc

SEQ ID NO: 2229956 - DNA, 25 bp, Homo sapien
cactgctagagctcgctgcatggag

SEQ ID NO: 2229957 - DNA, 25 bp, Homo sapien
catggagtctgctgagtgatgagcc

SEQ ID NO: 2229958 - DNA, 25 bp, Homo sapien
taaagcaggttcatgtcaatggacc

SEQ ID NO: 2229959 - DNA, 25 bp, Homo sapien
tcaatggaccaaaaggtgccagcca

SEQ ID NO: 2229960 - DNA, 25 bp, Homo sapien
tagtggacatttcccttgatggtac

SEQ ID NO: 2229961 - DNA, 25 bp, Homo sapien
ttagtggacatttcccttgatggta

SEQ ID NO: 2229962 - DNA, 25 bp, Homo sapien
tgcaaattcatcaagtgtctgccca

SEQ ID NO: 2229963 - DNA, 25 bp, Homo sapien
ttgagaacaaggcaactcttttctt

SEQ ID NO: 2229964 - DNA, 25 bp, Homo sapien
cacaaaagcgtcctgtagtttctgg

SEQ ID NO: 2229965 - DNA, 25 bp, Homo sapien
ctttcctttcgagtaaagttgagca

SEQ ID NO: 2229966 - DNA, 25 bp, Homo sapien
ctggaagtaggtcaggcttgtttga

SEQ ID NO: 2229967 - DNA, 25 bp, Homo sapien
aagtaggtcaggcttgtttgagtga

SEQ ID NO: 2229968 - DNA, 25 bp, Homo sapien
tcaggcttgtttgagtgaagtcagc

SEQ ID NO: 2229969 - DNA, 25 bp, Homo sapien
gtcaggcttgtttgagtgaagtcag

SEQ ID NO: 2229970 - DNA, 25 bp, Homo sapien
agagcctcctgaaactcactcagtg

SEQ ID NO: 2229971 - DNA, 25 bp, Homo sapien
ggtggttgtcagtttctggcttttc

SEQ ID NO: 2229972 - DNA, 25 bp, Homo sapien
ctcagtgcaatacaaaggagggatc

SEQ ID NO: 2229973 - DNA, 25 bp, Homo sapien
tcctgaaactcactcagtgcaatac

SEQ ID NO: 2229974 - DNA, 25 bp, Homo sapien
gggcttagttgtcccagatctttcc

SEQ ID NO: 2229975 - DNA, 25 bp, Homo sapien
gagaagctgcaggattatgaaagcc

SEQ ID NO: 2229976 - DNA, 25 bp, Homo sapien
gcatgtcatacacttgcctgctcat

SEQ ID NO: 2229977 - DNA, 25 bp, Homo sapien
caggattatgaaagcccagcatgtc

SEQ ID NO: 2229978 - DNA, 25 bp, Homo sapien
aacatgggctcaggggggtgggcga

SEQ ID NO: 2229979 - DNA, 25 bp, Homo sapien
ttctaaacatgggctcaggggggtg

SEQ ID NO: 2229980 - DNA, 25 bp, Homo sapien
taaacatgggctcaggggggtgggc

SEQ ID NO: 2229981 - DNA, 25 bp, Homo sapien
tctaaacatgggctcaggggggtgg

SEQ ID NO: 2229982 - DNA, 25 bp, Homo sapien
taattgaatagacacgatggcactg

SEQ ID NO: 2229983 - DNA, 25 bp, Homo sapien
tcacatcggccgtaagtgacagaat

SEQ ID NO: 2229984 - DNA, 25 bp, Homo sapien
cacccaggcgtgatttcaaagtcga

SEQ ID NO: 2229985 - DNA, 25 bp, Homo sapien
cactgataagccagaggtcttttcc

SEQ ID NO: 2229986 - DNA, 25 bp, Homo sapien
gacacataatgattgcacacattta

SEQ ID NO: 2229987 - DNA, 25 bp, Homo sapien
ggtacgtacgtataatgtgtaatga

SEQ ID NO: 2229988 - DNA, 25 bp, Homo sapien
tggaggtttctcaaacaacgaaaca

SEQ ID NO: 2229989 - DNA, 25 bp, Homo sapien
cagtcagcctactgtgctatcagaa

SEQ ID NO: 2229990 - DNA, 25 bp, Homo sapien
ggatgtctacctcagtcgaaatgga

SEQ ID NO: 2229991 - DNA, 25 bp, Homo sapien
tcttgcctgaagaggttgaatgcaa

SEQ ID NO: 2229992 - DNA, 25 bp, Homo sapien
gcatacagtgtcttaaaccatagca

SEQ ID NO: 2229993 - DNA, 25 bp, Homo sapien
tttgcttcacaaacaggcttatcct

SEQ ID NO: 2229994 - DNA, 25 bp, Homo sapien
ctctgctaggcaagttctgctagaa

SEQ ID NO: 2229995 - DNA, 25 bp, Homo sapien
tgtcctgttgtctgtgcagctctca

SEQ ID NO: 2229996 - DNA, 25 bp, Homo sapien
aacacttgcctgacaagtgttcagc

SEQ ID NO: 2229997 - DNA, 25 bp, Homo sapien
gattgtcctgttgtctgtgcagctc

SEQ ID NO: 2229998 - DNA, 25 bp, Homo sapien
gatgccacaacgttgctctctaaag

SEQ ID NO: 2229999 - DNA, 25 bp, Homo sapien
acaacagcatagagcccgtatgtgg

SEQ ID NO: 2230000 - DNA, 25 bp, Homo sapien
cagtcactaatcaatacaacagcat

SEQ ID NO: 2230001 - DNA, 25 bp, Homo sapien
cccgtatgtggacaatgtggtgatt

SEQ ID NO: 2230002 - DNA, 25 bp, Homo sapien
tagacaactccccttagtgatgatg

SEQ ID NO: 2230003 - DNA, 25 bp, Homo sapien
catatcctgataagcggcaacaatg

SEQ ID NO: 2230004 - DNA, 25 bp, Homo sapien
gagctttgtcatgcccatatggtaa

SEQ ID NO: 2230005 - DNA, 25 bp, Homo sapien
ccaggcttgccaaggataaaccaca

SEQ ID NO: 2230006 - DNA, 25 bp, Homo sapien
tgcttctggactccttccacatgga

SEQ ID NO: 2230007 - DNA, 25 bp, Homo sapien
ttgcttctggactccttccacatgg

SEQ ID NO: 2230008 - DNA, 25 bp, Homo sapien
catgaggatttacggacaaaattac

SEQ ID NO: 2230009 - DNA, 25 bp, Homo sapien
tgtcctttctcatgaggatttacgg

SEQ ID NO: 2230010 - DNA, 25 bp, Homo sapien
cctttctcatgaggatttacggaca

SEQ ID NO: 2230011 - DNA, 25 bp, Homo sapien
tctcatgaggatttacggacaaaat

SEQ ID NO: 2230012 - DNA, 25 bp, Homo sapien
tggctctttgggtggttatgtcacg

SEQ ID NO: 2230013 - DNA, 25 bp, Homo sapien
cagagcaactggctctttgggtggt

SEQ ID NO: 2230014 - DNA, 25 bp, Homo sapien
ctttgggtggttatgtcacgtggcc

SEQ ID NO: 2230015 - DNA, 25 bp, Homo sapien
gttatgtcacgtggcctgcaagtta

SEQ ID NO: 2230016 - DNA, 25 bp, Homo sapien
gacaaagaagacatcggagggctcc

SEQ ID NO: 2230017 - DNA, 25 bp, Homo sapien
caaagaagacatcggagggctcctt

SEQ ID NO: 2230018 - DNA, 25 bp, Homo sapien
gaggatgtgaacgaagacaaagaag

SEQ ID NO: 2230019 - DNA, 25 bp, Homo sapien
ggaaacaaagaggatgtgaacgaag

SEQ ID NO: 2230020 - DNA, 25 bp, Homo sapien
agatttgcttgaaggcctccgcggg

SEQ ID NO: 2230021 - DNA, 25 bp, Homo sapien
ggagatttgcttgaaggcctccgcg

SEQ ID NO: 2230022 - DNA, 25 bp, Homo sapien
tgcttgaaggcctccgcggggatct

SEQ ID NO: 2230023 - DNA, 25 bp, Homo sapien
cctccgcggggatcttgccctcggt

SEQ ID NO: 2230024 - DNA, 25 bp, Homo sapien
gccctcctgacgacccagagacagc

SEQ ID NO: 2230025 - DNA, 25 bp, Homo sapien
ttcttggccctcctgacgacccaga

SEQ ID NO: 2230026 - DNA, 25 bp, Homo sapien
cttggccctcctgacgacccagaga

SEQ ID NO: 2230027 - DNA, 25 bp, Homo sapien
tggccctcctgacgacccagagaca

SEQ ID NO: 2230028 - DNA, 25 bp, Homo sapien
ctggccagctctagtgtagttccac

SEQ ID NO: 2230029 - DNA, 25 bp, Homo sapien
aaggcctggccagctctagtgtagt

SEQ ID NO: 2230030 - DNA, 25 bp, Homo sapien
tagtgtagttccactcattgtcctg

SEQ ID NO: 2230031 - DNA, 25 bp, Homo sapien
ctggagcatagtgaaggcctggcca

SEQ ID NO: 2230032 - DNA, 25 bp, Homo sapien
gagaccactccagtttcatcccaga

SEQ ID NO: 2230033 - DNA, 25 bp, Homo sapien
tgagaccactccagtttcatcccag

SEQ ID NO: 2230034 - DNA, 25 bp, Homo sapien
ttctgagaccactccagtttcatcc

SEQ ID NO: 2230035 - DNA, 25 bp, Homo sapien
cagactgggcagagaaagcctgcac

SEQ ID NO: 2230036 - DNA, 25 bp, Homo sapien
gcatccctcacaaacagctcgtcat

SEQ ID NO: 2230037 - DNA, 25 bp, Homo sapien
tccctcacaaacagctcgtcattca

SEQ ID NO: 2230038 - DNA, 25 bp, Homo sapien
tcacaaacagctcgtcattcacgat

SEQ ID NO: 2230039 - DNA, 25 bp, Homo sapien
ggcatccctcacaaacagctcgtca

SEQ ID NO: 2230040 - DNA, 25 bp, Homo sapien
caatgaaggtccgggtgaaggcgag

SEQ ID NO: 2230041 - DNA, 25 bp, Homo sapien
gggtagcaatgaaggtccgggtgaa

SEQ ID NO: 2230042 - DNA, 25 bp, Homo sapien
caggggtagcaatgaaggtccgggt

SEQ ID NO: 2230043 - DNA, 25 bp, Homo sapien
ctgccaggggtagcaatgaaggtcc

SEQ ID NO: 2230044 - DNA, 25 bp, Homo sapien
cttcaaagacaacaaacaccaccac

SEQ ID NO: 2230045 - DNA, 25 bp, Homo sapien
atctggggaggggactatacagaca

SEQ ID NO: 2230046 - DNA, 25 bp, Homo sapien
gggaggggactatacagacactcac

SEQ ID NO: 2230047 - DNA, 25 bp, Homo sapien
tggggaggggactatacagacactc

SEQ ID NO: 2230048 - DNA, 25 bp, Homo sapien
ggagttctgagagggagcccagcca

SEQ ID NO: 2230049 - DNA, 25 bp, Homo sapien
cttccttgaaaaccccattgacaga

SEQ ID NO: 2230050 - DNA, 25 bp, Homo sapien
cttgaaaaccccattgacagaaaag

SEQ ID NO: 2230051 - DNA, 25 bp, Homo sapien
tgaaaaccccattgacagaaaagca

SEQ ID NO: 2230052 - DNA, 25 bp, Homo sapien
tccttgaaaaccccattgacagaaa

SEQ ID NO: 2230053 - DNA, 25 bp, Homo sapien
aaaaggaagcgctcaggtgctcagg

SEQ ID NO: 2230054 - DNA, 25 bp, Homo sapien
ctctctgggcctgcccaagggagga

SEQ ID NO: 2230055 - DNA, 25 bp, Homo sapien
ggctctctgggcctgcccaagggag

SEQ ID NO: 2230056 - DNA, 25 bp, Homo sapien
tctgggcctgcccaagggaggaagc

SEQ ID NO: 2230057 - DNA, 25 bp, Homo sapien
tgggcctgcccaagggaggaagcag

SEQ ID NO: 2230058 - DNA, 25 bp, Homo sapien
ccacaatgtcacgttttgtgcgcct

SEQ ID NO: 2230059 - DNA, 25 bp, Homo sapien
gttttgtgcgcctcagcagttcccc

SEQ ID NO: 2230060 - DNA, 25 bp, Homo sapien
aatgtcacgttttgtgcgcctcagc

SEQ ID NO: 2230061 - DNA, 25 bp, Homo sapien
tgtcacgttttgtgcgcctcagcag

SEQ ID NO: 2230062 - DNA, 25 bp, Homo sapien
ccactcttccccatcacacacttac

SEQ ID NO: 2230063 - DNA, 25 bp, Homo sapien
cttgcccactcttccccatcacaca

SEQ ID NO: 2230064 - DNA, 25 bp, Homo sapien
gcccactcttccccatcacacactt

SEQ ID NO: 2230065 - DNA, 25 bp, Homo sapien
ttgcccactcttccccatcacacac

SEQ ID NO: 2230066 - DNA, 25 bp, Homo sapien
gggtccttgagtgttttcatattcc

SEQ ID NO: 2230067 - DNA, 25 bp, Homo sapien
ctcaaagtacttgcacaagctgctc

SEQ ID NO: 2230068 - DNA, 25 bp, Homo sapien
tcctcaaagtacttgcacaagctgc

SEQ ID NO: 2230069 - DNA, 25 bp, Homo sapien
tattcctgctatcctcaaagtactt

SEQ ID NO: 2230070 - DNA, 25 bp, Homo sapien
aggagaccctgtcgatctccagagt

SEQ ID NO: 2230071 - DNA, 25 bp, Homo sapien
ggagaagcaggcctcatcgtggtaa

SEQ ID NO: 2230072 - DNA, 25 bp, Homo sapien
gaagcaggcctcatcgtggtaagca

SEQ ID NO: 2230073 - DNA, 25 bp, Homo sapien
cctgtcgatctccagagtcatagat

SEQ ID NO: 2230074 - DNA, 25 bp, Homo sapien
ggactaaatgctttagggtctcaga

SEQ ID NO: 2230075 - DNA, 25 bp, Homo sapien
aaatgctttagggtctcagatccag

SEQ ID NO: 2230076 - DNA, 25 bp, Homo sapien
tgcaggaattgcaggactaaatgct

SEQ ID NO: 2230077 - DNA, 25 bp, Homo sapien
gggtctcagatccagtaaagttttc

SEQ ID NO: 2230078 - DNA, 25 bp, Homo sapien
gcaacccaaatcttgcttggtcctt

SEQ ID NO: 2230079 - DNA, 25 bp, Homo sapien
caacccaaatcttgcttggtccttc

SEQ ID NO: 2230080 - DNA, 25 bp, Homo sapien
ctggtgcggataactctcggccgtc

SEQ ID NO: 2230081 - DNA, 25 bp, Homo sapien
atcactggtgcggataactctcggc

SEQ ID NO: 2230082 - DNA, 25 bp, Homo sapien
gtcaacaatcactggtgcggataac

SEQ ID NO: 2230083 - DNA, 25 bp, Homo sapien
acaatcactggtgcggataactctc

SEQ ID NO: 2230084 - DNA, 25 bp, Homo sapien
ccagggagacaagcatcagaggcta

SEQ ID NO: 2230085 - DNA, 25 bp, Homo sapien
cgataagatgaacatgcccagggag

SEQ ID NO: 2230086 - DNA, 25 bp, Homo sapien
agatggagctggatgatcgataaga

SEQ ID NO: 2230087 - DNA, 25 bp, Homo sapien
catgcccagggagacaagcatcaga

SEQ ID NO: 2230088 - DNA, 25 bp, Homo sapien
cttggggaaacaatcccggatggca

SEQ ID NO: 2230089 - DNA, 25 bp, Homo sapien
caacttggggaaacaatcccggatg

SEQ ID NO: 2230090 - DNA, 25 bp, Homo sapien
aggagtgaagagtcaggccccagct

SEQ ID NO: 2230091 - DNA, 25 bp, Homo sapien
gaggagtgaagagtcaggccccagc

SEQ ID NO: 2230092 - DNA, 25 bp, Homo sapien
ctttttggagcaagagaaggagaac

SEQ ID NO: 2230093 - DNA, 25 bp, Homo sapien
ggcaggaaggcctgtctcagcatga

SEQ ID NO: 2230094 - DNA, 25 bp, Homo sapien
aacgggttcccttctagccatagct

SEQ ID NO: 2230095 - DNA, 25 bp, Homo sapien
ccgagaaggtgctgcacaacgggtt

SEQ ID NO: 2230096 - DNA, 25 bp, Homo sapien
agctcttcgagcttcagccctttca

SEQ ID NO: 2230097 - DNA, 25 bp, Homo sapien
taggcggactggtccgagaaggtgc

SEQ ID NO: 2230098 - DNA, 25 bp, Homo sapien
ctctgtaatgtcagaaaggccatcc

SEQ ID NO: 2230099 - DNA, 25 bp, Homo sapien
taatgtcagaaaggccatccagctg

SEQ ID NO: 2230100 - DNA, 25 bp, Homo sapien
ccttctctgtaatgtcagaaaggcc

SEQ ID NO: 2230101 - DNA, 25 bp, Homo sapien
cagaaaggccatccagctggtacag

SEQ ID NO: 2230102 - DNA, 25 bp, Homo sapien
attatatcaatgtcacggcccatca

SEQ ID NO: 2230103 - DNA, 25 bp, Homo sapien
atatcaatgtcacggcccatcaagt

SEQ ID NO: 2230104 - DNA, 25 bp, Homo sapien
ttatatcaatgtcacggcccatcaa

SEQ ID NO: 2230105 - DNA, 25 bp, Homo sapien
tatatcaatgtcacggcccatcaag

SEQ ID NO: 2230106 - DNA, 25 bp, Homo sapien
agacattgtaccgtttgttcatggt

SEQ ID NO: 2230107 - DNA, 25 bp, Homo sapien
gcctggcttcaacttattcttcaca

SEQ ID NO: 2230108 - DNA, 25 bp, Homo sapien
aatgcggaggcagcgctagcatcct

SEQ ID NO: 2230109 - DNA, 25 bp, Homo sapien
ggaggcagcgctagcatcctggaca

SEQ ID NO: 2230110 - DNA, 25 bp, Homo sapien
cggaggcagcgctagcatcctggac

SEQ ID NO: 2230111 - DNA, 25 bp, Homo sapien
ttcaatgcggaggcagcgctagcat

SEQ ID NO: 2230112 - DNA, 25 bp, Homo sapien
ggattgaattcattagccatgcctt

SEQ ID NO: 2230113 - DNA, 25 bp, Homo sapien
attgaattcattagccatgccttgt

SEQ ID NO: 2230114 - DNA, 25 bp, Homo sapien
gattgaattcattagccatgccttg

SEQ ID NO: 2230115 - DNA, 25 bp, Homo sapien
ttgaattcattagccatgccttgtc

SEQ ID NO: 2230116 - DNA, 25 bp, Homo sapien
tacggatttcgtcttcactatgcca

SEQ ID NO: 2230117 - DNA, 25 bp, Homo sapien
ctatttctccacgtggtaatacgga

SEQ ID NO: 2230118 - DNA, 25 bp, Homo sapien
tgtgaccttaaaccagttccttgtg

SEQ ID NO: 2230119 - DNA, 25 bp, Homo sapien
ttcgcatcggatgctataaggagtg

SEQ ID NO: 2230120 - DNA, 25 bp, Homo sapien
gttggtccttgtggacatccctcat

SEQ ID NO: 2230121 - DNA, 25 bp, Homo sapien
agttgttggtccttgtggacatccc

SEQ ID NO: 2230122 - DNA, 25 bp, Homo sapien
tcttagttgttggtccttgtggaca

SEQ ID NO: 2230123 - DNA, 25 bp, Homo sapien
tgtcttagttgttggtccttgtgga

SEQ ID NO: 2230124 - DNA, 25 bp, Homo sapien
gaaaagtgctaccatggtcatggca

SEQ ID NO: 2230125 - DNA, 25 bp, Homo sapien
cagtgtgaaggcgggcgctcatacc

SEQ ID NO: 2230126 - DNA, 25 bp, Homo sapien
ccttgaaaagtgctaccatggtcat

SEQ ID NO: 2230127 - DNA, 25 bp, Homo sapien
ctcttgtcaaaattatcccggaaag

SEQ ID NO: 2230128 - DNA, 25 bp, Homo sapien
acgtaccacgtcgtgagctaactcc

SEQ ID NO: 2230129 - DNA, 25 bp, Homo sapien
cacgtaccacgtcgtgagctaactc

SEQ ID NO: 2230130 - DNA, 25 bp, Homo sapien
gtaccacgtcgtgagctaactccat

SEQ ID NO: 2230131 - DNA, 25 bp, Homo sapien
cgtaccacgtcgtgagctaactcca

SEQ ID NO: 2230132 - DNA, 25 bp, Homo sapien
cttatctcacaggtggcacaatcag

SEQ ID NO: 2230133 - DNA, 25 bp, Homo sapien
ggtagggctagcaaagtgccaaccc

SEQ ID NO: 2230134 - DNA, 25 bp, Homo sapien
gcaaagtgccaacccgccacataag

SEQ ID NO: 2230135 - DNA, 25 bp, Homo sapien
tgcctgtccagatacaagagcctta

SEQ ID NO: 2230136 - DNA, 25 bp, Homo sapien
aacatctggcgtttattgagggaga

SEQ ID NO: 2230137 - DNA, 25 bp, Homo sapien
aaatacgtgttagttgcattcgttg

SEQ ID NO: 2230138 - DNA, 25 bp, Homo sapien
tgagggagaaatacgtgttagttgc

SEQ ID NO: 2230139 - DNA, 25 bp, Homo sapien
gttgcattcgttgttattagtcctc

SEQ ID NO: 2230140 - DNA, 25 bp, Homo sapien
cggaaggattcagtagggagcttaa

SEQ ID NO: 2230141 - DNA, 25 bp, Homo sapien
tgcggaaggattcagtagggagctt

SEQ ID NO: 2230142 - DNA, 25 bp, Homo sapien
gaaacaggttatgcggaaggattca

SEQ ID NO: 2230143 - DNA, 25 bp, Homo sapien
atgaaacaggttatgcggaaggatt

SEQ ID NO: 2230144 - DNA, 25 bp, Homo sapien
cagtttagcttcaagccggacacaa

SEQ ID NO: 2230145 - DNA, 25 bp, Homo sapien
tgtggtggccccggctttaccactg

SEQ ID NO: 2230146 - DNA, 25 bp, Homo sapien
cggcagtttagcttcaagccggaca

SEQ ID NO: 2230147 - DNA, 25 bp, Homo sapien
cttgccggcagtttagcttcaagcc

SEQ ID NO: 2230148 - DNA, 25 bp, Homo sapien
cacacttctttagagtagagcacat

SEQ ID NO: 2230149 - DNA, 25 bp, Homo sapien
ttgtcctgacactacagtctcacag

SEQ ID NO: 2230150 - DNA, 25 bp, Homo sapien
ttcagttctgtatgtcccacacttc

SEQ ID NO: 2230151 - DNA, 25 bp, Homo sapien
gtctcacagaacgaacttggaaatg

SEQ ID NO: 2230152 - DNA, 25 bp, Homo sapien
ttaagattgggtctggaatcgtcta

SEQ ID NO: 2230153 - DNA, 25 bp, Homo sapien
tacaaactgggatctaggcagtctc

SEQ ID NO: 2230154 - DNA, 25 bp, Homo sapien
ggcagtctcgagtgtccttaataac

SEQ ID NO: 2230155 - DNA, 25 bp, Homo sapien
tctggaatcgtctatacaaactggg

SEQ ID NO: 2230156 - DNA, 25 bp, Homo sapien
tcagtaaacttctagtaccggctgg

SEQ ID NO: 2230157 - DNA, 25 bp, Homo sapien
gaaagttgccggaaggcttcagatc

SEQ ID NO: 2230158 - DNA, 25 bp, Homo sapien
cagcgcgtcaggatatgaaagttgc

SEQ ID NO: 2230159 - DNA, 25 bp, Homo sapien
gcttcagatctgagccgaagtccaa

SEQ ID NO: 2230160 - DNA, 25 bp, Homo sapien
tctgacaggattcggagcactcaat

SEQ ID NO: 2230161 - DNA, 25 bp, Homo sapien
cacctctctgacaggattcggagca

SEQ ID NO: 2230162 - DNA, 25 bp, Homo sapien
gtggagccggaagcacctctctgac

SEQ ID NO: 2230163 - DNA, 25 bp, Homo sapien
gccggaagcacctctctgacaggat

SEQ ID NO: 2230164 - DNA, 25 bp, Homo sapien
ttggggatccatgctagtggcttta

SEQ ID NO: 2230165 - DNA, 25 bp, Homo sapien
ttttggggatccatgctagtggctt

SEQ ID NO: 2230166 - DNA, 25 bp, Homo sapien
gggatccatgctagtggctttagga

SEQ ID NO: 2230167 - DNA, 25 bp, Homo sapien
tggggatccatgctagtggctttag

SEQ ID NO: 2230168 - DNA, 25 bp, Homo sapien
tcaaggaaggcatcataggaatggc

SEQ ID NO: 2230169 - DNA, 25 bp, Homo sapien
cataggaatggcaatcagccctaca

SEQ ID NO: 2230170 - DNA, 25 bp, Homo sapien
gcatcataggaatggcaatcagccc

SEQ ID NO: 2230171 - DNA, 25 bp, Homo sapien
ccctgaacagccaggatttccaccc

SEQ ID NO: 2230172 - DNA, 25 bp, Homo sapien
atgagatggatgggcatcagctcct

SEQ ID NO: 2230173 - DNA, 25 bp, Homo sapien
tgtgagattctgatgactgaatcct

SEQ ID NO: 2230174 - DNA, 25 bp, Homo sapien
tctgtgagattctgatgactgaatc

SEQ ID NO: 2230175 - DNA, 25 bp, Homo sapien
atttatctctgtgagattctgatga

SEQ ID NO: 2230176 - DNA, 25 bp, Homo sapien
tcaagagattcctcagatttgcgga

SEQ ID NO: 2230177 - DNA, 25 bp, Homo sapien
tcaattttgcccagtgcgagccatg

SEQ ID NO: 2230178 - DNA, 25 bp, Homo sapien
ggctgctgacagtcaaatgctgaca

SEQ ID NO: 2230179 - DNA, 25 bp, Homo sapien
ctcatgataagaaggagtagctcac

SEQ ID NO: 2230180 - DNA, 25 bp, Homo sapien
caacagtcttaggtgggtaacctca

SEQ ID NO: 2230181 - DNA, 25 bp, Homo sapien
tcatagcaatggacagggacaggat

SEQ ID NO: 2230182 - DNA, 25 bp, Homo sapien
gaagactcgtgagcacaggcattgt

SEQ ID NO: 2230183 - DNA, 25 bp, Homo sapien
caacgctgttaagtgctgcagaaga

SEQ ID NO: 2230184 - DNA, 25 bp, Homo sapien
tgtctgggtcctgctttaaatccag

SEQ ID NO: 2230185 - DNA, 25 bp, Homo sapien
ctgctttaaatccaggaccctccgt

SEQ ID NO: 2230186 - DNA, 25 bp, Homo sapien
tcagagcatgtggttctgctgtctg

SEQ ID NO: 2230187 - DNA, 25 bp, Homo sapien
gcatgtggttctgctgtctgggtcc

SEQ ID NO: 2230188 - DNA, 25 bp, Homo sapien
tccatgttgttcttctatgtaatca

SEQ ID NO: 2230189 - DNA, 25 bp, Homo sapien
tcctccgatcctccccagtctggtg

SEQ ID NO: 2230190 - DNA, 25 bp, Homo sapien
tgtacaaactcaacatcttttattg

SEQ ID NO: 2230191 - DNA, 25 bp, Homo sapien
cccagtctggtgtccatgttgttct

SEQ ID NO: 2230192 - DNA, 25 bp, Homo sapien
cattagagtccttaaggtgacccca

SEQ ID NO: 2230193 - DNA, 25 bp, Homo sapien
cagagatcctcagcattcaccgtca

SEQ ID NO: 2230194 - DNA, 25 bp, Homo sapien
ggtgaccccaagtgttggaccaaca

SEQ ID NO: 2230195 - DNA, 25 bp, Homo sapien
taatcacctctgtaagacattagag

SEQ ID NO: 2230196 - DNA, 25 bp, Homo sapien
tgcagcataccctcctgatgactca

SEQ ID NO: 2230197 - DNA, 25 bp, Homo sapien
ggctgcagcataccctcctgatgac

SEQ ID NO: 2230198 - DNA, 25 bp, Homo sapien
tgggagactgttaggccaccccctg

SEQ ID NO: 2230199 - DNA, 25 bp, Homo sapien
tcaggctgcagcataccctcctgat

SEQ ID NO: 2230200 - DNA, 25 bp, Homo sapien
atgtctctagtgtacatagggttac

SEQ ID NO: 2230201 - DNA, 25 bp, Homo sapien
tatgtctctagtgtacatagggtta

SEQ ID NO: 2230202 - DNA, 25 bp, Homo sapien
gagacaacgggagggccaaatcctc

SEQ ID NO: 2230203 - DNA, 25 bp, Homo sapien
tcaacggtccaacatggagacaacg

SEQ ID NO: 2230204 - DNA, 25 bp, Homo sapien
tcatagtgtgactcccttacactca

SEQ ID NO: 2230205 - DNA, 25 bp, Homo sapien
ggaggatctgcaggaccatcaatcg

SEQ ID NO: 2230206 - DNA, 25 bp, Homo sapien
agtgatgaacaatggaacaaagagg

SEQ ID NO: 2230207 - DNA, 25 bp, Homo sapien
agactccatgcagcgagctctagca

SEQ ID NO: 2230208 - DNA, 25 bp, Homo sapien
tcctcaagagcatggatagctgcag

SEQ ID NO: 2230209 - DNA, 25 bp, Homo sapien
caaagaggtctcatgggagctcctc

SEQ ID NO: 2230210 - DNA, 25 bp, Homo sapien
gtctcagtacaaggcaaatccagtg

SEQ ID NO: 2230211 - DNA, 25 bp, Homo sapien
gataaagacgagataccaactgaag

SEQ ID NO: 2230212 - DNA, 25 bp, Homo sapien
gaaggcctcgctaatttccataaag

SEQ ID NO: 2230213 - DNA, 25 bp, Homo sapien
aaagcacaaaggctcttctacctgg

SEQ ID NO: 2230214 - DNA, 25 bp, Homo sapien
aataaagattgaggaaatgtcagcc

SEQ ID NO: 2230215 - DNA, 25 bp, Homo sapien
tggaagaccaataaagattgaggaa

SEQ ID NO: 2230216 - DNA, 25 bp, Homo sapien
gcaatgaagcgtcctggataagatc

SEQ ID NO: 2230217 - DNA, 25 bp, Homo sapien
atgaagaccaaatgcaatgaagcgt

SEQ ID NO: 2230218 - DNA, 25 bp, Homo sapien
tggaagaagacttggaaccaacctg

SEQ ID NO: 2230219 - DNA, 25 bp, Homo sapien
taattggaagaagacttggaaccaa

SEQ ID NO: 2230220 - DNA, 25 bp, Homo sapien
ctaattggaagaagacttggaacca

SEQ ID NO: 2230221 - DNA, 25 bp, Homo sapien
gcttggagctggtaactttttgctt

SEQ ID NO: 2230222 - DNA, 25 bp, Homo sapien
tgggagggggactgtctataaccat

SEQ ID NO: 2230223 - DNA, 25 bp, Homo sapien
gactgtctataaccattatcctatg

SEQ ID NO: 2230224 - DNA, 25 bp, Homo sapien
taaccattatcctatgtccatgtca

SEQ ID NO: 2230225 - DNA, 25 bp, Homo sapien
ttcaactcaagctgcctagctttga

SEQ ID NO: 2230226 - DNA, 25 bp, Homo sapien
ctagtccagtggttttgaaacagtc

SEQ ID NO: 2230227 - DNA, 25 bp, Homo sapien
tcatctagtccagtggttttgaaac

SEQ ID NO: 2230228 - DNA, 25 bp, Homo sapien
ctcttattcgtgatcttctggaaag

SEQ ID NO: 2230229 - DNA, 25 bp, Homo sapien
ttgggccagttggtgcttacatgct

SEQ ID NO: 2230230 - DNA, 25 bp, Homo sapien
tcgactaaccacaggtgatgtcctc

SEQ ID NO: 2230231 - DNA, 25 bp, Homo sapien
tgagtccctgttgccatagctgggg

SEQ ID NO: 2230232 - DNA, 25 bp, Homo sapien
tgtgtcctggctatagcgaggaaga

SEQ ID NO: 2230233 - DNA, 25 bp, Homo sapien
tctcagcatagtatgggccaaatac

SEQ ID NO: 2230234 - DNA, 25 bp, Homo sapien
tttaggatctcagcatagtatgggc

SEQ ID NO: 2230235 - DNA, 25 bp, Homo sapien
ggatctcagcatagtatgggccaaa

SEQ ID NO: 2230236 - DNA, 25 bp, Homo sapien
tgtgttttaggatctcagcatagta

SEQ ID NO: 2230237 - DNA, 25 bp, Homo sapien
gattgagaaacttccagcccagttc

SEQ ID NO: 2230238 - DNA, 25 bp, Homo sapien
ctgattatgatgcatcagattgaga

SEQ ID NO: 2230239 - DNA, 25 bp, Homo sapien
tgctgattatgatgcatcagattga

SEQ ID NO: 2230240 - DNA, 25 bp, Homo sapien
ttgagaaacttccagcccagttctg

SEQ ID NO: 2230241 - DNA, 25 bp, Homo sapien
atttgagaaaaaaacggatccactg

SEQ ID NO: 2230242 - DNA, 25 bp, Homo sapien
ctgcatgccatgaagcaaacagcat

SEQ ID NO: 2230243 - DNA, 25 bp, Homo sapien
agcatttgagaaaaaaacggatcca

SEQ ID NO: 2230244 - DNA, 25 bp, Homo sapien
ttgagaaaaaaacggatccactgat

SEQ ID NO: 2230245 - DNA, 25 bp, Homo sapien
acaatgacaagaggaacgaagacgg

SEQ ID NO: 2230246 - DNA, 25 bp, Homo sapien
tgacaagaggaacgaagacggtaca

SEQ ID NO: 2230247 - DNA, 25 bp, Homo sapien
gaggaacgaagacggtacagaagaa

SEQ ID NO: 2230248 - DNA, 25 bp, Homo sapien
cgaagacggtacagaagaaattcac

SEQ ID NO: 2230249 - DNA, 25 bp, Homo sapien
tgccacttttctgcacgacgaccat

SEQ ID NO: 2230250 - DNA, 25 bp, Homo sapien
cttttctgcacgacgaccatggaga

SEQ ID NO: 2230251 - DNA, 25 bp, Homo sapien
tctgcacgacgaccatggagattct

SEQ ID NO: 2230252 - DNA, 25 bp, Homo sapien
gcacgacgaccatggagattcttac

SEQ ID NO: 2230253 - DNA, 25 bp, Homo sapien
tcactgctcagagtagtgaggccca

SEQ ID NO: 2230254 - DNA, 25 bp, Homo sapien
ctcacactcagcatagtctcttcag

SEQ ID NO: 2230255 - DNA, 25 bp, Homo sapien
tgttctggagttggcctagaagaga

SEQ ID NO: 2230256 - DNA, 25 bp, Homo sapien
tcttggtgatgttctggagttggcc

SEQ ID NO: 2230257 - DNA, 25 bp, Homo sapien
aaattcctcagttagggccttggtg

SEQ ID NO: 2230258 - DNA, 25 bp, Homo sapien
cttggtggtgcatttcagtctatcc

SEQ ID NO: 2230259 - DNA, 25 bp, Homo sapien
caggtgatctgaataaaacttcacc

SEQ ID NO: 2230260 - DNA, 25 bp, Homo sapien
taaaacttcaccagagaagcttctg

SEQ ID NO: 2230261 - DNA, 25 bp, Homo sapien
ggtatagcaccattgttggactggg

SEQ ID NO: 2230262 - DNA, 25 bp, Homo sapien
gaggttcaggtagccttggtatagc

SEQ ID NO: 2230263 - DNA, 25 bp, Homo sapien
tagccttggtatagcaccattgttg

SEQ ID NO: 2230264 - DNA, 25 bp, Homo sapien
ttctacgttttcaagatcccagagg

SEQ ID NO: 2230265 - DNA, 25 bp, Homo sapien
tggaagtgaacacgccatgctgcag

SEQ ID NO: 2230266 - DNA, 25 bp, Homo sapien
caggagaactcggacatagtgtagt

SEQ ID NO: 2230267 - DNA, 25 bp, Homo sapien
ctgccccgcttggaagtgaacacgc

SEQ ID NO: 2230268 - DNA, 25 bp, Homo sapien
tgtggctgctttggttagccatttt

SEQ ID NO: 2230269 - DNA, 25 bp, Homo sapien
tgaggtcaaatctcccctctcctgc

SEQ ID NO: 2230270 - DNA, 25 bp, Homo sapien
ctgaggtcaaatctcccctctcctg

SEQ ID NO: 2230271 - DNA, 25 bp, Homo sapien
aatgttcctgcaggtagggtcgaaa

SEQ ID NO: 2230272 - DNA, 25 bp, Homo sapien
tttcattaggcccagaacacggagg

SEQ ID NO: 2230273 - DNA, 25 bp, Homo sapien
tgggctgtttatcaaggagttcctg

SEQ ID NO: 2230274 - DNA, 25 bp, Homo sapien
aaagctctggatggtatagttcacc

SEQ ID NO: 2230275 - DNA, 25 bp, Homo sapien
gtttctgtatcgcttcatctcgaac

SEQ ID NO: 2230276 - DNA, 25 bp, Homo sapien
catctcgaaccggtgcacatagcag

SEQ ID NO: 2230277 - DNA, 25 bp, Homo sapien
tgcacatagcagagccatcaaattg

SEQ ID NO: 2230278 - DNA, 25 bp, Homo sapien
gatctcttatggtctctagtttctg

SEQ ID NO: 2230279 - DNA, 25 bp, Homo sapien
ccatggtaatagcagtgatagcaag

SEQ ID NO: 2230280 - DNA, 25 bp, Homo sapien
ctgccatggtaatagcagtgatagc

SEQ ID NO: 2230281 - DNA, 25 bp, Homo sapien
atggtaatagcagtgatagcaaggt

SEQ ID NO: 2230282 - DNA, 25 bp, Homo sapien
gccatggtaatagcagtgatagcaa

SEQ ID NO: 2230283 - DNA, 25 bp, Homo sapien
tgctcttaggccaaaggcatcccag

SEQ ID NO: 2230284 - DNA, 25 bp, Homo sapien
tagaggacaattaccattcaaggct

SEQ ID NO: 2230285 - DNA, 25 bp, Homo sapien
agggctcgcctattcatctccggga

SEQ ID NO: 2230286 - DNA, 25 bp, Homo sapien
caagttccttgtgggcaagggctcg

SEQ ID NO: 2230287 - DNA, 25 bp, Homo sapien
gaagttcaagggcacaagtgaagtc

SEQ ID NO: 2230288 - DNA, 25 bp, Homo sapien
gaagtcaggaggagtactcaatagc

SEQ ID NO: 2230289 - DNA, 25 bp, Homo sapien
ccttaacatcttttagaagttcaag

SEQ ID NO: 2230290 - DNA, 25 bp, Homo sapien
actcaatagctgttctttcagatgg

SEQ ID NO: 2230291 - DNA, 25 bp, Homo sapien
gaagggttaaatgagcagattgctc

SEQ ID NO: 2230292 - DNA, 25 bp, Homo sapien
ggttaaatgagcagattgctctttt

SEQ ID NO: 2230293 - DNA, 25 bp, Homo sapien
aagaagggttaaatgagcagattgc

SEQ ID NO: 2230294 - DNA, 25 bp, Homo sapien
aagggttaaatgagcagattgctct

SEQ ID NO: 2230295 - DNA, 25 bp, Homo sapien
caatttcatgtgaaatgctcagctt

SEQ ID NO: 2230296 - DNA, 25 bp, Homo sapien
gaaatcttggtttactacaatttca

SEQ ID NO: 2230297 - DNA, 25 bp, Homo sapien
caggagactggtcatctaaacagaa

SEQ ID NO: 2230298 - DNA, 25 bp, Homo sapien
tgggatcattctggagcacagtttc

SEQ ID NO: 2230299 - DNA, 25 bp, Homo sapien
ctcagtcttcggcatcttgatgtta

SEQ ID NO: 2230300 - DNA, 25 bp, Homo sapien
cattctctgctacactgggatcatt

SEQ ID NO: 2230301 - DNA, 25 bp, Homo sapien
ctcgtcctcgactggcggcctcgcc

SEQ ID NO: 2230302 - DNA, 25 bp, Homo sapien
gtctgctagcgaagcccctctgcct

SEQ ID NO: 2230303 - DNA, 25 bp, Homo sapien
tgcgtctgctagcgaagcccctctg

SEQ ID NO: 2230304 - DNA, 25 bp, Homo sapien
ctctgcgtctgctagcgaagcccct

SEQ ID NO: 2230305 - DNA, 25 bp, Homo sapien
gaaccatggagattatgaggtccac

SEQ ID NO: 2230306 - DNA, 25 bp, Homo sapien
gtaggacggaaccatggagattatg

SEQ ID NO: 2230307 - DNA, 25 bp, Homo sapien
gacggaaccatggagattatgaggt

SEQ ID NO: 2230308 - DNA, 25 bp, Homo sapien
atcagggaggagtaggacggaacca

SEQ ID NO: 2230309 - DNA, 25 bp, Homo sapien
cttgcccagggtgccttggaaacca

SEQ ID NO: 2230310 - DNA, 25 bp, Homo sapien
ctgtgacacaagataggagagtcca

SEQ ID NO: 2230311 - DNA, 25 bp, Homo sapien
tggaaaccaagacggcaggaaacgc

SEQ ID NO: 2230312 - DNA, 25 bp, Homo sapien
agggtgatccgtttccagggtagcg

SEQ ID NO: 2230313 - DNA, 25 bp, Homo sapien
tgagatagacgtaaggaggcttcat

SEQ ID NO: 2230314 - DNA, 25 bp, Homo sapien
ggaggctgagatagacgtaaggagg

SEQ ID NO: 2230315 - DNA, 25 bp, Homo sapien
ggctgagatagacgtaaggaggctt

SEQ ID NO: 2230316 - DNA, 25 bp, Homo sapien
gctgagatagacgtaaggaggcttc

SEQ ID NO: 2230317 - DNA, 25 bp, Homo sapien
tacagtgtatgggaatcaggctctt

SEQ ID NO: 2230318 - DNA, 25 bp, Homo sapien
agtgtatgggaatcaggctctttct

SEQ ID NO: 2230319 - DNA, 25 bp, Homo sapien
cagtgtatgggaatcaggctctttc

SEQ ID NO: 2230320 - DNA, 25 bp, Homo sapien
ttacagtgtatgggaatcaggctct

SEQ ID NO: 2230321 - DNA, 25 bp, Homo sapien
tcctcctcattgccaatggctccaa

SEQ ID NO: 2230322 - DNA, 25 bp, Homo sapien
cctcctcattgccaatggctccaac

SEQ ID NO: 2230323 - DNA, 25 bp, Homo sapien
gcttcaatggtctgacaggaaacat

SEQ ID NO: 2230324 - DNA, 25 bp, Homo sapien
tgagcttcaatggtctgacaggaaa

SEQ ID NO: 2230325 - DNA, 25 bp, Homo sapien
ctgagcttcaatggtctgacaggaa

SEQ ID NO: 2230326 - DNA, 25 bp, Homo sapien
gagcttcaatggtctgacaggaaac

SEQ ID NO: 2230327 - DNA, 25 bp, Homo sapien
gcttgtggaactttcagctatagcg

SEQ ID NO: 2230328 - DNA, 25 bp, Homo sapien
ctttcagctatagcgaaaaaatggc

SEQ ID NO: 2230329 - DNA, 25 bp, Homo sapien
ggaactttcagctatagcgaaaaaa

SEQ ID NO: 2230330 - DNA, 25 bp, Homo sapien
cagctatagcgaaaaaatggctgcc

SEQ ID NO: 2230331 - DNA, 25 bp, Homo sapien
tatccagtataggatgcaagaacta

SEQ ID NO: 2230332 - DNA, 25 bp, Homo sapien
caggcttatccagtataggatgcaa

SEQ ID NO: 2230333 - DNA, 25 bp, Homo sapien
cagtataggatgcaagaactacata

SEQ ID NO: 2230334 - DNA, 25 bp, Homo sapien
taaaacaggcttatccagtatagga

SEQ ID NO: 2230335 - DNA, 25 bp, Homo sapien
gaagatatccgaagacgcctaaaat

SEQ ID NO: 2230336 - DNA, 25 bp, Homo sapien
acaaaggtcatcaatggtgagatta

SEQ ID NO: 2230337 - DNA, 25 bp, Homo sapien
atctggaacatatgcaccaatggta

SEQ ID NO: 2230338 - DNA, 25 bp, Homo sapien
cttcttagccagggaacataggtga

SEQ ID NO: 2230339 - DNA, 25 bp, Homo sapien
tcaagactctcaggtaatgtcgaaa

SEQ ID NO: 2230340 - DNA, 25 bp, Homo sapien
taaaatcaagactctcaggtaatgt

SEQ ID NO: 2230341 - DNA, 25 bp, Homo sapien
tctcaggtaatgtcgaaatctgctg

SEQ ID NO: 2230342 - DNA, 25 bp, Homo sapien
aatgtcgaaatctgctgttgggagg

SEQ ID NO: 2230343 - DNA, 25 bp, Homo sapien
tatgatgtttgaacacactctttct

SEQ ID NO: 2230344 - DNA, 25 bp, Homo sapien
tgaacacactctttctcttgctgga

SEQ ID NO: 2230345 - DNA, 25 bp, Homo sapien
acacactctttctcttgctggatag

SEQ ID NO: 2230346 - DNA, 25 bp, Homo sapien
ttatgatgtttgaacacactctttc

SEQ ID NO: 2230347 - DNA, 25 bp, Homo sapien
aaacttctccacttccgacaagtct

SEQ ID NO: 2230348 - DNA, 25 bp, Homo sapien
gtcaaacttctccacttccgacaag

SEQ ID NO: 2230349 - DNA, 25 bp, Homo sapien
acttctccacttccgacaagtctgg

SEQ ID NO: 2230350 - DNA, 25 bp, Homo sapien
acctgtcaaacttctccacttccga

SEQ ID NO: 2230351 - DNA, 25 bp, Homo sapien
agactcgctccggaccaggttagcg

SEQ ID NO: 2230352 - DNA, 25 bp, Homo sapien
tgagacccagactcgctccggacca

SEQ ID NO: 2230353 - DNA, 25 bp, Homo sapien
gaccaggttagcgttcccgcgcaga

SEQ ID NO: 2230354 - DNA, 25 bp, Homo sapien
tcgctccggaccaggttagcgttcc

SEQ ID NO: 2230355 - DNA, 25 bp, Homo sapien
catctcgcccagtgagcttagaaca

SEQ ID NO: 2230356 - DNA, 25 bp, Homo sapien
caagctgaatgaccggtatttaggc

SEQ ID NO: 2230357 - DNA, 25 bp, Homo sapien
tgcaataagcagacacatctcgccc

SEQ ID NO: 2230358 - DNA, 25 bp, Homo sapien
aacatctggaactccgaggtccaag

SEQ ID NO: 2230359 - DNA, 25 bp, Homo sapien
gagatttgtctattacattgtgaaa

SEQ ID NO: 2230360 - DNA, 25 bp, Homo sapien
ctgagatttgtctattacattgtga

SEQ ID NO: 2230361 - DNA, 25 bp, Homo sapien
tacattgtgaaaatagtaaaagcaa

SEQ ID NO: 2230362 - DNA, 25 bp, Homo sapien
tactgagatttgtctattacattgt

SEQ ID NO: 2230363 - DNA, 25 bp, Homo sapien
ttttcttcagagattgtggcaaaga

SEQ ID NO: 2230364 - DNA, 25 bp, Homo sapien
gaagcttccctgattgccgactaca

SEQ ID NO: 2230365 - DNA, 25 bp, Homo sapien
agagccacagaaagtctcctccctg

SEQ ID NO: 2230366 - DNA, 25 bp, Homo sapien
caaactgactctgtgctacctttaa

SEQ ID NO: 2230367 - DNA, 25 bp, Homo sapien
gtgctttacagtgcgtctctttttg

SEQ ID NO: 2230368 - DNA, 25 bp, Homo sapien
gggcggtgctttacagtgcgtctct

SEQ ID NO: 2230369 - DNA, 25 bp, Homo sapien
ttttgtgatttcgttttgctcttcc

SEQ ID NO: 2230370 - DNA, 25 bp, Homo sapien
gtgatttcgttttgctcttcctgcc

SEQ ID NO: 2230371 - DNA, 25 bp, Homo sapien
aaagtcctggcgtttcttgtgctgg

SEQ ID NO: 2230372 - DNA, 25 bp, Homo sapien
gcaaacttgtagtggtcgtcggcca

SEQ ID NO: 2230373 - DNA, 25 bp, Homo sapien
taaccaccggggagccacacgatgg

SEQ ID NO: 2230374 - DNA, 25 bp, Homo sapien
tggcattggtgcagttgtgatcctc

SEQ ID NO: 2230375 - DNA, 25 bp, Homo sapien
cgtcatctcaatgggactgatcggc

SEQ ID NO: 2230376 - DNA, 25 bp, Homo sapien
cagccgtcatctcaatgggactgat

SEQ ID NO: 2230377 - DNA, 25 bp, Homo sapien
tcatctcaatgggactgatcggcag

SEQ ID NO: 2230378 - DNA, 25 bp, Homo sapien
ggcagccgtcatctcaatgggactg

SEQ ID NO: 2230379 - DNA, 25 bp, Homo sapien
ctgccgcacaccaggaaacagtcct

SEQ ID NO: 2230380 - DNA, 25 bp, Homo sapien
ccaggaaacagtcctctcagctcag

SEQ ID NO: 2230381 - DNA, 25 bp, Homo sapien
tcaggacccgcgctccgttttgtat

SEQ ID NO: 2230382 - DNA, 25 bp, Homo sapien
gacccgcgctccgttttgtatcact

SEQ ID NO: 2230383 - DNA, 25 bp, Homo sapien
gggagtcccatggccctggtagcat

SEQ ID NO: 2230384 - DNA, 25 bp, Homo sapien
ccatggccctggtagcatcaatgtc

SEQ ID NO: 2230385 - DNA, 25 bp, Homo sapien
cagacgggtagacctgatgtgcttt

SEQ ID NO: 2230386 - DNA, 25 bp, Homo sapien
ccagacgggtagacctgatgtgctt

SEQ ID NO: 2230387 - DNA, 25 bp, Homo sapien
aggacaggtgggaggtgtattgaac

SEQ ID NO: 2230388 - DNA, 25 bp, Homo sapien
ggacaggtgggaggtgtattgaaca

SEQ ID NO: 2230389 - DNA, 25 bp, Homo sapien
gacaggtgggaggtgtattgaacac

SEQ ID NO: 2230390 - DNA, 25 bp, Homo sapien
tccacccagtaggtgcatttgcaaa

SEQ ID NO: 2230391 - DNA, 25 bp, Homo sapien
agattttgtctatactctgggtcta

SEQ ID NO: 2230392 - DNA, 25 bp, Homo sapien
ggtctatgcaccacaacgacccttt

SEQ ID NO: 2230393 - DNA, 25 bp, Homo sapien
ggagagtcctcgatggccataaata

SEQ ID NO: 2230394 - DNA, 25 bp, Homo sapien
tggggacggtggctgtcatcgtcca

SEQ ID NO: 2230395 - DNA, 25 bp, Homo sapien
cggtggctgtcatcgtccaggccct

SEQ ID NO: 2230396 - DNA, 25 bp, Homo sapien
tcgtccaggccctggaccgggctga

SEQ ID NO: 2230397 - DNA, 25 bp, Homo sapien
gcatatcagagtgggtggggacggt

SEQ ID NO: 2230398 - DNA, 25 bp, Homo sapien
catcatcttcctaaagggcttggag

SEQ ID NO: 2230399 - DNA, 25 bp, Homo sapien
ctttctggcatcttactgggaggca

SEQ ID NO: 2230400 - DNA, 25 bp, Homo sapien
gcagagaaaagtcgaggtcatcatc

SEQ ID NO: 2230401 - DNA, 25 bp, Homo sapien
catgcagccagctcaggttggtcag

SEQ ID NO: 2230402 - DNA, 25 bp, Homo sapien
taagttcaaactgtagagagggccc

SEQ ID NO: 2230403 - DNA, 25 bp, Homo sapien
tctctgctcatcaaggtctgttgat

SEQ ID NO: 2230404 - DNA, 25 bp, Homo sapien
gagagggcccctcagagaggatact

SEQ ID NO: 2230405 - DNA, 25 bp, Homo sapien
caccaatatgggtgacctgcttcca

SEQ ID NO: 2230406 - DNA, 25 bp, Homo sapien
tttggccagcaaccacagttctatc

SEQ ID NO: 2230407 - DNA, 25 bp, Homo sapien
cagcaaccacagttctatctggtag

SEQ ID NO: 2230408 - DNA, 25 bp, Homo sapien
cacagttctatctggtagtcagatc

SEQ ID NO: 2230409 - DNA, 25 bp, Homo sapien
tctatctggtagtcagatctaaact

SEQ ID NO: 2230410 - DNA, 25 bp, Homo sapien
cttcactccagtcatactagactcc

SEQ ID NO: 2230411 - DNA, 25 bp, Homo sapien
ctctcccttctacccatccagcctc

SEQ ID NO: 2230412 - DNA, 25 bp, Homo sapien
tccagtcatactagactccctctcc

SEQ ID NO: 2230413 - DNA, 25 bp, Homo sapien
tcatactagactccctctcccttct

SEQ ID NO: 2230414 - DNA, 25 bp, Homo sapien
cattgcctcgagtccttgtgtctga

SEQ ID NO: 2230415 - DNA, 25 bp, Homo sapien
tcagtgagaaggtgcgcatcgcttg

SEQ ID NO: 2230416 - DNA, 25 bp, Homo sapien
ctgtatgacacagcacctcgaggca

SEQ ID NO: 2230417 - DNA, 25 bp, Homo sapien
tcttgagtcccaggtgccgagtcaa

SEQ ID NO: 2230418 - DNA, 25 bp, Homo sapien
tgaagttctgtgcgatcttgtgcac

SEQ ID NO: 2230419 - DNA, 25 bp, Homo sapien
cttgaagttctgtgcgatcttgtgc

SEQ ID NO: 2230420 - DNA, 25 bp, Homo sapien
ttgaagttctgtgcgatcttgtgca

SEQ ID NO: 2230421 - DNA, 25 bp, Homo sapien
tcttgaagttctgtgcgatcttgtg

SEQ ID NO: 2230422 - DNA, 25 bp, Homo sapien
atcatggaatggcagcttgcggatc

SEQ ID NO: 2230423 - DNA, 25 bp, Homo sapien
cagatcatggaatggcagcttgcgg

SEQ ID NO: 2230424 - DNA, 25 bp, Homo sapien
cttgcggatcagcagctcagttgat

SEQ ID NO: 2230425 - DNA, 25 bp, Homo sapien
tgcggatcagcagctcagttgattt

SEQ ID NO: 2230426 - DNA, 25 bp, Homo sapien
acttgtgtgtagtctgcttgatgtg

SEQ ID NO: 2230427 - DNA, 25 bp, Homo sapien
gtgtagtctgcttgatgtgggccat

SEQ ID NO: 2230428 - DNA, 25 bp, Homo sapien
tgtgtgtagtctgcttgatgtgggc

SEQ ID NO: 2230429 - DNA, 25 bp, Homo sapien
tgtgtagtctgcttgatgtgggcca

SEQ ID NO: 2230430 - DNA, 25 bp, Homo sapien
tcttggatgtattatctaggtgaag

SEQ ID NO: 2230431 - DNA, 25 bp, Homo sapien
ccagtagggttccagtttatccata

SEQ ID NO: 2230432 - DNA, 25 bp, Homo sapien
tgccaaacctttccacaatgactgc

SEQ ID NO: 2230433 - DNA, 25 bp, Homo sapien
gcacaattatacatttccagtaggg

SEQ ID NO: 2230434 - DNA, 25 bp, Homo sapien
ctctgattgcatgcttggttcatct

SEQ ID NO: 2230435 - DNA, 25 bp, Homo sapien
tgattgcatgcttggttcatctgag

SEQ ID NO: 2230436 - DNA, 25 bp, Homo sapien
tgaggatgctcaggtaacatgatct

SEQ ID NO: 2230437 - DNA, 25 bp, Homo sapien
aacatgatctgagggtccccggcaa

SEQ ID NO: 2230438 - DNA, 25 bp, Homo sapien
agacttgacagggaaccgaagagaa

SEQ ID NO: 2230439 - DNA, 25 bp, Homo sapien
tgacagggaaccgaagagaagccag

SEQ ID NO: 2230440 - DNA, 25 bp, Homo sapien
tggcggagatccaagctggtttgat

SEQ ID NO: 2230441 - DNA, 25 bp, Homo sapien
cggagatccaagctggtttgatacc

SEQ ID NO: 2230442 - DNA, 25 bp, Homo sapien
tggtcgtcgccacgttagggtccgc

SEQ ID NO: 2230443 - DNA, 25 bp, Homo sapien
ttatagcagcgccagaaatgtggtg

SEQ ID NO: 2230444 - DNA, 25 bp, Homo sapien
agaaatgtggtggtcgtcgccacgt

SEQ ID NO: 2230445 - DNA, 25 bp, Homo sapien
aggcagcctggtgccaacccgcagg

SEQ ID NO: 2230446 - DNA, 25 bp, Homo sapien
tctgggtcggaactatggtggttct

SEQ ID NO: 2230447 - DNA, 25 bp, Homo sapien
tgccattcggatcgctgggaaagcg

SEQ ID NO: 2230448 - DNA, 25 bp, Homo sapien
gaaagcggtgggaatccaactgaag

SEQ ID NO: 2230449 - DNA, 25 bp, Homo sapien
gggactcgtctttgccattcggatc

SEQ ID NO: 2230450 - DNA, 25 bp, Homo sapien
agaggcaccgtcagatcgtctggag

SEQ ID NO: 2230451 - DNA, 25 bp, Homo sapien
cagctctgtgcctagcccgtgggag

SEQ ID NO: 2230452 - DNA, 25 bp, Homo sapien
tgctccgggccctgattccggaaag

SEQ ID NO: 2230453 - DNA, 25 bp, Homo sapien
caaagtctgtctgcgcggtaggtct

SEQ ID NO: 2230454 - DNA, 25 bp, Homo sapien
agaaatggccaaacgggagccgtgt

SEQ ID NO: 2230455 - DNA, 25 bp, Homo sapien
aggcctgctttaaggctggccagtt

SEQ ID NO: 2230456 - DNA, 25 bp, Homo sapien
aaggcaaggaggaggagactggctc

SEQ ID NO: 2230457 - DNA, 25 bp, Homo sapien
ggcaaggaggaggagactggctcac

SEQ ID NO: 2230458 - DNA, 25 bp, Homo sapien
caaggaggaggagactggctcacac

SEQ ID NO: 2230459 - DNA, 25 bp, Homo sapien
gaaaggcaaggaggaggagactggc

SEQ ID NO: 2230460 - DNA, 25 bp, Homo sapien
ggacatgagataggtgtaggttgtg

SEQ ID NO: 2230461 - DNA, 25 bp, Homo sapien
cagtgggtgcagacccacttctact

SEQ ID NO: 2230462 - DNA, 25 bp, Homo sapien
aattcaggggacagttggagaaaga

SEQ ID NO: 2230463 - DNA, 25 bp, Homo sapien
tgcagacccacttctactctgctgg

SEQ ID NO: 2230464 - DNA, 25 bp, Homo sapien
gagaagaggacagactagagccagc

SEQ ID NO: 2230465 - DNA, 25 bp, Homo sapien
aagaaccctgtatgtatcctgccgg

SEQ ID NO: 2230466 - DNA, 25 bp, Homo sapien
tagggtcctggttatgggctacaga

SEQ ID NO: 2230467 - DNA, 25 bp, Homo sapien
cattgtcaattcgtggttctggtcc

SEQ ID NO: 2230468 - DNA, 25 bp, Homo sapien
caaagtacaactgctgcttccatac

SEQ ID NO: 2230469 - DNA, 25 bp, Homo sapien
aaagtacaactgctgcttccatact

SEQ ID NO: 2230470 - DNA, 25 bp, Homo sapien
tcaaagtacaactgctgcttccata

SEQ ID NO: 2230471 - DNA, 25 bp, Homo sapien
ttttcaagacagatcttgcgtgtgt

SEQ ID NO: 2230472 - DNA, 25 bp, Homo sapien
tcaagacagatcttgcgtgtgtttt

SEQ ID NO: 2230473 - DNA, 25 bp, Homo sapien
tttcaagacagatcttgcgtgtgtt

SEQ ID NO: 2230474 - DNA, 25 bp, Homo sapien
aagacagatcttgcgtgtgttttag

SEQ ID NO: 2230475 - DNA, 25 bp, Homo sapien
gtgactgagactagatgcgggtaca

SEQ ID NO: 2230476 - DNA, 25 bp, Homo sapien
ctgccctaggcgttcgtgaagagaa

SEQ ID NO: 2230477 - DNA, 25 bp, Homo sapien
gaagcagctgttgctattggaggag

SEQ ID NO: 2230478 - DNA, 25 bp, Homo sapien
tagatgcgggtacaggtagtgcctc

SEQ ID NO: 2230479 - DNA, 25 bp, Homo sapien
gataccagctcaaaactggcggagg

SEQ ID NO: 2230480 - DNA, 25 bp, Homo sapien
atacatctgccttttgctccaaggc

SEQ ID NO: 2230481 - DNA, 25 bp, Homo sapien
cagtggggatggctgataccagctc

SEQ ID NO: 2230482 - DNA, 25 bp, Homo sapien
tggctgataccagctcaaaactggc

SEQ ID NO: 2230483 - DNA, 25 bp, Homo sapien
atctctgctcattccttaggacgtg

SEQ ID NO: 2230484 - DNA, 25 bp, Homo sapien
cattccttaggacgtgtttctttgg

SEQ ID NO: 2230485 - DNA, 25 bp, Homo sapien
tctgctcattccttaggacgtgttt

SEQ ID NO: 2230486 - DNA, 25 bp, Homo sapien
tgctcattccttaggacgtgtttct

SEQ ID NO: 2230487 - DNA, 25 bp, Homo sapien
caattttagtatatgtgctgccaaa

SEQ ID NO: 2230488 - DNA, 25 bp, Homo sapien
catgctaatcttctctatatcgttc

SEQ ID NO: 2230489 - DNA, 25 bp, Homo sapien
ttgcatgtcatctttgcacaggggc

SEQ ID NO: 2230490 - DNA, 25 bp, Homo sapien
taaaaatacagaatgcttcatgaat

SEQ ID NO: 2230491 - DNA, 25 bp, Homo sapien
ctaagcctaccaacacacagagatg

SEQ ID NO: 2230492 - DNA, 25 bp, Homo sapien
tgagcctaggtacattagtgaaaca

SEQ ID NO: 2230493 - DNA, 25 bp, Homo sapien
tagtgaaacaagcaaatccctggaa

SEQ ID NO: 2230494 - DNA, 25 bp, Homo sapien
ttgaggtcgcaaacaagtagtgagc

SEQ ID NO: 2230495 - DNA, 25 bp, Homo sapien
tcagcaaaaaggaactttctccaag

SEQ ID NO: 2230496 - DNA, 25 bp, Homo sapien
ggaaatatcagtggtttcagcaaaa

SEQ ID NO: 2230497 - DNA, 25 bp, Homo sapien
atatcagtggtttcagcaaaaagga

SEQ ID NO: 2230498 - DNA, 25 bp, Homo sapien
tgggaaatatcagtggtttcagcaa

SEQ ID NO: 2230499 - DNA, 25 bp, Homo sapien
gctggttcgaataccagccacattt

SEQ ID NO: 2230500 - DNA, 25 bp, Homo sapien
gaaagaagaggattcaaaaggagcc

SEQ ID NO: 2230501 - DNA, 25 bp, Homo sapien
cttgacagggaaccgaagaggagcc

SEQ ID NO: 2230502 - DNA, 25 bp, Homo sapien
tggctgagatccaagctggttcgaa

SEQ ID NO: 2230503 - DNA, 25 bp, Homo sapien
ttcctcccctgcgtggctccacgaa

SEQ ID NO: 2230504 - DNA, 25 bp, Homo sapien
tcctcccctgcgtggctccacgaag

SEQ ID NO: 2230505 - DNA, 25 bp, Homo sapien
cttcctcccctgcgtggctccacga

SEQ ID NO: 2230506 - DNA, 25 bp, Homo sapien
caagggctgaggggctggctcggga

SEQ ID NO: 2230507 - DNA, 25 bp, Homo sapien
cggagcgggcctggccaagggctga

SEQ ID NO: 2230508 - DNA, 25 bp, Homo sapien
agggctgaggggctggctcgggagg

SEQ ID NO: 2230509 - DNA, 25 bp, Homo sapien
ggctgaggggctggctcgggaggca

SEQ ID NO: 2230510 - DNA, 25 bp, Homo sapien
gcgccccgccctcgacggtgtctgt

SEQ ID NO: 2230511 - DNA, 25 bp, Homo sapien
gccccgccctcgacggtgtctgtgc

SEQ ID NO: 2230512 - DNA, 25 bp, Homo sapien
ccgccctcgacggtgtctgtgcccg

SEQ ID NO: 2230513 - DNA, 25 bp, Homo sapien
ccccgccctcgacggtgtctgtgcc

SEQ ID NO: 2230514 - DNA, 25 bp, Homo sapien
gaggtgagccgcgtttgctactccg

SEQ ID NO: 2230515 - DNA, 25 bp, Homo sapien
agtccgccggaggtgagccgcgttt

SEQ ID NO: 2230516 - DNA, 25 bp, Homo sapien
gccccatgtcctcggtgccttccct

SEQ ID NO: 2230517 - DNA, 25 bp, Homo sapien
cgcgtttgctactccgggtcccgat

SEQ ID NO: 2230518 - DNA, 25 bp, Homo sapien
caggggacagttggagagagcatgg

SEQ ID NO: 2230519 - DNA, 25 bp, Homo sapien
gagcatggcaggtggcagatccact

SEQ ID NO: 2230520 - DNA, 25 bp, Homo sapien
agggggagaggacaatgcaggggac

SEQ ID NO: 2230521 - DNA, 25 bp, Homo sapien
agctctggaggttagtgagaagggg

SEQ ID NO: 2230522 - DNA, 25 bp, Homo sapien
tctgccggatttgcacagtgccagc

SEQ ID NO: 2230523 - DNA, 25 bp, Homo sapien
tgggttgtgactcagaaaagacctg

SEQ ID NO: 2230524 - DNA, 25 bp, Homo sapien
ttatttcttgcaggagacacgagat

SEQ ID NO: 2230525 - DNA, 25 bp, Homo sapien
gagataggtgtaggttgggttgtga

SEQ ID NO: 2230526 - DNA, 25 bp, Homo sapien
acacaggaaaccatagatacattga

SEQ ID NO: 2230527 - DNA, 25 bp, Homo sapien
cacaggaaaccatagatacattgaa

SEQ ID NO: 2230528 - DNA, 25 bp, Homo sapien
tccgggagtgattagggtccaatct

SEQ ID NO: 2230529 - DNA, 25 bp, Homo sapien
tatgagagcgggtatacttttgggc

SEQ ID NO: 2230530 - DNA, 25 bp, Homo sapien
ggaaactgcaccacatcagtgaagg

SEQ ID NO: 2230531 - DNA, 25 bp, Homo sapien
tgtatgttcacttgtctgtaggacc

SEQ ID NO: 2230532 - DNA, 25 bp, Homo sapien
caatagtagattcaggcacagagac

SEQ ID NO: 2230533 - DNA, 25 bp, Homo sapien
ctaatactgccttgaaactcagggc

SEQ ID NO: 2230534 - DNA, 25 bp, Homo sapien
tcattattgggtcctggttctgggc

SEQ ID NO: 2230535 - DNA, 25 bp, Homo sapien
gatgagttctataagcagtcctggg

SEQ ID NO: 2230536 - DNA, 25 bp, Homo sapien
tgatccttcctaccggtcagtccgg

SEQ ID NO: 2230537 - DNA, 25 bp, Homo sapien
ttcgagagcatcttagggccaggga

SEQ ID NO: 2230538 - DNA, 25 bp, Homo sapien
gatcagcctagtcctgagttcacat

SEQ ID NO: 2230539 - DNA, 25 bp, Homo sapien
tcagtccgggaaattcgagagcatc

SEQ ID NO: 2230540 - DNA, 25 bp, Homo sapien
taggcctgccgagaggagtgttttc

SEQ ID NO: 2230541 - DNA, 25 bp, Homo sapien
tcatccatggtacaggactgcggcg

SEQ ID NO: 2230542 - DNA, 25 bp, Homo sapien
tctggccaaggagcttcaggatctt

SEQ ID NO: 2230543 - DNA, 25 bp, Homo sapien
tcgaatgttcctcgccagccgagtg

SEQ ID NO: 2230544 - DNA, 25 bp, Homo sapien
ctgcccgacgcgttcgtggagagga

SEQ ID NO: 2230545 - DNA, 25 bp, Homo sapien
tgcccgacgcgttcgtggagaggag

SEQ ID NO: 2230546 - DNA, 25 bp, Homo sapien
gagcagcggttgctgttggaggagg

SEQ ID NO: 2230547 - DNA, 25 bp, Homo sapien
ccgacgcgttcgtggagaggagcag

SEQ ID NO: 2230548 - DNA, 25 bp, Homo sapien
ctcctgcctcagccccgctagtagc

SEQ ID NO: 2230549 - DNA, 25 bp, Homo sapien
ttctgtctcccaagttcaagcgatc

SEQ ID NO: 2230550 - DNA, 25 bp, Homo sapien
cagccccgctagtagctgggattac

SEQ ID NO: 2230551 - DNA, 25 bp, Homo sapien
ctgggattacaggcacacaccactg

SEQ ID NO: 2230552 - DNA, 25 bp, Homo sapien
gcaaggaggagacgatccggtcgga

SEQ ID NO: 2230553 - DNA, 25 bp, Homo sapien
tgccattctgatagcggggaaagcg

SEQ ID NO: 2230554 - DNA, 25 bp, Homo sapien
tgagaatcgaagtgaggagccgcca

SEQ ID NO: 2230555 - DNA, 25 bp, Homo sapien
agaggtgcgcagtgctcgagacccc

SEQ ID NO: 2230556 - DNA, 25 bp, Homo sapien
aatgatgtgtgagaatgtgggttcc

SEQ ID NO: 2230557 - DNA, 25 bp, Homo sapien
tttctcaacatgctgatccacttta

SEQ ID NO: 2230558 - DNA, 25 bp, Homo sapien
tagaacatttgaagtcaatctgctt

SEQ ID NO: 2230559 - DNA, 25 bp, Homo sapien
ccactttaagtaatgtaatgatgtg

SEQ ID NO: 2230560 - DNA, 25 bp, Homo sapien
tatcttttactagtaggcaagcctg

SEQ ID NO: 2230561 - DNA, 25 bp, Homo sapien
tgctgtgtcaacctacaagatagtg

SEQ ID NO: 2230562 - DNA, 25 bp, Homo sapien
tccctggtctaagctgatatgaaag

SEQ ID NO: 2230563 - DNA, 25 bp, Homo sapien
cattcccaggacatttaggctatgg

SEQ ID NO: 2230564 - DNA, 25 bp, Homo sapien
tgtgctatcttgtgtcagcagctct

SEQ ID NO: 2230565 - DNA, 25 bp, Homo sapien
ctcaatggtcgttgctagggtttcc

SEQ ID NO: 2230566 - DNA, 25 bp, Homo sapien
gctctggccacctctctcctaaagg

SEQ ID NO: 2230567 - DNA, 25 bp, Homo sapien
taaaggtgccatgtgcctctcaatg

SEQ ID NO: 2230568 - DNA, 25 bp, Homo sapien
tcaactgcctttcttggagtcttag

SEQ ID NO: 2230569 - DNA, 25 bp, Homo sapien
tgctctaccccaggtccatggtttt

SEQ ID NO: 2230570 - DNA, 25 bp, Homo sapien
tttctagcatgtgattggaatgctc

SEQ ID NO: 2230571 - DNA, 25 bp, Homo sapien
cttggagtcttaggattcccaggaa

SEQ ID NO: 2230572 - DNA, 25 bp, Homo sapien
tgaaggatataaccaacatcaagtt

SEQ ID NO: 2230573 - DNA, 25 bp, Homo sapien
cttgaaggatataaccaacatcaag

SEQ ID NO: 2230574 - DNA, 25 bp, Homo sapien
ggatataaccaacatcaagttctct

SEQ ID NO: 2230575 - DNA, 25 bp, Homo sapien
tataaccaacatcaagttctcttgc

SEQ ID NO: 2230576 - DNA, 25 bp, Homo sapien
agccagtcccataacaattatggct

SEQ ID NO: 2230577 - DNA, 25 bp, Homo sapien
gccagtcccataacaattatggctt

SEQ ID NO: 2230578 - DNA, 25 bp, Homo sapien
caaaggaaaagctattcactccact

SEQ ID NO: 2230579 - DNA, 25 bp, Homo sapien
aaagctattcactccactatcagca

SEQ ID NO: 2230580 - DNA, 25 bp, Homo sapien
aggaaaagctattcactccactatc

SEQ ID NO: 2230581 - DNA, 25 bp, Homo sapien
gtcaaaggaaaagctattcactcca

SEQ ID NO: 2230582 - DNA, 25 bp, Homo sapien
gatctgttagcacctacaggaccct

SEQ ID NO: 2230583 - DNA, 25 bp, Homo sapien
ttccagatctgttagcacctacagg

SEQ ID NO: 2230584 - DNA, 25 bp, Homo sapien
aagcccttgaactttattccagatc

SEQ ID NO: 2230585 - DNA, 25 bp, Homo sapien
gcccttgaactttattccagatctg

SEQ ID NO: 2230586 - DNA, 25 bp, Homo sapien
ttgagtgagtacccacaagggcata

SEQ ID NO: 2230587 - DNA, 25 bp, Homo sapien
taccacctataggaccttgcactgg

SEQ ID NO: 2230588 - DNA, 25 bp, Homo sapien
agacccattaccacctataggacct

SEQ ID NO: 2230589 - DNA, 25 bp, Homo sapien
taggaccttgcactgggatttcatc

SEQ ID NO: 2230590 - DNA, 25 bp, Homo sapien
catgattcagcgatactggtcagag

SEQ ID NO: 2230591 - DNA, 25 bp, Homo sapien
cagagcatgattcagcgatactggt

SEQ ID NO: 2230592 - DNA, 25 bp, Homo sapien
attcagcgatactggtcagagctgc

SEQ ID NO: 2230593 - DNA, 25 bp, Homo sapien
gagcatgattcagcgatactggtca

SEQ ID NO: 2230594 - DNA, 25 bp, Homo sapien
tgctgacaactacgtttctctcttc

SEQ ID NO: 2230595 - DNA, 25 bp, Homo sapien
gagttcgtgtgtgctgacaactacg

SEQ ID NO: 2230596 - DNA, 25 bp, Homo sapien
aagagagagttcgtgtgtgctgaca

SEQ ID NO: 2230597 - DNA, 25 bp, Homo sapien
tgcccctttatggccttaggtttca

SEQ ID NO: 2230598 - DNA, 25 bp, Homo sapien
gactgtcacctaatccaaccagcat

SEQ ID NO: 2230599 - DNA, 25 bp, Homo sapien
gatgactgtcacctaatccaaccag

SEQ ID NO: 2230600 - DNA, 25 bp, Homo sapien
tgtcacctaatccaaccagcataac

SEQ ID NO: 2230601 - DNA, 25 bp, Homo sapien
aatgatgactgtcacctaatccaac

SEQ ID NO: 2230602 - DNA, 25 bp, Homo sapien
ataccatattaagcaagtcacatga

SEQ ID NO: 2230603 - DNA, 25 bp, Homo sapien
aaataccatattaagcaagtcacat

SEQ ID NO: 2230604 - DNA, 25 bp, Homo sapien
gcagagatattacaggtttagttgc

SEQ ID NO: 2230605 - DNA, 25 bp, Homo sapien
acacacagagacattgcagagatat

SEQ ID NO: 2230606 - DNA, 25 bp, Homo sapien
atttcgtcttccatcactgataccg

SEQ ID NO: 2230607 - DNA, 25 bp, Homo sapien
tcttccagttgatcacatcagctcc

SEQ ID NO: 2230608 - DNA, 25 bp, Homo sapien
ttcgtcttccatcactgataccgtt

SEQ ID NO: 2230609 - DNA, 25 bp, Homo sapien
tttcgtcttccatcactgataccgt

SEQ ID NO: 2230610 - DNA, 25 bp, Homo sapien
gggtaggagatagaacctcattgcc

SEQ ID NO: 2230611 - DNA, 25 bp, Homo sapien
tggtaatccatatgaccccacagct

SEQ ID NO: 2230612 - DNA, 25 bp, Homo sapien
gttgagtgagtacccttagggaaca

SEQ ID NO: 2230613 - DNA, 25 bp, Homo sapien
cagctatgcctcatgcccaaagggc

SEQ ID NO: 2230614 - DNA, 25 bp, Homo sapien
gaggcagtcttgcataaagcagaaa

SEQ ID NO: 2230615 - DNA, 25 bp, Homo sapien
agaccaaatgggagggacttctctc

SEQ ID NO: 2230616 - DNA, 25 bp, Homo sapien
ggtccacatccctcaaatgggagag

SEQ ID NO: 2230617 - DNA, 25 bp, Homo sapien
gaaactccatgtcagctagaagacc

SEQ ID NO: 2230618 - DNA, 25 bp, Homo sapien
gctcagcaggtaagttcaaagacat

SEQ ID NO: 2230619 - DNA, 25 bp, Homo sapien
ctgggcgaacaccaaaccttgcatc

SEQ ID NO: 2230620 - DNA, 25 bp, Homo sapien
caagtagtctaggagcagccactgg

SEQ ID NO: 2230621 - DNA, 25 bp, Homo sapien
cactgggcgaacaccaaaccttgca

SEQ ID NO: 2230622 - DNA, 25 bp, Homo sapien
cagagcccacccaaaaactgcacca

SEQ ID NO: 2230623 - DNA, 25 bp, Homo sapien
gagcccacccaaaaactgcaccaga

SEQ ID NO: 2230624 - DNA, 25 bp, Homo sapien
cccagagcccacccaaaaactgcac

SEQ ID NO: 2230625 - DNA, 25 bp, Homo sapien
cacccaaaaactgcaccagaaacag

SEQ ID NO: 2230626 - DNA, 25 bp, Homo sapien
ggtgcttctaatgacactgttttca

SEQ ID NO: 2230627 - DNA, 25 bp, Homo sapien
gagtctttttgaatgacacaggagc

SEQ ID NO: 2230628 - DNA, 25 bp, Homo sapien
caggttctagagctactgctggcat

SEQ ID NO: 2230629 - DNA, 25 bp, Homo sapien
tgagttcaagtttggagaggatctg

SEQ ID NO: 2230630 - DNA, 25 bp, Homo sapien
tggttactcctgtacacgttcacaa

SEQ ID NO: 2230631 - DNA, 25 bp, Homo sapien
gagaggcctctaatcgactagtatg

SEQ ID NO: 2230632 - DNA, 25 bp, Homo sapien
taatatactgagcagtccaggagca

SEQ ID NO: 2230633 - DNA, 25 bp, Homo sapien
catgtctgggataaaagctttgttc

SEQ ID NO: 2230634 - DNA, 25 bp, Homo sapien
gaacagagtggtccagtctggtcct

SEQ ID NO: 2230635 - DNA, 25 bp, Homo sapien
gggctatggccagcttgcataataa

SEQ ID NO: 2230636 - DNA, 25 bp, Homo sapien
tatgaatttggtccctctcttgccc

SEQ ID NO: 2230637 - DNA, 25 bp, Homo sapien
gagtgcaagatgttgagttctccca

SEQ ID NO: 2230638 - DNA, 25 bp, Homo sapien
tggagtagtttgatcattggaagcc

SEQ ID NO: 2230639 - DNA, 25 bp, Homo sapien
ttttaattttctcctgtagcttgga

SEQ ID NO: 2230640 - DNA, 25 bp, Homo sapien
atgtagttctcaaaccttggctttc

SEQ ID NO: 2230641 - DNA, 25 bp, Homo sapien
taattttctcctgtagcttggagta

SEQ ID NO: 2230642 - DNA, 25 bp, Homo sapien
tgaacatgtaaattcgaaagcaggg

SEQ ID NO: 2230643 - DNA, 25 bp, Homo sapien
aataggagacccacgtaaacaagtg

SEQ ID NO: 2230644 - DNA, 25 bp, Homo sapien
tcttacagactggttcaaaaacaca

SEQ ID NO: 2230645 - DNA, 25 bp, Homo sapien
caacaagggcacatcatgaacatgt

SEQ ID NO: 2230646 - DNA, 25 bp, Homo sapien
aggatgggctgcctaacgcggaacc

SEQ ID NO: 2230647 - DNA, 25 bp, Homo sapien
cctttattagcaacttgctcctttt

SEQ ID NO: 2230648 - DNA, 25 bp, Homo sapien
tttcctctaggcacacagtattcac

SEQ ID NO: 2230649 - DNA, 25 bp, Homo sapien
tatgactcaactgcttttccctcag

SEQ ID NO: 2230650 - DNA, 25 bp, Homo sapien
catgctgagactgtttactgctcgt

SEQ ID NO: 2230651 - DNA, 25 bp, Homo sapien
ctgagactgtttactgctcgtttct

SEQ ID NO: 2230652 - DNA, 25 bp, Homo sapien
tttactgctcgtttctctttggact

SEQ ID NO: 2230653 - DNA, 25 bp, Homo sapien
tgctgagactgtttactgctcgttt

SEQ ID NO: 2230654 - DNA, 25 bp, Homo sapien
cattttccctacagatccatcccta

SEQ ID NO: 2230655 - DNA, 25 bp, Homo sapien
agatccatccctagatctcggcagg

SEQ ID NO: 2230656 - DNA, 25 bp, Homo sapien
agttgggaggggacctcagactgga

SEQ ID NO: 2230657 - DNA, 25 bp, Homo sapien
atccatccctagatctcggcaggca

SEQ ID NO: 2230658 - DNA, 25 bp, Homo sapien
cctatccttgtagtctcctccttct

SEQ ID NO: 2230659 - DNA, 25 bp, Homo sapien
ctatccttgtagtctcctccttctc

SEQ ID NO: 2230660 - DNA, 25 bp, Homo sapien
cctccttctcccgattctcgccacg

SEQ ID NO: 2230661 - DNA, 25 bp, Homo sapien
ttctcccgattctcgccacgaggtg

SEQ ID NO: 2230662 - DNA, 25 bp, Homo sapien
gcaaggactcgggaatggttttcca

SEQ ID NO: 2230663 - DNA, 25 bp, Homo sapien
acgctagctccttctccgcctaggg

SEQ ID NO: 2230664 - DNA, 25 bp, Homo sapien
ggtgttcaccgttttcctgcaagga

SEQ ID NO: 2230665 - DNA, 25 bp, Homo sapien
gaccactatgttcccaagaatgttg

SEQ ID NO: 2230666 - DNA, 25 bp, Homo sapien
tcaccgccaagctcaccctccttct

SEQ ID NO: 2230667 - DNA, 25 bp, Homo sapien
gagggccgtgcgtcaccgccaagct

SEQ ID NO: 2230668 - DNA, 25 bp, Homo sapien
ccacgggccggcggccagttaactg

SEQ ID NO: 2230669 - DNA, 25 bp, Homo sapien
cgtgagggccgtgcgtcaccgccaa

SEQ ID NO: 2230670 - DNA, 25 bp, Homo sapien
cctctccaatctgagggcccacaag

SEQ ID NO: 2230671 - DNA, 25 bp, Homo sapien
ttctcagcatagttgggaggtctct

SEQ ID NO: 2230672 - DNA, 25 bp, Homo sapien
gcatagttgggaggtctcttcccat

SEQ ID NO: 2230673 - DNA, 25 bp, Homo sapien
tagttgggaggtctcttcccattct

SEQ ID NO: 2230674 - DNA, 25 bp, Homo sapien
cagcatagttgggaggtctcttccc

SEQ ID NO: 2230675 - DNA, 25 bp, Homo sapien
taacaagacaccatactttattgtg

SEQ ID NO: 2230676 - DNA, 25 bp, Homo sapien
taacaggggtggacaagtgcacaga

SEQ ID NO: 2230677 - DNA, 25 bp, Homo sapien
gtgcacagaacaactggcccctttg

SEQ ID NO: 2230678 - DNA, 25 bp, Homo sapien
aacaactggcccctttggaaggatg

SEQ ID NO: 2230679 - DNA, 25 bp, Homo sapien
ctgtgagttgggcttcggcttctta

SEQ ID NO: 2230680 - DNA, 25 bp, Homo sapien
tcagccctgtgagttgggcttcggc

SEQ ID NO: 2230681 - DNA, 25 bp, Homo sapien
tgagttgggcttcggcttcttagcc

SEQ ID NO: 2230682 - DNA, 25 bp, Homo sapien
ttgggcttcggcttcttagccccag

SEQ ID NO: 2230683 - DNA, 25 bp, Homo sapien
gcagaaccggaagcccaagttcaat

SEQ ID NO: 2230684 - DNA, 25 bp, Homo sapien
ttgcccttggccgagaggaagtgca

SEQ ID NO: 2230685 - DNA, 25 bp, Homo sapien
ttgttttcaggatcctaggtcagtc

SEQ ID NO: 2230686 - DNA, 25 bp, Homo sapien
tgacacttaaggatttcctcttagg

SEQ ID NO: 2230687 - DNA, 25 bp, Homo sapien
agctctgacgtagtcacactggttg

SEQ ID NO: 2230688 - DNA, 25 bp, Homo sapien
cttgggccatgcaagaacatgagga

SEQ ID NO: 2230689 - DNA, 25 bp, Homo sapien
ggagctctgacgtagtcacactggt

SEQ ID NO: 2230690 - DNA, 25 bp, Homo sapien
atgaggagctctgacgtagtcacac

SEQ ID NO: 2230691 - DNA, 25 bp, Homo sapien
gacaggtaacatccattaggaccca

SEQ ID NO: 2230692 - DNA, 25 bp, Homo sapien
gccatttcttaatctatgcaacaga

SEQ ID NO: 2230693 - DNA, 25 bp, Homo sapien
gacccaagtgcagacactctgacaa

SEQ ID NO: 2230694 - DNA, 25 bp, Homo sapien
taatctatgcaacagaaacatgtct

SEQ ID NO: 2230695 - DNA, 25 bp, Homo sapien
atcccccagactgggcagagaaaac

SEQ ID NO: 2230696 - DNA, 25 bp, Homo sapien
tcatcccccagactgggcagagaaa

SEQ ID NO: 2230697 - DNA, 25 bp, Homo sapien
cagactgggcagagaaaacctgtac

SEQ ID NO: 2230698 - DNA, 25 bp, Homo sapien
ccccagactgggcagagaaaacctg

SEQ ID NO: 2230699 - DNA, 25 bp, Homo sapien
gggcactagggtgaacaaggcactc

SEQ ID NO: 2230700 - DNA, 25 bp, Homo sapien
ggtatcccgcacaaagagcttgtca

SEQ ID NO: 2230701 - DNA, 25 bp, Homo sapien
gcactagggtgaacaaggcactctg

SEQ ID NO: 2230702 - DNA, 25 bp, Homo sapien
tgggtcccttggtggctggtatccc

SEQ ID NO: 2230703 - DNA, 25 bp, Homo sapien
gggtagcaatgaaggtccgggtgaa

SEQ ID NO: 2230704 - DNA, 25 bp, Homo sapien
caatgaaggtccgggtgaaggcgag

SEQ ID NO: 2230705 - DNA, 25 bp, Homo sapien
caggggtagcaatgaaggtccgggt

SEQ ID NO: 2230706 - DNA, 25 bp, Homo sapien
ctgccaggggtagcaatgaaggtcc

SEQ ID NO: 2230707 - DNA, 25 bp, Homo sapien
cttcaaagacaacaaacaacattgc

SEQ ID NO: 2230708 - DNA, 25 bp, Homo sapien
tccttgaacaccccgttgacagaaa

SEQ ID NO: 2230709 - DNA, 25 bp, Homo sapien
cttgaacaccccgttgacagaaaag

SEQ ID NO: 2230710 - DNA, 25 bp, Homo sapien
tgaacaccccgttgacagaaaagca

SEQ ID NO: 2230711 - DNA, 25 bp, Homo sapien
cttccttgaacaccccgttgacaga

SEQ ID NO: 2230712 - DNA, 25 bp, Homo sapien
tgcttcagcagctccccccgaaggt

SEQ ID NO: 2230713 - DNA, 25 bp, Homo sapien
ggtaccacatgtccaccaggaagga

SEQ ID NO: 2230714 - DNA, 25 bp, Homo sapien
atatcaagttttgtgtgcttcagca

SEQ ID NO: 2230715 - DNA, 25 bp, Homo sapien
ttttaggcaacgcactgagggagtc

SEQ ID NO: 2230716 - DNA, 25 bp, Homo sapien
tgcccagacttctccatcacacact

SEQ ID NO: 2230717 - DNA, 25 bp, Homo sapien
gcccagacttctccatcacacactt

SEQ ID NO: 2230718 - DNA, 25 bp, Homo sapien
ccagacttctccatcacacacttac

SEQ ID NO: 2230719 - DNA, 25 bp, Homo sapien
cctgcccagacttctccatcacaca

SEQ ID NO: 2230720 - DNA, 25 bp, Homo sapien
tattcctgctatccttgaagaactt

SEQ ID NO: 2230721 - DNA, 25 bp, Homo sapien
cttgaagaacttgcagaagctgctc

SEQ ID NO: 2230722 - DNA, 25 bp, Homo sapien
tccttgaagaacttgcagaagctgc

SEQ ID NO: 2230723 - DNA, 25 bp, Homo sapien
ctatccttgaagaacttgcagaagc

SEQ ID NO: 2230724 - DNA, 25 bp, Homo sapien
agtgggtggtctggccagtgcaggc

SEQ ID NO: 2230725 - DNA, 25 bp, Homo sapien
ggtctggccagtgcaggcatctcca

SEQ ID NO: 2230726 - DNA, 25 bp, Homo sapien
agtgcaggcatctccaggagctggt

SEQ ID NO: 2230727 - DNA, 25 bp, Homo sapien
gccagtgcaggcatctccaggagct

SEQ ID NO: 2230728 - DNA, 25 bp, Homo sapien
tcctcaggattgaagggaatgctca

SEQ ID NO: 2230729 - DNA, 25 bp, Homo sapien
ctcaggattgaagggaatgctcagg

SEQ ID NO: 2230730 - DNA, 25 bp, Homo sapien
gctgagtcctcaggattgaagggaa

SEQ ID NO: 2230731 - DNA, 25 bp, Homo sapien
gagtcctcaggattgaagggaatgc

SEQ ID NO: 2230732 - DNA, 25 bp, Homo sapien
agtgaggacaggctatctctgtggc

SEQ ID NO: 2230733 - DNA, 25 bp, Homo sapien
gagtcttgaaagtctgactgtaggc

SEQ ID NO: 2230734 - DNA, 25 bp, Homo sapien
agtctgactgtaggcagacttgtac

SEQ ID NO: 2230735 - DNA, 25 bp, Homo sapien
ctgggtgccaaatgagtcttgaaag

SEQ ID NO: 2230736 - DNA, 25 bp, Homo sapien
atctgacctagccttctcttgcctc

SEQ ID NO: 2230737 - DNA, 25 bp, Homo sapien
caggaattgcaggaccagattcttc

SEQ ID NO: 2230738 - DNA, 25 bp, Homo sapien
aattgcaggaccagattcttcaaca

SEQ ID NO: 2230739 - DNA, 25 bp, Homo sapien
aggaccagattcttcaacatctcag

SEQ ID NO: 2230740 - DNA, 25 bp, Homo sapien
tgcaggaccagattcttcaacatct

SEQ ID NO: 2230741 - DNA, 25 bp, Homo sapien
ctggaataaagagtccccaggacca

SEQ ID NO: 2230742 - DNA, 25 bp, Homo sapien
agtccccaggaccacagatggtacc

SEQ ID NO: 2230743 - DNA, 25 bp, Homo sapien
ttcctcatgcaccaccctgctggat

SEQ ID NO: 2230744 - DNA, 25 bp, Homo sapien
atggtacccccccttcctcatgcac

SEQ ID NO: 2230745 - DNA, 25 bp, Homo sapien
gcttcagtaccacataaagttgctc

SEQ ID NO: 2230746 - DNA, 25 bp, Homo sapien
tcttgtgggcttcagtaccacataa

SEQ ID NO: 2230747 - DNA, 25 bp, Homo sapien
ggttggtaacctcttgtgggcttca

SEQ ID NO: 2230748 - DNA, 25 bp, Homo sapien
tgggcttcagtaccacataaagttg

SEQ ID NO: 2230749 - DNA, 25 bp, Homo sapien
tcccacatgggtccgtattcccttc

SEQ ID NO: 2230750 - DNA, 25 bp, Homo sapien
caagttcccacatgggtccgtattc

SEQ ID NO: 2230751 - DNA, 25 bp, Homo sapien
taatttggggaacaattccaggatg

SEQ ID NO: 2230752 - DNA, 25 bp, Homo sapien
ataatttggggaacaattccaggat

SEQ ID NO: 2230753 - DNA, 25 bp, Homo sapien
aatcacacctacgtcagagacacag

SEQ ID NO: 2230754 - DNA, 25 bp, Homo sapien
aaatggacaacggtaagtgaaactg

SEQ ID NO: 2230755 - DNA, 25 bp, Homo sapien
gacacagtgcagtgtgtccacctac

SEQ ID NO: 2230756 - DNA, 25 bp, Homo sapien
cacacctacgtcagagacacagtgc

SEQ ID NO: 2230757 - DNA, 25 bp, Homo sapien
gccctgggcagcattgggagcccag

SEQ ID NO: 2230758 - DNA, 25 bp, Homo sapien
ggcagcattgggagcccaggcttca

SEQ ID NO: 2230759 - DNA, 25 bp, Homo sapien
attgggagcccaggcttcaggactt

SEQ ID NO: 2230760 - DNA, 25 bp, Homo sapien
gcattgggagcccaggcttcaggac

SEQ ID NO: 2230761 - DNA, 25 bp, Homo sapien
tttgtccaagtccccactgaaggct

SEQ ID NO: 2230762 - DNA, 25 bp, Homo sapien
ctttgtccaagtccccactgaaggc

SEQ ID NO: 2230763 - DNA, 25 bp, Homo sapien
cagggagtaggaaatggggtgggag

SEQ ID NO: 2230764 - DNA, 25 bp, Homo sapien
gggagcccagggctctgctacctca

SEQ ID NO: 2230765 - DNA, 25 bp, Homo sapien
ggtgggagcccagggctctgctacc

SEQ ID NO: 2230766 - DNA, 25 bp, Homo sapien
ctgcagggagtaggaaatggggtgg

SEQ ID NO: 2230767 - DNA, 25 bp, Homo sapien
caagaccaggtcagctcttagggat

SEQ ID NO: 2230768 - DNA, 25 bp, Homo sapien
ccaagaccaggtcagctcttaggga

SEQ ID NO: 2230769 - DNA, 25 bp, Homo sapien
gtccgtcagtctgcctgtcctggcc

SEQ ID NO: 2230770 - DNA, 25 bp, Homo sapien
tgagacatatgagaggagagacaat

SEQ ID NO: 2230771 - DNA, 25 bp, Homo sapien
aaagatgctctaccgtggtggtgga

SEQ ID NO: 2230772 - DNA, 25 bp, Homo sapien
gaaaacatgcgcctgttgggctggg

SEQ ID NO: 2230773 - DNA, 25 bp, Homo sapien
agaagaaaagggctcccctgctgca

SEQ ID NO: 2230774 - DNA, 25 bp, Homo sapien
gaagtgaagggtcaagccccagctc

SEQ ID NO: 2230775 - DNA, 25 bp, Homo sapien
cctgcctcaggaatgtggcccgctt

SEQ ID NO: 2230776 - DNA, 25 bp, Homo sapien
gcttctggtcccttgactcaggaaa

SEQ ID NO: 2230777 - DNA, 25 bp, Homo sapien
cttgactcaggaaacccaggtttct

SEQ ID NO: 2230778 - DNA, 25 bp, Homo sapien
cctcaggaatgtggcccgcttctgg

SEQ ID NO: 2230779 - DNA, 25 bp, Homo sapien
ggaggagggaagccccatatcagca

SEQ ID NO: 2230780 - DNA, 25 bp, Homo sapien
gacggaggagggaagccccatatca

SEQ ID NO: 2230781 - DNA, 25 bp, Homo sapien
acggaggagggaagccccatatcag

SEQ ID NO: 2230782 - DNA, 25 bp, Homo sapien
cggaggagggaagccccatatcagc

SEQ ID NO: 2230783 - DNA, 25 bp, Homo sapien
cctcctgcagaagggcgctatcaaa

SEQ ID NO: 2230784 - DNA, 25 bp, Homo sapien
tgcagaagggcgctatcaaacacag

SEQ ID NO: 2230785 - DNA, 25 bp, Homo sapien
agggcgctatcaaacacaggtcagg

SEQ ID NO: 2230786 - DNA, 25 bp, Homo sapien
ggtggtgacagagggtacaactgac

SEQ ID NO: 2230787 - DNA, 25 bp, Homo sapien
gagaaggtcgtgcacactgggcttc

SEQ ID NO: 2230788 - DNA, 25 bp, Homo sapien
tccacttgtccatctcccctgcaga

SEQ ID NO: 2230789 - DNA, 25 bp, Homo sapien
actgggcttctgtccgcacacttct

SEQ ID NO: 2230790 - DNA, 25 bp, Homo sapien
tttatgttgctggaggtatccgaga

SEQ ID NO: 2230791 - DNA, 25 bp, Homo sapien
tgttctcttcatggacgtccaggga

SEQ ID NO: 2230792 - DNA, 25 bp, Homo sapien
ggattcgatgccatcttagtatcac

SEQ ID NO: 2230793 - DNA, 25 bp, Homo sapien
gttctcttcatggacgtccagggag

SEQ ID NO: 2230794 - DNA, 25 bp, Homo sapien
ttctaggattcgatgccatcttagt

SEQ ID NO: 2230795 - DNA, 25 bp, Homo sapien
gagacatcacactgttggttcatgg

SEQ ID NO: 2230796 - DNA, 25 bp, Homo sapien
gacatcacactgttggttcatggcc

SEQ ID NO: 2230797 - DNA, 25 bp, Homo sapien
catcacactgttggttcatggccag

SEQ ID NO: 2230798 - DNA, 25 bp, Homo sapien
tgggagacatcacactgttggttca

SEQ ID NO: 2230799 - DNA, 25 bp, Homo sapien
agtggggtatgccagcagggttgac

SEQ ID NO: 2230800 - DNA, 25 bp, Homo sapien
ggtatgccagcagggttgacaaaga

SEQ ID NO: 2230801 - DNA, 25 bp, Homo sapien
tgctccaccttttctgacttcagct

SEQ ID NO: 2230802 - DNA, 25 bp, Homo sapien
ttcagctccctgtgcacaaagtggg

SEQ ID NO: 2230803 - DNA, 25 bp, Homo sapien
gtgcataggcgatgctggcattctc

SEQ ID NO: 2230804 - DNA, 25 bp, Homo sapien
cttcagtgcataggcgatgctggca

SEQ ID NO: 2230805 - DNA, 25 bp, Homo sapien
caaagaagctggcatgcatgttttc

SEQ ID NO: 2230806 - DNA, 25 bp, Homo sapien
tcattatcctcatcccaaatcttgc

SEQ ID NO: 2230807 - DNA, 25 bp, Homo sapien
gacgaagggtacactgcattcattc

SEQ ID NO: 2230808 - DNA, 25 bp, Homo sapien
attcattctgaatcaaattcagcag

SEQ ID NO: 2230809 - DNA, 25 bp, Homo sapien
aactgggacgaagggtacactgcat

SEQ ID NO: 2230810 - DNA, 25 bp, Homo sapien
ctcaactgggacgaagggtacactg

SEQ ID NO: 2230811 - DNA, 25 bp, Homo sapien
cgaaaactgcctttccgattatagg

SEQ ID NO: 2230812 - DNA, 25 bp, Homo sapien
tatagggtgaaatagtatagggagt

SEQ ID NO: 2230813 - DNA, 25 bp, Homo sapien
tccctaaggtcccatccggcatgtt

SEQ ID NO: 2230814 - DNA, 25 bp, Homo sapien
tgctctctctccatgttaacgtggg

SEQ ID NO: 2230815 - DNA, 25 bp, Homo sapien
tccatgtgggcaccatgcattgctg

SEQ ID NO: 2230816 - DNA, 25 bp, Homo sapien
ccatgtgggcaccatgcattgctgc

SEQ ID NO: 2230817 - DNA, 25 bp, Homo sapien
tcttctttgaacaacttgatcagtg

SEQ ID NO: 2230818 - DNA, 25 bp, Homo sapien
tgctcttctttgaacaacttgatca

SEQ ID NO: 2230819 - DNA, 25 bp, Homo sapien
tgctaaatctcctttggtaaatatc

SEQ ID NO: 2230820 - DNA, 25 bp, Homo sapien
tcctttggtaaatatcccaacatct

SEQ ID NO: 2230821 - DNA, 25 bp, Homo sapien
gcctcaattccgctaaggtctttca

SEQ ID NO: 2230822 - DNA, 25 bp, Homo sapien
gcctactttcgtgaaatcctcacat

SEQ ID NO: 2230823 - DNA, 25 bp, Homo sapien
ctttcatttcttgttcgcctacttt

SEQ ID NO: 2230824 - DNA, 25 bp, Homo sapien
ttcttgttcgcctactttcgtgaaa

SEQ ID NO: 2230825 - DNA, 25 bp, Homo sapien
tctaagtccgatcccacatatagca

SEQ ID NO: 2230826 - DNA, 25 bp, Homo sapien
ttacacccgtgctctaagtccgatc

SEQ ID NO: 2230827 - DNA, 25 bp, Homo sapien
gatgggcattacacccgtgctctaa

SEQ ID NO: 2230828 - DNA, 25 bp, Homo sapien
ggaaagatgggcattacacccgtgc

SEQ ID NO: 2230829 - DNA, 25 bp, Homo sapien
taaacaaatccatactaggaataag

SEQ ID NO: 2230830 - DNA, 25 bp, Homo sapien
tactaggaataaggctttttgagct

SEQ ID NO: 2230831 - DNA, 25 bp, Homo sapien
tagtgtgtcctgaaggcagtgacat

SEQ ID NO: 2230832 - DNA, 25 bp, Homo sapien
ccgtagtgtgtcctgaaggcagtga

SEQ ID NO: 2230833 - DNA, 25 bp, Homo sapien
gtagtgtgtcctgaaggcagtgaca

SEQ ID NO: 2230834 - DNA, 25 bp, Homo sapien
cgtagtgtgtcctgaaggcagtgac

SEQ ID NO: 2230835 - DNA, 25 bp, Homo sapien
aatgtccttatagggctctcttgag

SEQ ID NO: 2230836 - DNA, 25 bp, Homo sapien
tttaccaatgtccttatagggctct

SEQ ID NO: 2230837 - DNA, 25 bp, Homo sapien
tatagggctctcttgaggagaatct

SEQ ID NO: 2230838 - DNA, 25 bp, Homo sapien
ccttatagggctctcttgaggagaa

SEQ ID NO: 2230839 - DNA, 25 bp, Homo sapien
ctggggacgggagtttggagaagat

SEQ ID NO: 2230840 - DNA, 25 bp, Homo sapien
gggacgggagtttggagaagattga

SEQ ID NO: 2230841 - DNA, 25 bp, Homo sapien
ggacgggagtttggagaagattgag

SEQ ID NO: 2230842 - DNA, 25 bp, Homo sapien
gacgggagtttggagaagattgagg

SEQ ID NO: 2230843 - DNA, 25 bp, Homo sapien
cccaaagtttgctgccagcctaaca

SEQ ID NO: 2230844 - DNA, 25 bp, Homo sapien
acacccagggagatgtttctaatgt

SEQ ID NO: 2230845 - DNA, 25 bp, Homo sapien
aatgtagccactcctgcaaaggtgg

SEQ ID NO: 2230846 - DNA, 25 bp, Homo sapien
tcctgcaaaggtggttagcaacaat

SEQ ID NO: 2230847 - DNA, 25 bp, Homo sapien
catccctatcgtaaaccattgtcag

SEQ ID NO: 2230848 - DNA, 25 bp, Homo sapien
gtcgtggaaatagaaccattgtcct

SEQ ID NO: 2230849 - DNA, 25 bp, Homo sapien
tacaagagcctctagggtttgagtc

SEQ ID NO: 2230850 - DNA, 25 bp, Homo sapien
gagcactggagtattacaagagcct

SEQ ID NO: 2230851 - DNA, 25 bp, Homo sapien
taacacaagaccactggaagtgaag

SEQ ID NO: 2230852 - DNA, 25 bp, Homo sapien
aacacaagaccactggaagtgaagc

SEQ ID NO: 2230853 - DNA, 25 bp, Homo sapien
cataacacaagaccactggaagtga

SEQ ID NO: 2230854 - DNA, 25 bp, Homo sapien
tcataacacaagaccactggaagtg

SEQ ID NO: 2230855 - DNA, 25 bp, Homo sapien
gcagtgaggggtggataccaacttt

SEQ ID NO: 2230856 - DNA, 25 bp, Homo sapien
tttagcagtgaggggtggataccaa

SEQ ID NO: 2230857 - DNA, 25 bp, Homo sapien
tgaggggtggataccaactttaatg

SEQ ID NO: 2230858 - DNA, 25 bp, Homo sapien
aatttagcagtgaggggtggatacc

SEQ ID NO: 2230859 - DNA, 25 bp, Homo sapien
gaaactagaacacctatgcactgct

SEQ ID NO: 2230860 - DNA, 25 bp, Homo sapien
agacgaccaacttcagactcacaga

SEQ ID NO: 2230861 - DNA, 25 bp, Homo sapien
tacaagactgtgaaaaagacaccct

SEQ ID NO: 2230862 - DNA, 25 bp, Homo sapien
gacacccttagtacaatttcacaga

SEQ ID NO: 2230863 - DNA, 25 bp, Homo sapien
tcaatgtaaacatagcacagagaag

SEQ ID NO: 2230864 - DNA, 25 bp, Homo sapien
tgtaaacatagcacagagaagaatc

SEQ ID NO: 2230865 - DNA, 25 bp, Homo sapien
aatgtaaacatagcacagagaagaa

SEQ ID NO: 2230866 - DNA, 25 bp, Homo sapien
gtaaacatagcacagagaagaatct

SEQ ID NO: 2230867 - DNA, 25 bp, Homo sapien
gtaagatgcctccgtcagagcctgg

SEQ ID NO: 2230868 - DNA, 25 bp, Homo sapien
cagccttgggattgataaccaccag

SEQ ID NO: 2230869 - DNA, 25 bp, Homo sapien
caattgtgggcagatttatgtaaga

SEQ ID NO: 2230870 - DNA, 25 bp, Homo sapien
aaataggagtggctacactggcagc

SEQ ID NO: 2230871 - DNA, 25 bp, Homo sapien
tatcagtccaccaagaattcagccc

SEQ ID NO: 2230872 - DNA, 25 bp, Homo sapien
gagactgcaaggataggcccaggtc

SEQ ID NO: 2230873 - DNA, 25 bp, Homo sapien
ggcatactggcttctcaggtggaaa

SEQ ID NO: 2230874 - DNA, 25 bp, Homo sapien
tagagtataaagtcaagtccagggc

SEQ ID NO: 2230875 - DNA, 25 bp, Homo sapien
ctatcgtccagactcacagagtggg

SEQ ID NO: 2230876 - DNA, 25 bp, Homo sapien
tacacttaccagtttctaatggaaa

SEQ ID NO: 2230877 - DNA, 25 bp, Homo sapien
cggctacctggactcaaaatctcag

SEQ ID NO: 2230878 - DNA, 25 bp, Homo sapien
aagttacggtcagcatggcaattca

SEQ ID NO: 2230879 - DNA, 25 bp, Homo sapien
tttagagtcactctcagcatcctct

SEQ ID NO: 2230880 - DNA, 25 bp, Homo sapien
gctttagagtcactctcagcatcct

SEQ ID NO: 2230881 - DNA, 25 bp, Homo sapien
tcaagctttagagtcactctcagca

SEQ ID NO: 2230882 - DNA, 25 bp, Homo sapien
tagagtcactctcagcatcctctgc

SEQ ID NO: 2230883 - DNA, 25 bp, Homo sapien
ttatggatcttcaaacaaagtagga

SEQ ID NO: 2230884 - DNA, 25 bp, Homo sapien
acagcctcactcatatagaggaaga

SEQ ID NO: 2230885 - DNA, 25 bp, Homo sapien
tcttcaaacaaagtaggaacagcct

SEQ ID NO: 2230886 - DNA, 25 bp, Homo sapien
aacagcctcactcatatagaggaag

SEQ ID NO: 2230887 - DNA, 25 bp, Homo sapien
ttcctctacgttatgaacactttct

SEQ ID NO: 2230888 - DNA, 25 bp, Homo sapien
ttcctgggtaggtggtgcttgttcc

SEQ ID NO: 2230889 - DNA, 25 bp, Homo sapien
tcttccaaatgtagctcttcctcta

SEQ ID NO: 2230890 - DNA, 25 bp, Homo sapien
tagctcttcctctacgttatgaaca

SEQ ID NO: 2230891 - DNA, 25 bp, Homo sapien
caggaagacacagagctaaagtcct

SEQ ID NO: 2230892 - DNA, 25 bp, Homo sapien
taaagtccttgcagaaccaaccaaa

SEQ ID NO: 2230893 - DNA, 25 bp, Homo sapien
ggaagacacagagctaaagtccttg

SEQ ID NO: 2230894 - DNA, 25 bp, Homo sapien
aagacacagagctaaagtccttgca

SEQ ID NO: 2230895 - DNA, 25 bp, Homo sapien
aatggtctggagacatgaagattcc

SEQ ID NO: 2230896 - DNA, 25 bp, Homo sapien
agaatggtctggagacatgaagatt

SEQ ID NO: 2230897 - DNA, 25 bp, Homo sapien
cttgaagaatggtctggagacatga

SEQ ID NO: 2230898 - DNA, 25 bp, Homo sapien
gaagaatggtctggagacatgaaga

SEQ ID NO: 2230899 - DNA, 25 bp, Homo sapien
catggtgttcagtcaataaaaaggc

SEQ ID NO: 2230900 - DNA, 25 bp, Homo sapien
caatgcatggctaaacatggtgttc

SEQ ID NO: 2230901 - DNA, 25 bp, Homo sapien
cattatcacctggaggagtttgcaa

SEQ ID NO: 2230902 - DNA, 25 bp, Homo sapien
gaatgtcagtaagcactcaccaaga

SEQ ID NO: 2230903 - DNA, 25 bp, Homo sapien
ccccattgccctcataagctggttg

SEQ ID NO: 2230904 - DNA, 25 bp, Homo sapien
aaatatgctgctttgccataacctg

SEQ ID NO: 2230905 - DNA, 25 bp, Homo sapien
aatccaatgagatgctggtaccaag

SEQ ID NO: 2230906 - DNA, 25 bp, Homo sapien
tagacctggaaaatgggtcaaaatc

SEQ ID NO: 2230907 - DNA, 25 bp, Homo sapien
aaagctggggccagattttaatatt

SEQ ID NO: 2230908 - DNA, 25 bp, Homo sapien
ggtccaaatgcctaacgggtgtgtc

SEQ ID NO: 2230909 - DNA, 25 bp, Homo sapien
tcttatcatttcttcagggtccaaa

SEQ ID NO: 2230910 - DNA, 25 bp, Homo sapien
tccaatgcatcatcacaaacttgtt

SEQ ID NO: 2230911 - DNA, 25 bp, Homo sapien
cacaggataaggacggctgcgtgaa

SEQ ID NO: 2230912 - DNA, 25 bp, Homo sapien
ctggccaggctgattcggccctcct

SEQ ID NO: 2230913 - DNA, 25 bp, Homo sapien
tctgcttcctggcttacgccttctt

SEQ ID NO: 2230914 - DNA, 25 bp, Homo sapien
ctggcttacgccttcttcggaaggt

SEQ ID NO: 2230915 - DNA, 25 bp, Homo sapien
cgccttcttcggaaggttgaggatt

SEQ ID NO: 2230916 - DNA, 25 bp, Homo sapien
ctcctgtggtacatcctccaaaggg

SEQ ID NO: 2230917 - DNA, 25 bp, Homo sapien
ccaaagggcgatcttcctcggcctt

SEQ ID NO: 2230918 - DNA, 25 bp, Homo sapien
atcttcctcggcctttggcatgttc

SEQ ID NO: 2230919 - DNA, 25 bp, Homo sapien
ggtacatcctccaaagggcgatctt

SEQ ID NO: 2230920 - DNA, 25 bp, Homo sapien
ccgaagagacctgaagcaattgcac

SEQ ID NO: 2230921 - DNA, 25 bp, Homo sapien
cgaagagacctgaagcaattgcacc

SEQ ID NO: 2230922 - DNA, 25 bp, Homo sapien
ctgcagggattcaggggattttcct

SEQ ID NO: 2230923 - DNA, 25 bp, Homo sapien
ggggattttcctctctcttccctca

SEQ ID NO: 2230924 - DNA, 25 bp, Homo sapien
gggattttcctctctcttccctcac

SEQ ID NO: 2230925 - DNA, 25 bp, Homo sapien
agggattcaggggattttcctctct

SEQ ID NO: 2230926 - DNA, 25 bp, Homo sapien
tgtcgcgcccaaaaaaccaaatatc

SEQ ID NO: 2230927 - DNA, 25 bp, Homo sapien
gatttgtgtcgcgcccaaaaaacca

SEQ ID NO: 2230928 - DNA, 25 bp, Homo sapien
ctcgatttgtgtcgcgcccaaaaaa

SEQ ID NO: 2230929 - DNA, 25 bp, Homo sapien
tgtgtcgcgcccaaaaaaccaaata

SEQ ID NO: 2230930 - DNA, 25 bp, Homo sapien
ctgctacagggaaacaggccctgga

SEQ ID NO: 2230931 - DNA, 25 bp, Homo sapien
agcaataaggagctgctacagggaa

SEQ ID NO: 2230932 - DNA, 25 bp, Homo sapien
cttctccagcaataaggagctgcta

SEQ ID NO: 2230933 - DNA, 25 bp, Homo sapien
gaaacaggccctggactataaggac

SEQ ID NO: 2230934 - DNA, 25 bp, Homo sapien
actgagctcgagtccccagttaccc

SEQ ID NO: 2230935 - DNA, 25 bp, Homo sapien
cactgagctcgagtccccagttacc

SEQ ID NO: 2230936 - DNA, 25 bp, Homo sapien
ctgagctcgagtccccagttacccc

SEQ ID NO: 2230937 - DNA, 25 bp, Homo sapien
tgagctcgagtccccagttacccct

SEQ ID NO: 2230938 - DNA, 25 bp, Homo sapien
tgaaattaagtcaatcagagtagat

SEQ ID NO: 2230939 - DNA, 25 bp, Homo sapien
tacaacactcagctacctttgaaat

SEQ ID NO: 2230940 - DNA, 25 bp, Homo sapien
tagcattctactgaagtaaaaacta

SEQ ID NO: 2230941 - DNA, 25 bp, Homo sapien
gcaatttcagtgtgtcaatacaaca

SEQ ID NO: 2230942 - DNA, 25 bp, Homo sapien
ggatttccaccagtaacttcatgat

SEQ ID NO: 2230943 - DNA, 25 bp, Homo sapien
tcagctgcagtggatttccaccagt

SEQ ID NO: 2230944 - DNA, 25 bp, Homo sapien
tttccaccagtaacttcatgatatg

SEQ ID NO: 2230945 - DNA, 25 bp, Homo sapien
cagtggatttccaccagtaacttca

SEQ ID NO: 2230946 - DNA, 25 bp, Homo sapien
ttacgaagcatttttcccacatttc

SEQ ID NO: 2230947 - DNA, 25 bp, Homo sapien
ccacatttcgtcagtattaacataa

SEQ ID NO: 2230948 - DNA, 25 bp, Homo sapien
cgaagcatttttcccacatttcgtc

SEQ ID NO: 2230949 - DNA, 25 bp, Homo sapien
tcccacatttcgtcagtattaacat

SEQ ID NO: 2230950 - DNA, 25 bp, Homo sapien
taaaagacagagcactgtagttggg

SEQ ID NO: 2230951 - DNA, 25 bp, Homo sapien
ttaaggttaaagcacataggccggc

SEQ ID NO: 2230952 - DNA, 25 bp, Homo sapien
taggccggcaaatgcctgccaggaa

SEQ ID NO: 2230953 - DNA, 25 bp, Homo sapien
caagagtgacacctaaaggaaagta

SEQ ID NO: 2230954 - DNA, 25 bp, Homo sapien
gacatcttctaagtctttctggccc

SEQ ID NO: 2230955 - DNA, 25 bp, Homo sapien
catatgggacatcttctaagtcttt

SEQ ID NO: 2230956 - DNA, 25 bp, Homo sapien
tgggacatcttctaagtctttctgg

SEQ ID NO: 2230957 - DNA, 25 bp, Homo sapien
ttaaacatatgggacatcttctaag

SEQ ID NO: 2230958 - DNA, 25 bp, Homo sapien
ggcttgccctcactttgtggcttgt

SEQ ID NO: 2230959 - DNA, 25 bp, Homo sapien
cttgccctcactttgtggcttgtcc

SEQ ID NO: 2230960 - DNA, 25 bp, Homo sapien
ttgccctcactttgtggcttgtcct

SEQ ID NO: 2230961 - DNA, 25 bp, Homo sapien
gcttgccctcactttgtggcttgtc

SEQ ID NO: 2230962 - DNA, 25 bp, Homo sapien
ttcatcttctgtacttccctcatcc

SEQ ID NO: 2230963 - DNA, 25 bp, Homo sapien
tgtccggcttttcttcctcgtctga

SEQ ID NO: 2230964 - DNA, 25 bp, Homo sapien
tcactttctaggtttctttcattct

SEQ ID NO: 2230965 - DNA, 25 bp, Homo sapien
tcctcgtctgactttccttcatctt

SEQ ID NO: 2230966 - DNA, 25 bp, Homo sapien
ttgagatgttcccttctttgccttt

SEQ ID NO: 2230967 - DNA, 25 bp, Homo sapien
gttgagatgttcccttctttgcctt

SEQ ID NO: 2230968 - DNA, 25 bp, Homo sapien
tgagatgttcccttctttgcctttc

SEQ ID NO: 2230969 - DNA, 25 bp, Homo sapien
ccaatttacacggacctgcagaaat

SEQ ID NO: 2230970 - DNA, 25 bp, Homo sapien
gtagttccaatttacacggacctgc

SEQ ID NO: 2230971 - DNA, 25 bp, Homo sapien
tgcatgcagttgtaagacttataaa

SEQ ID NO: 2230972 - DNA, 25 bp, Homo sapien
atttacacggacctgcagaaatcct

SEQ ID NO: 2230973 - DNA, 25 bp, Homo sapien
catatccccttagggtcttgacagc

SEQ ID NO: 2230974 - DNA, 25 bp, Homo sapien
agccatagatcaccatatcccctta

SEQ ID NO: 2230975 - DNA, 25 bp, Homo sapien
ttgacagcagtcatgtatcccgaaa

SEQ ID NO: 2230976 - DNA, 25 bp, Homo sapien
tagatcaccatatccccttagggtc

SEQ ID NO: 2230977 - DNA, 25 bp, Homo sapien
cctggtgcagtagccctctcccact

SEQ ID NO: 2230978 - DNA, 25 bp, Homo sapien
tcccaagggtcctggtgcagtagcc

SEQ ID NO: 2230979 - DNA, 25 bp, Homo sapien
caagggtcctggtgcagtagccctc

SEQ ID NO: 2230980 - DNA, 25 bp, Homo sapien
ggtgcagtagccctctcccactgac

SEQ ID NO: 2230981 - DNA, 25 bp, Homo sapien
ctgggttagtgcccacaaccacaga

SEQ ID NO: 2230982 - DNA, 25 bp, Homo sapien
gggttagtgcccacaaccacagact

SEQ ID NO: 2230983 - DNA, 25 bp, Homo sapien
gttagtgcccacaaccacagacttg

SEQ ID NO: 2230984 - DNA, 25 bp, Homo sapien
tagtgcccacaaccacagacttgaa

SEQ ID NO: 2230985 - DNA, 25 bp, Homo sapien
aaaagacacagggaactcaggcctg

SEQ ID NO: 2230986 - DNA, 25 bp, Homo sapien
ccgttgcagggtccgccctcagcag

SEQ ID NO: 2230987 - DNA, 25 bp, Homo sapien
gttggagaaaagacacagggaactc

SEQ ID NO: 2230988 - DNA, 25 bp, Homo sapien
ctcaggcctggacccgttgcagggt

SEQ ID NO: 2230989 - DNA, 25 bp, Homo sapien
cgtttcgtcgctgttctcttccctg

SEQ ID NO: 2230990 - DNA, 25 bp, Homo sapien
tcgccgtttcgtcgctgttctcttc

SEQ ID NO: 2230991 - DNA, 25 bp, Homo sapien
cgttttctcgccgtttcgtcgctgt

SEQ ID NO: 2230992 - DNA, 25 bp, Homo sapien
tcagacatcacccggtcgccggctt

SEQ ID NO: 2230993 - DNA, 25 bp, Homo sapien
cagggaaataaaagctggtacccat

SEQ ID NO: 2230994 - DNA, 25 bp, Homo sapien
tgtagcctatgtgcattaccatccc

SEQ ID NO: 2230995 - DNA, 25 bp, Homo sapien
tggaacagggcggtatctagaaagc

SEQ ID NO: 2230996 - DNA, 25 bp, Homo sapien
gcagatccgatcctctgtagcctat

SEQ ID NO: 2230997 - DNA, 25 bp, Homo sapien
aaatttctgcgccaaaatgaatggg

SEQ ID NO: 2230998 - DNA, 25 bp, Homo sapien
tctgccttcctccacggaaacaggg

SEQ ID NO: 2230999 - DNA, 25 bp, Homo sapien
ctgccttcctccacggaaacaggga

SEQ ID NO: 2231000 - DNA, 25 bp, Homo sapien
tctgtccttcagtctgaagtctgcc

SEQ ID NO: 2231001 - DNA, 25 bp, Homo sapien
gtccttcagtctgaagtctgccttc

SEQ ID NO: 2231002 - DNA, 25 bp, Homo sapien
tgcacacgtcggcttcagatcacgt

SEQ ID NO: 2231003 - DNA, 25 bp, Homo sapien
cggcttcagatcacgtgagaaaaac

SEQ ID NO: 2231004 - DNA, 25 bp, Homo sapien
caccagtgggctcgggtccctagtt

SEQ ID NO: 2231005 - DNA, 25 bp, Homo sapien
cgtgagaaaaacgtcaccagtgggc

SEQ ID NO: 2231006 - DNA, 25 bp, Homo sapien
taataggagacccacaagaaatagg

SEQ ID NO: 2231007 - DNA, 25 bp, Homo sapien
caggggtctccctattaacttcagg

SEQ ID NO: 2231008 - DNA, 25 bp, Homo sapien
taaaactctcctgctgacagaaact

SEQ ID NO: 2231009 - DNA, 25 bp, Homo sapien
tacgacaaaggtacaccacaaatgt

SEQ ID NO: 2231010 - DNA, 25 bp, Homo sapien
tatgactcaactgcttttccctcag

SEQ ID NO: 2231011 - DNA, 25 bp, Homo sapien
actatgactcaactgcttttccctc

SEQ ID NO: 2231012 - DNA, 25 bp, Homo sapien
ctatgactcaactgcttttccctca

SEQ ID NO: 2231013 - DNA, 25 bp, Homo sapien
caggatgggctgcctaacgcggaac

SEQ ID NO: 2231014 - DNA, 25 bp, Homo sapien
gatgggctgcctaacgcggaaccgc

SEQ ID NO: 2231015 - DNA, 25 bp, Homo sapien
gcaggatgggctgcctaacgcggaa

SEQ ID NO: 2231016 - DNA, 25 bp, Homo sapien
aggatgggctgcctaacgcggaacc

SEQ ID NO: 2231017 - DNA, 25 bp, Homo sapien
ttcactaacattcaaaggtagggcc

SEQ ID NO: 2231018 - DNA, 25 bp, Homo sapien
gatgagattgtttaacgctcgttcc

SEQ ID NO: 2231019 - DNA, 25 bp, Homo sapien
gcacacagtattcactaacattcaa

SEQ ID NO: 2231020 - DNA, 25 bp, Homo sapien
acattcaaaggtagggccaagggct

SEQ ID NO: 2231021 - DNA, 25 bp, Homo sapien
gaaaatggactcaattcttggtgaa

SEQ ID NO: 2231022 - DNA, 25 bp, Homo sapien
gagagaaaatggactcaattcttgg

SEQ ID NO: 2231023 - DNA, 25 bp, Homo sapien
gagaaaatggactcaattcttggtg

SEQ ID NO: 2231024 - DNA, 25 bp, Homo sapien
acagagagaaaatggactcaattct

SEQ ID NO: 2231025 - DNA, 25 bp, Homo sapien
actacccacctttcaaaattcagag

SEQ ID NO: 2231026 - DNA, 25 bp, Homo sapien
aggacagaggcccgactacccacct

SEQ ID NO: 2231027 - DNA, 25 bp, Homo sapien
cgactacccacctttcaaaattcag

SEQ ID NO: 2231028 - DNA, 25 bp, Homo sapien
cagaggcccgactacccacctttca

SEQ ID NO: 2231029 - DNA, 25 bp, Homo sapien
tgcccttctctcccgcaaagcccac

SEQ ID NO: 2231030 - DNA, 25 bp, Homo sapien
gcccttctctcccgcaaagcccacc

SEQ ID NO: 2231031 - DNA, 25 bp, Homo sapien
cccttctctcccgcaaagcccacca

SEQ ID NO: 2231032 - DNA, 25 bp, Homo sapien
ggcaccaaaatggaggacgaagaag

SEQ ID NO: 2231033 - DNA, 25 bp, Homo sapien
gaaggcacggattggggtctcagac

SEQ ID NO: 2231034 - DNA, 25 bp, Homo sapien
tgggctttcctcatgttctgacccc

SEQ ID NO: 2231035 - DNA, 25 bp, Homo sapien
caaaatggaggacgaagaaggggtg

SEQ ID NO: 2231036 - DNA, 25 bp, Homo sapien
cgtgaggtgcgtcgccgcaacactt

SEQ ID NO: 2231037 - DNA, 25 bp, Homo sapien
tcgacgtgaggtgcgtcgccgcaac

SEQ ID NO: 2231038 - DNA, 25 bp, Homo sapien
gattctcgacgtgaggtgcgtcgcc

SEQ ID NO: 2231039 - DNA, 25 bp, Homo sapien
tcctcccgattctcgacgtgaggtg

SEQ ID NO: 2231040 - DNA, 25 bp, Homo sapien
tgcagcggaacgctagagaggaccc

SEQ ID NO: 2231041 - DNA, 25 bp, Homo sapien
cccgggccctcctagccgctctcgc

SEQ ID NO: 2231042 - DNA, 25 bp, Homo sapien
gaacgctagagaggacccgccgcca

SEQ ID NO: 2231043 - DNA, 25 bp, Homo sapien
cgggccctcctagccgctctcgccc

SEQ ID NO: 2231044 - DNA, 25 bp, Homo sapien
gaaaagcttgcgctggtgacggagg

SEQ ID NO: 2231045 - DNA, 25 bp, Homo sapien
gctgcatcgtggaccggctgcgtct

SEQ ID NO: 2231046 - DNA, 25 bp, Homo sapien
ttttctgcatcaagaagggcggagc

SEQ ID NO: 2231047 - DNA, 25 bp, Homo sapien
aaaggtcgtagcctcaggatcgccg

SEQ ID NO: 2231048 - DNA, 25 bp, Homo sapien
tgctccccctccgcttcctactttc

SEQ ID NO: 2231049 - DNA, 25 bp, Homo sapien
ctgctccccctccgcttcctacttt

SEQ ID NO: 2231050 - DNA, 25 bp, Homo sapien
ttctgacgccacaacgaggtaagac

SEQ ID NO: 2231051 - DNA, 25 bp, Homo sapien
cgagcgacggcggttctgacgccac

SEQ ID NO: 2231052 - DNA, 25 bp, Homo sapien
gactcagtgttggccgatcacgtgt

SEQ ID NO: 2231053 - DNA, 25 bp, Homo sapien
taccactgccgagaagggagcgagc

SEQ ID NO: 2231054 - DNA, 25 bp, Homo sapien
tcctttgaagtggtaagccctacta

SEQ ID NO: 2231055 - DNA, 25 bp, Homo sapien
gtgagtccagatagcatgaaagcgc

SEQ ID NO: 2231056 - DNA, 25 bp, Homo sapien
tctgtataatgtgcgcaggcctcat

SEQ ID NO: 2231057 - DNA, 25 bp, Homo sapien
gcagattttgggcttgtcagtctcc

SEQ ID NO: 2231058 - DNA, 25 bp, Homo sapien
taggtaaatccttagatgtgctaga

SEQ ID NO: 2231059 - DNA, 25 bp, Homo sapien
tatttttgccaccttataccactgt

SEQ ID NO: 2231060 - DNA, 25 bp, Homo sapien
gatcaggtactcaatatatttttgc

SEQ ID NO: 2231061 - DNA, 25 bp, Homo sapien
caaagctcgtgcaaagatcaggtac

SEQ ID NO: 2231062 - DNA, 25 bp, Homo sapien
tatattcccgggcttctttctcctc

SEQ ID NO: 2231063 - DNA, 25 bp, Homo sapien
tcctctgggtaccagctccttactg

SEQ ID NO: 2231064 - DNA, 25 bp, Homo sapien
tctttctcctctgggtaccagctcc

SEQ ID NO: 2231065 - DNA, 25 bp, Homo sapien
ttctcctctgggtaccagctcctta

SEQ ID NO: 2231066 - DNA, 25 bp, Homo sapien
tgcggcttcgcagtccatctccttt

SEQ ID NO: 2231067 - DNA, 25 bp, Homo sapien
caaaagctaggcgaaatttgcggct

SEQ ID NO: 2231068 - DNA, 25 bp, Homo sapien
ttggagaggccattagctttgtctg

SEQ ID NO: 2231069 - DNA, 25 bp, Homo sapien
tccgcctctcctgcctattggagag

SEQ ID NO: 2231070 - DNA, 25 bp, Homo sapien
gggcttccctatcagtcctctgtta

SEQ ID NO: 2231071 - DNA, 25 bp, Homo sapien
gcatgattcaacttgtactccggaa

SEQ ID NO: 2231072 - DNA, 25 bp, Homo sapien
tccggaacaagtccagtaggcagag

SEQ ID NO: 2231073 - DNA, 25 bp, Homo sapien
tcctctgttattgagccctgtctcc

SEQ ID NO: 2231074 - DNA, 25 bp, Homo sapien
aaatctctgtgcatttggccctgga

SEQ ID NO: 2231075 - DNA, 25 bp, Homo sapien
gtgcatttggccctggaatcttcat

SEQ ID NO: 2231076 - DNA, 25 bp, Homo sapien
acacactgagataaaatctctgtgc

SEQ ID NO: 2231077 - DNA, 25 bp, Homo sapien
gcaaacacactgagataaaatctct

SEQ ID NO: 2231078 - DNA, 25 bp, Homo sapien
gggataaagtagacagggtccaaga

SEQ ID NO: 2231079 - DNA, 25 bp, Homo sapien
agcagactgtgctccgcaagtcagg

SEQ ID NO: 2231080 - DNA, 25 bp, Homo sapien
caaggataggcacctcctagggctc

SEQ ID NO: 2231081 - DNA, 25 bp, Homo sapien
ctagggctctagagatgtggaattc

SEQ ID NO: 2231082 - DNA, 25 bp, Homo sapien
tttgccttaactctctcatctcctc

SEQ ID NO: 2231083 - DNA, 25 bp, Homo sapien
ccctgagtttttgccttaactctct

SEQ ID NO: 2231084 - DNA, 25 bp, Homo sapien
tgagtttttgccttaactctctcat

SEQ ID NO: 2231085 - DNA, 25 bp, Homo sapien
tcatctcctccatgaaccattccat

SEQ ID NO: 2231086 - DNA, 25 bp, Homo sapien
ccattttgcacaggggcctgctccc

SEQ ID NO: 2231087 - DNA, 25 bp, Homo sapien
aagggcgaatttcctctccattttg

SEQ ID NO: 2231088 - DNA, 25 bp, Homo sapien
tctccattttgcacaggggcctgct

SEQ ID NO: 2231089 - DNA, 25 bp, Homo sapien
agggcgaatttcctctccattttgc

SEQ ID NO: 2231090 - DNA, 25 bp, Homo sapien
gaggttttccgtgttgagatttctc

SEQ ID NO: 2231091 - DNA, 25 bp, Homo sapien
tattctacttggcactccgtcactc

SEQ ID NO: 2231092 - DNA, 25 bp, Homo sapien
aggttttccgtgttgagatttctct

SEQ ID NO: 2231093 - DNA, 25 bp, Homo sapien
tgccgcagagcgctggcgcagaccc

SEQ ID NO: 2231094 - DNA, 25 bp, Homo sapien
agagcgctggcgcagacccgccacc

SEQ ID NO: 2231095 - DNA, 25 bp, Homo sapien
aggctgctgccgcagagcgctggcg

SEQ ID NO: 2231096 - DNA, 25 bp, Homo sapien
tgcagacggccagggtggggcgagt

SEQ ID NO: 2231097 - DNA, 25 bp, Homo sapien
tctggtccttgttcccgtctggata

SEQ ID NO: 2231098 - DNA, 25 bp, Homo sapien
ggacccgagctcactggtgacgtag

SEQ ID NO: 2231099 - DNA, 25 bp, Homo sapien
tctcatgtgaccaggagtcgacgtg

SEQ ID NO: 2231100 - DNA, 25 bp, Homo sapien
tgcagaagtcctggtaatctggtcc

SEQ ID NO: 2231101 - DNA, 25 bp, Homo sapien
agaaaggctgattcaatctctccag

SEQ ID NO: 2231102 - DNA, 25 bp, Homo sapien
gtgaaccaaagcatgaggaagagcc

SEQ ID NO: 2231103 - DNA, 25 bp, Homo sapien
aagaagatatacacaacaggcattt

SEQ ID NO: 2231104 - DNA, 25 bp, Homo sapien
caaacttatagtgatgcgttggaag

SEQ ID NO: 2231105 - DNA, 25 bp, Homo sapien
cgacttgcccctaattttcgatggg

SEQ ID NO: 2231106 - DNA, 25 bp, Homo sapien
ttcgatgggccatacccaataggca

SEQ ID NO: 2231107 - DNA, 25 bp, Homo sapien
gggagctctctaatcaccatgacca

SEQ ID NO: 2231108 - DNA, 25 bp, Homo sapien
gaatggagaggaagaccgccctttg

SEQ ID NO: 2231109 - DNA, 25 bp, Homo sapien
tgccagcttctatttgaagattgcc

SEQ ID NO: 2231110 - DNA, 25 bp, Homo sapien
gcagtagtttcacccatttgcatgg

SEQ ID NO: 2231111 - DNA, 25 bp, Homo sapien
tccatgtgtcaagtgggtcttgtgt

SEQ ID NO: 2231112 - DNA, 25 bp, Homo sapien
tactgatccgtttgctgtgaaccct

SEQ ID NO: 2231113 - DNA, 25 bp, Homo sapien
aatagggaatcatgtctgaccaacc

SEQ ID NO: 2231114 - DNA, 25 bp, Homo sapien
gcttgtatcccaaatgacatggaga

SEQ ID NO: 2231115 - DNA, 25 bp, Homo sapien
ggttctgtgaatgaaaccagtcagt

SEQ ID NO: 2231116 - DNA, 25 bp, Homo sapien
ccaaatttggaagaccatgcgtaac

SEQ ID NO: 2231117 - DNA, 25 bp, Homo sapien
catacagccattgtctcacaaaggg

SEQ ID NO: 2231118 - DNA, 25 bp, Homo sapien
atgcaaggatcatacagccattgtc

SEQ ID NO: 2231119 - DNA, 25 bp, Homo sapien
ggatcatacagccattgtctcacaa

SEQ ID NO: 2231120 - DNA, 25 bp, Homo sapien
ggagtctcaatgggcctgagaagac

SEQ ID NO: 2231121 - DNA, 25 bp, Homo sapien
gctgttgagtgaggcccatagggca

SEQ ID NO: 2231122 - DNA, 25 bp, Homo sapien
caaatgggaagctgctggtgatatt

SEQ ID NO: 2231123 - DNA, 25 bp, Homo sapien
gtgaggcccatagggcacaatactg

SEQ ID NO: 2231124 - DNA, 25 bp, Homo sapien
aatgggaagctgctggtgatattgt

SEQ ID NO: 2231125 - DNA, 25 bp, Homo sapien
agggcgaagctgaccatttcccttg

SEQ ID NO: 2231126 - DNA, 25 bp, Homo sapien
ggcgaagctgaccatttcccttggt

SEQ ID NO: 2231127 - DNA, 25 bp, Homo sapien
tgctcagggcgaagctgaccatttc

SEQ ID NO: 2231128 - DNA, 25 bp, Homo sapien
tcagggcgaagctgaccatttccct

SEQ ID NO: 2231129 - DNA, 25 bp, Homo sapien
cagggtcccgccttcaggtgtttgg

SEQ ID NO: 2231130 - DNA, 25 bp, Homo sapien
gaaacctgacgtcataacggcgacc

SEQ ID NO: 2231131 - DNA, 25 bp, Homo sapien
gaccagcctgcgtatcacggttgcc

SEQ ID NO: 2231132 - DNA, 25 bp, Homo sapien
catttccggtgtgctggaccagcct

SEQ ID NO: 2231133 - DNA, 25 bp, Homo sapien
tcctcgccccagtgagtgtgatgtc

SEQ ID NO: 2231134 - DNA, 25 bp, Homo sapien
gtgtgatgtcttgctccgggtgtcc

SEQ ID NO: 2231135 - DNA, 25 bp, Homo sapien
gagagacgaaaggagcccagatcca

SEQ ID NO: 2231136 - DNA, 25 bp, Homo sapien
tttggcataagttgccctggcggtc

SEQ ID NO: 2231137 - DNA, 25 bp, Homo sapien
gtcagtgtcattggtcactaattca

SEQ ID NO: 2231138 - DNA, 25 bp, Homo sapien
tgtcagtgtcattggtcactaattc

SEQ ID NO: 2231139 - DNA, 25 bp, Homo sapien
tcagtgtcattggtcactaattcag

SEQ ID NO: 2231140 - DNA, 25 bp, Homo sapien
gtgtcagtgtcattggtcactaatt

SEQ ID NO: 2231141 - DNA, 25 bp, Homo sapien
taacacaaggtcctgagggcgactc

SEQ ID NO: 2231142 - DNA, 25 bp, Homo sapien
aagctgctgcctgctatcgccagtg

SEQ ID NO: 2231143 - DNA, 25 bp, Homo sapien
gccagtgcccttgctgtatccagca

SEQ ID NO: 2231144 - DNA, 25 bp, Homo sapien
tggacgtgctgatgtgggtgccctt

SEQ ID NO: 2231145 - DNA, 25 bp, Homo sapien
gactggtgagccaaatgtgtcctct

SEQ ID NO: 2231146 - DNA, 25 bp, Homo sapien
gaagggcacagttccgggcacagtt

SEQ ID NO: 2231147 - DNA, 25 bp, Homo sapien
taatgtcaacactgtgtcgatggca

SEQ ID NO: 2231148 - DNA, 25 bp, Homo sapien
caaagtatgtgctccgctgaagggc

SEQ ID NO: 2231149 - DNA, 25 bp, Homo sapien
gcttgaatgcagttaatccctgtgc

SEQ ID NO: 2231150 - DNA, 25 bp, Homo sapien
accctaagattacccatcctgcttg

SEQ ID NO: 2231151 - DNA, 25 bp, Homo sapien
agattacccatcctgcttgaatgca

SEQ ID NO: 2231152 - DNA, 25 bp, Homo sapien
tgcttgaatgcagttaatccctgtg

SEQ ID NO: 2231153 - DNA, 25 bp, Homo sapien
cacttggttaaggtactgtttgcca

SEQ ID NO: 2231154 - DNA, 25 bp, Homo sapien
ggaataccgcagagatgaattgccc

SEQ ID NO: 2231155 - DNA, 25 bp, Homo sapien
cttgatttcatgagaagtacaggca

SEQ ID NO: 2231156 - DNA, 25 bp, Homo sapien
ccctgttcttaggaggtagaggaca

SEQ ID NO: 2231157 - DNA, 25 bp, Homo sapien
gatagcacagttcctgtagcacagc

SEQ ID NO: 2231158 - DNA, 25 bp, Homo sapien
aatattaaggagaaggagccatctc

SEQ ID NO: 2231159 - DNA, 25 bp, Homo sapien
catagaactttggttgcaatgggag

SEQ ID NO: 2231160 - DNA, 25 bp, Homo sapien
tatctgactgactcttatggaagct

SEQ ID NO: 2231161 - DNA, 25 bp, Homo sapien
gtattttatcttccagcactgagct

SEQ ID NO: 2231162 - DNA, 25 bp, Homo sapien
tccagtctctgcaactgacggcagg

SEQ ID NO: 2231163 - DNA, 25 bp, Homo sapien
acaggtgactgaacccgtggttttg

SEQ ID NO: 2231164 - DNA, 25 bp, Homo sapien
tctctgcaactgacggcaggaagat

SEQ ID NO: 2231165 - DNA, 25 bp, Homo sapien
cccgtggttttggtgtctgagaaga

SEQ ID NO: 2231166 - DNA, 25 bp, Homo sapien
ttacgttctggagggatccaccctg

SEQ ID NO: 2231167 - DNA, 25 bp, Homo sapien
cagtagctctaggagaacttgcagg

SEQ ID NO: 2231168 - DNA, 25 bp, Homo sapien
tggaaccataatgccaccagtagct

SEQ ID NO: 2231169 - DNA, 25 bp, Homo sapien
catcacagggacaggattacagcct

SEQ ID NO: 2231170 - DNA, 25 bp, Homo sapien
ataataatcaacagtgtaaattgga

SEQ ID NO: 2231171 - DNA, 25 bp, Homo sapien
taataatcaacagtgtaaattggaa

SEQ ID NO: 2231172 - DNA, 25 bp, Homo sapien
tcacgttatcaagagttgagcaaag

SEQ ID NO: 2231173 - DNA, 25 bp, Homo sapien
tcatgcacaagctggacagatctgt

SEQ ID NO: 2231174 - DNA, 25 bp, Homo sapien
catatcaccattctaacaaaggcgg

SEQ ID NO: 2231175 - DNA, 25 bp, Homo sapien
gcccctcttgtactatcgatgactg

SEQ ID NO: 2231176 - DNA, 25 bp, Homo sapien
ctggtgcagtttttgggtgggctct

SEQ ID NO: 2231177 - DNA, 25 bp, Homo sapien
tctggggtgggcagacgatctccac

SEQ ID NO: 2231178 - DNA, 25 bp, Homo sapien
ggctctggggtgggcagacgatctc

SEQ ID NO: 2231179 - DNA, 25 bp, Homo sapien
cagctgtttctggtgcagtttttgg

SEQ ID NO: 2231180 - DNA, 25 bp, Homo sapien
gcagaggctgctcttgtgagtggag

SEQ ID NO: 2231181 - DNA, 25 bp, Homo sapien
ttgcagaggctgctcttgtgagtgg

SEQ ID NO: 2231182 - DNA, 25 bp, Homo sapien
tgcagaggctgctcttgtgagtgga

SEQ ID NO: 2231183 - DNA, 25 bp, Homo sapien
tttgcagaggctgctcttgtgagtg

SEQ ID NO: 2231184 - DNA, 25 bp, Homo sapien
tgtgcaggacacgatggtgcggcag

SEQ ID NO: 2231185 - DNA, 25 bp, Homo sapien
gagcttgtccaccagatgcacaggt

SEQ ID NO: 2231186 - DNA, 25 bp, Homo sapien
gagaggcctcgcatcatcctggcat

SEQ ID NO: 2231187 - DNA, 25 bp, Homo sapien
ctggcattcaggcccttagccatgg

SEQ ID NO: 2231188 - DNA, 25 bp, Homo sapien
cgagccaattcatcctgtgccgcag

SEQ ID NO: 2231189 - DNA, 25 bp, Homo sapien
ggcctcccgagccaattcatcctgt

SEQ ID NO: 2231190 - DNA, 25 bp, Homo sapien
tgcaagctcagtaccttgctcggcc

SEQ ID NO: 2231191 - DNA, 25 bp, Homo sapien
gccaattcatcctgtgccgcagcag

SEQ ID NO: 2231192 - DNA, 25 bp, Homo sapien
tgttgaaattgcacagagggctgac

SEQ ID NO: 2231193 - DNA, 25 bp, Homo sapien
gatgttgaaattgcacagagggctg

SEQ ID NO: 2231194 - DNA, 25 bp, Homo sapien
tgatgttgaaattgcacagagggct

SEQ ID NO: 2231195 - DNA, 25 bp, Homo sapien
atgttgaaattgcacagagggctga

SEQ ID NO: 2231196 - DNA, 25 bp, Homo sapien
gaaggtcacacccaggcgctcggcg

SEQ ID NO: 2231197 - DNA, 25 bp, Homo sapien
gcgctcggcgtaggcctgggcctgc

SEQ ID NO: 2231198 - DNA, 25 bp, Homo sapien
aaagaaggtcacacccaggcgctcg

SEQ ID NO: 2231199 - DNA, 25 bp, Homo sapien
tcaaagaaggtcacacccaggcgct

SEQ ID NO: 2231200 - DNA, 25 bp, Homo sapien
cttgaatgccagatgtaggcgattc

SEQ ID NO: 2231201 - DNA, 25 bp, Homo sapien
gaatgccagatgtaggcgattcccc

SEQ ID NO: 2231202 - DNA, 25 bp, Homo sapien
tgaatgccagatgtaggcgattccc

SEQ ID NO: 2231203 - DNA, 25 bp, Homo sapien
atgccagatgtaggcgattccccac

SEQ ID NO: 2231204 - DNA, 25 bp, Homo sapien
ttaatccatcgatccataccctcga

SEQ ID NO: 2231205 - DNA, 25 bp, Homo sapien
tgcaccacgagagtaggagcggaat

SEQ ID NO: 2231206 - DNA, 25 bp, Homo sapien
gtcgtagaccaggatcactccttgt

SEQ ID NO: 2231207 - DNA, 25 bp, Homo sapien
cctcgaaagaccagcggtttgcaat

SEQ ID NO: 2231208 - DNA, 25 bp, Homo sapien
tgagccaggcccgcggggttgtgcg

SEQ ID NO: 2231209 - DNA, 25 bp, Homo sapien
agccaggcccgcggggttgtgcgca

SEQ ID NO: 2231210 - DNA, 25 bp, Homo sapien
gagccaggcccgcggggttgtgcgc

SEQ ID NO: 2231211 - DNA, 25 bp, Homo sapien
taatcatcggtaccttgaacagccg

SEQ ID NO: 2231212 - DNA, 25 bp, Homo sapien
tactcatcaatacagaacaaacgtg

SEQ ID NO: 2231213 - DNA, 25 bp, Homo sapien
cctaaagtagttcagtgcaggttac

SEQ ID NO: 2231214 - DNA, 25 bp, Homo sapien
taagggatcagccaactcatacggt

SEQ ID NO: 2231215 - DNA, 25 bp, Homo sapien
cagggatactaacccaatatctgag

SEQ ID NO: 2231216 - DNA, 25 bp, Homo sapien
tacacactaggtctacacccaggtc

SEQ ID NO: 2231217 - DNA, 25 bp, Homo sapien
ctttgttttaatacagcccttagtg

SEQ ID NO: 2231218 - DNA, 25 bp, Homo sapien
cattgccaattgctttgttaccaag

SEQ ID NO: 2231219 - DNA, 25 bp, Homo sapien
tgtggggccacaatagcaggggagt

SEQ ID NO: 2231220 - DNA, 25 bp, Homo sapien
agcaggggagtggaatctgaccatt

SEQ ID NO: 2231221 - DNA, 25 bp, Homo sapien
ctgtggggccacaatagcaggggag

SEQ ID NO: 2231222 - DNA, 25 bp, Homo sapien
aatagcaggggagtggaatctgacc

SEQ ID NO: 2231223 - DNA, 25 bp, Homo sapien
caaagatctccccttgaacatgtca

SEQ ID NO: 2231224 - DNA, 25 bp, Homo sapien
gaaggaagcaaacactggcactgtg

SEQ ID NO: 2231225 - DNA, 25 bp, Homo sapien
tattgatgagcaaggtaaggttcac

SEQ ID NO: 2231226 - DNA, 25 bp, Homo sapien
gcacagagatggcacctaacctcct

SEQ ID NO: 2231227 - DNA, 25 bp, Homo sapien
caaaaaccacagtcagttgatgggt

SEQ ID NO: 2231228 - DNA, 25 bp, Homo sapien
tcctgtcttctgtctagctgactca

SEQ ID NO: 2231229 - DNA, 25 bp, Homo sapien
tcctcccatggctcaataagaactc

SEQ ID NO: 2231230 - DNA, 25 bp, Homo sapien
ttgatgggtcgagtaactagggtac

SEQ ID NO: 2231231 - DNA, 25 bp, Homo sapien
tagttatttctcctaatggtaatat

SEQ ID NO: 2231232 - DNA, 25 bp, Homo sapien
tctcctaatggtaatataaaaagag

SEQ ID NO: 2231233 - DNA, 25 bp, Homo sapien
agaaatacttggaatttgatttgga

SEQ ID NO: 2231234 - DNA, 25 bp, Homo sapien
agagaaagaaatacttggaatttga

SEQ ID NO: 2231235 - DNA, 25 bp, Homo sapien
cctaaatggatgctcagtctgcacc

SEQ ID NO: 2231236 - DNA, 25 bp, Homo sapien
taaagaagtaaatctcgccaggcat

SEQ ID NO: 2231237 - DNA, 25 bp, Homo sapien
gaataaagagtccagctatagaccc

SEQ ID NO: 2231238 - DNA, 25 bp, Homo sapien
gctcagcatcactcgttataaggga

SEQ ID NO: 2231239 - DNA, 25 bp, Homo sapien
cagccatcacgacccagatcctcaa

SEQ ID NO: 2231240 - DNA, 25 bp, Homo sapien
gggggtctccttaggactgctgccc

SEQ ID NO: 2231241 - DNA, 25 bp, Homo sapien
tgttgggggtctccttaggactgct

SEQ ID NO: 2231242 - DNA, 25 bp, Homo sapien
tcagcagccatcacgacccagatcc

SEQ ID NO: 2231243 - DNA, 25 bp, Homo sapien
cctcctctatctcctaacaacaaat

SEQ ID NO: 2231244 - DNA, 25 bp, Homo sapien
tttgtgacagtatgggatgtaacag

SEQ ID NO: 2231245 - DNA, 25 bp, Homo sapien
tgtgttccaagaggacacattcagc

SEQ ID NO: 2231246 - DNA, 25 bp, Homo sapien
tgctgtgttccaagaggacacattc

SEQ ID NO: 2231247 - DNA, 25 bp, Homo sapien
gctgtgttccaagaggacacattca

SEQ ID NO: 2231248 - DNA, 25 bp, Homo sapien
gtgttccaagaggacacattcagct

SEQ ID NO: 2231249 - DNA, 25 bp, Homo sapien
tccttagcaggctggtgtagcgcaa

SEQ ID NO: 2231250 - DNA, 25 bp, Homo sapien
tagcaggctggtgtagcgcaaacca

SEQ ID NO: 2231251 - DNA, 25 bp, Homo sapien
ttagcaggctggtgtagcgcaaacc

SEQ ID NO: 2231252 - DNA, 25 bp, Homo sapien
tgtccatagcgtcccggagagggca

SEQ ID NO: 2231253 - DNA, 25 bp, Homo sapien
gacaagatttcatctcctctgtcat

SEQ ID NO: 2231254 - DNA, 25 bp, Homo sapien
tacacccaggtctcttggtacaaag

SEQ ID NO: 2231255 - DNA, 25 bp, Homo sapien
agggatcagccaactcatgtggccc

SEQ ID NO: 2231256 - DNA, 25 bp, Homo sapien
gccacaatagcaggggagtggaatt

SEQ ID NO: 2231257 - DNA, 25 bp, Homo sapien
tactctccagatgtgctcctgtgag

SEQ ID NO: 2231258 - DNA, 25 bp, Homo sapien
tgtgcaatcacgtcctcatcttttg

SEQ ID NO: 2231259 - DNA, 25 bp, Homo sapien
ctcctgtgaggtgcacatgaacaca

SEQ ID NO: 2231260 - DNA, 25 bp, Homo sapien
ggtctactgtccctaggatggtgca

SEQ ID NO: 2231261 - DNA, 25 bp, Homo sapien
gagggagattagagcattcagagac

SEQ ID NO: 2231262 - DNA, 25 bp, Homo sapien
cagggcaatggaatctgaccgtttc

SEQ ID NO: 2231263 - DNA, 25 bp, Homo sapien
ttcatgcggcctaacaaccaggtct

SEQ ID NO: 2231264 - DNA, 25 bp, Homo sapien
cttcagggatcagccaattcatgcg

SEQ ID NO: 2231265 - DNA, 25 bp, Homo sapien
tgcatgaggccataatagcagggca

SEQ ID NO: 2231266 - DNA, 25 bp, Homo sapien
aaattacagccccaactgagtagct

SEQ ID NO: 2231267 - DNA, 25 bp, Homo sapien
tgagcagcatcagggaaattacagc

SEQ ID NO: 2231268 - DNA, 25 bp, Homo sapien
tagcttcagcgacattacagatgcc

SEQ ID NO: 2231269 - DNA, 25 bp, Homo sapien
gaggaacatccctaagccaaaggaa

SEQ ID NO: 2231270 - DNA, 25 bp, Homo sapien
aacacaacagcaggagtgccagcac

SEQ ID NO: 2231271 - DNA, 25 bp, Homo sapien
ataacacaacagcaggagtgccagc

SEQ ID NO: 2231272 - DNA, 25 bp, Homo sapien
ttactgcaccgaataccagagccat

SEQ ID NO: 2231273 - DNA, 25 bp, Homo sapien
caccccagacatcaggtacattact

SEQ ID NO: 2231274 - DNA, 25 bp, Homo sapien
tcattctgcaccaaatcccatagca

SEQ ID NO: 2231275 - DNA, 25 bp, Homo sapien
aaatcccatagcaatcactgagtca

SEQ ID NO: 2231276 - DNA, 25 bp, Homo sapien
accaaatcccatagcaatcactgag

SEQ ID NO: 2231277 - DNA, 25 bp, Homo sapien
tctgcaccaaatcccatagcaatca

SEQ ID NO: 2231278 - DNA, 25 bp, Homo sapien
tacttggaaagtagctccgggacac

SEQ ID NO: 2231279 - DNA, 25 bp, Homo sapien
ttacttggaaagtagctccgggaca

SEQ ID NO: 2231280 - DNA, 25 bp, Homo sapien
tgagggatcaactgccctccaagcc

SEQ ID NO: 2231281 - DNA, 25 bp, Homo sapien
aagcctcttcacctcgggcaacaca

SEQ ID NO: 2231282 - DNA, 25 bp, Homo sapien
tagagccagacctaaattctgtgag

SEQ ID NO: 2231283 - DNA, 25 bp, Homo sapien
cctctcttaatatggttagagccag

SEQ ID NO: 2231284 - DNA, 25 bp, Homo sapien
taaccaaattttctgtcgattgcat

SEQ ID NO: 2231285 - DNA, 25 bp, Homo sapien
cattttaagcctttgtcatccacaa

SEQ ID NO: 2231286 - DNA, 25 bp, Homo sapien
tgttttactctgaagcttgccagaa

SEQ ID NO: 2231287 - DNA, 25 bp, Homo sapien
gactctgcaatcagtcacaggctgg

SEQ ID NO: 2231288 - DNA, 25 bp, Homo sapien
tctctctggaggtgatagtggagca

SEQ ID NO: 2231289 - DNA, 25 bp, Homo sapien
caaagatgtcgataagaaaatcatt

SEQ ID NO: 2231290 - DNA, 25 bp, Homo sapien
gtggatatccccagacagcatcagg

SEQ ID NO: 2231291 - DNA, 25 bp, Homo sapien
ggttttcaatacagcgtgtttgtgg

SEQ ID NO: 2231292 - DNA, 25 bp, Homo sapien
ttaatgtagtgctgatatcaggatg

SEQ ID NO: 2231293 - DNA, 25 bp, Homo sapien
aatttaatgtagtgctgatatcagg

SEQ ID NO: 2231294 - DNA, 25 bp, Homo sapien
aatgtagtgctgatatcaggatgaa

SEQ ID NO: 2231295 - DNA, 25 bp, Homo sapien
gtagtgctgatatcaggatgaaatt

SEQ ID NO: 2231296 - DNA, 25 bp, Homo sapien
gaaaccaaggcttttttcagagcca

SEQ ID NO: 2231297 - DNA, 25 bp, Homo sapien
aaaccaaggcttttttcagagccat

SEQ ID NO: 2231298 - DNA, 25 bp, Homo sapien
tctcctctttgatcctggcctgtta

SEQ ID NO: 2231299 - DNA, 25 bp, Homo sapien
ttctggaccgcccaactcattaaaa

SEQ ID NO: 2231300 - DNA, 25 bp, Homo sapien
aagactcctcttctggaccgcccaa

SEQ ID NO: 2231301 - DNA, 25 bp, Homo sapien
tcttctggaccgcccaactcattaa

SEQ ID NO: 2231302 - DNA, 25 bp, Homo sapien
tcctcttctggaccgcccaactcat

SEQ ID NO: 2231303 - DNA, 25 bp, Homo sapien
cggctggctaggaggcggggcgtgg

SEQ ID NO: 2231304 - DNA, 25 bp, Homo sapien
ggctggctaggaggcggggcgtggg

SEQ ID NO: 2231305 - DNA, 25 bp, Homo sapien
tccaggtcagtgtgcgggccttcca

SEQ ID NO: 2231306 - DNA, 25 bp, Homo sapien
tgtccccgcggctgggtctcgtctg

SEQ ID NO: 2231307 - DNA, 25 bp, Homo sapien
tctgcacgggcgcagatgtaggcac

SEQ ID NO: 2231308 - DNA, 25 bp, Homo sapien
tgtaggcaccggtccgagtgcctgc

SEQ ID NO: 2231309 - DNA, 25 bp, Homo sapien
aagctggcccgagtgtggacagaga

SEQ ID NO: 2231310 - DNA, 25 bp, Homo sapien
gtcgggtcgagtcgagggaagctgg

SEQ ID NO: 2231311 - DNA, 25 bp, Homo sapien
gtggacagagatggcggtgggaaaa

SEQ ID NO: 2231312 - DNA, 25 bp, Homo sapien
ggtcgggtcgagtcgagggaagctg

SEQ ID NO: 2231313 - DNA, 25 bp, Homo sapien
caagtatccatgctcgctttccagg

SEQ ID NO: 2231314 - DNA, 25 bp, Homo sapien
tgccgttcccgtgcgtagagaaaaa

SEQ ID NO: 2231315 - DNA, 25 bp, Homo sapien
tagagaaaaacgttgaccgcgaggc

SEQ ID NO: 2231316 - DNA, 25 bp, Homo sapien
ccgccccagtagtgagacagtggaa

SEQ ID NO: 2231317 - DNA, 25 bp, Homo sapien
ccagcgctctgcgaagcctgaaaag

SEQ ID NO: 2231318 - DNA, 25 bp, Homo sapien
cagcgctctgcgaagcctgaaaagg

SEQ ID NO: 2231319 - DNA, 25 bp, Homo sapien
ctctgcgaagcctgaaaaggaggag

SEQ ID NO: 2231320 - DNA, 25 bp, Homo sapien
gcgctctgcgaagcctgaaaaggag

SEQ ID NO: 2231321 - DNA, 25 bp, Homo sapien
ctgcaggaaagcgcccagctgagga

SEQ ID NO: 2231322 - DNA, 25 bp, Homo sapien
gaggatgatgtacccaggaaagcca

SEQ ID NO: 2231323 - DNA, 25 bp, Homo sapien
aaaaactaataaggggctggctcat

SEQ ID NO: 2231324 - DNA, 25 bp, Homo sapien
cagggagtgaaacaagggctgcagg

SEQ ID NO: 2231325 - DNA, 25 bp, Homo sapien
gccatacatgatatgaatttcagca

SEQ ID NO: 2231326 - DNA, 25 bp, Homo sapien
acatgatatgaatttcagcaatgag

SEQ ID NO: 2231327 - DNA, 25 bp, Homo sapien
gatatgaatttcagcaatgaggaca

SEQ ID NO: 2231328 - DNA, 25 bp, Homo sapien
ccatacatgatatgaatttcagcaa

SEQ ID NO: 2231329 - DNA, 25 bp, Homo sapien
taggcatccctcctgttgctagcag

SEQ ID NO: 2231330 - DNA, 25 bp, Homo sapien
ggccatgtgctttaacgttacggta

SEQ ID NO: 2231331 - DNA, 25 bp, Homo sapien
ggaaatgttcatctgttacatggaa

SEQ ID NO: 2231332 - DNA, 25 bp, Homo sapien
ctgcaatgcagtgttctcagtagga

SEQ ID NO: 2231333 - DNA, 25 bp, Homo sapien
cagacagctgagagatgggtgccac

SEQ ID NO: 2231334 - DNA, 25 bp, Homo sapien
agtgtgccccttctcatggatcctg

SEQ ID NO: 2231335 - DNA, 25 bp, Homo sapien
tcttcctgggtaatgccatacttga

SEQ ID NO: 2231336 - DNA, 25 bp, Homo sapien
gaaaggtagtgtgccccttctcatg

SEQ ID NO: 2231337 - DNA, 25 bp, Homo sapien
taaaaactagacatgctatatcagg

SEQ ID NO: 2231338 - DNA, 25 bp, Homo sapien
tatatcaggtatataggaactgagg

SEQ ID NO: 2231339 - DNA, 25 bp, Homo sapien
taaataagcctctagtgtaaggagc

SEQ ID NO: 2231340 - DNA, 25 bp, Homo sapien
gagctatgttaatctggctaggagt

SEQ ID NO: 2231341 - DNA, 25 bp, Homo sapien
tatcttaagatcatggactattggg

SEQ ID NO: 2231342 - DNA, 25 bp, Homo sapien
aaagtatgcccctcatagagcctga

SEQ ID NO: 2231343 - DNA, 25 bp, Homo sapien
gggtcatgagttccagttactactg

SEQ ID NO: 2231344 - DNA, 25 bp, Homo sapien
tcttagtacaaaatgccaggaggaa

SEQ ID NO: 2231345 - DNA, 25 bp, Homo sapien
gaaaaactgggtaatcaccactcat

SEQ ID NO: 2231346 - DNA, 25 bp, Homo sapien
gaaatccaaacttccaaggtgatag

SEQ ID NO: 2231347 - DNA, 25 bp, Homo sapien
gaaatgccattgatgtccccttcag

SEQ ID NO: 2231348 - DNA, 25 bp, Homo sapien
tactgttagcagtccagaaatgcca

SEQ ID NO: 2231349 - DNA, 25 bp, Homo sapien
ttacagacttaaggcaatcactatc

SEQ ID NO: 2231350 - DNA, 25 bp, Homo sapien
taacaaatggagttcttacactttc

SEQ ID NO: 2231351 - DNA, 25 bp, Homo sapien
ttgcagataataacaaagtgatcct

SEQ ID NO: 2231352 - DNA, 25 bp, Homo sapien
caaatgccagacttgtatatggaaa

SEQ ID NO: 2231353 - DNA, 25 bp, Homo sapien
aaatgaaaagatgatccaccagatg

SEQ ID NO: 2231354 - DNA, 25 bp, Homo sapien
tgaccttgagttaggcaattttact

SEQ ID NO: 2231355 - DNA, 25 bp, Homo sapien
tcaaatgataacatcgagaaaatga

SEQ ID NO: 2231356 - DNA, 25 bp, Homo sapien
tacatttgataaggagctaatttcc

SEQ ID NO: 2231357 - DNA, 25 bp, Homo sapien
ctcataggaccctaaatcaagggta

SEQ ID NO: 2231358 - DNA, 25 bp, Homo sapien
tacacaaacaagtagcagatcacac

SEQ ID NO: 2231359 - DNA, 25 bp, Homo sapien
tggaccaagcaatataccctcatag

SEQ ID NO: 2231360 - DNA, 25 bp, Homo sapien
gaacaatttgtcacctcccagagct

SEQ ID NO: 2231361 - DNA, 25 bp, Homo sapien
cagtgagatatcttataaggcagtg

SEQ ID NO: 2231362 - DNA, 25 bp, Homo sapien
aataagaaggcatagtgaaacttgg

SEQ ID NO: 2231363 - DNA, 25 bp, Homo sapien
gaatgaaatgggacttctctaggaa

SEQ ID NO: 2231364 - DNA, 25 bp, Homo sapien
gtctaaatgctatctcaacacaaag

SEQ ID NO: 2231365 - DNA, 25 bp, Homo sapien
catgtaactcgcttaaagttgaggt

SEQ ID NO: 2231366 - DNA, 25 bp, Homo sapien
ctttcagtcatgagccctacacatt

SEQ ID NO: 2231367 - DNA, 25 bp, Homo sapien
tagatgtttagcatgtaactcgctt

SEQ ID NO: 2231368 - DNA, 25 bp, Homo sapien
catttgcatgaaagatgtacattat

SEQ ID NO: 2231369 - DNA, 25 bp, Homo sapien
taacgacaatgtggcacttaataaa

SEQ ID NO: 2231370 - DNA, 25 bp, Homo sapien
ggacaaacgttttacttgtgttgca

SEQ ID NO: 2231371 - DNA, 25 bp, Homo sapien
gaagaaaactgtcaatcagcttata

SEQ ID NO: 2231372 - DNA, 25 bp, Homo sapien
gcataacagtggttgtgtggtaaga

SEQ ID NO: 2231373 - DNA, 25 bp, Homo sapien
agaagggctgttttacgtccaatag

SEQ ID NO: 2231374 - DNA, 25 bp, Homo sapien
cattctccaacatccagtagcaggt

SEQ ID NO: 2231375 - DNA, 25 bp, Homo sapien
taatatcgtttgacgttgagcagct

SEQ ID NO: 2231376 - DNA, 25 bp, Homo sapien
tggatctatcaaccagttccaggca

SEQ ID NO: 2231377 - DNA, 25 bp, Homo sapien
tggctacacaataatgcattgcctc

SEQ ID NO: 2231378 - DNA, 25 bp, Homo sapien
ttccagaaaaccgtggctacacaat

SEQ ID NO: 2231379 - DNA, 25 bp, Homo sapien
ccgtggctacacaataatgcattgc

SEQ ID NO: 2231380 - DNA, 25 bp, Homo sapien
gaaaaccgtggctacacaataatgc

SEQ ID NO: 2231381 - DNA, 25 bp, Homo sapien
tgtcaaagggataggaaccaccagc

SEQ ID NO: 2231382 - DNA, 25 bp, Homo sapien
gaatcagggcgttttgtcacatagc

SEQ ID NO: 2231383 - DNA, 25 bp, Homo sapien
caacatagatggacttgcagaggat

SEQ ID NO: 2231384 - DNA, 25 bp, Homo sapien
aaaatggtgagctgtctgtagacgc

SEQ ID NO: 2231385 - DNA, 25 bp, Homo sapien
aataatctcagtaggtgtggtgctc

SEQ ID NO: 2231386 - DNA, 25 bp, Homo sapien
taaacctgggacattggagcatcag

SEQ ID NO: 2231387 - DNA, 25 bp, Homo sapien
tttgcggtggtactcagcagaagcc

SEQ ID NO: 2231388 - DNA, 25 bp, Homo sapien
caaatagcccaacaataatgcaagg

SEQ ID NO: 2231389 - DNA, 25 bp, Homo sapien
tgcagagcgaccaccccatcttcct

SEQ ID NO: 2231390 - DNA, 25 bp, Homo sapien
taacctccattctattcttaaacgc

SEQ ID NO: 2231391 - DNA, 25 bp, Homo sapien
ttaaacgcctcctcactttcaacag

SEQ ID NO: 2231392 - DNA, 25 bp, Homo sapien
tcacggatcctgaaggggggttctc

SEQ ID NO: 2231393 - DNA, 25 bp, Homo sapien
tgctgtggaccagctgtcttctttc

SEQ ID NO: 2231394 - DNA, 25 bp, Homo sapien
gtccacgaggttgagaaccctgctt

SEQ ID NO: 2231395 - DNA, 25 bp, Homo sapien
tccacgaggttgagaaccctgcttt

SEQ ID NO: 2231396 - DNA, 25 bp, Homo sapien
cataaattactctgttgatgccact

SEQ ID NO: 2231397 - DNA, 25 bp, Homo sapien
cattctaactcccttaaaatctgga

SEQ ID NO: 2231398 - DNA, 25 bp, Homo sapien
tcttgtattagtccagaaaggcctg

SEQ ID NO: 2231399 - DNA, 25 bp, Homo sapien
tatgtttcataaaggcccatcagag

SEQ ID NO: 2231400 - DNA, 25 bp, Homo sapien
ccaagaactcctagtgatttcccag

SEQ ID NO: 2231401 - DNA, 25 bp, Homo sapien
aagaactcctagtgatttcccagat

SEQ ID NO: 2231402 - DNA, 25 bp, Homo sapien
cccttccaagaactcctagtgattt

SEQ ID NO: 2231403 - DNA, 25 bp, Homo sapien
ttccaagaactcctagtgatttccc

SEQ ID NO: 2231404 - DNA, 25 bp, Homo sapien
tagaagggtgaagtgggagatacaa

SEQ ID NO: 2231405 - DNA, 25 bp, Homo sapien
ctagaagggtgaagtgggagataca

SEQ ID NO: 2231406 - DNA, 25 bp, Homo sapien
agaagggtgaagtgggagatacaac

SEQ ID NO: 2231407 - DNA, 25 bp, Homo sapien
ctgcaatgaagatgaacttttgtga

SEQ ID NO: 2231408 - DNA, 25 bp, Homo sapien
gcaatgaagatgaacttttgtgaaa

SEQ ID NO: 2231409 - DNA, 25 bp, Homo sapien
tgaagatgaacttttgtgaaatcat

SEQ ID NO: 2231410 - DNA, 25 bp, Homo sapien
aatgaagatgaacttttgtgaaatc

SEQ ID NO: 2231411 - DNA, 25 bp, Homo sapien
aaagatgttcaatgtagtggtgttt

SEQ ID NO: 2231412 - DNA, 25 bp, Homo sapien
tagtggtgtttgcaatactgaagaa

SEQ ID NO: 2231413 - DNA, 25 bp, Homo sapien
caatgtagtggtgtttgcaatactg

SEQ ID NO: 2231414 - DNA, 25 bp, Homo sapien
gtgtttgcaatactgaagaactgga

SEQ ID NO: 2231415 - DNA, 25 bp, Homo sapien
ggaaaatgataacataaattatgta

SEQ ID NO: 2231416 - DNA, 25 bp, Homo sapien
tattcttcaacaggaaaatgataac

SEQ ID NO: 2231417 - DNA, 25 bp, Homo sapien
ttcttcaacaggaaaatgataacat

SEQ ID NO: 2231418 - DNA, 25 bp, Homo sapien
acaggaaaatgataacataaattat

SEQ ID NO: 2231419 - DNA, 25 bp, Homo sapien
aataggcagtggcataatactacag

SEQ ID NO: 2231420 - DNA, 25 bp, Homo sapien
attattaggtaaataggcagtggca

SEQ ID NO: 2231421 - DNA, 25 bp, Homo sapien
taatactacaggatcccaaatgcaa

SEQ ID NO: 2231422 - DNA, 25 bp, Homo sapien
tgaattaagcagagatctgtgtact

SEQ ID NO: 2231423 - DNA, 25 bp, Homo sapien
gattgtagactagccttaaaccagg

SEQ ID NO: 2231424 - DNA, 25 bp, Homo sapien
cctgttaaaatcagggtaacctctg

SEQ ID NO: 2231425 - DNA, 25 bp, Homo sapien
acctctgagaaagggatgattgtag

SEQ ID NO: 2231426 - DNA, 25 bp, Homo sapien
tgtttgttagtagcacctgtgggca

SEQ ID NO: 2231427 - DNA, 25 bp, Homo sapien
aaggcctggatgctagtactttcac

SEQ ID NO: 2231428 - DNA, 25 bp, Homo sapien
aatatggagactgatccctgtggga

SEQ ID NO: 2231429 - DNA, 25 bp, Homo sapien
gggacacggagacacatcctgtgaa

SEQ ID NO: 2231430 - DNA, 25 bp, Homo sapien
ttgaagactagatccctgaaccagg

SEQ ID NO: 2231431 - DNA, 25 bp, Homo sapien
tgatgagatagagccaaattcacct

SEQ ID NO: 2231432 - DNA, 25 bp, Homo sapien
caaaggtgagatccatactgctctg

SEQ ID NO: 2231433 - DNA, 25 bp, Homo sapien
gcattagttaagtacctctgaagga

SEQ ID NO: 2231434 - DNA, 25 bp, Homo sapien
agtatcctgagtgagcatgtatgcc

SEQ ID NO: 2231435 - DNA, 25 bp, Homo sapien
tattctgtgcctaccgatctaatgc

SEQ ID NO: 2231436 - DNA, 25 bp, Homo sapien
gagattatcaggactaacagaacca

SEQ ID NO: 2231437 - DNA, 25 bp, Homo sapien
tgtagacatatcattcagactgggc

SEQ ID NO: 2231438 - DNA, 25 bp, Homo sapien
ggtatcactgtctctaggccatctg

SEQ ID NO: 2231439 - DNA, 25 bp, Homo sapien
tgtcctggtactttacatgtaatcc

SEQ ID NO: 2231440 - DNA, 25 bp, Homo sapien
atgcactgtcctggtactttacatg

SEQ ID NO: 2231441 - DNA, 25 bp, Homo sapien
cactgtcctggtactttacatgtaa

SEQ ID NO: 2231442 - DNA, 25 bp, Homo sapien
ggtactttacatgtaatcctctcaa

SEQ ID NO: 2231443 - DNA, 25 bp, Homo sapien
gaatttagactactttcccagatag

SEQ ID NO: 2231444 - DNA, 25 bp, Homo sapien
gctgcatataggatgctccaaggaa

SEQ ID NO: 2231445 - DNA, 25 bp, Homo sapien
taatctatggaactgtggaactact

SEQ ID NO: 2231446 - DNA, 25 bp, Homo sapien
tactggaactatcaatggacttagc

SEQ ID NO: 2231447 - DNA, 25 bp, Homo sapien
agcaaacttagcttttctgatggtg

SEQ ID NO: 2231448 - DNA, 25 bp, Homo sapien
aggttctgcaatcaggatcagatct

SEQ ID NO: 2231449 - DNA, 25 bp, Homo sapien
cctgatcctcactatacagcaaact

SEQ ID NO: 2231450 - DNA, 25 bp, Homo sapien
tctgcaatcaggatcagatctcctg

SEQ ID NO: 2231451 - DNA, 25 bp, Homo sapien
gaaggcactaggtaatcccgtctat

SEQ ID NO: 2231452 - DNA, 25 bp, Homo sapien
aaacaaggcctactcatcgcatgtg

SEQ ID NO: 2231453 - DNA, 25 bp, Homo sapien
gattaatatacgcaacccactgcct

SEQ ID NO: 2231454 - DNA, 25 bp, Homo sapien
ccagctctgaccgattgtgaaggca

SEQ ID NO: 2231455 - DNA, 25 bp, Homo sapien
ctccaaccgccatagtaaagccagg

SEQ ID NO: 2231456 - DNA, 25 bp, Homo sapien
tctggcaactgatatccataggcag

SEQ ID NO: 2231457 - DNA, 25 bp, Homo sapien
tcccagcagccgacgtgtgatcact

SEQ ID NO: 2231458 - DNA, 25 bp, Homo sapien
cgacgtgtgatcactgccgttcctc

SEQ ID NO: 2231459 - DNA, 25 bp, Homo sapien
ttcagccaatcacaatcgtcttgtc

SEQ ID NO: 2231460 - DNA, 25 bp, Homo sapien
gccaatcacaatcgtcttgtctaag

SEQ ID NO: 2231461 - DNA, 25 bp, Homo sapien
gaggagggcgtatgcccttcagcca

SEQ ID NO: 2231462 - DNA, 25 bp, Homo sapien
ggcgtatgcccttcagccaatcaca

SEQ ID NO: 2231463 - DNA, 25 bp, Homo sapien
caatgattcagagccaaacccttcc

SEQ ID NO: 2231464 - DNA, 25 bp, Homo sapien
gccgcattagcaactccaaagggag

SEQ ID NO: 2231465 - DNA, 25 bp, Homo sapien
gactccggatttctgtggcgactga

SEQ ID NO: 2231466 - DNA, 25 bp, Homo sapien
gccaaaatcctatcgtaaaccacag

SEQ ID NO: 2231467 - DNA, 25 bp, Homo sapien
gcacactgaccttcttcaggcaaat

SEQ ID NO: 2231468 - DNA, 25 bp, Homo sapien
caaaggattggctgtttggtccctg

SEQ ID NO: 2231469 - DNA, 25 bp, Homo sapien
gaacggtaatatctataggcatcat

SEQ ID NO: 2231470 - DNA, 25 bp, Homo sapien
ctagatgccgccaaatcccagcaaa

SEQ ID NO: 2231471 - DNA, 25 bp, Homo sapien
tctgaggacagctagaccattttct

SEQ ID NO: 2231472 - DNA, 25 bp, Homo sapien
agcagtccaggctggcgtaagtctc

SEQ ID NO: 2231473 - DNA, 25 bp, Homo sapien
ccaggctggcgtaagtctctgagga

SEQ ID NO: 2231474 - DNA, 25 bp, Homo sapien
tctctgaggacagctagaccatttt

SEQ ID NO: 2231475 - DNA, 25 bp, Homo sapien
tggtaatgccccatacggtatagtg

SEQ ID NO: 2231476 - DNA, 25 bp, Homo sapien
tctcgatccagctctgtaaggctaa

SEQ ID NO: 2231477 - DNA, 25 bp, Homo sapien
gcaaccaggatatttgtagaaagcc

SEQ ID NO: 2231478 - DNA, 25 bp, Homo sapien
tactcaaggccacatagttactgca

SEQ ID NO: 2231479 - DNA, 25 bp, Homo sapien
taggcagaaggtagtgtggtctctg

SEQ ID NO: 2231480 - DNA, 25 bp, Homo sapien
tctaggcagaaggtagtgtggtctc

SEQ ID NO: 2231481 - DNA, 25 bp, Homo sapien
ctaggcagaaggtagtgtggtctct

SEQ ID NO: 2231482 - DNA, 25 bp, Homo sapien
ggcagaaggtagtgtggtctctgga

SEQ ID NO: 2231483 - DNA, 25 bp, Homo sapien
tcaaaggagtattgcttgtggcctc

SEQ ID NO: 2231484 - DNA, 25 bp, Homo sapien
ccctccatggagagtatcaaagaga

SEQ ID NO: 2231485 - DNA, 25 bp, Homo sapien
tcccagttgggcaggctctattgct

SEQ ID NO: 2231486 - DNA, 25 bp, Homo sapien
gttcttgagacttccaacagggcag

SEQ ID NO: 2231487 - DNA, 25 bp, Homo sapien
tctccttcccttagaagaggggctg

SEQ ID NO: 2231488 - DNA, 25 bp, Homo sapien
ttggggactataaatgccagaacct

SEQ ID NO: 2231489 - DNA, 25 bp, Homo sapien
tggaggttggggactataaatgcca

SEQ ID NO: 2231490 - DNA, 25 bp, Homo sapien
gggactataaatgccagaaccttcc

SEQ ID NO: 2231491 - DNA, 25 bp, Homo sapien
ggcagtggcccaagccatagccacg

SEQ ID NO: 2231492 - DNA, 25 bp, Homo sapien
catagccacggaaatagaaacgact

SEQ ID NO: 2231493 - DNA, 25 bp, Homo sapien
gaaacgactttcttggatgatatct

SEQ ID NO: 2231494 - DNA, 25 bp, Homo sapien
gactttcttggatgatatcttcctc

SEQ ID NO: 2231495 - DNA, 25 bp, Homo sapien
gcaaggcagcgaacacaaagagcag

SEQ ID NO: 2231496 - DNA, 25 bp, Homo sapien
cagatgtcgattgccttcacgtagg

SEQ ID NO: 2231497 - DNA, 25 bp, Homo sapien
gttggcgcctctgccttcttcgaag

SEQ ID NO: 2231498 - DNA, 25 bp, Homo sapien
aacaaaatttatggcagcatactcc

SEQ ID NO: 2231499 - DNA, 25 bp, Homo sapien
tgaagtccttccgtggcctactgag

SEQ ID NO: 2231500 - DNA, 25 bp, Homo sapien
aagccttccatgacatatcccattg

SEQ ID NO: 2231501 - DNA, 25 bp, Homo sapien
aacccctatcgattgcctgctcttt

SEQ ID NO: 2231502 - DNA, 25 bp, Homo sapien
gcctactgagtggattttcaacccc

SEQ ID NO: 2231503 - DNA, 25 bp, Homo sapien
cagatggaaaagatcggactgccca

SEQ ID NO: 2231504 - DNA, 25 bp, Homo sapien
tggaaaagatcggactgcccatcat

SEQ ID NO: 2231505 - DNA, 25 bp, Homo sapien
aaagatcggactgcccatcatactc

SEQ ID NO: 2231506 - DNA, 25 bp, Homo sapien
tgcccatcatactccacctcttcgc

SEQ ID NO: 2231507 - DNA, 25 bp, Homo sapien
tgctgatgaatttagctcagtagta

SEQ ID NO: 2231508 - DNA, 25 bp, Homo sapien
tgatgaatttagctcagtagtaagc

SEQ ID NO: 2231509 - DNA, 25 bp, Homo sapien
gaatttagctcagtagtaagctggg

SEQ ID NO: 2231510 - DNA, 25 bp, Homo sapien
tgaatttagctcagtagtaagctgg

SEQ ID NO: 2231511 - DNA, 25 bp, Homo sapien
catcattatcaaaacacgaccatca

SEQ ID NO: 2231512 - DNA, 25 bp, Homo sapien
tctggccgtgtagcccttgcctaag

SEQ ID NO: 2231513 - DNA, 25 bp, Homo sapien
gagccttgccaatatccctgtccat

SEQ ID NO: 2231514 - DNA, 25 bp, Homo sapien
tcaaaacacgaccatcacagcctgg

SEQ ID NO: 2231515 - DNA, 25 bp, Homo sapien
tgggaaatggggtactctatggcaa

SEQ ID NO: 2231516 - DNA, 25 bp, Homo sapien
ggcaagcaagttcccttgcatgtct

SEQ ID NO: 2231517 - DNA, 25 bp, Homo sapien
caagcaagttcccttgcatgtctct

SEQ ID NO: 2231518 - DNA, 25 bp, Homo sapien
aatggggtactctatggcaagcaag

SEQ ID NO: 2231519 - DNA, 25 bp, Homo sapien
ggtgaaactttacctcgatgcaggt

SEQ ID NO: 2231520 - DNA, 25 bp, Homo sapien
cttaggcaaagaggcccgggagcca

SEQ ID NO: 2231521 - DNA, 25 bp, Homo sapien
gacccaggacaggatgacgatgagt

SEQ ID NO: 2231522 - DNA, 25 bp, Homo sapien
agcccatctgccgttccaggtgaaa

SEQ ID NO: 2231523 - DNA, 25 bp, Homo sapien
tcagccacttggacagcaggagcat

SEQ ID NO: 2231524 - DNA, 25 bp, Homo sapien
ttctcatcccgcaagataaactggg

SEQ ID NO: 2231525 - DNA, 25 bp, Homo sapien
acgaggtctttcatggtgtagccaa

SEQ ID NO: 2231526 - DNA, 25 bp, Homo sapien
tgtagtgcttggtacaacagcctag

SEQ ID NO: 2231527 - DNA, 25 bp, Homo sapien
agtgacagagatggcagagggctgc

SEQ ID NO: 2231528 - DNA, 25 bp, Homo sapien
ggcagagggctgcagagtatggatg

SEQ ID NO: 2231529 - DNA, 25 bp, Homo sapien
gatggcagagggctgcagagtatgg

SEQ ID NO: 2231530 - DNA, 25 bp, Homo sapien
ctgaaagtgacagagatggcagagg

SEQ ID NO: 2231531 - DNA, 25 bp, Homo sapien
ttcttgaggtccatcaggcaggaca

SEQ ID NO: 2231532 - DNA, 25 bp, Homo sapien
aagctgcatcgtgcaggtctggatg

SEQ ID NO: 2231533 - DNA, 25 bp, Homo sapien
aagttcttgaggtccatcaggcagg

SEQ ID NO: 2231534 - DNA, 25 bp, Homo sapien
agctgcatcgtgcaggtctggatgt

SEQ ID NO: 2231535 - DNA, 25 bp, Homo sapien
gaagttggcccctttctcattagca

SEQ ID NO: 2231536 - DNA, 25 bp, Homo sapien
tgggtcattccactgttgccgcaag

SEQ ID NO: 2231537 - DNA, 25 bp, Homo sapien
tcaggatattctcggtaggacaggc

SEQ ID NO: 2231538 - DNA, 25 bp, Homo sapien
cagtaacttgttgtccgtggtcacc

SEQ ID NO: 2231539 - DNA, 25 bp, Homo sapien
gcagatatgggcccttcagaaacat

SEQ ID NO: 2231540 - DNA, 25 bp, Homo sapien
cagatatgggcccttcagaaacatt

SEQ ID NO: 2231541 - DNA, 25 bp, Homo sapien
agatatgggcccttcagaaacattg

SEQ ID NO: 2231542 - DNA, 25 bp, Homo sapien
gatggagctgaaactgttgatgaag

SEQ ID NO: 2231543 - DNA, 25 bp, Homo sapien
tgatggagctgaaactgttgatgaa

SEQ ID NO: 2231544 - DNA, 25 bp, Homo sapien
aggaggctccttctgagctgttaga

SEQ ID NO: 2231545 - DNA, 25 bp, Homo sapien
gatacacaggcccatggacaatggg

SEQ ID NO: 2231546 - DNA, 25 bp, Homo sapien
tcagtgccagatacacaggcccatg

SEQ ID NO: 2231547 - DNA, 25 bp, Homo sapien
gagggtagcaaagcacaggccattg

SEQ ID NO: 2231548 - DNA, 25 bp, Homo sapien
gttcgccccataagtttgtctagga

SEQ ID NO: 2231549 - DNA, 25 bp, Homo sapien
cctggcatcatatccagatgttcgc

SEQ ID NO: 2231550 - DNA, 25 bp, Homo sapien
tttgtctaggaaatcagagggggac

SEQ ID NO: 2231551 - DNA, 25 bp, Homo sapien
cccttggttccagatttgacttcct

SEQ ID NO: 2231552 - DNA, 25 bp, Homo sapien
ctagagtcctgcctccttgaatctt

SEQ ID NO: 2231553 - DNA, 25 bp, Homo sapien
ctccttgaatcttctaaggaagagg

SEQ ID NO: 2231554 - DNA, 25 bp, Homo sapien
cttgaccgtctagagtcctgcctcc

SEQ ID NO: 2231555 - DNA, 25 bp, Homo sapien
gaccgtctagagtcctgcctccttg

SEQ ID NO: 2231556 - DNA, 25 bp, Homo sapien
ccacaggatgtccacgctagccagg

SEQ ID NO: 2231557 - DNA, 25 bp, Homo sapien
aggatgtccacgctagccaggtgct

SEQ ID NO: 2231558 - DNA, 25 bp, Homo sapien
atgtccacgctagccaggtgctgct

SEQ ID NO: 2231559 - DNA, 25 bp, Homo sapien
acaggatgtccacgctagccaggtg

SEQ ID NO: 2231560 - DNA, 25 bp, Homo sapien
gcaggaacaagagttgtcattctgc

SEQ ID NO: 2231561 - DNA, 25 bp, Homo sapien
tcattctgcggggatcttgaagccc

SEQ ID NO: 2231562 - DNA, 25 bp, Homo sapien
ggaaggagagggttgcaggaacaag

SEQ ID NO: 2231563 - DNA, 25 bp, Homo sapien
ggaacaagagttgtcattctgcggg

SEQ ID NO: 2231564 - DNA, 25 bp, Homo sapien
cccctggaaatgatcctgacacaga

SEQ ID NO: 2231565 - DNA, 25 bp, Homo sapien
cacagataaccctactggcttctgc

SEQ ID NO: 2231566 - DNA, 25 bp, Homo sapien
cttgggctccggagggccttagcct

SEQ ID NO: 2231567 - DNA, 25 bp, Homo sapien
gctggaaaagattctctctgggcag

SEQ ID NO: 2231568 - DNA, 25 bp, Homo sapien
tgcaccctccgaaagcagtaattta

SEQ ID NO: 2231569 - DNA, 25 bp, Homo sapien
gttctgtccaacctctaactcccca

SEQ ID NO: 2231570 - DNA, 25 bp, Homo sapien
tagatgcaccctccgaaagcagtaa

SEQ ID NO: 2231571 - DNA, 25 bp, Homo sapien
cctagatgcaccctccgaaagcagt

SEQ ID NO: 2231572 - DNA, 25 bp, Homo sapien
ctccctccttgtttcctttaagcat

SEQ ID NO: 2231573 - DNA, 25 bp, Homo sapien
ccctccttgtttcctttaagcatca

SEQ ID NO: 2231574 - DNA, 25 bp, Homo sapien
tccctccttgtttcctttaagcatc

SEQ ID NO: 2231575 - DNA, 25 bp, Homo sapien
cctccttgtttcctttaagcatcat

SEQ ID NO: 2231576 - DNA, 25 bp, Homo sapien
attcccttgtcccttaggtctgcgg

SEQ ID NO: 2231577 - DNA, 25 bp, Homo sapien
ttaggtctgcggcctcacactcggt

SEQ ID NO: 2231578 - DNA, 25 bp, Homo sapien
ggtctgcggcctcacactcggtcat

SEQ ID NO: 2231579 - DNA, 25 bp, Homo sapien
ttcccttgtcccttaggtctgcggc

SEQ ID NO: 2231580 - DNA, 25 bp, Homo sapien
gttgtaggaccaatgtgaattgcct

SEQ ID NO: 2231581 - DNA, 25 bp, Homo sapien
gatatcatagtcaagtcccagttca

SEQ ID NO: 2231582 - DNA, 25 bp, Homo sapien
tcaggagtgatatcatagtcaagtc

SEQ ID NO: 2231583 - DNA, 25 bp, Homo sapien
gaattgcctggaaactagcctcagg

SEQ ID NO: 2231584 - DNA, 25 bp, Homo sapien
cctgctgaagggcaccaaaagtgaa

SEQ ID NO: 2231585 - DNA, 25 bp, Homo sapien
ttaaggaacacatcgagtccatggc

SEQ ID NO: 2231586 - DNA, 25 bp, Homo sapien
ggacttgagagtgaaccgactccca

SEQ ID NO: 2231587 - DNA, 25 bp, Homo sapien
aacacctcattggagaccagcaagg

SEQ ID NO: 2231588 - DNA, 25 bp, Homo sapien
catggttttaggaagagcaatccct

SEQ ID NO: 2231589 - DNA, 25 bp, Homo sapien
gaataacattcccttgcagtggtcc

SEQ ID NO: 2231590 - DNA, 25 bp, Homo sapien
tatacccagacacttagctgaaggg

SEQ ID NO: 2231591 - DNA, 25 bp, Homo sapien
ccagttctagggatagtagccttta

SEQ ID NO: 2231592 - DNA, 25 bp, Homo sapien
gaattctctttgcactgagcacctc

SEQ ID NO: 2231593 - DNA, 25 bp, Homo sapien
ggtcttcctgctagtggcaaatctg

SEQ ID NO: 2231594 - DNA, 25 bp, Homo sapien
ggcaaatctgtacgggtctgcagca

SEQ ID NO: 2231595 - DNA, 25 bp, Homo sapien
caattttttggatcactgcccagag

SEQ ID NO: 2231596 - DNA, 25 bp, Homo sapien
tgattaatagccattgttccagaga

SEQ ID NO: 2231597 - DNA, 25 bp, Homo sapien
cctggaacagcgactcctctgtggt

SEQ ID NO: 2231598 - DNA, 25 bp, Homo sapien
cacagccctatgattgtctcttgaa

SEQ ID NO: 2231599 - DNA, 25 bp, Homo sapien
gcaacattgccaattgctcctgtaa

SEQ ID NO: 2231600 - DNA, 25 bp, Homo sapien
tgaatccgaaaagagtcagataagg

SEQ ID NO: 2231601 - DNA, 25 bp, Homo sapien
gaatccgaaaagagtcagataaggg

SEQ ID NO: 2231602 - DNA, 25 bp, Homo sapien
gtgttggggcagcaataacttttgg

SEQ ID NO: 2231603 - DNA, 25 bp, Homo sapien
acggaagacacaaggtccgaataag

SEQ ID NO: 2231604 - DNA, 25 bp, Homo sapien
taagagggagttaagagtggtgggc

SEQ ID NO: 2231605 - DNA, 25 bp, Homo sapien
gacacaaggtccgaataagaggaga

SEQ ID NO: 2231606 - DNA, 25 bp, Homo sapien
atggtaagaggtatgagggtttcac

SEQ ID NO: 2231607 - DNA, 25 bp, Homo sapien
gaccgcagtagccttttcagaccct

SEQ ID NO: 2231608 - DNA, 25 bp, Homo sapien
gtaagaggtatgagggtttcactga

SEQ ID NO: 2231609 - DNA, 25 bp, Homo sapien
cagaaaggaagaaatgaccgcagta

SEQ ID NO: 2231610 - DNA, 25 bp, Homo sapien
gtcatggcaccaaatttcagatgcg

SEQ ID NO: 2231611 - DNA, 25 bp, Homo sapien
cgagtcatggcaccaaatttcagat

SEQ ID NO: 2231612 - DNA, 25 bp, Homo sapien
tcatggcaccaaatttcagatgcgt

SEQ ID NO: 2231613 - DNA, 25 bp, Homo sapien
ttcgagtcatggcaccaaatttcag

SEQ ID NO: 2231614 - DNA, 25 bp, Homo sapien
tgtctcgaagtcgattatccttctt

SEQ ID NO: 2231615 - DNA, 25 bp, Homo sapien
tgacttgtctcgaagtcgattatcc

SEQ ID NO: 2231616 - DNA, 25 bp, Homo sapien
ctgattcccagatcgtgttcttgac

SEQ ID NO: 2231617 - DNA, 25 bp, Homo sapien
gatcgtgttcttgacttgtctcgaa

SEQ ID NO: 2231618 - DNA, 25 bp, Homo sapien
tctctgcagcaaagcgaaattccag

SEQ ID NO: 2231619 - DNA, 25 bp, Homo sapien
tgtctctgcagcaaagcgaaattcc

SEQ ID NO: 2231620 - DNA, 25 bp, Homo sapien
ctgcagcaaagcgaaattccaggca

SEQ ID NO: 2231621 - DNA, 25 bp, Homo sapien
cagcaaagcgaaattccaggcaagc

SEQ ID NO: 2231622 - DNA, 25 bp, Homo sapien
acaaagcagactagccagccggcta

SEQ ID NO: 2231623 - DNA, 25 bp, Homo sapien
ggttggctgtcaatcagaaagccct

SEQ ID NO: 2231624 - DNA, 25 bp, Homo sapien
ggatccttccagctgaacaaagtca

SEQ ID NO: 2231625 - DNA, 25 bp, Homo sapien
gccggctacaattggagtcagagtc

SEQ ID NO: 2231626 - DNA, 25 bp, Homo sapien
gccctaactcagccaaccttactta

SEQ ID NO: 2231627 - DNA, 25 bp, Homo sapien
atggcgatggactactgaagcccta

SEQ ID NO: 2231628 - DNA, 25 bp, Homo sapien
gatggcgatggactactgaagccct

SEQ ID NO: 2231629 - DNA, 25 bp, Homo sapien
aagccctaactcagccaaccttact

SEQ ID NO: 2231630 - DNA, 25 bp, Homo sapien
gccttacacctcgttagggaagaga

SEQ ID NO: 2231631 - DNA, 25 bp, Homo sapien
cacctcgttagggaagagaaacagg

SEQ ID NO: 2231632 - DNA, 25 bp, Homo sapien
gggcatctggccttacacctcgtta

SEQ ID NO: 2231633 - DNA, 25 bp, Homo sapien
cataagggagcgtagaatctgtgta

SEQ ID NO: 2231634 - DNA, 25 bp, Homo sapien
taattagttgtgtactctggcctct

SEQ ID NO: 2231635 - DNA, 25 bp, Homo sapien
tacatgagaacagactggcctgagg

SEQ ID NO: 2231636 - DNA, 25 bp, Homo sapien
tggccctctggtagacacaggatag

SEQ ID NO: 2231637 - DNA, 25 bp, Homo sapien
gctggtggctaatggtgtaacctga

SEQ ID NO: 2231638 - DNA, 25 bp, Homo sapien
cagtcatcagctattcagttggtaa

SEQ ID NO: 2231639 - DNA, 25 bp, Homo sapien
gagtttgagacctgaatagctccca

SEQ ID NO: 2231640 - DNA, 25 bp, Homo sapien
gatcacataacagaatgcaccagtc

SEQ ID NO: 2231641 - DNA, 25 bp, Homo sapien
taaaggacagtgaagtaatccgtac

SEQ ID NO: 2231642 - DNA, 25 bp, Homo sapien
catttttcagctcatccaagtcatt

SEQ ID NO: 2231643 - DNA, 25 bp, Homo sapien
tcatttttcagctcatccaagtcat

SEQ ID NO: 2231644 - DNA, 25 bp, Homo sapien
gccccatagttgcagctggcaaatg

SEQ ID NO: 2231645 - DNA, 25 bp, Homo sapien
ttgccccatagttgcagctggcaaa

SEQ ID NO: 2231646 - DNA, 25 bp, Homo sapien
ccatagttgcagctggcaaatgact

SEQ ID NO: 2231647 - DNA, 25 bp, Homo sapien
cccatagttgcagctggcaaatgac

SEQ ID NO: 2231648 - DNA, 25 bp, Homo sapien
ttcctatcttcagggtcagtactga

SEQ ID NO: 2231649 - DNA, 25 bp, Homo sapien
ttatgcaggacgtggaagctgcagc

SEQ ID NO: 2231650 - DNA, 25 bp, Homo sapien
tatcttcagggtcagtactgagtgc

SEQ ID NO: 2231651 - DNA, 25 bp, Homo sapien
cagtactgagtgcagttatgcagga

SEQ ID NO: 2231652 - DNA, 25 bp, Homo sapien
gacaggtcttccacggtaaactgga

SEQ ID NO: 2231653 - DNA, 25 bp, Homo sapien
gttaagggccttgacttcacgtggc

SEQ ID NO: 2231654 - DNA, 25 bp, Homo sapien
gcaaggagtgtgcaaaaggcagtct

SEQ ID NO: 2231655 - DNA, 25 bp, Homo sapien
tcagattcagccatagcagacaggt

SEQ ID NO: 2231656 - DNA, 25 bp, Homo sapien
ttgtttgaaagacgcaaacatactc

SEQ ID NO: 2231657 - DNA, 25 bp, Homo sapien
gaaagacgcaaacatactcttcatt

SEQ ID NO: 2231658 - DNA, 25 bp, Homo sapien
tctgagactccttgaattgattgac

SEQ ID NO: 2231659 - DNA, 25 bp, Homo sapien
tggtgtctatgtgctcctgttctga

SEQ ID NO: 2231660 - DNA, 25 bp, Homo sapien
ataaagcaggtacctcaggatatat

SEQ ID NO: 2231661 - DNA, 25 bp, Homo sapien
aggtacctcaggatatattctgcag

SEQ ID NO: 2231662 - DNA, 25 bp, Homo sapien
tcctgttggtgaatagtgtgaataa

SEQ ID NO: 2231663 - DNA, 25 bp, Homo sapien
cttcctgttggtgaatagtgtgaat

SEQ ID NO: 2231664 - DNA, 25 bp, Homo sapien
tcttgctgagttgttgaaaccaagt

SEQ ID NO: 2231665 - DNA, 25 bp, Homo sapien
tagtaatttaatcttgctgagttgt

SEQ ID NO: 2231666 - DNA, 25 bp, Homo sapien
taatcttgctgagttgttgaaacca

SEQ ID NO: 2231667 - DNA, 25 bp, Homo sapien
tgagttgttgaaaccaagtgaagtt

SEQ ID NO: 2231668 - DNA, 25 bp, Homo sapien
ggtttcctgttaccgtggacactca

SEQ ID NO: 2231669 - DNA, 25 bp, Homo sapien
gtttcctgttaccgtggacactcat

SEQ ID NO: 2231670 - DNA, 25 bp, Homo sapien
caggactaggtttcctgttaccgtg

SEQ ID NO: 2231671 - DNA, 25 bp, Homo sapien
agactcatggccctggggtgaccat

SEQ ID NO: 2231672 - DNA, 25 bp, Homo sapien
ctagagactcatggccctggggtga

SEQ ID NO: 2231673 - DNA, 25 bp, Homo sapien
ttctccacagctgtggtcaaaccca

SEQ ID NO: 2231674 - DNA, 25 bp, Homo sapien
acagctgtggtcaaacccagaggcc

SEQ ID NO: 2231675 - DNA, 25 bp, Homo sapien
cttgcccaagacctggctagcttgg

SEQ ID NO: 2231676 - DNA, 25 bp, Homo sapien
gacctggctagcttggctttcctgt

SEQ ID NO: 2231677 - DNA, 25 bp, Homo sapien
caagacctggctagcttggctttcc

SEQ ID NO: 2231678 - DNA, 25 bp, Homo sapien
tgcccaagacctggctagcttggct

SEQ ID NO: 2231679 - DNA, 25 bp, Homo sapien
tctttaactccttcatgcagctggg

SEQ ID NO: 2231680 - DNA, 25 bp, Homo sapien
tgtatgtcagcaccccactgagtgt

SEQ ID NO: 2231681 - DNA, 25 bp, Homo sapien
ggcagggagctcactattaaggcag

SEQ ID NO: 2231682 - DNA, 25 bp, Homo sapien
tataggcataggcaggatagggacc

SEQ ID NO: 2231683 - DNA, 25 bp, Homo sapien
cacgaagaccctgctttggagccac

SEQ ID NO: 2231684 - DNA, 25 bp, Homo sapien
cagatctggagggttacaaagcgtc

SEQ ID NO: 2231685 - DNA, 25 bp, Homo sapien
tacccctatggtgtgaaaagcctgg

SEQ ID NO: 2231686 - DNA, 25 bp, Homo sapien
gatcatccacgctgaaggtcaagag

SEQ ID NO: 2231687 - DNA, 25 bp, Homo sapien
ttaagagcagggatttcccactcat

SEQ ID NO: 2231688 - DNA, 25 bp, Homo sapien
ctttaagagcagggatttcccactc

SEQ ID NO: 2231689 - DNA, 25 bp, Homo sapien
tttaagagcagggatttcccactca

SEQ ID NO: 2231690 - DNA, 25 bp, Homo sapien
tgcagcaccagaagggaaggagttt

SEQ ID NO: 2231691 - DNA, 25 bp, Homo sapien
gcaccagaagggaaggagtttgtaa

SEQ ID NO: 2231692 - DNA, 25 bp, Homo sapien
cagcaccagaagggaaggagtttgt

SEQ ID NO: 2231693 - DNA, 25 bp, Homo sapien
ttttgcagcaccagaagggaaggag

SEQ ID NO: 2231694 - DNA, 25 bp, Homo sapien
cagtagtgcagattgctcggaggca

SEQ ID NO: 2231695 - DNA, 25 bp, Homo sapien
tgctcaaaatcagtagtgcagattg

SEQ ID NO: 2231696 - DNA, 25 bp, Homo sapien
ctcggaggcaagtcttgaaagggat

SEQ ID NO: 2231697 - DNA, 25 bp, Homo sapien
tcttgaaagggatgtgtactgcagg

SEQ ID NO: 2231698 - DNA, 25 bp, Homo sapien
gcggaaaccctctgacgcactggat

SEQ ID NO: 2231699 - DNA, 25 bp, Homo sapien
ttcattttgcagagctaacaagtta

SEQ ID NO: 2231700 - DNA, 25 bp, Homo sapien
taacaagttatcagctacatccatg

SEQ ID NO: 2231701 - DNA, 25 bp, Homo sapien
tgggtgcttcgtagcgcggaaaccc

SEQ ID NO: 2231702 - DNA, 25 bp, Homo sapien
ctcttagagctagtcggctgtggcg

SEQ ID NO: 2231703 - DNA, 25 bp, Homo sapien
cttagagctagtcggctgtggcgca

SEQ ID NO: 2231704 - DNA, 25 bp, Homo sapien
agctcttagagctagtcggctgtgg

SEQ ID NO: 2231705 - DNA, 25 bp, Homo sapien
ccccagctcttagagctagtcggct

SEQ ID NO: 2231706 - DNA, 25 bp, Homo sapien
caggtcagctctgcgtgccgggaat

SEQ ID NO: 2231707 - DNA, 25 bp, Homo sapien
ttagagtcaccgtcactgctcctgc

SEQ ID NO: 2231708 - DNA, 25 bp, Homo sapien
ccgggaatccggctccttagagtca

SEQ ID NO: 2231709 - DNA, 25 bp, Homo sapien
ctcaatggggcagcaagtgcggctt

SEQ ID NO: 2231710 - DNA, 25 bp, Homo sapien
gctaaatctggtaattcagattctc

SEQ ID NO: 2231711 - DNA, 25 bp, Homo sapien
taaaacctgataatcaaagctaaat

SEQ ID NO: 2231712 - DNA, 25 bp, Homo sapien
gtttaagcgattggcctgcctacta

SEQ ID NO: 2231713 - DNA, 25 bp, Homo sapien
cacacccggccagtatatagatttt

SEQ ID NO: 2231714 - DNA, 25 bp, Homo sapien
aaccatgcttgacggcaggtggcag

SEQ ID NO: 2231715 - DNA, 25 bp, Homo sapien
tgaaccatgcttgacggcaggtggc

SEQ ID NO: 2231716 - DNA, 25 bp, Homo sapien
tctgaaccatgcttgacggcaggtg

SEQ ID NO: 2231717 - DNA, 25 bp, Homo sapien
catgcttgacggcaggtggcagcag

SEQ ID NO: 2231718 - DNA, 25 bp, Homo sapien
ggatgtactgcagccgcaatcagct

SEQ ID NO: 2231719 - DNA, 25 bp, Homo sapien
ggaaggatgtactgcagccgcaatc

SEQ ID NO: 2231720 - DNA, 25 bp, Homo sapien
tactgcagccgcaatcagcttcagg

SEQ ID NO: 2231721 - DNA, 25 bp, Homo sapien
gccgcaatcagcttcagggattttt

SEQ ID NO: 2231722 - DNA, 25 bp, Homo sapien
cttctctgccgttttcaattttcct

SEQ ID NO: 2231723 - DNA, 25 bp, Homo sapien
aggtctgacgctgcttagcttctgt

SEQ ID NO: 2231724 - DNA, 25 bp, Homo sapien
aatactaaccaggtctgacgctgct

SEQ ID NO: 2231725 - DNA, 25 bp, Homo sapien
caaatactaaccaggtctgacgctg

SEQ ID NO: 2231726 - DNA, 25 bp, Homo sapien
atcagatgagattggatgcgttcag

SEQ ID NO: 2231727 - DNA, 25 bp, Homo sapien
taaaattgtgtcctgttgtaaaata

SEQ ID NO: 2231728 - DNA, 25 bp, Homo sapien
ctttggttctgtttgatatttgtaa

SEQ ID NO: 2231729 - DNA, 25 bp, Homo sapien
atgagttccgtatgtttttctgtta

SEQ ID NO: 2231730 - DNA, 25 bp, Homo sapien
ggagtatgttttgcttagttgttaa

SEQ ID NO: 2231731 - DNA, 25 bp, Homo sapien
ggcagcattagtcatgtgttactca

SEQ ID NO: 2231732 - DNA, 25 bp, Homo sapien
tggcagcattagtcatgtgttactc

SEQ ID NO: 2231733 - DNA, 25 bp, Homo sapien
agcattagtcatgtgttactcatct

SEQ ID NO: 2231734 - DNA, 25 bp, Homo sapien
gcagcattagtcatgtgttactcat

SEQ ID NO: 2231735 - DNA, 25 bp, Homo sapien
gatgtgatttctagttcagcgctca

SEQ ID NO: 2231736 - DNA, 25 bp, Homo sapien
gcagctgagctcagtctaaattcag

SEQ ID NO: 2231737 - DNA, 25 bp, Homo sapien
tctaagaattgacccatcgagacag

SEQ ID NO: 2231738 - DNA, 25 bp, Homo sapien
tcagcgctcaatgctcttgctattg

SEQ ID NO: 2231739 - DNA, 25 bp, Homo sapien
ccaatggctatggtttagaggctgc

SEQ ID NO: 2231740 - DNA, 25 bp, Homo sapien
ctcattggctgtgctagcggagact

SEQ ID NO: 2231741 - DNA, 25 bp, Homo sapien
gagactgggacttgggctgttatca

SEQ ID NO: 2231742 - DNA, 25 bp, Homo sapien
tagaggctgcaggtctctcattggc

SEQ ID NO: 2231743 - DNA, 25 bp, Homo sapien
aatctatgacatccactgcctcggg

SEQ ID NO: 2231744 - DNA, 25 bp, Homo sapien
aacatcaggcgaatggtggtctgca

SEQ ID NO: 2231745 - DNA, 25 bp, Homo sapien
cttggagcccctggatatggcgtgc

SEQ ID NO: 2231746 - DNA, 25 bp, Homo sapien
tgtgctccaagatgtcgtgaacgaa

SEQ ID NO: 2231747 - DNA, 25 bp, Homo sapien
ccttggtgctcaggcctttgttgga

SEQ ID NO: 2231748 - DNA, 25 bp, Homo sapien
cacatggctgacattgtgggccaac

SEQ ID NO: 2231749 - DNA, 25 bp, Homo sapien
aataggtggtgaagctgtccctgca

SEQ ID NO: 2231750 - DNA, 25 bp, Homo sapien
gatcaccagtgggagggccttttgt

SEQ ID NO: 2231751 - DNA, 25 bp, Homo sapien
tgacacacagcgcagcgttcaaggt

SEQ ID NO: 2231752 - DNA, 25 bp, Homo sapien
gatgaagtgacacacagcgcagcgt

SEQ ID NO: 2231753 - DNA, 25 bp, Homo sapien
ctgattggatgaagtgacacacagc

SEQ ID NO: 2231754 - DNA, 25 bp, Homo sapien
gattggatgaagtgacacacagcgc

SEQ ID NO: 2231755 - DNA, 25 bp, Homo sapien
gaggaatgactatggccccatgtga

SEQ ID NO: 2231756 - DNA, 25 bp, Homo sapien
gactatggccccatgtgaaccattt

SEQ ID NO: 2231757 - DNA, 25 bp, Homo sapien
tgccagaggaatgactatggcccca

SEQ ID NO: 2231758 - DNA, 25 bp, Homo sapien
tgactatggccccatgtgaaccatt

SEQ ID NO: 2231759 - DNA, 25 bp, Homo sapien
ctggacctgcatggatgagtgcatt

SEQ ID NO: 2231760 - DNA, 25 bp, Homo sapien
ggacctgcatggatgagtgcattac

SEQ ID NO: 2231761 - DNA, 25 bp, Homo sapien
tggacctgcatggatgagtgcatta

SEQ ID NO: 2231762 - DNA, 25 bp, Homo sapien
gaggtcattcgctaggttaccatca

SEQ ID NO: 2231763 - DNA, 25 bp, Homo sapien
ccttggtggtgaagttccgctggtt

SEQ ID NO: 2231764 - DNA, 25 bp, Homo sapien
ggctgcatcctgaacaatactgagg

SEQ ID NO: 2231765 - DNA, 25 bp, Homo sapien
taggttaccatcaccaactgcagcc

SEQ ID NO: 2231766 - DNA, 25 bp, Homo sapien
gaaaatcagataatgtagcaccggc

SEQ ID NO: 2231767 - DNA, 25 bp, Homo sapien
aaatcagataatgtagcaccggcat

SEQ ID NO: 2231768 - DNA, 25 bp, Homo sapien
aaaatcagataatgtagcaccggca

SEQ ID NO: 2231769 - DNA, 25 bp, Homo sapien
aggaaaatcagataatgtagcaccg

SEQ ID NO: 2231770 - DNA, 25 bp, Homo sapien
caaccgccatagttgaaattttctg

SEQ ID NO: 2231771 - DNA, 25 bp, Homo sapien
tcaaccgccatagttgaaattttct

SEQ ID NO: 2231772 - DNA, 25 bp, Homo sapien
gttgctgatacagatttggtagtag

SEQ ID NO: 2231773 - DNA, 25 bp, Homo sapien
gaaatgatattcacaactccagata

SEQ ID NO: 2231774 - DNA, 25 bp, Homo sapien
taggatatgagttatttccaccacg

SEQ ID NO: 2231775 - DNA, 25 bp, Homo sapien
cacggacagaagttgctgcttttag

SEQ ID NO: 2231776 - DNA, 25 bp, Homo sapien
gagttatttccaccacggacagaag

SEQ ID NO: 2231777 - DNA, 25 bp, Homo sapien
agacggtgacactggttttaatgac

SEQ ID NO: 2231778 - DNA, 25 bp, Homo sapien
gcagacggtgacactggttttaatg

SEQ ID NO: 2231779 - DNA, 25 bp, Homo sapien
cagacggtgacactggttttaatga

SEQ ID NO: 2231780 - DNA, 25 bp, Homo sapien
tgcagacggtgacactggttttaat

SEQ ID NO: 2231781 - DNA, 25 bp, Homo sapien
tcattatctatgaccaatctgtttg

SEQ ID NO: 2231782 - DNA, 25 bp, Homo sapien
gcaagaatttccctatggtagtagg

SEQ ID NO: 2231783 - DNA, 25 bp, Homo sapien
tcattacaagtctggcgtttgtcat

SEQ ID NO: 2231784 - DNA, 25 bp, Homo sapien
ggcgtttgtcattatctatgaccaa

SEQ ID NO: 2231785 - DNA, 25 bp, Homo sapien
tcccaaagcttacagattagtgttt

SEQ ID NO: 2231786 - DNA, 25 bp, Homo sapien
caaagcttacagattagtgtttgaa

SEQ ID NO: 2231787 - DNA, 25 bp, Homo sapien
ttttcccaaagcttacagattagtg

SEQ ID NO: 2231788 - DNA, 25 bp, Homo sapien
acttttcccaaagcttacagattag

SEQ ID NO: 2231789 - DNA, 25 bp, Homo sapien
ccaatcagagctcagttgtgcaggc

SEQ ID NO: 2231790 - DNA, 25 bp, Homo sapien
gaggctttgccagagtacaccagaa

SEQ ID NO: 2231791 - DNA, 25 bp, Homo sapien
cagaaccagacagtcagagctaggc

SEQ ID NO: 2231792 - DNA, 25 bp, Homo sapien
aatcagagctcagttgtgcaggcca

SEQ ID NO: 2231793 - DNA, 25 bp, Homo sapien
caatcacccagtggttaagctcggg

SEQ ID NO: 2231794 - DNA, 25 bp, Homo sapien
aaattcttgaccgtgcacaatcacc

SEQ ID NO: 2231795 - DNA, 25 bp, Homo sapien
ccttcctatgcctcatcatgatgaa

SEQ ID NO: 2231796 - DNA, 25 bp, Homo sapien
gatattaattaggttccttcctatg

SEQ ID NO: 2231797 - DNA, 25 bp, Homo sapien
gaagcagcctggatcctaggctcag

SEQ ID NO: 2231798 - DNA, 25 bp, Homo sapien
tccctctgcagcaagaacctgggct

SEQ ID NO: 2231799 - DNA, 25 bp, Homo sapien
tgcgttggaccccttgaagagcctt

SEQ ID NO: 2231800 - DNA, 25 bp, Homo sapien
ctagggaagtgcgttggaccccttg

SEQ ID NO: 2231801 - DNA, 25 bp, Homo sapien
agagcaggctgtactcaaccctgcc

SEQ ID NO: 2231802 - DNA, 25 bp, Homo sapien
gagcaggctgtactcaaccctgccc

SEQ ID NO: 2231803 - DNA, 25 bp, Homo sapien
aggctgtactcaaccctgcccaccc

SEQ ID NO: 2231804 - DNA, 25 bp, Homo sapien
gagagcaggctgtactcaaccctgc

SEQ ID NO: 2231805 - DNA, 25 bp, Homo sapien
tgtattttacttgcagcctctcaac

SEQ ID NO: 2231806 - DNA, 25 bp, Homo sapien
actgaacccataggacataggaatc

SEQ ID NO: 2231807 - DNA, 25 bp, Homo sapien
cagaaatgaccatgtagtaaaggga

SEQ ID NO: 2231808 - DNA, 25 bp, Homo sapien
gaacccattaatctcatgacctcag

SEQ ID NO: 2231809 - DNA, 25 bp, Homo sapien
caaattcggattcggctttgatgac

SEQ ID NO: 2231810 - DNA, 25 bp, Homo sapien
gctctgcaatcagccgcacagaatt

SEQ ID NO: 2231811 - DNA, 25 bp, Homo sapien
cacagaattcaaattcggattcggc

SEQ ID NO: 2231812 - DNA, 25 bp, Homo sapien
tcagccgcacagaattcaaattcgg

SEQ ID NO: 2231813 - DNA, 25 bp, Homo sapien
gggaaatcgcgcgctctttctttac

SEQ ID NO: 2231814 - DNA, 25 bp, Homo sapien
gcgccgggaaatcgcgcgctctttc

SEQ ID NO: 2231815 - DNA, 25 bp, Homo sapien
tctccgcgccgggaaatcgcgcgct

SEQ ID NO: 2231816 - DNA, 25 bp, Homo sapien
ccgggaaatcgcgcgctctttcttt

SEQ ID NO: 2231817 - DNA, 25 bp, Homo sapien
ggcagcgtatgctcccgcgtcgaca

SEQ ID NO: 2231818 - DNA, 25 bp, Homo sapien
gggcagcgtatgctcccgcgtcgac

SEQ ID NO: 2231819 - DNA, 25 bp, Homo sapien
gaacaggatcgctggcgcctcctgg

SEQ ID NO: 2231820 - DNA, 25 bp, Homo sapien
acaggatcgctggcgcctcctgggc

SEQ ID NO: 2231821 - DNA, 25 bp, Homo sapien
aggatcgctggcgcctcctgggccg

SEQ ID NO: 2231822 - DNA, 25 bp, Homo sapien
aacaggatcgctggcgcctcctggg

SEQ ID NO: 2231823 - DNA, 25 bp, Homo sapien
cttagcgagtgcttcgcagagaggt

SEQ ID NO: 2231824 - DNA, 25 bp, Homo sapien
cgagtgcttcgcagagaggtagccg

SEQ ID NO: 2231825 - DNA, 25 bp, Homo sapien
ttagcgagtgcttcgcagagaggta

SEQ ID NO: 2231826 - DNA, 25 bp, Homo sapien
gtgcttcgcagagaggtagccgagt

SEQ ID NO: 2231827 - DNA, 25 bp, Homo sapien
gggcagccgcggttgctttcagtct

SEQ ID NO: 2231828 - DNA, 25 bp, Homo sapien
cgggcagccgcggttgctttcagtc

SEQ ID NO: 2231829 - DNA, 25 bp, Homo sapien
ccgggcagccgcggttgctttcagt

SEQ ID NO: 2231830 - DNA, 25 bp, Homo sapien
tccgggcagccgcggttgctttcag

SEQ ID NO: 2231831 - DNA, 25 bp, Homo sapien
ctctgctccgggctttgagaccgga

SEQ ID NO: 2231832 - DNA, 25 bp, Homo sapien
tgctccgggctttgagaccggatgc

SEQ ID NO: 2231833 - DNA, 25 bp, Homo sapien
atctgtgagtttgctgctaccccgt

SEQ ID NO: 2231834 - DNA, 25 bp, Homo sapien
tgagtttgctgctaccccgtcgctt

SEQ ID NO: 2231835 - DNA, 25 bp, Homo sapien
gaaaccaagtgaacaatgagagttc

SEQ ID NO: 2231836 - DNA, 25 bp, Homo sapien
tctgtgtgcggatgcgcctgtctcc

SEQ ID NO: 2231837 - DNA, 25 bp, Homo sapien
tgaaggaggtagtagtgtgcccact

SEQ ID NO: 2231838 - DNA, 25 bp, Homo sapien
ccctgtgaaggaggtagtagtgtgc

SEQ ID NO: 2231839 - DNA, 25 bp, Homo sapien
gtgctttctgtgtgcggatgcgcct

SEQ ID NO: 2231840 - DNA, 25 bp, Homo sapien
ggcagtggctggaaaacctgctcca

SEQ ID NO: 2231841 - DNA, 25 bp, Homo sapien
gcagtggctggaaaacctgctccat

SEQ ID NO: 2231842 - DNA, 25 bp, Homo sapien
tgaacagtctgaagcccttccactg

SEQ ID NO: 2231843 - DNA, 25 bp, Homo sapien
gacttagagagcaggtattacttcc

SEQ ID NO: 2231844 - DNA, 25 bp, Homo sapien
gcttggaagcaagtgaacagtctga

SEQ ID NO: 2231845 - DNA, 25 bp, Homo sapien
tgtatagtgtggctaggaggctcct

SEQ ID NO: 2231846 - DNA, 25 bp, Homo sapien
cagactctcgacggagtaaagcttc

SEQ ID NO: 2231847 - DNA, 25 bp, Homo sapien
agactctcgacggagtaaagcttcc

SEQ ID NO: 2231848 - DNA, 25 bp, Homo sapien
acagactctcgacggagtaaagctt

SEQ ID NO: 2231849 - DNA, 25 bp, Homo sapien
cccggcgagtccgagcctttgtctt

SEQ ID NO: 2231850 - DNA, 25 bp, Homo sapien
tggtgcttggtgtctgcgccgccgc

SEQ ID NO: 2231851 - DNA, 25 bp, Homo sapien
ggctggtgcttggtgtctgcgccgc

SEQ ID NO: 2231852 - DNA, 25 bp, Homo sapien
ccggcgagtccgagcctttgtcttt

SEQ ID NO: 2231853 - DNA, 25 bp, Homo sapien
gagcgatgccgagccctcccggggg

SEQ ID NO: 2231854 - DNA, 25 bp, Homo sapien
gcgagcgatgccgagccctcccggg

SEQ ID NO: 2231855 - DNA, 25 bp, Homo sapien
ctgcgagcgatgccgagccctcccg

SEQ ID NO: 2231856 - DNA, 25 bp, Homo sapien
cgatgccgagccctcccgggggccg

SEQ ID NO: 2231857 - DNA, 25 bp, Homo sapien
ggtcttgtgcttctatcacctccat

SEQ ID NO: 2231858 - DNA, 25 bp, Homo sapien
ctggtcttgtgcttctatcacctcc

SEQ ID NO: 2231859 - DNA, 25 bp, Homo sapien
ttagtccgaagatagttctgccagg

SEQ ID NO: 2231860 - DNA, 25 bp, Homo sapien
tcagaaacggcaaatgatgtggagt

SEQ ID NO: 2231861 - DNA, 25 bp, Homo sapien
gacatttactgcctatcagaaacgg

SEQ ID NO: 2231862 - DNA, 25 bp, Homo sapien
tttgcttgtgatcccttagtccgaa

SEQ ID NO: 2231863 - DNA, 25 bp, Homo sapien
gactgtgacatagagccatgtggcc

SEQ ID NO: 2231864 - DNA, 25 bp, Homo sapien
caacagcggcggagatatcttcggg

SEQ ID NO: 2231865 - DNA, 25 bp, Homo sapien
tatggttcgtgacatactggaccgc

SEQ ID NO: 2231866 - DNA, 25 bp, Homo sapien
tcacctcccgggacattcggatggc

SEQ ID NO: 2231867 - DNA, 25 bp, Homo sapien
gatgggcaagctcgctgagtctcag

SEQ ID NO: 2231868 - DNA, 25 bp, Homo sapien
agatgggcaagctcgctgagtctca

SEQ ID NO: 2231869 - DNA, 25 bp, Homo sapien
ctcaggtacaccaaaagcaagtgag

SEQ ID NO: 2231870 - DNA, 25 bp, Homo sapien
caaacagcgagggataagatcgctc

SEQ ID NO: 2231871 - DNA, 25 bp, Homo sapien
tgttcaaacagcgagggataagatc

SEQ ID NO: 2231872 - DNA, 25 bp, Homo sapien
cgagggataagatcgctcctgcagt

SEQ ID NO: 2231873 - DNA, 25 bp, Homo sapien
taagatcgctcctgcagttctcact

SEQ ID NO: 2231874 - DNA, 25 bp, Homo sapien
ttgatgagggaattgggaacacttg

SEQ ID NO: 2231875 - DNA, 25 bp, Homo sapien
aagaagaggttgatgagggaattgg

SEQ ID NO: 2231876 - DNA, 25 bp, Homo sapien
aggttgatgagggaattgggaacac

SEQ ID NO: 2231877 - DNA, 25 bp, Homo sapien
agaggttgatgagggaattgggaac

SEQ ID NO: 2231878 - DNA, 25 bp, Homo sapien
aggtttagcttgaaccatcccctct

SEQ ID NO: 2231879 - DNA, 25 bp, Homo sapien
gccagtgggtgggtcatctgctact

SEQ ID NO: 2231880 - DNA, 25 bp, Homo sapien
ggtttagcttgaaccatcccctctc

SEQ ID NO: 2231881 - DNA, 25 bp, Homo sapien
agtgggtgggtcatctgctactatt

SEQ ID NO: 2231882 - DNA, 25 bp, Homo sapien
ggacaactagcacagacatgatctc

SEQ ID NO: 2231883 - DNA, 25 bp, Homo sapien
tagccgagtgcctgccacattgtac

SEQ ID NO: 2231884 - DNA, 25 bp, Homo sapien
cgatggcgtttattgtagtgctgga

SEQ ID NO: 2231885 - DNA, 25 bp, Homo sapien
cctaaggtgcccaatgaaaaatggt

SEQ ID NO: 2231886 - DNA, 25 bp, Homo sapien
aacctcatcacacattgggctgtgg

SEQ ID NO: 2231887 - DNA, 25 bp, Homo sapien
aaacctcatcacacattgggctgtg

SEQ ID NO: 2231888 - DNA, 25 bp, Homo sapien
gaaacctcatcacacattgggctgt

SEQ ID NO: 2231889 - DNA, 25 bp, Homo sapien
ggccaggcataaaggtctccaaaaa

SEQ ID NO: 2231890 - DNA, 25 bp, Homo sapien
aggccaggcataaaggtctccaaaa

SEQ ID NO: 2231891 - DNA, 25 bp, Homo sapien
gccaggcataaaggtctccaaaaac

SEQ ID NO: 2231892 - DNA, 25 bp, Homo sapien
ccatcatccccatgatgaacagagg

SEQ ID NO: 2231893 - DNA, 25 bp, Homo sapien
ttttcagtaagccacagcttgacat

SEQ ID NO: 2231894 - DNA, 25 bp, Homo sapien
cacgattgctcactaggttcccctt

SEQ ID NO: 2231895 - DNA, 25 bp, Homo sapien
ccactgaaatgctatagcagatgtg

SEQ ID NO: 2231896 - DNA, 25 bp, Homo sapien
tgctatagcagatgtgtgagctcct

SEQ ID NO: 2231897 - DNA, 25 bp, Homo sapien
ggttttcaaagtgttgctccggaca

SEQ ID NO: 2231898 - DNA, 25 bp, Homo sapien
tccggacatgtagggtcacctggcg

SEQ ID NO: 2231899 - DNA, 25 bp, Homo sapien
gcggcaccgtccagagcgatttagt

SEQ ID NO: 2231900 - DNA, 25 bp, Homo sapien
gttttagacaaggtacacagctctg

SEQ ID NO: 2231901 - DNA, 25 bp, Homo sapien
caaggcacaatacaataaattccta

SEQ ID NO: 2231902 - DNA, 25 bp, Homo sapien
acatactcgggcggctggagatcct

SEQ ID NO: 2231903 - DNA, 25 bp, Homo sapien
caataaattcctatgggtcgcaatc

SEQ ID NO: 2231904 - DNA, 25 bp, Homo sapien
caatacaataaattcctatgggtcg

SEQ ID NO: 2231905 - DNA, 25 bp, Homo sapien
ctttctctgttgctgtatggcatac

SEQ ID NO: 2231906 - DNA, 25 bp, Homo sapien
tttctctgttgctgtatggcataca

SEQ ID NO: 2231907 - DNA, 25 bp, Homo sapien
actttctctgttgctgtatggcata

SEQ ID NO: 2231908 - DNA, 25 bp, Homo sapien
tctctgttgctgtatggcatacagt

SEQ ID NO: 2231909 - DNA, 25 bp, Homo sapien
ttgggttcccgtggtgctcgggtgc

SEQ ID NO: 2231910 - DNA, 25 bp, Homo sapien
gtggtgtcccccttggcgagccact

SEQ ID NO: 2231911 - DNA, 25 bp, Homo sapien
tcccgtggtgctcgggtgctcctga

SEQ ID NO: 2231912 - DNA, 25 bp, Homo sapien
ctccggtggtgtcccccttggcgag

SEQ ID NO: 2231913 - DNA, 25 bp, Homo sapien
caatatgtcatgaaccaaagaatcc

SEQ ID NO: 2231914 - DNA, 25 bp, Homo sapien
tgccttcggactcggcgagcttgcc

SEQ ID NO: 2231915 - DNA, 25 bp, Homo sapien
tgaggacagccttcgtgccttcgga

SEQ ID NO: 2231916 - DNA, 25 bp, Homo sapien
aataggtggcgaagctgtccccgcg

SEQ ID NO: 2231917 - DNA, 25 bp, Homo sapien
tgttcctcagaggtcgtctcagagg

SEQ ID NO: 2231918 - DNA, 25 bp, Homo sapien
tctgggacgtagtggagttggcctc

SEQ ID NO: 2231919 - DNA, 25 bp, Homo sapien
ctcagaggaaggtccagccatggcg

SEQ ID NO: 2231920 - DNA, 25 bp, Homo sapien
tagatggcacgaccagacaatggcg

SEQ ID NO: 2231921 - DNA, 25 bp, Homo sapien
ccacgtgcactattcagggaagctc

SEQ ID NO: 2231922 - DNA, 25 bp, Homo sapien
catgacctccttgatcagccatcag

SEQ ID NO: 2231923 - DNA, 25 bp, Homo sapien
tgagcacttgcgtttctgccacagg

SEQ ID NO: 2231924 - DNA, 25 bp, Homo sapien
tctctggagcatcttgcgttgacca

SEQ ID NO: 2231925 - DNA, 25 bp, Homo sapien
ctgcgagggttttatcgagttatta

SEQ ID NO: 2231926 - DNA, 25 bp, Homo sapien
tgcgagggttttatcgagttattat

SEQ ID NO: 2231927 - DNA, 25 bp, Homo sapien
caggtgcgtccgtcacccctttctt

SEQ ID NO: 2231928 - DNA, 25 bp, Homo sapien
cgattttccaggtgcgtccgtcacc

SEQ ID NO: 2231929 - DNA, 25 bp, Homo sapien
ttttaagccggtctgaaaagcgcaa

SEQ ID NO: 2231930 - DNA, 25 bp, Homo sapien
tgtgcttcccaggtgaggcaatgcc

SEQ ID NO: 2231931 - DNA, 25 bp, Homo sapien
cgtattcatgcgttgaaggtgccat

SEQ ID NO: 2231932 - DNA, 25 bp, Homo sapien
ctacgtattcatgcgttgaaggtgc

SEQ ID NO: 2231933 - DNA, 25 bp, Homo sapien
tacgtattcatgcgttgaaggtgcc

SEQ ID NO: 2231934 - DNA, 25 bp, Homo sapien
acgtattcatgcgttgaaggtgcca

SEQ ID NO: 2231935 - DNA, 25 bp, Homo sapien
catggcttatgtcacgggccagcaa

SEQ ID NO: 2231936 - DNA, 25 bp, Homo sapien
gaacggacaatgatggctgaccacc

SEQ ID NO: 2231937 - DNA, 25 bp, Homo sapien
catctgactgaatgaagtgccacgc

SEQ ID NO: 2231938 - DNA, 25 bp, Homo sapien
caatcactgtgggtgtcggtcgacc

SEQ ID NO: 2231939 - DNA, 25 bp, Homo sapien
tgtagtcactccctaaattcctccg

SEQ ID NO: 2231940 - DNA, 25 bp, Homo sapien
ctaacgcatcgttgggatgatggaa

SEQ ID NO: 2231941 - DNA, 25 bp, Homo sapien
caaacagtgtgggataaggtcgctc

SEQ ID NO: 2231942 - DNA, 25 bp, Homo sapien
cttcatgacttggaactaacgcatc

SEQ ID NO: 2231943 - DNA, 25 bp, Homo sapien
catgagatagctagaccagcggtcc

SEQ ID NO: 2231944 - DNA, 25 bp, Homo sapien
cagatcgtcgttcattaggttccca

SEQ ID NO: 2231945 - DNA, 25 bp, Homo sapien
taaggagtgtgcaagctaagatccc

SEQ ID NO: 2231946 - DNA, 25 bp, Homo sapien
tgaagttcaatagcgactggatgcc

SEQ ID NO: 2231947 - DNA, 25 bp, Homo sapien
cgggagacctgatcacactttgggc

SEQ ID NO: 2231948 - DNA, 25 bp, Homo sapien
tcagaccgggagacctgatcacact

SEQ ID NO: 2231949 - DNA, 25 bp, Homo sapien
gacctgatcacactttgggctgtgg

SEQ ID NO: 2231950 - DNA, 25 bp, Homo sapien
tgatcacactttgggctgtggcccc

SEQ ID NO: 2231951 - DNA, 25 bp, Homo sapien
gtagaggccagtcatgaagattttc

SEQ ID NO: 2231952 - DNA, 25 bp, Homo sapien
cccatgacacgtagaggccagtcat

SEQ ID NO: 2231953 - DNA, 25 bp, Homo sapien
ttccatgatccccatgacacgtaga

SEQ ID NO: 2231954 - DNA, 25 bp, Homo sapien
catgatccccatgacacgtagaggc

SEQ ID NO: 2231955 - DNA, 25 bp, Homo sapien
ttcctcttccgatcttcgcatcaat

SEQ ID NO: 2231956 - DNA, 25 bp, Homo sapien
tcttccgatcttcgcatcaatccac

SEQ ID NO: 2231957 - DNA, 25 bp, Homo sapien
cctcttccgatcttcgcatcaatcc

SEQ ID NO: 2231958 - DNA, 25 bp, Homo sapien
tccgatcttcgcatcaatccacccc

SEQ ID NO: 2231959 - DNA, 25 bp, Homo sapien
tgttttggaacaggtatacagctct

SEQ ID NO: 2231960 - DNA, 25 bp, Homo sapien
gtgcagtaagtacagcttcaactat

SEQ ID NO: 2231961 - DNA, 25 bp, Homo sapien
gcagtaagtacagcttcaactattt

SEQ ID NO: 2231962 - DNA, 25 bp, Homo sapien
ggtgttttggaacaggtatacagct

SEQ ID NO: 2231963 - DNA, 25 bp, Homo sapien
gacaatgagtgttgctcatagactt

SEQ ID NO: 2231964 - DNA, 25 bp, Homo sapien
ccacgtggaatatcacaggaaggct

SEQ ID NO: 2231965 - DNA, 25 bp, Homo sapien
ggttcagcttcggtcactcgtccca

SEQ ID NO: 2231966 - DNA, 25 bp, Homo sapien
actcgtcccacattgggacaatgag

SEQ ID NO: 2231967 - DNA, 25 bp, Homo sapien
acacggccatccgaatgtcccggga

SEQ ID NO: 2231968 - DNA, 25 bp, Homo sapien
tgcggtccagtatgtcacgaaccat

SEQ ID NO: 2231969 - DNA, 25 bp, Homo sapien
ctgagactcagcgagcttgcccatc

SEQ ID NO: 2231970 - DNA, 25 bp, Homo sapien
tcacgcacttggagtagtgggccag

SEQ ID NO: 2231971 - DNA, 25 bp, Homo sapien
tctttgggctcctggatgctctggt

SEQ ID NO: 2231972 - DNA, 25 bp, Homo sapien
ctcagaggttgtcttagagaaagcc

SEQ ID NO: 2231973 - DNA, 25 bp, Homo sapien
tggtcttcctcagaggttgtcttag

SEQ ID NO: 2231974 - DNA, 25 bp, Homo sapien
cttctgggccgtcatggagttggcc

SEQ ID NO: 2231975 - DNA, 25 bp, Homo sapien
gctccttgaagagggcttgacctcc

SEQ ID NO: 2231976 - DNA, 25 bp, Homo sapien
tgccacaccgtgagcactttgaagg

SEQ ID NO: 2231977 - DNA, 25 bp, Homo sapien
tatcatgtcaaccaatcacagtggg

SEQ ID NO: 2231978 - DNA, 25 bp, Homo sapien
tgaagggtgtcacggaaaactccca

SEQ ID NO: 2231979 - DNA, 25 bp, Homo sapien
taaaacaaaagtgcagttccagaga

SEQ ID NO: 2231980 - DNA, 25 bp, Homo sapien
tctacctctcgcatcatattgtgaa

SEQ ID NO: 2231981 - DNA, 25 bp, Homo sapien
caggatatgaatccacagctgtaag

SEQ ID NO: 2231982 - DNA, 25 bp, Homo sapien
ggctattcctgtgtacagtttgcaa

SEQ ID NO: 2231983 - DNA, 25 bp, Homo sapien
aaatttacgactctgtacttcccag

SEQ ID NO: 2231984 - DNA, 25 bp, Homo sapien
tgaccatatgtcctgatttcgcctg

SEQ ID NO: 2231985 - DNA, 25 bp, Homo sapien
tgattggtcctaattcttgacggaa

SEQ ID NO: 2231986 - DNA, 25 bp, Homo sapien
cccactatggtaatatgagacaata

SEQ ID NO: 2231987 - DNA, 25 bp, Homo sapien
caaaactttgctgcagagatctcag

SEQ ID NO: 2231988 - DNA, 25 bp, Homo sapien
ggcacctattaaccagaagattgaa

SEQ ID NO: 2231989 - DNA, 25 bp, Homo sapien
tgagtggcgactattccaggcattg

SEQ ID NO: 2231990 - DNA, 25 bp, Homo sapien
taaaaagagtcaccacggactgagt

SEQ ID NO: 2231991 - DNA, 25 bp, Homo sapien
tttgatcagtcaatcaggattcatt

SEQ ID NO: 2231992 - DNA, 25 bp, Homo sapien
aaatgatatcactaccttctttacc

SEQ ID NO: 2231993 - DNA, 25 bp, Homo sapien
gcattatcaatgttgtgctgtctat

SEQ ID NO: 2231994 - DNA, 25 bp, Homo sapien
tcccttatctccagcattatcaatg

SEQ ID NO: 2231995 - DNA, 25 bp, Homo sapien
tttgcattgctcttacaccacggca

SEQ ID NO: 2231996 - DNA, 25 bp, Homo sapien
tcaatgagtctcacaagcaatgtgg

SEQ ID NO: 2231997 - DNA, 25 bp, Homo sapien
tatgcaactctcagatagttcaggg

SEQ ID NO: 2231998 - DNA, 25 bp, Homo sapien
tttaatttgccagaaagggtcacag

SEQ ID NO: 2231999 - DNA, 25 bp, Homo sapien
cttgaatccacaagttgagtactgt

SEQ ID NO: 2232000 - DNA, 25 bp, Homo sapien
ccttgaatccacaagttgagtactg

SEQ ID NO: 2232001 - DNA, 25 bp, Homo sapien
ttctgtggcattcagtgagaagttc

SEQ ID NO: 2232002 - DNA, 25 bp, Homo sapien
cccaaaggcacgtgtcttgctgaca

SEQ ID NO: 2232003 - DNA, 25 bp, Homo sapien
tcttgtggcacctgacgagttcatg

SEQ ID NO: 2232004 - DNA, 25 bp, Homo sapien
tgtcctagcagataacaccaagcag

SEQ ID NO: 2232005 - DNA, 25 bp, Homo sapien
taagctatatagaaccaaccaggga

SEQ ID NO: 2232006 - DNA, 25 bp, Homo sapien
tggattgccgtagtgaggccccatg

SEQ ID NO: 2232007 - DNA, 25 bp, Homo sapien
tcatggattgccgtagtgaggcccc

SEQ ID NO: 2232008 - DNA, 25 bp, Homo sapien
aagtcatggattgccgtagtgaggc

SEQ ID NO: 2232009 - DNA, 25 bp, Homo sapien
aggaagtcatggattgccgtagtga

SEQ ID NO: 2232010 - DNA, 25 bp, Homo sapien
gacatgagcccggcagcccagcggt

SEQ ID NO: 2232011 - DNA, 25 bp, Homo sapien
agatcaggagcagctttcggccccg

SEQ ID NO: 2232012 - DNA, 25 bp, Homo sapien
gccagaaaccacgatagtagcccag

SEQ ID NO: 2232013 - DNA, 25 bp, Homo sapien
cggcctccaccacgccagacatgag

SEQ ID NO: 2232014 - DNA, 25 bp, Homo sapien
tctgctcgcgtcctgtgctgaagct

SEQ ID NO: 2232015 - DNA, 25 bp, Homo sapien
ctgctcgcgtcctgtgctgaagctc

SEQ ID NO: 2232016 - DNA, 25 bp, Homo sapien
tgctcgcgtcctgtgctgaagctcc

SEQ ID NO: 2232017 - DNA, 25 bp, Homo sapien
gaagacaactgggtgcagatggaag

SEQ ID NO: 2232018 - DNA, 25 bp, Homo sapien
aagacaactgggtgcagatggaaga

SEQ ID NO: 2232019 - DNA, 25 bp, Homo sapien
gacaactgggtgcagatggaagaaa

SEQ ID NO: 2232020 - DNA, 25 bp, Homo sapien
agacaactgggtgcagatggaagaa

SEQ ID NO: 2232021 - DNA, 25 bp, Homo sapien
ctcagggaaaggaacagagatgtgt

SEQ ID NO: 2232022 - DNA, 25 bp, Homo sapien
gaggacaggggagaggcggaggggc

SEQ ID NO: 2232023 - DNA, 25 bp, Homo sapien
caggaggacaggggagaggcggagg

SEQ ID NO: 2232024 - DNA, 25 bp, Homo sapien
ggacaggggagaggcggaggggcat

SEQ ID NO: 2232025 - DNA, 25 bp, Homo sapien
gaatattcgtagagccaggaagcga

SEQ ID NO: 2232026 - DNA, 25 bp, Homo sapien
ggaagcgaaaatacacaacccgctg

SEQ ID NO: 2232027 - DNA, 25 bp, Homo sapien
gggctcagtctctttctaccagtgg

SEQ ID NO: 2232028 - DNA, 25 bp, Homo sapien
gctgactgtaactgcaacgtgatag

SEQ ID NO: 2232029 - DNA, 25 bp, Homo sapien
taaggaatacttgtgtgacacaggc

SEQ ID NO: 2232030 - DNA, 25 bp, Homo sapien
tgagttagccatcatgtgcacagca

SEQ ID NO: 2232031 - DNA, 25 bp, Homo sapien
catagcagcaagtggcttgtgcgcc

SEQ ID NO: 2232032 - DNA, 25 bp, Homo sapien
tgcgccatacacaaggatgcagcct

SEQ ID NO: 2232033 - DNA, 25 bp, Homo sapien
tgctggcctcctaaaactagttgag

SEQ ID NO: 2232034 - DNA, 25 bp, Homo sapien
tcaacctggttgcatgcggcatcag

SEQ ID NO: 2232035 - DNA, 25 bp, Homo sapien
taccttactgcatcgactgggacct

SEQ ID NO: 2232036 - DNA, 25 bp, Homo sapien
tagaggtgacgttactggaacaagc

SEQ ID NO: 2232037 - DNA, 25 bp, Homo sapien
tgtaactactgtgccatagaatgcc

SEQ ID NO: 2232038 - DNA, 25 bp, Homo sapien
ctgagtctcaggatgggtaaaggct

SEQ ID NO: 2232039 - DNA, 25 bp, Homo sapien
gagaagaaatacctctcagagcagg

SEQ ID NO: 2232040 - DNA, 25 bp, Homo sapien
tgagcacccttgtagatggattacc

SEQ ID NO: 2232041 - DNA, 25 bp, Homo sapien
catttggtgaagaacgtcaatccca

SEQ ID NO: 2232042 - DNA, 25 bp, Homo sapien
tctatacatgggataagaccacaca

SEQ ID NO: 2232043 - DNA, 25 bp, Homo sapien
cacaagggaggtcctattgaacagt

SEQ ID NO: 2232044 - DNA, 25 bp, Homo sapien
aacagattaatcattgccagggagc

SEQ ID NO: 2232045 - DNA, 25 bp, Homo sapien
gaaagggtctgtctcaggtgtctcc

SEQ ID NO: 2232046 - DNA, 25 bp, Homo sapien
tcagcaatttgcactaaagtactcc

SEQ ID NO: 2232047 - DNA, 25 bp, Homo sapien
gaagacaaatccaacctcatggaga

SEQ ID NO: 2232048 - DNA, 25 bp, Homo sapien
tcagtacaagacagctagattccca

SEQ ID NO: 2232049 - DNA, 25 bp, Homo sapien
tgagagcccattgagcccagacaag

SEQ ID NO: 2232050 - DNA, 25 bp, Homo sapien
gagagcccattgagcccagacaagc

SEQ ID NO: 2232051 - DNA, 25 bp, Homo sapien
tgacttccgtcatatgtgtggcgca

SEQ ID NO: 2232052 - DNA, 25 bp, Homo sapien
tcccacgtggcatctactgaggtca

SEQ ID NO: 2232053 - DNA, 25 bp, Homo sapien
tgagtcagcaatccagagaaagggc

SEQ ID NO: 2232054 - DNA, 25 bp, Homo sapien
tagagaattctcctgtcccacgtgg

SEQ ID NO: 2232055 - DNA, 25 bp, Homo sapien
tatgtctgacatagtgccggaagtc

SEQ ID NO: 2232056 - DNA, 25 bp, Homo sapien
gccggaagtctcaaaagatgtcagt

SEQ ID NO: 2232057 - DNA, 25 bp, Homo sapien
tcagtgatgtaagaattagaagccc

SEQ ID NO: 2232058 - DNA, 25 bp, Homo sapien
actccatcatgggaggcatagcaga

SEQ ID NO: 2232059 - DNA, 25 bp, Homo sapien
gggtggaactacctaccaattctga

SEQ ID NO: 2232060 - DNA, 25 bp, Homo sapien
tctgggactaccataatatatgtgg

SEQ ID NO: 2232061 - DNA, 25 bp, Homo sapien
tcattaccgcaactgatctgcaatg

SEQ ID NO: 2232062 - DNA, 25 bp, Homo sapien
aatgccactatgcagtgaataactg

SEQ ID NO: 2232063 - DNA, 25 bp, Homo sapien
aacggagctcccacaatcctctttg

SEQ ID NO: 2232064 - DNA, 25 bp, Homo sapien
gcctcgctcgctgtcatggcggcga

SEQ ID NO: 2232065 - DNA, 25 bp, Homo sapien
cctcagaaagcagcgacagtcgcag

SEQ ID NO: 2232066 - DNA, 25 bp, Homo sapien
acttaagcgacgcacaacggagctc

SEQ ID NO: 2232067 - DNA, 25 bp, Homo sapien
gctgtgttgctcagattagagtaca

SEQ ID NO: 2232068 - DNA, 25 bp, Homo sapien
caggacataatgtagataaggctta

SEQ ID NO: 2232069 - DNA, 25 bp, Homo sapien
tcctagcaccgaacatagtacttgg

SEQ ID NO: 2232070 - DNA, 25 bp, Homo sapien
gaaaaatagtttgctcaggacataa

SEQ ID NO: 2232071 - DNA, 25 bp, Homo sapien
ccagtggttcttggcaggtgatccc

SEQ ID NO: 2232072 - DNA, 25 bp, Homo sapien
taggaatgcatactagtgggccccg

SEQ ID NO: 2232073 - DNA, 25 bp, Homo sapien
gatgcacagtctagtttaagaacca

SEQ ID NO: 2232074 - DNA, 25 bp, Homo sapien
cagggaggcgcctagcattgttttt

SEQ ID NO: 2232075 - DNA, 25 bp, Homo sapien
aaaattaatacactgcagctttgcc

SEQ ID NO: 2232076 - DNA, 25 bp, Homo sapien
gcttagaggacccaaagagagctta

SEQ ID NO: 2232077 - DNA, 25 bp, Homo sapien
gcttagggatagacaccagaatact

SEQ ID NO: 2232078 - DNA, 25 bp, Homo sapien
ttggttctcctaaccagcttagagg

SEQ ID NO: 2232079 - DNA, 25 bp, Homo sapien
tctgtagagaactgacattggagca

SEQ ID NO: 2232080 - DNA, 25 bp, Homo sapien
ccataaagttgggttgaaggagatt

SEQ ID NO: 2232081 - DNA, 25 bp, Homo sapien
acttgctgtagtattggttctcatc

SEQ ID NO: 2232082 - DNA, 25 bp, Homo sapien
aacttgggcttgcttgtgattgaag

SEQ ID NO: 2232083 - DNA, 25 bp, Homo sapien
gagcagttctatgtatggaggagca

SEQ ID NO: 2232084 - DNA, 25 bp, Homo sapien
cactagagggagatctgtggttgct

SEQ ID NO: 2232085 - DNA, 25 bp, Homo sapien
cagatcagatttctagagagagcag

SEQ ID NO: 2232086 - DNA, 25 bp, Homo sapien
gaggagcaattcagcttttcagcag

SEQ ID NO: 2232087 - DNA, 25 bp, Homo sapien
ccacagagacatggcgagaacctgg

SEQ ID NO: 2232088 - DNA, 25 bp, Homo sapien
taacaatgtcccagcctcatcgaga

SEQ ID NO: 2232089 - DNA, 25 bp, Homo sapien
tggtagcaaatcctttcccctggga

SEQ ID NO: 2232090 - DNA, 25 bp, Homo sapien
aaaactaacaatgtccggctgggtg

SEQ ID NO: 2232091 - DNA, 25 bp, Homo sapien
cttctcatggggaggcacacagacc

SEQ ID NO: 2232092 - DNA, 25 bp, Homo sapien
acacagaccattggggtgcatttga

SEQ ID NO: 2232093 - DNA, 25 bp, Homo sapien
cttgggtccctgccccatagtgctg

SEQ ID NO: 2232094 - DNA, 25 bp, Homo sapien
gggtccctgccccatagtgctgtgc

SEQ ID NO: 2232095 - DNA, 25 bp, Homo sapien
tcagccgttcaagagtggacaccag

SEQ ID NO: 2232096 - DNA, 25 bp, Homo sapien
tcactctctcaagcccctgctgttc

SEQ ID NO: 2232097 - DNA, 25 bp, Homo sapien
caagagtggacaccaggatactgca

SEQ ID NO: 2232098 - DNA, 25 bp, Homo sapien
ccctgctgttcagccgttcaagagt

SEQ ID NO: 2232099 - DNA, 25 bp, Homo sapien
gcccagtgccgaggcttggggagga

SEQ ID NO: 2232100 - DNA, 25 bp, Homo sapien
ggcccagtgccgaggcttggggagg

SEQ ID NO: 2232101 - DNA, 25 bp, Homo sapien
ggtaaaatggcccagtgccgaggct

SEQ ID NO: 2232102 - DNA, 25 bp, Homo sapien
aaaatggcccagtgccgaggcttgg

SEQ ID NO: 2232103 - DNA, 25 bp, Homo sapien
tacacctgcaatggtatgtgctgcc

SEQ ID NO: 2232104 - DNA, 25 bp, Homo sapien
tgaggagctacacctgcaatggtat

SEQ ID NO: 2232105 - DNA, 25 bp, Homo sapien
aatggtatgtgctgcccctagctgg

SEQ ID NO: 2232106 - DNA, 25 bp, Homo sapien
gaggtgatacgcactgaggagctac

SEQ ID NO: 2232107 - DNA, 25 bp, Homo sapien
tgtgactgcccacttcttagctggg

SEQ ID NO: 2232108 - DNA, 25 bp, Homo sapien
aattggcaggaaccaagattctctc

SEQ ID NO: 2232109 - DNA, 25 bp, Homo sapien
gatgttgaaggtgaaaaacacactg

SEQ ID NO: 2232110 - DNA, 25 bp, Homo sapien
gaagctacagtaataggttctcctg

SEQ ID NO: 2232111 - DNA, 25 bp, Homo sapien
cagggcattcgttaactttgttcac

SEQ ID NO: 2232112 - DNA, 25 bp, Homo sapien
ttgaaaatactacaattatgtggcc

SEQ ID NO: 2232113 - DNA, 25 bp, Homo sapien
gcacaatttctatctggcaggaaag

SEQ ID NO: 2232114 - DNA, 25 bp, Homo sapien
caagcatctaacgaattacttgatg

SEQ ID NO: 2232115 - DNA, 25 bp, Homo sapien
gcccatgtgatgtgtacaggagcca

SEQ ID NO: 2232116 - DNA, 25 bp, Homo sapien
gccaggtcagcagtagcagtgtttc

SEQ ID NO: 2232117 - DNA, 25 bp, Homo sapien
tagttgtggcaccagatgaacacac

SEQ ID NO: 2232118 - DNA, 25 bp, Homo sapien
gagcaggagcagcataataggcccc

SEQ ID NO: 2232119 - DNA, 25 bp, Homo sapien
aaattcaggcgtgctgcaagtctct

SEQ ID NO: 2232120 - DNA, 25 bp, Homo sapien
gaaaaagttctctagctcctgcagc

SEQ ID NO: 2232121 - DNA, 25 bp, Homo sapien
tgcagctgaaactgcgtgaacgcgg

SEQ ID NO: 2232122 - DNA, 25 bp, Homo sapien
cacaacgtcgggatattgagattca

SEQ ID NO: 2232123 - DNA, 25 bp, Homo sapien
tgccatcagcgaggtcacggtaagt

SEQ ID NO: 2232124 - DNA, 25 bp, Homo sapien
caatatcactgtgggtgtacccgcg

SEQ ID NO: 2232125 - DNA, 25 bp, Homo sapien
attcacttcctcgatgtcctcgccg

SEQ ID NO: 2232126 - DNA, 25 bp, Homo sapien
ctcgccgactgccaggctgcggtag

SEQ ID NO: 2232127 - DNA, 25 bp, Homo sapien
gggtgtacccgcgaagagactccat

SEQ ID NO: 2232128 - DNA, 25 bp, Homo sapien
gcttcaagcgctgtcgataaagctg

SEQ ID NO: 2232129 - DNA, 25 bp, Homo sapien
ctgtcgataaagctgtgcacttctg

SEQ ID NO: 2232130 - DNA, 25 bp, Homo sapien
tctgtgcgtggttccgcggcgatcc

SEQ ID NO: 2232131 - DNA, 25 bp, Homo sapien
tctgcagactctgtgcgtggttccg

SEQ ID NO: 2232132 - DNA, 25 bp, Homo sapien
gatattaacgggcaggatgctgcat

SEQ ID NO: 2232133 - DNA, 25 bp, Homo sapien
caccacttcacgtttgctcaatacg

SEQ ID NO: 2232134 - DNA, 25 bp, Homo sapien
tgcatgcactagttgctgagctggt

SEQ ID NO: 2232135 - DNA, 25 bp, Homo sapien
caatacggagaggatattaacgggc

SEQ ID NO: 2232136 - DNA, 25 bp, Homo sapien
ggccagtaaatagttcagtttggct

SEQ ID NO: 2232137 - DNA, 25 bp, Homo sapien
aggccagtaaatagttcagtttggc

SEQ ID NO: 2232138 - DNA, 25 bp, Homo sapien
gccagtaaatagttcagtttggctg

SEQ ID NO: 2232139 - DNA, 25 bp, Homo sapien
cactcaaggtgccatttcaggagag

SEQ ID NO: 2232140 - DNA, 25 bp, Homo sapien
gataaccagacttgagttaggcact

SEQ ID NO: 2232141 - DNA, 25 bp, Homo sapien
tcaaatctcccttgagaggggcacg

SEQ ID NO: 2232142 - DNA, 25 bp, Homo sapien
tttcaggagagtaataaaggctcct

SEQ ID NO: 2232143 - DNA, 25 bp, Homo sapien
taggagaggatctagttcagcattc

SEQ ID NO: 2232144 - DNA, 25 bp, Homo sapien
tcaggaagtgcagattgggctttca

SEQ ID NO: 2232145 - DNA, 25 bp, Homo sapien
gattgggctttcattaggagaggat

SEQ ID NO: 2232146 - DNA, 25 bp, Homo sapien
ccggggggcttgcaatttttctctg

SEQ ID NO: 2232147 - DNA, 25 bp, Homo sapien
agaggccaagttaatgggaatcttg

SEQ ID NO: 2232148 - DNA, 25 bp, Homo sapien
gaggccaagttaatgggaatcttgg

SEQ ID NO: 2232149 - DNA, 25 bp, Homo sapien
aagaggccaagttaatgggaatctt

SEQ ID NO: 2232150 - DNA, 25 bp, Homo sapien
aggccaagttaatgggaatcttggc

SEQ ID NO: 2232151 - DNA, 25 bp, Homo sapien
tctaggaccctcagataaatgcagc

SEQ ID NO: 2232152 - DNA, 25 bp, Homo sapien
gggaatccgactgccatgccatgtg

SEQ ID NO: 2232153 - DNA, 25 bp, Homo sapien
tgtaacttgagagaccctcagccag

SEQ ID NO: 2232154 - DNA, 25 bp, Homo sapien
acaaatgtgagcttctctaggaccc

SEQ ID NO: 2232155 - DNA, 25 bp, Homo sapien
ttatatcttgaagacaggctcagtg

SEQ ID NO: 2232156 - DNA, 25 bp, Homo sapien
tttttatatcttgaagacaggctca

SEQ ID NO: 2232157 - DNA, 25 bp, Homo sapien
ttttatatcttgaagacaggctcag

SEQ ID NO: 2232158 - DNA, 25 bp, Homo sapien
tatatcttgaagacaggctcagtgc

SEQ ID NO: 2232159 - DNA, 25 bp, Homo sapien
tatatccgaggatctgagttcttga

SEQ ID NO: 2232160 - DNA, 25 bp, Homo sapien
tctcagataatccacaagatgtccc

SEQ ID NO: 2232161 - DNA, 25 bp, Homo sapien
tcaatagcaagttccatagcactgc

SEQ ID NO: 2232162 - DNA, 25 bp, Homo sapien
aaaatgactttcacgtccacgcctg

SEQ ID NO: 2232163 - DNA, 25 bp, Homo sapien
tgggcggcgactacatccctacagt

SEQ ID NO: 2232164 - DNA, 25 bp, Homo sapien
gaaatcatagttggctttgcagccg

SEQ ID NO: 2232165 - DNA, 25 bp, Homo sapien
cgatgcacatatggctctcgaggca

SEQ ID NO: 2232166 - DNA, 25 bp, Homo sapien
taaggcgagccggttgctttccagg

SEQ ID NO: 2232167 - DNA, 25 bp, Homo sapien
ccattcccaagtcttcttccatttc

SEQ ID NO: 2232168 - DNA, 25 bp, Homo sapien
tttgaataacttccattcccaagtc

SEQ ID NO: 2232169 - DNA, 25 bp, Homo sapien
ttccattcccaagtcttcttccatt

SEQ ID NO: 2232170 - DNA, 25 bp, Homo sapien
ttcttttgaataacttccattccca

SEQ ID NO: 2232171 - DNA, 25 bp, Homo sapien
tttctgtagactgggacagagagct

SEQ ID NO: 2232172 - DNA, 25 bp, Homo sapien
agagcttgagtgtggaacctgcatc

SEQ ID NO: 2232173 - DNA, 25 bp, Homo sapien
tgaggatcaatttgttcatcatctg

SEQ ID NO: 2232174 - DNA, 25 bp, Homo sapien
tctgacctgattggacaatttgaca

SEQ ID NO: 2232175 - DNA, 25 bp, Homo sapien
cctgagatgcagtatgatagttttg

SEQ ID NO: 2232176 - DNA, 25 bp, Homo sapien
taggtcacaagacggcttacaatgt

SEQ ID NO: 2232177 - DNA, 25 bp, Homo sapien
tccagtgaactgcattgaagcaggg

SEQ ID NO: 2232178 - DNA, 25 bp, Homo sapien
tcttggaggcattcctccagtgaac

SEQ ID NO: 2232179 - DNA, 25 bp, Homo sapien
tacactacctctaacatggcacaga

SEQ ID NO: 2232180 - DNA, 25 bp, Homo sapien
aacagccatcaagaatatgggttca

SEQ ID NO: 2232181 - DNA, 25 bp, Homo sapien
catgccctgccaaaggaaaccttta

SEQ ID NO: 2232182 - DNA, 25 bp, Homo sapien
cagaaaatcaacttggttgacccta

SEQ ID NO: 2232183 - DNA, 25 bp, Homo sapien
ggtttgtagccataatctttgcaga

SEQ ID NO: 2232184 - DNA, 25 bp, Homo sapien
tgatctgccttgactctcaggtgcc

SEQ ID NO: 2232185 - DNA, 25 bp, Homo sapien
cagatttcagacctgccaaatggaa

SEQ ID NO: 2232186 - DNA, 25 bp, Homo sapien
gtttgtggccctctttgaaccaggc

SEQ ID NO: 2232187 - DNA, 25 bp, Homo sapien
tatctgagcaggactgattgctatt

SEQ ID NO: 2232188 - DNA, 25 bp, Homo sapien
ggcttgctgtccctctatcaggaca

SEQ ID NO: 2232189 - DNA, 25 bp, Homo sapien
gtcaagtattaaccagattgttcca

SEQ ID NO: 2232190 - DNA, 25 bp, Homo sapien
tgatttaatattgccttgtcaagta

SEQ ID NO: 2232191 - DNA, 25 bp, Homo sapien
tgcattgaacacataggagcaattc

SEQ ID NO: 2232192 - DNA, 25 bp, Homo sapien
ttgcacattgttctttcacagcatc

SEQ ID NO: 2232193 - DNA, 25 bp, Homo sapien
tagatgtaagactgcagacaacctc

SEQ ID NO: 2232194 - DNA, 25 bp, Homo sapien
gcatccagtcatagatgtaagactg

SEQ ID NO: 2232195 - DNA, 25 bp, Homo sapien
gatgggaaaagacttggtggagctg

SEQ ID NO: 2232196 - DNA, 25 bp, Homo sapien
gtggagctgtgagtagaatctgtct

SEQ ID NO: 2232197 - DNA, 25 bp, Homo sapien
cagtgtcacactgggcgtggaaagc

SEQ ID NO: 2232198 - DNA, 25 bp, Homo sapien
tgctgaacagagtcttatttgcagt

SEQ ID NO: 2232199 - DNA, 25 bp, Homo sapien
ctaactgggttgatgtggtgccagc

SEQ ID NO: 2232200 - DNA, 25 bp, Homo sapien
ggctaactgggttgatgtggtgcca

SEQ ID NO: 2232201 - DNA, 25 bp, Homo sapien
actgggttgatgtggtgccagctca

SEQ ID NO: 2232202 - DNA, 25 bp, Homo sapien
ttggctaactgggttgatgtggtgc

SEQ ID NO: 2232203 - DNA, 25 bp, Homo sapien
tcttggttgacacccctgctcatct

SEQ ID NO: 2232204 - DNA, 25 bp, Homo sapien
ggaacaattagtcttggttgacacc

SEQ ID NO: 2232205 - DNA, 25 bp, Homo sapien
gtggaaattcagctgcaattggaac

SEQ ID NO: 2232206 - DNA, 25 bp, Homo sapien
cttttagaaccagttcataaggagg

SEQ ID NO: 2232207 - DNA, 25 bp, Homo sapien
tcgtatcaggggagttgtactcagt

SEQ ID NO: 2232208 - DNA, 25 bp, Homo sapien
ttaagggactgcttcaccgttctaa

SEQ ID NO: 2232209 - DNA, 25 bp, Homo sapien
tttaagggactgcttcaccgttcta

SEQ ID NO: 2232210 - DNA, 25 bp, Homo sapien
ttaattacaactcgtatcaggggag

SEQ ID NO: 2232211 - DNA, 25 bp, Homo sapien
taaagacttatcagcttgctgtttc

SEQ ID NO: 2232212 - DNA, 25 bp, Homo sapien
caagtactgctaaagacttatcagc

SEQ ID NO: 2232213 - DNA, 25 bp, Homo sapien
actgctaaagacttatcagcttgct

SEQ ID NO: 2232214 - DNA, 25 bp, Homo sapien
cactgtcaagtactgctaaagactt

SEQ ID NO: 2232215 - DNA, 25 bp, Homo sapien
tctgtcatgatcatcgggtctctga

SEQ ID NO: 2232216 - DNA, 25 bp, Homo sapien
tcatgatcatcgggtctctgaagca

SEQ ID NO: 2232217 - DNA, 25 bp, Homo sapien
catgatcatcgggtctctgaagcaa

SEQ ID NO: 2232218 - DNA, 25 bp, Homo sapien
tgtcatgatcatcgggtctctgaag

SEQ ID NO: 2232219 - DNA, 25 bp, Homo sapien
ctaatatggcagtacattgggcttc

SEQ ID NO: 2232220 - DNA, 25 bp, Homo sapien
gattgactgctaaacaaaggccttt

SEQ ID NO: 2232221 - DNA, 25 bp, Homo sapien
gacacgtccctgcattagctggtaa

SEQ ID NO: 2232222 - DNA, 25 bp, Homo sapien
ctggtaacggtaagctttgggaatg

SEQ ID NO: 2232223 - DNA, 25 bp, Homo sapien
tttgaacctcctgctattgctgtta

SEQ ID NO: 2232224 - DNA, 25 bp, Homo sapien
ttgaacctcctgctattgctgttac

SEQ ID NO: 2232225 - DNA, 25 bp, Homo sapien
gaacctcctgctattgctgttactg

SEQ ID NO: 2232226 - DNA, 25 bp, Homo sapien
tgaacctcctgctattgctgttact

SEQ ID NO: 2232227 - DNA, 25 bp, Homo sapien
aaaatgccaactttggtgagtcgca

SEQ ID NO: 2232228 - DNA, 25 bp, Homo sapien
aatgccaactttggtgagtcgcagg

SEQ ID NO: 2232229 - DNA, 25 bp, Homo sapien
gtagaaaggttaagactgtgtccca

SEQ ID NO: 2232230 - DNA, 25 bp, Homo sapien
tctggagaagactagtcctgtggta

SEQ ID NO: 2232231 - DNA, 25 bp, Homo sapien
ttccatctaagatctgcagggcaca

SEQ ID NO: 2232232 - DNA, 25 bp, Homo sapien
gtcttccatctaagatctgcagggc

SEQ ID NO: 2232233 - DNA, 25 bp, Homo sapien
ctgcttcttccatgtaattcgtaag

SEQ ID NO: 2232234 - DNA, 25 bp, Homo sapien
tgtaattcgtaagaacaaggcagaa

SEQ ID NO: 2232235 - DNA, 25 bp, Homo sapien
tctgggtaattcagcaagtgggctg

SEQ ID NO: 2232236 - DNA, 25 bp, Homo sapien
gcaccctgacttctgggtaattcag

SEQ ID NO: 2232237 - DNA, 25 bp, Homo sapien
gacttctgggtaattcagcaagtgg

SEQ ID NO: 2232238 - DNA, 25 bp, Homo sapien
cctgacttctgggtaattcagcaag

SEQ ID NO: 2232239 - DNA, 25 bp, Homo sapien
aaagaattgctaacctgcagctgcc

SEQ ID NO: 2232240 - DNA, 25 bp, Homo sapien
tgtgatctggaaccatcctactgtt

SEQ ID NO: 2232241 - DNA, 25 bp, Homo sapien
catcttgcttgggtgcaccttctca

SEQ ID NO: 2232242 - DNA, 25 bp, Homo sapien
ggctttgtgcagttcatagttcatc

SEQ ID NO: 2232243 - DNA, 25 bp, Homo sapien
aaaagcttctgacaaacactgggac

SEQ ID NO: 2232244 - DNA, 25 bp, Homo sapien
cgggactcagacagccctagatggc

SEQ ID NO: 2232245 - DNA, 25 bp, Homo sapien
ctgggaccttagaccacgggactca

SEQ ID NO: 2232246 - DNA, 25 bp, Homo sapien
agtgaagtcaccagaacgaggagag

SEQ ID NO: 2232247 - DNA, 25 bp, Homo sapien
ggacttctgactccctgaactctgt

SEQ ID NO: 2232248 - DNA, 25 bp, Homo sapien
tggacttctgactccctgaactctg

SEQ ID NO: 2232249 - DNA, 25 bp, Homo sapien
acttctgactccctgaactctgtgc

SEQ ID NO: 2232250 - DNA, 25 bp, Homo sapien
ttctgactccctgaactctgtgcct

SEQ ID NO: 2232251 - DNA, 25 bp, Homo sapien
tcctgtgcagacttgcttagttgta

SEQ ID NO: 2232252 - DNA, 25 bp, Homo sapien
ccttttcttcagattggcgcacaca

SEQ ID NO: 2232253 - DNA, 25 bp, Homo sapien
tttcttcagattggcgcacacatac

SEQ ID NO: 2232254 - DNA, 25 bp, Homo sapien
ctgtgcagacttgcttagttgtaga

SEQ ID NO: 2232255 - DNA, 25 bp, Homo sapien
gataagttcaagtggctgcacagat

SEQ ID NO: 2232256 - DNA, 25 bp, Homo sapien
ggatgttttcccttcgttcatgttc

SEQ ID NO: 2232257 - DNA, 25 bp, Homo sapien
tctgaggatgttttcccttcgttca

SEQ ID NO: 2232258 - DNA, 25 bp, Homo sapien
ttagcgggagatacaagctccatgg

SEQ ID NO: 2232259 - DNA, 25 bp, Homo sapien
gcacagaagcatgttcaaccaatct

SEQ ID NO: 2232260 - DNA, 25 bp, Homo sapien
gctcttctaagtgatgatgtcagca

SEQ ID NO: 2232261 - DNA, 25 bp, Homo sapien
ctaagcactaagcatgtagcccact

SEQ ID NO: 2232262 - DNA, 25 bp, Homo sapien
tctagaatccggtgctcttctaagt

SEQ ID NO: 2232263 - DNA, 25 bp, Homo sapien
caacttcaccccataaagcagttgt

SEQ ID NO: 2232264 - DNA, 25 bp, Homo sapien
caccgttactgcagctacaacttca

SEQ ID NO: 2232265 - DNA, 25 bp, Homo sapien
ataaagcagttgtcagggcatccat

SEQ ID NO: 2232266 - DNA, 25 bp, Homo sapien
ggaatcagaaaccaccgttactgca

SEQ ID NO: 2232267 - DNA, 25 bp, Homo sapien
caatgtaagtgaagggtcccgtggc

SEQ ID NO: 2232268 - DNA, 25 bp, Homo sapien
cgtacccagctggttggaagcacct

SEQ ID NO: 2232269 - DNA, 25 bp, Homo sapien
tagtgccatgctaaaggccagactg

SEQ ID NO: 2232270 - DNA, 25 bp, Homo sapien
aaatggtctcatccatggacagccc

SEQ ID NO: 2232271 - DNA, 25 bp, Homo sapien
gaagagttctctccggtcctggaaa

SEQ ID NO: 2232272 - DNA, 25 bp, Homo sapien
cttaaggatcttataggtggcaggg

SEQ ID NO: 2232273 - DNA, 25 bp, Homo sapien
tcagaaaaactaggtggtttgcgtc

SEQ ID NO: 2232274 - DNA, 25 bp, Homo sapien
cctggaaagctctaattgtcagaaa

SEQ ID NO: 2232275 - DNA, 25 bp, Homo sapien
tgcacactggctgtagggttcccgg

SEQ ID NO: 2232276 - DNA, 25 bp, Homo sapien
tggagctcatttccaggcgcccttc

SEQ ID NO: 2232277 - DNA, 25 bp, Homo sapien
gcagcggtggcaggatgtgaggcga

SEQ ID NO: 2232278 - DNA, 25 bp, Homo sapien
aggcatattttggaggcggcagcag

SEQ ID NO: 2232279 - DNA, 25 bp, Homo sapien
ccgaagcgaagtcgcgcaaaaggaa

SEQ ID NO: 2232280 - DNA, 25 bp, Homo sapien
ggcaaggctgctccgaagcgaagtc

SEQ ID NO: 2232281 - DNA, 25 bp, Homo sapien
cttggccgaggcaaggtgttgctgg

SEQ ID NO: 2232282 - DNA, 25 bp, Homo sapien
gtcccggagtgcaccgcttggccga

SEQ ID NO: 2232283 - DNA, 25 bp, Homo sapien
tcaggtaatgtccactcgcagagct

SEQ ID NO: 2232284 - DNA, 25 bp, Homo sapien
gcaatttccaactgggcgcttctga

SEQ ID NO: 2232285 - DNA, 25 bp, Homo sapien
gggatcttcatgctctctgcggctg

SEQ ID NO: 2232286 - DNA, 25 bp, Homo sapien
tagggaatagagctccgaaggccag

SEQ ID NO: 2232287 - DNA, 25 bp, Homo sapien
caagcactaggcaggggagatcgct

SEQ ID NO: 2232288 - DNA, 25 bp, Homo sapien
caggggagatcgctggatatctggg

SEQ ID NO: 2232289 - DNA, 25 bp, Homo sapien
gggagatcgctggatatctggggcc

SEQ ID NO: 2232290 - DNA, 25 bp, Homo sapien
ctaggcaggggagatcgctggatat

SEQ ID NO: 2232291 - DNA, 25 bp, Homo sapien
aggtccccactgctgctcaggcgtg

SEQ ID NO: 2232292 - DNA, 25 bp, Homo sapien
gtccccactgctgctcaggcgtgag

SEQ ID NO: 2232293 - DNA, 25 bp, Homo sapien
tgggtttcccaggtccccactgctg

SEQ ID NO: 2232294 - DNA, 25 bp, Homo sapien
ccaggtccccactgctgctcaggcg

SEQ ID NO: 2232295 - DNA, 25 bp, Homo sapien
tcaagctgtagattattaaacatgc

SEQ ID NO: 2232296 - DNA, 25 bp, Homo sapien
agctgtagattattaaacatgcggc

SEQ ID NO: 2232297 - DNA, 25 bp, Homo sapien
gctgtagattattaaacatgcggca

SEQ ID NO: 2232298 - DNA, 25 bp, Homo sapien
caagctgtagattattaaacatgcg

SEQ ID NO: 2232299 - DNA, 25 bp, Homo sapien
ccaccccttcttgccgcacagaacg

SEQ ID NO: 2232300 - DNA, 25 bp, Homo sapien
tcttgccgcacagaacgcgttcttc

SEQ ID NO: 2232301 - DNA, 25 bp, Homo sapien
ttgccgcacagaacgcgttcttctc

SEQ ID NO: 2232302 - DNA, 25 bp, Homo sapien
cccttcttgccgcacagaacgcgtt

SEQ ID NO: 2232303 - DNA, 25 bp, Homo sapien
ggtgaaattcccaagtattcctgag

SEQ ID NO: 2232304 - DNA, 25 bp, Homo sapien
gaagtgcctatcttcgccacttgca

SEQ ID NO: 2232305 - DNA, 25 bp, Homo sapien
cctgagccgaggcttcagcagaagt

SEQ ID NO: 2232306 - DNA, 25 bp, Homo sapien
tgctctatggccagtacagtcgcac

SEQ ID NO: 2232307 - DNA, 25 bp, Homo sapien
tgctggacccgatgcggagactcca

SEQ ID NO: 2232308 - DNA, 25 bp, Homo sapien
gctctccaatttgagggctgccctg

SEQ ID NO: 2232309 - DNA, 25 bp, Homo sapien
tgaaaccacctgcttacagttagct

SEQ ID NO: 2232310 - DNA, 25 bp, Homo sapien
actccagtttgaaaccacctgctta

SEQ ID NO: 2232311 - DNA, 25 bp, Homo sapien
tctgccctataggtcaaggccagac

SEQ ID NO: 2232312 - DNA, 25 bp, Homo sapien
tgcttctgccctataggtcaaggcc

SEQ ID NO: 2232313 - DNA, 25 bp, Homo sapien
accaaagctgcctccgtgaacagac

SEQ ID NO: 2232314 - DNA, 25 bp, Homo sapien
gaggcaagttgcgaccaaagctgcc

SEQ ID NO: 2232315 - DNA, 25 bp, Homo sapien
ctttgtggaatagcctctgcttccc

SEQ ID NO: 2232316 - DNA, 25 bp, Homo sapien
cagtagggttgaggatttaaatccg

SEQ ID NO: 2232317 - DNA, 25 bp, Homo sapien
gaggatttaaatccggctttgtgga

SEQ ID NO: 2232318 - DNA, 25 bp, Homo sapien
cttccctctctgatatctggccagt

SEQ ID NO: 2232319 - DNA, 25 bp, Homo sapien
ctgctccattgttctctatagattt

SEQ ID NO: 2232320 - DNA, 25 bp, Homo sapien
gggaatggtcttgccagtgccacta

SEQ ID NO: 2232321 - DNA, 25 bp, Homo sapien
tgctccattgttctctatagattta

SEQ ID NO: 2232322 - DNA, 25 bp, Homo sapien
gtacagggaatggtcttgccagtgc

SEQ ID NO: 2232323 - DNA, 25 bp, Homo sapien
gaatggtcttgccagatccaaaaat

SEQ ID NO: 2232324 - DNA, 25 bp, Homo sapien
ctatacagggaatggtcttgccaga

SEQ ID NO: 2232325 - DNA, 25 bp, Homo sapien
cagggaatggtcttgccagatccaa

SEQ ID NO: 2232326 - DNA, 25 bp, Homo sapien
gtcttgccagatccaaaaatacagc

SEQ ID NO: 2232327 - DNA, 25 bp, Homo sapien
caattccctagtgttttgttcaaag

SEQ ID NO: 2232328 - DNA, 25 bp, Homo sapien
ttcaaagtgagtaattccattggat

SEQ ID NO: 2232329 - DNA, 25 bp, Homo sapien
attccctagtgttttgttcaaagtg

SEQ ID NO: 2232330 - DNA, 25 bp, Homo sapien
ttccattggatcctgtgtttaagag

SEQ ID NO: 2232331 - DNA, 25 bp, Homo sapien
atctccttcttttcctggtgaatac

SEQ ID NO: 2232332 - DNA, 25 bp, Homo sapien
ctccttcttttcctggtgaatacat

SEQ ID NO: 2232333 - DNA, 25 bp, Homo sapien
tgggtactcttctttatcacatctc

SEQ ID NO: 2232334 - DNA, 25 bp, Homo sapien
cttgggtactcttctttatcacatc

SEQ ID NO: 2232335 - DNA, 25 bp, Homo sapien
aaaaatgttttatctgatttgtttg

SEQ ID NO: 2232336 - DNA, 25 bp, Homo sapien
tggaaaaatgttttatctgatttgt

SEQ ID NO: 2232337 - DNA, 25 bp, Homo sapien
aaatgttttatctgatttgtttgaa

SEQ ID NO: 2232338 - DNA, 25 bp, Homo sapien
aaaatgttttatctgatttgtttga

SEQ ID NO: 2232339 - DNA, 25 bp, Homo sapien
tctgcctcactattctgaatccctg

SEQ ID NO: 2232340 - DNA, 25 bp, Homo sapien
ctctgcctcactattctgaatccct

SEQ ID NO: 2232341 - DNA, 25 bp, Homo sapien
gcctcactattctgaatccctgtac

SEQ ID NO: 2232342 - DNA, 25 bp, Homo sapien
tgcctcactattctgaatccctgta

SEQ ID NO: 2232343 - DNA, 25 bp, Homo sapien
atcttgcttagacttgttctctcta

SEQ ID NO: 2232344 - DNA, 25 bp, Homo sapien
gccacactttagcatcttgcttaga

SEQ ID NO: 2232345 - DNA, 25 bp, Homo sapien
catgggccacactttagcatcttgc

SEQ ID NO: 2232346 - DNA, 25 bp, Homo sapien
cttgcttagacttgttctctctaac

SEQ ID NO: 2232347 - DNA, 25 bp, Homo sapien
tcagagcaatgttgtctaacagact

SEQ ID NO: 2232348 - DNA, 25 bp, Homo sapien
ttgtctaacagactgattccaggtg

SEQ ID NO: 2232349 - DNA, 25 bp, Homo sapien
tcagtttatcgcattcagagcaatg

SEQ ID NO: 2232350 - DNA, 25 bp, Homo sapien
tatcgcattcagagcaatgttgtct

SEQ ID NO: 2232351 - DNA, 25 bp, Homo sapien
ctagtcagcctgcagaggtgcaggc

SEQ ID NO: 2232352 - DNA, 25 bp, Homo sapien
gcagaggtgcaggcagggtgggccc

SEQ ID NO: 2232353 - DNA, 25 bp, Homo sapien
agaggtgcaggcagggtgggccccc

SEQ ID NO: 2232354 - DNA, 25 bp, Homo sapien
aggtgcaggcagggtgggcccccac

SEQ ID NO: 2232355 - DNA, 25 bp, Homo sapien
ttccagcacgctcagctcgatcagg

SEQ ID NO: 2232356 - DNA, 25 bp, Homo sapien
tccagcacgctcagctcgatcaggc

SEQ ID NO: 2232357 - DNA, 25 bp, Homo sapien
ccagcacgctcagctcgatcaggcc

SEQ ID NO: 2232358 - DNA, 25 bp, Homo sapien
agcagagatgatggctgctattttc

SEQ ID NO: 2232359 - DNA, 25 bp, Homo sapien
tgctgatccacctctttggcttcca

SEQ ID NO: 2232360 - DNA, 25 bp, Homo sapien
ctgatccacctctttggcttccact

SEQ ID NO: 2232361 - DNA, 25 bp, Homo sapien
gatgatggctgctattttctgctgc

SEQ ID NO: 2232362 - DNA, 25 bp, Homo sapien
gggatgtgtcaaggacacatcgtcc

SEQ ID NO: 2232363 - DNA, 25 bp, Homo sapien
ccgaaggtgggatgtgtcaaggaca

SEQ ID NO: 2232364 - DNA, 25 bp, Homo sapien
cttcccgaaggtgggatgtgtcaag

SEQ ID NO: 2232365 - DNA, 25 bp, Homo sapien
ggatgtgtcaaggacacatcgtcca

SEQ ID NO: 2232366 - DNA, 25 bp, Homo sapien
actggtacattaagtggtcgagaat

SEQ ID NO: 2232367 - DNA, 25 bp, Homo sapien
tacattaagtggtcgagaatggcag

SEQ ID NO: 2232368 - DNA, 25 bp, Homo sapien
cagagttcagcatgcttcctacaac

SEQ ID NO: 2232369 - DNA, 25 bp, Homo sapien
gttcagcatgcttcctacaacagct

SEQ ID NO: 2232370 - DNA, 25 bp, Homo sapien
gttttcttctgctggaccctctcac

SEQ ID NO: 2232371 - DNA, 25 bp, Homo sapien
tttcttctgctggaccctctcacac

SEQ ID NO: 2232372 - DNA, 25 bp, Homo sapien
tggaccctctcacacctgcttccac

SEQ ID NO: 2232373 - DNA, 25 bp, Homo sapien
gaccctctcacacctgcttccactc

SEQ ID NO: 2232374 - DNA, 25 bp, Homo sapien
tattctctgacttttcatggatttt

SEQ ID NO: 2232375 - DNA, 25 bp, Homo sapien
atcacttgtatcatcaggcttcttg

SEQ ID NO: 2232376 - DNA, 25 bp, Homo sapien
tatgatggggattgtcatattctct

SEQ ID NO: 2232377 - DNA, 25 bp, Homo sapien
gatctaccactttggatttggtgcc

SEQ ID NO: 2232378 - DNA, 25 bp, Homo sapien
tttaataaaatcgtactctcctatc

SEQ ID NO: 2232379 - DNA, 25 bp, Homo sapien
ttaataaaatcgtactctcctatct

SEQ ID NO: 2232380 - DNA, 25 bp, Homo sapien
taataaaatcgtactctcctatctt

SEQ ID NO: 2232381 - DNA, 25 bp, Homo sapien
tgccttcggaaagcaaggatattgg

SEQ ID NO: 2232382 - DNA, 25 bp, Homo sapien
cctgcctccggttcatagtatattg

SEQ ID NO: 2232383 - DNA, 25 bp, Homo sapien
tgtcatagtgttacctcgattggca

SEQ ID NO: 2232384 - DNA, 25 bp, Homo sapien
agtacaaatttaatgccggctttca

SEQ ID NO: 2232385 - DNA, 25 bp, Homo sapien
taaagcacttgagtatcccgtaccc

SEQ ID NO: 2232386 - DNA, 25 bp, Homo sapien
cagattgtaatctgttttggatccc

SEQ ID NO: 2232387 - DNA, 25 bp, Homo sapien
tctgtgtttaccagctactgatgtc

SEQ ID NO: 2232388 - DNA, 25 bp, Homo sapien
tactttcaggaatgctctaagagct

SEQ ID NO: 2232389 - DNA, 25 bp, Homo sapien
ccaagctgtggcctaggtgaagtta

SEQ ID NO: 2232390 - DNA, 25 bp, Homo sapien
tatcaccagcacctagtaaaaagcc

SEQ ID NO: 2232391 - DNA, 25 bp, Homo sapien
tgcactgagcactgaaatgaactat

SEQ ID NO: 2232392 - DNA, 25 bp, Homo sapien
cacagaggccgagagatgttaagtc

SEQ ID NO: 2232393 - DNA, 25 bp, Homo sapien
tattagaacagactttaatccaaat

SEQ ID NO: 2232394 - DNA, 25 bp, Homo sapien
cagactttaatccaaattatcccag

SEQ ID NO: 2232395 - DNA, 25 bp, Homo sapien
ttcatattagaacagactttaatcc

SEQ ID NO: 2232396 - DNA, 25 bp, Homo sapien
tctagtttcatattagaacagactt

SEQ ID NO: 2232397 - DNA, 25 bp, Homo sapien
ttctccttgcctctcagattttcat

SEQ ID NO: 2232398 - DNA, 25 bp, Homo sapien
tctccttgcctctcagattttcatc

SEQ ID NO: 2232399 - DNA, 25 bp, Homo sapien
ggccgtactttttagcttagctaga

SEQ ID NO: 2232400 - DNA, 25 bp, Homo sapien
tcagctaacagcagaaagtacacct

SEQ ID NO: 2232401 - DNA, 25 bp, Homo sapien
ttctctaggtcataattaacaaggc

SEQ ID NO: 2232402 - DNA, 25 bp, Homo sapien
tgccctgctggaagcttaggcagat

SEQ ID NO: 2232403 - DNA, 25 bp, Homo sapien
gagttatgttccttgatgtggtttg

SEQ ID NO: 2232404 - DNA, 25 bp, Homo sapien
cctggtttcatgccagttttcaagg

SEQ ID NO: 2232405 - DNA, 25 bp, Homo sapien
gatttgttatatacatggctctcat

SEQ ID NO: 2232406 - DNA, 25 bp, Homo sapien
tttctatttgggtgctctttatttc

SEQ ID NO: 2232407 - DNA, 25 bp, Homo sapien
cttgactggatttctggcaacggca

SEQ ID NO: 2232408 - DNA, 25 bp, Homo sapien
ctcataggtgccttgtttagtgccc

SEQ ID NO: 2232409 - DNA, 25 bp, Homo sapien
tggacaatatccaaagcacagtatc

SEQ ID NO: 2232410 - DNA, 25 bp, Homo sapien
ggcatttccttgcattgctcatagg

SEQ ID NO: 2232411 - DNA, 25 bp, Homo sapien
gctatagaagtctgtgcatggcagt

SEQ ID NO: 2232412 - DNA, 25 bp, Homo sapien
ttgtctgatgtccatgaatggcagt

SEQ ID NO: 2232413 - DNA, 25 bp, Homo sapien
gaacaataaccattgtgacaaaggg

SEQ ID NO: 2232414 - DNA, 25 bp, Homo sapien
caataaccattgtgacaaagggaac

SEQ ID NO: 2232415 - DNA, 25 bp, Homo sapien
tcagggctttcactgaccttatatg

SEQ ID NO: 2232416 - DNA, 25 bp, Homo sapien
gggtatattctgaaagtgagtaact

SEQ ID NO: 2232417 - DNA, 25 bp, Homo sapien
cctcagggctttcactgaccttata

SEQ ID NO: 2232418 - DNA, 25 bp, Homo sapien
tctgaaagtgagtaactttgggaag

SEQ ID NO: 2232419 - DNA, 25 bp, Homo sapien
gaatcactgattcccttgaagtctt

SEQ ID NO: 2232420 - DNA, 25 bp, Homo sapien
cctgaatcactgattcccttgaagt

SEQ ID NO: 2232421 - DNA, 25 bp, Homo sapien
gggatgaggtcagcctgaatcactg

SEQ ID NO: 2232422 - DNA, 25 bp, Homo sapien
agcctgaatcactgattcccttgaa

SEQ ID NO: 2232423 - DNA, 25 bp, Homo sapien
ctttgcacttaatcatgtcattgcc

SEQ ID NO: 2232424 - DNA, 25 bp, Homo sapien
cactcccaaatgctacatgcttccc

SEQ ID NO: 2232425 - DNA, 25 bp, Homo sapien
tgcaaatctttgcacttaatcatgt

SEQ ID NO: 2232426 - DNA, 25 bp, Homo sapien
acttaatcatgtcattgccaagtcc

SEQ ID NO: 2232427 - DNA, 25 bp, Homo sapien
aaggacagggtaatcaggggacaca

SEQ ID NO: 2232428 - DNA, 25 bp, Homo sapien
ggtttatccaactcttggcagtaaa

SEQ ID NO: 2232429 - DNA, 25 bp, Homo sapien
tcttggcagtaaacagatgtaacca

SEQ ID NO: 2232430 - DNA, 25 bp, Homo sapien
taaagtggtttatccaactcttggc

SEQ ID NO: 2232431 - DNA, 25 bp, Homo sapien
cagactggctgggttaattagaagc

SEQ ID NO: 2232432 - DNA, 25 bp, Homo sapien
agcagctggtgtgcatatggttcta

SEQ ID NO: 2232433 - DNA, 25 bp, Homo sapien
cagctggtgtgcatatggttctacc

SEQ ID NO: 2232434 - DNA, 25 bp, Homo sapien
gtgtgcatatggttctaccagaaac

SEQ ID NO: 2232435 - DNA, 25 bp, Homo sapien
gacataacattgtagttgcagtcat

SEQ ID NO: 2232436 - DNA, 25 bp, Homo sapien
agacataacattgtagttgcagtca

SEQ ID NO: 2232437 - DNA, 25 bp, Homo sapien
agccagacataacattgtagttgca

SEQ ID NO: 2232438 - DNA, 25 bp, Homo sapien
aatgaatcgggacaaaatctgcaga

SEQ ID NO: 2232439 - DNA, 25 bp, Homo sapien
ctaaccaaaagggaatggcttgata

SEQ ID NO: 2232440 - DNA, 25 bp, Homo sapien
caacagtatgtggtattccaagaag

SEQ ID NO: 2232441 - DNA, 25 bp, Homo sapien
gcccaaagccttctaaatgctaaaa

SEQ ID NO: 2232442 - DNA, 25 bp, Homo sapien
tcctgccatacttagtaccagtgtc

SEQ ID NO: 2232443 - DNA, 25 bp, Homo sapien
cactgattgattcagcttatggaga

SEQ ID NO: 2232444 - DNA, 25 bp, Homo sapien
tatacttaatcctggaacaatttct

SEQ ID NO: 2232445 - DNA, 25 bp, Homo sapien
taatggacactcatacactgattga

SEQ ID NO: 2232446 - DNA, 25 bp, Homo sapien
ttgtagtctatcagcagtcctcagg

SEQ ID NO: 2232447 - DNA, 25 bp, Homo sapien
taaaaagaacatgcaatccctggaa

SEQ ID NO: 2232448 - DNA, 25 bp, Homo sapien
tcagcgctgccatatggaatgtcat

SEQ ID NO: 2232449 - DNA, 25 bp, Homo sapien
ggagaatggctcacttgtacaacac

SEQ ID NO: 2232450 - DNA, 25 bp, Homo sapien
ccaagagtaaaaggagacgatgaag

SEQ ID NO: 2232451 - DNA, 25 bp, Homo sapien
agaccaagagtaaaaggagacgatg

SEQ ID NO: 2232452 - DNA, 25 bp, Homo sapien
gaattttctgggtacaggaagacca

SEQ ID NO: 2232453 - DNA, 25 bp, Homo sapien
aaggagacgatgaagatttttagtt

SEQ ID NO: 2232454 - DNA, 25 bp, Homo sapien
gctctgaaaaataccgacgaaaaca

SEQ ID NO: 2232455 - DNA, 25 bp, Homo sapien
tgctctgaaaaataccgacgaaaac

SEQ ID NO: 2232456 - DNA, 25 bp, Homo sapien
ctgctctgaaaaataccgacgaaaa

SEQ ID NO: 2232457 - DNA, 25 bp, Homo sapien
tctgctctgaaaaataccgacgaaa

SEQ ID NO: 2232458 - DNA, 25 bp, Homo sapien
tgtttgaaatccagtgccaaggata

SEQ ID NO: 2232459 - DNA, 25 bp, Homo sapien
tccagtgccaaggatatttgcaaca

SEQ ID NO: 2232460 - DNA, 25 bp, Homo sapien
tgccaaggatatttgcaacaacagt

SEQ ID NO: 2232461 - DNA, 25 bp, Homo sapien
gaaatccagtgccaaggatatttgc

SEQ ID NO: 2232462 - DNA, 25 bp, Homo sapien
gataagtagtgttctgttccaggtc

SEQ ID NO: 2232463 - DNA, 25 bp, Homo sapien
ctagcaaatgtcaaagcaggattaa

SEQ ID NO: 2232464 - DNA, 25 bp, Homo sapien
tgtagtatcaccaactaatggccat

SEQ ID NO: 2232465 - DNA, 25 bp, Homo sapien
caaaactgcctgcatatgcttgcct

SEQ ID NO: 2232466 - DNA, 25 bp, Homo sapien
tgggcctgttgccagcattgaatac

SEQ ID NO: 2232467 - DNA, 25 bp, Homo sapien
tggcatccttcttaccctgagcgtg

SEQ ID NO: 2232468 - DNA, 25 bp, Homo sapien
tgcctgctgggctgataacccctgg

SEQ ID NO: 2232469 - DNA, 25 bp, Homo sapien
cagcattgaatactggagggagatc

SEQ ID NO: 2232470 - DNA, 25 bp, Homo sapien
atgtgcagggaacctctggagagcc

SEQ ID NO: 2232471 - DNA, 25 bp, Homo sapien
aagatgtgcagggaacctctggaga

SEQ ID NO: 2232472 - DNA, 25 bp, Homo sapien
ctgaagatgtgcagggaacctctgg

SEQ ID NO: 2232473 - DNA, 25 bp, Homo sapien
tgaagatgtgcagggaacctctgga

SEQ ID NO: 2232474 - DNA, 25 bp, Homo sapien
cgggatttggctggtagcacctgac

SEQ ID NO: 2232475 - DNA, 25 bp, Homo sapien
tattcttccattggcacagccctag

SEQ ID NO: 2232476 - DNA, 25 bp, Homo sapien
aacgggatttggctggtagcacctg

SEQ ID NO: 2232477 - DNA, 25 bp, Homo sapien
gccctagagatgctaactctgaaaa

SEQ ID NO: 2232478 - DNA, 25 bp, Homo sapien
aaccgcttctatagctcatccactg

SEQ ID NO: 2232479 - DNA, 25 bp, Homo sapien
gcttctatagctcatccactgagag

SEQ ID NO: 2232480 - DNA, 25 bp, Homo sapien
tcttccatgccaaacagcgcatcat

SEQ ID NO: 2232481 - DNA, 25 bp, Homo sapien
catcatcaataggagttagatttcc

SEQ ID NO: 2232482 - DNA, 25 bp, Homo sapien
gggagttgccctcttgtctttggat

SEQ ID NO: 2232483 - DNA, 25 bp, Homo sapien
tttggatgggatcagggcagggaca

SEQ ID NO: 2232484 - DNA, 25 bp, Homo sapien
ctttgagtttgcaggggagttgccc

SEQ ID NO: 2232485 - DNA, 25 bp, Homo sapien
tgaagaactatcaaggaaggatagc

SEQ ID NO: 2232486 - DNA, 25 bp, Homo sapien
catctttcaagcctctctcacatgc

SEQ ID NO: 2232487 - DNA, 25 bp, Homo sapien
aagcctctctcacatgccactatct

SEQ ID NO: 2232488 - DNA, 25 bp, Homo sapien
tgctctccccagaatgcctttctct

SEQ ID NO: 2232489 - DNA, 25 bp, Homo sapien
aaacccatctttcaagcctctctca

SEQ ID NO: 2232490 - DNA, 25 bp, Homo sapien
tttcctgtttatctcatattccttt

SEQ ID NO: 2232491 - DNA, 25 bp, Homo sapien
tattcagtgtcacccatttgccttt

SEQ ID NO: 2232492 - DNA, 25 bp, Homo sapien
aattcaagccaatacatcaatttca

SEQ ID NO: 2232493 - DNA, 25 bp, Homo sapien
aatttcatattattcagtgtcaccc

SEQ ID NO: 2232494 - DNA, 25 bp, Homo sapien
ctaagtatttgctctttcgctcatt

SEQ ID NO: 2232495 - DNA, 25 bp, Homo sapien
gcatactggggtgtacatcttgagc

SEQ ID NO: 2232496 - DNA, 25 bp, Homo sapien
ttcctttgtggttaatttcaatgta

SEQ ID NO: 2232497 - DNA, 25 bp, Homo sapien
tgtaggcatactggggtgtacatct

SEQ ID NO: 2232498 - DNA, 25 bp, Homo sapien
ttgggatcagtagcagttgaaagac

SEQ ID NO: 2232499 - DNA, 25 bp, Homo sapien
tgtaaatcgagcagagtcacttgaa

SEQ ID NO: 2232500 - DNA, 25 bp, Homo sapien
gtaaatcgagcagagtcacttgaaa

SEQ ID NO: 2232501 - DNA, 25 bp, Homo sapien
gcaccttgacattgtaaatcgagca

SEQ ID NO: 2232502 - DNA, 25 bp, Homo sapien
caccttgacattgtaaatcgagcag

SEQ ID NO: 2232503 - DNA, 25 bp, Homo sapien
aatcttgccaaaggctctaggcctg

SEQ ID NO: 2232504 - DNA, 25 bp, Homo sapien
tgctgcttggtatttgctgcacgga

SEQ ID NO: 2232505 - DNA, 25 bp, Homo sapien
gccaaaggctctaggcctgctgctt

SEQ ID NO: 2232506 - DNA, 25 bp, Homo sapien
atttgctgcacggactgggcctgag

SEQ ID NO: 2232507 - DNA, 25 bp, Homo sapien
tagctaaagagtaggctctccagta

SEQ ID NO: 2232508 - DNA, 25 bp, Homo sapien
agatgaatagctaaagagtaggctc

SEQ ID NO: 2232509 - DNA, 25 bp, Homo sapien
aagagtaggctctccagtaaaactt

SEQ ID NO: 2232510 - DNA, 25 bp, Homo sapien
tgaatagctaaagagtaggctctcc

SEQ ID NO: 2232511 - DNA, 25 bp, Homo sapien
ccctgctgtctttcaagagtgttat

SEQ ID NO: 2232512 - DNA, 25 bp, Homo sapien
gagtcaattttatcagatccctgct

SEQ ID NO: 2232513 - DNA, 25 bp, Homo sapien
cctgctgtctttcaagagtgttatt

SEQ ID NO: 2232514 - DNA, 25 bp, Homo sapien
ctgagtcaattttatcagatccctg

SEQ ID NO: 2232515 - DNA, 25 bp, Homo sapien
tgttactaactcactagaaataatc

SEQ ID NO: 2232516 - DNA, 25 bp, Homo sapien
agaaataatctctgacaaagtccac

SEQ ID NO: 2232517 - DNA, 25 bp, Homo sapien
gaaataatctctgacaaagtccaca

SEQ ID NO: 2232518 - DNA, 25 bp, Homo sapien
tctcttctgttactaactcactaga

SEQ ID NO: 2232519 - DNA, 25 bp, Homo sapien
actcatttcatctccggttctaccc

SEQ ID NO: 2232520 - DNA, 25 bp, Homo sapien
cactcatttcatctccggttctacc

SEQ ID NO: 2232521 - DNA, 25 bp, Homo sapien
ctcatttcatctccggttctaccca

SEQ ID NO: 2232522 - DNA, 25 bp, Homo sapien
tcatttcatctccggttctacccat

SEQ ID NO: 2232523 - DNA, 25 bp, Homo sapien
tgagcaaagtagaatcaaaattctc

SEQ ID NO: 2232524 - DNA, 25 bp, Homo sapien
ctgagcaaagtagaatcaaaattct

SEQ ID NO: 2232525 - DNA, 25 bp, Homo sapien
gagcaaagtagaatcaaaattctcc

SEQ ID NO: 2232526 - DNA, 25 bp, Homo sapien
tgtggaagagaagtagcccaaaaga

SEQ ID NO: 2232527 - DNA, 25 bp, Homo sapien
cgccaaataagttcctggacgattt

SEQ ID NO: 2232528 - DNA, 25 bp, Homo sapien
gttcctggacgatttgtggaagaga

SEQ ID NO: 2232529 - DNA, 25 bp, Homo sapien
tcagctttgtagtccgccaaataag

SEQ ID NO: 2232530 - DNA, 25 bp, Homo sapien
ctggggagttccattaaggataaca

SEQ ID NO: 2232531 - DNA, 25 bp, Homo sapien
gaatgagcacagctatccccctggg

SEQ ID NO: 2232532 - DNA, 25 bp, Homo sapien
acttcctgtactgtatataactgca

SEQ ID NO: 2232533 - DNA, 25 bp, Homo sapien
aagtggaaatggcattcttttctca

SEQ ID NO: 2232534 - DNA, 25 bp, Homo sapien
ctctgctcacttcctgtactgtata

SEQ ID NO: 2232535 - DNA, 25 bp, Homo sapien
aaatggcattcttttctcagactct

SEQ ID NO: 2232536 - DNA, 25 bp, Homo sapien
tactttctttaagctgcttgttgtt

SEQ ID NO: 2232537 - DNA, 25 bp, Homo sapien
actttctttaagctgcttgttgttg

SEQ ID NO: 2232538 - DNA, 25 bp, Homo sapien
ccaagttgattgggcattgcttcca

SEQ ID NO: 2232539 - DNA, 25 bp, Homo sapien
tcttcccaagttgattgggcattgc

SEQ ID NO: 2232540 - DNA, 25 bp, Homo sapien
cttcccaagttgattgggcattgct

SEQ ID NO: 2232541 - DNA, 25 bp, Homo sapien
tcccaagttgattgggcattgcttc

SEQ ID NO: 2232542 - DNA, 25 bp, Homo sapien
ggacagttgcgaaaggatgccataa

SEQ ID NO: 2232543 - DNA, 25 bp, Homo sapien
cacctgaaccctcctttctggacag

SEQ ID NO: 2232544 - DNA, 25 bp, Homo sapien
caaaggcacgtgtaaatgtgatcat

SEQ ID NO: 2232545 - DNA, 25 bp, Homo sapien
cctccacaaaggcacgtgtaaatgt

SEQ ID NO: 2232546 - DNA, 25 bp, Homo sapien
gaataggactgtggaaatcaggaag

SEQ ID NO: 2232547 - DNA, 25 bp, Homo sapien
caggtcccccgttcaaggccagctt

SEQ ID NO: 2232548 - DNA, 25 bp, Homo sapien
agcttgctccctttggctctcaact

SEQ ID NO: 2232549 - DNA, 25 bp, Homo sapien
gggatagagagaataggactgtgga

SEQ ID NO: 2232550 - DNA, 25 bp, Homo sapien
aggagaggaactgatatgtggggcc

SEQ ID NO: 2232551 - DNA, 25 bp, Homo sapien
ggagaggaactgatatgtggggccc

SEQ ID NO: 2232552 - DNA, 25 bp, Homo sapien
tacacatgagaaagtggggaactct

SEQ ID NO: 2232553 - DNA, 25 bp, Homo sapien
ctgctggtgcctttgactgttttac

SEQ ID NO: 2232554 - DNA, 25 bp, Homo sapien
gagtcccgaacatcagcaccttcaa

SEQ ID NO: 2232555 - DNA, 25 bp, Homo sapien
cctgtacgctctggctgagtcccga

SEQ ID NO: 2232556 - DNA, 25 bp, Homo sapien
tgtgccagttgcataagcacttcct

SEQ ID NO: 2232557 - DNA, 25 bp, Homo sapien
ccttccgaaggtcattgtcaactgg

SEQ ID NO: 2232558 - DNA, 25 bp, Homo sapien
tcattgtcaactggcacctccactg

SEQ ID NO: 2232559 - DNA, 25 bp, Homo sapien
tcctcaagggcacctactgacatgt

SEQ ID NO: 2232560 - DNA, 25 bp, Homo sapien
cactttcagaatgcattggaggctc

SEQ ID NO: 2232561 - DNA, 25 bp, Homo sapien
ttcagaatgcattggaggctcattc

SEQ ID NO: 2232562 - DNA, 25 bp, Homo sapien
gagtgatcttgacaaagcattgcac

SEQ ID NO: 2232563 - DNA, 25 bp, Homo sapien
gatgaaaagagtgatcttgacaaag

SEQ ID NO: 2232564 - DNA, 25 bp, Homo sapien
caggaagaaacttttcttagatggg

SEQ ID NO: 2232565 - DNA, 25 bp, Homo sapien
ggagtccactgtgctgggtataaac

SEQ ID NO: 2232566 - DNA, 25 bp, Homo sapien
gtgcctgtggagtgcccatttgagg

SEQ ID NO: 2232567 - DNA, 25 bp, Homo sapien
ccactgtgctgggtataaacaggaa

SEQ ID NO: 2232568 - DNA, 25 bp, Homo sapien
acccaggtagcaatttccaggagag

SEQ ID NO: 2232569 - DNA, 25 bp, Homo sapien
ctattgatccgtgaaaagttaagtg

SEQ ID NO: 2232570 - DNA, 25 bp, Homo sapien
caacaagtcggttacccaggtagca

SEQ ID NO: 2232571 - DNA, 25 bp, Homo sapien
tgaaaagttaagtgtcaacaagtcg

SEQ ID NO: 2232572 - DNA, 25 bp, Homo sapien
cctccatttgtgtctcaatctggtt

SEQ ID NO: 2232573 - DNA, 25 bp, Homo sapien
caatctggttcaggtctaactcctc

SEQ ID NO: 2232574 - DNA, 25 bp, Homo sapien
ttagtcactaggtccacatgcccca

SEQ ID NO: 2232575 - DNA, 25 bp, Homo sapien
tccaaggctcctccatttgtgtctc

SEQ ID NO: 2232576 - DNA, 25 bp, Homo sapien
gctaaaacatacatgtacccccgat

SEQ ID NO: 2232577 - DNA, 25 bp, Homo sapien
aacatacatgtacccccgatcaaca

SEQ ID NO: 2232578 - DNA, 25 bp, Homo sapien
tagctaaaacatacatgtacccccg

SEQ ID NO: 2232579 - DNA, 25 bp, Homo sapien
taaaacatacatgtacccccgatca

SEQ ID NO: 2232580 - DNA, 25 bp, Homo sapien
cagtggcaggagttctctgttcaaa

SEQ ID NO: 2232581 - DNA, 25 bp, Homo sapien
tctgttcaaatctgactgtccctgg

SEQ ID NO: 2232582 - DNA, 25 bp, Homo sapien
catgagagctgtagagtcatagcag

SEQ ID NO: 2232583 - DNA, 25 bp, Homo sapien
actgtccctggttctgctcacttgg

SEQ ID NO: 2232584 - DNA, 25 bp, Homo sapien
ccctgaaggattccctcaggagtag

SEQ ID NO: 2232585 - DNA, 25 bp, Homo sapien
gccctgaaggattccctcaggagta

SEQ ID NO: 2232586 - DNA, 25 bp, Homo sapien
gcaactccccagctggttcgaacat

SEQ ID NO: 2232587 - DNA, 25 bp, Homo sapien
gtctcttatttgcaactgctctcct

SEQ ID NO: 2232588 - DNA, 25 bp, Homo sapien
tcttatttgcaactgctctcctggt

SEQ ID NO: 2232589 - DNA, 25 bp, Homo sapien
attatttgatggtctcttatttgca

SEQ ID NO: 2232590 - DNA, 25 bp, Homo sapien
atttgcaactgctctcctggtacca

SEQ ID NO: 2232591 - DNA, 25 bp, Homo sapien
tcggttctattttgcatttctgcac

SEQ ID NO: 2232592 - DNA, 25 bp, Homo sapien
cagtcgaagcaagtatccctccgtg

SEQ ID NO: 2232593 - DNA, 25 bp, Homo sapien
ttcccttcccacagtcgaagcaagt

SEQ ID NO: 2232594 - DNA, 25 bp, Homo sapien
ttcccacagtcgaagcaagtatccc

SEQ ID NO: 2232595 - DNA, 25 bp, Homo sapien
gcaagtatccctccgtgaaaaattc

SEQ ID NO: 2232596 - DNA, 25 bp, Homo sapien
tgaggttcggagtatctcctgtctc

SEQ ID NO: 2232597 - DNA, 25 bp, Homo sapien
gctgatgaggttcggagtatctcct

SEQ ID NO: 2232598 - DNA, 25 bp, Homo sapien
tttgctgatgaggttcggagtatct

SEQ ID NO: 2232599 - DNA, 25 bp, Homo sapien
gatgaggttcggagtatctcctgtc

SEQ ID NO: 2232600 - DNA, 25 bp, Homo sapien
tattctgtggggccccccatcagac

SEQ ID NO: 2232601 - DNA, 25 bp, Homo sapien
ctattctgtggggccccccatcaga

SEQ ID NO: 2232602 - DNA, 25 bp, Homo sapien
gcctcccagtcggaaggcagctgag

SEQ ID NO: 2232603 - DNA, 25 bp, Homo sapien
taagatgtggctgtttcgaccgacc

SEQ ID NO: 2232604 - DNA, 25 bp, Homo sapien
aataggtgtacttttcctgatcagc

SEQ ID NO: 2232605 - DNA, 25 bp, Homo sapien
caggctagtatcaaaggcctcccag

SEQ ID NO: 2232606 - DNA, 25 bp, Homo sapien
gctcccactcatggggagacaccag

SEQ ID NO: 2232607 - DNA, 25 bp, Homo sapien
tgctcccactcatggggagacacca

SEQ ID NO: 2232608 - DNA, 25 bp, Homo sapien
ctccttctgtgcaaacccctccggc

SEQ ID NO: 2232609 - DNA, 25 bp, Homo sapien
gtgcaaacccctccggcagtggcca

SEQ ID NO: 2232610 - DNA, 25 bp, Homo sapien
tctgggccattcttagccgggaggc

SEQ ID NO: 2232611 - DNA, 25 bp, Homo sapien
tgccaaggcctgtgcggctgatttg

SEQ ID NO: 2232612 - DNA, 25 bp, Homo sapien
gaggccgcctccttgcgttccgtct

SEQ ID NO: 2232613 - DNA, 25 bp, Homo sapien
tttgtgcagtttggcgaagccgtgc

SEQ ID NO: 2232614 - DNA, 25 bp, Homo sapien
aaggccaccacgttgctatgccgga

SEQ ID NO: 2232615 - DNA, 25 bp, Homo sapien
taaggatatattctcaagatagaac

SEQ ID NO: 2232616 - DNA, 25 bp, Homo sapien
ttgctatgccggaacccgctactgg

SEQ ID NO: 2232617 - DNA, 25 bp, Homo sapien
atatattctcaagatagaactcggg

SEQ ID NO: 2232618 - DNA, 25 bp, Homo sapien
ccgctgtcttaacacgcccgaagag

SEQ ID NO: 2232619 - DNA, 25 bp, Homo sapien
cttaacacgcccgaagagagaggaa

SEQ ID NO: 2232620 - DNA, 25 bp, Homo sapien
aacacgcccgaagagagaggaagat

SEQ ID NO: 2232621 - DNA, 25 bp, Homo sapien
gctgtcttaacacgcccgaagagag

SEQ ID NO: 2232622 - DNA, 25 bp, Homo sapien
tataatcaagtcaaaaaagtcccat

SEQ ID NO: 2232623 - DNA, 25 bp, Homo sapien
cgtccatcacctaaggtgaccattg

SEQ ID NO: 2232624 - DNA, 25 bp, Homo sapien
tactccaatggctctcgtccatcac

SEQ ID NO: 2232625 - DNA, 25 bp, Homo sapien
ggtgaccattgactccttggctgcc

SEQ ID NO: 2232626 - DNA, 25 bp, Homo sapien
ggctctcgtccatcacctaaggtga

SEQ ID NO: 2232627 - DNA, 25 bp, Homo sapien
actagttctattccttcctgcttgc

SEQ ID NO: 2232628 - DNA, 25 bp, Homo sapien
tgctcaatacatgtcactagttcta

SEQ ID NO: 2232629 - DNA, 25 bp, Homo sapien
tgtcactagttctattccttcctgc

SEQ ID NO: 2232630 - DNA, 25 bp, Homo sapien
gaatgggtcctgctcaatacatgtc

SEQ ID NO: 2232631 - DNA, 25 bp, Homo sapien
ttccgtaatttcctcgtgaagccat

SEQ ID NO: 2232632 - DNA, 25 bp, Homo sapien
ttacatttccgtaatttcctcgtga

SEQ ID NO: 2232633 - DNA, 25 bp, Homo sapien
tttccgtaatttcctcgtgaagcca

SEQ ID NO: 2232634 - DNA, 25 bp, Homo sapien
catttccgtaatttcctcgtgaagc

SEQ ID NO: 2232635 - DNA, 25 bp, Homo sapien
ctgtcctttgtgaaaaacaatgagg

SEQ ID NO: 2232636 - DNA, 25 bp, Homo sapien
aaacaatgaggaacgttatttctgt

SEQ ID NO: 2232637 - DNA, 25 bp, Homo sapien
aatgaggaacgttatttctgtatct

SEQ ID NO: 2232638 - DNA, 25 bp, Homo sapien
caatgaggaacgttatttctgtatc

SEQ ID NO: 2232639 - DNA, 25 bp, Homo sapien
tgcctttcgttctccttccaattgg

SEQ ID NO: 2232640 - DNA, 25 bp, Homo sapien
cagaagggtcctggcgtacttccct

SEQ ID NO: 2232641 - DNA, 25 bp, Homo sapien
tcctggcgtacttccctctaacagt

SEQ ID NO: 2232642 - DNA, 25 bp, Homo sapien
aacagtgtgcctttcgttctccttc

SEQ ID NO: 2232643 - DNA, 25 bp, Homo sapien
cagcatgacatactctgggctttta

SEQ ID NO: 2232644 - DNA, 25 bp, Homo sapien
tgtatcaacacggtagtttctgtag

SEQ ID NO: 2232645 - DNA, 25 bp, Homo sapien
tcaaggatgatgctcagcatgacat

SEQ ID NO: 2232646 - DNA, 25 bp, Homo sapien
ctttgtatgtatcaacacggtagtt

SEQ ID NO: 2232647 - DNA, 25 bp, Homo sapien
tgatccccacgctatcatgtgattt

SEQ ID NO: 2232648 - DNA, 25 bp, Homo sapien
atgatccccacgctatcatgtgatt

SEQ ID NO: 2232649 - DNA, 25 bp, Homo sapien
caatgatccccacgctatcatgtga

SEQ ID NO: 2232650 - DNA, 25 bp, Homo sapien
gatccccacgctatcatgtgatttc

SEQ ID NO: 2232651 - DNA, 25 bp, Homo sapien
cttggtttctatctgcttgcttcat

SEQ ID NO: 2232652 - DNA, 25 bp, Homo sapien
ttctatgccttcttggtttctatct

SEQ ID NO: 2232653 - DNA, 25 bp, Homo sapien
cttctatgccttcttggtttctatc

SEQ ID NO: 2232654 - DNA, 25 bp, Homo sapien
cttcttggtttctatctgcttgctt

SEQ ID NO: 2232655 - DNA, 25 bp, Homo sapien
gaactatctgggcttgcactgtact

SEQ ID NO: 2232656 - DNA, 25 bp, Homo sapien
gaacaattggctatgaacaggtggg

SEQ ID NO: 2232657 - DNA, 25 bp, Homo sapien
aatagaggcagaactcttttgggcc

SEQ ID NO: 2232658 - DNA, 25 bp, Homo sapien
tattgaatagcacctgtccagagtg

SEQ ID NO: 2232659 - DNA, 25 bp, Homo sapien
ttggatttgttgagtccagtgcaaa

SEQ ID NO: 2232660 - DNA, 25 bp, Homo sapien
tttgttgagtccagtgcaaactgaa

SEQ ID NO: 2232661 - DNA, 25 bp, Homo sapien
ggatttgttgagtccagtgcaaact

SEQ ID NO: 2232662 - DNA, 25 bp, Homo sapien
gatttgttgagtccagtgcaaactg

SEQ ID NO: 2232663 - DNA, 25 bp, Homo sapien
caggctctaggcctatgtcaattgg

SEQ ID NO: 2232664 - DNA, 25 bp, Homo sapien
ggctctaggcctatgtcaattggat

SEQ ID NO: 2232665 - DNA, 25 bp, Homo sapien
tctaggcctatgtcaattggattga

SEQ ID NO: 2232666 - DNA, 25 bp, Homo sapien
ttcaggctctaggcctatgtcaatt

SEQ ID NO: 2232667 - DNA, 25 bp, Homo sapien
tgatctttctcgtttggaccttcga

SEQ ID NO: 2232668 - DNA, 25 bp, Homo sapien
tcaaaatggccaatttaagccgctg

SEQ ID NO: 2232669 - DNA, 25 bp, Homo sapien
ggaccttcgatacattaacttcaaa

SEQ ID NO: 2232670 - DNA, 25 bp, Homo sapien
taagccgctgtaatcttgcacaggc

SEQ ID NO: 2232671 - DNA, 25 bp, Homo sapien
tagctgtgtccaaatgggttctgaa

SEQ ID NO: 2232672 - DNA, 25 bp, Homo sapien
caagagcagggatattagctgtgtc

SEQ ID NO: 2232673 - DNA, 25 bp, Homo sapien
tacatatgcatagtgggaggagatc

SEQ ID NO: 2232674 - DNA, 25 bp, Homo sapien
gaggagatcagacctttacaagtga

SEQ ID NO: 2232675 - DNA, 25 bp, Homo sapien
tcaatgaataattgtgacaaatacc

SEQ ID NO: 2232676 - DNA, 25 bp, Homo sapien
agaggctgtcacaacccagaccgct

SEQ ID NO: 2232677 - DNA, 25 bp, Homo sapien
cttgctgagaagaggctgtcacaac

SEQ ID NO: 2232678 - DNA, 25 bp, Homo sapien
aacccagaccgctcactgagaacag

SEQ ID NO: 2232679 - DNA, 25 bp, Homo sapien
ccagaccgctcactgagaacagcat

SEQ ID NO: 2232680 - DNA, 25 bp, Homo sapien
cagtctctggaaacagctggttgtg

SEQ ID NO: 2232681 - DNA, 25 bp, Homo sapien
ttttccccagccaaccatgttttca

SEQ ID NO: 2232682 - DNA, 25 bp, Homo sapien
caaccatgttttcaccaggtgcata

SEQ ID NO: 2232683 - DNA, 25 bp, Homo sapien
ccaggtgcatattgttttcttagac

SEQ ID NO: 2232684 - DNA, 25 bp, Homo sapien
atggcattggttttcacataacctg

SEQ ID NO: 2232685 - DNA, 25 bp, Homo sapien
tcacataacctggagggctggctga

SEQ ID NO: 2232686 - DNA, 25 bp, Homo sapien
ctagatggcattggttttcacataa

SEQ ID NO: 2232687 - DNA, 25 bp, Homo sapien
agatggcattggttttcacataacc

SEQ ID NO: 2232688 - DNA, 25 bp, Homo sapien
cacttccactgacaacacggttggg

SEQ ID NO: 2232689 - DNA, 25 bp, Homo sapien
cttccactgacaacacggttgggca

SEQ ID NO: 2232690 - DNA, 25 bp, Homo sapien
ttccactgacaacacggttgggcat

SEQ ID NO: 2232691 - DNA, 25 bp, Homo sapien
tgtctttaacagagtgtttggtggc

SEQ ID NO: 2232692 - DNA, 25 bp, Homo sapien
ctttaacagagtgtttggtggctcc

SEQ ID NO: 2232693 - DNA, 25 bp, Homo sapien
tctgtctttaacagagtgtttggtg

SEQ ID NO: 2232694 - DNA, 25 bp, Homo sapien
tgttctgtctttaacagagtgtttg

SEQ ID NO: 2232695 - DNA, 25 bp, Homo sapien
accttgtgggtattcagaacgcttt

SEQ ID NO: 2232696 - DNA, 25 bp, Homo sapien
gctctacaagcacatccccatactg

SEQ ID NO: 2232697 - DNA, 25 bp, Homo sapien
tcagaacgctttgcccagtcatttt

SEQ ID NO: 2232698 - DNA, 25 bp, Homo sapien
tcagcagtatatagtgttctcatgc

SEQ ID NO: 2232699 - DNA, 25 bp, Homo sapien
caacttctttattgcgagtaaattg

SEQ ID NO: 2232700 - DNA, 25 bp, Homo sapien
tgcgagtaaattgttcaggtaaaac

SEQ ID NO: 2232701 - DNA, 25 bp, Homo sapien
caatgaacaggacccgtattgctgt

SEQ ID NO: 2232702 - DNA, 25 bp, Homo sapien
aacactgtagcacaaattgctttca

SEQ ID NO: 2232703 - DNA, 25 bp, Homo sapien
gctgaattttataggatatgaaccc

SEQ ID NO: 2232704 - DNA, 25 bp, Homo sapien
gacagtacttgttttaccacaccac

SEQ ID NO: 2232705 - DNA, 25 bp, Homo sapien
ccactagaagggcatgacagtactt

SEQ ID NO: 2232706 - DNA, 25 bp, Homo sapien
taatgtttaactgccttagtggcca

SEQ ID NO: 2232707 - DNA, 25 bp, Homo sapien
ttgctgcatgtagaagtttgtcttc

SEQ ID NO: 2232708 - DNA, 25 bp, Homo sapien
cagagttgctgcatgtagaagtttg

SEQ ID NO: 2232709 - DNA, 25 bp, Homo sapien
atgtgaataataaatgcagagttgc

SEQ ID NO: 2232710 - DNA, 25 bp, Homo sapien
tatgtgaataataaatgcagagttg

SEQ ID NO: 2232711 - DNA, 25 bp, Homo sapien
ttctttactgcaaagtagatttggc

SEQ ID NO: 2232712 - DNA, 25 bp, Homo sapien
ttcttctttactgcaaagtagattt

SEQ ID NO: 2232713 - DNA, 25 bp, Homo sapien
atttggcaatcctgagctagatcca

SEQ ID NO: 2232714 - DNA, 25 bp, Homo sapien
ctttactgcaaagtagatttggcaa

SEQ ID NO: 2232715 - DNA, 25 bp, Homo sapien
tgtaccaattttattatatgtgcta

SEQ ID NO: 2232716 - DNA, 25 bp, Homo sapien
ttttattatatgtgctatcaaagtg

SEQ ID NO: 2232717 - DNA, 25 bp, Homo sapien
taccaattttattatatgtgctatc

SEQ ID NO: 2232718 - DNA, 25 bp, Homo sapien
tattatatgtgctatcaaagtgagc

SEQ ID NO: 2232719 - DNA, 25 bp, Homo sapien
tatgtcatggcagatcaagcacttc

SEQ ID NO: 2232720 - DNA, 25 bp, Homo sapien
gatactataatgacacttgaggctc

SEQ ID NO: 2232721 - DNA, 25 bp, Homo sapien
tggatgaaccaaatgtctaacagac

SEQ ID NO: 2232722 - DNA, 25 bp, Homo sapien
catatggtatgagggaaccaggcag

SEQ ID NO: 2232723 - DNA, 25 bp, Homo sapien
tcacagcgggacaattagttgctcc

SEQ ID NO: 2232724 - DNA, 25 bp, Homo sapien
catgtcggtgttttatagatgtact

SEQ ID NO: 2232725 - DNA, 25 bp, Homo sapien
aagtcctgttcaacacatgtcggtg

SEQ ID NO: 2232726 - DNA, 25 bp, Homo sapien
gggacaattagttgctcctttgaaa

SEQ ID NO: 2232727 - DNA, 25 bp, Homo sapien
acccattagaagggtcgtatgtcat

SEQ ID NO: 2232728 - DNA, 25 bp, Homo sapien
tgtacccattagaagggtcgtatgt

SEQ ID NO: 2232729 - DNA, 25 bp, Homo sapien
aatgtacccattagaagggtcgtat

SEQ ID NO: 2232730 - DNA, 25 bp, Homo sapien
tacccattagaagggtcgtatgtca

SEQ ID NO: 2232731 - DNA, 25 bp, Homo sapien
cctttcctcagggtagttcttgagg

SEQ ID NO: 2232732 - DNA, 25 bp, Homo sapien
ggaggtaaaaatgcatagaagaccc

SEQ ID NO: 2232733 - DNA, 25 bp, Homo sapien
ccctacgatattgaggagattatat

SEQ ID NO: 2232734 - DNA, 25 bp, Homo sapien
agcagttcctttcctcagggtagtt

SEQ ID NO: 2232735 - DNA, 25 bp, Homo sapien
tattgtaactcaccaaaatcatcag

SEQ ID NO: 2232736 - DNA, 25 bp, Homo sapien
tatattgtaactcaccaaaatcatc

SEQ ID NO: 2232737 - DNA, 25 bp, Homo sapien
cttatattgtaactcaccaaaatca

SEQ ID NO: 2232738 - DNA, 25 bp, Homo sapien
tgtaactcaccaaaatcatcagggt

SEQ ID NO: 2232739 - DNA, 25 bp, Homo sapien
gtgaatctgacgactatgtttcttg

SEQ ID NO: 2232740 - DNA, 25 bp, Homo sapien
gacgactatgtttcttggggttgat

SEQ ID NO: 2232741 - DNA, 25 bp, Homo sapien
cttggtgaatctgacgactatgttt

SEQ ID NO: 2232742 - DNA, 25 bp, Homo sapien
atctgacgactatgtttcttggggt

SEQ ID NO: 2232743 - DNA, 25 bp, Homo sapien
tctccaatgtcttccagcttgtttc

SEQ ID NO: 2232744 - DNA, 25 bp, Homo sapien
cttgtttccaaggcttcgttccctg

SEQ ID NO: 2232745 - DNA, 25 bp, Homo sapien
tgttttggttaaagtctctccaatg

SEQ ID NO: 2232746 - DNA, 25 bp, Homo sapien
ttcgttccctggcaggtttccagct

SEQ ID NO: 2232747 - DNA, 25 bp, Homo sapien
ccatgagaaggtagagaagtactta

SEQ ID NO: 2232748 - DNA, 25 bp, Homo sapien
ctggaagccatgagaaggtagagaa

SEQ ID NO: 2232749 - DNA, 25 bp, Homo sapien
aagccatgagaaggtagagaagtac

SEQ ID NO: 2232750 - DNA, 25 bp, Homo sapien
ctactcagactcctggaagccatga

SEQ ID NO: 2232751 - DNA, 25 bp, Homo sapien
cctgttttattgcttctactgggag

SEQ ID NO: 2232752 - DNA, 25 bp, Homo sapien
atctctgaggcaagggtgtttttcc

SEQ ID NO: 2232753 - DNA, 25 bp, Homo sapien
gcccatctctgaggcaagggtgttt

SEQ ID NO: 2232754 - DNA, 25 bp, Homo sapien
cttcactctcttcttgtgggcaggg

SEQ ID NO: 2232755 - DNA, 25 bp, Homo sapien
tttcttcctgtaaagttcagtgcca

SEQ ID NO: 2232756 - DNA, 25 bp, Homo sapien
ttcttcctgtaaagttcagtgccat

SEQ ID NO: 2232757 - DNA, 25 bp, Homo sapien
cagtttcttcctgtaaagttcagtg

SEQ ID NO: 2232758 - DNA, 25 bp, Homo sapien
gtttcttcctgtaaagttcagtgcc

SEQ ID NO: 2232759 - DNA, 25 bp, Homo sapien
aatttgtacaccaaaaggccatggg

SEQ ID NO: 2232760 - DNA, 25 bp, Homo sapien
gagattgtaaatgataaaccgagct

SEQ ID NO: 2232761 - DNA, 25 bp, Homo sapien
gaatctttacatcctttgccagctg

SEQ ID NO: 2232762 - DNA, 25 bp, Homo sapien
tttgtgcaagtacctcatcgctgag

SEQ ID NO: 2232763 - DNA, 25 bp, Homo sapien
aagttctggcaggttatgagcagca

SEQ ID NO: 2232764 - DNA, 25 bp, Homo sapien
ccagcccgtcacagaagtgtggagg

SEQ ID NO: 2232765 - DNA, 25 bp, Homo sapien
tccctagcccttgtgatttgaagca

SEQ ID NO: 2232766 - DNA, 25 bp, Homo sapien
tgagcagcactagggataaagtatg

SEQ ID NO: 2232767 - DNA, 25 bp, Homo sapien
gtgtcttgtttggtgcttaacatac

SEQ ID NO: 2232768 - DNA, 25 bp, Homo sapien
ttttgccacctcgtatttcaaagtg

SEQ ID NO: 2232769 - DNA, 25 bp, Homo sapien
ccacctcgtatttcaaagtgtcttg

SEQ ID NO: 2232770 - DNA, 25 bp, Homo sapien
tatttcaaagtgtcttgtttggtgc

SEQ ID NO: 2232771 - DNA, 25 bp, Homo sapien
cctattattggtaatttcaaaagat

SEQ ID NO: 2232772 - DNA, 25 bp, Homo sapien
ccccagtagtttgtagtagaggtct

SEQ ID NO: 2232773 - DNA, 25 bp, Homo sapien
ttgtctggttgaggtcccaaacagt

SEQ ID NO: 2232774 - DNA, 25 bp, Homo sapien
gaaggcaggattgaaagttcaggat

SEQ ID NO: 2232775 - DNA, 25 bp, Homo sapien
gcttccttgttgcaggttgcaggtg

SEQ ID NO: 2232776 - DNA, 25 bp, Homo sapien
tgctatgcccaacagtgctagtcca

SEQ ID NO: 2232777 - DNA, 25 bp, Homo sapien
gctatgcccaacagtgctagtccag

SEQ ID NO: 2232778 - DNA, 25 bp, Homo sapien
gtgctatgcccaacagtgctagtcc

SEQ ID NO: 2232779 - DNA, 25 bp, Homo sapien
tatgcccaacagtgctagtccagcc

SEQ ID NO: 2232780 - DNA, 25 bp, Homo sapien
tgattttggagtatgcgccatgtgg

SEQ ID NO: 2232781 - DNA, 25 bp, Homo sapien
tgaattcttgaccattacgtaatgc

SEQ ID NO: 2232782 - DNA, 25 bp, Homo sapien
ggaaagttaggtgttctcattgaaa

SEQ ID NO: 2232783 - DNA, 25 bp, Homo sapien
tgtctgatactctcaatggtggtgt

SEQ ID NO: 2232784 - DNA, 25 bp, Homo sapien
tgccagggcggttggggagactctc

SEQ ID NO: 2232785 - DNA, 25 bp, Homo sapien
agatacattctgaagacagcctgcc

SEQ ID NO: 2232786 - DNA, 25 bp, Homo sapien
tctctctgtgggaaactttcttgtc

SEQ ID NO: 2232787 - DNA, 25 bp, Homo sapien
ggagactctctgattagatcctgat

SEQ ID NO: 2232788 - DNA, 25 bp, Homo sapien
tcagggctagaatttcagatactac

SEQ ID NO: 2232789 - DNA, 25 bp, Homo sapien
tattcagtgaaattagagccaaaaa

SEQ ID NO: 2232790 - DNA, 25 bp, Homo sapien
gatactacatcattaccactcactg

SEQ ID NO: 2232791 - DNA, 25 bp, Homo sapien
gatacaaaagtaccaatattcagtg

SEQ ID NO: 2232792 - DNA, 25 bp, Homo sapien
gaactcagagaatcctactaatggg

SEQ ID NO: 2232793 - DNA, 25 bp, Homo sapien
cagtgtcagatctggcaagaactca

SEQ ID NO: 2232794 - DNA, 25 bp, Homo sapien
cattgatcttattggagtactggga

SEQ ID NO: 2232795 - DNA, 25 bp, Homo sapien
tactgggatacgaagacctgacctg

SEQ ID NO: 2232796 - DNA, 25 bp, Homo sapien
gaattactcattgacattctgaatg

SEQ ID NO: 2232797 - DNA, 25 bp, Homo sapien
aaagttcagccagggttcaatcttc

SEQ ID NO: 2232798 - DNA, 25 bp, Homo sapien
aatgctctgccataggattggcctc

SEQ ID NO: 2232799 - DNA, 25 bp, Homo sapien
ttcaatcttcatcccatcataaggg

SEQ ID NO: 2232800 - DNA, 25 bp, Homo sapien
cacacgtgcaattagccaatggcct

SEQ ID NO: 2232801 - DNA, 25 bp, Homo sapien
tatttcccattgcaatacacacgtg

SEQ ID NO: 2232802 - DNA, 25 bp, Homo sapien
ttgcaatacacacgtgcaattagcc

SEQ ID NO: 2232803 - DNA, 25 bp, Homo sapien
aatacacacgtgcaattagccaatg

SEQ ID NO: 2232804 - DNA, 25 bp, Homo sapien
gttttcaggctgatccgaaagttca

SEQ ID NO: 2232805 - DNA, 25 bp, Homo sapien
ctacgcttccgttgggttcacaact

SEQ ID NO: 2232806 - DNA, 25 bp, Homo sapien
tctatcaatttggataatagggtgt

SEQ ID NO: 2232807 - DNA, 25 bp, Homo sapien
gaaagagaatactccttgtgcttct

SEQ ID NO: 2232808 - DNA, 25 bp, Homo sapien
tggggagaacaaatcctgcgggtct

SEQ ID NO: 2232809 - DNA, 25 bp, Homo sapien
gtggggagaacaaatcctgcgggtc

SEQ ID NO: 2232810 - DNA, 25 bp, Homo sapien
tgaagaaacaggaacagtctttggg

SEQ ID NO: 2232811 - DNA, 25 bp, Homo sapien
ctgaagaaacaggaacagtctttgg

SEQ ID NO: 2232812 - DNA, 25 bp, Homo sapien
gaagaaacaggaacagtctttggga

SEQ ID NO: 2232813 - DNA, 25 bp, Homo sapien
agaaacaggaacagtctttgggaag

SEQ ID NO: 2232814 - DNA, 25 bp, Homo sapien
cattctctggcgattctacggctag

SEQ ID NO: 2232815 - DNA, 25 bp, Homo sapien
gaagtttcctctgctaaatgtagtc

SEQ ID NO: 2232816 - DNA, 25 bp, Homo sapien
attcactatggcctgctgccgccag

SEQ ID NO: 2232817 - DNA, 25 bp, Homo sapien
tacggctagccattgggaaacacct

SEQ ID NO: 2232818 - DNA, 25 bp, Homo sapien
ggcatcagattgctaattggtaaaa

SEQ ID NO: 2232819 - DNA, 25 bp, Homo sapien
actctggagtgattctagcttagga

SEQ ID NO: 2232820 - DNA, 25 bp, Homo sapien
gttcatacatttaagaactctagtt

SEQ ID NO: 2232821 - DNA, 25 bp, Homo sapien
gtcacaccgcctctctaggcatcag

SEQ ID NO: 2232822 - DNA, 25 bp, Homo sapien
ctttggaacaaacaagtcaacccat

SEQ ID NO: 2232823 - DNA, 25 bp, Homo sapien
tgtggctccaaggtcatatgtggca

SEQ ID NO: 2232824 - DNA, 25 bp, Homo sapien
gtttcagaccattgtcctctgtgag

SEQ ID NO: 2232825 - DNA, 25 bp, Homo sapien
tgctgaatgcccatcttcaaaagtg

SEQ ID NO: 2232826 - DNA, 25 bp, Homo sapien
gaagggaacacatggcaatcaccat

SEQ ID NO: 2232827 - DNA, 25 bp, Homo sapien
ggaagggaacacatggcaatcacca

SEQ ID NO: 2232828 - DNA, 25 bp, Homo sapien
gaactgtcttctgtcttggatggat

SEQ ID NO: 2232829 - DNA, 25 bp, Homo sapien
gcagttcaattccatatccactagg

SEQ ID NO: 2232830 - DNA, 25 bp, Homo sapien
cccttctgtagtaagcggttccact

SEQ ID NO: 2232831 - DNA, 25 bp, Homo sapien
gagtgccagagcattcttgctgtag

SEQ ID NO: 2232832 - DNA, 25 bp, Homo sapien
ctagactgaaaattgacatctgaaa

SEQ ID NO: 2232833 - DNA, 25 bp, Homo sapien
actgaaaattgacatctgaaagtct

SEQ ID NO: 2232834 - DNA, 25 bp, Homo sapien
tagactgaaaattgacatctgaaag

SEQ ID NO: 2232835 - DNA, 25 bp, Homo sapien
gaaaattgacatctgaaagtcttac

SEQ ID NO: 2232836 - DNA, 25 bp, Homo sapien
tccacagtgaacctccggtacagat

SEQ ID NO: 2232837 - DNA, 25 bp, Homo sapien
catgactgttaatctcctgcttggc

SEQ ID NO: 2232838 - DNA, 25 bp, Homo sapien
cattggagtgtctgtgaggttgaac

SEQ ID NO: 2232839 - DNA, 25 bp, Homo sapien
tcagtgaacagatcagatgctggaa

SEQ ID NO: 2232840 - DNA, 25 bp, Homo sapien
gatgcacagtggattgtagcatgaa

SEQ ID NO: 2232841 - DNA, 25 bp, Homo sapien
cacagtggattgtagcatgaagccc

SEQ ID NO: 2232842 - DNA, 25 bp, Homo sapien
ggattgtagcatgaagcccaagtac

SEQ ID NO: 2232843 - DNA, 25 bp, Homo sapien
ggtgatgcacagtggattgtagcat

SEQ ID NO: 2232844 - DNA, 25 bp, Homo sapien
tgagccagagacacataataaccac

SEQ ID NO: 2232845 - DNA, 25 bp, Homo sapien
tgttatagcaacattatgaaaacgc

SEQ ID NO: 2232846 - DNA, 25 bp, Homo sapien
gagacaaccactgagggagcttagt

SEQ ID NO: 2232847 - DNA, 25 bp, Homo sapien
cacggaaataatgccatggactgtc

SEQ ID NO: 2232848 - DNA, 25 bp, Homo sapien
tataaccaccaactatataaccacc

SEQ ID NO: 2232849 - DNA, 25 bp, Homo sapien
tctgtagggcttggagcaatggacc

SEQ ID NO: 2232850 - DNA, 25 bp, Homo sapien
catccctgggcaaggctaaagtata

SEQ ID NO: 2232851 - DNA, 25 bp, Homo sapien
tgccccttggtttggaaatggcctc

SEQ ID NO: 2232852 - DNA, 25 bp, Homo sapien
gagcttggaagaaagctgcgcccag

SEQ ID NO: 2232853 - DNA, 25 bp, Homo sapien
ataacgggaaaggagtgtcgttctg

SEQ ID NO: 2232854 - DNA, 25 bp, Homo sapien
ggtaatggctgtcgtaaatgctagt

SEQ ID NO: 2232855 - DNA, 25 bp, Homo sapien
gaaaagaagagagtgctgcttagga

SEQ ID NO: 2232856 - DNA, 25 bp, Homo sapien
ctttttctatacttgggttgatcat

SEQ ID NO: 2232857 - DNA, 25 bp, Homo sapien
caaacatcacggtgttcaattttgc

SEQ ID NO: 2232858 - DNA, 25 bp, Homo sapien
tggtatgcaggtcaaggtccttttc

SEQ ID NO: 2232859 - DNA, 25 bp, Homo sapien
tactgtttatcctcaaacatcacgg

SEQ ID NO: 2232860 - DNA, 25 bp, Homo sapien
tggatgtctctttgttcagaagtct

SEQ ID NO: 2232861 - DNA, 25 bp, Homo sapien
taggcaagaagcacagcacgtggtt

SEQ ID NO: 2232862 - DNA, 25 bp, Homo sapien
aataggcaagaagcacagcacgtgg

SEQ ID NO: 2232863 - DNA, 25 bp, Homo sapien
agcacgtggttgagtcttttggatt

SEQ ID NO: 2232864 - DNA, 25 bp, Homo sapien
gcaagaagcacagcacgtggttgag

SEQ ID NO: 2232865 - DNA, 25 bp, Homo sapien
tgataaggccacttggaaacaggag

SEQ ID NO: 2232866 - DNA, 25 bp, Homo sapien
cagctccctattgggtctggtccct

SEQ ID NO: 2232867 - DNA, 25 bp, Homo sapien
tagagtgtgcatcaatgccattgcc

SEQ ID NO: 2232868 - DNA, 25 bp, Homo sapien
gacttgcgggcattatcggctttga

SEQ ID NO: 2232869 - DNA, 25 bp, Homo sapien
tgtctactattattgcagctccact

SEQ ID NO: 2232870 - DNA, 25 bp, Homo sapien
ttgtctactattattgcagctccac

SEQ ID NO: 2232871 - DNA, 25 bp, Homo sapien
tctactattattgcagctccacttg

SEQ ID NO: 2232872 - DNA, 25 bp, Homo sapien
ctactattattgcagctccacttgt

SEQ ID NO: 2232873 - DNA, 25 bp, Homo sapien
atgatggtgacctgatctctgctca

SEQ ID NO: 2232874 - DNA, 25 bp, Homo sapien
tgatgatggtgacctgatctctgct

SEQ ID NO: 2232875 - DNA, 25 bp, Homo sapien
catgatgatggtgacctgatctctg

SEQ ID NO: 2232876 - DNA, 25 bp, Homo sapien
gcatgatgatggtgacctgatctct

SEQ ID NO: 2232877 - DNA, 25 bp, Homo sapien
gctttattcccatcagaaatccatg

SEQ ID NO: 2232878 - DNA, 25 bp, Homo sapien
tcagaaatccatgctcctttttcta

SEQ ID NO: 2232879 - DNA, 25 bp, Homo sapien
gacctcattgttattcggaatccag

SEQ ID NO: 2232880 - DNA, 25 bp, Homo sapien
gcatgtgcatccagtctaaagccat

SEQ ID NO: 2232881 - DNA, 25 bp, Homo sapien
tgttattcggaatccagttcctggt

SEQ ID NO: 2232882 - DNA, 25 bp, Homo sapien
tgacccccgagcagtaccgcatgtg

SEQ ID NO: 2232883 - DNA, 25 bp, Homo sapien
gacagtgcacttaactttcagaagc

SEQ ID NO: 2232884 - DNA, 25 bp, Homo sapien
gagtgcgtagattctcatgacccca

SEQ ID NO: 2232885 - DNA, 25 bp, Homo sapien
caggttctgagtgagtgcgtagatt

SEQ ID NO: 2232886 - DNA, 25 bp, Homo sapien
catgaccccaaacactgaacttttg

SEQ ID NO: 2232887 - DNA, 25 bp, Homo sapien
ccttaatacgtgagtatgttcttgt

SEQ ID NO: 2232888 - DNA, 25 bp, Homo sapien
gtgagtgtaagtgcatgtgagaata

SEQ ID NO: 2232889 - DNA, 25 bp, Homo sapien
tgtgtgtgagtttaaatgcgagcat

SEQ ID NO: 2232890 - DNA, 25 bp, Homo sapien
tcactgctgcgagctccttaatacg

SEQ ID NO: 2232891 - DNA, 25 bp, Homo sapien
tgtcctagtcagaagctgccatgag

SEQ ID NO: 2232892 - DNA, 25 bp, Homo sapien
gctcagtccaaggatttaggtctcg

SEQ ID NO: 2232893 - DNA, 25 bp, Homo sapien
tagccacttccctcagagttctggg

SEQ ID NO: 2232894 - DNA, 25 bp, Homo sapien
tgagtaaggcctagcattcttcctg

SEQ ID NO: 2232895 - DNA, 25 bp, Homo sapien
cggaagaggaactagaataaagcct

SEQ ID NO: 2232896 - DNA, 25 bp, Homo sapien
ctgcggaagaggaactagaataaag

SEQ ID NO: 2232897 - DNA, 25 bp, Homo sapien
gcggaagaggaactagaataaagcc

SEQ ID NO: 2232898 - DNA, 25 bp, Homo sapien
tgcggaagaggaactagaataaagc

SEQ ID NO: 2232899 - DNA, 25 bp, Homo sapien
tttaggcttggtgccctcacaaggg

SEQ ID NO: 2232900 - DNA, 25 bp, Homo sapien
tgaagcctgcatacccattgcctct

SEQ ID NO: 2232901 - DNA, 25 bp, Homo sapien
ccatagagtgtaatagatggagcag

SEQ ID NO: 2232902 - DNA, 25 bp, Homo sapien
caacagggggtgcatatttaggctt

SEQ ID NO: 2232903 - DNA, 25 bp, Homo sapien
ggcagaaattgcagggatagagcta

SEQ ID NO: 2232904 - DNA, 25 bp, Homo sapien
cccgggagtgttcagctgcatgtct

SEQ ID NO: 2232905 - DNA, 25 bp, Homo sapien
ttgtatatacaagcaaagaagtggc

SEQ ID NO: 2232906 - DNA, 25 bp, Homo sapien
ggatagagctaaaggcctggagatt

SEQ ID NO: 2232907 - DNA, 25 bp, Homo sapien
gaaccacagccttatttgcacactt

SEQ ID NO: 2232908 - DNA, 25 bp, Homo sapien
atcagcatcctgtccaaaacctgtt

SEQ ID NO: 2232909 - DNA, 25 bp, Homo sapien
agatgggcattgtgtcccatcagca

SEQ ID NO: 2232910 - DNA, 25 bp, Homo sapien
gtctcagatgggcattgtgtcccat

SEQ ID NO: 2232911 - DNA, 25 bp, Homo sapien
ttactctcattaatcatgtgcttcc

SEQ ID NO: 2232912 - DNA, 25 bp, Homo sapien
tgaagccatttcagattcttgaggc

SEQ ID NO: 2232913 - DNA, 25 bp, Homo sapien
actctcattaatcatgtgcttccag

SEQ ID NO: 2232914 - DNA, 25 bp, Homo sapien
tactctcattaatcatgtgcttcca

SEQ ID NO: 2232915 - DNA, 25 bp, Homo sapien
ctctggtaacctgattggctcccct

SEQ ID NO: 2232916 - DNA, 25 bp, Homo sapien
tctcttggaacaacatatgccccag

SEQ ID NO: 2232917 - DNA, 25 bp, Homo sapien
tgaatctgcgttccgaaagactgga

SEQ ID NO: 2232918 - DNA, 25 bp, Homo sapien
cttgactgccgtggttgaatctgcg

SEQ ID NO: 2232919 - DNA, 25 bp, Homo sapien
tttggccccaagaggtgtactcctc

SEQ ID NO: 2232920 - DNA, 25 bp, Homo sapien
ggccccaagaggtgtactcctccat

SEQ ID NO: 2232921 - DNA, 25 bp, Homo sapien
gatggggcgaagaaagatcactaat

SEQ ID NO: 2232922 - DNA, 25 bp, Homo sapien
ctggatggggcgaagaaagatcact

SEQ ID NO: 2232923 - DNA, 25 bp, Homo sapien
cagaacagaaattggactccaggag

SEQ ID NO: 2232924 - DNA, 25 bp, Homo sapien
aacagaaattggactccaggagccc

SEQ ID NO: 2232925 - DNA, 25 bp, Homo sapien
ttggactccaggagcccaagagttg

SEQ ID NO: 2232926 - DNA, 25 bp, Homo sapien
aattggactccaggagcccaagagt

SEQ ID NO: 2232927 - DNA, 25 bp, Homo sapien
tctaagcttggctggcatagaattc

SEQ ID NO: 2232928 - DNA, 25 bp, Homo sapien
gctatctaagcttggctggcataga

SEQ ID NO: 2232929 - DNA, 25 bp, Homo sapien
ttgggctatctaagcttggctggca

SEQ ID NO: 2232930 - DNA, 25 bp, Homo sapien
ttattgggctatctaagcttggctg

SEQ ID NO: 2232931 - DNA, 25 bp, Homo sapien
tcagtttgtcctccaggtcttcctt

SEQ ID NO: 2232932 - DNA, 25 bp, Homo sapien
aatctttttcagtttgtcctccagg

SEQ ID NO: 2232933 - DNA, 25 bp, Homo sapien
ttttcagtttgtcctccaggtcttc

SEQ ID NO: 2232934 - DNA, 25 bp, Homo sapien
agtttgtcctccaggtcttccttca

SEQ ID NO: 2232935 - DNA, 25 bp, Homo sapien
gaatgaaagttcatgcttcttctgt

SEQ ID NO: 2232936 - DNA, 25 bp, Homo sapien
taaagagcatgatcttggaagactt

SEQ ID NO: 2232937 - DNA, 25 bp, Homo sapien
gggttttgctaaagagcatgatctt

SEQ ID NO: 2232938 - DNA, 25 bp, Homo sapien
tgaatgaaagttcatgcttcttctg

SEQ ID NO: 2232939 - DNA, 25 bp, Homo sapien
ctcctccagttcatcctgatggaca

SEQ ID NO: 2232940 - DNA, 25 bp, Homo sapien
tagcctcctccagttcatcctgatg

SEQ ID NO: 2232941 - DNA, 25 bp, Homo sapien
gcctcctccagttcatcctgatgga

SEQ ID NO: 2232942 - DNA, 25 bp, Homo sapien
atagcctcctccagttcatcctgat

SEQ ID NO: 2232943 - DNA, 25 bp, Homo sapien
tgggccacaaaatgcagtcctataa

SEQ ID NO: 2232944 - DNA, 25 bp, Homo sapien
ctataaacctgacatctacagaact

SEQ ID NO: 2232945 - DNA, 25 bp, Homo sapien
gactgggaactcagggacatataag

SEQ ID NO: 2232946 - DNA, 25 bp, Homo sapien
tataaggccaatatagattctctct

SEQ ID NO: 2232947 - DNA, 25 bp, Homo sapien
tagctaatactcaagactatacatg

SEQ ID NO: 2232948 - DNA, 25 bp, Homo sapien
aatactcaagactatacatgaatac

SEQ ID NO: 2232949 - DNA, 25 bp, Homo sapien
gctaatactcaagactatacatgaa

SEQ ID NO: 2232950 - DNA, 25 bp, Homo sapien
ttagctaatactcaagactatacat

SEQ ID NO: 2232951 - DNA, 25 bp, Homo sapien
tatattcagccgcttctttagagaa

SEQ ID NO: 2232952 - DNA, 25 bp, Homo sapien
tatcccatactctatgctcagcaga

SEQ ID NO: 2232953 - DNA, 25 bp, Homo sapien
tgtgctctgctgagtccagatcctt

SEQ ID NO: 2232954 - DNA, 25 bp, Homo sapien
cagtttatcctcagtagccgtatcc

SEQ ID NO: 2232955 - DNA, 25 bp, Homo sapien
ctgagaatgttcctactggtaagta

SEQ ID NO: 2232956 - DNA, 25 bp, Homo sapien
tttccaacagatctcacaccctgtg

SEQ ID NO: 2232957 - DNA, 25 bp, Homo sapien
ctttccaacagatctcacaccctgt

SEQ ID NO: 2232958 - DNA, 25 bp, Homo sapien
gcattgacccgctgctgaaccaagg

SEQ ID NO: 2232959 - DNA, 25 bp, Homo sapien
gaagtttcctgacagcattgacccg

SEQ ID NO: 2232960 - DNA, 25 bp, Homo sapien
ggtagggtctgagcaactaagccag

SEQ ID NO: 2232961 - DNA, 25 bp, Homo sapien
gcttctacttgtgcatatgctgcct

SEQ ID NO: 2232962 - DNA, 25 bp, Homo sapien
tcctgctcccgggtgcgctcactcc

SEQ ID NO: 2232963 - DNA, 25 bp, Homo sapien
ttctgccaggtacacgccctgccag

SEQ ID NO: 2232964 - DNA, 25 bp, Homo sapien
caggaatgcagcgacctctgcaggt

SEQ ID NO: 2232965 - DNA, 25 bp, Homo sapien
tcccactcccctggcgcaagtgtct

SEQ ID NO: 2232966 - DNA, 25 bp, Homo sapien
tggaaatcctcaggggctacctctg

SEQ ID NO: 2232967 - DNA, 25 bp, Homo sapien
caaaacagcttctattgcctcctgg

SEQ ID NO: 2232968 - DNA, 25 bp, Homo sapien
ggggctacctctgcctcggcttcag

SEQ ID NO: 2232969 - DNA, 25 bp, Homo sapien
caaggcactcccgatgaatccaggg

SEQ ID NO: 2232970 - DNA, 25 bp, Homo sapien
tataaatggactaaattctgcaatt

SEQ ID NO: 2232971 - DNA, 25 bp, Homo sapien
taaatataaatggactaaattctgc

SEQ ID NO: 2232972 - DNA, 25 bp, Homo sapien
ttaaatataaatggactaaattctg

SEQ ID NO: 2232973 - DNA, 25 bp, Homo sapien
aatataaatggactaaattctgcaa

SEQ ID NO: 2232974 - DNA, 25 bp, Homo sapien
tgggtctccttaagcttgaacactg

SEQ ID NO: 2232975 - DNA, 25 bp, Homo sapien
gatgcatggcgaatgacatccccat

SEQ ID NO: 2232976 - DNA, 25 bp, Homo sapien
catgggatgcatggcgaatgacatc

SEQ ID NO: 2232977 - DNA, 25 bp, Homo sapien
catccccatcagtgcactgttgggt

SEQ ID NO: 2232978 - DNA, 25 bp, Homo sapien
tctgctcattaatccctggataagc

SEQ ID NO: 2232979 - DNA, 25 bp, Homo sapien
cctggataagctgtttcatactgca

SEQ ID NO: 2232980 - DNA, 25 bp, Homo sapien
cattaatccctggataagctgtttc

SEQ ID NO: 2232981 - DNA, 25 bp, Homo sapien
taatccctggataagctgtttcata

SEQ ID NO: 2232982 - DNA, 25 bp, Homo sapien
ttccgaagaaggtagaatctttcca

SEQ ID NO: 2232983 - DNA, 25 bp, Homo sapien
tgtactgaggagctacgatttcttt

SEQ ID NO: 2232984 - DNA, 25 bp, Homo sapien
ccgaagaaggtagaatctttccaag

SEQ ID NO: 2232985 - DNA, 25 bp, Homo sapien
ctttccaagatgtactgaggagcta

SEQ ID NO: 2232986 - DNA, 25 bp, Homo sapien
aagcaaatcgagttcactaagacca

SEQ ID NO: 2232987 - DNA, 25 bp, Homo sapien
ctttaaagcaaatcgagttcactaa

SEQ ID NO: 2232988 - DNA, 25 bp, Homo sapien
tgtggataaggcttacaacttttcc

SEQ ID NO: 2232989 - DNA, 25 bp, Homo sapien
atgaagttcagtttgagggtgtgga

SEQ ID NO: 2232990 - DNA, 25 bp, Homo sapien
cagagactattttgacatgttttca

SEQ ID NO: 2232991 - DNA, 25 bp, Homo sapien
agagactattttgacatgttttcac

SEQ ID NO: 2232992 - DNA, 25 bp, Homo sapien
tcagagactattttgacatgttttc

SEQ ID NO: 2232993 - DNA, 25 bp, Homo sapien
gagactattttgacatgttttcaca

SEQ ID NO: 2232994 - DNA, 25 bp, Homo sapien
cccatttgcagttctagcttcttct

SEQ ID NO: 2232995 - DNA, 25 bp, Homo sapien
tttccagtgaagagagtgtttccca

SEQ ID NO: 2232996 - DNA, 25 bp, Homo sapien
ttcagtgagtagatcatgtgctgga

SEQ ID NO: 2232997 - DNA, 25 bp, Homo sapien
ggaagccatgcaagatctctatcat

SEQ ID NO: 2232998 - DNA, 25 bp, Homo sapien
tttgggtcctggagtatgcctcaag

SEQ ID NO: 2232999 - DNA, 25 bp, Homo sapien
ggtcctggagtatgcctcaagggaa

SEQ ID NO: 2233000 - DNA, 25 bp, Homo sapien
tctgagtttgggtcctggagtatgc

SEQ ID NO: 2233001 - DNA, 25 bp, Homo sapien
tggagtatgcctcaagggaaagcat

SEQ ID NO: 2233002 - DNA, 25 bp, Homo sapien
tcaagtaccaagtgaaccagataga

SEQ ID NO: 2233003 - DNA, 25 bp, Homo sapien
ggtaggtgattactttgccttcaga

SEQ ID NO: 2233004 - DNA, 25 bp, Homo sapien
gaactgtagcatgaagctcaagtac

SEQ ID NO: 2233005 - DNA, 25 bp, Homo sapien
tccacaatgaaactccaatacaggt

SEQ ID NO: 2233006 - DNA, 25 bp, Homo sapien
ggtgttacatgctctgaacttggaa

SEQ ID NO: 2233007 - DNA, 25 bp, Homo sapien
tttctaaattgctagtgaggaagcc

SEQ ID NO: 2233008 - DNA, 25 bp, Homo sapien
ttggaagaatacaaggcaatggagt

SEQ ID NO: 2233009 - DNA, 25 bp, Homo sapien
gctgtgaaatcaccaatgaccacgg

SEQ ID NO: 2233010 - DNA, 25 bp, Homo sapien
gaatgtaactgacctgatagagctt

SEQ ID NO: 2233011 - DNA, 25 bp, Homo sapien
gaaagaagccaatcgactgagtcca

SEQ ID NO: 2233012 - DNA, 25 bp, Homo sapien
tgtcacagtaattcgctagcaaggg

SEQ ID NO: 2233013 - DNA, 25 bp, Homo sapien
aaagaaccactgcaagaaccctgac

SEQ ID NO: 2233014 - DNA, 25 bp, Homo sapien
ggtgctctaaagattaatactttga

SEQ ID NO: 2233015 - DNA, 25 bp, Homo sapien
tagctttgtcttaatgcagatctaa

SEQ ID NO: 2233016 - DNA, 25 bp, Homo sapien
gtttagcaacattcaccgataatag

SEQ ID NO: 2233017 - DNA, 25 bp, Homo sapien
tagttttccctatatctcgcatggt

SEQ ID NO: 2233018 - DNA, 25 bp, Homo sapien
ctgaagtgacactcaaagaactact

SEQ ID NO: 2233019 - DNA, 25 bp, Homo sapien
gtgacactcaaagaactactcattg

SEQ ID NO: 2233020 - DNA, 25 bp, Homo sapien
tgaaacttcttgagtactgaagtga

SEQ ID NO: 2233021 - DNA, 25 bp, Homo sapien
aactactcattggagcagttcagat

SEQ ID NO: 2233022 - DNA, 25 bp, Homo sapien
aacaaaagcgcattgcaattcaggg

SEQ ID NO: 2233023 - DNA, 25 bp, Homo sapien
catagcagtgcgactgaaagtgcct

SEQ ID NO: 2233024 - DNA, 25 bp, Homo sapien
acttgcagtatagggaacaaaagcg

SEQ ID NO: 2233025 - DNA, 25 bp, Homo sapien
gagtcgctcttgacagctataagtg

SEQ ID NO: 2233026 - DNA, 25 bp, Homo sapien
tcacaggtttaattcttttggaatc

SEQ ID NO: 2233027 - DNA, 25 bp, Homo sapien
taattcttttggaatcttcacctta

SEQ ID NO: 2233028 - DNA, 25 bp, Homo sapien
cacaggtttaattcttttggaatct

SEQ ID NO: 2233029 - DNA, 25 bp, Homo sapien
tcttttggaatcttcaccttactgg

SEQ ID NO: 2233030 - DNA, 25 bp, Homo sapien
ttcttcttgctatctacatagagca

SEQ ID NO: 2233031 - DNA, 25 bp, Homo sapien
ctgcctggagtggagatttattgtc

SEQ ID NO: 2233032 - DNA, 25 bp, Homo sapien
tgctatctacatagagcagctgcct

SEQ ID NO: 2233033 - DNA, 25 bp, Homo sapien
gcctggagtggagatttattgtcat

SEQ ID NO: 2233034 - DNA, 25 bp, Homo sapien
tgcctcctggctccgacgtagctcg

SEQ ID NO: 2233035 - DNA, 25 bp, Homo sapien
agctccccagtctcactccattcct

SEQ ID NO: 2233036 - DNA, 25 bp, Homo sapien
gacgtagctcgcagctccccagtct

SEQ ID NO: 2233037 - DNA, 25 bp, Homo sapien
tggctccgacgtagctcgcagctcc

SEQ ID NO: 2233038 - DNA, 25 bp, Homo sapien
gactaggtaagttcagtagtgagaa

SEQ ID NO: 2233039 - DNA, 25 bp, Homo sapien
tcaatctgtaactgagtgaataatc

SEQ ID NO: 2233040 - DNA, 25 bp, Homo sapien
ctaggtaagttcagtagtgagaagt

SEQ ID NO: 2233041 - DNA, 25 bp, Homo sapien
taagactaggtaagttcagtagtga

SEQ ID NO: 2233042 - DNA, 25 bp, Homo sapien
caaagttcgcgatgtggctgaagcc

SEQ ID NO: 2233043 - DNA, 25 bp, Homo sapien
aacgactacttcgtgctgcagcggc

SEQ ID NO: 2233044 - DNA, 25 bp, Homo sapien
aagctgtggctgatggaaaggtcca

SEQ ID NO: 2233045 - DNA, 25 bp, Homo sapien
aagcctgaggaagtgcttctgaaaa

SEQ ID NO: 2233046 - DNA, 25 bp, Homo sapien
tcccgatcctaaatcgtgggcggag

SEQ ID NO: 2233047 - DNA, 25 bp, Homo sapien
tacttaaaaggtggtgaggacaaca

SEQ ID NO: 2233048 - DNA, 25 bp, Homo sapien
tctgggctgtgttcgctgttactta

SEQ ID NO: 2233049 - DNA, 25 bp, Homo sapien
tgagaatgtctcactggacgacgag

SEQ ID NO: 2233050 - DNA, 25 bp, Homo sapien
acaggtgaagggaggagcgcggttc

SEQ ID NO: 2233051 - DNA, 25 bp, Homo sapien
ggacaggtgaagggaggagcgcggt

SEQ ID NO: 2233052 - DNA, 25 bp, Homo sapien
aggtgaagggaggagcgcggttctt

SEQ ID NO: 2233053 - DNA, 25 bp, Homo sapien
ctttggttgggacaggtgaagggag

SEQ ID NO: 2233054 - DNA, 25 bp, Homo sapien
gatgttccccttcgtatgttcatgt

SEQ ID NO: 2233055 - DNA, 25 bp, Homo sapien
ccatctatgagtctgaacatgcggt

SEQ ID NO: 2233056 - DNA, 25 bp, Homo sapien
ttcccatctatgagtctgaacatgc

SEQ ID NO: 2233057 - DNA, 25 bp, Homo sapien
catgatttatagtccctacaaagga

SEQ ID NO: 2233058 - DNA, 25 bp, Homo sapien
tgattgccaaggtaacagaattgct

SEQ ID NO: 2233059 - DNA, 25 bp, Homo sapien
cactagaaattctgggcactgctgt

SEQ ID NO: 2233060 - DNA, 25 bp, Homo sapien
taaagaatggctacactaagactga

SEQ ID NO: 2233061 - DNA, 25 bp, Homo sapien
taatctgggtaaaatcagccttctg

SEQ ID NO: 2233062 - DNA, 25 bp, Homo sapien
ggcagctagatgacccaattttcag

SEQ ID NO: 2233063 - DNA, 25 bp, Homo sapien
ccattcaggtaagccagggtgagct

SEQ ID NO: 2233064 - DNA, 25 bp, Homo sapien
ttccacagagagacgggactacatg

SEQ ID NO: 2233065 - DNA, 25 bp, Homo sapien
tacttccggctaactgatgtctgtg

SEQ ID NO: 2233066 - DNA, 25 bp, Homo sapien
ccttctggccccttttcattggcct

SEQ ID NO: 2233067 - DNA, 25 bp, Homo sapien
ttcttcttcgctgtctgagtcctcg

SEQ ID NO: 2233068 - DNA, 25 bp, Homo sapien
gaaagttctgcagtaaaatctcccc

SEQ ID NO: 2233069 - DNA, 25 bp, Homo sapien
cgtataggttgatggttgcctggac

SEQ ID NO: 2233070 - DNA, 25 bp, Homo sapien
tacagatagtcgaaggagcgggatt

SEQ ID NO: 2233071 - DNA, 25 bp, Homo sapien
ttggtgacctcagcagccgttgccc

SEQ ID NO: 2233072 - DNA, 25 bp, Homo sapien
gacagggtgatggaacttggattca

SEQ ID NO: 2233073 - DNA, 25 bp, Homo sapien
cttggattcagccttggtgacctca

SEQ ID NO: 2233074 - DNA, 25 bp, Homo sapien
ctgacagggtgatggaacttggatt

SEQ ID NO: 2233075 - DNA, 25 bp, Homo sapien
ccttggggagtcatttgtggaagac

SEQ ID NO: 2233076 - DNA, 25 bp, Homo sapien
ggagtcatttgtggaagacagccag

SEQ ID NO: 2233077 - DNA, 25 bp, Homo sapien
ctcatctgccttggggagtcatttg

SEQ ID NO: 2233078 - DNA, 25 bp, Homo sapien
tctgccttggggagtcatttgtgga

SEQ ID NO: 2233079 - DNA, 25 bp, Homo sapien
cagcagagtccattcttaggggacc

SEQ ID NO: 2233080 - DNA, 25 bp, Homo sapien
tgtgctaggtctggagctagggcca

SEQ ID NO: 2233081 - DNA, 25 bp, Homo sapien
gggcttgtgctaggtctggagctag

SEQ ID NO: 2233082 - DNA, 25 bp, Homo sapien
caagatgggcttaacaggccaggga

SEQ ID NO: 2233083 - DNA, 25 bp, Homo sapien
atttccttatgccactccattgtag

SEQ ID NO: 2233084 - DNA, 25 bp, Homo sapien
taaggtgctgaatgacaaaatgtgg

SEQ ID NO: 2233085 - DNA, 25 bp, Homo sapien
tattatccatccctaagtagtgtca

SEQ ID NO: 2233086 - DNA, 25 bp, Homo sapien
gtgcagctccatgaattttgacaaa

SEQ ID NO: 2233087 - DNA, 25 bp, Homo sapien
cactagttgaaagacatttaggtca

SEQ ID NO: 2233088 - DNA, 25 bp, Homo sapien
caattgggatttttgtggaccagtg

SEQ ID NO: 2233089 - DNA, 25 bp, Homo sapien
tgagacccattgacagaatgtgctc

SEQ ID NO: 2233090 - DNA, 25 bp, Homo sapien
tacacagatgtaccagtttattcgt

SEQ ID NO: 2233091 - DNA, 25 bp, Homo sapien
caaagatctttgactactgggtagg

SEQ ID NO: 2233092 - DNA, 25 bp, Homo sapien
gaaacgatggttgcatagtctgaac

SEQ ID NO: 2233093 - DNA, 25 bp, Homo sapien
gatttttaagcatggcaaagcgtga

SEQ ID NO: 2233094 - DNA, 25 bp, Homo sapien
caaagcgtgaggtgaaagtcacaat

SEQ ID NO: 2233095 - DNA, 25 bp, Homo sapien
taaggcatgtgcctacgcaggaggc

SEQ ID NO: 2233096 - DNA, 25 bp, Homo sapien
tgttcaaggagcaagagcttcagcc

SEQ ID NO: 2233097 - DNA, 25 bp, Homo sapien
tagcacttgagttaacacagccacc

SEQ ID NO: 2233098 - DNA, 25 bp, Homo sapien
caaaggtcaaaaggcatccagcgtt

SEQ ID NO: 2233099 - DNA, 25 bp, Homo sapien
tatgtctcacttggtaactaaagct

SEQ ID NO: 2233100 - DNA, 25 bp, Homo sapien
tattatccaaacatgtgctctaagt

SEQ ID NO: 2233101 - DNA, 25 bp, Homo sapien
cagaaagtgtagttccttaatgccc

SEQ ID NO: 2233102 - DNA, 25 bp, Homo sapien
gagatgtccatttcacaaagcgtaa

SEQ ID NO: 2233103 - DNA, 25 bp, Homo sapien
tcactgagagaatgtcggaatgtgc

SEQ ID NO: 2233104 - DNA, 25 bp, Homo sapien
actagatcgtaacctctggtaaggc

SEQ ID NO: 2233105 - DNA, 25 bp, Homo sapien
caaggagatctcatgctggtatggc

SEQ ID NO: 2233106 - DNA, 25 bp, Homo sapien
tatttacatttagacaactgcggcc

SEQ ID NO: 2233107 - DNA, 25 bp, Homo sapien
cctgaactctttggagagtatgtgc

SEQ ID NO: 2233108 - DNA, 25 bp, Homo sapien
ctctacttcctactttttactgttg

SEQ ID NO: 2233109 - DNA, 25 bp, Homo sapien
cttttgccactgcttgatctcacct

SEQ ID NO: 2233110 - DNA, 25 bp, Homo sapien
attgtttctcctctacttcctactt

SEQ ID NO: 2233111 - DNA, 25 bp, Homo sapien
gattgttacatcttcgaaggctgca

SEQ ID NO: 2233112 - DNA, 25 bp, Homo sapien
gtataccggacccaatatctgctga

SEQ ID NO: 2233113 - DNA, 25 bp, Homo sapien
tctgaccctagactcttgaaagcct

SEQ ID NO: 2233114 - DNA, 25 bp, Homo sapien
gagttgtacttgttagcttacccca

SEQ ID NO: 2233115 - DNA, 25 bp, Homo sapien
tagctgacgtggatacgtagccgcg

SEQ ID NO: 2233116 - DNA, 25 bp, Homo sapien
tagccgcgtaagctttgccaaagcc

SEQ ID NO: 2233117 - DNA, 25 bp, Homo sapien
cacgaagctccaagtgagggaggac

SEQ ID NO: 2233118 - DNA, 25 bp, Homo sapien
gagtcatacccgatctcacgaagct

SEQ ID NO: 2233119 - DNA, 25 bp, Homo sapien
aagaagaaagcacaacgccaccaag

SEQ ID NO: 2233120 - DNA, 25 bp, Homo sapien
agtaattactcaattcttggtggcc

SEQ ID NO: 2233121 - DNA, 25 bp, Homo sapien
taagggatgcttcccattagcactc

SEQ ID NO: 2233122 - DNA, 25 bp, Homo sapien
tcctcctttgtctacggccagtaag

SEQ ID NO: 2233123 - DNA, 25 bp, Homo sapien
tctccctctggggtccggtaggaga

SEQ ID NO: 2233124 - DNA, 25 bp, Homo sapien
tcatctccctctggggtccggtagg

SEQ ID NO: 2233125 - DNA, 25 bp, Homo sapien
taggtcatctccctctggggtccgg

SEQ ID NO: 2233126 - DNA, 25 bp, Homo sapien
ctttctaggtcatctccctctgggg

SEQ ID NO: 2233127 - DNA, 25 bp, Homo sapien
gactgccagtgattcctctcctgtt

SEQ ID NO: 2233128 - DNA, 25 bp, Homo sapien
tctggaattcagcttggcgataacc

SEQ ID NO: 2233129 - DNA, 25 bp, Homo sapien
ggcgataacccatgtgtttcttgct

SEQ ID NO: 2233130 - DNA, 25 bp, Homo sapien
gcctcctgggtactgtagatcacca

SEQ ID NO: 2233131 - DNA, 25 bp, Homo sapien
gcgttggtctttggcccctggatac

SEQ ID NO: 2233132 - DNA, 25 bp, Homo sapien
cacagaataaggcactgggttccag

SEQ ID NO: 2233133 - DNA, 25 bp, Homo sapien
cccttctgggtaggcaacaggtgct

SEQ ID NO: 2233134 - DNA, 25 bp, Homo sapien
taaaagggatcagctgaatgggagc

SEQ ID NO: 2233135 - DNA, 25 bp, Homo sapien
ttctagtataacattcacgaatcta

SEQ ID NO: 2233136 - DNA, 25 bp, Homo sapien
tatgttataagcacaacgataaatc

SEQ ID NO: 2233137 - DNA, 25 bp, Homo sapien
gagttactatctggcgtcatttcct

SEQ ID NO: 2233138 - DNA, 25 bp, Homo sapien
taattgtcatttcagactgtagatc

SEQ ID NO: 2233139 - DNA, 25 bp, Homo sapien
tccagaggcttaagttgaagagatg

SEQ ID NO: 2233140 - DNA, 25 bp, Homo sapien
ccctcatatccaattgtcttgttat

SEQ ID NO: 2233141 - DNA, 25 bp, Homo sapien
ggatctttggtggattactgaatac

SEQ ID NO: 2233142 - DNA, 25 bp, Homo sapien
gaaggaagcacactagggctatgaa

SEQ ID NO: 2233143 - DNA, 25 bp, Homo sapien
tcagcgtccggagctgggcaaccat

SEQ ID NO: 2233144 - DNA, 25 bp, Homo sapien
gcacccttcagcgtccggagctggg

SEQ ID NO: 2233145 - DNA, 25 bp, Homo sapien
agctgggcaaccatgtccgagagac

SEQ ID NO: 2233146 - DNA, 25 bp, Homo sapien
tgggcaaccatgtccgagagacagt

SEQ ID NO: 2233147 - DNA, 25 bp, Homo sapien
tggtggttctcattttccataggca

SEQ ID NO: 2233148 - DNA, 25 bp, Homo sapien
cttcttctcctcaacagtttgttct

SEQ ID NO: 2233149 - DNA, 25 bp, Homo sapien
cttcttcttctcctcaacagtttgt

SEQ ID NO: 2233150 - DNA, 25 bp, Homo sapien
tctcattttccataggcatcttctt

SEQ ID NO: 2233151 - DNA, 25 bp, Homo sapien
gagaaccccatctcatgtatactca

SEQ ID NO: 2233152 - DNA, 25 bp, Homo sapien
gaaccccatctcatgtatactcaac

SEQ ID NO: 2233153 - DNA, 25 bp, Homo sapien
agaaccccatctcatgtatactcaa

SEQ ID NO: 2233154 - DNA, 25 bp, Homo sapien
agctttgctcaagcacaggtcttca

SEQ ID NO: 2233155 - DNA, 25 bp, Homo sapien
gtttcttagctttgctcaagcacag

SEQ ID NO: 2233156 - DNA, 25 bp, Homo sapien
tcttagctttgctcaagcacaggtc

SEQ ID NO: 2233157 - DNA, 25 bp, Homo sapien
atcagtgagttcttgttcctctgga

SEQ ID NO: 2233158 - DNA, 25 bp, Homo sapien
actttggatgggaattataataaca

SEQ ID NO: 2233159 - DNA, 25 bp, Homo sapien
acaaaaccatcttgcaggtaacatg

SEQ ID NO: 2233160 - DNA, 25 bp, Homo sapien
ctgaacccatgtctggtcaggaacc

SEQ ID NO: 2233161 - DNA, 25 bp, Homo sapien
tgcaggtaacatggatggatcaatc

SEQ ID NO: 2233162 - DNA, 25 bp, Homo sapien
ttccagtaagcattgagcttctggg

SEQ ID NO: 2233163 - DNA, 25 bp, Homo sapien
agttgaggtctcaaaattatcttga

SEQ ID NO: 2233164 - DNA, 25 bp, Homo sapien
gcctggctacagttgaggtctcaaa

SEQ ID NO: 2233165 - DNA, 25 bp, Homo sapien
cattgagcttctgggcaagggcatt

SEQ ID NO: 2233166 - DNA, 25 bp, Homo sapien
caattactcctacaccttctccacg

SEQ ID NO: 2233167 - DNA, 25 bp, Homo sapien
tcaatgactccaattactcctacac

SEQ ID NO: 2233168 - DNA, 25 bp, Homo sapien
aaagtcttgtttgttgtaggcaggt

SEQ ID NO: 2233169 - DNA, 25 bp, Homo sapien
tttaggaaattgcactcaatgactc

SEQ ID NO: 2233170 - DNA, 25 bp, Homo sapien
ccccaccttctcaaaagattttatg

SEQ ID NO: 2233171 - DNA, 25 bp, Homo sapien
caaaagattttatgagtcggttgtt

SEQ ID NO: 2233172 - DNA, 25 bp, Homo sapien
tgagtcggttgttatgatacatcat

SEQ ID NO: 2233173 - DNA, 25 bp, Homo sapien
tttatgagtcggttgttatgataca

SEQ ID NO: 2233174 - DNA, 25 bp, Homo sapien
aagagaacccaaaggtgattctcac

SEQ ID NO: 2233175 - DNA, 25 bp, Homo sapien
caaaggtgattctcacctgcttatt

SEQ ID NO: 2233176 - DNA, 25 bp, Homo sapien
tattccaaactggttactattcttg

SEQ ID NO: 2233177 - DNA, 25 bp, Homo sapien
gttactattcttgcaagagaaccca

SEQ ID NO: 2233178 - DNA, 25 bp, Homo sapien
aggtcaacttcatgtagtggtacac

SEQ ID NO: 2233179 - DNA, 25 bp, Homo sapien
ataaagaggtcaacttcatgtagtg

SEQ ID NO: 2233180 - DNA, 25 bp, Homo sapien
gaggtcaacttcatgtagtggtaca

SEQ ID NO: 2233181 - DNA, 25 bp, Homo sapien
aaagaggtcaacttcatgtagtggt

SEQ ID NO: 2233182 - DNA, 25 bp, Homo sapien
tgtgaaggtaggtttatatgtatca

SEQ ID NO: 2233183 - DNA, 25 bp, Homo sapien
tgtatcatattctacattggccagg

SEQ ID NO: 2233184 - DNA, 25 bp, Homo sapien
gtatcatattctacattggccaggc

SEQ ID NO: 2233185 - DNA, 25 bp, Homo sapien
tatgtatcatattctacattggcca

SEQ ID NO: 2233186 - DNA, 25 bp, Homo sapien
gaaaaattttcatgcgtggcttcat

SEQ ID NO: 2233187 - DNA, 25 bp, Homo sapien
tcttttgacgcagaaaaattttcat

SEQ ID NO: 2233188 - DNA, 25 bp, Homo sapien
tcatgcgtggcttcatgtatagaat

SEQ ID NO: 2233189 - DNA, 25 bp, Homo sapien
ggcttcatgtatagaataccacaaa

SEQ ID NO: 2233190 - DNA, 25 bp, Homo sapien
tctgtttctggtagctcagaggtaa

SEQ ID NO: 2233191 - DNA, 25 bp, Homo sapien
gataccaggatgtcatattgatctg

SEQ ID NO: 2233192 - DNA, 25 bp, Homo sapien
tctgtgtcaaagtctgataccagga

SEQ ID NO: 2233193 - DNA, 25 bp, Homo sapien
tcagaggtaacaccgccagtcattt

SEQ ID NO: 2233194 - DNA, 25 bp, Homo sapien
tattagaatctatcacccttggaat

SEQ ID NO: 2233195 - DNA, 25 bp, Homo sapien
ttagaatctatcacccttggaatac

SEQ ID NO: 2233196 - DNA, 25 bp, Homo sapien
tgtttattagaatctatcacccttg

SEQ ID NO: 2233197 - DNA, 25 bp, Homo sapien
gaatctatcacccttggaatactat

SEQ ID NO: 2233198 - DNA, 25 bp, Homo sapien
gcaggtcattttcacggttgaaaat

SEQ ID NO: 2233199 - DNA, 25 bp, Homo sapien
aatggaatagttcaagatggcttct

SEQ ID NO: 2233200 - DNA, 25 bp, Homo sapien
ctgcggatgttccaaatgagaacac

SEQ ID NO: 2233201 - DNA, 25 bp, Homo sapien
tgagaacacgagtgccttttttgcc

SEQ ID NO: 2233202 - DNA, 25 bp, Homo sapien
gggcaatgaatcctcggtaataatc

SEQ ID NO: 2233203 - DNA, 25 bp, Homo sapien
gcaatgaatcctcggtaataatcat

SEQ ID NO: 2233204 - DNA, 25 bp, Homo sapien
tgggcaatgaatcctcggtaataat

SEQ ID NO: 2233205 - DNA, 25 bp, Homo sapien
ctgggcaatgaatcctcggtaataa

SEQ ID NO: 2233206 - DNA, 25 bp, Homo sapien
aaggatattgttttgctggttgaat

SEQ ID NO: 2233207 - DNA, 25 bp, Homo sapien
aggatattgttttgctggttgaatg

SEQ ID NO: 2233208 - DNA, 25 bp, Homo sapien
ggatattgttttgctggttgaatgg

SEQ ID NO: 2233209 - DNA, 25 bp, Homo sapien
gctggttgaatggaacaattggtac

SEQ ID NO: 2233210 - DNA, 25 bp, Homo sapien
caaagaccccaatgggacactggct

SEQ ID NO: 2233211 - DNA, 25 bp, Homo sapien
aagtccaacagtgagagtaccccca

SEQ ID NO: 2233212 - DNA, 25 bp, Homo sapien
cattcttggtgaagacaagggcgtc

SEQ ID NO: 2233213 - DNA, 25 bp, Homo sapien
tttcctagccgcatggagcctgact

SEQ ID NO: 2233214 - DNA, 25 bp, Homo sapien
taaagaccgtcctggcagatacatc

SEQ ID NO: 2233215 - DNA, 25 bp, Homo sapien
catcatcggtaaaggtcaaacaaga

SEQ ID NO: 2233216 - DNA, 25 bp, Homo sapien
cagatacatctggatctacagcatt

SEQ ID NO: 2233217 - DNA, 25 bp, Homo sapien
tgtagtttatgaggtgtcatcccac

SEQ ID NO: 2233218 - DNA, 25 bp, Homo sapien
ctagcagctccgcgatggcactgaa

SEQ ID NO: 2233219 - DNA, 25 bp, Homo sapien
ctggagttgctctggaggtagcggg

SEQ ID NO: 2233220 - DNA, 25 bp, Homo sapien
gctggagttgctctggaggtagcgg

SEQ ID NO: 2233221 - DNA, 25 bp, Homo sapien
gatggcactgaagggtcgcgtgtgg

SEQ ID NO: 2233222 - DNA, 25 bp, Homo sapien
agagaaggtcccgacccgcgtgagg

SEQ ID NO: 2233223 - DNA, 25 bp, Homo sapien
gcgagagaaggtcccgacccgcgtg

SEQ ID NO: 2233224 - DNA, 25 bp, Homo sapien
cgagagaaggtcccgacccgcgtga

SEQ ID NO: 2233225 - DNA, 25 bp, Homo sapien
gagaaggtcccgacccgcgtgaggc

SEQ ID NO: 2233226 - DNA, 25 bp, Homo sapien
gcggatcccgaaggcctgcgggccg

SEQ ID NO: 2233227 - DNA, 25 bp, Homo sapien
aggcggatcccgaaggcctgcgggc

SEQ ID NO: 2233228 - DNA, 25 bp, Homo sapien
gctcaggcggatcccgaaggcctgc

SEQ ID NO: 2233229 - DNA, 25 bp, Homo sapien
cgtgctcaggcggatcccgaaggcc

SEQ ID NO: 2233230 - DNA, 25 bp, Homo sapien
ggccgccacggtacccgtctgctgc

SEQ ID NO: 2233231 - DNA, 25 bp, Homo sapien
tttggccgccacggtacccgtctgc

SEQ ID NO: 2233232 - DNA, 25 bp, Homo sapien
gccacggtacccgtctgctgccgcc

SEQ ID NO: 2233233 - DNA, 25 bp, Homo sapien
cacggtacccgtctgctgccgccgg

SEQ ID NO: 2233234 - DNA, 25 bp, Homo sapien
ggcggtccgggactagccctcgctc

SEQ ID NO: 2233235 - DNA, 25 bp, Homo sapien
cggtccgggactagccctcgctcac

SEQ ID NO: 2233236 - DNA, 25 bp, Homo sapien
gcggtccgggactagccctcgctca

SEQ ID NO: 2233237 - DNA, 25 bp, Homo sapien
cggcggtccgggactagccctcgct

SEQ ID NO: 2233238 - DNA, 25 bp, Homo sapien
ccactcgcagctggcggcgaccgtc

SEQ ID NO: 2233239 - DNA, 25 bp, Homo sapien
agctggcggcgaccgtccgggaccg

SEQ ID NO: 2233240 - DNA, 25 bp, Homo sapien
tcgcagctggcggcgaccgtccggg

SEQ ID NO: 2233241 - DNA, 25 bp, Homo sapien
gcagctggcggcgaccgtccgggac

SEQ ID NO: 2233242 - DNA, 25 bp, Homo sapien
aggccggctgaggcaagcggcggct

SEQ ID NO: 2233243 - DNA, 25 bp, Homo sapien
gggtgaggccggctgaggcaagcgg

SEQ ID NO: 2233244 - DNA, 25 bp, Homo sapien
gcaagcggcggctccgccctgtcag

SEQ ID NO: 2233245 - DNA, 25 bp, Homo sapien
cggctgaggcaagcggcggctccgc

SEQ ID NO: 2233246 - DNA, 25 bp, Homo sapien
ctgcccagcaataaacagaagcagc

SEQ ID NO: 2233247 - DNA, 25 bp, Homo sapien
tgcccagcaataaacagaagcagca

SEQ ID NO: 2233248 - DNA, 25 bp, Homo sapien
aacctggcagttggttcagcatggg

SEQ ID NO: 2233249 - DNA, 25 bp, Homo sapien
taagaaggccataatgcaaagttcc

SEQ ID NO: 2233250 - DNA, 25 bp, Homo sapien
tcatgcttcactaccaaacagggct

SEQ ID NO: 2233251 - DNA, 25 bp, Homo sapien
gcacatctgtgagggaggatccaat

SEQ ID NO: 2233252 - DNA, 25 bp, Homo sapien
agggagagcaaagtgctagagtctc

SEQ ID NO: 2233253 - DNA, 25 bp, Homo sapien
aaccaggtctgtgtgcgccgcttcc

SEQ ID NO: 2233254 - DNA, 25 bp, Homo sapien
agtgctagagtctccttcacttccc

SEQ ID NO: 2233255 - DNA, 25 bp, Homo sapien
ccaaccaggtctgtgtgcgccgctt

SEQ ID NO: 2233256 - DNA, 25 bp, Homo sapien
cagctaccatgagggatgacgggac

SEQ ID NO: 2233257 - DNA, 25 bp, Homo sapien
ctgagaaagatgtcagagcatctca

SEQ ID NO: 2233258 - DNA, 25 bp, Homo sapien
ggaagccccagctaccatgagggat

SEQ ID NO: 2233259 - DNA, 25 bp, Homo sapien
cccagctaccatgagggatgacggg

SEQ ID NO: 2233260 - DNA, 25 bp, Homo sapien
gaaagtgattttccttgatctgtaa

SEQ ID NO: 2233261 - DNA, 25 bp, Homo sapien
caaaaattgcttttaggtccaccag

SEQ ID NO: 2233262 - DNA, 25 bp, Homo sapien
cattcctaaaccttgatcctcaaaa

SEQ ID NO: 2233263 - DNA, 25 bp, Homo sapien
gtaagtcttgtatcattcctaaacc

SEQ ID NO: 2233264 - DNA, 25 bp, Homo sapien
aactgtttctcaagattatcccaat

SEQ ID NO: 2233265 - DNA, 25 bp, Homo sapien
tgatagttgtcaaacacccttgttt

SEQ ID NO: 2233266 - DNA, 25 bp, Homo sapien
gaaatttgatagttgtcaaacaccc

SEQ ID NO: 2233267 - DNA, 25 bp, Homo sapien
tcccaattatccagagatactcaac

SEQ ID NO: 2233268 - DNA, 25 bp, Homo sapien
tcagcaaggaagcaacaatcttaga

SEQ ID NO: 2233269 - DNA, 25 bp, Homo sapien
aggaagcaacaatcttagacgccat

SEQ ID NO: 2233270 - DNA, 25 bp, Homo sapien
tttatcttggcaccccatttagcaa

SEQ ID NO: 2233271 - DNA, 25 bp, Homo sapien
aaagaaagcctagtgatcagcaagg

SEQ ID NO: 2233272 - DNA, 25 bp, Homo sapien
ctggggaggttgactgacgaccgct

SEQ ID NO: 2233273 - DNA, 25 bp, Homo sapien
gaggttgactgacgaccgctctacc

SEQ ID NO: 2233274 - DNA, 25 bp, Homo sapien
tgctggggaggttgactgacgaccg

SEQ ID NO: 2233275 - DNA, 25 bp, Homo sapien
gttgactgacgaccgctctacctgc

SEQ ID NO: 2233276 - DNA, 25 bp, Homo sapien
aatagataatgccaaatgccctccc

SEQ ID NO: 2233277 - DNA, 25 bp, Homo sapien
gacaactcaacatctagtgcccaga

SEQ ID NO: 2233278 - DNA, 25 bp, Homo sapien
tccgtacccttagcaacatttagtg

SEQ ID NO: 2233279 - DNA, 25 bp, Homo sapien
ccatccaaagcctacaagagtgtct

SEQ ID NO: 2233280 - DNA, 25 bp, Homo sapien
aaaataagcaggagatgggacatct

SEQ ID NO: 2233281 - DNA, 25 bp, Homo sapien
tacctccgccataaaagggagcagc

SEQ ID NO: 2233282 - DNA, 25 bp, Homo sapien
gggagcagcgttcttcccctctgga

SEQ ID NO: 2233283 - DNA, 25 bp, Homo sapien
gcaacaaagtatcatcttggaaggg

SEQ ID NO: 2233284 - DNA, 25 bp, Homo sapien
aaagtccagcttagaagtatgcccc

SEQ ID NO: 2233285 - DNA, 25 bp, Homo sapien
tgatggacacccctacttttgtgag

SEQ ID NO: 2233286 - DNA, 25 bp, Homo sapien
gtcagatgatatccccagagtaggc

SEQ ID NO: 2233287 - DNA, 25 bp, Homo sapien
taagaagctatttcagcctgggctc

SEQ ID NO: 2233288 - DNA, 25 bp, Homo sapien
ggaatgcttaatggtgtcacacagg

SEQ ID NO: 2233289 - DNA, 25 bp, Homo sapien
tacgttataggccaaacgatgcaac

SEQ ID NO: 2233290 - DNA, 25 bp, Homo sapien
taagtgtggctgtacaggtctgact

SEQ ID NO: 2233291 - DNA, 25 bp, Homo sapien
tatttccagcaagtcaggtctgcca

SEQ ID NO: 2233292 - DNA, 25 bp, Homo sapien
gcatttgttgatgcttaggcctggg

SEQ ID NO: 2233293 - DNA, 25 bp, Homo sapien
tcaatgatactcaatggttgctagc

SEQ ID NO: 2233294 - DNA, 25 bp, Homo sapien
gactgataacttgtggaggaagcat

SEQ ID NO: 2233295 - DNA, 25 bp, Homo sapien
gatgaaatatggcaaatgggctcta

SEQ ID NO: 2233296 - DNA, 25 bp, Homo sapien
tagagacaaatattgaggaccccag

SEQ ID NO: 2233297 - DNA, 25 bp, Homo sapien
gcactttacccttcatactcagcat

SEQ ID NO: 2233298 - DNA, 25 bp, Homo sapien
tatttctgtgtatacgaagcagtct

SEQ ID NO: 2233299 - DNA, 25 bp, Homo sapien
tccaaacaaactggtgtctatacat

SEQ ID NO: 2233300 - DNA, 25 bp, Homo sapien
tagctaccactaatttctgtagtgc

SEQ ID NO: 2233301 - DNA, 25 bp, Homo sapien
gctaccactaatttctgtagtgcta

SEQ ID NO: 2233302 - DNA, 25 bp, Homo sapien
ctagctaccactaatttctgtagtg

SEQ ID NO: 2233303 - DNA, 25 bp, Homo sapien
ctaccactaatttctgtagtgctac

SEQ ID NO: 2233304 - DNA, 25 bp, Homo sapien
atatgagagaagtcgcttggagatt

SEQ ID NO: 2233305 - DNA, 25 bp, Homo sapien
tatgagagaagtcgcttggagattt

SEQ ID NO: 2233306 - DNA, 25 bp, Homo sapien
tgagagaagtcgcttggagatttga

SEQ ID NO: 2233307 - DNA, 25 bp, Homo sapien
gagagaagtcgcttggagatttgac

SEQ ID NO: 2233308 - DNA, 25 bp, Homo sapien
cccatgtagtttgtatccatttact

SEQ ID NO: 2233309 - DNA, 25 bp, Homo sapien
tagatgcaatgcttgccatgctatc

SEQ ID NO: 2233310 - DNA, 25 bp, Homo sapien
aatgcttgccatgctatctccttat

SEQ ID NO: 2233311 - DNA, 25 bp, Homo sapien
tctttccaaactctatcaccaatat

SEQ ID NO: 2233312 - DNA, 25 bp, Homo sapien
gaaacaaagacataggcagcgtgct

SEQ ID NO: 2233313 - DNA, 25 bp, Homo sapien
tcatgttatcaagggcactttgcca

SEQ ID NO: 2233314 - DNA, 25 bp, Homo sapien
tggttctgggccaccttattgggat

SEQ ID NO: 2233315 - DNA, 25 bp, Homo sapien
aaatcggtgtttgagggtgtctcct

SEQ ID NO: 2233316 - DNA, 25 bp, Homo sapien
tcctggaaccgagcgaacaatgaca

SEQ ID NO: 2233317 - DNA, 25 bp, Homo sapien
ggtgataaaagcctggcccctcatt

SEQ ID NO: 2233318 - DNA, 25 bp, Homo sapien
gtcacccgagggctaaggttcttca

SEQ ID NO: 2233319 - DNA, 25 bp, Homo sapien
cgtccagtcatcattcggaattgaa

SEQ ID NO: 2233320 - DNA, 25 bp, Homo sapien
taaggcaaatcagttgaaggctgtc

SEQ ID NO: 2233321 - DNA, 25 bp, Homo sapien
catttggctcctagaacgctggtag

SEQ ID NO: 2233322 - DNA, 25 bp, Homo sapien
gctggtagtaccctcgtaagaaaga

SEQ ID NO: 2233323 - DNA, 25 bp, Homo sapien
tgagacaccatgctcagccgtaaga

SEQ ID NO: 2233324 - DNA, 25 bp, Homo sapien
agtttagaggatacaaacagaaaga

SEQ ID NO: 2233325 - DNA, 25 bp, Homo sapien
tttagaggatacaaacagaaagata

SEQ ID NO: 2233326 - DNA, 25 bp, Homo sapien
gtttagaggatacaaacagaaagat

SEQ ID NO: 2233327 - DNA, 25 bp, Homo sapien
aagtttagaggatacaaacagaaag

SEQ ID NO: 2233328 - DNA, 25 bp, Homo sapien
gccttaatcacctggcttaggtagt

SEQ ID NO: 2233329 - DNA, 25 bp, Homo sapien
caggagaagtacagttttgatcaca

SEQ ID NO: 2233330 - DNA, 25 bp, Homo sapien
caactattggtgttggccttaatca

SEQ ID NO: 2233331 - DNA, 25 bp, Homo sapien
cacctggactcatggatgtttattc

SEQ ID NO: 2233332 - DNA, 25 bp, Homo sapien
tctactaaactgtccttgatccctt

SEQ ID NO: 2233333 - DNA, 25 bp, Homo sapien
caccacaccatgctacttgattata

SEQ ID NO: 2233334 - DNA, 25 bp, Homo sapien
tgtggaatctacaaatcaatttgag

SEQ ID NO: 2233335 - DNA, 25 bp, Homo sapien
ttcttcttcaggagtgtgttacatg

SEQ ID NO: 2233336 - DNA, 25 bp, Homo sapien
tgtttccaacttactgatgagccta

SEQ ID NO: 2233337 - DNA, 25 bp, Homo sapien
gttatactctgaaatcgtcccatag

SEQ ID NO: 2233338 - DNA, 25 bp, Homo sapien
aaatagagtctgatccttgcaggtc

SEQ ID NO: 2233339 - DNA, 25 bp, Homo sapien
ggaggcattctctaatcctatgatg

SEQ ID NO: 2233340 - DNA, 25 bp, Homo sapien
tcttaagtctataggccactggtgt

SEQ ID NO: 2233341 - DNA, 25 bp, Homo sapien
taactcacagaaagttcctgaaagg

SEQ ID NO: 2233342 - DNA, 25 bp, Homo sapien
tattgatttgtagggaaggatctcc

SEQ ID NO: 2233343 - DNA, 25 bp, Homo sapien
taaattgttactctcgaccagcagg

SEQ ID NO: 2233344 - DNA, 25 bp, Homo sapien
ggcatatgtgcaacaagaggtgtat

SEQ ID NO: 2233345 - DNA, 25 bp, Homo sapien
gattgagatctacacgaagaactgc

SEQ ID NO: 2233346 - DNA, 25 bp, Homo sapien
tcctagaaaaagtctggcatatgtg

SEQ ID NO: 2233347 - DNA, 25 bp, Homo sapien
gcattcttcaatgtggccccacaca

SEQ ID NO: 2233348 - DNA, 25 bp, Homo sapien
ggaatttttcggatctcttcctctg

SEQ ID NO: 2233349 - DNA, 25 bp, Homo sapien
tgcgtcagcttcttaggcccagtcc

SEQ ID NO: 2233350 - DNA, 25 bp, Homo sapien
cctctgacaaacgatttctctggat

SEQ ID NO: 2233351 - DNA, 25 bp, Homo sapien
acaaattctattggctgcgtcagct

SEQ ID NO: 2233352 - DNA, 25 bp, Homo sapien
tctcagctgtgccactatcacccac

SEQ ID NO: 2233353 - DNA, 25 bp, Homo sapien
gtgccactatcacccactgatgtag

SEQ ID NO: 2233354 - DNA, 25 bp, Homo sapien
cctggagtaatgatgggctctcagc

SEQ ID NO: 2233355 - DNA, 25 bp, Homo sapien
tggagtaatgatgggctctcagctg

SEQ ID NO: 2233356 - DNA, 25 bp, Homo sapien
ctgagaccagtgagtgggaagcaaa

SEQ ID NO: 2233357 - DNA, 25 bp, Homo sapien
accagtgagtgggaagcaaagggtt

SEQ ID NO: 2233358 - DNA, 25 bp, Homo sapien
gagaccagtgagtgggaagcaaagg

SEQ ID NO: 2233359 - DNA, 25 bp, Homo sapien
agtgagtgggaagcaaagggttcac

SEQ ID NO: 2233360 - DNA, 25 bp, Homo sapien
cataagttgaaactcttcaagacgt

SEQ ID NO: 2233361 - DNA, 25 bp, Homo sapien
ttgttcatgggatcacctttgttct

SEQ ID NO: 2233362 - DNA, 25 bp, Homo sapien
tcataagttgaaactcttcaagacg

SEQ ID NO: 2233363 - DNA, 25 bp, Homo sapien
caggttgttcatgggatcacctttg

SEQ ID NO: 2233364 - DNA, 25 bp, Homo sapien
cagcagcctatctgaaactggagtg

SEQ ID NO: 2233365 - DNA, 25 bp, Homo sapien
acagtgaggtttgtagcatttcgac

SEQ ID NO: 2233366 - DNA, 25 bp, Homo sapien
gaccagttctggagcaccataaaag

SEQ ID NO: 2233367 - DNA, 25 bp, Homo sapien
taaaggcaccaggacaattggctat

SEQ ID NO: 2233368 - DNA, 25 bp, Homo sapien
tcatgtacttgtctgcacttgtctt

SEQ ID NO: 2233369 - DNA, 25 bp, Homo sapien
catgtacttgtctgcacttgtcttt

SEQ ID NO: 2233370 - DNA, 25 bp, Homo sapien
tcttcctcttcattgaggtcatgta

SEQ ID NO: 2233371 - DNA, 25 bp, Homo sapien
tcttcattgaggtcatgtacttgtc

SEQ ID NO: 2233372 - DNA, 25 bp, Homo sapien
tgctcacaccatctgttgcaactga

SEQ ID NO: 2233373 - DNA, 25 bp, Homo sapien
tccctagtgctcacaccatctgttg

SEQ ID NO: 2233374 - DNA, 25 bp, Homo sapien
tccatagttagcacactccctagtg

SEQ ID NO: 2233375 - DNA, 25 bp, Homo sapien
tctcacatctcctccatagttagca

SEQ ID NO: 2233376 - DNA, 25 bp, Homo sapien
tatttccatttctcgccgggtcagc

SEQ ID NO: 2233377 - DNA, 25 bp, Homo sapien
ttaaggaaggagtgacgatcagctc

SEQ ID NO: 2233378 - DNA, 25 bp, Homo sapien
caggcaaagaatgcgctgacgctcc

SEQ ID NO: 2233379 - DNA, 25 bp, Homo sapien
gtattgcttcaggagttgccctcag

SEQ ID NO: 2233380 - DNA, 25 bp, Homo sapien
taagccctaattccctgagagaagc

SEQ ID NO: 2233381 - DNA, 25 bp, Homo sapien
tggtccttctcatgcagtgtctgga

SEQ ID NO: 2233382 - DNA, 25 bp, Homo sapien
tacatagtaccaggagcaaagctct

SEQ ID NO: 2233383 - DNA, 25 bp, Homo sapien
cttccttcccaaagggcttgtacat

SEQ ID NO: 2233384 - DNA, 25 bp, Homo sapien
tacatcttatttctaagctgaagca

SEQ ID NO: 2233385 - DNA, 25 bp, Homo sapien
cgagagtgccgtcatccaggaataa

SEQ ID NO: 2233386 - DNA, 25 bp, Homo sapien
cactgcaacaaaatggaactccatc

SEQ ID NO: 2233387 - DNA, 25 bp, Homo sapien
tatttctaagctgaagcaccactgc

SEQ ID NO: 2233388 - DNA, 25 bp, Homo sapien
atcaagttgatgctgaaggaggctt

SEQ ID NO: 2233389 - DNA, 25 bp, Homo sapien
tatcaagttgatgctgaaggaggct

SEQ ID NO: 2233390 - DNA, 25 bp, Homo sapien
cctcaagtcccagaactccgcgcgg

SEQ ID NO: 2233391 - DNA, 25 bp, Homo sapien
aagtcccagaactccgcgcggcgga

SEQ ID NO: 2233392 - DNA, 25 bp, Homo sapien
ctccaacttgggtaaataggccgcg

SEQ ID NO: 2233393 - DNA, 25 bp, Homo sapien
gctctgggaattgtagtagcacaga

SEQ ID NO: 2233394 - DNA, 25 bp, Homo sapien
cttctaagggtattgtgatggagca

SEQ ID NO: 2233395 - DNA, 25 bp, Homo sapien
gggctctgggaattgtagtagcaca

SEQ ID NO: 2233396 - DNA, 25 bp, Homo sapien
tctaagggtattgtgatggagcatg

SEQ ID NO: 2233397 - DNA, 25 bp, Homo sapien
gcttcatccttcacgatgtagccag

SEQ ID NO: 2233398 - DNA, 25 bp, Homo sapien
tatcacctgtactaatggttctcct

SEQ ID NO: 2233399 - DNA, 25 bp, Homo sapien
gccagagtcatcagacacgagtctg

SEQ ID NO: 2233400 - DNA, 25 bp, Homo sapien
tttccagtcgagcctctgcttcatc

SEQ ID NO: 2233401 - DNA, 25 bp, Homo sapien
caaggtgcagaacgatatgtatact

SEQ ID NO: 2233402 - DNA, 25 bp, Homo sapien
tgtggaactttgtactatgcaacct

SEQ ID NO: 2233403 - DNA, 25 bp, Homo sapien
aacaaggttcgttagctgtgacaaa

SEQ ID NO: 2233404 - DNA, 25 bp, Homo sapien
ggaaacgggcgctctcaatacacta

SEQ ID NO: 2233405 - DNA, 25 bp, Homo sapien
aatggtcaggaagaatcttagagat

SEQ ID NO: 2233406 - DNA, 25 bp, Homo sapien
gatttagtccaatgtacaattccag

SEQ ID NO: 2233407 - DNA, 25 bp, Homo sapien
caggaagaatcttagagatgattta

SEQ ID NO: 2233408 - DNA, 25 bp, Homo sapien
atgatttagtccaatgtacaattcc

SEQ ID NO: 2233409 - DNA, 25 bp, Homo sapien
atgtgtacccgccacgatggtcgtg

SEQ ID NO: 2233410 - DNA, 25 bp, Homo sapien
tctgcgtggttacaaaaacttactg

SEQ ID NO: 2233411 - DNA, 25 bp, Homo sapien
gatggtcgtgtgcaatcagtacaac

SEQ ID NO: 2233412 - DNA, 25 bp, Homo sapien
tctgctcataagactaatcgttgct

SEQ ID NO: 2233413 - DNA, 25 bp, Homo sapien
taatagttaatttcagtattacatg

SEQ ID NO: 2233414 - DNA, 25 bp, Homo sapien
tttaatagttaatttcagtattaca

SEQ ID NO: 2233415 - DNA, 25 bp, Homo sapien
tgacgataatcctcgaaaacccgtg

SEQ ID NO: 2233416 - DNA, 25 bp, Homo sapien
gtgtgcatgctcctcgtgacgataa

SEQ ID NO: 2233417 - DNA, 25 bp, Homo sapien
tacttttggcagacatcaccctatg

SEQ ID NO: 2233418 - DNA, 25 bp, Homo sapien
ggtaataatccagaaacgacatgct

SEQ ID NO: 2233419 - DNA, 25 bp, Homo sapien
cttcctcaactctacccgagaagca

SEQ ID NO: 2233420 - DNA, 25 bp, Homo sapien
tcctcaactctacccgagaagcact

SEQ ID NO: 2233421 - DNA, 25 bp, Homo sapien
tcaactctacccgagaagcactgat

SEQ ID NO: 2233422 - DNA, 25 bp, Homo sapien
aactctacccgagaagcactgatca

SEQ ID NO: 2233423 - DNA, 25 bp, Homo sapien
ccttctctagatccaatttaatagc

SEQ ID NO: 2233424 - DNA, 25 bp, Homo sapien
ttggtgataaactacctggaactac

SEQ ID NO: 2233425 - DNA, 25 bp, Homo sapien
tacctggaactaccttctctagatc

SEQ ID NO: 2233426 - DNA, 25 bp, Homo sapien
atttaatagctaccttttgaatcac

SEQ ID NO: 2233427 - DNA, 25 bp, Homo sapien
cactgcagggagtccatatgggcat

SEQ ID NO: 2233428 - DNA, 25 bp, Homo sapien
ctgaattccgatcaatccactgcag

SEQ ID NO: 2233429 - DNA, 25 bp, Homo sapien
caatccactgcagggagtccatatg

SEQ ID NO: 2233430 - DNA, 25 bp, Homo sapien
tccactgcagggagtccatatgggc

SEQ ID NO: 2233431 - DNA, 25 bp, Homo sapien
tcagaattctgcagatctggtggag

SEQ ID NO: 2233432 - DNA, 25 bp, Homo sapien
catataagacttttagattatgatt

SEQ ID NO: 2233433 - DNA, 25 bp, Homo sapien
aaaatacatataagacttttagatt

SEQ ID NO: 2233434 - DNA, 25 bp, Homo sapien
atacatataagacttttagattatg

SEQ ID NO: 2233435 - DNA, 25 bp, Homo sapien
tacatataagacttttagattatga

SEQ ID NO: 2233436 - DNA, 25 bp, Homo sapien
aactcacaaccttttctgcctctag

SEQ ID NO: 2233437 - DNA, 25 bp, Homo sapien
taaccacacccaaggggcttcatat

SEQ ID NO: 2233438 - DNA, 25 bp, Homo sapien
cctctagatgtttcctgctccacta

SEQ ID NO: 2233439 - DNA, 25 bp, Homo sapien
tgggaataaccacaaaaaactcaca

SEQ ID NO: 2233440 - DNA, 25 bp, Homo sapien
attaacaacgtccttgagatcttgg

SEQ ID NO: 2233441 - DNA, 25 bp, Homo sapien
cggatcagtagtgtcagaagaactt

SEQ ID NO: 2233442 - DNA, 25 bp, Homo sapien
cagaagaactttcaaatgtattcag

SEQ ID NO: 2233443 - DNA, 25 bp, Homo sapien
tgtattcaggtgattaacaacgtcc

SEQ ID NO: 2233444 - DNA, 25 bp, Homo sapien
gtccactctggtcacgcgtagactc

SEQ ID NO: 2233445 - DNA, 25 bp, Homo sapien
tcctctaaataagtcaacagaaatt

SEQ ID NO: 2233446 - DNA, 25 bp, Homo sapien
cagaaattctagttcctgctgctgt

SEQ ID NO: 2233447 - DNA, 25 bp, Homo sapien
caggataaaatccaattcttgttcc

SEQ ID NO: 2233448 - DNA, 25 bp, Homo sapien
cttttctgatccagtttcactttgt

SEQ ID NO: 2233449 - DNA, 25 bp, Homo sapien
tcacttctccatgtaaaatacgaat

SEQ ID NO: 2233450 - DNA, 25 bp, Homo sapien
aagcattgacctgagtggcctggag

SEQ ID NO: 2233451 - DNA, 25 bp, Homo sapien
gctcaaggttccactcatttataag

SEQ ID NO: 2233452 - DNA, 25 bp, Homo sapien
gaccatatgtcatcacaggagttgc

SEQ ID NO: 2233453 - DNA, 25 bp, Homo sapien
tcaatcaatgtatggtcccaagcat

SEQ ID NO: 2233454 - DNA, 25 bp, Homo sapien
tagtagtgttggtggtgaaagtggc

SEQ ID NO: 2233455 - DNA, 25 bp, Homo sapien
gataacagttggttttggttcacag

SEQ ID NO: 2233456 - DNA, 25 bp, Homo sapien
ctaacagttgaagtataaggtacaa

SEQ ID NO: 2233457 - DNA, 25 bp, Homo sapien
ggttcacagtaaagccactggtgat

SEQ ID NO: 2233458 - DNA, 25 bp, Homo sapien
aaaatcttactaactgcagtaggag

SEQ ID NO: 2233459 - DNA, 25 bp, Homo sapien
aatcccaaggttataatatcaagtg

SEQ ID NO: 2233460 - DNA, 25 bp, Homo sapien
tctagccgaagttgttggagcacca

SEQ ID NO: 2233461 - DNA, 25 bp, Homo sapien
tgagacccccaagacatcctgataa

SEQ ID NO: 2233462 - DNA, 25 bp, Homo sapien
agagcccaatagcagcagtggaggt

SEQ ID NO: 2233463 - DNA, 25 bp, Homo sapien
gagagcccaatagcagcagtggagg

SEQ ID NO: 2233464 - DNA, 25 bp, Homo sapien
gagcccaatagcagcagtggaggtc

SEQ ID NO: 2233465 - DNA, 25 bp, Homo sapien
gcttgaactagtggtggtggcaaca

SEQ ID NO: 2233466 - DNA, 25 bp, Homo sapien
cttgaactagtggtggtggcaacag

SEQ ID NO: 2233467 - DNA, 25 bp, Homo sapien
tgcttgaactagtggtggtggcaac

SEQ ID NO: 2233468 - DNA, 25 bp, Homo sapien
ggtgcttgaactagtggtggtggca

SEQ ID NO: 2233469 - DNA, 25 bp, Homo sapien
ctgtctgccaaggacgaaaggagct

SEQ ID NO: 2233470 - DNA, 25 bp, Homo sapien
tggactgtctgccaaggacgaaagg

SEQ ID NO: 2233471 - DNA, 25 bp, Homo sapien
tctgccaaggacgaaaggagctatt

SEQ ID NO: 2233472 - DNA, 25 bp, Homo sapien
ttgtggactgtctgccaaggacgaa

SEQ ID NO: 2233473 - DNA, 25 bp, Homo sapien
gagcggcatgcctcatggaaacaat

SEQ ID NO: 2233474 - DNA, 25 bp, Homo sapien
aaatgctgttggctgagcggcatgc

SEQ ID NO: 2233475 - DNA, 25 bp, Homo sapien
taaggggtaattctacaaatgctgt

SEQ ID NO: 2233476 - DNA, 25 bp, Homo sapien
ggtgtgcctccaccgatgaatgaga

SEQ ID NO: 2233477 - DNA, 25 bp, Homo sapien
ctccaaaattaaacctgctgatgac

SEQ ID NO: 2233478 - DNA, 25 bp, Homo sapien
tccaaaattaaacctgctgatgact

SEQ ID NO: 2233479 - DNA, 25 bp, Homo sapien
caaaattaaacctgctgatgactcc

SEQ ID NO: 2233480 - DNA, 25 bp, Homo sapien
ccaaaattaaacctgctgatgactc

SEQ ID NO: 2233481 - DNA, 25 bp, Homo sapien
tagtgaagtttaaatctgagaaaca

SEQ ID NO: 2233482 - DNA, 25 bp, Homo sapien
gagacctagtgaagtttaaatctga

SEQ ID NO: 2233483 - DNA, 25 bp, Homo sapien
tcagcagagacctagtgaagtttaa

SEQ ID NO: 2233484 - DNA, 25 bp, Homo sapien
cctgaatcagcagagacctagtgaa

SEQ ID NO: 2233485 - DNA, 25 bp, Homo sapien
ctctaagcttctgtatttccgacat

SEQ ID NO: 2233486 - DNA, 25 bp, Homo sapien
cggacctgctcgagccggaaagaat

SEQ ID NO: 2233487 - DNA, 25 bp, Homo sapien
gaaagaatcggcctccttagtgggc

SEQ ID NO: 2233488 - DNA, 25 bp, Homo sapien
tcccgctgaagtgaagctaaccgag

SEQ ID NO: 2233489 - DNA, 25 bp, Homo sapien
tccgagactgctagacgccagaggg

SEQ ID NO: 2233490 - DNA, 25 bp, Homo sapien
tgtcgtctaaaagtgtggcctggga

SEQ ID NO: 2233491 - DNA, 25 bp, Homo sapien
ggctgccaccaaggctttttcctgt

SEQ ID NO: 2233492 - DNA, 25 bp, Homo sapien
agttagtgcggtaaattgggctgcc

SEQ ID NO: 2233493 - DNA, 25 bp, Homo sapien
ttatttgggatcagagttagtgcgg

SEQ ID NO: 2233494 - DNA, 25 bp, Homo sapien
ccccagaactagcatgagcaatcat

SEQ ID NO: 2233495 - DNA, 25 bp, Homo sapien
taaagtgaatttgaagagagaggaa

SEQ ID NO: 2233496 - DNA, 25 bp, Homo sapien
aatagtcacattaacctctgacaca

SEQ ID NO: 2233497 - DNA, 25 bp, Homo sapien
caatagcttgttgccactggtaaaa

SEQ ID NO: 2233498 - DNA, 25 bp, Homo sapien
tgtacttggtacttatttctccaat

SEQ ID NO: 2233499 - DNA, 25 bp, Homo sapien
tagcttgttgccactggtaaaagcc

SEQ ID NO: 2233500 - DNA, 25 bp, Homo sapien
tctccaatagcttgttgccactggt

SEQ ID NO: 2233501 - DNA, 25 bp, Homo sapien
cagatcaaaacttctctacatattt

SEQ ID NO: 2233502 - DNA, 25 bp, Homo sapien
gcatgtaaacatatgatgagacttt

SEQ ID NO: 2233503 - DNA, 25 bp, Homo sapien
ttaagaggtctgacaccgaacacca

SEQ ID NO: 2233504 - DNA, 25 bp, Homo sapien
taagaggtctgacaccgaacaccac

SEQ ID NO: 2233505 - DNA, 25 bp, Homo sapien
tcattctcaggcaagtttaccttga

SEQ ID NO: 2233506 - DNA, 25 bp, Homo sapien
tctcaggcaagtttaccttgaattc

SEQ ID NO: 2233507 - DNA, 25 bp, Homo sapien
ggcaagtttaccttgaattcaatga

SEQ ID NO: 2233508 - DNA, 25 bp, Homo sapien
atggcctaggataaattggcattcc

SEQ ID NO: 2233509 - DNA, 25 bp, Homo sapien
tggcttctggaatgcttcaaccagc

SEQ ID NO: 2233510 - DNA, 25 bp, Homo sapien
tattggcttctggaatgcttcaacc

SEQ ID NO: 2233511 - DNA, 25 bp, Homo sapien
attggcttctggaatgcttcaacca

SEQ ID NO: 2233512 - DNA, 25 bp, Homo sapien
ttggcttctggaatgcttcaaccag

SEQ ID NO: 2233513 - DNA, 25 bp, Homo sapien
ggttcttggtatccttcaccatgga

SEQ ID NO: 2233514 - DNA, 25 bp, Homo sapien
tgaatttgctgaacctttccaggtc

SEQ ID NO: 2233515 - DNA, 25 bp, Homo sapien
gaaaaggtcttctccttgtcgagta

SEQ ID NO: 2233516 - DNA, 25 bp, Homo sapien
tctagaatcttcttctctcgaagta

SEQ ID NO: 2233517 - DNA, 25 bp, Homo sapien
tcggcaattgggacagtactctact

SEQ ID NO: 2233518 - DNA, 25 bp, Homo sapien
caattgggacagtactctactcctc

SEQ ID NO: 2233519 - DNA, 25 bp, Homo sapien
ctcggcaattgggacagtactctac

SEQ ID NO: 2233520 - DNA, 25 bp, Homo sapien
ggcaattgggacagtactctactcc

SEQ ID NO: 2233521 - DNA, 25 bp, Homo sapien
ttatataagtcttctagggttactg

SEQ ID NO: 2233522 - DNA, 25 bp, Homo sapien
attatataagtcttctagggttact

SEQ ID NO: 2233523 - DNA, 25 bp, Homo sapien
tatataagtcttctagggttactga

SEQ ID NO: 2233524 - DNA, 25 bp, Homo sapien
attcttatcaggatggtacctcaag

SEQ ID NO: 2233525 - DNA, 25 bp, Homo sapien
agtagcattgattgggtttgacccc

SEQ ID NO: 2233526 - DNA, 25 bp, Homo sapien
ccccaaaacatcatagtaagtggtt

SEQ ID NO: 2233527 - DNA, 25 bp, Homo sapien
catcttctgccggtgagcaggctga

SEQ ID NO: 2233528 - DNA, 25 bp, Homo sapien
ctggaagttctcaaacgaggtgcca

SEQ ID NO: 2233529 - DNA, 25 bp, Homo sapien
gttctcaaacgaggtgccaaacttc

SEQ ID NO: 2233530 - DNA, 25 bp, Homo sapien
gaagttctcaaacgaggtgccaaac

SEQ ID NO: 2233531 - DNA, 25 bp, Homo sapien
tctcaaacgaggtgccaaacttcat

SEQ ID NO: 2233532 - DNA, 25 bp, Homo sapien
cctgtgtgcagcctgatttgcactt

SEQ ID NO: 2233533 - DNA, 25 bp, Homo sapien
gaaggattaatctgttcagagagag

SEQ ID NO: 2233534 - DNA, 25 bp, Homo sapien
ccagctgactcaactggtttggctc

SEQ ID NO: 2233535 - DNA, 25 bp, Homo sapien
cacttggattggctgatggatagac

SEQ ID NO: 2233536 - DNA, 25 bp, Homo sapien
atggcaaccataagagttatactgt

SEQ ID NO: 2233537 - DNA, 25 bp, Homo sapien
ggcaaccataagagttatactgtat

SEQ ID NO: 2233538 - DNA, 25 bp, Homo sapien
cccagaatttaagagattatccttg

SEQ ID NO: 2233539 - DNA, 25 bp, Homo sapien
attgtttgtacccagaatttaagag

SEQ ID NO: 2233540 - DNA, 25 bp, Homo sapien
ttcccacagatggtgccagtaaatc

SEQ ID NO: 2233541 - DNA, 25 bp, Homo sapien
caagttgggaggcgtccttcctacg

SEQ ID NO: 2233542 - DNA, 25 bp, Homo sapien
tggtgccagtaaatcaaacttctgg

SEQ ID NO: 2233543 - DNA, 25 bp, Homo sapien
tacgccttagcgctgcttctagtct

SEQ ID NO: 2233544 - DNA, 25 bp, Homo sapien
taatttcccgaagagcctgttgtca

SEQ ID NO: 2233545 - DNA, 25 bp, Homo sapien
catctcttacagtaagtcttttcat

SEQ ID NO: 2233546 - DNA, 25 bp, Homo sapien
tgaagattttaatttcccgaagagc

SEQ ID NO: 2233547 - DNA, 25 bp, Homo sapien
gaagagcctgttgtcatctcttaca

SEQ ID NO: 2233548 - DNA, 25 bp, Homo sapien
aaggaggacagtacagcaacaagcc

SEQ ID NO: 2233549 - DNA, 25 bp, Homo sapien
gaaggctgatattcaaaggaggaca

SEQ ID NO: 2233550 - DNA, 25 bp, Homo sapien
taatccaaggatggcataaggcctc

SEQ ID NO: 2233551 - DNA, 25 bp, Homo sapien
caacaagcctgaaaaggatgccatg

SEQ ID NO: 2233552 - DNA, 25 bp, Homo sapien
cgagacatataaaaccacacctgtt

SEQ ID NO: 2233553 - DNA, 25 bp, Homo sapien
ttttcttccctgtctggtgaaaggc

SEQ ID NO: 2233554 - DNA, 25 bp, Homo sapien
ggcagccagagaaacagaagatggg

SEQ ID NO: 2233555 - DNA, 25 bp, Homo sapien
tcttccctgtctggtgaaaggcagc

SEQ ID NO: 2233556 - DNA, 25 bp, Homo sapien
tgcatgcaccttctatgatctaggg

SEQ ID NO: 2233557 - DNA, 25 bp, Homo sapien
gggaaggctggtatcacaccaagta

SEQ ID NO: 2233558 - DNA, 25 bp, Homo sapien
cacaccaagtatgtggctgcatgca

SEQ ID NO: 2233559 - DNA, 25 bp, Homo sapien
caaaggagaatttccggcaaacaca

SEQ ID NO: 2233560 - DNA, 25 bp, Homo sapien
gcagcttgaatggagcctgagcatg

SEQ ID NO: 2233561 - DNA, 25 bp, Homo sapien
cacaaagcagcttgaatggagcctg

SEQ ID NO: 2233562 - DNA, 25 bp, Homo sapien
ttaccacaaagcagcttgaatggag

SEQ ID NO: 2233563 - DNA, 25 bp, Homo sapien
gtccagtgacacagttcctctcaat

SEQ ID NO: 2233564 - DNA, 25 bp, Homo sapien
ctggagatgggaggccaattcttcc

SEQ ID NO: 2233565 - DNA, 25 bp, Homo sapien
ggagaccaagagcttctcttgaatc

SEQ ID NO: 2233566 - DNA, 25 bp, Homo sapien
ttgccagctggcagatcgctccctt

SEQ ID NO: 2233567 - DNA, 25 bp, Homo sapien
gccagctggcagatcgctcccttac

SEQ ID NO: 2233568 - DNA, 25 bp, Homo sapien
ctttgccagctggcagatcgctccc

SEQ ID NO: 2233569 - DNA, 25 bp, Homo sapien
tttgccagctggcagatcgctccct

SEQ ID NO: 2233570 - DNA, 25 bp, Homo sapien
ccgaaactcaaggtgcgtgtggatg

SEQ ID NO: 2233571 - DNA, 25 bp, Homo sapien
cgtgtggatgtttgcgatggtgacc

SEQ ID NO: 2233572 - DNA, 25 bp, Homo sapien
gctcgaagccgctcacactccagtg

SEQ ID NO: 2233573 - DNA, 25 bp, Homo sapien
ggagcccgagccgaaactcaaggtg

SEQ ID NO: 2233574 - DNA, 25 bp, Homo sapien
ccgagccaggaactgcgcctttaag

SEQ ID NO: 2233575 - DNA, 25 bp, Homo sapien
gaactgcgcctttaagccgctttcc

SEQ ID NO: 2233576 - DNA, 25 bp, Homo sapien
gcactcgagggtcgggaggcgccgg

SEQ ID NO: 2233577 - DNA, 25 bp, Homo sapien
ccattcggggaaatcgacgccagca

SEQ ID NO: 2233578 - DNA, 25 bp, Homo sapien
ctcttccaggtgaggaatgatgcac

SEQ ID NO: 2233579 - DNA, 25 bp, Homo sapien
ttcatgccccacacagccaatggct

SEQ ID NO: 2233580 - DNA, 25 bp, Homo sapien
gcatcagagcttggggcttcatgcc

SEQ ID NO: 2233581 - DNA, 25 bp, Homo sapien
ggtagaggggtgcatgtttcagcat

SEQ ID NO: 2233582 - DNA, 25 bp, Homo sapien
gctgggggctttcctctttcactcc

SEQ ID NO: 2233583 - DNA, 25 bp, Homo sapien
cagctgggggctttcctctttcact

SEQ ID NO: 2233584 - DNA, 25 bp, Homo sapien
ctcagctgggggctttcctctttca

SEQ ID NO: 2233585 - DNA, 25 bp, Homo sapien
ctctttcactccctgtcctgctgct

SEQ ID NO: 2233586 - DNA, 25 bp, Homo sapien
ctgggcctctggcgcattttcaatt

SEQ ID NO: 2233587 - DNA, 25 bp, Homo sapien
aatttcccagtctactagttgatcc

SEQ ID NO: 2233588 - DNA, 25 bp, Homo sapien
gcctctggcgcattttcaatttccc

SEQ ID NO: 2233589 - DNA, 25 bp, Homo sapien
cccagtctactagttgatccatttc

SEQ ID NO: 2233590 - DNA, 25 bp, Homo sapien
gaccacattcacagtccatagcatt

SEQ ID NO: 2233591 - DNA, 25 bp, Homo sapien
tgaccacattcacagtccatagcat

SEQ ID NO: 2233592 - DNA, 25 bp, Homo sapien
tagtggtagccaaaagtgttgggta

SEQ ID NO: 2233593 - DNA, 25 bp, Homo sapien
cttatgcaggcttacttcattattc

SEQ ID NO: 2233594 - DNA, 25 bp, Homo sapien
tatctccttatgcaggcttacttca

SEQ ID NO: 2233595 - DNA, 25 bp, Homo sapien
ttgaattatctccttatgcaggctt

SEQ ID NO: 2233596 - DNA, 25 bp, Homo sapien
gaattatctccttatgcaggcttac

SEQ ID NO: 2233597 - DNA, 25 bp, Homo sapien
tagttctagagaagcaagtctgggt

SEQ ID NO: 2233598 - DNA, 25 bp, Homo sapien
tatgaattttatgcatgagctgaac

SEQ ID NO: 2233599 - DNA, 25 bp, Homo sapien
gtctgggtaatgataaactatgaat

SEQ ID NO: 2233600 - DNA, 25 bp, Homo sapien
cattgaaaaacttcagccccaagct

SEQ ID NO: 2233601 - DNA, 25 bp, Homo sapien
gctcctccatgcttgagtctggaga

SEQ ID NO: 2233602 - DNA, 25 bp, Homo sapien
gagaacctgtttcgtggcctttata

SEQ ID NO: 2233603 - DNA, 25 bp, Homo sapien
agtctggagaacctgtttcgtggcc

SEQ ID NO: 2233604 - DNA, 25 bp, Homo sapien
gctgaagccccccacttggctgtgg

SEQ ID NO: 2233605 - DNA, 25 bp, Homo sapien
tgtaggacttcacccttcttgaaaa

SEQ ID NO: 2233606 - DNA, 25 bp, Homo sapien
gaatctgtaggacttcacccttctt

SEQ ID NO: 2233607 - DNA, 25 bp, Homo sapien
tctgaatctgtaggacttcaccctt

SEQ ID NO: 2233608 - DNA, 25 bp, Homo sapien
ctcaacttctgaatctgtaggactt

SEQ ID NO: 2233609 - DNA, 25 bp, Homo sapien
aagggtcaccagattctgccttggg

SEQ ID NO: 2233610 - DNA, 25 bp, Homo sapien
ttttgacttggagcccaagggtcac

SEQ ID NO: 2233611 - DNA, 25 bp, Homo sapien
cccaagggtcaccagattctgcctt

SEQ ID NO: 2233612 - DNA, 25 bp, Homo sapien
tcaccagattctgccttggggccca

SEQ ID NO: 2233613 - DNA, 25 bp, Homo sapien
ctggaggggaggactaaggagcaaa

SEQ ID NO: 2233614 - DNA, 25 bp, Homo sapien
tggaggggaggactaaggagcaaac

SEQ ID NO: 2233615 - DNA, 25 bp, Homo sapien
catcttggatgctcgttttcttcct

SEQ ID NO: 2233616 - DNA, 25 bp, Homo sapien
accacatcttggatgctcgttttct

SEQ ID NO: 2233617 - DNA, 25 bp, Homo sapien
caccacatcttggatgctcgttttc

SEQ ID NO: 2233618 - DNA, 25 bp, Homo sapien
cactttcctatagcacaggcccaaa

SEQ ID NO: 2233619 - DNA, 25 bp, Homo sapien
ccagatgggcccaaggcaaactgcc

SEQ ID NO: 2233620 - DNA, 25 bp, Homo sapien
tatggtgccagatgggcccaaggca

SEQ ID NO: 2233621 - DNA, 25 bp, Homo sapien
ttctggctacgctcgaagcccactg

SEQ ID NO: 2233622 - DNA, 25 bp, Homo sapien
ttcagtcaacctcccagaggtgggt

SEQ ID NO: 2233623 - DNA, 25 bp, Homo sapien
ggcagccatgctttgtagagtccag

SEQ ID NO: 2233624 - DNA, 25 bp, Homo sapien
ggaatagatactggtcaggcagcca

SEQ ID NO: 2233625 - DNA, 25 bp, Homo sapien
tagaagctgctcgttttccccgtgc

SEQ ID NO: 2233626 - DNA, 25 bp, Homo sapien
tcagtgccagccagtttaagagaca

SEQ ID NO: 2233627 - DNA, 25 bp, Homo sapien
tgtttttgcacgcaggcaggctgct

SEQ ID NO: 2233628 - DNA, 25 bp, Homo sapien
catagttggaggctgctatcagaac

SEQ ID NO: 2233629 - DNA, 25 bp, Homo sapien
ccttggtcacattctcatagttgga

SEQ ID NO: 2233630 - DNA, 25 bp, Homo sapien
gccccatgggacgaggattctctcc

SEQ ID NO: 2233631 - DNA, 25 bp, Homo sapien
aggagtcagaatcagccccatggga

SEQ ID NO: 2233632 - DNA, 25 bp, Homo sapien
aggaaggagtcagaatcagccccat

SEQ ID NO: 2233633 - DNA, 25 bp, Homo sapien
catgtcccctaacagtggctccaga

SEQ ID NO: 2233634 - DNA, 25 bp, Homo sapien
cactggttgcctgctcctttaggac

SEQ ID NO: 2233635 - DNA, 25 bp, Homo sapien
gaacactggttgcctgctcctttag

SEQ ID NO: 2233636 - DNA, 25 bp, Homo sapien
aacactggttgcctgctcctttagg

SEQ ID NO: 2233637 - DNA, 25 bp, Homo sapien
ctggttgcctgctcctttaggactg

SEQ ID NO: 2233638 - DNA, 25 bp, Homo sapien
ttgagggcggcgctggcatgggccc

SEQ ID NO: 2233639 - DNA, 25 bp, Homo sapien
gttggcgcgtcggaagcagacatcc

SEQ ID NO: 2233640 - DNA, 25 bp, Homo sapien
tcaaagtgacttgagggcggcgctg

SEQ ID NO: 2233641 - DNA, 25 bp, Homo sapien
cacctggtctttggagtgagttggc

SEQ ID NO: 2233642 - DNA, 25 bp, Homo sapien
cccgagatcccaaggattcgtttgg

SEQ ID NO: 2233643 - DNA, 25 bp, Homo sapien
tcgaggccacgaaagaggaaattgg

SEQ ID NO: 2233644 - DNA, 25 bp, Homo sapien
gaaattggaaggcaagatacgcggg

SEQ ID NO: 2233645 - DNA, 25 bp, Homo sapien
gattcgtttgggttgcctggcagcc

SEQ ID NO: 2233646 - DNA, 25 bp, Homo sapien
cggcgcgagcgggaagttttccgct

SEQ ID NO: 2233647 - DNA, 25 bp, Homo sapien
cgagcgggaagttttccgctgcggg

SEQ ID NO: 2233648 - DNA, 25 bp, Homo sapien
ctgttggaaaagtggcggcgcgagc

SEQ ID NO: 2233649 - DNA, 25 bp, Homo sapien
gagataaggggcgaggggaatcaga

SEQ ID NO: 2233650 - DNA, 25 bp, Homo sapien
gccttacttgcaatactgggcaaag

SEQ ID NO: 2233651 - DNA, 25 bp, Homo sapien
tagagccttacttgcaatactgggc

SEQ ID NO: 2233652 - DNA, 25 bp, Homo sapien
gagccttacttgcaatactgggcaa

SEQ ID NO: 2233653 - DNA, 25 bp, Homo sapien
ttagagccttacttgcaatactggg

SEQ ID NO: 2233654 - DNA, 25 bp, Homo sapien
gagtcaggggttgctccctcacagg

SEQ ID NO: 2233655 - DNA, 25 bp, Homo sapien
gacaattcagagatggtgcactgga

SEQ ID NO: 2233656 - DNA, 25 bp, Homo sapien
caactgctgggcgtaagtccttggc

SEQ ID NO: 2233657 - DNA, 25 bp, Homo sapien
ggactgtgctcctgattggacaatt

SEQ ID NO: 2233658 - DNA, 25 bp, Homo sapien
taccaccatgttttccagacgatgc

SEQ ID NO: 2233659 - DNA, 25 bp, Homo sapien
tattgactatagcttcaggagggag

SEQ ID NO: 2233660 - DNA, 25 bp, Homo sapien
gacagctgtatagagggtcctctgc

SEQ ID NO: 2233661 - DNA, 25 bp, Homo sapien
tcctgacctgctagaatgggtgaca

SEQ ID NO: 2233662 - DNA, 25 bp, Homo sapien
tgcgaagaaggccaagttgaggtcc

SEQ ID NO: 2233663 - DNA, 25 bp, Homo sapien
ttcatcagtgctgcgaagaaggcca

SEQ ID NO: 2233664 - DNA, 25 bp, Homo sapien
tcagtgctgcgaagaaggccaagtt

SEQ ID NO: 2233665 - DNA, 25 bp, Homo sapien
aaggccaagttgaggtccaatcctg

SEQ ID NO: 2233666 - DNA, 25 bp, Homo sapien
tctccaggtgaacagctctgaaggg

SEQ ID NO: 2233667 - DNA, 25 bp, Homo sapien
gccccaaggcatatgaaggagattc

SEQ ID NO: 2233668 - DNA, 25 bp, Homo sapien
tagcaaacctacagatggccgaatg

SEQ ID NO: 2233669 - DNA, 25 bp, Homo sapien
gccgaatgatgaaaaagccagcatt

SEQ ID NO: 2233670 - DNA, 25 bp, Homo sapien
catgccaggccctcccatatatttt

SEQ ID NO: 2233671 - DNA, 25 bp, Homo sapien
ataatctatgcacatgttcccttat

SEQ ID NO: 2233672 - DNA, 25 bp, Homo sapien
acgcccggccatatgaaataatcta

SEQ ID NO: 2233673 - DNA, 25 bp, Homo sapien
acatgttcccttatactttattgtt

SEQ ID NO: 2233674 - DNA, 25 bp, Homo sapien
gaccgaatggtgagatgcctagctt

SEQ ID NO: 2233675 - DNA, 25 bp, Homo sapien
tcacacatgacggagatggcacagc

SEQ ID NO: 2233676 - DNA, 25 bp, Homo sapien
aacaggacaaatccccaagcacggg

SEQ ID NO: 2233677 - DNA, 25 bp, Homo sapien
atggcacagcggagcatggacagac

SEQ ID NO: 2233678 - DNA, 25 bp, Homo sapien
taaaaatcctgagcagacaggtgtg

SEQ ID NO: 2233679 - DNA, 25 bp, Homo sapien
ttgatcaccctgagtatgctacatg

SEQ ID NO: 2233680 - DNA, 25 bp, Homo sapien
aatgttagacaaccatcgcctgatc

SEQ ID NO: 2233681 - DNA, 25 bp, Homo sapien
tacttctcgactgttttaccggctg

SEQ ID NO: 2233682 - DNA, 25 bp, Homo sapien
caagtacgggaatactagtcgctat

SEQ ID NO: 2233683 - DNA, 25 bp, Homo sapien
catttcatccttgtacaagtacggg

SEQ ID NO: 2233684 - DNA, 25 bp, Homo sapien
gtcgctataacagatcaactcccta

SEQ ID NO: 2233685 - DNA, 25 bp, Homo sapien
catggcacactccaatgcaagtgtt

SEQ ID NO: 2233686 - DNA, 25 bp, Homo sapien
cacagcaaagtggtggccacctaca

SEQ ID NO: 2233687 - DNA, 25 bp, Homo sapien
gagaactggccagcatttccccatg

SEQ ID NO: 2233688 - DNA, 25 bp, Homo sapien
atgttgaggcctaaccccaatgtga

SEQ ID NO: 2233689 - DNA, 25 bp, Homo sapien
ttagatgaggtcactagggcagagc

SEQ ID NO: 2233690 - DNA, 25 bp, Homo sapien
catggaatcttctccggtcctgcta

SEQ ID NO: 2233691 - DNA, 25 bp, Homo sapien
tctagacttctctcagctggcgcca

SEQ ID NO: 2233692 - DNA, 25 bp, Homo sapien
tacttacgttgaattaggtctctgg

SEQ ID NO: 2233693 - DNA, 25 bp, Homo sapien
gaagcattgctccaaaatacaggtg

SEQ ID NO: 2233694 - DNA, 25 bp, Homo sapien
ggcccaaatgaacattgtaccatag

SEQ ID NO: 2233695 - DNA, 25 bp, Homo sapien
cctttcctggccaaatatcctcttg

SEQ ID NO: 2233696 - DNA, 25 bp, Homo sapien
taccatagtcttctggaaagcaaac

SEQ ID NO: 2233697 - DNA, 25 bp, Homo sapien
cagctcagcttgagcagacattggg

SEQ ID NO: 2233698 - DNA, 25 bp, Homo sapien
tcgggatatctattttacagctagc

SEQ ID NO: 2233699 - DNA, 25 bp, Homo sapien
tgagtgagtttcttggcccatcatc

SEQ ID NO: 2233700 - DNA, 25 bp, Homo sapien
tttactttgggaagctacatggcta

SEQ ID NO: 2233701 - DNA, 25 bp, Homo sapien
ccatggcggccttaagtgagtgagt

SEQ ID NO: 2233702 - DNA, 25 bp, Homo sapien
gcctagcctcaaagcagttcttgac

SEQ ID NO: 2233703 - DNA, 25 bp, Homo sapien
tagcaggagcagacctgccagggca

SEQ ID NO: 2233704 - DNA, 25 bp, Homo sapien
gccacggtgcctagcctcaaagcag

SEQ ID NO: 2233705 - DNA, 25 bp, Homo sapien
ccaaagctaagtggagttgcagcga

SEQ ID NO: 2233706 - DNA, 25 bp, Homo sapien
agtggagctattctattaggctggt

SEQ ID NO: 2233707 - DNA, 25 bp, Homo sapien
tggagtgttgatcctacagccccat

SEQ ID NO: 2233708 - DNA, 25 bp, Homo sapien
ggagctattctattaggctggtgca

SEQ ID NO: 2233709 - DNA, 25 bp, Homo sapien
ggagtggagtgttgatcctacagcc

SEQ ID NO: 2233710 - DNA, 25 bp, Homo sapien
tagggcctcctatggcaaaaattgg

SEQ ID NO: 2233711 - DNA, 25 bp, Homo sapien
aagcaactgggtgtggcctgactcc

SEQ ID NO: 2233712 - DNA, 25 bp, Homo sapien
aaattggtcacctggacaggaacag

SEQ ID NO: 2233713 - DNA, 25 bp, Homo sapien
agctctgggacggtgagtttcctca

SEQ ID NO: 2233714 - DNA, 25 bp, Homo sapien
gagatgcctagtgctggcagagaaa

SEQ ID NO: 2233715 - DNA, 25 bp, Homo sapien
cagtggtagctgatataacgatgct

SEQ ID NO: 2233716 - DNA, 25 bp, Homo sapien
cccgagaacctagcagtcagagcaa

SEQ ID NO: 2233717 - DNA, 25 bp, Homo sapien
ataataacgatgaaggtgcagaggc

SEQ ID NO: 2233718 - DNA, 25 bp, Homo sapien
cagctttgagtgaggacatgtgtca

SEQ ID NO: 2233719 - DNA, 25 bp, Homo sapien
tgtccggatttgtaaaagctcccca

SEQ ID NO: 2233720 - DNA, 25 bp, Homo sapien
cagttgtggttcatgctgccgggct

SEQ ID NO: 2233721 - DNA, 25 bp, Homo sapien
tgagaaccaccctcttgtaccctgg

SEQ ID NO: 2233722 - DNA, 25 bp, Homo sapien
ccccactccagtcacccggaactca

SEQ ID NO: 2233723 - DNA, 25 bp, Homo sapien
cccactccagtcacccggaactcac

SEQ ID NO: 2233724 - DNA, 25 bp, Homo sapien
cccaggcagggcgaagcgtcccggt

SEQ ID NO: 2233725 - DNA, 25 bp, Homo sapien
catggaggcccacatgccttacgct

SEQ ID NO: 2233726 - DNA, 25 bp, Homo sapien
cgcatggaggcccacatgccttacg

SEQ ID NO: 2233727 - DNA, 25 bp, Homo sapien
tctggcggccgcatggaggcccaca

SEQ ID NO: 2233728 - DNA, 25 bp, Homo sapien
cgtgagagcgtcttagagcagcagc

SEQ ID NO: 2233729 - DNA, 25 bp, Homo sapien
tgatcaacgtccagacatagcaagt

SEQ ID NO: 2233730 - DNA, 25 bp, Homo sapien
ggaggagatcttacaccaaggctta

SEQ ID NO: 2233731 - DNA, 25 bp, Homo sapien
gctgatcagcatgggcttggaagcc

SEQ ID NO: 2233732 - DNA, 25 bp, Homo sapien
tgaggtcaggagggaggggtccgaa

SEQ ID NO: 2233733 - DNA, 25 bp, Homo sapien
cggggccatgtgaggtcaggaggga

SEQ ID NO: 2233734 - DNA, 25 bp, Homo sapien
atgcggggccatgtgaggtcaggag

SEQ ID NO: 2233735 - DNA, 25 bp, Homo sapien
gtgaggtcaggagggaggggtccga

SEQ ID NO: 2233736 - DNA, 25 bp, Homo sapien
tcacttgtccttgcaaaagccacag

SEQ ID NO: 2233737 - DNA, 25 bp, Homo sapien
caccacttctgtggacggccaatca

SEQ ID NO: 2233738 - DNA, 25 bp, Homo sapien
caagagccacagtatccttgctcac

SEQ ID NO: 2233739 - DNA, 25 bp, Homo sapien
ggttgagattggctgctctttgaca

SEQ ID NO: 2233740 - DNA, 25 bp, Homo sapien
gtgggcacttggatcctatgagctg

SEQ ID NO: 2233741 - DNA, 25 bp, Homo sapien
acttggatcctatgagctgaattac

SEQ ID NO: 2233742 - DNA, 25 bp, Homo sapien
ggcacttggatcctatgagctgaat

SEQ ID NO: 2233743 - DNA, 25 bp, Homo sapien
gggcacttggatcctatgagctgaa

SEQ ID NO: 2233744 - DNA, 25 bp, Homo sapien
tcgcctggcgataatctactgccat

SEQ ID NO: 2233745 - DNA, 25 bp, Homo sapien
cgatcgcctggcgataatctactgc

SEQ ID NO: 2233746 - DNA, 25 bp, Homo sapien
aagagcgatcgcctggcgataatct

SEQ ID NO: 2233747 - DNA, 25 bp, Homo sapien
gagcgatcgcctggcgataatctac

SEQ ID NO: 2233748 - DNA, 25 bp, Homo sapien
attctctccgactttccctagccct

SEQ ID NO: 2233749 - DNA, 25 bp, Homo sapien
ttccctagcccttttgccacctcca

SEQ ID NO: 2233750 - DNA, 25 bp, Homo sapien
tcagcattctctccgactttcccta

SEQ ID NO: 2233751 - DNA, 25 bp, Homo sapien
tccctagcccttttgccacctccat

SEQ ID NO: 2233752 - DNA, 25 bp, Homo sapien
gtccgcacacgtcttcagctcccat

SEQ ID NO: 2233753 - DNA, 25 bp, Homo sapien
tgtccgcacacgtcttcagctccca

SEQ ID NO: 2233754 - DNA, 25 bp, Homo sapien
ctgtccgcacacgtcttcagctccc

SEQ ID NO: 2233755 - DNA, 25 bp, Homo sapien
taccttaaaggacagtggatcatgc

SEQ ID NO: 2233756 - DNA, 25 bp, Homo sapien
tcacactttgtgtcccaagcagtcc

SEQ ID NO: 2233757 - DNA, 25 bp, Homo sapien
gcagtccttgtctggaaataaccca

SEQ ID NO: 2233758 - DNA, 25 bp, Homo sapien
gacagtggatcatgcaccttttttc

SEQ ID NO: 2233759 - DNA, 25 bp, Homo sapien
tccaggagcaacgtgttcttttgcc

SEQ ID NO: 2233760 - DNA, 25 bp, Homo sapien
aacccatggaagtctttccaggagc

SEQ ID NO: 2233761 - DNA, 25 bp, Homo sapien
tgagcccagaagcctaaaacccatg

SEQ ID NO: 2233762 - DNA, 25 bp, Homo sapien
cagaagcctaaaacccatggaagtc

SEQ ID NO: 2233763 - DNA, 25 bp, Homo sapien
tctcattcagctgcaagtctggcat

SEQ ID NO: 2233764 - DNA, 25 bp, Homo sapien
cttgtagagaaaggcttgatgacca

SEQ ID NO: 2233765 - DNA, 25 bp, Homo sapien
accagagaggtttggggcgttgttg

SEQ ID NO: 2233766 - DNA, 25 bp, Homo sapien
cagctgcaagtctggcatgggaagt

SEQ ID NO: 2233767 - DNA, 25 bp, Homo sapien
agacttggccctacccacgtggttg

SEQ ID NO: 2233768 - DNA, 25 bp, Homo sapien
ggtgataatgaaccccaaagagagg

SEQ ID NO: 2233769 - DNA, 25 bp, Homo sapien
cttgggaacatagtgggcttagaac

SEQ ID NO: 2233770 - DNA, 25 bp, Homo sapien
gaggtgatcgtttcccttgggaaca

SEQ ID NO: 2233771 - DNA, 25 bp, Homo sapien
cagaactttgtaagcggtcatccca

SEQ ID NO: 2233772 - DNA, 25 bp, Homo sapien
aacaggacttcacgtttcagtggac

SEQ ID NO: 2233773 - DNA, 25 bp, Homo sapien
tccgtggccgcattcagaggctggc

SEQ ID NO: 2233774 - DNA, 25 bp, Homo sapien
tcaatactcccaaggctggttaggc

SEQ ID NO: 2233775 - DNA, 25 bp, Homo sapien
ggcttcttcataggaacagtcgttg

SEQ ID NO: 2233776 - DNA, 25 bp, Homo sapien
tcccctgccttcacgaaacagagga

SEQ ID NO: 2233777 - DNA, 25 bp, Homo sapien
ccttcacgaaacagaggagaagaga

SEQ ID NO: 2233778 - DNA, 25 bp, Homo sapien
taggaacagtcgttgtcaggtgaag

SEQ ID NO: 2233779 - DNA, 25 bp, Homo sapien
tctggagcaaactggtgtcacacct

SEQ ID NO: 2233780 - DNA, 25 bp, Homo sapien
ccttaaactttctggagcaaactgg

SEQ ID NO: 2233781 - DNA, 25 bp, Homo sapien
ctttgccagttgcagctaagttgcc

SEQ ID NO: 2233782 - DNA, 25 bp, Homo sapien
ccccagggcgcagtagcattagagg

SEQ ID NO: 2233783 - DNA, 25 bp, Homo sapien
tggcttggtgttactaggccccatg

SEQ ID NO: 2233784 - DNA, 25 bp, Homo sapien
gttactaggccccatgcaactcagc

SEQ ID NO: 2233785 - DNA, 25 bp, Homo sapien
ttggtgttactaggccccatgcaac

SEQ ID NO: 2233786 - DNA, 25 bp, Homo sapien
gcttggtgttactaggccccatgca

SEQ ID NO: 2233787 - DNA, 25 bp, Homo sapien
tcttggcaccagctgtgctaggtgt

SEQ ID NO: 2233788 - DNA, 25 bp, Homo sapien
taaagttctcctcgtgagatgatgc

SEQ ID NO: 2233789 - DNA, 25 bp, Homo sapien
cagctgtgctaggtgtaaagttctc

SEQ ID NO: 2233790 - DNA, 25 bp, Homo sapien
catgtccttaggacatctcttggca

SEQ ID NO: 2233791 - DNA, 25 bp, Homo sapien
aaaacaagtttagtggctctgccca

SEQ ID NO: 2233792 - DNA, 25 bp, Homo sapien
ggtaaaacaagtttagtggctctgc

SEQ ID NO: 2233793 - DNA, 25 bp, Homo sapien
aacaagtttagtggctctgcccacc

SEQ ID NO: 2233794 - DNA, 25 bp, Homo sapien
taaaacaagtttagtggctctgccc

SEQ ID NO: 2233795 - DNA, 25 bp, Homo sapien
tgttctcacgctctagctgggagtt

SEQ ID NO: 2233796 - DNA, 25 bp, Homo sapien
ctgggcttgccagggtcttcaacag

SEQ ID NO: 2233797 - DNA, 25 bp, Homo sapien
ccaccaggggcctcgggcacttgtg

SEQ ID NO: 2233798 - DNA, 25 bp, Homo sapien
tcttcagggctcagacaggactgga

SEQ ID NO: 2233799 - DNA, 25 bp, Homo sapien
catcccatactgtttgtctgctgta

SEQ ID NO: 2233800 - DNA, 25 bp, Homo sapien
gggggaagggtagacctgcaatgca

SEQ ID NO: 2233801 - DNA, 25 bp, Homo sapien
gcaatgcatcccatactgtttgtct

SEQ ID NO: 2233802 - DNA, 25 bp, Homo sapien
aatgcatcccatactgtttgtctgc

SEQ ID NO: 2233803 - DNA, 25 bp, Homo sapien
tgccagctgcacgatgcacacaaat

SEQ ID NO: 2233804 - DNA, 25 bp, Homo sapien
acacaaatgcaagagtctgagctcc

SEQ ID NO: 2233805 - DNA, 25 bp, Homo sapien
tcctgtttccacccaactcctgacc

SEQ ID NO: 2233806 - DNA, 25 bp, Homo sapien
gcacacaaatgcaagagtctgagct

SEQ ID NO: 2233807 - DNA, 25 bp, Homo sapien
aggagagagtcagagcctgcggcaa

SEQ ID NO: 2233808 - DNA, 25 bp, Homo sapien
agagagtcagagcctgcggcaaaga

SEQ ID NO: 2233809 - DNA, 25 bp, Homo sapien
gagagagtcagagcctgcggcaaag

SEQ ID NO: 2233810 - DNA, 25 bp, Homo sapien
gagagtcagagcctgcggcaaagac

SEQ ID NO: 2233811 - DNA, 25 bp, Homo sapien
ctccagtgcggataggaggcaggct

SEQ ID NO: 2233812 - DNA, 25 bp, Homo sapien
caggctgtcggcttcctcagggttt

SEQ ID NO: 2233813 - DNA, 25 bp, Homo sapien
ataggaggcaggctgtcggcttcct

SEQ ID NO: 2233814 - DNA, 25 bp, Homo sapien
tggctaagggctttttcacccattc

SEQ ID NO: 2233815 - DNA, 25 bp, Homo sapien
aagcagcagctaagtcaggggatga

SEQ ID NO: 2233816 - DNA, 25 bp, Homo sapien
tgagaatgacgcagtgatgccactc

SEQ ID NO: 2233817 - DNA, 25 bp, Homo sapien
ggatgagaatgacgcagtgatgcca

SEQ ID NO: 2233818 - DNA, 25 bp, Homo sapien
agaatgacgcagtgatgccactcac

SEQ ID NO: 2233819 - DNA, 25 bp, Homo sapien
gatcttgttgtctatggccaccacg

SEQ ID NO: 2233820 - DNA, 25 bp, Homo sapien
ggcctgttcgatcttgttgtctatg

SEQ ID NO: 2233821 - DNA, 25 bp, Homo sapien
cttgttgtctatggccaccacgctg

SEQ ID NO: 2233822 - DNA, 25 bp, Homo sapien
tgttcgatcttgttgtctatggcca

SEQ ID NO: 2233823 - DNA, 25 bp, Homo sapien
gagttccggacagtttgtccccaga

SEQ ID NO: 2233824 - DNA, 25 bp, Homo sapien
ttacccactcggttctactcttgag

SEQ ID NO: 2233825 - DNA, 25 bp, Homo sapien
agcaaagcgacccattacccactcg

SEQ ID NO: 2233826 - DNA, 25 bp, Homo sapien
ctcttgagtacatggcagttgtggc

SEQ ID NO: 2233827 - DNA, 25 bp, Homo sapien
acagccggcctacaaggtcccaggc

SEQ ID NO: 2233828 - DNA, 25 bp, Homo sapien
accgtggcctgctcgggcaatatgc

SEQ ID NO: 2233829 - DNA, 25 bp, Homo sapien
gctcgggcaatatgcaaacaatggg

SEQ ID NO: 2233830 - DNA, 25 bp, Homo sapien
caaccgatcggagctgcttgcgagt

SEQ ID NO: 2233831 - DNA, 25 bp, Homo sapien
ccggctctgaagctagctaggaatt

SEQ ID NO: 2233832 - DNA, 25 bp, Homo sapien
ggctggtaagcttccggccttctcc

SEQ ID NO: 2233833 - DNA, 25 bp, Homo sapien
tccttctcggctggtaagcttccgg

SEQ ID NO: 2233834 - DNA, 25 bp, Homo sapien
ggccttctcccaagcggcgcacggc

SEQ ID NO: 2233835 - DNA, 25 bp, Homo sapien
cccaggatgctgcaccgcggggaac

SEQ ID NO: 2233836 - DNA, 25 bp, Homo sapien
cccttcccaggatgctgcaccgcgg

SEQ ID NO: 2233837 - DNA, 25 bp, Homo sapien
tcagagaccgggctcctagcccagc

SEQ ID NO: 2233838 - DNA, 25 bp, Homo sapien
tcctagcccagctccggccggcgcc

SEQ ID NO: 2233839 - DNA, 25 bp, Homo sapien
ctgttgtccagcttaacggaaacca

SEQ ID NO: 2233840 - DNA, 25 bp, Homo sapien
tgtccagcttaacggaaaccacatc

SEQ ID NO: 2233841 - DNA, 25 bp, Homo sapien
ccacctccatgggggtctgatacat

SEQ ID NO: 2233842 - DNA, 25 bp, Homo sapien
gcagctggtagaccgccacctccat

SEQ ID NO: 2233843 - DNA, 25 bp, Homo sapien
gggtgtcacctcgtatgtcacaaac

SEQ ID NO: 2233844 - DNA, 25 bp, Homo sapien
gcgctccagctggagttgaagggaa

SEQ ID NO: 2233845 - DNA, 25 bp, Homo sapien
tgggctctgcgctggagtccggccc

SEQ ID NO: 2233846 - DNA, 25 bp, Homo sapien
cagaacgaacccaaagccaagcagg

SEQ ID NO: 2233847 - DNA, 25 bp, Homo sapien
ttgcttctcgcttatcttctctctt

SEQ ID NO: 2233848 - DNA, 25 bp, Homo sapien
ggctggaggaataaggaggctgaaa

SEQ ID NO: 2233849 - DNA, 25 bp, Homo sapien
catggtttaatttgtccttgcttct

SEQ ID NO: 2233850 - DNA, 25 bp, Homo sapien
gtttaatttgtccttgcttctcgct

SEQ ID NO: 2233851 - DNA, 25 bp, Homo sapien
ctattggcaatgcttggaagacagc

SEQ ID NO: 2233852 - DNA, 25 bp, Homo sapien
ggcttgtgaagagggcaggagcacc

SEQ ID NO: 2233853 - DNA, 25 bp, Homo sapien
tgcctccattgtgggcctcgctata

SEQ ID NO: 2233854 - DNA, 25 bp, Homo sapien
ttactttgagtagcatgtgaaggac

SEQ ID NO: 2233855 - DNA, 25 bp, Homo sapien
tctgaagagcccctatggtgccagg

SEQ ID NO: 2233856 - DNA, 25 bp, Homo sapien
gacacattcggacgaggcttggcat

SEQ ID NO: 2233857 - DNA, 25 bp, Homo sapien
taagagccaagaaagggtctatctg

SEQ ID NO: 2233858 - DNA, 25 bp, Homo sapien
gctcttttgacaccagtccatggaa

SEQ ID NO: 2233859 - DNA, 25 bp, Homo sapien
tgaagactcgctggcaagaaaccaa

SEQ ID NO: 2233860 - DNA, 25 bp, Homo sapien
cctctgagtgggcagctttaagagg

SEQ ID NO: 2233861 - DNA, 25 bp, Homo sapien
ccaaactgcctctgagtgggcagct

SEQ ID NO: 2233862 - DNA, 25 bp, Homo sapien
tgtggccaaatattgaagactcgct

SEQ ID NO: 2233863 - DNA, 25 bp, Homo sapien
gaaaagtgccgagtcgcatggtgac

SEQ ID NO: 2233864 - DNA, 25 bp, Homo sapien
ggagccatgggagtaacttttacat

SEQ ID NO: 2233865 - DNA, 25 bp, Homo sapien
tgccaaggctacatggaagccctcc

SEQ ID NO: 2233866 - DNA, 25 bp, Homo sapien
cctagataacagagacctgatgggt

SEQ ID NO: 2233867 - DNA, 25 bp, Homo sapien
caccagctgaggacttcttgccatg

SEQ ID NO: 2233868 - DNA, 25 bp, Homo sapien
tgacctcgggccctctccatcaaag

SEQ ID NO: 2233869 - DNA, 25 bp, Homo sapien
catcctgtcccctcaagccttcctc

SEQ ID NO: 2233870 - DNA, 25 bp, Homo sapien
tgctgtgccgaatgaacccgttttc

SEQ ID NO: 2233871 - DNA, 25 bp, Homo sapien
ggactctggggagtaatgactgaac

SEQ ID NO: 2233872 - DNA, 25 bp, Homo sapien
ggaagggactctggggagtaatgac

SEQ ID NO: 2233873 - DNA, 25 bp, Homo sapien
ctggggagtaatgactgaacttgac

SEQ ID NO: 2233874 - DNA, 25 bp, Homo sapien
gggagtaatgactgaacttgacaat

SEQ ID NO: 2233875 - DNA, 25 bp, Homo sapien
cattgtttggttacttgcgctgggg

SEQ ID NO: 2233876 - DNA, 25 bp, Homo sapien
ttgccagatagacaactgcctgccc

SEQ ID NO: 2233877 - DNA, 25 bp, Homo sapien
aatcttgccagatagacaactgcct

SEQ ID NO: 2233878 - DNA, 25 bp, Homo sapien
tgaaatcttgccagatagacaactg

SEQ ID NO: 2233879 - DNA, 25 bp, Homo sapien
ctaggttcggcaggcactgcccgtc

SEQ ID NO: 2233880 - DNA, 25 bp, Homo sapien
aggttcggcaggcactgcccgtctg

SEQ ID NO: 2233881 - DNA, 25 bp, Homo sapien
ctctaggttcggcaggcactgcccg

SEQ ID NO: 2233882 - DNA, 25 bp, Homo sapien
gttcggcaggcactgcccgtctgct

SEQ ID NO: 2233883 - DNA, 25 bp, Homo sapien
catgggtatattctaccttccctcc

SEQ ID NO: 2233884 - DNA, 25 bp, Homo sapien
tctaccttccctccgtgcacaaaga

SEQ ID NO: 2233885 - DNA, 25 bp, Homo sapien
gtatattctaccttccctccgtgca

SEQ ID NO: 2233886 - DNA, 25 bp, Homo sapien
ttctaccttccctccgtgcacaaag

SEQ ID NO: 2233887 - DNA, 25 bp, Homo sapien
gctgacatttcagggtccaaagagc

SEQ ID NO: 2233888 - DNA, 25 bp, Homo sapien
tattgtggtcttggcactgcccggc

SEQ ID NO: 2233889 - DNA, 25 bp, Homo sapien
tcagagccggatgcaaacggcacgc

SEQ ID NO: 2233890 - DNA, 25 bp, Homo sapien
tgtgtaccggacaagctgtttattg

SEQ ID NO: 2233891 - DNA, 25 bp, Homo sapien
tttcctttgataaagcacttggcag

SEQ ID NO: 2233892 - DNA, 25 bp, Homo sapien
tctccagctgttgggcgggctgttt

SEQ ID NO: 2233893 - DNA, 25 bp, Homo sapien
ggcagtactcccagttctgtagttt

SEQ ID NO: 2233894 - DNA, 25 bp, Homo sapien
catctccagctgttgggcgggctgt

SEQ ID NO: 2233895 - DNA, 25 bp, Homo sapien
cagtatgggctcttcacatcatccg

SEQ ID NO: 2233896 - DNA, 25 bp, Homo sapien
gagagcagcgcccgttcccacaggc

SEQ ID NO: 2233897 - DNA, 25 bp, Homo sapien
gagagatccctgctcctcgggagcc

SEQ ID NO: 2233898 - DNA, 25 bp, Homo sapien
acatcatccgcgagagatccctgct

SEQ ID NO: 2233899 - DNA, 25 bp, Homo sapien
cactcctttgggattcagatcccac

SEQ ID NO: 2233900 - DNA, 25 bp, Homo sapien
cttcccagtccagatgtagtaatac

SEQ ID NO: 2233901 - DNA, 25 bp, Homo sapien
tccttcccagtccagatgtagtaat

SEQ ID NO: 2233902 - DNA, 25 bp, Homo sapien
ccttcccagtccagatgtagtaata

SEQ ID NO: 2233903 - DNA, 25 bp, Homo sapien
gccgctaacccttcactatagccag

SEQ ID NO: 2233904 - DNA, 25 bp, Homo sapien
ttccaatactgccagccgctaaccc

SEQ ID NO: 2233905 - DNA, 25 bp, Homo sapien
ctaacccttcactatagccagtgtg

SEQ ID NO: 2233906 - DNA, 25 bp, Homo sapien
ttctgagatagggtgacctggatat

SEQ ID NO: 2233907 - DNA, 25 bp, Homo sapien
ttaaccaagtcattaattagggtca

SEQ ID NO: 2233908 - DNA, 25 bp, Homo sapien
taaccaagtcattaattagggtcat

SEQ ID NO: 2233909 - DNA, 25 bp, Homo sapien
agtgtgacccacaggattcccattg

SEQ ID NO: 2233910 - DNA, 25 bp, Homo sapien
gttaaactgtccaagtgtgacccac

SEQ ID NO: 2233911 - DNA, 25 bp, Homo sapien
ggattcccattgatccaagaacaat

SEQ ID NO: 2233912 - DNA, 25 bp, Homo sapien
ttgatgatgttaaactgtccaagtg

SEQ ID NO: 2233913 - DNA, 25 bp, Homo sapien
gcagtagctgactccctgaggcaga

SEQ ID NO: 2233914 - DNA, 25 bp, Homo sapien
aagcaggctcagcaacagggcacat

SEQ ID NO: 2233915 - DNA, 25 bp, Homo sapien
cagaaactgatcagataccgcaggt

SEQ ID NO: 2233916 - DNA, 25 bp, Homo sapien
gcccaagactttcacatagccagga

SEQ ID NO: 2233917 - DNA, 25 bp, Homo sapien
ttttccacatgtgatggcctagagc

SEQ ID NO: 2233918 - DNA, 25 bp, Homo sapien
aaagcccagcatctttctcaaggag

SEQ ID NO: 2233919 - DNA, 25 bp, Homo sapien
acatgtgatggcctagagctacttc

SEQ ID NO: 2233920 - DNA, 25 bp, Homo sapien
tcaaggagattcttattccacatgt

SEQ ID NO: 2233921 - DNA, 25 bp, Homo sapien
caaaagccatttgtgctcgaaggaa

SEQ ID NO: 2233922 - DNA, 25 bp, Homo sapien
gaagaggtcgttatgttgacccaga

SEQ ID NO: 2233923 - DNA, 25 bp, Homo sapien
tcttctgcaaaggagcaatgggacc

SEQ ID NO: 2233924 - DNA, 25 bp, Homo sapien
caatgggaccatctcggaaaatgtg

SEQ ID NO: 2233925 - DNA, 25 bp, Homo sapien
tgtgtgagtacagacaccgggaagg

SEQ ID NO: 2233926 - DNA, 25 bp, Homo sapien
ctgtgtgagtacagacaccgggaag

SEQ ID NO: 2233927 - DNA, 25 bp, Homo sapien
tggatggatgagagccctaaagatg

SEQ ID NO: 2233928 - DNA, 25 bp, Homo sapien
cactggagcctaatgaggttgccaa

SEQ ID NO: 2233929 - DNA, 25 bp, Homo sapien
taaagatggatcactgctgcccagt

SEQ ID NO: 2233930 - DNA, 25 bp, Homo sapien
gacaccactggagcctaatgaggtt

SEQ ID NO: 2233931 - DNA, 25 bp, Homo sapien
cagggcttgccttcgtgaaatccac

SEQ ID NO: 2233932 - DNA, 25 bp, Homo sapien
ggcttgccttcgtgaaatccacaag

SEQ ID NO: 2233933 - DNA, 25 bp, Homo sapien
ttctctccagggcttgccttcgtga

SEQ ID NO: 2233934 - DNA, 25 bp, Homo sapien
tccagggcttgccttcgtgaaatcc

SEQ ID NO: 2233935 - DNA, 25 bp, Homo sapien
ataggccccttggagcacgtggtgc

SEQ ID NO: 2233936 - DNA, 25 bp, Homo sapien
tgttccccggtgttcaggagacaaa

SEQ ID NO: 2233937 - DNA, 25 bp, Homo sapien
tcacataggccccttggagcacgtg

SEQ ID NO: 2233938 - DNA, 25 bp, Homo sapien
ctgtccacgcagagctcacataggc

SEQ ID NO: 2233939 - DNA, 25 bp, Homo sapien
tcagtgggaacaagagaggagggac

SEQ ID NO: 2233940 - DNA, 25 bp, Homo sapien
acaagagaggagggaccaaagcatt

SEQ ID NO: 2233941 - DNA, 25 bp, Homo sapien
ggaacaagagaggagggaccaaagc

SEQ ID NO: 2233942 - DNA, 25 bp, Homo sapien
cttcagtgggaacaagagaggaggg

SEQ ID NO: 2233943 - DNA, 25 bp, Homo sapien
acaggtctcccctgaacatccatca

SEQ ID NO: 2233944 - DNA, 25 bp, Homo sapien
tgccttctagttaggaggaacttag

SEQ ID NO: 2233945 - DNA, 25 bp, Homo sapien
ttggagatgccttctagttaggagg

SEQ ID NO: 2233946 - DNA, 25 bp, Homo sapien
ctagttaggaggaacttagcttgaa

SEQ ID NO: 2233947 - DNA, 25 bp, Homo sapien
caagcatcagattggtggcaaagtc

SEQ ID NO: 2233948 - DNA, 25 bp, Homo sapien
tcttctggatccaaatctgacccac

SEQ ID NO: 2233949 - DNA, 25 bp, Homo sapien
tttctaccacctcgagctgtagctc

SEQ ID NO: 2233950 - DNA, 25 bp, Homo sapien
tggcaaagtctggactcgaacccaa

SEQ ID NO: 2233951 - DNA, 25 bp, Homo sapien
cctctcttgcctgcgttctctccct

SEQ ID NO: 2233952 - DNA, 25 bp, Homo sapien
agtacagtgcactctcacgctctgg

SEQ ID NO: 2233953 - DNA, 25 bp, Homo sapien
ctcctctcttgcctgcgttctctcc

SEQ ID NO: 2233954 - DNA, 25 bp, Homo sapien
tacagtgcactctcacgctctggct

SEQ ID NO: 2233955 - DNA, 25 bp, Homo sapien
agggtgggacaactggaaactctag

SEQ ID NO: 2233956 - DNA, 25 bp, Homo sapien
ctagggtgggacaactggaaactct

SEQ ID NO: 2233957 - DNA, 25 bp, Homo sapien
tagggtgggacaactggaaactcta

SEQ ID NO: 2233958 - DNA, 25 bp, Homo sapien
ttcttttccaacccgaacagcaagc

SEQ ID NO: 2233959 - DNA, 25 bp, Homo sapien
tcaaaaagaccaatgtttcagcaac

SEQ ID NO: 2233960 - DNA, 25 bp, Homo sapien
ggagggccggatcctccgggagagc

SEQ ID NO: 2233961 - DNA, 25 bp, Homo sapien
cggatcctccgggagagcccagacg

SEQ ID NO: 2233962 - DNA, 25 bp, Homo sapien
aatgaagaaagttgagagagcaagc

SEQ ID NO: 2233963 - DNA, 25 bp, Homo sapien
atgaagaaagttgagagagcaagcc

SEQ ID NO: 2233964 - DNA, 25 bp, Homo sapien
tgaagaaagttgagagagcaagcct

SEQ ID NO: 2233965 - DNA, 25 bp, Homo sapien
gaagaaagttgagagagcaagcctt

SEQ ID NO: 2233966 - DNA, 25 bp, Homo sapien
aaagggtatgtgagtgacagagcaa

SEQ ID NO: 2233967 - DNA, 25 bp, Homo sapien
aaaagggtatgtgagtgacagagca

SEQ ID NO: 2233968 - DNA, 25 bp, Homo sapien
ctgagcagaaaagggtatgtgagtg

SEQ ID NO: 2233969 - DNA, 25 bp, Homo sapien
gagcagaaaagggtatgtgagtgac

SEQ ID NO: 2233970 - DNA, 25 bp, Homo sapien
tgattttcagctgatcctatacacc

SEQ ID NO: 2233971 - DNA, 25 bp, Homo sapien
gattttcagctgatcctatacacct

SEQ ID NO: 2233972 - DNA, 25 bp, Homo sapien
ttttcagctgatcctatacacctgg

SEQ ID NO: 2233973 - DNA, 25 bp, Homo sapien
attttcagctgatcctatacacctg

SEQ ID NO: 2233974 - DNA, 25 bp, Homo sapien
tagcctgtgttctcctgacttcctg

SEQ ID NO: 2233975 - DNA, 25 bp, Homo sapien
gttctcctgacttcctgcacttttc

SEQ ID NO: 2233976 - DNA, 25 bp, Homo sapien
gaagtcccgttagcctgtgttctcc

SEQ ID NO: 2233977 - DNA, 25 bp, Homo sapien
tctaattctgggtgaagtcccgtta

SEQ ID NO: 2233978 - DNA, 25 bp, Homo sapien
tcagattcccttggatcacactggg

SEQ ID NO: 2233979 - DNA, 25 bp, Homo sapien
tcacactgggctgttagctatcacc

SEQ ID NO: 2233980 - DNA, 25 bp, Homo sapien
tatcacctgccttgccattgtggag

SEQ ID NO: 2233981 - DNA, 25 bp, Homo sapien
tagctttgcaccacaggtccctaga

SEQ ID NO: 2233982 - DNA, 25 bp, Homo sapien
ggccgccataaagagactctccctt

SEQ ID NO: 2233983 - DNA, 25 bp, Homo sapien
tgctggaagcggccgccataaagag

SEQ ID NO: 2233984 - DNA, 25 bp, Homo sapien
aagcggccgccataaagagactctc

SEQ ID NO: 2233985 - DNA, 25 bp, Homo sapien
ggaagcggccgccataaagagactc

SEQ ID NO: 2233986 - DNA, 25 bp, Homo sapien
ttgggatgatgacaaaattttggga

SEQ ID NO: 2233987 - DNA, 25 bp, Homo sapien
tgggatgatgacaaaattttgggaa

SEQ ID NO: 2233988 - DNA, 25 bp, Homo sapien
tgatgacaaaattttgggaatgata

SEQ ID NO: 2233989 - DNA, 25 bp, Homo sapien
gatgatgacaaaattttgggaatga

SEQ ID NO: 2233990 - DNA, 25 bp, Homo sapien
tggtgggagcaaggaccgagttgcc

SEQ ID NO: 2233991 - DNA, 25 bp, Homo sapien
tgaacttcctagttgccccttttgc

SEQ ID NO: 2233992 - DNA, 25 bp, Homo sapien
ctgaacttcctagttgccccttttg

SEQ ID NO: 2233993 - DNA, 25 bp, Homo sapien
gagttgccgccgtgtgccgagccac

SEQ ID NO: 2233994 - DNA, 25 bp, Homo sapien
cagatgccctcgttgatcaggtagc

SEQ ID NO: 2233995 - DNA, 25 bp, Homo sapien
gctgccgaaagttgctcactgtagg

SEQ ID NO: 2233996 - DNA, 25 bp, Homo sapien
ggctctagcgaatcctgccgcatta

SEQ ID NO: 2233997 - DNA, 25 bp, Homo sapien
tcgatgttgcggttgcagatgccct

SEQ ID NO: 2233998 - DNA, 25 bp, Homo sapien
ccgacaggtgagcggcaatcgagct

SEQ ID NO: 2233999 - DNA, 25 bp, Homo sapien
ggagcccactccgatgggccaggtc

SEQ ID NO: 2234000 - DNA, 25 bp, Homo sapien
gcggcaatcgagcttggactgggcc

SEQ ID NO: 2234001 - DNA, 25 bp, Homo sapien
cagcagttgcagcagtcgaggccga

SEQ ID NO: 2234002 - DNA, 25 bp, Homo sapien
ttctcaggctcggaggtcgcctggc

SEQ ID NO: 2234003 - DNA, 25 bp, Homo sapien
ggtcaggggcggctggcaggtgcgc

SEQ ID NO: 2234004 - DNA, 25 bp, Homo sapien
tgcgcgcccaccgagctggcctgag

SEQ ID NO: 2234005 - DNA, 25 bp, Homo sapien
gtcgcctggcctgcgaggtcagggg

SEQ ID NO: 2234006 - DNA, 25 bp, Homo sapien
gaaattagcgcctaaagccagccac

SEQ ID NO: 2234007 - DNA, 25 bp, Homo sapien
ctccgggtgcgaatagaaacagctg

SEQ ID NO: 2234008 - DNA, 25 bp, Homo sapien
tggacaaacagctccgagcggatcc

SEQ ID NO: 2234009 - DNA, 25 bp, Homo sapien
tccgagcggatccttcgggctcact

SEQ ID NO: 2234010 - DNA, 25 bp, Homo sapien
cggccccagcgcagtcccaagtttc

SEQ ID NO: 2234011 - DNA, 25 bp, Homo sapien
tttcccaagtgtgagcggggattgg

SEQ ID NO: 2234012 - DNA, 25 bp, Homo sapien
ggccccagcgcagtcccaagtttcc

SEQ ID NO: 2234013 - DNA, 25 bp, Homo sapien
tcccaagtgtgagcggggattgggg

SEQ ID NO: 2234014 - DNA, 25 bp, Homo sapien
gagctgagagcgagtgagctagtta

SEQ ID NO: 2234015 - DNA, 25 bp, Homo sapien
ctgtgacggctgagcggtggcagga

SEQ ID NO: 2234016 - DNA, 25 bp, Homo sapien
ccggtttgcaggctctcaggctctc

SEQ ID NO: 2234017 - DNA, 25 bp, Homo sapien
agtgagctagttagcggtctgcacg

SEQ ID NO: 2234018 - DNA, 25 bp, Homo sapien
gttgtagccttaaactgccgccctc

SEQ ID NO: 2234019 - DNA, 25 bp, Homo sapien
acgccctcgagagccccaagtgttg

SEQ ID NO: 2234020 - DNA, 25 bp, Homo sapien
cctacagaagagacgacgccctcga

SEQ ID NO: 2234021 - DNA, 25 bp, Homo sapien
gagagccccaagtgttgtagcctta

SEQ ID NO: 2234022 - DNA, 25 bp, Homo sapien
ggggggcgtgcaaggagagcggttg

SEQ ID NO: 2234023 - DNA, 25 bp, Homo sapien
ctggggggggggcgtgcaaggagag

SEQ ID NO: 2234024 - DNA, 25 bp, Homo sapien
tggggggggggcgtgcaaggagagc

SEQ ID NO: 2234025 - DNA, 25 bp, Homo sapien
gggcgtgcaaggagagcggttgcct

SEQ ID NO: 2234026 - DNA, 25 bp, Homo sapien
ccttacctgccaccttagttgatct

SEQ ID NO: 2234027 - DNA, 25 bp, Homo sapien
tacctgccaccttagttgatctccg

SEQ ID NO: 2234028 - DNA, 25 bp, Homo sapien
tgaaccttacctgccaccttagttg

SEQ ID NO: 2234029 - DNA, 25 bp, Homo sapien
ctgccaccttagttgatctccgtct

SEQ ID NO: 2234030 - DNA, 25 bp, Homo sapien
tcagtcagtactccccacccccgca

SEQ ID NO: 2234031 - DNA, 25 bp, Homo sapien
cagtcagtactccccacccccgcat

SEQ ID NO: 2234032 - DNA, 25 bp, Homo sapien
ttcagtcagtactccccacccccgc

SEQ ID NO: 2234033 - DNA, 25 bp, Homo sapien
tggcctgagtccctgcggattggac

SEQ ID NO: 2234034 - DNA, 25 bp, Homo sapien
gcggattggacttccatagatttga

SEQ ID NO: 2234035 - DNA, 25 bp, Homo sapien
tgagtccctgcggattggacttcca

SEQ ID NO: 2234036 - DNA, 25 bp, Homo sapien
aacttcctccgggtaccacaagcat

SEQ ID NO: 2234037 - DNA, 25 bp, Homo sapien
tctatgctgtagcagccggaaagcc

SEQ ID NO: 2234038 - DNA, 25 bp, Homo sapien
ggtcctatatgtgccctgcaacttg

SEQ ID NO: 2234039 - DNA, 25 bp, Homo sapien
agccaaaaacaagccgtacttctcg

SEQ ID NO: 2234040 - DNA, 25 bp, Homo sapien
tgtgattaagagcaaagagcggcca

SEQ ID NO: 2234041 - DNA, 25 bp, Homo sapien
gctgagaatccaggtaaactgcaga

SEQ ID NO: 2234042 - DNA, 25 bp, Homo sapien
agctgagaatccaggtaaactgcag

SEQ ID NO: 2234043 - DNA, 25 bp, Homo sapien
gagctgagaatccaggtaaactgca

SEQ ID NO: 2234044 - DNA, 25 bp, Homo sapien
aaattgaactacatttccagaccag

SEQ ID NO: 2234045 - DNA, 25 bp, Homo sapien
gatgaggtacacagggctttccgga

SEQ ID NO: 2234046 - DNA, 25 bp, Homo sapien
ggtactggagtcaagaaagctgaac

SEQ ID NO: 2234047 - DNA, 25 bp, Homo sapien
acttttgcttgactgctggtactgg

SEQ ID NO: 2234048 - DNA, 25 bp, Homo sapien
cattgttatgggactccctgtgctc

SEQ ID NO: 2234049 - DNA, 25 bp, Homo sapien
gtgctcccaggtggtcccctcatcc

SEQ ID NO: 2234050 - DNA, 25 bp, Homo sapien
tgcccattgttatgggactccctgt

SEQ ID NO: 2234051 - DNA, 25 bp, Homo sapien
tctgcccattgttatgggactccct

SEQ ID NO: 2234052 - DNA, 25 bp, Homo sapien
aaaagccacagttacaatgtggccc

SEQ ID NO: 2234053 - DNA, 25 bp, Homo sapien
caaaaagccacagttacaatgtggc

SEQ ID NO: 2234054 - DNA, 25 bp, Homo sapien
acaaaaagccacagttacaatgtgg

SEQ ID NO: 2234055 - DNA, 25 bp, Homo sapien
aagccacagttacaatgtggcccat

SEQ ID NO: 2234056 - DNA, 25 bp, Homo sapien
tatccaatcagcattcaaaaattcc

SEQ ID NO: 2234057 - DNA, 25 bp, Homo sapien
aaattcccaattgtcgccgggcgcg

SEQ ID NO: 2234058 - DNA, 25 bp, Homo sapien
tatctttaaaagatgacgcccctcc

SEQ ID NO: 2234059 - DNA, 25 bp, Homo sapien
tactagacatccatataatttcctc

SEQ ID NO: 2234060 - DNA, 25 bp, Homo sapien
tgcttgctcaggtttctccggtcac

SEQ ID NO: 2234061 - DNA, 25 bp, Homo sapien
cctttgcttgctcaggtttctccgg

SEQ ID NO: 2234062 - DNA, 25 bp, Homo sapien
cttgctcaggtttctccggtcactc

SEQ ID NO: 2234063 - DNA, 25 bp, Homo sapien
tttgcttgctcaggtttctccggtc

SEQ ID NO: 2234064 - DNA, 25 bp, Homo sapien
ggaggcccagctgcggtagcatcgc

SEQ ID NO: 2234065 - DNA, 25 bp, Homo sapien
cggcgtcggcgacggtagcggcagc

SEQ ID NO: 2234066 - DNA, 25 bp, Homo sapien
tggcggatcccggctgctgcgcggc

SEQ ID NO: 2234067 - DNA, 25 bp, Homo sapien
gtagcatcgcggccgccgtgctgtc

SEQ ID NO: 2234068 - DNA, 25 bp, Homo sapien
ctatcccatagaactcaagctctgt

SEQ ID NO: 2234069 - DNA, 25 bp, Homo sapien
tatcccatagaactcaagctctgtc

SEQ ID NO: 2234070 - DNA, 25 bp, Homo sapien
actcaagctctgtcttttcagacag

SEQ ID NO: 2234071 - DNA, 25 bp, Homo sapien
tacactctaggatgctggttcagcc

SEQ ID NO: 2234072 - DNA, 25 bp, Homo sapien
tataagatgcttaaagtgtgggtgg

SEQ ID NO: 2234073 - DNA, 25 bp, Homo sapien
tggttcagcctaagtgggttggcaa

SEQ ID NO: 2234074 - DNA, 25 bp, Homo sapien
gagggattttgagtaatgtgccagc

SEQ ID NO: 2234075 - DNA, 25 bp, Homo sapien
tcagactccgctggttgatgaacgg

SEQ ID NO: 2234076 - DNA, 25 bp, Homo sapien
ggatcatcgtcttactgagaccgaa

SEQ ID NO: 2234077 - DNA, 25 bp, Homo sapien
tgatgaacggcatccccagtctctg

SEQ ID NO: 2234078 - DNA, 25 bp, Homo sapien
caatctgaaatcgtcctgaaacatg

SEQ ID NO: 2234079 - DNA, 25 bp, Homo sapien
tttgttcagtgttgctaggatccat

SEQ ID NO: 2234080 - DNA, 25 bp, Homo sapien
gaaaaatggtttacgatccagatcc

SEQ ID NO: 2234081 - DNA, 25 bp, Homo sapien
ggcagacaatgctaattcatgacag

SEQ ID NO: 2234082 - DNA, 25 bp, Homo sapien
gatcactttgtgtatagccctttgt

SEQ ID NO: 2234083 - DNA, 25 bp, Homo sapien
caaggtacacgccacttggatgtct

SEQ ID NO: 2234084 - DNA, 25 bp, Homo sapien
ttttgcaagaccaaggtacacgcca

SEQ ID NO: 2234085 - DNA, 25 bp, Homo sapien
gatgtctcttgttaatcatgggtgg

SEQ ID NO: 2234086 - DNA, 25 bp, Homo sapien
tgtgaggatgacttgtagtgagcaa

SEQ ID NO: 2234087 - DNA, 25 bp, Homo sapien
tggggtacagaggagagggagttgc

SEQ ID NO: 2234088 - DNA, 25 bp, Homo sapien
ctctccatattctgacagcccttca

SEQ ID NO: 2234089 - DNA, 25 bp, Homo sapien
gctctccatattctgacagcccttc

SEQ ID NO: 2234090 - DNA, 25 bp, Homo sapien
agctctccatattctgacagccctt

SEQ ID NO: 2234091 - DNA, 25 bp, Homo sapien
tttgcaagtcgctgattattgtgct

SEQ ID NO: 2234092 - DNA, 25 bp, Homo sapien
ccatggctccatgtgcagtgttttg

SEQ ID NO: 2234093 - DNA, 25 bp, Homo sapien
gcagtgttttgcaagtcgctgatta

SEQ ID NO: 2234094 - DNA, 25 bp, Homo sapien
ccatgtgcagtgttttgcaagtcgc

SEQ ID NO: 2234095 - DNA, 25 bp, Homo sapien
attaaacaccttcatgctttcgtac

SEQ ID NO: 2234096 - DNA, 25 bp, Homo sapien
tacgcaaattgcatattgtctgcag

SEQ ID NO: 2234097 - DNA, 25 bp, Homo sapien
tatatcacagatgaatacgcaaatt

SEQ ID NO: 2234098 - DNA, 25 bp, Homo sapien
aacaccttcatgctttcgtactcca

SEQ ID NO: 2234099 - DNA, 25 bp, Homo sapien
ttatatgtgcccacggtgaagagca

SEQ ID NO: 2234100 - DNA, 25 bp, Homo sapien
aatgtgatgctggataagcctctcc

SEQ ID NO: 2234101 - DNA, 25 bp, Homo sapien
ggcctgcctaaaacattatgggact

SEQ ID NO: 2234102 - DNA, 25 bp, Homo sapien
cagaagatctggctcaagccttgcc

SEQ ID NO: 2234103 - DNA, 25 bp, Homo sapien
cctgtaactatttgcgatcagttgg

SEQ ID NO: 2234104 - DNA, 25 bp, Homo sapien
taactatttgcgatcagttggttgt

SEQ ID NO: 2234105 - DNA, 25 bp, Homo sapien
aacctgtaactatttgcgatcagtt

SEQ ID NO: 2234106 - DNA, 25 bp, Homo sapien
gtaactatttgcgatcagttggttg

SEQ ID NO: 2234107 - DNA, 25 bp, Homo sapien
taatgatcctgtctggcttgcctgc

SEQ ID NO: 2234108 - DNA, 25 bp, Homo sapien
acctgaagcgtctgggtgtcctcct

SEQ ID NO: 2234109 - DNA, 25 bp, Homo sapien
gcaggcctcaagaatccccttatgt

SEQ ID NO: 2234110 - DNA, 25 bp, Homo sapien
tattgattaccctgagcggcaggaa

SEQ ID NO: 2234111 - DNA, 25 bp, Homo sapien
gatgggccccagatatttacttcag

SEQ ID NO: 2234112 - DNA, 25 bp, Homo sapien
caaactactgccatgggagtgcaca

SEQ ID NO: 2234113 - DNA, 25 bp, Homo sapien
gtggtagccataacaactccctcag

SEQ ID NO: 2234114 - DNA, 25 bp, Homo sapien
tactagactgaacaccttgagagga

SEQ ID NO: 2234115 - DNA, 25 bp, Homo sapien
tataatccctctcaggcacatattc

SEQ ID NO: 2234116 - DNA, 25 bp, Homo sapien
caggtgtataatccctctcaggcac

SEQ ID NO: 2234117 - DNA, 25 bp, Homo sapien
ggtccaggattcctatgactgcttc

SEQ ID NO: 2234118 - DNA, 25 bp, Homo sapien
gattcctatgactgcttctttccat

SEQ ID NO: 2234119 - DNA, 25 bp, Homo sapien
ccaagaatgttgggacatcagggca

SEQ ID NO: 2234120 - DNA, 25 bp, Homo sapien
cccaagaatgttgggacatcagggc

SEQ ID NO: 2234121 - DNA, 25 bp, Homo sapien
caagaatgttgggacatcagggcag

SEQ ID NO: 2234122 - DNA, 25 bp, Homo sapien
tccagccgtgtgtgggaggtgccac

SEQ ID NO: 2234123 - DNA, 25 bp, Homo sapien
gaggatgagaaacgcctccccgcag

SEQ ID NO: 2234124 - DNA, 25 bp, Homo sapien
ggtgagtcctttccccagcgaggat

SEQ ID NO: 2234125 - DNA, 25 bp, Homo sapien
tgtgggaggtgccacgccccacctg

SEQ ID NO: 2234126 - DNA, 25 bp, Homo sapien
tgtcagtgtctacactttccttcac

SEQ ID NO: 2234127 - DNA, 25 bp, Homo sapien
cctcagaagacatgggataggagtg

SEQ ID NO: 2234128 - DNA, 25 bp, Homo sapien
gcacttttctcagtcgctttttgaa

SEQ ID NO: 2234129 - DNA, 25 bp, Homo sapien
tctttgccgtttggctgcagagggt

SEQ ID NO: 2234130 - DNA, 25 bp, Homo sapien
cgtacccactcctatcctcctccac

SEQ ID NO: 2234131 - DNA, 25 bp, Homo sapien
tctggaagttgatttcccattggga

SEQ ID NO: 2234132 - DNA, 25 bp, Homo sapien
tctgagcactatcagttgctgactc

SEQ ID NO: 2234133 - DNA, 25 bp, Homo sapien
catagtctagaccagcaaaccctct

SEQ ID NO: 2234134 - DNA, 25 bp, Homo sapien
tgtagccagatttccctcccacatt

SEQ ID NO: 2234135 - DNA, 25 bp, Homo sapien
gactgccctggttctactcactggg

SEQ ID NO: 2234136 - DNA, 25 bp, Homo sapien
tgactgccctggttctactcactgg

SEQ ID NO: 2234137 - DNA, 25 bp, Homo sapien
tcactggggactggaaaggattctc

SEQ ID NO: 2234138 - DNA, 25 bp, Homo sapien
ctactcactggggactggaaaggat

SEQ ID NO: 2234139 - DNA, 25 bp, Homo sapien
agccagattcgcctcccacagagga

SEQ ID NO: 2234140 - DNA, 25 bp, Homo sapien
ttactgaggcttttgcagccagatt

SEQ ID NO: 2234141 - DNA, 25 bp, Homo sapien
ccagattcgcctcccacagaggaag

SEQ ID NO: 2234142 - DNA, 25 bp, Homo sapien
atttactgaggcttttgcagccaga

SEQ ID NO: 2234143 - DNA, 25 bp, Homo sapien
cttgagggtctattccctgggcctc

SEQ ID NO: 2234144 - DNA, 25 bp, Homo sapien
ctgctgatggagttcggagtctctc

SEQ ID NO: 2234145 - DNA, 25 bp, Homo sapien
gatggagttcggagtctctcctgtc

SEQ ID NO: 2234146 - DNA, 25 bp, Homo sapien
ttgagggtctattccctgggcctcc

SEQ ID NO: 2234147 - DNA, 25 bp, Homo sapien
gggtatattgggtatggctgagaag

SEQ ID NO: 2234148 - DNA, 25 bp, Homo sapien
acctttgctggtgaagggggtatat

SEQ ID NO: 2234149 - DNA, 25 bp, Homo sapien
ctgagaaggcggacaaagggcatgg

SEQ ID NO: 2234150 - DNA, 25 bp, Homo sapien
tatgagtatgtgaatgaggtaggga

SEQ ID NO: 2234151 - DNA, 25 bp, Homo sapien
gagactgtggacccaagcccagaga

SEQ ID NO: 2234152 - DNA, 25 bp, Homo sapien
gtgagactgtggacccaagcccaga

SEQ ID NO: 2234153 - DNA, 25 bp, Homo sapien
cagtgagactgtggacccaagccca

SEQ ID NO: 2234154 - DNA, 25 bp, Homo sapien
gactgtggacccaagcccagagaag

SEQ ID NO: 2234155 - DNA, 25 bp, Homo sapien
ctctgccccgcaaaggtgtaatttg

SEQ ID NO: 2234156 - DNA, 25 bp, Homo sapien
caatagctccgaggggctgcctgaa

SEQ ID NO: 2234157 - DNA, 25 bp, Homo sapien
ccccgcaaaggtgtaatttgcctgc

SEQ ID NO: 2234158 - DNA, 25 bp, Homo sapien
tgcctgctacaatagctccgagggg

SEQ ID NO: 2234159 - DNA, 25 bp, Homo sapien
agaggcattggacagggaccattcg

SEQ ID NO: 2234160 - DNA, 25 bp, Homo sapien
tggacagggaccattcgggggatct

SEQ ID NO: 2234161 - DNA, 25 bp, Homo sapien
gacagggaccattcgggggatctta

SEQ ID NO: 2234162 - DNA, 25 bp, Homo sapien
gggcagaggcattggacagggacca

SEQ ID NO: 2234163 - DNA, 25 bp, Homo sapien
gcggttttgtaactgcccctgcctg

SEQ ID NO: 2234164 - DNA, 25 bp, Homo sapien
caaggctggtctcggttagctgcaa

SEQ ID NO: 2234165 - DNA, 25 bp, Homo sapien
ttccgtcaggtttgaggccaagacc

SEQ ID NO: 2234166 - DNA, 25 bp, Homo sapien
agctgcaactggaaggtcgcctcat

SEQ ID NO: 2234167 - DNA, 25 bp, Homo sapien
tggggtcctcaggtctcaaggccat

SEQ ID NO: 2234168 - DNA, 25 bp, Homo sapien
tgatgaaggccaccacgtttccgtg

SEQ ID NO: 2234169 - DNA, 25 bp, Homo sapien
cggaacccactactggggtcctcag

SEQ ID NO: 2234170 - DNA, 25 bp, Homo sapien
tgaaggccaccacgtttccgtgccg

SEQ ID NO: 2234171 - DNA, 25 bp, Homo sapien
accccgctgcttaacacgcctgaag

SEQ ID NO: 2234172 - DNA, 25 bp, Homo sapien
caaccccgctgcttaacacgcctga

SEQ ID NO: 2234173 - DNA, 25 bp, Homo sapien
ccgctgcttaacacgcctgaagaga

SEQ ID NO: 2234174 - DNA, 25 bp, Homo sapien
cccgctgcttaacacgcctgaagag

SEQ ID NO: 2234175 - DNA, 25 bp, Homo sapien
gagggaacacccagatttctcccag

SEQ ID NO: 2234176 - DNA, 25 bp, Homo sapien
ccataggaacccatctgattggagg

SEQ ID NO: 2234177 - DNA, 25 bp, Homo sapien
caaagtttcatggaagcaatctgca

SEQ ID NO: 2234178 - DNA, 25 bp, Homo sapien
tcaagctctgtttcagagagactgg

SEQ ID NO: 2234179 - DNA, 25 bp, Homo sapien
aatactcctccgcatcccagttttg

SEQ ID NO: 2234180 - DNA, 25 bp, Homo sapien
aatgatcccagtgatctgccctcca

SEQ ID NO: 2234181 - DNA, 25 bp, Homo sapien
tgccctccaaatactcctccgcatc

SEQ ID NO: 2234182 - DNA, 25 bp, Homo sapien
gcccagctctaatgatcccagtgat

SEQ ID NO: 2234183 - DNA, 25 bp, Homo sapien
ttagtttctgaaatacaaatcaaaa

SEQ ID NO: 2234184 - DNA, 25 bp, Homo sapien
tttagtttctgaaatacaaatcaaa

SEQ ID NO: 2234185 - DNA, 25 bp, Homo sapien
tttttagtttctgaaatacaaatca

SEQ ID NO: 2234186 - DNA, 25 bp, Homo sapien
ttttagtttctgaaatacaaatcaa

SEQ ID NO: 2234187 - DNA, 25 bp, Homo sapien
ttttcaatacaggatgacacaaaat

SEQ ID NO: 2234188 - DNA, 25 bp, Homo sapien
ggagggtgctgaagactcacaacag

SEQ ID NO: 2234189 - DNA, 25 bp, Homo sapien
cagtattttagagcacaccatccaa

SEQ ID NO: 2234190 - DNA, 25 bp, Homo sapien
tattcgatgcctggaaaacaagctg

SEQ ID NO: 2234191 - DNA, 25 bp, Homo sapien
acagaaacgtttggcgtaggcctga

SEQ ID NO: 2234192 - DNA, 25 bp, Homo sapien
ttctcaatgtaaatacttgctcctt

SEQ ID NO: 2234193 - DNA, 25 bp, Homo sapien
ccacttgcaggggtgtcttttcttc

SEQ ID NO: 2234194 - DNA, 25 bp, Homo sapien
tctcaatgtaaatacttgctccttg

SEQ ID NO: 2234195 - DNA, 25 bp, Homo sapien
cagagaccaattaatcactaccaat

SEQ ID NO: 2234196 - DNA, 25 bp, Homo sapien
ctatgtaatggttaggatttcttgc

SEQ ID NO: 2234197 - DNA, 25 bp, Homo sapien
ccaattctatgtaatggttaggatt

SEQ ID NO: 2234198 - DNA, 25 bp, Homo sapien
cagggaccaccagagaccaattaat

SEQ ID NO: 2234199 - DNA, 25 bp, Homo sapien
tctgagtggcaagataataggcaat

SEQ ID NO: 2234200 - DNA, 25 bp, Homo sapien
tcaggtagaatacaaatgactgcta

SEQ ID NO: 2234201 - DNA, 25 bp, Homo sapien
gcaagaaggctaatgtcaggtagaa

SEQ ID NO: 2234202 - DNA, 25 bp, Homo sapien
taacacgtattgcatttataagcag

SEQ ID NO: 2234203 - DNA, 25 bp, Homo sapien
gtggatgctttgtagtacagaagga

SEQ ID NO: 2234204 - DNA, 25 bp, Homo sapien
ggatgctttgtagtacagaaggata

SEQ ID NO: 2234205 - DNA, 25 bp, Homo sapien
tgtggatgctttgtagtacagaagg

SEQ ID NO: 2234206 - DNA, 25 bp, Homo sapien
gatgctttgtagtacagaaggatat

SEQ ID NO: 2234207 - DNA, 25 bp, Homo sapien
cccgccttccagtaacatgacagcg

SEQ ID NO: 2234208 - DNA, 25 bp, Homo sapien
cgccttccagtaacatgacagcgat

SEQ ID NO: 2234209 - DNA, 25 bp, Homo sapien
ccgccttccagtaacatgacagcga

SEQ ID NO: 2234210 - DNA, 25 bp, Homo sapien
cgaagctgcataatgtaagggagta

SEQ ID NO: 2234211 - DNA, 25 bp, Homo sapien
taagggagtacagccattttgattg

SEQ ID NO: 2234212 - DNA, 25 bp, Homo sapien
gcagaagccgcaatatgaagaggag

SEQ ID NO: 2234213 - DNA, 25 bp, Homo sapien
tgtttttcgaagctgcataatgtaa

SEQ ID NO: 2234214 - DNA, 25 bp, Homo sapien
taatgcacaggcttcagtaaacacc

SEQ ID NO: 2234215 - DNA, 25 bp, Homo sapien
gagtctcatgcttgatcacaagggc

SEQ ID NO: 2234216 - DNA, 25 bp, Homo sapien
aatcacagagtatgagtggcaaaca

SEQ ID NO: 2234217 - DNA, 25 bp, Homo sapien
ccaggatagagtacaatggctcact

SEQ ID NO: 2234218 - DNA, 25 bp, Homo sapien
acaatttctgtatgtccagctgagc

SEQ ID NO: 2234219 - DNA, 25 bp, Homo sapien
atcgtctttatcattcactggcact

SEQ ID NO: 2234220 - DNA, 25 bp, Homo sapien
ttcaacaatttctgtatgtccagct

SEQ ID NO: 2234221 - DNA, 25 bp, Homo sapien
gcatgcccagtgcaatgcagttctg

SEQ ID NO: 2234222 - DNA, 25 bp, Homo sapien
atattacttactggtataagacaga

SEQ ID NO: 2234223 - DNA, 25 bp, Homo sapien
aatactggtgctggcaaatctatag

SEQ ID NO: 2234224 - DNA, 25 bp, Homo sapien
gatgaacatacgtaattctgggcag

SEQ ID NO: 2234225 - DNA, 25 bp, Homo sapien
cagatgaaggtttaagtaacatggg

SEQ ID NO: 2234226 - DNA, 25 bp, Homo sapien
ctagtagccagggatttatcggcca

SEQ ID NO: 2234227 - DNA, 25 bp, Homo sapien
tcggccagaatactctccttcaact

SEQ ID NO: 2234228 - DNA, 25 bp, Homo sapien
gtagccagggatttatcggccagaa

SEQ ID NO: 2234229 - DNA, 25 bp, Homo sapien
tggtcagttctagtagccagggatt

SEQ ID NO: 2234230 - DNA, 25 bp, Homo sapien
gccgttagagcttcaccaatcaccg

SEQ ID NO: 2234231 - DNA, 25 bp, Homo sapien
gctccggctacgccagtcaaaacag

SEQ ID NO: 2234232 - DNA, 25 bp, Homo sapien
ccagtcaaaacagccgttagagctt

SEQ ID NO: 2234233 - DNA, 25 bp, Homo sapien
cagcaactacttgtcgcgcgagcaa

SEQ ID NO: 2234234 - DNA, 25 bp, Homo sapien
gagtcggccatatgaaacaggttcg

SEQ ID NO: 2234235 - DNA, 25 bp, Homo sapien
tatgagagcctaaaggtcctgtccc

SEQ ID NO: 2234236 - DNA, 25 bp, Homo sapien
caagttgccggtggaattggcccag

SEQ ID NO: 2234237 - DNA, 25 bp, Homo sapien
ttgagtggaaccgtgtgaaagagcc

SEQ ID NO: 2234238 - DNA, 25 bp, Homo sapien
aagggttgcaatcaagaaagggagc

SEQ ID NO: 2234239 - DNA, 25 bp, Homo sapien
tgaggccctggcagtactgcataag

SEQ ID NO: 2234240 - DNA, 25 bp, Homo sapien
tcagtgactcttaacctgaggccct

SEQ ID NO: 2234241 - DNA, 25 bp, Homo sapien
aagggagcaccaggctttggatgaa

SEQ ID NO: 2234242 - DNA, 25 bp, Homo sapien
ttttatttgctatgtacaaaactga

SEQ ID NO: 2234243 - DNA, 25 bp, Homo sapien
tatttgctatgtacaaaactgacac

SEQ ID NO: 2234244 - DNA, 25 bp, Homo sapien
atgtacaaaactgacaccatgctta

SEQ ID NO: 2234245 - DNA, 25 bp, Homo sapien
ttattttatttgctatgtacaaaac

SEQ ID NO: 2234246 - DNA, 25 bp, Homo sapien
gaatacaatgtactgcatagccaat

SEQ ID NO: 2234247 - DNA, 25 bp, Homo sapien
ttaggtctgctaactgctcaagaga

SEQ ID NO: 2234248 - DNA, 25 bp, Homo sapien
aaggaactgcctcatgtcaacatag

SEQ ID NO: 2234249 - DNA, 25 bp, Homo sapien
catagctaagagtgttctggaaaac

SEQ ID NO: 2234250 - DNA, 25 bp, Homo sapien
agtttgccacattgcacacatctgg

SEQ ID NO: 2234251 - DNA, 25 bp, Homo sapien
ctcagaatacaaggaaaccaacact

SEQ ID NO: 2234252 - DNA, 25 bp, Homo sapien
cctgtgaaagagcaattggataacc

SEQ ID NO: 2234253 - DNA, 25 bp, Homo sapien
tggatggcatttggaataaacaggg

SEQ ID NO: 2234254 - DNA, 25 bp, Homo sapien
cttggccacatttgttgcatcctct

SEQ ID NO: 2234255 - DNA, 25 bp, Homo sapien
gccacatttgttgcatcctctgctt

SEQ ID NO: 2234256 - DNA, 25 bp, Homo sapien
tggccacatttgttgcatcctctgc

SEQ ID NO: 2234257 - DNA, 25 bp, Homo sapien
tcacacatccttacgcacccacccc

SEQ ID NO: 2234258 - DNA, 25 bp, Homo sapien
tgcctagacacagtgggcctccttg

SEQ ID NO: 2234259 - DNA, 25 bp, Homo sapien
ttcaagcctctctaagccatgtggg

SEQ ID NO: 2234260 - DNA, 25 bp, Homo sapien
tcaagacggtaaggagaaagctagc

SEQ ID NO: 2234261 - DNA, 25 bp, Homo sapien
ggcccagtcttgctcattctagaga

SEQ ID NO: 2234262 - DNA, 25 bp, Homo sapien
ggtgggctcatctctatggacccga

SEQ ID NO: 2234263 - DNA, 25 bp, Homo sapien
gacgagtgtccggtagtctagccca

SEQ ID NO: 2234264 - DNA, 25 bp, Homo sapien
caatgtacaacttgacaggcaaagg

SEQ ID NO: 2234265 - DNA, 25 bp, Homo sapien
tctagcccaaatgagactccaatgt

SEQ ID NO: 2234266 - DNA, 25 bp, Homo sapien
actgactcgagtgtggagctgccca

SEQ ID NO: 2234267 - DNA, 25 bp, Homo sapien
gcaccactgcattcgatgaaaggag

SEQ ID NO: 2234268 - DNA, 25 bp, Homo sapien
ccagctttcagcgtttcagacacag

SEQ ID NO: 2234269 - DNA, 25 bp, Homo sapien
tggcaggtgcctcgggcaccactgc

SEQ ID NO: 2234270 - DNA, 25 bp, Homo sapien
ccagcaaggacatataaacacagca

SEQ ID NO: 2234271 - DNA, 25 bp, Homo sapien
atggagaggcagcaaaaataccagc

SEQ ID NO: 2234272 - DNA, 25 bp, Homo sapien
cgctgccttcacaccgaaatggaga

SEQ ID NO: 2234273 - DNA, 25 bp, Homo sapien
gcatgcactcatcaaagccttttgg

SEQ ID NO: 2234274 - DNA, 25 bp, Homo sapien
caatccagaggctgcgccagcccag

SEQ ID NO: 2234275 - DNA, 25 bp, Homo sapien
aatccagaggctgcgccagcccagg

SEQ ID NO: 2234276 - DNA, 25 bp, Homo sapien
tgcgggatggtgatgtcctggctgt

SEQ ID NO: 2234277 - DNA, 25 bp, Homo sapien
ctgcgggatggtgatgtcctggctg

SEQ ID NO: 2234278 - DNA, 25 bp, Homo sapien
ttatcattgcgcctggcatagtggc

SEQ ID NO: 2234279 - DNA, 25 bp, Homo sapien
ggagagccagtaagatttatcattg

SEQ ID NO: 2234280 - DNA, 25 bp, Homo sapien
tctgggtctggctgacgggcatcat

SEQ ID NO: 2234281 - DNA, 25 bp, Homo sapien
caatggcttgcgagggtgcctcaca

SEQ ID NO: 2234282 - DNA, 25 bp, Homo sapien
cagctggctcatcccgatgggacac

SEQ ID NO: 2234283 - DNA, 25 bp, Homo sapien
taccaacgtgtagcccactctcatg

SEQ ID NO: 2234284 - DNA, 25 bp, Homo sapien
ggcacctgttccgactggctgtgct

SEQ ID NO: 2234285 - DNA, 25 bp, Homo sapien
tgcccctccacaaacagtaagctgt

SEQ ID NO: 2234286 - DNA, 25 bp, Homo sapien
ggatcaccaagagccccaggtgggc

SEQ ID NO: 2234287 - DNA, 25 bp, Homo sapien
tcaaatcctggagggccttgcagtc

SEQ ID NO: 2234288 - DNA, 25 bp, Homo sapien
ttgcagtccaggcagaccaggatca

SEQ ID NO: 2234289 - DNA, 25 bp, Homo sapien
gtccaggcagaccaggatcaccaag

SEQ ID NO: 2234290 - DNA, 25 bp, Homo sapien
tgggagcccactggggccatcttta

SEQ ID NO: 2234291 - DNA, 25 bp, Homo sapien
ctgggagcccactggggccatcttt

SEQ ID NO: 2234292 - DNA, 25 bp, Homo sapien
gggagcccactggggccatctttac

SEQ ID NO: 2234293 - DNA, 25 bp, Homo sapien
gggatgccaggtaaacctttggagc

SEQ ID NO: 2234294 - DNA, 25 bp, Homo sapien
attgtcttgtgtggccctttattca

SEQ ID NO: 2234295 - DNA, 25 bp, Homo sapien
tgtcttgtgtggccctttattcacc

SEQ ID NO: 2234296 - DNA, 25 bp, Homo sapien
cattgtcttgtgtggccctttattc

SEQ ID NO: 2234297 - DNA, 25 bp, Homo sapien
tcttgtgtggccctttattcaccac

SEQ ID NO: 2234298 - DNA, 25 bp, Homo sapien
aagtaccaagtacaaccaccctgct

SEQ ID NO: 2234299 - DNA, 25 bp, Homo sapien
cctctaaagccaagtaccaagtaca

SEQ ID NO: 2234300 - DNA, 25 bp, Homo sapien
agtaccaagtacaaccaccctgctg

SEQ ID NO: 2234301 - DNA, 25 bp, Homo sapien
taaagccaagtaccaagtacaacca

SEQ ID NO: 2234302 - DNA, 25 bp, Homo sapien
ccagtgaggccagggatgccatcga

SEQ ID NO: 2234303 - DNA, 25 bp, Homo sapien
gatgccatcgatccctggtagaccc

SEQ ID NO: 2234304 - DNA, 25 bp, Homo sapien
tgaggccagggatgccatcgatccc

SEQ ID NO: 2234305 - DNA, 25 bp, Homo sapien
cagggatgccatcgatccctggtag

SEQ ID NO: 2234306 - DNA, 25 bp, Homo sapien
ttggccctgccttccccttcattcc

SEQ ID NO: 2234307 - DNA, 25 bp, Homo sapien
cttcattccgggaaatcctgggtct

SEQ ID NO: 2234308 - DNA, 25 bp, Homo sapien
attccgggaaatcctgggtctccag

SEQ ID NO: 2234309 - DNA, 25 bp, Homo sapien
tcattccgggaaatcctgggtctcc

SEQ ID NO: 2234310 - DNA, 25 bp, Homo sapien
cttgcctggagtccccatgaagcca

SEQ ID NO: 2234311 - DNA, 25 bp, Homo sapien
tggagtccccatgaagccaggctca

SEQ ID NO: 2234312 - DNA, 25 bp, Homo sapien
catgaagccaggctcacctctcatg

SEQ ID NO: 2234313 - DNA, 25 bp, Homo sapien
gcctggagtccccatgaagccaggc

SEQ ID NO: 2234314 - DNA, 25 bp, Homo sapien
ggaagaacatcagccaccggcctct

SEQ ID NO: 2234315 - DNA, 25 bp, Homo sapien
tgaggtagggaagaacatcagccac

SEQ ID NO: 2234316 - DNA, 25 bp, Homo sapien
aaggaagcaagtcaggtcccggcat

SEQ ID NO: 2234317 - DNA, 25 bp, Homo sapien
gcctctcttcacaggactgcaggaa

SEQ ID NO: 2234318 - DNA, 25 bp, Homo sapien
tcagtcctagctctccagggaggcc

SEQ ID NO: 2234319 - DNA, 25 bp, Homo sapien
cagggaggccagaaaaacctggaat

SEQ ID NO: 2234320 - DNA, 25 bp, Homo sapien
agctctccagggaggccagaaaaac

SEQ ID NO: 2234321 - DNA, 25 bp, Homo sapien
cagtcctagctctccagggaggcca

SEQ ID NO: 2234322 - DNA, 25 bp, Homo sapien
agggtctccggtgtcgccttgattc

SEQ ID NO: 2234323 - DNA, 25 bp, Homo sapien
ccggtgtcgccttgattcgaggatg

SEQ ID NO: 2234324 - DNA, 25 bp, Homo sapien
ggtctccggtgtcgccttgattcga

SEQ ID NO: 2234325 - DNA, 25 bp, Homo sapien
gtgtcgccttgattcgaggatggcc

SEQ ID NO: 2234326 - DNA, 25 bp, Homo sapien
ggtgaacaggtagtagccactgcag

SEQ ID NO: 2234327 - DNA, 25 bp, Homo sapien
gaacaggtagtagccactgcagaag

SEQ ID NO: 2234328 - DNA, 25 bp, Homo sapien
ggcaggtgaacaggtagtagccact

SEQ ID NO: 2234329 - DNA, 25 bp, Homo sapien
acaggtagtagccactgcagaaggc

SEQ ID NO: 2234330 - DNA, 25 bp, Homo sapien
gttctccatctaggcctggtcgccc

SEQ ID NO: 2234331 - DNA, 25 bp, Homo sapien
cccggggtcaccaggctgtcctgct

SEQ ID NO: 2234332 - DNA, 25 bp, Homo sapien
tccatctaggcctggtcgcccgggg

SEQ ID NO: 2234333 - DNA, 25 bp, Homo sapien
ctcgttctccatctaggcctggtcg

SEQ ID NO: 2234334 - DNA, 25 bp, Homo sapien
ggcccaggcacaccggtgatactag

SEQ ID NO: 2234335 - DNA, 25 bp, Homo sapien
cccaggcacaccggtgatactaggt

SEQ ID NO: 2234336 - DNA, 25 bp, Homo sapien
tccctggagctccgatgccaattcc

SEQ ID NO: 2234337 - DNA, 25 bp, Homo sapien
ccaggcacaccggtgatactaggtc

SEQ ID NO: 2234338 - DNA, 25 bp, Homo sapien
gcccggaagcccattcagtccatgt

SEQ ID NO: 2234339 - DNA, 25 bp, Homo sapien
gccatgggtacccttggtgcccgga

SEQ ID NO: 2234340 - DNA, 25 bp, Homo sapien
catgggtacccttggtgcccggaag

SEQ ID NO: 2234341 - DNA, 25 bp, Homo sapien
actgcctgctcccaaatacacatac

SEQ ID NO: 2234342 - DNA, 25 bp, Homo sapien
ccccactgcctgctcccaaatacac

SEQ ID NO: 2234343 - DNA, 25 bp, Homo sapien
ttccccactgcctgctcccaaatac

SEQ ID NO: 2234344 - DNA, 25 bp, Homo sapien
ccactgcctgctcccaaatacacat

SEQ ID NO: 2234345 - DNA, 25 bp, Homo sapien
tggttctcctctcatgccggcaact

SEQ ID NO: 2234346 - DNA, 25 bp, Homo sapien
ccgggggatcctagaggcccaattg

SEQ ID NO: 2234347 - DNA, 25 bp, Homo sapien
tagaggcccaattgccccttggtga

SEQ ID NO: 2234348 - DNA, 25 bp, Homo sapien
atcctagaggcccaattgccccttg

SEQ ID NO: 2234349 - DNA, 25 bp, Homo sapien
aggaaggccaacatctccagaaaca

SEQ ID NO: 2234350 - DNA, 25 bp, Homo sapien
ggaaggccaacatctccagaaacac

SEQ ID NO: 2234351 - DNA, 25 bp, Homo sapien
caggaaggccaacatctccagaaac

SEQ ID NO: 2234352 - DNA, 25 bp, Homo sapien
ctattagtccatctcttccttttgt

SEQ ID NO: 2234353 - DNA, 25 bp, Homo sapien
tattagtccatctcttccttttgtg

SEQ ID NO: 2234354 - DNA, 25 bp, Homo sapien
attagtccatctcttccttttgtgc

SEQ ID NO: 2234355 - DNA, 25 bp, Homo sapien
aggctgtcccttgggtcctgggcta

SEQ ID NO: 2234356 - DNA, 25 bp, Homo sapien
aaatttcaactgtctggccgttgtc

SEQ ID NO: 2234357 - DNA, 25 bp, Homo sapien
cctgggctaccggaaatttcaactg

SEQ ID NO: 2234358 - DNA, 25 bp, Homo sapien
taaaaccagattcgccaggctgtcc

SEQ ID NO: 2234359 - DNA, 25 bp, Homo sapien
gcctgggagaccagatgctcctggg

SEQ ID NO: 2234360 - DNA, 25 bp, Homo sapien
gcgaccctctgataccttgtgaacc

SEQ ID NO: 2234361 - DNA, 25 bp, Homo sapien
gtccaggcgaccctctgataccttg

SEQ ID NO: 2234362 - DNA, 25 bp, Homo sapien
gggagtccaggcgaccctctgatac

SEQ ID NO: 2234363 - DNA, 25 bp, Homo sapien
gctctggagccattatgcataggaa

SEQ ID NO: 2234364 - DNA, 25 bp, Homo sapien
gagccattatgcataggaagaagtt

SEQ ID NO: 2234365 - DNA, 25 bp, Homo sapien
caaagctctggagccattatgcata

SEQ ID NO: 2234366 - DNA, 25 bp, Homo sapien
tctggagccattatgcataggaaga

SEQ ID NO: 2234367 - DNA, 25 bp, Homo sapien
tctgaatttgggcaaatgttaccat

SEQ ID NO: 2234368 - DNA, 25 bp, Homo sapien
caggttccgcaaggaacacaagttc

SEQ ID NO: 2234369 - DNA, 25 bp, Homo sapien
tgccttcactggctaatgtccaaca

SEQ ID NO: 2234370 - DNA, 25 bp, Homo sapien
gcagggttagccctctgccacaggt

SEQ ID NO: 2234371 - DNA, 25 bp, Homo sapien
gccatcagcaaagttcttttcttga

SEQ ID NO: 2234372 - DNA, 25 bp, Homo sapien
tgggaagtggccatgtcagctgcca

SEQ ID NO: 2234373 - DNA, 25 bp, Homo sapien
tgccatcagcaaagttcttttcttg

SEQ ID NO: 2234374 - DNA, 25 bp, Homo sapien
tggccatgtcagctgccatcagcaa

SEQ ID NO: 2234375 - DNA, 25 bp, Homo sapien
tcagatggactgacacttttgaagt

SEQ ID NO: 2234376 - DNA, 25 bp, Homo sapien
agatggactgacacttttgaagttc

SEQ ID NO: 2234377 - DNA, 25 bp, Homo sapien
cagatggactgacacttttgaagtt

SEQ ID NO: 2234378 - DNA, 25 bp, Homo sapien
tgggcagtgggggtatatccccgtg

SEQ ID NO: 2234379 - DNA, 25 bp, Homo sapien
gccttttctggtataaagacaaaga

SEQ ID NO: 2234380 - DNA, 25 bp, Homo sapien
tttctgaggatgtcctgggagaagg

SEQ ID NO: 2234381 - DNA, 25 bp, Homo sapien
tatatccccgtgagatggggggcct

SEQ ID NO: 2234382 - DNA, 25 bp, Homo sapien
tggtggtccaggtcgaccagcctct

SEQ ID NO: 2234383 - DNA, 25 bp, Homo sapien
gccccggattcccatgaagccaggg

SEQ ID NO: 2234384 - DNA, 25 bp, Homo sapien
tcctttgataatgcctgggaggcca

SEQ ID NO: 2234385 - DNA, 25 bp, Homo sapien
cttcaggccaggtaagccccggatt

SEQ ID NO: 2234386 - DNA, 25 bp, Homo sapien
ttgacattggacgtcttggactagg

SEQ ID NO: 2234387 - DNA, 25 bp, Homo sapien
gaaatccattggatccggctgagcc

SEQ ID NO: 2234388 - DNA, 25 bp, Homo sapien
gactggccccggattgcctctgtct

SEQ ID NO: 2234389 - DNA, 25 bp, Homo sapien
tggactaggtattccgactggcccc

SEQ ID NO: 2234390 - DNA, 25 bp, Homo sapien
caggagtaccagcacgtccagatgg

SEQ ID NO: 2234391 - DNA, 25 bp, Homo sapien
cttgttccaggaataccaggcagac

SEQ ID NO: 2234392 - DNA, 25 bp, Homo sapien
tggaaaacctacgaatccaacagac

SEQ ID NO: 2234393 - DNA, 25 bp, Homo sapien
tccttttaatcctcttgttccagga

SEQ ID NO: 2234394 - DNA, 25 bp, Homo sapien
gccctggcagccctttctttacaat

SEQ ID NO: 2234395 - DNA, 25 bp, Homo sapien
tggcaacccagcgacccctggagag

SEQ ID NO: 2234396 - DNA, 25 bp, Homo sapien
gggcttcctttcagtcctactaggc

SEQ ID NO: 2234397 - DNA, 25 bp, Homo sapien
tacaattgatccaggaggacctttc

SEQ ID NO: 2234398 - DNA, 25 bp, Homo sapien
ccttgatgccatatggaccactaga

SEQ ID NO: 2234399 - DNA, 25 bp, Homo sapien
cagatttgcccttgatgccatatgg

SEQ ID NO: 2234400 - DNA, 25 bp, Homo sapien
tttgcccttgatgccatatggacca

SEQ ID NO: 2234401 - DNA, 25 bp, Homo sapien
gccatatggaccactagatcctggg

SEQ ID NO: 2234402 - DNA, 25 bp, Homo sapien
tagtaagccaggcttcccgtgcaca

SEQ ID NO: 2234403 - DNA, 25 bp, Homo sapien
agtaagccaggcttcccgtgcacac

SEQ ID NO: 2234404 - DNA, 25 bp, Homo sapien
ctagtaagccaggcttcccgtgcac

SEQ ID NO: 2234405 - DNA, 25 bp, Homo sapien
gccctgttaatccttgtaggccttg

SEQ ID NO: 2234406 - DNA, 25 bp, Homo sapien
ttcagcaccaaagatgtcaccagtg

SEQ ID NO: 2234407 - DNA, 25 bp, Homo sapien
ctccaagaaatcctttgtgccctgt

SEQ ID NO: 2234408 - DNA, 25 bp, Homo sapien
tgttcccccggagcaccattttcag

SEQ ID NO: 2234409 - DNA, 25 bp, Homo sapien
cctggactgccaatcatcccaggca

SEQ ID NO: 2234410 - DNA, 25 bp, Homo sapien
aagcctggactgccaatcatcccag

SEQ ID NO: 2234411 - DNA, 25 bp, Homo sapien
tggactgccaatcatcccaggcaag

SEQ ID NO: 2234412 - DNA, 25 bp, Homo sapien
ggactgccaatcatcccaggcaagc

SEQ ID NO: 2234413 - DNA, 25 bp, Homo sapien
ttagaagcaatttgtctgagtacag

SEQ ID NO: 2234414 - DNA, 25 bp, Homo sapien
tttagaagcaatttgtctgagtaca

SEQ ID NO: 2234415 - DNA, 25 bp, Homo sapien
aaaggcgaacataaaagaccatggc

SEQ ID NO: 2234416 - DNA, 25 bp, Homo sapien
aaaaaggcgaacataaaagaccatg

SEQ ID NO: 2234417 - DNA, 25 bp, Homo sapien
cagggaggcctcgagaccctttagg

SEQ ID NO: 2234418 - DNA, 25 bp, Homo sapien
tgaaccaatcctggactccctggct

SEQ ID NO: 2234419 - DNA, 25 bp, Homo sapien
gaagatgaaccaatcctggactccc

SEQ ID NO: 2234420 - DNA, 25 bp, Homo sapien
gatgaaccaatcctggactccctgg

SEQ ID NO: 2234421 - DNA, 25 bp, Homo sapien
gaaaacccaaatgtaagcaatgagg

SEQ ID NO: 2234422 - DNA, 25 bp, Homo sapien
ctgaaaacccaaatgtaagcaatga

SEQ ID NO: 2234423 - DNA, 25 bp, Homo sapien
tgaaaacccaaatgtaagcaatgag

SEQ ID NO: 2234424 - DNA, 25 bp, Homo sapien
ctccccacactgccctctccagcag

SEQ ID NO: 2234425 - DNA, 25 bp, Homo sapien
cacactgccctctccagcagccatc

SEQ ID NO: 2234426 - DNA, 25 bp, Homo sapien
ccacactgccctctccagcagccat

SEQ ID NO: 2234427 - DNA, 25 bp, Homo sapien
ccccacactgccctctccagcagcc

SEQ ID NO: 2234428 - DNA, 25 bp, Homo sapien
ggaatccgggagtgcctggaaatcc

SEQ ID NO: 2234429 - DNA, 25 bp, Homo sapien
aggaataatacagggcagggtgatt

SEQ ID NO: 2234430 - DNA, 25 bp, Homo sapien
gcctggaaatcctgatggaccgtat

SEQ ID NO: 2234431 - DNA, 25 bp, Homo sapien
gatggaccgtatgacccaggaataa

SEQ ID NO: 2234432 - DNA, 25 bp, Homo sapien
tttaataggacagccaagctcttcc

SEQ ID NO: 2234433 - DNA, 25 bp, Homo sapien
tccctagtacgctcctttacttcta

SEQ ID NO: 2234434 - DNA, 25 bp, Homo sapien
tgaacccagagttagggaagatttc

SEQ ID NO: 2234435 - DNA, 25 bp, Homo sapien
ctgtaaatggtaacatgtgtgcatt

SEQ ID NO: 2234436 - DNA, 25 bp, Homo sapien
ttaccaacctctctacagcagcagt

SEQ ID NO: 2234437 - DNA, 25 bp, Homo sapien
tctctctgtgtctaagtctccttta

SEQ ID NO: 2234438 - DNA, 25 bp, Homo sapien
taagtctcctttaccaacctctcta

SEQ ID NO: 2234439 - DNA, 25 bp, Homo sapien
tgtgtctaagtctcctttaccaacc

SEQ ID NO: 2234440 - DNA, 25 bp, Homo sapien
ccttgttgtcccggtaatccatcct

SEQ ID NO: 2234441 - DNA, 25 bp, Homo sapien
cttgttgtcccggtaatccatcctt

SEQ ID NO: 2234442 - DNA, 25 bp, Homo sapien
tgttgtcccggtaatccatccttgc

SEQ ID NO: 2234443 - DNA, 25 bp, Homo sapien
ttgttgtcccggtaatccatccttg

SEQ ID NO: 2234444 - DNA, 25 bp, Homo sapien
caggtggaccaggatggcctttttc

SEQ ID NO: 2234445 - DNA, 25 bp, Homo sapien
gggaggccaggtggaccaggatggc

SEQ ID NO: 2234446 - DNA, 25 bp, Homo sapien
gtggaccaggatggcctttttcacc

SEQ ID NO: 2234447 - DNA, 25 bp, Homo sapien
ggaggccaggtggaccaggatggcc

SEQ ID NO: 2234448 - DNA, 25 bp, Homo sapien
aacctggtactccgtccttgcctgg

SEQ ID NO: 2234449 - DNA, 25 bp, Homo sapien
aaacctggtactccgtccttgcctg

SEQ ID NO: 2234450 - DNA, 25 bp, Homo sapien
tgggagccagaatcaccccgatctc

SEQ ID NO: 2234451 - DNA, 25 bp, Homo sapien
ctgggagccagaatcaccccgatct

SEQ ID NO: 2234452 - DNA, 25 bp, Homo sapien
cttggattgtactgagaattggttc

SEQ ID NO: 2234453 - DNA, 25 bp, Homo sapien
ggattgtactgagaattggttcccc

SEQ ID NO: 2234454 - DNA, 25 bp, Homo sapien
tcctttgggtcctgaaggacccaga

SEQ ID NO: 2234455 - DNA, 25 bp, Homo sapien
gaaggacccagaggcccaactaagc

SEQ ID NO: 2234456 - DNA, 25 bp, Homo sapien
ctttaaggcctggaaggcctatgag

SEQ ID NO: 2234457 - DNA, 25 bp, Homo sapien
gttgggaacaccaccgtcacaagca

SEQ ID NO: 2234458 - DNA, 25 bp, Homo sapien
tatgagaccccatggaccaggtggg

SEQ ID NO: 2234459 - DNA, 25 bp, Homo sapien
tggtccagtgttgggaacaccaccg

SEQ ID NO: 2234460 - DNA, 25 bp, Homo sapien
tctcctcggagaccagggaaccctg

SEQ ID NO: 2234461 - DNA, 25 bp, Homo sapien
ttttggaccttgttctcctcggaga

SEQ ID NO: 2234462 - DNA, 25 bp, Homo sapien
cagggaaccctgactctttgttgtg

SEQ ID NO: 2234463 - DNA, 25 bp, Homo sapien
tttgttgtgtagagtttcagtctca

SEQ ID NO: 2234464 - DNA, 25 bp, Homo sapien
gctccaattgtggtacggcctgggt

SEQ ID NO: 2234465 - DNA, 25 bp, Homo sapien
ttcagccctggaaatccctgaggcc

SEQ ID NO: 2234466 - DNA, 25 bp, Homo sapien
tggaaatccctgaggccctagggct

SEQ ID NO: 2234467 - DNA, 25 bp, Homo sapien
aggccagctgctccaattgtggtac

SEQ ID NO: 2234468 - DNA, 25 bp, Homo sapien
ccgacccagaggtatagaagggaat

SEQ ID NO: 2234469 - DNA, 25 bp, Homo sapien
agaggactgatctgtgtaggaaatg

SEQ ID NO: 2234470 - DNA, 25 bp, Homo sapien
gggaaccacagtgtatagaggactg

SEQ ID NO: 2234471 - DNA, 25 bp, Homo sapien
actttggctaggtgtgtgccccgac

SEQ ID NO: 2234472 - DNA, 25 bp, Homo sapien
taggccttggatgccttcatctcct

SEQ ID NO: 2234473 - DNA, 25 bp, Homo sapien
aggccttggatgccttcatctcctt

SEQ ID NO: 2234474 - DNA, 25 bp, Homo sapien
gataagctctggtaagtacttcttc

SEQ ID NO: 2234475 - DNA, 25 bp, Homo sapien
taagaattgttctggccaaggcctg

SEQ ID NO: 2234476 - DNA, 25 bp, Homo sapien
gggccttctggagccaaaattagtg

SEQ ID NO: 2234477 - DNA, 25 bp, Homo sapien
gattaagatgttgaagtccactatt

SEQ ID NO: 2234478 - DNA, 25 bp, Homo sapien
gcaccatctatatcgatgaaaacat

SEQ ID NO: 2234479 - DNA, 25 bp, Homo sapien
ggcaggccaatgtcacccttttgac

SEQ ID NO: 2234480 - DNA, 25 bp, Homo sapien
ggcctggcaggccaatgtcaccctt

SEQ ID NO: 2234481 - DNA, 25 bp, Homo sapien
tgagatcacagcaccatctatatcg

SEQ ID NO: 2234482 - DNA, 25 bp, Homo sapien
tggatttttcacttcccaacattac

SEQ ID NO: 2234483 - DNA, 25 bp, Homo sapien
ccctggatttttcacttcccaacat

SEQ ID NO: 2234484 - DNA, 25 bp, Homo sapien
cctggatttttcacttcccaacatt

SEQ ID NO: 2234485 - DNA, 25 bp, Homo sapien
ctggatttttcacttcccaacatta

SEQ ID NO: 2234486 - DNA, 25 bp, Homo sapien
aattccttggaatccattaagccca

SEQ ID NO: 2234487 - DNA, 25 bp, Homo sapien
ggaatccattaagcccaggaaatcc

SEQ ID NO: 2234488 - DNA, 25 bp, Homo sapien
ccttggaatccattaagcccaggaa

SEQ ID NO: 2234489 - DNA, 25 bp, Homo sapien
ttccttggaatccattaagcccagg

SEQ ID NO: 2234490 - DNA, 25 bp, Homo sapien
agtggaaagtatgagagcataagag

SEQ ID NO: 2234491 - DNA, 25 bp, Homo sapien
ggaaagtatgagagcataagagagt

SEQ ID NO: 2234492 - DNA, 25 bp, Homo sapien
tagttaccactaagtggaaagtatg

SEQ ID NO: 2234493 - DNA, 25 bp, Homo sapien
agttaccactaagtggaaagtatga

SEQ ID NO: 2234494 - DNA, 25 bp, Homo sapien
gccttggactccttctgaacccatg

SEQ ID NO: 2234495 - DNA, 25 bp, Homo sapien
gggccttggactccttctgaaccca

SEQ ID NO: 2234496 - DNA, 25 bp, Homo sapien
ggccttggactccttctgaacccat

SEQ ID NO: 2234497 - DNA, 25 bp, Homo sapien
taggtcctggcaaaccagggattcc

SEQ ID NO: 2234498 - DNA, 25 bp, Homo sapien
ctcccttttctccagtagttccaag

SEQ ID NO: 2234499 - DNA, 25 bp, Homo sapien
ttctcccttttctccagtagttcca

SEQ ID NO: 2234500 - DNA, 25 bp, Homo sapien
cctaggtcctggcaaaccagggatt

SEQ ID NO: 2234501 - DNA, 25 bp, Homo sapien
cacttatgcctggaaaacccttagg

SEQ ID NO: 2234502 - DNA, 25 bp, Homo sapien
atgcctggaaaacccttaggccctg

SEQ ID NO: 2234503 - DNA, 25 bp, Homo sapien
gccacttatgcctggaaaaccctta

SEQ ID NO: 2234504 - DNA, 25 bp, Homo sapien
ccacttatgcctggaaaacccttag

SEQ ID NO: 2234505 - DNA, 25 bp, Homo sapien
gcccaaggttagtaagtagcatcag

SEQ ID NO: 2234506 - DNA, 25 bp, Homo sapien
cagcccaaggttagtaagtagcatc

SEQ ID NO: 2234507 - DNA, 25 bp, Homo sapien
agcatcaggaagcagtgaacgcaca

SEQ ID NO: 2234508 - DNA, 25 bp, Homo sapien
gcacagtaggatggctctccacatg

SEQ ID NO: 2234509 - DNA, 25 bp, Homo sapien
ggggaatcccatgaattccagctct

SEQ ID NO: 2234510 - DNA, 25 bp, Homo sapien
tggggaatcccatgaattccagctc

SEQ ID NO: 2234511 - DNA, 25 bp, Homo sapien
atcccatgaattccagctctccagt

SEQ ID NO: 2234512 - DNA, 25 bp, Homo sapien
ccatgaattccagctctccagtaga

SEQ ID NO: 2234513 - DNA, 25 bp, Homo sapien
tgtaagatcaaatggaacattaagc

SEQ ID NO: 2234514 - DNA, 25 bp, Homo sapien
tggaacattaagcaaagtgacaatc

SEQ ID NO: 2234515 - DNA, 25 bp, Homo sapien
cacaccgaccgtttttccagagtgg

SEQ ID NO: 2234516 - DNA, 25 bp, Homo sapien
aagtgacaatcacaccgaccgtttt

SEQ ID NO: 2234517 - DNA, 25 bp, Homo sapien
tccttgaaaacctagccccatattc

SEQ ID NO: 2234518 - DNA, 25 bp, Homo sapien
ctccttgaaaacctagccccatatt

SEQ ID NO: 2234519 - DNA, 25 bp, Homo sapien
tctccttgaaaacctagccccatat

SEQ ID NO: 2234520 - DNA, 25 bp, Homo sapien
atcaggaccaagaggaccaggaggc

SEQ ID NO: 2234521 - DNA, 25 bp, Homo sapien
gaggaccaggaggccctggaggacc

SEQ ID NO: 2234522 - DNA, 25 bp, Homo sapien
ccaagaggaccaggaggccctggag

SEQ ID NO: 2234523 - DNA, 25 bp, Homo sapien
aagaggaccaggaggccctggagga

SEQ ID NO: 2234524 - DNA, 25 bp, Homo sapien
agctccaggaaatccgggtgctcct

SEQ ID NO: 2234525 - DNA, 25 bp, Homo sapien
tatttggacacgaagcaacacactt

SEQ ID NO: 2234526 - DNA, 25 bp, Homo sapien
caagatagactgtatgctggaccat

SEQ ID NO: 2234527 - DNA, 25 bp, Homo sapien
tcatgcctgtgtatgtggacaaaca

SEQ ID NO: 2234528 - DNA, 25 bp, Homo sapien
taagccaattgttttgccctaggga

SEQ ID NO: 2234529 - DNA, 25 bp, Homo sapien
ccagtccaggcagcccaggatcccc

SEQ ID NO: 2234530 - DNA, 25 bp, Homo sapien
gtgattccatccagtccaggcagcc

SEQ ID NO: 2234531 - DNA, 25 bp, Homo sapien
agtgattccatccagtccaggcagc

SEQ ID NO: 2234532 - DNA, 25 bp, Homo sapien
catccagtccaggcagcccaggatc

SEQ ID NO: 2234533 - DNA, 25 bp, Homo sapien
ctgccttccaaagtgatttccaatg

SEQ ID NO: 2234534 - DNA, 25 bp, Homo sapien
tttccaatgttccaggctctatgca

SEQ ID NO: 2234535 - DNA, 25 bp, Homo sapien
taaatcttgtccggctctccagcca

SEQ ID NO: 2234536 - DNA, 25 bp, Homo sapien
ccaaagtgatttccaatgttccagg

SEQ ID NO: 2234537 - DNA, 25 bp, Homo sapien
tgctaccagggaaatgatggactcc

SEQ ID NO: 2234538 - DNA, 25 bp, Homo sapien
cagggaaatgatggactcctgcccc

SEQ ID NO: 2234539 - DNA, 25 bp, Homo sapien
taccagggaaatgatggactcctgc

SEQ ID NO: 2234540 - DNA, 25 bp, Homo sapien
gctaccagggaaatgatggactcct

SEQ ID NO: 2234541 - DNA, 25 bp, Homo sapien
caaggacagggtcaccttttgatcc

SEQ ID NO: 2234542 - DNA, 25 bp, Homo sapien
cttcattcctttgaaactacctgga

SEQ ID NO: 2234543 - DNA, 25 bp, Homo sapien
tttgaaactacctggagcaaggaca

SEQ ID NO: 2234544 - DNA, 25 bp, Homo sapien
ttcctttgaaactacctggagcaag

SEQ ID NO: 2234545 - DNA, 25 bp, Homo sapien
gataatcaacgtccctacacctaag

SEQ ID NO: 2234546 - DNA, 25 bp, Homo sapien
tcaaagtctgtctaagaggctggtg

SEQ ID NO: 2234547 - DNA, 25 bp, Homo sapien
aatgattgattccttcagcacaggg

SEQ ID NO: 2234548 - DNA, 25 bp, Homo sapien
gaggctggtgtatctcactgctaac

SEQ ID NO: 2234549 - DNA, 25 bp, Homo sapien
acttgtaaaatcagcctggaagggc

SEQ ID NO: 2234550 - DNA, 25 bp, Homo sapien
tggtatagaccaagcttgcaagccc

SEQ ID NO: 2234551 - DNA, 25 bp, Homo sapien
tcaaagtcctatatgccaatctggg

SEQ ID NO: 2234552 - DNA, 25 bp, Homo sapien
aatatctcagatcagtgccctcatg

SEQ ID NO: 2234553 - DNA, 25 bp, Homo sapien
tggctgccccacaaaatcttgaggt

SEQ ID NO: 2234554 - DNA, 25 bp, Homo sapien
gctgccccacaaaatcttgaggttt

SEQ ID NO: 2234555 - DNA, 25 bp, Homo sapien
tgccccacaaaatcttgaggtttcc

SEQ ID NO: 2234556 - DNA, 25 bp, Homo sapien
ggctgccccacaaaatcttgaggtt

SEQ ID NO: 2234557 - DNA, 25 bp, Homo sapien
aaaatgcaaatatctggcagcatac

SEQ ID NO: 2234558 - DNA, 25 bp, Homo sapien
gtagagacaagcaaagccatttgaa

SEQ ID NO: 2234559 - DNA, 25 bp, Homo sapien
tagagacaagcaaagccatttgaaa

SEQ ID NO: 2234560 - DNA, 25 bp, Homo sapien
aataaaatgcaaatatctggcagca

SEQ ID NO: 2234561 - DNA, 25 bp, Homo sapien
tcagggcctggaaatccaacagctc

SEQ ID NO: 2234562 - DNA, 25 bp, Homo sapien
ccatcagggcctggaaatccaacag

SEQ ID NO: 2234563 - DNA, 25 bp, Homo sapien
catcagggcctggaaatccaacagc

SEQ ID NO: 2234564 - DNA, 25 bp, Homo sapien
atcagggcctggaaatccaacagct

SEQ ID NO: 2234565 - DNA, 25 bp, Homo sapien
gcctctggggcctggttgtccaggg

SEQ ID NO: 2234566 - DNA, 25 bp, Homo sapien
tggggcctggttgtccagggtggcc

SEQ ID NO: 2234567 - DNA, 25 bp, Homo sapien
gggcctctggggcctggttgtccag

SEQ ID NO: 2234568 - DNA, 25 bp, Homo sapien
caggtgggcctctggggcctggttg

SEQ ID NO: 2234569 - DNA, 25 bp, Homo sapien
gaaaagaagggatcaagttagccaa

SEQ ID NO: 2234570 - DNA, 25 bp, Homo sapien
aagagaaaagaagggatcaagttag

SEQ ID NO: 2234571 - DNA, 25 bp, Homo sapien
aagaagggatcaagttagccaaagg

SEQ ID NO: 2234572 - DNA, 25 bp, Homo sapien
agaaaagaagggatcaagttagcca

SEQ ID NO: 2234573 - DNA, 25 bp, Homo sapien
ataaatctttgacctctgactcaga

SEQ ID NO: 2234574 - DNA, 25 bp, Homo sapien
gaattctctggaaataaatctttga

SEQ ID NO: 2234575 - DNA, 25 bp, Homo sapien
ctcagatctatcagccccttttcat

SEQ ID NO: 2234576 - DNA, 25 bp, Homo sapien
ctgactcagatctatcagccccttt

SEQ ID NO: 2234577 - DNA, 25 bp, Homo sapien
gataccaaggaatgggtagacaagg

SEQ ID NO: 2234578 - DNA, 25 bp, Homo sapien
accaaggaatgggtagacaaggcat

SEQ ID NO: 2234579 - DNA, 25 bp, Homo sapien
ataccaaggaatgggtagacaaggc

SEQ ID NO: 2234580 - DNA, 25 bp, Homo sapien
ctgataccaaggaatgggtagacaa

SEQ ID NO: 2234581 - DNA, 25 bp, Homo sapien
aatccaagggcaattgtgtgtgacc

SEQ ID NO: 2234582 - DNA, 25 bp, Homo sapien
tgtgtgaccactgccctttaaacct

SEQ ID NO: 2234583 - DNA, 25 bp, Homo sapien
gtgtgtgaccactgccctttaaacc

SEQ ID NO: 2234584 - DNA, 25 bp, Homo sapien
cttgtgcctgaatccaagggcaatt

SEQ ID NO: 2234585 - DNA, 25 bp, Homo sapien
gatgttgctgaggtcaaagtgtcca

SEQ ID NO: 2234586 - DNA, 25 bp, Homo sapien
aagtgtccaaaatatgaggcagaac

SEQ ID NO: 2234587 - DNA, 25 bp, Homo sapien
ggatgttgctgaggtcaaagtgtcc

SEQ ID NO: 2234588 - DNA, 25 bp, Homo sapien
tgcatgagacaggatgttgctgagg

SEQ ID NO: 2234589 - DNA, 25 bp, Homo sapien
tgccaagaaagccaggaactcccat

SEQ ID NO: 2234590 - DNA, 25 bp, Homo sapien
tgatgccaagaaagccaggaactcc

SEQ ID NO: 2234591 - DNA, 25 bp, Homo sapien
attgatgccaagaaagccaggaact

SEQ ID NO: 2234592 - DNA, 25 bp, Homo sapien
caagaaagccaggaactcccatggg

SEQ ID NO: 2234593 - DNA, 25 bp, Homo sapien
tctcctttcaatcccgataaaccag

SEQ ID NO: 2234594 - DNA, 25 bp, Homo sapien
cagtagagccagtgaatccttgagg

SEQ ID NO: 2234595 - DNA, 25 bp, Homo sapien
tccttttggtccataaggtcccaga

SEQ ID NO: 2234596 - DNA, 25 bp, Homo sapien
ggtccataaggtcccagaaggcctg

SEQ ID NO: 2234597 - DNA, 25 bp, Homo sapien
gaattccaattggtccaggtcgtcc

SEQ ID NO: 2234598 - DNA, 25 bp, Homo sapien
ttgaattccaattggtccaggtcgt

SEQ ID NO: 2234599 - DNA, 25 bp, Homo sapien
tgaattccaattggtccaggtcgtc

SEQ ID NO: 2234600 - DNA, 25 bp, Homo sapien
cttgaattccaattggtccaggtcg

SEQ ID NO: 2234601 - DNA, 25 bp, Homo sapien
gtccaaatggccaaccatgtgcttg

SEQ ID NO: 2234602 - DNA, 25 bp, Homo sapien
gtgggcccagaaacctacaggctga

SEQ ID NO: 2234603 - DNA, 25 bp, Homo sapien
cccagaaacctacaggctgacaaac

SEQ ID NO: 2234604 - DNA, 25 bp, Homo sapien
tgggcccagaaacctacaggctgac

SEQ ID NO: 2234605 - DNA, 25 bp, Homo sapien
ggcccagaaacctacaggctgacaa

SEQ ID NO: 2234606 - DNA, 25 bp, Homo sapien
gagctcatcttcgttggcagatccc

SEQ ID NO: 2234607 - DNA, 25 bp, Homo sapien
caagagctcatcttcgttggcagat

SEQ ID NO: 2234608 - DNA, 25 bp, Homo sapien
ctgcaagagctcatcttcgttggca

SEQ ID NO: 2234609 - DNA, 25 bp, Homo sapien
gctcatcttcgttggcagatcccag

SEQ ID NO: 2234610 - DNA, 25 bp, Homo sapien
attggaaaggttccagctgaagcgg

SEQ ID NO: 2234611 - DNA, 25 bp, Homo sapien
aaggttgattggaaaggttccagct

SEQ ID NO: 2234612 - DNA, 25 bp, Homo sapien
agtcatgggccgcactggaaaggtt

SEQ ID NO: 2234613 - DNA, 25 bp, Homo sapien
catgggccgcactggaaaggttgat

SEQ ID NO: 2234614 - DNA, 25 bp, Homo sapien
atctctaatgcacaggatttctgcc

SEQ ID NO: 2234615 - DNA, 25 bp, Homo sapien
tttgtgcttatagctgtatgatctt

SEQ ID NO: 2234616 - DNA, 25 bp, Homo sapien
cttatagctgtatgatcttttttcc

SEQ ID NO: 2234617 - DNA, 25 bp, Homo sapien
catctctaatgcacaggatttctgc

SEQ ID NO: 2234618 - DNA, 25 bp, Homo sapien
aagaacaatgtggaaatagctgatc

SEQ ID NO: 2234619 - DNA, 25 bp, Homo sapien
caaacaatagttggcagcttaggag

SEQ ID NO: 2234620 - DNA, 25 bp, Homo sapien
gataagtccaataggaggaaggtaa

SEQ ID NO: 2234621 - DNA, 25 bp, Homo sapien
tatcagaagtactggggctgaggat

SEQ ID NO: 2234622 - DNA, 25 bp, Homo sapien
cctctcaaactcaccagtgcaccac

SEQ ID NO: 2234623 - DNA, 25 bp, Homo sapien
ccagtctggatgtcttcggtggccc

SEQ ID NO: 2234624 - DNA, 25 bp, Homo sapien
cagtctggatgtcttcggtggccct

SEQ ID NO: 2234625 - DNA, 25 bp, Homo sapien
tggccctctcaaactcaccagtgca

SEQ ID NO: 2234626 - DNA, 25 bp, Homo sapien
gtattctgtaccattaagcaactgt

SEQ ID NO: 2234627 - DNA, 25 bp, Homo sapien
cattaagcaactgttggaagactgc

SEQ ID NO: 2234628 - DNA, 25 bp, Homo sapien
tgtaccattaagcaactgttggaag

SEQ ID NO: 2234629 - DNA, 25 bp, Homo sapien
ttctgtaccattaagcaactgttgg

SEQ ID NO: 2234630 - DNA, 25 bp, Homo sapien
ggggaagatttgacctgtcaggatc

SEQ ID NO: 2234631 - DNA, 25 bp, Homo sapien
ggaagatttgacctgtcaggatctg

SEQ ID NO: 2234632 - DNA, 25 bp, Homo sapien
agatttgacctgtcaggatctgtgt

SEQ ID NO: 2234633 - DNA, 25 bp, Homo sapien
gaagatttgacctgtcaggatctgt

SEQ ID NO: 2234634 - DNA, 25 bp, Homo sapien
gaggatggttatctctcaaagaact

SEQ ID NO: 2234635 - DNA, 25 bp, Homo sapien
aattatcaggtactcaccccgagac

SEQ ID NO: 2234636 - DNA, 25 bp, Homo sapien
tactacactatactgaaccaatggc

SEQ ID NO: 2234637 - DNA, 25 bp, Homo sapien
gcaaagaaagacgaaccaaggcaag

SEQ ID NO: 2234638 - DNA, 25 bp, Homo sapien
taaaccattggccagatgttttcat

SEQ ID NO: 2234639 - DNA, 25 bp, Homo sapien
acaacacacttgtatttcagagaga

SEQ ID NO: 2234640 - DNA, 25 bp, Homo sapien
aaccattggccagatgttttcatca

SEQ ID NO: 2234641 - DNA, 25 bp, Homo sapien
tcatctcccacaacacacttgtatt

SEQ ID NO: 2234642 - DNA, 25 bp, Homo sapien
catcagcaagggatttgttgggtcc

SEQ ID NO: 2234643 - DNA, 25 bp, Homo sapien
ttacaacatgtggtattgcatcagc

SEQ ID NO: 2234644 - DNA, 25 bp, Homo sapien
cagcaagggatttgttgggtcctgt

SEQ ID NO: 2234645 - DNA, 25 bp, Homo sapien
tcttacaacatgtggtattgcatca

SEQ ID NO: 2234646 - DNA, 25 bp, Homo sapien
tctagggatagtacttaaatgtcga

SEQ ID NO: 2234647 - DNA, 25 bp, Homo sapien
gagtgggcatacaactactatttgc

SEQ ID NO: 2234648 - DNA, 25 bp, Homo sapien
taggcagccactcccatgcattgag

SEQ ID NO: 2234649 - DNA, 25 bp, Homo sapien
taaatgtcgagattattgtctgcca

SEQ ID NO: 2234650 - DNA, 25 bp, Homo sapien
ccataaatgggcttggcaaaaacac

SEQ ID NO: 2234651 - DNA, 25 bp, Homo sapien
ccttttctttgagcgtgaggccaca

SEQ ID NO: 2234652 - DNA, 25 bp, Homo sapien
cactctggtgatgtgttgtaaggcc

SEQ ID NO: 2234653 - DNA, 25 bp, Homo sapien
gaggccacaccctgggatttcacag

SEQ ID NO: 2234654 - DNA, 25 bp, Homo sapien
gaaggaaaaacatcgacttactcca

SEQ ID NO: 2234655 - DNA, 25 bp, Homo sapien
tactccataaaggaagttaagcaga

SEQ ID NO: 2234656 - DNA, 25 bp, Homo sapien
aaaacatcgacttactccataaagg

SEQ ID NO: 2234657 - DNA, 25 bp, Homo sapien
taaaggaagttaagcagaggccagg

SEQ ID NO: 2234658 - DNA, 25 bp, Homo sapien
tatatgagacagctaagacttagag

SEQ ID NO: 2234659 - DNA, 25 bp, Homo sapien
gagcccacaactgtgccaatactat

SEQ ID NO: 2234660 - DNA, 25 bp, Homo sapien
tgccaaatggcacatatcaatagag

SEQ ID NO: 2234661 - DNA, 25 bp, Homo sapien
ggaacaatcaatagatgccatagtc

SEQ ID NO: 2234662 - DNA, 25 bp, Homo sapien
gcaagaatatccatggcagtgccct

SEQ ID NO: 2234663 - DNA, 25 bp, Homo sapien
tcatagcacgtggtgtcacactgcc

SEQ ID NO: 2234664 - DNA, 25 bp, Homo sapien
gcaaaacagtcatgagtcatagcac

SEQ ID NO: 2234665 - DNA, 25 bp, Homo sapien
caatgatagattgttccaaagcagg

SEQ ID NO: 2234666 - DNA, 25 bp, Homo sapien
tcccgagcaatgagccagcatgaca

SEQ ID NO: 2234667 - DNA, 25 bp, Homo sapien
tagttgtacggctctttctcccgag

SEQ ID NO: 2234668 - DNA, 25 bp, Homo sapien
ggttctaccatcatagaggccactt

SEQ ID NO: 2234669 - DNA, 25 bp, Homo sapien
gcatgacatttgagggccaaacgca

SEQ ID NO: 2234670 - DNA, 25 bp, Homo sapien
tatcattcagtagctgcaagttgtg

SEQ ID NO: 2234671 - DNA, 25 bp, Homo sapien
agagattaggcagaacctcactgaa

SEQ ID NO: 2234672 - DNA, 25 bp, Homo sapien
tagagccggccagccatatcattca

SEQ ID NO: 2234673 - DNA, 25 bp, Homo sapien
tcaaaagagattaggcagaacctca

SEQ ID NO: 2234674 - DNA, 25 bp, Homo sapien
atagatcaggaaagcaaactgtgcc

SEQ ID NO: 2234675 - DNA, 25 bp, Homo sapien
tagatcaggaaagcaaactgtgcca

SEQ ID NO: 2234676 - DNA, 25 bp, Homo sapien
aatagatcaggaaagcaaactgtgc

SEQ ID NO: 2234677 - DNA, 25 bp, Homo sapien
ttgtcagcgttggtgaagtcttgtg

SEQ ID NO: 2234678 - DNA, 25 bp, Homo sapien
tgccagctctcttccaagcaactgt

SEQ ID NO: 2234679 - DNA, 25 bp, Homo sapien
tggccggcaagtttgctgggcaata

SEQ ID NO: 2234680 - DNA, 25 bp, Homo sapien
tcagccataaaatttgtcagcgttg

SEQ ID NO: 2234681 - DNA, 25 bp, Homo sapien
ttccagaatgaattgcaacttcccc

SEQ ID NO: 2234682 - DNA, 25 bp, Homo sapien
taatagtagaactgccaaagccacc

SEQ ID NO: 2234683 - DNA, 25 bp, Homo sapien
tcatttggcatctacaggaggctca

SEQ ID NO: 2234684 - DNA, 25 bp, Homo sapien
tgggcccagatggatactgaaggat

SEQ ID NO: 2234685 - DNA, 25 bp, Homo sapien
agttcccaggctgcgtttgtctttg

SEQ ID NO: 2234686 - DNA, 25 bp, Homo sapien
taggccttccagtgtagaagctggt

SEQ ID NO: 2234687 - DNA, 25 bp, Homo sapien
tgccgtgtttgcttcagaactgcct

SEQ ID NO: 2234688 - DNA, 25 bp, Homo sapien
ttctcctgtcgctcagggccgaagg

SEQ ID NO: 2234689 - DNA, 25 bp, Homo sapien
tctgggaaactctcaaggaggccct

SEQ ID NO: 2234690 - DNA, 25 bp, Homo sapien
ggatccccgaggagcaaggatcttt

SEQ ID NO: 2234691 - DNA, 25 bp, Homo sapien
ccagccacgggtgggtgatggcgct

SEQ ID NO: 2234692 - DNA, 25 bp, Homo sapien
gcgggatcaggttcccctcaggaat

SEQ ID NO: 2234693 - DNA, 25 bp, Homo sapien
gggcaggcggacttgccacattgca

SEQ ID NO: 2234694 - DNA, 25 bp, Homo sapien
ggacttgccacattgcaggctctgg

SEQ ID NO: 2234695 - DNA, 25 bp, Homo sapien
ctctggtgcctccaagggaccttgg

SEQ ID NO: 2234696 - DNA, 25 bp, Homo sapien
tctggtgcctccaagggaccttgga

SEQ ID NO: 2234697 - DNA, 25 bp, Homo sapien
tagggtggaggacgaagggcaattg

SEQ ID NO: 2234698 - DNA, 25 bp, Homo sapien
gtattcctccaatcacaacaatctg

SEQ ID NO: 2234699 - DNA, 25 bp, Homo sapien
gtggatgtcttcctagcagattttc

SEQ ID NO: 2234700 - DNA, 25 bp, Homo sapien
attttctccactccaagtattcctc

SEQ ID NO: 2234701 - DNA, 25 bp, Homo sapien
atggctttccataagacttctctcc

SEQ ID NO: 2234702 - DNA, 25 bp, Homo sapien
aaacactgacagctcccactgcagt

SEQ ID NO: 2234703 - DNA, 25 bp, Homo sapien
acatggctttccataagacttctct

SEQ ID NO: 2234704 - DNA, 25 bp, Homo sapien
catggctttccataagacttctctc

SEQ ID NO: 2234705 - DNA, 25 bp, Homo sapien
cttgtactctgctctcggaattgtt

SEQ ID NO: 2234706 - DNA, 25 bp, Homo sapien
ttgtactctgctctcggaattgttc

SEQ ID NO: 2234707 - DNA, 25 bp, Homo sapien
tgtactctgctctcggaattgttct

SEQ ID NO: 2234708 - DNA, 25 bp, Homo sapien
aaaagccctgacgaacatctacctt

SEQ ID NO: 2234709 - DNA, 25 bp, Homo sapien
cctgacgaacatctaccttaaagat

SEQ ID NO: 2234710 - DNA, 25 bp, Homo sapien
cagagagtgaaagagttccgggaaa

SEQ ID NO: 2234711 - DNA, 25 bp, Homo sapien
gccctgacgaacatctaccttaaag

SEQ ID NO: 2234712 - DNA, 25 bp, Homo sapien
atgcaaactaagtactgatagagcc

SEQ ID NO: 2234713 - DNA, 25 bp, Homo sapien
ttaaatggttgatgaatgcaaacta

SEQ ID NO: 2234714 - DNA, 25 bp, Homo sapien
ctaagtactgatagagcctgaaaac

SEQ ID NO: 2234715 - DNA, 25 bp, Homo sapien
aaatggttgatgaatgcaaactaag

SEQ ID NO: 2234716 - DNA, 25 bp, Homo sapien
tgttcctccttggacctggagtctc

SEQ ID NO: 2234717 - DNA, 25 bp, Homo sapien
ttcctccttggacctggagtctcct

SEQ ID NO: 2234718 - DNA, 25 bp, Homo sapien
ccttgttcctccttggacctggagt

SEQ ID NO: 2234719 - DNA, 25 bp, Homo sapien
ttgttcctccttggacctggagtct

SEQ ID NO: 2234720 - DNA, 25 bp, Homo sapien
aaattttgcccattcttcatagtcc

SEQ ID NO: 2234721 - DNA, 25 bp, Homo sapien
caattcaaattttgcccattcttca

SEQ ID NO: 2234722 - DNA, 25 bp, Homo sapien
tcaaattttgcccattcttcatagt

SEQ ID NO: 2234723 - DNA, 25 bp, Homo sapien
attcttcatagtccagctcgtccat

SEQ ID NO: 2234724 - DNA, 25 bp, Homo sapien
ctttcctgattatttcttctctgcc

SEQ ID NO: 2234725 - DNA, 25 bp, Homo sapien
gaagactttcctgattatttcttct

SEQ ID NO: 2234726 - DNA, 25 bp, Homo sapien
aagactttcctgattatttcttctc

SEQ ID NO: 2234727 - DNA, 25 bp, Homo sapien
gactttcctgattatttcttctctg

SEQ ID NO: 2234728 - DNA, 25 bp, Homo sapien
cttgctatgctgcagttgattgccc

SEQ ID NO: 2234729 - DNA, 25 bp, Homo sapien
gataaacaccttagtcgatcctcct

SEQ ID NO: 2234730 - DNA, 25 bp, Homo sapien
tgcagtaatgatttccaactcttcc

SEQ ID NO: 2234731 - DNA, 25 bp, Homo sapien
tggatctgattcttgctacggcttt

SEQ ID NO: 2234732 - DNA, 25 bp, Homo sapien
ctgtaaacaagcattatgaaagcta

SEQ ID NO: 2234733 - DNA, 25 bp, Homo sapien
gctttgcaaaatcagggagactaac

SEQ ID NO: 2234734 - DNA, 25 bp, Homo sapien
aagctaaggagttggttaaagcgct

SEQ ID NO: 2234735 - DNA, 25 bp, Homo sapien
aagcgcttttcaagtgctttgcaaa

SEQ ID NO: 2234736 - DNA, 25 bp, Homo sapien
ctgatttctaacatttgcagttctc

SEQ ID NO: 2234737 - DNA, 25 bp, Homo sapien
atttgcagttctcacgtctggagcc

SEQ ID NO: 2234738 - DNA, 25 bp, Homo sapien
ttgcagttctcacgtctggagccat

SEQ ID NO: 2234739 - DNA, 25 bp, Homo sapien
tgatttctaacatttgcagttctca

SEQ ID NO: 2234740 - DNA, 25 bp, Homo sapien
actctgactgatttaagggataatc

SEQ ID NO: 2234741 - DNA, 25 bp, Homo sapien
actgatttaagggataatcttgact

SEQ ID NO: 2234742 - DNA, 25 bp, Homo sapien
tttagtgtactatccacttcctgct

SEQ ID NO: 2234743 - DNA, 25 bp, Homo sapien
tgttaattgcagtatacttcacagc

SEQ ID NO: 2234744 - DNA, 25 bp, Homo sapien
gtatcattgttaactaggttgtgaa

SEQ ID NO: 2234745 - DNA, 25 bp, Homo sapien
agtatcattgttaactaggttgtga

SEQ ID NO: 2234746 - DNA, 25 bp, Homo sapien
tctccaacaatgtcttccctaagct

SEQ ID NO: 2234747 - DNA, 25 bp, Homo sapien
tccaacaatgtcttccctaagctgg

SEQ ID NO: 2234748 - DNA, 25 bp, Homo sapien
aacaatgtcttccctaagctgggca

SEQ ID NO: 2234749 - DNA, 25 bp, Homo sapien
caacaatgtcttccctaagctgggc

SEQ ID NO: 2234750 - DNA, 25 bp, Homo sapien
tctgtttgtaggagatctgtaaagc

SEQ ID NO: 2234751 - DNA, 25 bp, Homo sapien
taggagatctgtaaagctagcactc

SEQ ID NO: 2234752 - DNA, 25 bp, Homo sapien
tgatgttcccaccaatttgacaaaa

SEQ ID NO: 2234753 - DNA, 25 bp, Homo sapien
tctgtaaagctagcactccactcta

SEQ ID NO: 2234754 - DNA, 25 bp, Homo sapien
gacgtacctgaaatttattgtattc

SEQ ID NO: 2234755 - DNA, 25 bp, Homo sapien
caagacgtacctgaaatttattgta

SEQ ID NO: 2234756 - DNA, 25 bp, Homo sapien
gcaagacgtacctgaaatttattgt

SEQ ID NO: 2234757 - DNA, 25 bp, Homo sapien
aagacgtacctgaaatttattgtat

SEQ ID NO: 2234758 - DNA, 25 bp, Homo sapien
cagtcgtttccctttactccataat

SEQ ID NO: 2234759 - DNA, 25 bp, Homo sapien
ctctgccttgaggttaaggtctcca

SEQ ID NO: 2234760 - DNA, 25 bp, Homo sapien
tagcctgaccctgttccaactgtcc

SEQ ID NO: 2234761 - DNA, 25 bp, Homo sapien
aataatcatcctgtgctctagctct

SEQ ID NO: 2234762 - DNA, 25 bp, Homo sapien
cgctgctgccagttcctcggtcagg

SEQ ID NO: 2234763 - DNA, 25 bp, Homo sapien
cagttcctcggtcaggcacaacgta

SEQ ID NO: 2234764 - DNA, 25 bp, Homo sapien
tcggtcaggcacaacgtaaccagga

SEQ ID NO: 2234765 - DNA, 25 bp, Homo sapien
gctgccagttcctcggtcaggcaca

SEQ ID NO: 2234766 - DNA, 25 bp, Homo sapien
tggaggctgtttccttactcagaac

SEQ ID NO: 2234767 - DNA, 25 bp, Homo sapien
gtcccgggagactgctaagcggctc

SEQ ID NO: 2234768 - DNA, 25 bp, Homo sapien
tcagaacagagtaggtggacgaagt

SEQ ID NO: 2234769 - DNA, 25 bp, Homo sapien
tcagcggtgcccgttacaacttgca

SEQ ID NO: 2234770 - DNA, 25 bp, Homo sapien
agcccagggagcaccgaccaaaatt

SEQ ID NO: 2234771 - DNA, 25 bp, Homo sapien
taaactggcaaatactctcagaatc

SEQ ID NO: 2234772 - DNA, 25 bp, Homo sapien
gatgtcatcaagcttgatgccagca

SEQ ID NO: 2234773 - DNA, 25 bp, Homo sapien
gaatcaactttactggcattatgga

SEQ ID NO: 2234774 - DNA, 25 bp, Homo sapien
caaatatggcagagtagggaaccct

SEQ ID NO: 2234775 - DNA, 25 bp, Homo sapien
atttcactgtactagtccactgagt

SEQ ID NO: 2234776 - DNA, 25 bp, Homo sapien
gaagacaacagtctacatttcactg

SEQ ID NO: 2234777 - DNA, 25 bp, Homo sapien
cccctgctctctagcttggcagtgg

SEQ ID NO: 2234778 - DNA, 25 bp, Homo sapien
ccctgctctctagcttggcagtggc

SEQ ID NO: 2234779 - DNA, 25 bp, Homo sapien
tagtaccatatttctcttgagggag

SEQ ID NO: 2234780 - DNA, 25 bp, Homo sapien
cagggacctaattcttggatctaca

SEQ ID NO: 2234781 - DNA, 25 bp, Homo sapien
tatggtccatgcatatgaagcgact

SEQ ID NO: 2234782 - DNA, 25 bp, Homo sapien
gaaatatactgggacagcctaaagg

SEQ ID NO: 2234783 - DNA, 25 bp, Homo sapien
caaaaccaacaaactaagatcagta

SEQ ID NO: 2234784 - DNA, 25 bp, Homo sapien
aatactcttaaaacttataagtgag

SEQ ID NO: 2234785 - DNA, 25 bp, Homo sapien
aagtgagtttagaaagatcacagaa

SEQ ID NO: 2234786 - DNA, 25 bp, Homo sapien
aaaaatcggttgtatgagcaatggg

SEQ ID NO: 2234787 - DNA, 25 bp, Homo sapien
cctggtttacctggcactcctggac

SEQ ID NO: 2234788 - DNA, 25 bp, Homo sapien
caggctttcctggatctaaaggtga

SEQ ID NO: 2234789 - DNA, 25 bp, Homo sapien
taaaggtgaacctggtgatatcctc

SEQ ID NO: 2234790 - DNA, 25 bp, Homo sapien
gacaggatggattgccagggcttcc

SEQ ID NO: 2234791 - DNA, 25 bp, Homo sapien
gatacctggtagcaaaggagaacca

SEQ ID NO: 2234792 - DNA, 25 bp, Homo sapien
gcagagtaggttagaagtttagcat

SEQ ID NO: 2234793 - DNA, 25 bp, Homo sapien
caggtatccctggaattgggcttcc

SEQ ID NO: 2234794 - DNA, 25 bp, Homo sapien
cacctggtcccaaaggtatgttgga

SEQ ID NO: 2234795 - DNA, 25 bp, Homo sapien
taagactggtcaagtgcagtaacga

SEQ ID NO: 2234796 - DNA, 25 bp, Homo sapien
gagttcaatctataactgaacaatc

SEQ ID NO: 2234797 - DNA, 25 bp, Homo sapien
agtgcagtaacgagaagggaggaaa

SEQ ID NO: 2234798 - DNA, 25 bp, Homo sapien
tcaatctataactgaacaatcaatt

SEQ ID NO: 2234799 - DNA, 25 bp, Homo sapien
tttctttcaaatggccaatgggcag

SEQ ID NO: 2234800 - DNA, 25 bp, Homo sapien
aagccagaagtctgccagatgtttc

SEQ ID NO: 2234801 - DNA, 25 bp, Homo sapien
acagtttatcttcgcagtggtttga

SEQ ID NO: 2234802 - DNA, 25 bp, Homo sapien
acttgattgtacaaagggagatcct

SEQ ID NO: 2234803 - DNA, 25 bp, Homo sapien
tactaatcctgctgtatcccgggtt

SEQ ID NO: 2234804 - DNA, 25 bp, Homo sapien
gtgaacagccttttagctcaaaatg

SEQ ID NO: 2234805 - DNA, 25 bp, Homo sapien
tataaaggtgttaagcttattttgc

SEQ ID NO: 2234806 - DNA, 25 bp, Homo sapien
atattttgcccagttactaaaatgg

SEQ ID NO: 2234807 - DNA, 25 bp, Homo sapien
aagtcgtctcccaaaactgcaaacg

SEQ ID NO: 2234808 - DNA, 25 bp, Homo sapien
gcatttgttatgcagtacctgtgac

SEQ ID NO: 2234809 - DNA, 25 bp, Homo sapien
cactatacagagttgcaaagtcgtc

SEQ ID NO: 2234810 - DNA, 25 bp, Homo sapien
tttttaacgaccaagtgactatgcc

SEQ ID NO: 2234811 - DNA, 25 bp, Homo sapien
tcacgttctcaaaggtccaggtacc

SEQ ID NO: 2234812 - DNA, 25 bp, Homo sapien
aagttgatgccctagcagtgaccag

SEQ ID NO: 2234813 - DNA, 25 bp, Homo sapien
tgtgtgccaccacggaacaaagctc

SEQ ID NO: 2234814 - DNA, 25 bp, Homo sapien
aattcagtttacatcagaggcaagc

SEQ ID NO: 2234815 - DNA, 25 bp, Homo sapien
gatcattcaattgccagagtccact

SEQ ID NO: 2234816 - DNA, 25 bp, Homo sapien
gagtccacttgtaggcttgtagaaa

SEQ ID NO: 2234817 - DNA, 25 bp, Homo sapien
tgggttgctttctactcagaagcct

SEQ ID NO: 2234818 - DNA, 25 bp, Homo sapien
cctttaggcagatctggagtagacg

SEQ ID NO: 2234819 - DNA, 25 bp, Homo sapien
gaacagcgtaaggaagcaactcaga

SEQ ID NO: 2234820 - DNA, 25 bp, Homo sapien
ggtggcaaaggaaagcaattcgaga

SEQ ID NO: 2234821 - DNA, 25 bp, Homo sapien
tgctttcctataacacctacaccag

SEQ ID NO: 2234822 - DNA, 25 bp, Homo sapien
aatgcattatgggaacttgagccac

SEQ ID NO: 2234823 - DNA, 25 bp, Homo sapien
tcgaatcattagacaatgaccattc

SEQ ID NO: 2234824 - DNA, 25 bp, Homo sapien
ccctaacactgtagactgtagcgca

SEQ ID NO: 2234825 - DNA, 25 bp, Homo sapien
gactgtagcgcatcgaatcattaga

SEQ ID NO: 2234826 - DNA, 25 bp, Homo sapien
cactgtagactgtagcgcatcgaat

SEQ ID NO: 2234827 - DNA, 25 bp, Homo sapien
ggagagtcgaactgattatcacgtc

SEQ ID NO: 2234828 - DNA, 25 bp, Homo sapien
tcttttgggagagtcgaactgatta

SEQ ID NO: 2234829 - DNA, 25 bp, Homo sapien
gagtcgaactgattatcacgtctgg

SEQ ID NO: 2234830 - DNA, 25 bp, Homo sapien
gaactgattatcacgtctggcaaaa

SEQ ID NO: 2234831 - DNA, 25 bp, Homo sapien
tcgttgtcagaatcttctctctccg

SEQ ID NO: 2234832 - DNA, 25 bp, Homo sapien
gtcgtcgttgtcagaatcttctctc

SEQ ID NO: 2234833 - DNA, 25 bp, Homo sapien
tgtcgtcgtcgttgtcagaatcttc

SEQ ID NO: 2234834 - DNA, 25 bp, Homo sapien
gtgagtgtcgtcgtcgttgtcagaa

SEQ ID NO: 2234835 - DNA, 25 bp, Homo sapien
ggcagaggcggagtcaaatccagca

SEQ ID NO: 2234836 - DNA, 25 bp, Homo sapien
cagcactcagaaaatgggtcgacca

SEQ ID NO: 2234837 - DNA, 25 bp, Homo sapien
ttcagcatcatagcgaatggcactg

SEQ ID NO: 2234838 - DNA, 25 bp, Homo sapien
tctctcgaggctgtctgttggaaaa

SEQ ID NO: 2234839 - DNA, 25 bp, Homo sapien
gcaattatgccccacgaatctggta

SEQ ID NO: 2234840 - DNA, 25 bp, Homo sapien
gacgtagtcactagagctgtcagct

SEQ ID NO: 2234841 - DNA, 25 bp, Homo sapien
gaggaagtggccacctagcactgtc

SEQ ID NO: 2234842 - DNA, 25 bp, Homo sapien
tagaaaaggctgactgtctgggttc

SEQ ID NO: 2234843 - DNA, 25 bp, Homo sapien
tcatcaaaagctctggctctgtggg

SEQ ID NO: 2234844 - DNA, 25 bp, Homo sapien
cattggcacgtatgggtcatcctca

SEQ ID NO: 2234845 - DNA, 25 bp, Homo sapien
ggaagagccaccctgaggatttctg

SEQ ID NO: 2234846 - DNA, 25 bp, Homo sapien
gacattttgaggagccattggcata

SEQ ID NO: 2234847 - DNA, 25 bp, Homo sapien
ttgctttgagttaatttgccaaaat

SEQ ID NO: 2234848 - DNA, 25 bp, Homo sapien
cttgctttgagttaatttgccaaaa

SEQ ID NO: 2234849 - DNA, 25 bp, Homo sapien
tgctttgagttaatttgccaaaata

SEQ ID NO: 2234850 - DNA, 25 bp, Homo sapien
gttcaccatcaccatcggatccttt

SEQ ID NO: 2234851 - DNA, 25 bp, Homo sapien
tgtccctcgcctgaacactggtttc

SEQ ID NO: 2234852 - DNA, 25 bp, Homo sapien
ctgaaccgtgcccacctgcggtgcc

SEQ ID NO: 2234853 - DNA, 25 bp, Homo sapien
ctatggctactggagccttggccat

SEQ ID NO: 2234854 - DNA, 25 bp, Homo sapien
ggtgccctggccatctctagagcac

SEQ ID NO: 2234855 - DNA, 25 bp, Homo sapien
ttacgaagcgcctggtgaaaagcat

SEQ ID NO: 2234856 - DNA, 25 bp, Homo sapien
catctttatagaagggtggctccgc

SEQ ID NO: 2234857 - DNA, 25 bp, Homo sapien
aatactgctccgagtgtccacagcg

SEQ ID NO: 2234858 - DNA, 25 bp, Homo sapien
cttcagaagacaggcgagctccatt

SEQ ID NO: 2234859 - DNA, 25 bp, Homo sapien
cacgcgccgcggtggaatgagcggg

SEQ ID NO: 2234860 - DNA, 25 bp, Homo sapien
tggctcacggaaaagcactggtata

SEQ ID NO: 2234861 - DNA, 25 bp, Homo sapien
actggtatagggtgatcacgcgccg

SEQ ID NO: 2234862 - DNA, 25 bp, Homo sapien
cgcggcgcggacactgtgccggaac

SEQ ID NO: 2234863 - DNA, 25 bp, Homo sapien
caggtagccgcgtttgcagacttcc

SEQ ID NO: 2234864 - DNA, 25 bp, Homo sapien
gtttgagcacgaagtagcgcctgtg

SEQ ID NO: 2234865 - DNA, 25 bp, Homo sapien
cgtcagcagtctcgagtttgagcac

SEQ ID NO: 2234866 - DNA, 25 bp, Homo sapien
tttcgtagtattccagccgagctgg

SEQ ID NO: 2234867 - DNA, 25 bp, Homo sapien
ctgctgcacctcttagtcttcttgt

SEQ ID NO: 2234868 - DNA, 25 bp, Homo sapien
cttcttgtcgcttggtcgcgagtga

SEQ ID NO: 2234869 - DNA, 25 bp, Homo sapien
cttggtcgcgagtgaaggagcaact

SEQ ID NO: 2234870 - DNA, 25 bp, Homo sapien
cgcgagtgaaggagcaactcgccat

SEQ ID NO: 2234871 - DNA, 25 bp, Homo sapien
tgcacgatggttttaaggtgagcga

SEQ ID NO: 2234872 - DNA, 25 bp, Homo sapien
gcacgatggttttaaggtgagcgag

SEQ ID NO: 2234873 - DNA, 25 bp, Homo sapien
gatggttttaaggtgagcgaggagg

SEQ ID NO: 2234874 - DNA, 25 bp, Homo sapien
acgatggttttaaggtgagcgagga

SEQ ID NO: 2234875 - DNA, 25 bp, Homo sapien
cacagtaaatggattggttaggctc

SEQ ID NO: 2234876 - DNA, 25 bp, Homo sapien
tagccttgccgatgaatagtacttg

SEQ ID NO: 2234877 - DNA, 25 bp, Homo sapien
tcactgtgcgcttatagatatagcc

SEQ ID NO: 2234878 - DNA, 25 bp, Homo sapien
catcaatcatgaggataacacagta

SEQ ID NO: 2234879 - DNA, 25 bp, Homo sapien
ttataagttataatcagataggaca

SEQ ID NO: 2234880 - DNA, 25 bp, Homo sapien
tataagttataatcagataggacat

SEQ ID NO: 2234881 - DNA, 25 bp, Homo sapien
ataagttataatcagataggacata

SEQ ID NO: 2234882 - DNA, 25 bp, Homo sapien
taagttataatcagataggacatac

SEQ ID NO: 2234883 - DNA, 25 bp, Homo sapien
tagggacccacattggcagacacca

SEQ ID NO: 2234884 - DNA, 25 bp, Homo sapien
gcagcagctgttttagggacccaca

SEQ ID NO: 2234885 - DNA, 25 bp, Homo sapien
aagtgagttaatgtaaattctctgg

SEQ ID NO: 2234886 - DNA, 25 bp, Homo sapien
tctgggattctcagtcagtttacat

SEQ ID NO: 2234887 - DNA, 25 bp, Homo sapien
gtgatggacatagacaagaaggagc

SEQ ID NO: 2234888 - DNA, 25 bp, Homo sapien
taactgctaagagatttgacacagg

SEQ ID NO: 2234889 - DNA, 25 bp, Homo sapien
gcaataatgatggttgtaacaagag

SEQ ID NO: 2234890 - DNA, 25 bp, Homo sapien
aagagtttttgaaatgaagacacag

SEQ ID NO: 2234891 - DNA, 25 bp, Homo sapien
gaccacaccttgacttagtccttca

SEQ ID NO: 2234892 - DNA, 25 bp, Homo sapien
agtaatatgtctctgcttatgtgtc

SEQ ID NO: 2234893 - DNA, 25 bp, Homo sapien
ccttgtatcgtctgtttggtacttg

SEQ ID NO: 2234894 - DNA, 25 bp, Homo sapien
tgcttttgcctgctgaccacacctt

SEQ ID NO: 2234895 - DNA, 25 bp, Homo sapien
gagggctgtgccagaatctccccag

SEQ ID NO: 2234896 - DNA, 25 bp, Homo sapien
agggctgtgccagaatctccccagc

SEQ ID NO: 2234897 - DNA, 25 bp, Homo sapien
ggagggctgtgccagaatctcccca

SEQ ID NO: 2234898 - DNA, 25 bp, Homo sapien
ctggagggctgtgccagaatctccc

SEQ ID NO: 2234899 - DNA, 25 bp, Homo sapien
tcagtctgtggacctctaccagtgg

SEQ ID NO: 2234900 - DNA, 25 bp, Homo sapien
ttaagctctgaaggtagtacacagc

SEQ ID NO: 2234901 - DNA, 25 bp, Homo sapien
tagtggctttctatctttttcagtc

SEQ ID NO: 2234902 - DNA, 25 bp, Homo sapien
caagtacagagtcatttctttaagc

SEQ ID NO: 2234903 - DNA, 25 bp, Homo sapien
ccagatagcttttgagcgttacttc

SEQ ID NO: 2234904 - DNA, 25 bp, Homo sapien
tatttacaccctatgttctggccac

SEQ ID NO: 2234905 - DNA, 25 bp, Homo sapien
ttcctctgcctctagttcaaactga

SEQ ID NO: 2234906 - DNA, 25 bp, Homo sapien
gcgttacttctccatgggtccttat

SEQ ID NO: 2234907 - DNA, 25 bp, Homo sapien
accactactctgatcgttttttcac

SEQ ID NO: 2234908 - DNA, 25 bp, Homo sapien
ggtgaaataccactactctgatcgt

SEQ ID NO: 2234909 - DNA, 25 bp, Homo sapien
gccctgcgggccgccggtgaaatac

SEQ ID NO: 2234910 - DNA, 25 bp, Homo sapien
ggccgccggtgaaataccactactc

SEQ ID NO: 2234911 - DNA, 25 bp, Homo sapien
tctgccagagccatctgttgatgac

SEQ ID NO: 2234912 - DNA, 25 bp, Homo sapien
gccagagccatctgttgatgacttt

SEQ ID NO: 2234913 - DNA, 25 bp, Homo sapien
tgccagagccatctgttgatgactt

SEQ ID NO: 2234914 - DNA, 25 bp, Homo sapien
tgttgatgactttttagctacacat

SEQ ID NO: 2234915 - DNA, 25 bp, Homo sapien
tcttcataaatattcgtactctcgt

SEQ ID NO: 2234916 - DNA, 25 bp, Homo sapien
gtactctcgttcctgccaacatcat

SEQ ID NO: 2234917 - DNA, 25 bp, Homo sapien
ttaaccagcaatcaaagaggccaga

SEQ ID NO: 2234918 - DNA, 25 bp, Homo sapien
tcagggaaatatatgcttgtccttc

SEQ ID NO: 2234919 - DNA, 25 bp, Homo sapien
tgggaactcccactcataagataaa

SEQ ID NO: 2234920 - DNA, 25 bp, Homo sapien
tctcagtttctatgcctgaacatgg

SEQ ID NO: 2234921 - DNA, 25 bp, Homo sapien
catgggaactcccactcataagata

SEQ ID NO: 2234922 - DNA, 25 bp, Homo sapien
tctatgcctgaacatgggaactccc

SEQ ID NO: 2234923 - DNA, 25 bp, Homo sapien
ggaaaggctccagtttcccagacat

SEQ ID NO: 2234924 - DNA, 25 bp, Homo sapien
gatgtgtggtacataaatggagata

SEQ ID NO: 2234925 - DNA, 25 bp, Homo sapien
ggattctcaggaacttcattcatgt

SEQ ID NO: 2234926 - DNA, 25 bp, Homo sapien
gttgtgaattcaggcaagagccaga

SEQ ID NO: 2234927 - DNA, 25 bp, Homo sapien
ggtccgacagactcattggcccttt

SEQ ID NO: 2234928 - DNA, 25 bp, Homo sapien
cctgctggtcatgccagatgtgagt

SEQ ID NO: 2234929 - DNA, 25 bp, Homo sapien
tccaaccattaggactctgctttgt

SEQ ID NO: 2234930 - DNA, 25 bp, Homo sapien
tctgctttgttcacaaggtccgaca

SEQ ID NO: 2234931 - DNA, 25 bp, Homo sapien
cttttgtgaaagaagccaacagaga

SEQ ID NO: 2234932 - DNA, 25 bp, Homo sapien
tcttccacgatcttaattccctctg

SEQ ID NO: 2234933 - DNA, 25 bp, Homo sapien
cttccacgatcttaattccctctgg

SEQ ID NO: 2234934 - DNA, 25 bp, Homo sapien
catcttccacgatcttaattccctc

SEQ ID NO: 2234935 - DNA, 25 bp, Homo sapien
ttccacgatcttaattccctctggc

SEQ ID NO: 2234936 - DNA, 25 bp, Homo sapien
cagctgccaaaagcaagtttgccag

SEQ ID NO: 2234937 - DNA, 25 bp, Homo sapien
gctcaatctgagcttggcagctgcc

SEQ ID NO: 2234938 - DNA, 25 bp, Homo sapien
tcataagctcatctgctcaatctga

SEQ ID NO: 2234939 - DNA, 25 bp, Homo sapien
catctgctcaatctgagcttggcag

SEQ ID NO: 2234940 - DNA, 25 bp, Homo sapien
cttagttttgactcagacaggttca

SEQ ID NO: 2234941 - DNA, 25 bp, Homo sapien
atcatttttaactagtggtgactgc

SEQ ID NO: 2234942 - DNA, 25 bp, Homo sapien
tggtgactgcagaacaatgctagaa

SEQ ID NO: 2234943 - DNA, 25 bp, Homo sapien
cagcttatagttgcctgcaagcaca

SEQ ID NO: 2234944 - DNA, 25 bp, Homo sapien
ggctatgtattttgtcccattggtc

SEQ ID NO: 2234945 - DNA, 25 bp, Homo sapien
tttttactgatccctgtagtatagt

SEQ ID NO: 2234946 - DNA, 25 bp, Homo sapien
aatgatattatctagttgtcttcca

SEQ ID NO: 2234947 - DNA, 25 bp, Homo sapien
ctatgtcaagaatgatattatctag

SEQ ID NO: 2234948 - DNA, 25 bp, Homo sapien
tctctgaaattattgatgtacccat

SEQ ID NO: 2234949 - DNA, 25 bp, Homo sapien
aaattattgatgtacccattacccg

SEQ ID NO: 2234950 - DNA, 25 bp, Homo sapien
attattgatgtacccattacccgag

SEQ ID NO: 2234951 - DNA, 25 bp, Homo sapien
tgaaattattgatgtacccattacc

SEQ ID NO: 2234952 - DNA, 25 bp, Homo sapien
agtactaggttgtagcttccccagg

SEQ ID NO: 2234953 - DNA, 25 bp, Homo sapien
caaaactcaagatgacgcgtggagg

SEQ ID NO: 2234954 - DNA, 25 bp, Homo sapien
tgggtcccagagcacatggtcttaa

SEQ ID NO: 2234955 - DNA, 25 bp, Homo sapien
cagtcaatattgttccagcagccaa

SEQ ID NO: 2234956 - DNA, 25 bp, Homo sapien
gtttggacaaggcacagtagcacaa

SEQ ID NO: 2234957 - DNA, 25 bp, Homo sapien
caggtgactgaccacagagaagagt

SEQ ID NO: 2234958 - DNA, 25 bp, Homo sapien
tatagtgcctgactcaattaaggcc

SEQ ID NO: 2234959 - DNA, 25 bp, Homo sapien
ttcagtcttcagtgggtgtgttacc

SEQ ID NO: 2234960 - DNA, 25 bp, Homo sapien
tgagctcgatcacccctgaagtaaa

SEQ ID NO: 2234961 - DNA, 25 bp, Homo sapien
tgtactcacaactcaggaaatttcc

SEQ ID NO: 2234962 - DNA, 25 bp, Homo sapien
ggatacaaaattgtactcacaactc

SEQ ID NO: 2234963 - DNA, 25 bp, Homo sapien
ccatgatgagctcgatcacccctga

SEQ ID NO: 2234964 - DNA, 25 bp, Homo sapien
ttgcccaggcagaacaatttcttga

SEQ ID NO: 2234965 - DNA, 25 bp, Homo sapien
cttgcccaggcagaacaatttcttg

SEQ ID NO: 2234966 - DNA, 25 bp, Homo sapien
cagaacaatttcttgaactgaagtg

SEQ ID NO: 2234967 - DNA, 25 bp, Homo sapien
tgcccaggcagaacaatttcttgaa

SEQ ID NO: 2234968 - DNA, 25 bp, Homo sapien
gattcaaatcctggagccctttgcc

SEQ ID NO: 2234969 - DNA, 25 bp, Homo sapien
attcaaatcctggagccctttgccc

SEQ ID NO: 2234970 - DNA, 25 bp, Homo sapien
agagaagattcaaatcctggagccc

SEQ ID NO: 2234971 - DNA, 25 bp, Homo sapien
gaagattcaaatcctggagcccttt

SEQ ID NO: 2234972 - DNA, 25 bp, Homo sapien
tggaaggctgcaatctccactggtt

SEQ ID NO: 2234973 - DNA, 25 bp, Homo sapien
gctgcaatctccactggttgcaggc

SEQ ID NO: 2234974 - DNA, 25 bp, Homo sapien
tttggaaggctgcaatctccactgg

SEQ ID NO: 2234975 - DNA, 25 bp, Homo sapien
gaaggctgcaatctccactggttgc

SEQ ID NO: 2234976 - DNA, 25 bp, Homo sapien
tttcccaatcagccagaaggtttcc

SEQ ID NO: 2234977 - DNA, 25 bp, Homo sapien
ttttcccaatcagccagaaggtttc

SEQ ID NO: 2234978 - DNA, 25 bp, Homo sapien
tcccaatcagccagaaggtttcctc

SEQ ID NO: 2234979 - DNA, 25 bp, Homo sapien
gctctgttcttcctcgaagctccac

SEQ ID NO: 2234980 - DNA, 25 bp, Homo sapien
gctgagactgacatgaatgcgataa

SEQ ID NO: 2234981 - DNA, 25 bp, Homo sapien
ctgagactgacatgaatgcgataag

SEQ ID NO: 2234982 - DNA, 25 bp, Homo sapien
tcttcctcgaagctccacttcatag

SEQ ID NO: 2234983 - DNA, 25 bp, Homo sapien
agaatcaccttctcaatagcagagt

SEQ ID NO: 2234984 - DNA, 25 bp, Homo sapien
atccatctctctattaggtactcac

SEQ ID NO: 2234985 - DNA, 25 bp, Homo sapien
tccgagaagctgtgttcacagtgtc

SEQ ID NO: 2234986 - DNA, 25 bp, Homo sapien
caaacaagcagtatctgggcatggt

SEQ ID NO: 2234987 - DNA, 25 bp, Homo sapien
atggtgaggcccaccactccagcaa

SEQ ID NO: 2234988 - DNA, 25 bp, Homo sapien
gtaagcctgtagattccatccgaga

SEQ ID NO: 2234989 - DNA, 25 bp, Homo sapien
gcatgtgccgcatcttgaaagtgcc

SEQ ID NO: 2234990 - DNA, 25 bp, Homo sapien
tgaaggccaattcgaattcggaccg

SEQ ID NO: 2234991 - DNA, 25 bp, Homo sapien
tctaaggacatgtttgcaatctcag

SEQ ID NO: 2234992 - DNA, 25 bp, Homo sapien
attcggaccggcacttctggcatgt

SEQ ID NO: 2234993 - DNA, 25 bp, Homo sapien
caatgtcgctgaagtacaaggtgac

SEQ ID NO: 2234994 - DNA, 25 bp, Homo sapien
aaagccctcaggttcaactgtgcag

SEQ ID NO: 2234995 - DNA, 25 bp, Homo sapien
tcagaagatccacgacctcaatggg

SEQ ID NO: 2234996 - DNA, 25 bp, Homo sapien
caaggtgaccaagtcaaagccctca

SEQ ID NO: 2234997 - DNA, 25 bp, Homo sapien
ggtggtagcatctgtgttagaagct

SEQ ID NO: 2234998 - DNA, 25 bp, Homo sapien
agaatattgctccaacatccgaagc

SEQ ID NO: 2234999 - DNA, 25 bp, Homo sapien
tcttcagtccgctcccgaatcaaat

SEQ ID NO: 2235000 - DNA, 25 bp, Homo sapien
cgaatcaaatcttccaagttgctag

SEQ ID NO: 2235001 - DNA, 25 bp, Homo sapien
tgctcaggaggaactactggtctgt

SEQ ID NO: 2235002 - DNA, 25 bp, Homo sapien
aaagttggtcgttgttctgcagcct

SEQ ID NO: 2235003 - DNA, 25 bp, Homo sapien
aggggcatgctcaggaggaactact

SEQ ID NO: 2235004 - DNA, 25 bp, Homo sapien
catcagctggagacattctggaggg

SEQ ID NO: 2235005 - DNA, 25 bp, Homo sapien
gatgcgagaagagaaccgtttacaa

SEQ ID NO: 2235006 - DNA, 25 bp, Homo sapien
gaagagaaccgtttacaaatcatgg

SEQ ID NO: 2235007 - DNA, 25 bp, Homo sapien
ctgtccagatgcgagaagagaaccg

SEQ ID NO: 2235008 - DNA, 25 bp, Homo sapien
agagaaccgtttacaaatcatggaa

SEQ ID NO: 2235009 - DNA, 25 bp, Homo sapien
gttagcactaacactcttctggaaa

SEQ ID NO: 2235010 - DNA, 25 bp, Homo sapien
aaaatcatgacagcctgagttggtc

SEQ ID NO: 2235011 - DNA, 25 bp, Homo sapien
tgatgatctcggtcatggtggaccc

SEQ ID NO: 2235012 - DNA, 25 bp, Homo sapien
gagctgcttgcagactatcaggctg

SEQ ID NO: 2235013 - DNA, 25 bp, Homo sapien
ggtaccccggaccatcacttcttgc

SEQ ID NO: 2235014 - DNA, 25 bp, Homo sapien
aagaacctaacctgctgcctcttgg

SEQ ID NO: 2235015 - DNA, 25 bp, Homo sapien
caaagctatagacatctcctgcaaa

SEQ ID NO: 2235016 - DNA, 25 bp, Homo sapien
gatccatcatgcagaatggggtacc

SEQ ID NO: 2235017 - DNA, 25 bp, Homo sapien
gtttcgagactttagcctcccatga

SEQ ID NO: 2235018 - DNA, 25 bp, Homo sapien
gaacaaactctctgtggtgtaagta

SEQ ID NO: 2235019 - DNA, 25 bp, Homo sapien
gatgtcgttaaagccataatctgtc

SEQ ID NO: 2235020 - DNA, 25 bp, Homo sapien
gcccatctaccacacagtttcgaga

SEQ ID NO: 2235021 - DNA, 25 bp, Homo sapien
tccccgaatcatagaagaaacccaa

SEQ ID NO: 2235022 - DNA, 25 bp, Homo sapien
ggctccctcgggaacagaattctgt

SEQ ID NO: 2235023 - DNA, 25 bp, Homo sapien
gtcacaatggcaaacatccccgaat

SEQ ID NO: 2235024 - DNA, 25 bp, Homo sapien
gggttaatattctcatgacgcaagt

SEQ ID NO: 2235025 - DNA, 25 bp, Homo sapien
ttgatttgatggacttaaggtctcc

SEQ ID NO: 2235026 - DNA, 25 bp, Homo sapien
gagaactttttcagccacacccaat

SEQ ID NO: 2235027 - DNA, 25 bp, Homo sapien
ctccaaaatctccaagggagaactt

SEQ ID NO: 2235028 - DNA, 25 bp, Homo sapien
atttcgaacacatcacttgctcttg

SEQ ID NO: 2235029 - DNA, 25 bp, Homo sapien
tttttagctctgatgatctgcgatt

SEQ ID NO: 2235030 - DNA, 25 bp, Homo sapien
cataggtagctggagttagactccc

SEQ ID NO: 2235031 - DNA, 25 bp, Homo sapien
cataaatcgctatgttggagttttc

SEQ ID NO: 2235032 - DNA, 25 bp, Homo sapien
gacctctgaggtaatctggaagctt

SEQ ID NO: 2235033 - DNA, 25 bp, Homo sapien
ctggaagcttacactggcacgactt

SEQ ID NO: 2235034 - DNA, 25 bp, Homo sapien
ttctattgggtcctttgatcaactg

SEQ ID NO: 2235035 - DNA, 25 bp, Homo sapien
tattgggtcctttgatcaactggat

SEQ ID NO: 2235036 - DNA, 25 bp, Homo sapien
tgccaaagtggggattgataaacgt

SEQ ID NO: 2235037 - DNA, 25 bp, Homo sapien
gttacatcctccaaagtcagtagaa

SEQ ID NO: 2235038 - DNA, 25 bp, Homo sapien
taagcaaatccattaatagacagca

SEQ ID NO: 2235039 - DNA, 25 bp, Homo sapien
tagacagcagggctataagcaaagt

SEQ ID NO: 2235040 - DNA, 25 bp, Homo sapien
ccatcatggcaaaggcagggtcgat

SEQ ID NO: 2235041 - DNA, 25 bp, Homo sapien
cagggctataagcaaagtaaggcag

SEQ ID NO: 2235042 - DNA, 25 bp, Homo sapien
cagtgtaggtgctatggagttccca

SEQ ID NO: 2235043 - DNA, 25 bp, Homo sapien
cattctttcaagttggtgtccagga

SEQ ID NO: 2235044 - DNA, 25 bp, Homo sapien
catgtttctggaatgctgaaccagg

SEQ ID NO: 2235045 - DNA, 25 bp, Homo sapien
gaaacgtagcagctccatttccatg

SEQ ID NO: 2235046 - DNA, 25 bp, Homo sapien
gtagatggttccaaacaacggtgaa

SEQ ID NO: 2235047 - DNA, 25 bp, Homo sapien
tgaattgtagatggttccaaacaac

SEQ ID NO: 2235048 - DNA, 25 bp, Homo sapien
ggcttgtgcgataaagtaaattgaa

SEQ ID NO: 2235049 - DNA, 25 bp, Homo sapien
aattgaattgtagatggttccaaac

SEQ ID NO: 2235050 - DNA, 25 bp, Homo sapien
catcataggcttcccggagctttgg

SEQ ID NO: 2235051 - DNA, 25 bp, Homo sapien
tcttgggactccactgtaatggtca

SEQ ID NO: 2235052 - DNA, 25 bp, Homo sapien
taatggtcaacactgcatcataggc

SEQ ID NO: 2235053 - DNA, 25 bp, Homo sapien
tgtagagcagggcatcataaggaac

SEQ ID NO: 2235054 - DNA, 25 bp, Homo sapien
tctcccccaatcaaagctgaatgca

SEQ ID NO: 2235055 - DNA, 25 bp, Homo sapien
tcccccaatcaaagctgaatgcata

SEQ ID NO: 2235056 - DNA, 25 bp, Homo sapien
ccccaatcaaagctgaatgcataca

SEQ ID NO: 2235057 - DNA, 25 bp, Homo sapien
caatcaaagctgaatgcatacacat

SEQ ID NO: 2235058 - DNA, 25 bp, Homo sapien
aatttcagcgggagaaagcactcac

SEQ ID NO: 2235059 - DNA, 25 bp, Homo sapien
tgaagtcacgtttaaatttcagcgg

SEQ ID NO: 2235060 - DNA, 25 bp, Homo sapien
tcacgtttaaatttcagcgggagaa

SEQ ID NO: 2235061 - DNA, 25 bp, Homo sapien
tccctgaagtcacgtttaaatttca

SEQ ID NO: 2235062 - DNA, 25 bp, Homo sapien
gatgggtcccggttgattcgctcaa

SEQ ID NO: 2235063 - DNA, 25 bp, Homo sapien
cagtagccagggttggtaggtccaa

SEQ ID NO: 2235064 - DNA, 25 bp, Homo sapien
acagttacaagcacccggatgggag

SEQ ID NO: 2235065 - DNA, 25 bp, Homo sapien
gactcgattggctgtatgcacccaa

SEQ ID NO: 2235066 - DNA, 25 bp, Homo sapien
ttgtaggggagtgtccacacctgct

SEQ ID NO: 2235067 - DNA, 25 bp, Homo sapien
agtgtccacacctgctgcggaaggg

SEQ ID NO: 2235068 - DNA, 25 bp, Homo sapien
tccacacctgctgcggaagggacat

SEQ ID NO: 2235069 - DNA, 25 bp, Homo sapien
tgtaggggagtgtccacacctgctg

SEQ ID NO: 2235070 - DNA, 25 bp, Homo sapien
tgaaagccgcaaaccagagaacaag

SEQ ID NO: 2235071 - DNA, 25 bp, Homo sapien
caagcaccacaggaacttggcagat

SEQ ID NO: 2235072 - DNA, 25 bp, Homo sapien
acagacagaaggcacaagcaccaca

SEQ ID NO: 2235073 - DNA, 25 bp, Homo sapien
acaaggcgagaaaagcgcccgagtc

SEQ ID NO: 2235074 - DNA, 25 bp, Homo sapien
cacagacggtggtgtttccaaatgc

SEQ ID NO: 2235075 - DNA, 25 bp, Homo sapien
tgctttcccgacacagacggtggtg

SEQ ID NO: 2235076 - DNA, 25 bp, Homo sapien
tactggagagttattctgctttccc

SEQ ID NO: 2235077 - DNA, 25 bp, Homo sapien
tccagcaagctaatgacgagatact

SEQ ID NO: 2235078 - DNA, 25 bp, Homo sapien
cacaaagtgtcccttggcattcact

SEQ ID NO: 2235079 - DNA, 25 bp, Homo sapien
cacatgccacaaagtgtcccttggc

SEQ ID NO: 2235080 - DNA, 25 bp, Homo sapien
acaaagtgtcccttggcattcactc

SEQ ID NO: 2235081 - DNA, 25 bp, Homo sapien
caaagtgtcccttggcattcactct

SEQ ID NO: 2235082 - DNA, 25 bp, Homo sapien
tgcgcatgcagaccactggcatagc

SEQ ID NO: 2235083 - DNA, 25 bp, Homo sapien
tcctgtcaaggactccagtctgttg

SEQ ID NO: 2235084 - DNA, 25 bp, Homo sapien
gtaattcaccgctcaaatgtcttca

SEQ ID NO: 2235085 - DNA, 25 bp, Homo sapien
ggcatagctacctcagtgtgtccat

SEQ ID NO: 2235086 - DNA, 25 bp, Homo sapien
tgtctaataaccaccaatcgccctt

SEQ ID NO: 2235087 - DNA, 25 bp, Homo sapien
ttgttccattctgtctaataaccac

SEQ ID NO: 2235088 - DNA, 25 bp, Homo sapien
tctaataaccaccaatcgccctttc

SEQ ID NO: 2235089 - DNA, 25 bp, Homo sapien
ataaccaccaatcgccctttctcca

SEQ ID NO: 2235090 - DNA, 25 bp, Homo sapien
agaatataaaaggtgatccaggctg

SEQ ID NO: 2235091 - DNA, 25 bp, Homo sapien
gattccagcccagaatataaaaggt

SEQ ID NO: 2235092 - DNA, 25 bp, Homo sapien
gctgtgattccagcccagaatataa

SEQ ID NO: 2235093 - DNA, 25 bp, Homo sapien
ccagaatataaaaggtgatccaggc

SEQ ID NO: 2235094 - DNA, 25 bp, Homo sapien
gcaagtgagggccccagttagcatt

SEQ ID NO: 2235095 - DNA, 25 bp, Homo sapien
tagcattctctatgtagtgctgcat

SEQ ID NO: 2235096 - DNA, 25 bp, Homo sapien
aatactggtgcaagtgagggcccca

SEQ ID NO: 2235097 - DNA, 25 bp, Homo sapien
ctgatggaaatactggtgcaagtga

SEQ ID NO: 2235098 - DNA, 25 bp, Homo sapien
tggatattatactgagaagggccac

SEQ ID NO: 2235099 - DNA, 25 bp, Homo sapien
gagaagggccactcctaattccact

SEQ ID NO: 2235100 - DNA, 25 bp, Homo sapien
caagtccaagcttgcagatacagga

SEQ ID NO: 2235101 - DNA, 25 bp, Homo sapien
tccactccttggttatcatacctat

SEQ ID NO: 2235102 - DNA, 25 bp, Homo sapien
tatagggctcaatgatattcaattg

SEQ ID NO: 2235103 - DNA, 25 bp, Homo sapien
gagcagctataaactacttgtttag

SEQ ID NO: 2235104 - DNA, 25 bp, Homo sapien
tctatcatttcgcatagttacccat

SEQ ID NO: 2235105 - DNA, 25 bp, Homo sapien
tacagtcctgttacatattagatgt

SEQ ID NO: 2235106 - DNA, 25 bp, Homo sapien
aaataaaatgtgttatactcatacc

SEQ ID NO: 2235107 - DNA, 25 bp, Homo sapien
aataaataaaatgtgttatactcat

SEQ ID NO: 2235108 - DNA, 25 bp, Homo sapien
tgaataaataaaatgtgttatactc

SEQ ID NO: 2235109 - DNA, 25 bp, Homo sapien
taaataaaatgtgttatactcatac

SEQ ID NO: 2235110 - DNA, 25 bp, Homo sapien
caacaatcagaatgtccaaatgctg

SEQ ID NO: 2235111 - DNA, 25 bp, Homo sapien
caataactacattgaacggtgtgca

SEQ ID NO: 2235112 - DNA, 25 bp, Homo sapien
aatgctgtcctttcccttacagaga

SEQ ID NO: 2235113 - DNA, 25 bp, Homo sapien
tcttgcccaaaactatacactgtat

SEQ ID NO: 2235114 - DNA, 25 bp, Homo sapien
tgtcgtagaggtgtcacaaggtgac

SEQ ID NO: 2235115 - DNA, 25 bp, Homo sapien
gcccaagttgcactccctgtcgtag

SEQ ID NO: 2235116 - DNA, 25 bp, Homo sapien
tgctgatctgcttatatacacccat

SEQ ID NO: 2235117 - DNA, 25 bp, Homo sapien
aaggtgacaccttgcattcatgctg

SEQ ID NO: 2235118 - DNA, 25 bp, Homo sapien
tagatatttgcacaggatcggcagc

SEQ ID NO: 2235119 - DNA, 25 bp, Homo sapien
gatcggcagctgtccactgacctcg

SEQ ID NO: 2235120 - DNA, 25 bp, Homo sapien
tctggcaatgcccacaaatgtcacc

SEQ ID NO: 2235121 - DNA, 25 bp, Homo sapien
gattccccctttatagatatttgca

SEQ ID NO: 2235122 - DNA, 25 bp, Homo sapien
agaaggaaacaggcttaacagatat

SEQ ID NO: 2235123 - DNA, 25 bp, Homo sapien
ttaacagatatgcaactgagccaaa

SEQ ID NO: 2235124 - DNA, 25 bp, Homo sapien
ggcttaacagatatgcaactgagcc

SEQ ID NO: 2235125 - DNA, 25 bp, Homo sapien
cagatatgcaactgagccaaaggaa

SEQ ID NO: 2235126 - DNA, 25 bp, Homo sapien
attcagcagacaccggaagcagcag

SEQ ID NO: 2235127 - DNA, 25 bp, Homo sapien
agagggaaatctttgacattcagca

SEQ ID NO: 2235128 - DNA, 25 bp, Homo sapien
gggaaatctttgacattcagcagac

SEQ ID NO: 2235129 - DNA, 25 bp, Homo sapien
agcagacaccggaagcagcagagac

SEQ ID NO: 2235130 - DNA, 25 bp, Homo sapien
taatggtaatcctcagcagaagatg

SEQ ID NO: 2235131 - DNA, 25 bp, Homo sapien
gctgccagttagacggcccagagtt

SEQ ID NO: 2235132 - DNA, 25 bp, Homo sapien
tgctagctccctgctgaaagagaga

SEQ ID NO: 2235133 - DNA, 25 bp, Homo sapien
caaaaatcaggcgttaccactggga

SEQ ID NO: 2235134 - DNA, 25 bp, Homo sapien
gacaagagagcagaggcagtttagt

SEQ ID NO: 2235135 - DNA, 25 bp, Homo sapien
cagaggcagtttagtgcagttggat

SEQ ID NO: 2235136 - DNA, 25 bp, Homo sapien
cccgaatgggtaaggtggtgcttct

SEQ ID NO: 2235137 - DNA, 25 bp, Homo sapien
ttccagacaaggtctcctggcctct

SEQ ID NO: 2235138 - DNA, 25 bp, Homo sapien
tatctgggcctcagatgaggcgaac

SEQ ID NO: 2235139 - DNA, 25 bp, Homo sapien
ttatctgggcctcagatgaggcgaa

SEQ ID NO: 2235140 - DNA, 25 bp, Homo sapien
atctgggcctcagatgaggcgaacc

SEQ ID NO: 2235141 - DNA, 25 bp, Homo sapien
cattatctgggcctcagatgaggcg

SEQ ID NO: 2235142 - DNA, 25 bp, Homo sapien
tgaggagggcgcgaaccagcaatct

SEQ ID NO: 2235143 - DNA, 25 bp, Homo sapien
gaggcgcgcccagggatgagcgaga

SEQ ID NO: 2235144 - DNA, 25 bp, Homo sapien
gtggaaggtgggaggcgcgcccagg

SEQ ID NO: 2235145 - DNA, 25 bp, Homo sapien
cagggatgagcgagatgaggagggc

SEQ ID NO: 2235146 - DNA, 25 bp, Homo sapien
gcccctcggaggcaagctggcggcg

SEQ ID NO: 2235147 - DNA, 25 bp, Homo sapien
ggcagcctcggcgtcggcggtcagg

SEQ ID NO: 2235148 - DNA, 25 bp, Homo sapien
attcgtgctcggcgcaagcctggga

SEQ ID NO: 2235149 - DNA, 25 bp, Homo sapien
cggggcccattcgtgctcggcgcaa

SEQ ID NO: 2235150 - DNA, 25 bp, Homo sapien
aacaggcggctcagaagggttcgca

SEQ ID NO: 2235151 - DNA, 25 bp, Homo sapien
aagccgctggcattaccccggtggt

SEQ ID NO: 2235152 - DNA, 25 bp, Homo sapien
gccaagcaggcgtagaagatcatga

SEQ ID NO: 2235153 - DNA, 25 bp, Homo sapien
gatgtagagataggcgtcgtcgccc

SEQ ID NO: 2235154 - DNA, 25 bp, Homo sapien
ggagtgacacggcggctccaggacg

SEQ ID NO: 2235155 - DNA, 25 bp, Homo sapien
tcggggagtgacacggcggctccag

SEQ ID NO: 2235156 - DNA, 25 bp, Homo sapien
gcggctccaggacgctgctgacctt

SEQ ID NO: 2235157 - DNA, 25 bp, Homo sapien
ggctccaggacgctgctgacctttc

SEQ ID NO: 2235158 - DNA, 25 bp, Homo sapien
ggaaacagcggtagcacccagctct

SEQ ID NO: 2235159 - DNA, 25 bp, Homo sapien
gggaagcgagctagcgagcgggccg

SEQ ID NO: 2235160 - DNA, 25 bp, Homo sapien
gctcagcagcggaaacagcggtagc

SEQ ID NO: 2235161 - DNA, 25 bp, Homo sapien
gtagcacccagctctccggcgagcg

SEQ ID NO: 2235162 - DNA, 25 bp, Homo sapien
ggagttcctctgcaatactctgtgc

SEQ ID NO: 2235163 - DNA, 25 bp, Homo sapien
cctggagttcctctgcaatactctg

SEQ ID NO: 2235164 - DNA, 25 bp, Homo sapien
tcctggagttcctctgcaatactct

SEQ ID NO: 2235165 - DNA, 25 bp, Homo sapien
tggagttcctctgcaatactctgtg

SEQ ID NO: 2235166 - DNA, 25 bp, Homo sapien
tatgcccctgtttgtgctttcagat

SEQ ID NO: 2235167 - DNA, 25 bp, Homo sapien
gaaagaagccttgctctatgcccct

SEQ ID NO: 2235168 - DNA, 25 bp, Homo sapien
tcttcacaatgcacccttctgagct

SEQ ID NO: 2235169 - DNA, 25 bp, Homo sapien
cctcaaaattcgttgactgaaagaa

SEQ ID NO: 2235170 - DNA, 25 bp, Homo sapien
tagaaacggagaatagtcataaaat

SEQ ID NO: 2235171 - DNA, 25 bp, Homo sapien
atagatgtgtaaaagcgggtggaaa

SEQ ID NO: 2235172 - DNA, 25 bp, Homo sapien
gaaagaaatcactaccagagagaag

SEQ ID NO: 2235173 - DNA, 25 bp, Homo sapien
gctgagatgctaacccctttcccta

SEQ ID NO: 2235174 - DNA, 25 bp, Homo sapien
gttctcattcctcaccacccctcca

SEQ ID NO: 2235175 - DNA, 25 bp, Homo sapien
ggttctcattcctcaccacccctcc

SEQ ID NO: 2235176 - DNA, 25 bp, Homo sapien
ttctcattcctcaccacccctccac

SEQ ID NO: 2235177 - DNA, 25 bp, Homo sapien
cagtgcagctctatggaagttggtt

SEQ ID NO: 2235178 - DNA, 25 bp, Homo sapien
ggaaaggttctcttccatgccaagt

SEQ ID NO: 2235179 - DNA, 25 bp, Homo sapien
taagcactgtcggagtccagaaggc

SEQ ID NO: 2235180 - DNA, 25 bp, Homo sapien
taaaagtacaattgaggcgccatgg

SEQ ID NO: 2235181 - DNA, 25 bp, Homo sapien
gatttgaaccagaggtcagttatct

SEQ ID NO: 2235182 - DNA, 25 bp, Homo sapien
tcagggttggaagtctcatctaacc

SEQ ID NO: 2235183 - DNA, 25 bp, Homo sapien
tgtaaaggcggagctactgaggtcc

SEQ ID NO: 2235184 - DNA, 25 bp, Homo sapien
tcgattggctcataggtggtcaagc

SEQ ID NO: 2235185 - DNA, 25 bp, Homo sapien
ggagcatttgactcaacctcagaga

SEQ ID NO: 2235186 - DNA, 25 bp, Homo sapien
ccagggattgcagcgagggcttcta

SEQ ID NO: 2235187 - DNA, 25 bp, Homo sapien
tattggaattagtcccctgaccacg

SEQ ID NO: 2235188 - DNA, 25 bp, Homo sapien
cctgaccacgtgagacattgtttcc

SEQ ID NO: 2235189 - DNA, 25 bp, Homo sapien
agttcagcttctcattcaccctcat

SEQ ID NO: 2235190 - DNA, 25 bp, Homo sapien
gataagatagtacatgcactcacac

SEQ ID NO: 2235191 - DNA, 25 bp, Homo sapien
gcagcacccaaccttaagtgttaat

SEQ ID NO: 2235192 - DNA, 25 bp, Homo sapien
caagttgggaagaatgagaatactc

SEQ ID NO: 2235193 - DNA, 25 bp, Homo sapien
ggacctataacagatcagttggcag

SEQ ID NO: 2235194 - DNA, 25 bp, Homo sapien
cctgcacaactgtcaataagacaac

SEQ ID NO: 2235195 - DNA, 25 bp, Homo sapien
tcagctgcactagaactatgcaaaa

SEQ ID NO: 2235196 - DNA, 25 bp, Homo sapien
gactctatatctaacctatgcaaca

SEQ ID NO: 2235197 - DNA, 25 bp, Homo sapien
cagagtttaaatctctttcccaggt

SEQ ID NO: 2235198 - DNA, 25 bp, Homo sapien
tgtctttgaggtaatggttcctcag

SEQ ID NO: 2235199 - DNA, 25 bp, Homo sapien
ccatacattcgttcaatgtctttga

SEQ ID NO: 2235200 - DNA, 25 bp, Homo sapien
ccttgattggaatttcaaatcgctc

SEQ ID NO: 2235201 - DNA, 25 bp, Homo sapien
catggctctgggcttaatcgaacct

SEQ ID NO: 2235202 - DNA, 25 bp, Homo sapien
gaagtgaaagatgggagaaaaggag

SEQ ID NO: 2235203 - DNA, 25 bp, Homo sapien
attagaagtgaaagatgggagaaaa

SEQ ID NO: 2235204 - DNA, 25 bp, Homo sapien
tagaagtgaaagatgggagaaaagg

SEQ ID NO: 2235205 - DNA, 25 bp, Homo sapien
aagtgaaagatgggagaaaaggaga

SEQ ID NO: 2235206 - DNA, 25 bp, Homo sapien
tatccatatgtctgctcaaatacca

SEQ ID NO: 2235207 - DNA, 25 bp, Homo sapien
accccggagaggacatccctgacca

SEQ ID NO: 2235208 - DNA, 25 bp, Homo sapien
atatgtctgctcaaataccaccacc

SEQ ID NO: 2235209 - DNA, 25 bp, Homo sapien
tccctgaccactcataacaaaagag

SEQ ID NO: 2235210 - DNA, 25 bp, Homo sapien
cttccatagcaggattattgcagat

SEQ ID NO: 2235211 - DNA, 25 bp, Homo sapien
tattgcagatatcaacccaagttcc

SEQ ID NO: 2235212 - DNA, 25 bp, Homo sapien
catttgcagcttctcgaatttcttt

SEQ ID NO: 2235213 - DNA, 25 bp, Homo sapien
tctgttgtgccaaaagtgtcaacct

SEQ ID NO: 2235214 - DNA, 25 bp, Homo sapien
acatactctcctgcttgtaacttca

SEQ ID NO: 2235215 - DNA, 25 bp, Homo sapien
gcaaaagcacagatgttgtcaataa

SEQ ID NO: 2235216 - DNA, 25 bp, Homo sapien
gacaattcttcagtgcagcttctac

SEQ ID NO: 2235217 - DNA, 25 bp, Homo sapien
cctgcttgtaacttcactagatctt

SEQ ID NO: 2235218 - DNA, 25 bp, Homo sapien
tatcaccagtgcaaaaccacctttg

SEQ ID NO: 2235219 - DNA, 25 bp, Homo sapien
ggcttgtcattaattgtataaccgc

SEQ ID NO: 2235220 - DNA, 25 bp, Homo sapien
agatgttctgtccaccaattacgat

SEQ ID NO: 2235221 - DNA, 25 bp, Homo sapien
catcgggatggaattctccaatatc

SEQ ID NO: 2235222 - DNA, 25 bp, Homo sapien
caactctgccagtagtatagtcagt

SEQ ID NO: 2235223 - DNA, 25 bp, Homo sapien
tccaactctgccagtagtatagtca

SEQ ID NO: 2235224 - DNA, 25 bp, Homo sapien
actctgccagtagtatagtcagtta

SEQ ID NO: 2235225 - DNA, 25 bp, Homo sapien
gtgctccaactctgccagtagtata

SEQ ID NO: 2235226 - DNA, 25 bp, Homo sapien
cctccagacagcatcatgcggacat

SEQ ID NO: 2235227 - DNA, 25 bp, Homo sapien
tcggtgtgtctgaggagatagcggg

SEQ ID NO: 2235228 - DNA, 25 bp, Homo sapien
gcagacattcatgaatcggtgtgtc

SEQ ID NO: 2235229 - DNA, 25 bp, Homo sapien
tgattctgtcagtccataaccctgg

SEQ ID NO: 2235230 - DNA, 25 bp, Homo sapien
aaagggaggataaatgattttaatg

SEQ ID NO: 2235231 - DNA, 25 bp, Homo sapien
gaggataaatgattttaatgtacgc

SEQ ID NO: 2235232 - DNA, 25 bp, Homo sapien
cttaataaagggaggataaatgatt

SEQ ID NO: 2235233 - DNA, 25 bp, Homo sapien
ggataaatgattttaatgtacgcat

SEQ ID NO: 2235234 - DNA, 25 bp, Homo sapien
tgttccaatttgtaatcatacccta

SEQ ID NO: 2235235 - DNA, 25 bp, Homo sapien
cataccctatcttgaacagagtttt

SEQ ID NO: 2235236 - DNA, 25 bp, Homo sapien
tcatctcttggactttgctcataac

SEQ ID NO: 2235237 - DNA, 25 bp, Homo sapien
gattgcaaagaggtgcatcatatcc

SEQ ID NO: 2235238 - DNA, 25 bp, Homo sapien
cagcccagactaccactaaatgatg

SEQ ID NO: 2235239 - DNA, 25 bp, Homo sapien
gagaattcactcagctgtcgcagaa

SEQ ID NO: 2235240 - DNA, 25 bp, Homo sapien
cattttaacggaagcaaagaacacg

SEQ ID NO: 2235241 - DNA, 25 bp, Homo sapien
tgtgaccttcttacagcatggcaga

SEQ ID NO: 2235242 - DNA, 25 bp, Homo sapien
tacaaccaacgggaaggagactatc

SEQ ID NO: 2235243 - DNA, 25 bp, Homo sapien
taaggagcctatgtgctaactgtgc

SEQ ID NO: 2235244 - DNA, 25 bp, Homo sapien
taattcgtgcacagaacatagcccc

SEQ ID NO: 2235245 - DNA, 25 bp, Homo sapien
gaacattactatctcgaggccgcaa

SEQ ID NO: 2235246 - DNA, 25 bp, Homo sapien
ttgattccatcacctatgagctgtg

SEQ ID NO: 2235247 - DNA, 25 bp, Homo sapien
agactgatagactgatactccacca

SEQ ID NO: 2235248 - DNA, 25 bp, Homo sapien
gacagccatagtggttaagaagact

SEQ ID NO: 2235249 - DNA, 25 bp, Homo sapien
tatggttttagtcagatgcctcttc

SEQ ID NO: 2235250 - DNA, 25 bp, Homo sapien
agccataagtgtgggcttcagtaca

SEQ ID NO: 2235251 - DNA, 25 bp, Homo sapien
taagtgtgggcttcagtacagtaca

SEQ ID NO: 2235252 - DNA, 25 bp, Homo sapien
cagcagccataagtgtgggcttcag

SEQ ID NO: 2235253 - DNA, 25 bp, Homo sapien
gaacagcagccataagtgtgggctt

SEQ ID NO: 2235254 - DNA, 25 bp, Homo sapien
tccaaatgtggtgcttctagtctcc

SEQ ID NO: 2235255 - DNA, 25 bp, Homo sapien
catgtccttcaggtcggagttgccc

SEQ ID NO: 2235256 - DNA, 25 bp, Homo sapien
tctgcatgctactgaccagctcttg

SEQ ID NO: 2235257 - DNA, 25 bp, Homo sapien
tgtgcacatttgcaagtggaaacct

SEQ ID NO: 2235258 - DNA, 25 bp, Homo sapien
gagtgtaagcggagaagaatatcca

SEQ ID NO: 2235259 - DNA, 25 bp, Homo sapien
ttctagcacatgagccaaaggcaag

SEQ ID NO: 2235260 - DNA, 25 bp, Homo sapien
gaatatccaatcctgcagccatagg

SEQ ID NO: 2235261 - DNA, 25 bp, Homo sapien
ggcaagtagccaatatatgtgtcct

SEQ ID NO: 2235262 - DNA, 25 bp, Homo sapien
ggtcggccagtagaaccactagtat

SEQ ID NO: 2235263 - DNA, 25 bp, Homo sapien
gatgcatcatcactcccttaggtcg

SEQ ID NO: 2235264 - DNA, 25 bp, Homo sapien
cgttggtctacttggaggaatgccc

SEQ ID NO: 2235265 - DNA, 25 bp, Homo sapien
aggtattctttcacactggcctgtc

SEQ ID NO: 2235266 - DNA, 25 bp, Homo sapien
tgtctgggatagaacaaagctccac

SEQ ID NO: 2235267 - DNA, 25 bp, Homo sapien
aaccctggagcttccactttcaaga

SEQ ID NO: 2235268 - DNA, 25 bp, Homo sapien
aaaccactggatctgatctttaagg

SEQ ID NO: 2235269 - DNA, 25 bp, Homo sapien
gggtatcagaatcacgtgcagaact

SEQ ID NO: 2235270 - DNA, 25 bp, Homo sapien
actcttctactgattgcatgctgtg

SEQ ID NO: 2235271 - DNA, 25 bp, Homo sapien
tatgtttaacacaactgatatctaa

SEQ ID NO: 2235272 - DNA, 25 bp, Homo sapien
gaatctcaaatccttcagggtactc

SEQ ID NO: 2235273 - DNA, 25 bp, Homo sapien
gatagccttattgtccacataaatg

SEQ ID NO: 2235274 - DNA, 25 bp, Homo sapien
ggaagcctcagattcatttagccca

SEQ ID NO: 2235275 - DNA, 25 bp, Homo sapien
tgccaagtgtggcatataaagtcac

SEQ ID NO: 2235276 - DNA, 25 bp, Homo sapien
catttagcccatgaactactgcttc

SEQ ID NO: 2235277 - DNA, 25 bp, Homo sapien
tcaacactggtaatcagataggaag

SEQ ID NO: 2235278 - DNA, 25 bp, Homo sapien
gttcatccatttataattcccaaga

SEQ ID NO: 2235279 - DNA, 25 bp, Homo sapien
cacttcaagatagttcatccattta

SEQ ID NO: 2235280 - DNA, 25 bp, Homo sapien
tattcactctgcgattcacttcaag

SEQ ID NO: 2235281 - DNA, 25 bp, Homo sapien
cagtgagtccactaccaaagttatt

SEQ ID NO: 2235282 - DNA, 25 bp, Homo sapien
gctccagggatgtctattacagcta

SEQ ID NO: 2235283 - DNA, 25 bp, Homo sapien
tcttcacttaggatttccctggtcc

SEQ ID NO: 2235284 - DNA, 25 bp, Homo sapien
tggatacagcatggtcaaataattt

SEQ ID NO: 2235285 - DNA, 25 bp, Homo sapien
cagctagtgagtcgaagtgtgtgac

SEQ ID NO: 2235286 - DNA, 25 bp, Homo sapien
ttggcattggtaagaaaataccatg

SEQ ID NO: 2235287 - DNA, 25 bp, Homo sapien
cttggcattggtaagaaaataccat

SEQ ID NO: 2235288 - DNA, 25 bp, Homo sapien
tggcattggtaagaaaataccatgg

SEQ ID NO: 2235289 - DNA, 25 bp, Homo sapien
aaataatggtgagcacatttagctt

SEQ ID NO: 2235290 - DNA, 25 bp, Homo sapien
tattaacaagtggacaggcagcaaa

SEQ ID NO: 2235291 - DNA, 25 bp, Homo sapien
taatggtgagcacatttagcttaag

SEQ ID NO: 2235292 - DNA, 25 bp, Homo sapien
tgtatattgttattaacaagtggac

SEQ ID NO: 2235293 - DNA, 25 bp, Homo sapien
tgcttatttcttgttattctttggc

SEQ ID NO: 2235294 - DNA, 25 bp, Homo sapien
gcttatttcttgttattctttggct

SEQ ID NO: 2235295 - DNA, 25 bp, Homo sapien
ggtgcttatttcttgttattctttg

SEQ ID NO: 2235296 - DNA, 25 bp, Homo sapien
gtgcttatttcttgttattctttgg

SEQ ID NO: 2235297 - DNA, 25 bp, Homo sapien
agttagtaatctttggaagccgaca

SEQ ID NO: 2235298 - DNA, 25 bp, Homo sapien
tttggaagccgacaataaagtacgc

SEQ ID NO: 2235299 - DNA, 25 bp, Homo sapien
cagataaaagttagtaatctttgga

SEQ ID NO: 2235300 - DNA, 25 bp, Homo sapien
atagcagtacagccaaggcagttca

SEQ ID NO: 2235301 - DNA, 25 bp, Homo sapien
acacccggcccaagaataggaacat

SEQ ID NO: 2235302 - DNA, 25 bp, Homo sapien
cacacccggcccaagaataggaaca

SEQ ID NO: 2235303 - DNA, 25 bp, Homo sapien
cacccggcccaagaataggaacatt

SEQ ID NO: 2235304 - DNA, 25 bp, Homo sapien
tctgggaccacactagatcagcagg

SEQ ID NO: 2235305 - DNA, 25 bp, Homo sapien
tagtctctcggacaagtctggtcat

SEQ ID NO: 2235306 - DNA, 25 bp, Homo sapien
ggaagtcactgggtgtcaatcctca

SEQ ID NO: 2235307 - DNA, 25 bp, Homo sapien
tggtagcttaatcctgcctgtgcct

SEQ ID NO: 2235308 - DNA, 25 bp, Homo sapien
tatgatgctgagcatcgtacccatc

SEQ ID NO: 2235309 - DNA, 25 bp, Homo sapien
gagttggtggtaagggtatgatgct

SEQ ID NO: 2235310 - DNA, 25 bp, Homo sapien
aattttctaggctaacagatctggg

SEQ ID NO: 2235311 - DNA, 25 bp, Homo sapien
gcatcgtacccatcattaggcaaaa

SEQ ID NO: 2235312 - DNA, 25 bp, Homo sapien
agctctatattagtggcttcatctg

SEQ ID NO: 2235313 - DNA, 25 bp, Homo sapien
gaaagctctatattagtggcttcat

SEQ ID NO: 2235314 - DNA, 25 bp, Homo sapien
aaaagaaagctctatattagtggct

SEQ ID NO: 2235315 - DNA, 25 bp, Homo sapien
aagaaagctctatattagtggcttc

SEQ ID NO: 2235316 - DNA, 25 bp, Homo sapien
tcaacagatccacttaggtgtcagt

SEQ ID NO: 2235317 - DNA, 25 bp, Homo sapien
caagcctggaagtctgccttaaaca

SEQ ID NO: 2235318 - DNA, 25 bp, Homo sapien
gggcttggtccttgaacctcacaat

SEQ ID NO: 2235319 - DNA, 25 bp, Homo sapien
gcaattcaccagcaaatcctaatgg

SEQ ID NO: 2235320 - DNA, 25 bp, Homo sapien
tactgctatcccatcattaggagga

SEQ ID NO: 2235321 - DNA, 25 bp, Homo sapien
aaaggcagggcattatcttcagtca

SEQ ID NO: 2235322 - DNA, 25 bp, Homo sapien
gaatctgtgactggaacagtgcctc

SEQ ID NO: 2235323 - DNA, 25 bp, Homo sapien
tgtatgtcagccagaaaaaggcagg

SEQ ID NO: 2235324 - DNA, 25 bp, Homo sapien
cagcaaagaaagcacctcagctgcc

SEQ ID NO: 2235325 - DNA, 25 bp, Homo sapien
tcccagcaaagaaagcacctcagct

SEQ ID NO: 2235326 - DNA, 25 bp, Homo sapien
gaggtattaactcctgaagtcgcca

SEQ ID NO: 2235327 - DNA, 25 bp, Homo sapien
tgaagtcgccattctgccagtctct

SEQ ID NO: 2235328 - DNA, 25 bp, Homo sapien
aagaagaacacgaatatcttctgtg

SEQ ID NO: 2235329 - DNA, 25 bp, Homo sapien
agaagaacacgaatatcttctgtga

SEQ ID NO: 2235330 - DNA, 25 bp, Homo sapien
taagaagaacacgaatatcttctgt

SEQ ID NO: 2235331 - DNA, 25 bp, Homo sapien
gaagaacacgaatatcttctgtgat

SEQ ID NO: 2235332 - DNA, 25 bp, Homo sapien
caaatgccagtgagcaaaacaaagt

SEQ ID NO: 2235333 - DNA, 25 bp, Homo sapien
tgccagtgagcaaaacaaagtccac

SEQ ID NO: 2235334 - DNA, 25 bp, Homo sapien
agtgagcaaaacaaagtccacgcag

SEQ ID NO: 2235335 - DNA, 25 bp, Homo sapien
gccagtgagcaaaacaaagtccacg

SEQ ID NO: 2235336 - DNA, 25 bp, Homo sapien
gtaagccctagtttgattcactgag

SEQ ID NO: 2235337 - DNA, 25 bp, Homo sapien
tgtggtattcttgcccaaattgcat

SEQ ID NO: 2235338 - DNA, 25 bp, Homo sapien
ttgatagataccaaaaacactgtct

SEQ ID NO: 2235339 - DNA, 25 bp, Homo sapien
ttcccaccggcagtatattaatatg

SEQ ID NO: 2235340 - DNA, 25 bp, Homo sapien
caacagtcatatttccttgcataga

SEQ ID NO: 2235341 - DNA, 25 bp, Homo sapien
ttccctcgcatttcttagaagtatg

SEQ ID NO: 2235342 - DNA, 25 bp, Homo sapien
ggtcacagatcttataaactatgcc

SEQ ID NO: 2235343 - DNA, 25 bp, Homo sapien
ttcttgcttgagataccaaactgca

SEQ ID NO: 2235344 - DNA, 25 bp, Homo sapien
tactttttgaggtccacacctaaga

SEQ ID NO: 2235345 - DNA, 25 bp, Homo sapien
gcacattctgtttatgagctctcaa

SEQ ID NO: 2235346 - DNA, 25 bp, Homo sapien
tgattatcatgaaacaactactggg

SEQ ID NO: 2235347 - DNA, 25 bp, Homo sapien
gaacattaagaaagcaccctatgtg

SEQ ID NO: 2235348 - DNA, 25 bp, Homo sapien
gaatatggtccaaaaggtgtttagc

SEQ ID NO: 2235349 - DNA, 25 bp, Homo sapien
ctgtaaaaggagctaaaagttggct

SEQ ID NO: 2235350 - DNA, 25 bp, Homo sapien
ggtgtttagccctactcaagtggca

SEQ ID NO: 2235351 - DNA, 25 bp, Homo sapien
gccactgcacccacgtagaggttat

SEQ ID NO: 2235352 - DNA, 25 bp, Homo sapien
taagctccttagaggcagaggtcat

SEQ ID NO: 2235353 - DNA, 25 bp, Homo sapien
tatgttacgtgaagtgcctctgcta

SEQ ID NO: 2235354 - DNA, 25 bp, Homo sapien
ggagggcctcctctcatatattagg

SEQ ID NO: 2235355 - DNA, 25 bp, Homo sapien
aaggaagactatgccccagctgaga

SEQ ID NO: 2235356 - DNA, 25 bp, Homo sapien
tggaaccaggatagaggaccatcag

SEQ ID NO: 2235357 - DNA, 25 bp, Homo sapien
tgttgcttagtccaaaggcttcaga

SEQ ID NO: 2235358 - DNA, 25 bp, Homo sapien
gcttgtctataacgtgccactgggt

SEQ ID NO: 2235359 - DNA, 25 bp, Homo sapien
gttgtgcttatcagagactcctgga

SEQ ID NO: 2235360 - DNA, 25 bp, Homo sapien
agttcgagaccaggaatgagggata

SEQ ID NO: 2235361 - DNA, 25 bp, Homo sapien
tctctgggtaggaagatcaccgtat

SEQ ID NO: 2235362 - DNA, 25 bp, Homo sapien
caacctatgactatgtaactacatg

SEQ ID NO: 2235363 - DNA, 25 bp, Homo sapien
gtgcatagttggctataccatctag

SEQ ID NO: 2235364 - DNA, 25 bp, Homo sapien
ccactgggtacggactcactgaagt

SEQ ID NO: 2235365 - DNA, 25 bp, Homo sapien
tggcctctcctaaatatgacagtga

SEQ ID NO: 2235366 - DNA, 25 bp, Homo sapien
taagtggtccctacatataaacaag

SEQ ID NO: 2235367 - DNA, 25 bp, Homo sapien
tcactgaagtgggaaacaaatggtt

SEQ ID NO: 2235368 - DNA, 25 bp, Homo sapien
aagccaaaaggctggataaccatgg

SEQ ID NO: 2235369 - DNA, 25 bp, Homo sapien
tacaatttgctaggaatgatgcgaa

SEQ ID NO: 2235370 - DNA, 25 bp, Homo sapien
taaccatggttgagaggatcatccc

SEQ ID NO: 2235371 - DNA, 25 bp, Homo sapien
ttctttcaaccgaagtgagctgctt

SEQ ID NO: 2235372 - DNA, 25 bp, Homo sapien
gagctgtataacatacttaggtcag

SEQ ID NO: 2235373 - DNA, 25 bp, Homo sapien
aaatcctggccttaatacttgacac

SEQ ID NO: 2235374 - DNA, 25 bp, Homo sapien
ttgaatgaatgtgctaatactcaca

SEQ ID NO: 2235375 - DNA, 25 bp, Homo sapien
taacatgtaactctatttgaatgaa

SEQ ID NO: 2235376 - DNA, 25 bp, Homo sapien
caggtattccccaggagagttggtc

SEQ ID NO: 2235377 - DNA, 25 bp, Homo sapien
tgccgagttctacccttcagtaaag

SEQ ID NO: 2235378 - DNA, 25 bp, Homo sapien
gagttggtcgtacaaaaccctatca

SEQ ID NO: 2235379 - DNA, 25 bp, Homo sapien
tcaccatcttagcagggcagctctg

SEQ ID NO: 2235380 - DNA, 25 bp, Homo sapien
gagtatagctatgttgggccttcac

SEQ ID NO: 2235381 - DNA, 25 bp, Homo sapien
gtaaaagttcaatctcacatgccct

SEQ ID NO: 2235382 - DNA, 25 bp, Homo sapien
acttgatagcacctaaaatcctctg

SEQ ID NO: 2235383 - DNA, 25 bp, Homo sapien
gaatagggacactgtttcaatcatc

SEQ ID NO: 2235384 - DNA, 25 bp, Homo sapien
gaatcctattataagcatcctccag

SEQ ID NO: 2235385 - DNA, 25 bp, Homo sapien
catcctccagtgtgcaaatgtttaa

SEQ ID NO: 2235386 - DNA, 25 bp, Homo sapien
cctgagtgttcagtacaaggcatta

SEQ ID NO: 2235387 - DNA, 25 bp, Homo sapien
tacttcatcgatagcagaaaacatc

SEQ ID NO: 2235388 - DNA, 25 bp, Homo sapien
tatatatatgtctaaccaagaggct

SEQ ID NO: 2235389 - DNA, 25 bp, Homo sapien
cactgcagcgaaaccttatacatag

SEQ ID NO: 2235390 - DNA, 25 bp, Homo sapien
gaactcctatgtcagtgtatatata

SEQ ID NO: 2235391 - DNA, 25 bp, Homo sapien
taataactcaatggtattccacagt

SEQ ID NO: 2235392 - DNA, 25 bp, Homo sapien
aacaggagtcttacatgtcttacac

SEQ ID NO: 2235393 - DNA, 25 bp, Homo sapien
ccccacctaaatggcagagagtgtt

SEQ ID NO: 2235394 - DNA, 25 bp, Homo sapien
tgaccgatatgctcaatggcagtac

SEQ ID NO: 2235395 - DNA, 25 bp, Homo sapien
tgctgtattacaccttccatggatt

SEQ ID NO: 2235396 - DNA, 25 bp, Homo sapien
gcgacggcatccctcaaattcgaga

SEQ ID NO: 2235397 - DNA, 25 bp, Homo sapien
aagcaaggaagatatcggaagcgac

SEQ ID NO: 2235398 - DNA, 25 bp, Homo sapien
ggctccctagccctcagttacagag

SEQ ID NO: 2235399 - DNA, 25 bp, Homo sapien
tctagggctagagaggctccctagc

SEQ ID NO: 2235400 - DNA, 25 bp, Homo sapien
gtggcaaagcctagtaccccgatca

SEQ ID NO: 2235401 - DNA, 25 bp, Homo sapien
ttcatggtctcctccggaaagggcc

SEQ ID NO: 2235402 - DNA, 25 bp, Homo sapien
gaggtctagcaagcacttcatggtc

SEQ ID NO: 2235403 - DNA, 25 bp, Homo sapien
taccccgatcaggaagatgacttct

SEQ ID NO: 2235404 - DNA, 25 bp, Homo sapien
ccggctcaggtgaggtacgccagtc

SEQ ID NO: 2235405 - DNA, 25 bp, Homo sapien
gatacagtgacctcgggaatcttcc

SEQ ID NO: 2235406 - DNA, 25 bp, Homo sapien
aggaaaaaagcgagccgactccagg

SEQ ID NO: 2235407 - DNA, 25 bp, Homo sapien
gagcggatagatagccctggctcaa

SEQ ID NO: 2235408 - DNA, 25 bp, Homo sapien
aaggaaccgcgtgcccgctagcgct

SEQ ID NO: 2235409 - DNA, 25 bp, Homo sapien
cggaggccagagaaaaagccgcagc

SEQ ID NO: 2235410 - DNA, 25 bp, Homo sapien
gcactcggaaagctcgcaaaaagga

SEQ ID NO: 2235411 - DNA, 25 bp, Homo sapien
ggactcagcgcgagcccggaaaaga

SEQ ID NO: 2235412 - DNA, 25 bp, Homo sapien
tgcggcttgcttcgcaggactccac

SEQ ID NO: 2235413 - DNA, 25 bp, Homo sapien
cggcttgcttcgcaggactccaccc

SEQ ID NO: 2235414 - DNA, 25 bp, Homo sapien
ggcttgcttcgcaggactccacccc

SEQ ID NO: 2235415 - DNA, 25 bp, Homo sapien
gcggcttgcttcgcaggactccacc

SEQ ID NO: 2235416 - DNA, 25 bp, Homo sapien
caattgagataaattactagctttg

SEQ ID NO: 2235417 - DNA, 25 bp, Homo sapien
aatcaattgagataaattactagct

SEQ ID NO: 2235418 - DNA, 25 bp, Homo sapien
ataaattactagctttggaccagcc

SEQ ID NO: 2235419 - DNA, 25 bp, Homo sapien
ttgagataaattactagctttggac

SEQ ID NO: 2235420 - DNA, 25 bp, Homo sapien
tagtttccactgagagtcctttgag

SEQ ID NO: 2235421 - DNA, 25 bp, Homo sapien
gagagtcctttgagcaatcttgtct

SEQ ID NO: 2235422 - DNA, 25 bp, Homo sapien
cacactattatagtttccactgaga

SEQ ID NO: 2235423 - DNA, 25 bp, Homo sapien
ccaaagtctaaagacacactattat

SEQ ID NO: 2235424 - DNA, 25 bp, Homo sapien
tggacctcatatgcagcagctgctg

SEQ ID NO: 2235425 - DNA, 25 bp, Homo sapien
tccaacgttgggtgactgtcctcca

SEQ ID NO: 2235426 - DNA, 25 bp, Homo sapien
tgtcctccaataagtccaccatgga

SEQ ID NO: 2235427 - DNA, 25 bp, Homo sapien
gctgtttggacccagccaaaggtgt

SEQ ID NO: 2235428 - DNA, 25 bp, Homo sapien
gaaaagaaacgagcggcttcctgcc

SEQ ID NO: 2235429 - DNA, 25 bp, Homo sapien
gaacagtatgaagaacagcgggtgg

SEQ ID NO: 2235430 - DNA, 25 bp, Homo sapien
tcctacgggctgacgctgaaattgc

SEQ ID NO: 2235431 - DNA, 25 bp, Homo sapien
tcctgcccatatctcctcctacggg

SEQ ID NO: 2235432 - DNA, 25 bp, Homo sapien
acagcccagtagaggcctaaggccc

SEQ ID NO: 2235433 - DNA, 25 bp, Homo sapien
ccagtagaggcctaaggccccgcta

SEQ ID NO: 2235434 - DNA, 25 bp, Homo sapien
aggcctaaggccccgctatggagtg

SEQ ID NO: 2235435 - DNA, 25 bp, Homo sapien
gtagaggcctaaggccccgctatgg

SEQ ID NO: 2235436 - DNA, 25 bp, Homo sapien
tggaaatgcttggcaatacttgggc

SEQ ID NO: 2235437 - DNA, 25 bp, Homo sapien
ggaaatgcttggcaatacttgggct

SEQ ID NO: 2235438 - DNA, 25 bp, Homo sapien
gaaatgcttggcaatacttgggctg

SEQ ID NO: 2235439 - DNA, 25 bp, Homo sapien
gaagcaccgagcatcatgaaagccc

SEQ ID NO: 2235440 - DNA, 25 bp, Homo sapien
gagaagcaccgagcatcatgaaagc

SEQ ID NO: 2235441 - DNA, 25 bp, Homo sapien
agaagcaccgagcatcatgaaagcc

SEQ ID NO: 2235442 - DNA, 25 bp, Homo sapien
agcaccgagcatcatgaaagccctg

SEQ ID NO: 2235443 - DNA, 25 bp, Homo sapien
gtcttgtgcaccagaggttcttaac

SEQ ID NO: 2235444 - DNA, 25 bp, Homo sapien
ctgtccagtcttgtgcaccagaggt

SEQ ID NO: 2235445 - DNA, 25 bp, Homo sapien
aacctggggctttggcggatccttg

SEQ ID NO: 2235446 - DNA, 25 bp, Homo sapien
tgaggttacatgcagaactctgtgg

SEQ ID NO: 2235447 - DNA, 25 bp, Homo sapien
tttggatgtggtcagggcttttgct

SEQ ID NO: 2235448 - DNA, 25 bp, Homo sapien
gcttttccggtgattacaaattcca

SEQ ID NO: 2235449 - DNA, 25 bp, Homo sapien
tccagaagcctattgtaccagaaag

SEQ ID NO: 2235450 - DNA, 25 bp, Homo sapien
gctaagatgacaaccttgaaaaacc

SEQ ID NO: 2235451 - DNA, 25 bp, Homo sapien
tagtttgttcaccacttagcctaac

SEQ ID NO: 2235452 - DNA, 25 bp, Homo sapien
tcccaggttgggtgtcgagttgatc

SEQ ID NO: 2235453 - DNA, 25 bp, Homo sapien
tggctgtaagctctgaagatcctcc

SEQ ID NO: 2235454 - DNA, 25 bp, Homo sapien
ttagcctaacaatggccacaactgg

SEQ ID NO: 2235455 - DNA, 25 bp, Homo sapien
ctctgctggtgagagccccaaagct

SEQ ID NO: 2235456 - DNA, 25 bp, Homo sapien
ctgagccagcactcaagggcctctt

SEQ ID NO: 2235457 - DNA, 25 bp, Homo sapien
agccagcactcaagggcctcttgga

SEQ ID NO: 2235458 - DNA, 25 bp, Homo sapien
ttctctgctggtgagagccccaaag

SEQ ID NO: 2235459 - DNA, 25 bp, Homo sapien
aagtctgcaagtttacattgcaagg

SEQ ID NO: 2235460 - DNA, 25 bp, Homo sapien
caaggattgatctttcaagcttgca

SEQ ID NO: 2235461 - DNA, 25 bp, Homo sapien
gcaattcccagatgtgcccatagaa

SEQ ID NO: 2235462 - DNA, 25 bp, Homo sapien
gatgtaatatttgctcaccacaaag

SEQ ID NO: 2235463 - DNA, 25 bp, Homo sapien
agctaatggcattcccgtgtctctg

SEQ ID NO: 2235464 - DNA, 25 bp, Homo sapien
tacgtgtttgctcttctggccgcac

SEQ ID NO: 2235465 - DNA, 25 bp, Homo sapien
catttggatacttgggaactttgca

SEQ ID NO: 2235466 - DNA, 25 bp, Homo sapien
gcatttcttgaatcagtggcacacc

SEQ ID NO: 2235467 - DNA, 25 bp, Homo sapien
cacccttcgaagatagcctttgtca

SEQ ID NO: 2235468 - DNA, 25 bp, Homo sapien
cgaagatagcctttgtcactgcttg

SEQ ID NO: 2235469 - DNA, 25 bp, Homo sapien
gatagcctttgtcactgcttgccct

SEQ ID NO: 2235470 - DNA, 25 bp, Homo sapien
tcttcttcacccttcgaagatagcc

SEQ ID NO: 2235471 - DNA, 25 bp, Homo sapien
ttctgcttcacttcagttgtcttaa

SEQ ID NO: 2235472 - DNA, 25 bp, Homo sapien
gtccctctgttctggatttgcctcc

SEQ ID NO: 2235473 - DNA, 25 bp, Homo sapien
cttcagttgtcttaattccattcac

SEQ ID NO: 2235474 - DNA, 25 bp, Homo sapien
gggggcattgggtccctctgttctg

SEQ ID NO: 2235475 - DNA, 25 bp, Homo sapien
ttctctgagccccggttgacacagc

SEQ ID NO: 2235476 - DNA, 25 bp, Homo sapien
ggttctctgagccccggttgacaca

SEQ ID NO: 2235477 - DNA, 25 bp, Homo sapien
cttggttctctgagccccggttgac

SEQ ID NO: 2235478 - DNA, 25 bp, Homo sapien
gctctctacgctcccctctgtctcc

SEQ ID NO: 2235479 - DNA, 25 bp, Homo sapien
ccctattgtagccatgtccttccat

SEQ ID NO: 2235480 - DNA, 25 bp, Homo sapien
gccctattgtagccatgtccttcca

SEQ ID NO: 2235481 - DNA, 25 bp, Homo sapien
taggcagcgataataatggagtcct

SEQ ID NO: 2235482 - DNA, 25 bp, Homo sapien
ctaggcagcgataataatggagtcc

SEQ ID NO: 2235483 - DNA, 25 bp, Homo sapien
gatgcctgtgaagaggattttcaga

SEQ ID NO: 2235484 - DNA, 25 bp, Homo sapien
tcttgagatgcctgtgaagaggatt

SEQ ID NO: 2235485 - DNA, 25 bp, Homo sapien
gaaaaggctcttgagatgcctgtga

SEQ ID NO: 2235486 - DNA, 25 bp, Homo sapien
ttggtgaaaaggctcttgagatgcc

SEQ ID NO: 2235487 - DNA, 25 bp, Homo sapien
tagtgcttaatgagtgccatcttgg

SEQ ID NO: 2235488 - DNA, 25 bp, Homo sapien
ccaaaagcaaagagtcaagggctcc

SEQ ID NO: 2235489 - DNA, 25 bp, Homo sapien
gggctccagcgtgatattttaaaag

SEQ ID NO: 2235490 - DNA, 25 bp, Homo sapien
tggcgccatctagtgcttaatgagt

SEQ ID NO: 2235491 - DNA, 25 bp, Homo sapien
tctggattaccaatttcatctgaac

SEQ ID NO: 2235492 - DNA, 25 bp, Homo sapien
caaccagggccagcataaaaaacaa

SEQ ID NO: 2235493 - DNA, 25 bp, Homo sapien
taggagtctggattaccaatttcat

SEQ ID NO: 2235494 - DNA, 25 bp, Homo sapien
ttttgctaaatgcaaccagggccag

SEQ ID NO: 2235495 - DNA, 25 bp, Homo sapien
ccagtgtgcgtaaatgactggcagc

SEQ ID NO: 2235496 - DNA, 25 bp, Homo sapien
cattcagggataacttgagtgtcag

SEQ ID NO: 2235497 - DNA, 25 bp, Homo sapien
agaaaagggctcaggcttcaaaatc

SEQ ID NO: 2235498 - DNA, 25 bp, Homo sapien
ctgtgcccattccagtgtgcgtaaa

SEQ ID NO: 2235499 - DNA, 25 bp, Homo sapien
cagatatatttcgtgagattttcaa

SEQ ID NO: 2235500 - DNA, 25 bp, Homo sapien
ccagatatatttcgtgagattttca

SEQ ID NO: 2235501 - DNA, 25 bp, Homo sapien
gatatatttcgtgagattttcaaaa

SEQ ID NO: 2235502 - DNA, 25 bp, Homo sapien
agatatatttcgtgagattttcaaa

SEQ ID NO: 2235503 - DNA, 25 bp, Homo sapien
cttggcaggtcccattgccttcagc

SEQ ID NO: 2235504 - DNA, 25 bp, Homo sapien
ccttcagccattgaagactgcagct

SEQ ID NO: 2235505 - DNA, 25 bp, Homo sapien
agagtagaccgaaggacctgaggaa

SEQ ID NO: 2235506 - DNA, 25 bp, Homo sapien
tgaggaaacctgaatggtagtcttg

SEQ ID NO: 2235507 - DNA, 25 bp, Homo sapien
gcctttggcataatggccatactcc

SEQ ID NO: 2235508 - DNA, 25 bp, Homo sapien
ctttggcataatggccatactccac

SEQ ID NO: 2235509 - DNA, 25 bp, Homo sapien
tggcataatggccatactccactgc

SEQ ID NO: 2235510 - DNA, 25 bp, Homo sapien
gcataatggccatactccactgcca

SEQ ID NO: 2235511 - DNA, 25 bp, Homo sapien
tgactttctctcaacggatctgatg

SEQ ID NO: 2235512 - DNA, 25 bp, Homo sapien
aagctccaggccagttgtcaaggct

SEQ ID NO: 2235513 - DNA, 25 bp, Homo sapien
atctgatgtgcaagggcatctttcc

SEQ ID NO: 2235514 - DNA, 25 bp, Homo sapien
ggtccaagcaccagcattttccctg

SEQ ID NO: 2235515 - DNA, 25 bp, Homo sapien
actttcaggctcccagaacctaggc

SEQ ID NO: 2235516 - DNA, 25 bp, Homo sapien
ctttcaggctcccagaacctaggca

SEQ ID NO: 2235517 - DNA, 25 bp, Homo sapien
ttcaggctcccagaacctaggcagg

SEQ ID NO: 2235518 - DNA, 25 bp, Homo sapien
tttcaggctcccagaacctaggcag

SEQ ID NO: 2235519 - DNA, 25 bp, Homo sapien
ggaaccactgcatcatgtcccggta

SEQ ID NO: 2235520 - DNA, 25 bp, Homo sapien
tgtcccggtatagctaccagagtct

SEQ ID NO: 2235521 - DNA, 25 bp, Homo sapien
aaccctgcctcgttggtggccactg

SEQ ID NO: 2235522 - DNA, 25 bp, Homo sapien
ttgcttcctgtactgtggtcaaggg

SEQ ID NO: 2235523 - DNA, 25 bp, Homo sapien
tgtgtttactcagctctttcctggc

SEQ ID NO: 2235524 - DNA, 25 bp, Homo sapien
cagggcagcgcttgcacatctgtca

SEQ ID NO: 2235525 - DNA, 25 bp, Homo sapien
gttcatgggcatcaaggcacttgga

SEQ ID NO: 2235526 - DNA, 25 bp, Homo sapien
cagttaatctgaaggcctggcgagg

SEQ ID NO: 2235527 - DNA, 25 bp, Homo sapien
aattgtctttgccaatcgaccagct

SEQ ID NO: 2235528 - DNA, 25 bp, Homo sapien
tgccagtattggtataaagtcaggg

SEQ ID NO: 2235529 - DNA, 25 bp, Homo sapien
gccaatcgaccagctgtgtttgcag

SEQ ID NO: 2235530 - DNA, 25 bp, Homo sapien
tcatgtccatcacatgccagtattg

SEQ ID NO: 2235531 - DNA, 25 bp, Homo sapien
gcgctttcacacttggtcccttggg

SEQ ID NO: 2235532 - DNA, 25 bp, Homo sapien
tattgtcttggtcatcggagtcagg

SEQ ID NO: 2235533 - DNA, 25 bp, Homo sapien
aagggaccgcctctacatttggatc

SEQ ID NO: 2235534 - DNA, 25 bp, Homo sapien
tgcaccctgcaggaatgttgctcag

SEQ ID NO: 2235535 - DNA, 25 bp, Homo sapien
tagagccagtatgggttgcttgcag

SEQ ID NO: 2235536 - DNA, 25 bp, Homo sapien
tttgccctggacagacagttcacag

SEQ ID NO: 2235537 - DNA, 25 bp, Homo sapien
tcactgagcctgcatgtagagccag

SEQ ID NO: 2235538 - DNA, 25 bp, Homo sapien
gctgcggatataactgaggccatca

SEQ ID NO: 2235539 - DNA, 25 bp, Homo sapien
tggtcctaggtcaaagcccttggga

SEQ ID NO: 2235540 - DNA, 25 bp, Homo sapien
catacagtcagtgctacacaaatgt

SEQ ID NO: 2235541 - DNA, 25 bp, Homo sapien
gctgcttggcatacagtcagtgcta

SEQ ID NO: 2235542 - DNA, 25 bp, Homo sapien
ggatgctcatcacttgtgggctcag

SEQ ID NO: 2235543 - DNA, 25 bp, Homo sapien
tataagcttcatctagtactacctc

SEQ ID NO: 2235544 - DNA, 25 bp, Homo sapien
tagtactacctcaaatacagtaaag

SEQ ID NO: 2235545 - DNA, 25 bp, Homo sapien
aagtggatgacagcactcgataaac

SEQ ID NO: 2235546 - DNA, 25 bp, Homo sapien
cactcgataaactgtaaagctgaat

SEQ ID NO: 2235547 - DNA, 25 bp, Homo sapien
aagagatggctgttcattattctgg

SEQ ID NO: 2235548 - DNA, 25 bp, Homo sapien
tgaatactcagtaggtatttcttga

SEQ ID NO: 2235549 - DNA, 25 bp, Homo sapien
gagtgtagaacataactgaatactc

SEQ ID NO: 2235550 - DNA, 25 bp, Homo sapien
gcgctgcttacggaatttagacata

SEQ ID NO: 2235551 - DNA, 25 bp, Homo sapien
aatttctcctcataatgtggcaaaa

SEQ ID NO: 2235552 - DNA, 25 bp, Homo sapien
ccaaactctgggccatttgcatgtg

SEQ ID NO: 2235553 - DNA, 25 bp, Homo sapien
tatagagggactcttattggagtca

SEQ ID NO: 2235554 - DNA, 25 bp, Homo sapien
gcaaaacacgttttggtgctaggta

SEQ ID NO: 2235555 - DNA, 25 bp, Homo sapien
taccaatatgtccagtcctttatgg

SEQ ID NO: 2235556 - DNA, 25 bp, Homo sapien
aatatgtccagtcctttatggctct

SEQ ID NO: 2235557 - DNA, 25 bp, Homo sapien
ccaatatgtccagtcctttatggct

SEQ ID NO: 2235558 - DNA, 25 bp, Homo sapien
tgtccagtcctttatggctctccat

SEQ ID NO: 2235559 - DNA, 25 bp, Homo sapien
atcaatttatagatcttgtttatcc

SEQ ID NO: 2235560 - DNA, 25 bp, Homo sapien
ctttttttattgatccttggtatgg

SEQ ID NO: 2235561 - DNA, 25 bp, Homo sapien
tcaatttatagatcttgtttatcct

SEQ ID NO: 2235562 - DNA, 25 bp, Homo sapien
tttttattgatccttggtatggatt

SEQ ID NO: 2235563 - DNA, 25 bp, Homo sapien
caggaatgagccaacacggtggctg

SEQ ID NO: 2235564 - DNA, 25 bp, Homo sapien
tctcttgccagtgatcataacataa

SEQ ID NO: 2235565 - DNA, 25 bp, Homo sapien
ggctgatacacaccatctttaatgg

SEQ ID NO: 2235566 - DNA, 25 bp, Homo sapien
gctaagattacttcgtggcagagtc

SEQ ID NO: 2235567 - DNA, 25 bp, Homo sapien
cacagcaaccttgggcatcgttttc

SEQ ID NO: 2235568 - DNA, 25 bp, Homo sapien
gaaggcctcttatccttcctgttct

SEQ ID NO: 2235569 - DNA, 25 bp, Homo sapien
attccagcctggcagtcttctgcct

SEQ ID NO: 2235570 - DNA, 25 bp, Homo sapien
tctctagtatctccaactcctagaa

SEQ ID NO: 2235571 - DNA, 25 bp, Homo sapien
tgtagcagttgaagccgttgattgg

SEQ ID NO: 2235572 - DNA, 25 bp, Homo sapien
ccccttttctaatgccgcccaagct

SEQ ID NO: 2235573 - DNA, 25 bp, Homo sapien
cccttttctaatgccgcccaagctg

SEQ ID NO: 2235574 - DNA, 25 bp, Homo sapien
cagttgaagccgttgattgggactg

SEQ ID NO: 2235575 - DNA, 25 bp, Homo sapien
cctcatggctagcagggagaatccc

SEQ ID NO: 2235576 - DNA, 25 bp, Homo sapien
ttgcagcgggctgggtgataaacca

SEQ ID NO: 2235577 - DNA, 25 bp, Homo sapien
gtctggaccaaacagcccctcatgg

SEQ ID NO: 2235578 - DNA, 25 bp, Homo sapien
agaagcaggagctacgagccatgtc

SEQ ID NO: 2235579 - DNA, 25 bp, Homo sapien
caaatcagctagagaatgcctaggc

SEQ ID NO: 2235580 - DNA, 25 bp, Homo sapien
tttgcaaatcagctagagaatgcct

SEQ ID NO: 2235581 - DNA, 25 bp, Homo sapien
tagagaatgcctaggcttcagtttc

SEQ ID NO: 2235582 - DNA, 25 bp, Homo sapien
tcagctagagaatgcctaggcttca

SEQ ID NO: 2235583 - DNA, 25 bp, Homo sapien
catttcccttggtgagtgtaaagta

SEQ ID NO: 2235584 - DNA, 25 bp, Homo sapien
taaagtaatagttgagcagcatgtg

SEQ ID NO: 2235585 - DNA, 25 bp, Homo sapien
ctgggaaattattttccgtgtggat

SEQ ID NO: 2235586 - DNA, 25 bp, Homo sapien
aagagccagagccaacgtctgtgtc

SEQ ID NO: 2235587 - DNA, 25 bp, Homo sapien
cagactctgtccccttcactggcag

SEQ ID NO: 2235588 - DNA, 25 bp, Homo sapien
gactctgtccccttcactggcagct

SEQ ID NO: 2235589 - DNA, 25 bp, Homo sapien
tggccagactctgtccccttcactg

SEQ ID NO: 2235590 - DNA, 25 bp, Homo sapien
gccagactctgtccccttcactggc

SEQ ID NO: 2235591 - DNA, 25 bp, Homo sapien
ccctgaggaagcaagtcgtgacttg

SEQ ID NO: 2235592 - DNA, 25 bp, Homo sapien
cactctgcttgtcggtgctttaaca

SEQ ID NO: 2235593 - DNA, 25 bp, Homo sapien
tgataaaatcatgggagagggcagt

SEQ ID NO: 2235594 - DNA, 25 bp, Homo sapien
tgacttgacttggagaacacccagt

SEQ ID NO: 2235595 - DNA, 25 bp, Homo sapien
tcctcctcgtttctgtggcatggca

SEQ ID NO: 2235596 - DNA, 25 bp, Homo sapien
gctctgtctacagcttagtacccca

SEQ ID NO: 2235597 - DNA, 25 bp, Homo sapien
ggtgtgactgtgtaggccttctcct

SEQ ID NO: 2235598 - DNA, 25 bp, Homo sapien
gttgctcgagccttccccatgttga

SEQ ID NO: 2235599 - DNA, 25 bp, Homo sapien
tatcttgggccaagccaacgtggag

SEQ ID NO: 2235600 - DNA, 25 bp, Homo sapien
gtggcatccactccaaatagcagag

SEQ ID NO: 2235601 - DNA, 25 bp, Homo sapien
caggtttccgtgtgccatttgccag

SEQ ID NO: 2235602 - DNA, 25 bp, Homo sapien
gagaagcaacccaaccagactcttg

SEQ ID NO: 2235603 - DNA, 25 bp, Homo sapien
tgatgctgttagacaagacactgac

SEQ ID NO: 2235604 - DNA, 25 bp, Homo sapien
cagagagcaagttgtcagcaggtct

SEQ ID NO: 2235605 - DNA, 25 bp, Homo sapien
ttgtagatgttgacccagagtcctc

SEQ ID NO: 2235606 - DNA, 25 bp, Homo sapien
gacactgacgctgattatggagggt

SEQ ID NO: 2235607 - DNA, 25 bp, Homo sapien
tgtcaggagcttagcaaatgcctct

SEQ ID NO: 2235608 - DNA, 25 bp, Homo sapien
gattgctatgcactgggcagacccg

SEQ ID NO: 2235609 - DNA, 25 bp, Homo sapien
cagcaggcttaggatttttgtcagg

SEQ ID NO: 2235610 - DNA, 25 bp, Homo sapien
gctggttcttgcgtgctctgtgccc

SEQ ID NO: 2235611 - DNA, 25 bp, Homo sapien
acacattgcctacttctgccaggga

SEQ ID NO: 2235612 - DNA, 25 bp, Homo sapien
gtcggaccatgaacaagatagcctt

SEQ ID NO: 2235613 - DNA, 25 bp, Homo sapien
gcaggccatttgctcttagcagagg

SEQ ID NO: 2235614 - DNA, 25 bp, Homo sapien
agctgcgtggctggttgcccttgaa

SEQ ID NO: 2235615 - DNA, 25 bp, Homo sapien
tttccaaggctacctgctgagcagc

SEQ ID NO: 2235616 - DNA, 25 bp, Homo sapien
gccctttttacacaggacagaggcc

SEQ ID NO: 2235617 - DNA, 25 bp, Homo sapien
ggaagcagacctgcttttccaaggc

SEQ ID NO: 2235618 - DNA, 25 bp, Homo sapien
agcccatgatgactgtgattggccc

SEQ ID NO: 2235619 - DNA, 25 bp, Homo sapien
gagaggagaggtagccagataggga

SEQ ID NO: 2235620 - DNA, 25 bp, Homo sapien
ggagaggagaggtagccagataggg

SEQ ID NO: 2235621 - DNA, 25 bp, Homo sapien
ggtgtctgcatggcaaaagccccac

SEQ ID NO: 2235622 - DNA, 25 bp, Homo sapien
agcccatggaatgtgtcatccaccc

SEQ ID NO: 2235623 - DNA, 25 bp, Homo sapien
ctctgggcaaggtgtccaactgctt

SEQ ID NO: 2235624 - DNA, 25 bp, Homo sapien
cccaccagcccatggaatgtgtcat

SEQ ID NO: 2235625 - DNA, 25 bp, Homo sapien
caagcaaggtgccatgcctctggag

SEQ ID NO: 2235626 - DNA, 25 bp, Homo sapien
tattgatggatcatgttgagcctga

SEQ ID NO: 2235627 - DNA, 25 bp, Homo sapien
taactgggcatgttgaggctccagc

SEQ ID NO: 2235628 - DNA, 25 bp, Homo sapien
tcatcaaatgatggcttcccaaaag

SEQ ID NO: 2235629 - DNA, 25 bp, Homo sapien
ctctgtcctatactcagaaaatggg

SEQ ID NO: 2235630 - DNA, 25 bp, Homo sapien
ctatactcagaaaatgggcaagcct

SEQ ID NO: 2235631 - DNA, 25 bp, Homo sapien
ctgggtgaccacatcttgagcattt

SEQ ID NO: 2235632 - DNA, 25 bp, Homo sapien
ctctgggtgaccacatcttgagcat

SEQ ID NO: 2235633 - DNA, 25 bp, Homo sapien
taaatcgagaggcacacaacgggtt

SEQ ID NO: 2235634 - DNA, 25 bp, Homo sapien
tacaaacttccggtgtgctgggcac

SEQ ID NO: 2235635 - DNA, 25 bp, Homo sapien
tttagagtccgcatgaccagtcacg

SEQ ID NO: 2235636 - DNA, 25 bp, Homo sapien
gagtgaagacccaactactaggctg

SEQ ID NO: 2235637 - DNA, 25 bp, Homo sapien
tattcagcatagctcagggtcatct

SEQ ID NO: 2235638 - DNA, 25 bp, Homo sapien
gatgctggcgatgagcaaggtattc

SEQ ID NO: 2235639 - DNA, 25 bp, Homo sapien
caggaataatggttgtatggcggaa

SEQ ID NO: 2235640 - DNA, 25 bp, Homo sapien
gatgagcaaggtattcagcatagct

SEQ ID NO: 2235641 - DNA, 25 bp, Homo sapien
tcctcaataaggagtctatggtctg

SEQ ID NO: 2235642 - DNA, 25 bp, Homo sapien
tttatggttttcctgaattcattag

SEQ ID NO: 2235643 - DNA, 25 bp, Homo sapien
tctatggtctgtatatggtcccatc

SEQ ID NO: 2235644 - DNA, 25 bp, Homo sapien
tagtaatcggagctttgtatcctcc

SEQ ID NO: 2235645 - DNA, 25 bp, Homo sapien
cagcaggatgagtaatggcaaccac

SEQ ID NO: 2235646 - DNA, 25 bp, Homo sapien
ttcgcaatcctctgatcttagtggg

SEQ ID NO: 2235647 - DNA, 25 bp, Homo sapien
tctgattaggaagtgtagaccaagc

SEQ ID NO: 2235648 - DNA, 25 bp, Homo sapien
gtatactagtatctgaggccctcta

SEQ ID NO: 2235649 - DNA, 25 bp, Homo sapien
ttgcaacctccggtaggtaggtggc

SEQ ID NO: 2235650 - DNA, 25 bp, Homo sapien
ctattctaatgccatgtacacccac

SEQ ID NO: 2235651 - DNA, 25 bp, Homo sapien
aggtggcggtgcgttttgatccttt

SEQ ID NO: 2235652 - DNA, 25 bp, Homo sapien
cttgctcctttgcaacctccggtag

SEQ ID NO: 2235653 - DNA, 25 bp, Homo sapien
actccaaatggcaaccctgtaccat

SEQ ID NO: 2235654 - DNA, 25 bp, Homo sapien
tggagtcatacggaatgtggctttc

SEQ ID NO: 2235655 - DNA, 25 bp, Homo sapien
cattaagtagtcacttcccatttac

SEQ ID NO: 2235656 - DNA, 25 bp, Homo sapien
ttaacagtagttattctcagaatgg

SEQ ID NO: 2235657 - DNA, 25 bp, Homo sapien
tataatcactcccatccccactact

SEQ ID NO: 2235658 - DNA, 25 bp, Homo sapien
tcccatataatcactcccatcccca

SEQ ID NO: 2235659 - DNA, 25 bp, Homo sapien
tcatcccccttggatctcaggcttt

SEQ ID NO: 2235660 - DNA, 25 bp, Homo sapien
atcccccttggatctcaggcttttc

SEQ ID NO: 2235661 - DNA, 25 bp, Homo sapien
ctcccagtccaaataatcacagaca

SEQ ID NO: 2235662 - DNA, 25 bp, Homo sapien
catcttcaaagttagtgagcagaga

SEQ ID NO: 2235663 - DNA, 25 bp, Homo sapien
agacatcttcaaagttagtgagcag

SEQ ID NO: 2235664 - DNA, 25 bp, Homo sapien
gtggcagctcatcccttgtcattgg

SEQ ID NO: 2235665 - DNA, 25 bp, Homo sapien
ctctgattgcctactatattaatgg

SEQ ID NO: 2235666 - DNA, 25 bp, Homo sapien
gattgcctactatattaatggcact

SEQ ID NO: 2235667 - DNA, 25 bp, Homo sapien
atattaatggcactactggtattca

SEQ ID NO: 2235668 - DNA, 25 bp, Homo sapien
ctgattgcctactatattaatggca

SEQ ID NO: 2235669 - DNA, 25 bp, Homo sapien
cataagtgaagatcaggctacagtg

SEQ ID NO: 2235670 - DNA, 25 bp, Homo sapien
cagtgcttttctcatgacatggagc

SEQ ID NO: 2235671 - DNA, 25 bp, Homo sapien
tgcttttctcatgacatggagcctt

SEQ ID NO: 2235672 - DNA, 25 bp, Homo sapien
agatcaggctacagtgcttttctca

SEQ ID NO: 2235673 - DNA, 25 bp, Homo sapien
cccttcagaactgcaggacatgtcc

SEQ ID NO: 2235674 - DNA, 25 bp, Homo sapien
gggattggctgacaatgtcgtctgt

SEQ ID NO: 2235675 - DNA, 25 bp, Homo sapien
tgacaatgtcgtctgtcatcaccag

SEQ ID NO: 2235676 - DNA, 25 bp, Homo sapien
ggacatgtcctcactaccacatggg

SEQ ID NO: 2235677 - DNA, 25 bp, Homo sapien
ttttgtatgcgctcctcttttctac

SEQ ID NO: 2235678 - DNA, 25 bp, Homo sapien
cttttgtatgcgctcctcttttcta

SEQ ID NO: 2235679 - DNA, 25 bp, Homo sapien
gcagctctgagttattccagttagg

SEQ ID NO: 2235680 - DNA, 25 bp, Homo sapien
tccatactgggataaaactaagcat

SEQ ID NO: 2235681 - DNA, 25 bp, Homo sapien
actactcaatgctaggctattacag

SEQ ID NO: 2235682 - DNA, 25 bp, Homo sapien
taatgtgtacaatagcaaccgccct

SEQ ID NO: 2235683 - DNA, 25 bp, Homo sapien
tcagccaactccagaagtctaaggt

SEQ ID NO: 2235684 - DNA, 25 bp, Homo sapien
cactaaaagatctagcaccaggtct

SEQ ID NO: 2235685 - DNA, 25 bp, Homo sapien
tagcacttcgactaaaactatgtgg

SEQ ID NO: 2235686 - DNA, 25 bp, Homo sapien
tctatcttggaatctctgggctcta

SEQ ID NO: 2235687 - DNA, 25 bp, Homo sapien
tgtttgtgccattttggctaatggg

SEQ ID NO: 2235688 - DNA, 25 bp, Homo sapien
tcagatataaggattgacaccaact

SEQ ID NO: 2235689 - DNA, 25 bp, Homo sapien
gttcagtcatgccaatgggcgttgt

SEQ ID NO: 2235690 - DNA, 25 bp, Homo sapien
gacaccaactaaggagagttcagtc

SEQ ID NO: 2235691 - DNA, 25 bp, Homo sapien
cagaggcctgctcaatggcagtgtc

SEQ ID NO: 2235692 - DNA, 25 bp, Homo sapien
gttttctataccagaggcctgctca

SEQ ID NO: 2235693 - DNA, 25 bp, Homo sapien
tcacaactcccaaatgtaccatgtt

SEQ ID NO: 2235694 - DNA, 25 bp, Homo sapien
gagctatattcacaactcccaaatg

SEQ ID NO: 2235695 - DNA, 25 bp, Homo sapien
ggcagaaaaagtacctatgcatcca

SEQ ID NO: 2235696 - DNA, 25 bp, Homo sapien
aatcttccatgttacaaacagtggg

SEQ ID NO: 2235697 - DNA, 25 bp, Homo sapien
gcatccacgtaatcttttgtctcga

SEQ ID NO: 2235698 - DNA, 25 bp, Homo sapien
taagtgtgtactccctgagtcctga

SEQ ID NO: 2235699 - DNA, 25 bp, Homo sapien
actaaagtatgacccttctggagtc

SEQ ID NO: 2235700 - DNA, 25 bp, Homo sapien
tccagttgcaagtaggttaatctgc

SEQ ID NO: 2235701 - DNA, 25 bp, Homo sapien
tcacattgtattccctcttgaaatg

SEQ ID NO: 2235702 - DNA, 25 bp, Homo sapien
tctataaccatcatttctggttctg

SEQ ID NO: 2235703 - DNA, 25 bp, Homo sapien
ggtagagctcacttcgtttgttccc

SEQ ID NO: 2235704 - DNA, 25 bp, Homo sapien
caatgctgtggtctagaaactgcct

SEQ ID NO: 2235705 - DNA, 25 bp, Homo sapien
tcctgtgctgtctgttgcccgatgt

SEQ ID NO: 2235706 - DNA, 25 bp, Homo sapien
gcctcacagtgttgcccttgataca

SEQ ID NO: 2235707 - DNA, 25 bp, Homo sapien
ttatatatcaccagtgggaagctga

SEQ ID NO: 2235708 - DNA, 25 bp, Homo sapien
gaatggaatgtcttgtaggcattaa

SEQ ID NO: 2235709 - DNA, 25 bp, Homo sapien
cattgtgacaatcaattttttagta

SEQ ID NO: 2235710 - DNA, 25 bp, Homo sapien
aagaaacaggtactgctgtctagtt

SEQ ID NO: 2235711 - DNA, 25 bp, Homo sapien
gataagttcttccaatgatctagca

SEQ ID NO: 2235712 - DNA, 25 bp, Homo sapien
catgggataagatttagagataagt

SEQ ID NO: 2235713 - DNA, 25 bp, Homo sapien
tagagataagttcttccaatgatct

SEQ ID NO: 2235714 - DNA, 25 bp, Homo sapien
agaaggtccagggatcatgggataa

SEQ ID NO: 2235715 - DNA, 25 bp, Homo sapien
aaacaactttcaagacctgcaactt

SEQ ID NO: 2235716 - DNA, 25 bp, Homo sapien
tgccacacttagatgtaagtttttc

SEQ ID NO: 2235717 - DNA, 25 bp, Homo sapien
tcaagacctgcaacttgatcatatc

SEQ ID NO: 2235718 - DNA, 25 bp, Homo sapien
ccactgccacacttagatgtaagtt

SEQ ID NO: 2235719 - DNA, 25 bp, Homo sapien
gcagagaatctgttaccaccttgca

SEQ ID NO: 2235720 - DNA, 25 bp, Homo sapien
tgcagcaatccaagatctcactaga

SEQ ID NO: 2235721 - DNA, 25 bp, Homo sapien
tgtgggacccctaggctaacagcat

SEQ ID NO: 2235722 - DNA, 25 bp, Homo sapien
gatccactaacacctgaagcaaagc

SEQ ID NO: 2235723 - DNA, 25 bp, Homo sapien
caaggtgaactatataggctcttaa

SEQ ID NO: 2235724 - DNA, 25 bp, Homo sapien
gaatggcaaggtgaactatataggc

SEQ ID NO: 2235725 - DNA, 25 bp, Homo sapien
aagtatatcgaatggcaaggtgaac

SEQ ID NO: 2235726 - DNA, 25 bp, Homo sapien
gatcacagtgaaagtatatcgaatg

SEQ ID NO: 2235727 - DNA, 25 bp, Homo sapien
tggcaggatactgcataaaacagtc

SEQ ID NO: 2235728 - DNA, 25 bp, Homo sapien
gcataaaacagtcaactgtgctctc

SEQ ID NO: 2235729 - DNA, 25 bp, Homo sapien
ggctttgggtaacaatgtggattat

SEQ ID NO: 2235730 - DNA, 25 bp, Homo sapien
tgcatgtggctttgggtaacaatgt

SEQ ID NO: 2235731 - DNA, 25 bp, Homo sapien
tgggaatctactctttccacctaca

SEQ ID NO: 2235732 - DNA, 25 bp, Homo sapien
gcaactgcccaattactgattgtgg

SEQ ID NO: 2235733 - DNA, 25 bp, Homo sapien
ctgtctccagtgtcctgtgagcaac

SEQ ID NO: 2235734 - DNA, 25 bp, Homo sapien
gacagcttacacattgagggtccat

SEQ ID NO: 2235735 - DNA, 25 bp, Homo sapien
acttggctgccacccgctaactgaa

SEQ ID NO: 2235736 - DNA, 25 bp, Homo sapien
cagagattcctacttggctgccacc

SEQ ID NO: 2235737 - DNA, 25 bp, Homo sapien
gagattcctacttggctgccacccg

SEQ ID NO: 2235738 - DNA, 25 bp, Homo sapien
ctacttggctgccacccgctaactg

SEQ ID NO: 2235739 - DNA, 25 bp, Homo sapien
gatgcctttcagtacgagtttcact

SEQ ID NO: 2235740 - DNA, 25 bp, Homo sapien
tctagcatttaacgcaaaaagtcag

SEQ ID NO: 2235741 - DNA, 25 bp, Homo sapien
cctggcttttagctgtaacagtgct

SEQ ID NO: 2235742 - DNA, 25 bp, Homo sapien
ccacacatccaaatggacagggatt

SEQ ID NO: 2235743 - DNA, 25 bp, Homo sapien
gctgctggtatccatacaggtgaca

SEQ ID NO: 2235744 - DNA, 25 bp, Homo sapien
gagcacatcgaagcaaaagcagcac

SEQ ID NO: 2235745 - DNA, 25 bp, Homo sapien
tagaaagtagggtccccactccgca

SEQ ID NO: 2235746 - DNA, 25 bp, Homo sapien
cgaggcggcggacgatgaggagggt

SEQ ID NO: 2235747 - DNA, 25 bp, Homo sapien
gtggcgacagggcgatccccccgcc

SEQ ID NO: 2235748 - DNA, 25 bp, Homo sapien
ggcgacagggcgatccccccgccgc

SEQ ID NO: 2235749 - DNA, 25 bp, Homo sapien
tggcgacagggcgatccccccgccg

SEQ ID NO: 2235750 - DNA, 25 bp, Homo sapien
aggtggcgacagggcgatccccccg

SEQ ID NO: 2235751 - DNA, 25 bp, Homo sapien
tgccgctacctcctccggttagacc

SEQ ID NO: 2235752 - DNA, 25 bp, Homo sapien
ttgagccgcgtaccggcgcctccta

SEQ ID NO: 2235753 - DNA, 25 bp, Homo sapien
ctgccgctacctcctccggttagac

SEQ ID NO: 2235754 - DNA, 25 bp, Homo sapien
ttagacctcccagcccgttgagccg

SEQ ID NO: 2235755 - DNA, 25 bp, Homo sapien
cagaggggggcgaactggacagttt

SEQ ID NO: 2235756 - DNA, 25 bp, Homo sapien
gagccagaggggggcgaactggaca

SEQ ID NO: 2235757 - DNA, 25 bp, Homo sapien
caccgccacccgagccagagggggg

SEQ ID NO: 2235758 - DNA, 25 bp, Homo sapien
acccgagccagaggggggcgaactg

SEQ ID NO: 2235759 - DNA, 25 bp, Homo sapien
tcaccccgcagcaacccgccgccat

SEQ ID NO: 2235760 - DNA, 25 bp, Homo sapien
gggcgagcacgctgcggctcaggcc

SEQ ID NO: 2235761 - DNA, 25 bp, Homo sapien
cgacccataagtgaggcgagctggc

SEQ ID NO: 2235762 - DNA, 25 bp, Homo sapien
gcgtttccgacccataagtgaggcg

SEQ ID NO: 2235763 - DNA, 25 bp, Homo sapien
cacgcagcgtttccgacccataagt

SEQ ID NO: 2235764 - DNA, 25 bp, Homo sapien
gctcccggccccgtctgcctagcca

SEQ ID NO: 2235765 - DNA, 25 bp, Homo sapien
ggccccgtctgcctagccacgcggc

SEQ ID NO: 2235766 - DNA, 25 bp, Homo sapien
cgtctgcctagccacgcggctgccc

SEQ ID NO: 2235767 - DNA, 25 bp, Homo sapien
tcccggccccgtctgcctagccacg

SEQ ID NO: 2235768 - DNA, 25 bp, Homo sapien
agattcatcaattcctccatagcct

SEQ ID NO: 2235769 - DNA, 25 bp, Homo sapien
gattcatcaattcctccatagcctt

SEQ ID NO: 2235770 - DNA, 25 bp, Homo sapien
ctaattagattcatcaattcctcca

SEQ ID NO: 2235771 - DNA, 25 bp, Homo sapien
attagattcatcaattcctccatag

SEQ ID NO: 2235772 - DNA, 25 bp, Homo sapien
ttttattgtatgctgctgccaatgt

SEQ ID NO: 2235773 - DNA, 25 bp, Homo sapien
gttttattgtatgctgctgccaatg

SEQ ID NO: 2235774 - DNA, 25 bp, Homo sapien
aaaacttgcacactaagttttattg

SEQ ID NO: 2235775 - DNA, 25 bp, Homo sapien
ttgcacactaagttttattgtatgc

SEQ ID NO: 2235776 - DNA, 25 bp, Homo sapien
gataagcttttgtacaggcttcaaa

SEQ ID NO: 2235777 - DNA, 25 bp, Homo sapien
ggataagcttttgtacaggcttcaa

SEQ ID NO: 2235778 - DNA, 25 bp, Homo sapien
gggataagcttttgtacaggcttca

SEQ ID NO: 2235779 - DNA, 25 bp, Homo sapien
ggaacagactttctggggtctgaag

SEQ ID NO: 2235780 - DNA, 25 bp, Homo sapien
ttctggggtctgaagggatttgtac

SEQ ID NO: 2235781 - DNA, 25 bp, Homo sapien
ctacaaaaaggaacagactttctgg

SEQ ID NO: 2235782 - DNA, 25 bp, Homo sapien
aaaggaacagactttctggggtctg

SEQ ID NO: 2235783 - DNA, 25 bp, Homo sapien
acttttacgctgttgagcccggcct

SEQ ID NO: 2235784 - DNA, 25 bp, Homo sapien
gctgttgagcccggcctccagctgg

SEQ ID NO: 2235785 - DNA, 25 bp, Homo sapien
tgcctgggaaacttttacgctgttg

SEQ ID NO: 2235786 - DNA, 25 bp, Homo sapien
tgggaaacttttacgctgttgagcc

SEQ ID NO: 2235787 - DNA, 25 bp, Homo sapien
cgattcgtgggtcggtgggtcgtgg

SEQ ID NO: 2235788 - DNA, 25 bp, Homo sapien
ccgattcgtgggtcggtgggtcgtg

SEQ ID NO: 2235789 - DNA, 25 bp, Homo sapien
cttttcaattgttagttcttcgcta

SEQ ID NO: 2235790 - DNA, 25 bp, Homo sapien
ttttcaattgttagttcttcgctaa

SEQ ID NO: 2235791 - DNA, 25 bp, Homo sapien
ttcaattgttagttcttcgctaatt

SEQ ID NO: 2235792 - DNA, 25 bp, Homo sapien
tttcaattgttagttcttcgctaat

SEQ ID NO: 2235793 - DNA, 25 bp, Homo sapien
tttttcacccatgaaccctctaatg

SEQ ID NO: 2235794 - DNA, 25 bp, Homo sapien
gaaccctctaatgttttctgcagct

SEQ ID NO: 2235795 - DNA, 25 bp, Homo sapien
agcttctttgagctcattctttatc

SEQ ID NO: 2235796 - DNA, 25 bp, Homo sapien
ctttgagctcattctttatcttcca

SEQ ID NO: 2235797 - DNA, 25 bp, Homo sapien
gcccatcccctttccaaagagtata

SEQ ID NO: 2235798 - DNA, 25 bp, Homo sapien
cctttccaaagagtataaacttcat

SEQ ID NO: 2235799 - DNA, 25 bp, Homo sapien
catggcccatcccctttccaaagag

SEQ ID NO: 2235800 - DNA, 25 bp, Homo sapien
tggcccatcccctttccaaagagta

SEQ ID NO: 2235801 - DNA, 25 bp, Homo sapien
tgattgataggattctgaagaactc

SEQ ID NO: 2235802 - DNA, 25 bp, Homo sapien
agtttttctatgaaagcccatgacg

SEQ ID NO: 2235803 - DNA, 25 bp, Homo sapien
ttgtactaaataggcactcaggtgg

SEQ ID NO: 2235804 - DNA, 25 bp, Homo sapien
catgacgtggagcacaatgctttgt

SEQ ID NO: 2235805 - DNA, 25 bp, Homo sapien
tgttcattgttcagagacaaaggtc

SEQ ID NO: 2235806 - DNA, 25 bp, Homo sapien
ccaaacctgggtgtgttaaaatgtg

SEQ ID NO: 2235807 - DNA, 25 bp, Homo sapien
catccttccaaacctgggtgtgtta

SEQ ID NO: 2235808 - DNA, 25 bp, Homo sapien
taaaatgtgttcattgttcagagac

SEQ ID NO: 2235809 - DNA, 25 bp, Homo sapien
taagaagtctcagctttgcaatgag

SEQ ID NO: 2235810 - DNA, 25 bp, Homo sapien
ctcagctttgcaatgagtttgtggg

SEQ ID NO: 2235811 - DNA, 25 bp, Homo sapien
ctttaagaagtctcagctttgcaat

SEQ ID NO: 2235812 - DNA, 25 bp, Homo sapien
gaagtctcagctttgcaatgagttt

SEQ ID NO: 2235813 - DNA, 25 bp, Homo sapien
gttattcagcgtagcttcatcttca

SEQ ID NO: 2235814 - DNA, 25 bp, Homo sapien
tcatctggaacatggttattcagcg

SEQ ID NO: 2235815 - DNA, 25 bp, Homo sapien
aacatggttattcagcgtagcttca

SEQ ID NO: 2235816 - DNA, 25 bp, Homo sapien
tttgtcatctggaacatggttattc

SEQ ID NO: 2235817 - DNA, 25 bp, Homo sapien
agacacccagatgttggcaagtagt

SEQ ID NO: 2235818 - DNA, 25 bp, Homo sapien
acacccagatgttggcaagtagtac

SEQ ID NO: 2235819 - DNA, 25 bp, Homo sapien
ctctcttgtgccagacacccagatg

SEQ ID NO: 2235820 - DNA, 25 bp, Homo sapien
tcaactctcttgtgccagacaccca

SEQ ID NO: 2235821 - DNA, 25 bp, Homo sapien
cgaacagcatagtcgttgaacagca

SEQ ID NO: 2235822 - DNA, 25 bp, Homo sapien
ttggaccgaacagcatagtcgttga

SEQ ID NO: 2235823 - DNA, 25 bp, Homo sapien
acagcatagtcgttgaacagcatca

SEQ ID NO: 2235824 - DNA, 25 bp, Homo sapien
tagtcgttgaacagcatcatcttcc

SEQ ID NO: 2235825 - DNA, 25 bp, Homo sapien
cctctgatgaacaattaccaatgaa

SEQ ID NO: 2235826 - DNA, 25 bp, Homo sapien
tcctctgatgaacaattaccaatga

SEQ ID NO: 2235827 - DNA, 25 bp, Homo sapien
ctctgatgaacaattaccaatgaac

SEQ ID NO: 2235828 - DNA, 25 bp, Homo sapien
gtggggagtgtatgtaggttgtttc

SEQ ID NO: 2235829 - DNA, 25 bp, Homo sapien
tgtgggaagccaaaccttttggcaa

SEQ ID NO: 2235830 - DNA, 25 bp, Homo sapien
tgtcctctaaattccgagggtgccc

SEQ ID NO: 2235831 - DNA, 25 bp, Homo sapien
ggagtgtatgtaggttgtttcaggg

SEQ ID NO: 2235832 - DNA, 25 bp, Homo sapien
agctgactccggagcccacatttct

SEQ ID NO: 2235833 - DNA, 25 bp, Homo sapien
tctcctgtctttctaggcttggact

SEQ ID NO: 2235834 - DNA, 25 bp, Homo sapien
ctttctaggcttggacttgctctct

SEQ ID NO: 2235835 - DNA, 25 bp, Homo sapien
ctggagctgactccggagcccacat

SEQ ID NO: 2235836 - DNA, 25 bp, Homo sapien
ttcctcaggtgttctacacgtttga

SEQ ID NO: 2235837 - DNA, 25 bp, Homo sapien
agtgctgtcaggcaggtgaacccgc

SEQ ID NO: 2235838 - DNA, 25 bp, Homo sapien
gtgctgtcaggcaggtgaacccgct

SEQ ID NO: 2235839 - DNA, 25 bp, Homo sapien
caggtgttctacacgtttgaatgtg

SEQ ID NO: 2235840 - DNA, 25 bp, Homo sapien
gtgcaaattccttgatcagagcctt

SEQ ID NO: 2235841 - DNA, 25 bp, Homo sapien
gcaaattccttgatcagagcctttc

SEQ ID NO: 2235842 - DNA, 25 bp, Homo sapien
tgagtgcaaattccttgatcagagc

SEQ ID NO: 2235843 - DNA, 25 bp, Homo sapien
tttatatctgagtgcaaattccttg

SEQ ID NO: 2235844 - DNA, 25 bp, Homo sapien
tttgtgcgcatcatgtgccttttct

SEQ ID NO: 2235845 - DNA, 25 bp, Homo sapien
gccttgtttgtgcgcatcatgtgcc

SEQ ID NO: 2235846 - DNA, 25 bp, Homo sapien
ttctctcataaggttgctaaaggcc

SEQ ID NO: 2235847 - DNA, 25 bp, Homo sapien
ttttctctcataaggttgctaaagg

SEQ ID NO: 2235848 - DNA, 25 bp, Homo sapien
ttctgaccacttcccattaaattca

SEQ ID NO: 2235849 - DNA, 25 bp, Homo sapien
cccattaaattcagggagtgaacct

SEQ ID NO: 2235850 - DNA, 25 bp, Homo sapien
cacttcccattaaattcagggagtg

SEQ ID NO: 2235851 - DNA, 25 bp, Homo sapien
tgaccacttcccattaaattcaggg

SEQ ID NO: 2235852 - DNA, 25 bp, Homo sapien
ttaatctagttgcttgcactgaggt

SEQ ID NO: 2235853 - DNA, 25 bp, Homo sapien
gcttgcactgaggtaactttttaat

SEQ ID NO: 2235854 - DNA, 25 bp, Homo sapien
tctagttgcttgcactgaggtaact

SEQ ID NO: 2235855 - DNA, 25 bp, Homo sapien
tagttgcttgcactgaggtaacttt

SEQ ID NO: 2235856 - DNA, 25 bp, Homo sapien
ggtgattaacaatgccgccaacttc

SEQ ID NO: 2235857 - DNA, 25 bp, Homo sapien
ttttcctcggaaagctctggtattg

SEQ ID NO: 2235858 - DNA, 25 bp, Homo sapien
caaacgctgctttaggtgattaaca

SEQ ID NO: 2235859 - DNA, 25 bp, Homo sapien
aagctctggtattgcgcaaacgctg

SEQ ID NO: 2235860 - DNA, 25 bp, Homo sapien
gataccagggaaaatgaggctcgag

SEQ ID NO: 2235861 - DNA, 25 bp, Homo sapien
aaatgaggctcgagtattgtacgta

SEQ ID NO: 2235862 - DNA, 25 bp, Homo sapien
gtacgtataatctgtcaatgccctc

SEQ ID NO: 2235863 - DNA, 25 bp, Homo sapien
tggccaagacagagaggataccagg

SEQ ID NO: 2235864 - DNA, 25 bp, Homo sapien
cattattagtgtgggaagaaggacc

SEQ ID NO: 2235865 - DNA, 25 bp, Homo sapien
tatgggtagccagctgagtcaccga

SEQ ID NO: 2235866 - DNA, 25 bp, Homo sapien
attagtaggacaagaggaactcgcc

SEQ ID NO: 2235867 - DNA, 25 bp, Homo sapien
ttagggaaaccactcagactgactt

SEQ ID NO: 2235868 - DNA, 25 bp, Homo sapien
gggtagcagctttccacagacaaaa

SEQ ID NO: 2235869 - DNA, 25 bp, Homo sapien
gatgctctcccagatgcttgtctcc

SEQ ID NO: 2235870 - DNA, 25 bp, Homo sapien
aaatgtccacagctttgggaagcat

SEQ ID NO: 2235871 - DNA, 25 bp, Homo sapien
gagatgctctcccagatgcttgtct

SEQ ID NO: 2235872 - DNA, 25 bp, Homo sapien
caattttgtcctgcaaagtgacttc

SEQ ID NO: 2235873 - DNA, 25 bp, Homo sapien
cttctatagctttgggagtcaggtt

SEQ ID NO: 2235874 - DNA, 25 bp, Homo sapien
caagctcctgggttgaggtatttct

SEQ ID NO: 2235875 - DNA, 25 bp, Homo sapien
aaagctgggccgcaaacaaagatgg

SEQ ID NO: 2235876 - DNA, 25 bp, Homo sapien
tggttagcatgctaccccctgtgcc

SEQ ID NO: 2235877 - DNA, 25 bp, Homo sapien
tcagaaacactgaagacatgggcct

SEQ ID NO: 2235878 - DNA, 25 bp, Homo sapien
aagccatacgctctgcttctaagcg

SEQ ID NO: 2235879 - DNA, 25 bp, Homo sapien
caccattaaagccatacgctctgct

SEQ ID NO: 2235880 - DNA, 25 bp, Homo sapien
aggcactgcctcattccccagagcc

SEQ ID NO: 2235881 - DNA, 25 bp, Homo sapien
ctagtgccatctatccttacccact

SEQ ID NO: 2235882 - DNA, 25 bp, Homo sapien
tctgaatccctcctctcggcaggca

SEQ ID NO: 2235883 - DNA, 25 bp, Homo sapien
agagccaggcctagacaatggcggc

SEQ ID NO: 2235884 - DNA, 25 bp, Homo sapien
ggcataaggccattaaagtattctt

SEQ ID NO: 2235885 - DNA, 25 bp, Homo sapien
ataaggccattaaagtattcttcaa

SEQ ID NO: 2235886 - DNA, 25 bp, Homo sapien
taaggccattaaagtattcttcaaa

SEQ ID NO: 2235887 - DNA, 25 bp, Homo sapien
ttatggcataaggccattaaagtat

SEQ ID NO: 2235888 - DNA, 25 bp, Homo sapien
tgccaaccaccttgaggtgtgacag

SEQ ID NO: 2235889 - DNA, 25 bp, Homo sapien
tcttctggtcccggtccttgccaaa

SEQ ID NO: 2235890 - DNA, 25 bp, Homo sapien
accaccttgaggtgtgacaggaaaa

SEQ ID NO: 2235891 - DNA, 25 bp, Homo sapien
tccctcttctggtcccggtccttgc

SEQ ID NO: 2235892 - DNA, 25 bp, Homo sapien
tgaagggatggagtggcttagatgc

SEQ ID NO: 2235893 - DNA, 25 bp, Homo sapien
gcttagatgcaaatggccaaatccc

SEQ ID NO: 2235894 - DNA, 25 bp, Homo sapien
atggagtggcttagatgcaaatggc

SEQ ID NO: 2235895 - DNA, 25 bp, Homo sapien
gagtggcttagatgcaaatggccaa

SEQ ID NO: 2235896 - DNA, 25 bp, Homo sapien
tttctggcagccttttgttgtcctt

SEQ ID NO: 2235897 - DNA, 25 bp, Homo sapien
tctggcagccttttgttgtccttac

SEQ ID NO: 2235898 - DNA, 25 bp, Homo sapien
ggccctcagacaagctgggctccct

SEQ ID NO: 2235899 - DNA, 25 bp, Homo sapien
acaagctgggctcccttttctggca

SEQ ID NO: 2235900 - DNA, 25 bp, Homo sapien
ccatgtgccactcagtgtaaccaca

SEQ ID NO: 2235901 - DNA, 25 bp, Homo sapien
agacctctgccaattgctgacatta

SEQ ID NO: 2235902 - DNA, 25 bp, Homo sapien
agtgtaaccacaggcagacctctgc

SEQ ID NO: 2235903 - DNA, 25 bp, Homo sapien
gcagacctctgccaattgctgacat

SEQ ID NO: 2235904 - DNA, 25 bp, Homo sapien
ggcgaacagccaatccaaacattaa

SEQ ID NO: 2235905 - DNA, 25 bp, Homo sapien
tagagaatgcaggaatcctaaatgc

SEQ ID NO: 2235906 - DNA, 25 bp, Homo sapien
agtgcatgtccaaacaagaactggg

SEQ ID NO: 2235907 - DNA, 25 bp, Homo sapien
tcctaaatgctattctcagtgcatg

SEQ ID NO: 2235908 - DNA, 25 bp, Homo sapien
tcaccttcccactccgcaatttctc

SEQ ID NO: 2235909 - DNA, 25 bp, Homo sapien
ccttcccactccgcaatttctcagg

SEQ ID NO: 2235910 - DNA, 25 bp, Homo sapien
ttcccactccgcaatttctcaggct

SEQ ID NO: 2235911 - DNA, 25 bp, Homo sapien
tcccactccgcaatttctcaggctt

SEQ ID NO: 2235912 - DNA, 25 bp, Homo sapien
gagtaattccagaggagcaggcttc

SEQ ID NO: 2235913 - DNA, 25 bp, Homo sapien
ctagagtaattccagaggagcaggc

SEQ ID NO: 2235914 - DNA, 25 bp, Homo sapien
agtaattccagaggagcaggcttca

SEQ ID NO: 2235915 - DNA, 25 bp, Homo sapien
aattccagaggagcaggcttcatac

SEQ ID NO: 2235916 - DNA, 25 bp, Homo sapien
catgtcagggtagtcaccgtcttcc

SEQ ID NO: 2235917 - DNA, 25 bp, Homo sapien
tcatgtcagggtagtcaccgtcttc

SEQ ID NO: 2235918 - DNA, 25 bp, Homo sapien
tgtcagggtagtcaccgtcttcctt

SEQ ID NO: 2235919 - DNA, 25 bp, Homo sapien
atcatgtcagggtagtcaccgtctt

SEQ ID NO: 2235920 - DNA, 25 bp, Homo sapien
gattagggtcaaggtgaggactcat

SEQ ID NO: 2235921 - DNA, 25 bp, Homo sapien
ctttgaggagaatcccaagttgatt

SEQ ID NO: 2235922 - DNA, 25 bp, Homo sapien
tgaggagaatcccaagttgattagg

SEQ ID NO: 2235923 - DNA, 25 bp, Homo sapien
gagaatcccaagttgattagggtca

SEQ ID NO: 2235924 - DNA, 25 bp, Homo sapien
agcgcactggccaaatgcacttgct

SEQ ID NO: 2235925 - DNA, 25 bp, Homo sapien
cagcgcactggccaaatgcacttgc

SEQ ID NO: 2235926 - DNA, 25 bp, Homo sapien
tcctccttcaactgctctgtaggtt

SEQ ID NO: 2235927 - DNA, 25 bp, Homo sapien
ccagcgcactggccaaatgcacttg

SEQ ID NO: 2235928 - DNA, 25 bp, Homo sapien
taccccactagccaattcaaagctt

SEQ ID NO: 2235929 - DNA, 25 bp, Homo sapien
ttctaccccactagccaattcaaag

SEQ ID NO: 2235930 - DNA, 25 bp, Homo sapien
ccactagccaattcaaagcttgtct

SEQ ID NO: 2235931 - DNA, 25 bp, Homo sapien
tcttctaccccactagccaattcaa

SEQ ID NO: 2235932 - DNA, 25 bp, Homo sapien
cagtactgccaaaactatgagagcc

SEQ ID NO: 2235933 - DNA, 25 bp, Homo sapien
acagaagcaatagagtggaaatttt

SEQ ID NO: 2235934 - DNA, 25 bp, Homo sapien
gtactgccaaaactatgagagccat

SEQ ID NO: 2235935 - DNA, 25 bp, Homo sapien
ggagaagaggtcaacagtagtgaca

SEQ ID NO: 2235936 - DNA, 25 bp, Homo sapien
tgtgtatgatactcaggactccctg

SEQ ID NO: 2235937 - DNA, 25 bp, Homo sapien
tgtcaggaaccaagggccactgtgt

SEQ ID NO: 2235938 - DNA, 25 bp, Homo sapien
cataggccctgaggctgtcaggaac

SEQ ID NO: 2235939 - DNA, 25 bp, Homo sapien
gtttgtaatccattcctttggctgc

SEQ ID NO: 2235940 - DNA, 25 bp, Homo sapien
ctagaatgatttcatgttcctcctc

SEQ ID NO: 2235941 - DNA, 25 bp, Homo sapien
cagaacctgctttcacgatgggaga

SEQ ID NO: 2235942 - DNA, 25 bp, Homo sapien
taagaggctgatcctcccaagaggt

SEQ ID NO: 2235943 - DNA, 25 bp, Homo sapien
tctttgtccctctatcagaacctgc

SEQ ID NO: 2235944 - DNA, 25 bp, Homo sapien
agcttacaggctcccgaatgcctgc

SEQ ID NO: 2235945 - DNA, 25 bp, Homo sapien
tgcctgccgagtcagttgcatcaga

SEQ ID NO: 2235946 - DNA, 25 bp, Homo sapien
catcagattaggaagtgatgatcct

SEQ ID NO: 2235947 - DNA, 25 bp, Homo sapien
ggtgcagaagaatttggaacaggaa

SEQ ID NO: 2235948 - DNA, 25 bp, Homo sapien
tctaaacgattagcccagagaaaga

SEQ ID NO: 2235949 - DNA, 25 bp, Homo sapien
tcaggctcatgggattaggttggca

SEQ ID NO: 2235950 - DNA, 25 bp, Homo sapien
tggcccggcaaggtagtcaggctca

SEQ ID NO: 2235951 - DNA, 25 bp, Homo sapien
taggttggcaggagcgactgtcctc

SEQ ID NO: 2235952 - DNA, 25 bp, Homo sapien
cgaggtccacccagacatgctgtct

SEQ ID NO: 2235953 - DNA, 25 bp, Homo sapien
tagcttctaactggatcatgtctgt

SEQ ID NO: 2235954 - DNA, 25 bp, Homo sapien
ttggcctttggcataagtaaatgtc

SEQ ID NO: 2235955 - DNA, 25 bp, Homo sapien
cctttcatcaggtatgtcaaaaacc

SEQ ID NO: 2235956 - DNA, 25 bp, Homo sapien
cgttatgatcaccattacagggctc

SEQ ID NO: 2235957 - DNA, 25 bp, Homo sapien
cctatggcagggataccggtcgctg

SEQ ID NO: 2235958 - DNA, 25 bp, Homo sapien
tcttgctagctgtctgaaatccatg

SEQ ID NO: 2235959 - DNA, 25 bp, Homo sapien
gaaatccatggagcctttctgttga

SEQ ID NO: 2235960 - DNA, 25 bp, Homo sapien
gaaatgatgtctaatccgccagtga

SEQ ID NO: 2235961 - DNA, 25 bp, Homo sapien
cgatgtccgcaacgctaatggtagc

SEQ ID NO: 2235962 - DNA, 25 bp, Homo sapien
gctactgtcagtcccagatgctgga

SEQ ID NO: 2235963 - DNA, 25 bp, Homo sapien
tccaggctctgaagtaatgtccaca

SEQ ID NO: 2235964 - DNA, 25 bp, Homo sapien
ggagcaatgtccaccccactaatga

SEQ ID NO: 2235965 - DNA, 25 bp, Homo sapien
catggcctcaggattgacatctgca

SEQ ID NO: 2235966 - DNA, 25 bp, Homo sapien
tctggagggttgtctgcatcgctaa

SEQ ID NO: 2235967 - DNA, 25 bp, Homo sapien
ggagctctgtccatgccgcaaatga

SEQ ID NO: 2235968 - DNA, 25 bp, Homo sapien
tataccgtgtctggaaggatggcca

SEQ ID NO: 2235969 - DNA, 25 bp, Homo sapien
tctatgccgctaatggaaaccatgg

SEQ ID NO: 2235970 - DNA, 25 bp, Homo sapien
tgagagccccagactctagagtgac

SEQ ID NO: 2235971 - DNA, 25 bp, Homo sapien
gacatgtgcacactaccagtgcgag

SEQ ID NO: 2235972 - DNA, 25 bp, Homo sapien
ttctaccacgcgtctcagtgaggcc

SEQ ID NO: 2235973 - DNA, 25 bp, Homo sapien
tgcacacctgagtggagccttagtg

SEQ ID NO: 2235974 - DNA, 25 bp, Homo sapien
ccttctctttggtagccttggctga

SEQ ID NO: 2235975 - DNA, 25 bp, Homo sapien
gcccttgctcaaacgttcagacttg

SEQ ID NO: 2235976 - DNA, 25 bp, Homo sapien
tcagaaattagaataggaggattgt

SEQ ID NO: 2235977 - DNA, 25 bp, Homo sapien
ggaggattgttgttagtcaagggcc

SEQ ID NO: 2235978 - DNA, 25 bp, Homo sapien
tagaataggaggattgttgttagtc

SEQ ID NO: 2235979 - DNA, 25 bp, Homo sapien
gaaattagaataggaggattgttgt

SEQ ID NO: 2235980 - DNA, 25 bp, Homo sapien
tttcttggaaggcaataaccatata

SEQ ID NO: 2235981 - DNA, 25 bp, Homo sapien
tcatttcttggaaggcaataaccat

SEQ ID NO: 2235982 - DNA, 25 bp, Homo sapien
catttcttggaaggcaataaccata

SEQ ID NO: 2235983 - DNA, 25 bp, Homo sapien
atttcttggaaggcaataaccatat

SEQ ID NO: 2235984 - DNA, 25 bp, Homo sapien
atgaaaactatgtggaaagtgagga

SEQ ID NO: 2235985 - DNA, 25 bp, Homo sapien
cttagctggcttaccccatgattgt

SEQ ID NO: 2235986 - DNA, 25 bp, Homo sapien
taagttacttagctggcttacccca

SEQ ID NO: 2235987 - DNA, 25 bp, Homo sapien
agttacttagctggcttaccccatg

SEQ ID NO: 2235988 - DNA, 25 bp, Homo sapien
gaacagtccgcttgggtgtgccttt

SEQ ID NO: 2235989 - DNA, 25 bp, Homo sapien
gtccgcttgggtgtgcctttctctt

SEQ ID NO: 2235990 - DNA, 25 bp, Homo sapien
tggaacagtccgcttgggtgtgcct

SEQ ID NO: 2235991 - DNA, 25 bp, Homo sapien
ctaagttggaacagtccgcttgggt

SEQ ID NO: 2235992 - DNA, 25 bp, Homo sapien
tgttttcacagggactaatgttgga

SEQ ID NO: 2235993 - DNA, 25 bp, Homo sapien
gatccagttgttatttgtagggcac

SEQ ID NO: 2235994 - DNA, 25 bp, Homo sapien
tagggcacagttgaaaatatgtccc

SEQ ID NO: 2235995 - DNA, 25 bp, Homo sapien
aactttggctgcatgtctaggatcc

SEQ ID NO: 2235996 - DNA, 25 bp, Homo sapien
cacatgctgtttgctttcaagtctc

SEQ ID NO: 2235997 - DNA, 25 bp, Homo sapien
tacccattctctgggaccaatcctg

SEQ ID NO: 2235998 - DNA, 25 bp, Homo sapien
tggtcagaaaggaccaacagtcacc

SEQ ID NO: 2235999 - DNA, 25 bp, Homo sapien
cctgactatggtcagaaaggaccaa

SEQ ID NO: 2236000 - DNA, 25 bp, Homo sapien
gctgcattctgataatctgcctggg

SEQ ID NO: 2236001 - DNA, 25 bp, Homo sapien
tttccatgattacttcaacagctgc

SEQ ID NO: 2236002 - DNA, 25 bp, Homo sapien
tctaccacgtgaaaatgaactgctc

SEQ ID NO: 2236003 - DNA, 25 bp, Homo sapien
tcatctcgccagtgaataatgtgct

SEQ ID NO: 2236004 - DNA, 25 bp, Homo sapien
tgactgaaactgctgacactttcag

SEQ ID NO: 2236005 - DNA, 25 bp, Homo sapien
gttttgggataagcttgcgcgccat

SEQ ID NO: 2236006 - DNA, 25 bp, Homo sapien
gaataaacccttgatgtctttgaca

SEQ ID NO: 2236007 - DNA, 25 bp, Homo sapien
gatttgttttgggataagcttgcgc

SEQ ID NO: 2236008 - DNA, 25 bp, Homo sapien
cgtccaaggccgaaagccctccagt

SEQ ID NO: 2236009 - DNA, 25 bp, Homo sapien
cctgcttctgctacgaccttctggg

SEQ ID NO: 2236010 - DNA, 25 bp, Homo sapien
ccttctggggaacgcgaatttctca

SEQ ID NO: 2236011 - DNA, 25 bp, Homo sapien
agctcaaggtcaaaacgtccaaggc

SEQ ID NO: 2236012 - DNA, 25 bp, Homo sapien
gaagggcaagtttccatcatctata

SEQ ID NO: 2236013 - DNA, 25 bp, Homo sapien
gctatgtaagacaaggactcccctt

SEQ ID NO: 2236014 - DNA, 25 bp, Homo sapien
tacattgtatatacgtgtatgcaca

SEQ ID NO: 2236015 - DNA, 25 bp, Homo sapien
caatgtccccaacaagattgcttaa

SEQ ID NO: 2236016 - DNA, 25 bp, Homo sapien
ggtccatctaaccattggtccctgg

SEQ ID NO: 2236017 - DNA, 25 bp, Homo sapien
tgcatgggcataatttcaccaggat

SEQ ID NO: 2236018 - DNA, 25 bp, Homo sapien
gcttgtaggactgacaccagcctgg

SEQ ID NO: 2236019 - DNA, 25 bp, Homo sapien
gtacggcacccagaaaaccatttgc

SEQ ID NO: 2236020 - DNA, 25 bp, Homo sapien
tcagtatcttggtccctgagagtca

SEQ ID NO: 2236021 - DNA, 25 bp, Homo sapien
ttcagtatcttggtccctgagagtc

SEQ ID NO: 2236022 - DNA, 25 bp, Homo sapien
tcgagagtcaactcagggtctggat

SEQ ID NO: 2236023 - DNA, 25 bp, Homo sapien
caattcatcgagagtcaactcaggg

SEQ ID NO: 2236024 - DNA, 25 bp, Homo sapien
gggagattagtggacaattcatcga

SEQ ID NO: 2236025 - DNA, 25 bp, Homo sapien
ggtctggatggagttgcaataaggg

SEQ ID NO: 2236026 - DNA, 25 bp, Homo sapien
tcgtgggaatgctcattgtcctgtg

SEQ ID NO: 2236027 - DNA, 25 bp, Homo sapien
gggaatgctcattgtcctgtggtct

SEQ ID NO: 2236028 - DNA, 25 bp, Homo sapien
cagtcgtgggaatgctcattgtcct

SEQ ID NO: 2236029 - DNA, 25 bp, Homo sapien
tacagtcgtgggaatgctcattgtc

SEQ ID NO: 2236030 - DNA, 25 bp, Homo sapien
aatgaataccaacaagttttgtgta

SEQ ID NO: 2236031 - DNA, 25 bp, Homo sapien
caccaatttcaatatttataccaga

SEQ ID NO: 2236032 - DNA, 25 bp, Homo sapien
cagggctttcccaaattcaccaatt

SEQ ID NO: 2236033 - DNA, 25 bp, Homo sapien
accaacaagttttgtgtatgctctg

SEQ ID NO: 2236034 - DNA, 25 bp, Homo sapien
cacagcaggaggaacagacagagga

SEQ ID NO: 2236035 - DNA, 25 bp, Homo sapien
ctcttccatgaccacagcaggagga

SEQ ID NO: 2236036 - DNA, 25 bp, Homo sapien
gtacagaaagcatgatggcttctgg

SEQ ID NO: 2236037 - DNA, 25 bp, Homo sapien
caaaagagaagcaggcatctcttcc

SEQ ID NO: 2236038 - DNA, 25 bp, Homo sapien
tcctcaatggaggtggagcaatact

SEQ ID NO: 2236039 - DNA, 25 bp, Homo sapien
caaaattccatccagggtgtgggtc

SEQ ID NO: 2236040 - DNA, 25 bp, Homo sapien
taggagaccaaattgacaggactgg

SEQ ID NO: 2236041 - DNA, 25 bp, Homo sapien
tgtaaagagggactacgcgtagctc

SEQ ID NO: 2236042 - DNA, 25 bp, Homo sapien
tatatctagggaaactctctgcgtg

SEQ ID NO: 2236043 - DNA, 25 bp, Homo sapien
tgaggaccgagccactttgcaaagt

SEQ ID NO: 2236044 - DNA, 25 bp, Homo sapien
tctcaaccgggatgtactgcttctc

SEQ ID NO: 2236045 - DNA, 25 bp, Homo sapien
gaacaaatctagaaggcatgcctga

SEQ ID NO: 2236046 - DNA, 25 bp, Homo sapien
tctgcatacacgacttgaacacatc

SEQ ID NO: 2236047 - DNA, 25 bp, Homo sapien
tctgagcttctccttcggtgaagat

SEQ ID NO: 2236048 - DNA, 25 bp, Homo sapien
gagcttctccttcggtgaagatctt

SEQ ID NO: 2236049 - DNA, 25 bp, Homo sapien
cttgaacacatctggctgatctgag

SEQ ID NO: 2236050 - DNA, 25 bp, Homo sapien
tcagggttgttctggtcaccagctt

SEQ ID NO: 2236051 - DNA, 25 bp, Homo sapien
gagatagtgctgctgaccatgggac

SEQ ID NO: 2236052 - DNA, 25 bp, Homo sapien
ttcccctcggcttctccagtggatg

SEQ ID NO: 2236053 - DNA, 25 bp, Homo sapien
gtgctgctgaccatgggactctctc

SEQ ID NO: 2236054 - DNA, 25 bp, Homo sapien
taagggagatagtgctgctgaccat

SEQ ID NO: 2236055 - DNA, 25 bp, Homo sapien
tattgtcaaagctttggcctggaag

SEQ ID NO: 2236056 - DNA, 25 bp, Homo sapien
aggcatcgtttcttccccgcagaag

SEQ ID NO: 2236057 - DNA, 25 bp, Homo sapien
tccaaacgtggacctctacctgagg

SEQ ID NO: 2236058 - DNA, 25 bp, Homo sapien
tgaggtggtctctcagtctccagtg

SEQ ID NO: 2236059 - DNA, 25 bp, Homo sapien
ccaaaagcagggcctccaaccaacg

SEQ ID NO: 2236060 - DNA, 25 bp, Homo sapien
aaaagcagggcctccaaccaacgca

SEQ ID NO: 2236061 - DNA, 25 bp, Homo sapien
caaaagcagggcctccaaccaacgc

SEQ ID NO: 2236062 - DNA, 25 bp, Homo sapien
aaagcagggcctccaaccaacgcac

SEQ ID NO: 2236063 - DNA, 25 bp, Homo sapien
gtttgggtgccaggactcgccatga

SEQ ID NO: 2236064 - DNA, 25 bp, Homo sapien
gacattacaagtacatagcacacac

SEQ ID NO: 2236065 - DNA, 25 bp, Homo sapien
tggacacaccttgcagcattttccg

SEQ ID NO: 2236066 - DNA, 25 bp, Homo sapien
tccacaatgccaaatgcccggaggt

SEQ ID NO: 2236067 - DNA, 25 bp, Homo sapien
caatttgcacaatggttcctgatgc

SEQ ID NO: 2236068 - DNA, 25 bp, Homo sapien
cctgtcggcttggtggaggatcata

SEQ ID NO: 2236069 - DNA, 25 bp, Homo sapien
cttgctgggaatccataagagctcc

SEQ ID NO: 2236070 - DNA, 25 bp, Homo sapien
gggacagacctccagcctgtcggct

SEQ ID NO: 2236071 - DNA, 25 bp, Homo sapien
ctggattaagtccaggcctatcact

SEQ ID NO: 2236072 - DNA, 25 bp, Homo sapien
ggattaagtccaggcctatcactag

SEQ ID NO: 2236073 - DNA, 25 bp, Homo sapien
gtactggattaagtccaggcctatc

SEQ ID NO: 2236074 - DNA, 25 bp, Homo sapien
ttgctacaggaagtactggattaag

SEQ ID NO: 2236075 - DNA, 25 bp, Homo sapien
gatatcaccatcagaatgttcccat

SEQ ID NO: 2236076 - DNA, 25 bp, Homo sapien
cttctctgttggcaggttgccggaa

SEQ ID NO: 2236077 - DNA, 25 bp, Homo sapien
caggttgccggaagatatcaccatc

SEQ ID NO: 2236078 - DNA, 25 bp, Homo sapien
tcagaatgttcccatgacagttctc

SEQ ID NO: 2236079 - DNA, 25 bp, Homo sapien
ttgagaccacaatacacgtttccct

SEQ ID NO: 2236080 - DNA, 25 bp, Homo sapien
ggcacaggttaatttggggcaagtc

SEQ ID NO: 2236081 - DNA, 25 bp, Homo sapien
caagtcttgagaccacaatacacgt

SEQ ID NO: 2236082 - DNA, 25 bp, Homo sapien
gggcaagtcttgagaccacaataca

SEQ ID NO: 2236083 - DNA, 25 bp, Homo sapien
gctggtcaccttattgttcactggg

SEQ ID NO: 2236084 - DNA, 25 bp, Homo sapien
taagttgtcccattgtactcgcaag

SEQ ID NO: 2236085 - DNA, 25 bp, Homo sapien
aagagcccttcagctacgaacagct

SEQ ID NO: 2236086 - DNA, 25 bp, Homo sapien
ttgggttgccgattctgaaagagcc

SEQ ID NO: 2236087 - DNA, 25 bp, Homo sapien
aacagggtggagaaaaaccacactg

SEQ ID NO: 2236088 - DNA, 25 bp, Homo sapien
agggtggagaaaaaccacactgagt

SEQ ID NO: 2236089 - DNA, 25 bp, Homo sapien
actctgcagctaaacagacagacac

SEQ ID NO: 2236090 - DNA, 25 bp, Homo sapien
caagaaggtgccgagtgagaggaaa

SEQ ID NO: 2236091 - DNA, 25 bp, Homo sapien
tcactctgcagctaaacagacagac

SEQ ID NO: 2236092 - DNA, 25 bp, Homo sapien
agaaggtgccgagtgagaggaaaca

SEQ ID NO: 2236093 - DNA, 25 bp, Homo sapien
cctgcctgaatatgccgtcttgtca

SEQ ID NO: 2236094 - DNA, 25 bp, Homo sapien
agagtgtgcaagaaagggccatgtc

SEQ ID NO: 2236095 - DNA, 25 bp, Homo sapien
gaatatgccgtcttgtcagacagat

SEQ ID NO: 2236096 - DNA, 25 bp, Homo sapien
gagagagtgtgcaagaaagggccat

SEQ ID NO: 2236097 - DNA, 25 bp, Homo sapien
agttcatgtcaaagatgtatcccct

SEQ ID NO: 2236098 - DNA, 25 bp, Homo sapien
gtcatgaagttcatgtcaaagatgt

SEQ ID NO: 2236099 - DNA, 25 bp, Homo sapien
gaagttcatgtcaaagatgtatccc

SEQ ID NO: 2236100 - DNA, 25 bp, Homo sapien
tcatgaagttcatgtcaaagatgta

SEQ ID NO: 2236101 - DNA, 25 bp, Homo sapien
cttcagaggcaacctctatgttctt

SEQ ID NO: 2236102 - DNA, 25 bp, Homo sapien
ggcaacctctatgttctttcctgtc

SEQ ID NO: 2236103 - DNA, 25 bp, Homo sapien
cagaggcaacctctatgttctttcc

SEQ ID NO: 2236104 - DNA, 25 bp, Homo sapien
acctctatgttctttcctgtcaaaa

SEQ ID NO: 2236105 - DNA, 25 bp, Homo sapien
ttgcttcaattcagctattgctgtg

SEQ ID NO: 2236106 - DNA, 25 bp, Homo sapien
taacaggttttgcttcaattcagct

SEQ ID NO: 2236107 - DNA, 25 bp, Homo sapien
ttcaattcagctattgctgtgttac

SEQ ID NO: 2236108 - DNA, 25 bp, Homo sapien
tcagcctttggtgactgttaacagg

SEQ ID NO: 2236109 - DNA, 25 bp, Homo sapien
cataggttggctctgggttgagggc

SEQ ID NO: 2236110 - DNA, 25 bp, Homo sapien
taggttggctctgggttgagggcaa

SEQ ID NO: 2236111 - DNA, 25 bp, Homo sapien
ggttggctctgggttgagggcaaag

SEQ ID NO: 2236112 - DNA, 25 bp, Homo sapien
ttggctctgggttgagggcaaaggc

SEQ ID NO: 2236113 - DNA, 25 bp, Homo sapien
gcataagtaatggttgtctcaaaca

SEQ ID NO: 2236114 - DNA, 25 bp, Homo sapien
acagcataagtaatggttgtctcaa

SEQ ID NO: 2236115 - DNA, 25 bp, Homo sapien
agggccacatctacagaggccccat

SEQ ID NO: 2236116 - DNA, 25 bp, Homo sapien
cagcataagtaatggttgtctcaaa

SEQ ID NO: 2236117 - DNA, 25 bp, Homo sapien
gtttggtcagattattgccttgctc

SEQ ID NO: 2236118 - DNA, 25 bp, Homo sapien
aatttccttttaagcagactcatga

SEQ ID NO: 2236119 - DNA, 25 bp, Homo sapien
ccttttaagcagactcatgaataat

SEQ ID NO: 2236120 - DNA, 25 bp, Homo sapien
gaaagccatagctatccagtcctgc

SEQ ID NO: 2236121 - DNA, 25 bp, Homo sapien
caatcaacaagtttccattgaattc

SEQ ID NO: 2236122 - DNA, 25 bp, Homo sapien
aatcaacaagtttccattgaattct

SEQ ID NO: 2236123 - DNA, 25 bp, Homo sapien
tcagtgtcaatcaacaagtttccat

SEQ ID NO: 2236124 - DNA, 25 bp, Homo sapien
caacaagtcatgaacaatgggcggg

SEQ ID NO: 2236125 - DNA, 25 bp, Homo sapien
gctaattccgagaaatgccattcat

SEQ ID NO: 2236126 - DNA, 25 bp, Homo sapien
gaaattcctgggctaattccgagaa

SEQ ID NO: 2236127 - DNA, 25 bp, Homo sapien
tgccattcatttctcgccaacaaca

SEQ ID NO: 2236128 - DNA, 25 bp, Homo sapien
ctaattgtataagacacatgccgcc

SEQ ID NO: 2236129 - DNA, 25 bp, Homo sapien
tctgggccacaatttccatctccga

SEQ ID NO: 2236130 - DNA, 25 bp, Homo sapien
acaatttccatctccgattgacacc

SEQ ID NO: 2236131 - DNA, 25 bp, Homo sapien
tgccgccatgctgcaactctcctgg

SEQ ID NO: 2236132 - DNA, 25 bp, Homo sapien
atttggacatctgactcggctgcaa

SEQ ID NO: 2236133 - DNA, 25 bp, Homo sapien
gactcggctgcaaagcacattccca

SEQ ID NO: 2236134 - DNA, 25 bp, Homo sapien
cagcacagatgaggaatatgcacag

SEQ ID NO: 2236135 - DNA, 25 bp, Homo sapien
ggacatctgactcggctgcaaagca

SEQ ID NO: 2236136 - DNA, 25 bp, Homo sapien
cctggccatttgggcactgaaagcc

SEQ ID NO: 2236137 - DNA, 25 bp, Homo sapien
gtccctggccatttgggcactgaaa

SEQ ID NO: 2236138 - DNA, 25 bp, Homo sapien
tccctggccatttgggcactgaaag

SEQ ID NO: 2236139 - DNA, 25 bp, Homo sapien
tggccatttgggcactgaaagcctc

SEQ ID NO: 2236140 - DNA, 25 bp, Homo sapien
tgggaaatcacatgtcatgagagat

SEQ ID NO: 2236141 - DNA, 25 bp, Homo sapien
ggaaatcacatgtcatgagagattg

SEQ ID NO: 2236142 - DNA, 25 bp, Homo sapien
aatcacatgtcatgagagattgtac

SEQ ID NO: 2236143 - DNA, 25 bp, Homo sapien
actgggaaatcacatgtcatgagag

SEQ ID NO: 2236144 - DNA, 25 bp, Homo sapien
tcacgcagtaaaccaacccataagg

SEQ ID NO: 2236145 - DNA, 25 bp, Homo sapien
ccataaggttccaggtaaggatgcc

SEQ ID NO: 2236146 - DNA, 25 bp, Homo sapien
tctgagcagatgcagttcacgcagt

SEQ ID NO: 2236147 - DNA, 25 bp, Homo sapien
acccactctgtacttcttgtcttga

SEQ ID NO: 2236148 - DNA, 25 bp, Homo sapien
ctgtgaagaaggagatggagaatat

SEQ ID NO: 2236149 - DNA, 25 bp, Homo sapien
gtgaagaaggagatggagaatatgc

SEQ ID NO: 2236150 - DNA, 25 bp, Homo sapien
tgtgaagaaggagatggagaatatg

SEQ ID NO: 2236151 - DNA, 25 bp, Homo sapien
tgaacacatttccacgaatagccat

SEQ ID NO: 2236152 - DNA, 25 bp, Homo sapien
atgttgacttttgtgaaaaaacatt

SEQ ID NO: 2236153 - DNA, 25 bp, Homo sapien
tgttgacttttgtgaaaaaacattc

SEQ ID NO: 2236154 - DNA, 25 bp, Homo sapien
taaatggcatccaatttgctaacgg

SEQ ID NO: 2236155 - DNA, 25 bp, Homo sapien
ttttcggcataagggaataggcaga

SEQ ID NO: 2236156 - DNA, 25 bp, Homo sapien
tgctaacggtccctggaatctcaat

SEQ ID NO: 2236157 - DNA, 25 bp, Homo sapien
tctgagcccagttcataggaaggtt

SEQ ID NO: 2236158 - DNA, 25 bp, Homo sapien
ttgcctccttctagcaaaagaaaga

SEQ ID NO: 2236159 - DNA, 25 bp, Homo sapien
gaaagaacaacaacgaaaagatgta

SEQ ID NO: 2236160 - DNA, 25 bp, Homo sapien
aaagatgtatttcatgcctcccatt

SEQ ID NO: 2236161 - DNA, 25 bp, Homo sapien
gatgtatttcatgcctcccattttc

SEQ ID NO: 2236162 - DNA, 25 bp, Homo sapien
ctgcaaaaggtgacagaaccttcaa

SEQ ID NO: 2236163 - DNA, 25 bp, Homo sapien
tgcaaaaggtgacagaaccttcaag

SEQ ID NO: 2236164 - DNA, 25 bp, Homo sapien
actgcaaaaggtgacagaaccttca

SEQ ID NO: 2236165 - DNA, 25 bp, Homo sapien
tctgggccatcaagtgtcaggagcc

SEQ ID NO: 2236166 - DNA, 25 bp, Homo sapien
ggccatcaagtgtcaggagcccact

SEQ ID NO: 2236167 - DNA, 25 bp, Homo sapien
ggcaatctgggccatcaagtgtcag

SEQ ID NO: 2236168 - DNA, 25 bp, Homo sapien
gctgtgactgcaaggcaatctgggc

SEQ ID NO: 2236169 - DNA, 25 bp, Homo sapien
cagcccctagggtagcaattttctt

SEQ ID NO: 2236170 - DNA, 25 bp, Homo sapien
tccgacaaacaataagaaagacact

SEQ ID NO: 2236171 - DNA, 25 bp, Homo sapien
tcacattgactatcatctgtgggac

SEQ ID NO: 2236172 - DNA, 25 bp, Homo sapien
tgactatcatctgtgggacagcccc

SEQ ID NO: 2236173 - DNA, 25 bp, Homo sapien
gcgggcgccgggcactgctcactaa

SEQ ID NO: 2236174 - DNA, 25 bp, Homo sapien
agggaagcgggcgccgggcactgct

SEQ ID NO: 2236175 - DNA, 25 bp, Homo sapien
aggtgagggaagcgggcgccgggca

SEQ ID NO: 2236176 - DNA, 25 bp, Homo sapien
aagcgggcgccgggcactgctcact

SEQ ID NO: 2236177 - DNA, 25 bp, Homo sapien
cgtgcacgcgctccgagctccccgg

SEQ ID NO: 2236178 - DNA, 25 bp, Homo sapien
ccggggcgctctcgtccgaggtctg

SEQ ID NO: 2236179 - DNA, 25 bp, Homo sapien
ggccttctccgtctgccacgcgtgc

SEQ ID NO: 2236180 - DNA, 25 bp, Homo sapien
ctgccacgcgtgcacgcgctccgag

SEQ ID NO: 2236181 - DNA, 25 bp, Homo sapien
tgcactggatgcacctaggagctcc

SEQ ID NO: 2236182 - DNA, 25 bp, Homo sapien
tgaagataccgactaccctctgact

SEQ ID NO: 2236183 - DNA, 25 bp, Homo sapien
accactcgcgcacgccctgaagata

SEQ ID NO: 2236184 - DNA, 25 bp, Homo sapien
tctgcactggatgcacctaggagct

SEQ ID NO: 2236185 - DNA, 25 bp, Homo sapien
tttccgaggtgtgcacctggtctgg

SEQ ID NO: 2236186 - DNA, 25 bp, Homo sapien
gcaccaaggcctttccgaggtgtgc

SEQ ID NO: 2236187 - DNA, 25 bp, Homo sapien
aaggcctttccgaggtgtgcacctg

SEQ ID NO: 2236188 - DNA, 25 bp, Homo sapien
tgtgcacctggtctggtactgagct

SEQ ID NO: 2236189 - DNA, 25 bp, Homo sapien
tttcacggcgtttcccatatccaca

SEQ ID NO: 2236190 - DNA, 25 bp, Homo sapien
caaatcacgccctagcatgctgctt

SEQ ID NO: 2236191 - DNA, 25 bp, Homo sapien
gaatgaaccctcctcgcaaatcacg

SEQ ID NO: 2236192 - DNA, 25 bp, Homo sapien
tagcatgctgcttatcatttcacgg

SEQ ID NO: 2236193 - DNA, 25 bp, Homo sapien
cttctagatccttagggtgaaggca

SEQ ID NO: 2236194 - DNA, 25 bp, Homo sapien
ggatgaggcttgagggctcttccct

SEQ ID NO: 2236195 - DNA, 25 bp, Homo sapien
cttcctgctgagaatgtggatgcac

SEQ ID NO: 2236196 - DNA, 25 bp, Homo sapien
tacacaaggtctgatgcactgtcac

SEQ ID NO: 2236197 - DNA, 25 bp, Homo sapien
ggtacacagtgtctcctgaggaaat

SEQ ID NO: 2236198 - DNA, 25 bp, Homo sapien
taccccatggggttcagagaccgag

SEQ ID NO: 2236199 - DNA, 25 bp, Homo sapien
ggttcagagaccgaggctaacccac

SEQ ID NO: 2236200 - DNA, 25 bp, Homo sapien
gaacagcgggtgaccacgctgcgaa

SEQ ID NO: 2236201 - DNA, 25 bp, Homo sapien
tgcgaagaatgagctgtagacaacc

SEQ ID NO: 2236202 - DNA, 25 bp, Homo sapien
ctggcaaacttgtgccaatcgtagc

SEQ ID NO: 2236203 - DNA, 25 bp, Homo sapien
tgccaatcgtagcatccaacctagg

SEQ ID NO: 2236204 - DNA, 25 bp, Homo sapien
ttgtgccaatcgtagcatccaacct

SEQ ID NO: 2236205 - DNA, 25 bp, Homo sapien
aaacttgtgccaatcgtagcatcca

SEQ ID NO: 2236206 - DNA, 25 bp, Homo sapien
tatattctatgctgttgggctcaat

SEQ ID NO: 2236207 - DNA, 25 bp, Homo sapien
ggacttcaaagcctttacctagaga

SEQ ID NO: 2236208 - DNA, 25 bp, Homo sapien
cattcaatagcacttgggcctgtat

SEQ ID NO: 2236209 - DNA, 25 bp, Homo sapien
tacctagagatagaagcccatttgc

SEQ ID NO: 2236210 - DNA, 25 bp, Homo sapien
caggcagctgattttagtgtgagtt

SEQ ID NO: 2236211 - DNA, 25 bp, Homo sapien
gtcaatgaatgatgtgtgcaggcag

SEQ ID NO: 2236212 - DNA, 25 bp, Homo sapien
tgtgcaggcagctgattttagtgtg

SEQ ID NO: 2236213 - DNA, 25 bp, Homo sapien
cacagttgtcaatgaatgatgtgtg

SEQ ID NO: 2236214 - DNA, 25 bp, Homo sapien
tgatcaatcctaactttgatccttt

SEQ ID NO: 2236215 - DNA, 25 bp, Homo sapien
gtttgtagttatcaaccacttggtg

SEQ ID NO: 2236216 - DNA, 25 bp, Homo sapien
tagttatcaaccacttggtgggcat

SEQ ID NO: 2236217 - DNA, 25 bp, Homo sapien
taactttgatcctttggacttggtg

SEQ ID NO: 2236218 - DNA, 25 bp, Homo sapien
tagggatgcaggtccaaactggatc

SEQ ID NO: 2236219 - DNA, 25 bp, Homo sapien
cagtcttggtcctcatctaaactga

SEQ ID NO: 2236220 - DNA, 25 bp, Homo sapien
ggatccgtgatgaccttcaaccctc

SEQ ID NO: 2236221 - DNA, 25 bp, Homo sapien
ggtccaaactggatctccaactgga

SEQ ID NO: 2236222 - DNA, 25 bp, Homo sapien
agggtttcacttccgcctggctgca

SEQ ID NO: 2236223 - DNA, 25 bp, Homo sapien
gactaggtcgtaattggaataatca

SEQ ID NO: 2236224 - DNA, 25 bp, Homo sapien
gaaccacaagttccagactaggtcg

SEQ ID NO: 2236225 - DNA, 25 bp, Homo sapien
cttgagagactggaagggtttcact

SEQ ID NO: 2236226 - DNA, 25 bp, Homo sapien
agcccaccccagggacgattttgag

SEQ ID NO: 2236227 - DNA, 25 bp, Homo sapien
tgtgaccttttgtgtgttgtaaggc

SEQ ID NO: 2236228 - DNA, 25 bp, Homo sapien
tgaccttttgtgtgttgtaaggccc

SEQ ID NO: 2236229 - DNA, 25 bp, Homo sapien
gtgaccttttgtgtgttgtaaggcc

SEQ ID NO: 2236230 - DNA, 25 bp, Homo sapien
cacagagcataaggagaagtaaagg

SEQ ID NO: 2236231 - DNA, 25 bp, Homo sapien
ctgggcaagtcaacatccgaatcat

SEQ ID NO: 2236232 - DNA, 25 bp, Homo sapien
ttaagttcccacagagcataaggag

SEQ ID NO: 2236233 - DNA, 25 bp, Homo sapien
caactgggcaagtcaacatccgaat

SEQ ID NO: 2236234 - DNA, 25 bp, Homo sapien
gaaaagcaacacaaatccagtctgc

SEQ ID NO: 2236235 - DNA, 25 bp, Homo sapien
cacaatgagggtggcccatttggtg

SEQ ID NO: 2236236 - DNA, 25 bp, Homo sapien
aaaatggatcaatgctgttgagaaa

SEQ ID NO: 2236237 - DNA, 25 bp, Homo sapien
tgaaaaatggatcaatgctgttgag

SEQ ID NO: 2236238 - DNA, 25 bp, Homo sapien
aacaaagctctgattccaggcagca

SEQ ID NO: 2236239 - DNA, 25 bp, Homo sapien
ctaacaaagctctgattccaggcag

SEQ ID NO: 2236240 - DNA, 25 bp, Homo sapien
taacaaagctctgattccaggcagc

SEQ ID NO: 2236241 - DNA, 25 bp, Homo sapien
cagacccccagaacaggtgcggccg

SEQ ID NO: 2236242 - DNA, 25 bp, Homo sapien
gtgccagacccccagaacaggtgcg

SEQ ID NO: 2236243 - DNA, 25 bp, Homo sapien
tgccagacccccagaacaggtgcgg

SEQ ID NO: 2236244 - DNA, 25 bp, Homo sapien
acccccagaacaggtgcggccgcac

SEQ ID NO: 2236245 - DNA, 25 bp, Homo sapien
tatcactatgaatctgggattgctg

SEQ ID NO: 2236246 - DNA, 25 bp, Homo sapien
ggattgctgctgatattccagcttc

SEQ ID NO: 2236247 - DNA, 25 bp, Homo sapien
cgtccagacagggagctgattatca

SEQ ID NO: 2236248 - DNA, 25 bp, Homo sapien
gacagggagctgattatcactatga

SEQ ID NO: 2236249 - DNA, 25 bp, Homo sapien
cacatacactcctggctgacgcatt

SEQ ID NO: 2236250 - DNA, 25 bp, Homo sapien
tgcgtaggcactgaggcaaaagctg

SEQ ID NO: 2236251 - DNA, 25 bp, Homo sapien
agtggaccctgtatcacgatatagc

SEQ ID NO: 2236252 - DNA, 25 bp, Homo sapien
gccttgcggttgcagagcattctct

SEQ ID NO: 2236253 - DNA, 25 bp, Homo sapien
acttcagcaagatggttcaacctca

SEQ ID NO: 2236254 - DNA, 25 bp, Homo sapien
ctgtgccttctacttcagcaagatg

SEQ ID NO: 2236255 - DNA, 25 bp, Homo sapien
cttcagcaagatggttcaacctcat

SEQ ID NO: 2236256 - DNA, 25 bp, Homo sapien
actgcaggtgtttctacttcccacc

SEQ ID NO: 2236257 - DNA, 25 bp, Homo sapien
ccataccattctccttgcttggact

SEQ ID NO: 2236258 - DNA, 25 bp, Homo sapien
tccactccctgttacactgcaggtg

SEQ ID NO: 2236259 - DNA, 25 bp, Homo sapien
ctccctgttacactgcaggtgtttc

SEQ ID NO: 2236260 - DNA, 25 bp, Homo sapien
ggcttccgcatagaatacacacagg

SEQ ID NO: 2236261 - DNA, 25 bp, Homo sapien
tctttcaacaggtagaactgagggc

SEQ ID NO: 2236262 - DNA, 25 bp, Homo sapien
taaataccaggctacggagttgggc

SEQ ID NO: 2236263 - DNA, 25 bp, Homo sapien
taagtagcttgtgtcggcttccgca

SEQ ID NO: 2236264 - DNA, 25 bp, Homo sapien
tcaatgcttgtgcaaagagcatata

SEQ ID NO: 2236265 - DNA, 25 bp, Homo sapien
agccaaaagcctatcagagactgat

SEQ ID NO: 2236266 - DNA, 25 bp, Homo sapien
ggcagattggcaccagccagtttca

SEQ ID NO: 2236267 - DNA, 25 bp, Homo sapien
aagcctatcagagactgattgttct

SEQ ID NO: 2236268 - DNA, 25 bp, Homo sapien
tgtaactgaggtaaagggtttctga

SEQ ID NO: 2236269 - DNA, 25 bp, Homo sapien
tctgaagcttgaggtgcacaatgct

SEQ ID NO: 2236270 - DNA, 25 bp, Homo sapien
tgctaccagtgtcagtgcaaatggg

SEQ ID NO: 2236271 - DNA, 25 bp, Homo sapien
acttgatagagtgagctgtgccagg

SEQ ID NO: 2236272 - DNA, 25 bp, Homo sapien
tcacttggcaaatctcttccaaacc

SEQ ID NO: 2236273 - DNA, 25 bp, Homo sapien
atgcatatgtcacttggcaaatctc

SEQ ID NO: 2236274 - DNA, 25 bp, Homo sapien
aggatttctgaacacttggtgcaca

SEQ ID NO: 2236275 - DNA, 25 bp, Homo sapien
ggatttctgaacacttggtgcacat

SEQ ID NO: 2236276 - DNA, 25 bp, Homo sapien
cctgggctgaagagcactggcctca

SEQ ID NO: 2236277 - DNA, 25 bp, Homo sapien
gagaagatggaatctgccaattgaa

SEQ ID NO: 2236278 - DNA, 25 bp, Homo sapien
gaatctgccaattgaagccagacat

SEQ ID NO: 2236279 - DNA, 25 bp, Homo sapien
cagttggactgaactctgagaagat

SEQ ID NO: 2236280 - DNA, 25 bp, Homo sapien
tcagtcctgcatagctgatttctga

SEQ ID NO: 2236281 - DNA, 25 bp, Homo sapien
cctctatttcccaatctagaggcag

SEQ ID NO: 2236282 - DNA, 25 bp, Homo sapien
tttctgagcccgtattctcaatcga

SEQ ID NO: 2236283 - DNA, 25 bp, Homo sapien
tacaaatggtaatagtctgtcgcag

SEQ ID NO: 2236284 - DNA, 25 bp, Homo sapien
catgctgtgcccctggtagggagaa

SEQ ID NO: 2236285 - DNA, 25 bp, Homo sapien
ctccaaagagcccaaccaggttgtt

SEQ ID NO: 2236286 - DNA, 25 bp, Homo sapien
aaccaggttgttacatgctgtgccc

SEQ ID NO: 2236287 - DNA, 25 bp, Homo sapien
cactgctttgagctcatgatgctct

SEQ ID NO: 2236288 - DNA, 25 bp, Homo sapien
ttaatgaagcaatactttcctgagc

SEQ ID NO: 2236289 - DNA, 25 bp, Homo sapien
tcccataattgagggcagatatgac

SEQ ID NO: 2236290 - DNA, 25 bp, Homo sapien
gccgatagagaattgtatcctttaa

SEQ ID NO: 2236291 - DNA, 25 bp, Homo sapien
gacacattcctgtttgccgatagag

SEQ ID NO: 2236292 - DNA, 25 bp, Homo sapien
ttaaaatattgtttccagtgatatt

SEQ ID NO: 2236293 - DNA, 25 bp, Homo sapien
tccagtgatatttcacagtgcacat

SEQ ID NO: 2236294 - DNA, 25 bp, Homo sapien
tattgtttccagtgatatttcacag

SEQ ID NO: 2236295 - DNA, 25 bp, Homo sapien
aaaatattgtttccagtgatatttc

SEQ ID NO: 2236296 - DNA, 25 bp, Homo sapien
cctgcagtggtgtctacattttcac

SEQ ID NO: 2236297 - DNA, 25 bp, Homo sapien
aaaatatccctctttcatctactcc

SEQ ID NO: 2236298 - DNA, 25 bp, Homo sapien
gactctttagcagtgtgatttgcaa

SEQ ID NO: 2236299 - DNA, 25 bp, Homo sapien
actcattcctttgattgaagcattg

SEQ ID NO: 2236300 - DNA, 25 bp, Homo sapien
ggagggacagtttgccaccatttta

SEQ ID NO: 2236301 - DNA, 25 bp, Homo sapien
gaaagagacatcctaaccatatggg

SEQ ID NO: 2236302 - DNA, 25 bp, Homo sapien
tcaggatttagaccaggaaagagac

SEQ ID NO: 2236303 - DNA, 25 bp, Homo sapien
caaatgtgtggtcaatgcatagcac

SEQ ID NO: 2236304 - DNA, 25 bp, Homo sapien
tttactaactagttactgggtgcca

SEQ ID NO: 2236305 - DNA, 25 bp, Homo sapien
tcatggaggcataggaaggaatcat

SEQ ID NO: 2236306 - DNA, 25 bp, Homo sapien
aatggactgtgtctttagagggcac

SEQ ID NO: 2236307 - DNA, 25 bp, Homo sapien
taagtagacaaccaacctagaatca

SEQ ID NO: 2236308 - DNA, 25 bp, Homo sapien
tatcctttatggtcttgtcaatcaa

SEQ ID NO: 2236309 - DNA, 25 bp, Homo sapien
taaaaattgccactcataaggaaag

SEQ ID NO: 2236310 - DNA, 25 bp, Homo sapien
ttttgaaagaaacgatggtgagaag

SEQ ID NO: 2236311 - DNA, 25 bp, Homo sapien
gcaggaatccttgctgtacaacaat

SEQ ID NO: 2236312 - DNA, 25 bp, Homo sapien
gagaccttggagcagtgacccttca

SEQ ID NO: 2236313 - DNA, 25 bp, Homo sapien
gataataatatatcccaggaggcat

SEQ ID NO: 2236314 - DNA, 25 bp, Homo sapien
tacaatcgagtaacttgaacgccag

SEQ ID NO: 2236315 - DNA, 25 bp, Homo sapien
gacccttcagatcactgtaggcaga

SEQ ID NO: 2236316 - DNA, 25 bp, Homo sapien
gggcacatctttcaatgttgattcc

SEQ ID NO: 2236317 - DNA, 25 bp, Homo sapien
gatttttaagctcatcttgacacag

SEQ ID NO: 2236318 - DNA, 25 bp, Homo sapien
caggtgagtctatccaaatctttga

SEQ ID NO: 2236319 - DNA, 25 bp, Homo sapien
tgctagtgtgccctgagataacgag

SEQ ID NO: 2236320 - DNA, 25 bp, Homo sapien
ggttttcattaagctgtggccagta

SEQ ID NO: 2236321 - DNA, 25 bp, Homo sapien
tagcagagcccatgcattttaatgg

SEQ ID NO: 2236322 - DNA, 25 bp, Homo sapien
gctgagactgctaagagtgaaccta

SEQ ID NO: 2236323 - DNA, 25 bp, Homo sapien
ttcctgtgaagtagtgctgggcttt

SEQ ID NO: 2236324 - DNA, 25 bp, Homo sapien
gcaaggtcaagtacaaatttggctc

SEQ ID NO: 2236325 - DNA, 25 bp, Homo sapien
catcacagttgaagaagctacccac

SEQ ID NO: 2236326 - DNA, 25 bp, Homo sapien
cattgtaatgatgccttgtaacaga

SEQ ID NO: 2236327 - DNA, 25 bp, Homo sapien
acagatgaggtggttcccactgctg

SEQ ID NO: 2236328 - DNA, 25 bp, Homo sapien
atttcctgttgactagagtatacac

SEQ ID NO: 2236329 - DNA, 25 bp, Homo sapien
gcaaacatatggatggtggcctggt

SEQ ID NO: 2236330 - DNA, 25 bp, Homo sapien
tagagtatacactgtggcccactgt

SEQ ID NO: 2236331 - DNA, 25 bp, Homo sapien
ggcccactgtgatagggtgactcat

SEQ ID NO: 2236332 - DNA, 25 bp, Homo sapien
cctgaatggtagttcgtgcgcgccc

SEQ ID NO: 2236333 - DNA, 25 bp, Homo sapien
ttaactaagacctggcacctgacgg

SEQ ID NO: 2236334 - DNA, 25 bp, Homo sapien
tagcagcagcgagaggtttcacatt

SEQ ID NO: 2236335 - DNA, 25 bp, Homo sapien
tagggcaggactacactttccggag

SEQ ID NO: 2236336 - DNA, 25 bp, Homo sapien
tacagagacttcagatcacggcagt

SEQ ID NO: 2236337 - DNA, 25 bp, Homo sapien
ttgactttggcagttggaccaccct

SEQ ID NO: 2236338 - DNA, 25 bp, Homo sapien
ggaccacccttcttacgcaggtaca

SEQ ID NO: 2236339 - DNA, 25 bp, Homo sapien
tcatcgctggaaataaccttgaagc

SEQ ID NO: 2236340 - DNA, 25 bp, Homo sapien
tggacaggagaacggacttcctcct

SEQ ID NO: 2236341 - DNA, 25 bp, Homo sapien
ataggaatgtcagtggtccttctgt

SEQ ID NO: 2236342 - DNA, 25 bp, Homo sapien
tctggacaggagaacggacttcctc

SEQ ID NO: 2236343 - DNA, 25 bp, Homo sapien
gtactataataggaatgtcagtggt

SEQ ID NO: 2236344 - DNA, 25 bp, Homo sapien
tttcgggtagccacgagccaggttc

SEQ ID NO: 2236345 - DNA, 25 bp, Homo sapien
actactttcgggtagccacgagcca

SEQ ID NO: 2236346 - DNA, 25 bp, Homo sapien
cagtgatctgagtaactactttcgg

SEQ ID NO: 2236347 - DNA, 25 bp, Homo sapien
tgagtaactactttcgggtagccac

SEQ ID NO: 2236348 - DNA, 25 bp, Homo sapien
cgctggtgcgaccatgctggaacat

SEQ ID NO: 2236349 - DNA, 25 bp, Homo sapien
aatataggtggaagtcccagcacgc

SEQ ID NO: 2236350 - DNA, 25 bp, Homo sapien
ttctcaggagaaactcgctggtgcg

SEQ ID NO: 2236351 - DNA, 25 bp, Homo sapien
tcagaaacactgtgcgggtgtcaat

SEQ ID NO: 2236352 - DNA, 25 bp, Homo sapien
gaagagctcaaagccaatgatgtaa

SEQ ID NO: 2236353 - DNA, 25 bp, Homo sapien
ttctgctgcagtgacataatgacct

SEQ ID NO: 2236354 - DNA, 25 bp, Homo sapien
tcggcggtaagtgcgcaggtccttc

SEQ ID NO: 2236355 - DNA, 25 bp, Homo sapien
aattgtcaggtcttcccattcggcg

SEQ ID NO: 2236356 - DNA, 25 bp, Homo sapien
ggttgttcacattgcggcagacatt

SEQ ID NO: 2236357 - DNA, 25 bp, Homo sapien
tatcacggttgttatagcagcctcc

SEQ ID NO: 2236358 - DNA, 25 bp, Homo sapien
gattctgcaggaaggtatcacggtt

SEQ ID NO: 2236359 - DNA, 25 bp, Homo sapien
agttgcggcaaaagtcctccaagct

SEQ ID NO: 2236360 - DNA, 25 bp, Homo sapien
catcatcagacataacaagccccag

SEQ ID NO: 2236361 - DNA, 25 bp, Homo sapien
taacaagccccaggttcttgcgatc

SEQ ID NO: 2236362 - DNA, 25 bp, Homo sapien
agtcagttgctgccactcttcagaa

SEQ ID NO: 2236363 - DNA, 25 bp, Homo sapien
ggttcttgcgatctgatgcagtcag

SEQ ID NO: 2236364 - DNA, 25 bp, Homo sapien
tctctctccaagacgaattttgcga

SEQ ID NO: 2236365 - DNA, 25 bp, Homo sapien
gaccccaatcagtttcaacttcttg

SEQ ID NO: 2236366 - DNA, 25 bp, Homo sapien
tcagtcatggtataggtatggccct

SEQ ID NO: 2236367 - DNA, 25 bp, Homo sapien
gtttctcaggcgaaccatatacacc

SEQ ID NO: 2236368 - DNA, 25 bp, Homo sapien
cattaattggcttaacccagtagga

SEQ ID NO: 2236369 - DNA, 25 bp, Homo sapien
gatatataaaggcacaggaattggg

SEQ ID NO: 2236370 - DNA, 25 bp, Homo sapien
attgggagacccaatcctgactcct

SEQ ID NO: 2236371 - DNA, 25 bp, Homo sapien
caaagaaagatatataaaggcacag

SEQ ID NO: 2236372 - DNA, 25 bp, Homo sapien
tcatgggtcttcgggttaagggcga

SEQ ID NO: 2236373 - DNA, 25 bp, Homo sapien
cttccacaccagggcaaaatgtgta

SEQ ID NO: 2236374 - DNA, 25 bp, Homo sapien
ttccacaccagggcaaaatgtgtat

SEQ ID NO: 2236375 - DNA, 25 bp, Homo sapien
tatacagtggttgtttttcatgagt

SEQ ID NO: 2236376 - DNA, 25 bp, Homo sapien
aatgagtatacagtggttgtttttc

SEQ ID NO: 2236377 - DNA, 25 bp, Homo sapien
tgccaggaatgagtatacagtggtt

SEQ ID NO: 2236378 - DNA, 25 bp, Homo sapien
tctgccaggaatgagtatacagtgg

SEQ ID NO: 2236379 - DNA, 25 bp, Homo sapien
cagttctccgaatagcttgtacttc

SEQ ID NO: 2236380 - DNA, 25 bp, Homo sapien
cctttctgcatgtcaacagtttcag

SEQ ID NO: 2236381 - DNA, 25 bp, Homo sapien
caatgtgcccgtgaagtccacaata

SEQ ID NO: 2236382 - DNA, 25 bp, Homo sapien
gaacagcagatcagaccacctttgg

SEQ ID NO: 2236383 - DNA, 25 bp, Homo sapien
aaaactcattcatggaagtggagaa

SEQ ID NO: 2236384 - DNA, 25 bp, Homo sapien
gagaagaccagatctccgttaatgg

SEQ ID NO: 2236385 - DNA, 25 bp, Homo sapien
aacgaaagtgaaatatcccagcgta

SEQ ID NO: 2236386 - DNA, 25 bp, Homo sapien
tgggcaacaagtcatcaatcaccac

SEQ ID NO: 2236387 - DNA, 25 bp, Homo sapien
gaaaccattggcttgtgccccagtc

SEQ ID NO: 2236388 - DNA, 25 bp, Homo sapien
gctaatgttgcccacaatcagatgg

SEQ ID NO: 2236389 - DNA, 25 bp, Homo sapien
tgagactcctgaacagccaaacagg

SEQ ID NO: 2236390 - DNA, 25 bp, Homo sapien
cccttgggtcagctggtggttgcta

SEQ ID NO: 2236391 - DNA, 25 bp, Homo sapien
tcaggcagaaatgttggatcacaga

SEQ ID NO: 2236392 - DNA, 25 bp, Homo sapien
tgtctttgatgcattcctgcttcag

SEQ ID NO: 2236393 - DNA, 25 bp, Homo sapien
ctttccaggaagcagtcggttgtag

SEQ ID NO: 2236394 - DNA, 25 bp, Homo sapien
cagtcggttgtagaaaagagaatca

SEQ ID NO: 2236395 - DNA, 25 bp, Homo sapien
ccgctgctgctgttagccaggtaac

SEQ ID NO: 2236396 - DNA, 25 bp, Homo sapien
cgctgctgctgttagccaggtaacc

SEQ ID NO: 2236397 - DNA, 25 bp, Homo sapien
tgctgctgttagccaggtaacccca

SEQ ID NO: 2236398 - DNA, 25 bp, Homo sapien
gctgctgctgttagccaggtaaccc

SEQ ID NO: 2236399 - DNA, 25 bp, Homo sapien
aaagtctgttcagtcagtgtggctg

SEQ ID NO: 2236400 - DNA, 25 bp, Homo sapien
tctgttcagtcagtgtggctgaaca

SEQ ID NO: 2236401 - DNA, 25 bp, Homo sapien
agtctgttcagtcagtgtggctgaa

SEQ ID NO: 2236402 - DNA, 25 bp, Homo sapien
tgttcagtcagtgtggctgaacaaa

SEQ ID NO: 2236403 - DNA, 25 bp, Homo sapien
tgtcagcttccaaaccaaatagcct

SEQ ID NO: 2236404 - DNA, 25 bp, Homo sapien
aaagtgtgaacagaagccacggaag

SEQ ID NO: 2236405 - DNA, 25 bp, Homo sapien
gcttgaaatcctctaaggccagtga

SEQ ID NO: 2236406 - DNA, 25 bp, Homo sapien
cacggaagaggatggactgtcagct

SEQ ID NO: 2236407 - DNA, 25 bp, Homo sapien
ctgcaagctggtatgtgtagacaca

SEQ ID NO: 2236408 - DNA, 25 bp, Homo sapien
gacaaatatagctgtagagacagtc

SEQ ID NO: 2236409 - DNA, 25 bp, Homo sapien
acaggagcctgcctagacaaatata

SEQ ID NO: 2236410 - DNA, 25 bp, Homo sapien
ggtaatgtaattgaaacttctttca

SEQ ID NO: 2236411 - DNA, 25 bp, Homo sapien
gttctctttggatttcaatagatcc

SEQ ID NO: 2236412 - DNA, 25 bp, Homo sapien
ttctctttggatttcaatagatcca

SEQ ID NO: 2236413 - DNA, 25 bp, Homo sapien
taagggatcattggcttcaagctgc

SEQ ID NO: 2236414 - DNA, 25 bp, Homo sapien
tacaactgtaagacaactgggagca

SEQ ID NO: 2236415 - DNA, 25 bp, Homo sapien
tattggtcatcggtcaagcagagtc

SEQ ID NO: 2236416 - DNA, 25 bp, Homo sapien
tagctaagccaaagcgggaggtctg

SEQ ID NO: 2236417 - DNA, 25 bp, Homo sapien
gttcaaggtaagcaccaatcactgg

SEQ ID NO: 2236418 - DNA, 25 bp, Homo sapien
cattgtacccagagtattgaaggga

SEQ ID NO: 2236419 - DNA, 25 bp, Homo sapien
caatcactggtctaagacttggact

SEQ ID NO: 2236420 - DNA, 25 bp, Homo sapien
cagggtgattgggagcattgtaccc

SEQ ID NO: 2236421 - DNA, 25 bp, Homo sapien
aatagctacacatccactttcaggt

SEQ ID NO: 2236422 - DNA, 25 bp, Homo sapien
tacacatccactttcaggttccttg

SEQ ID NO: 2236423 - DNA, 25 bp, Homo sapien
tcaaatagctacacatccactttca

SEQ ID NO: 2236424 - DNA, 25 bp, Homo sapien
tttcaggttccttggttacttgtga

SEQ ID NO: 2236425 - DNA, 25 bp, Homo sapien
catgtgtttggacccttttgccctg

SEQ ID NO: 2236426 - DNA, 25 bp, Homo sapien
tagttcccaggaagagccttgcagc

SEQ ID NO: 2236427 - DNA, 25 bp, Homo sapien
gaaggccacaggagcagtgtacaca

SEQ ID NO: 2236428 - DNA, 25 bp, Homo sapien
gcccagaaggaggtctcttagaact

SEQ ID NO: 2236429 - DNA, 25 bp, Homo sapien
ctggaaattgtcctcatcagagcag

SEQ ID NO: 2236430 - DNA, 25 bp, Homo sapien
ctcatcagagcaggatggctttggg

SEQ ID NO: 2236431 - DNA, 25 bp, Homo sapien
tggaaattgtcctcatcagagcagg

SEQ ID NO: 2236432 - DNA, 25 bp, Homo sapien
gtcctcatcagagcaggatggcttt

SEQ ID NO: 2236433 - DNA, 25 bp, Homo sapien
aacccgggcctcaatcaggagtgaa

SEQ ID NO: 2236434 - DNA, 25 bp, Homo sapien
gaagttagttgttcagcccagcccc

SEQ ID NO: 2236435 - DNA, 25 bp, Homo sapien
ttggtgctggacaacaaacccgggc

SEQ ID NO: 2236436 - DNA, 25 bp, Homo sapien
tgtgaggcccaagcataaggaaatc

SEQ ID NO: 2236437 - DNA, 25 bp, Homo sapien
gataggcttggatttgtactctgga

SEQ ID NO: 2236438 - DNA, 25 bp, Homo sapien
aatgataggcttggatttgtactct

SEQ ID NO: 2236439 - DNA, 25 bp, Homo sapien
cctactacaatgataggcttggatt

SEQ ID NO: 2236440 - DNA, 25 bp, Homo sapien
cttggatttgtactctggactctga

SEQ ID NO: 2236441 - DNA, 25 bp, Homo sapien
agcgagtccgagtcatccaaggaca

SEQ ID NO: 2236442 - DNA, 25 bp, Homo sapien
ttacatggaatcaccaagcgagtcc

SEQ ID NO: 2236443 - DNA, 25 bp, Homo sapien
gaatcaccaagcgagtccgagtcat

SEQ ID NO: 2236444 - DNA, 25 bp, Homo sapien
caagcgagtccgagtcatccaagga

SEQ ID NO: 2236445 - DNA, 25 bp, Homo sapien
atgtttgtaacaaatacagctgtgc

SEQ ID NO: 2236446 - DNA, 25 bp, Homo sapien
tcccttggagccctacagaacaaaa

SEQ ID NO: 2236447 - DNA, 25 bp, Homo sapien
taatttgcacctgaaattcatttgc

SEQ ID NO: 2236448 - DNA, 25 bp, Homo sapien
cagaaacacacatattgcttagcaa

SEQ ID NO: 2236449 - DNA, 25 bp, Homo sapien
aagcatggtttggttacctcattag

SEQ ID NO: 2236450 - DNA, 25 bp, Homo sapien
ggttacctcattagctttggagacc

SEQ ID NO: 2236451 - DNA, 25 bp, Homo sapien
agtgttcaacccatgtcccaaagca

SEQ ID NO: 2236452 - DNA, 25 bp, Homo sapien
tggtgcctggtgacataaagtgccc

SEQ ID NO: 2236453 - DNA, 25 bp, Homo sapien
tgagtgcaaagaggtttagtaaggt

SEQ ID NO: 2236454 - DNA, 25 bp, Homo sapien
ctgagtgcaaagaggtttagtaagg

SEQ ID NO: 2236455 - DNA, 25 bp, Homo sapien
gtgcaaagaggtttagtaaggtata

SEQ ID NO: 2236456 - DNA, 25 bp, Homo sapien
gagtgcaaagaggtttagtaaggta

SEQ ID NO: 2236457 - DNA, 25 bp, Homo sapien
agctggctgctggaggttccgtttg

SEQ ID NO: 2236458 - DNA, 25 bp, Homo sapien
tagagatgggagactgcttagactt

SEQ ID NO: 2236459 - DNA, 25 bp, Homo sapien
cttgtgcttccggaggctgccagga

SEQ ID NO: 2236460 - DNA, 25 bp, Homo sapien
tgccaggactggtgggcgtagagat

SEQ ID NO: 2236461 - DNA, 25 bp, Homo sapien
ttcggcgcataggaccagggctctt

SEQ ID NO: 2236462 - DNA, 25 bp, Homo sapien
gcgcataggaccagggctcttggct

SEQ ID NO: 2236463 - DNA, 25 bp, Homo sapien
ctggagacttgcttcggcgcatagg

SEQ ID NO: 2236464 - DNA, 25 bp, Homo sapien
cttgcttcggcgcataggaccaggg

SEQ ID NO: 2236465 - DNA, 25 bp, Homo sapien
tttcaggaccacaggcaataaacac

SEQ ID NO: 2236466 - DNA, 25 bp, Homo sapien
gagaaaaatcatcctgagcatagcg

SEQ ID NO: 2236467 - DNA, 25 bp, Homo sapien
tttcatccagagaaaaatcatcctg

SEQ ID NO: 2236468 - DNA, 25 bp, Homo sapien
tgagcatagcgaaatttttcaggac

SEQ ID NO: 2236469 - DNA, 25 bp, Homo sapien
ttgctaaaagctggccgaaaacttg

SEQ ID NO: 2236470 - DNA, 25 bp, Homo sapien
gcaatgggtcccaataggcctgagt

SEQ ID NO: 2236471 - DNA, 25 bp, Homo sapien
gaggaaaacttcatcatgagcaatg

SEQ ID NO: 2236472 - DNA, 25 bp, Homo sapien
ggtagtggcccagaataccatttct

SEQ ID NO: 2236473 - DNA, 25 bp, Homo sapien
tagggcaaaggaactctgtaagaga

SEQ ID NO: 2236474 - DNA, 25 bp, Homo sapien
gggcaaaggaactctgtaagagata

SEQ ID NO: 2236475 - DNA, 25 bp, Homo sapien
ggcaaaggaactctgtaagagatac

SEQ ID NO: 2236476 - DNA, 25 bp, Homo sapien
caaaggaactctgtaagagatacag

SEQ ID NO: 2236477 - DNA, 25 bp, Homo sapien
cagccctaggaagagttgcatcctg

SEQ ID NO: 2236478 - DNA, 25 bp, Homo sapien
gagttgcatcctgttgactacagta

SEQ ID NO: 2236479 - DNA, 25 bp, Homo sapien
ctaggaagagttgcatcctgttgac

SEQ ID NO: 2236480 - DNA, 25 bp, Homo sapien
gcatcctgttgactacagtaaggca

SEQ ID NO: 2236481 - DNA, 25 bp, Homo sapien
agttgggctgttgagtacatgccca

SEQ ID NO: 2236482 - DNA, 25 bp, Homo sapien
ttttccaagagtctgtgtcagctcc

SEQ ID NO: 2236483 - DNA, 25 bp, Homo sapien
agagtctgtgtcagctcccactggg

SEQ ID NO: 2236484 - DNA, 25 bp, Homo sapien
gagtacatgcccaggactgacacct

SEQ ID NO: 2236485 - DNA, 25 bp, Homo sapien
ttgatgaaagctgtaggtcttctcc

SEQ ID NO: 2236486 - DNA, 25 bp, Homo sapien
gatctatatcttttttgtgtcacaa

SEQ ID NO: 2236487 - DNA, 25 bp, Homo sapien
ctagagccttttgagatctatatct

SEQ ID NO: 2236488 - DNA, 25 bp, Homo sapien
caagccctttagagaatttgatgaa

SEQ ID NO: 2236489 - DNA, 25 bp, Homo sapien
tatctcatttcccagggtgttgctg

SEQ ID NO: 2236490 - DNA, 25 bp, Homo sapien
tgggctaaggcagaatttatctcat

SEQ ID NO: 2236491 - DNA, 25 bp, Homo sapien
cccaggctgaccactccaagaacca

SEQ ID NO: 2236492 - DNA, 25 bp, Homo sapien
cccagggtgttgctgctgttactat

SEQ ID NO: 2236493 - DNA, 25 bp, Homo sapien
aatattaggtctattgggaactatc

SEQ ID NO: 2236494 - DNA, 25 bp, Homo sapien
attaggtctattgggaactatctcc

SEQ ID NO: 2236495 - DNA, 25 bp, Homo sapien
tttcaatattaggtctattgggaac

SEQ ID NO: 2236496 - DNA, 25 bp, Homo sapien
ttatttcaatattaggtctattggg

SEQ ID NO: 2236497 - DNA, 25 bp, Homo sapien
tgtttatgcacatcagagtcgtcca

SEQ ID NO: 2236498 - DNA, 25 bp, Homo sapien
cccattcgaggtggctgtttatgca

SEQ ID NO: 2236499 - DNA, 25 bp, Homo sapien
tgcacatcagagtcgtccatttttt

SEQ ID NO: 2236500 - DNA, 25 bp, Homo sapien
cattcgaggtggctgtttatgcaca

SEQ ID NO: 2236501 - DNA, 25 bp, Homo sapien
tcagcagcagctaaactggtaccct

SEQ ID NO: 2236502 - DNA, 25 bp, Homo sapien
aactggtaccctccagtatctctca

SEQ ID NO: 2236503 - DNA, 25 bp, Homo sapien
gctaaactggtaccctccagtatct

SEQ ID NO: 2236504 - DNA, 25 bp, Homo sapien
gcagcagctaaactggtaccctcca

SEQ ID NO: 2236505 - DNA, 25 bp, Homo sapien
gaaattgttacctagcaaccaggcc

SEQ ID NO: 2236506 - DNA, 25 bp, Homo sapien
tacctagcaaccaggccttgcagct

SEQ ID NO: 2236507 - DNA, 25 bp, Homo sapien
ttcccagctgaaggttctttgtgct

SEQ ID NO: 2236508 - DNA, 25 bp, Homo sapien
tttgtgctgagaaattgttacctag

SEQ ID NO: 2236509 - DNA, 25 bp, Homo sapien
cacagccagcgctgttaagctgagt

SEQ ID NO: 2236510 - DNA, 25 bp, Homo sapien
tagcttgctcagtaacagttatttc

SEQ ID NO: 2236511 - DNA, 25 bp, Homo sapien
taccgctcggtgaactgaaccacag

SEQ ID NO: 2236512 - DNA, 25 bp, Homo sapien
ggtccctgtggagtagccaacctcc

SEQ ID NO: 2236513 - DNA, 25 bp, Homo sapien
tttccaaggttaaatccaatctgtc

SEQ ID NO: 2236514 - DNA, 25 bp, Homo sapien
tcttttgtatggcaacgtggaaagg

SEQ ID NO: 2236515 - DNA, 25 bp, Homo sapien
cctgcaattgcctttgtgcttacag

SEQ ID NO: 2236516 - DNA, 25 bp, Homo sapien
gtgcttacagcacccagttcttttg

SEQ ID NO: 2236517 - DNA, 25 bp, Homo sapien
gtatatttacagctccctatgctta

SEQ ID NO: 2236518 - DNA, 25 bp, Homo sapien
ctatgcttaagagaatggtgcatct

SEQ ID NO: 2236519 - DNA, 25 bp, Homo sapien
catctgtctgatggagacgcctggc

SEQ ID NO: 2236520 - DNA, 25 bp, Homo sapien
ccagatattaatataggtggcactt

SEQ ID NO: 2236521 - DNA, 25 bp, Homo sapien
actgttgctgctagccaaggactgg

SEQ ID NO: 2236522 - DNA, 25 bp, Homo sapien
tcttgttcagaagcacacgcacagc

SEQ ID NO: 2236523 - DNA, 25 bp, Homo sapien
ttttacgttgacagaccagttggga

SEQ ID NO: 2236524 - DNA, 25 bp, Homo sapien
cccactgcggatgatggtaaccagc

SEQ ID NO: 2236525 - DNA, 25 bp, Homo sapien
gcagggtgcaaattcgctggaacta

SEQ ID NO: 2236526 - DNA, 25 bp, Homo sapien
cagttgggttcccatcctgccacag

SEQ ID NO: 2236527 - DNA, 25 bp, Homo sapien
cctgccacagcttccaagggctatt

SEQ ID NO: 2236528 - DNA, 25 bp, Homo sapien
caagggctatttcctaccagctggg

SEQ ID NO: 2236529 - DNA, 25 bp, Homo sapien
gaagtctgtcctccattcccagatg

SEQ ID NO: 2236530 - DNA, 25 bp, Homo sapien
ttcccagatgggcagttctaaaata

SEQ ID NO: 2236531 - DNA, 25 bp, Homo sapien
ccagatgggcagttctaaaatataa

SEQ ID NO: 2236532 - DNA, 25 bp, Homo sapien
gtctgtcctccattcccagatgggc

SEQ ID NO: 2236533 - DNA, 25 bp, Homo sapien
tagcggtccccattgcggtagaaac

SEQ ID NO: 2236534 - DNA, 25 bp, Homo sapien
taaatgtaacgcactccctgaggca

SEQ ID NO: 2236535 - DNA, 25 bp, Homo sapien
tcaaagctgcgaaaacggtcagagg

SEQ ID NO: 2236536 - DNA, 25 bp, Homo sapien
tcagacagagatcgcgtcaggtcag

SEQ ID NO: 2236537 - DNA, 25 bp, Homo sapien
gacagtggctcctatcaaattggaa

SEQ ID NO: 2236538 - DNA, 25 bp, Homo sapien
gaaggagctacccaaggttagcatc

SEQ ID NO: 2236539 - DNA, 25 bp, Homo sapien
tggaacttcgggctaaatacattaa

SEQ ID NO: 2236540 - DNA, 25 bp, Homo sapien
gttgtaaatgaatccatagcctgac

SEQ ID NO: 2236541 - DNA, 25 bp, Homo sapien
agattctcctttaaagggacagcct

SEQ ID NO: 2236542 - DNA, 25 bp, Homo sapien
ttgtgctattcatcaaaccctttcc

SEQ ID NO: 2236543 - DNA, 25 bp, Homo sapien
ctttgtgctattcatcaaacccttt

SEQ ID NO: 2236544 - DNA, 25 bp, Homo sapien
ctaagattctcctttaaagggacag

SEQ ID NO: 2236545 - DNA, 25 bp, Homo sapien
gtgcagctatccgacattcataaga

SEQ ID NO: 2236546 - DNA, 25 bp, Homo sapien
ggtgcagctatccgacattcataag

SEQ ID NO: 2236547 - DNA, 25 bp, Homo sapien
gcagctatccgacattcataagaaa

SEQ ID NO: 2236548 - DNA, 25 bp, Homo sapien
cagctatccgacattcataagaaat

SEQ ID NO: 2236549 - DNA, 25 bp, Homo sapien
aatcggatagaataaggcaaaaaag

SEQ ID NO: 2236550 - DNA, 25 bp, Homo sapien
gaaaaaatcggatagaataaggcaa

SEQ ID NO: 2236551 - DNA, 25 bp, Homo sapien
atcggatagaataaggcaaaaaagg

SEQ ID NO: 2236552 - DNA, 25 bp, Homo sapien
tttctgctggttgggtggagatgct

SEQ ID NO: 2236553 - DNA, 25 bp, Homo sapien
ttttctgctggttgggtggagatgc

SEQ ID NO: 2236554 - DNA, 25 bp, Homo sapien
tctgctggttgggtggagatgctga

SEQ ID NO: 2236555 - DNA, 25 bp, Homo sapien
cggttttctgctggttgggtggaga

SEQ ID NO: 2236556 - DNA, 25 bp, Homo sapien
caggccattggcaaagagaaggtct

SEQ ID NO: 2236557 - DNA, 25 bp, Homo sapien
tcagatgtgagtccagggaaaaagt

SEQ ID NO: 2236558 - DNA, 25 bp, Homo sapien
aggcaagacagtgtaggaaacatcc

SEQ ID NO: 2236559 - DNA, 25 bp, Homo sapien
tgacgactcattgaggaaaggagat

SEQ ID NO: 2236560 - DNA, 25 bp, Homo sapien
actcattgaggaaaggagatagcac

SEQ ID NO: 2236561 - DNA, 25 bp, Homo sapien
gggcttgacgactcattgaggaaag

SEQ ID NO: 2236562 - DNA, 25 bp, Homo sapien
ccctgaggggcttgacgactcattg

SEQ ID NO: 2236563 - DNA, 25 bp, Homo sapien
acagcaggatagcatgagctttaga

SEQ ID NO: 2236564 - DNA, 25 bp, Homo sapien
tgcctattacaagaataccactaag

SEQ ID NO: 2236565 - DNA, 25 bp, Homo sapien
gagctttagaggcattgacaatata

SEQ ID NO: 2236566 - DNA, 25 bp, Homo sapien
tgggaactccaagttgatacatgaa

SEQ ID NO: 2236567 - DNA, 25 bp, Homo sapien
ttgcaaaaggtttgttgaaggtgga

SEQ ID NO: 2236568 - DNA, 25 bp, Homo sapien
tcaatgtgcttctccttcgtggcct

SEQ ID NO: 2236569 - DNA, 25 bp, Homo sapien
aatcagaacttttctctcagccacc

SEQ ID NO: 2236570 - DNA, 25 bp, Homo sapien
tgattgtcagtgacaagaagcaaga

SEQ ID NO: 2236571 - DNA, 25 bp, Homo sapien
tgctggtgtcctttatgattgtcag

SEQ ID NO: 2236572 - DNA, 25 bp, Homo sapien
caatcagaacttttctctcagccac

SEQ ID NO: 2236573 - DNA, 25 bp, Homo sapien
gagtactggcttcgatacttcttgc

SEQ ID NO: 2236574 - DNA, 25 bp, Homo sapien
cttgtgattccgaccttcgagggtc

SEQ ID NO: 2236575 - DNA, 25 bp, Homo sapien
cgaccttcgagggtctctggtgaca

SEQ ID NO: 2236576 - DNA, 25 bp, Homo sapien
tggtgacagtactatgccttccttg

SEQ ID NO: 2236577 - DNA, 25 bp, Homo sapien
ctcctgccaagtacatctttatttc

SEQ ID NO: 2236578 - DNA, 25 bp, Homo sapien
ctttctgggttcctgttagctttgc

SEQ ID NO: 2236579 - DNA, 25 bp, Homo sapien
gagttggctgagatctggcacttag

SEQ ID NO: 2236580 - DNA, 25 bp, Homo sapien
gttggctgagatctggcacttagaa

SEQ ID NO: 2236581 - DNA, 25 bp, Homo sapien
gcagagtcatctcgttgagttggct

SEQ ID NO: 2236582 - DNA, 25 bp, Homo sapien
ttaattcattagtaaactatcatat

SEQ ID NO: 2236583 - DNA, 25 bp, Homo sapien
ttcattagtaaactatcatattcat

SEQ ID NO: 2236584 - DNA, 25 bp, Homo sapien
aattcattagtaaactatcatattc

SEQ ID NO: 2236585 - DNA, 25 bp, Homo sapien
tcattagtaaactatcatattcatt

SEQ ID NO: 2236586 - DNA, 25 bp, Homo sapien
cctcagggacatcattcggtccttt

SEQ ID NO: 2236587 - DNA, 25 bp, Homo sapien
ggtcccaaggtcatcaatgtgaatg

SEQ ID NO: 2236588 - DNA, 25 bp, Homo sapien
tcagtcacagtatatagtcgaagcc

SEQ ID NO: 2236589 - DNA, 25 bp, Homo sapien
tagtcgaagccagatattgccattc

SEQ ID NO: 2236590 - DNA, 25 bp, Homo sapien
gggaacagtatttggatcagtcaca

SEQ ID NO: 2236591 - DNA, 25 bp, Homo sapien
gtttcccactaagcccatgctaagg

SEQ ID NO: 2236592 - DNA, 25 bp, Homo sapien
taatggtgaggctttgtttcccact

SEQ ID NO: 2236593 - DNA, 25 bp, Homo sapien
aaggaggagtgataggttttcttct

SEQ ID NO: 2236594 - DNA, 25 bp, Homo sapien
tgccagttcctatttggatcctcac

SEQ ID NO: 2236595 - DNA, 25 bp, Homo sapien
tgtgggttcttcaaaggcctctgtc

SEQ ID NO: 2236596 - DNA, 25 bp, Homo sapien
tcttccttggtggaatggcttccca

SEQ ID NO: 2236597 - DNA, 25 bp, Homo sapien
tctgtcactgaagacccctctactg

SEQ ID NO: 2236598 - DNA, 25 bp, Homo sapien
aataggagtagggaagagaggtaag

SEQ ID NO: 2236599 - DNA, 25 bp, Homo sapien
ctcataatcactcatttcctgcccc

SEQ ID NO: 2236600 - DNA, 25 bp, Homo sapien
tcactcatttcctgccccatcttat

SEQ ID NO: 2236601 - DNA, 25 bp, Homo sapien
tcctgccccatcttatctccatccc

SEQ ID NO: 2236602 - DNA, 25 bp, Homo sapien
tctccccctcataatcactcatttc

SEQ ID NO: 2236603 - DNA, 25 bp, Homo sapien
tcgcccatcaactctgacagcacag

SEQ ID NO: 2236604 - DNA, 25 bp, Homo sapien
tgctcttcacaatgctccttcggct

SEQ ID NO: 2236605 - DNA, 25 bp, Homo sapien
tagagatgcagagtcgaatccccac

SEQ ID NO: 2236606 - DNA, 25 bp, Homo sapien
gctccttcggctcaaacatgtcatc

SEQ ID NO: 2236607 - DNA, 25 bp, Homo sapien
ttcatcacaactaccccatggggat

SEQ ID NO: 2236608 - DNA, 25 bp, Homo sapien
tcatcacaactaccccatggggatc

SEQ ID NO: 2236609 - DNA, 25 bp, Homo sapien
catcacaactaccccatggggatcc

SEQ ID NO: 2236610 - DNA, 25 bp, Homo sapien
tcataactgagtttgactgctgcag

SEQ ID NO: 2236611 - DNA, 25 bp, Homo sapien
ctgagtttgactgctgcagatccca

SEQ ID NO: 2236612 - DNA, 25 bp, Homo sapien
ctgaagctttggactcataactgag

SEQ ID NO: 2236613 - DNA, 25 bp, Homo sapien
aatctgaagctttggactcataact

SEQ ID NO: 2236614 - DNA, 25 bp, Homo sapien
taaaagcccacttcttagctactgg

SEQ ID NO: 2236615 - DNA, 25 bp, Homo sapien
tagctactggccaatccacaccaat

SEQ ID NO: 2236616 - DNA, 25 bp, Homo sapien
caagtttagctactgtgttgcaaga

SEQ ID NO: 2236617 - DNA, 25 bp, Homo sapien
catgaagagggcaaaccctagcttt

SEQ ID NO: 2236618 - DNA, 25 bp, Homo sapien
aagtgcttccggctccaggaaataa

SEQ ID NO: 2236619 - DNA, 25 bp, Homo sapien
tcatcacttcccaaaagcttctttt

SEQ ID NO: 2236620 - DNA, 25 bp, Homo sapien
gtgcaaaatgactcatcacttccca

SEQ ID NO: 2236621 - DNA, 25 bp, Homo sapien
caggaaataaccattcatgtgtttg

SEQ ID NO: 2236622 - DNA, 25 bp, Homo sapien
tgcagatctggagtcttgatccttt

SEQ ID NO: 2236623 - DNA, 25 bp, Homo sapien
cagaactgaacttggaagctggatt

SEQ ID NO: 2236624 - DNA, 25 bp, Homo sapien
tcaagagagagcagcatagttgctt

SEQ ID NO: 2236625 - DNA, 25 bp, Homo sapien
tagttgcttgcagaactgaacttgg

SEQ ID NO: 2236626 - DNA, 25 bp, Homo sapien
cccctccaaagatagaagcagctcg

SEQ ID NO: 2236627 - DNA, 25 bp, Homo sapien
gcattacctttaggggctgatcagg

SEQ ID NO: 2236628 - DNA, 25 bp, Homo sapien
gagggttagaacttcgcttcaccca

SEQ ID NO: 2236629 - DNA, 25 bp, Homo sapien
ccaaagatagaagcagctcgagtgg

SEQ ID NO: 2236630 - DNA, 25 bp, Homo sapien
ctttgggggggacgtctatcatcac

SEQ ID NO: 2236631 - DNA, 25 bp, Homo sapien
tttgggggggacgtctatcatcaca

SEQ ID NO: 2236632 - DNA, 25 bp, Homo sapien
ttgggggggacgtctatcatcacac

SEQ ID NO: 2236633 - DNA, 25 bp, Homo sapien
atctctggagctccacgaccgatca

SEQ ID NO: 2236634 - DNA, 25 bp, Homo sapien
tataatcatcccgagagtaatcatc

SEQ ID NO: 2236635 - DNA, 25 bp, Homo sapien
tcccgagagtaatcatctctggagc

SEQ ID NO: 2236636 - DNA, 25 bp, Homo sapien
ggagctccacgaccgatcatcccgt

SEQ ID NO: 2236637 - DNA, 25 bp, Homo sapien
tgtcatatcagtcttcatagcggtc

SEQ ID NO: 2236638 - DNA, 25 bp, Homo sapien
tccccgcctcctctgtagtcatcat

SEQ ID NO: 2236639 - DNA, 25 bp, Homo sapien
cctctgtagtcatcatccctgcgat

SEQ ID NO: 2236640 - DNA, 25 bp, Homo sapien
ctgtcatatcagtcttcatagcggt

SEQ ID NO: 2236641 - DNA, 25 bp, Homo sapien
tgccttggtcatcatagcgatcccg

SEQ ID NO: 2236642 - DNA, 25 bp, Homo sapien
atagcgatcccggccaccatatcca

SEQ ID NO: 2236643 - DNA, 25 bp, Homo sapien
gggaatcatagcctctatcatagtc

SEQ ID NO: 2236644 - DNA, 25 bp, Homo sapien
gatcccggccaccatatccatccat

SEQ ID NO: 2236645 - DNA, 25 bp, Homo sapien
ccatcccgataccggtctgaatcat

SEQ ID NO: 2236646 - DNA, 25 bp, Homo sapien
ggtctgaatcataacgatcccgata

SEQ ID NO: 2236647 - DNA, 25 bp, Homo sapien
taccggtctgaatcataacgatccc

SEQ ID NO: 2236648 - DNA, 25 bp, Homo sapien
tcccgataccggtctgaatcataac

SEQ ID NO: 2236649 - DNA, 25 bp, Homo sapien
tcatcaaagctgtctgtagcaggac

SEQ ID NO: 2236650 - DNA, 25 bp, Homo sapien
tcaaagctgtctgtagcaggacaag

SEQ ID NO: 2236651 - DNA, 25 bp, Homo sapien
agtcatcaaagctgtctgtagcagg

SEQ ID NO: 2236652 - DNA, 25 bp, Homo sapien
ctagtcatcaaagctgtctgtagca

SEQ ID NO: 2236653 - DNA, 25 bp, Homo sapien
ccagtccgtatctgttttgtcagaa

SEQ ID NO: 2236654 - DNA, 25 bp, Homo sapien
cgtatctgttttgtcagaatcccga

SEQ ID NO: 2236655 - DNA, 25 bp, Homo sapien
agtccgtatctgttttgtcagaatc

SEQ ID NO: 2236656 - DNA, 25 bp, Homo sapien
tccgtatctgttttgtcagaatccc

SEQ ID NO: 2236657 - DNA, 25 bp, Homo sapien
gatcatccctgtctttatcctgtgc

SEQ ID NO: 2236658 - DNA, 25 bp, Homo sapien
gcaacatccactcgaattctcctgt

SEQ ID NO: 2236659 - DNA, 25 bp, Homo sapien
ctatcacggccaaaagaacgatcat

SEQ ID NO: 2236660 - DNA, 25 bp, Homo sapien
tatcctgtgcttgatcagcaacatc

SEQ ID NO: 2236661 - DNA, 25 bp, Homo sapien
cagcataaccaaaacctttcaacct

SEQ ID NO: 2236662 - DNA, 25 bp, Homo sapien
gcactgagcagggaatccaggtcct

SEQ ID NO: 2236663 - DNA, 25 bp, Homo sapien
caggtcctcaaattcagcataacca

SEQ ID NO: 2236664 - DNA, 25 bp, Homo sapien
gactcttcattgagactcagggcac

SEQ ID NO: 2236665 - DNA, 25 bp, Homo sapien
ttctgtaacatcatagggtaggttt

SEQ ID NO: 2236666 - DNA, 25 bp, Homo sapien
tctgtaacatcatagggtaggtttc

SEQ ID NO: 2236667 - DNA, 25 bp, Homo sapien
ctgggttcacgtggtaaacgcactg

SEQ ID NO: 2236668 - DNA, 25 bp, Homo sapien
gattgctgggttcacgtggtaaacg

SEQ ID NO: 2236669 - DNA, 25 bp, Homo sapien
aaaagcagtgtagggtggcgatttg

SEQ ID NO: 2236670 - DNA, 25 bp, Homo sapien
gcagtgtagggtggcgatttgggaa

SEQ ID NO: 2236671 - DNA, 25 bp, Homo sapien
gtgtagggtggcgatttgggaagac

SEQ ID NO: 2236672 - DNA, 25 bp, Homo sapien
ctagaaaagcagtgtagggtggcga

SEQ ID NO: 2236673 - DNA, 25 bp, Homo sapien
gctccggtcgatattgggttcccga

SEQ ID NO: 2236674 - DNA, 25 bp, Homo sapien
ttcccgagcagcccgtggagcagtg

SEQ ID NO: 2236675 - DNA, 25 bp, Homo sapien
ccggtcgatattgggttcccgagca

SEQ ID NO: 2236676 - DNA, 25 bp, Homo sapien
ggatggaacggtcaattggaggcac

SEQ ID NO: 2236677 - DNA, 25 bp, Homo sapien
ctgtgccaagttgtcgaaacatctc

SEQ ID NO: 2236678 - DNA, 25 bp, Homo sapien
atcgtcattgttactgtgccaagtt

SEQ ID NO: 2236679 - DNA, 25 bp, Homo sapien
tcattgttactgtgccaagttgtcg

SEQ ID NO: 2236680 - DNA, 25 bp, Homo sapien
tgttactgtgccaagttgtcgaaac

SEQ ID NO: 2236681 - DNA, 25 bp, Homo sapien
agcccagctgactggtttggaaaca

SEQ ID NO: 2236682 - DNA, 25 bp, Homo sapien
ccaggtcatcgtttcatcagcccag

SEQ ID NO: 2236683 - DNA, 25 bp, Homo sapien
ggtcatcgtttcatcagcccagctg

SEQ ID NO: 2236684 - DNA, 25 bp, Homo sapien
cttccaggtcatcgtttcatcagcc

SEQ ID NO: 2236685 - DNA, 25 bp, Homo sapien
cagaaagtctgttagggagatagtc

SEQ ID NO: 2236686 - DNA, 25 bp, Homo sapien
tctgttagggagatagtcttcccct

SEQ ID NO: 2236687 - DNA, 25 bp, Homo sapien
aagtctgttagggagatagtcttcc

SEQ ID NO: 2236688 - DNA, 25 bp, Homo sapien
agccagaaagtctgttagggagata

SEQ ID NO: 2236689 - DNA, 25 bp, Homo sapien
gcgtggcttgtgctgacggcgcagg

SEQ ID NO: 2236690 - DNA, 25 bp, Homo sapien
gtggcttgtgctgacggcgcaggac

SEQ ID NO: 2236691 - DNA, 25 bp, Homo sapien
aagcgtggcttgtgctgacggcgca

SEQ ID NO: 2236692 - DNA, 25 bp, Homo sapien
gaagcgtggcttgtgctgacggcgc

SEQ ID NO: 2236693 - DNA, 25 bp, Homo sapien
ctggtggggcagcgggaacttgacc

SEQ ID NO: 2236694 - DNA, 25 bp, Homo sapien
tgccgagagtccatgactcggtagc

SEQ ID NO: 2236695 - DNA, 25 bp, Homo sapien
tgggcctgggcgcagtgccgagagt

SEQ ID NO: 2236696 - DNA, 25 bp, Homo sapien
gccgagagtccatgactcggtagca

SEQ ID NO: 2236697 - DNA, 25 bp, Homo sapien
cagtgccgagagtccatgactcggt

SEQ ID NO: 2236698 - DNA, 25 bp, Homo sapien
ctgggtgaccgcccgccgtggtcag

SEQ ID NO: 2236699 - DNA, 25 bp, Homo sapien
ggtgaccgcccgccgtggtcaggtc

SEQ ID NO: 2236700 - DNA, 25 bp, Homo sapien
ccgcccgccgtggtcaggtcctggt

SEQ ID NO: 2236701 - DNA, 25 bp, Homo sapien
tgaccgcccgccgtggtcaggtcct

SEQ ID NO: 2236702 - DNA, 25 bp, Homo sapien
gacttctcaaacacccacccagagt

SEQ ID NO: 2236703 - DNA, 25 bp, Homo sapien
acagcgcagccagatgcggaagttc

SEQ ID NO: 2236704 - DNA, 25 bp, Homo sapien
ccagagtaggcaatctcccctgaaa

SEQ ID NO: 2236705 - DNA, 25 bp, Homo sapien
gagtcacagcgcagccagatgcgga

SEQ ID NO: 2236706 - DNA, 25 bp, Homo sapien
gaaataccagaagctggacttggcg

SEQ ID NO: 2236707 - DNA, 25 bp, Homo sapien
tgagatacgaaataccagaagctgg

SEQ ID NO: 2236708 - DNA, 25 bp, Homo sapien
gagatacgaaataccagaagctgga

SEQ ID NO: 2236709 - DNA, 25 bp, Homo sapien
atacgaaataccagaagctggactt

SEQ ID NO: 2236710 - DNA, 25 bp, Homo sapien
tcatctcagatttcatagacggtag

SEQ ID NO: 2236711 - DNA, 25 bp, Homo sapien
tgactcatctcagatttcatagacg

SEQ ID NO: 2236712 - DNA, 25 bp, Homo sapien
agatttcatagacggtagatgggtc

SEQ ID NO: 2236713 - DNA, 25 bp, Homo sapien
tctcagatttcatagacggtagatg

SEQ ID NO: 2236714 - DNA, 25 bp, Homo sapien
gacacttcgatggactagatcatcg

SEQ ID NO: 2236715 - DNA, 25 bp, Homo sapien
cttgacacttcgatggactagatca

SEQ ID NO: 2236716 - DNA, 25 bp, Homo sapien
cgatggactagatcatcgtagggca

SEQ ID NO: 2236717 - DNA, 25 bp, Homo sapien
ttaaacttgacacttcgatggacta

SEQ ID NO: 2236718 - DNA, 25 bp, Homo sapien
aacagcagcttatattcccaggaag

SEQ ID NO: 2236719 - DNA, 25 bp, Homo sapien
acagcagcttatattcccaggaagt

SEQ ID NO: 2236720 - DNA, 25 bp, Homo sapien
gcttgttaagctgaccagaccgtgg

SEQ ID NO: 2236721 - DNA, 25 bp, Homo sapien
tatgtgcaacaccaaagacgaatct

SEQ ID NO: 2236722 - DNA, 25 bp, Homo sapien
tatctcataggtcaatcggctggct

SEQ ID NO: 2236723 - DNA, 25 bp, Homo sapien
tatcttgcgaggtaagagccagcag

SEQ ID NO: 2236724 - DNA, 25 bp, Homo sapien
gagctggctcctacacataaagggc

SEQ ID NO: 2236725 - DNA, 25 bp, Homo sapien
aacgtgcgtggcctcagttgcgtca

SEQ ID NO: 2236726 - DNA, 25 bp, Homo sapien
gtagggaccaccagctttgacgacc

SEQ ID NO: 2236727 - DNA, 25 bp, Homo sapien
tgaccgtcgcgctcggaaagaaacc

SEQ ID NO: 2236728 - DNA, 25 bp, Homo sapien
gaatgttttgtcaggtagcagctaa

SEQ ID NO: 2236729 - DNA, 25 bp, Homo sapien
cattaataggtgatctatggaggga

SEQ ID NO: 2236730 - DNA, 25 bp, Homo sapien
taatgggcactgtgaatctcaagga

SEQ ID NO: 2236731 - DNA, 25 bp, Homo sapien
catccatatttaagcacgaacgtgc

SEQ ID NO: 2236732 - DNA, 25 bp, Homo sapien
tgttgtggaatatagcttgctaggg

SEQ ID NO: 2236733 - DNA, 25 bp, Homo sapien
gcttaagaaggattggtactggttc

SEQ ID NO: 2236734 - DNA, 25 bp, Homo sapien
gctagggttttgttgacgacttgca

SEQ ID NO: 2236735 - DNA, 25 bp, Homo sapien
catggggaatgagtcttgtaatgtg

SEQ ID NO: 2236736 - DNA, 25 bp, Homo sapien
tagcaccgagtttgtggtcttaaaa

SEQ ID NO: 2236737 - DNA, 25 bp, Homo sapien
tcataccagatagcaaggaacatat

SEQ ID NO: 2236738 - DNA, 25 bp, Homo sapien
gaaaacaataagtatccctagcacc

SEQ ID NO: 2236739 - DNA, 25 bp, Homo sapien
cattatgtcagaaggactcagaaac

SEQ ID NO: 2236740 - DNA, 25 bp, Homo sapien
gaactcaggagtcggagtttgcatt

SEQ ID NO: 2236741 - DNA, 25 bp, Homo sapien
actcaggagtcggagtttgcattga

SEQ ID NO: 2236742 - DNA, 25 bp, Homo sapien
aactcaggagtcggagtttgcattg

SEQ ID NO: 2236743 - DNA, 25 bp, Homo sapien
attggtgtcttttgcacagttagca

SEQ ID NO: 2236744 - DNA, 25 bp, Homo sapien
tctgctttagatttatcccatatgc

SEQ ID NO: 2236745 - DNA, 25 bp, Homo sapien
tactgcactgtattgaattggtgtc

SEQ ID NO: 2236746 - DNA, 25 bp, Homo sapien
gatgtatgtaagtgttttactgcac

SEQ ID NO: 2236747 - DNA, 25 bp, Homo sapien
gaaagcccatctgtgatattgcatt

SEQ ID NO: 2236748 - DNA, 25 bp, Homo sapien
tatttacagtgatcccaaggttgag

SEQ ID NO: 2236749 - DNA, 25 bp, Homo sapien
gatttaccggtagttctgctttcat

SEQ ID NO: 2236750 - DNA, 25 bp, Homo sapien
gaagtgatctttccaattggctaaa

SEQ ID NO: 2236751 - DNA, 25 bp, Homo sapien
taatatgagttaggaatgtagccca

SEQ ID NO: 2236752 - DNA, 25 bp, Homo sapien
tcagctctgcgggaaaatggcatga

SEQ ID NO: 2236753 - DNA, 25 bp, Homo sapien
taatgttggtaaaagccgtccttgc

SEQ ID NO: 2236754 - DNA, 25 bp, Homo sapien
cactgaatggcaacaaagatgggca

SEQ ID NO: 2236755 - DNA, 25 bp, Homo sapien
tcagtgctgctagtggaaaagctcc

SEQ ID NO: 2236756 - DNA, 25 bp, Homo sapien
agagacactcttggatttggcccga

SEQ ID NO: 2236757 - DNA, 25 bp, Homo sapien
tgggcaccactggaccttggcatgg

SEQ ID NO: 2236758 - DNA, 25 bp, Homo sapien
tgtacattggctctgaactgggttc

SEQ ID NO: 2236759 - DNA, 25 bp, Homo sapien
gaatttcttatcatagcagccacat

SEQ ID NO: 2236760 - DNA, 25 bp, Homo sapien
tctgtaagtccctcatgtgttttgg

SEQ ID NO: 2236761 - DNA, 25 bp, Homo sapien
ttttgactaaattcctgataacttc

SEQ ID NO: 2236762 - DNA, 25 bp, Homo sapien
gcagccacatatcttttgactaaat

SEQ ID NO: 2236763 - DNA, 25 bp, Homo sapien
gtatcaggctgtcagcattgcgttc

SEQ ID NO: 2236764 - DNA, 25 bp, Homo sapien
tgattttgtatcaggctgtcagcat

SEQ ID NO: 2236765 - DNA, 25 bp, Homo sapien
gttgattttgtatcaggctgtcagc

SEQ ID NO: 2236766 - DNA, 25 bp, Homo sapien
ttttgtatcaggctgtcagcattgc

SEQ ID NO: 2236767 - DNA, 25 bp, Homo sapien
aagttgcgccttctccgtctaccgt

SEQ ID NO: 2236768 - DNA, 25 bp, Homo sapien
cgtctaccgtcagggtctcttttgg

SEQ ID NO: 2236769 - DNA, 25 bp, Homo sapien
tcaaagtaactcatccagagcttcg

SEQ ID NO: 2236770 - DNA, 25 bp, Homo sapien
gaaggtgttgttgaaccagttacca

SEQ ID NO: 2236771 - DNA, 25 bp, Homo sapien
cattctttgctaaggtgctcatgta

SEQ ID NO: 2236772 - DNA, 25 bp, Homo sapien
taactggccttgttgccttaggctg

SEQ ID NO: 2236773 - DNA, 25 bp, Homo sapien
tgctcagttaatgattgcacagtga

SEQ ID NO: 2236774 - DNA, 25 bp, Homo sapien
ggcctttccttactacttgtgtaga

SEQ ID NO: 2236775 - DNA, 25 bp, Homo sapien
ttctcctgttcctgtcctccctttc

SEQ ID NO: 2236776 - DNA, 25 bp, Homo sapien
ttgtcagtttcaatttttctcctgt

SEQ ID NO: 2236777 - DNA, 25 bp, Homo sapien
tcttgtcagtttcaatttttctcct

SEQ ID NO: 2236778 - DNA, 25 bp, Homo sapien
cttctctgtagtcatcttgtcagtt

SEQ ID NO: 2236779 - DNA, 25 bp, Homo sapien
gagctttggtatgggcacatcaata

SEQ ID NO: 2236780 - DNA, 25 bp, Homo sapien
tttctgagctttggtatgggcacat

SEQ ID NO: 2236781 - DNA, 25 bp, Homo sapien
tcaaggctcgactccgcaagaacct

SEQ ID NO: 2236782 - DNA, 25 bp, Homo sapien
ccccagtaaaattgcaactcaaggc

SEQ ID NO: 2236783 - DNA, 25 bp, Homo sapien
tatgccgatgttgccccaacctgaa

SEQ ID NO: 2236784 - DNA, 25 bp, Homo sapien
tgaaaccaaagtaagcacgcttgta

SEQ ID NO: 2236785 - DNA, 25 bp, Homo sapien
ccaaagtaagcacgcttgtaaagca

SEQ ID NO: 2236786 - DNA, 25 bp, Homo sapien
ctatgccgatgttgccccaacctga

SEQ ID NO: 2236787 - DNA, 25 bp, Homo sapien
tgtatgttccaaacatggtagctcc

SEQ ID NO: 2236788 - DNA, 25 bp, Homo sapien
aaggccaaatacagaccagaagagt

SEQ ID NO: 2236789 - DNA, 25 bp, Homo sapien
tggtagctcctacaaactcggtgaa

SEQ ID NO: 2236790 - DNA, 25 bp, Homo sapien
tgttcagcagcactaccagggagat

SEQ ID NO: 2236791 - DNA, 25 bp, Homo sapien
ctgacccttcgggtggatccacagt

SEQ ID NO: 2236792 - DNA, 25 bp, Homo sapien
ccttcgggtggatccacagtgagca

SEQ ID NO: 2236793 - DNA, 25 bp, Homo sapien
gacccttcgggtggatccacagtga

SEQ ID NO: 2236794 - DNA, 25 bp, Homo sapien
acctctgacccttcgggtggatcca

SEQ ID NO: 2236795 - DNA, 25 bp, Homo sapien
tgtgaacagggatatgagacgcaac

SEQ ID NO: 2236796 - DNA, 25 bp, Homo sapien
cgaagagtgcttccgcaatcagagt

SEQ ID NO: 2236797 - DNA, 25 bp, Homo sapien
catcggatccccttgcagttgttag

SEQ ID NO: 2236798 - DNA, 25 bp, Homo sapien
caagcagcatgcgtcccaaagagat

SEQ ID NO: 2236799 - DNA, 25 bp, Homo sapien
gtgcacaagatgaggggtacagtga

SEQ ID NO: 2236800 - DNA, 25 bp, Homo sapien
acaagatgaggggtacagtgaacat

SEQ ID NO: 2236801 - DNA, 25 bp, Homo sapien
tgcacaagatgaggggtacagtgaa

SEQ ID NO: 2236802 - DNA, 25 bp, Homo sapien
cacaagatgaggggtacagtgaaca

SEQ ID NO: 2236803 - DNA, 25 bp, Homo sapien
gcttaatgtagccaaaatcgctgtg

SEQ ID NO: 2236804 - DNA, 25 bp, Homo sapien
tcagtgcaaaagcttaatgtagcca

SEQ ID NO: 2236805 - DNA, 25 bp, Homo sapien
aaatcgctgtgtaggaaatatggca

SEQ ID NO: 2236806 - DNA, 25 bp, Homo sapien
aaaatcgctgtgtaggaaatatggc

SEQ ID NO: 2236807 - DNA, 25 bp, Homo sapien
tcagtaaatccaccatcccacattt

SEQ ID NO: 2236808 - DNA, 25 bp, Homo sapien
gccaggtagagggagttcattgcaa

SEQ ID NO: 2236809 - DNA, 25 bp, Homo sapien
aaaatccatcaggttccaccagtca

SEQ ID NO: 2236810 - DNA, 25 bp, Homo sapien
caccagtcatggatgtattcagtaa

SEQ ID NO: 2236811 - DNA, 25 bp, Homo sapien
tagacagcatgggaaacaggaaccc

SEQ ID NO: 2236812 - DNA, 25 bp, Homo sapien
tatcatccattccacgacagttggg

SEQ ID NO: 2236813 - DNA, 25 bp, Homo sapien
gatgaacagcccaaggttgctcctg

SEQ ID NO: 2236814 - DNA, 25 bp, Homo sapien
gaagcttgactacccagtgtttccg

SEQ ID NO: 2236815 - DNA, 25 bp, Homo sapien
ggcttctgtcagcccctgtccctca

SEQ ID NO: 2236816 - DNA, 25 bp, Homo sapien
gggcaaagctttcaacatgggcagt

SEQ ID NO: 2236817 - DNA, 25 bp, Homo sapien
gacaaaatagttgccacccctgcag

SEQ ID NO: 2236818 - DNA, 25 bp, Homo sapien
ggtacatttaaagggacagtctcca

SEQ ID NO: 2236819 - DNA, 25 bp, Homo sapien
gatgccaatggtagcagtatgccaa

SEQ ID NO: 2236820 - DNA, 25 bp, Homo sapien
ccacaactggtgcttagtctttctc

SEQ ID NO: 2236821 - DNA, 25 bp, Homo sapien
ggaggccacaactggtgcttagtct

SEQ ID NO: 2236822 - DNA, 25 bp, Homo sapien
ttcctgaagttagggactaaatcca

SEQ ID NO: 2236823 - DNA, 25 bp, Homo sapien
gtctttctcttatcaaatttctgag

SEQ ID NO: 2236824 - DNA, 25 bp, Homo sapien
ccacaaacctcgactcatcgagaaa

SEQ ID NO: 2236825 - DNA, 25 bp, Homo sapien
catttgtactgggtatttcttcatt

SEQ ID NO: 2236826 - DNA, 25 bp, Homo sapien
ttccatttgtactgggtatttcttc

SEQ ID NO: 2236827 - DNA, 25 bp, Homo sapien
aacctcgactcatcgagaaaaattc

SEQ ID NO: 2236828 - DNA, 25 bp, Homo sapien
gagagctcctcatactcggccttga

SEQ ID NO: 2236829 - DNA, 25 bp, Homo sapien
tatagatgttcagtcgggagcgaga

SEQ ID NO: 2236830 - DNA, 25 bp, Homo sapien
gcaaagagcttgcactgctgagaga

SEQ ID NO: 2236831 - DNA, 25 bp, Homo sapien
tccacacagttgcagcggatctggt

SEQ ID NO: 2236832 - DNA, 25 bp, Homo sapien
ccttctgctttgtcctccttcatca

SEQ ID NO: 2236833 - DNA, 25 bp, Homo sapien
cttctgctttgtcctccttcatcat

SEQ ID NO: 2236834 - DNA, 25 bp, Homo sapien
cccttctgctttgtcctccttcatc

SEQ ID NO: 2236835 - DNA, 25 bp, Homo sapien
tagaatactgttgctgacctgttgg

SEQ ID NO: 2236836 - DNA, 25 bp, Homo sapien
gacctgttggcagttgccctaaatg

SEQ ID NO: 2236837 - DNA, 25 bp, Homo sapien
gcagctgacgctggtctccagaggt

SEQ ID NO: 2236838 - DNA, 25 bp, Homo sapien
ctaaatgtaagcatagtcctccaga

SEQ ID NO: 2236839 - DNA, 25 bp, Homo sapien
tggtgctctcggcaggcatgcatgc

SEQ ID NO: 2236840 - DNA, 25 bp, Homo sapien
aagtggccaatcacatgcttagagg

SEQ ID NO: 2236841 - DNA, 25 bp, Homo sapien
tcacatgcttagaggtaaagtccat

SEQ ID NO: 2236842 - DNA, 25 bp, Homo sapien
aggatgagggatagggccccaatca

SEQ ID NO: 2236843 - DNA, 25 bp, Homo sapien
ggatctgctgagtgaaatatccagg

SEQ ID NO: 2236844 - DNA, 25 bp, Homo sapien
cctggatctgctgagtgaaatatcc

SEQ ID NO: 2236845 - DNA, 25 bp, Homo sapien
atctgctgagtgaaatatccagggc

SEQ ID NO: 2236846 - DNA, 25 bp, Homo sapien
ctagcccagtgtcctggatctgctg

SEQ ID NO: 2236847 - DNA, 25 bp, Homo sapien
gctgtccccctccacactgtgtaat

SEQ ID NO: 2236848 - DNA, 25 bp, Homo sapien
tccccctccacactgtgtaatctca

SEQ ID NO: 2236849 - DNA, 25 bp, Homo sapien
cccctccacactgtgtaatctcagt

SEQ ID NO: 2236850 - DNA, 25 bp, Homo sapien
tgtccccctccacactgtgtaatct

SEQ ID NO: 2236851 - DNA, 25 bp, Homo sapien
tgagatttaatctctctagctcatc

SEQ ID NO: 2236852 - DNA, 25 bp, Homo sapien
aaatgagtaattatggaagagccca

SEQ ID NO: 2236853 - DNA, 25 bp, Homo sapien
acttatcagtgttgttgagatttaa

SEQ ID NO: 2236854 - DNA, 25 bp, Homo sapien
ctgtgagaccaattttaattttgag

SEQ ID NO: 2236855 - DNA, 25 bp, Homo sapien
ctctccgctgggccgcctgtagctg

SEQ ID NO: 2236856 - DNA, 25 bp, Homo sapien
ctgcttctctccgctgggccgcctg

SEQ ID NO: 2236857 - DNA, 25 bp, Homo sapien
cttctctccgctgggccgcctgtag

SEQ ID NO: 2236858 - DNA, 25 bp, Homo sapien
tgcttctctccgctgggccgcctgt

SEQ ID NO: 2236859 - DNA, 25 bp, Homo sapien
ccttgcgtatggcatagagcaatgc

SEQ ID NO: 2236860 - DNA, 25 bp, Homo sapien
gtggttcagcagtagctccatgatc

SEQ ID NO: 2236861 - DNA, 25 bp, Homo sapien
tatggcatagagcaatgcatcaccc

SEQ ID NO: 2236862 - DNA, 25 bp, Homo sapien
tgcatcacccacatacacgctgtgg

SEQ ID NO: 2236863 - DNA, 25 bp, Homo sapien
atgagcagggcactccggcccaagg

SEQ ID NO: 2236864 - DNA, 25 bp, Homo sapien
gggtccatgcagttgatgttaacat

SEQ ID NO: 2236865 - DNA, 25 bp, Homo sapien
acattatagtagatctcagcctcct

SEQ ID NO: 2236866 - DNA, 25 bp, Homo sapien
cggcccaaggggtccatgcagttga

SEQ ID NO: 2236867 - DNA, 25 bp, Homo sapien
tgcggtctctgtacggtgagtagtt

SEQ ID NO: 2236868 - DNA, 25 bp, Homo sapien
cggtgagtagttgacctttttgtag

SEQ ID NO: 2236869 - DNA, 25 bp, Homo sapien
cacaatttgcagggggatgcggtct

SEQ ID NO: 2236870 - DNA, 25 bp, Homo sapien
agagagctctgtctcagccctcaca

SEQ ID NO: 2236871 - DNA, 25 bp, Homo sapien
ccctctgaaacccagttggcaaatg

SEQ ID NO: 2236872 - DNA, 25 bp, Homo sapien
cttccctctgaaacccagttggcaa

SEQ ID NO: 2236873 - DNA, 25 bp, Homo sapien
tgctggcccatcaagttgctcccac

SEQ ID NO: 2236874 - DNA, 25 bp, Homo sapien
tcaaagcctgaacgtcagttcccag

SEQ ID NO: 2236875 - DNA, 25 bp, Homo sapien
ggccaattagataggcattaggcat

SEQ ID NO: 2236876 - DNA, 25 bp, Homo sapien
gcaatatggccaattagataggcat

SEQ ID NO: 2236877 - DNA, 25 bp, Homo sapien
tgaaatccagccagcaatatggcca

SEQ ID NO: 2236878 - DNA, 25 bp, Homo sapien
tccagccagcaatatggccaattag

SEQ ID NO: 2236879 - DNA, 25 bp, Homo sapien
cagattctcagaagtctgcctgact

SEQ ID NO: 2236880 - DNA, 25 bp, Homo sapien
tcttcacaacttgcctcttcaggga

SEQ ID NO: 2236881 - DNA, 25 bp, Homo sapien
gctgcttcgggtatcttcatcatga

SEQ ID NO: 2236882 - DNA, 25 bp, Homo sapien
gctttgacagccatagacctttctt

SEQ ID NO: 2236883 - DNA, 25 bp, Homo sapien
ggggctttggcatgctagggcttct

SEQ ID NO: 2236884 - DNA, 25 bp, Homo sapien
tgttccactgccctcatatccatga

SEQ ID NO: 2236885 - DNA, 25 bp, Homo sapien
cttgctttggctgtgctgaattcct

SEQ ID NO: 2236886 - DNA, 25 bp, Homo sapien
cagtgttccactgccctcatatcca

SEQ ID NO: 2236887 - DNA, 25 bp, Homo sapien
tatatagtccaaggtaaggatgagc

SEQ ID NO: 2236888 - DNA, 25 bp, Homo sapien
tcttatatagtccaaggtaaggatg

SEQ ID NO: 2236889 - DNA, 25 bp, Homo sapien
tatagtccaaggtaaggatgagctg

SEQ ID NO: 2236890 - DNA, 25 bp, Homo sapien
agtccaaggtaaggatgagctggca

SEQ ID NO: 2236891 - DNA, 25 bp, Homo sapien
gtcgaacttgaccatgtatttccca

SEQ ID NO: 2236892 - DNA, 25 bp, Homo sapien
ggctcggtcgaacttgaccatgtat

SEQ ID NO: 2236893 - DNA, 25 bp, Homo sapien
tgagggctcggtcgaacttgaccat

SEQ ID NO: 2236894 - DNA, 25 bp, Homo sapien
ctcctgagggctcggtcgaacttga

SEQ ID NO: 2236895 - DNA, 25 bp, Homo sapien
gaagctttgtggaaaggtcctgtgg

SEQ ID NO: 2236896 - DNA, 25 bp, Homo sapien
ccacttgatgttcccatgcaaatgt

SEQ ID NO: 2236897 - DNA, 25 bp, Homo sapien
cccacttgatgttcccatgcaaatg

SEQ ID NO: 2236898 - DNA, 25 bp, Homo sapien
ccccacttgatgttcccatgcaaat

SEQ ID NO: 2236899 - DNA, 25 bp, Homo sapien
gtttctcacagtccttggcaggtac

SEQ ID NO: 2236900 - DNA, 25 bp, Homo sapien
ctgacaaagatcgtgattctgtgac

SEQ ID NO: 2236901 - DNA, 25 bp, Homo sapien
gacttgcagcaatgttggtcctgaa

SEQ ID NO: 2236902 - DNA, 25 bp, Homo sapien
tccagcctcttgtgggtttctcaca

SEQ ID NO: 2236903 - DNA, 25 bp, Homo sapien
ttccacagtcaagttgtgctgctcc

SEQ ID NO: 2236904 - DNA, 25 bp, Homo sapien
tccacagtcaagttgtgctgctcca

SEQ ID NO: 2236905 - DNA, 25 bp, Homo sapien
gcccccaccccatgacaggccctgg

SEQ ID NO: 2236906 - DNA, 25 bp, Homo sapien
aggcccccaccccatgacaggccct

SEQ ID NO: 2236907 - DNA, 25 bp, Homo sapien
ctaatgcaatcgctcccccaggccc

SEQ ID NO: 2236908 - DNA, 25 bp, Homo sapien
ctcctaatgcaatcgctcccccagg

SEQ ID NO: 2236909 - DNA, 25 bp, Homo sapien
aaattatgaaacatcctgataggtg

SEQ ID NO: 2236910 - DNA, 25 bp, Homo sapien
caccactgtcaccaaagattggcaa

SEQ ID NO: 2236911 - DNA, 25 bp, Homo sapien
tatccggcttgtactggctacttcc

SEQ ID NO: 2236912 - DNA, 25 bp, Homo sapien
tacctggtggatcttctcttagacc

SEQ ID NO: 2236913 - DNA, 25 bp, Homo sapien
agtctggactccttaacactaaagg

SEQ ID NO: 2236914 - DNA, 25 bp, Homo sapien
tgtttgccgatttccggaccagtgc

SEQ ID NO: 2236915 - DNA, 25 bp, Homo sapien
aaaatgacagaaatctctgatctat

SEQ ID NO: 2236916 - DNA, 25 bp, Homo sapien
taggagatcttgctgaagttttgtt

SEQ ID NO: 2236917 - DNA, 25 bp, Homo sapien
catttgcaatgcaaccaactgcttc

SEQ ID NO: 2236918 - DNA, 25 bp, Homo sapien
taaaatctgtgtcgtctggatgtcc

SEQ ID NO: 2236919 - DNA, 25 bp, Homo sapien
gaaacagcagccgactgggacagcc

SEQ ID NO: 2236920 - DNA, 25 bp, Homo sapien
ccggactcctcttttgcggcgcgaa

SEQ ID NO: 2236921 - DNA, 25 bp, Homo sapien
tgagccaagtggttttttcggataa

SEQ ID NO: 2236922 - DNA, 25 bp, Homo sapien
caagctccagctgttaggtagcggc

SEQ ID NO: 2236923 - DNA, 25 bp, Homo sapien
ggtgtaaagacgagcgcaagtactg

SEQ ID NO: 2236924 - DNA, 25 bp, Homo sapien
aaacttgcctgtaacagatcggccc

SEQ ID NO: 2236925 - DNA, 25 bp, Homo sapien
ggatgctcagttattgccaaacttg

SEQ ID NO: 2236926 - DNA, 25 bp, Homo sapien
cccttttctacactagaggtttctg

SEQ ID NO: 2236927 - DNA, 25 bp, Homo sapien
tctacactagaggtttctgtcccct

SEQ ID NO: 2236928 - DNA, 25 bp, Homo sapien
tttctacactagaggtttctgtccc

SEQ ID NO: 2236929 - DNA, 25 bp, Homo sapien
tacactagaggtttctgtccccttc

SEQ ID NO: 2236930 - DNA, 25 bp, Homo sapien
ttcccttctttctgcgcccggcttc

SEQ ID NO: 2236931 - DNA, 25 bp, Homo sapien
tggctgcgagctgcggacaacccgt

SEQ ID NO: 2236932 - DNA, 25 bp, Homo sapien
gcggacaacccgtcgtggttgtgat

SEQ ID NO: 2236933 - DNA, 25 bp, Homo sapien
gggaaaatcaaggaggcacgctccc

SEQ ID NO: 2236934 - DNA, 25 bp, Homo sapien
tggcgaggctgctccggcgaccata

SEQ ID NO: 2236935 - DNA, 25 bp, Homo sapien
cgaccataggtcattcaggaggaag

SEQ ID NO: 2236936 - DNA, 25 bp, Homo sapien
ggctgctccggcgaccataggtcat

SEQ ID NO: 2236937 - DNA, 25 bp, Homo sapien
tccggcgaccataggtcattcagga

SEQ ID NO: 2236938 - DNA, 25 bp, Homo sapien
gagacttctacctgcaacctgcagg

SEQ ID NO: 2236939 - DNA, 25 bp, Homo sapien
tatagcctggcgctcagaatgtcca

SEQ ID NO: 2236940 - DNA, 25 bp, Homo sapien
tgcaggcgcataggtccactagctg

SEQ ID NO: 2236941 - DNA, 25 bp, Homo sapien
ggtccactagctggcagcatttcat

SEQ ID NO: 2236942 - DNA, 25 bp, Homo sapien
tatttagcttttgtatgggagcaag

SEQ ID NO: 2236943 - DNA, 25 bp, Homo sapien
ggcagtccaatattctggagagtat

SEQ ID NO: 2236944 - DNA, 25 bp, Homo sapien
tagtcctcctagtcccgaggcagtc

SEQ ID NO: 2236945 - DNA, 25 bp, Homo sapien
caagcaagacaaattttccccttgt

SEQ ID NO: 2236946 - DNA, 25 bp, Homo sapien
gcttacacttagtaagtgcctcttt

SEQ ID NO: 2236947 - DNA, 25 bp, Homo sapien
cagggcactctgaatgcttacactt

SEQ ID NO: 2236948 - DNA, 25 bp, Homo sapien
tattaagccagaatgctcttgctgc

SEQ ID NO: 2236949 - DNA, 25 bp, Homo sapien
ctttattaagccagaatgctcttgc

SEQ ID NO: 2236950 - DNA, 25 bp, Homo sapien
ttgtgcatcagcatgctcttcccct

SEQ ID NO: 2236951 - DNA, 25 bp, Homo sapien
gatcagggtgacattgtgcatcagc

SEQ ID NO: 2236952 - DNA, 25 bp, Homo sapien
tcaaggctcctgatgcttgatcagg

SEQ ID NO: 2236953 - DNA, 25 bp, Homo sapien
tctgtatctatggttctacaagtcc

SEQ ID NO: 2236954 - DNA, 25 bp, Homo sapien
ctcatcccattgatgtgtcatttcc

SEQ ID NO: 2236955 - DNA, 25 bp, Homo sapien
gaagcagtcctttcgtctcatccca

SEQ ID NO: 2236956 - DNA, 25 bp, Homo sapien
tgtgccagaagcagtcctttcgtct

SEQ ID NO: 2236957 - DNA, 25 bp, Homo sapien
gtcctttcgtctcatcccattgatg

SEQ ID NO: 2236958 - DNA, 25 bp, Homo sapien
tctggtttacacaagagacttgtag

SEQ ID NO: 2236959 - DNA, 25 bp, Homo sapien
gtcactgaccatctggtttacacaa

SEQ ID NO: 2236960 - DNA, 25 bp, Homo sapien
tgaccatctggtttacacaagagac

SEQ ID NO: 2236961 - DNA, 25 bp, Homo sapien
ttacacaagagacttgtagagggag

SEQ ID NO: 2236962 - DNA, 25 bp, Homo sapien
tttgtcccctcagcatggaaggcgt

SEQ ID NO: 2236963 - DNA, 25 bp, Homo sapien
tcccctcagcatggaaggcgttcat

SEQ ID NO: 2236964 - DNA, 25 bp, Homo sapien
ttttgtcccctcagcatggaaggcg

SEQ ID NO: 2236965 - DNA, 25 bp, Homo sapien
tgtcccctcagcatggaaggcgttc

SEQ ID NO: 2236966 - DNA, 25 bp, Homo sapien
cctctccgccaatcaaatcctattg

SEQ ID NO: 2236967 - DNA, 25 bp, Homo sapien
tcctcctctccgccaatcaaatcct

SEQ ID NO: 2236968 - DNA, 25 bp, Homo sapien
gtctcctcctctccgccaatcaaat

SEQ ID NO: 2236969 - DNA, 25 bp, Homo sapien
tcctctccgccaatcaaatcctatt

SEQ ID NO: 2236970 - DNA, 25 bp, Homo sapien
tgtgtttcttttctcatggtattta

SEQ ID NO: 2236971 - DNA, 25 bp, Homo sapien
ttcttttctcatggtatttatctac

SEQ ID NO: 2236972 - DNA, 25 bp, Homo sapien
tgtgctctcgtagaattgtgtttct

SEQ ID NO: 2236973 - DNA, 25 bp, Homo sapien
atatgctgtgctctcgtagaattgt

SEQ ID NO: 2236974 - DNA, 25 bp, Homo sapien
ttctcttgaatggttgtatgtgtcc

SEQ ID NO: 2236975 - DNA, 25 bp, Homo sapien
cttataaccattgcttcttctcgaa

SEQ ID NO: 2236976 - DNA, 25 bp, Homo sapien
cttctcgaagttccccatcctggcc

SEQ ID NO: 2236977 - DNA, 25 bp, Homo sapien
cttgaatggttgtatgtgtcctttc

SEQ ID NO: 2236978 - DNA, 25 bp, Homo sapien
agcagtggctgaagcgtgcacagga

SEQ ID NO: 2236979 - DNA, 25 bp, Homo sapien
gcagtggctgaagcgtgcacaggat

SEQ ID NO: 2236980 - DNA, 25 bp, Homo sapien
cagtggctgaagcgtgcacaggatg

SEQ ID NO: 2236981 - DNA, 25 bp, Homo sapien
tcgaaggttcctgttccaagtgtaa

SEQ ID NO: 2236982 - DNA, 25 bp, Homo sapien
ttatcgaaggttcctgttccaagtg

SEQ ID NO: 2236983 - DNA, 25 bp, Homo sapien
gttccaagtgtaatagttgtagatg

SEQ ID NO: 2236984 - DNA, 25 bp, Homo sapien
agtgtaatagttgtagatggagcca

SEQ ID NO: 2236985 - DNA, 25 bp, Homo sapien
ttgcctcaggccgatattggttccc

SEQ ID NO: 2236986 - DNA, 25 bp, Homo sapien
acttcactctctgctagtctgcact

SEQ ID NO: 2236987 - DNA, 25 bp, Homo sapien
cttcactctctgctagtctgcactg

SEQ ID NO: 2236988 - DNA, 25 bp, Homo sapien
aggccgatattggttcccaggctca

SEQ ID NO: 2236989 - DNA, 25 bp, Homo sapien
gaattctttgaggatcagagaagtg

SEQ ID NO: 2236990 - DNA, 25 bp, Homo sapien
ttagaattctttgaggatcagagaa

SEQ ID NO: 2236991 - DNA, 25 bp, Homo sapien
attctttgaggatcagagaagtgac

SEQ ID NO: 2236992 - DNA, 25 bp, Homo sapien
tagaattctttgaggatcagagaag

SEQ ID NO: 2236993 - DNA, 25 bp, Homo sapien
aaggtcaagttcatgagggaagtat

SEQ ID NO: 2236994 - DNA, 25 bp, Homo sapien
aagctgaatggcctctgaaggtcaa

SEQ ID NO: 2236995 - DNA, 25 bp, Homo sapien
agttcatgagggaagtattgtagcc

SEQ ID NO: 2236996 - DNA, 25 bp, Homo sapien
aagtattgtagccagcaggagggca

SEQ ID NO: 2236997 - DNA, 25 bp, Homo sapien
tgggaattctgcttttcgccttcct

SEQ ID NO: 2236998 - DNA, 25 bp, Homo sapien
aatgatgaggtgtaaggcagaacaa

SEQ ID NO: 2236999 - DNA, 25 bp, Homo sapien
gtcagcttggtccacagaaaagctg

SEQ ID NO: 2237000 - DNA, 25 bp, Homo sapien
catgagactgaatgatgaggtgtaa

SEQ ID NO: 2237001 - DNA, 25 bp, Homo sapien
ggcaggtcttggagccacagctgac

SEQ ID NO: 2237002 - DNA, 25 bp, Homo sapien
gctgacaggttccaatgagctcaca

SEQ ID NO: 2237003 - DNA, 25 bp, Homo sapien
aggcaggtcttggagccacagctga

SEQ ID NO: 2237004 - DNA, 25 bp, Homo sapien
ggttccaatgagctcacagacagca

SEQ ID NO: 2237005 - DNA, 25 bp, Homo sapien
tgctctaatgaagtcccctttttca

SEQ ID NO: 2237006 - DNA, 25 bp, Homo sapien
tttgccaggcactttaaagtcttct

SEQ ID NO: 2237007 - DNA, 25 bp, Homo sapien
ctaccagttggaaagtgaaggaatc

SEQ ID NO: 2237008 - DNA, 25 bp, Homo sapien
aaggaatcagcataatttgccaggc

SEQ ID NO: 2237009 - DNA, 25 bp, Homo sapien
cactttaaagtcttcttacgtggca

SEQ ID NO: 2237010 - DNA, 25 bp, Homo sapien
tatacctctattcaggtctctgaaa

SEQ ID NO: 2237011 - DNA, 25 bp, Homo sapien
tattaaagcagttatgaggtaatta

SEQ ID NO: 2237012 - DNA, 25 bp, Homo sapien
taatcttgtcaataacctctagagt

SEQ ID NO: 2237013 - DNA, 25 bp, Homo sapien
acctctagagtgaatgtgcattgtc

SEQ ID NO: 2237014 - DNA, 25 bp, Homo sapien
attattccccatgtaggcaaaatga

SEQ ID NO: 2237015 - DNA, 25 bp, Homo sapien
ctctttgtaactcaaaggtgatgcc

SEQ ID NO: 2237016 - DNA, 25 bp, Homo sapien
accaaccaatctggacctcaggcag

SEQ ID NO: 2237017 - DNA, 25 bp, Homo sapien
aaagaccaaccaatctggacctcag

SEQ ID NO: 2237018 - DNA, 25 bp, Homo sapien
gatctgctggtagcccacacaaggg

SEQ ID NO: 2237019 - DNA, 25 bp, Homo sapien
atgagatctgctggtagcccacaca

SEQ ID NO: 2237020 - DNA, 25 bp, Homo sapien
agcacaaatcaggagccatggggac

SEQ ID NO: 2237021 - DNA, 25 bp, Homo sapien
cacaaatcaggagccatggggacag

SEQ ID NO: 2237022 - DNA, 25 bp, Homo sapien
gatacaacaagtcaaacaatggcat

SEQ ID NO: 2237023 - DNA, 25 bp, Homo sapien
taacctctgccacatcatggtagca

SEQ ID NO: 2237024 - DNA, 25 bp, Homo sapien
cactttcaaccgaaacttggatgca

SEQ ID NO: 2237025 - DNA, 25 bp, Homo sapien
aatggcatgacaacccagtcgctct

SEQ ID NO: 2237026 - DNA, 25 bp, Homo sapien
taattctctcttggctaactctggc

SEQ ID NO: 2237027 - DNA, 25 bp, Homo sapien
taatgaagcaggtttataggttccc

SEQ ID NO: 2237028 - DNA, 25 bp, Homo sapien
gcaattaggaagtaggtaacctctc

SEQ ID NO: 2237029 - DNA, 25 bp, Homo sapien
ccttgctgcacaatgactccttgga

SEQ ID NO: 2237030 - DNA, 25 bp, Homo sapien
tttcagaacatagcatatctagcgt

SEQ ID NO: 2237031 - DNA, 25 bp, Homo sapien
tatcactacatatgcctgccttctg

SEQ ID NO: 2237032 - DNA, 25 bp, Homo sapien
caaggtccctggagttatttatggc

SEQ ID NO: 2237033 - DNA, 25 bp, Homo sapien
tatggcctagggaggcagagtactc

SEQ ID NO: 2237034 - DNA, 25 bp, Homo sapien
cccacaatcaggtgtttcacagcca

SEQ ID NO: 2237035 - DNA, 25 bp, Homo sapien
acccacaatcaggtgtttcacagcc

SEQ ID NO: 2237036 - DNA, 25 bp, Homo sapien
tcacccacaatcaggtgtttcacag

SEQ ID NO: 2237037 - DNA, 25 bp, Homo sapien
ccacaatcaggtgtttcacagccag

SEQ ID NO: 2237038 - DNA, 25 bp, Homo sapien
atgttccccaaaacagccttccagt

SEQ ID NO: 2237039 - DNA, 25 bp, Homo sapien
aacagccttccagttggaactggtg

SEQ ID NO: 2237040 - DNA, 25 bp, Homo sapien
gaactggtggaagtagtcagcagcc

SEQ ID NO: 2237041 - DNA, 25 bp, Homo sapien
ccttccagttggaactggtggaagt

SEQ ID NO: 2237042 - DNA, 25 bp, Homo sapien
tatctcggactaataaaatgacagc

SEQ ID NO: 2237043 - DNA, 25 bp, Homo sapien
gaaggttaacttgcctcaggttaca

SEQ ID NO: 2237044 - DNA, 25 bp, Homo sapien
ccagaatatccatgctcagtgaggg

SEQ ID NO: 2237045 - DNA, 25 bp, Homo sapien
tagcaactagcagagctcaaagctc

SEQ ID NO: 2237046 - DNA, 25 bp, Homo sapien
gaaggaaacaatagtccagtacatt

SEQ ID NO: 2237047 - DNA, 25 bp, Homo sapien
caatagtccagtacattcgtcagta

SEQ ID NO: 2237048 - DNA, 25 bp, Homo sapien
tcgtcagtaaacctggaaaccaagc

SEQ ID NO: 2237049 - DNA, 25 bp, Homo sapien
cagtacattcgtcagtaaacctgga

SEQ ID NO: 2237050 - DNA, 25 bp, Homo sapien
tttccatttctctgaccatttgtgg

SEQ ID NO: 2237051 - DNA, 25 bp, Homo sapien
catttctctgaccatttgtggtcag

SEQ ID NO: 2237052 - DNA, 25 bp, Homo sapien
ttccccacatattcttgctgaagtc

SEQ ID NO: 2237053 - DNA, 25 bp, Homo sapien
ttctctgaccatttgtggtcagagc

SEQ ID NO: 2237054 - DNA, 25 bp, Homo sapien
gagcgactctattttctcctgatga

SEQ ID NO: 2237055 - DNA, 25 bp, Homo sapien
ctgggccctgggacatataattagc

SEQ ID NO: 2237056 - DNA, 25 bp, Homo sapien
gtaactgtggccatacctttgggaa

SEQ ID NO: 2237057 - DNA, 25 bp, Homo sapien
gggaatgtaacccatgcaatcacat

SEQ ID NO: 2237058 - DNA, 25 bp, Homo sapien
tgatagctctgagagccccaacttg

SEQ ID NO: 2237059 - DNA, 25 bp, Homo sapien
gctgatagctctgagagccccaact

SEQ ID NO: 2237060 - DNA, 25 bp, Homo sapien
atagctctgagagccccaacttgcc

SEQ ID NO: 2237061 - DNA, 25 bp, Homo sapien
aatctcagctagctgatagctctga

SEQ ID NO: 2237062 - DNA, 25 bp, Homo sapien
ggataatataccctggcccaagaag

SEQ ID NO: 2237063 - DNA, 25 bp, Homo sapien
tagagagttagctcctgctgagaca

SEQ ID NO: 2237064 - DNA, 25 bp, Homo sapien
gatagtacagcaagagatagtcctc

SEQ ID NO: 2237065 - DNA, 25 bp, Homo sapien
gtatggtttcggctggcaagtcccc

SEQ ID NO: 2237066 - DNA, 25 bp, Homo sapien
tagatggattcacacatgtgactcc

SEQ ID NO: 2237067 - DNA, 25 bp, Homo sapien
tagactgggaaactatactcttcca

SEQ ID NO: 2237068 - DNA, 25 bp, Homo sapien
aaggtatactctgaagccattctgc

SEQ ID NO: 2237069 - DNA, 25 bp, Homo sapien
ccaaaagatgtagtgtgaggcggca

SEQ ID NO: 2237070 - DNA, 25 bp, Homo sapien
gtaccctggatcatttcaacactgg

SEQ ID NO: 2237071 - DNA, 25 bp, Homo sapien
gatttgcacatggattggaggtagc

SEQ ID NO: 2237072 - DNA, 25 bp, Homo sapien
gaggttgaacatagacagatgatcc

SEQ ID NO: 2237073 - DNA, 25 bp, Homo sapien
gtttaaatcagagcatcatcagcat

SEQ ID NO: 2237074 - DNA, 25 bp, Homo sapien
cactaggctatgctaatgacagtca

SEQ ID NO: 2237075 - DNA, 25 bp, Homo sapien
tcttcgggttagcacgacttgccag

SEQ ID NO: 2237076 - DNA, 25 bp, Homo sapien
tacttgggaatgaactgatgaactg

SEQ ID NO: 2237077 - DNA, 25 bp, Homo sapien
tgagtgccccacaaatgctagtcta

SEQ ID NO: 2237078 - DNA, 25 bp, Homo sapien
agaattggtattcctcatgatgctc

SEQ ID NO: 2237079 - DNA, 25 bp, Homo sapien
tgaggcaatggtcaagctccatagc

SEQ ID NO: 2237080 - DNA, 25 bp, Homo sapien
tccagcacagtaataggcccagcca

SEQ ID NO: 2237081 - DNA, 25 bp, Homo sapien
ataggcccagccaagccgacaggta

SEQ ID NO: 2237082 - DNA, 25 bp, Homo sapien
tggacaccaagggagtcccgggaca

SEQ ID NO: 2237083 - DNA, 25 bp, Homo sapien
agggtagagtggacaccaagggagt

SEQ ID NO: 2237084 - DNA, 25 bp, Homo sapien
tacataattttccaggagggtagag

SEQ ID NO: 2237085 - DNA, 25 bp, Homo sapien
gtacataattttccaggagggtaga

SEQ ID NO: 2237086 - DNA, 25 bp, Homo sapien
tcttttcccctatgctggacaaaat

SEQ ID NO: 2237087 - DNA, 25 bp, Homo sapien
ttctcttttcccctatgctggacaa

SEQ ID NO: 2237088 - DNA, 25 bp, Homo sapien
ttttcccctatgctggacaaaatag

SEQ ID NO: 2237089 - DNA, 25 bp, Homo sapien
tttcccctatgctggacaaaatagg

SEQ ID NO: 2237090 - DNA, 25 bp, Homo sapien
agaagcagcatgaggtccttcgatg

SEQ ID NO: 2237091 - DNA, 25 bp, Homo sapien
ggcatatgctgaaaactgttctctc

SEQ ID NO: 2237092 - DNA, 25 bp, Homo sapien
ccttgctgaaggaagatggcatatg

SEQ ID NO: 2237093 - DNA, 25 bp, Homo sapien
tgaggtccttcgatggcaagcctgc

SEQ ID NO: 2237094 - DNA, 25 bp, Homo sapien
tcctaaagggtataaggcacagcct

SEQ ID NO: 2237095 - DNA, 25 bp, Homo sapien
ctaactgaaattgattggagacatt

SEQ ID NO: 2237096 - DNA, 25 bp, Homo sapien
ttatctccgggctattccatcctaa

SEQ ID NO: 2237097 - DNA, 25 bp, Homo sapien
tcccacatgtttgcattatctccgg

SEQ ID NO: 2237098 - DNA, 25 bp, Homo sapien
cagctttataccaagcagtcctccc

SEQ ID NO: 2237099 - DNA, 25 bp, Homo sapien
atgccttacaccatgacgccttacg

SEQ ID NO: 2237100 - DNA, 25 bp, Homo sapien
tgctggaccgatgagcagggaacca

SEQ ID NO: 2237101 - DNA, 25 bp, Homo sapien
taatgattcctgtaacttggagtca

SEQ ID NO: 2237102 - DNA, 25 bp, Homo sapien
actttgctgagtatgagtcaggcca

SEQ ID NO: 2237103 - DNA, 25 bp, Homo sapien
cactttgctgagtatgagtcaggcc

SEQ ID NO: 2237104 - DNA, 25 bp, Homo sapien
tcagggtgctaacagccctgcatgg

SEQ ID NO: 2237105 - DNA, 25 bp, Homo sapien
agggtgctaacagccctgcatggaa

SEQ ID NO: 2237106 - DNA, 25 bp, Homo sapien
cagggtgctaacagccctgcatgga

SEQ ID NO: 2237107 - DNA, 25 bp, Homo sapien
ggtgctaacagccctgcatggaagc

SEQ ID NO: 2237108 - DNA, 25 bp, Homo sapien
ggcattgaagctggcatagcgccca

SEQ ID NO: 2237109 - DNA, 25 bp, Homo sapien
taactggtagaactggtcacagcag

SEQ ID NO: 2237110 - DNA, 25 bp, Homo sapien
catgcaacgtcccatcattctggag

SEQ ID NO: 2237111 - DNA, 25 bp, Homo sapien
cacagggtagttgcacctccggaat

SEQ ID NO: 2237112 - DNA, 25 bp, Homo sapien
atgagttggatcacagcaccaaatg

SEQ ID NO: 2237113 - DNA, 25 bp, Homo sapien
agatgagttggatcacagcaccaaa

SEQ ID NO: 2237114 - DNA, 25 bp, Homo sapien
agcaccaaatgcagtaagttaccat

SEQ ID NO: 2237115 - DNA, 25 bp, Homo sapien
gatgagttggatcacagcaccaaat

SEQ ID NO: 2237116 - DNA, 25 bp, Homo sapien
tatttttcatctggttggccagtcc

SEQ ID NO: 2237117 - DNA, 25 bp, Homo sapien
tccactggcctatttttcatctggt

SEQ ID NO: 2237118 - DNA, 25 bp, Homo sapien
gtaggctccactggcctatttttca

SEQ ID NO: 2237119 - DNA, 25 bp, Homo sapien
atttttcatctggttggccagtcct

SEQ ID NO: 2237120 - DNA, 25 bp, Homo sapien
ggaatactagctgccctttgcagtg

SEQ ID NO: 2237121 - DNA, 25 bp, Homo sapien
ggctcagatctcagaaacaacttct

SEQ ID NO: 2237122 - DNA, 25 bp, Homo sapien
taatggggattaactccaaacacgc

SEQ ID NO: 2237123 - DNA, 25 bp, Homo sapien
ttctgaccacgaaggctgactgact

SEQ ID NO: 2237124 - DNA, 25 bp, Homo sapien
cttggtccaacaaagagtttaggca

SEQ ID NO: 2237125 - DNA, 25 bp, Homo sapien
gagtttaggcattggtgttctcagt

SEQ ID NO: 2237126 - DNA, 25 bp, Homo sapien
aatactgccttggtccaacaaagag

SEQ ID NO: 2237127 - DNA, 25 bp, Homo sapien
tctcagtgaaagcatcagcatcctg

SEQ ID NO: 2237128 - DNA, 25 bp, Homo sapien
actcctccctgtgtttaggggctgc

SEQ ID NO: 2237129 - DNA, 25 bp, Homo sapien
acactactcctccctgtgtttaggg

SEQ ID NO: 2237130 - DNA, 25 bp, Homo sapien
cacacactactcctccctgtgttta

SEQ ID NO: 2237131 - DNA, 25 bp, Homo sapien
ctactcctccctgtgtttaggggct

SEQ ID NO: 2237132 - DNA, 25 bp, Homo sapien
aattctctgctttgggtggccatca

SEQ ID NO: 2237133 - DNA, 25 bp, Homo sapien
taaagagaccgattagagcatgcgg

SEQ ID NO: 2237134 - DNA, 25 bp, Homo sapien
tctgctgcacgctgcccttgaaagg

SEQ ID NO: 2237135 - DNA, 25 bp, Homo sapien
taaagcctctgtcgggtaaacacca

SEQ ID NO: 2237136 - DNA, 25 bp, Homo sapien
tattgtcagtgaaaagataggcaca

SEQ ID NO: 2237137 - DNA, 25 bp, Homo sapien
attgtcagtgaaaagataggcacaa

SEQ ID NO: 2237138 - DNA, 25 bp, Homo sapien
tatgtatacactttaagctgccgca

SEQ ID NO: 2237139 - DNA, 25 bp, Homo sapien
gaaattggtggcaattagcccacag

SEQ ID NO: 2237140 - DNA, 25 bp, Homo sapien
cacatgccattaatcacaagggagg

SEQ ID NO: 2237141 - DNA, 25 bp, Homo sapien
catgtaacccatcgttgctactgga

SEQ ID NO: 2237142 - DNA, 25 bp, Homo sapien
tatgaatgtatgaacctccaggagg

SEQ ID NO: 2237143 - DNA, 25 bp, Homo sapien
gaaaacgtcgatgtatagccacctg

SEQ ID NO: 2237144 - DNA, 25 bp, Homo sapien
attggcaatttgagactggagaccc

SEQ ID NO: 2237145 - DNA, 25 bp, Homo sapien
aatgcacagataggtaggagtccag

SEQ ID NO: 2237146 - DNA, 25 bp, Homo sapien
tcttgtcccaggatctgaatgggag

SEQ ID NO: 2237147 - DNA, 25 bp, Homo sapien
gatctgaatgggagtttttctttcc

SEQ ID NO: 2237148 - DNA, 25 bp, Homo sapien
agatattccaccatctctgcatcag

SEQ ID NO: 2237149 - DNA, 25 bp, Homo sapien
tccagagtattggagtggaacacag

SEQ ID NO: 2237150 - DNA, 25 bp, Homo sapien
tccaggaccggtagctggacttgca

SEQ ID NO: 2237151 - DNA, 25 bp, Homo sapien
agctggaaccggaaccagagccgga

SEQ ID NO: 2237152 - DNA, 25 bp, Homo sapien
cacagccggagctgaagttggtgcc

SEQ ID NO: 2237153 - DNA, 25 bp, Homo sapien
ggacttgcaggaacctcagcctgag

SEQ ID NO: 2237154 - DNA, 25 bp, Homo sapien
gaggcagcagctggaatctgaccag

SEQ ID NO: 2237155 - DNA, 25 bp, Homo sapien
ggcagcagctggaatctgaccagca

SEQ ID NO: 2237156 - DNA, 25 bp, Homo sapien
aggcagcagctggaatctgaccagc

SEQ ID NO: 2237157 - DNA, 25 bp, Homo sapien
gctgcagttttgttcgattccgtcc

SEQ ID NO: 2237158 - DNA, 25 bp, Homo sapien
agctgcagttttgttcgattccgtc

SEQ ID NO: 2237159 - DNA, 25 bp, Homo sapien
tgcagttttgttcgattccgtccca

SEQ ID NO: 2237160 - DNA, 25 bp, Homo sapien
gcagttttgttcgattccgtcccac

SEQ ID NO: 2237161 - DNA, 25 bp, Homo sapien
agcacggtagtctccacccaggaga

SEQ ID NO: 2237162 - DNA, 25 bp, Homo sapien
gttcagtttgggtactgcagtctcg

SEQ ID NO: 2237163 - DNA, 25 bp, Homo sapien
aagggacatattcagcacggtagtc

SEQ ID NO: 2237164 - DNA, 25 bp, Homo sapien
ggtactgcagtctcggctgcctgtc

SEQ ID NO: 2237165 - DNA, 25 bp, Homo sapien
tgtcttgctcggctccttccgggaa

SEQ ID NO: 2237166 - DNA, 25 bp, Homo sapien
gagcaagcctgatccagcattggaa

SEQ ID NO: 2237167 - DNA, 25 bp, Homo sapien
gaacgctgctggagtactttgatca

SEQ ID NO: 2237168 - DNA, 25 bp, Homo sapien
tggacatcagagacttcgctggccg

SEQ ID NO: 2237169 - DNA, 25 bp, Homo sapien
tccatgtcaaggcaacgcttattgg

SEQ ID NO: 2237170 - DNA, 25 bp, Homo sapien
tgttaggagagtgactgatgactgt

SEQ ID NO: 2237171 - DNA, 25 bp, Homo sapien
cgcttattggccatcaagatttctt

SEQ ID NO: 2237172 - DNA, 25 bp, Homo sapien
caaggcaacgcttattggccatcaa

SEQ ID NO: 2237173 - DNA, 25 bp, Homo sapien
actcagagccctgccagctaattga

SEQ ID NO: 2237174 - DNA, 25 bp, Homo sapien
acttagtgaattccgacagggctgc

SEQ ID NO: 2237175 - DNA, 25 bp, Homo sapien
aattgatatggacactgttaactcc

SEQ ID NO: 2237176 - DNA, 25 bp, Homo sapien
tggagcctgaaaatgtggggcactt

SEQ ID NO: 2237177 - DNA, 25 bp, Homo sapien
tgaggttatgcacatagagaatgtg

SEQ ID NO: 2237178 - DNA, 25 bp, Homo sapien
cagatgaaatgtgaccgctcacgca

SEQ ID NO: 2237179 - DNA, 25 bp, Homo sapien
tgtgaccgctcacgcacgatgaggt

SEQ ID NO: 2237180 - DNA, 25 bp, Homo sapien
cacgcacgatgaggttatgcacata

SEQ ID NO: 2237181 - DNA, 25 bp, Homo sapien
gcagcatccagagcaaaatgtctca

SEQ ID NO: 2237182 - DNA, 25 bp, Homo sapien
tttgtcatatcagcttccagagcca

SEQ ID NO: 2237183 - DNA, 25 bp, Homo sapien
tccagagcaaaatgtctcatcacat

SEQ ID NO: 2237184 - DNA, 25 bp, Homo sapien
catccagagcaaaatgtctcatcac

SEQ ID NO: 2237185 - DNA, 25 bp, Homo sapien
aacgttggtgggctgacagttgccc

SEQ ID NO: 2237186 - DNA, 25 bp, Homo sapien
cattgtattctgaaacgttggtggg

SEQ ID NO: 2237187 - DNA, 25 bp, Homo sapien
ttggtgggctgacagttgccctgac

SEQ ID NO: 2237188 - DNA, 25 bp, Homo sapien
tattctgaaacgttggtgggctgac

SEQ ID NO: 2237189 - DNA, 25 bp, Homo sapien
agttccctctccagtcgtgtccgga

SEQ ID NO: 2237190 - DNA, 25 bp, Homo sapien
tggagctgtacaagggcctgctgca

SEQ ID NO: 2237191 - DNA, 25 bp, Homo sapien
cacgtttttcacatgctgcctggag

SEQ ID NO: 2237192 - DNA, 25 bp, Homo sapien
gagacggtgctctagctgctcacgt

SEQ ID NO: 2237193 - DNA, 25 bp, Homo sapien
tcttatctacgtgtaaaaaggaaca

SEQ ID NO: 2237194 - DNA, 25 bp, Homo sapien
gagtgtatagtacagaaagtactcc

SEQ ID NO: 2237195 - DNA, 25 bp, Homo sapien
tcactccagatatccttgacatggc

SEQ ID NO: 2237196 - DNA, 25 bp, Homo sapien
taataccaagccatacacattccag

SEQ ID NO: 2237197 - DNA, 25 bp, Homo sapien
gagaggatatgccagacatccatcg

SEQ ID NO: 2237198 - DNA, 25 bp, Homo sapien
ggatcatcataagacagcagccagc

SEQ ID NO: 2237199 - DNA, 25 bp, Homo sapien
tctccagcgaggtcaaattggtagg

SEQ ID NO: 2237200 - DNA, 25 bp, Homo sapien
tgccctgagccttgtgagaggatat

SEQ ID NO: 2237201 - DNA, 25 bp, Homo sapien
tgctactgcaataggggcacagggt

SEQ ID NO: 2237202 - DNA, 25 bp, Homo sapien
gctgctactgcaataggggcacagg

SEQ ID NO: 2237203 - DNA, 25 bp, Homo sapien
caataggggcacagggtacacgctg

SEQ ID NO: 2237204 - DNA, 25 bp, Homo sapien
gcacagggtacacgctggttcaagg

SEQ ID NO: 2237205 - DNA, 25 bp, Homo sapien
ttcgatgtgtcgtctttggtcctca

SEQ ID NO: 2237206 - DNA, 25 bp, Homo sapien
tcattggtagaacgggcagtggcca

SEQ ID NO: 2237207 - DNA, 25 bp, Homo sapien
tggcctgggcattactcagggcctg

SEQ ID NO: 2237208 - DNA, 25 bp, Homo sapien
agggcctgatctcggatttcgatgt

SEQ ID NO: 2237209 - DNA, 25 bp, Homo sapien
ggattcctgcagtacattccccaga

SEQ ID NO: 2237210 - DNA, 25 bp, Homo sapien
tggtttctctaggattcctgcagta

SEQ ID NO: 2237211 - DNA, 25 bp, Homo sapien
gctgccttcttctagggttgagttg

SEQ ID NO: 2237212 - DNA, 25 bp, Homo sapien
cttcttctagggttgagttggtttg

SEQ ID NO: 2237213 - DNA, 25 bp, Homo sapien
tgtcagtgtcccaagacgaaagaaa

SEQ ID NO: 2237214 - DNA, 25 bp, Homo sapien
tgtcccaagacgaaagaaattagga

SEQ ID NO: 2237215 - DNA, 25 bp, Homo sapien
cagtgtcccaagacgaaagaaatta

SEQ ID NO: 2237216 - DNA, 25 bp, Homo sapien
ctgtcagtgtcccaagacgaaagaa

SEQ ID NO: 2237217 - DNA, 25 bp, Homo sapien
ctagagccatttgacagtcttttgc

SEQ ID NO: 2237218 - DNA, 25 bp, Homo sapien
tagagccatttgacagtcttttgcc

SEQ ID NO: 2237219 - DNA, 25 bp, Homo sapien
ctgtttctgcagcttgcagacttac

SEQ ID NO: 2237220 - DNA, 25 bp, Homo sapien
tcctctgacccctcatattccttct

SEQ ID NO: 2237221 - DNA, 25 bp, Homo sapien
tgcttgttggcagtctctagacgct

SEQ ID NO: 2237222 - DNA, 25 bp, Homo sapien
tctctgcaagctgcttgttggcagt

SEQ ID NO: 2237223 - DNA, 25 bp, Homo sapien
caaagagctgcgagatggtttttct

SEQ ID NO: 2237224 - DNA, 25 bp, Homo sapien
aagacaagtctgttggttccctcac

SEQ ID NO: 2237225 - DNA, 25 bp, Homo sapien
tcttttggaggatgacttcacgagg

SEQ ID NO: 2237226 - DNA, 25 bp, Homo sapien
ccgaatctcgccctctagcttgttt

SEQ ID NO: 2237227 - DNA, 25 bp, Homo sapien
tctcatatgcctccgagacgcgctg

SEQ ID NO: 2237228 - DNA, 25 bp, Homo sapien
gaaatcatgcatcctccgaatctcg

SEQ ID NO: 2237229 - DNA, 25 bp, Homo sapien
aatggtggtgatggtaggagggtga

SEQ ID NO: 2237230 - DNA, 25 bp, Homo sapien
aacaaaaaaagacaatggtggtgat

SEQ ID NO: 2237231 - DNA, 25 bp, Homo sapien
aaaaagacaatggtggtgatggtag

SEQ ID NO: 2237232 - DNA, 25 bp, Homo sapien
gtggtgatggtaggagggtgatggg

SEQ ID NO: 2237233 - DNA, 25 bp, Homo sapien
gttccggttctcgtctgagaggatc

SEQ ID NO: 2237234 - DNA, 25 bp, Homo sapien
ccggttctcgtctgagaggatctca

SEQ ID NO: 2237235 - DNA, 25 bp, Homo sapien
ttctcatagcatccttccaactctt

SEQ ID NO: 2237236 - DNA, 25 bp, Homo sapien
tgagaggatctcaaccatctgctgg

SEQ ID NO: 2237237 - DNA, 25 bp, Homo sapien
caatggcaaaagggtctgctggcac

SEQ ID NO: 2237238 - DNA, 25 bp, Homo sapien
ctggaaacaatggcaaaagggtctg

SEQ ID NO: 2237239 - DNA, 25 bp, Homo sapien
ggaaacaatggcaaaagggtctgct

SEQ ID NO: 2237240 - DNA, 25 bp, Homo sapien
aacaatggcaaaagggtctgctggc

SEQ ID NO: 2237241 - DNA, 25 bp, Homo sapien
agcagaggatggctgagcccgaggc

SEQ ID NO: 2237242 - DNA, 25 bp, Homo sapien
gaagcagaggatggctgagcccgag

SEQ ID NO: 2237243 - DNA, 25 bp, Homo sapien
cagaggatggctgagcccgaggcat

SEQ ID NO: 2237244 - DNA, 25 bp, Homo sapien
ctgataagaagcagaggatggctga

SEQ ID NO: 2237245 - DNA, 25 bp, Homo sapien
ctgaataggcttctcctggctgctg

SEQ ID NO: 2237246 - DNA, 25 bp, Homo sapien
gctgaataggcttctcctggctgct

SEQ ID NO: 2237247 - DNA, 25 bp, Homo sapien
agctgaataggcttctcctggctgc

SEQ ID NO: 2237248 - DNA, 25 bp, Homo sapien
aaatgctgctgcggcctaggcaggt

SEQ ID NO: 2237249 - DNA, 25 bp, Homo sapien
cccctggtgagcctgattaggaagg

SEQ ID NO: 2237250 - DNA, 25 bp, Homo sapien
gagacggtaatgatccccctggtga

SEQ ID NO: 2237251 - DNA, 25 bp, Homo sapien
caggttgggagagacggtaatgatc

SEQ ID NO: 2237252 - DNA, 25 bp, Homo sapien
agattgtagcaagggcaaggacccc

SEQ ID NO: 2237253 - DNA, 25 bp, Homo sapien
tcgggcaggagacaatctagtggat

SEQ ID NO: 2237254 - DNA, 25 bp, Homo sapien
gcgagttcctggctgacaatggcaa

SEQ ID NO: 2237255 - DNA, 25 bp, Homo sapien
gaggctgcgagttcctggctgacaa

SEQ ID NO: 2237256 - DNA, 25 bp, Homo sapien
gaaagtactgggactggaccttggc

SEQ ID NO: 2237257 - DNA, 25 bp, Homo sapien
taacaggtggatgggccttaactcc

SEQ ID NO: 2237258 - DNA, 25 bp, Homo sapien
taggattgccatagcgaagctgctc

SEQ ID NO: 2237259 - DNA, 25 bp, Homo sapien
tgtagcaaacgctgcaataccgtgg

SEQ ID NO: 2237260 - DNA, 25 bp, Homo sapien
gagagagagaaattgggcacctggg

SEQ ID NO: 2237261 - DNA, 25 bp, Homo sapien
aagagagagagaaattgggcacctg

SEQ ID NO: 2237262 - DNA, 25 bp, Homo sapien
gagagagaaattgggcacctgggct

SEQ ID NO: 2237263 - DNA, 25 bp, Homo sapien
gaagagagagagaaattgggcacct

SEQ ID NO: 2237264 - DNA, 25 bp, Homo sapien
cttccaactgttgcgctgggcagtc

SEQ ID NO: 2237265 - DNA, 25 bp, Homo sapien
ctggcttccaactgttgcgctgggc

SEQ ID NO: 2237266 - DNA, 25 bp, Homo sapien
caactgttgcgctgggcagtctgac

SEQ ID NO: 2237267 - DNA, 25 bp, Homo sapien
ggaccctccaaagtccctctcatca

SEQ ID NO: 2237268 - DNA, 25 bp, Homo sapien
ttcttttaggcttaaagccttgatc

SEQ ID NO: 2237269 - DNA, 25 bp, Homo sapien
tcttttaggcttaaagccttgatca

SEQ ID NO: 2237270 - DNA, 25 bp, Homo sapien
ccgccaagagtccaaccactggtca

SEQ ID NO: 2237271 - DNA, 25 bp, Homo sapien
tcagggtaagcgccgccaagagtcc

SEQ ID NO: 2237272 - DNA, 25 bp, Homo sapien
gtaagcgccgccaagagtccaacca

SEQ ID NO: 2237273 - DNA, 25 bp, Homo sapien
gccaagagtccaaccactggtcact

SEQ ID NO: 2237274 - DNA, 25 bp, Homo sapien
gatggtaactcaaggtcttggtcgt

SEQ ID NO: 2237275 - DNA, 25 bp, Homo sapien
tctgggatggtaactcaaggtcttg

SEQ ID NO: 2237276 - DNA, 25 bp, Homo sapien
tgaggatcagtgtgagagatccgtt

SEQ ID NO: 2237277 - DNA, 25 bp, Homo sapien
gatcagtgtgagagatccgtttctg

SEQ ID NO: 2237278 - DNA, 25 bp, Homo sapien
ttagcaaaacaccagagtcccatga

SEQ ID NO: 2237279 - DNA, 25 bp, Homo sapien
gacattcagttcttgtgacccaacc

SEQ ID NO: 2237280 - DNA, 25 bp, Homo sapien
ttttgcccttggaaagatctgacag

SEQ ID NO: 2237281 - DNA, 25 bp, Homo sapien
tatcccagtggcttgcgaaatggca

SEQ ID NO: 2237282 - DNA, 25 bp, Homo sapien
atcttatttgtccttcttagcagct

SEQ ID NO: 2237283 - DNA, 25 bp, Homo sapien
tttctgatgtcagcaatccccttcc

SEQ ID NO: 2237284 - DNA, 25 bp, Homo sapien
tcttcaatgctgttaacactcaggc

SEQ ID NO: 2237285 - DNA, 25 bp, Homo sapien
tactgattgagtccaggcctctcgg

SEQ ID NO: 2237286 - DNA, 25 bp, Homo sapien
caaatattccaagtatgcaccaccg

SEQ ID NO: 2237287 - DNA, 25 bp, Homo sapien
taaaaaacacatacatcagttttat

SEQ ID NO: 2237288 - DNA, 25 bp, Homo sapien
ttaaaaaacacatacatcagtttta

SEQ ID NO: 2237289 - DNA, 25 bp, Homo sapien
cttaaaaaacacatacatcagtttt

SEQ ID NO: 2237290 - DNA, 25 bp, Homo sapien
gcgcacactctaaccgatttaactt

SEQ ID NO: 2237291 - DNA, 25 bp, Homo sapien
aaaactcatggcgagctgcaaagaa

SEQ ID NO: 2237292 - DNA, 25 bp, Homo sapien
ctaaccgatttaacttgctgcacat

SEQ ID NO: 2237293 - DNA, 25 bp, Homo sapien
aaagtagaacacacgggcattccca

SEQ ID NO: 2237294 - DNA, 25 bp, Homo sapien
gcgaaaagtaaccacgcgtctccta

SEQ ID NO: 2237295 - DNA, 25 bp, Homo sapien
gccgagggcacgaccaagttcatgc

SEQ ID NO: 2237296 - DNA, 25 bp, Homo sapien
cgagggcacgaccaagttcatgcca

SEQ ID NO: 2237297 - DNA, 25 bp, Homo sapien
gttcatgccaccatggattcctgcc

SEQ ID NO: 2237298 - DNA, 25 bp, Homo sapien
ctcaagtggcttcggtcccgggcca

SEQ ID NO: 2237299 - DNA, 25 bp, Homo sapien
cggatagccggaggcgagactgact

SEQ ID NO: 2237300 - DNA, 25 bp, Homo sapien
ggtgacgactctctgctcgctcaag

SEQ ID NO: 2237301 - DNA, 25 bp, Homo sapien
tccgtccgggctctccttggtggca

SEQ ID NO: 2237302 - DNA, 25 bp, Homo sapien
gaggagtaattcagggggtctacca

SEQ ID NO: 2237303 - DNA, 25 bp, Homo sapien
ggggtctaccagtttaggcagccag

SEQ ID NO: 2237304 - DNA, 25 bp, Homo sapien
ggaggcgaaagagagcggagatgga

SEQ ID NO: 2237305 - DNA, 25 bp, Homo sapien
aaggaaggggcgtgactgccaaggc

SEQ ID NO: 2237306 - DNA, 25 bp, Homo sapien
ccgtagccgtgagagtctgcgcggg

SEQ ID NO: 2237307 - DNA, 25 bp, Homo sapien
ggcacgactcggttgccgtagccgt

SEQ ID NO: 2237308 - DNA, 25 bp, Homo sapien
caataataatctgcggcaacagcgc

SEQ ID NO: 2237309 - DNA, 25 bp, Homo sapien
atagacgcgtgggagagccagtgca

SEQ ID NO: 2237310 - DNA, 25 bp, Homo sapien
gatttatcttctctggctcgctgcc

SEQ ID NO: 2237311 - DNA, 25 bp, Homo sapien
gagagttgttatcccagttggagga

SEQ ID NO: 2237312 - DNA, 25 bp, Homo sapien
ttccagtgtgatttaaggcaggccc

SEQ ID NO: 2237313 - DNA, 25 bp, Homo sapien
tccagggagaaggtaggtcaatgcc

SEQ ID NO: 2237314 - DNA, 25 bp, Homo sapien
cattaaccaattgaacttttaacat

SEQ ID NO: 2237315 - DNA, 25 bp, Homo sapien
tttaacataaattctatgtcccact

SEQ ID NO: 2237316 - DNA, 25 bp, Homo sapien
cataaattctatgtcccactcctct

SEQ ID NO: 2237317 - DNA, 25 bp, Homo sapien
aattctatgtcccactcctctagtt

SEQ ID NO: 2237318 - DNA, 25 bp, Homo sapien
gagatttcacttattcccaaagtgg

SEQ ID NO: 2237319 - DNA, 25 bp, Homo sapien
aagatattttagactgatcccaggc

SEQ ID NO: 2237320 - DNA, 25 bp, Homo sapien
catccatcagagtctaccctataag

SEQ ID NO: 2237321 - DNA, 25 bp, Homo sapien
ggcatagtttctttacatccatcag

SEQ ID NO: 2237322 - DNA, 25 bp, Homo sapien
gcctttagaagtttgcttctatcaa

SEQ ID NO: 2237323 - DNA, 25 bp, Homo sapien
tacaggggcagcctttagaagtttg

SEQ ID NO: 2237324 - DNA, 25 bp, Homo sapien
ttagaagtttgcttctatcaagcat

SEQ ID NO: 2237325 - DNA, 25 bp, Homo sapien
gggcagcctttagaagtttgcttct

SEQ ID NO: 2237326 - DNA, 25 bp, Homo sapien
gactacaggagcccactaccacccc

SEQ ID NO: 2237327 - DNA, 25 bp, Homo sapien
gggactacaggagcccactaccacc

SEQ ID NO: 2237328 - DNA, 25 bp, Homo sapien
ctacaggagcccactaccaccccca

SEQ ID NO: 2237329 - DNA, 25 bp, Homo sapien
aggagcccactaccacccccagctt

SEQ ID NO: 2237330 - DNA, 25 bp, Homo sapien
gggatgcataaacacatgggagtag

SEQ ID NO: 2237331 - DNA, 25 bp, Homo sapien
ttaggaaacggtgcaaactgatttg

SEQ ID NO: 2237332 - DNA, 25 bp, Homo sapien
aatgctggctgcacgagtggataca

SEQ ID NO: 2237333 - DNA, 25 bp, Homo sapien
ctgggcacacgctctgcaggaagaa

SEQ ID NO: 2237334 - DNA, 25 bp, Homo sapien
tgcctcctgttgtaattcaatgacc

SEQ ID NO: 2237335 - DNA, 25 bp, Homo sapien
catgcctcctgttgtaattcaatga

SEQ ID NO: 2237336 - DNA, 25 bp, Homo sapien
tcatgcctcctgttgtaattcaatg

SEQ ID NO: 2237337 - DNA, 25 bp, Homo sapien
atgcctcctgttgtaattcaatgac

SEQ ID NO: 2237338 - DNA, 25 bp, Homo sapien
ggtggttatccccatgagaatagta

SEQ ID NO: 2237339 - DNA, 25 bp, Homo sapien
aactgcaggaggtgcaaaagtgtgc

SEQ ID NO: 2237340 - DNA, 25 bp, Homo sapien
caaggtggttatccccatgagaata

SEQ ID NO: 2237341 - DNA, 25 bp, Homo sapien
tgtagagtctagtgatagaaactgc

SEQ ID NO: 2237342 - DNA, 25 bp, Homo sapien
gtttggcatactcggcagtgacctg

SEQ ID NO: 2237343 - DNA, 25 bp, Homo sapien
ggcttgagaatatggcatactgtct

SEQ ID NO: 2237344 - DNA, 25 bp, Homo sapien
gagaatatggcatactgtcttcaaa

SEQ ID NO: 2237345 - DNA, 25 bp, Homo sapien
cagtgacctgcagggtggcttgaga

SEQ ID NO: 2237346 - DNA, 25 bp, Homo sapien
tatttttattcattatactaggcac

SEQ ID NO: 2237347 - DNA, 25 bp, Homo sapien
tactaggcacttggtgggccctttc

SEQ ID NO: 2237348 - DNA, 25 bp, Homo sapien
cgcccggctgtgtgatctattttta

SEQ ID NO: 2237349 - DNA, 25 bp, Homo sapien
accacgcccggctgtgtgatctatt

SEQ ID NO: 2237350 - DNA, 25 bp, Homo sapien
tgagagcagcctgtgagatccctgg

SEQ ID NO: 2237351 - DNA, 25 bp, Homo sapien
ccatattgggcttctcttatcttct

SEQ ID NO: 2237352 - DNA, 25 bp, Homo sapien
tagtttgttttagaccatattgggc

SEQ ID NO: 2237353 - DNA, 25 bp, Homo sapien
gagcagcctgtgagatccctggctt

SEQ ID NO: 2237354 - DNA, 25 bp, Homo sapien
gaaaaaccaatcatcgcactcatga

SEQ ID NO: 2237355 - DNA, 25 bp, Homo sapien
aatgtgcctaccttctactcctaac

SEQ ID NO: 2237356 - DNA, 25 bp, Homo sapien
aaccaatcatcgcactcatgaacca

SEQ ID NO: 2237357 - DNA, 25 bp, Homo sapien
gtaatgtgcctaccttctactccta

SEQ ID NO: 2237358 - DNA, 25 bp, Homo sapien
acccacagtgatcagccatgaccac

SEQ ID NO: 2237359 - DNA, 25 bp, Homo sapien
gccatgaccacctttggctggattt

SEQ ID NO: 2237360 - DNA, 25 bp, Homo sapien
catgaccacctttggctggatttca

SEQ ID NO: 2237361 - DNA, 25 bp, Homo sapien
cacagtgatcagccatgaccacctt

SEQ ID NO: 2237362 - DNA, 25 bp, Homo sapien
gaatcaggtaattattccacatgta

SEQ ID NO: 2237363 - DNA, 25 bp, Homo sapien
ttaggaaagttgtatttaggaatca

SEQ ID NO: 2237364 - DNA, 25 bp, Homo sapien
gatggtcatatccttatcacagcca

SEQ ID NO: 2237365 - DNA, 25 bp, Homo sapien
tgatggtcatatccttatcacagcc

SEQ ID NO: 2237366 - DNA, 25 bp, Homo sapien
ggtgatggtcatatccttatcacag

SEQ ID NO: 2237367 - DNA, 25 bp, Homo sapien
gtgatggtcatatccttatcacagc

SEQ ID NO: 2237368 - DNA, 25 bp, Homo sapien
gaatgtcctgcactctcacagttcc

SEQ ID NO: 2237369 - DNA, 25 bp, Homo sapien
cagaatgtcctgcactctcacagtt

SEQ ID NO: 2237370 - DNA, 25 bp, Homo sapien
cttttcagaatgtcctgcactctca

SEQ ID NO: 2237371 - DNA, 25 bp, Homo sapien
ttcagaatgtcctgcactctcacag

SEQ ID NO: 2237372 - DNA, 25 bp, Homo sapien
atttatcacaccacctccacaagca

SEQ ID NO: 2237373 - DNA, 25 bp, Homo sapien
aaactggcatatctccatttatcac

SEQ ID NO: 2237374 - DNA, 25 bp, Homo sapien
ccaaactggcatatctccatttatc

SEQ ID NO: 2237375 - DNA, 25 bp, Homo sapien
tccatttatcacaccacctccacaa

SEQ ID NO: 2237376 - DNA, 25 bp, Homo sapien
cctatccctctgtgcttggtcaccc

SEQ ID NO: 2237377 - DNA, 25 bp, Homo sapien
atccctctgtgcttggtcaccctca

SEQ ID NO: 2237378 - DNA, 25 bp, Homo sapien
tccctctgtgcttggtcaccctcat

SEQ ID NO: 2237379 - DNA, 25 bp, Homo sapien
tatccctctgtgcttggtcaccctc

SEQ ID NO: 2237380 - DNA, 25 bp, Homo sapien
catgcattttagcatgaagtgaggt

SEQ ID NO: 2237381 - DNA, 25 bp, Homo sapien
ccatcggaagacaatttcatgcatt

SEQ ID NO: 2237382 - DNA, 25 bp, Homo sapien
gaggaaccatctatggtttggagca

SEQ ID NO: 2237383 - DNA, 25 bp, Homo sapien
gcatagagagaatgatggtcttgcc

SEQ ID NO: 2237384 - DNA, 25 bp, Homo sapien
tgctggtgagcatcactagtctccc

SEQ ID NO: 2237385 - DNA, 25 bp, Homo sapien
aacaccatttgtggctatcttccag

SEQ ID NO: 2237386 - DNA, 25 bp, Homo sapien
tatattcattgactgagtctacagg

SEQ ID NO: 2237387 - DNA, 25 bp, Homo sapien
tctacatacaggtaccaatatccta

SEQ ID NO: 2237388 - DNA, 25 bp, Homo sapien
cttggatcaagcctgaacccaattg

SEQ ID NO: 2237389 - DNA, 25 bp, Homo sapien
gcccatattcgcagataattctgag

SEQ ID NO: 2237390 - DNA, 25 bp, Homo sapien
aagcctgaacccaattgcagagtac

SEQ ID NO: 2237391 - DNA, 25 bp, Homo sapien
ttatctgagcccatattcgcagata

SEQ ID NO: 2237392 - DNA, 25 bp, Homo sapien
tgaagagggtggcagtggacataaa

SEQ ID NO: 2237393 - DNA, 25 bp, Homo sapien
aagagggtggcagtggacataaaag

SEQ ID NO: 2237394 - DNA, 25 bp, Homo sapien
gaagagggtggcagtggacataaaa

SEQ ID NO: 2237395 - DNA, 25 bp, Homo sapien
cagagaatgaattacaattccccat

SEQ ID NO: 2237396 - DNA, 25 bp, Homo sapien
gtcttcagagaatgaattacaattc

SEQ ID NO: 2237397 - DNA, 25 bp, Homo sapien
cttcagagaatgaattacaattccc

SEQ ID NO: 2237398 - DNA, 25 bp, Homo sapien
tcctgagtcttcagagaatgaatta

SEQ ID NO: 2237399 - DNA, 25 bp, Homo sapien
tccttgagaatgagacagtgcctac

SEQ ID NO: 2237400 - DNA, 25 bp, Homo sapien
tactggcactgaggaaactcccttt

SEQ ID NO: 2237401 - DNA, 25 bp, Homo sapien
tattatcactggatataagatgctg

SEQ ID NO: 2237402 - DNA, 25 bp, Homo sapien
cactctgatagctgggtcagagcag

SEQ ID NO: 2237403 - DNA, 25 bp, Homo sapien
gattctgttgctaccctaggcttag

SEQ ID NO: 2237404 - DNA, 25 bp, Homo sapien
tcagtgtgtccatgttgggtcctcc

SEQ ID NO: 2237405 - DNA, 25 bp, Homo sapien
tattgctgctatggcagactgggct

SEQ ID NO: 2237406 - DNA, 25 bp, Homo sapien
gggtagattcgattgctgcagctgc

SEQ ID NO: 2237407 - DNA, 25 bp, Homo sapien
ttagtattacataggatggatcttt

SEQ ID NO: 2237408 - DNA, 25 bp, Homo sapien
cttagtattacataggatggatctt

SEQ ID NO: 2237409 - DNA, 25 bp, Homo sapien
atgctatgccgtatctgacatctga

SEQ ID NO: 2237410 - DNA, 25 bp, Homo sapien
actctcctgtcatccctttttctga

SEQ ID NO: 2237411 - DNA, 25 bp, Homo sapien
gacatctgagctgatgaggtccaag

SEQ ID NO: 2237412 - DNA, 25 bp, Homo sapien
cacataatgagtatcttgactctcc

SEQ ID NO: 2237413 - DNA, 25 bp, Homo sapien
ttcatagtgctctgctgtccaccca

SEQ ID NO: 2237414 - DNA, 25 bp, Homo sapien
tctcgaatgactcctttcatagtgc

SEQ ID NO: 2237415 - DNA, 25 bp, Homo sapien
gatttatccgtggagaagacatgaa

SEQ ID NO: 2237416 - DNA, 25 bp, Homo sapien
ttattgatttatccgtggagaagac

SEQ ID NO: 2237417 - DNA, 25 bp, Homo sapien
gacacaattcatggtcacccttttg

SEQ ID NO: 2237418 - DNA, 25 bp, Homo sapien
ttcatatctgtggcacttctcagta

SEQ ID NO: 2237419 - DNA, 25 bp, Homo sapien
aattcatggtcacccttttgtatga

SEQ ID NO: 2237420 - DNA, 25 bp, Homo sapien
atctgccagaggacacaattcatgg

SEQ ID NO: 2237421 - DNA, 25 bp, Homo sapien
cagttttggatgtttttgatgccat

SEQ ID NO: 2237422 - DNA, 25 bp, Homo sapien
tgcccagtccggatttttttccagc

SEQ ID NO: 2237423 - DNA, 25 bp, Homo sapien
ctagatgtagcgctctttcttttgc

SEQ ID NO: 2237424 - DNA, 25 bp, Homo sapien
gctgttgctctagatgtagcgctct

SEQ ID NO: 2237425 - DNA, 25 bp, Homo sapien
ttttgcaagctgacaaccagactct

SEQ ID NO: 2237426 - DNA, 25 bp, Homo sapien
aagctgacaaccagactctttgatg

SEQ ID NO: 2237427 - DNA, 25 bp, Homo sapien
gcaccataggattttccaggatcat

SEQ ID NO: 2237428 - DNA, 25 bp, Homo sapien
tctgaattgctaacccaaacccctg

SEQ ID NO: 2237429 - DNA, 25 bp, Homo sapien
cagtatctggtcaggatagttttcc

SEQ ID NO: 2237430 - DNA, 25 bp, Homo sapien
tccaggatcatcatggttttccttg

SEQ ID NO: 2237431 - DNA, 25 bp, Homo sapien
tgaattgaaatacctatctattatc

SEQ ID NO: 2237432 - DNA, 25 bp, Homo sapien
gtgctcacgaccacacgaccacgcc

SEQ ID NO: 2237433 - DNA, 25 bp, Homo sapien
ctcacgaccacacgaccacgcccgg

SEQ ID NO: 2237434 - DNA, 25 bp, Homo sapien
atttgaattgaaatacctatctatt

SEQ ID NO: 2237435 - DNA, 25 bp, Homo sapien
ttatcaaacaatgccctaatccatg

SEQ ID NO: 2237436 - DNA, 25 bp, Homo sapien
taatccatgaacactcacactgtat

SEQ ID NO: 2237437 - DNA, 25 bp, Homo sapien
tctgtctcatgtaaaggaggtttgg

SEQ ID NO: 2237438 - DNA, 25 bp, Homo sapien
cattccaggccggtatagagatacc

SEQ ID NO: 2237439 - DNA, 25 bp, Homo sapien
gacaagtgatcaggtttaggacatc

SEQ ID NO: 2237440 - DNA, 25 bp, Homo sapien
tcaggtttaggacatcatcagcatg

SEQ ID NO: 2237441 - DNA, 25 bp, Homo sapien
tgtgttttaattgaagtgctttgac

SEQ ID NO: 2237442 - DNA, 25 bp, Homo sapien
aggacatcatcagcatgtttaccag

SEQ ID NO: 2237443 - DNA, 25 bp, Homo sapien
cactaaacttgagctttaacctggg

SEQ ID NO: 2237444 - DNA, 25 bp, Homo sapien
taaaagctcaggtactaagttatac

SEQ ID NO: 2237445 - DNA, 25 bp, Homo sapien
aatcactcttgggaaacagatgtgg

SEQ ID NO: 2237446 - DNA, 25 bp, Homo sapien
taggttgttacttattcctctgcac

SEQ ID NO: 2237447 - DNA, 25 bp, Homo sapien
ctccacataaattataggattgctt

SEQ ID NO: 2237448 - DNA, 25 bp, Homo sapien
tgcccaggccaatgtgcaggagtgt

SEQ ID NO: 2237449 - DNA, 25 bp, Homo sapien
tgagctgactataaatgcatgaatc

SEQ ID NO: 2237450 - DNA, 25 bp, Homo sapien
tatatgatgagagatgggattcagc

SEQ ID NO: 2237451 - DNA, 25 bp, Homo sapien
aaatatgaaatcagatcatctgcca

SEQ ID NO: 2237452 - DNA, 25 bp, Homo sapien
tgaaaagatttgtgaacatctgggt

SEQ ID NO: 2237453 - DNA, 25 bp, Homo sapien
cctgtgacgatctgcattaatcttt

SEQ ID NO: 2237454 - DNA, 25 bp, Homo sapien
tgctgccacctgtgacgatctgcat

SEQ ID NO: 2237455 - DNA, 25 bp, Homo sapien
gccacctgtgacgatctgcattaat

SEQ ID NO: 2237456 - DNA, 25 bp, Homo sapien
ggccacatcatttccgatgagaaag

SEQ ID NO: 2237457 - DNA, 25 bp, Homo sapien
cattcgaccatttgactaggatgtg

SEQ ID NO: 2237458 - DNA, 25 bp, Homo sapien
aatgttgtccttaatgttgtgccac

SEQ ID NO: 2237459 - DNA, 25 bp, Homo sapien
ggatcccttaaacatgagtcacttc

SEQ ID NO: 2237460 - DNA, 25 bp, Homo sapien
gggtagtaagcgttctatagacatt

SEQ ID NO: 2237461 - DNA, 25 bp, Homo sapien
taagcgttctatagacatttgaaaa

SEQ ID NO: 2237462 - DNA, 25 bp, Homo sapien
gagacatttgggtagtaagcgttct

SEQ ID NO: 2237463 - DNA, 25 bp, Homo sapien
ggacatactaaatttgagctgtttg

SEQ ID NO: 2237464 - DNA, 25 bp, Homo sapien
gaatgtttctcccagctttacgtta

SEQ ID NO: 2237465 - DNA, 25 bp, Homo sapien
tactggcataagaatggcttccaag

SEQ ID NO: 2237466 - DNA, 25 bp, Homo sapien
aagtatactcctacagctcactgtg

SEQ ID NO: 2237467 - DNA, 25 bp, Homo sapien
tacatagctagaaggtggttttcac

SEQ ID NO: 2237468 - DNA, 25 bp, Homo sapien
tttgtgtaatatctggatccaagaa

SEQ ID NO: 2237469 - DNA, 25 bp, Homo sapien
caagaatccatgagtagacgatttc

SEQ ID NO: 2237470 - DNA, 25 bp, Homo sapien
tctggatccaagaatccatgagtag

SEQ ID NO: 2237471 - DNA, 25 bp, Homo sapien
ccatgagtagacgatttctgtgttc

SEQ ID NO: 2237472 - DNA, 25 bp, Homo sapien
agcacgagaacagcagataagaaat

SEQ ID NO: 2237473 - DNA, 25 bp, Homo sapien
cagcttttaccatgcttgaagatag

SEQ ID NO: 2237474 - DNA, 25 bp, Homo sapien
ccagcttttaccatgcttgaagata

SEQ ID NO: 2237475 - DNA, 25 bp, Homo sapien
agccagcttttaccatgcttgaaga

SEQ ID NO: 2237476 - DNA, 25 bp, Homo sapien
gccagcttttaccatgcttgaagat

SEQ ID NO: 2237477 - DNA, 25 bp, Homo sapien
catgatgttacataagcttcctgga

SEQ ID NO: 2237478 - DNA, 25 bp, Homo sapien
taattagggaatgctacagaggaaa

SEQ ID NO: 2237479 - DNA, 25 bp, Homo sapien
gggaatgaggacatcttgacacatg

SEQ ID NO: 2237480 - DNA, 25 bp, Homo sapien
tcttggaaccagacttcatgatgtt

SEQ ID NO: 2237481 - DNA, 25 bp, Homo sapien
ttgaatagtaccgaactctgcaggg

SEQ ID NO: 2237482 - DNA, 25 bp, Homo sapien
tcaattttcataggcgtgcgaaccc

SEQ ID NO: 2237483 - DNA, 25 bp, Homo sapien
atccagcaagctttacctcctgagc

SEQ ID NO: 2237484 - DNA, 25 bp, Homo sapien
tcttgcggatacgttccaagatccc

SEQ ID NO: 2237485 - DNA, 25 bp, Homo sapien
ttatatgattaattcctgattttac

SEQ ID NO: 2237486 - DNA, 25 bp, Homo sapien
ttggccttgttgattatctttatta

SEQ ID NO: 2237487 - DNA, 25 bp, Homo sapien
gcctgaggtttcttaatattgttag

SEQ ID NO: 2237488 - DNA, 25 bp, Homo sapien
tgttagtatgttcaaaaatttggcc

SEQ ID NO: 2237489 - DNA, 25 bp, Homo sapien
caaaatcacttgcaaaaccgtacac

SEQ ID NO: 2237490 - DNA, 25 bp, Homo sapien
ggatattattgatacctggctctca

SEQ ID NO: 2237491 - DNA, 25 bp, Homo sapien
caatcctattatatgcaagttccag

SEQ ID NO: 2237492 - DNA, 25 bp, Homo sapien
tcatatggcaacacagagttcctgt

SEQ ID NO: 2237493 - DNA, 25 bp, Homo sapien
tatcagcagctatgtcttgattgaa

SEQ ID NO: 2237494 - DNA, 25 bp, Homo sapien
gctatgtcttgattgaataaagcca

SEQ ID NO: 2237495 - DNA, 25 bp, Homo sapien
tatgtagaatagtcacatgaatata

SEQ ID NO: 2237496 - DNA, 25 bp, Homo sapien
taaagccagtcttctactagattca

SEQ ID NO: 2237497 - DNA, 25 bp, Homo sapien
aatcctctatgaccgtgtggcatca

SEQ ID NO: 2237498 - DNA, 25 bp, Homo sapien
ctctatgaccgtgtggcatcaccag

SEQ ID NO: 2237499 - DNA, 25 bp, Homo sapien
tgtccataaatcctctatgaccgtg

SEQ ID NO: 2237500 - DNA, 25 bp, Homo sapien
cataaatcctctatgaccgtgtggc

SEQ ID NO: 2237501 - DNA, 25 bp, Homo sapien
aatgcaataattgtgaccaacctga

SEQ ID NO: 2237502 - DNA, 25 bp, Homo sapien
taccgtcagcctgttcacttaagaa

SEQ ID NO: 2237503 - DNA, 25 bp, Homo sapien
tcttgaaagcccttgctatgttgtc

SEQ ID NO: 2237504 - DNA, 25 bp, Homo sapien
tagtttgtatgcctcctcctccggg

SEQ ID NO: 2237505 - DNA, 25 bp, Homo sapien
gaattactaagtttatgctccactg

SEQ ID NO: 2237506 - DNA, 25 bp, Homo sapien
atatattaacatgcacagatcctaa

SEQ ID NO: 2237507 - DNA, 25 bp, Homo sapien
ttcatgtaaccatcaacctaaagaa

SEQ ID NO: 2237508 - DNA, 25 bp, Homo sapien
agaataattccattaccttgaaagt

SEQ ID NO: 2237509 - DNA, 25 bp, Homo sapien
gcaaggaatttcagtactacgttga

SEQ ID NO: 2237510 - DNA, 25 bp, Homo sapien
atggtactaagaaccttttaatgtg

SEQ ID NO: 2237511 - DNA, 25 bp, Homo sapien
gtacttttagtttgcattgcccaga

SEQ ID NO: 2237512 - DNA, 25 bp, Homo sapien
ttagtttgcattgcccagatgaata

SEQ ID NO: 2237513 - DNA, 25 bp, Homo sapien
caatttgtctggtacactagggcaa

SEQ ID NO: 2237514 - DNA, 25 bp, Homo sapien
gaccagcaacagtggaatgacacag

SEQ ID NO: 2237515 - DNA, 25 bp, Homo sapien
taaacactgtcgtggagtcggaccc

SEQ ID NO: 2237516 - DNA, 25 bp, Homo sapien
cactataagacatgcccgcttgggc

SEQ ID NO: 2237517 - DNA, 25 bp, Homo sapien
ctagataggtttcttaaattgacct

SEQ ID NO: 2237518 - DNA, 25 bp, Homo sapien
aggtttcttaaattgacctacaatg

SEQ ID NO: 2237519 - DNA, 25 bp, Homo sapien
taaattgacctacaatggattttat

SEQ ID NO: 2237520 - DNA, 25 bp, Homo sapien
tttaatatagtcatacactgtataa

SEQ ID NO: 2237521 - DNA, 25 bp, Homo sapien
agttgctaggctattgattactgcc

SEQ ID NO: 2237522 - DNA, 25 bp, Homo sapien
tgatcatggtagatgagctttctga

SEQ ID NO: 2237523 - DNA, 25 bp, Homo sapien
ttttttttagttgctaggctattga

SEQ ID NO: 2237524 - DNA, 25 bp, Homo sapien
tatttttctattgctggaaatagtt

SEQ ID NO: 2237525 - DNA, 25 bp, Homo sapien
ggtgaaatgcttgacctctctccaa

SEQ ID NO: 2237526 - DNA, 25 bp, Homo sapien
gatatattttgaacagccccaggca

SEQ ID NO: 2237527 - DNA, 25 bp, Homo sapien
aattagacactacaactctgcagag

SEQ ID NO: 2237528 - DNA, 25 bp, Homo sapien
gcaattattaccaggtgcatggact

SEQ ID NO: 2237529 - DNA, 25 bp, Homo sapien
caaaggtccgtgtgagacacactgt

SEQ ID NO: 2237530 - DNA, 25 bp, Homo sapien
gacacactgtatccgcttaattctg

SEQ ID NO: 2237531 - DNA, 25 bp, Homo sapien
aatccatataatatcccgccaaagg

SEQ ID NO: 2237532 - DNA, 25 bp, Homo sapien
tcctgttagcatctgccgaaatcca

SEQ ID NO: 2237533 - DNA, 25 bp, Homo sapien
cattgaaagtggaagagacccactc

SEQ ID NO: 2237534 - DNA, 25 bp, Homo sapien
tgccaaacgttgtgaaaacctgccc

SEQ ID NO: 2237535 - DNA, 25 bp, Homo sapien
agagacccactccataaagaatgat

SEQ ID NO: 2237536 - DNA, 25 bp, Homo sapien
cttctctacgagtcaacaggttgct

SEQ ID NO: 2237537 - DNA, 25 bp, Homo sapien
tggtgatgtatcagctcccaaaagc

SEQ ID NO: 2237538 - DNA, 25 bp, Homo sapien
tcaggatagtatacaaggatgtcac

SEQ ID NO: 2237539 - DNA, 25 bp, Homo sapien
aaatgttgctcctctgatggccatg

SEQ ID NO: 2237540 - DNA, 25 bp, Homo sapien
tgatgttgcctccacctgctatgtg

SEQ ID NO: 2237541 - DNA, 25 bp, Homo sapien
agatggcaacatggaatagcaacac

SEQ ID NO: 2237542 - DNA, 25 bp, Homo sapien
tggaatagcaacactctcaagagga

SEQ ID NO: 2237543 - DNA, 25 bp, Homo sapien
taccttgtagccagcatggagatgg

SEQ ID NO: 2237544 - DNA, 25 bp, Homo sapien
tcatcttgtaaaaaataagagcctg

SEQ ID NO: 2237545 - DNA, 25 bp, Homo sapien
cagtttcttattatgaccactgata

SEQ ID NO: 2237546 - DNA, 25 bp, Homo sapien
ggcattgctgtcatgagcttcatca

SEQ ID NO: 2237547 - DNA, 25 bp, Homo sapien
tgaaggagtcatataacaaatacca

SEQ ID NO: 2237548 - DNA, 25 bp, Homo sapien
atgaccactgataaaggcattgctg

SEQ ID NO: 2237549 - DNA, 25 bp, Homo sapien
tctgtaattgcatactaacaaagtg

SEQ ID NO: 2237550 - DNA, 25 bp, Homo sapien
gagttagaactccatcactgtgatg

SEQ ID NO: 2237551 - DNA, 25 bp, Homo sapien
tatagtagaaggagcaatggaagag

SEQ ID NO: 2237552 - DNA, 25 bp, Homo sapien
gaataaccattgagttactgacaga

SEQ ID NO: 2237553 - DNA, 25 bp, Homo sapien
tgaaacccattaggccattaagctg

SEQ ID NO: 2237554 - DNA, 25 bp, Homo sapien
taactagacctcaaacacaataggc

SEQ ID NO: 2237555 - DNA, 25 bp, Homo sapien
taagctgacgctgaatgaaattaag

SEQ ID NO: 2237556 - DNA, 25 bp, Homo sapien
tttatataaccaagtggctggctgc

SEQ ID NO: 2237557 - DNA, 25 bp, Homo sapien
tgttctcctgataggattgtatctg

SEQ ID NO: 2237558 - DNA, 25 bp, Homo sapien
tatcagtatcacttttcccaccctt

SEQ ID NO: 2237559 - DNA, 25 bp, Homo sapien
gttttaacctgttgtacattatcag

SEQ ID NO: 2237560 - DNA, 25 bp, Homo sapien
gaaaatgcaagcagtggcaccgaca

SEQ ID NO: 2237561 - DNA, 25 bp, Homo sapien
tactatgaaactaacacccctgtgt

SEQ ID NO: 2237562 - DNA, 25 bp, Homo sapien
ggcaggcactgtttaggtattatca

SEQ ID NO: 2237563 - DNA, 25 bp, Homo sapien
gacttgtccagctcatataaccaga

SEQ ID NO: 2237564 - DNA, 25 bp, Homo sapien
gcctaatacctgattgggaccacta

SEQ ID NO: 2237565 - DNA, 25 bp, Homo sapien
gacttctgatttatccagcccagtc

SEQ ID NO: 2237566 - DNA, 25 bp, Homo sapien
tatccagcccagtcattggattgat

SEQ ID NO: 2237567 - DNA, 25 bp, Homo sapien
ccagtcattggattgatttctcctg

SEQ ID NO: 2237568 - DNA, 25 bp, Homo sapien
ctgatttatccagcccagtcattgg

SEQ ID NO: 2237569 - DNA, 25 bp, Homo sapien
tccagaagaataggcaatagcctgt

SEQ ID NO: 2237570 - DNA, 25 bp, Homo sapien
ctaaagatttgatcattgagtctgc

SEQ ID NO: 2237571 - DNA, 25 bp, Homo sapien
tgtttcagagaagcctccagaagaa

SEQ ID NO: 2237572 - DNA, 25 bp, Homo sapien
aattgcatggtgaataaaggttgtc

SEQ ID NO: 2237573 - DNA, 25 bp, Homo sapien
atctatggcagatggatccttactc

SEQ ID NO: 2237574 - DNA, 25 bp, Homo sapien
tctatggcagatggatccttactct

SEQ ID NO: 2237575 - DNA, 25 bp, Homo sapien
tgacatttctttcaattttgttcat

SEQ ID NO: 2237576 - DNA, 25 bp, Homo sapien
cttctatgacatttctttcaatttt

SEQ ID NO: 2237577 - DNA, 25 bp, Homo sapien
ttctatgacatttctttcaattttg

SEQ ID NO: 2237578 - DNA, 25 bp, Homo sapien
tatgacatttctttcaattttgttc

SEQ ID NO: 2237579 - DNA, 25 bp, Homo sapien
acccatcatttagcattgggtatat

SEQ ID NO: 2237580 - DNA, 25 bp, Homo sapien
ttaacccatcatttagcattgggta

SEQ ID NO: 2237581 - DNA, 25 bp, Homo sapien
caacagtccgcggtgtgtgatattc

SEQ ID NO: 2237582 - DNA, 25 bp, Homo sapien
ccttgcgtttgctgagaatgacggt

SEQ ID NO: 2237583 - DNA, 25 bp, Homo sapien
taaaaagttggtgcagctaatgcct

SEQ ID NO: 2237584 - DNA, 25 bp, Homo sapien
tgtagccaacagcataatatgaagg

SEQ ID NO: 2237585 - DNA, 25 bp, Homo sapien
ccaaggcaaagtagttccagctatt

SEQ ID NO: 2237586 - DNA, 25 bp, Homo sapien
tatctgggattgacatgcatattcc

SEQ ID NO: 2237587 - DNA, 25 bp, Homo sapien
tgactatctggatcaccttcggtga

SEQ ID NO: 2237588 - DNA, 25 bp, Homo sapien
acagatcacacagcctaattcccag

SEQ ID NO: 2237589 - DNA, 25 bp, Homo sapien
gaggttcattttggagttgtgacta

SEQ ID NO: 2237590 - DNA, 25 bp, Homo sapien
taattcccagcttgaagtaatcagg

SEQ ID NO: 2237591 - DNA, 25 bp, Homo sapien
gaatgaatttcacgacaaacctgat

SEQ ID NO: 2237592 - DNA, 25 bp, Homo sapien
gcaacatctgccttcaaaactgcaa

SEQ ID NO: 2237593 - DNA, 25 bp, Homo sapien
gaatttcacgacaaacctgattttg

SEQ ID NO: 2237594 - DNA, 25 bp, Homo sapien
aacatctgccttcaaaactgcaacc

SEQ ID NO: 2237595 - DNA, 25 bp, Homo sapien
ctgttccagggtccaatgcagggtg

SEQ ID NO: 2237596 - DNA, 25 bp, Homo sapien
catatttgtcaacactatggaacca

SEQ ID NO: 2237597 - DNA, 25 bp, Homo sapien
cattgccaccaactaaattccagac

SEQ ID NO: 2237598 - DNA, 25 bp, Homo sapien
gataataagactttacactcctcag

SEQ ID NO: 2237599 - DNA, 25 bp, Homo sapien
caaagataagctgtgatacctgatg

SEQ ID NO: 2237600 - DNA, 25 bp, Homo sapien
tgtacctggtctccaacagtaacct

SEQ ID NO: 2237601 - DNA, 25 bp, Homo sapien
ctagaagataatggttttgagcaca

SEQ ID NO: 2237602 - DNA, 25 bp, Homo sapien
tatctttgcccaagaagactgtgta

SEQ ID NO: 2237603 - DNA, 25 bp, Homo sapien
ggaccacaagtatcttggcatctgt

SEQ ID NO: 2237604 - DNA, 25 bp, Homo sapien
tggaccacaagtatcttggcatctg

SEQ ID NO: 2237605 - DNA, 25 bp, Homo sapien
ctggaccacaagtatcttggcatct

SEQ ID NO: 2237606 - DNA, 25 bp, Homo sapien
caccctagctgttttagtatgagaa

SEQ ID NO: 2237607 - DNA, 25 bp, Homo sapien
tactttaagacgattttgctcctcc

SEQ ID NO: 2237608 - DNA, 25 bp, Homo sapien
gtacagggagctcccatgcaccatt

SEQ ID NO: 2237609 - DNA, 25 bp, Homo sapien
tatgagaagctgagacgaattaggt

SEQ ID NO: 2237610 - DNA, 25 bp, Homo sapien
tcatagttttagttgtagagctctt

SEQ ID NO: 2237611 - DNA, 25 bp, Homo sapien
agctgaggattgtttcggtcattct

SEQ ID NO: 2237612 - DNA, 25 bp, Homo sapien
ttgtatgtcattggtccttttatga

SEQ ID NO: 2237613 - DNA, 25 bp, Homo sapien
tcatagttccgtataaattttgctt

SEQ ID NO: 2237614 - DNA, 25 bp, Homo sapien
catatggtcttatccctgaaaatga

SEQ ID NO: 2237615 - DNA, 25 bp, Homo sapien
tattgctgtgagctctcttaatact

SEQ ID NO: 2237616 - DNA, 25 bp, Homo sapien
ccatttgctctatagtgaaggttaa

SEQ ID NO: 2237617 - DNA, 25 bp, Homo sapien
gagttctggcacaaagcttgttgtt

SEQ ID NO: 2237618 - DNA, 25 bp, Homo sapien
tccacgggcactggcagaattctcc

SEQ ID NO: 2237619 - DNA, 25 bp, Homo sapien
gatagccccaaaccactttagtcag

SEQ ID NO: 2237620 - DNA, 25 bp, Homo sapien
gacctggattcctctcagtggagca

SEQ ID NO: 2237621 - DNA, 25 bp, Homo sapien
tgtgttctgttatgaccagggcagc

SEQ ID NO: 2237622 - DNA, 25 bp, Homo sapien
gaaagaacttgccagctggatagca

SEQ ID NO: 2237623 - DNA, 25 bp, Homo sapien
tgctattctgcagagtttacccaag

SEQ ID NO: 2237624 - DNA, 25 bp, Homo sapien
taaaatggcctgcaatggattctag

SEQ ID NO: 2237625 - DNA, 25 bp, Homo sapien
ttaactgggctaccataaaatggcc

SEQ ID NO: 2237626 - DNA, 25 bp, Homo sapien
ggtgtcaatcagtgacccagacttt

SEQ ID NO: 2237627 - DNA, 25 bp, Homo sapien
tagtacttacttggtatgccatagc

SEQ ID NO: 2237628 - DNA, 25 bp, Homo sapien
taatggaagtgttaagatagatgca

SEQ ID NO: 2237629 - DNA, 25 bp, Homo sapien
catagcttaaggtactgaaagcaat

SEQ ID NO: 2237630 - DNA, 25 bp, Homo sapien
taaggatttacccatcccatgcctc

SEQ ID NO: 2237631 - DNA, 25 bp, Homo sapien
atcatctaatttgatgaagaatttc

SEQ ID NO: 2237632 - DNA, 25 bp, Homo sapien
tctgtaaggatttacccatcccatg

SEQ ID NO: 2237633 - DNA, 25 bp, Homo sapien
catgtttctgtaaggatttacccat

SEQ ID NO: 2237634 - DNA, 25 bp, Homo sapien
cgctttgttattctatccaaaaatt

SEQ ID NO: 2237635 - DNA, 25 bp, Homo sapien
atcgctttgttattctatccaaaaa

SEQ ID NO: 2237636 - DNA, 25 bp, Homo sapien
tcgctttgttattctatccaaaaat

SEQ ID NO: 2237637 - DNA, 25 bp, Homo sapien
tatcgctttgttattctatccaaaa

SEQ ID NO: 2237638 - DNA, 25 bp, Homo sapien
tggcaaatagcagttatagcaaagc

SEQ ID NO: 2237639 - DNA, 25 bp, Homo sapien
taggagagaatgctgtgcttcttcc

SEQ ID NO: 2237640 - DNA, 25 bp, Homo sapien
tagcagttatagcaaagcaacacca

SEQ ID NO: 2237641 - DNA, 25 bp, Homo sapien
caaatagcagttatagcaaagcaac

SEQ ID NO: 2237642 - DNA, 25 bp, Homo sapien
ttattgtacctggatcactttcctt

SEQ ID NO: 2237643 - DNA, 25 bp, Homo sapien
tatgattattattgtacctggatca

SEQ ID NO: 2237644 - DNA, 25 bp, Homo sapien
cttatatgattattattgtacctgg

SEQ ID NO: 2237645 - DNA, 25 bp, Homo sapien
gattattattgtacctggatcactt

SEQ ID NO: 2237646 - DNA, 25 bp, Homo sapien
tttcaaggacacttgaagggaattc

SEQ ID NO: 2237647 - DNA, 25 bp, Homo sapien
gccctttcaaggacacttgaaggga

SEQ ID NO: 2237648 - DNA, 25 bp, Homo sapien
cctttcaaggacacttgaagggaat

SEQ ID NO: 2237649 - DNA, 25 bp, Homo sapien
aagccctttcaaggacacttgaagg

SEQ ID NO: 2237650 - DNA, 25 bp, Homo sapien
tgtccttcagatatgcaccctacgg

SEQ ID NO: 2237651 - DNA, 25 bp, Homo sapien
tataaaacgggataacagccattgc

SEQ ID NO: 2237652 - DNA, 25 bp, Homo sapien
tatattggagtctaaggccaacccc

SEQ ID NO: 2237653 - DNA, 25 bp, Homo sapien
taatgcctcagcctaaggtgtccag

SEQ ID NO: 2237654 - DNA, 25 bp, Homo sapien
tgctgactttcttggactgatactg

SEQ ID NO: 2237655 - DNA, 25 bp, Homo sapien
tagtgattagcaagacagaggtgtc

SEQ ID NO: 2237656 - DNA, 25 bp, Homo sapien
tgccatgaaccagtaattctcccag

SEQ ID NO: 2237657 - DNA, 25 bp, Homo sapien
tgtagccactaaagtgtctccttgg

SEQ ID NO: 2237658 - DNA, 25 bp, Homo sapien
tataagcatgcccactgtacctggc

SEQ ID NO: 2237659 - DNA, 25 bp, Homo sapien
tacagcctgttaccggacacaagtg

SEQ ID NO: 2237660 - DNA, 25 bp, Homo sapien
catctcaccactgattagcaaggga

SEQ ID NO: 2237661 - DNA, 25 bp, Homo sapien
tccctccctaggtgacttgatggtc

SEQ ID NO: 2237662 - DNA, 25 bp, Homo sapien
tagtgaaaatctccttaatacgcaa

SEQ ID NO: 2237663 - DNA, 25 bp, Homo sapien
tatcagagatgtaatcgggaaagac

SEQ ID NO: 2237664 - DNA, 25 bp, Homo sapien
gaacaattgtagagctaatacacct

SEQ ID NO: 2237665 - DNA, 25 bp, Homo sapien
gatctaggacatagctgtcaggcct

SEQ ID NO: 2237666 - DNA, 25 bp, Homo sapien
cacagacacgagtgaaatttggtgc

SEQ ID NO: 2237667 - DNA, 25 bp, Homo sapien
acacagacacgagtgaaatttggtg

SEQ ID NO: 2237668 - DNA, 25 bp, Homo sapien
cagacacgagtgaaatttggtgccg

SEQ ID NO: 2237669 - DNA, 25 bp, Homo sapien
acagacacgagtgaaatttggtgcc

SEQ ID NO: 2237670 - DNA, 25 bp, Homo sapien
cagacatcactaaaatggtaagggc

SEQ ID NO: 2237671 - DNA, 25 bp, Homo sapien
caaggaaggtaggtgacttgaccaa

SEQ ID NO: 2237672 - DNA, 25 bp, Homo sapien
aaaagagtgagctgaactttgccca

SEQ ID NO: 2237673 - DNA, 25 bp, Homo sapien
gaccaaggttttatagcgactctgc

SEQ ID NO: 2237674 - DNA, 25 bp, Homo sapien
ccaaaataccgtgtttttcactgtg

SEQ ID NO: 2237675 - DNA, 25 bp, Homo sapien
tgcttggggcttctcaagacagcac

SEQ ID NO: 2237676 - DNA, 25 bp, Homo sapien
tcacttgaaacatatttggagatcc

SEQ ID NO: 2237677 - DNA, 25 bp, Homo sapien
ggagatccaagccaacaagccaaaa

SEQ ID NO: 2237678 - DNA, 25 bp, Homo sapien
gattctctgtgcaaaactcaatatc

SEQ ID NO: 2237679 - DNA, 25 bp, Homo sapien
tgttgtgagtaccacactggctgcc

SEQ ID NO: 2237680 - DNA, 25 bp, Homo sapien
aatatccaaaagtccattgattcca

SEQ ID NO: 2237681 - DNA, 25 bp, Homo sapien
actctgcctcttgttgtgagtacca

SEQ ID NO: 2237682 - DNA, 25 bp, Homo sapien
tggaaacttggcagagctctgctgc

SEQ ID NO: 2237683 - DNA, 25 bp, Homo sapien
agaggactggaagcctggaaacttg

SEQ ID NO: 2237684 - DNA, 25 bp, Homo sapien
ggaaagaaagaggactggaagcctg

SEQ ID NO: 2237685 - DNA, 25 bp, Homo sapien
acctcatttcaaacagaatggccat

SEQ ID NO: 2237686 - DNA, 25 bp, Homo sapien
tccgagttgaaggaaatagacagct

SEQ ID NO: 2237687 - DNA, 25 bp, Homo sapien
gatggttcacaataccaatcacaat

SEQ ID NO: 2237688 - DNA, 25 bp, Homo sapien
caatcacaatgcgataaatacaagt

SEQ ID NO: 2237689 - DNA, 25 bp, Homo sapien
ttttccgagttgaaggaaatagaca

SEQ ID NO: 2237690 - DNA, 25 bp, Homo sapien
ttcctgctgttgaaactgagaagct

SEQ ID NO: 2237691 - DNA, 25 bp, Homo sapien
cagtgcatgcatacttttcctgctg

SEQ ID NO: 2237692 - DNA, 25 bp, Homo sapien
actgtcagtgcatgcatacttttcc

SEQ ID NO: 2237693 - DNA, 25 bp, Homo sapien
tgaaactgagaagctgtcatttcac

SEQ ID NO: 2237694 - DNA, 25 bp, Homo sapien
caactgaattgtcttgaagctgact

SEQ ID NO: 2237695 - DNA, 25 bp, Homo sapien
tgtcggtgaccccaaacaataaata

SEQ ID NO: 2237696 - DNA, 25 bp, Homo sapien
tgactctgctcaagaacattgacag

SEQ ID NO: 2237697 - DNA, 25 bp, Homo sapien
aaatacaactgaattgtcttgaagc

SEQ ID NO: 2237698 - DNA, 25 bp, Homo sapien
gctgcaagttcactaggtacatgaa

SEQ ID NO: 2237699 - DNA, 25 bp, Homo sapien
acaggagaccaatttgacaaatgtt

SEQ ID NO: 2237700 - DNA, 25 bp, Homo sapien
caatctcttgcttgtgaagctgcaa

SEQ ID NO: 2237701 - DNA, 25 bp, Homo sapien
tccagcctcagatagcagttttctc

SEQ ID NO: 2237702 - DNA, 25 bp, Homo sapien
caatggataatggaaatcgatatgt

SEQ ID NO: 2237703 - DNA, 25 bp, Homo sapien
ttagtgaaatcagagaaacaatgga

SEQ ID NO: 2237704 - DNA, 25 bp, Homo sapien
tcagagaaacaatggataatggaaa

SEQ ID NO: 2237705 - DNA, 25 bp, Homo sapien
cttcactagctcactgactcaaatg

SEQ ID NO: 2237706 - DNA, 25 bp, Homo sapien
caaaagaacctggtgaggtctcaca

SEQ ID NO: 2237707 - DNA, 25 bp, Homo sapien
aaaagaacctggtgaggtctcacaa

SEQ ID NO: 2237708 - DNA, 25 bp, Homo sapien
cacagtgcagaagcatgagctatca

SEQ ID NO: 2237709 - DNA, 25 bp, Homo sapien
agcatgagctatcaaaagaacctgg

SEQ ID NO: 2237710 - DNA, 25 bp, Homo sapien
aaatacaactggcttaggtgcccat

SEQ ID NO: 2237711 - DNA, 25 bp, Homo sapien
ctgagcaactatgccctctcccatc

SEQ ID NO: 2237712 - DNA, 25 bp, Homo sapien
acaaatacaactggcttaggtgccc

SEQ ID NO: 2237713 - DNA, 25 bp, Homo sapien
agccttctctgagcaactatgccct

SEQ ID NO: 2237714 - DNA, 25 bp, Homo sapien
cacaaagaactatttgtggttctct

SEQ ID NO: 2237715 - DNA, 25 bp, Homo sapien
gttctctctaatctctgaggctttt

SEQ ID NO: 2237716 - DNA, 25 bp, Homo sapien
gaggcttttgcatatactttcagaa

SEQ ID NO: 2237717 - DNA, 25 bp, Homo sapien
catatactttcagaatacactcttc

SEQ ID NO: 2237718 - DNA, 25 bp, Homo sapien
gaaggcagcttcaaatcaactacta

SEQ ID NO: 2237719 - DNA, 25 bp, Homo sapien
ccatgccacggttgttttaaagata

SEQ ID NO: 2237720 - DNA, 25 bp, Homo sapien
taatagatccccatgattcccaaga

SEQ ID NO: 2237721 - DNA, 25 bp, Homo sapien
taacctctggtagcctgagtttgaa

SEQ ID NO: 2237722 - DNA, 25 bp, Homo sapien
tgttggatcgtaattctggaggctg

SEQ ID NO: 2237723 - DNA, 25 bp, Homo sapien
agaaatagggggctaaattcatcct

SEQ ID NO: 2237724 - DNA, 25 bp, Homo sapien
tgaacagaaatctgttggatcgtaa

SEQ ID NO: 2237725 - DNA, 25 bp, Homo sapien
agtccaagattgaaagaccaatctt

SEQ ID NO: 2237726 - DNA, 25 bp, Homo sapien
tatttctgttgtagtcaggaaacac

SEQ ID NO: 2237727 - DNA, 25 bp, Homo sapien
gattctgtactccactattgttggg

SEQ ID NO: 2237728 - DNA, 25 bp, Homo sapien
cttagagtgttgatttgagaacccc

SEQ ID NO: 2237729 - DNA, 25 bp, Homo sapien
tgtgactccctatttgactcatagg

SEQ ID NO: 2237730 - DNA, 25 bp, Homo sapien
gaacatctcaccaattttaaatcgg

SEQ ID NO: 2237731 - DNA, 25 bp, Homo sapien
tcagaccgaccagcccaaggaacat

SEQ ID NO: 2237732 - DNA, 25 bp, Homo sapien
ctcaggtcctcagaccgaccagccc

SEQ ID NO: 2237733 - DNA, 25 bp, Homo sapien
gcccaaggaacatctcaccaatttt

SEQ ID NO: 2237734 - DNA, 25 bp, Homo sapien
ggcctgaagtaactgaagaatcaca

SEQ ID NO: 2237735 - DNA, 25 bp, Homo sapien
tggcctgaagtaactgaagaatcac

SEQ ID NO: 2237736 - DNA, 25 bp, Homo sapien
tgaagtaactgaagaatcacaaaag

SEQ ID NO: 2237737 - DNA, 25 bp, Homo sapien
agatggcctgaagtaactgaagaat

SEQ ID NO: 2237738 - DNA, 25 bp, Homo sapien
gtccttgccttaactgatgacatta

SEQ ID NO: 2237739 - DNA, 25 bp, Homo sapien
atggccggtccttgccttaactgat

SEQ ID NO: 2237740 - DNA, 25 bp, Homo sapien
cttgccttaactgatgacattacct

SEQ ID NO: 2237741 - DNA, 25 bp, Homo sapien
aatggccggtccttgccttaactga

SEQ ID NO: 2237742 - DNA, 25 bp, Homo sapien
gatggtctgaatttaggtcggagcc

SEQ ID NO: 2237743 - DNA, 25 bp, Homo sapien
ggacttagccacagaaacaggtact

SEQ ID NO: 2237744 - DNA, 25 bp, Homo sapien
gaagagttccggagtgctacattag

SEQ ID NO: 2237745 - DNA, 25 bp, Homo sapien
tcacaagcttacagtcaggatggtc

SEQ ID NO: 2237746 - DNA, 25 bp, Homo sapien
gtagttttggaaacatatgtatttg

SEQ ID NO: 2237747 - DNA, 25 bp, Homo sapien
cagtagttttggaaacatatgtatt

SEQ ID NO: 2237748 - DNA, 25 bp, Homo sapien
agtagttttggaaacatatgtattt

SEQ ID NO: 2237749 - DNA, 25 bp, Homo sapien
cacagccttagaaaccgggaaatat

SEQ ID NO: 2237750 - DNA, 25 bp, Homo sapien
gcgagcgccgctcaaaggctaacgt

SEQ ID NO: 2237751 - DNA, 25 bp, Homo sapien
tcggcgagcgccgctcaaaggctaa

SEQ ID NO: 2237752 - DNA, 25 bp, Homo sapien
ggcgagcgccgctcaaaggctaacg

SEQ ID NO: 2237753 - DNA, 25 bp, Homo sapien
gctcggcgagcgccgctcaaaggct

SEQ ID NO: 2237754 - DNA, 25 bp, Homo sapien
caagaaaactgcgatgggtttttgc

SEQ ID NO: 2237755 - DNA, 25 bp, Homo sapien
tgcttttcgaaacagaacttgggtg

SEQ ID NO: 2237756 - DNA, 25 bp, Homo sapien
gacagtatgttcactgccaaattaa

SEQ ID NO: 2237757 - DNA, 25 bp, Homo sapien
cttcaagaaaactgcgatgggtttt

SEQ ID NO: 2237758 - DNA, 25 bp, Homo sapien
ttctgccgggttaggtcctccaagc

SEQ ID NO: 2237759 - DNA, 25 bp, Homo sapien
tctctctgtacggcctctctgtagc

SEQ ID NO: 2237760 - DNA, 25 bp, Homo sapien
tctctgtagcctcttctatacactc

SEQ ID NO: 2237761 - DNA, 25 bp, Homo sapien
tagcctcttctatacactcgctgcg

SEQ ID NO: 2237762 - DNA, 25 bp, Homo sapien
gggccccgttcacccttctctgcgc

SEQ ID NO: 2237763 - DNA, 25 bp, Homo sapien
gttttggtgcctctgagccaagggg

SEQ ID NO: 2237764 - DNA, 25 bp, Homo sapien
gctgccgccaggacaccgcaggcac

SEQ ID NO: 2237765 - DNA, 25 bp, Homo sapien
gccccgttcacccttctctgcgctg

SEQ ID NO: 2237766 - DNA, 25 bp, Homo sapien
aaaaagagctctgcctgaccggtta

SEQ ID NO: 2237767 - DNA, 25 bp, Homo sapien
ctgaccggttagagctctgcctgac

SEQ ID NO: 2237768 - DNA, 25 bp, Homo sapien
tctgcctgaccggttagagctctgc

SEQ ID NO: 2237769 - DNA, 25 bp, Homo sapien
ccggttgcgcctgggagcctgtgaa

SEQ ID NO: 2237770 - DNA, 25 bp, Homo sapien
acaacgactgggcaaccgactggct

SEQ ID NO: 2237771 - DNA, 25 bp, Homo sapien
ttgctgccttgaccttgcattgaca

SEQ ID NO: 2237772 - DNA, 25 bp, Homo sapien
gccttgaccttgcattgacagcacc

SEQ ID NO: 2237773 - DNA, 25 bp, Homo sapien
acgactgggcaaccgactggctgtg

SEQ ID NO: 2237774 - DNA, 25 bp, Homo sapien
tacatcgttgtcgtcggagtcgtcg

SEQ ID NO: 2237775 - DNA, 25 bp, Homo sapien
tcttctgtctgtacatcgttgtcgt

SEQ ID NO: 2237776 - DNA, 25 bp, Homo sapien
gccgattgcatatgaactcttcttc

SEQ ID NO: 2237777 - DNA, 25 bp, Homo sapien
tcgtcgcgatcgtcgtggcgctcgt

SEQ ID NO: 2237778 - DNA, 25 bp, Homo sapien
gccaacgaagaagaaagaagacgcg

SEQ ID NO: 2237779 - DNA, 25 bp, Homo sapien
gaagacgcgattagtgcagagatgc

SEQ ID NO: 2237780 - DNA, 25 bp, Homo sapien
gatgctggaggtggtcagttactaa

SEQ ID NO: 2237781 - DNA, 25 bp, Homo sapien
cgtccgtttagagtagtgtagttag

SEQ ID NO: 2237782 - DNA, 25 bp, Homo sapien
ggcgcacggtcacccaaaggaggtc

SEQ ID NO: 2237783 - DNA, 25 bp, Homo sapien
ggtcacccaaaggaggtcgactcgc

SEQ ID NO: 2237784 - DNA, 25 bp, Homo sapien
ggcgcttcctatcgcgccgagctcc

SEQ ID NO: 2237785 - DNA, 25 bp, Homo sapien
aaaggaggtcgactcgccggcgctt

SEQ ID NO: 2237786 - DNA, 25 bp, Homo sapien
tgggcgattgcagccgagtccgttt

SEQ ID NO: 2237787 - DNA, 25 bp, Homo sapien
gcgggctccgctgggcgattgcagc

SEQ ID NO: 2237788 - DNA, 25 bp, Homo sapien
gcgattgcagccgagtccgtttctc

SEQ ID NO: 2237789 - DNA, 25 bp, Homo sapien
gcagccgagtccgtttctcgtctag

SEQ ID NO: 2237790 - DNA, 25 bp, Homo sapien
gcaggctaaccgagggacgttcata

SEQ ID NO: 2237791 - DNA, 25 bp, Homo sapien
gaaatgcggcgcactgagtaacctc

SEQ ID NO: 2237792 - DNA, 25 bp, Homo sapien
agacaattgcgacctcacatacacg

SEQ ID NO: 2237793 - DNA, 25 bp, Homo sapien
tgagctccccagtttgcagacaatt

SEQ ID NO: 2237794 - DNA, 25 bp, Homo sapien
gctatggtataagatgccgatcgat

SEQ ID NO: 2237795 - DNA, 25 bp, Homo sapien
taagatgccgatcgataactgttgt

SEQ ID NO: 2237796 - DNA, 25 bp, Homo sapien
tgccgatcgataactgttgtagagg

SEQ ID NO: 2237797 - DNA, 25 bp, Homo sapien
caccctgctatggtataagatgccg

SEQ ID NO: 2237798 - DNA, 25 bp, Homo sapien
ctcccttaagatacagtttgtctag

SEQ ID NO: 2237799 - DNA, 25 bp, Homo sapien
ccttaagatacagtttgtctagggc

SEQ ID NO: 2237800 - DNA, 25 bp, Homo sapien
aagatacagtttgtctagggcagct

SEQ ID NO: 2237801 - DNA, 25 bp, Homo sapien
taagatacagtttgtctagggcagc

SEQ ID NO: 2237802 - DNA, 25 bp, Homo sapien
tgattagtgcaattcaccgaagact

SEQ ID NO: 2237803 - DNA, 25 bp, Homo sapien
ccagaattttaaggctcatgatcaa

SEQ ID NO: 2237804 - DNA, 25 bp, Homo sapien
caagccacctagtaaatgttctcca

SEQ ID NO: 2237805 - DNA, 25 bp, Homo sapien
tctcaaaagaaaagcgcatgccttc

SEQ ID NO: 2237806 - DNA, 25 bp, Homo sapien
gatgaatgtcaaacttaaaggtgtt

SEQ ID NO: 2237807 - DNA, 25 bp, Homo sapien
aaaggtgtttgttatctggctgggc

SEQ ID NO: 2237808 - DNA, 25 bp, Homo sapien
gaaaagacaatatgtcatttcagtt

SEQ ID NO: 2237809 - DNA, 25 bp, Homo sapien
taatgatgaatgtcaaacttaaagg

SEQ ID NO: 2237810 - DNA, 25 bp, Homo sapien
caaccaaactagacatacagaggat

SEQ ID NO: 2237811 - DNA, 25 bp, Homo sapien
cctctttctaacagccatgatttct

SEQ ID NO: 2237812 - DNA, 25 bp, Homo sapien
ttataattcatttgcaacacttcaa

SEQ ID NO: 2237813 - DNA, 25 bp, Homo sapien
tcttttcagacaacaacatatttat

SEQ ID NO: 2237814 - DNA, 25 bp, Homo sapien
gtggtctccgctgacgctttgccat

SEQ ID NO: 2237815 - DNA, 25 bp, Homo sapien
acagtctcccaccaggcattgtggt

SEQ ID NO: 2237816 - DNA, 25 bp, Homo sapien
tcatcattcatagtatctgctgggc

SEQ ID NO: 2237817 - DNA, 25 bp, Homo sapien
catctgctgagtaccgccatgtctg

SEQ ID NO: 2237818 - DNA, 25 bp, Homo sapien
ctctggtaccgcttgctaatgatga

SEQ ID NO: 2237819 - DNA, 25 bp, Homo sapien
tctggtaccgcttgctaatgatgag

SEQ ID NO: 2237820 - DNA, 25 bp, Homo sapien
ccattaatcttaccttgaagcttct

SEQ ID NO: 2237821 - DNA, 25 bp, Homo sapien
ctcaccattaatcttaccttgaagc

SEQ ID NO: 2237822 - DNA, 25 bp, Homo sapien
catgtggaatgcataggactcaagt

SEQ ID NO: 2237823 - DNA, 25 bp, Homo sapien
ttcatgtggaatgcataggactcaa

SEQ ID NO: 2237824 - DNA, 25 bp, Homo sapien
atgacactttgtccctctgcctctt

SEQ ID NO: 2237825 - DNA, 25 bp, Homo sapien
actttgtccctctgcctcttatctt

SEQ ID NO: 2237826 - DNA, 25 bp, Homo sapien
agtaatcgtgttctcttttcctaca

SEQ ID NO: 2237827 - DNA, 25 bp, Homo sapien
ggcatcaatgtcaaaagtgacttca

SEQ ID NO: 2237828 - DNA, 25 bp, Homo sapien
agcagagacattgaggatgccattg

SEQ ID NO: 2237829 - DNA, 25 bp, Homo sapien
tgccattggcatcaatgtcaaaagt

SEQ ID NO: 2237830 - DNA, 25 bp, Homo sapien
cagagacattgaggatgccattggc

SEQ ID NO: 2237831 - DNA, 25 bp, Homo sapien
caaacttgtcaagcaggttgtcatc

SEQ ID NO: 2237832 - DNA, 25 bp, Homo sapien
tgaggaacaccatggggtgcagaag

SEQ ID NO: 2237833 - DNA, 25 bp, Homo sapien
gaacaccatggggtgcagaaggtat

SEQ ID NO: 2237834 - DNA, 25 bp, Homo sapien
caccatggggtgcagaaggtatgcc

SEQ ID NO: 2237835 - DNA, 25 bp, Homo sapien
ggtcatagcacactcaccttcataa

SEQ ID NO: 2237836 - DNA, 25 bp, Homo sapien
tggtcatagcacactcaccttcata

SEQ ID NO: 2237837 - DNA, 25 bp, Homo sapien
cttggtcatagcacactcaccttca

SEQ ID NO: 2237838 - DNA, 25 bp, Homo sapien
tcatagcacactcaccttcataaac

SEQ ID NO: 2237839 - DNA, 25 bp, Homo sapien
cagcaagttcaataccaaaggaaag

SEQ ID NO: 2237840 - DNA, 25 bp, Homo sapien
tggttgtcagaatagataggctgtc

SEQ ID NO: 2237841 - DNA, 25 bp, Homo sapien
ggctgtcagaaggtctctgtctgct

SEQ ID NO: 2237842 - DNA, 25 bp, Homo sapien
caccagcaagttcaataccaaagga

SEQ ID NO: 2237843 - DNA, 25 bp, Homo sapien
atatgagtataaccaccaatagaga

SEQ ID NO: 2237844 - DNA, 25 bp, Homo sapien
ggatatgagtataaccaccaataga

SEQ ID NO: 2237845 - DNA, 25 bp, Homo sapien
tatgagtataaccaccaatagagac

SEQ ID NO: 2237846 - DNA, 25 bp, Homo sapien
gatatgagtataaccaccaatagag

SEQ ID NO: 2237847 - DNA, 25 bp, Homo sapien
acagaggcgtcttatagctctcttc

SEQ ID NO: 2237848 - DNA, 25 bp, Homo sapien
cagaggcgtcttatagctctcttct

SEQ ID NO: 2237849 - DNA, 25 bp, Homo sapien
tctttcttatacttatgcttgaact

SEQ ID NO: 2237850 - DNA, 25 bp, Homo sapien
atggctgacaattcggttgtcaaag

SEQ ID NO: 2237851 - DNA, 25 bp, Homo sapien
gggtgtctccagatttgacctcaaa

SEQ ID NO: 2237852 - DNA, 25 bp, Homo sapien
ttcttatacttatgcttgaactcag

SEQ ID NO: 2237853 - DNA, 25 bp, Homo sapien
tgggcctgtcagtatcattcaccat

SEQ ID NO: 2237854 - DNA, 25 bp, Homo sapien
acacaagagtatgcagtgtcaagat

SEQ ID NO: 2237855 - DNA, 25 bp, Homo sapien
cacaagagtatgcagtgtcaagatc

SEQ ID NO: 2237856 - DNA, 25 bp, Homo sapien
aaatgttgaggcagatattcccagg

SEQ ID NO: 2237857 - DNA, 25 bp, Homo sapien
ggcatacaccctataaaatgttgag

SEQ ID NO: 2237858 - DNA, 25 bp, Homo sapien
caaggaacggaatatcctcgtgctt

SEQ ID NO: 2237859 - DNA, 25 bp, Homo sapien
ctcattggaatttaaagctttcgaa

SEQ ID NO: 2237860 - DNA, 25 bp, Homo sapien
ctttccactacccagtgatcacgta

SEQ ID NO: 2237861 - DNA, 25 bp, Homo sapien
gtcttcctaagacctgatcttcttg

SEQ ID NO: 2237862 - DNA, 25 bp, Homo sapien
tcttcttgactcagtaccttctgtg

SEQ ID NO: 2237863 - DNA, 25 bp, Homo sapien
cacgtacaagggcaaaagctactgt

SEQ ID NO: 2237864 - DNA, 25 bp, Homo sapien
tagttattacctacaccagatgttc

SEQ ID NO: 2237865 - DNA, 25 bp, Homo sapien
cctgggatttgaggactgaacgatc

SEQ ID NO: 2237866 - DNA, 25 bp, Homo sapien
actgaacgatcagcaattagggaac

SEQ ID NO: 2237867 - DNA, 25 bp, Homo sapien
gatttgaggactgaacgatcagcaa

SEQ ID NO: 2237868 - DNA, 25 bp, Homo sapien
tgttcctgtgagtgggggacaattg

SEQ ID NO: 2237869 - DNA, 25 bp, Homo sapien
ttcctgtgagtgggggacaattgct

SEQ ID NO: 2237870 - DNA, 25 bp, Homo sapien
gttcctgtgagtgggggacaattgc

SEQ ID NO: 2237871 - DNA, 25 bp, Homo sapien
caaagatttaattcgctgataaaca

SEQ ID NO: 2237872 - DNA, 25 bp, Homo sapien
gggtcaagccaatatgttcccattg

SEQ ID NO: 2237873 - DNA, 25 bp, Homo sapien
ctggcaatgtctgccttagtgaaaa

SEQ ID NO: 2237874 - DNA, 25 bp, Homo sapien
gttcccattgcatgcactcgttaca

SEQ ID NO: 2237875 - DNA, 25 bp, Homo sapien
gggcgatccatcaataacttcataa

SEQ ID NO: 2237876 - DNA, 25 bp, Homo sapien
taccaagatacagtccaaattggag

SEQ ID NO: 2237877 - DNA, 25 bp, Homo sapien
catagttgaaccacaaatcctgttc

SEQ ID NO: 2237878 - DNA, 25 bp, Homo sapien
tcttccagagtaggataacatagtt

SEQ ID NO: 2237879 - DNA, 25 bp, Homo sapien
taggtactctgctaccagacagaag

SEQ ID NO: 2237880 - DNA, 25 bp, Homo sapien
ctttaggaacctaagcagtgagacc

SEQ ID NO: 2237881 - DNA, 25 bp, Homo sapien
gagagaagatgtaacccaggcgaag

SEQ ID NO: 2237882 - DNA, 25 bp, Homo sapien
caacgatctctttctgtagcaagga

SEQ ID NO: 2237883 - DNA, 25 bp, Homo sapien
aattgcaaacctgctaggtgaagcc

SEQ ID NO: 2237884 - DNA, 25 bp, Homo sapien
gtttccagcattattgcacacatga

SEQ ID NO: 2237885 - DNA, 25 bp, Homo sapien
gcacacatgaaaagcctgcatgttg

SEQ ID NO: 2237886 - DNA, 25 bp, Homo sapien
aggtgaagcccaacctccgctgatt

SEQ ID NO: 2237887 - DNA, 25 bp, Homo sapien
gttcacatatgcagtcagggagaag

SEQ ID NO: 2237888 - DNA, 25 bp, Homo sapien
catatgcagtcagggagaagggtcc

SEQ ID NO: 2237889 - DNA, 25 bp, Homo sapien
ttattgttcacatatgcagtcaggg

SEQ ID NO: 2237890 - DNA, 25 bp, Homo sapien
aaaataattattgttcacatatgca

SEQ ID NO: 2237891 - DNA, 25 bp, Homo sapien
aacaagcgaatcaacagtcccctct

SEQ ID NO: 2237892 - DNA, 25 bp, Homo sapien
gcgaatcaacagtcccctctaatat

SEQ ID NO: 2237893 - DNA, 25 bp, Homo sapien
catgtcttgattgtttaactgccaa

SEQ ID NO: 2237894 - DNA, 25 bp, Homo sapien
ttaaacaagcgaatcaacagtcccc

SEQ ID NO: 2237895 - DNA, 25 bp, Homo sapien
tgttccactccagccgcaatagtgg

SEQ ID NO: 2237896 - DNA, 25 bp, Homo sapien
gcaatagtggtgatcataatgctgc

SEQ ID NO: 2237897 - DNA, 25 bp, Homo sapien
atcttgttccactccagccgcaata

SEQ ID NO: 2237898 - DNA, 25 bp, Homo sapien
ctccagccgcaatagtggtgatcat

SEQ ID NO: 2237899 - DNA, 25 bp, Homo sapien
tatgagaatctgtatgaaatacaat

SEQ ID NO: 2237900 - DNA, 25 bp, Homo sapien
tgtgtctacatctcctggctccgga

SEQ ID NO: 2237901 - DNA, 25 bp, Homo sapien
tctgtgtctacatctcctggctccg

SEQ ID NO: 2237902 - DNA, 25 bp, Homo sapien
ctgtgtctacatctcctggctccgg

SEQ ID NO: 2237903 - DNA, 25 bp, Homo sapien
gaatgttctgcatacaatctacaca

SEQ ID NO: 2237904 - DNA, 25 bp, Homo sapien
ccaagaacgtccacctgtttagcag

SEQ ID NO: 2237905 - DNA, 25 bp, Homo sapien
aatctacacaataagaagcaccaag

SEQ ID NO: 2237906 - DNA, 25 bp, Homo sapien
acctgtttagcaggagacaacttcc

SEQ ID NO: 2237907 - DNA, 25 bp, Homo sapien
tattgagactcatattgaacatttg

SEQ ID NO: 2237908 - DNA, 25 bp, Homo sapien
caataccatgtctcttgatatggaa

SEQ ID NO: 2237909 - DNA, 25 bp, Homo sapien
gactggaaactgttgagtcaatacc

SEQ ID NO: 2237910 - DNA, 25 bp, Homo sapien
tgaacatttggccatgactggaaac

SEQ ID NO: 2237911 - DNA, 25 bp, Homo sapien
atgtatcacagaaaaattctggaat

SEQ ID NO: 2237912 - DNA, 25 bp, Homo sapien
tcatgtatcacagaaaaattctgga

SEQ ID NO: 2237913 - DNA, 25 bp, Homo sapien
catgtatcacagaaaaattctggaa

SEQ ID NO: 2237914 - DNA, 25 bp, Homo sapien
aatggtagccagaaacgtagcaaag

SEQ ID NO: 2237915 - DNA, 25 bp, Homo sapien
tggcttacgcaaaagcagaccggtt

SEQ ID NO: 2237916 - DNA, 25 bp, Homo sapien
caaagttttcttcgataggtcttca

SEQ ID NO: 2237917 - DNA, 25 bp, Homo sapien
taagatgaaaccaaatggtagccag

SEQ ID NO: 2237918 - DNA, 25 bp, Homo sapien
cactccactcactccaaattccgtc

SEQ ID NO: 2237919 - DNA, 25 bp, Homo sapien
tcactccactcactccaaattccgt

SEQ ID NO: 2237920 - DNA, 25 bp, Homo sapien
tatcactccactcactccaaattcc

SEQ ID NO: 2237921 - DNA, 25 bp, Homo sapien
ctccactcactccaaattccgtcat

SEQ ID NO: 2237922 - DNA, 25 bp, Homo sapien
cataattgtcgggtttcatttgttg

SEQ ID NO: 2237923 - DNA, 25 bp, Homo sapien
tactacaaagcataattgtcgggtt

SEQ ID NO: 2237924 - DNA, 25 bp, Homo sapien
ttgttgttttcaaggtgtatgtttc

SEQ ID NO: 2237925 - DNA, 25 bp, Homo sapien
tgcttcttactacaaagcataattg

SEQ ID NO: 2237926 - DNA, 25 bp, Homo sapien
gtaagatagactggcggcaaaggtt

SEQ ID NO: 2237927 - DNA, 25 bp, Homo sapien
tttcataatcaaaacaccttgctgg

SEQ ID NO: 2237928 - DNA, 25 bp, Homo sapien
gaataggtcccaaaggtatgctcca

SEQ ID NO: 2237929 - DNA, 25 bp, Homo sapien
atttcacatgaactctcccgagtaa

SEQ ID NO: 2237930 - DNA, 25 bp, Homo sapien
tgatgatccattaacacaaatatag

SEQ ID NO: 2237931 - DNA, 25 bp, Homo sapien
ctccaaatagggaaatctgcatcct

SEQ ID NO: 2237932 - DNA, 25 bp, Homo sapien
gaaatctgcatcctatattttgtcc

SEQ ID NO: 2237933 - DNA, 25 bp, Homo sapien
ctgatgatccattaacacaaatata

SEQ ID NO: 2237934 - DNA, 25 bp, Homo sapien
caagttgtaattggtatcaagaagt

SEQ ID NO: 2237935 - DNA, 25 bp, Homo sapien
caggtttccaagaacagagtaaata

SEQ ID NO: 2237936 - DNA, 25 bp, Homo sapien
gccaattgtaatatacgcaatccat

SEQ ID NO: 2237937 - DNA, 25 bp, Homo sapien
tatcaagaagtacacctatgccagg

SEQ ID NO: 2237938 - DNA, 25 bp, Homo sapien
caataagtagtttctgcccaggaac

SEQ ID NO: 2237939 - DNA, 25 bp, Homo sapien
gtgtatcttcgcttcaatgcccttg

SEQ ID NO: 2237940 - DNA, 25 bp, Homo sapien
cttgttaagatcaaacccatctttg

SEQ ID NO: 2237941 - DNA, 25 bp, Homo sapien
cattgccatggtaaaagcgtgtgta

SEQ ID NO: 2237942 - DNA, 25 bp, Homo sapien
gagataacctaagtatccgggatcc

SEQ ID NO: 2237943 - DNA, 25 bp, Homo sapien
cactatctcaaaatcctgaggaggg

SEQ ID NO: 2237944 - DNA, 25 bp, Homo sapien
ccatgtttcactaccaatgtttcgg

SEQ ID NO: 2237945 - DNA, 25 bp, Homo sapien
ttgccattgcaaatagagataacct

SEQ ID NO: 2237946 - DNA, 25 bp, Homo sapien
tatcagaaaggtatataagcatccg

SEQ ID NO: 2237947 - DNA, 25 bp, Homo sapien
cgatagccaagcaaacgaaagccat

SEQ ID NO: 2237948 - DNA, 25 bp, Homo sapien
cttttatctcggtgtctgaagatga

SEQ ID NO: 2237949 - DNA, 25 bp, Homo sapien
ggtgtctgaagatgaagtacagcca

SEQ ID NO: 2237950 - DNA, 25 bp, Homo sapien
ctccgagatttaaaaccttgatatt

SEQ ID NO: 2237951 - DNA, 25 bp, Homo sapien
ccgagatttaaaaccttgatattgc

SEQ ID NO: 2237952 - DNA, 25 bp, Homo sapien
gatttaaaaccttgatattgcctct

SEQ ID NO: 2237953 - DNA, 25 bp, Homo sapien
gagatttaaaaccttgatattgcct

SEQ ID NO: 2237954 - DNA, 25 bp, Homo sapien
cacgagagtgttcttactggttcac

SEQ ID NO: 2237955 - DNA, 25 bp, Homo sapien
aaatagccttcatccggaagaccgt

SEQ ID NO: 2237956 - DNA, 25 bp, Homo sapien
gacaggcacacttctgaccaggtta

SEQ ID NO: 2237957 - DNA, 25 bp, Homo sapien
gaagaccgttagactcacgagagtg

SEQ ID NO: 2237958 - DNA, 25 bp, Homo sapien
tttggtaagcctcaatggctacttt

SEQ ID NO: 2237959 - DNA, 25 bp, Homo sapien
catctgtaatattgtaactttggta

SEQ ID NO: 2237960 - DNA, 25 bp, Homo sapien
ctgatccatctgtaatattgtaact

SEQ ID NO: 2237961 - DNA, 25 bp, Homo sapien
gtaactttggtaagcctcaatggct

SEQ ID NO: 2237962 - DNA, 25 bp, Homo sapien
aatgaacacaaagacaattctctcc

SEQ ID NO: 2237963 - DNA, 25 bp, Homo sapien
tctgggttacaggattgtcactagt

SEQ ID NO: 2237964 - DNA, 25 bp, Homo sapien
caggaacaccggagtttttcacaag

SEQ ID NO: 2237965 - DNA, 25 bp, Homo sapien
tacactatgtggttaccaggaacac

SEQ ID NO: 2237966 - DNA, 25 bp, Homo sapien
tggctttaatcttttgctgtctcca

SEQ ID NO: 2237967 - DNA, 25 bp, Homo sapien
tttccaatgactggcagctcactcc

SEQ ID NO: 2237968 - DNA, 25 bp, Homo sapien
atggctttaatcttttgctgtctcc

SEQ ID NO: 2237969 - DNA, 25 bp, Homo sapien
tccacattttccaatgactggcagc

SEQ ID NO: 2237970 - DNA, 25 bp, Homo sapien
atgggatgctttcctacattgctta

SEQ ID NO: 2237971 - DNA, 25 bp, Homo sapien
gaaactgggacaatgggatgctttc

SEQ ID NO: 2237972 - DNA, 25 bp, Homo sapien
atgaaactgggacaatgggatgctt

SEQ ID NO: 2237973 - DNA, 25 bp, Homo sapien
tgggatgctttcctacattgcttac

SEQ ID NO: 2237974 - DNA, 25 bp, Homo sapien
gtgtccagtatgacatatgatgtgc

SEQ ID NO: 2237975 - DNA, 25 bp, Homo sapien
ttgtgtccagtatgacatatgatgt

SEQ ID NO: 2237976 - DNA, 25 bp, Homo sapien
gaacagtcttgagagaaattaaggc

SEQ ID NO: 2237977 - DNA, 25 bp, Homo sapien
cagtcttgagagaaattaaggcttt

SEQ ID NO: 2237978 - DNA, 25 bp, Homo sapien
aaggtttccccatgatgactacctt

SEQ ID NO: 2237979 - DNA, 25 bp, Homo sapien
ggtttccccatgatgactaccttct

SEQ ID NO: 2237980 - DNA, 25 bp, Homo sapien
aggtttccccatgatgactaccttc

SEQ ID NO: 2237981 - DNA, 25 bp, Homo sapien
tgaactgccatgatgtggacctcag

SEQ ID NO: 2237982 - DNA, 25 bp, Homo sapien
tagacgtggtgttgccatttggcac

SEQ ID NO: 2237983 - DNA, 25 bp, Homo sapien
taagagtcatcaattacacaggcac

SEQ ID NO: 2237984 - DNA, 25 bp, Homo sapien
cctaaggcgtgacctaaggcaaact

SEQ ID NO: 2237985 - DNA, 25 bp, Homo sapien
gccacagaaagctgagatgccttgg

SEQ ID NO: 2237986 - DNA, 25 bp, Homo sapien
ggagcgcctgaactgtgacaccaac

SEQ ID NO: 2237987 - DNA, 25 bp, Homo sapien
gctgagatgccttggttgttggtaa

SEQ ID NO: 2237988 - DNA, 25 bp, Homo sapien
ggttgttggtaattcaaggagcgcc

SEQ ID NO: 2237989 - DNA, 25 bp, Homo sapien
gtcctcgttcttccaaaatatgatg

SEQ ID NO: 2237990 - DNA, 25 bp, Homo sapien
tcacaagtcctcgttcttccaaaat

SEQ ID NO: 2237991 - DNA, 25 bp, Homo sapien
cgttcttccaaaatatgatgaggca

SEQ ID NO: 2237992 - DNA, 25 bp, Homo sapien
cttccaaaatatgatgaggcaaaca

SEQ ID NO: 2237993 - DNA, 25 bp, Homo sapien
aatctaatgaaagactcatacactg

SEQ ID NO: 2237994 - DNA, 25 bp, Homo sapien
caaaaaggtagacagtagtagccat

SEQ ID NO: 2237995 - DNA, 25 bp, Homo sapien
cattaactactagggaaacgcaaat

SEQ ID NO: 2237996 - DNA, 25 bp, Homo sapien
cacagggtttcaatagacattactc

SEQ ID NO: 2237997 - DNA, 25 bp, Homo sapien
tatctcttaggcaatttgtatccag

SEQ ID NO: 2237998 - DNA, 25 bp, Homo sapien
ttctacatttcttcgacattttgcc

SEQ ID NO: 2237999 - DNA, 25 bp, Homo sapien
gacattttgccatgctcagtttggg

SEQ ID NO: 2238000 - DNA, 25 bp, Homo sapien
gagacacccaactttttacaagcat

SEQ ID NO: 2238001 - DNA, 25 bp, Homo sapien
aactttttacaagcatcaagaaaat

SEQ ID NO: 2238002 - DNA, 25 bp, Homo sapien
atcagtgcagctccaatgtcatcag

SEQ ID NO: 2238003 - DNA, 25 bp, Homo sapien
attacttttaacctggattcaagat

SEQ ID NO: 2238004 - DNA, 25 bp, Homo sapien
gaacgtggccttatatgattggcta

SEQ ID NO: 2238005 - DNA, 25 bp, Homo sapien
tgaatactagcaacagaacgtggcc

SEQ ID NO: 2238006 - DNA, 25 bp, Homo sapien
tatttgctctcgctcttcccgtaaa

SEQ ID NO: 2238007 - DNA, 25 bp, Homo sapien
ctcgctcttcccgtaaatgttccat

SEQ ID NO: 2238008 - DNA, 25 bp, Homo sapien
gttgcgaagttgtcgtatttgctct

SEQ ID NO: 2238009 - DNA, 25 bp, Homo sapien
gaagttgtcgtatttgctctcgctc

SEQ ID NO: 2238010 - DNA, 25 bp, Homo sapien
tgccccatattcttggcgagatgag

SEQ ID NO: 2238011 - DNA, 25 bp, Homo sapien
ccccatattcttggcgagatgagcg

SEQ ID NO: 2238012 - DNA, 25 bp, Homo sapien
ctttcttctcattgtaaatcctgga

SEQ ID NO: 2238013 - DNA, 25 bp, Homo sapien
cttctcattgtaaatcctggatctg

SEQ ID NO: 2238014 - DNA, 25 bp, Homo sapien
gatctaggcttcaagccaaagggac

SEQ ID NO: 2238015 - DNA, 25 bp, Homo sapien
aggcttcaagccaaagggactgtgt

SEQ ID NO: 2238016 - DNA, 25 bp, Homo sapien
tgaaaaaccatcagttctgtcatat

SEQ ID NO: 2238017 - DNA, 25 bp, Homo sapien
gtgaaaaaccatcagttctgtcata

SEQ ID NO: 2238018 - DNA, 25 bp, Homo sapien
taatgccaatacactttaaggtaat

SEQ ID NO: 2238019 - DNA, 25 bp, Homo sapien
gagtatttgatcgagatttcacaaa

SEQ ID NO: 2238020 - DNA, 25 bp, Homo sapien
tgatacccattctcccaaaaacgtg

SEQ ID NO: 2238021 - DNA, 25 bp, Homo sapien
caaaaacgtgtaacctcctgtcgat

SEQ ID NO: 2238022 - DNA, 25 bp, Homo sapien
caaactctaactttctgatacccat

SEQ ID NO: 2238023 - DNA, 25 bp, Homo sapien
gatgatactggagattgtgttgaca

SEQ ID NO: 2238024 - DNA, 25 bp, Homo sapien
ttgtgttgacatattagcattatca

SEQ ID NO: 2238025 - DNA, 25 bp, Homo sapien
ctcagatgatactggagattgtgtt

SEQ ID NO: 2238026 - DNA, 25 bp, Homo sapien
tgtgttgacatattagcattatcac

SEQ ID NO: 2238027 - DNA, 25 bp, Homo sapien
acttgaactcttcctcattgattta

SEQ ID NO: 2238028 - DNA, 25 bp, Homo sapien
ccacttgaactcttcctcattgatt

SEQ ID NO: 2238029 - DNA, 25 bp, Homo sapien
tcatcattttcattgccacttgaac

SEQ ID NO: 2238030 - DNA, 25 bp, Homo sapien
cattgccacttgaactcttcctcat

SEQ ID NO: 2238031 - DNA, 25 bp, Homo sapien
ctgcaaatgatcctgcaaatcagtg

SEQ ID NO: 2238032 - DNA, 25 bp, Homo sapien
tgtaaacaccattgaattcggacta

SEQ ID NO: 2238033 - DNA, 25 bp, Homo sapien
taattgtgagcaattcgttgtaaac

SEQ ID NO: 2238034 - DNA, 25 bp, Homo sapien
aaacaccattgaattcggactagcc

SEQ ID NO: 2238035 - DNA, 25 bp, Homo sapien
aaacaaatgtgtaattgtgagcaat

SEQ ID NO: 2238036 - DNA, 25 bp, Homo sapien
tatagggtgagattctggccacggt

SEQ ID NO: 2238037 - DNA, 25 bp, Homo sapien
tttctaatctgtttgctccgcctcc

SEQ ID NO: 2238038 - DNA, 25 bp, Homo sapien
taatctgtttgctccgcctcctttc

SEQ ID NO: 2238039 - DNA, 25 bp, Homo sapien
tctgccagattatagggtgagattc

SEQ ID NO: 2238040 - DNA, 25 bp, Homo sapien
tgaggggtgataatggtgaattaac

SEQ ID NO: 2238041 - DNA, 25 bp, Homo sapien
atggtgaattaacttcatctgctga

SEQ ID NO: 2238042 - DNA, 25 bp, Homo sapien
aatggtgaattaacttcatctgctg

SEQ ID NO: 2238043 - DNA, 25 bp, Homo sapien
caggtgaggggtgataatggtgaat

SEQ ID NO: 2238044 - DNA, 25 bp, Homo sapien
ctgattgatcacgtgtaaaatatac

SEQ ID NO: 2238045 - DNA, 25 bp, Homo sapien
tgattgatcacgtgtaaaatataca

SEQ ID NO: 2238046 - DNA, 25 bp, Homo sapien
ctcatcacagaagttgaatgattaa

SEQ ID NO: 2238047 - DNA, 25 bp, Homo sapien
tttgttttggcttgtttctcatcac

SEQ ID NO: 2238048 - DNA, 25 bp, Homo sapien
ctcttttcacattccacagtttgtt

SEQ ID NO: 2238049 - DNA, 25 bp, Homo sapien
tgttttggcttgtttctcatcacag

SEQ ID NO: 2238050 - DNA, 25 bp, Homo sapien
ttctgttcttgctgcaataactgag

SEQ ID NO: 2238051 - DNA, 25 bp, Homo sapien
tgcaataactgagcagctattttcc

SEQ ID NO: 2238052 - DNA, 25 bp, Homo sapien
gcagctattttcctcaaatcagtta

SEQ ID NO: 2238053 - DNA, 25 bp, Homo sapien
ctgttcttgctgcaataactgagca

SEQ ID NO: 2238054 - DNA, 25 bp, Homo sapien
catttttccgagatttttcagaaca

SEQ ID NO: 2238055 - DNA, 25 bp, Homo sapien
ttcatttttccgagatttttcagaa

SEQ ID NO: 2238056 - DNA, 25 bp, Homo sapien
tcatttttccgagatttttcagaac

SEQ ID NO: 2238057 - DNA, 25 bp, Homo sapien
caggaactgctacatcttctgtgtt

SEQ ID NO: 2238058 - DNA, 25 bp, Homo sapien
gaactgctacatcttctgtgttggg

SEQ ID NO: 2238059 - DNA, 25 bp, Homo sapien
atttccctgttcaggaactgctaca

SEQ ID NO: 2238060 - DNA, 25 bp, Homo sapien
tgttggggtcaacaaaatcatatac

SEQ ID NO: 2238061 - DNA, 25 bp, Homo sapien
ttctgagaatcagtcttacttccta

SEQ ID NO: 2238062 - DNA, 25 bp, Homo sapien
agaatcagtcttacttcctattatg

SEQ ID NO: 2238063 - DNA, 25 bp, Homo sapien
tacttcctattatgtgactgtcatt

SEQ ID NO: 2238064 - DNA, 25 bp, Homo sapien
acttcctattatgtgactgtcattt

SEQ ID NO: 2238065 - DNA, 25 bp, Homo sapien
tcacttccaattccagagtcagggc

SEQ ID NO: 2238066 - DNA, 25 bp, Homo sapien
ccaattccagagtcagggccatgat

SEQ ID NO: 2238067 - DNA, 25 bp, Homo sapien
cagagtcagggccatgatttttatt

SEQ ID NO: 2238068 - DNA, 25 bp, Homo sapien
attatcacttccaattccagagtca

SEQ ID NO: 2238069 - DNA, 25 bp, Homo sapien
caacatgcttgaatatttaagtact

SEQ ID NO: 2238070 - DNA, 25 bp, Homo sapien
gtacttaaatatgtgcaccttaccc

SEQ ID NO: 2238071 - DNA, 25 bp, Homo sapien
tactcaatgatggaagatccaggga

SEQ ID NO: 2238072 - DNA, 25 bp, Homo sapien
aggctgtgagggcattcgtttactc

SEQ ID NO: 2238073 - DNA, 25 bp, Homo sapien
tgcaatggattgttatccaaaatta

SEQ ID NO: 2238074 - DNA, 25 bp, Homo sapien
ggtggtacttgcaatggattgttat

SEQ ID NO: 2238075 - DNA, 25 bp, Homo sapien
ggtacttgcaatggattgttatcca

SEQ ID NO: 2238076 - DNA, 25 bp, Homo sapien
tacttgcaatggattgttatccaaa

SEQ ID NO: 2238077 - DNA, 25 bp, Homo sapien
agcttgactaagggaaggtctccta

SEQ ID NO: 2238078 - DNA, 25 bp, Homo sapien
cagcttgactaagggaaggtctcct

SEQ ID NO: 2238079 - DNA, 25 bp, Homo sapien
tccagcttgactaagggaaggtctc

SEQ ID NO: 2238080 - DNA, 25 bp, Homo sapien
ccagcttgactaagggaaggtctcc

SEQ ID NO: 2238081 - DNA, 25 bp, Homo sapien
tatatttagctctctaagtgaatgt

SEQ ID NO: 2238082 - DNA, 25 bp, Homo sapien
ggaaggacttgaatctcattgcagc

SEQ ID NO: 2238083 - DNA, 25 bp, Homo sapien
ttgttggggaaggacttgaatctca

SEQ ID NO: 2238084 - DNA, 25 bp, Homo sapien
tcttatatttagctctctaagtgaa

SEQ ID NO: 2238085 - DNA, 25 bp, Homo sapien
tctggaatggataccagtttattat

SEQ ID NO: 2238086 - DNA, 25 bp, Homo sapien
aatttcttctggaatggataccagt

SEQ ID NO: 2238087 - DNA, 25 bp, Homo sapien
caaataggtattttggcaatgttga

SEQ ID NO: 2238088 - DNA, 25 bp, Homo sapien
tcaaataggtattttggcaatgttg

SEQ ID NO: 2238089 - DNA, 25 bp, Homo sapien
aggggtgcaaataaccagacatcag

SEQ ID NO: 2238090 - DNA, 25 bp, Homo sapien
atttaatgtttcaaggggtgcaaat

SEQ ID NO: 2238091 - DNA, 25 bp, Homo sapien
ttaatgtttcaaggggtgcaaataa

SEQ ID NO: 2238092 - DNA, 25 bp, Homo sapien
gggtgcaaataaccagacatcagaa

SEQ ID NO: 2238093 - DNA, 25 bp, Homo sapien
aaacatcatttagaaatacactcat

SEQ ID NO: 2238094 - DNA, 25 bp, Homo sapien
aaaaacatcatttagaaatacactc

SEQ ID NO: 2238095 - DNA, 25 bp, Homo sapien
cttgaaggcaaaaaacatcatttag

SEQ ID NO: 2238096 - DNA, 25 bp, Homo sapien
caaaaaacatcatttagaaatacac

SEQ ID NO: 2238097 - DNA, 25 bp, Homo sapien
gaggaataccaaggccgctcgccca

SEQ ID NO: 2238098 - DNA, 25 bp, Homo sapien
ctacgaggaataccaaggccgctcg

SEQ ID NO: 2238099 - DNA, 25 bp, Homo sapien
acgaggaataccaaggccgctcgcc

SEQ ID NO: 2238100 - DNA, 25 bp, Homo sapien
gaataccaaggccgctcgcccaatg

SEQ ID NO: 2238101 - DNA, 25 bp, Homo sapien
catgtaggaaatactagagttgact

SEQ ID NO: 2238102 - DNA, 25 bp, Homo sapien
attttacaacctgatacaatgcacc

SEQ ID NO: 2238103 - DNA, 25 bp, Homo sapien
agttgaaaaggtgaaccagcacatg

SEQ ID NO: 2238104 - DNA, 25 bp, Homo sapien
tacaacctgatacaatgcaccatgc

SEQ ID NO: 2238105 - DNA, 25 bp, Homo sapien
tattgcttgattcgcccctcacgtt

SEQ ID NO: 2238106 - DNA, 25 bp, Homo sapien
agacccgcagagtccaacaacgcag

SEQ ID NO: 2238107 - DNA, 25 bp, Homo sapien
tcacgttcaggagaacgggctgccc

SEQ ID NO: 2238108 - DNA, 25 bp, Homo sapien
ctttgttagtctggcggtccccgcg

SEQ ID NO: 2238109 - DNA, 25 bp, Homo sapien
gtccaggctcctcacggtgtgctga

SEQ ID NO: 2238110 - DNA, 25 bp, Homo sapien
gctgaggctgcaggctccccgggtt

SEQ ID NO: 2238111 - DNA, 25 bp, Homo sapien
gaagtctcggagtttccgaccactg

SEQ ID NO: 2238112 - DNA, 25 bp, Homo sapien
cggagtttccgaccactgaggctca

SEQ ID NO: 2238113 - DNA, 25 bp, Homo sapien
ccctccagccgtgccacagccaccg

SEQ ID NO: 2238114 - DNA, 25 bp, Homo sapien
agccaccgctacttccacctccacc

SEQ ID NO: 2238115 - DNA, 25 bp, Homo sapien
ccccactgttaccgcctcctccctg

SEQ ID NO: 2238116 - DNA, 25 bp, Homo sapien
ccacagccaccgctacttccacctc

SEQ ID NO: 2238117 - DNA, 25 bp, Homo sapien
agtgtaaggggttcttaggacgcat

SEQ ID NO: 2238118 - DNA, 25 bp, Homo sapien
aatagcccccgacaatactgtcagc

SEQ ID NO: 2238119 - DNA, 25 bp, Homo sapien
agagagaatagcccccgacaatact

SEQ ID NO: 2238120 - DNA, 25 bp, Homo sapien
tcagcctgtgccgcgagtgtaaggg

SEQ ID NO: 2238121 - DNA, 25 bp, Homo sapien
atcaattgcattccatatggtcttc

SEQ ID NO: 2238122 - DNA, 25 bp, Homo sapien
ttgtgggattgcttagagggtattt

SEQ ID NO: 2238123 - DNA, 25 bp, Homo sapien
tcaattgcattccatatggtcttct

SEQ ID NO: 2238124 - DNA, 25 bp, Homo sapien
tttttgtgggattgcttagagggta

SEQ ID NO: 2238125 - DNA, 25 bp, Homo sapien
gaagcatgccaaggttccaactcct

SEQ ID NO: 2238126 - DNA, 25 bp, Homo sapien
cctcatgtggcagggtttggaataa

SEQ ID NO: 2238127 - DNA, 25 bp, Homo sapien
tggctggctgtgaaaaacctgatgg

SEQ ID NO: 2238128 - DNA, 25 bp, Homo sapien
tgcagacagaagataagtaggtgac

SEQ ID NO: 2238129 - DNA, 25 bp, Homo sapien
caaattaaagggtgtaggcagaaat

SEQ ID NO: 2238130 - DNA, 25 bp, Homo sapien
taggcagaaataagtctttctcccc

SEQ ID NO: 2238131 - DNA, 25 bp, Homo sapien
gggtgtaggcagaaataagtctttc

SEQ ID NO: 2238132 - DNA, 25 bp, Homo sapien
gtctttctccccaagatttaatatg

SEQ ID NO: 2238133 - DNA, 25 bp, Homo sapien
ggtaagagctggcagaaactcagga

SEQ ID NO: 2238134 - DNA, 25 bp, Homo sapien
tgggtaagagctggcagaaactcag

SEQ ID NO: 2238135 - DNA, 25 bp, Homo sapien
gtgtgggtaagagctggcagaaact

SEQ ID NO: 2238136 - DNA, 25 bp, Homo sapien
tgtgggtaagagctggcagaaactc

SEQ ID NO: 2238137 - DNA, 25 bp, Homo sapien
ggctgccacgtgatgcactggtgca

SEQ ID NO: 2238138 - DNA, 25 bp, Homo sapien
catgttcctgcaagctctggctgcc

SEQ ID NO: 2238139 - DNA, 25 bp, Homo sapien
gaaggtgaccatgtcctcgacaagg

SEQ ID NO: 2238140 - DNA, 25 bp, Homo sapien
ccaaggccagtaggtacggtgctcg

SEQ ID NO: 2238141 - DNA, 25 bp, Homo sapien
gcccattgagctttgctgacttggc

SEQ ID NO: 2238142 - DNA, 25 bp, Homo sapien
cagtaagcattcttgttaccattcc

SEQ ID NO: 2238143 - DNA, 25 bp, Homo sapien
tgttgcgtggcctgaatatcacatt

SEQ ID NO: 2238144 - DNA, 25 bp, Homo sapien
tcttgttaccattccttagctgttg

SEQ ID NO: 2238145 - DNA, 25 bp, Homo sapien
taatgaggattctttacatcatgta

SEQ ID NO: 2238146 - DNA, 25 bp, Homo sapien
ttaatgaggattctttacatcatgt

SEQ ID NO: 2238147 - DNA, 25 bp, Homo sapien
aatgaggattctttacatcatgtaa

SEQ ID NO: 2238148 - DNA, 25 bp, Homo sapien
gccctttgaatggatgccagttgca

SEQ ID NO: 2238149 - DNA, 25 bp, Homo sapien
catgaaatactgaggcactgattgg

SEQ ID NO: 2238150 - DNA, 25 bp, Homo sapien
gcatcagcatggaggagtctttctg

SEQ ID NO: 2238151 - DNA, 25 bp, Homo sapien
tccatgtgtccagatgaccagagct

SEQ ID NO: 2238152 - DNA, 25 bp, Homo sapien
ataagatctttatttgcccttctat

SEQ ID NO: 2238153 - DNA, 25 bp, Homo sapien
tcctactttcctgacttgctgaact

SEQ ID NO: 2238154 - DNA, 25 bp, Homo sapien
gttcctctaccttgagcaaatccac

SEQ ID NO: 2238155 - DNA, 25 bp, Homo sapien
gctttatcacaaccccatactattc

SEQ ID NO: 2238156 - DNA, 25 bp, Homo sapien
atctgctaagtccaaactccccttt

SEQ ID NO: 2238157 - DNA, 25 bp, Homo sapien
cttcaccctctttttcaacagactc

SEQ ID NO: 2238158 - DNA, 25 bp, Homo sapien
tcttcaccctctttttcaacagact

SEQ ID NO: 2238159 - DNA, 25 bp, Homo sapien
ttcaccctctttttcaacagactcc

SEQ ID NO: 2238160 - DNA, 25 bp, Homo sapien
gccatgtcctcacggacctcagaaa

SEQ ID NO: 2238161 - DNA, 25 bp, Homo sapien
gtcctcacggacctcagaaaactct

SEQ ID NO: 2238162 - DNA, 25 bp, Homo sapien
cagccatgtcctcacggacctcaga

SEQ ID NO: 2238163 - DNA, 25 bp, Homo sapien
catgtcctcacggacctcagaaaac

SEQ ID NO: 2238164 - DNA, 25 bp, Homo sapien
aacaaagacgtgcttggaatacatc

SEQ ID NO: 2238165 - DNA, 25 bp, Homo sapien
gaacaaagacgtgcttggaatacat

SEQ ID NO: 2238166 - DNA, 25 bp, Homo sapien
tttatggtacaacaagcagcaagcc

SEQ ID NO: 2238167 - DNA, 25 bp, Homo sapien
tttaccatagtaagggtcatgtttc

SEQ ID NO: 2238168 - DNA, 25 bp, Homo sapien
ttaccatagtaagggtcatgtttca

SEQ ID NO: 2238169 - DNA, 25 bp, Homo sapien
tttgggaaccacatctttatggtac

SEQ ID NO: 2238170 - DNA, 25 bp, Homo sapien
ggaattgtagggctctagtacaggt

SEQ ID NO: 2238171 - DNA, 25 bp, Homo sapien
gtagggctctagtacaggtatggaa

SEQ ID NO: 2238172 - DNA, 25 bp, Homo sapien
atcggagtgctccaggtgatgtggg

SEQ ID NO: 2238173 - DNA, 25 bp, Homo sapien
tcatgaaagcacaatcggagtgctc

SEQ ID NO: 2238174 - DNA, 25 bp, Homo sapien
agagagacattccatgagcagggag

SEQ ID NO: 2238175 - DNA, 25 bp, Homo sapien
gtcaacagagagacattccatgagc

SEQ ID NO: 2238176 - DNA, 25 bp, Homo sapien
tagtcaacagagagacattccatga

SEQ ID NO: 2238177 - DNA, 25 bp, Homo sapien
catagtcaacagagagacattccat

SEQ ID NO: 2238178 - DNA, 25 bp, Homo sapien
cagttcccctgccaaagctgtgaaa

SEQ ID NO: 2238179 - DNA, 25 bp, Homo sapien
ccagttcccctgccaaagctgtgaa

SEQ ID NO: 2238180 - DNA, 25 bp, Homo sapien
accagttcccctgccaaagctgtga

SEQ ID NO: 2238181 - DNA, 25 bp, Homo sapien
gcacaagttggccagtttatgaatt

SEQ ID NO: 2238182 - DNA, 25 bp, Homo sapien
gttggaagagctcacggtatgtgcc

SEQ ID NO: 2238183 - DNA, 25 bp, Homo sapien
agcatcttccttgcccgtgatgata

SEQ ID NO: 2238184 - DNA, 25 bp, Homo sapien
cttgcccgtgatgatatgctcaggt

SEQ ID NO: 2238185 - DNA, 25 bp, Homo sapien
ctcacggtatgtgccagagcaaact

SEQ ID NO: 2238186 - DNA, 25 bp, Homo sapien
caaacactgcttgggcaagggcttg

SEQ ID NO: 2238187 - DNA, 25 bp, Homo sapien
acaaacactgcttgggcaagggctt

SEQ ID NO: 2238188 - DNA, 25 bp, Homo sapien
aacactgcttgggcaagggcttggt

SEQ ID NO: 2238189 - DNA, 25 bp, Homo sapien
aaacactgcttgggcaagggcttgg

SEQ ID NO: 2238190 - DNA, 25 bp, Homo sapien
cagcctcttgtgactggaaatcagc

SEQ ID NO: 2238191 - DNA, 25 bp, Homo sapien
ttatatttccactgatctataaacc

SEQ ID NO: 2238192 - DNA, 25 bp, Homo sapien
cctcttgtgactggaaatcagctgt

SEQ ID NO: 2238193 - DNA, 25 bp, Homo sapien
tatatttccactgatctataaacct

SEQ ID NO: 2238194 - DNA, 25 bp, Homo sapien
tggaggatatagaaaatagctggat

SEQ ID NO: 2238195 - DNA, 25 bp, Homo sapien
ggaggatatagaaaatagctggatg

SEQ ID NO: 2238196 - DNA, 25 bp, Homo sapien
gaggatatagaaaatagctggatgt

SEQ ID NO: 2238197 - DNA, 25 bp, Homo sapien
agtggaggatatagaaaatagctgg

SEQ ID NO: 2238198 - DNA, 25 bp, Homo sapien
atgaggagcaagttgacgctactgc

SEQ ID NO: 2238199 - DNA, 25 bp, Homo sapien
ctgcaagggccgcaggtggacaatc

SEQ ID NO: 2238200 - DNA, 25 bp, Homo sapien
cgcaggtggacaatctaactctggg

SEQ ID NO: 2238201 - DNA, 25 bp, Homo sapien
aagggccgcaggtggacaatctaac

SEQ ID NO: 2238202 - DNA, 25 bp, Homo sapien
tgacttagaaggttaaccagaatcc

SEQ ID NO: 2238203 - DNA, 25 bp, Homo sapien
gactgagccaagtagattcttacct

SEQ ID NO: 2238204 - DNA, 25 bp, Homo sapien
caatcactgactgagccaagtagat

SEQ ID NO: 2238205 - DNA, 25 bp, Homo sapien
cactgactgagccaagtagattctt

SEQ ID NO: 2238206 - DNA, 25 bp, Homo sapien
cttcaatcactgactgagccaagta

SEQ ID NO: 2238207 - DNA, 25 bp, Homo sapien
tgaatagttttgacatgagtggaag

SEQ ID NO: 2238208 - DNA, 25 bp, Homo sapien
gatgaatagttttgacatgagtgga

SEQ ID NO: 2238209 - DNA, 25 bp, Homo sapien
atgaatagttttgacatgagtggaa

SEQ ID NO: 2238210 - DNA, 25 bp, Homo sapien
ctagcagtagaggcccgtgagcttg

SEQ ID NO: 2238211 - DNA, 25 bp, Homo sapien
ggcccgtgagcttgttctcatcaat

SEQ ID NO: 2238212 - DNA, 25 bp, Homo sapien
tcatcaatgtcacaaaacagaccaa

SEQ ID NO: 2238213 - DNA, 25 bp, Homo sapien
cagtagaggcccgtgagcttgttct

SEQ ID NO: 2238214 - DNA, 25 bp, Homo sapien
cagttcccgatggtgaagatcaccc

SEQ ID NO: 2238215 - DNA, 25 bp, Homo sapien
tgtgtggtcgtgtgctggtggtagc

SEQ ID NO: 2238216 - DNA, 25 bp, Homo sapien
cacccagtgcgtgaggacgagaaag

SEQ ID NO: 2238217 - DNA, 25 bp, Homo sapien
tggtggcctccaagacagagtgtgt

SEQ ID NO: 2238218 - DNA, 25 bp, Homo sapien
aataggaagagactgagcaattcag

SEQ ID NO: 2238219 - DNA, 25 bp, Homo sapien
ccaagtgccgcaagatacatgaagc

SEQ ID NO: 2238220 - DNA, 25 bp, Homo sapien
ttttctgttgtggaagctgaatgca

SEQ ID NO: 2238221 - DNA, 25 bp, Homo sapien
agacagattcttccataagctttca

SEQ ID NO: 2238222 - DNA, 25 bp, Homo sapien
gaacgtaccacatagggctgaagtg

SEQ ID NO: 2238223 - DNA, 25 bp, Homo sapien
tgggattggaacagaagaacgtacc

SEQ ID NO: 2238224 - DNA, 25 bp, Homo sapien
accacatagggctgaagtgatatat

SEQ ID NO: 2238225 - DNA, 25 bp, Homo sapien
gaacagaagaacgtaccacataggg

SEQ ID NO: 2238226 - DNA, 25 bp, Homo sapien
gtacgaacttcccgctgcttttgct

SEQ ID NO: 2238227 - DNA, 25 bp, Homo sapien
gaacttcccgctgcttttgctccat

SEQ ID NO: 2238228 - DNA, 25 bp, Homo sapien
gaactctagcaactctgttgccttc

SEQ ID NO: 2238229 - DNA, 25 bp, Homo sapien
ctgctgtcttagagaactctagcaa

SEQ ID NO: 2238230 - DNA, 25 bp, Homo sapien
gaagtagataaactgtctattccgg

SEQ ID NO: 2238231 - DNA, 25 bp, Homo sapien
acttgagctttgaggacaactgata

SEQ ID NO: 2238232 - DNA, 25 bp, Homo sapien
tctattccggttcctgtagctgtag

SEQ ID NO: 2238233 - DNA, 25 bp, Homo sapien
aatgttgggacttagggagactcct

SEQ ID NO: 2238234 - DNA, 25 bp, Homo sapien
tgcctgccagaggtacaactggtgg

SEQ ID NO: 2238235 - DNA, 25 bp, Homo sapien
gcatattgtcatggtcaacagccat

SEQ ID NO: 2238236 - DNA, 25 bp, Homo sapien
ggtgcctgccagaggtacaactggt

SEQ ID NO: 2238237 - DNA, 25 bp, Homo sapien
ctaggggtgcatattgtcatggtca

SEQ ID NO: 2238238 - DNA, 25 bp, Homo sapien
tcaactgtacgatggtgcaaaagag

SEQ ID NO: 2238239 - DNA, 25 bp, Homo sapien
caatataacgttaaaccagcagggc

SEQ ID NO: 2238240 - DNA, 25 bp, Homo sapien
tggcaatcctagtcgaatggtacac

SEQ ID NO: 2238241 - DNA, 25 bp, Homo sapien
tcttcaggacgggtgagatgcctct

SEQ ID NO: 2238242 - DNA, 25 bp, Homo sapien
ggtgttataccctcacgtctgtggc

SEQ ID NO: 2238243 - DNA, 25 bp, Homo sapien
gaactgaatggtcttcttcacagaa

SEQ ID NO: 2238244 - DNA, 25 bp, Homo sapien
taaggttaaggttgctagatatggc

SEQ ID NO: 2238245 - DNA, 25 bp, Homo sapien
taaatctggcaacctaataaggtgt

SEQ ID NO: 2238246 - DNA, 25 bp, Homo sapien
gatccttaaggcttggatttttcat

SEQ ID NO: 2238247 - DNA, 25 bp, Homo sapien
caaccccttatcttggattagatcc

SEQ ID NO: 2238248 - DNA, 25 bp, Homo sapien
tgcttcctcatcaaccccttatctt

SEQ ID NO: 2238249 - DNA, 25 bp, Homo sapien
ccttatcttggattagatccttaag

SEQ ID NO: 2238250 - DNA, 25 bp, Homo sapien
taattcagagtttatcaggtagaat

SEQ ID NO: 2238251 - DNA, 25 bp, Homo sapien
gaataagttgggctataatcatgta

SEQ ID NO: 2238252 - DNA, 25 bp, Homo sapien
aactggataaattggccgatcatgg

SEQ ID NO: 2238253 - DNA, 25 bp, Homo sapien
gtttatgtgacccataattcagagt

SEQ ID NO: 2238254 - DNA, 25 bp, Homo sapien
cattcttggtagaataaacagttat

SEQ ID NO: 2238255 - DNA, 25 bp, Homo sapien
agcattcttggtagaataaacagtt

SEQ ID NO: 2238256 - DNA, 25 bp, Homo sapien
aacacagacccaaatatttaactat

SEQ ID NO: 2238257 - DNA, 25 bp, Homo sapien
tattttgcatacttagtaaacacag

SEQ ID NO: 2238258 - DNA, 25 bp, Homo sapien
tcctggttcccaggccgactgctag

SEQ ID NO: 2238259 - DNA, 25 bp, Homo sapien
ttccgaggtgcagaagttgtctgag

SEQ ID NO: 2238260 - DNA, 25 bp, Homo sapien
ccaggactctgcgactttacgtaag

SEQ ID NO: 2238261 - DNA, 25 bp, Homo sapien
ggatccccacccagttgatgtgaca

SEQ ID NO: 2238262 - DNA, 25 bp, Homo sapien
ctgggcgtgggcaggagtgggtccc

SEQ ID NO: 2238263 - DNA, 25 bp, Homo sapien
gcaggagtgggtcccggggagagca

SEQ ID NO: 2238264 - DNA, 25 bp, Homo sapien
tgggcaggagtgggtcccggggaga

SEQ ID NO: 2238265 - DNA, 25 bp, Homo sapien
ggagcgggtttcctgggcgtgggca

SEQ ID NO: 2238266 - DNA, 25 bp, Homo sapien
tggcttctcgccagtcccaaagttg

SEQ ID NO: 2238267 - DNA, 25 bp, Homo sapien
cacccgcagtacttaagcgctgtaa

SEQ ID NO: 2238268 - DNA, 25 bp, Homo sapien
ccgggctccgggacgtaagatgatc

SEQ ID NO: 2238269 - DNA, 25 bp, Homo sapien
gggttaatggcatctgactctagcc

SEQ ID NO: 2238270 - DNA, 25 bp, Homo sapien
ttgagcttggagctaagtgggttgg

SEQ ID NO: 2238271 - DNA, 25 bp, Homo sapien
ctgagctgcacgatatccccagtgg

SEQ ID NO: 2238272 - DNA, 25 bp, Homo sapien
gagctgcacgatatccccagtggtg

SEQ ID NO: 2238273 - DNA, 25 bp, Homo sapien
cagaaggttgaacttttgcagaagg

SEQ ID NO: 2238274 - DNA, 25 bp, Homo sapien
gacagacgggatgctgggggcgccc

SEQ ID NO: 2238275 - DNA, 25 bp, Homo sapien
agacagacgggatgctgggggcgcc

SEQ ID NO: 2238276 - DNA, 25 bp, Homo sapien
ttagcgtcagacagacgggatgctg

SEQ ID NO: 2238277 - DNA, 25 bp, Homo sapien
gtcagacagacgggatgctgggggc

SEQ ID NO: 2238278 - DNA, 25 bp, Homo sapien
ttccaactaagtggctggagcccca

SEQ ID NO: 2238279 - DNA, 25 bp, Homo sapien
tggtgaattccaactaagtggctgg

SEQ ID NO: 2238280 - DNA, 25 bp, Homo sapien
tgatcctcgagatgcagttcatggt

SEQ ID NO: 2238281 - DNA, 25 bp, Homo sapien
tcacaatggactggggagcctaaac

SEQ ID NO: 2238282 - DNA, 25 bp, Homo sapien
taactgtatggtttctgtttgtaac

SEQ ID NO: 2238283 - DNA, 25 bp, Homo sapien
ttaactgtatggtttctgtttgtaa

SEQ ID NO: 2238284 - DNA, 25 bp, Homo sapien
aactgtatggtttctgtttgtaaca

SEQ ID NO: 2238285 - DNA, 25 bp, Homo sapien
actgtatggtttctgtttgtaacat

SEQ ID NO: 2238286 - DNA, 25 bp, Homo sapien
gcagtttcctatgccctggttttct

SEQ ID NO: 2238287 - DNA, 25 bp, Homo sapien
cagtttcctatgccctggttttctc

SEQ ID NO: 2238288 - DNA, 25 bp, Homo sapien
ggcagtttcctatgccctggttttc

SEQ ID NO: 2238289 - DNA, 25 bp, Homo sapien
aggcagtttcctatgccctggtttt

SEQ ID NO: 2238290 - DNA, 25 bp, Homo sapien
ttttttttgcagtgatgcactgatg

SEQ ID NO: 2238291 - DNA, 25 bp, Homo sapien
ttttttttttgcagtgatgcactga

SEQ ID NO: 2238292 - DNA, 25 bp, Homo sapien
tttttttttgcagtgatgcactgat

SEQ ID NO: 2238293 - DNA, 25 bp, Homo sapien
tttttttgcagtgatgcactgatgg

SEQ ID NO: 2238294 - DNA, 25 bp, Homo sapien
ggcacccgccatcacacttggttac

SEQ ID NO: 2238295 - DNA, 25 bp, Homo sapien
cagtgcgcctggctgatggttttat

SEQ ID NO: 2238296 - DNA, 25 bp, Homo sapien
ttttaaaacaccagtcactgtatgt

SEQ ID NO: 2238297 - DNA, 25 bp, Homo sapien
aaaacaccagtcactgtatgtgtct

SEQ ID NO: 2238298 - DNA, 25 bp, Homo sapien
cctgtgtcgaaaatcccattagtgg

SEQ ID NO: 2238299 - DNA, 25 bp, Homo sapien
gaatttgccgttagacctgtgtcga

SEQ ID NO: 2238300 - DNA, 25 bp, Homo sapien
tgtgaccctcgaaaacattagatga

SEQ ID NO: 2238301 - DNA, 25 bp, Homo sapien
gaaaacagggtgagaacagcctact

SEQ ID NO: 2238302 - DNA, 25 bp, Homo sapien
tattttgcttcatgcactagatgcg

SEQ ID NO: 2238303 - DNA, 25 bp, Homo sapien
tcagcaagccaactgtaaatggatt

SEQ ID NO: 2238304 - DNA, 25 bp, Homo sapien
acctggccagccaggtatattttgc

SEQ ID NO: 2238305 - DNA, 25 bp, Homo sapien
gatgcgttcctgaaaatcagcaagc

SEQ ID NO: 2238306 - DNA, 25 bp, Homo sapien
gacaactgaaacgatagcatgtact

SEQ ID NO: 2238307 - DNA, 25 bp, Homo sapien
gcgctcctatcctcctttgtcatgg

SEQ ID NO: 2238308 - DNA, 25 bp, Homo sapien
catgtacttccatcagtaactgtgg

SEQ ID NO: 2238309 - DNA, 25 bp, Homo sapien
taactgtggctcaccatagcaagtg

SEQ ID NO: 2238310 - DNA, 25 bp, Homo sapien
gaaaatttgccgaagtaactggctg

SEQ ID NO: 2238311 - DNA, 25 bp, Homo sapien
ggaagtatgccaatgtttgtcagga

SEQ ID NO: 2238312 - DNA, 25 bp, Homo sapien
tattcgagaactatggtcagagcgt

SEQ ID NO: 2238313 - DNA, 25 bp, Homo sapien
tgctcagaacttagacgggatttgg

SEQ ID NO: 2238314 - DNA, 25 bp, Homo sapien
tcctgacattgggtgtgaagcaaca

SEQ ID NO: 2238315 - DNA, 25 bp, Homo sapien
tccaatcatggttgagtatcctgac

SEQ ID NO: 2238316 - DNA, 25 bp, Homo sapien
tgtagtttattgattccaatcatgg

SEQ ID NO: 2238317 - DNA, 25 bp, Homo sapien
aagcaacagtttggaattcatacag

SEQ ID NO: 2238318 - DNA, 25 bp, Homo sapien
caagacgcttgacttgaagggaaaa

SEQ ID NO: 2238319 - DNA, 25 bp, Homo sapien
cattgattggttgcccgtcgaatcg

SEQ ID NO: 2238320 - DNA, 25 bp, Homo sapien
tgcctcactgacaatccctgtcgtt

SEQ ID NO: 2238321 - DNA, 25 bp, Homo sapien
ttgcccgtcgaatcggaatctgatc

SEQ ID NO: 2238322 - DNA, 25 bp, Homo sapien
attggttgcccgtcgaatcggaatc

SEQ ID NO: 2238323 - DNA, 25 bp, Homo sapien
aatctcctcagctgccgtttcacaa

SEQ ID NO: 2238324 - DNA, 25 bp, Homo sapien
agaggtaccaggtccgcaccaaacg

SEQ ID NO: 2238325 - DNA, 25 bp, Homo sapien
aaacgagcacacaagcagcaccagg

SEQ ID NO: 2238326 - DNA, 25 bp, Homo sapien
ggcaagcgccggaatctcctcagct

SEQ ID NO: 2238327 - DNA, 25 bp, Homo sapien
cagcgatggaccagggcagagggtg

SEQ ID NO: 2238328 - DNA, 25 bp, Homo sapien
agaaaaggtctgggagtatctggca

SEQ ID NO: 2238329 - DNA, 25 bp, Homo sapien
cccaaaccgcaagggaatgagtaag

SEQ ID NO: 2238330 - DNA, 25 bp, Homo sapien
tgcccaaaccgcaagggaatgagta

SEQ ID NO: 2238331 - DNA, 25 bp, Homo sapien
ctctgcccaaaccgcaagggaatga

SEQ ID NO: 2238332 - DNA, 25 bp, Homo sapien
gagtgaaatggagccaggaaattct

SEQ ID NO: 2238333 - DNA, 25 bp, Homo sapien
aggagtgaaatggagccaggaaatt

SEQ ID NO: 2238334 - DNA, 25 bp, Homo sapien
gtgaacgtcagttggtgaggagtga

SEQ ID NO: 2238335 - DNA, 25 bp, Homo sapien
aacgtcagttggtgaggagtgaaat

SEQ ID NO: 2238336 - DNA, 25 bp, Homo sapien
ggtgtctccattctgcaagagcagc

SEQ ID NO: 2238337 - DNA, 25 bp, Homo sapien
tatcaatcagaggactggtcaggca

SEQ ID NO: 2238338 - DNA, 25 bp, Homo sapien
gggaggatgcatgccccaagttaac

SEQ ID NO: 2238339 - DNA, 25 bp, Homo sapien
tccttaatacgctacaggtgtctcc

SEQ ID NO: 2238340 - DNA, 25 bp, Homo sapien
cgctgggcccctagcagttccagaa

SEQ ID NO: 2238341 - DNA, 25 bp, Homo sapien
tgggaggtgatagggcaccggcagt

SEQ ID NO: 2238342 - DNA, 25 bp, Homo sapien
caccggcagtgtctggtcttgggaa

SEQ ID NO: 2238343 - DNA, 25 bp, Homo sapien
taggcggcatacgcgccaccagcag

SEQ ID NO: 2238344 - DNA, 25 bp, Homo sapien
tccttctagtagagcctttctggcc

SEQ ID NO: 2238345 - DNA, 25 bp, Homo sapien
tttggacgccgagtttttgccgctg

SEQ ID NO: 2238346 - DNA, 25 bp, Homo sapien
tctggcaagtgtagggaggtccttc

SEQ ID NO: 2238347 - DNA, 25 bp, Homo sapien
cttccccgtcgggagcctggaagcg

SEQ ID NO: 2238348 - DNA, 25 bp, Homo sapien
cttgaccaagaggtcaaaggcgact

SEQ ID NO: 2238349 - DNA, 25 bp, Homo sapien
gaggtcaaaggcgactggcgtccca

SEQ ID NO: 2238350 - DNA, 25 bp, Homo sapien
caagaggtcaaaggcgactggcgtc

SEQ ID NO: 2238351 - DNA, 25 bp, Homo sapien
aaggcgactggcgtcccactgaccg

SEQ ID NO: 2238352 - DNA, 25 bp, Homo sapien
ggaagggagccagtggcaccccaaa

SEQ ID NO: 2238353 - DNA, 25 bp, Homo sapien
aagggagccagtggcaccccaaaca

SEQ ID NO: 2238354 - DNA, 25 bp, Homo sapien
ctacgtcacgcaggaagggagccag

SEQ ID NO: 2238355 - DNA, 25 bp, Homo sapien
ggagccagtggcaccccaaacacac

SEQ ID NO: 2238356 - DNA, 25 bp, Homo sapien
acagaggcgggcatttccctgacga

SEQ ID NO: 2238357 - DNA, 25 bp, Homo sapien
aaggctgcacgtacaacacacacag

SEQ ID NO: 2238358 - DNA, 25 bp, Homo sapien
caagtgttccgatcttcctgcccaa

SEQ ID NO: 2238359 - DNA, 25 bp, Homo sapien
tccctgacgactcgtgtgtgccgtg

SEQ ID NO: 2238360 - DNA, 25 bp, Homo sapien
ccccaagccaaggtgaggcaagtcc

SEQ ID NO: 2238361 - DNA, 25 bp, Homo sapien
ccaaggtgaggcaagtcccagttga

SEQ ID NO: 2238362 - DNA, 25 bp, Homo sapien
ttctaccaccacgagtaacaccgcc

SEQ ID NO: 2238363 - DNA, 25 bp, Homo sapien
ccggacacgccctccacttctacca

SEQ ID NO: 2238364 - DNA, 25 bp, Homo sapien
cttaaaggtgcgttgacgtggaagg

SEQ ID NO: 2238365 - DNA, 25 bp, Homo sapien
taaaggtgcgttgacgtggaaggtg

SEQ ID NO: 2238366 - DNA, 25 bp, Homo sapien
tgaatgtctctttgcgtgacagtgc

SEQ ID NO: 2238367 - DNA, 25 bp, Homo sapien
tgcttgtaaggtttccggcctaaga

SEQ ID NO: 2238368 - DNA, 25 bp, Homo sapien
cctgaattgagcgaagcggtgccga

SEQ ID NO: 2238369 - DNA, 25 bp, Homo sapien
tcaggtggaacggaggaccatgaac

SEQ ID NO: 2238370 - DNA, 25 bp, Homo sapien
ggctcgctctctagctggattcagg

SEQ ID NO: 2238371 - DNA, 25 bp, Homo sapien
tccaccctttgggcacgagcccctg

SEQ ID NO: 2238372 - DNA, 25 bp, Homo sapien
ctccaccctttgggcacgagcccct

SEQ ID NO: 2238373 - DNA, 25 bp, Homo sapien
aggcagagtccgacgggtccttcct

SEQ ID NO: 2238374 - DNA, 25 bp, Homo sapien
agagtccgacgggtccttccttctg

SEQ ID NO: 2238375 - DNA, 25 bp, Homo sapien
cagcggacccttctggcgcggagca

SEQ ID NO: 2238376 - DNA, 25 bp, Homo sapien
tgtccccaggcagagtccgacgggt

SEQ ID NO: 2238377 - DNA, 25 bp, Homo sapien
gggtttggcctcaaacttcaggtga

SEQ ID NO: 2238378 - DNA, 25 bp, Homo sapien
tgaacccacaattccggaatagcgg

SEQ ID NO: 2238379 - DNA, 25 bp, Homo sapien
caattccggaatagcgggaccggca

SEQ ID NO: 2238380 - DNA, 25 bp, Homo sapien
acttcaggtgaacccacaattccgg

SEQ ID NO: 2238381 - DNA, 25 bp, Homo sapien
ccccaagccaaggtgaggcaagtcc

SEQ ID NO: 2238382 - DNA, 25 bp, Homo sapien
ccggacacgccctccacttctacca

SEQ ID NO: 2238383 - DNA, 25 bp, Homo sapien
ccaaggtgaggcaagtcccagttga

SEQ ID NO: 2238384 - DNA, 25 bp, Homo sapien
ttctaccaccacgagtaacaccgcc

SEQ ID NO: 2238385 - DNA, 25 bp, Homo sapien
cttaaaggtgcgttgacgtggaagg

SEQ ID NO: 2238386 - DNA, 25 bp, Homo sapien
taaaggtgcgttgacgtggaaggtg

SEQ ID NO: 2238387 - DNA, 25 bp, Homo sapien
tgaatgtctctttgcgtgacagtgc

SEQ ID NO: 2238388 - DNA, 25 bp, Homo sapien
tgcttgtaaggtttccggcctaaga

SEQ ID NO: 2238389 - DNA, 25 bp, Homo sapien
cctgaattgagcgaagcggtgccga

SEQ ID NO: 2238390 - DNA, 25 bp, Homo sapien
tcaggtggaacggaggaccatgaac

SEQ ID NO: 2238391 - DNA, 25 bp, Homo sapien
ggctcgctctctagctggattcagg

SEQ ID NO: 2238392 - DNA, 25 bp, Homo sapien
tccaccctttgggcacgagcccctg

SEQ ID NO: 2238393 - DNA, 25 bp, Homo sapien
ctccaccctttgggcacgagcccct

SEQ ID NO: 2238394 - DNA, 25 bp, Homo sapien
ccgggagatggctccgtctgctgct

SEQ ID NO: 2238395 - DNA, 25 bp, Homo sapien
cagaccgggtcctgcaaaggatgca

SEQ ID NO: 2238396 - DNA, 25 bp, Homo sapien
aagccagaaagccccgggagatggc

SEQ ID NO: 2238397 - DNA, 25 bp, Homo sapien
tgcaaaggatgcatcctccgagcct

SEQ ID NO: 2238398 - DNA, 25 bp, Homo sapien
gctcttaccgttttgaaggcgcacg

SEQ ID NO: 2238399 - DNA, 25 bp, Homo sapien
ttttgaaggcgcacgtgggcaagaa

SEQ ID NO: 2238400 - DNA, 25 bp, Homo sapien
acacgttcagttgcagctcttaccg

SEQ ID NO: 2238401 - DNA, 25 bp, Homo sapien
tatctgcaccatgtctcacacgttc

SEQ ID NO: 2238402 - DNA, 25 bp, Homo sapien
ccttgagtgccggacgaggtcaaca

SEQ ID NO: 2238403 - DNA, 25 bp, Homo sapien
gctttccgtcacagaatatgtttgg

SEQ ID NO: 2238404 - DNA, 25 bp, Homo sapien
caacataggctttccgtcacagaat

SEQ ID NO: 2238405 - DNA, 25 bp, Homo sapien
ccggacgaggtcaacataggctttc

SEQ ID NO: 2238406 - DNA, 25 bp, Homo sapien
cgagtcgtcagggaaatgcccgcct

SEQ ID NO: 2238407 - DNA, 25 bp, Homo sapien
tgttgtacgtgcagccttctgggca

SEQ ID NO: 2238408 - DNA, 25 bp, Homo sapien
tggctcccttcctgcgtgacgtagg

SEQ ID NO: 2238409 - DNA, 25 bp, Homo sapien
ccggaattgtgggttcacctgaagt

SEQ ID NO: 2238410 - DNA, 25 bp, Homo sapien
gatgcggttaggtcgggtccatccc

SEQ ID NO: 2238411 - DNA, 25 bp, Homo sapien
tcctaacgcatcgttagggatgcgg

SEQ ID NO: 2238412 - DNA, 25 bp, Homo sapien
ggaccgctttctggtttgtcaggaa

SEQ ID NO: 2238413 - DNA, 25 bp, Homo sapien
caggctagtaagaagggtcccgccg

SEQ ID NO: 2238414 - DNA, 25 bp, Homo sapien
caggactagggcaggtgctcggacg

SEQ ID NO: 2238415 - DNA, 25 bp, Homo sapien
atccgaggtctctggaggtccgaga

SEQ ID NO: 2238416 - DNA, 25 bp, Homo sapien
agagagaggcgccaggactagctgg

SEQ ID NO: 2238417 - DNA, 25 bp, Homo sapien
ggacggatccgaggtctctggaggt

SEQ ID NO: 2238418 - DNA, 25 bp, Homo sapien
tcggggccttgggcagtttgcctgg

SEQ ID NO: 2238419 - DNA, 25 bp, Homo sapien
gcaaccggggtgacggcctagctgg

SEQ ID NO: 2238420 - DNA, 25 bp, Homo sapien
tgctgagttccgtggccattggcgc

SEQ ID NO: 2238421 - DNA, 25 bp, Homo sapien
ctagctgggtcctcggcccgggagg

SEQ ID NO: 2238422 - DNA, 25 bp, Homo sapien
ctgcggtgtgaggagggccgactgc

SEQ ID NO: 2238423 - DNA, 25 bp, Homo sapien
cgatgagttcggtggcaaagcttga

SEQ ID NO: 2238424 - DNA, 25 bp, Homo sapien
agcttgagaaatggagactctctgg

SEQ ID NO: 2238425 - DNA, 25 bp, Homo sapien
agaagggtccgctgctcaggcagca

SEQ ID NO: 2238426 - DNA, 25 bp, Homo sapien
cagaaggaaggacccgtcggactct

SEQ ID NO: 2238427 - DNA, 25 bp, Homo sapien
ctggcttctccgagggtgttcagga

SEQ ID NO: 2238428 - DNA, 25 bp, Homo sapien
gcttcgctcaattcaggagtggaga

SEQ ID NO: 2238429 - DNA, 25 bp, Homo sapien
tgttcaggagtctcccaagtgcgca

SEQ ID NO: 2238430 - DNA, 25 bp, Homo sapien
gtggaggtcggcaccgcttcgctca

SEQ ID NO: 2238431 - DNA, 25 bp, Homo sapien
tcgatgggcctcttaggccggaaac

SEQ ID NO: 2238432 - DNA, 25 bp, Homo sapien
agtcgatgggcctcttaggccggaa

SEQ ID NO: 2238433 - DNA, 25 bp, Homo sapien
cagaaggagtcgatgggcctcttag

SEQ ID NO: 2238434 - DNA, 25 bp, Homo sapien
gaaggcagaaggagtcgatgggcct

SEQ ID NO: 2238435 - DNA, 25 bp, Homo sapien
tcatggtcctccgttccacctgaat

SEQ ID NO: 2238436 - DNA, 25 bp, Homo sapien
ggaccaaggcagaaaaggtccagag

SEQ ID NO: 2238437 - DNA, 25 bp, Homo sapien
agagggttcatggtcctccgttcca

SEQ ID NO: 2238438 - DNA, 25 bp, Homo sapien
cagaaaaggtccagagggttcatgg

SEQ ID NO: 2238439 - DNA, 25 bp, Homo sapien
ataggtgtgcccctcgtcgcccgtg

SEQ ID NO: 2238440 - DNA, 25 bp, Homo sapien
ccctcgtcgcccgtgcgctgaggca

SEQ ID NO: 2238441 - DNA, 25 bp, Homo sapien
tagagagcgagccagggggataggt

SEQ ID NO: 2238442 - DNA, 25 bp, Homo sapien
ccagggggataggtgtgcccctcgt

SEQ ID NO: 2238443 - DNA, 25 bp, Homo sapien
agcggtccgccgtgcccaagaggaa

SEQ ID NO: 2238444 - DNA, 25 bp, Homo sapien
aaagagacattcaccttccacgtca

SEQ ID NO: 2238445 - DNA, 25 bp, Homo sapien
aacgcacctttaagggcgagagcgg

SEQ ID NO: 2238446 - DNA, 25 bp, Homo sapien
caagaggaacgggatgacattcaac

SEQ ID NO: 2238447 - DNA, 25 bp, Homo sapien
cgtgggggcggtgttactcgtggtg

SEQ ID NO: 2238448 - DNA, 25 bp, Homo sapien
agtggagggcgtgtccgggtacttg

SEQ ID NO: 2238449 - DNA, 25 bp, Homo sapien
cggtgttactcgtggtggtagaagt

SEQ ID NO: 2238450 - DNA, 25 bp, Homo sapien
gggcggtgttactcgtggtggtaga

SEQ ID NO: 2238451 - DNA, 25 bp, Homo sapien
gctcttaccgttttgaaggcgcacg

SEQ ID NO: 2238452 - DNA, 25 bp, Homo sapien
ttttgaaggcgcacgtgggcaagaa

SEQ ID NO: 2238453 - DNA, 25 bp, Homo sapien
tatctgcaccatgtctcacacgttc

SEQ ID NO: 2238454 - DNA, 25 bp, Homo sapien
acacgttcagttgcagctcttaccg

SEQ ID NO: 2238455 - DNA, 25 bp, Homo sapien
gaaagtcaatcacgttgagacagag

SEQ ID NO: 2238456 - DNA, 25 bp, Homo sapien
ccccagtagaagtgggcgagagagc

SEQ ID NO: 2238457 - DNA, 25 bp, Homo sapien
aacgtggcacgagagagagaaatta

SEQ ID NO: 2238458 - DNA, 25 bp, Homo sapien
aggagaggaagtgggccccagtaga

SEQ ID NO: 2238459 - DNA, 25 bp, Homo sapien
caggaagatcggaacacttggggct

SEQ ID NO: 2238460 - DNA, 25 bp, Homo sapien
gcaggaagatcggaacacttggggc

SEQ ID NO: 2238461 - DNA, 25 bp, Homo sapien
ggcaggaagatcggaacacttgggg

SEQ ID NO: 2238462 - DNA, 25 bp, Homo sapien
gagaccagtcgcgtttgacctgttg

SEQ ID NO: 2238463 - DNA, 25 bp, Homo sapien
gatcagtgggagaccagtcgcgttt

SEQ ID NO: 2238464 - DNA, 25 bp, Homo sapien
ccccagcgatcagtgggagaccagt

SEQ ID NO: 2238465 - DNA, 25 bp, Homo sapien
tcgcgtttgacctgttggtcgagct

SEQ ID NO: 2238466 - DNA, 25 bp, Homo sapien
gaccgctttctggtttgtcaggaag

SEQ ID NO: 2238467 - DNA, 25 bp, Homo sapien
gatgcggttaggtcgggtccatccc

SEQ ID NO: 2238468 - DNA, 25 bp, Homo sapien
tcctaacgcatcgttagggatgcgg

SEQ ID NO: 2238469 - DNA, 25 bp, Homo sapien
caggctagtaagaagggtcccgccg

SEQ ID NO: 2238470 - DNA, 25 bp, Homo sapien
caattgccgagattccgtgtgccaa

SEQ ID NO: 2238471 - DNA, 25 bp, Homo sapien
tccgttgggccaaaatggcaagcct

SEQ ID NO: 2238472 - DNA, 25 bp, Homo sapien
gcaagccttgcggtttgtaagtagg

SEQ ID NO: 2238473 - DNA, 25 bp, Homo sapien
taagtaggccgaattggcaattgcc

SEQ ID NO: 2238474 - DNA, 25 bp, Homo sapien
cctttgaactcttggtcagctgggc

SEQ ID NO: 2238475 - DNA, 25 bp, Homo sapien
cactgcacgcctgcggtgtgagcga

SEQ ID NO: 2238476 - DNA, 25 bp, Homo sapien
ctgggcttgccgggaaccgtagaat

SEQ ID NO: 2238477 - DNA, 25 bp, Homo sapien
tcaattggaacccattgcctttgaa

SEQ ID NO: 2238478 - DNA, 25 bp, Homo sapien
tgttgtacgtgcagccttctgggca

SEQ ID NO: 2238479 - DNA, 25 bp, Homo sapien
tattccggaattgtgggttcacctg

SEQ ID NO: 2238480 - DNA, 25 bp, Homo sapien
ggtcaacataggctttccgtcacag

SEQ ID NO: 2238481 - DNA, 25 bp, Homo sapien
cttgagtgccggacgaggtcaacat

SEQ ID NO: 2238482 - DNA, 25 bp, Homo sapien
gaccgctttctggtttgtcaggaag

SEQ ID NO: 2238483 - DNA, 25 bp, Homo sapien
gatgcggttaggtcgggtccatccc

SEQ ID NO: 2238484 - DNA, 25 bp, Homo sapien
taacgcatcgttagggatgcggtta

SEQ ID NO: 2238485 - DNA, 25 bp, Homo sapien
ctcccatcctaacgcatcgttaggg

SEQ ID NO: 2238486 - DNA, 25 bp, Homo sapien
ttcctcagcaaagggcggagggagt

SEQ ID NO: 2238487 - DNA, 25 bp, Homo sapien
aagaggaactggcttggcaatcccg

SEQ ID NO: 2238488 - DNA, 25 bp, Homo sapien
caatactgccatcaagaggaactgg

SEQ ID NO: 2238489 - DNA, 25 bp, Homo sapien
atttctggagcaatactgccatcaa

SEQ ID NO: 2238490 - DNA, 25 bp, Homo sapien
gtctctggaggtccgagagaagcag

SEQ ID NO: 2238491 - DNA, 25 bp, Homo sapien
ccagagagaggcgccaggactagct

SEQ ID NO: 2238492 - DNA, 25 bp, Homo sapien
agagagaggcgccaggactagctgg

SEQ ID NO: 2238493 - DNA, 25 bp, Homo sapien
ggacggatccgaggtctctggaggt

SEQ ID NO: 2238494 - DNA, 25 bp, Homo sapien
gctgagttccgtggccattggcgcc

SEQ ID NO: 2238495 - DNA, 25 bp, Homo sapien
ctgagttccgtggccattggcgccg

SEQ ID NO: 2238496 - DNA, 25 bp, Homo sapien
gagttccgtggccattggcgccggt

SEQ ID NO: 2238497 - DNA, 25 bp, Homo sapien
ttccgtggccattggcgccggtgcc

SEQ ID NO: 2238498 - DNA, 25 bp, Homo sapien
cgatgagttcggtggcaaagcttga

SEQ ID NO: 2238499 - DNA, 25 bp, Homo sapien
agcttgagaaatggagactctctgg

SEQ ID NO: 2238500 - DNA, 25 bp, Homo sapien
agaagggtccgctgctcaggcagca

SEQ ID NO: 2238501 - DNA, 25 bp, Homo sapien
cagaaggaaggacccgtcggactct

SEQ ID NO: 2238502 - DNA, 25 bp, Homo sapien
caagacctggtccactccctccgtt

SEQ ID NO: 2238503 - DNA, 25 bp, Homo sapien
cccaagacctggtccactccctccg

SEQ ID NO: 2238504 - DNA, 25 bp, Homo sapien
agaaatgctcaagagcccaagacct

SEQ ID NO: 2238505 - DNA, 25 bp, Homo sapien
aaatgctcaagagcccaagacctgg

SEQ ID NO: 2238506 - DNA, 25 bp, Homo sapien
tgctactggcacttccaagaggaga

SEQ ID NO: 2238507 - DNA, 25 bp, Homo sapien
gagaaatgcaaaagagcccatggcc

SEQ ID NO: 2238508 - DNA, 25 bp, Homo sapien
gcaagtaacagttggatgtcaccct

SEQ ID NO: 2238509 - DNA, 25 bp, Homo sapien
tatcctgggaacattggcctgcagt

SEQ ID NO: 2238510 - DNA, 25 bp, Homo sapien
cagaacccaccaataaatggccggg

SEQ ID NO: 2238511 - DNA, 25 bp, Homo sapien
tcacattcttgaaagcgccagaacc

SEQ ID NO: 2238512 - DNA, 25 bp, Homo sapien
ccaccaataaatggccgggtcctct

SEQ ID NO: 2238513 - DNA, 25 bp, Homo sapien
tgaaagcgccagaacccaccaataa

SEQ ID NO: 2238514 - DNA, 25 bp, Homo sapien
cctggtggaggcctttgctagtctt

SEQ ID NO: 2238515 - DNA, 25 bp, Homo sapien
cacagctttctgtatgggacccgcc

SEQ ID NO: 2238516 - DNA, 25 bp, Homo sapien
tagtcttgcccagacatggctgcca

SEQ ID NO: 2238517 - DNA, 25 bp, Homo sapien
tctttttgacacctgtccctggagt

SEQ ID NO: 2238518 - DNA, 25 bp, Homo sapien
ggcttgtagatgcaggtatactgta

SEQ ID NO: 2238519 - DNA, 25 bp, Homo sapien
ggtcagtgactgaacaactctccat

SEQ ID NO: 2238520 - DNA, 25 bp, Homo sapien
tcagcttggaagagaatgacagctc

SEQ ID NO: 2238521 - DNA, 25 bp, Homo sapien
aggtatacttctaagcctcttgagt

SEQ ID NO: 2238522 - DNA, 25 bp, Homo sapien
cacatgacgatctcaatagacccag

SEQ ID NO: 2238523 - DNA, 25 bp, Homo sapien
ggttttataccagagatgcaaggac

SEQ ID NO: 2238524 - DNA, 25 bp, Homo sapien
taagcacagaaggaacatgcctcaa

SEQ ID NO: 2238525 - DNA, 25 bp, Homo sapien
tcagacatcgagttaaggaagggct

SEQ ID NO: 2238526 - DNA, 25 bp, Homo sapien
gcgaagctgctctcgcccatgtaca

SEQ ID NO: 2238527 - DNA, 25 bp, Homo sapien
aaggcagttgagtcttcccacagga

SEQ ID NO: 2238528 - DNA, 25 bp, Homo sapien
catatcaccgcgagccatcttgtgc

SEQ ID NO: 2238529 - DNA, 25 bp, Homo sapien
tcaattcctagggttacacgctccc

SEQ ID NO: 2238530 - DNA, 25 bp, Homo sapien
cagcatgggggggtctttatattca

SEQ ID NO: 2238531 - DNA, 25 bp, Homo sapien
ggtattcatcaaagttaccacagca

SEQ ID NO: 2238532 - DNA, 25 bp, Homo sapien
tgtcctttggtattcatcaaagtta

SEQ ID NO: 2238533 - DNA, 25 bp, Homo sapien
ggtctttatattcaggttttgccca

SEQ ID NO: 2238534 - DNA, 25 bp, Homo sapien
atctgggccattcgtgggttactgg

SEQ ID NO: 2238535 - DNA, 25 bp, Homo sapien
tgcatctgggccattcgtgggttac

SEQ ID NO: 2238536 - DNA, 25 bp, Homo sapien
aaatacatttgtgtctattaatcaa

SEQ ID NO: 2238537 - DNA, 25 bp, Homo sapien
aatacatttgtgtctattaatcaaa

SEQ ID NO: 2238538 - DNA, 25 bp, Homo sapien
atacatttgtgtctattaatcaaaa

SEQ ID NO: 2238539 - DNA, 25 bp, Homo sapien
taaatacatttgtgtctattaatca

SEQ ID NO: 2238540 - DNA, 25 bp, Homo sapien
gattgctctatctaagtctttcagt

SEQ ID NO: 2238541 - DNA, 25 bp, Homo sapien
tgatgcatcgcaatgattgatttgc

SEQ ID NO: 2238542 - DNA, 25 bp, Homo sapien
tcatgaagggatgaaaacatcattt

SEQ ID NO: 2238543 - DNA, 25 bp, Homo sapien
cccacttggtcgtgatgaatgagct

SEQ ID NO: 2238544 - DNA, 25 bp, Homo sapien
ttctagttcaagcacactgttagat

SEQ ID NO: 2238545 - DNA, 25 bp, Homo sapien
gttcaagcacactgttagatttttt

SEQ ID NO: 2238546 - DNA, 25 bp, Homo sapien
acttctttcataatactgcttttgc

SEQ ID NO: 2238547 - DNA, 25 bp, Homo sapien
tcccattgtggtcagagtagatgtt

SEQ ID NO: 2238548 - DNA, 25 bp, Homo sapien
gatatcagtgcagcaacttttgctc

SEQ ID NO: 2238549 - DNA, 25 bp, Homo sapien
ccttgacatgggatatattcttcca

SEQ ID NO: 2238550 - DNA, 25 bp, Homo sapien
cattatatagcgaccttgtctcttg

SEQ ID NO: 2238551 - DNA, 25 bp, Homo sapien
tcagtgtacacgtgtctttataggg

SEQ ID NO: 2238552 - DNA, 25 bp, Homo sapien
ggagctggattattaaattccttga

SEQ ID NO: 2238553 - DNA, 25 bp, Homo sapien
tgtgctggagatccattatatgtta

SEQ ID NO: 2238554 - DNA, 25 bp, Homo sapien
ttatccttgtttcttgggagctgga

SEQ ID NO: 2238555 - DNA, 25 bp, Homo sapien
ccataccactctcttggcctgtgaa

SEQ ID NO: 2238556 - DNA, 25 bp, Homo sapien
tattttcaatagcttgctcactatt

SEQ ID NO: 2238557 - DNA, 25 bp, Homo sapien
caattctgctagtaaaagacactga

SEQ ID NO: 2238558 - DNA, 25 bp, Homo sapien
cctattttcaatagcttgctcacta

SEQ ID NO: 2238559 - DNA, 25 bp, Homo sapien
tttcaatagcttgctcactatttct

SEQ ID NO: 2238560 - DNA, 25 bp, Homo sapien
gatttgcaggtcacacatcatgaca

SEQ ID NO: 2238561 - DNA, 25 bp, Homo sapien
tacctcagaggtacaacttttgctg

SEQ ID NO: 2238562 - DNA, 25 bp, Homo sapien
cggaaactctctcagcaccatgctg

SEQ ID NO: 2238563 - DNA, 25 bp, Homo sapien
aaaccaggtattgttagtgctcacc

SEQ ID NO: 2238564 - DNA, 25 bp, Homo sapien
taagattgccctggctccatgagga

SEQ ID NO: 2238565 - DNA, 25 bp, Homo sapien
gaatgtaattctctaccagcctgga

SEQ ID NO: 2238566 - DNA, 25 bp, Homo sapien
cctgggaaccatcacgagaccttgt

SEQ ID NO: 2238567 - DNA, 25 bp, Homo sapien
tatataaacccacaagtgtgcccag

SEQ ID NO: 2238568 - DNA, 25 bp, Homo sapien
ccagcccttcgcagtgtatccagag

SEQ ID NO: 2238569 - DNA, 25 bp, Homo sapien
ttcagtgcaaaagcgagggagccga

SEQ ID NO: 2238570 - DNA, 25 bp, Homo sapien
gcttatactggttgtgggccttccc

SEQ ID NO: 2238571 - DNA, 25 bp, Homo sapien
gaacaacagtgccatcaagaggaag

SEQ ID NO: 2238572 - DNA, 25 bp, Homo sapien
tcagctcaagaacaatccggaagtg

SEQ ID NO: 2238573 - DNA, 25 bp, Homo sapien
tcaagcgaagaaaggaggcactgcc

SEQ ID NO: 2238574 - DNA, 25 bp, Homo sapien
gaccactgggcaacactttaggaaa

SEQ ID NO: 2238575 - DNA, 25 bp, Homo sapien
tcctcgtggaagaaacctgggttca

SEQ ID NO: 2238576 - DNA, 25 bp, Homo sapien
ttcatcccagtagggtggtctcaaa

SEQ ID NO: 2238577 - DNA, 25 bp, Homo sapien
tgtttatcctggctgaatccttggg

SEQ ID NO: 2238578 - DNA, 25 bp, Homo sapien
tgatcatacctaaaagccatggctg

SEQ ID NO: 2238579 - DNA, 25 bp, Homo sapien
gctgaatctttagcactggagctgg

SEQ ID NO: 2238580 - DNA, 25 bp, Homo sapien
agttggagccagacttaaactctgc

SEQ ID NO: 2238581 - DNA, 25 bp, Homo sapien
tgagaccacaggaaaatatcttgag

SEQ ID NO: 2238582 - DNA, 25 bp, Homo sapien
gcagagagttggagccagacttaaa

SEQ ID NO: 2238583 - DNA, 25 bp, Homo sapien
tatcttgagtctgggcagagagttg

SEQ ID NO: 2238584 - DNA, 25 bp, Homo sapien
ggtctcaggatgcaatacccacaaa

SEQ ID NO: 2238585 - DNA, 25 bp, Homo sapien
gatgcaatacccacaaaatggtggc

SEQ ID NO: 2238586 - DNA, 25 bp, Homo sapien
aaatggtggcgcagcggcaccagaa

SEQ ID NO: 2238587 - DNA, 25 bp, Homo sapien
ccagaggtctcaggatgcaataccc

SEQ ID NO: 2238588 - DNA, 25 bp, Homo sapien
ccagttatctacatgcctcagcagt

SEQ ID NO: 2238589 - DNA, 25 bp, Homo sapien
tagatgggctgaaatcccagaacca

SEQ ID NO: 2238590 - DNA, 25 bp, Homo sapien
gaaacacatcttgcctaggtgctca

SEQ ID NO: 2238591 - DNA, 25 bp, Homo sapien
tcctactaagcatggtggaaagcta

SEQ ID NO: 2238592 - DNA, 25 bp, Homo sapien
cccgggatcgcagaggtatcctctt

SEQ ID NO: 2238593 - DNA, 25 bp, Homo sapien
gatgacccgggatcgcagaggtatc

SEQ ID NO: 2238594 - DNA, 25 bp, Homo sapien
ctagcatctggagatgacccgggat

SEQ ID NO: 2238595 - DNA, 25 bp, Homo sapien
atctggagatgacccgggatcgcag

SEQ ID NO: 2238596 - DNA, 25 bp, Homo sapien
ggattttgggctgattgtcaaagtg

SEQ ID NO: 2238597 - DNA, 25 bp, Homo sapien
aagatagccaactatccttcactgg

SEQ ID NO: 2238598 - DNA, 25 bp, Homo sapien
tgtcaaagtgatagccaaaaggtgg

SEQ ID NO: 2238599 - DNA, 25 bp, Homo sapien
ttcactggattttgggctgattgtc

SEQ ID NO: 2238600 - DNA, 25 bp, Homo sapien
ctcattggctgccatgtttagacac

SEQ ID NO: 2238601 - DNA, 25 bp, Homo sapien
tgccaagctcgggaggtggtagaag

SEQ ID NO: 2238602 - DNA, 25 bp, Homo sapien
accctggcttgtcaggcctgccaag

SEQ ID NO: 2238603 - DNA, 25 bp, Homo sapien
tggtagaagccaggtctcattggct

SEQ ID NO: 2238604 - DNA, 25 bp, Homo sapien
ggaactgccctgaaggtctcaggga

SEQ ID NO: 2238605 - DNA, 25 bp, Homo sapien
cattcagactatggatctttgctct

SEQ ID NO: 2238606 - DNA, 25 bp, Homo sapien
ctgcgatactggagagcattcagac

SEQ ID NO: 2238607 - DNA, 25 bp, Homo sapien
atgtgggaaacctgagaaccaatgt

SEQ ID NO: 2238608 - DNA, 25 bp, Homo sapien
gggactcggcgggatccttctacta

SEQ ID NO: 2238609 - DNA, 25 bp, Homo sapien
tgctccgaacacaaccaatcaccat

SEQ ID NO: 2238610 - DNA, 25 bp, Homo sapien
ggatccttctactagcctgccttca

SEQ ID NO: 2238611 - DNA, 25 bp, Homo sapien
aaacaccaaccgtgctccgaacaca

SEQ ID NO: 2238612 - DNA, 25 bp, Homo sapien
ctctgtctctatgtgattgggcttc

SEQ ID NO: 2238613 - DNA, 25 bp, Homo sapien
tgggcttctttgactctccgggaat

SEQ ID NO: 2238614 - DNA, 25 bp, Homo sapien
ttgctctgtctctatgtgattgggc

SEQ ID NO: 2238615 - DNA, 25 bp, Homo sapien
tccgggaattcccatcaatgtgggc

SEQ ID NO: 2238616 - DNA, 25 bp, Homo sapien
ttaaaacgataagagatgcaactga

SEQ ID NO: 2238617 - DNA, 25 bp, Homo sapien
cgataagagatgcaactgaacgtgt

SEQ ID NO: 2238618 - DNA, 25 bp, Homo sapien
gcaactgaacgtgtgagacatcgtg

SEQ ID NO: 2238619 - DNA, 25 bp, Homo sapien
gagatgcaactgaacgtgtgagaca

SEQ ID NO: 2238620 - DNA, 25 bp, Homo sapien
aggagatgacccagtccactgctgt

SEQ ID NO: 2238621 - DNA, 25 bp, Homo sapien
agttagccgcaggagatgacccagt

SEQ ID NO: 2238622 - DNA, 25 bp, Homo sapien
gagacacctgaacacccttggaagg

SEQ ID NO: 2238623 - DNA, 25 bp, Homo sapien
cccttggaagggagagttagccgca

SEQ ID NO: 2238624 - DNA, 25 bp, Homo sapien
agcagatccttctggcacggagcag

SEQ ID NO: 2238625 - DNA, 25 bp, Homo sapien
agatccttctggcacggagcaggct

SEQ ID NO: 2238626 - DNA, 25 bp, Homo sapien
gtccccaggcctgtccgacaggtcc

SEQ ID NO: 2238627 - DNA, 25 bp, Homo sapien
cagacttcagcaggcctaggaaggc

SEQ ID NO: 2238628 - DNA, 25 bp, Homo sapien
gactgtgtggttacggaccctccca

SEQ ID NO: 2238629 - DNA, 25 bp, Homo sapien
tcatcaaggactgtgtggttacgga

SEQ ID NO: 2238630 - DNA, 25 bp, Homo sapien
tcaaggactgtgtggttacggaccc

SEQ ID NO: 2238631 - DNA, 25 bp, Homo sapien
tgtggttacggaccctcccatggcc

SEQ ID NO: 2238632 - DNA, 25 bp, Homo sapien
ggcatgcagtgtggccgagggagcc

SEQ ID NO: 2238633 - DNA, 25 bp, Homo sapien
ggggcccctcttcactggcatgcag

SEQ ID NO: 2238634 - DNA, 25 bp, Homo sapien
tggcatgcagtgtggccgagggagc

SEQ ID NO: 2238635 - DNA, 25 bp, Homo sapien
gggcccctcttcactggcatgcagt

SEQ ID NO: 2238636 - DNA, 25 bp, Homo sapien
gagcagtaaattcgcaagacccacg

SEQ ID NO: 2238637 - DNA, 25 bp, Homo sapien
tcccagaaaccttgacgtgcaaaac

SEQ ID NO: 2238638 - DNA, 25 bp, Homo sapien
tcaacatctatacaggtcttcccag

SEQ ID NO: 2238639 - DNA, 25 bp, Homo sapien
cacataaaggcaggcattccgttga

SEQ ID NO: 2238640 - DNA, 25 bp, Homo sapien
ctgtaacagaaaccctatgatgact

SEQ ID NO: 2238641 - DNA, 25 bp, Homo sapien
aaatgtttaatgatcttcaggttat

SEQ ID NO: 2238642 - DNA, 25 bp, Homo sapien
aatgtttaatgatcttcaggttata

SEQ ID NO: 2238643 - DNA, 25 bp, Homo sapien
gtttaatgatcttcaggttatattt

SEQ ID NO: 2238644 - DNA, 25 bp, Homo sapien
ttccttgtataaagctactaaccca

SEQ ID NO: 2238645 - DNA, 25 bp, Homo sapien
caactgagaagggtccgtccacagt

SEQ ID NO: 2238646 - DNA, 25 bp, Homo sapien
catcgcactggacccaaagattgga

SEQ ID NO: 2238647 - DNA, 25 bp, Homo sapien
ggaattttctccctagaagaagatg

SEQ ID NO: 2238648 - DNA, 25 bp, Homo sapien
tacatccactggaacccttaaggta

SEQ ID NO: 2238649 - DNA, 25 bp, Homo sapien
gggaatagactctttatcgagctca

SEQ ID NO: 2238650 - DNA, 25 bp, Homo sapien
gataggttctatagcaaattccacc

SEQ ID NO: 2238651 - DNA, 25 bp, Homo sapien
tatggcctatggaggaaacatcggg

SEQ ID NO: 2238652 - DNA, 25 bp, Homo sapien
gaatagagaagtatctgtgcagctg

SEQ ID NO: 2238653 - DNA, 25 bp, Homo sapien
tctatttacacagggcataagccga

SEQ ID NO: 2238654 - DNA, 25 bp, Homo sapien
tgagagttccataattcccgacagg

SEQ ID NO: 2238655 - DNA, 25 bp, Homo sapien
cactggtaacactgggagtggccca

SEQ ID NO: 2238656 - DNA, 25 bp, Homo sapien
taactgagagcgtcgctaaggccct

SEQ ID NO: 2238657 - DNA, 25 bp, Homo sapien
atggccaccaccagactcctgagcc

SEQ ID NO: 2238658 - DNA, 25 bp, Homo sapien
ggccaccaccagactcctgagccat

SEQ ID NO: 2238659 - DNA, 25 bp, Homo sapien
ccagatcatggccaccaccagactc

SEQ ID NO: 2238660 - DNA, 25 bp, Homo sapien
tcatggccaccaccagactcctgag

SEQ ID NO: 2238661 - DNA, 25 bp, Homo sapien
tcctgacaaacagggaagtggtccc

SEQ ID NO: 2238662 - DNA, 25 bp, Homo sapien
gactagattatagctccggacagag

SEQ ID NO: 2238663 - DNA, 25 bp, Homo sapien
taggtacacagctccaatgacgtgg

SEQ ID NO: 2238664 - DNA, 25 bp, Homo sapien
taaacatggtggtaagcagagtccc

SEQ ID NO: 2238665 - DNA, 25 bp, Homo sapien
ttagtaagattaaccaagagaagag

SEQ ID NO: 2238666 - DNA, 25 bp, Homo sapien
ctgacaccacttagatacaaaagat

SEQ ID NO: 2238667 - DNA, 25 bp, Homo sapien
caggatcagatagagtcacagcaga

SEQ ID NO: 2238668 - DNA, 25 bp, Homo sapien
ggctactatgaatgcctttatgcat

SEQ ID NO: 2238669 - DNA, 25 bp, Homo sapien
ctttttcttaataatcatggccgtt

SEQ ID NO: 2238670 - DNA, 25 bp, Homo sapien
ataatcatggccgtttcagatcctc

SEQ ID NO: 2238671 - DNA, 25 bp, Homo sapien
atcatggccgtttcagatcctccca

SEQ ID NO: 2238672 - DNA, 25 bp, Homo sapien
ttcttaataatcatggccgtttcag

SEQ ID NO: 2238673 - DNA, 25 bp, Homo sapien
gatgaaaatgtgagcgagcccctga

SEQ ID NO: 2238674 - DNA, 25 bp, Homo sapien
taaatgcgtacgtagaaagggagct

SEQ ID NO: 2238675 - DNA, 25 bp, Homo sapien
tgaaggaatccgtgtgcgcaccctt

SEQ ID NO: 2238676 - DNA, 25 bp, Homo sapien
gcagccaccattgcgcaagttcgag

SEQ ID NO: 2238677 - DNA, 25 bp, Homo sapien
cgcgccagcgggaaaggtccgacta

SEQ ID NO: 2238678 - DNA, 25 bp, Homo sapien
gcgccagcgggaaaggtccgactac

SEQ ID NO: 2238679 - DNA, 25 bp, Homo sapien
ctgcgcgccagcgggaaaggtccga

SEQ ID NO: 2238680 - DNA, 25 bp, Homo sapien
gcgcgccagcgggaaaggtccgact

SEQ ID NO: 2238681 - DNA, 25 bp, Homo sapien
aatgcgccccctgcggcaacgcgac

SEQ ID NO: 2238682 - DNA, 25 bp, Homo sapien
acggctggaccccaatgcgccccct

SEQ ID NO: 2238683 - DNA, 25 bp, Homo sapien
aacgcgactcccgcgttgccacagg

SEQ ID NO: 2238684 - DNA, 25 bp, Homo sapien
cccctgcggcaacgcgactcccgcg

SEQ ID NO: 2238685 - DNA, 25 bp, Homo sapien
gaggagggtacaactgcacttttac

SEQ ID NO: 2238686 - DNA, 25 bp, Homo sapien
tgcacttttaccgcctccaactcct

SEQ ID NO: 2238687 - DNA, 25 bp, Homo sapien
ctgaggagggtacaactgcactttt

SEQ ID NO: 2238688 - DNA, 25 bp, Homo sapien
actgcacttttaccgcctccaactc

SEQ ID NO: 2238689 - DNA, 25 bp, Homo sapien
ctttatttaatgtaggaatggccat

SEQ ID NO: 2238690 - DNA, 25 bp, Homo sapien
ggatgcctccctgtttttctcctcc

SEQ ID NO: 2238691 - DNA, 25 bp, Homo sapien
ctcctcctttatttaatgtaggaat

SEQ ID NO: 2238692 - DNA, 25 bp, Homo sapien
ctctctggatgcctccctgtttttc

SEQ ID NO: 2238693 - DNA, 25 bp, Homo sapien
tagttttggcttgcttcgcttctga

SEQ ID NO: 2238694 - DNA, 25 bp, Homo sapien
catggtagttttggcttgcttcgct

SEQ ID NO: 2238695 - DNA, 25 bp, Homo sapien
tggcttgcttcgcttctgacctggg

SEQ ID NO: 2238696 - DNA, 25 bp, Homo sapien
cagcatggtagttttggcttgcttc

SEQ ID NO: 2238697 - DNA, 25 bp, Homo sapien
taaacagcagcaagtatgggcaaga

SEQ ID NO: 2238698 - DNA, 25 bp, Homo sapien
agcaagtatgggcaagatgaggcaa

SEQ ID NO: 2238699 - DNA, 25 bp, Homo sapien
tgattttactaaagtagcagttgta

SEQ ID NO: 2238700 - DNA, 25 bp, Homo sapien
gtagcagttgtaaacagcagcaagt

SEQ ID NO: 2238701 - DNA, 25 bp, Homo sapien
taacctaagttgtgcactattgcct

SEQ ID NO: 2238702 - DNA, 25 bp, Homo sapien
gggccactggctgatctatctctga

SEQ ID NO: 2238703 - DNA, 25 bp, Homo sapien
catagccaagctgaccaacttttgc

SEQ ID NO: 2238704 - DNA, 25 bp, Homo sapien
gaagacacctgcattggaatcacaa

SEQ ID NO: 2238705 - DNA, 25 bp, Homo sapien
cttccccgactacgatttcctcgtg

SEQ ID NO: 2238706 - DNA, 25 bp, Homo sapien
tagagtcttccccgactacgatttc

SEQ ID NO: 2238707 - DNA, 25 bp, Homo sapien
actacgatttcctcgtgtgccccaa

SEQ ID NO: 2238708 - DNA, 25 bp, Homo sapien
tccccgactacgatttcctcgtgtg

SEQ ID NO: 2238709 - DNA, 25 bp, Homo sapien
tttcaatgcaacgactttaatcttg

SEQ ID NO: 2238710 - DNA, 25 bp, Homo sapien
tctcaaccttttgtacaggtttcca

SEQ ID NO: 2238711 - DNA, 25 bp, Homo sapien
gttattttcaatgcaacgactttaa

SEQ ID NO: 2238712 - DNA, 25 bp, Homo sapien
ctcaaccttttgtacaggtttccag

SEQ ID NO: 2238713 - DNA, 25 bp, Homo sapien
caaagtactgcagcctgattttgaa

SEQ ID NO: 2238714 - DNA, 25 bp, Homo sapien
cctggagagctaagcgaagttgtct

SEQ ID NO: 2238715 - DNA, 25 bp, Homo sapien
tttgcaggccccgtgcaaagtactg

SEQ ID NO: 2238716 - DNA, 25 bp, Homo sapien
tgtctgatataaatttgcaggcccc

SEQ ID NO: 2238717 - DNA, 25 bp, Homo sapien
tagtgaaaactatacaacaaacatt

SEQ ID NO: 2238718 - DNA, 25 bp, Homo sapien
ctagtgaaaactatacaacaaacat

SEQ ID NO: 2238719 - DNA, 25 bp, Homo sapien
gaaaactatacaacaaacattccac

SEQ ID NO: 2238720 - DNA, 25 bp, Homo sapien
gtgaaaactatacaacaaacattcc

SEQ ID NO: 2238721 - DNA, 25 bp, Homo sapien
ataactgaactgtagcttgggttct

SEQ ID NO: 2238722 - DNA, 25 bp, Homo sapien
gcttgggttcttcattaccagcatt

SEQ ID NO: 2238723 - DNA, 25 bp, Homo sapien
ttcttcattaccagcattctctcca

SEQ ID NO: 2238724 - DNA, 25 bp, Homo sapien
actgaactgtagcttgggttcttca

SEQ ID NO: 2238725 - DNA, 25 bp, Homo sapien
ttccatgtcaccacaaaatgaactc

SEQ ID NO: 2238726 - DNA, 25 bp, Homo sapien
tccatgtcaccacaaaatgaactca

SEQ ID NO: 2238727 - DNA, 25 bp, Homo sapien
cttgtggaatggataattctagaga

SEQ ID NO: 2238728 - DNA, 25 bp, Homo sapien
accttgtggaatggataattctaga

SEQ ID NO: 2238729 - DNA, 25 bp, Homo sapien
tggaatggataattctagagaagag

SEQ ID NO: 2238730 - DNA, 25 bp, Homo sapien
tgtggaatggataattctagagaag

SEQ ID NO: 2238731 - DNA, 25 bp, Homo sapien
ctgtaagagcctgtacacacagtca

SEQ ID NO: 2238732 - DNA, 25 bp, Homo sapien
gcctgtacacacagtcaagatccga

SEQ ID NO: 2238733 - DNA, 25 bp, Homo sapien
gtcaagatccgagggattgaaggtc

SEQ ID NO: 2238734 - DNA, 25 bp, Homo sapien
cacacagtcaagatccgagggattg

SEQ ID NO: 2238735 - DNA, 25 bp, Homo sapien
ctgttcagccaccaaccctacaagt

SEQ ID NO: 2238736 - DNA, 25 bp, Homo sapien
gttcagccaccaaccctacaagttg

SEQ ID NO: 2238737 - DNA, 25 bp, Homo sapien
tgttcagccaccaaccctacaagtt

SEQ ID NO: 2238738 - DNA, 25 bp, Homo sapien
tcactgtaagctttttagcccagac

SEQ ID NO: 2238739 - DNA, 25 bp, Homo sapien
tttggattcagttagtataagctct

SEQ ID NO: 2238740 - DNA, 25 bp, Homo sapien
ttggattcagttagtataagctctt

SEQ ID NO: 2238741 - DNA, 25 bp, Homo sapien
tatttggctgaacaacccacctaaa

SEQ ID NO: 2238742 - DNA, 25 bp, Homo sapien
aattgctcgttctctaacaatgtcc

SEQ ID NO: 2238743 - DNA, 25 bp, Homo sapien
tcgttctctaacaatgtcctctcct

SEQ ID NO: 2238744 - DNA, 25 bp, Homo sapien
gaaaggaatttaattgctcgttctc

SEQ ID NO: 2238745 - DNA, 25 bp, Homo sapien
cttcataggcatttttatgctggac

SEQ ID NO: 2238746 - DNA, 25 bp, Homo sapien
agcagactcaaccaattctggaaac

SEQ ID NO: 2238747 - DNA, 25 bp, Homo sapien
acaccacccggtatcacttcatagg

SEQ ID NO: 2238748 - DNA, 25 bp, Homo sapien
ttttatgctggaccacttgctccat

SEQ ID NO: 2238749 - DNA, 25 bp, Homo sapien
caggatgccataattgcggtaaagc

SEQ ID NO: 2238750 - DNA, 25 bp, Homo sapien
aggatgccataattgcggtaaagct

SEQ ID NO: 2238751 - DNA, 25 bp, Homo sapien
ccaggatgccataattgcggtaaag

SEQ ID NO: 2238752 - DNA, 25 bp, Homo sapien
ggatgccataattgcggtaaagctc

SEQ ID NO: 2238753 - DNA, 25 bp, Homo sapien
cgcttccgctatccttgtcctcacc

SEQ ID NO: 2238754 - DNA, 25 bp, Homo sapien
cagggcccgcttccgctatccttgt

SEQ ID NO: 2238755 - DNA, 25 bp, Homo sapien
ctacgttcggcacagtgagtgacaa

SEQ ID NO: 2238756 - DNA, 25 bp, Homo sapien
cacagtgagtgacaagcccagggcc

SEQ ID NO: 2238757 - DNA, 25 bp, Homo sapien
gagacttagcatatatgaccttata

SEQ ID NO: 2238758 - DNA, 25 bp, Homo sapien
caaaaagacaactaatagaaactct

SEQ ID NO: 2238759 - DNA, 25 bp, Homo sapien
atttgtcatcaacctgagacttagc

SEQ ID NO: 2238760 - DNA, 25 bp, Homo sapien
gataatgatgctatttggatgaaca

SEQ ID NO: 2238761 - DNA, 25 bp, Homo sapien
tcactttggatatgtaacatgtgga

SEQ ID NO: 2238762 - DNA, 25 bp, Homo sapien
ttgatccttgagaccagtgatgacc

SEQ ID NO: 2238763 - DNA, 25 bp, Homo sapien
gtccacatgtcccatatgttgtttg

SEQ ID NO: 2238764 - DNA, 25 bp, Homo sapien
tttcagtatgttcaacccaagttac

SEQ ID NO: 2238765 - DNA, 25 bp, Homo sapien
aaggctaggtcttccggagacaagc

SEQ ID NO: 2238766 - DNA, 25 bp, Homo sapien
cctgttccttgtgggtgttcaaggc

SEQ ID NO: 2238767 - DNA, 25 bp, Homo sapien
gttccttgtgggtgttcaaggctag

SEQ ID NO: 2238768 - DNA, 25 bp, Homo sapien
tcttccggagacaagcctgtagttt

SEQ ID NO: 2238769 - DNA, 25 bp, Homo sapien
tcctggctgtttctttgcaaggggc

SEQ ID NO: 2238770 - DNA, 25 bp, Homo sapien
ctcctggctgtttctttgcaagggg

SEQ ID NO: 2238771 - DNA, 25 bp, Homo sapien
tgtggcctgcagcatggacaggtgc

SEQ ID NO: 2238772 - DNA, 25 bp, Homo sapien
ctgtggcctgcagcatggacaggtg

SEQ ID NO: 2238773 - DNA, 25 bp, Homo sapien
tggcctgcagcatggacaggtgcat

SEQ ID NO: 2238774 - DNA, 25 bp, Homo sapien
gtggcctgcagcatggacaggtgca

SEQ ID NO: 2238775 - DNA, 25 bp, Homo sapien
gcaaaaacattaccagcggtcttca

SEQ ID NO: 2238776 - DNA, 25 bp, Homo sapien
cataagaactaggagctgctgacat

SEQ ID NO: 2238777 - DNA, 25 bp, Homo sapien
gcggtcttcacttcgggcttgtgaa

SEQ ID NO: 2238778 - DNA, 25 bp, Homo sapien
gacatttcaatatgaagggcaactc

SEQ ID NO: 2238779 - DNA, 25 bp, Homo sapien
cctttgtgtcttaaacgtgagagca

SEQ ID NO: 2238780 - DNA, 25 bp, Homo sapien
tcttgggattcaccaacagctgcgt

SEQ ID NO: 2238781 - DNA, 25 bp, Homo sapien
gatgggtgtcattaatagctgcgaa

SEQ ID NO: 2238782 - DNA, 25 bp, Homo sapien
tgtcttgccggaaaagcagttctct

SEQ ID NO: 2238783 - DNA, 25 bp, Homo sapien
tgggctaaccctttgtagagtgagt

SEQ ID NO: 2238784 - DNA, 25 bp, Homo sapien
cgggtattgggaaatcaaccgctct

SEQ ID NO: 2238785 - DNA, 25 bp, Homo sapien
tgtagagtgagttaaccgggtattg

SEQ ID NO: 2238786 - DNA, 25 bp, Homo sapien
cctctaatatgaggcgcctgggcta

SEQ ID NO: 2238787 - DNA, 25 bp, Homo sapien
ctgggactccttggctggtgctcca

SEQ ID NO: 2238788 - DNA, 25 bp, Homo sapien
cagatgagccggcacttgcatgcag

SEQ ID NO: 2238789 - DNA, 25 bp, Homo sapien
tacatctagaatggcaggctgcctg

SEQ ID NO: 2238790 - DNA, 25 bp, Homo sapien
cttgtctaatcttgcagtgtgagtc

SEQ ID NO: 2238791 - DNA, 25 bp, Homo sapien
ctcccaaaacttcataaagcatcag

SEQ ID NO: 2238792 - DNA, 25 bp, Homo sapien
ttcataaagcatcaggccaacacgg

SEQ ID NO: 2238793 - DNA, 25 bp, Homo sapien
tcccaaaacttcataaagcatcagg

SEQ ID NO: 2238794 - DNA, 25 bp, Homo sapien
aaagcatcaggccaacacggaccat

SEQ ID NO: 2238795 - DNA, 25 bp, Homo sapien
agagaatagagcctagaacagctgc

SEQ ID NO: 2238796 - DNA, 25 bp, Homo sapien
ttagagaatagagcctagaacagct

SEQ ID NO: 2238797 - DNA, 25 bp, Homo sapien
tagagaatagagcctagaacagctg

SEQ ID NO: 2238798 - DNA, 25 bp, Homo sapien
ggcttggcaaacagttgcctttact

SEQ ID NO: 2238799 - DNA, 25 bp, Homo sapien
tttgtagctttaaagaatagtgtgc

SEQ ID NO: 2238800 - DNA, 25 bp, Homo sapien
tagctttaaagaatagtgtgcaatc

SEQ ID NO: 2238801 - DNA, 25 bp, Homo sapien
tttaaagaatagtgtgcaatcatac

SEQ ID NO: 2238802 - DNA, 25 bp, Homo sapien
aacactaaactgaagagcaccagtg

SEQ ID NO: 2238803 - DNA, 25 bp, Homo sapien
tttggagtcggataacactaaactg

SEQ ID NO: 2238804 - DNA, 25 bp, Homo sapien
gataacactaaactgaagagcacca

SEQ ID NO: 2238805 - DNA, 25 bp, Homo sapien
gtcggataacactaaactgaagagc

SEQ ID NO: 2238806 - DNA, 25 bp, Homo sapien
aaacgatatggttgagaggagagca

SEQ ID NO: 2238807 - DNA, 25 bp, Homo sapien
gaaaagaaacgatatggttgagagg

SEQ ID NO: 2238808 - DNA, 25 bp, Homo sapien
tgaggtgggattcccataaggccta

SEQ ID NO: 2238809 - DNA, 25 bp, Homo sapien
aaggcctaaacttgtctagtctggg

SEQ ID NO: 2238810 - DNA, 25 bp, Homo sapien
caaggattgaagggctagcctcttt

SEQ ID NO: 2238811 - DNA, 25 bp, Homo sapien
tcaaggattgaagggctagcctctt

SEQ ID NO: 2238812 - DNA, 25 bp, Homo sapien
ctcaaggattgaagggctagcctct

SEQ ID NO: 2238813 - DNA, 25 bp, Homo sapien
ctaacttgaatacaccacggattta

SEQ ID NO: 2238814 - DNA, 25 bp, Homo sapien
taacttgaatacaccacggatttat

SEQ ID NO: 2238815 - DNA, 25 bp, Homo sapien
aacttgaatacaccacggatttata

SEQ ID NO: 2238816 - DNA, 25 bp, Homo sapien
tgatgggcggaccacagctttgaca

SEQ ID NO: 2238817 - DNA, 25 bp, Homo sapien
acactggtgatgggcggaccacagc

SEQ ID NO: 2238818 - DNA, 25 bp, Homo sapien
ggcggaccacagctttgacactaag

SEQ ID NO: 2238819 - DNA, 25 bp, Homo sapien
ctttgacactaagcattctcagcat

SEQ ID NO: 2238820 - DNA, 25 bp, Homo sapien
tgcccatttcagcttttggactaac

SEQ ID NO: 2238821 - DNA, 25 bp, Homo sapien
gatggaaactatatcatcacttttg

SEQ ID NO: 2238822 - DNA, 25 bp, Homo sapien
tatttcagccccaatcgtgtatgca

SEQ ID NO: 2238823 - DNA, 25 bp, Homo sapien
caattcatggttacagatggaaact

SEQ ID NO: 2238824 - DNA, 25 bp, Homo sapien
cttgtcatcgttgtgcaggggacat

SEQ ID NO: 2238825 - DNA, 25 bp, Homo sapien
gctcacaaatttgcttgtcatcgtt

SEQ ID NO: 2238826 - DNA, 25 bp, Homo sapien
gaacgctcacaaatttgcttgtcat

SEQ ID NO: 2238827 - DNA, 25 bp, Homo sapien
acgctcacaaatttgcttgtcatcg

SEQ ID NO: 2238828 - DNA, 25 bp, Homo sapien
aactgtagcagatcaccaataggta

SEQ ID NO: 2238829 - DNA, 25 bp, Homo sapien
cttccaggcctaagtcttgggcagg

SEQ ID NO: 2238830 - DNA, 25 bp, Homo sapien
tcaggaaggctaaatcatgcctaag

SEQ ID NO: 2238831 - DNA, 25 bp, Homo sapien
taaatgttccaaaggtcactggtga

SEQ ID NO: 2238832 - DNA, 25 bp, Homo sapien
gattttagccaattgtacacagcca

SEQ ID NO: 2238833 - DNA, 25 bp, Homo sapien
tcagagaccaacatgagcatgctgt

SEQ ID NO: 2238834 - DNA, 25 bp, Homo sapien
catctgttaatatgggcaatgacca

SEQ ID NO: 2238835 - DNA, 25 bp, Homo sapien
tttgcaacctagctacacatcatgg

SEQ ID NO: 2238836 - DNA, 25 bp, Homo sapien
gagaatagatggctaacaagaggtt

SEQ ID NO: 2238837 - DNA, 25 bp, Homo sapien
ctataggtgacttttgcaattcagg

SEQ ID NO: 2238838 - DNA, 25 bp, Homo sapien
tttcaaaagctgaccacaaagagta

SEQ ID NO: 2238839 - DNA, 25 bp, Homo sapien
cacttactttaatgcgaacttggag

SEQ ID NO: 2238840 - DNA, 25 bp, Homo sapien
caccactggcattacatcctgtacg

SEQ ID NO: 2238841 - DNA, 25 bp, Homo sapien
cactggcattacatcctgtacgctt

SEQ ID NO: 2238842 - DNA, 25 bp, Homo sapien
aatgatttccaccactggcattaca

SEQ ID NO: 2238843 - DNA, 25 bp, Homo sapien
ttccaccactggcattacatcctgt

SEQ ID NO: 2238844 - DNA, 25 bp, Homo sapien
cagcttgttttccaccatactgagg

SEQ ID NO: 2238845 - DNA, 25 bp, Homo sapien
gagtatgttccagttcaaccagctt

SEQ ID NO: 2238846 - DNA, 25 bp, Homo sapien
tatcccgagagaggtcgtagactgc

SEQ ID NO: 2238847 - DNA, 25 bp, Homo sapien
tggatttccggtgaggtgatgcacc

SEQ ID NO: 2238848 - DNA, 25 bp, Homo sapien
tcgctaggagtaaatagaagttcat

SEQ ID NO: 2238849 - DNA, 25 bp, Homo sapien
ctcgctaggagtaaatagaagttca

SEQ ID NO: 2238850 - DNA, 25 bp, Homo sapien
ttgggaaactttgggccaggatgcc

SEQ ID NO: 2238851 - DNA, 25 bp, Homo sapien
gaagttctgtgttgtcccgctttat

SEQ ID NO: 2238852 - DNA, 25 bp, Homo sapien
ccaggatgcctggtgtaactgggaa

SEQ ID NO: 2238853 - DNA, 25 bp, Homo sapien
tagttgggaagcagtgggcctctag

SEQ ID NO: 2238854 - DNA, 25 bp, Homo sapien
gatctccatcaagtaaaccgtaaaa

SEQ ID NO: 2238855 - DNA, 25 bp, Homo sapien
ttggatctccatcaagtaaaccgta

SEQ ID NO: 2238856 - DNA, 25 bp, Homo sapien
ggatctccatcaagtaaaccgtaaa

SEQ ID NO: 2238857 - DNA, 25 bp, Homo sapien
tggatctccatcaagtaaaccgtaa

SEQ ID NO: 2238858 - DNA, 25 bp, Homo sapien
cttttgtgtttgttggcctgcagcc

SEQ ID NO: 2238859 - DNA, 25 bp, Homo sapien
tcccctagagatagagctttctgag

SEQ ID NO: 2238860 - DNA, 25 bp, Homo sapien
gacacattgctggttagctagcgtg

SEQ ID NO: 2238861 - DNA, 25 bp, Homo sapien
gctctcaactgtggataatagcacc

SEQ ID NO: 2238862 - DNA, 25 bp, Homo sapien
tcattaccctcacagaaaggcatgt

SEQ ID NO: 2238863 - DNA, 25 bp, Homo sapien
ttcattaccctcacagaaaggcatg

SEQ ID NO: 2238864 - DNA, 25 bp, Homo sapien
tttcattaccctcacagaaaggcat

SEQ ID NO: 2238865 - DNA, 25 bp, Homo sapien
tttttcattaccctcacagaaaggc

SEQ ID NO: 2238866 - DNA, 25 bp, Homo sapien
gttttgtctactctggcccacacag

SEQ ID NO: 2238867 - DNA, 25 bp, Homo sapien
cagaggttccatatctcccatgaca

SEQ ID NO: 2238868 - DNA, 25 bp, Homo sapien
catctacccttggaacaaaccctag

SEQ ID NO: 2238869 - DNA, 25 bp, Homo sapien
catgacagtcctgggcaaggaataa

SEQ ID NO: 2238870 - DNA, 25 bp, Homo sapien
ggagtaatgacaaaccagccagctc

SEQ ID NO: 2238871 - DNA, 25 bp, Homo sapien
agtaatgacaaaccagccagctctc

SEQ ID NO: 2238872 - DNA, 25 bp, Homo sapien
taggagtaatgacaaaccagccagc

SEQ ID NO: 2238873 - DNA, 25 bp, Homo sapien
ggataggagtaatgacaaaccagcc

SEQ ID NO: 2238874 - DNA, 25 bp, Homo sapien
gcaattaaaatgccccatccagcac

SEQ ID NO: 2238875 - DNA, 25 bp, Homo sapien
aatccagatgattccaactagctcc

SEQ ID NO: 2238876 - DNA, 25 bp, Homo sapien
atccagatgattccaactagctcca

SEQ ID NO: 2238877 - DNA, 25 bp, Homo sapien
tcttgaatcgttgttttgatcactt

SEQ ID NO: 2238878 - DNA, 25 bp, Homo sapien
gtaaatcttgaatcgttgttttgat

SEQ ID NO: 2238879 - DNA, 25 bp, Homo sapien
aagtaaatcttgaatcgttgttttg

SEQ ID NO: 2238880 - DNA, 25 bp, Homo sapien
aatcttgaatcgttgttttgatcac

SEQ ID NO: 2238881 - DNA, 25 bp, Homo sapien
atatatgagccatttggcccaatat

SEQ ID NO: 2238882 - DNA, 25 bp, Homo sapien
gatatatgagccatttggcccaata

SEQ ID NO: 2238883 - DNA, 25 bp, Homo sapien
agccatttggcccaatatagaaaaa

SEQ ID NO: 2238884 - DNA, 25 bp, Homo sapien
agatatatgagccatttggcccaat

SEQ ID NO: 2238885 - DNA, 25 bp, Homo sapien
cttgtccgttggagcaccattttac

SEQ ID NO: 2238886 - DNA, 25 bp, Homo sapien
tctgatcacagaatcacttgtgtta

SEQ ID NO: 2238887 - DNA, 25 bp, Homo sapien
atagtgctgccccaagtatgagccg

SEQ ID NO: 2238888 - DNA, 25 bp, Homo sapien
gagccgagccagaagacaacaaaat

SEQ ID NO: 2238889 - DNA, 25 bp, Homo sapien
aagttgctgcagactagcttctaac

SEQ ID NO: 2238890 - DNA, 25 bp, Homo sapien
cagactagcttctaactgggttcca

SEQ ID NO: 2238891 - DNA, 25 bp, Homo sapien
cagtgccttgtaagttgctgcagac

SEQ ID NO: 2238892 - DNA, 25 bp, Homo sapien
tctaactgggttccatacctggaac

SEQ ID NO: 2238893 - DNA, 25 bp, Homo sapien
tgtacgcttttgaggtgaatttctg

SEQ ID NO: 2238894 - DNA, 25 bp, Homo sapien
atcctgtacgcttttgaggtgaatt

SEQ ID NO: 2238895 - DNA, 25 bp, Homo sapien
cctgtacgcttttgaggtgaatttc

SEQ ID NO: 2238896 - DNA, 25 bp, Homo sapien
ctgtacgcttttgaggtgaatttct

SEQ ID NO: 2238897 - DNA, 25 bp, Homo sapien
aggtttgccaatagtcgcttctgca

SEQ ID NO: 2238898 - DNA, 25 bp, Homo sapien
gcttctgcatgtttttcgagtgtga

SEQ ID NO: 2238899 - DNA, 25 bp, Homo sapien
catttggtattccaccctcttcagg

SEQ ID NO: 2238900 - DNA, 25 bp, Homo sapien
cagaaaagcgtcttagtagtgcaaa

SEQ ID NO: 2238901 - DNA, 25 bp, Homo sapien
cagaagacaatcaaggcacacagaa

SEQ ID NO: 2238902 - DNA, 25 bp, Homo sapien
ccagaagacaatcaaggcacacaga

SEQ ID NO: 2238903 - DNA, 25 bp, Homo sapien
tcgggacggaccccctcagctggta

SEQ ID NO: 2238904 - DNA, 25 bp, Homo sapien
gaagacaatcaaggcacacagaatg

SEQ ID NO: 2238905 - DNA, 25 bp, Homo sapien
agtatacgggtttggcacacacggg

SEQ ID NO: 2238906 - DNA, 25 bp, Homo sapien
aggagagtatacgggtttggcacac

SEQ ID NO: 2238907 - DNA, 25 bp, Homo sapien
gagtatacgggtttggcacacacgg

SEQ ID NO: 2238908 - DNA, 25 bp, Homo sapien
gagagtatacgggtttggcacacac

SEQ ID NO: 2238909 - DNA, 25 bp, Homo sapien
cagcttgaggcattgcttcagaggg

SEQ ID NO: 2238910 - DNA, 25 bp, Homo sapien
ccaaggtacagcttgaggcattgct

SEQ ID NO: 2238911 - DNA, 25 bp, Homo sapien
gaaaaaatagattgtgggtcaggcc

SEQ ID NO: 2238912 - DNA, 25 bp, Homo sapien
aaaatagattgtgggtcaggcccag

SEQ ID NO: 2238913 - DNA, 25 bp, Homo sapien
ctcaattcgtggaactgttatcttt

SEQ ID NO: 2238914 - DNA, 25 bp, Homo sapien
tcttttgattgtgtatactagctgg

SEQ ID NO: 2238915 - DNA, 25 bp, Homo sapien
tactagctggtacacctgcgttcat

SEQ ID NO: 2238916 - DNA, 25 bp, Homo sapien
caattcgtggaactgttatcttttg

SEQ ID NO: 2238917 - DNA, 25 bp, Homo sapien
aatctggtccaacaagtcctttagc

SEQ ID NO: 2238918 - DNA, 25 bp, Homo sapien
cctggttgatgctaattcgtttagc

SEQ ID NO: 2238919 - DNA, 25 bp, Homo sapien
tagctggtgtactttcttacgttgg

SEQ ID NO: 2238920 - DNA, 25 bp, Homo sapien
tacgttggtcttcaggaagtctctg

SEQ ID NO: 2238921 - DNA, 25 bp, Homo sapien
gctgcaagtcttttcacccaggtga

SEQ ID NO: 2238922 - DNA, 25 bp, Homo sapien
agctgcaagtcttttcacccaggtg

SEQ ID NO: 2238923 - DNA, 25 bp, Homo sapien
ggtttgtacgctgtcattctctgta

SEQ ID NO: 2238924 - DNA, 25 bp, Homo sapien
atccttctacttttgacaatcaagt

SEQ ID NO: 2238925 - DNA, 25 bp, Homo sapien
gtatgagctgcttcttccgtgacag

SEQ ID NO: 2238926 - DNA, 25 bp, Homo sapien
aaaatcctgcatgcctttcatactg

SEQ ID NO: 2238927 - DNA, 25 bp, Homo sapien
atatacattctattggcctaatttc

SEQ ID NO: 2238928 - DNA, 25 bp, Homo sapien
aatatacattctattggcctaattt

SEQ ID NO: 2238929 - DNA, 25 bp, Homo sapien
agtatatgtgctgcccaggccaaca

SEQ ID NO: 2238930 - DNA, 25 bp, Homo sapien
gtatatgtgctgcccaggccaacac

SEQ ID NO: 2238931 - DNA, 25 bp, Homo sapien
tcaataagatatgaaccgttaccat

SEQ ID NO: 2238932 - DNA, 25 bp, Homo sapien
taggtgcttcttctacgactaaaac

SEQ ID NO: 2238933 - DNA, 25 bp, Homo sapien
tacgactaaaactcaataagatatg

SEQ ID NO: 2238934 - DNA, 25 bp, Homo sapien
ttcttttggcataggtgcttcttct

SEQ ID NO: 2238935 - DNA, 25 bp, Homo sapien
cataaattttctcttacttctgctt

SEQ ID NO: 2238936 - DNA, 25 bp, Homo sapien
taaattttctcttacttctgcttct

SEQ ID NO: 2238937 - DNA, 25 bp, Homo sapien
aattttctcttacttctgcttctct

SEQ ID NO: 2238938 - DNA, 25 bp, Homo sapien
ggccataaattttctcttacttctg

SEQ ID NO: 2238939 - DNA, 25 bp, Homo sapien
taggagtaggcacacataaagcagc

SEQ ID NO: 2238940 - DNA, 25 bp, Homo sapien
tagtacgggcatgcacagagtgacc

SEQ ID NO: 2238941 - DNA, 25 bp, Homo sapien
gtaactgcagctccgatgtcctagg

SEQ ID NO: 2238942 - DNA, 25 bp, Homo sapien
tgcacagcggtcacaacttcagagt

SEQ ID NO: 2238943 - DNA, 25 bp, Homo sapien
cctccaatgaacaggggaagcatct

SEQ ID NO: 2238944 - DNA, 25 bp, Homo sapien
tccagaatattctgcagtgggcttc

SEQ ID NO: 2238945 - DNA, 25 bp, Homo sapien
cttctggtgtttggcttagatggca

SEQ ID NO: 2238946 - DNA, 25 bp, Homo sapien
ggaagcatctgacacagtccgaact

SEQ ID NO: 2238947 - DNA, 25 bp, Homo sapien
tctggaagtatccaccattctctga

SEQ ID NO: 2238948 - DNA, 25 bp, Homo sapien
tttcagcaagttgatggcagtctcc

SEQ ID NO: 2238949 - DNA, 25 bp, Homo sapien
tccagtactgcaattcactgaatca

SEQ ID NO: 2238950 - DNA, 25 bp, Homo sapien
ggttggctagccagtccctttcagc

SEQ ID NO: 2238951 - DNA, 25 bp, Homo sapien
ttatcaatacaccacgaagattcag

SEQ ID NO: 2238952 - DNA, 25 bp, Homo sapien
gataataatctggttctagcaatgg

SEQ ID NO: 2238953 - DNA, 25 bp, Homo sapien
caatggattggactgctgcaataaa

SEQ ID NO: 2238954 - DNA, 25 bp, Homo sapien
tcaccatcctctgttgataataatc

SEQ ID NO: 2238955 - DNA, 25 bp, Homo sapien
caagaagcatgtccctttctgagtt

SEQ ID NO: 2238956 - DNA, 25 bp, Homo sapien
caggtaagtcctaaccaagaagcat

SEQ ID NO: 2238957 - DNA, 25 bp, Homo sapien
cagtaccagggaatgccgtctagct

SEQ ID NO: 2238958 - DNA, 25 bp, Homo sapien
ggaaaggttcctaatctatgaagaa

SEQ ID NO: 2238959 - DNA, 25 bp, Homo sapien
tcccagatgtttgcctgatgcaggc

SEQ ID NO: 2238960 - DNA, 25 bp, Homo sapien
ggaaacaatcacagtctgccgtaca

SEQ ID NO: 2238961 - DNA, 25 bp, Homo sapien
tgccgtacatcagagaactcccaga

SEQ ID NO: 2238962 - DNA, 25 bp, Homo sapien
ccataaggagatcccaaccagtgtt

SEQ ID NO: 2238963 - DNA, 25 bp, Homo sapien
agatacaaggggttacagttatggg

SEQ ID NO: 2238964 - DNA, 25 bp, Homo sapien
tccaagatacaaggggttacagtta

SEQ ID NO: 2238965 - DNA, 25 bp, Homo sapien
caagatacaaggggttacagttatg

SEQ ID NO: 2238966 - DNA, 25 bp, Homo sapien
acttccaagatacaaggggttacag

SEQ ID NO: 2238967 - DNA, 25 bp, Homo sapien
cacaatgacctagcaaatgttctcc

SEQ ID NO: 2238968 - DNA, 25 bp, Homo sapien
taggtggtgccacagtagagactct

SEQ ID NO: 2238969 - DNA, 25 bp, Homo sapien
catgcaccaataggctcaacatcac

SEQ ID NO: 2238970 - DNA, 25 bp, Homo sapien
cagttcttgacatccatgcaccaat

SEQ ID NO: 2238971 - DNA, 25 bp, Homo sapien
catcatttccagctaatacttctgt

SEQ ID NO: 2238972 - DNA, 25 bp, Homo sapien
tcatcatttccagctaatacttctg

SEQ ID NO: 2238973 - DNA, 25 bp, Homo sapien
catttccagctaatacttctgtttg

SEQ ID NO: 2238974 - DNA, 25 bp, Homo sapien
actcttatctaggagaatcacagga

SEQ ID NO: 2238975 - DNA, 25 bp, Homo sapien
tcctttagctggaatagtgttacta

SEQ ID NO: 2238976 - DNA, 25 bp, Homo sapien
gttactaactgaactcttatctagg

SEQ ID NO: 2238977 - DNA, 25 bp, Homo sapien
tcacagagacccgaaattcctttag

SEQ ID NO: 2238978 - DNA, 25 bp, Homo sapien
ggactactggccctatggaagtctt

SEQ ID NO: 2238979 - DNA, 25 bp, Homo sapien
cccctggtgcaatgcttgaaatctc

SEQ ID NO: 2238980 - DNA, 25 bp, Homo sapien
tttgcccctggtgcaatgcttgaaa

SEQ ID NO: 2238981 - DNA, 25 bp, Homo sapien
ctatggaagtctttgcccctggtgc

SEQ ID NO: 2238982 - DNA, 25 bp, Homo sapien
tgcactaagccttcgctggtcctgt

SEQ ID NO: 2238983 - DNA, 25 bp, Homo sapien
ctgctgtgcactcaactagatcagc

SEQ ID NO: 2238984 - DNA, 25 bp, Homo sapien
catgcactaagccttcgctggtcct

SEQ ID NO: 2238985 - DNA, 25 bp, Homo sapien
tcaactagatcagcatcaccttctc

SEQ ID NO: 2238986 - DNA, 25 bp, Homo sapien
ttaaaattagatttccctgctgcct

SEQ ID NO: 2238987 - DNA, 25 bp, Homo sapien
tgcctggagcagggcctgttgtttc

SEQ ID NO: 2238988 - DNA, 25 bp, Homo sapien
ctttaaaattagatttccctgctgc

SEQ ID NO: 2238989 - DNA, 25 bp, Homo sapien
aaaattagatttccctgctgcctgg

SEQ ID NO: 2238990 - DNA, 25 bp, Homo sapien
gcccaagctggccggcagtaagcat

SEQ ID NO: 2238991 - DNA, 25 bp, Homo sapien
ctctatttcttcctttggcccaagc

SEQ ID NO: 2238992 - DNA, 25 bp, Homo sapien
ctatttcttcctttggcccaagctg

SEQ ID NO: 2238993 - DNA, 25 bp, Homo sapien
tatttcttcctttggcccaagctgg

SEQ ID NO: 2238994 - DNA, 25 bp, Homo sapien
agagagtggggaccaatattcaaca

SEQ ID NO: 2238995 - DNA, 25 bp, Homo sapien
tctctcagcagaaactctcctagcc

SEQ ID NO: 2238996 - DNA, 25 bp, Homo sapien
attcaacattcttaaagaaaagaat

SEQ ID NO: 2238997 - DNA, 25 bp, Homo sapien
ctcagcagaaactctcctagccaga

SEQ ID NO: 2238998 - DNA, 25 bp, Homo sapien
tacagaaacatcttgtggaagattc

SEQ ID NO: 2238999 - DNA, 25 bp, Homo sapien
tgtacagaaacatcttgtggaagat

SEQ ID NO: 2239000 - DNA, 25 bp, Homo sapien
ttagtgtacagaaacatcttgtgga

SEQ ID NO: 2239001 - DNA, 25 bp, Homo sapien
agtgtacagaaacatcttgtggaag

SEQ ID NO: 2239002 - DNA, 25 bp, Homo sapien
atccttttccaactgcttactgcta

SEQ ID NO: 2239003 - DNA, 25 bp, Homo sapien
actgctatttgtactctctgccctg

SEQ ID NO: 2239004 - DNA, 25 bp, Homo sapien
tccaactgcttactgctatttgtac

SEQ ID NO: 2239005 - DNA, 25 bp, Homo sapien
tgcttactgctatttgtactctctg

SEQ ID NO: 2239006 - DNA, 25 bp, Homo sapien
tttgccttgtcattgcttgaggctc

SEQ ID NO: 2239007 - DNA, 25 bp, Homo sapien
tgaggctcttctgacattgaccttt

SEQ ID NO: 2239008 - DNA, 25 bp, Homo sapien
cagtgtattactttccccagattgc

SEQ ID NO: 2239009 - DNA, 25 bp, Homo sapien
tgaccttttgaccagctgttgggtt

SEQ ID NO: 2239010 - DNA, 25 bp, Homo sapien
ttaaattacatccaaaagcaactga

SEQ ID NO: 2239011 - DNA, 25 bp, Homo sapien
ccaaaagcaactgactgtgtttcat

SEQ ID NO: 2239012 - DNA, 25 bp, Homo sapien
atatttctaacagccttattatcat

SEQ ID NO: 2239013 - DNA, 25 bp, Homo sapien
tatatttctaacagccttattatca

SEQ ID NO: 2239014 - DNA, 25 bp, Homo sapien
gggttgttcgggtacattcttcaca

SEQ ID NO: 2239015 - DNA, 25 bp, Homo sapien
ggttgttcgggtacattcttcacat

SEQ ID NO: 2239016 - DNA, 25 bp, Homo sapien
gttgttcgggtacattcttcacatg

SEQ ID NO: 2239017 - DNA, 25 bp, Homo sapien
tcactcctcccatatcttcaatctc

SEQ ID NO: 2239018 - DNA, 25 bp, Homo sapien
tcatccccacattctatcgttcact

SEQ ID NO: 2239019 - DNA, 25 bp, Homo sapien
ccatcacccttggaaccaagctcaa

SEQ ID NO: 2239020 - DNA, 25 bp, Homo sapien
ccccatcacccttggaaccaagctc

SEQ ID NO: 2239021 - DNA, 25 bp, Homo sapien
agttattgggacacaggtggtaact

SEQ ID NO: 2239022 - DNA, 25 bp, Homo sapien
ggacacaggtggtaactggttacat

SEQ ID NO: 2239023 - DNA, 25 bp, Homo sapien
gtcctcacagcatagctcccatata

SEQ ID NO: 2239024 - DNA, 25 bp, Homo sapien
cacagcatagctcccatatattagt

SEQ ID NO: 2239025 - DNA, 25 bp, Homo sapien
tatatatcacagtttctttattcac

SEQ ID NO: 2239026 - DNA, 25 bp, Homo sapien
tatatcacagtttctttattcactc

SEQ ID NO: 2239027 - DNA, 25 bp, Homo sapien
tatatatatcacagtttctttattc

SEQ ID NO: 2239028 - DNA, 25 bp, Homo sapien
tatcacagtttctttattcactcat

SEQ ID NO: 2239029 - DNA, 25 bp, Homo sapien
gtgcaataaaccctcatgacagaag

SEQ ID NO: 2239030 - DNA, 25 bp, Homo sapien
aatctgtgcaataaaccctcatgac

SEQ ID NO: 2239031 - DNA, 25 bp, Homo sapien
gcaataaaccctcatgacagaagtt

SEQ ID NO: 2239032 - DNA, 25 bp, Homo sapien
tctgtgcaataaaccctcatgacag

SEQ ID NO: 2239033 - DNA, 25 bp, Homo sapien
aaatcttttaggagcaaggtgccaa

SEQ ID NO: 2239034 - DNA, 25 bp, Homo sapien
taaatcttttaggagcaaggtgcca

SEQ ID NO: 2239035 - DNA, 25 bp, Homo sapien
tctaaatcttttaggagcaaggtgc

SEQ ID NO: 2239036 - DNA, 25 bp, Homo sapien
acactagacgtgatatttctaaatc

SEQ ID NO: 2239037 - DNA, 25 bp, Homo sapien
gggtgacataaccatgtggccatca

SEQ ID NO: 2239038 - DNA, 25 bp, Homo sapien
gcatgggtgacataaccatgtggcc

SEQ ID NO: 2239039 - DNA, 25 bp, Homo sapien
ctttatgcatgggtgacataaccat

SEQ ID NO: 2239040 - DNA, 25 bp, Homo sapien
acataaccatgtggccatcaaacag

SEQ ID NO: 2239041 - DNA, 25 bp, Homo sapien
aaacttcaggactgatcttcctttt

SEQ ID NO: 2239042 - DNA, 25 bp, Homo sapien
caaacttcaggactgatcttccttt

SEQ ID NO: 2239043 - DNA, 25 bp, Homo sapien
tccaaacttcaggactgatcttcct

SEQ ID NO: 2239044 - DNA, 25 bp, Homo sapien
tttccaaacttcaggactgatcttc

SEQ ID NO: 2239045 - DNA, 25 bp, Homo sapien
ctattaatatcagattctttcacag

SEQ ID NO: 2239046 - DNA, 25 bp, Homo sapien
tattaatatcagattctttcacagg

SEQ ID NO: 2239047 - DNA, 25 bp, Homo sapien
tctgggatccttaactgagtcctct

SEQ ID NO: 2239048 - DNA, 25 bp, Homo sapien
atctgggatccttaactgagtcctc

SEQ ID NO: 2239049 - DNA, 25 bp, Homo sapien
tgatgttctctccaaaccgtctgtc

SEQ ID NO: 2239050 - DNA, 25 bp, Homo sapien
cgtctgtcttgtcatgactttctag

SEQ ID NO: 2239051 - DNA, 25 bp, Homo sapien
ccaaaccgtctgtcttgtcatgact

SEQ ID NO: 2239052 - DNA, 25 bp, Homo sapien
gactttctagatttgactgccacat

SEQ ID NO: 2239053 - DNA, 25 bp, Homo sapien
gaaatcaaaactattaatagcgcct

SEQ ID NO: 2239054 - DNA, 25 bp, Homo sapien
tctctgagagtaagcccaatagaaa

SEQ ID NO: 2239055 - DNA, 25 bp, Homo sapien
cctgtttcaaccatggctacattaa

SEQ ID NO: 2239056 - DNA, 25 bp, Homo sapien
gagagtaagcccaatagaaatcaaa

SEQ ID NO: 2239057 - DNA, 25 bp, Homo sapien
ggtagataacacaagccgaaagcat

SEQ ID NO: 2239058 - DNA, 25 bp, Homo sapien
ggaacatcccggtagataacacaag

SEQ ID NO: 2239059 - DNA, 25 bp, Homo sapien
tcaactcgaggaacatcccggtaga

SEQ ID NO: 2239060 - DNA, 25 bp, Homo sapien
tcccggtagataacacaagccgaaa

SEQ ID NO: 2239061 - DNA, 25 bp, Homo sapien
tgccaaagtaatttcaacaccaaaa

SEQ ID NO: 2239062 - DNA, 25 bp, Homo sapien
cagtgccaaagtaatttcaacacca

SEQ ID NO: 2239063 - DNA, 25 bp, Homo sapien
tcacagtgccaaagtaatttcaaca

SEQ ID NO: 2239064 - DNA, 25 bp, Homo sapien
ttcaacaccaaaagcccactcagcc

SEQ ID NO: 2239065 - DNA, 25 bp, Homo sapien
cagcccctgaagccaattgacaaaa

SEQ ID NO: 2239066 - DNA, 25 bp, Homo sapien
aatacagtgccaaataattgtagcc

SEQ ID NO: 2239067 - DNA, 25 bp, Homo sapien
ttggtagttgaggtaactgctgcca

SEQ ID NO: 2239068 - DNA, 25 bp, Homo sapien
gctgccagaatcacaactgggggta

SEQ ID NO: 2239069 - DNA, 25 bp, Homo sapien
tttcctgccagaatttgctgataac

SEQ ID NO: 2239070 - DNA, 25 bp, Homo sapien
ttgctgataactcccagggacaagc

SEQ ID NO: 2239071 - DNA, 25 bp, Homo sapien
tttgctgataactcccagggacaag

SEQ ID NO: 2239072 - DNA, 25 bp, Homo sapien
atttgctgataactcccagggacaa

SEQ ID NO: 2239073 - DNA, 25 bp, Homo sapien
gatgccattgaaattcagctacagt

SEQ ID NO: 2239074 - DNA, 25 bp, Homo sapien
acatggcacgccagctgcagtctgt

SEQ ID NO: 2239075 - DNA, 25 bp, Homo sapien
cctagtaactgaaattgatgccatt

SEQ ID NO: 2239076 - DNA, 25 bp, Homo sapien
tgcagtctgtgcagacctattacag

SEQ ID NO: 2239077 - DNA, 25 bp, Homo sapien
ggtcctgtcgttcaagcttctttcc

SEQ ID NO: 2239078 - DNA, 25 bp, Homo sapien
catccggtcctgtcgttcaagcttc

SEQ ID NO: 2239079 - DNA, 25 bp, Homo sapien
ctcatccggtcctgtcgttcaagct

SEQ ID NO: 2239080 - DNA, 25 bp, Homo sapien
tccggtcctgtcgttcaagcttctt

SEQ ID NO: 2239081 - DNA, 25 bp, Homo sapien
gattagcaggcaagttataacatgc

SEQ ID NO: 2239082 - DNA, 25 bp, Homo sapien
tttttgcaagaatgtccctgagggc

SEQ ID NO: 2239083 - DNA, 25 bp, Homo sapien
catgccagactaggagaagtccgca

SEQ ID NO: 2239084 - DNA, 25 bp, Homo sapien
ctggattgtgtgaaaagcatccctt

SEQ ID NO: 2239085 - DNA, 25 bp, Homo sapien
ggcatcaaaccaacagcccactgaa

SEQ ID NO: 2239086 - DNA, 25 bp, Homo sapien
gggcataagattggaagaagagacc

SEQ ID NO: 2239087 - DNA, 25 bp, Homo sapien
gagaccatagttgggcatcaaacca

SEQ ID NO: 2239088 - DNA, 25 bp, Homo sapien
cattcccttctacctgcacagtcag

SEQ ID NO: 2239089 - DNA, 25 bp, Homo sapien
gtgatcctgattaaccacaggtgtc

SEQ ID NO: 2239090 - DNA, 25 bp, Homo sapien
aaagtgatcctgattaaccacaggt

SEQ ID NO: 2239091 - DNA, 25 bp, Homo sapien
gatcctgattaaccacaggtgtctt

SEQ ID NO: 2239092 - DNA, 25 bp, Homo sapien
aagtgatcctgattaaccacaggtg

SEQ ID NO: 2239093 - DNA, 25 bp, Homo sapien
tctgggtcctttgcaggcagaagaa

SEQ ID NO: 2239094 - DNA, 25 bp, Homo sapien
ctgaaattgactggaaggcaaggca

SEQ ID NO: 2239095 - DNA, 25 bp, Homo sapien
ggcaacatttgcaagctagctctct

SEQ ID NO: 2239096 - DNA, 25 bp, Homo sapien
gcagatatcctatgatcaaaactga

SEQ ID NO: 2239097 - DNA, 25 bp, Homo sapien
tatgtaccttcgcactcctcacacc

SEQ ID NO: 2239098 - DNA, 25 bp, Homo sapien
ttttatgtaccttcgcactcctcac

SEQ ID NO: 2239099 - DNA, 25 bp, Homo sapien
tttatgtaccttcgcactcctcaca

SEQ ID NO: 2239100 - DNA, 25 bp, Homo sapien
tgtaccttcgcactcctcacacccc

SEQ ID NO: 2239101 - DNA, 25 bp, Homo sapien
caaagctgttgctatggatacccaa

SEQ ID NO: 2239102 - DNA, 25 bp, Homo sapien
tattttctcgctgcaagccaggaag

SEQ ID NO: 2239103 - DNA, 25 bp, Homo sapien
caggctgacgtaagaaagcctctgg

SEQ ID NO: 2239104 - DNA, 25 bp, Homo sapien
gaactcttattttctcgctgcaagc

SEQ ID NO: 2239105 - DNA, 25 bp, Homo sapien
ccagcagaccatacagcaactttgg

SEQ ID NO: 2239106 - DNA, 25 bp, Homo sapien
tgtaacatcattacagctattttgt

SEQ ID NO: 2239107 - DNA, 25 bp, Homo sapien
tcttgaagttccagagtcctccatc

SEQ ID NO: 2239108 - DNA, 25 bp, Homo sapien
tcattacagctattttgtttgttaa

SEQ ID NO: 2239109 - DNA, 25 bp, Homo sapien
gtgttagcaacggtcagaccacagg

SEQ ID NO: 2239110 - DNA, 25 bp, Homo sapien
agtgtaagatccttgccccagtttg

SEQ ID NO: 2239111 - DNA, 25 bp, Homo sapien
gccccagtttgtcagtgttagcaac

SEQ ID NO: 2239112 - DNA, 25 bp, Homo sapien
tggaagtagtgtaagatccttgccc

SEQ ID NO: 2239113 - DNA, 25 bp, Homo sapien
gctgcaattgttcctttaccccaca

SEQ ID NO: 2239114 - DNA, 25 bp, Homo sapien
acagcaacataagggcatgccccag

SEQ ID NO: 2239115 - DNA, 25 bp, Homo sapien
tggctgtgtagctgccccaacccag

SEQ ID NO: 2239116 - DNA, 25 bp, Homo sapien
tgccccaggctggtagaacccagct

SEQ ID NO: 2239117 - DNA, 25 bp, Homo sapien
tttggttcctgatgctgcccagaat

SEQ ID NO: 2239118 - DNA, 25 bp, Homo sapien
cctgccctttggttcctgatgctgc

SEQ ID NO: 2239119 - DNA, 25 bp, Homo sapien
gccctttggttcctgatgctgccca

SEQ ID NO: 2239120 - DNA, 25 bp, Homo sapien
tgctgcccagaatttcttgtggcct

SEQ ID NO: 2239121 - DNA, 25 bp, Homo sapien
ctgggtatgaatccatactgattag

SEQ ID NO: 2239122 - DNA, 25 bp, Homo sapien
tacgaaggtactacgaccagtatct

SEQ ID NO: 2239123 - DNA, 25 bp, Homo sapien
gatggtccagctctaggctgcctat

SEQ ID NO: 2239124 - DNA, 25 bp, Homo sapien
ttacttccaggtatccctgctaagc

SEQ ID NO: 2239125 - DNA, 25 bp, Homo sapien
aattgtcctcttgggccacaaagcc

SEQ ID NO: 2239126 - DNA, 25 bp, Homo sapien
ttcttactcttgtactagcaaatat

SEQ ID NO: 2239127 - DNA, 25 bp, Homo sapien
actcttgtactagcaaatattctaa

SEQ ID NO: 2239128 - DNA, 25 bp, Homo sapien
cttactcttgtactagcaaatattc

SEQ ID NO: 2239129 - DNA, 25 bp, Homo sapien
gtgtccaagtatcttgacctccact

SEQ ID NO: 2239130 - DNA, 25 bp, Homo sapien
tcctgtgtccaagtatcttgacctc

SEQ ID NO: 2239131 - DNA, 25 bp, Homo sapien
gctcctgtgtccaagtatcttgacc

SEQ ID NO: 2239132 - DNA, 25 bp, Homo sapien
ttatgacttcttgccgccttcgggc

SEQ ID NO: 2239133 - DNA, 25 bp, Homo sapien
gacctagctattgttgtagacatca

SEQ ID NO: 2239134 - DNA, 25 bp, Homo sapien
agcactcaggccctttggcagagcc

SEQ ID NO: 2239135 - DNA, 25 bp, Homo sapien
tgtagggattgagtcaccagcgttc

SEQ ID NO: 2239136 - DNA, 25 bp, Homo sapien
ccagcgttcatatcagcactcaggc

SEQ ID NO: 2239137 - DNA, 25 bp, Homo sapien
gaaactttgtgttctcaatgcaccc

SEQ ID NO: 2239138 - DNA, 25 bp, Homo sapien
cacattgcaaagatagaactacagc

SEQ ID NO: 2239139 - DNA, 25 bp, Homo sapien
tttataagtagagggttcatgctgc

SEQ ID NO: 2239140 - DNA, 25 bp, Homo sapien
tacttgaagcctagtgagcacagtt

SEQ ID NO: 2239141 - DNA, 25 bp, Homo sapien
tgtgcaagcacgaatgccaccaagg

SEQ ID NO: 2239142 - DNA, 25 bp, Homo sapien
ccaccaagggattctggcagatcaa

SEQ ID NO: 2239143 - DNA, 25 bp, Homo sapien
gtcagtatcagggtcaaagcacatg

SEQ ID NO: 2239144 - DNA, 25 bp, Homo sapien
tattttcgaagacagcgaccccaac

SEQ ID NO: 2239145 - DNA, 25 bp, Homo sapien
gaaatatacatcactcctccataca

SEQ ID NO: 2239146 - DNA, 25 bp, Homo sapien
tccatacacagttccagcatggcca

SEQ ID NO: 2239147 - DNA, 25 bp, Homo sapien
catacacagttccagcatggccata

SEQ ID NO: 2239148 - DNA, 25 bp, Homo sapien
ctcctccatacacagttccagcatg

SEQ ID NO: 2239149 - DNA, 25 bp, Homo sapien
tggcaacataggtccattcatttgt

SEQ ID NO: 2239150 - DNA, 25 bp, Homo sapien
cattcatttgttcttggattgtaac

SEQ ID NO: 2239151 - DNA, 25 bp, Homo sapien
caacataggtccattcatttgttct

SEQ ID NO: 2239152 - DNA, 25 bp, Homo sapien
tttggcaacataggtccattcattt

SEQ ID NO: 2239153 - DNA, 25 bp, Homo sapien
ctactgctttgttggctttgttcat

SEQ ID NO: 2239154 - DNA, 25 bp, Homo sapien
gaaatttgtctctatgcttaatata

SEQ ID NO: 2239155 - DNA, 25 bp, Homo sapien
aaatttgtctctatgcttaatataa

SEQ ID NO: 2239156 - DNA, 25 bp, Homo sapien
agaaatttgtctctatgcttaatat

SEQ ID NO: 2239157 - DNA, 25 bp, Homo sapien
ttgcagcaaagtccatccgaggctc

SEQ ID NO: 2239158 - DNA, 25 bp, Homo sapien
gaaaatttccaatgacggcgatgcc

SEQ ID NO: 2239159 - DNA, 25 bp, Homo sapien
tactggaaagcacgaaggcaagacg

SEQ ID NO: 2239160 - DNA, 25 bp, Homo sapien
gcgaagccaacgacaggtagcctta

SEQ ID NO: 2239161 - DNA, 25 bp, Homo sapien
gctagccgagtgaagcagtcaaagt

SEQ ID NO: 2239162 - DNA, 25 bp, Homo sapien
tagccgagtgaagcagtcaaagtga

SEQ ID NO: 2239163 - DNA, 25 bp, Homo sapien
ctagccgagtgaagcagtcaaagtg

SEQ ID NO: 2239164 - DNA, 25 bp, Homo sapien
tggctagccgagtgaagcagtcaaa

SEQ ID NO: 2239165 - DNA, 25 bp, Homo sapien
tccagcgtgtcttgaaggttgtcca

SEQ ID NO: 2239166 - DNA, 25 bp, Homo sapien
cagaatctgtaggaaactggcagct

SEQ ID NO: 2239167 - DNA, 25 bp, Homo sapien
tttacagaagtccaaaactggcaga

SEQ ID NO: 2239168 - DNA, 25 bp, Homo sapien
tagaccgactttgctcacaccatga

SEQ ID NO: 2239169 - DNA, 25 bp, Homo sapien
ccttcaagtcgaagctggtcaaagc

SEQ ID NO: 2239170 - DNA, 25 bp, Homo sapien
tagccttgaagtaatcactagcaga

SEQ ID NO: 2239171 - DNA, 25 bp, Homo sapien
acaaagcaatccttcaagtcgaagc

SEQ ID NO: 2239172 - DNA, 25 bp, Homo sapien
tgtgaacatagccttgaagtaatca

SEQ ID NO: 2239173 - DNA, 25 bp, Homo sapien
gctcgaaaaacagtcaccctcaagg

SEQ ID NO: 2239174 - DNA, 25 bp, Homo sapien
tgtctgcagaaagaaccgccaaaaa

SEQ ID NO: 2239175 - DNA, 25 bp, Homo sapien
tcaaggattccagcgagtaatgata

SEQ ID NO: 2239176 - DNA, 25 bp, Homo sapien
catgagtggaaaccttacaaggctg

SEQ ID NO: 2239177 - DNA, 25 bp, Homo sapien
tagagccctagcaactggaaagaat

SEQ ID NO: 2239178 - DNA, 25 bp, Homo sapien
gctttcaggccaaagggccaaaata

SEQ ID NO: 2239179 - DNA, 25 bp, Homo sapien
gaagaagagacctcacaaagttcca

SEQ ID NO: 2239180 - DNA, 25 bp, Homo sapien
catgataactgtgtggcagagcagg

SEQ ID NO: 2239181 - DNA, 25 bp, Homo sapien
tttcagaaagaatggtatcagctct

SEQ ID NO: 2239182 - DNA, 25 bp, Homo sapien
agaaagaatggtatcagctcttctt

SEQ ID NO: 2239183 - DNA, 25 bp, Homo sapien
tcagaaagaatggtatcagctcttc

SEQ ID NO: 2239184 - DNA, 25 bp, Homo sapien
cagaaagaatggtatcagctcttct

SEQ ID NO: 2239185 - DNA, 25 bp, Homo sapien
gctcggaggagtttgctgttaccta

SEQ ID NO: 2239186 - DNA, 25 bp, Homo sapien
cggaggagtttgctgttacctacct

SEQ ID NO: 2239187 - DNA, 25 bp, Homo sapien
tagcaattcctataatttttttcaa

SEQ ID NO: 2239188 - DNA, 25 bp, Homo sapien
agcaattcctataatttttttcaag

SEQ ID NO: 2239189 - DNA, 25 bp, Homo sapien
tgctggtaaagatgcgtgtaggtcc

SEQ ID NO: 2239190 - DNA, 25 bp, Homo sapien
aactgtgggtattgctggtaaagat

SEQ ID NO: 2239191 - DNA, 25 bp, Homo sapien
tgccttggaagactgcaaatgggat

SEQ ID NO: 2239192 - DNA, 25 bp, Homo sapien
atgcgtgtaggtcctgccttggaag

SEQ ID NO: 2239193 - DNA, 25 bp, Homo sapien
ttcgctgcctccaagggacaatttc

SEQ ID NO: 2239194 - DNA, 25 bp, Homo sapien
tcgctgcctccaagggacaatttca

SEQ ID NO: 2239195 - DNA, 25 bp, Homo sapien
tgttggtcttcctcttccacgagag

SEQ ID NO: 2239196 - DNA, 25 bp, Homo sapien
gtgttggtcttcctcttccacgaga

SEQ ID NO: 2239197 - DNA, 25 bp, Homo sapien
ttggtcttcctcttccacgagagat

SEQ ID NO: 2239198 - DNA, 25 bp, Homo sapien
gttggtcttcctcttccacgagaga

SEQ ID NO: 2239199 - DNA, 25 bp, Homo sapien
cagtaggtcacttagatgcaaagag

SEQ ID NO: 2239200 - DNA, 25 bp, Homo sapien
agtatctctcacttaccagtttggg

SEQ ID NO: 2239201 - DNA, 25 bp, Homo sapien
tttatacacagactaaagaagggtc

SEQ ID NO: 2239202 - DNA, 25 bp, Homo sapien
ggtctagtctgattcccactccaaa

SEQ ID NO: 2239203 - DNA, 25 bp, Homo sapien
gatggtgactgttatccctaaccag

SEQ ID NO: 2239204 - DNA, 25 bp, Homo sapien
tctgctttggtaacagtacatgcca

SEQ ID NO: 2239205 - DNA, 25 bp, Homo sapien
gatatagccttccaccagagtttca

SEQ ID NO: 2239206 - DNA, 25 bp, Homo sapien
cacagagcctagcacgaaagactta

SEQ ID NO: 2239207 - DNA, 25 bp, Homo sapien
aagtcattctcaatgtggggagggg

SEQ ID NO: 2239208 - DNA, 25 bp, Homo sapien
agaaagtggagttgacctggatgtt

SEQ ID NO: 2239209 - DNA, 25 bp, Homo sapien
aatttccagatagcaggagagctcg

SEQ ID NO: 2239210 - DNA, 25 bp, Homo sapien
taagcacaggaactgggaatttcca

SEQ ID NO: 2239211 - DNA, 25 bp, Homo sapien
tggatgttttaagcacaggaactgg

SEQ ID NO: 2239212 - DNA, 25 bp, Homo sapien
tctaccttaacagggatactgcagc

SEQ ID NO: 2239213 - DNA, 25 bp, Homo sapien
tataaacctcagcatagccttaggc

SEQ ID NO: 2239214 - DNA, 25 bp, Homo sapien
ggctaccgctaatagagatcagtga

SEQ ID NO: 2239215 - DNA, 25 bp, Homo sapien
gaatgccattatgggaaaagcccgt

SEQ ID NO: 2239216 - DNA, 25 bp, Homo sapien
tgaatatatccttgaaatcggcttg

SEQ ID NO: 2239217 - DNA, 25 bp, Homo sapien
tgaaatcggcttgttttaatgacaa

SEQ ID NO: 2239218 - DNA, 25 bp, Homo sapien
gttttaatgacaattgcctccgtct

SEQ ID NO: 2239219 - DNA, 25 bp, Homo sapien
tgattttttgaatatatccttgaaa

SEQ ID NO: 2239220 - DNA, 25 bp, Homo sapien
tgcattcagaatgttgcgcaaccac

SEQ ID NO: 2239221 - DNA, 25 bp, Homo sapien
tgcatctgcattctgtcactatgga

SEQ ID NO: 2239222 - DNA, 25 bp, Homo sapien
tgctgcacctatcaagtaaacaatt

SEQ ID NO: 2239223 - DNA, 25 bp, Homo sapien
ccccttctatcttgttgtgaaacat

SEQ ID NO: 2239224 - DNA, 25 bp, Homo sapien
ttgcagcaaccaattcccctctatg

SEQ ID NO: 2239225 - DNA, 25 bp, Homo sapien
aagtattgcagcaaccaattcccct

SEQ ID NO: 2239226 - DNA, 25 bp, Homo sapien
gtattgcagcaaccaattcccctct

SEQ ID NO: 2239227 - DNA, 25 bp, Homo sapien
tattgcagcaaccaattcccctcta

SEQ ID NO: 2239228 - DNA, 25 bp, Homo sapien
acatgggcaactgttatattgtact

SEQ ID NO: 2239229 - DNA, 25 bp, Homo sapien
gctacatgggcaactgttatattgt

SEQ ID NO: 2239230 - DNA, 25 bp, Homo sapien
tacatgggcaactgttatattgtac

SEQ ID NO: 2239231 - DNA, 25 bp, Homo sapien
catgggcaactgttatattgtactt

SEQ ID NO: 2239232 - DNA, 25 bp, Homo sapien
ctggccaagtgccagagtggctgac

SEQ ID NO: 2239233 - DNA, 25 bp, Homo sapien
gccaagtgccagagtggctgacaca

SEQ ID NO: 2239234 - DNA, 25 bp, Homo sapien
ccaagtgccagagtggctgacacac

SEQ ID NO: 2239235 - DNA, 25 bp, Homo sapien
tggccaagtgccagagtggctgaca

SEQ ID NO: 2239236 - DNA, 25 bp, Homo sapien
tcccttctatagtcactgaagcaat

SEQ ID NO: 2239237 - DNA, 25 bp, Homo sapien
tctatagtcactgaagcaatctgcc

SEQ ID NO: 2239238 - DNA, 25 bp, Homo sapien
ttcagcttcccttctatagtcactg

SEQ ID NO: 2239239 - DNA, 25 bp, Homo sapien
agcttcccttctatagtcactgaag

SEQ ID NO: 2239240 - DNA, 25 bp, Homo sapien
cttcaactgctggatcgacaagacg

SEQ ID NO: 2239241 - DNA, 25 bp, Homo sapien
gacaagacgttcactatgtggatga

SEQ ID NO: 2239242 - DNA, 25 bp, Homo sapien
actgctggatcgacaagacgttcac

SEQ ID NO: 2239243 - DNA, 25 bp, Homo sapien
tagcctataacaccttcaactgctg

SEQ ID NO: 2239244 - DNA, 25 bp, Homo sapien
ataccttccgaaggacctgcctgaa

SEQ ID NO: 2239245 - DNA, 25 bp, Homo sapien
acctccacatcgcatcccactggaa

SEQ ID NO: 2239246 - DNA, 25 bp, Homo sapien
ccacatcgcatcccactggaaggtc

SEQ ID NO: 2239247 - DNA, 25 bp, Homo sapien
ccttccgaaggacctgcctgaagct

SEQ ID NO: 2239248 - DNA, 25 bp, Homo sapien
cagtattgctatacctttataccac

SEQ ID NO: 2239249 - DNA, 25 bp, Homo sapien
taatcactggccgaaaggttatgtg

SEQ ID NO: 2239250 - DNA, 25 bp, Homo sapien
tgtgacacatgactataatatcgca

SEQ ID NO: 2239251 - DNA, 25 bp, Homo sapien
catatgggaccacaatttcgtaggc

SEQ ID NO: 2239252 - DNA, 25 bp, Homo sapien
tctcttccttgccagtaactgtcat

SEQ ID NO: 2239253 - DNA, 25 bp, Homo sapien
cagtcatgactacccatttctcttc

SEQ ID NO: 2239254 - DNA, 25 bp, Homo sapien
ttccaccagtcatgactacccattt

SEQ ID NO: 2239255 - DNA, 25 bp, Homo sapien
caccagtcatgactacccatttctc

SEQ ID NO: 2239256 - DNA, 25 bp, Homo sapien
gtgacaggtacccaggacctctctg

SEQ ID NO: 2239257 - DNA, 25 bp, Homo sapien
aatttgcctgctaaaagtgcctcca

SEQ ID NO: 2239258 - DNA, 25 bp, Homo sapien
gcatcagttaaaggcaaagtcattc

SEQ ID NO: 2239259 - DNA, 25 bp, Homo sapien
agagggtatcttggaacatcaggaa

SEQ ID NO: 2239260 - DNA, 25 bp, Homo sapien
attgtaaagaccatcaaggctagga

SEQ ID NO: 2239261 - DNA, 25 bp, Homo sapien
aggatcaaattcacacataacaata

SEQ ID NO: 2239262 - DNA, 25 bp, Homo sapien
agaaactgcatctactaacgagcaa

SEQ ID NO: 2239263 - DNA, 25 bp, Homo sapien
aataaccagctaacatcataatgac

SEQ ID NO: 2239264 - DNA, 25 bp, Homo sapien
cataaatgttcacgtggatactgta

SEQ ID NO: 2239265 - DNA, 25 bp, Homo sapien
aattgcttgttcataaatgttcacg

SEQ ID NO: 2239266 - DNA, 25 bp, Homo sapien
gctttacgtataattgcttgttcat

SEQ ID NO: 2239267 - DNA, 25 bp, Homo sapien
ataaatgttcacgtggatactgtac

SEQ ID NO: 2239268 - DNA, 25 bp, Homo sapien
aaacctccaactccctgtctcaagc

SEQ ID NO: 2239269 - DNA, 25 bp, Homo sapien
ctccaactccctgtctcaagcgatt

SEQ ID NO: 2239270 - DNA, 25 bp, Homo sapien
tgtcaccacgcccagctcatttttg

SEQ ID NO: 2239271 - DNA, 25 bp, Homo sapien
atgtcaccacgcccagctcattttt

SEQ ID NO: 2239272 - DNA, 25 bp, Homo sapien
taaatagtcttactatgcaatcaca

SEQ ID NO: 2239273 - DNA, 25 bp, Homo sapien
agtcttactatgcaatcacattagc

SEQ ID NO: 2239274 - DNA, 25 bp, Homo sapien
tataaatagtcttactatgcaatca

SEQ ID NO: 2239275 - DNA, 25 bp, Homo sapien
ttactatgcaatcacattagcagca

SEQ ID NO: 2239276 - DNA, 25 bp, Homo sapien
gaacctcagtatgggagctaacacc

SEQ ID NO: 2239277 - DNA, 25 bp, Homo sapien
ggcaacacttggtcatacatcaggc

SEQ ID NO: 2239278 - DNA, 25 bp, Homo sapien
tttaggaccatgtacgaagattgcg

SEQ ID NO: 2239279 - DNA, 25 bp, Homo sapien
cataagacgtgctaccaggacagtg

SEQ ID NO: 2239280 - DNA, 25 bp, Homo sapien
agcaacagcgaggcccagaggagaa

SEQ ID NO: 2239281 - DNA, 25 bp, Homo sapien
agcgggaccccagaccgtcagggca

SEQ ID NO: 2239282 - DNA, 25 bp, Homo sapien
agcagaaactgttagagggcaagag

SEQ ID NO: 2239283 - DNA, 25 bp, Homo sapien
aaagcagaaactgttagagggcaag

SEQ ID NO: 2239284 - DNA, 25 bp, Homo sapien
tctgcccctggtacagatcgcaact

SEQ ID NO: 2239285 - DNA, 25 bp, Homo sapien
cgcgcaccagcacgcgggagaaaaa

SEQ ID NO: 2239286 - DNA, 25 bp, Homo sapien
tagaagaacccaggcgtccgacgga

SEQ ID NO: 2239287 - DNA, 25 bp, Homo sapien
gctggagcccctgtgacttcaggac

SEQ ID NO: 2239288 - DNA, 25 bp, Homo sapien
ctccgagggccaaagagggagtcgc

SEQ ID NO: 2239289 - DNA, 25 bp, Homo sapien
cctaacccgaatgccgctgcagtta

SEQ ID NO: 2239290 - DNA, 25 bp, Homo sapien
cgcaggcggagagcacggaccctaa

SEQ ID NO: 2239291 - DNA, 25 bp, Homo sapien
ttcaccctgtcctggcgcaggcgga

SEQ ID NO: 2239292 - DNA, 25 bp, Homo sapien
tgcggccgcagcggcagagcctccg

SEQ ID NO: 2239293 - DNA, 25 bp, Homo sapien
gcggccgcagcggcagagcctccgc

SEQ ID NO: 2239294 - DNA, 25 bp, Homo sapien
ctgcggccgcagcggcagagcctcc

SEQ ID NO: 2239295 - DNA, 25 bp, Homo sapien
ctgacctcaccagggtgtggggggg

SEQ ID NO: 2239296 - DNA, 25 bp, Homo sapien
gaagctgaatgaccgctaagtggcc

SEQ ID NO: 2239297 - DNA, 25 bp, Homo sapien
cctgaagctgaatgaccgctaagtg

SEQ ID NO: 2239298 - DNA, 25 bp, Homo sapien
taagtggccctcacgcctcggaaac

SEQ ID NO: 2239299 - DNA, 25 bp, Homo sapien
gctgaatgaccgctaagtggccctc

SEQ ID NO: 2239300 - DNA, 25 bp, Homo sapien
tggagggtatcatcaaatttgcttg

SEQ ID NO: 2239301 - DNA, 25 bp, Homo sapien
tctgtgtcgtgctctaaaggtccac

SEQ ID NO: 2239302 - DNA, 25 bp, Homo sapien
actcaggagaatggagggtatcatc

SEQ ID NO: 2239303 - DNA, 25 bp, Homo sapien
aaggtccacccatctaacaaggctg

SEQ ID NO: 2239304 - DNA, 25 bp, Homo sapien
tgtcagtcctgacagtcctttccgt

SEQ ID NO: 2239305 - DNA, 25 bp, Homo sapien
ctttccgtatccaggccaggtgaag

SEQ ID NO: 2239306 - DNA, 25 bp, Homo sapien
tctctgtcactctgccgcaagggac

SEQ ID NO: 2239307 - DNA, 25 bp, Homo sapien
tacagaatcaagagagctatcaatc

SEQ ID NO: 2239308 - DNA, 25 bp, Homo sapien
tcctcctttcagggtgataatgtta

SEQ ID NO: 2239309 - DNA, 25 bp, Homo sapien
ctcctttcagggtgataatgttaaa

SEQ ID NO: 2239310 - DNA, 25 bp, Homo sapien
cctcctttcagggtgataatgttaa

SEQ ID NO: 2239311 - DNA, 25 bp, Homo sapien
cataattccaaggaaaactttgcat

SEQ ID NO: 2239312 - DNA, 25 bp, Homo sapien
ttggtatcacttcccgcaggaagcc

SEQ ID NO: 2239313 - DNA, 25 bp, Homo sapien
tatcacttcccgcaggaagcctttc

SEQ ID NO: 2239314 - DNA, 25 bp, Homo sapien
tttggtatcacttcccgcaggaagc

SEQ ID NO: 2239315 - DNA, 25 bp, Homo sapien
ggtatcacttcccgcaggaagcctt

SEQ ID NO: 2239316 - DNA, 25 bp, Homo sapien
catggggttccacgctgctctggat

SEQ ID NO: 2239317 - DNA, 25 bp, Homo sapien
tatagagttccttgaatatgtgtct

SEQ ID NO: 2239318 - DNA, 25 bp, Homo sapien
tgctctggatggcaggtgcattttg

SEQ ID NO: 2239319 - DNA, 25 bp, Homo sapien
cttttgtggcacatcgaatagtttg

SEQ ID NO: 2239320 - DNA, 25 bp, Homo sapien
agtgcagtcatgacttctgtaatcc

SEQ ID NO: 2239321 - DNA, 25 bp, Homo sapien
tcagtggacctgctgttaatagcct

SEQ ID NO: 2239322 - DNA, 25 bp, Homo sapien
aaaattctactccacccctgcattc

SEQ ID NO: 2239323 - DNA, 25 bp, Homo sapien
tctcctgattctcagtggacctgct

SEQ ID NO: 2239324 - DNA, 25 bp, Homo sapien
gtggacctgctgttaatagcctctc

SEQ ID NO: 2239325 - DNA, 25 bp, Homo sapien
cattccaaagaagagttcagtcact

SEQ ID NO: 2239326 - DNA, 25 bp, Homo sapien
acagggctccaggtggctaatgtca

SEQ ID NO: 2239327 - DNA, 25 bp, Homo sapien
ggatattctatcagatgggcaactg

SEQ ID NO: 2239328 - DNA, 25 bp, Homo sapien
tgcatttccaccacgatagcaggat

SEQ ID NO: 2239329 - DNA, 25 bp, Homo sapien
cactatacggtgactacggttaata

SEQ ID NO: 2239330 - DNA, 25 bp, Homo sapien
gatacagttacagctacatgggaag

SEQ ID NO: 2239331 - DNA, 25 bp, Homo sapien
tatcaaagggatatgtgctcccctg

SEQ ID NO: 2239332 - DNA, 25 bp, Homo sapien
tgaggtgccggatatactaattact

SEQ ID NO: 2239333 - DNA, 25 bp, Homo sapien
cagaatgggcctctctaaaagacag

SEQ ID NO: 2239334 - DNA, 25 bp, Homo sapien
catgcatgttgtaaagtggagggct

SEQ ID NO: 2239335 - DNA, 25 bp, Homo sapien
ccaccttttgcaggaactgtcatca

SEQ ID NO: 2239336 - DNA, 25 bp, Homo sapien
gcaagctgttagtagagaagaccaa

SEQ ID NO: 2239337 - DNA, 25 bp, Homo sapien
gatacagattttcgacacacatgtt

SEQ ID NO: 2239338 - DNA, 25 bp, Homo sapien
tacagattttcgacacacatgttct

SEQ ID NO: 2239339 - DNA, 25 bp, Homo sapien
ttagatacagattttcgacacacat

SEQ ID NO: 2239340 - DNA, 25 bp, Homo sapien
tagatacagattttcgacacacatg

SEQ ID NO: 2239341 - DNA, 25 bp, Homo sapien
ttggctgccatgtggtgcctgccat

SEQ ID NO: 2239342 - DNA, 25 bp, Homo sapien
tcctgttcttgtcatcaccaagagc

SEQ ID NO: 2239343 - DNA, 25 bp, Homo sapien
agttagtacgtcaacaatgctcatg

SEQ ID NO: 2239344 - DNA, 25 bp, Homo sapien
tgaaggcttcatgggctgatgtctg

SEQ ID NO: 2239345 - DNA, 25 bp, Homo sapien
aagtagctatggcacactctctgat

SEQ ID NO: 2239346 - DNA, 25 bp, Homo sapien
gcacactctctgatccaggacttca

SEQ ID NO: 2239347 - DNA, 25 bp, Homo sapien
cactttctgcagttatccagcccag

SEQ ID NO: 2239348 - DNA, 25 bp, Homo sapien
tacccaaacagtgtttgatccactt

SEQ ID NO: 2239349 - DNA, 25 bp, Homo sapien
cattccgggcttggatagtaagaca

SEQ ID NO: 2239350 - DNA, 25 bp, Homo sapien
tctatttttatcaccggacgctggg

SEQ ID NO: 2239351 - DNA, 25 bp, Homo sapien
taaccggaggcctaatactggctca

SEQ ID NO: 2239352 - DNA, 25 bp, Homo sapien
tgtccacaccaacgtttcccgagag

SEQ ID NO: 2239353 - DNA, 25 bp, Homo sapien
gtttcattatcctacacgtggctag

SEQ ID NO: 2239354 - DNA, 25 bp, Homo sapien
cattatcctacacgtggctagccag

SEQ ID NO: 2239355 - DNA, 25 bp, Homo sapien
agtttcattatcctacacgtggcta

SEQ ID NO: 2239356 - DNA, 25 bp, Homo sapien
ttcattatcctacacgtggctagcc

SEQ ID NO: 2239357 - DNA, 25 bp, Homo sapien
gctccagtcttaggtgcataaatgt

SEQ ID NO: 2239358 - DNA, 25 bp, Homo sapien
ccagtcttaggtgcataaatgttta

SEQ ID NO: 2239359 - DNA, 25 bp, Homo sapien
agtcttaggtgcataaatgtttagg

SEQ ID NO: 2239360 - DNA, 25 bp, Homo sapien
agctccagtcttaggtgcataaatg

SEQ ID NO: 2239361 - DNA, 25 bp, Homo sapien
aggcgcggtggctcatgcctgtaat

SEQ ID NO: 2239362 - DNA, 25 bp, Homo sapien
tgtctcgaataaatttttttgagcc

SEQ ID NO: 2239363 - DNA, 25 bp, Homo sapien
gcaagaccctgtctcgaataaattt

SEQ ID NO: 2239364 - DNA, 25 bp, Homo sapien
cctgtctcgaataaatttttttgag

SEQ ID NO: 2239365 - DNA, 25 bp, Homo sapien
aaataattttgcggctaggcacagt

SEQ ID NO: 2239366 - DNA, 25 bp, Homo sapien
ataattttgcggctaggcacagtgg

SEQ ID NO: 2239367 - DNA, 25 bp, Homo sapien
aataattttgcggctaggcacagtg

SEQ ID NO: 2239368 - DNA, 25 bp, Homo sapien
tcttgcctagagtgtgacaggtgca

SEQ ID NO: 2239369 - DNA, 25 bp, Homo sapien
catcacggtgcctaagtcagttaca

SEQ ID NO: 2239370 - DNA, 25 bp, Homo sapien
cgtaagtatgcgatcaatgtcacca

SEQ ID NO: 2239371 - DNA, 25 bp, Homo sapien
gatttgtttagcacctttaggcaca

SEQ ID NO: 2239372 - DNA, 25 bp, Homo sapien
tggatgccacaccttctggtaaatc

SEQ ID NO: 2239373 - DNA, 25 bp, Homo sapien
cacaatgcagttgttacatcagcca

SEQ ID NO: 2239374 - DNA, 25 bp, Homo sapien
aagatgctgaagttttggatgccac

SEQ ID NO: 2239375 - DNA, 25 bp, Homo sapien
cactatcgtgtttgtcttggtatcc

SEQ ID NO: 2239376 - DNA, 25 bp, Homo sapien
tagtaggtgcttgatgaacatgtgc

SEQ ID NO: 2239377 - DNA, 25 bp, Homo sapien
ttaacagcttcttgagataggtggc

SEQ ID NO: 2239378 - DNA, 25 bp, Homo sapien
tgccagtgtctctcacaatgcttgc

SEQ ID NO: 2239379 - DNA, 25 bp, Homo sapien
tatgggtaaccattctctttagaga

SEQ ID NO: 2239380 - DNA, 25 bp, Homo sapien
tgcgctattctattgaacctctgag

SEQ ID NO: 2239381 - DNA, 25 bp, Homo sapien
cctctgagcaggttgcaaatattaa

SEQ ID NO: 2239382 - DNA, 25 bp, Homo sapien
ttttcaccatccctacttggagagg

SEQ ID NO: 2239383 - DNA, 25 bp, Homo sapien
tagtgaaccatgaaacctaagttgt

SEQ ID NO: 2239384 - DNA, 25 bp, Homo sapien
aaagcaatgcaatggcaaactcctt

SEQ ID NO: 2239385 - DNA, 25 bp, Homo sapien
cagggaaagagcaaacgatgacgtg

SEQ ID NO: 2239386 - DNA, 25 bp, Homo sapien
caaacgatgacgtgaagtcactgag

SEQ ID NO: 2239387 - DNA, 25 bp, Homo sapien
aatgcaatggcaaactccttgaggt

SEQ ID NO: 2239388 - DNA, 25 bp, Homo sapien
tactgagatatattgtcctccccag

SEQ ID NO: 2239389 - DNA, 25 bp, Homo sapien
tattgtcctccccagtgatagcagt

SEQ ID NO: 2239390 - DNA, 25 bp, Homo sapien
ctccccagtgatagcagtttccgtg

SEQ ID NO: 2239391 - DNA, 25 bp, Homo sapien
agtttccgtgacattattcagaatt

SEQ ID NO: 2239392 - DNA, 25 bp, Homo sapien
attttcacagacatatcattagctt

SEQ ID NO: 2239393 - DNA, 25 bp, Homo sapien
gcattttcacagacatatcattagc

SEQ ID NO: 2239394 - DNA, 25 bp, Homo sapien
ttttcacagacatatcattagcttc

SEQ ID NO: 2239395 - DNA, 25 bp, Homo sapien
cattttcacagacatatcattagct

SEQ ID NO: 2239396 - DNA, 25 bp, Homo sapien
cctttgagaaactgctacggggcat

SEQ ID NO: 2239397 - DNA, 25 bp, Homo sapien
gcctttgagaaactgctacggggca

SEQ ID NO: 2239398 - DNA, 25 bp, Homo sapien
tctggggccattccgtggaaacaga

SEQ ID NO: 2239399 - DNA, 25 bp, Homo sapien
aatctttctggggccattccgtgga

SEQ ID NO: 2239400 - DNA, 25 bp, Homo sapien
tgagcgtttggcacacacactctcg

SEQ ID NO: 2239401 - DNA, 25 bp, Homo sapien
caagggcacgacgagatcctgatcc

SEQ ID NO: 2239402 - DNA, 25 bp, Homo sapien
tctggactcggcacaaagagccggg

SEQ ID NO: 2239403 - DNA, 25 bp, Homo sapien
tgtgagctaaagagctgacctcgcg

SEQ ID NO: 2239404 - DNA, 25 bp, Homo sapien
ctaggctcagagacatcagggagtc

SEQ ID NO: 2239405 - DNA, 25 bp, Homo sapien
cagccgagtgtttacgacatgctct

SEQ ID NO: 2239406 - DNA, 25 bp, Homo sapien
ccgtctgtccctgctaaatggtctg

SEQ ID NO: 2239407 - DNA, 25 bp, Homo sapien
gtgaccgacatgaccacttgcaagg

SEQ ID NO: 2239408 - DNA, 25 bp, Homo sapien
cgcctgggaaccctggaacctctgg

SEQ ID NO: 2239409 - DNA, 25 bp, Homo sapien
ttaggtcaatgagcttcatgacaga

SEQ ID NO: 2239410 - DNA, 25 bp, Homo sapien
tcatgacagagttgacgcctgggaa

SEQ ID NO: 2239411 - DNA, 25 bp, Homo sapien
gagttgacgcctgggaaccctggaa

SEQ ID NO: 2239412 - DNA, 25 bp, Homo sapien
aggtgctaggtctgcctgccctcct

SEQ ID NO: 2239413 - DNA, 25 bp, Homo sapien
tcagacacccataggggccagattt

SEQ ID NO: 2239414 - DNA, 25 bp, Homo sapien
ggccagatttctgttgggagcccag

SEQ ID NO: 2239415 - DNA, 25 bp, Homo sapien
ccagggtagagggactcaggtgcta

SEQ ID NO: 2239416 - DNA, 25 bp, Homo sapien
gtggatctggctgcctgatccagct

SEQ ID NO: 2239417 - DNA, 25 bp, Homo sapien
gattttcctcaactgctgctcctgg

SEQ ID NO: 2239418 - DNA, 25 bp, Homo sapien
tgctttccccccattctgattttcc

SEQ ID NO: 2239419 - DNA, 25 bp, Homo sapien
tgccaccttccaggaaactcttctg

SEQ ID NO: 2239420 - DNA, 25 bp, Homo sapien
gagattaacaatacccaaacccata

SEQ ID NO: 2239421 - DNA, 25 bp, Homo sapien
gtctgcactggcttcacattgccat

SEQ ID NO: 2239422 - DNA, 25 bp, Homo sapien
ataaacacccagatttcctagaggg

SEQ ID NO: 2239423 - DNA, 25 bp, Homo sapien
agagcgtgggggagattaacaatac

SEQ ID NO: 2239424 - DNA, 25 bp, Homo sapien
acatagccagacccctgtctcttaa

SEQ ID NO: 2239425 - DNA, 25 bp, Homo sapien
atagccagacccctgtctcttaaaa

SEQ ID NO: 2239426 - DNA, 25 bp, Homo sapien
catagccagacccctgtctcttaaa

SEQ ID NO: 2239427 - DNA, 25 bp, Homo sapien
ccactgtattaggatgaaagggcaa

SEQ ID NO: 2239428 - DNA, 25 bp, Homo sapien
caagggattgactggcagtgctttc

SEQ ID NO: 2239429 - DNA, 25 bp, Homo sapien
ggttggagccactgtattaggatga

SEQ ID NO: 2239430 - DNA, 25 bp, Homo sapien
tcttgctggcagcattaaggctcct

SEQ ID NO: 2239431 - DNA, 25 bp, Homo sapien
aggctgtcctgttcttttgtccaga

SEQ ID NO: 2239432 - DNA, 25 bp, Homo sapien
cataggctgtcctgttcttttgtcc

SEQ ID NO: 2239433 - DNA, 25 bp, Homo sapien
gctgtcctgttcttttgtccagaaa

SEQ ID NO: 2239434 - DNA, 25 bp, Homo sapien
taggctgtcctgttcttttgtccag

SEQ ID NO: 2239435 - DNA, 25 bp, Homo sapien
aaaaagttcaatatgtaattgactg

SEQ ID NO: 2239436 - DNA, 25 bp, Homo sapien
tcaatatgtaattgactgaacaatc

SEQ ID NO: 2239437 - DNA, 25 bp, Homo sapien
aagttcaatatgtaattgactgaac

SEQ ID NO: 2239438 - DNA, 25 bp, Homo sapien
caatatgtaattgactgaacaatca

SEQ ID NO: 2239439 - DNA, 25 bp, Homo sapien
cacactgtgcagaaccctatatcaa

SEQ ID NO: 2239440 - DNA, 25 bp, Homo sapien
cattttgaaaggaacgttggaagct

SEQ ID NO: 2239441 - DNA, 25 bp, Homo sapien
tgacacctgcgctatggagactaac

SEQ ID NO: 2239442 - DNA, 25 bp, Homo sapien
ggcaaagcagcaacggtgacacctg

SEQ ID NO: 2239443 - DNA, 25 bp, Homo sapien
taatagtctttctctagcgcaagcc

SEQ ID NO: 2239444 - DNA, 25 bp, Homo sapien
tgttagaaggaatagcaaccactgc

SEQ ID NO: 2239445 - DNA, 25 bp, Homo sapien
taattttgcctgtagacgccgcagc

SEQ ID NO: 2239446 - DNA, 25 bp, Homo sapien
cattgaggcttatcggcaccatacc

SEQ ID NO: 2239447 - DNA, 25 bp, Homo sapien
cacatgcaatgaaagaggattagag

SEQ ID NO: 2239448 - DNA, 25 bp, Homo sapien
catcccaaactaaatctagacacaa

SEQ ID NO: 2239449 - DNA, 25 bp, Homo sapien
agataccttcagagccacgatgata

SEQ ID NO: 2239450 - DNA, 25 bp, Homo sapien
gtaatagtactatgtcctccctccc

SEQ ID NO: 2239451 - DNA, 25 bp, Homo sapien
aaggctttctcattactagaaacca

SEQ ID NO: 2239452 - DNA, 25 bp, Homo sapien
tcatgatctccgtggctatcccttt

SEQ ID NO: 2239453 - DNA, 25 bp, Homo sapien
ttggccatactcaagaacctgaagg

SEQ ID NO: 2239454 - DNA, 25 bp, Homo sapien
aggttggccatactcaagaacctga

SEQ ID NO: 2239455 - DNA, 25 bp, Homo sapien
ttctaactctctccccaatataata

SEQ ID NO: 2239456 - DNA, 25 bp, Homo sapien
tctaactctctccccaatataataa

SEQ ID NO: 2239457 - DNA, 25 bp, Homo sapien
tttctaactctctccccaatataat

SEQ ID NO: 2239458 - DNA, 25 bp, Homo sapien
gatgttcaaatgtgttccgagtttc

SEQ ID NO: 2239459 - DNA, 25 bp, Homo sapien
ttcaaatgtgttccgagtttcttcc

SEQ ID NO: 2239460 - DNA, 25 bp, Homo sapien
tgttcaaatgtgttccgagtttctt

SEQ ID NO: 2239461 - DNA, 25 bp, Homo sapien
tctgatgttcaaatgtgttccgagt

SEQ ID NO: 2239462 - DNA, 25 bp, Homo sapien
caaacaggttgtcgaggtagccaat

SEQ ID NO: 2239463 - DNA, 25 bp, Homo sapien
acaggttgtcgaggtagccaattcc

SEQ ID NO: 2239464 - DNA, 25 bp, Homo sapien
tggtcaaacaggttgtcgaggtagc

SEQ ID NO: 2239465 - DNA, 25 bp, Homo sapien
tgtatattggtcaaacaggttgtcg

SEQ ID NO: 2239466 - DNA, 25 bp, Homo sapien
cctgcctggcaaccgctgctgttgg

SEQ ID NO: 2239467 - DNA, 25 bp, Homo sapien
gacctctattactcctccaccagca

SEQ ID NO: 2239468 - DNA, 25 bp, Homo sapien
tggccagcattaggctgcagctctt

SEQ ID NO: 2239469 - DNA, 25 bp, Homo sapien
cattcacgtggcagcacctccctgc

SEQ ID NO: 2239470 - DNA, 25 bp, Homo sapien
ggcaccagcaactgctcggtgtgtg

SEQ ID NO: 2239471 - DNA, 25 bp, Homo sapien
cggcgacccgggcaccagcaactgc

SEQ ID NO: 2239472 - DNA, 25 bp, Homo sapien
gggcaccagcaactgctcggtgtgt

SEQ ID NO: 2239473 - DNA, 25 bp, Homo sapien
ctacaccggcgacccgggcaccagc

SEQ ID NO: 2239474 - DNA, 25 bp, Homo sapien
gccagggctgtgtgccactgcccat

SEQ ID NO: 2239475 - DNA, 25 bp, Homo sapien
ctgtggctggccagggctgtgtgcc

SEQ ID NO: 2239476 - DNA, 25 bp, Homo sapien
gctggccagggctgtgtgccactgc

SEQ ID NO: 2239477 - DNA, 25 bp, Homo sapien
tggccagggctgtgtgccactgccc

SEQ ID NO: 2239478 - DNA, 25 bp, Homo sapien
caacaacaacggcttcatcaaccag

SEQ ID NO: 2239479 - DNA, 25 bp, Homo sapien
ctggcgctggctggtctacgacaag

SEQ ID NO: 2239480 - DNA, 25 bp, Homo sapien
catcaaccaggacttcgtggtgtgg

SEQ ID NO: 2239481 - DNA, 25 bp, Homo sapien
gtagaccaactaccccatcaagttc

SEQ ID NO: 2239482 - DNA, 25 bp, Homo sapien
catttggcggccacaggctccgcat

SEQ ID NO: 2239483 - DNA, 25 bp, Homo sapien
ggtcatctacattagctaccaggac

SEQ ID NO: 2239484 - DNA, 25 bp, Homo sapien
gcatcgcctatgtggtggtcagctc

SEQ ID NO: 2239485 - DNA, 25 bp, Homo sapien
cccttcctgtgcatcgcctatgtgg

SEQ ID NO: 2239486 - DNA, 25 bp, Homo sapien
ttcagatagtaatttgttcccaggg

SEQ ID NO: 2239487 - DNA, 25 bp, Homo sapien
cctgaacctggttgggcctgaagca

SEQ ID NO: 2239488 - DNA, 25 bp, Homo sapien
agatagtaatttgttcccagggaca

SEQ ID NO: 2239489 - DNA, 25 bp, Homo sapien
ctgaacctggttgggcctgaagcag

SEQ ID NO: 2239490 - DNA, 25 bp, Homo sapien
ctaaaaaggtaaggtagctgcccag

SEQ ID NO: 2239491 - DNA, 25 bp, Homo sapien
tctccaggtaagaagcgcaattcca

SEQ ID NO: 2239492 - DNA, 25 bp, Homo sapien
tcattgttccagtcatcgtcgcagg

SEQ ID NO: 2239493 - DNA, 25 bp, Homo sapien
tgcccaggcaggttttgcagtttct

SEQ ID NO: 2239494 - DNA, 25 bp, Homo sapien
tagacttgtataccaaaggccagtg

SEQ ID NO: 2239495 - DNA, 25 bp, Homo sapien
cacttctgtagacaatccactctgg

SEQ ID NO: 2239496 - DNA, 25 bp, Homo sapien
gctaccgtgctgagcctcaacttgt

SEQ ID NO: 2239497 - DNA, 25 bp, Homo sapien
ggtgtggagatctacaattcatttt

SEQ ID NO: 2239498 - DNA, 25 bp, Homo sapien
gatcctattgaaccatgtttgtggc

SEQ ID NO: 2239499 - DNA, 25 bp, Homo sapien
tctttatgttgagtcgcgcaccgaa

SEQ ID NO: 2239500 - DNA, 25 bp, Homo sapien
agttgtgacaacttcctgagggatc

SEQ ID NO: 2239501 - DNA, 25 bp, Homo sapien
taaaaacaggcagctcataagagcc

SEQ ID NO: 2239502 - DNA, 25 bp, Homo sapien
gatgtaaatctgctcaggagacctg

SEQ ID NO: 2239503 - DNA, 25 bp, Homo sapien
tagaacattggtattcgcttgagaa

SEQ ID NO: 2239504 - DNA, 25 bp, Homo sapien
gcagaggataattagcatctcaggt

SEQ ID NO: 2239505 - DNA, 25 bp, Homo sapien
tgaggtggtatcttcacgtagaaca

SEQ ID NO: 2239506 - DNA, 25 bp, Homo sapien
catcccctgtgggaaattagtaggc

SEQ ID NO: 2239507 - DNA, 25 bp, Homo sapien
tacaggtttgggtacaagtggcaac

SEQ ID NO: 2239508 - DNA, 25 bp, Homo sapien
gtgtcttacattggtagccagccag

SEQ ID NO: 2239509 - DNA, 25 bp, Homo sapien
taagaaaccctcactctctacaggt

SEQ ID NO: 2239510 - DNA, 25 bp, Homo sapien
cagttcccgcttcctgaccttttga

SEQ ID NO: 2239511 - DNA, 25 bp, Homo sapien
gcatcttgtccctccgtttccatga

SEQ ID NO: 2239512 - DNA, 25 bp, Homo sapien
gatgcccacttctcggtctcctttg

SEQ ID NO: 2239513 - DNA, 25 bp, Homo sapien
aaaccagtctctgagtgccctttta

SEQ ID NO: 2239514 - DNA, 25 bp, Homo sapien
cttccataataatgatacaataaac

SEQ ID NO: 2239515 - DNA, 25 bp, Homo sapien
ttccataataatgatacaataaaca

SEQ ID NO: 2239516 - DNA, 25 bp, Homo sapien
tccataataatgatacaataaacat

SEQ ID NO: 2239517 - DNA, 25 bp, Homo sapien
gaggaaagggtggaagcggcttcca

SEQ ID NO: 2239518 - DNA, 25 bp, Homo sapien
ccagttcgggcttgggtcagctccc

SEQ ID NO: 2239519 - DNA, 25 bp, Homo sapien
atccccggacggctgcgaggaatga

SEQ ID NO: 2239520 - DNA, 25 bp, Homo sapien
gccagaagcaatggtgcatcccgaa

SEQ ID NO: 2239521 - DNA, 25 bp, Homo sapien
tgcttgtttcgccatgcccgggccg

SEQ ID NO: 2239522 - DNA, 25 bp, Homo sapien
tctctgactgtcttctcccaacaga

SEQ ID NO: 2239523 - DNA, 25 bp, Homo sapien
cagaagaggtttttggggtcagaga

SEQ ID NO: 2239524 - DNA, 25 bp, Homo sapien
agatgtaaggacttctctgactgtc

SEQ ID NO: 2239525 - DNA, 25 bp, Homo sapien
gggtcagagatgtaaggacttctct

SEQ ID NO: 2239526 - DNA, 25 bp, Homo sapien
ctgctgatgattttcgaattcggta

SEQ ID NO: 2239527 - DNA, 25 bp, Homo sapien
caggaatgtatagctgctgatgatt

SEQ ID NO: 2239528 - DNA, 25 bp, Homo sapien
tcttcagtctaacagacagtgcttg

SEQ ID NO: 2239529 - DNA, 25 bp, Homo sapien
tggattgtgaatatcagaccacctc

SEQ ID NO: 2239530 - DNA, 25 bp, Homo sapien
tgacttggctcaaagcaaagaagca

SEQ ID NO: 2239531 - DNA, 25 bp, Homo sapien
tctggtgctgtcatatgcttctaca

SEQ ID NO: 2239532 - DNA, 25 bp, Homo sapien
gctgcagagcccataaagcagtcag

SEQ ID NO: 2239533 - DNA, 25 bp, Homo sapien
gcagattcatagtttggccacacat

SEQ ID NO: 2239534 - DNA, 25 bp, Homo sapien
tagttgggacattcgtgggcaacaa

SEQ ID NO: 2239535 - DNA, 25 bp, Homo sapien
tgggacattcgtgggcaacaaaatg

SEQ ID NO: 2239536 - DNA, 25 bp, Homo sapien
ctagcggaagtagttgggacattcg

SEQ ID NO: 2239537 - DNA, 25 bp, Homo sapien
agtagttgggacattcgtgggcaac

SEQ ID NO: 2239538 - DNA, 25 bp, Homo sapien
aaaagtgtccatgacagccgggtcc

SEQ ID NO: 2239539 - DNA, 25 bp, Homo sapien
atgacagccgggtccatgggccctt

SEQ ID NO: 2239540 - DNA, 25 bp, Homo sapien
ccacgtctctgtgggcaccctgcag

SEQ ID NO: 2239541 - DNA, 25 bp, Homo sapien
agtgtccatgacagccgggtccatg

SEQ ID NO: 2239542 - DNA, 25 bp, Homo sapien
gaaatggcctcaaagtggtgctcct

SEQ ID NO: 2239543 - DNA, 25 bp, Homo sapien
tgacaccatacacggcctgtgtggc

SEQ ID NO: 2239544 - DNA, 25 bp, Homo sapien
cagctattcccaaagaagtggcccc

SEQ ID NO: 2239545 - DNA, 25 bp, Homo sapien
ttgtacttgccggtcagcagacccc

SEQ ID NO: 2239546 - DNA, 25 bp, Homo sapien
gcccaaggcaggggaagagctccat

SEQ ID NO: 2239547 - DNA, 25 bp, Homo sapien
agtgcccaaggcaggggaagagctc

SEQ ID NO: 2239548 - DNA, 25 bp, Homo sapien
tcagtccaaagtgcccaaggcaggg

SEQ ID NO: 2239549 - DNA, 25 bp, Homo sapien
ctcagtccaaagtgcccaaggcagg

SEQ ID NO: 2239550 - DNA, 25 bp, Homo sapien
cctgccgggtggtggcattgtacat

SEQ ID NO: 2239551 - DNA, 25 bp, Homo sapien
ccacctgccgggtggtggcattgta

SEQ ID NO: 2239552 - DNA, 25 bp, Homo sapien
ttccacctgccgggtggtggcattg

SEQ ID NO: 2239553 - DNA, 25 bp, Homo sapien
cacctgccgggtggtggcattgtac

SEQ ID NO: 2239554 - DNA, 25 bp, Homo sapien
tggtacacagtgggcaggatccagc

SEQ ID NO: 2239555 - DNA, 25 bp, Homo sapien
gccatggtacacagtgggcaggatc

SEQ ID NO: 2239556 - DNA, 25 bp, Homo sapien
ccatggtacacagtgggcaggatcc

SEQ ID NO: 2239557 - DNA, 25 bp, Homo sapien
catggtacacagtgggcaggatcca

SEQ ID NO: 2239558 - DNA, 25 bp, Homo sapien
cactgtcaggctttagtgattttcc

SEQ ID NO: 2239559 - DNA, 25 bp, Homo sapien
gcctcaggccgcccaggatgatttt

SEQ ID NO: 2239560 - DNA, 25 bp, Homo sapien
caggccgcccaggatgattttggac

SEQ ID NO: 2239561 - DNA, 25 bp, Homo sapien
ctcaggccgcccaggatgattttgg

SEQ ID NO: 2239562 - DNA, 25 bp, Homo sapien
cagcctcaggccgcccaggatgatt

SEQ ID NO: 2239563 - DNA, 25 bp, Homo sapien
tccaggaaagcgtgcacggccgtgg

SEQ ID NO: 2239564 - DNA, 25 bp, Homo sapien
caggatgcccaaggcggcctgcgtt

SEQ ID NO: 2239565 - DNA, 25 bp, Homo sapien
ctggcagatgtgtccatgtggcgcc

SEQ ID NO: 2239566 - DNA, 25 bp, Homo sapien
cggcctgcgttggttgtggaaggga

SEQ ID NO: 2239567 - DNA, 25 bp, Homo sapien
cagggagcgacttgtgcagtggatg

SEQ ID NO: 2239568 - DNA, 25 bp, Homo sapien
acttgtgcagtggatggcggcttgg

SEQ ID NO: 2239569 - DNA, 25 bp, Homo sapien
agcgacttgtgcagtggatggcggc

SEQ ID NO: 2239570 - DNA, 25 bp, Homo sapien
tcgggtggcagggagcgacttgtgc

SEQ ID NO: 2239571 - DNA, 25 bp, Homo sapien
tctcaggggcgtctgtgaagtcaga

SEQ ID NO: 2239572 - DNA, 25 bp, Homo sapien
cagagatgaagaaacgctgagcccc

SEQ ID NO: 2239573 - DNA, 25 bp, Homo sapien
gaccttccattacactgggtccatc

SEQ ID NO: 2239574 - DNA, 25 bp, Homo sapien
atccatgcactgaccttccattaca

SEQ ID NO: 2239575 - DNA, 25 bp, Homo sapien
agccagcaggagatgtccggtcggc

SEQ ID NO: 2239576 - DNA, 25 bp, Homo sapien
cggtcggcgcctgcgtccgccgctc

SEQ ID NO: 2239577 - DNA, 25 bp, Homo sapien
tcgcgccgccgggtgttgccccttc

SEQ ID NO: 2239578 - DNA, 25 bp, Homo sapien
gagatgtccggtcggcgcctgcgtc

SEQ ID NO: 2239579 - DNA, 25 bp, Homo sapien
cagtgacagtggcagataaggcatc

SEQ ID NO: 2239580 - DNA, 25 bp, Homo sapien
agtgacagtggcagataaggcatcc

SEQ ID NO: 2239581 - DNA, 25 bp, Homo sapien
aaatcattttattacaaagatacat

SEQ ID NO: 2239582 - DNA, 25 bp, Homo sapien
attttattacaaagatacatgcaca

SEQ ID NO: 2239583 - DNA, 25 bp, Homo sapien
ccaaagcaatataaatcattttatt

SEQ ID NO: 2239584 - DNA, 25 bp, Homo sapien
tcattttattacaaagatacatgca

SEQ ID NO: 2239585 - DNA, 25 bp, Homo sapien
gagaaggtaggagtgcaggactgaa

SEQ ID NO: 2239586 - DNA, 25 bp, Homo sapien
catttgtctgagagaaggtaggagt

SEQ ID NO: 2239587 - DNA, 25 bp, Homo sapien
aaggtaggagtgcaggactgaagaa

SEQ ID NO: 2239588 - DNA, 25 bp, Homo sapien
cacatttgtctgagagaaggtagga

SEQ ID NO: 2239589 - DNA, 25 bp, Homo sapien
tcagtataacttgacctttgaccac

SEQ ID NO: 2239590 - DNA, 25 bp, Homo sapien
tctgttagggtctatcccagggttc

SEQ ID NO: 2239591 - DNA, 25 bp, Homo sapien
tctgtgttcatactaacggaatgat

SEQ ID NO: 2239592 - DNA, 25 bp, Homo sapien
ttgtgcagcccatatagaagatgat

SEQ ID NO: 2239593 - DNA, 25 bp, Homo sapien
ctagtaacgttgtggctgctgagca

SEQ ID NO: 2239594 - DNA, 25 bp, Homo sapien
tggcccaccataccttcattgaaag

SEQ ID NO: 2239595 - DNA, 25 bp, Homo sapien
aagtctttagagctgtactgtctac

SEQ ID NO: 2239596 - DNA, 25 bp, Homo sapien
tatggctagtctgtttgatatgtgc

SEQ ID NO: 2239597 - DNA, 25 bp, Homo sapien
taggatcccttgcaaagcttagagc

SEQ ID NO: 2239598 - DNA, 25 bp, Homo sapien
aatgagctaggtttactgcccagac

SEQ ID NO: 2239599 - DNA, 25 bp, Homo sapien
cattctgcgtcatagggaggtgctc

SEQ ID NO: 2239600 - DNA, 25 bp, Homo sapien
gcatgttactatcacccaaggagaa

SEQ ID NO: 2239601 - DNA, 25 bp, Homo sapien
aaccagacaggctcaattggctcaa

SEQ ID NO: 2239602 - DNA, 25 bp, Homo sapien
gagagttgaagatcgtttggtttct

SEQ ID NO: 2239603 - DNA, 25 bp, Homo sapien
tgccatgtggctccatgctttggct

SEQ ID NO: 2239604 - DNA, 25 bp, Homo sapien
aggctcaattggctcaactgggttc

SEQ ID NO: 2239605 - DNA, 25 bp, Homo sapien
tcctcctttcaggtttcctctgatc

SEQ ID NO: 2239606 - DNA, 25 bp, Homo sapien
aataaggaaccccagcgatattggg

SEQ ID NO: 2239607 - DNA, 25 bp, Homo sapien
acaagcaataaggaaccccagcgat

SEQ ID NO: 2239608 - DNA, 25 bp, Homo sapien
ggaaccacagcaaataacacacaag

SEQ ID NO: 2239609 - DNA, 25 bp, Homo sapien
ctgattttgtaggcttaggtggctt

SEQ ID NO: 2239610 - DNA, 25 bp, Homo sapien
tgtgctgtcttctcctgtttatgga

SEQ ID NO: 2239611 - DNA, 25 bp, Homo sapien
gctgtcttctcctgtttatggacac

SEQ ID NO: 2239612 - DNA, 25 bp, Homo sapien
gtcttctcctgtttatggacactgg

SEQ ID NO: 2239613 - DNA, 25 bp, Homo sapien
taggctccttagtctcagcatcggc

SEQ ID NO: 2239614 - DNA, 25 bp, Homo sapien
cataatctgactgttgaccagcagg

SEQ ID NO: 2239615 - DNA, 25 bp, Homo sapien
catagttatccaaaccggctctgag

SEQ ID NO: 2239616 - DNA, 25 bp, Homo sapien
aatgtgggccttgaaactcttctgc

SEQ ID NO: 2239617 - DNA, 25 bp, Homo sapien
tccacttgatatctgcttgccatct

SEQ ID NO: 2239618 - DNA, 25 bp, Homo sapien
cacttgatatctgcttgccatctgg

SEQ ID NO: 2239619 - DNA, 25 bp, Homo sapien
acttgatatctgcttgccatctgga

SEQ ID NO: 2239620 - DNA, 25 bp, Homo sapien
ccacttgatatctgcttgccatctg

SEQ ID NO: 2239621 - DNA, 25 bp, Homo sapien
gggctcttttcagtcgaactccaaa

SEQ ID NO: 2239622 - DNA, 25 bp, Homo sapien
cactcttatacttctgcgagggagg

SEQ ID NO: 2239623 - DNA, 25 bp, Homo sapien
gaagtgcttctgattttatgtcccc

SEQ ID NO: 2239624 - DNA, 25 bp, Homo sapien
cctacagaggatgaaattgggcccg

SEQ ID NO: 2239625 - DNA, 25 bp, Homo sapien
tcaaaaacagatcgcctagcagcag

SEQ ID NO: 2239626 - DNA, 25 bp, Homo sapien
tagcagcccgctcgaaatttgagga

SEQ ID NO: 2239627 - DNA, 25 bp, Homo sapien
tcacgaatgactgggtcggacgcct

SEQ ID NO: 2239628 - DNA, 25 bp, Homo sapien
cactgggccctttgatgacatctgt

SEQ ID NO: 2239629 - DNA, 25 bp, Homo sapien
catatgctgctgacattggatagcc

SEQ ID NO: 2239630 - DNA, 25 bp, Homo sapien
ctaaggacaagtgcgagaaagggac

SEQ ID NO: 2239631 - DNA, 25 bp, Homo sapien
cactggattgtttaaggcttcttcc

SEQ ID NO: 2239632 - DNA, 25 bp, Homo sapien
gcagtcttattggtaggtgaagacc

SEQ ID NO: 2239633 - DNA, 25 bp, Homo sapien
tagtttcatatccagcatacagcgc

SEQ ID NO: 2239634 - DNA, 25 bp, Homo sapien
atggaagggccccttgtgcctttct

SEQ ID NO: 2239635 - DNA, 25 bp, Homo sapien
gctgataatagctgactatgctcca

SEQ ID NO: 2239636 - DNA, 25 bp, Homo sapien
tcttccctcactatctgctgcatcc

SEQ ID NO: 2239637 - DNA, 25 bp, Homo sapien
aaacgtgtttaggaatgtcctgtct

SEQ ID NO: 2239638 - DNA, 25 bp, Homo sapien
aatactgctagaaatcagcttgcca

SEQ ID NO: 2239639 - DNA, 25 bp, Homo sapien
agcttgccatcaactggagccaaca

SEQ ID NO: 2239640 - DNA, 25 bp, Homo sapien
tgtctttggacccacatgtgaaatc

SEQ ID NO: 2239641 - DNA, 25 bp, Homo sapien
tcttcttcagaaaccaatggaaggt

SEQ ID NO: 2239642 - DNA, 25 bp, Homo sapien
cttcttcagaaaccaatggaaggtt

SEQ ID NO: 2239643 - DNA, 25 bp, Homo sapien
tcccagcttcttttcgttgatttct

SEQ ID NO: 2239644 - DNA, 25 bp, Homo sapien
ttcttcttcagaaaccaatggaagg

SEQ ID NO: 2239645 - DNA, 25 bp, Homo sapien
ctgagtgacacactgcagggatccc

SEQ ID NO: 2239646 - DNA, 25 bp, Homo sapien
ttctaatgtctgagtgacacactgc

SEQ ID NO: 2239647 - DNA, 25 bp, Homo sapien
tccctctaaaataccctggaaatga

SEQ ID NO: 2239648 - DNA, 25 bp, Homo sapien
gaaatgactgaaccacactggaagg

SEQ ID NO: 2239649 - DNA, 25 bp, Homo sapien
gtggctggggtgctgaaaccaatgg

SEQ ID NO: 2239650 - DNA, 25 bp, Homo sapien
aagtcattttgtggcgagcagctga

SEQ ID NO: 2239651 - DNA, 25 bp, Homo sapien
gtggcaaatgcagtcaaggactgtg

SEQ ID NO: 2239652 - DNA, 25 bp, Homo sapien
ggtagaggcaagtgtggcaaatgca

SEQ ID NO: 2239653 - DNA, 25 bp, Homo sapien
tgggatagtgatggagcctgtaacc

SEQ ID NO: 2239654 - DNA, 25 bp, Homo sapien
cagtgggatagtgatggagcctgta

SEQ ID NO: 2239655 - DNA, 25 bp, Homo sapien
ctccagtgggatagtgatggagcct

SEQ ID NO: 2239656 - DNA, 25 bp, Homo sapien
ccagtgggatagtgatggagcctgt

SEQ ID NO: 2239657 - DNA, 25 bp, Homo sapien
tgtggtaaagccttcttttgtggat

SEQ ID NO: 2239658 - DNA, 25 bp, Homo sapien
gattcttaggtgactcatcatcgag

SEQ ID NO: 2239659 - DNA, 25 bp, Homo sapien
tttcaggttggataacaggtgggat

SEQ ID NO: 2239660 - DNA, 25 bp, Homo sapien
cgctgtcaaactcttatgtggtaaa

SEQ ID NO: 2239661 - DNA, 25 bp, Homo sapien
cctcgttgttctgaatgtcacttaa

SEQ ID NO: 2239662 - DNA, 25 bp, Homo sapien
ttcttctttaacaatctcctcgttg

SEQ ID NO: 2239663 - DNA, 25 bp, Homo sapien
aacaatctcctcgttgttctgaatg

SEQ ID NO: 2239664 - DNA, 25 bp, Homo sapien
ctgaatgtcacttaatccattagaa

SEQ ID NO: 2239665 - DNA, 25 bp, Homo sapien
cccagactgcacttgtaggcacatt

SEQ ID NO: 2239666 - DNA, 25 bp, Homo sapien
accttactcctaggtttaggcagag

SEQ ID NO: 2239667 - DNA, 25 bp, Homo sapien
aacccagactgcacttgtaggcaca

SEQ ID NO: 2239668 - DNA, 25 bp, Homo sapien
caactccaggaaccttactcctagg

SEQ ID NO: 2239669 - DNA, 25 bp, Homo sapien
cctctctggggatccatagaaggaa

SEQ ID NO: 2239670 - DNA, 25 bp, Homo sapien
tgatctttcaggctcaggacccaac

SEQ ID NO: 2239671 - DNA, 25 bp, Homo sapien
gatagggctttgctccccatgctgc

SEQ ID NO: 2239672 - DNA, 25 bp, Homo sapien
caggacccaacatgaagatgctatc

SEQ ID NO: 2239673 - DNA, 25 bp, Homo sapien
tgaagatgctatcatgggatagggc

SEQ ID NO: 2239674 - DNA, 25 bp, Homo sapien
tcttcttcctgggtatcttcggctt

SEQ ID NO: 2239675 - DNA, 25 bp, Homo sapien
ttcttcttcctgggtatcttcggct

SEQ ID NO: 2239676 - DNA, 25 bp, Homo sapien
ttcttcctgggtatcttcggcttct

SEQ ID NO: 2239677 - DNA, 25 bp, Homo sapien
cttcctgggtatcttcggcttcttt

SEQ ID NO: 2239678 - DNA, 25 bp, Homo sapien
ccagactgtcagaaatttcacttag

SEQ ID NO: 2239679 - DNA, 25 bp, Homo sapien
cacttagtgattcagccattgtagg

SEQ ID NO: 2239680 - DNA, 25 bp, Homo sapien
tcacttagtgattcagccattgtag

SEQ ID NO: 2239681 - DNA, 25 bp, Homo sapien
acatccagactgtcagaaatttcac

SEQ ID NO: 2239682 - DNA, 25 bp, Homo sapien
ggacctgcaagtccagaaccttcca

SEQ ID NO: 2239683 - DNA, 25 bp, Homo sapien
gtaaatcaccttgggtacagggcat

SEQ ID NO: 2239684 - DNA, 25 bp, Homo sapien
ggctccaaatacctagctttaagga

SEQ ID NO: 2239685 - DNA, 25 bp, Homo sapien
agggacctgcaagtccagaaccttc

SEQ ID NO: 2239686 - DNA, 25 bp, Homo sapien
tgaggggcccactatcctggccaga

SEQ ID NO: 2239687 - DNA, 25 bp, Homo sapien
cttggagtaggagaagctgactagc

SEQ ID NO: 2239688 - DNA, 25 bp, Homo sapien
agatccccaagattaccagcaatca

SEQ ID NO: 2239689 - DNA, 25 bp, Homo sapien
taggagaagctgactagcatgatgt

SEQ ID NO: 2239690 - DNA, 25 bp, Homo sapien
gaaatcttgaggcaagcatgaaagc

SEQ ID NO: 2239691 - DNA, 25 bp, Homo sapien
aaatcttgaggcaagcatgaaagct

SEQ ID NO: 2239692 - DNA, 25 bp, Homo sapien
tgaaatcttgaggcaagcatgaaag

SEQ ID NO: 2239693 - DNA, 25 bp, Homo sapien
taagggctaacaaggctagaggcca

SEQ ID NO: 2239694 - DNA, 25 bp, Homo sapien
ggatggatggcgaagtcctgggtac

SEQ ID NO: 2239695 - DNA, 25 bp, Homo sapien
ccccactaagggctaacaaggctag

SEQ ID NO: 2239696 - DNA, 25 bp, Homo sapien
ctacagcaagaggatggcagttcct

SEQ ID NO: 2239697 - DNA, 25 bp, Homo sapien
tcctccagaacttggcacttctgtt

SEQ ID NO: 2239698 - DNA, 25 bp, Homo sapien
taagccctgtctaactggagtcagg

SEQ ID NO: 2239699 - DNA, 25 bp, Homo sapien
gatgggagtcaggaagatatttttc

SEQ ID NO: 2239700 - DNA, 25 bp, Homo sapien
aaggaactgtcaacagattccagat

SEQ ID NO: 2239701 - DNA, 25 bp, Homo sapien
catgggcaggctaatgaaatgtaca

SEQ ID NO: 2239702 - DNA, 25 bp, Homo sapien
tctgtgttgggtaaatagaagccag

SEQ ID NO: 2239703 - DNA, 25 bp, Homo sapien
gacggtatgacttcagcatgggcag

SEQ ID NO: 2239704 - DNA, 25 bp, Homo sapien
tataaatgaagactctatggttcct

SEQ ID NO: 2239705 - DNA, 25 bp, Homo sapien
atggcagaggctctttcttcttagt

SEQ ID NO: 2239706 - DNA, 25 bp, Homo sapien
tttcttcttagttctctgtgtcctc

SEQ ID NO: 2239707 - DNA, 25 bp, Homo sapien
gggctgatggcagaggctctttctt

SEQ ID NO: 2239708 - DNA, 25 bp, Homo sapien
tcttcttagttctctgtgtcctcca

SEQ ID NO: 2239709 - DNA, 25 bp, Homo sapien
tagaagtctgctctgtccggtcgca

SEQ ID NO: 2239710 - DNA, 25 bp, Homo sapien
ggagtctccgctgggcttagaaaga

SEQ ID NO: 2239711 - DNA, 25 bp, Homo sapien
gaccaggctgctaaaactatccagg

SEQ ID NO: 2239712 - DNA, 25 bp, Homo sapien
cactggtgtaggttgcccatcctct

SEQ ID NO: 2239713 - DNA, 25 bp, Homo sapien
aatcctgtctgtaccgtccacacaa

SEQ ID NO: 2239714 - DNA, 25 bp, Homo sapien
tacattacttcctgttgtacgggag

SEQ ID NO: 2239715 - DNA, 25 bp, Homo sapien
cagtcccacgataataactttgtgc

SEQ ID NO: 2239716 - DNA, 25 bp, Homo sapien
gtacgggagttatgtacaacttcac

SEQ ID NO: 2239717 - DNA, 25 bp, Homo sapien
cgtgagccacggtgtccggccctgt

SEQ ID NO: 2239718 - DNA, 25 bp, Homo sapien
gcgtgagccacggtgtccggccctg

SEQ ID NO: 2239719 - DNA, 25 bp, Homo sapien
tgggatgctgcctgagacggcttcc

SEQ ID NO: 2239720 - DNA, 25 bp, Homo sapien
tgcctgagacggcttccctccttcc

SEQ ID NO: 2239721 - DNA, 25 bp, Homo sapien
ttgggatgctgcctgagacggcttc

SEQ ID NO: 2239722 - DNA, 25 bp, Homo sapien
ctgagacggcttccctccttccaag

SEQ ID NO: 2239723 - DNA, 25 bp, Homo sapien
gttggaatgacgctcttgaacatcc

SEQ ID NO: 2239724 - DNA, 25 bp, Homo sapien
tgtcatttagtactggcttactccc

SEQ ID NO: 2239725 - DNA, 25 bp, Homo sapien
tgaacatccagctgttcggtcagtg

SEQ ID NO: 2239726 - DNA, 25 bp, Homo sapien
catacagggaggtttgagtagggaa

SEQ ID NO: 2239727 - DNA, 25 bp, Homo sapien
catcaggggtccccggttgattcat

SEQ ID NO: 2239728 - DNA, 25 bp, Homo sapien
ctagacatgaggctgccgctcaggc

SEQ ID NO: 2239729 - DNA, 25 bp, Homo sapien
ggcccagactcccaaatagttgtat

SEQ ID NO: 2239730 - DNA, 25 bp, Homo sapien
gctgggaggtacttctgaaggtaac

SEQ ID NO: 2239731 - DNA, 25 bp, Homo sapien
gttgtatgcaagtaaccccagctgc

SEQ ID NO: 2239732 - DNA, 25 bp, Homo sapien
ttcctcgggcaccaaggagagcatt

SEQ ID NO: 2239733 - DNA, 25 bp, Homo sapien
ttccagaagagtggatttctttgcc

SEQ ID NO: 2239734 - DNA, 25 bp, Homo sapien
caaggagagcattcgggtatggcat

SEQ ID NO: 2239735 - DNA, 25 bp, Homo sapien
acttccagaagagtggatttctttg

SEQ ID NO: 2239736 - DNA, 25 bp, Homo sapien
agcataggaagaaggccgcgtccaa

SEQ ID NO: 2239737 - DNA, 25 bp, Homo sapien
gtcctgggcgttgttctattcttga

SEQ ID NO: 2239738 - DNA, 25 bp, Homo sapien
tatcgggcgtgcagtcgaggtgcgc

SEQ ID NO: 2239739 - DNA, 25 bp, Homo sapien
tggtgcagcgcccagatatcgggcg

SEQ ID NO: 2239740 - DNA, 25 bp, Homo sapien
tcctgctctacaagatcgtgcgcgg

SEQ ID NO: 2239741 - DNA, 25 bp, Homo sapien
tgcatgagattttcacgtcgccgct

SEQ ID NO: 2239742 - DNA, 25 bp, Homo sapien
caacggcaaggtgttcgatgtgacc

SEQ ID NO: 2239743 - DNA, 25 bp, Homo sapien
cgcgcatactcatggccatcaacgg

SEQ ID NO: 2239744 - DNA, 25 bp, Homo sapien
ttttgcctggataaggaagcactga

SEQ ID NO: 2239745 - DNA, 25 bp, Homo sapien
gatgagtacgatgacctttctgacc

SEQ ID NO: 2239746 - DNA, 25 bp, Homo sapien
tgcctggataaggaagcactgaagg

SEQ ID NO: 2239747 - DNA, 25 bp, Homo sapien
actgaaggatgagtacgatgacctt

SEQ ID NO: 2239748 - DNA, 25 bp, Homo sapien
cagtacagtcgctagtcaagtggtt

SEQ ID NO: 2239749 - DNA, 25 bp, Homo sapien
ccctgaaccacgaggaaacagtaca

SEQ ID NO: 2239750 - DNA, 25 bp, Homo sapien
tcttaaatgtgcaccaagagcaaag

SEQ ID NO: 2239751 - DNA, 25 bp, Homo sapien
taagcgctgtccagtaacaaaatga

SEQ ID NO: 2239752 - DNA, 25 bp, Homo sapien
aaaaaggtaatcgattgcccctgag

SEQ ID NO: 2239753 - DNA, 25 bp, Homo sapien
aatgtcttcaattaccaggtcaggc

SEQ ID NO: 2239754 - DNA, 25 bp, Homo sapien
taacctgaagtggaatagtcacagc

SEQ ID NO: 2239755 - DNA, 25 bp, Homo sapien
taatctgctccttcactggcgtaga

SEQ ID NO: 2239756 - DNA, 25 bp, Homo sapien
tcttgatgacattacgggcacctga

SEQ ID NO: 2239757 - DNA, 25 bp, Homo sapien
cctgagagggcccatagttcacttt

SEQ ID NO: 2239758 - DNA, 25 bp, Homo sapien
cagacagctgtttccatcagttggg

SEQ ID NO: 2239759 - DNA, 25 bp, Homo sapien
aaacctaagcctattgactcatggg

SEQ ID NO: 2239760 - DNA, 25 bp, Homo sapien
tattgtctgacttggcaacctgaca

SEQ ID NO: 2239761 - DNA, 25 bp, Homo sapien
gacttggcaacctgacattttgaca

SEQ ID NO: 2239762 - DNA, 25 bp, Homo sapien
tttattgtctgacttggcaacctga

SEQ ID NO: 2239763 - DNA, 25 bp, Homo sapien
gtctgacttggcaacctgacatttt

SEQ ID NO: 2239764 - DNA, 25 bp, Homo sapien
cttccagagttttcaatgtgttccc

SEQ ID NO: 2239765 - DNA, 25 bp, Homo sapien
gtgttccctggagaatcattagctt

SEQ ID NO: 2239766 - DNA, 25 bp, Homo sapien
ctggagaatcattagctttggtgcc

SEQ ID NO: 2239767 - DNA, 25 bp, Homo sapien
ctttggtgccaataatgtcgacttc

SEQ ID NO: 2239768 - DNA, 25 bp, Homo sapien
atagatccaaattaggaacaatatt

SEQ ID NO: 2239769 - DNA, 25 bp, Homo sapien
tgggatagatccaaattaggaacaa

SEQ ID NO: 2239770 - DNA, 25 bp, Homo sapien
ctgggatagatccaaattaggaaca

SEQ ID NO: 2239771 - DNA, 25 bp, Homo sapien
ggatagatccaaattaggaacaata

SEQ ID NO: 2239772 - DNA, 25 bp, Homo sapien
cttcagggcttgtctccttaccctg

SEQ ID NO: 2239773 - DNA, 25 bp, Homo sapien
tctccttaccctggccttcttcctc

SEQ ID NO: 2239774 - DNA, 25 bp, Homo sapien
ccttcagggcttgtctccttaccct

SEQ ID NO: 2239775 - DNA, 25 bp, Homo sapien
cctccttatagctccttcgctgaag

SEQ ID NO: 2239776 - DNA, 25 bp, Homo sapien
agtgcttggtcgtatcagacgtaac

SEQ ID NO: 2239777 - DNA, 25 bp, Homo sapien
tccttcgctgaagtgcttggtcgta

SEQ ID NO: 2239778 - DNA, 25 bp, Homo sapien
tcttctagttcttgtaattttagcc

SEQ ID NO: 2239779 - DNA, 25 bp, Homo sapien
cttcaaagggactccatggctttta

SEQ ID NO: 2239780 - DNA, 25 bp, Homo sapien
cttaatgttacatgccagagctttc

SEQ ID NO: 2239781 - DNA, 25 bp, Homo sapien
tacatgccagagctttcccatcatt

SEQ ID NO: 2239782 - DNA, 25 bp, Homo sapien
caaagggactccatggcttttacaa

SEQ ID NO: 2239783 - DNA, 25 bp, Homo sapien
atgcctcaaatgtctgtaagccaaa

SEQ ID NO: 2239784 - DNA, 25 bp, Homo sapien
caaatgtctgtaagccaaagctaaa

SEQ ID NO: 2239785 - DNA, 25 bp, Homo sapien
tgtctgtaagccaaagctaaaaccc

SEQ ID NO: 2239786 - DNA, 25 bp, Homo sapien
gtatgaatgcctcaaatgtctgtaa

SEQ ID NO: 2239787 - DNA, 25 bp, Homo sapien
gaagggccttacaggttctagactc

SEQ ID NO: 2239788 - DNA, 25 bp, Homo sapien
aactggtcagggcaaatcaggctct

SEQ ID NO: 2239789 - DNA, 25 bp, Homo sapien
gagttatcatacaccactgtgactg

SEQ ID NO: 2239790 - DNA, 25 bp, Homo sapien
tcaaaacatatggaatctgggctct

SEQ ID NO: 2239791 - DNA, 25 bp, Homo sapien
gactggagaagccacaattcacttg

SEQ ID NO: 2239792 - DNA, 25 bp, Homo sapien
gaactcttcacagtggaccaaaatg

SEQ ID NO: 2239793 - DNA, 25 bp, Homo sapien
cagtggaccaaaatgaagttatggc

SEQ ID NO: 2239794 - DNA, 25 bp, Homo sapien
ctcgtgctgaaaatgtgatcaaggg

SEQ ID NO: 2239795 - DNA, 25 bp, Homo sapien
tccggtaggataacgggactgccgc

SEQ ID NO: 2239796 - DNA, 25 bp, Homo sapien
aggataacgggactgccgccgccgt

SEQ ID NO: 2239797 - DNA, 25 bp, Homo sapien
tctactccaggatccggtaggataa

SEQ ID NO: 2239798 - DNA, 25 bp, Homo sapien
tccaggatccggtaggataacggga

SEQ ID NO: 2239799 - DNA, 25 bp, Homo sapien
agctcaccgcggctgcctagtagct

SEQ ID NO: 2239800 - DNA, 25 bp, Homo sapien
tcctcgctaagagggcaacgctggc

SEQ ID NO: 2239801 - DNA, 25 bp, Homo sapien
cagctgttgaatggctcgcgtcgag

SEQ ID NO: 2239802 - DNA, 25 bp, Homo sapien
tagtagctcgcgactgcgggttcgt

SEQ ID NO: 2239803 - DNA, 25 bp, Homo sapien
tatgacaacaccgagcctcttctct

SEQ ID NO: 2239804 - DNA, 25 bp, Homo sapien
agcctcttctctcaagcattgctaa

SEQ ID NO: 2239805 - DNA, 25 bp, Homo sapien
acaccgagcctcttctctcaagcat

SEQ ID NO: 2239806 - DNA, 25 bp, Homo sapien
tcttctctcaagcattgctaatgtc

SEQ ID NO: 2239807 - DNA, 25 bp, Homo sapien
gggtctgctagtttacattcaagga

SEQ ID NO: 2239808 - DNA, 25 bp, Homo sapien
tactggatctgctggagtccctctt

SEQ ID NO: 2239809 - DNA, 25 bp, Homo sapien
catatcaggactgaaaggaatcccc

SEQ ID NO: 2239810 - DNA, 25 bp, Homo sapien
tctgagataacacatttagtcagct

SEQ ID NO: 2239811 - DNA, 25 bp, Homo sapien
caaggtgcttagtgggggagtttct

SEQ ID NO: 2239812 - DNA, 25 bp, Homo sapien
gagagtcaggaaagggagaaaggga

SEQ ID NO: 2239813 - DNA, 25 bp, Homo sapien
gggttaatcactcagttaagatggg

SEQ ID NO: 2239814 - DNA, 25 bp, Homo sapien
cagggttaatcactcagttaagatg

SEQ ID NO: 2239815 - DNA, 25 bp, Homo sapien
ccttggcttggtggtcagatttctg

SEQ ID NO: 2239816 - DNA, 25 bp, Homo sapien
ttggcttggtggtcagatttctggc

SEQ ID NO: 2239817 - DNA, 25 bp, Homo sapien
tctgtgatggtctacagggcttttg

SEQ ID NO: 2239818 - DNA, 25 bp, Homo sapien
acagggcttttgaggtgatcgggca

SEQ ID NO: 2239819 - DNA, 25 bp, Homo sapien
accaaatttcactcgagtctgtgtg

SEQ ID NO: 2239820 - DNA, 25 bp, Homo sapien
caaatttcactcgagtctgtgtgaa

SEQ ID NO: 2239821 - DNA, 25 bp, Homo sapien
cggcaccaaatttcactcgagtctg

SEQ ID NO: 2239822 - DNA, 25 bp, Homo sapien
gcaccaaatttcactcgagtctgtg

SEQ ID NO: 2239823 - DNA, 25 bp, Homo sapien
tcaaactgaacaacagccagataga

SEQ ID NO: 2239824 - DNA, 25 bp, Homo sapien
gaggagacttctggttgtcattcac

SEQ ID NO: 2239825 - DNA, 25 bp, Homo sapien
ttgtccattgcccacaacaatcaaa

SEQ ID NO: 2239826 - DNA, 25 bp, Homo sapien
catgtccaaatccacttgtccattg

SEQ ID NO: 2239827 - DNA, 25 bp, Homo sapien
cttcttagaaggggacttgagtgct

SEQ ID NO: 2239828 - DNA, 25 bp, Homo sapien
tgtctgtttatccttcttagaaggg

SEQ ID NO: 2239829 - DNA, 25 bp, Homo sapien
ttcttagaaggggacttgagtgctg

SEQ ID NO: 2239830 - DNA, 25 bp, Homo sapien
cagtgtctgtttatccttcttagaa

SEQ ID NO: 2239831 - DNA, 25 bp, Homo sapien
tgccccagccaggagaatattttta

SEQ ID NO: 2239832 - DNA, 25 bp, Homo sapien
tgtggctaaatacctgaaccctccc

SEQ ID NO: 2239833 - DNA, 25 bp, Homo sapien
ctttcttcgtgtgccaaagtggaaa

SEQ ID NO: 2239834 - DNA, 25 bp, Homo sapien
ttggaccatggcagactcagggagt

SEQ ID NO: 2239835 - DNA, 25 bp, Homo sapien
cagctagtggggacctcaggaacca

SEQ ID NO: 2239836 - DNA, 25 bp, Homo sapien
acaaagtcctatgagatggttcctg

SEQ ID NO: 2239837 - DNA, 25 bp, Homo sapien
ggttccttgcatcgtgttccaccat

SEQ ID NO: 2239838 - DNA, 25 bp, Homo sapien
gagcaactctccagggtggttttcc

SEQ ID NO: 2239839 - DNA, 25 bp, Homo sapien
gatacaggttccttgcatcgtgttc

SEQ ID NO: 2239840 - DNA, 25 bp, Homo sapien
gaattcattgttcacacacttacca

SEQ ID NO: 2239841 - DNA, 25 bp, Homo sapien
ccacattttataaggttgtactgaa

SEQ ID NO: 2239842 - DNA, 25 bp, Homo sapien
gtactgaattgcaaaggttagacct

SEQ ID NO: 2239843 - DNA, 25 bp, Homo sapien
tcatgatcatgtcggagggcaagga

SEQ ID NO: 2239844 - DNA, 25 bp, Homo sapien
ccagaaggatgagaatgagccaact

SEQ ID NO: 2239845 - DNA, 25 bp, Homo sapien
ttacaagtaattgaccacaatcagc

SEQ ID NO: 2239846 - DNA, 25 bp, Homo sapien
caactatgcaaagaaccagggaggg

SEQ ID NO: 2239847 - DNA, 25 bp, Homo sapien
tgtctccccggctgaagtcacaggg

SEQ ID NO: 2239848 - DNA, 25 bp, Homo sapien
caaagtgtactttcagaggaagggc

SEQ ID NO: 2239849 - DNA, 25 bp, Homo sapien
tcaatccaagggcactttacctggg

SEQ ID NO: 2239850 - DNA, 25 bp, Homo sapien
tgataggtgactacgggagctccag

SEQ ID NO: 2239851 - DNA, 25 bp, Homo sapien
tcaaagagagtagcagatgtggcca

SEQ ID NO: 2239852 - DNA, 25 bp, Homo sapien
tatctcgatgactgaagggttcttt

SEQ ID NO: 2239853 - DNA, 25 bp, Homo sapien
gccagtaggatgtagtttgcccata

SEQ ID NO: 2239854 - DNA, 25 bp, Homo sapien
catttgaaatacagacaggatccca

SEQ ID NO: 2239855 - DNA, 25 bp, Homo sapien
gcatgaccttgtctcgcttgcctca

SEQ ID NO: 2239856 - DNA, 25 bp, Homo sapien
tccagcgttcaagtcccgggtgttc

SEQ ID NO: 2239857 - DNA, 25 bp, Homo sapien
gggtttttgtccaggcacatcgtga

SEQ ID NO: 2239858 - DNA, 25 bp, Homo sapien
taaatcggccatttgcttcgctccg

SEQ ID NO: 2239859 - DNA, 25 bp, Homo sapien
gagcgaactctaaagacatggccag

SEQ ID NO: 2239860 - DNA, 25 bp, Homo sapien
ctctcggcatctccgaggcggcgga

SEQ ID NO: 2239861 - DNA, 25 bp, Homo sapien
agcagtttctgagtgacggcctccc

SEQ ID NO: 2239862 - DNA, 25 bp, Homo sapien
gccggcgttagaaagaggaacgcca

SEQ ID NO: 2239863 - DNA, 25 bp, Homo sapien
tcaaggtcgcggcaaggagataact

SEQ ID NO: 2239864 - DNA, 25 bp, Homo sapien
taggtctgaaggtcacgggtccgct

SEQ ID NO: 2239865 - DNA, 25 bp, Homo sapien
ggaggcttaatgctactggtgcaga

SEQ ID NO: 2239866 - DNA, 25 bp, Homo sapien
gagacggaagcagctcaggagactt

SEQ ID NO: 2239867 - DNA, 25 bp, Homo sapien
cctaatgcctctgaacctgggtttg

SEQ ID NO: 2239868 - DNA, 25 bp, Homo sapien
ttatataacatatcttgagcattct

SEQ ID NO: 2239869 - DNA, 25 bp, Homo sapien
tttactggttgaaaatgggaagcaa

SEQ ID NO: 2239870 - DNA, 25 bp, Homo sapien
gcattcttgacagactcctggctgt

SEQ ID NO: 2239871 - DNA, 25 bp, Homo sapien
cagtttctcagtggcaactatttac

SEQ ID NO: 2239872 - DNA, 25 bp, Homo sapien
tgcatattgctgtaacggctgctga

SEQ ID NO: 2239873 - DNA, 25 bp, Homo sapien
tcggaatcgtattctgaccacctgg

SEQ ID NO: 2239874 - DNA, 25 bp, Homo sapien
gaaccgagtcatactgtggagtacc

SEQ ID NO: 2239875 - DNA, 25 bp, Homo sapien
tgtcctgcgtttctcatcactagcc

SEQ ID NO: 2239876 - DNA, 25 bp, Homo sapien
cagagatatcttatgggcagaggca

SEQ ID NO: 2239877 - DNA, 25 bp, Homo sapien
ccttgggcaactttcgtaacatggg

SEQ ID NO: 2239878 - DNA, 25 bp, Homo sapien
tgactggtaacttccgagggcctcg

SEQ ID NO: 2239879 - DNA, 25 bp, Homo sapien
caatacccagtttggcaagaagcag

SEQ ID NO: 2239880 - DNA, 25 bp, Homo sapien
tgtggtcaccaggattcttctcaca

SEQ ID NO: 2239881 - DNA, 25 bp, Homo sapien
gtgtggtcaccaggattcttctcac

SEQ ID NO: 2239882 - DNA, 25 bp, Homo sapien
cttcctttgctctcgtagtatttca

SEQ ID NO: 2239883 - DNA, 25 bp, Homo sapien
ttgctctcgtagtatttcaaggaac

SEQ ID NO: 2239884 - DNA, 25 bp, Homo sapien
tgcagcctcgatagcccaggctcaa

SEQ ID NO: 2239885 - DNA, 25 bp, Homo sapien
tctgccggcctgggcctccaaagtg

SEQ ID NO: 2239886 - DNA, 25 bp, Homo sapien
gcctcgatagcccaggctcaagtga

SEQ ID NO: 2239887 - DNA, 25 bp, Homo sapien
ctcaggcgatctgccggcctgggcc

SEQ ID NO: 2239888 - DNA, 25 bp, Homo sapien
tcagacagcatctgcgggaggatgt

SEQ ID NO: 2239889 - DNA, 25 bp, Homo sapien
ccaatccctgtgttgcagagagggc

SEQ ID NO: 2239890 - DNA, 25 bp, Homo sapien
tctttgcagactttatggcaggcct

SEQ ID NO: 2239891 - DNA, 25 bp, Homo sapien
caaacccctgtgaatagtgtcagac

SEQ ID NO: 2239892 - DNA, 25 bp, Homo sapien
tgtgcttctgtttcaccaggaagaa

SEQ ID NO: 2239893 - DNA, 25 bp, Homo sapien
aagacgtcaagatgagagcttccac

SEQ ID NO: 2239894 - DNA, 25 bp, Homo sapien
caggaagaaatcttgaatgtcagcc

SEQ ID NO: 2239895 - DNA, 25 bp, Homo sapien
tgaaggacactctttgtacaagacg

SEQ ID NO: 2239896 - DNA, 25 bp, Homo sapien
agcatatagggcctgcacgctgagg

SEQ ID NO: 2239897 - DNA, 25 bp, Homo sapien
aatgctggcccagctttttccacca

SEQ ID NO: 2239898 - DNA, 25 bp, Homo sapien
gagggtcagattccaaagccgacag

SEQ ID NO: 2239899 - DNA, 25 bp, Homo sapien
agccaagtgcgtgtggcccaaagta

SEQ ID NO: 2239900 - DNA, 25 bp, Homo sapien
acctgatagtttaccaaaggactca

SEQ ID NO: 2239901 - DNA, 25 bp, Homo sapien
ttgggtcttcatgttccatgatgac

SEQ ID NO: 2239902 - DNA, 25 bp, Homo sapien
gacatttgggtcttcatgttccatg

SEQ ID NO: 2239903 - DNA, 25 bp, Homo sapien
ggtcttcatgttccatgatgacctt

SEQ ID NO: 2239904 - DNA, 25 bp, Homo sapien
caaccgctggtccacccctggaaga

SEQ ID NO: 2239905 - DNA, 25 bp, Homo sapien
agctgctgtgcagccagtaaccagg

SEQ ID NO: 2239906 - DNA, 25 bp, Homo sapien
cagggaggatggctccacctttcat

SEQ ID NO: 2239907 - DNA, 25 bp, Homo sapien
cctgttgttagaaggatttccttct

SEQ ID NO: 2239908 - DNA, 25 bp, Homo sapien
ctccaaaatgtcaacatggctcttc

SEQ ID NO: 2239909 - DNA, 25 bp, Homo sapien
caaaaatatgataagactctccaaa

SEQ ID NO: 2239910 - DNA, 25 bp, Homo sapien
acatggctcttcataccaacagcaa

SEQ ID NO: 2239911 - DNA, 25 bp, Homo sapien
aaatgtcactaattaatagagaaca

SEQ ID NO: 2239912 - DNA, 25 bp, Homo sapien
ttcagaggtggagtggatgacatcc

SEQ ID NO: 2239913 - DNA, 25 bp, Homo sapien
taacagttaatcctgtcccgtagga

SEQ ID NO: 2239914 - DNA, 25 bp, Homo sapien
aggtaaccatacacttgctacaggg

SEQ ID NO: 2239915 - DNA, 25 bp, Homo sapien
ggaaaggtaaaggtcactgtctgga

SEQ ID NO: 2239916 - DNA, 25 bp, Homo sapien
tctcagaatgaggacgggaaacaag

SEQ ID NO: 2239917 - DNA, 25 bp, Homo sapien
gaattggttgcgaagacttcactgg

SEQ ID NO: 2239918 - DNA, 25 bp, Homo sapien
ccagttcttgctagctcacatctaa

SEQ ID NO: 2239919 - DNA, 25 bp, Homo sapien
aagaaggtaacacagccccatcctg

SEQ ID NO: 2239920 - DNA, 25 bp, Homo sapien
gtagcacctcacgaacctgccttgg

SEQ ID NO: 2239921 - DNA, 25 bp, Homo sapien
gataatacaagaaggttaacacaac

SEQ ID NO: 2239922 - DNA, 25 bp, Homo sapien
catctcccggtagcacctcacgaac

SEQ ID NO: 2239923 - DNA, 25 bp, Homo sapien
agataatacaagaaggttaacacaa

SEQ ID NO: 2239924 - DNA, 25 bp, Homo sapien
cacatggatataggtatcattgaag

SEQ ID NO: 2239925 - DNA, 25 bp, Homo sapien
taaaaacatggatacaaacacatgg

SEQ ID NO: 2239926 - DNA, 25 bp, Homo sapien
ggataaaaacatggatacaaacaca

SEQ ID NO: 2239927 - DNA, 25 bp, Homo sapien
atggataaaaacatggatacaaaca

SEQ ID NO: 2239928 - DNA, 25 bp, Homo sapien
aataacatctatatatacaacactc

SEQ ID NO: 2239929 - DNA, 25 bp, Homo sapien
taatctataacgtctccctcccatg

SEQ ID NO: 2239930 - DNA, 25 bp, Homo sapien
aaagatacccaacaaatcattttgt

SEQ ID NO: 2239931 - DNA, 25 bp, Homo sapien
gactagagggtagctccctcccttg

SEQ ID NO: 2239932 - DNA, 25 bp, Homo sapien
gccgtgactacaggggtatgccgcc

SEQ ID NO: 2239933 - DNA, 25 bp, Homo sapien
gtgactacaggggtatgccgccaca

SEQ ID NO: 2239934 - DNA, 25 bp, Homo sapien
tagccgtgactacaggggtatgccg

SEQ ID NO: 2239935 - DNA, 25 bp, Homo sapien
aagtagccgtgactacaggggtatg

SEQ ID NO: 2239936 - DNA, 25 bp, Homo sapien
ctactttcatttggatctgagctgt

SEQ ID NO: 2239937 - DNA, 25 bp, Homo sapien
atttggatctgagctgtcctaccca

SEQ ID NO: 2239938 - DNA, 25 bp, Homo sapien
tttggatctgagctgtcctacccac

SEQ ID NO: 2239939 - DNA, 25 bp, Homo sapien
ctttcatttggatctgagctgtcct

SEQ ID NO: 2239940 - DNA, 25 bp, Homo sapien
tacgggatggctcgcctacagcttc

SEQ ID NO: 2239941 - DNA, 25 bp, Homo sapien
tttgagtataaagtcgatacgggat

SEQ ID NO: 2239942 - DNA, 25 bp, Homo sapien
aagtcgatacgggatggctcgccta

SEQ ID NO: 2239943 - DNA, 25 bp, Homo sapien
tacagcttcagtgtttgaagtaaag

SEQ ID NO: 2239944 - DNA, 25 bp, Homo sapien
catggtgcttttcctatgacacacc

SEQ ID NO: 2239945 - DNA, 25 bp, Homo sapien
ttcatggtgcttttcctatgacaca

SEQ ID NO: 2239946 - DNA, 25 bp, Homo sapien
gtgcttttcctatgacacaccataa

SEQ ID NO: 2239947 - DNA, 25 bp, Homo sapien
tcctatgacacaccataatattttg

SEQ ID NO: 2239948 - DNA, 25 bp, Homo sapien
cataaataggaatccgtctatgtaa

SEQ ID NO: 2239949 - DNA, 25 bp, Homo sapien
ctctagtctagggcttagaaaaagg

SEQ ID NO: 2239950 - DNA, 25 bp, Homo sapien
tctagtctagggcttagaaaaaggc

SEQ ID NO: 2239951 - DNA, 25 bp, Homo sapien
cctctagtctagggcttagaaaaag

SEQ ID NO: 2239952 - DNA, 25 bp, Homo sapien
actggttgtcaatcaaggtcccctt

SEQ ID NO: 2239953 - DNA, 25 bp, Homo sapien
tggttgtcaatcaaggtccccttca

SEQ ID NO: 2239954 - DNA, 25 bp, Homo sapien
aactggttgtcaatcaaggtcccct

SEQ ID NO: 2239955 - DNA, 25 bp, Homo sapien
ctggttgtcaatcaaggtccccttc

SEQ ID NO: 2239956 - DNA, 25 bp, Homo sapien
tgtgcatatgagtcagcaacttccc

SEQ ID NO: 2239957 - DNA, 25 bp, Homo sapien
cagctgtttttcaatcactttggca

SEQ ID NO: 2239958 - DNA, 25 bp, Homo sapien
agctcttgcagtcgcctcttgctca

SEQ ID NO: 2239959 - DNA, 25 bp, Homo sapien
ctttggcattctgtgcatatgagtc

SEQ ID NO: 2239960 - DNA, 25 bp, Homo sapien
ttgcccatgtctttggtccgtttgg

SEQ ID NO: 2239961 - DNA, 25 bp, Homo sapien
tatatatgttcgttttcccaaagcc

SEQ ID NO: 2239962 - DNA, 25 bp, Homo sapien
gagtatatatgttcgttttcccaaa

SEQ ID NO: 2239963 - DNA, 25 bp, Homo sapien
tctgagtatatatgttcgttttccc

SEQ ID NO: 2239964 - DNA, 25 bp, Homo sapien
tttctgagtatatatgttcgttttc

SEQ ID NO: 2239965 - DNA, 25 bp, Homo sapien
ttggagaaacccacattgttaatac

SEQ ID NO: 2239966 - DNA, 25 bp, Homo sapien
cttggagaaacccacattgttaata

SEQ ID NO: 2239967 - DNA, 25 bp, Homo sapien
gagaaacccacattgttaatactta

SEQ ID NO: 2239968 - DNA, 25 bp, Homo sapien
tggagaaacccacattgttaatact

SEQ ID NO: 2239969 - DNA, 25 bp, Homo sapien
cacatttcttcctgtactgtcgttc

SEQ ID NO: 2239970 - DNA, 25 bp, Homo sapien
catttcttcctgtactgtcgttcaa

SEQ ID NO: 2239971 - DNA, 25 bp, Homo sapien
tgtactgtcgttcaatgccttcagg

SEQ ID NO: 2239972 - DNA, 25 bp, Homo sapien
tttgcacatttcttcctgtactgtc

SEQ ID NO: 2239973 - DNA, 25 bp, Homo sapien
tggcagcatcaatcacacgggaccg

SEQ ID NO: 2239974 - DNA, 25 bp, Homo sapien
gcctcatgggcaatttctctaactg

SEQ ID NO: 2239975 - DNA, 25 bp, Homo sapien
tctgtgttacaaaacttatgggcat

SEQ ID NO: 2239976 - DNA, 25 bp, Homo sapien
aaaacttatgggcatgtttggcagc

SEQ ID NO: 2239977 - DNA, 25 bp, Homo sapien
tcaagaacccgaagtctggctcctt

SEQ ID NO: 2239978 - DNA, 25 bp, Homo sapien
gccagaggaaattcgccttcaagaa

SEQ ID NO: 2239979 - DNA, 25 bp, Homo sapien
tcgccttcaagaacccgaagtctgg

SEQ ID NO: 2239980 - DNA, 25 bp, Homo sapien
atcacagccagaggaaattcgcctt

SEQ ID NO: 2239981 - DNA, 25 bp, Homo sapien
tactgaccgagacactactttcggc

SEQ ID NO: 2239982 - DNA, 25 bp, Homo sapien
tcagagcagactactgaccgagaca

SEQ ID NO: 2239983 - DNA, 25 bp, Homo sapien
tcgccgtcgtcatattcctcccggt

SEQ ID NO: 2239984 - DNA, 25 bp, Homo sapien
ctcccggtcccgagtgtcagagcag

SEQ ID NO: 2239985 - DNA, 25 bp, Homo sapien
ccgaaatgacgtcacgagtgcgcct

SEQ ID NO: 2239986 - DNA, 25 bp, Homo sapien
caagaagagggtcgccccgaaatga

SEQ ID NO: 2239987 - DNA, 25 bp, Homo sapien
tcacgagtgcgccttgcaccttttc

SEQ ID NO: 2239988 - DNA, 25 bp, Homo sapien
gcaatctgaaaactctacgccaaga

SEQ ID NO: 2239989 - DNA, 25 bp, Homo sapien
agagttgccgctttttgagaaccgg

SEQ ID NO: 2239990 - DNA, 25 bp, Homo sapien
gggttgtgcaccctagagttgccgc

SEQ ID NO: 2239991 - DNA, 25 bp, Homo sapien
gattttccgtgattttaaccaatca

SEQ ID NO: 2239992 - DNA, 25 bp, Homo sapien
cactccttcgtcctctagtttggga

SEQ ID NO: 2239993 - DNA, 25 bp, Homo sapien
actggggtggtgcttagccggcgcc

SEQ ID NO: 2239994 - DNA, 25 bp, Homo sapien
ctacactggggtggtgcttagccgg

SEQ ID NO: 2239995 - DNA, 25 bp, Homo sapien
gggtggtgcttagccggcgccagac

SEQ ID NO: 2239996 - DNA, 25 bp, Homo sapien
ggtgcttagccggcgccagaccgac

SEQ ID NO: 2239997 - DNA, 25 bp, Homo sapien
cccctgaccccgctcgcgacatgtc

SEQ ID NO: 2239998 - DNA, 25 bp, Homo sapien
gttcctctgggtgcttccgcctccc

SEQ ID NO: 2239999 - DNA, 25 bp, Homo sapien
gggaacccgagaccccagtgtatgc

SEQ ID NO: 2240000 - DNA, 25 bp, Homo sapien
tcgcgacatgtccaccccggctcgg

SEQ ID NO: 2240001 - DNA, 25 bp, Homo sapien
attagctcagttcccgctgccaggg

SEQ ID NO: 2240002 - DNA, 25 bp, Homo sapien
tcccgaaggttgcaggaggatcctc

SEQ ID NO: 2240003 - DNA, 25 bp, Homo sapien
ggctccgtccgagaacaacataatg

SEQ ID NO: 2240004 - DNA, 25 bp, Homo sapien
caacataatggtgtggaacgcggtc

SEQ ID NO: 2240005 - DNA, 25 bp, Homo sapien
tcatctcaagtacttagatttcccc

SEQ ID NO: 2240006 - DNA, 25 bp, Homo sapien
atctcaagtacttagatttccccag

SEQ ID NO: 2240007 - DNA, 25 bp, Homo sapien
catctcaagtacttagatttcccca

SEQ ID NO: 2240008 - DNA, 25 bp, Homo sapien
cccctgggtaaatatcattactctt

SEQ ID NO: 2240009 - DNA, 25 bp, Homo sapien
ccccctgggtaaatatcattactct

SEQ ID NO: 2240010 - DNA, 25 bp, Homo sapien
tactggttctatttttgatgatgtg

SEQ ID NO: 2240011 - DNA, 25 bp, Homo sapien
tctatttttgatgatgtgtatctcc

SEQ ID NO: 2240012 - DNA, 25 bp, Homo sapien
tatttttgatgatgtgtatctccat

SEQ ID NO: 2240013 - DNA, 25 bp, Homo sapien
gttctatttttgatgatgtgtatct

SEQ ID NO: 2240014 - DNA, 25 bp, Homo sapien
catgtctgtggatagctagggaccc

SEQ ID NO: 2240015 - DNA, 25 bp, Homo sapien
gggatacagcctacaaatttggtgg

SEQ ID NO: 2240016 - DNA, 25 bp, Homo sapien
tgaaggccaggcatacggtattgtc

SEQ ID NO: 2240017 - DNA, 25 bp, Homo sapien
tagtagtaagcctagaacagcttgc

SEQ ID NO: 2240018 - DNA, 25 bp, Homo sapien
ttggagtccaacctatgatgtgtct

SEQ ID NO: 2240019 - DNA, 25 bp, Homo sapien
catacttcagaaccgttggagtcca

SEQ ID NO: 2240020 - DNA, 25 bp, Homo sapien
gatgtgtcttccattctaacatcca

SEQ ID NO: 2240021 - DNA, 25 bp, Homo sapien
cagatggtagtatatgtctggacat

SEQ ID NO: 2240022 - DNA, 25 bp, Homo sapien
tctgcaatagtagaacaaagctggc

SEQ ID NO: 2240023 - DNA, 25 bp, Homo sapien
gctgtaccaggagaacaaacgggaa

SEQ ID NO: 2240024 - DNA, 25 bp, Homo sapien
gatgaacccaatcccaatagtccag

SEQ ID NO: 2240025 - DNA, 25 bp, Homo sapien
aaagctggcgtgattgttgaccccg

SEQ ID NO: 2240026 - DNA, 25 bp, Homo sapien
tatgcttagcttgatgaccaggatg

SEQ ID NO: 2240027 - DNA, 25 bp, Homo sapien
aagggagcatagcatatctgtggca

SEQ ID NO: 2240028 - DNA, 25 bp, Homo sapien
tacctttaagtagcagtatgggaca

SEQ ID NO: 2240029 - DNA, 25 bp, Homo sapien
tgaagtgtttcatcctggctggtcc

SEQ ID NO: 2240030 - DNA, 25 bp, Homo sapien
aaacaacatatgcatggtcaaaggc

SEQ ID NO: 2240031 - DNA, 25 bp, Homo sapien
tcccaacaaagtgcatgatattgcc

SEQ ID NO: 2240032 - DNA, 25 bp, Homo sapien
tcaattctgcacgtgctgatgtggg

SEQ ID NO: 2240033 - DNA, 25 bp, Homo sapien
aatttttaacaccacaggctacatg

SEQ ID NO: 2240034 - DNA, 25 bp, Homo sapien
taagaagttaggcaatctggcccct

SEQ ID NO: 2240035 - DNA, 25 bp, Homo sapien
gaacaaaatggaacaacagcaagct

SEQ ID NO: 2240036 - DNA, 25 bp, Homo sapien
tatttgggagccttcctaactgtaa

SEQ ID NO: 2240037 - DNA, 25 bp, Homo sapien
tgttggactcacctagacaaaccag

SEQ ID NO: 2240038 - DNA, 25 bp, Homo sapien
ttttgagagagggaccagccaactg

SEQ ID NO: 2240039 - DNA, 25 bp, Homo sapien
ccagaaataagcgaaaatagcagtt

SEQ ID NO: 2240040 - DNA, 25 bp, Homo sapien
tattcaggaagcatacactaattct

SEQ ID NO: 2240041 - DNA, 25 bp, Homo sapien
caggcttaataagctttttgagaga

SEQ ID NO: 2240042 - DNA, 25 bp, Homo sapien
cttcagtcttttaccaagctctacc

SEQ ID NO: 2240043 - DNA, 25 bp, Homo sapien
tgtggttgccttggatgtgctgcac

SEQ ID NO: 2240044 - DNA, 25 bp, Homo sapien
tgtgctgcacatccaaaccgtgtga

SEQ ID NO: 2240045 - DNA, 25 bp, Homo sapien
tcaaagcaccaatgtatcttcagtc

SEQ ID NO: 2240046 - DNA, 25 bp, Homo sapien
tcctttcttcagattgaaccaaagt

SEQ ID NO: 2240047 - DNA, 25 bp, Homo sapien
ggcaccaagaacaaacagttcaagc

SEQ ID NO: 2240048 - DNA, 25 bp, Homo sapien
tgctctctcagcgtgaagactagaa

SEQ ID NO: 2240049 - DNA, 25 bp, Homo sapien
caatagtctggaaatcacatggtag

SEQ ID NO: 2240050 - DNA, 25 bp, Homo sapien
tattgtcaaacattctataactggc

SEQ ID NO: 2240051 - DNA, 25 bp, Homo sapien
tagattaatacaaaatgatctgaca

SEQ ID NO: 2240052 - DNA, 25 bp, Homo sapien
cagcacaatttattgtcaaacattc

SEQ ID NO: 2240053 - DNA, 25 bp, Homo sapien
aactggcttcacacaaagatgaaaa

SEQ ID NO: 2240054 - DNA, 25 bp, Homo sapien
caagtggacagaattctttaggttc

SEQ ID NO: 2240055 - DNA, 25 bp, Homo sapien
cttatgaatatactctgcaaccgga

SEQ ID NO: 2240056 - DNA, 25 bp, Homo sapien
cacaatatcatctgctggattaagc

SEQ ID NO: 2240057 - DNA, 25 bp, Homo sapien
tgttgcagattgctgtgctatgccc

SEQ ID NO: 2240058 - DNA, 25 bp, Homo sapien
gcctcattaggcatttacaaaataa

SEQ ID NO: 2240059 - DNA, 25 bp, Homo sapien
tttctttaattcaaaaatctgcctc

SEQ ID NO: 2240060 - DNA, 25 bp, Homo sapien
tctgcctcattaggcatttacaaaa

SEQ ID NO: 2240061 - DNA, 25 bp, Homo sapien
aattcaaaaatctgcctcattaggc

SEQ ID NO: 2240062 - DNA, 25 bp, Homo sapien
caagctcgtaatggcccacttggcc

SEQ ID NO: 2240063 - DNA, 25 bp, Homo sapien
tttgcttgaggcataacaagctcgt

SEQ ID NO: 2240064 - DNA, 25 bp, Homo sapien
taccactaggtacctatcatggccc

SEQ ID NO: 2240065 - DNA, 25 bp, Homo sapien
cctgtttgagctgatctagtaggtc

SEQ ID NO: 2240066 - DNA, 25 bp, Homo sapien
ctttgcatttccagcggaggcctgt

SEQ ID NO: 2240067 - DNA, 25 bp, Homo sapien
tctttcactgagataggctcccgta

SEQ ID NO: 2240068 - DNA, 25 bp, Homo sapien
aagtcaaatctgtgtggctctcgga

SEQ ID NO: 2240069 - DNA, 25 bp, Homo sapien
gaagaattttcaaagcctcgtcggc

SEQ ID NO: 2240070 - DNA, 25 bp, Homo sapien
tgtaaaaacactcgacaacgccatg

SEQ ID NO: 2240071 - DNA, 25 bp, Homo sapien
taaaaattggctgcccggaagcatc

SEQ ID NO: 2240072 - DNA, 25 bp, Homo sapien
cataggaggacatgccaatctgaca

SEQ ID NO: 2240073 - DNA, 25 bp, Homo sapien
tcggctaccacagactcgggaaatg

SEQ ID NO: 2240074 - DNA, 25 bp, Homo sapien
aatgtacaggctcaaaacgaggtct

SEQ ID NO: 2240075 - DNA, 25 bp, Homo sapien
cgaggtctcgcatggaatttggaac

SEQ ID NO: 2240076 - DNA, 25 bp, Homo sapien
ctacaaaatgtacaggctcaaaacg

SEQ ID NO: 2240077 - DNA, 25 bp, Homo sapien
tcaaaacgaggtctcgcatggaatt

SEQ ID NO: 2240078 - DNA, 25 bp, Homo sapien
tcacatgttgagaggtggcgttttt

SEQ ID NO: 2240079 - DNA, 25 bp, Homo sapien
catgttgagaggtggcgtttttgac

SEQ ID NO: 2240080 - DNA, 25 bp, Homo sapien
cacatgttgagaggtggcgtttttg

SEQ ID NO: 2240081 - DNA, 25 bp, Homo sapien
catcacatgttgagaggtggcgttt

SEQ ID NO: 2240082 - DNA, 25 bp, Homo sapien
ccccaatatcaataccttcagccat

SEQ ID NO: 2240083 - DNA, 25 bp, Homo sapien
ctccccaatatcaataccttcagcc

SEQ ID NO: 2240084 - DNA, 25 bp, Homo sapien
tccccaatatcaataccttcagcca

SEQ ID NO: 2240085 - DNA, 25 bp, Homo sapien
gactttatcaacagggtatcttggc

SEQ ID NO: 2240086 - DNA, 25 bp, Homo sapien
gaaatggaatcagggtccttagaga

SEQ ID NO: 2240087 - DNA, 25 bp, Homo sapien
taagccagtcttataattgctccca

SEQ ID NO: 2240088 - DNA, 25 bp, Homo sapien
tagactcttactggcaaagtgagcc

SEQ ID NO: 2240089 - DNA, 25 bp, Homo sapien
caagagtcttcattggcccttccct

SEQ ID NO: 2240090 - DNA, 25 bp, Homo sapien
aagcccatctaaagactgcacttgg

SEQ ID NO: 2240091 - DNA, 25 bp, Homo sapien
gaagatgagaggtaacataaagccc

SEQ ID NO: 2240092 - DNA, 25 bp, Homo sapien
ggtccctagcttccaagagtcttca

SEQ ID NO: 2240093 - DNA, 25 bp, Homo sapien
acgtggttggtccaggcggcggaga

SEQ ID NO: 2240094 - DNA, 25 bp, Homo sapien
ttcgtggctatagcgccactgctcc

SEQ ID NO: 2240095 - DNA, 25 bp, Homo sapien
agcccactgccagtcactttcgtgg

SEQ ID NO: 2240096 - DNA, 25 bp, Homo sapien
tgtgcaggtgccgacagatgaagct

SEQ ID NO: 2240097 - DNA, 25 bp, Homo sapien
aggctccgcacctccacggatccgc

SEQ ID NO: 2240098 - DNA, 25 bp, Homo sapien
tccgcacctccacggatccgcagac

SEQ ID NO: 2240099 - DNA, 25 bp, Homo sapien
acctccacggatccgcagacccacg

SEQ ID NO: 2240100 - DNA, 25 bp, Homo sapien
gcacctccacggatccgcagaccca

SEQ ID NO: 2240101 - DNA, 25 bp, Homo sapien
ttgcgccgcggctgttccctaactt

SEQ ID NO: 2240102 - DNA, 25 bp, Homo sapien
ctaacttccaaatcccgtcgcagaa

SEQ ID NO: 2240103 - DNA, 25 bp, Homo sapien
cagtgacgactacgggcctttgacg

SEQ ID NO: 2240104 - DNA, 25 bp, Homo sapien
gaatctcgcgcgacgtacttttttc

SEQ ID NO: 2240105 - DNA, 25 bp, Homo sapien
taaggaaaggatgcatgccctgatg

SEQ ID NO: 2240106 - DNA, 25 bp, Homo sapien
tcctagtgtgtgagctgcgcagagc

SEQ ID NO: 2240107 - DNA, 25 bp, Homo sapien
tcctaagggccaccagagttcttta

SEQ ID NO: 2240108 - DNA, 25 bp, Homo sapien
tgggaggctccgctctctagtagac

SEQ ID NO: 2240109 - DNA, 25 bp, Homo sapien
actcctcaggcaaaccgtggtgggc

SEQ ID NO: 2240110 - DNA, 25 bp, Homo sapien
ttcaaatcacccactcagaaggcag

SEQ ID NO: 2240111 - DNA, 25 bp, Homo sapien
ggtgggccgcatcacccagtgactt

SEQ ID NO: 2240112 - DNA, 25 bp, Homo sapien
tcttgttccgtaggctctggcgctc

SEQ ID NO: 2240113 - DNA, 25 bp, Homo sapien
ggacacagggacacatgaacacttg

SEQ ID NO: 2240114 - DNA, 25 bp, Homo sapien
ttctcctggagaatgaaagccccag

SEQ ID NO: 2240115 - DNA, 25 bp, Homo sapien
taacagtggctgtagacagtcaacc

SEQ ID NO: 2240116 - DNA, 25 bp, Homo sapien
tactttcatacccacagctgaggtg

SEQ ID NO: 2240117 - DNA, 25 bp, Homo sapien
gggcgcctccggtttgtaatgcaaa

SEQ ID NO: 2240118 - DNA, 25 bp, Homo sapien
taatgcaaataattaccgggcggcg

SEQ ID NO: 2240119 - DNA, 25 bp, Homo sapien
ttataagggtcacctagggcacctg

SEQ ID NO: 2240120 - DNA, 25 bp, Homo sapien
tctgaaggtctctccaaggctgtgt

SEQ ID NO: 2240121 - DNA, 25 bp, Homo sapien
ctattcagtacacagccatggatta

SEQ ID NO: 2240122 - DNA, 25 bp, Homo sapien
ggacagtatggagcccttccggaaa

SEQ ID NO: 2240123 - DNA, 25 bp, Homo sapien
gagagacggcatgttagccacagat

SEQ ID NO: 2240124 - DNA, 25 bp, Homo sapien
ggcctcaccttattgggacagtatg

SEQ ID NO: 2240125 - DNA, 25 bp, Homo sapien
cagttttccagcctacaaagtggga

SEQ ID NO: 2240126 - DNA, 25 bp, Homo sapien
tggttacccagccatggtggttgca

SEQ ID NO: 2240127 - DNA, 25 bp, Homo sapien
cagctgtgctgatcggtggttaccc

SEQ ID NO: 2240128 - DNA, 25 bp, Homo sapien
gatgcatctgcgagccacatgactg

SEQ ID NO: 2240129 - DNA, 25 bp, Homo sapien
tacctcagggaaactaacagcaacc

SEQ ID NO: 2240130 - DNA, 25 bp, Homo sapien
catcttccaatttcaagcgattctc

SEQ ID NO: 2240131 - DNA, 25 bp, Homo sapien
ctgcacccggctcttttttgttgtt

SEQ ID NO: 2240132 - DNA, 25 bp, Homo sapien
aacctccatcttccaatttcaagcg

SEQ ID NO: 2240133 - DNA, 25 bp, Homo sapien
cctccatcttccaatttcaagcgat

SEQ ID NO: 2240134 - DNA, 25 bp, Homo sapien
tgaggtagagtatctgcaacgatgt

SEQ ID NO: 2240135 - DNA, 25 bp, Homo sapien
gagctataagtagtgcctcaagcaa

SEQ ID NO: 2240136 - DNA, 25 bp, Homo sapien
tctaggtttcatgggaaggctgacg

SEQ ID NO: 2240137 - DNA, 25 bp, Homo sapien
tatactgtgcactcctaaggaccaa

SEQ ID NO: 2240138 - DNA, 25 bp, Homo sapien
gactcgttggtctgaaattgctttc

SEQ ID NO: 2240139 - DNA, 25 bp, Homo sapien
tctgcctgcattctaggtggccttc

SEQ ID NO: 2240140 - DNA, 25 bp, Homo sapien
ggccttcgtgatccaccccttgaat

SEQ ID NO: 2240141 - DNA, 25 bp, Homo sapien
caccccttgaatgagggctttgagg

SEQ ID NO: 2240142 - DNA, 25 bp, Homo sapien
gccaggaagagccaacctacttggg

SEQ ID NO: 2240143 - DNA, 25 bp, Homo sapien
caggaagagccaacctacttggggt

SEQ ID NO: 2240144 - DNA, 25 bp, Homo sapien
tgccaggaagagccaacctacttgg

SEQ ID NO: 2240145 - DNA, 25 bp, Homo sapien
ccaggaagagccaacctacttgggg

SEQ ID NO: 2240146 - DNA, 25 bp, Homo sapien
tcatgggccttatgttgcagaaacc

SEQ ID NO: 2240147 - DNA, 25 bp, Homo sapien
taagcaactgtgtcaagccacgtgc

SEQ ID NO: 2240148 - DNA, 25 bp, Homo sapien
gtttaattccagtcaactagcaggg

SEQ ID NO: 2240149 - DNA, 25 bp, Homo sapien
gacacttcactacgcactggaacta

SEQ ID NO: 2240150 - DNA, 25 bp, Homo sapien
gaagccactgccagttctatttaga

SEQ ID NO: 2240151 - DNA, 25 bp, Homo sapien
cagctagaccaatgaagcagcttct

SEQ ID NO: 2240152 - DNA, 25 bp, Homo sapien
tctacgattagatgcttgtgttggg

SEQ ID NO: 2240153 - DNA, 25 bp, Homo sapien
ctgcatattataagtcacgagagaa

SEQ ID NO: 2240154 - DNA, 25 bp, Homo sapien
caggaccctgggtctcatgcagcat

SEQ ID NO: 2240155 - DNA, 25 bp, Homo sapien
gaccctgggtctcatgcagcatgca

SEQ ID NO: 2240156 - DNA, 25 bp, Homo sapien
cctgggtctcatgcagcatgcagca

SEQ ID NO: 2240157 - DNA, 25 bp, Homo sapien
ggtctcatgcagcatgcagcaaaca

SEQ ID NO: 2240158 - DNA, 25 bp, Homo sapien
gatccaaccaccatctctcaagaag

SEQ ID NO: 2240159 - DNA, 25 bp, Homo sapien
tagcacaggtctaacggtggctctt

SEQ ID NO: 2240160 - DNA, 25 bp, Homo sapien
caaaactcactaccgtgactatggg

SEQ ID NO: 2240161 - DNA, 25 bp, Homo sapien
gaagccaagattcagggccacttct

SEQ ID NO: 2240162 - DNA, 25 bp, Homo sapien
ggtgcaccgagtttctgctaaaggc

SEQ ID NO: 2240163 - DNA, 25 bp, Homo sapien
ctacggccatggagaggtgagcaac

SEQ ID NO: 2240164 - DNA, 25 bp, Homo sapien
gattattgacccacatggtatccag

SEQ ID NO: 2240165 - DNA, 25 bp, Homo sapien
gcaacctcagatatagggcaagggt

SEQ ID NO: 2240166 - DNA, 25 bp, Homo sapien
ggatgctgggaccagttataggtac

SEQ ID NO: 2240167 - DNA, 25 bp, Homo sapien
tatattgctgcacctctaatttttt

SEQ ID NO: 2240168 - DNA, 25 bp, Homo sapien
tgttcctctcttatattgctgcacc

SEQ ID NO: 2240169 - DNA, 25 bp, Homo sapien
taggtacctcaaccagtctgacagc

SEQ ID NO: 2240170 - DNA, 25 bp, Homo sapien
ggaggaaagagaaggcaccacccca

SEQ ID NO: 2240171 - DNA, 25 bp, Homo sapien
gaaagagaaggcaccaccccagagc

SEQ ID NO: 2240172 - DNA, 25 bp, Homo sapien
agcaggaggaaagagaaggcaccac

SEQ ID NO: 2240173 - DNA, 25 bp, Homo sapien
ccaccccagagcagcctgctactta

SEQ ID NO: 2240174 - DNA, 25 bp, Homo sapien
ttcagagtctgtgagcctccagcct

SEQ ID NO: 2240175 - DNA, 25 bp, Homo sapien
cttgaaagcattcacttcatcatcc

SEQ ID NO: 2240176 - DNA, 25 bp, Homo sapien
gcttgaaagcattcacttcatcatc

SEQ ID NO: 2240177 - DNA, 25 bp, Homo sapien
acagtgtccggcccaatgtttggat

SEQ ID NO: 2240178 - DNA, 25 bp, Homo sapien
gagccacagtgtccggcccaatgtt

SEQ ID NO: 2240179 - DNA, 25 bp, Homo sapien
actcatgtccttctaaagaacatcc

SEQ ID NO: 2240180 - DNA, 25 bp, Homo sapien
tcatgtccttctaaagaacatcctc

SEQ ID NO: 2240181 - DNA, 25 bp, Homo sapien
taggaactcgttccttttggcctca

SEQ ID NO: 2240182 - DNA, 25 bp, Homo sapien
ctttctctttgactcgctggacgaa

SEQ ID NO: 2240183 - DNA, 25 bp, Homo sapien
tctttgactcgctggacgaacatct

SEQ ID NO: 2240184 - DNA, 25 bp, Homo sapien
tcgctggacgaacatctgtctcatc

SEQ ID NO: 2240185 - DNA, 25 bp, Homo sapien
catgtgtgtgtggtgatcagccttg

SEQ ID NO: 2240186 - DNA, 25 bp, Homo sapien
aaggcggcggtacttcccaagcctg

SEQ ID NO: 2240187 - DNA, 25 bp, Homo sapien
ccttgcccttaaaagcaaggcggcg

SEQ ID NO: 2240188 - DNA, 25 bp, Homo sapien
cttggagctgtcatggatgcgtgca

SEQ ID NO: 2240189 - DNA, 25 bp, Homo sapien
gatacagctcatagtgccgggtgtg

SEQ ID NO: 2240190 - DNA, 25 bp, Homo sapien
gcagatcctccatgttgacccgaat

SEQ ID NO: 2240191 - DNA, 25 bp, Homo sapien
tcctccagcttacagcggcgataca

SEQ ID NO: 2240192 - DNA, 25 bp, Homo sapien
caaagtcgcagtgggcctcgttttc

SEQ ID NO: 2240193 - DNA, 25 bp, Homo sapien
tctggcctgtgtgaacaagtcccct

SEQ ID NO: 2240194 - DNA, 25 bp, Homo sapien
caaggtggctacaggtatggcttca

SEQ ID NO: 2240195 - DNA, 25 bp, Homo sapien
gcaaaatcgatttctggctggacca

SEQ ID NO: 2240196 - DNA, 25 bp, Homo sapien
tggaccaggtcacgaggagcacttt

SEQ ID NO: 2240197 - DNA, 25 bp, Homo sapien
tgggtccagaaaccatttgcaaacg

SEQ ID NO: 2240198 - DNA, 25 bp, Homo sapien
ggcttctcctcgtctcacttcaggt

SEQ ID NO: 2240199 - DNA, 25 bp, Homo sapien
tctgtttaggttcagagtagtccac

SEQ ID NO: 2240200 - DNA, 25 bp, Homo sapien
gtttctcagaccacaagtccattcc

SEQ ID NO: 2240201 - DNA, 25 bp, Homo sapien
tctttcacacgatgcccctatcagc

SEQ ID NO: 2240202 - DNA, 25 bp, Homo sapien
accagagacctcttctacccacagc

SEQ ID NO: 2240203 - DNA, 25 bp, Homo sapien
cccagtttctagctgtagactctga

SEQ ID NO: 2240204 - DNA, 25 bp, Homo sapien
gtcttgtgcactgaactgactagcc

SEQ ID NO: 2240205 - DNA, 25 bp, Homo sapien
aggatactgccgcgccctcatcatc

SEQ ID NO: 2240206 - DNA, 25 bp, Homo sapien
atactgccgcgccctcatcatcttg

SEQ ID NO: 2240207 - DNA, 25 bp, Homo sapien
gccaatgacagcaaacggcaggtgg

SEQ ID NO: 2240208 - DNA, 25 bp, Homo sapien
caatgacagcaaacggcaggtgggc

SEQ ID NO: 2240209 - DNA, 25 bp, Homo sapien
aaaccgaaggcaaacgaaagctgag

SEQ ID NO: 2240210 - DNA, 25 bp, Homo sapien
ctgaaaccgaaggcaaacgaaagct

SEQ ID NO: 2240211 - DNA, 25 bp, Homo sapien
tgaaaccgaaggcaaacgaaagctg

SEQ ID NO: 2240212 - DNA, 25 bp, Homo sapien
accgaaggcaaacgaaagctgagaa

SEQ ID NO: 2240213 - DNA, 25 bp, Homo sapien
gaaaggcactgagtgttacacaacc

SEQ ID NO: 2240214 - DNA, 25 bp, Homo sapien
agaaaggcactgagtgttacacaac

SEQ ID NO: 2240215 - DNA, 25 bp, Homo sapien
aggcactgagtgttacacaacccaa

SEQ ID NO: 2240216 - DNA, 25 bp, Homo sapien
aaggcactgagtgttacacaaccca

SEQ ID NO: 2240217 - DNA, 25 bp, Homo sapien
tcacagagccgtaatccacaaggag

SEQ ID NO: 2240218 - DNA, 25 bp, Homo sapien
gctcaagtatatggtctggtaccct

SEQ ID NO: 2240219 - DNA, 25 bp, Homo sapien
tacaccaacaggtaaagagcctatg

SEQ ID NO: 2240220 - DNA, 25 bp, Homo sapien
tgtaagtgctaagtcaccacagcca

SEQ ID NO: 2240221 - DNA, 25 bp, Homo sapien
tttgctctcaagtcaaccactggtg

SEQ ID NO: 2240222 - DNA, 25 bp, Homo sapien
caagaccattggctgatttgctctc

SEQ ID NO: 2240223 - DNA, 25 bp, Homo sapien
tatgttagtccccatttcaggcccc

SEQ ID NO: 2240224 - DNA, 25 bp, Homo sapien
ggtggacagtgtttcccagttatgt

SEQ ID NO: 2240225 - DNA, 25 bp, Homo sapien
ggaaataccattgctgtctcagagg

SEQ ID NO: 2240226 - DNA, 25 bp, Homo sapien
gaggatgcagcttcatacaccacgg

SEQ ID NO: 2240227 - DNA, 25 bp, Homo sapien
tgacatagttgttcggtggcaggca

SEQ ID NO: 2240228 - DNA, 25 bp, Homo sapien
gaaaatagcatgcaacaagacctcg

SEQ ID NO: 2240229 - DNA, 25 bp, Homo sapien
gaatcccttcacagccataacagca

SEQ ID NO: 2240230 - DNA, 25 bp, Homo sapien
tatgagtaataaaggacccagaatc

SEQ ID NO: 2240231 - DNA, 25 bp, Homo sapien
gttgttcagcctcgaattttgtttc

SEQ ID NO: 2240232 - DNA, 25 bp, Homo sapien
gccataacagcatgcttgacaactg

SEQ ID NO: 2240233 - DNA, 25 bp, Homo sapien
tgataacaaacacatctcgggtgta

SEQ ID NO: 2240234 - DNA, 25 bp, Homo sapien
atttgtctaagatggtgatggtgat

SEQ ID NO: 2240235 - DNA, 25 bp, Homo sapien
tggtgataacaaacacatctcgggt

SEQ ID NO: 2240236 - DNA, 25 bp, Homo sapien
gatttgtctaagatggtgatggtga

SEQ ID NO: 2240237 - DNA, 25 bp, Homo sapien
tgacaagctcgctggtgattttgat

SEQ ID NO: 2240238 - DNA, 25 bp, Homo sapien
tctgccaccgactcatcatctgtag

SEQ ID NO: 2240239 - DNA, 25 bp, Homo sapien
tgatagatctggactccgttgctga

SEQ ID NO: 2240240 - DNA, 25 bp, Homo sapien
tgttagctcactcttcgaaatggca

SEQ ID NO: 2240241 - DNA, 25 bp, Homo sapien
caagcagacatggattcgggagtca

SEQ ID NO: 2240242 - DNA, 25 bp, Homo sapien
aggtaggcctcgaattgtgcatcga

SEQ ID NO: 2240243 - DNA, 25 bp, Homo sapien
catcgatgaattccacgataggctt

SEQ ID NO: 2240244 - DNA, 25 bp, Homo sapien
gtgtagcactcttcggatctttagc

SEQ ID NO: 2240245 - DNA, 25 bp, Homo sapien
gaaatctgtagtgataccctgtgcc

SEQ ID NO: 2240246 - DNA, 25 bp, Homo sapien
cagtgactcatcttcccacggtggc

SEQ ID NO: 2240247 - DNA, 25 bp, Homo sapien
tcaagatgtacatggatcagaccag

SEQ ID NO: 2240248 - DNA, 25 bp, Homo sapien
tgtagacgaatcctaaatgggtggc

SEQ ID NO: 2240249 - DNA, 25 bp, Homo sapien
ggctggctccccttcgaatttggtg

SEQ ID NO: 2240250 - DNA, 25 bp, Homo sapien
agccaactgtgctaacgatcgtgag

SEQ ID NO: 2240251 - DNA, 25 bp, Homo sapien
ttagcctcacgttgctctcttggag

SEQ ID NO: 2240252 - DNA, 25 bp, Homo sapien
ctcttggaggtcataggtattagac

SEQ ID NO: 2240253 - DNA, 25 bp, Homo sapien
ggctcctccaagtggatagtaaggt

SEQ ID NO: 2240254 - DNA, 25 bp, Homo sapien
ggtttttaacgcatgctccaccagc

SEQ ID NO: 2240255 - DNA, 25 bp, Homo sapien
gccaagaggatttcatctcactttg

SEQ ID NO: 2240256 - DNA, 25 bp, Homo sapien
tcaaactatgctcttgcgggacggt

SEQ ID NO: 2240257 - DNA, 25 bp, Homo sapien
aatgtctaggtggaaactagaggat

SEQ ID NO: 2240258 - DNA, 25 bp, Homo sapien
tctcccatccactttgccttgagct

SEQ ID NO: 2240259 - DNA, 25 bp, Homo sapien
cagcaggtgcaagtggaagcattta

SEQ ID NO: 2240260 - DNA, 25 bp, Homo sapien
acaagtggggagcaaaagagagtct

SEQ ID NO: 2240261 - DNA, 25 bp, Homo sapien
agccattaaggatccatattctgta

SEQ ID NO: 2240262 - DNA, 25 bp, Homo sapien
aatttcctgctatggaaatactcac

SEQ ID NO: 2240263 - DNA, 25 bp, Homo sapien
ctgcaaagccgtatccagccattaa

SEQ ID NO: 2240264 - DNA, 25 bp, Homo sapien
catattctgtaatagaatttcctgc

SEQ ID NO: 2240265 - DNA, 25 bp, Homo sapien
agctggtcaggcaagctgtcaaacc

SEQ ID NO: 2240266 - DNA, 25 bp, Homo sapien
tgacggacttattcaccagctggtc

SEQ ID NO: 2240267 - DNA, 25 bp, Homo sapien
cagaagccctggctgacggacttat

SEQ ID NO: 2240268 - DNA, 25 bp, Homo sapien
cagggggacagttcggcaaccttca

SEQ ID NO: 2240269 - DNA, 25 bp, Homo sapien
gcagagaaacccacggtttcaaatc

SEQ ID NO: 2240270 - DNA, 25 bp, Homo sapien
ggcggcagagaaacccacggtttca

SEQ ID NO: 2240271 - DNA, 25 bp, Homo sapien
gcggcagagaaacccacggtttcaa

SEQ ID NO: 2240272 - DNA, 25 bp, Homo sapien
gccttctgccccaggctaaccccag

SEQ ID NO: 2240273 - DNA, 25 bp, Homo sapien
ccttctgccccaggctaaccccagc

SEQ ID NO: 2240274 - DNA, 25 bp, Homo sapien
tgccccaggctaaccccagccccgc

SEQ ID NO: 2240275 - DNA, 25 bp, Homo sapien
ttctgccccaggctaaccccagccc

SEQ ID NO: 2240276 - DNA, 25 bp, Homo sapien
ggcgagctatatcggtcgctgccat

SEQ ID NO: 2240277 - DNA, 25 bp, Homo sapien
tggcgagctatatcggtcgctgcca

SEQ ID NO: 2240278 - DNA, 25 bp, Homo sapien
cctggcgagctatatcggtcgctgc

SEQ ID NO: 2240279 - DNA, 25 bp, Homo sapien
cacctggcgagctatatcggtcgct

SEQ ID NO: 2240280 - DNA, 25 bp, Homo sapien
caccccttgaaagtagggtatggag

SEQ ID NO: 2240281 - DNA, 25 bp, Homo sapien
aggagctcctccgacaaagagaaag

SEQ ID NO: 2240282 - DNA, 25 bp, Homo sapien
gaaagtgttacacttcgggcgcgac

SEQ ID NO: 2240283 - DNA, 25 bp, Homo sapien
gcaacgggagctactgcacaggaaa

SEQ ID NO: 2240284 - DNA, 25 bp, Homo sapien
tcttacagcaactaggggcttcaca

SEQ ID NO: 2240285 - DNA, 25 bp, Homo sapien
ggcgacagtgggctctggtcttgag

SEQ ID NO: 2240286 - DNA, 25 bp, Homo sapien
ctctggtcttgagggatgactaaaa

SEQ ID NO: 2240287 - DNA, 25 bp, Homo sapien
gcccggcctaaatataggtgtctct

SEQ ID NO: 2240288 - DNA, 25 bp, Homo sapien
tatctgtctttggaaggagtgcatc

SEQ ID NO: 2240289 - DNA, 25 bp, Homo sapien
tcaagtgactattcttcccagaccg

SEQ ID NO: 2240290 - DNA, 25 bp, Homo sapien
cagctctgagcgtctggcagacagg

SEQ ID NO: 2240291 - DNA, 25 bp, Homo sapien
tattgcatccgcatggatttccagc

SEQ ID NO: 2240292 - DNA, 25 bp, Homo sapien
gctgtttgtgggcaccattggccac

SEQ ID NO: 2240293 - DNA, 25 bp, Homo sapien
tggccacccactgaatgaactgacc

SEQ ID NO: 2240294 - DNA, 25 bp, Homo sapien
caggaccagctgcaatgctctctct

SEQ ID NO: 2240295 - DNA, 25 bp, Homo sapien
gcaccattggccacccactgaatga

SEQ ID NO: 2240296 - DNA, 25 bp, Homo sapien
cagtagctggtgacaggtgaagaca

SEQ ID NO: 2240297 - DNA, 25 bp, Homo sapien
cgtgagcgtatgcagcttcattcct

SEQ ID NO: 2240298 - DNA, 25 bp, Homo sapien
acccactggaaggaatacattctgg

SEQ ID NO: 2240299 - DNA, 25 bp, Homo sapien
agtcagcgagaccaataacccactg

SEQ ID NO: 2240300 - DNA, 25 bp, Homo sapien
cagcgagaccaataacccactggaa

SEQ ID NO: 2240301 - DNA, 25 bp, Homo sapien
ataacccactggaaggaatacattc

SEQ ID NO: 2240302 - DNA, 25 bp, Homo sapien
aattgacaaaccacaatacaacagc

SEQ ID NO: 2240303 - DNA, 25 bp, Homo sapien
tgaatccagccaaccaacgtgttca

SEQ ID NO: 2240304 - DNA, 25 bp, Homo sapien
actgaatccagccaaccaacgtgtt

SEQ ID NO: 2240305 - DNA, 25 bp, Homo sapien
agaggaaaacacgtcgaaatctcca

SEQ ID NO: 2240306 - DNA, 25 bp, Homo sapien
cacgtcgaaatctccagatagtggt

SEQ ID NO: 2240307 - DNA, 25 bp, Homo sapien
ttatagacccagcttggttcttctc

SEQ ID NO: 2240308 - DNA, 25 bp, Homo sapien
ttctccaatgtctccttttggagtt

SEQ ID NO: 2240309 - DNA, 25 bp, Homo sapien
tagacccagcttggttcttctccaa

SEQ ID NO: 2240310 - DNA, 25 bp, Homo sapien
tcttctccaatgtctccttttggag

SEQ ID NO: 2240311 - DNA, 25 bp, Homo sapien
tcacataaccttttaggtaccacaa

SEQ ID NO: 2240312 - DNA, 25 bp, Homo sapien
tttctctcctctaacaagtttggag

SEQ ID NO: 2240313 - DNA, 25 bp, Homo sapien
tctcctctaacaagtttggagttct

SEQ ID NO: 2240314 - DNA, 25 bp, Homo sapien
aaaggcagtctgacagcaatgtagc

SEQ ID NO: 2240315 - DNA, 25 bp, Homo sapien
taggatcagagtagtggcgaagccc

SEQ ID NO: 2240316 - DNA, 25 bp, Homo sapien
gaaggctaggctcttaactaggatc

SEQ ID NO: 2240317 - DNA, 25 bp, Homo sapien
cctggaggtacacagacatactctg

SEQ ID NO: 2240318 - DNA, 25 bp, Homo sapien
tcacaaacatataaaagctcccgca

SEQ ID NO: 2240319 - DNA, 25 bp, Homo sapien
tcacgtctagtgcagggaaacagca

SEQ ID NO: 2240320 - DNA, 25 bp, Homo sapien
tacaatcgatcaactcctccattca

SEQ ID NO: 2240321 - DNA, 25 bp, Homo sapien
cctccattcacgtctagtgcaggga

SEQ ID NO: 2240322 - DNA, 25 bp, Homo sapien
tggcctcgcatgatctttacaatcg

SEQ ID NO: 2240323 - DNA, 25 bp, Homo sapien
ggataatggcagtacttccacaaaa

SEQ ID NO: 2240324 - DNA, 25 bp, Homo sapien
tcaaaaatgattaacacggcttttc

SEQ ID NO: 2240325 - DNA, 25 bp, Homo sapien
tgaagcactgtaattgcaacctgct

SEQ ID NO: 2240326 - DNA, 25 bp, Homo sapien
catgattttaccctcataaaggcaa

SEQ ID NO: 2240327 - DNA, 25 bp, Homo sapien
aaacatttttaacgctggaagatag

SEQ ID NO: 2240328 - DNA, 25 bp, Homo sapien
aatcgcttaatcctgaaagtcttgt

SEQ ID NO: 2240329 - DNA, 25 bp, Homo sapien
ttggccaggaatcgcttaatcctga

SEQ ID NO: 2240330 - DNA, 25 bp, Homo sapien
gccaggaatcgcttaatcctgaaag

SEQ ID NO: 2240331 - DNA, 25 bp, Homo sapien
ttatttccagttttcatccgaatcc

SEQ ID NO: 2240332 - DNA, 25 bp, Homo sapien
tgcaatcaatttagacaatattaga

SEQ ID NO: 2240333 - DNA, 25 bp, Homo sapien
caatcaatttagacaatattagagc

SEQ ID NO: 2240334 - DNA, 25 bp, Homo sapien
aatgcaatcaatttagacaatatta

SEQ ID NO: 2240335 - DNA, 25 bp, Homo sapien
gcaatcaatttagacaatattagag

SEQ ID NO: 2240336 - DNA, 25 bp, Homo sapien
gactcagacgaccacactgggaatg

SEQ ID NO: 2240337 - DNA, 25 bp, Homo sapien
cctgggatctaaaaatgcggttcgc

SEQ ID NO: 2240338 - DNA, 25 bp, Homo sapien
taaagagtgactggttcgctgctgc

SEQ ID NO: 2240339 - DNA, 25 bp, Homo sapien
tcagagcatcaatgtgcagaaccag

SEQ ID NO: 2240340 - DNA, 25 bp, Homo sapien
tcgctacaagcgaagggaaaccgga

SEQ ID NO: 2240341 - DNA, 25 bp, Homo sapien
gcctccagaacgagttcgctacaag

SEQ ID NO: 2240342 - DNA, 25 bp, Homo sapien
caggttgctcgctggctcactagct

SEQ ID NO: 2240343 - DNA, 25 bp, Homo sapien
ctccaggccacgaaagacaacagtg

SEQ ID NO: 2240344 - DNA, 25 bp, Homo sapien
gcgagcagcggagtcaagaacacac

SEQ ID NO: 2240345 - DNA, 25 bp, Homo sapien
ggcgagcagcggagtcaagaacaca

SEQ ID NO: 2240346 - DNA, 25 bp, Homo sapien
ccacgatggcggagaaaggaagagg

SEQ ID NO: 2240347 - DNA, 25 bp, Homo sapien
cgagcagcggagtcaagaacacacc

SEQ ID NO: 2240348 - DNA, 25 bp, Homo sapien
cagacattgatgcagtttccttcct

SEQ ID NO: 2240349 - DNA, 25 bp, Homo sapien
caggaacagacattgatgcagtttc

SEQ ID NO: 2240350 - DNA, 25 bp, Homo sapien
aaaagttgctatttaacaggaacag

SEQ ID NO: 2240351 - DNA, 25 bp, Homo sapien
gctatttaacaggaacagacattga

SEQ ID NO: 2240352 - DNA, 25 bp, Homo sapien
tcctccttcttttctatggttaata

SEQ ID NO: 2240353 - DNA, 25 bp, Homo sapien
tatggttaatatcactttcctgctt

SEQ ID NO: 2240354 - DNA, 25 bp, Homo sapien
tcttttctatggttaatatcacttt

SEQ ID NO: 2240355 - DNA, 25 bp, Homo sapien
tctatggttaatatcactttcctgc

SEQ ID NO: 2240356 - DNA, 25 bp, Homo sapien
caccagaatcgacctgggcttcgag

SEQ ID NO: 2240357 - DNA, 25 bp, Homo sapien
cagaatcgacctgggcttcgagctc

SEQ ID NO: 2240358 - DNA, 25 bp, Homo sapien
catcttgccaccagaatcgacctgg

SEQ ID NO: 2240359 - DNA, 25 bp, Homo sapien
ttgccaccagaatcgacctgggctt

SEQ ID NO: 2240360 - DNA, 25 bp, Homo sapien
ccagacttggttatgtcatcagggt

SEQ ID NO: 2240361 - DNA, 25 bp, Homo sapien
cagggtgcgagagtcgaccttggct

SEQ ID NO: 2240362 - DNA, 25 bp, Homo sapien
cgagagtcgaccttggcttcgagct

SEQ ID NO: 2240363 - DNA, 25 bp, Homo sapien
cttggttatgtcatcagggtgcgag

SEQ ID NO: 2240364 - DNA, 25 bp, Homo sapien
tgcaggaagcctacagtattcgttg

SEQ ID NO: 2240365 - DNA, 25 bp, Homo sapien
gcctacagtattcgttgtctctttc

SEQ ID NO: 2240366 - DNA, 25 bp, Homo sapien
caggaagcctacagtattcgttgtc

SEQ ID NO: 2240367 - DNA, 25 bp, Homo sapien
gaagcctacagtattcgttgtctct

SEQ ID NO: 2240368 - DNA, 25 bp, Homo sapien
tcggcctcgagctcctcgatggtaa

SEQ ID NO: 2240369 - DNA, 25 bp, Homo sapien
tggtaacactgcatccatggacagt

SEQ ID NO: 2240370 - DNA, 25 bp, Homo sapien
agggtgccagagtcgacctcggcct

SEQ ID NO: 2240371 - DNA, 25 bp, Homo sapien
acttgtcatcagggtgccagagtcg

SEQ ID NO: 2240372 - DNA, 25 bp, Homo sapien
tgcgcccagccgtatctccatttct

SEQ ID NO: 2240373 - DNA, 25 bp, Homo sapien
atttctttcacagctgtattagtcc

SEQ ID NO: 2240374 - DNA, 25 bp, Homo sapien
tctttcacagctgtattagtccgtt

SEQ ID NO: 2240375 - DNA, 25 bp, Homo sapien
ctgcgcccagccgtatctccatttc

SEQ ID NO: 2240376 - DNA, 25 bp, Homo sapien
tatcaacagccatatcagaagtctt

SEQ ID NO: 2240377 - DNA, 25 bp, Homo sapien
tcacaagatcagcatgtgggagact

SEQ ID NO: 2240378 - DNA, 25 bp, Homo sapien
tacatggcagcagactagaggtgaa

SEQ ID NO: 2240379 - DNA, 25 bp, Homo sapien
ggtgaagtgcgaacataggaaaaac

SEQ ID NO: 2240380 - DNA, 25 bp, Homo sapien
ccatgtaattggagctggaaggaaa

SEQ ID NO: 2240381 - DNA, 25 bp, Homo sapien
tccatgtaattggagctggaaggaa

SEQ ID NO: 2240382 - DNA, 25 bp, Homo sapien
catgtaattggagctggaaggaaag

SEQ ID NO: 2240383 - DNA, 25 bp, Homo sapien
ttgacataaaacttactcctctgcc

SEQ ID NO: 2240384 - DNA, 25 bp, Homo sapien
cctctgccgtgtaccccacgagcag

SEQ ID NO: 2240385 - DNA, 25 bp, Homo sapien
cgagcagagcgaccccctttctatt

SEQ ID NO: 2240386 - DNA, 25 bp, Homo sapien
gccgtgtaccccacgagcagagcga

SEQ ID NO: 2240387 - DNA, 25 bp, Homo sapien
taaggccatcaggacttatcacaca

SEQ ID NO: 2240388 - DNA, 25 bp, Homo sapien
acagtcaggacacctaaggccatca

SEQ ID NO: 2240389 - DNA, 25 bp, Homo sapien
ggccatcaggacttatcacacacct

SEQ ID NO: 2240390 - DNA, 25 bp, Homo sapien
caggacacctaaggccatcaggact

SEQ ID NO: 2240391 - DNA, 25 bp, Homo sapien
ctctgcctcctaggttcaagcaatt

SEQ ID NO: 2240392 - DNA, 25 bp, Homo sapien
ctttgttgctcaggctggagtgcaa

SEQ ID NO: 2240393 - DNA, 25 bp, Homo sapien
tgagattgagtctcactttgttgct

SEQ ID NO: 2240394 - DNA, 25 bp, Homo sapien
tggcacaatctctgctcactgcaac

SEQ ID NO: 2240395 - DNA, 25 bp, Homo sapien
gaaaatagtgttgatagtggctttg

SEQ ID NO: 2240396 - DNA, 25 bp, Homo sapien
tggtaagactgcatccctggacgac

SEQ ID NO: 2240397 - DNA, 25 bp, Homo sapien
tactgttacaacaatgctactaagc

SEQ ID NO: 2240398 - DNA, 25 bp, Homo sapien
cctggacgaccctgaagtacaatga

SEQ ID NO: 2240399 - DNA, 25 bp, Homo sapien
atcaaacatgtatctgaacaaaagg

SEQ ID NO: 2240400 - DNA, 25 bp, Homo sapien
aacatgtatctgaacaaaaggaggc

SEQ ID NO: 2240401 - DNA, 25 bp, Homo sapien
tgcatccagcctattttatgtttaa

SEQ ID NO: 2240402 - DNA, 25 bp, Homo sapien
aaagaaatcaaacatgtatctgaac

SEQ ID NO: 2240403 - DNA, 25 bp, Homo sapien
tcaggacacctaaggccatctggac

SEQ ID NO: 2240404 - DNA, 25 bp, Homo sapien
cacactggattgtcaagagtcaaac

SEQ ID NO: 2240405 - DNA, 25 bp, Homo sapien
tgagacctaagatcaaacacactgg

SEQ ID NO: 2240406 - DNA, 25 bp, Homo sapien
tagatcggaacaaggcttcaaagcg

SEQ ID NO: 2240407 - DNA, 25 bp, Homo sapien
catcagggggacagagtcgatttcg

SEQ ID NO: 2240408 - DNA, 25 bp, Homo sapien
atggctaataccactttcctgcttc

SEQ ID NO: 2240409 - DNA, 25 bp, Homo sapien
ggctaataccactttcctgcttcct

SEQ ID NO: 2240410 - DNA, 25 bp, Homo sapien
agtcgatttcggcttcgagctcctg

SEQ ID NO: 2240411 - DNA, 25 bp, Homo sapien
tctgagctgcctattgattctgtac

SEQ ID NO: 2240412 - DNA, 25 bp, Homo sapien
tctttctcgaagtatgcgctcctga

SEQ ID NO: 2240413 - DNA, 25 bp, Homo sapien
tgatctcgttcatattcccgttccc

SEQ ID NO: 2240414 - DNA, 25 bp, Homo sapien
tcttattcgatctctcttgaccact

SEQ ID NO: 2240415 - DNA, 25 bp, Homo sapien
tcttgtaatcacaaatgcaggaaca

SEQ ID NO: 2240416 - DNA, 25 bp, Homo sapien
gatttggcccctgcaatgaggttgc

SEQ ID NO: 2240417 - DNA, 25 bp, Homo sapien
tctgagacagaaccctgaaagatct

SEQ ID NO: 2240418 - DNA, 25 bp, Homo sapien
taacaaagagtccttgactactgac

SEQ ID NO: 2240419 - DNA, 25 bp, Homo sapien
taagttcgctatcagaacgcttggg

SEQ ID NO: 2240420 - DNA, 25 bp, Homo sapien
tcgctatcagaacgcttgggcaatg

SEQ ID NO: 2240421 - DNA, 25 bp, Homo sapien
tttcatctttaagttcgctatcaga

SEQ ID NO: 2240422 - DNA, 25 bp, Homo sapien
gaacgcttgggcaatgtacaacttt

SEQ ID NO: 2240423 - DNA, 25 bp, Homo sapien
ttttattttgaaggctgggacacta

SEQ ID NO: 2240424 - DNA, 25 bp, Homo sapien
tatttttattttgaaggctgggaca

SEQ ID NO: 2240425 - DNA, 25 bp, Homo sapien
ttattttgaaggctgggacactatc

SEQ ID NO: 2240426 - DNA, 25 bp, Homo sapien
attttgaaggctgggacactatctt

SEQ ID NO: 2240427 - DNA, 25 bp, Homo sapien
tgtgtgtgtgacatgatactagatg

SEQ ID NO: 2240428 - DNA, 25 bp, Homo sapien
tgtgtgacatgatactagatgctct

SEQ ID NO: 2240429 - DNA, 25 bp, Homo sapien
atactagatgctctgtatcatgtac

SEQ ID NO: 2240430 - DNA, 25 bp, Homo sapien
gacatgatactagatgctctgtatc

SEQ ID NO: 2240431 - DNA, 25 bp, Homo sapien
ttctgattcacagcttgtaacagaa

SEQ ID NO: 2240432 - DNA, 25 bp, Homo sapien
ttcacagcttgtaacagaaacctgt

SEQ ID NO: 2240433 - DNA, 25 bp, Homo sapien
ctgattcacagcttgtaacagaaac

SEQ ID NO: 2240434 - DNA, 25 bp, Homo sapien
gattcacagcttgtaacagaaacct

SEQ ID NO: 2240435 - DNA, 25 bp, Homo sapien
aatctttggttcatcctttaatttg

SEQ ID NO: 2240436 - DNA, 25 bp, Homo sapien
tcatcctttaatttgtccctttctg

SEQ ID NO: 2240437 - DNA, 25 bp, Homo sapien
atttgtccctttctggaattctgtc

SEQ ID NO: 2240438 - DNA, 25 bp, Homo sapien
gaattctgtctatcttctttagctt

SEQ ID NO: 2240439 - DNA, 25 bp, Homo sapien
tttcagaatatcaaatgagtgtctc

SEQ ID NO: 2240440 - DNA, 25 bp, Homo sapien
agaatatcaaatgagtgtctctggg

SEQ ID NO: 2240441 - DNA, 25 bp, Homo sapien
cgtttgtagagtgaactcctggtcc

SEQ ID NO: 2240442 - DNA, 25 bp, Homo sapien
caacctaagaacattccacgtttgt

SEQ ID NO: 2240443 - DNA, 25 bp, Homo sapien
tcaggaagctcaaaagtggggttgt

SEQ ID NO: 2240444 - DNA, 25 bp, Homo sapien
aggaagctcaaaagtggggttgtct

SEQ ID NO: 2240445 - DNA, 25 bp, Homo sapien
caggaagctcaaaagtggggttgtc

SEQ ID NO: 2240446 - DNA, 25 bp, Homo sapien
ttttctcattatctgtggcataact

SEQ ID NO: 2240447 - DNA, 25 bp, Homo sapien
agcagtgtctctggagtagatgtca

SEQ ID NO: 2240448 - DNA, 25 bp, Homo sapien
tttgcttctatttcctctagcagtg

SEQ ID NO: 2240449 - DNA, 25 bp, Homo sapien
atctgtggcataactttccaaaaac

SEQ ID NO: 2240450 - DNA, 25 bp, Homo sapien
catttgaggaaacagaaaatataat

SEQ ID NO: 2240451 - DNA, 25 bp, Homo sapien
ttgaggaaacagaaaatataataga

SEQ ID NO: 2240452 - DNA, 25 bp, Homo sapien
taaataatcatttgaggaaacagaa

SEQ ID NO: 2240453 - DNA, 25 bp, Homo sapien
ctaaataatcatttgaggaaacaga

SEQ ID NO: 2240454 - DNA, 25 bp, Homo sapien
catcatcgatagtcccgactttggt

SEQ ID NO: 2240455 - DNA, 25 bp, Homo sapien
gatagtcccgactttggtatctctt

SEQ ID NO: 2240456 - DNA, 25 bp, Homo sapien
tgcaaattctactatagcgggatat

SEQ ID NO: 2240457 - DNA, 25 bp, Homo sapien
aattctactatagcgggatattcct

SEQ ID NO: 2240458 - DNA, 25 bp, Homo sapien
tatgctctggcatacatatgaggat

SEQ ID NO: 2240459 - DNA, 25 bp, Homo sapien
catcaaagcgatccctgaacaaaat

SEQ ID NO: 2240460 - DNA, 25 bp, Homo sapien
tattgtcaaggaatacataaccatc

SEQ ID NO: 2240461 - DNA, 25 bp, Homo sapien
tctggcatacatatgaggatacaaa

SEQ ID NO: 2240462 - DNA, 25 bp, Homo sapien
aaatgtactcgcaggtgtctggccc

SEQ ID NO: 2240463 - DNA, 25 bp, Homo sapien
tgtctggcccaattacaagtatgca

SEQ ID NO: 2240464 - DNA, 25 bp, Homo sapien
tgcagagaggaaagcaattatgtaa

SEQ ID NO: 2240465 - DNA, 25 bp, Homo sapien
aattatgtaaatgtactcgcaggtg

SEQ ID NO: 2240466 - DNA, 25 bp, Homo sapien
aaataatcatgctcaggcataggtt

SEQ ID NO: 2240467 - DNA, 25 bp, Homo sapien
catgctcaggcataggttgaagatg

SEQ ID NO: 2240468 - DNA, 25 bp, Homo sapien
ctgctccttggtcaaagtgggaggt

SEQ ID NO: 2240469 - DNA, 25 bp, Homo sapien
taatcatgctcaggcataggttgaa

SEQ ID NO: 2240470 - DNA, 25 bp, Homo sapien
tgtgggtgccacgaaatcttgattt

SEQ ID NO: 2240471 - DNA, 25 bp, Homo sapien
taagccaacgctggtctttgtgggt

SEQ ID NO: 2240472 - DNA, 25 bp, Homo sapien
gatgctctcgatctaccctcctgta

SEQ ID NO: 2240473 - DNA, 25 bp, Homo sapien
gatttagcaacaagtttctcccacg

SEQ ID NO: 2240474 - DNA, 25 bp, Homo sapien
gggctctccccatttcgggtgaatg

SEQ ID NO: 2240475 - DNA, 25 bp, Homo sapien
gcgaagagatagaaggagaacctga

SEQ ID NO: 2240476 - DNA, 25 bp, Homo sapien
gatgaaccaggatgatgcgacttcc

SEQ ID NO: 2240477 - DNA, 25 bp, Homo sapien
gatgatgcgacttccattcaggcga

SEQ ID NO: 2240478 - DNA, 25 bp, Homo sapien
taacagggttactcgcttctcctta

SEQ ID NO: 2240479 - DNA, 25 bp, Homo sapien
ttcttctccttgttgcgatcctgct

SEQ ID NO: 2240480 - DNA, 25 bp, Homo sapien
tactcgcttctccttaggcctgtgc

SEQ ID NO: 2240481 - DNA, 25 bp, Homo sapien
ccttgttgcgatcctgcttatcttc

SEQ ID NO: 2240482 - DNA, 25 bp, Homo sapien
cttgtgataagtcgggccccacgtt

SEQ ID NO: 2240483 - DNA, 25 bp, Homo sapien
ggcacaaacggctcccgggaagctc

SEQ ID NO: 2240484 - DNA, 25 bp, Homo sapien
caacaaatgccccttgtgataagtc

SEQ ID NO: 2240485 - DNA, 25 bp, Homo sapien
tacgtcccccgctgaagcggcttgg

SEQ ID NO: 2240486 - DNA, 25 bp, Homo sapien
ttttgttgggcgttcaggggccaga

SEQ ID NO: 2240487 - DNA, 25 bp, Homo sapien
cagggtccctgtttgtgagtaaatc

SEQ ID NO: 2240488 - DNA, 25 bp, Homo sapien
gtttgtgagtaaatcgaatcctttc

SEQ ID NO: 2240489 - DNA, 25 bp, Homo sapien
ggggccagagctatctcagggtccc

SEQ ID NO: 2240490 - DNA, 25 bp, Homo sapien
tctacaaaggaaggacacgaagtaa

SEQ ID NO: 2240491 - DNA, 25 bp, Homo sapien
tacaaaggaaggacacgaagtaaga

SEQ ID NO: 2240492 - DNA, 25 bp, Homo sapien
tctctacaaaggaaggacacgaagt

SEQ ID NO: 2240493 - DNA, 25 bp, Homo sapien
ttctctacaaaggaaggacacgaag

SEQ ID NO: 2240494 - DNA, 25 bp, Homo sapien
tcttctggcaagtcggaagcaccac

SEQ ID NO: 2240495 - DNA, 25 bp, Homo sapien
taatgggaattgcatcctcatcggg

SEQ ID NO: 2240496 - DNA, 25 bp, Homo sapien
aagtaatgggaattgcatcctcatc

SEQ ID NO: 2240497 - DNA, 25 bp, Homo sapien
ctcatcggggtcttctggcaagtcg

SEQ ID NO: 2240498 - DNA, 25 bp, Homo sapien
cccatgcttgtaatctgaacggtca

SEQ ID NO: 2240499 - DNA, 25 bp, Homo sapien
tatcattggattgtgggtcacccgc

SEQ ID NO: 2240500 - DNA, 25 bp, Homo sapien
gaggcattgcccatagacgtatcct

SEQ ID NO: 2240501 - DNA, 25 bp, Homo sapien
tctggctgcgctcaaagatggcttg

SEQ ID NO: 2240502 - DNA, 25 bp, Homo sapien
ctgatccaccgcctttcctggagaa

SEQ ID NO: 2240503 - DNA, 25 bp, Homo sapien
aagacactgacggaagaggactgcg

SEQ ID NO: 2240504 - DNA, 25 bp, Homo sapien
gccgggagtcgaagcaaaagacact

SEQ ID NO: 2240505 - DNA, 25 bp, Homo sapien
tcttgtgccctagcagattccgtcg

SEQ ID NO: 2240506 - DNA, 25 bp, Homo sapien
tagagtcctgagctccgaaacagcc

SEQ ID NO: 2240507 - DNA, 25 bp, Homo sapien
gtacatccacaggttcactaacggg

SEQ ID NO: 2240508 - DNA, 25 bp, Homo sapien
gactccacgggctgatttccgaaaa

SEQ ID NO: 2240509 - DNA, 25 bp, Homo sapien
gactctccgtcatgggcgtgtgctt

SEQ ID NO: 2240510 - DNA, 25 bp, Homo sapien
gaagccgaggcttgcgaaacgaagc

SEQ ID NO: 2240511 - DNA, 25 bp, Homo sapien
tgcaagcctttaggaatttactgcg

SEQ ID NO: 2240512 - DNA, 25 bp, Homo sapien
gctgttgtttcttagtgtcccaaaa

SEQ ID NO: 2240513 - DNA, 25 bp, Homo sapien
tcttcacgtgtgatctacagctgtt

SEQ ID NO: 2240514 - DNA, 25 bp, Homo sapien
gtcccaaaagacaacaactagatat

SEQ ID NO: 2240515 - DNA, 25 bp, Homo sapien
tacccctgctagaaggttacagtgt

SEQ ID NO: 2240516 - DNA, 25 bp, Homo sapien
caatgtgttatgtagtgcttaataa

SEQ ID NO: 2240517 - DNA, 25 bp, Homo sapien
cagtgtattatgtagcatgcaatgt

SEQ ID NO: 2240518 - DNA, 25 bp, Homo sapien
aataactcagttatggccatctacc

SEQ ID NO: 2240519 - DNA, 25 bp, Homo sapien
tttactgggagttaagcctcactgc

SEQ ID NO: 2240520 - DNA, 25 bp, Homo sapien
ctttatgggcacaactgggaacaac

SEQ ID NO: 2240521 - DNA, 25 bp, Homo sapien
gcaatgacacgggaaggatacaatc

SEQ ID NO: 2240522 - DNA, 25 bp, Homo sapien
tccatcacattagcagagtaaccag

SEQ ID NO: 2240523 - DNA, 25 bp, Homo sapien
ccaccacgcccagctgagaataaaa

SEQ ID NO: 2240524 - DNA, 25 bp, Homo sapien
cacgcccagctgagaataaaatttt

SEQ ID NO: 2240525 - DNA, 25 bp, Homo sapien
accacgcccagctgagaataaaatt

SEQ ID NO: 2240526 - DNA, 25 bp, Homo sapien
cgcccagctgagaataaaattttta

SEQ ID NO: 2240527 - DNA, 25 bp, Homo sapien
tatcataggcatgtaataataatgc

SEQ ID NO: 2240528 - DNA, 25 bp, Homo sapien
cattttacaatagtataatcagaat

SEQ ID NO: 2240529 - DNA, 25 bp, Homo sapien
ggcaagcgggcattttacaatagta

SEQ ID NO: 2240530 - DNA, 25 bp, Homo sapien
aataataatgcagatcaaataacct

SEQ ID NO: 2240531 - DNA, 25 bp, Homo sapien
tatcctcaagctcatatcagctcag

SEQ ID NO: 2240532 - DNA, 25 bp, Homo sapien
gggataagagtagacttcttaagac

SEQ ID NO: 2240533 - DNA, 25 bp, Homo sapien
tattaagaatttaggctggacgcag

SEQ ID NO: 2240534 - DNA, 25 bp, Homo sapien
aatctacttagtatatgaaagacag

SEQ ID NO: 2240535 - DNA, 25 bp, Homo sapien
tggtcaatccaaaataacccaaaga

SEQ ID NO: 2240536 - DNA, 25 bp, Homo sapien
agttactatggtcaatccaaaataa

SEQ ID NO: 2240537 - DNA, 25 bp, Homo sapien
tactatggtcaatccaaaataaccc

SEQ ID NO: 2240538 - DNA, 25 bp, Homo sapien
aaagctttctcagaacataataatc

SEQ ID NO: 2240539 - DNA, 25 bp, Homo sapien
aaatagaaggcacagtagcactgta

SEQ ID NO: 2240540 - DNA, 25 bp, Homo sapien
aatagaaggcacagtagcactgtaa

SEQ ID NO: 2240541 - DNA, 25 bp, Homo sapien
gctttctcagaacataataatcttt

SEQ ID NO: 2240542 - DNA, 25 bp, Homo sapien
gttctcttttcgcagtcgcacagcc

SEQ ID NO: 2240543 - DNA, 25 bp, Homo sapien
atctggttctcttttcgcagtcgca

SEQ ID NO: 2240544 - DNA, 25 bp, Homo sapien
tggttctcttttcgcagtcgcacag

SEQ ID NO: 2240545 - DNA, 25 bp, Homo sapien
ttctcttttcgcagtcgcacagcct

SEQ ID NO: 2240546 - DNA, 25 bp, Homo sapien
tattaatattttagctgcctgacac

SEQ ID NO: 2240547 - DNA, 25 bp, Homo sapien
catcattaatcctttcttacccaga

SEQ ID NO: 2240548 - DNA, 25 bp, Homo sapien
ttagctgcctgacacgtcctttttt

SEQ ID NO: 2240549 - DNA, 25 bp, Homo sapien
taattattttcatagtacatcatca

SEQ ID NO: 2240550 - DNA, 25 bp, Homo sapien
gatggaacttccttcaaggttctac

SEQ ID NO: 2240551 - DNA, 25 bp, Homo sapien
tcagatggaacttccttcaaggttc

SEQ ID NO: 2240552 - DNA, 25 bp, Homo sapien
cagatggaacttccttcaaggttct

SEQ ID NO: 2240553 - DNA, 25 bp, Homo sapien
atggaacttccttcaaggttctact

SEQ ID NO: 2240554 - DNA, 25 bp, Homo sapien
aattcagttgttctcctatgctttc

SEQ ID NO: 2240555 - DNA, 25 bp, Homo sapien
cttgtccttttagtctagtatataa

SEQ ID NO: 2240556 - DNA, 25 bp, Homo sapien
ggagtgacttggctattcttgtcct

SEQ ID NO: 2240557 - DNA, 25 bp, Homo sapien
ctttctaaagtgctgtaagcttcat

SEQ ID NO: 2240558 - DNA, 25 bp, Homo sapien
caagccaatttcacctcttcgtggg

SEQ ID NO: 2240559 - DNA, 25 bp, Homo sapien
tttacatattcagccatagctgcac

SEQ ID NO: 2240560 - DNA, 25 bp, Homo sapien
tcttcgtgggatacgttttccagct

SEQ ID NO: 2240561 - DNA, 25 bp, Homo sapien
ttcaccaggtaacagagcatggcca

SEQ ID NO: 2240562 - DNA, 25 bp, Homo sapien
catcttgagaggtaagtgtttttgg

SEQ ID NO: 2240563 - DNA, 25 bp, Homo sapien
tgggccaattaaatctgatggttct

SEQ ID NO: 2240564 - DNA, 25 bp, Homo sapien
ctgggccaattaaatctgatggttc

SEQ ID NO: 2240565 - DNA, 25 bp, Homo sapien
ggtttatcatcttgagaggtaagtg

SEQ ID NO: 2240566 - DNA, 25 bp, Homo sapien
gatccttccagggattttccagaaa

SEQ ID NO: 2240567 - DNA, 25 bp, Homo sapien
ggattctttagagcttgaatcactg

SEQ ID NO: 2240568 - DNA, 25 bp, Homo sapien
ttgttcgatccttccagggattttc

SEQ ID NO: 2240569 - DNA, 25 bp, Homo sapien
ttctttagagcttgaatcactggac

SEQ ID NO: 2240570 - DNA, 25 bp, Homo sapien
gatctgaattcccagcttattcaaa

SEQ ID NO: 2240571 - DNA, 25 bp, Homo sapien
gaactggtgactatacatcttaatt

SEQ ID NO: 2240572 - DNA, 25 bp, Homo sapien
tcttcctatgttagagggcatctta

SEQ ID NO: 2240573 - DNA, 25 bp, Homo sapien
gcgagacactgcctcttaagaattt

SEQ ID NO: 2240574 - DNA, 25 bp, Homo sapien
ttggctttctttgctctccttttgt

SEQ ID NO: 2240575 - DNA, 25 bp, Homo sapien
tttttcttggctttctttgctctcc

SEQ ID NO: 2240576 - DNA, 25 bp, Homo sapien
ctttgctctccttttgttatcttca

SEQ ID NO: 2240577 - DNA, 25 bp, Homo sapien
tttgctctccttttgttatcttcat

SEQ ID NO: 2240578 - DNA, 25 bp, Homo sapien
tggacctttcttttgaacggctaga

SEQ ID NO: 2240579 - DNA, 25 bp, Homo sapien
ctttcttttgaacggctagacttct

SEQ ID NO: 2240580 - DNA, 25 bp, Homo sapien
cttttgaacggctagacttcttctt

SEQ ID NO: 2240581 - DNA, 25 bp, Homo sapien
ttcttttgaacggctagacttcttc

SEQ ID NO: 2240582 - DNA, 25 bp, Homo sapien
ctaatgttcaactatttacaaactg

SEQ ID NO: 2240583 - DNA, 25 bp, Homo sapien
acgatgggcaatttgagtaaaagca

SEQ ID NO: 2240584 - DNA, 25 bp, Homo sapien
gacgatgggcaatttgagtaaaagc

SEQ ID NO: 2240585 - DNA, 25 bp, Homo sapien
cagacgatgggcaatttgagtaaaa

SEQ ID NO: 2240586 - DNA, 25 bp, Homo sapien
ttcatcctccactggtgtatgttca

SEQ ID NO: 2240587 - DNA, 25 bp, Homo sapien
ctccactggtgtatgttcatcagaa

SEQ ID NO: 2240588 - DNA, 25 bp, Homo sapien
catcctccactggtgtatgttcatc

SEQ ID NO: 2240589 - DNA, 25 bp, Homo sapien
tcctccactggtgtatgttcatcag

SEQ ID NO: 2240590 - DNA, 25 bp, Homo sapien
gaaagtgatgagatatggaccatgg

SEQ ID NO: 2240591 - DNA, 25 bp, Homo sapien
taacagcatcgattgtccaagaacc

SEQ ID NO: 2240592 - DNA, 25 bp, Homo sapien
gaccatggagtgtaaagatatgaac

SEQ ID NO: 2240593 - DNA, 25 bp, Homo sapien
caagcattggagatcctaaggcaga

SEQ ID NO: 2240594 - DNA, 25 bp, Homo sapien
tcaactcaacctaaagttggcacag

SEQ ID NO: 2240595 - DNA, 25 bp, Homo sapien
aaacgtgcagttcaagggtctacca

SEQ ID NO: 2240596 - DNA, 25 bp, Homo sapien
gtctcctcagagcaaaaacctaaca

SEQ ID NO: 2240597 - DNA, 25 bp, Homo sapien
ggtttacctgtcaagcacattgtct

SEQ ID NO: 2240598 - DNA, 25 bp, Homo sapien
tttggagaaagtccccatacttcag

SEQ ID NO: 2240599 - DNA, 25 bp, Homo sapien
gaaagtccccatacttcaggagctc

SEQ ID NO: 2240600 - DNA, 25 bp, Homo sapien
tcaggattctttggagaaagtcccc

SEQ ID NO: 2240601 - DNA, 25 bp, Homo sapien
tctggttcaggattctttggagaaa

SEQ ID NO: 2240602 - DNA, 25 bp, Homo sapien
tctctagaacgcgaccgcgagcgtg

SEQ ID NO: 2240603 - DNA, 25 bp, Homo sapien
taggccaaggcttgtcgctcccgta

SEQ ID NO: 2240604 - DNA, 25 bp, Homo sapien
gcgcgagtagctgccgtaatagact

SEQ ID NO: 2240605 - DNA, 25 bp, Homo sapien
tgatgggtgagtccattccggtccc

SEQ ID NO: 2240606 - DNA, 25 bp, Homo sapien
cgaggcctccctatccgggctgcgt

SEQ ID NO: 2240607 - DNA, 25 bp, Homo sapien
aggcctccctatccgggctgcgtga

SEQ ID NO: 2240608 - DNA, 25 bp, Homo sapien
cccgaggcctccctatccgggctgc

SEQ ID NO: 2240609 - DNA, 25 bp, Homo sapien
ggcctccctatccgggctgcgtgag

SEQ ID NO: 2240610 - DNA, 25 bp, Homo sapien
ggggggccccagcagccgtgggaca

SEQ ID NO: 2240611 - DNA, 25 bp, Homo sapien
ggggccccagcagccgtgggacaag

SEQ ID NO: 2240612 - DNA, 25 bp, Homo sapien
gggggccccagcagccgtgggacaa

SEQ ID NO: 2240613 - DNA, 25 bp, Homo sapien
tgttgccttggttcccgggacctgc

SEQ ID NO: 2240614 - DNA, 25 bp, Homo sapien
cgagcctaggaagatgtctgttgcc

SEQ ID NO: 2240615 - DNA, 25 bp, Homo sapien
tctgggtacttctgcaaaacccttc

SEQ ID NO: 2240616 - DNA, 25 bp, Homo sapien
gaggaaaccttggacacagttctgg

SEQ ID NO: 2240617 - DNA, 25 bp, Homo sapien
gatagtgagaaatcaacgtgccgca

SEQ ID NO: 2240618 - DNA, 25 bp, Homo sapien
caaatgttaaatatgggactgtggc

SEQ ID NO: 2240619 - DNA, 25 bp, Homo sapien
gaaaacattggactcagtgagcaga

SEQ ID NO: 2240620 - DNA, 25 bp, Homo sapien
gaaagaacaggacttcctcagaatg

SEQ ID NO: 2240621 - DNA, 25 bp, Homo sapien
ctgaactcacgagatccagccgcct

SEQ ID NO: 2240622 - DNA, 25 bp, Homo sapien
gaactcacgagatccagccgcctca

SEQ ID NO: 2240623 - DNA, 25 bp, Homo sapien
tcctgaactcacgagatccagccgc

SEQ ID NO: 2240624 - DNA, 25 bp, Homo sapien
tgaactcacgagatccagccgcctc

SEQ ID NO: 2240625 - DNA, 25 bp, Homo sapien
taccttgcagctcaaaggatctcca

SEQ ID NO: 2240626 - DNA, 25 bp, Homo sapien
gagtcttcctattcgtgaacataga

SEQ ID NO: 2240627 - DNA, 25 bp, Homo sapien
gggaattgcattcaatctacaggtc

SEQ ID NO: 2240628 - DNA, 25 bp, Homo sapien
caatctacaggtcaagttgggaaga

SEQ ID NO: 2240629 - DNA, 25 bp, Homo sapien
tttgctcagaataatggtttctagc

SEQ ID NO: 2240630 - DNA, 25 bp, Homo sapien
cagaataatggtttctagcttcatc

SEQ ID NO: 2240631 - DNA, 25 bp, Homo sapien
tcagaataatggtttctagcttcat

SEQ ID NO: 2240632 - DNA, 25 bp, Homo sapien
gctcagaataatggtttctagcttc

SEQ ID NO: 2240633 - DNA, 25 bp, Homo sapien
ttattttgttgagcagtggtttaca

SEQ ID NO: 2240634 - DNA, 25 bp, Homo sapien
attttgttgagcagtggtttacagt

SEQ ID NO: 2240635 - DNA, 25 bp, Homo sapien
ggtatagcttgaagtcaggtaacgt

SEQ ID NO: 2240636 - DNA, 25 bp, Homo sapien
ttgttgagcagtggtttacagttct

SEQ ID NO: 2240637 - DNA, 25 bp, Homo sapien
tagaaataaccagaaatagccagaa

SEQ ID NO: 2240638 - DNA, 25 bp, Homo sapien
gccagaatagctagttgaaggcagg

SEQ ID NO: 2240639 - DNA, 25 bp, Homo sapien
gtcaaaacaggatgcagccgtccca

SEQ ID NO: 2240640 - DNA, 25 bp, Homo sapien
ggtcacgaccccactgatggaaaca

SEQ ID NO: 2240641 - DNA, 25 bp, Homo sapien
taggccaacttgagaatgtgtagga

SEQ ID NO: 2240642 - DNA, 25 bp, Homo sapien
tatcaaaggactgaagcaggtttca

SEQ ID NO: 2240643 - DNA, 25 bp, Homo sapien
taatgtgtaatttccataagctggg

SEQ ID NO: 2240644 - DNA, 25 bp, Homo sapien
gcatattccctctggtaatgtgtaa

SEQ ID NO: 2240645 - DNA, 25 bp, Homo sapien
ttcgacttcacttacatccatgcat

SEQ ID NO: 2240646 - DNA, 25 bp, Homo sapien
catccatgcatattgtaagctcctt

SEQ ID NO: 2240647 - DNA, 25 bp, Homo sapien
cacttacatccatgcatattgtaag

SEQ ID NO: 2240648 - DNA, 25 bp, Homo sapien
gacttcacttacatccatgcatatt

SEQ ID NO: 2240649 - DNA, 25 bp, Homo sapien
gaaaatgtctatcctctcaaccgct

SEQ ID NO: 2240650 - DNA, 25 bp, Homo sapien
gaattgtggatgaaatgaaatacac

SEQ ID NO: 2240651 - DNA, 25 bp, Homo sapien
tcaaccgctccagcatatttttctg

SEQ ID NO: 2240652 - DNA, 25 bp, Homo sapien
gatgaacgtttcataccggtttgaa

SEQ ID NO: 2240653 - DNA, 25 bp, Homo sapien
caaacacgtcgggatactgagagca

SEQ ID NO: 2240654 - DNA, 25 bp, Homo sapien
tgcagctccgaggaagaagagtcct

SEQ ID NO: 2240655 - DNA, 25 bp, Homo sapien
ctgagagcatcggaaaatgctgtct

SEQ ID NO: 2240656 - DNA, 25 bp, Homo sapien
aggtgcaacccactgaatgcactgg

SEQ ID NO: 2240657 - DNA, 25 bp, Homo sapien
caccgaaggccctatagccctatag

SEQ ID NO: 2240658 - DNA, 25 bp, Homo sapien
acttcaatcaccgaaggccctatag

SEQ ID NO: 2240659 - DNA, 25 bp, Homo sapien
tccctgctcgggttcggactcttct

SEQ ID NO: 2240660 - DNA, 25 bp, Homo sapien
cccgcgcagacgtgactttcttctg

SEQ ID NO: 2240661 - DNA, 25 bp, Homo sapien
gccaggcactgaccgtcgccttcct

SEQ ID NO: 2240662 - DNA, 25 bp, Homo sapien
tagatctgggctgggacgcgatctg

SEQ ID NO: 2240663 - DNA, 25 bp, Homo sapien
cgcgatctgagagcgcggtggatga

SEQ ID NO: 2240664 - DNA, 25 bp, Homo sapien
tagccggtgtcttcgtggctagatc

SEQ ID NO: 2240665 - DNA, 25 bp, Homo sapien
ctgcacgtggcggggagccggctgc

SEQ ID NO: 2240666 - DNA, 25 bp, Homo sapien
cacgtggcggggagccggctgctgc

SEQ ID NO: 2240667 - DNA, 25 bp, Homo sapien
gccggctgctgccctggtcgcctcc

SEQ ID NO: 2240668 - DNA, 25 bp, Homo sapien
ccggctgctgccctggtcgcctccg

SEQ ID NO: 2240669 - DNA, 25 bp, Homo sapien
tccagtttgcggcttggttgaccac

SEQ ID NO: 2240670 - DNA, 25 bp, Homo sapien
gcgtgcagggaacccgcgctccagt

SEQ ID NO: 2240671 - DNA, 25 bp, Homo sapien
caggaaggtggcggtaaagtcaggg

SEQ ID NO: 2240672 - DNA, 25 bp, Homo sapien
tgcggcttggttgaccactcccaac

SEQ ID NO: 2240673 - DNA, 25 bp, Homo sapien
aaatggccaagtatgcttcctctgc

SEQ ID NO: 2240674 - DNA, 25 bp, Homo sapien
aatggccaagtatgcttcctctgca

SEQ ID NO: 2240675 - DNA, 25 bp, Homo sapien
ccaattagatggattcctttttcat

SEQ ID NO: 2240676 - DNA, 25 bp, Homo sapien
tcctttttcattgctacaaactgtc

SEQ ID NO: 2240677 - DNA, 25 bp, Homo sapien
ctttttcattgctacaaactgtcat

SEQ ID NO: 2240678 - DNA, 25 bp, Homo sapien
tggaccaattagatggattcctttt

SEQ ID NO: 2240679 - DNA, 25 bp, Homo sapien
aacctagatttcttcatccggtgaa

SEQ ID NO: 2240680 - DNA, 25 bp, Homo sapien
cgaagagcaagaagaggtgttcaaa

SEQ ID NO: 2240681 - DNA, 25 bp, Homo sapien
agatttcttcatccggtgaagttac

SEQ ID NO: 2240682 - DNA, 25 bp, Homo sapien
ctatcgaagagcaagaagaggtgtt

SEQ ID NO: 2240683 - DNA, 25 bp, Homo sapien
gtgtaggacaaagtatccaaggtct

SEQ ID NO: 2240684 - DNA, 25 bp, Homo sapien
atgtgtaggacaaagtatccaaggt

SEQ ID NO: 2240685 - DNA, 25 bp, Homo sapien
tgtgtaggacaaagtatccaaggtc

SEQ ID NO: 2240686 - DNA, 25 bp, Homo sapien
tgtaggacaaagtatccaaggtctg

SEQ ID NO: 2240687 - DNA, 25 bp, Homo sapien
tactctgaccaattgctttcatcag

SEQ ID NO: 2240688 - DNA, 25 bp, Homo sapien
ctactctgaccaattgctttcatca

SEQ ID NO: 2240689 - DNA, 25 bp, Homo sapien
tctgaccaattgctttcatcaggct

SEQ ID NO: 2240690 - DNA, 25 bp, Homo sapien
gaccaattgctttcatcaggcttac

SEQ ID NO: 2240691 - DNA, 25 bp, Homo sapien
atccatgcatattgccagttgcttt

SEQ ID NO: 2240692 - DNA, 25 bp, Homo sapien
catccatgcatattgccagttgctt

SEQ ID NO: 2240693 - DNA, 25 bp, Homo sapien
acatccatgcatattgccagttgct

SEQ ID NO: 2240694 - DNA, 25 bp, Homo sapien
caagcgaacatgtccggatattgag

SEQ ID NO: 2240695 - DNA, 25 bp, Homo sapien
aagcgaacatgtccggatattgaga

SEQ ID NO: 2240696 - DNA, 25 bp, Homo sapien
cgaacatgtccggatattgagaagg

SEQ ID NO: 2240697 - DNA, 25 bp, Homo sapien
gcgaacatgtccggatattgagaag

SEQ ID NO: 2240698 - DNA, 25 bp, Homo sapien
atgctgtctagctccttcaggtgca

SEQ ID NO: 2240699 - DNA, 25 bp, Homo sapien
agaaaatgctgtctagctccttcag

SEQ ID NO: 2240700 - DNA, 25 bp, Homo sapien
tcagaaaatgctgtctagctccttc

SEQ ID NO: 2240701 - DNA, 25 bp, Homo sapien
gctgtctagctccttcaggtgcaac

SEQ ID NO: 2240702 - DNA, 25 bp, Homo sapien
cactgaagtctctatatccttcgca

SEQ ID NO: 2240703 - DNA, 25 bp, Homo sapien
caccgcccttctggttctcgtggat

SEQ ID NO: 2240704 - DNA, 25 bp, Homo sapien
ctcccgcgtacacgtgactttcttt

SEQ ID NO: 2240705 - DNA, 25 bp, Homo sapien
gggctgaatagacgctcctgatctt

SEQ ID NO: 2240706 - DNA, 25 bp, Homo sapien
aacgccacctgggagcgtggtcgac

SEQ ID NO: 2240707 - DNA, 25 bp, Homo sapien
cgtggtcgacgaagccgtgcgtctc

SEQ ID NO: 2240708 - DNA, 25 bp, Homo sapien
acccaggccgaggtcgccggtgtct

SEQ ID NO: 2240709 - DNA, 25 bp, Homo sapien
atctgggctggaacgccacctggga

SEQ ID NO: 2240710 - DNA, 25 bp, Homo sapien
atgaattttggcctgggatccgtta

SEQ ID NO: 2240711 - DNA, 25 bp, Homo sapien
ggatccgttattatgtgagagactt

SEQ ID NO: 2240712 - DNA, 25 bp, Homo sapien
gcctgggatccgttattatgtgaga

SEQ ID NO: 2240713 - DNA, 25 bp, Homo sapien
tttggcctgggatccgttattatgt

SEQ ID NO: 2240714 - DNA, 25 bp, Homo sapien
gttagaattggagtcctgtggtgtc

SEQ ID NO: 2240715 - DNA, 25 bp, Homo sapien
tgacttgcttcagcgctttctcagc

SEQ ID NO: 2240716 - DNA, 25 bp, Homo sapien
tatgtattagcccagctatgacatc

SEQ ID NO: 2240717 - DNA, 25 bp, Homo sapien
cacatctgagatttccatgacttgc

SEQ ID NO: 2240718 - DNA, 25 bp, Homo sapien
aatgcaacgtagttgttattgtaag

SEQ ID NO: 2240719 - DNA, 25 bp, Homo sapien
tgcaacgtagttgttattgtaagtg

SEQ ID NO: 2240720 - DNA, 25 bp, Homo sapien
caacgtagttgttattgtaagtgct

SEQ ID NO: 2240721 - DNA, 25 bp, Homo sapien
gcaacgtagttgttattgtaagtgc

SEQ ID NO: 2240722 - DNA, 25 bp, Homo sapien
gaagtcatgatcaaactgaaacaag

SEQ ID NO: 2240723 - DNA, 25 bp, Homo sapien
tagatgccagagacaggtttacccg

SEQ ID NO: 2240724 - DNA, 25 bp, Homo sapien
caaggtgttcccatgctagatgcca

SEQ ID NO: 2240725 - DNA, 25 bp, Homo sapien
aggtttacccgtgggtgaatgatgc

SEQ ID NO: 2240726 - DNA, 25 bp, Homo sapien
ctcgagtgcacagtttctgtccttt

SEQ ID NO: 2240727 - DNA, 25 bp, Homo sapien
tcctcgagtgcacagtttctgtcct

SEQ ID NO: 2240728 - DNA, 25 bp, Homo sapien
tcgagtgcacagtttctgtcctttt

SEQ ID NO: 2240729 - DNA, 25 bp, Homo sapien
cctcgagtgcacagtttctgtcctt

SEQ ID NO: 2240730 - DNA, 25 bp, Homo sapien
tgtggcactagaaggttcatagcgg

SEQ ID NO: 2240731 - DNA, 25 bp, Homo sapien
gatcggctttctgggtgtcagacca

SEQ ID NO: 2240732 - DNA, 25 bp, Homo sapien
tcaccatcatcagtagtattctagc

SEQ ID NO: 2240733 - DNA, 25 bp, Homo sapien
tagctctggagcttacgtgttcacc

SEQ ID NO: 2240734 - DNA, 25 bp, Homo sapien
cctttttgatgtggcgggtaggcct

SEQ ID NO: 2240735 - DNA, 25 bp, Homo sapien
tttggagttgacctttttgatgtgg

SEQ ID NO: 2240736 - DNA, 25 bp, Homo sapien
tggcgggtaggcctgtggaatttct

SEQ ID NO: 2240737 - DNA, 25 bp, Homo sapien
ttgacctttttgatgtggcgggtag

SEQ ID NO: 2240738 - DNA, 25 bp, Homo sapien
gtaaaaaggctcaggcttaagacag

SEQ ID NO: 2240739 - DNA, 25 bp, Homo sapien
ctttggaggaggttgattactttct

SEQ ID NO: 2240740 - DNA, 25 bp, Homo sapien
cctgcaggcctttgaaggaaagcat

SEQ ID NO: 2240741 - DNA, 25 bp, Homo sapien
ttagaggtaaaaaggctcaggctta

SEQ ID NO: 2240742 - DNA, 25 bp, Homo sapien
tgagtatctgtaggctaccaaatgt

SEQ ID NO: 2240743 - DNA, 25 bp, Homo sapien
tctgtaggctaccaaatgtttcagt

SEQ ID NO: 2240744 - DNA, 25 bp, Homo sapien
cctatttctgagtatctgtaggcta

SEQ ID NO: 2240745 - DNA, 25 bp, Homo sapien
tctttgcctatttctgagtatctgt

SEQ ID NO: 2240746 - DNA, 25 bp, Homo sapien
ccttgcaaaaccctcacaccaaatg

SEQ ID NO: 2240747 - DNA, 25 bp, Homo sapien
cagcctgacagaaagttcatgctca

SEQ ID NO: 2240748 - DNA, 25 bp, Homo sapien
ccaaatgcaattgcgtggctgaagc

SEQ ID NO: 2240749 - DNA, 25 bp, Homo sapien
tgaagcttgacacccacaattgtga

SEQ ID NO: 2240750 - DNA, 25 bp, Homo sapien
catcccgctgatgaacaagggtgcc

SEQ ID NO: 2240751 - DNA, 25 bp, Homo sapien
gaatctggctcaaagacactctggc

SEQ ID NO: 2240752 - DNA, 25 bp, Homo sapien
gaagtaatcatctctcatcccgctg

SEQ ID NO: 2240753 - DNA, 25 bp, Homo sapien
ttgagaacttactgaccccatgtga

SEQ ID NO: 2240754 - DNA, 25 bp, Homo sapien
tccaaataggcaactctgaacacgt

SEQ ID NO: 2240755 - DNA, 25 bp, Homo sapien
tactcgagcagaagatcccaatctc

SEQ ID NO: 2240756 - DNA, 25 bp, Homo sapien
tcccaaagcgggagtgtccaaatag

SEQ ID NO: 2240757 - DNA, 25 bp, Homo sapien
cacgttcagtagtaatgtggaggag

SEQ ID NO: 2240758 - DNA, 25 bp, Homo sapien
caatgccaaaagtgggccaaatgtg

SEQ ID NO: 2240759 - DNA, 25 bp, Homo sapien
tggtcaaaggttcataaacataagc

SEQ ID NO: 2240760 - DNA, 25 bp, Homo sapien
aaacataagcaatgccaaaagtggg

SEQ ID NO: 2240761 - DNA, 25 bp, Homo sapien
ctgtggtcaaaggttcataaacata

SEQ ID NO: 2240762 - DNA, 25 bp, Homo sapien
ctgcactgcgagttcagtcacattc

SEQ ID NO: 2240763 - DNA, 25 bp, Homo sapien
gcgagttcagtcacattcatgcttc

SEQ ID NO: 2240764 - DNA, 25 bp, Homo sapien
gagttcagtcacattcatgcttctt

SEQ ID NO: 2240765 - DNA, 25 bp, Homo sapien
cactgcgagttcagtcacattcatg

SEQ ID NO: 2240766 - DNA, 25 bp, Homo sapien
gctgtcctcaacgttgccatcgctg

SEQ ID NO: 2240767 - DNA, 25 bp, Homo sapien
tccttcccataggtggccaggaact

SEQ ID NO: 2240768 - DNA, 25 bp, Homo sapien
ccctgtgggcgcgaatactgctgcc

SEQ ID NO: 2240769 - DNA, 25 bp, Homo sapien
tttgacctcttcagtaagcgacagc

SEQ ID NO: 2240770 - DNA, 25 bp, Homo sapien
cctgtagttctttctcgtcgtcgac

SEQ ID NO: 2240771 - DNA, 25 bp, Homo sapien
cagggctgagcaagctggtcatata

SEQ ID NO: 2240772 - DNA, 25 bp, Homo sapien
tcatatactggctacactggtccgg

SEQ ID NO: 2240773 - DNA, 25 bp, Homo sapien
ttctcgtcgtcgactgcagggctga

SEQ ID NO: 2240774 - DNA, 25 bp, Homo sapien
atggagctgtgcacttctgcagatt

SEQ ID NO: 2240775 - DNA, 25 bp, Homo sapien
accctgagtggtgtggatggagctg

SEQ ID NO: 2240776 - DNA, 25 bp, Homo sapien
gtggatggagctgtgcacttctgca

SEQ ID NO: 2240777 - DNA, 25 bp, Homo sapien
gcacttctgcagattctgagctggg

SEQ ID NO: 2240778 - DNA, 25 bp, Homo sapien
tggacctgcagtgatttcccttctt

SEQ ID NO: 2240779 - DNA, 25 bp, Homo sapien
gtggacctgcagtgatttcccttct

SEQ ID NO: 2240780 - DNA, 25 bp, Homo sapien
taaggcagcacaatgtatctcagct

SEQ ID NO: 2240781 - DNA, 25 bp, Homo sapien
gccaggcgcagtgttagacatgcat

SEQ ID NO: 2240782 - DNA, 25 bp, Homo sapien
tcacttgtcacagcaatggtgtaag

SEQ ID NO: 2240783 - DNA, 25 bp, Homo sapien
gctttcgtcacttactgagtccctg

SEQ ID NO: 2240784 - DNA, 25 bp, Homo sapien
gacagttgtgtcttctaacaggtag

SEQ ID NO: 2240785 - DNA, 25 bp, Homo sapien
gctttctagctaaagatcctgtgtg

SEQ ID NO: 2240786 - DNA, 25 bp, Homo sapien
tatctcactgggaacaacttgacag

SEQ ID NO: 2240787 - DNA, 25 bp, Homo sapien
gatgtgaccattccagggtgctttc

SEQ ID NO: 2240788 - DNA, 25 bp, Homo sapien
acttcatgtctctcacaacagggag

SEQ ID NO: 2240789 - DNA, 25 bp, Homo sapien
tagtcatccagttgaccaggtgtgg

SEQ ID NO: 2240790 - DNA, 25 bp, Homo sapien
ctgaagtctggcaccctgcgagtca

SEQ ID NO: 2240791 - DNA, 25 bp, Homo sapien
aagctctctccgctatgtcctgaag

SEQ ID NO: 2240792 - DNA, 25 bp, Homo sapien
gaagtggataagctaactcttgggc

SEQ ID NO: 2240793 - DNA, 25 bp, Homo sapien
ggccagtggcctacctctctaaata

SEQ ID NO: 2240794 - DNA, 25 bp, Homo sapien
aagcttgctctgtgaaaaatcccca

SEQ ID NO: 2240795 - DNA, 25 bp, Homo sapien
gactcagtttattctagcaggccca

SEQ ID NO: 2240796 - DNA, 25 bp, Homo sapien
gcttcaccccttcttgcacatattt

SEQ ID NO: 2240797 - DNA, 25 bp, Homo sapien
ttcaccccttcttgcacatatttgt

SEQ ID NO: 2240798 - DNA, 25 bp, Homo sapien
caccccttcttgcacatatttgtgg

SEQ ID NO: 2240799 - DNA, 25 bp, Homo sapien
accccttcttgcacatatttgtggt

SEQ ID NO: 2240800 - DNA, 25 bp, Homo sapien
ctaaaggggcaaggtggtgaggatg

SEQ ID NO: 2240801 - DNA, 25 bp, Homo sapien
agataagggtagcctgagcggcatg

SEQ ID NO: 2240802 - DNA, 25 bp, Homo sapien
agcccaggtgtcagtggcaccagaa

SEQ ID NO: 2240803 - DNA, 25 bp, Homo sapien
cagcccaggtgtcagtggcaccaga

SEQ ID NO: 2240804 - DNA, 25 bp, Homo sapien
aggagataagggtagcctgagcggc

SEQ ID NO: 2240805 - DNA, 25 bp, Homo sapien
tagacacagtcgtctgggtcagcac

SEQ ID NO: 2240806 - DNA, 25 bp, Homo sapien
ttaattctctctgatgtcgcctaca

SEQ ID NO: 2240807 - DNA, 25 bp, Homo sapien
ttcattggcgagcattaattctctc

SEQ ID NO: 2240808 - DNA, 25 bp, Homo sapien
tagtccacgacgatgtagacacagt

SEQ ID NO: 2240809 - DNA, 25 bp, Homo sapien
cccagttaaggatttgcagtatttc

SEQ ID NO: 2240810 - DNA, 25 bp, Homo sapien
ctttcccagttaaggatttgcagta

SEQ ID NO: 2240811 - DNA, 25 bp, Homo sapien
ttaaggatttgcagtatttctgctg

SEQ ID NO: 2240812 - DNA, 25 bp, Homo sapien
ttcactttcccagttaaggatttgc

SEQ ID NO: 2240813 - DNA, 25 bp, Homo sapien
tcaaattgctttttcaagtgtactg

SEQ ID NO: 2240814 - DNA, 25 bp, Homo sapien
aaattgctttttcaagtgtactgac

SEQ ID NO: 2240815 - DNA, 25 bp, Homo sapien
caaattgctttttcaagtgtactga

SEQ ID NO: 2240816 - DNA, 25 bp, Homo sapien
agtcacacctaagttttcggcaagt

SEQ ID NO: 2240817 - DNA, 25 bp, Homo sapien
tcacacctaagttttcggcaagttc

SEQ ID NO: 2240818 - DNA, 25 bp, Homo sapien
cttgtgggcacatcagggtattgag

SEQ ID NO: 2240819 - DNA, 25 bp, Homo sapien
ggcacatcagggtattgagtgtgtc

SEQ ID NO: 2240820 - DNA, 25 bp, Homo sapien
catcagggtattgagtgtgtcggaa

SEQ ID NO: 2240821 - DNA, 25 bp, Homo sapien
cagggtattgagtgtgtcggaaaac

SEQ ID NO: 2240822 - DNA, 25 bp, Homo sapien
gttcatgccgttctcgtggttcaca

SEQ ID NO: 2240823 - DNA, 25 bp, Homo sapien
gttcatattacccatgaggcctgga

SEQ ID NO: 2240824 - DNA, 25 bp, Homo sapien
caacatggccttctgcgcttgatgc

SEQ ID NO: 2240825 - DNA, 25 bp, Homo sapien
caacagcgtgaacttcgtgcgccga

SEQ ID NO: 2240826 - DNA, 25 bp, Homo sapien
cacaaactccgtggcgtctgcagct

SEQ ID NO: 2240827 - DNA, 25 bp, Homo sapien
gcacaaactccgtggcgtctgcagc

SEQ ID NO: 2240828 - DNA, 25 bp, Homo sapien
tgcacaaactccgtggcgtctgcag

SEQ ID NO: 2240829 - DNA, 25 bp, Homo sapien
tccactgggctaagtgagatccttg

SEQ ID NO: 2240830 - DNA, 25 bp, Homo sapien
tgggctaagtgagatccttgcgttc

SEQ ID NO: 2240831 - DNA, 25 bp, Homo sapien
cactgggctaagtgagatccttgcg

SEQ ID NO: 2240832 - DNA, 25 bp, Homo sapien
ccatccactgggctaagtgagatcc

SEQ ID NO: 2240833 - DNA, 25 bp, Homo sapien
tgtgtcctaggacactggatgaatc

SEQ ID NO: 2240834 - DNA, 25 bp, Homo sapien
tgtcctaggacactggatgaatcta

SEQ ID NO: 2240835 - DNA, 25 bp, Homo sapien
gtgtcctaggacactggatgaatct

SEQ ID NO: 2240836 - DNA, 25 bp, Homo sapien
tgtgtgtcctaggacactggatgaa

SEQ ID NO: 2240837 - DNA, 25 bp, Homo sapien
acaccggggtacactgtggaaatct

SEQ ID NO: 2240838 - DNA, 25 bp, Homo sapien
caagctgtcacagacgtcccagcta

SEQ ID NO: 2240839 - DNA, 25 bp, Homo sapien
cagacgtcccagctagtctactgca

SEQ ID NO: 2240840 - DNA, 25 bp, Homo sapien
cagctagtctactgcactccatgat

SEQ ID NO: 2240841 - DNA, 25 bp, Homo sapien
gaacttctgagtcaactgaaacacc

SEQ ID NO: 2240842 - DNA, 25 bp, Homo sapien
cttgttactttgtgaggcctctctg

SEQ ID NO: 2240843 - DNA, 25 bp, Homo sapien
gaaacttatcatctccccaaactgg

SEQ ID NO: 2240844 - DNA, 25 bp, Homo sapien
tactgtaaccaaacgcaggctaagc

SEQ ID NO: 2240845 - DNA, 25 bp, Homo sapien
tgacctggctggcaatcaatcagat

SEQ ID NO: 2240846 - DNA, 25 bp, Homo sapien
tgcttacctcacgtaaatgaagtgg

SEQ ID NO: 2240847 - DNA, 25 bp, Homo sapien
tacttctatgcaaacggtgacctgg

SEQ ID NO: 2240848 - DNA, 25 bp, Homo sapien
cgtgactcgcttggatgacttatat

SEQ ID NO: 2240849 - DNA, 25 bp, Homo sapien
cagaattagcctatggtcagtggtc

SEQ ID NO: 2240850 - DNA, 25 bp, Homo sapien
gatgacaggtggactcaatacacaa

SEQ ID NO: 2240851 - DNA, 25 bp, Homo sapien
tatgaaggcagtcttgacacatgtg

SEQ ID NO: 2240852 - DNA, 25 bp, Homo sapien
attaggccctagacatcaaaaggtc

SEQ ID NO: 2240853 - DNA, 25 bp, Homo sapien
cgatgtccacccactgtctctgaag

SEQ ID NO: 2240854 - DNA, 25 bp, Homo sapien
gacagtaagggcaggtcgttctacc

SEQ ID NO: 2240855 - DNA, 25 bp, Homo sapien
gctacctgcacttggtgagtcccaa

SEQ ID NO: 2240856 - DNA, 25 bp, Homo sapien
aggagcaaactttgtgcaggccctg

SEQ ID NO: 2240857 - DNA, 25 bp, Homo sapien
acaagagtgcagagtcaagttatcc

SEQ ID NO: 2240858 - DNA, 25 bp, Homo sapien
tgagtatagccagggaatacatgac

SEQ ID NO: 2240859 - DNA, 25 bp, Homo sapien
tttaatcgtacacgggaagactgtg

SEQ ID NO: 2240860 - DNA, 25 bp, Homo sapien
taaaggcaaggtggaaggttacatg

SEQ ID NO: 2240861 - DNA, 25 bp, Homo sapien
aggtgggtgtttgtcatgttggcta

SEQ ID NO: 2240862 - DNA, 25 bp, Homo sapien
ttttcttaattagaaatggcccaga

SEQ ID NO: 2240863 - DNA, 25 bp, Homo sapien
gacatccaacaagcaattattactt

SEQ ID NO: 2240864 - DNA, 25 bp, Homo sapien
gtgcccggcctccatgattttagaa

SEQ ID NO: 2240865 - DNA, 25 bp, Homo sapien
ctaatattatgtctggcagatgttt

SEQ ID NO: 2240866 - DNA, 25 bp, Homo sapien
tatgtctggcagatgtttaaggtta

SEQ ID NO: 2240867 - DNA, 25 bp, Homo sapien
aaattcaagctaatggctgggtgcg

SEQ ID NO: 2240868 - DNA, 25 bp, Homo sapien
cattataaattcaagctaatggctg

SEQ ID NO: 2240869 - DNA, 25 bp, Homo sapien
ataaaccataaacaggtgtctgaca

SEQ ID NO: 2240870 - DNA, 25 bp, Homo sapien
cacacagagatcttaagcctattaa

SEQ ID NO: 2240871 - DNA, 25 bp, Homo sapien
gaccatgatccattctctctcctat

SEQ ID NO: 2240872 - DNA, 25 bp, Homo sapien
gcacagaatgctctatgaaagacca

SEQ ID NO: 2240873 - DNA, 25 bp, Homo sapien
ggtgacccgctttctcagcatgagg

SEQ ID NO: 2240874 - DNA, 25 bp, Homo sapien
cacgtgtgcgggtgtcatggcacta

SEQ ID NO: 2240875 - DNA, 25 bp, Homo sapien
caaaattgatcacgttctgcaccta

SEQ ID NO: 2240876 - DNA, 25 bp, Homo sapien
tcggcgcgagacaactaactacagg

SEQ ID NO: 2240877 - DNA, 25 bp, Homo sapien
gacgaccagtggactagccaacaag

SEQ ID NO: 2240878 - DNA, 25 bp, Homo sapien
acaccggaggctggtcagtctacgc

SEQ ID NO: 2240879 - DNA, 25 bp, Homo sapien
attgccccaccagaacagtcctatg

SEQ ID NO: 2240880 - DNA, 25 bp, Homo sapien
tggctaaaaccagcggcagcagtga

SEQ ID NO: 2240881 - DNA, 25 bp, Homo sapien
taaaacccgcttcagggcttggaca

SEQ ID NO: 2240882 - DNA, 25 bp, Homo sapien
catgtataggcaatgaggtctgaac

SEQ ID NO: 2240883 - DNA, 25 bp, Homo sapien
gaagcatgaatgtgactgaactcgc

SEQ ID NO: 2240884 - DNA, 25 bp, Homo sapien
tacagaacagcctactgggtgtggg

SEQ ID NO: 2240885 - DNA, 25 bp, Homo sapien
caaccagaacgtatgtttccttaag

SEQ ID NO: 2240886 - DNA, 25 bp, Homo sapien
tatgtttccttaagctgagactgat

SEQ ID NO: 2240887 - DNA, 25 bp, Homo sapien
gaataattcccaaccagaacgtatg

SEQ ID NO: 2240888 - DNA, 25 bp, Homo sapien
gaacgtatgtttccttaagctgaga

SEQ ID NO: 2240889 - DNA, 25 bp, Homo sapien
tgtctaagggatagcctctgtgcca

SEQ ID NO: 2240890 - DNA, 25 bp, Homo sapien
taacggcacccttgttcatcagcgg

SEQ ID NO: 2240891 - DNA, 25 bp, Homo sapien
tcatggtaaccgcagctgaggccat

SEQ ID NO: 2240892 - DNA, 25 bp, Homo sapien
tgcatagcaccccatcaaaagtagt

SEQ ID NO: 2240893 - DNA, 25 bp, Homo sapien
tcagactgaaacatttggtagccta

SEQ ID NO: 2240894 - DNA, 25 bp, Homo sapien
tatttacagtaagtcgcgcatgtca

SEQ ID NO: 2240895 - DNA, 25 bp, Homo sapien
gcatgtcagtgtacattccgtctgg

SEQ ID NO: 2240896 - DNA, 25 bp, Homo sapien
tgagatctcctatactcagttggca

SEQ ID NO: 2240897 - DNA, 25 bp, Homo sapien
aattgagcaatggacgatttgcaaa

SEQ ID NO: 2240898 - DNA, 25 bp, Homo sapien
caatggacgatttgcaaatcgggca

SEQ ID NO: 2240899 - DNA, 25 bp, Homo sapien
tcagaagtgagatagagaatggctg

SEQ ID NO: 2240900 - DNA, 25 bp, Homo sapien
attacttaagacacatgaactaaaa

SEQ ID NO: 2240901 - DNA, 25 bp, Homo sapien
tccgttgccctaagtggccctagtg

SEQ ID NO: 2240902 - DNA, 25 bp, Homo sapien
aggcttctgtgttccgttgccctaa

SEQ ID NO: 2240903 - DNA, 25 bp, Homo sapien
taagtggccctagtgacccacctcg

SEQ ID NO: 2240904 - DNA, 25 bp, Homo sapien
ccacctcgctgcaccatagacctgg

SEQ ID NO: 2240905 - DNA, 25 bp, Homo sapien
tttttatcctggtatgtcagacttg

SEQ ID NO: 2240906 - DNA, 25 bp, Homo sapien
gggtttttatcctggtatgtcagac

SEQ ID NO: 2240907 - DNA, 25 bp, Homo sapien
tatcctggtatgtcagacttgtggc

SEQ ID NO: 2240908 - DNA, 25 bp, Homo sapien
tttatcctggtatgtcagacttgtg

SEQ ID NO: 2240909 - DNA, 25 bp, Homo sapien
ttctcttcagacacagctgactgca

SEQ ID NO: 2240910 - DNA, 25 bp, Homo sapien
attgagtaaggcttagtttcttgtt

SEQ ID NO: 2240911 - DNA, 25 bp, Homo sapien
tcaattgagtaaggcttagtttctt

SEQ ID NO: 2240912 - DNA, 25 bp, Homo sapien
cagctgactgcaactcataaagcaa

SEQ ID NO: 2240913 - DNA, 25 bp, Homo sapien
caccaatttggctttttcatcgttt

SEQ ID NO: 2240914 - DNA, 25 bp, Homo sapien
tcatcgtttaatctttgtttagaaa

SEQ ID NO: 2240915 - DNA, 25 bp, Homo sapien
gtttagaaagattctcattcacaaa

SEQ ID NO: 2240916 - DNA, 25 bp, Homo sapien
cattcacaaactcattttggagagc

SEQ ID NO: 2240917 - DNA, 25 bp, Homo sapien
gaactaaatgaagatcttgctttcc

SEQ ID NO: 2240918 - DNA, 25 bp, Homo sapien
accacattataacaggaactaaatg

SEQ ID NO: 2240919 - DNA, 25 bp, Homo sapien
actcataggttgtgttcgtgaacta

SEQ ID NO: 2240920 - DNA, 25 bp, Homo sapien
aacaggaactaaatgaagatcttgc

SEQ ID NO: 2240921 - DNA, 25 bp, Homo sapien
tgaggagtgctaggtaaaaccacag

SEQ ID NO: 2240922 - DNA, 25 bp, Homo sapien
gaggagtgctaggtaaaaccacagc

SEQ ID NO: 2240923 - DNA, 25 bp, Homo sapien
aggagtgctaggtaaaaccacagct

SEQ ID NO: 2240924 - DNA, 25 bp, Homo sapien
ctgaggagtgctaggtaaaaccaca

SEQ ID NO: 2240925 - DNA, 25 bp, Homo sapien
gaataatggaaataataacttcaca

SEQ ID NO: 2240926 - DNA, 25 bp, Homo sapien
gggaataatggaaataataacttca

SEQ ID NO: 2240927 - DNA, 25 bp, Homo sapien
ataatggaaataataacttcacatg

SEQ ID NO: 2240928 - DNA, 25 bp, Homo sapien
ggaataatggaaataataacttcac

SEQ ID NO: 2240929 - DNA, 25 bp, Homo sapien
ttatttcaccaatagttgctttaaa

SEQ ID NO: 2240930 - DNA, 25 bp, Homo sapien
ctttatttcaccaatagttgcttta

SEQ ID NO: 2240931 - DNA, 25 bp, Homo sapien
tcaccaatagttgctttaaaaataa

SEQ ID NO: 2240932 - DNA, 25 bp, Homo sapien
tgctttaaaaataagggaacactca

SEQ ID NO: 2240933 - DNA, 25 bp, Homo sapien
gtatggcttatctcggaagtcaggg

SEQ ID NO: 2240934 - DNA, 25 bp, Homo sapien
tggaaggttcagtgttgtatggctt

SEQ ID NO: 2240935 - DNA, 25 bp, Homo sapien
tcacggtgaccagaagcattccaaa

SEQ ID NO: 2240936 - DNA, 25 bp, Homo sapien
gggtcagtgaccaaaattcacggtg

SEQ ID NO: 2240937 - DNA, 25 bp, Homo sapien
ttcttcctcttctgctctactgaac

SEQ ID NO: 2240938 - DNA, 25 bp, Homo sapien
cttcctcttctgctctactgaacat

SEQ ID NO: 2240939 - DNA, 25 bp, Homo sapien
gcttactgtttcttcctcttctgct

SEQ ID NO: 2240940 - DNA, 25 bp, Homo sapien
gtttcttcctcttctgctctactga

SEQ ID NO: 2240941 - DNA, 25 bp, Homo sapien
gcttgttaggaactatatcagtcat

SEQ ID NO: 2240942 - DNA, 25 bp, Homo sapien
ttgttaggaactatatcagtcatgg

SEQ ID NO: 2240943 - DNA, 25 bp, Homo sapien
gggcttgttaggaactatatcagtc

SEQ ID NO: 2240944 - DNA, 25 bp, Homo sapien
tgttaggaactatatcagtcatggc

SEQ ID NO: 2240945 - DNA, 25 bp, Homo sapien
atgtgtgacaatctagtgcaggggc

SEQ ID NO: 2240946 - DNA, 25 bp, Homo sapien
gagatgtgtgacaatctagtgcagg

SEQ ID NO: 2240947 - DNA, 25 bp, Homo sapien
ttgagatgtgtgacaatctagtgca

SEQ ID NO: 2240948 - DNA, 25 bp, Homo sapien
agatgtgtgacaatctagtgcaggg

SEQ ID NO: 2240949 - DNA, 25 bp, Homo sapien
cctttatatccgattttattaagtg

SEQ ID NO: 2240950 - DNA, 25 bp, Homo sapien
ctttatatccgattttattaagtgg

SEQ ID NO: 2240951 - DNA, 25 bp, Homo sapien
ctccgctcggcccacaggtacagta

SEQ ID NO: 2240952 - DNA, 25 bp, Homo sapien
gctcggcccacaggtacagtaccaa

SEQ ID NO: 2240953 - DNA, 25 bp, Homo sapien
accagtctccgctcggcccacaggt

SEQ ID NO: 2240954 - DNA, 25 bp, Homo sapien
ccagtctccgctcggcccacaggta

SEQ ID NO: 2240955 - DNA, 25 bp, Homo sapien
atggtagaataaagtccagagcctc

SEQ ID NO: 2240956 - DNA, 25 bp, Homo sapien
agggctcataagttggatgagttaa

SEQ ID NO: 2240957 - DNA, 25 bp, Homo sapien
aagggctcataagttggatgagtta

SEQ ID NO: 2240958 - DNA, 25 bp, Homo sapien
caacaccaggagcaatgatcaagag

SEQ ID NO: 2240959 - DNA, 25 bp, Homo sapien
caccaacaccaggagcaatgatcaa

SEQ ID NO: 2240960 - DNA, 25 bp, Homo sapien
tgatcaagagagcacagtcagcttg

SEQ ID NO: 2240961 - DNA, 25 bp, Homo sapien
atgatcaagagagcacagtcagctt

SEQ ID NO: 2240962 - DNA, 25 bp, Homo sapien
tagtggacttgcctgaatctacatg

SEQ ID NO: 2240963 - DNA, 25 bp, Homo sapien
atattgatatgagtttttcctttcc

SEQ ID NO: 2240964 - DNA, 25 bp, Homo sapien
acaatattgatatgagtttttcctt

SEQ ID NO: 2240965 - DNA, 25 bp, Homo sapien
acgacaatattgatatgagtttttc

SEQ ID NO: 2240966 - DNA, 25 bp, Homo sapien
gtaaagcaacatagggagtggcatc

SEQ ID NO: 2240967 - DNA, 25 bp, Homo sapien
ctgagctaaaatgagtgattttgta

SEQ ID NO: 2240968 - DNA, 25 bp, Homo sapien
ggttcaattgtacttaactatttga

SEQ ID NO: 2240969 - DNA, 25 bp, Homo sapien
caagcataacctctgagctaaaatg

SEQ ID NO: 2240970 - DNA, 25 bp, Homo sapien
gacaagcctaggcatcatagtgata

SEQ ID NO: 2240971 - DNA, 25 bp, Homo sapien
aacaaaatcacattaggctgcgtgc

SEQ ID NO: 2240972 - DNA, 25 bp, Homo sapien
tgcatagggcaagctatcaggagga

SEQ ID NO: 2240973 - DNA, 25 bp, Homo sapien
tctaggtgtataaccttccaggcac

SEQ ID NO: 2240974 - DNA, 25 bp, Homo sapien
caactctacccaatttggtcaaatc

SEQ ID NO: 2240975 - DNA, 25 bp, Homo sapien
cagtcgttctcccatcggatttgac

SEQ ID NO: 2240976 - DNA, 25 bp, Homo sapien
aacactcagcgatcatattgttggg

SEQ ID NO: 2240977 - DNA, 25 bp, Homo sapien
gttattgtttcagtcgttctcccat

SEQ ID NO: 2240978 - DNA, 25 bp, Homo sapien
taccaaggtattgacaggaataaca

SEQ ID NO: 2240979 - DNA, 25 bp, Homo sapien
tcagcataggactctgacaggtgct

SEQ ID NO: 2240980 - DNA, 25 bp, Homo sapien
caggagttaactacatagactgaac

SEQ ID NO: 2240981 - DNA, 25 bp, Homo sapien
gtacagtctcctaacacgtggtaag

SEQ ID NO: 2240982 - DNA, 25 bp, Homo sapien
taagtggacatatgcagctctaacc

SEQ ID NO: 2240983 - DNA, 25 bp, Homo sapien
tcaagctgggtgctacgtgcctgag

SEQ ID NO: 2240984 - DNA, 25 bp, Homo sapien
tcttccgaagaagctactcataggg

SEQ ID NO: 2240985 - DNA, 25 bp, Homo sapien
caaatgaaacacaagaggagactct

SEQ ID NO: 2240986 - DNA, 25 bp, Homo sapien
tcagaatcagagtcactgtcgctat

SEQ ID NO: 2240987 - DNA, 25 bp, Homo sapien
cagagtcactgtcgctatcttcaga

SEQ ID NO: 2240988 - DNA, 25 bp, Homo sapien
tcagagtcactgtcgctatcttcag

SEQ ID NO: 2240989 - DNA, 25 bp, Homo sapien
gaatcagagtcactgtcgctatctt

SEQ ID NO: 2240990 - DNA, 25 bp, Homo sapien
tatagggaccaaggatgcctgccag

SEQ ID NO: 2240991 - DNA, 25 bp, Homo sapien
tcagctactccataacacaaagggt

SEQ ID NO: 2240992 - DNA, 25 bp, Homo sapien
taaatacagttcaagggtctgccac

SEQ ID NO: 2240993 - DNA, 25 bp, Homo sapien
gattgacacaaactgggaggacctt

SEQ ID NO: 2240994 - DNA, 25 bp, Homo sapien
tcccgtaggagcgtgagtagttgcc

SEQ ID NO: 2240995 - DNA, 25 bp, Homo sapien
tactgcagcctcgaaaacgggacat

SEQ ID NO: 2240996 - DNA, 25 bp, Homo sapien
gagaatgcgaccacaactgggagcg

SEQ ID NO: 2240997 - DNA, 25 bp, Homo sapien
cagtcagccgctcttgagaatgcga

SEQ ID NO: 2240998 - DNA, 25 bp, Homo sapien
ccgcgcaaccgctgggagcaaagga

SEQ ID NO: 2240999 - DNA, 25 bp, Homo sapien
tctcaggagcctcagcagtatccgt

SEQ ID NO: 2241000 - DNA, 25 bp, Homo sapien
agtatccgttgcctttgctccaaaa

SEQ ID NO: 2241001 - DNA, 25 bp, Homo sapien
aaccatgggaactattgcgagtacg

SEQ ID NO: 2241002 - DNA, 25 bp, Homo sapien
tcccacatagtttgttttcccacaa

SEQ ID NO: 2241003 - DNA, 25 bp, Homo sapien
gagcttaaggaattgcatatttcca

SEQ ID NO: 2241004 - DNA, 25 bp, Homo sapien
ttttcagtctaatatcctgatggac

SEQ ID NO: 2241005 - DNA, 25 bp, Homo sapien
taatgctaagtcctaatcaaaaatc

SEQ ID NO: 2241006 - DNA, 25 bp, Homo sapien
gatgtgaatgatacggatgccggca

SEQ ID NO: 2241007 - DNA, 25 bp, Homo sapien
taacttaagactctgtgatctctgg

SEQ ID NO: 2241008 - DNA, 25 bp, Homo sapien
gagggtatcaggcatcagttcatgc

SEQ ID NO: 2241009 - DNA, 25 bp, Homo sapien
cttaagttggtagctgagggtatca

SEQ ID NO: 2241010 - DNA, 25 bp, Homo sapien
gccataacaatcttgcgagactaac

SEQ ID NO: 2241011 - DNA, 25 bp, Homo sapien
tagttcttagagcttcttgtggcaa

SEQ ID NO: 2241012 - DNA, 25 bp, Homo sapien
taatagtcaaaagtgagtcagctgc

SEQ ID NO: 2241013 - DNA, 25 bp, Homo sapien
tctgatgacagcacggcaaaatttc

SEQ ID NO: 2241014 - DNA, 25 bp, Homo sapien
aagcagtctgagttttcaacatggc

SEQ ID NO: 2241015 - DNA, 25 bp, Homo sapien
tcaacatggcagtgatacagatttt

SEQ ID NO: 2241016 - DNA, 25 bp, Homo sapien
gcagtgatacagattttaagcaaca

SEQ ID NO: 2241017 - DNA, 25 bp, Homo sapien
cagattttaagcaacatccagttta

SEQ ID NO: 2241018 - DNA, 25 bp, Homo sapien
caaaaggaccgataagaccagtggc

SEQ ID NO: 2241019 - DNA, 25 bp, Homo sapien
tacctaccacggtgtgccagatgga

SEQ ID NO: 2241020 - DNA, 25 bp, Homo sapien
tagatgggagcaccagcatttgcgc

SEQ ID NO: 2241021 - DNA, 25 bp, Homo sapien
tagggcctataaaccaggtgcttca

SEQ ID NO: 2241022 - DNA, 25 bp, Homo sapien
tggatagtagggtggagagtaacgg

SEQ ID NO: 2241023 - DNA, 25 bp, Homo sapien
taacggggcggtgcacttgaggacc

SEQ ID NO: 2241024 - DNA, 25 bp, Homo sapien
cggtgcacttgaggaccacatgtag

SEQ ID NO: 2241025 - DNA, 25 bp, Homo sapien
ttcaaaaggtggatagtagggtgga

SEQ ID NO: 2241026 - DNA, 25 bp, Homo sapien
gcagactggggctcatcagaaagtc

SEQ ID NO: 2241027 - DNA, 25 bp, Homo sapien
gagggagaggcagactggggctcat

SEQ ID NO: 2241028 - DNA, 25 bp, Homo sapien
gagaggcagactggggctcatcaga

SEQ ID NO: 2241029 - DNA, 25 bp, Homo sapien
gaggcagactggggctcatcagaaa

SEQ ID NO: 2241030 - DNA, 25 bp, Homo sapien
tgtgcaccaccaagcacgaagagca

SEQ ID NO: 2241031 - DNA, 25 bp, Homo sapien
caccttgggaaagatctggctttgt

SEQ ID NO: 2241032 - DNA, 25 bp, Homo sapien
ctttgtcgcagccagggagttggcc

SEQ ID NO: 2241033 - DNA, 25 bp, Homo sapien
gcagctcaggagaacagaactttga

SEQ ID NO: 2241034 - DNA, 25 bp, Homo sapien
cctttcagggacacagatggctttc

SEQ ID NO: 2241035 - DNA, 25 bp, Homo sapien
ttcagggacacagatggctttcctc

SEQ ID NO: 2241036 - DNA, 25 bp, Homo sapien
ttccaccttagcctgcctcctgcct

SEQ ID NO: 2241037 - DNA, 25 bp, Homo sapien
cagggacacagatggctttcctctt

SEQ ID NO: 2241038 - DNA, 25 bp, Homo sapien
tgtgtcccaagggtaaaatcccagc

SEQ ID NO: 2241039 - DNA, 25 bp, Homo sapien
agtgacttcacaaagagcccaggaa

SEQ ID NO: 2241040 - DNA, 25 bp, Homo sapien
gcatctgtcggtattgtgcattccc

SEQ ID NO: 2241041 - DNA, 25 bp, Homo sapien
gatcaatgcgcatttccgtcagggc

SEQ ID NO: 2241042 - DNA, 25 bp, Homo sapien
gatgagcatagtaagaaactgttgg

SEQ ID NO: 2241043 - DNA, 25 bp, Homo sapien
tgaggagggctatggtagtaggtat

SEQ ID NO: 2241044 - DNA, 25 bp, Homo sapien
aagtcataagcagaatatggtggca

SEQ ID NO: 2241045 - DNA, 25 bp, Homo sapien
cttggggatgagcatagtaagaaac

SEQ ID NO: 2241046 - DNA, 25 bp, Homo sapien
tctggggaagtaccagaaatcatgt

SEQ ID NO: 2241047 - DNA, 25 bp, Homo sapien
ctccagctctcgcaaaatgaaacca

SEQ ID NO: 2241048 - DNA, 25 bp, Homo sapien
accctccagctctcgcaaaatgaaa

SEQ ID NO: 2241049 - DNA, 25 bp, Homo sapien
tccagctctcgcaaaatgaaaccag

SEQ ID NO: 2241050 - DNA, 25 bp, Homo sapien
ccctccagctctcgcaaaatgaaac

SEQ ID NO: 2241051 - DNA, 25 bp, Homo sapien
gtcccatctcctcaactcgccaaac

SEQ ID NO: 2241052 - DNA, 25 bp, Homo sapien
tgaggtcccatctcctcaactcgcc

SEQ ID NO: 2241053 - DNA, 25 bp, Homo sapien
ttaacactcatcctgaggtcccatc

SEQ ID NO: 2241054 - DNA, 25 bp, Homo sapien
aggtcccatctcctcaactcgccaa

SEQ ID NO: 2241055 - DNA, 25 bp, Homo sapien
ttctcttccagccaaagctgctgag

SEQ ID NO: 2241056 - DNA, 25 bp, Homo sapien
aagctgctgagattccacacaatac

SEQ ID NO: 2241057 - DNA, 25 bp, Homo sapien
caaagctgctgagattccacacaat

SEQ ID NO: 2241058 - DNA, 25 bp, Homo sapien
ttccagccaaagctgctgagattcc

SEQ ID NO: 2241059 - DNA, 25 bp, Homo sapien
gcttcccctacttgttagtgcttgg

SEQ ID NO: 2241060 - DNA, 25 bp, Homo sapien
ttgcagctctctaacctaaaagctt

SEQ ID NO: 2241061 - DNA, 25 bp, Homo sapien
cttgttagtgcttgggcattccaga

SEQ ID NO: 2241062 - DNA, 25 bp, Homo sapien
cttcctcaaggccaaatttacagga

SEQ ID NO: 2241063 - DNA, 25 bp, Homo sapien
ctggctccttcaacttgagacattt

SEQ ID NO: 2241064 - DNA, 25 bp, Homo sapien
gctacatccttgaagcaattgcttc

SEQ ID NO: 2241065 - DNA, 25 bp, Homo sapien
tgagacatttgaaggcagctacatc

SEQ ID NO: 2241066 - DNA, 25 bp, Homo sapien
ccaacaggggccactgtgaaatgca

SEQ ID NO: 2241067 - DNA, 25 bp, Homo sapien
tccttaaagcctccaaggacagcgg

SEQ ID NO: 2241068 - DNA, 25 bp, Homo sapien
tcgtagtacccaccagtgatctcca

SEQ ID NO: 2241069 - DNA, 25 bp, Homo sapien
gccaacaatgttgaggatggtggca

SEQ ID NO: 2241070 - DNA, 25 bp, Homo sapien
aactgctgacatcgatgtattcgta

SEQ ID NO: 2241071 - DNA, 25 bp, Homo sapien
tgtgcagaattcacggctgaggtga

SEQ ID NO: 2241072 - DNA, 25 bp, Homo sapien
cagaagcaggtgttgccccggatgc

SEQ ID NO: 2241073 - DNA, 25 bp, Homo sapien
ccacagttgtagaggtcacagcaga

SEQ ID NO: 2241074 - DNA, 25 bp, Homo sapien
ccccggatgcgaggtgtgcagaatt

SEQ ID NO: 2241075 - DNA, 25 bp, Homo sapien
gacggtatataacagtgaggagatg

SEQ ID NO: 2241076 - DNA, 25 bp, Homo sapien
ctgacggtatataacagtgaggaga

SEQ ID NO: 2241077 - DNA, 25 bp, Homo sapien
tgacggtatataacagtgaggagat

SEQ ID NO: 2241078 - DNA, 25 bp, Homo sapien
taaggatggctttgaaatgaacacc

SEQ ID NO: 2241079 - DNA, 25 bp, Homo sapien
ctggccgaacttgtgcatgaggcaa

SEQ ID NO: 2241080 - DNA, 25 bp, Homo sapien
gagccggcgcatgcactctgaagta

SEQ ID NO: 2241081 - DNA, 25 bp, Homo sapien
cagatggaaggacagacggaagaac

SEQ ID NO: 2241082 - DNA, 25 bp, Homo sapien
ctctagctgcctgggtaaggttcct

SEQ ID NO: 2241083 - DNA, 25 bp, Homo sapien
gaatttttggttgaggaacttatga

SEQ ID NO: 2241084 - DNA, 25 bp, Homo sapien
taaggttcctcataaccctcgtgga

SEQ ID NO: 2241085 - DNA, 25 bp, Homo sapien
cataaccctcgtggaaggagaattt

SEQ ID NO: 2241086 - DNA, 25 bp, Homo sapien
tcttgttagcaagaaattgtccagc

SEQ ID NO: 2241087 - DNA, 25 bp, Homo sapien
gaagtgctgctaaatttgtcttgct

SEQ ID NO: 2241088 - DNA, 25 bp, Homo sapien
tagcaagaaattgtccagctctctc

SEQ ID NO: 2241089 - DNA, 25 bp, Homo sapien
atgcaatgaagtgctgctaaatttg

SEQ ID NO: 2241090 - DNA, 25 bp, Homo sapien
tctgtgatgtcttgggaacataatg

SEQ ID NO: 2241091 - DNA, 25 bp, Homo sapien
taatggcaccggttagcgtagagtg

SEQ ID NO: 2241092 - DNA, 25 bp, Homo sapien
ggttagcgtagagtggtttcagatc

SEQ ID NO: 2241093 - DNA, 25 bp, Homo sapien
ggaacataatggcaccggttagcgt

SEQ ID NO: 2241094 - DNA, 25 bp, Homo sapien
aaaaagcattcaggcaccaagtgcc

SEQ ID NO: 2241095 - DNA, 25 bp, Homo sapien
ctggttttgcaaaaagcattcaggc

SEQ ID NO: 2241096 - DNA, 25 bp, Homo sapien
gcaaaaagcattcaggcaccaagtg

SEQ ID NO: 2241097 - DNA, 25 bp, Homo sapien
tttgcaaaaagcattcaggcaccaa

SEQ ID NO: 2241098 - DNA, 25 bp, Homo sapien
gaagacagacgtgtgatagttgccc

SEQ ID NO: 2241099 - DNA, 25 bp, Homo sapien
caacctctgtaatctgaagggctac

SEQ ID NO: 2241100 - DNA, 25 bp, Homo sapien
caaggcaattgggaggcaagaaaag

SEQ ID NO: 2241101 - DNA, 25 bp, Homo sapien
tgcctctggctgatactcttcattg

SEQ ID NO: 2241102 - DNA, 25 bp, Homo sapien
aaagaccccgtcaactatggcacaa

SEQ ID NO: 2241103 - DNA, 25 bp, Homo sapien
ccaaagctgataaacacgatagaag

SEQ ID NO: 2241104 - DNA, 25 bp, Homo sapien
ctgataaacacgatagaagccacca

SEQ ID NO: 2241105 - DNA, 25 bp, Homo sapien
tatggcacaacaaaaagccgcaatc

SEQ ID NO: 2241106 - DNA, 25 bp, Homo sapien
ccaatgattccaaggaacgatccaa

SEQ ID NO: 2241107 - DNA, 25 bp, Homo sapien
tgttctcaataaggtttgatccaat

SEQ ID NO: 2241108 - DNA, 25 bp, Homo sapien
tttgatccaatgattccaaggaacg

SEQ ID NO: 2241109 - DNA, 25 bp, Homo sapien
ttccaaggaacgatccaaagccgag

SEQ ID NO: 2241110 - DNA, 25 bp, Homo sapien
cagcatttgctcatcagtcagaaat

SEQ ID NO: 2241111 - DNA, 25 bp, Homo sapien
agcatttgctcatcagtcagaaata

SEQ ID NO: 2241112 - DNA, 25 bp, Homo sapien
agtcacggtgacatagatggagttt

SEQ ID NO: 2241113 - DNA, 25 bp, Homo sapien
attaacacggacacaataagcaaag

SEQ ID NO: 2241114 - DNA, 25 bp, Homo sapien
gagtttcgtttcctccgattgaatg

SEQ ID NO: 2241115 - DNA, 25 bp, Homo sapien
tggttgcagcaaggcccactgtgag

SEQ ID NO: 2241116 - DNA, 25 bp, Homo sapien
tcagctttgccacacagggtgggtc

SEQ ID NO: 2241117 - DNA, 25 bp, Homo sapien
cagggtgggtccccggatatcccag

SEQ ID NO: 2241118 - DNA, 25 bp, Homo sapien
ccccggatatcccagccttgagtat

SEQ ID NO: 2241119 - DNA, 25 bp, Homo sapien
ctgagtcagctttgccacacagggt

SEQ ID NO: 2241120 - DNA, 25 bp, Homo sapien
tagacgctgattcaggcccggactg

SEQ ID NO: 2241121 - DNA, 25 bp, Homo sapien
tcaggaatttgccagtgccgtcggt

SEQ ID NO: 2241122 - DNA, 25 bp, Homo sapien
ggagactcccctgtccaaactgtgg

SEQ ID NO: 2241123 - DNA, 25 bp, Homo sapien
tagctcctaagtagcctagacgctg

SEQ ID NO: 2241124 - DNA, 25 bp, Homo sapien
tcaaaaagtggaatgcgtggcgccg

SEQ ID NO: 2241125 - DNA, 25 bp, Homo sapien
gatttatgattcctttcccgcagtg

SEQ ID NO: 2241126 - DNA, 25 bp, Homo sapien
gccggctccgcttctatctgggatt

SEQ ID NO: 2241127 - DNA, 25 bp, Homo sapien
tgggcgaagcccactcagctgtttg

SEQ ID NO: 2241128 - DNA, 25 bp, Homo sapien
gtagcgactctttaagccctgggcc

SEQ ID NO: 2241129 - DNA, 25 bp, Homo sapien
cgggaatggacgctgcggaacccca

SEQ ID NO: 2241130 - DNA, 25 bp, Homo sapien
tcgcgaagcgcaacagcttggcgtc

SEQ ID NO: 2241131 - DNA, 25 bp, Homo sapien
agagcagtgcgccaagtagcgactc

SEQ ID NO: 2241132 - DNA, 25 bp, Homo sapien
aaaccattgaggatacggatctttc

SEQ ID NO: 2241133 - DNA, 25 bp, Homo sapien
ccattgaggatacggatctttccac

SEQ ID NO: 2241134 - DNA, 25 bp, Homo sapien
atatgcaaaaccattgaggatacgg

SEQ ID NO: 2241135 - DNA, 25 bp, Homo sapien
gcaaaaccattgaggatacggatct

SEQ ID NO: 2241136 - DNA, 25 bp, Homo sapien
gacactgagtcttctgcgggcagta

SEQ ID NO: 2241137 - DNA, 25 bp, Homo sapien
tcatcggagaagacctgagcagact

SEQ ID NO: 2241138 - DNA, 25 bp, Homo sapien
tccggtgaacgagttttgttgacac

SEQ ID NO: 2241139 - DNA, 25 bp, Homo sapien
gatgttcccgcaaattcatcggaga

SEQ ID NO: 2241140 - DNA, 25 bp, Homo sapien
aatggaaagcgaaggcgcaggttgc

SEQ ID NO: 2241141 - DNA, 25 bp, Homo sapien
ttagaagtgaccaggactttgcaaa

SEQ ID NO: 2241142 - DNA, 25 bp, Homo sapien
tgaccaggactttgcaaagagggag

SEQ ID NO: 2241143 - DNA, 25 bp, Homo sapien
aaagagggagtgtcgaatggaaagc

SEQ ID NO: 2241144 - DNA, 25 bp, Homo sapien
cgacgcaagcttggcgctccgatct

SEQ ID NO: 2241145 - DNA, 25 bp, Homo sapien
gggcagagatactccgacgcaagct

SEQ ID NO: 2241146 - DNA, 25 bp, Homo sapien
gtagacacacgcacacaaacaggca

SEQ ID NO: 2241147 - DNA, 25 bp, Homo sapien
aggccgctcccctgggactctggtc

SEQ ID NO: 2241148 - DNA, 25 bp, Homo sapien
cagaggccagggcactcaacccctg

SEQ ID NO: 2241149 - DNA, 25 bp, Homo sapien
ctggggcgttcacagtccagaggcc

SEQ ID NO: 2241150 - DNA, 25 bp, Homo sapien
ccagaggccagggcactcaacccct

SEQ ID NO: 2241151 - DNA, 25 bp, Homo sapien
gggcgttcacagtccagaggccagg

SEQ ID NO: 2241152 - DNA, 25 bp, Homo sapien
catgtcgctggaccgctgctgagtc

SEQ ID NO: 2241153 - DNA, 25 bp, Homo sapien
aatcgggcagggacatgtcgctgga

SEQ ID NO: 2241154 - DNA, 25 bp, Homo sapien
agggacatgtcgctggaccgctgct

SEQ ID NO: 2241155 - DNA, 25 bp, Homo sapien
ccatggaatcgggcagggacatgtc

SEQ ID NO: 2241156 - DNA, 25 bp, Homo sapien
ccggctctgggcgccccgcagagca

SEQ ID NO: 2241157 - DNA, 25 bp, Homo sapien
ggctctgggcgccccgcagagcatc

SEQ ID NO: 2241158 - DNA, 25 bp, Homo sapien
ccagtccccgaagctgcttcaagcg

SEQ ID NO: 2241159 - DNA, 25 bp, Homo sapien
tccccgaagctgcttcaagcgcccc

SEQ ID NO: 2241160 - DNA, 25 bp, Homo sapien
tactccgcggttgcctctctcggtc

SEQ ID NO: 2241161 - DNA, 25 bp, Homo sapien
tctctcggtccttccgagagctgag

SEQ ID NO: 2241162 - DNA, 25 bp, Homo sapien
acactgcctctggttgcgagctgca

SEQ ID NO: 2241163 - DNA, 25 bp, Homo sapien
ttccgagagctgagagacactgcct

SEQ ID NO: 2241164 - DNA, 25 bp, Homo sapien
accctacactatacatgtggtttag

SEQ ID NO: 2241165 - DNA, 25 bp, Homo sapien
ggtattattagcaaccctacactat

SEQ ID NO: 2241166 - DNA, 25 bp, Homo sapien
caggggccacgttgaatgctgtgtc

SEQ ID NO: 2241167 - DNA, 25 bp, Homo sapien
catgtggtttagaaatctgtgatat

SEQ ID NO: 2241168 - DNA, 25 bp, Homo sapien
ttggagcacagcacgcactcagtca

SEQ ID NO: 2241169 - DNA, 25 bp, Homo sapien
gagagtagtagcagtcttctcccca

SEQ ID NO: 2241170 - DNA, 25 bp, Homo sapien
tgactttgagaccagtagcagtgac

SEQ ID NO: 2241171 - DNA, 25 bp, Homo sapien
cagtagcagtgacaatagcagcagc

SEQ ID NO: 2241172 - DNA, 25 bp, Homo sapien
caggtgggcaagtactttttctggt

SEQ ID NO: 2241173 - DNA, 25 bp, Homo sapien
gcaggtgggcaagtactttttctgg

SEQ ID NO: 2241174 - DNA, 25 bp, Homo sapien
aaatgatcctgttctaatggtggct

SEQ ID NO: 2241175 - DNA, 25 bp, Homo sapien
gggcccaaactaggatactggatca

SEQ ID NO: 2241176 - DNA, 25 bp, Homo sapien
cgtacattattagtccagcccaggg

SEQ ID NO: 2241177 - DNA, 25 bp, Homo sapien
ccttcctagggagatgtgttctagc

SEQ ID NO: 2241178 - DNA, 25 bp, Homo sapien
gcagtgcttggaactattaaggcca

SEQ ID NO: 2241179 - DNA, 25 bp, Homo sapien
gatcaccacagggatctgactcagg

SEQ ID NO: 2241180 - DNA, 25 bp, Homo sapien
aaagagtagctttcaggaccaaaag

SEQ ID NO: 2241181 - DNA, 25 bp, Homo sapien
caaaagaacccaagctgatacggcc

SEQ ID NO: 2241182 - DNA, 25 bp, Homo sapien
tctgatcactgtgtatagcctagtt

SEQ ID NO: 2241183 - DNA, 25 bp, Homo sapien
tgatcactgtgtatagcctagttac

SEQ ID NO: 2241184 - DNA, 25 bp, Homo sapien
ctgatcactgtgtatagcctagtta

SEQ ID NO: 2241185 - DNA, 25 bp, Homo sapien
ctctgatcactgtgtatagcctagt

SEQ ID NO: 2241186 - DNA, 25 bp, Homo sapien
gacagccatgaaaccgttcgtgatt

SEQ ID NO: 2241187 - DNA, 25 bp, Homo sapien
aaccgttcgtgattgtgtactccca

SEQ ID NO: 2241188 - DNA, 25 bp, Homo sapien
gtgattgtgtactcccaagatggcc

SEQ ID NO: 2241189 - DNA, 25 bp, Homo sapien
catgaaaccgttcgtgattgtgtac

SEQ ID NO: 2241190 - DNA, 25 bp, Homo sapien
agaattaagcatggcattttggttg

SEQ ID NO: 2241191 - DNA, 25 bp, Homo sapien
ctgcggagaattaagcatggcattt

SEQ ID NO: 2241192 - DNA, 25 bp, Homo sapien
cattgttgttcaggcaagagttgct

SEQ ID NO: 2241193 - DNA, 25 bp, Homo sapien
cggagaattaagcatggcattttgg

SEQ ID NO: 2241194 - DNA, 25 bp, Homo sapien
caaaggtattgaggtgcacatccat

SEQ ID NO: 2241195 - DNA, 25 bp, Homo sapien
ctccaaaggtattgaggtgcacatc

SEQ ID NO: 2241196 - DNA, 25 bp, Homo sapien
tccaaaggtattgaggtgcacatcc

SEQ ID NO: 2241197 - DNA, 25 bp, Homo sapien
ccaaaggtattgaggtgcacatcca

SEQ ID NO: 2241198 - DNA, 25 bp, Homo sapien
tggcacccggggcacgaagaataat

SEQ ID NO: 2241199 - DNA, 25 bp, Homo sapien
gccactctggcacccggggcacgaa

SEQ ID NO: 2241200 - DNA, 25 bp, Homo sapien
gcacccggggcacgaagaataataa

SEQ ID NO: 2241201 - DNA, 25 bp, Homo sapien
actctggcacccggggcacgaagaa

SEQ ID NO: 2241202 - DNA, 25 bp, Homo sapien
agagtccctgaagacctaaccagtc

SEQ ID NO: 2241203 - DNA, 25 bp, Homo sapien
cctgaagacctaaccagtcccttgg

SEQ ID NO: 2241204 - DNA, 25 bp, Homo sapien
atggaaagtacacaactgctctttg

SEQ ID NO: 2241205 - DNA, 25 bp, Homo sapien
gctctttgacggctctgggacacat

SEQ ID NO: 2241206 - DNA, 25 bp, Homo sapien
tgcatccgcattagccacttgtggc

SEQ ID NO: 2241207 - DNA, 25 bp, Homo sapien
gcccaagaaatgagcatgtagtttt

SEQ ID NO: 2241208 - DNA, 25 bp, Homo sapien
tctgctgttatattcaaagtctctc

SEQ ID NO: 2241209 - DNA, 25 bp, Homo sapien
ccctttgtagccactgcttcatttg

SEQ ID NO: 2241210 - DNA, 25 bp, Homo sapien
tgctgcgtctttgcccactgaacag

SEQ ID NO: 2241211 - DNA, 25 bp, Homo sapien
caactccggtccagaagggctccat

SEQ ID NO: 2241212 - DNA, 25 bp, Homo sapien
cactgaacagccatgagaaggcaac

SEQ ID NO: 2241213 - DNA, 25 bp, Homo sapien
tgagaaggcaactccggtccagaag

SEQ ID NO: 2241214 - DNA, 25 bp, Homo sapien
gcagggcttttctgattgcctactg

SEQ ID NO: 2241215 - DNA, 25 bp, Homo sapien
tgtctctgtacccttgcacatagtg

SEQ ID NO: 2241216 - DNA, 25 bp, Homo sapien
gaactgctcatcacattagtcccaa

SEQ ID NO: 2241217 - DNA, 25 bp, Homo sapien
gatctattcttgtaattctcggaga

SEQ ID NO: 2241218 - DNA, 25 bp, Homo sapien
gggcaccaagctctggatggtgcat

SEQ ID NO: 2241219 - DNA, 25 bp, Homo sapien
ccaagtccctttccagtcaacagtg

SEQ ID NO: 2241220 - DNA, 25 bp, Homo sapien
aaaatggattccaaggacagacctc

SEQ ID NO: 2241221 - DNA, 25 bp, Homo sapien
tggtgcatctcttgggaggaataag

SEQ ID NO: 2241222 - DNA, 25 bp, Homo sapien
gagtagtggctccaactcagaccct

SEQ ID NO: 2241223 - DNA, 25 bp, Homo sapien
ccactctcattcagctgcgagtagt

SEQ ID NO: 2241224 - DNA, 25 bp, Homo sapien
gctccaactcagacccttactgtgg

SEQ ID NO: 2241225 - DNA, 25 bp, Homo sapien
caccaaggctcttgccatcaaaact

SEQ ID NO: 2241226 - DNA, 25 bp, Homo sapien
gctaattccttttcgagcgccaact

SEQ ID NO: 2241227 - DNA, 25 bp, Homo sapien
tgctaattccttttcgagcgccaac

SEQ ID NO: 2241228 - DNA, 25 bp, Homo sapien
gatattatctgaacagctgacatct

SEQ ID NO: 2241229 - DNA, 25 bp, Homo sapien
tttctatgatattatctgaacagct

SEQ ID NO: 2241230 - DNA, 25 bp, Homo sapien
tatgatattatctgaacagctgaca

SEQ ID NO: 2241231 - DNA, 25 bp, Homo sapien
ttatctgaacagctgacatctgtca

SEQ ID NO: 2241232 - DNA, 25 bp, Homo sapien
atctaaaatcacacatactagatca

SEQ ID NO: 2241233 - DNA, 25 bp, Homo sapien
aatctaaaatcacacatactagatc

SEQ ID NO: 2241234 - DNA, 25 bp, Homo sapien
taagtgtactcatgcccaagttagc

SEQ ID NO: 2241235 - DNA, 25 bp, Homo sapien
tagtccagctttggctaggcaggca

SEQ ID NO: 2241236 - DNA, 25 bp, Homo sapien
gagccattagcagtccctacaggga

SEQ ID NO: 2241237 - DNA, 25 bp, Homo sapien
tgcaggaggcacacaaacaaagtat

SEQ ID NO: 2241238 - DNA, 25 bp, Homo sapien
ccttcttccaatcatataagagata

SEQ ID NO: 2241239 - DNA, 25 bp, Homo sapien
ttacacagactgataaccagtacga

SEQ ID NO: 2241240 - DNA, 25 bp, Homo sapien
caatcatataagagataaagacaac

SEQ ID NO: 2241241 - DNA, 25 bp, Homo sapien
tgataaccagtacgacttttccttc

SEQ ID NO: 2241242 - DNA, 25 bp, Homo sapien
ggaataagaaagttgaggtcagagt

SEQ ID NO: 2241243 - DNA, 25 bp, Homo sapien
tctaatgacactgggttaaggagcc

SEQ ID NO: 2241244 - DNA, 25 bp, Homo sapien
tgcgcttgcctaatatgggaagact

SEQ ID NO: 2241245 - DNA, 25 bp, Homo sapien
cacgaaattcctcagtacgaaaagc

SEQ ID NO: 2241246 - DNA, 25 bp, Homo sapien
tccaaaatagagaattgcgcttgcc

SEQ ID NO: 2241247 - DNA, 25 bp, Homo sapien
caacaagggctgattatctagctca

SEQ ID NO: 2241248 - DNA, 25 bp, Homo sapien
taagcaaaacatagtacggaagccc

SEQ ID NO: 2241249 - DNA, 25 bp, Homo sapien
caagtttaagcatatctgatgggca

SEQ ID NO: 2241250 - DNA, 25 bp, Homo sapien
gagactctgatcatgcccctatata

SEQ ID NO: 2241251 - DNA, 25 bp, Homo sapien
taatggccatgttaataagttcaag

SEQ ID NO: 2241252 - DNA, 25 bp, Homo sapien
cttaaaacattgcacgttgatgttc

SEQ ID NO: 2241253 - DNA, 25 bp, Homo sapien
gcatacttcaaggttaggatcaaaa

SEQ ID NO: 2241254 - DNA, 25 bp, Homo sapien
ggccagggcttcttaagatagacct

SEQ ID NO: 2241255 - DNA, 25 bp, Homo sapien
ggaccagtaaatatgacactttgga

SEQ ID NO: 2241256 - DNA, 25 bp, Homo sapien
tgagaggtaagaaaatcttgttatt

SEQ ID NO: 2241257 - DNA, 25 bp, Homo sapien
tttattaataaagactgatctcaaa

SEQ ID NO: 2241258 - DNA, 25 bp, Homo sapien
ttattaataaagactgatctcaaaa

SEQ ID NO: 2241259 - DNA, 25 bp, Homo sapien
aaagtgtttcaacaactgagaggta

SEQ ID NO: 2241260 - DNA, 25 bp, Homo sapien
aataagtactcctgccaaggcagct

SEQ ID NO: 2241261 - DNA, 25 bp, Homo sapien
gaagttgtcgtcatctgcactgcag

SEQ ID NO: 2241262 - DNA, 25 bp, Homo sapien
ttgagaccaataaaataagccagca

SEQ ID NO: 2241263 - DNA, 25 bp, Homo sapien
cgctatgggcacaaggaagttgtcg

SEQ ID NO: 2241264 - DNA, 25 bp, Homo sapien
tcctgagctggattaatgaagtgca

SEQ ID NO: 2241265 - DNA, 25 bp, Homo sapien
taagtgggccctgatgacataactg

SEQ ID NO: 2241266 - DNA, 25 bp, Homo sapien
tcaagggaaacgcaagcaggttggc

SEQ ID NO: 2241267 - DNA, 25 bp, Homo sapien
tgatcaggccgtgagctttcagagg

SEQ ID NO: 2241268 - DNA, 25 bp, Homo sapien
caatcgaggcctatgtatgggacta

SEQ ID NO: 2241269 - DNA, 25 bp, Homo sapien
gtagcctgcctagcatcaatcgagg

SEQ ID NO: 2241270 - DNA, 25 bp, Homo sapien
cactggttccctaactgactatgca

SEQ ID NO: 2241271 - DNA, 25 bp, Homo sapien
taaatcctctaaggatgcagcctgg

SEQ ID NO: 2241272 - DNA, 25 bp, Homo sapien
catacatcaactagtggtttaaaca

SEQ ID NO: 2241273 - DNA, 25 bp, Homo sapien
cagatagagcgttaccatcaaggta

SEQ ID NO: 2241274 - DNA, 25 bp, Homo sapien
caattttgagcaaacagacaggcaa

SEQ ID NO: 2241275 - DNA, 25 bp, Homo sapien
catggaaagtatttacatggaccag

SEQ ID NO: 2241276 - DNA, 25 bp, Homo sapien
atcaggcatataatctgaatgtaga

SEQ ID NO: 2241277 - DNA, 25 bp, Homo sapien
ctatgaatcaggcatataatctgaa

SEQ ID NO: 2241278 - DNA, 25 bp, Homo sapien
tttactatgaatcaggcatataatc

SEQ ID NO: 2241279 - DNA, 25 bp, Homo sapien
cagtgtttattagaggtattttact

SEQ ID NO: 2241280 - DNA, 25 bp, Homo sapien
tacagaggccaatttatgagcacaa

SEQ ID NO: 2241281 - DNA, 25 bp, Homo sapien
cgcccagcctagatgcaagttattt

SEQ ID NO: 2241282 - DNA, 25 bp, Homo sapien
ggagcaagtacaaatccacggtaga

SEQ ID NO: 2241283 - DNA, 25 bp, Homo sapien
tctaggttctaggacacactggcat

SEQ ID NO: 2241284 - DNA, 25 bp, Homo sapien
ttgaccagtattgcatgttggaact

SEQ ID NO: 2241285 - DNA, 25 bp, Homo sapien
aagttgaccagtattgcatgttgga

SEQ ID NO: 2241286 - DNA, 25 bp, Homo sapien
tgcatgttggaacttgtacttgctt

SEQ ID NO: 2241287 - DNA, 25 bp, Homo sapien
taagttgaccagtattgcatgttgg

SEQ ID NO: 2241288 - DNA, 25 bp, Homo sapien
ttacagagtctgatatccagcataa

SEQ ID NO: 2241289 - DNA, 25 bp, Homo sapien
tacagagtctgatatccagcataac

SEQ ID NO: 2241290 - DNA, 25 bp, Homo sapien
gaccagcaccaactataattgggat

SEQ ID NO: 2241291 - DNA, 25 bp, Homo sapien
tcatcatccagcgaacactcttggg

SEQ ID NO: 2241292 - DNA, 25 bp, Homo sapien
tcttctgccaattacgtaagcaatc

SEQ ID NO: 2241293 - DNA, 25 bp, Homo sapien
caatcactataacgataatcaagcc

SEQ ID NO: 2241294 - DNA, 25 bp, Homo sapien
tcaaaaagcgtcattcacactggca

SEQ ID NO: 2241295 - DNA, 25 bp, Homo sapien
gatgcctggaatagctagctctgct

SEQ ID NO: 2241296 - DNA, 25 bp, Homo sapien
tatttataggtacccacagccaaga

SEQ ID NO: 2241297 - DNA, 25 bp, Homo sapien
tgcaaaagtagtcgaatggctcaca

SEQ ID NO: 2241298 - DNA, 25 bp, Homo sapien
aaattattaatgaagtttgcttgat

SEQ ID NO: 2241299 - DNA, 25 bp, Homo sapien
gaatactttccttgtgtcacattga

SEQ ID NO: 2241300 - DNA, 25 bp, Homo sapien
tctgaaatgctccagacactgaaac

SEQ ID NO: 2241301 - DNA, 25 bp, Homo sapien
tgctccagacactgaaacagtctgc

SEQ ID NO: 2241302 - DNA, 25 bp, Homo sapien
agtctgctctttgttgcacatataa

SEQ ID NO: 2241303 - DNA, 25 bp, Homo sapien
gagattgttatttgcaatgctgaaa

SEQ ID NO: 2241304 - DNA, 25 bp, Homo sapien
tgagattgttatttgcaatgctgaa

SEQ ID NO: 2241305 - DNA, 25 bp, Homo sapien
ctgagattgttatttgcaatgctga

SEQ ID NO: 2241306 - DNA, 25 bp, Homo sapien
agattgttatttgcaatgctgaaaa

SEQ ID NO: 2241307 - DNA, 25 bp, Homo sapien
atcaaaaatgggaaagttggccagg

SEQ ID NO: 2241308 - DNA, 25 bp, Homo sapien
gcaattcttaccataactaggttcc

SEQ ID NO: 2241309 - DNA, 25 bp, Homo sapien
ttttaaggtatgatcaaggtacact

SEQ ID NO: 2241310 - DNA, 25 bp, Homo sapien
gaacagtcctcagggtttttcagtg

SEQ ID NO: 2241311 - DNA, 25 bp, Homo sapien
ccttcagggtaatccacagtctttt

SEQ ID NO: 2241312 - DNA, 25 bp, Homo sapien
ggtaataagaccattgtaatttcta

SEQ ID NO: 2241313 - DNA, 25 bp, Homo sapien
tttctaatccttcagggtaatccac

SEQ ID NO: 2241314 - DNA, 25 bp, Homo sapien
cattaaataaggcactatttggtaa

SEQ ID NO: 2241315 - DNA, 25 bp, Homo sapien
tccttcagataaaatcggttttcat

SEQ ID NO: 2241316 - DNA, 25 bp, Homo sapien
ccttcagataaaatcggttttcatt

SEQ ID NO: 2241317 - DNA, 25 bp, Homo sapien
cttcagataaaatcggttttcattt

SEQ ID NO: 2241318 - DNA, 25 bp, Homo sapien
ttccagttaattaacatttcacaac

SEQ ID NO: 2241319 - DNA, 25 bp, Homo sapien
ctgtttgaaaaagagcttccagtta

SEQ ID NO: 2241320 - DNA, 25 bp, Homo sapien
agagcttccagttaattaacatttc

SEQ ID NO: 2241321 - DNA, 25 bp, Homo sapien
ttgaaaaagagcttccagttaatta

SEQ ID NO: 2241322 - DNA, 25 bp, Homo sapien
gatgcttcgctgagtaagtacaaca

SEQ ID NO: 2241323 - DNA, 25 bp, Homo sapien
caggagctgtttgaatggtccaggc

SEQ ID NO: 2241324 - DNA, 25 bp, Homo sapien
gaaccgggcaggattctcttaggaa

SEQ ID NO: 2241325 - DNA, 25 bp, Homo sapien
cccattttgggagtatggctgcgga

SEQ ID NO: 2241326 - DNA, 25 bp, Homo sapien
tatcttctattccaccagtctcatt

SEQ ID NO: 2241327 - DNA, 25 bp, Homo sapien
tcttctattccaccagtctcatttg

SEQ ID NO: 2241328 - DNA, 25 bp, Homo sapien
ctatcttctattccaccagtctcat

SEQ ID NO: 2241329 - DNA, 25 bp, Homo sapien
cttctattccaccagtctcatttgc

SEQ ID NO: 2241330 - DNA, 25 bp, Homo sapien
gaacattaatgcaagagtccagtcc

SEQ ID NO: 2241331 - DNA, 25 bp, Homo sapien
agaccattgcacagactctgaggga

SEQ ID NO: 2241332 - DNA, 25 bp, Homo sapien
tgaacagggatgaatggactacact

SEQ ID NO: 2241333 - DNA, 25 bp, Homo sapien
gagtctctctaatggtaaaatggcc

SEQ ID NO: 2241334 - DNA, 25 bp, Homo sapien
tattggggttgatgttaataactga

SEQ ID NO: 2241335 - DNA, 25 bp, Homo sapien
tggtgctgctattgagtctaagtag

SEQ ID NO: 2241336 - DNA, 25 bp, Homo sapien
cagctgcctgtggagtgagttgtat

SEQ ID NO: 2241337 - DNA, 25 bp, Homo sapien
cagtgtgagaacggcagctgcctgt

SEQ ID NO: 2241338 - DNA, 25 bp, Homo sapien
aaggtacaggttagctataaaagtg

SEQ ID NO: 2241339 - DNA, 25 bp, Homo sapien
caggttagctataaaagtggccagc

SEQ ID NO: 2241340 - DNA, 25 bp, Homo sapien
agccttacactctaccaaacaaaat

SEQ ID NO: 2241341 - DNA, 25 bp, Homo sapien
tagctataaaagtggccagcaaagc

SEQ ID NO: 2241342 - DNA, 25 bp, Homo sapien
tcctgagtgatgttcagctgcagcc

SEQ ID NO: 2241343 - DNA, 25 bp, Homo sapien
tatcctgagtgatgttcagctgcag

SEQ ID NO: 2241344 - DNA, 25 bp, Homo sapien
cttatcctgagtgatgttcagctgc

SEQ ID NO: 2241345 - DNA, 25 bp, Homo sapien
cctgagtgatgttcagctgcagccc

SEQ ID NO: 2241346 - DNA, 25 bp, Homo sapien
tcctttggagtaggtgttgtagtag

SEQ ID NO: 2241347 - DNA, 25 bp, Homo sapien
gaagttttgtctttatcacacagga

SEQ ID NO: 2241348 - DNA, 25 bp, Homo sapien
ggtagccagcagacaagtatcattg

SEQ ID NO: 2241349 - DNA, 25 bp, Homo sapien
cattattaactgaataggttccagc

SEQ ID NO: 2241350 - DNA, 25 bp, Homo sapien
catcccagtagtgttggacaacatc

SEQ ID NO: 2241351 - DNA, 25 bp, Homo sapien
gcttgtacaagaacatcccagtagt

SEQ ID NO: 2241352 - DNA, 25 bp, Homo sapien
tccaaagttgataaactattgcatc

SEQ ID NO: 2241353 - DNA, 25 bp, Homo sapien
gcatctaaaaaggtcattcaatgga

SEQ ID NO: 2241354 - DNA, 25 bp, Homo sapien
gcaggtaacacactaggtgtgttac

SEQ ID NO: 2241355 - DNA, 25 bp, Homo sapien
atatacatatatactaggatatgtg

SEQ ID NO: 2241356 - DNA, 25 bp, Homo sapien
tgtgttactgtatactaggagatat

SEQ ID NO: 2241357 - DNA, 25 bp, Homo sapien
gaattaagtgagatgctgcaggtaa

SEQ ID NO: 2241358 - DNA, 25 bp, Homo sapien
ggaaaagccaggtccgaactgcact

SEQ ID NO: 2241359 - DNA, 25 bp, Homo sapien
tcacagtgccatggtctgaaatggt

SEQ ID NO: 2241360 - DNA, 25 bp, Homo sapien
gtcaattgaataagtagatgctgcc

SEQ ID NO: 2241361 - DNA, 25 bp, Homo sapien
gaactgcactgctattttgggacca

SEQ ID NO: 2241362 - DNA, 25 bp, Homo sapien
ctcctctggataaattcgtgtatgt

SEQ ID NO: 2241363 - DNA, 25 bp, Homo sapien
actcctctggataaattcgtgtatg

SEQ ID NO: 2241364 - DNA, 25 bp, Homo sapien
cactcctctggataaattcgtgtat

SEQ ID NO: 2241365 - DNA, 25 bp, Homo sapien
tatttgtagtttcatagcgtactgt

SEQ ID NO: 2241366 - DNA, 25 bp, Homo sapien
tgtgaaattcatctgccattttgca

SEQ ID NO: 2241367 - DNA, 25 bp, Homo sapien
tccaatgcataagaccgcacagctc

SEQ ID NO: 2241368 - DNA, 25 bp, Homo sapien
gtcaaattaagttccaatgcataag

SEQ ID NO: 2241369 - DNA, 25 bp, Homo sapien
tgagggttctggcacactctgttcc

SEQ ID NO: 2241370 - DNA, 25 bp, Homo sapien
gaaacaccctgagggttctggcaca

SEQ ID NO: 2241371 - DNA, 25 bp, Homo sapien
ctggtggcccgtaaacaagagctga

SEQ ID NO: 2241372 - DNA, 25 bp, Homo sapien
aagagctgagaaacaccctgagggt

SEQ ID NO: 2241373 - DNA, 25 bp, Homo sapien
gagccactgtgcccagcagaaaagg

SEQ ID NO: 2241374 - DNA, 25 bp, Homo sapien
gcatgtgccacgacaccggctaatt

SEQ ID NO: 2241375 - DNA, 25 bp, Homo sapien
gtgagccactgtgcccagcagaaaa

SEQ ID NO: 2241376 - DNA, 25 bp, Homo sapien
acaggcatgtgccacgacaccggct

SEQ ID NO: 2241377 - DNA, 25 bp, Homo sapien
actaggcagaccagaacgagccctg

SEQ ID NO: 2241378 - DNA, 25 bp, Homo sapien
agaacgagccctgagcccggaaccg

SEQ ID NO: 2241379 - DNA, 25 bp, Homo sapien
ccaggactaggcagaccagaacgag

SEQ ID NO: 2241380 - DNA, 25 bp, Homo sapien
agaccagaacgagccctgagcccgg

SEQ ID NO: 2241381 - DNA, 25 bp, Homo sapien
gctgcaacaccagggaaaaggctcg

SEQ ID NO: 2241382 - DNA, 25 bp, Homo sapien
ggcggtacaacaacagctgcaacac

SEQ ID NO: 2241383 - DNA, 25 bp, Homo sapien
caggaatcggcgcttcagtgcgagt

SEQ ID NO: 2241384 - DNA, 25 bp, Homo sapien
aaaaggctcgctggacctgggtcaa

SEQ ID NO: 2241385 - DNA, 25 bp, Homo sapien
gctttggcgccaggagtagcttgca

SEQ ID NO: 2241386 - DNA, 25 bp, Homo sapien
tcatctggtggcctttatgcgagca

SEQ ID NO: 2241387 - DNA, 25 bp, Homo sapien
cgaaaagaacgatgaagtgctgccc

SEQ ID NO: 2241388 - DNA, 25 bp, Homo sapien
taattgtggcctctgcgcgaaaaga

SEQ ID NO: 2241389 - DNA, 25 bp, Homo sapien
cacatttcccaagtcaacacatgtg

SEQ ID NO: 2241390 - DNA, 25 bp, Homo sapien
catgaagttttccctgcttcacatt

SEQ ID NO: 2241391 - DNA, 25 bp, Homo sapien
tacggggttggatgggagaagcgtc

SEQ ID NO: 2241392 - DNA, 25 bp, Homo sapien
cccaagtcaacacatgtggcctttc

SEQ ID NO: 2241393 - DNA, 25 bp, Homo sapien
ctcaggtgatcccccacctcggtct

SEQ ID NO: 2241394 - DNA, 25 bp, Homo sapien
tcaggtgatcccccacctcggtctc

SEQ ID NO: 2241395 - DNA, 25 bp, Homo sapien
caggtgatcccccacctcggtctcc

SEQ ID NO: 2241396 - DNA, 25 bp, Homo sapien
aggtttccgctcatagccagcaggc

SEQ ID NO: 2241397 - DNA, 25 bp, Homo sapien
ccacagaccgcagtaatggaaaatg

SEQ ID NO: 2241398 - DNA, 25 bp, Homo sapien
cttgaactgacaccggatgaatgcc

SEQ ID NO: 2241399 - DNA, 25 bp, Homo sapien
ctccgggactgaaggtttccgctca

SEQ ID NO: 2241400 - DNA, 25 bp, Homo sapien
ttggtctctggcattggtggttcat

SEQ ID NO: 2241401 - DNA, 25 bp, Homo sapien
cagcagatggttattggctgccatt

SEQ ID NO: 2241402 - DNA, 25 bp, Homo sapien
cagatggttattggctgccattttg

SEQ ID NO: 2241403 - DNA, 25 bp, Homo sapien
tggtctctggcattggtggttcatc

SEQ ID NO: 2241404 - DNA, 25 bp, Homo sapien
caagcatgtatccactgagttaata

SEQ ID NO: 2241405 - DNA, 25 bp, Homo sapien
tccactgagttaataaacaatccaa

SEQ ID NO: 2241406 - DNA, 25 bp, Homo sapien
caccacggagaacgaggtatccatc

SEQ ID NO: 2241407 - DNA, 25 bp, Homo sapien
aagcacaccacggagaacgaggtat

SEQ ID NO: 2241408 - DNA, 25 bp, Homo sapien
taatcttcctaacggctccaacagg

SEQ ID NO: 2241409 - DNA, 25 bp, Homo sapien
tagacaccagtgtgcaagttgatgc

SEQ ID NO: 2241410 - DNA, 25 bp, Homo sapien
gaaaactaggtgtccagtggctaag

SEQ ID NO: 2241411 - DNA, 25 bp, Homo sapien
aaatagaaccaccacgtacacaggg

SEQ ID NO: 2241412 - DNA, 25 bp, Homo sapien
tcccggtcaattaaagattctattc

SEQ ID NO: 2241413 - DNA, 25 bp, Homo sapien
gcaatatagttgtactggtttggat

SEQ ID NO: 2241414 - DNA, 25 bp, Homo sapien
tttatctctttccatgtagtcccgg

SEQ ID NO: 2241415 - DNA, 25 bp, Homo sapien
ctattctcttcttaagatcagcagg

SEQ ID NO: 2241416 - DNA, 25 bp, Homo sapien
tgtaaagttcattatcattggctca

SEQ ID NO: 2241417 - DNA, 25 bp, Homo sapien
taaaaagacaacagtttcggctcat

SEQ ID NO: 2241418 - DNA, 25 bp, Homo sapien
tcattggctcaagcccatttagtta

SEQ ID NO: 2241419 - DNA, 25 bp, Homo sapien
cagtttcggctcatgaatttaatct

SEQ ID NO: 2241420 - DNA, 25 bp, Homo sapien
taaactcttgttctggagtaatccc

SEQ ID NO: 2241421 - DNA, 25 bp, Homo sapien
tttcatacataccttacatagcctg

SEQ ID NO: 2241422 - DNA, 25 bp, Homo sapien
gcagctacccttcgcgtggttaaat

SEQ ID NO: 2241423 - DNA, 25 bp, Homo sapien
ggattctcattaaaggtgttcaacc

SEQ ID NO: 2241424 - DNA, 25 bp, Homo sapien
aacaaggagattgtggctaagtgtc

SEQ ID NO: 2241425 - DNA, 25 bp, Homo sapien
catcaatttgatactgtctgtcttg

SEQ ID NO: 2241426 - DNA, 25 bp, Homo sapien
tgtacacttctgaaacaaggagatt

SEQ ID NO: 2241427 - DNA, 25 bp, Homo sapien
tcatcttcataattcgaacaattgc

SEQ ID NO: 2241428 - DNA, 25 bp, Homo sapien
aatcagacatgcatgccattagtgc

SEQ ID NO: 2241429 - DNA, 25 bp, Homo sapien
gactcaaggcatggtattaactggc

SEQ ID NO: 2241430 - DNA, 25 bp, Homo sapien
aacagtttggcctttttgcagcagt

SEQ ID NO: 2241431 - DNA, 25 bp, Homo sapien
ggaggcggtttaccaatcttgatgc

SEQ ID NO: 2241432 - DNA, 25 bp, Homo sapien
ttgattattaacatgtataattcca

SEQ ID NO: 2241433 - DNA, 25 bp, Homo sapien
catgtataattccagtgtgttagga

SEQ ID NO: 2241434 - DNA, 25 bp, Homo sapien
gtataattccagtgtgttaggacta

SEQ ID NO: 2241435 - DNA, 25 bp, Homo sapien
ataattccagtgtgttaggactaag

SEQ ID NO: 2241436 - DNA, 25 bp, Homo sapien
tcattacaaatgaacttgtcaccat

SEQ ID NO: 2241437 - DNA, 25 bp, Homo sapien
gccagaactctagctttgccacagg

SEQ ID NO: 2241438 - DNA, 25 bp, Homo sapien
ttgccacaggctaatgactgcagtg

SEQ ID NO: 2241439 - DNA, 25 bp, Homo sapien
tgccctttggatttttcgccagaac

SEQ ID NO: 2241440 - DNA, 25 bp, Homo sapien
aacattagcagcaccagtgtttgaa

SEQ ID NO: 2241441 - DNA, 25 bp, Homo sapien
cattaaacattagcagcaccagtgt

SEQ ID NO: 2241442 - DNA, 25 bp, Homo sapien
cattagcagcaccagtgtttgaaaa

SEQ ID NO: 2241443 - DNA, 25 bp, Homo sapien
taaacattagcagcaccagtgtttg

SEQ ID NO: 2241444 - DNA, 25 bp, Homo sapien
tgccactatgtttgcctaggtaaaa

SEQ ID NO: 2241445 - DNA, 25 bp, Homo sapien
tttaacacacagtgtcctagggttg

SEQ ID NO: 2241446 - DNA, 25 bp, Homo sapien
tgaaaatctcctgaagttttaccat

SEQ ID NO: 2241447 - DNA, 25 bp, Homo sapien
cacagtgtcctagggttgactgcca

SEQ ID NO: 2241448 - DNA, 25 bp, Homo sapien
cacagttaactcaatatttcccgga

SEQ ID NO: 2241449 - DNA, 25 bp, Homo sapien
aatagcccattgtcaggatattcac

SEQ ID NO: 2241450 - DNA, 25 bp, Homo sapien
taggcacatatgtcggccaatagcc

SEQ ID NO: 2241451 - DNA, 25 bp, Homo sapien
ctctggtggtaaatgaacttccata

SEQ ID NO: 2241452 - DNA, 25 bp, Homo sapien
cagccagcccaagtctccagttttt

SEQ ID NO: 2241453 - DNA, 25 bp, Homo sapien
ttgctccactgcctgtctgcaggga

SEQ ID NO: 2241454 - DNA, 25 bp, Homo sapien
ccactgcctgtctgcagggagtgac

SEQ ID NO: 2241455 - DNA, 25 bp, Homo sapien
tctccagtttttcacttgctccact

SEQ ID NO: 2241456 - DNA, 25 bp, Homo sapien
ctgtttgaactgaatcatgatgtct

SEQ ID NO: 2241457 - DNA, 25 bp, Homo sapien
ccttcaagtttgctggtgaaagcag

SEQ ID NO: 2241458 - DNA, 25 bp, Homo sapien
ctgaatcatgatgtctttagaaagt

SEQ ID NO: 2241459 - DNA, 25 bp, Homo sapien
tccttcaagtttgctggtgaaagca

SEQ ID NO: 2241460 - DNA, 25 bp, Homo sapien
tatacatagacatgagtgacaaaag

SEQ ID NO: 2241461 - DNA, 25 bp, Homo sapien
taccccaaagtgtatgccccattaa

SEQ ID NO: 2241462 - DNA, 25 bp, Homo sapien
caaaagaggaaatcgattgaaaggg

SEQ ID NO: 2241463 - DNA, 25 bp, Homo sapien
caataagttggaaacctcaggagct

SEQ ID NO: 2241464 - DNA, 25 bp, Homo sapien
gatgcactctttccgactaacaggc

SEQ ID NO: 2241465 - DNA, 25 bp, Homo sapien
taacaggcgcttggctaaatctttc

SEQ ID NO: 2241466 - DNA, 25 bp, Homo sapien
catgtttaagtttggacagcattga

SEQ ID NO: 2241467 - DNA, 25 bp, Homo sapien
tttcagcatctacagatgcactctt

SEQ ID NO: 2241468 - DNA, 25 bp, Homo sapien
taagccaagtagcaaaaatcaaggc

SEQ ID NO: 2241469 - DNA, 25 bp, Homo sapien
agaaaagcttttgtggactggtagc

SEQ ID NO: 2241470 - DNA, 25 bp, Homo sapien
tactagaagagccaaagcataggac

SEQ ID NO: 2241471 - DNA, 25 bp, Homo sapien
agagatccatttttgtgccagacat

SEQ ID NO: 2241472 - DNA, 25 bp, Homo sapien
tgttgcctgcacgaagttttgaatc

SEQ ID NO: 2241473 - DNA, 25 bp, Homo sapien
gcctgcacgaagttttgaatctaca

SEQ ID NO: 2241474 - DNA, 25 bp, Homo sapien
tctttgttgcctgcacgaagttttg

SEQ ID NO: 2241475 - DNA, 25 bp, Homo sapien
tgcacgaagttttgaatctacatac

SEQ ID NO: 2241476 - DNA, 25 bp, Homo sapien
catccttatgctaaatgggcccaga

SEQ ID NO: 2241477 - DNA, 25 bp, Homo sapien
tgtgagggcatcatgtaatccaagc

SEQ ID NO: 2241478 - DNA, 25 bp, Homo sapien
tgtagcttgaaataacaccctgcct

SEQ ID NO: 2241479 - DNA, 25 bp, Homo sapien
gaatacacgaggtactgggcactat

SEQ ID NO: 2241480 - DNA, 25 bp, Homo sapien
caattatatggtcaaccttatcttt

SEQ ID NO: 2241481 - DNA, 25 bp, Homo sapien
cttttgttaatgaacgtttcaaatg

SEQ ID NO: 2241482 - DNA, 25 bp, Homo sapien
tatcaattatatggtcaaccttatc

SEQ ID NO: 2241483 - DNA, 25 bp, Homo sapien
tttgttaatgaacgtttcaaatgct

SEQ ID NO: 2241484 - DNA, 25 bp, Homo sapien
actgaagagctgatacagaagagac

SEQ ID NO: 2241485 - DNA, 25 bp, Homo sapien
gaactccacctcgaactctactgaa

SEQ ID NO: 2241486 - DNA, 25 bp, Homo sapien
tattcgatccactgctgcaaaagaa

SEQ ID NO: 2241487 - DNA, 25 bp, Homo sapien
tgaattcggttttcatcaaggaggt

SEQ ID NO: 2241488 - DNA, 25 bp, Homo sapien
gcaatctcttatttacaaattgcca

SEQ ID NO: 2241489 - DNA, 25 bp, Homo sapien
aaagcaatctcttatttacaaattg

SEQ ID NO: 2241490 - DNA, 25 bp, Homo sapien
ctcttatttacaaattgccaattac

SEQ ID NO: 2241491 - DNA, 25 bp, Homo sapien
taaaaagcaatctcttatttacaaa

SEQ ID NO: 2241492 - DNA, 25 bp, Homo sapien
tgttaagtgttcacctagaagttgt

SEQ ID NO: 2241493 - DNA, 25 bp, Homo sapien
gtctgatctaagtaagtaataagtc

SEQ ID NO: 2241494 - DNA, 25 bp, Homo sapien
ttcttcttctagacgtttgttaaca

SEQ ID NO: 2241495 - DNA, 25 bp, Homo sapien
tagacgtttgttaacatgatgtaga

SEQ ID NO: 2241496 - DNA, 25 bp, Homo sapien
ggtggtctgatctaagtaagtaata

SEQ ID NO: 2241497 - DNA, 25 bp, Homo sapien
aatttataggtagagtttatgatcc

SEQ ID NO: 2241498 - DNA, 25 bp, Homo sapien
cagggtagaatcatatgtaaaaatt

SEQ ID NO: 2241499 - DNA, 25 bp, Homo sapien
tgtcaaatgtgacagggtagaatca

SEQ ID NO: 2241500 - DNA, 25 bp, Homo sapien
ctggaagtggccctgtcaaatgtga

SEQ ID NO: 2241501 - DNA, 25 bp, Homo sapien
aaagtaaggtctattgtgagagaca

SEQ ID NO: 2241502 - DNA, 25 bp, Homo sapien
taaggtctattgtgagagacagtga

SEQ ID NO: 2241503 - DNA, 25 bp, Homo sapien
gagcacctaagtgagagaagagcat

SEQ ID NO: 2241504 - DNA, 25 bp, Homo sapien
aaagaaaggagcacctaagtgagag

SEQ ID NO: 2241505 - DNA, 25 bp, Homo sapien
catagagccggttagtttcttccaa

SEQ ID NO: 2241506 - DNA, 25 bp, Homo sapien
cttcagctgcatagagccggttagt

SEQ ID NO: 2241507 - DNA, 25 bp, Homo sapien
tctctttcttgcattaatttttggc

SEQ ID NO: 2241508 - DNA, 25 bp, Homo sapien
aaaatcgttgttcaaaagaatcttg

SEQ ID NO: 2241509 - DNA, 25 bp, Homo sapien
aaatcagacagcatgcttaaaaggc

SEQ ID NO: 2241510 - DNA, 25 bp, Homo sapien
tatgagccctaaataactccagtcc

SEQ ID NO: 2241511 - DNA, 25 bp, Homo sapien
tctgatcacttataatatgagccct

SEQ ID NO: 2241512 - DNA, 25 bp, Homo sapien
caagagaagaatgccatcaattgtc

SEQ ID NO: 2241513 - DNA, 25 bp, Homo sapien
ctgaagaacgtaagttctatccaga

SEQ ID NO: 2241514 - DNA, 25 bp, Homo sapien
gaacgtaagttctatccagaaacaa

SEQ ID NO: 2241515 - DNA, 25 bp, Homo sapien
agaacgtaagttctatccagaaaca

SEQ ID NO: 2241516 - DNA, 25 bp, Homo sapien
gaagaacgtaagttctatccagaaa

SEQ ID NO: 2241517 - DNA, 25 bp, Homo sapien
ggttttgccagcatctatcaatctt

SEQ ID NO: 2241518 - DNA, 25 bp, Homo sapien
ttaaaaaaagaacgctatccaatga

SEQ ID NO: 2241519 - DNA, 25 bp, Homo sapien
gttttgccagcatctatcaatcttc

SEQ ID NO: 2241520 - DNA, 25 bp, Homo sapien
aaaaagaacgctatccaatgaatcc

SEQ ID NO: 2241521 - DNA, 25 bp, Homo sapien
gaaacatatgttaaggatattttaa

SEQ ID NO: 2241522 - DNA, 25 bp, Homo sapien
tgaaacatatgttaaggatatttta

SEQ ID NO: 2241523 - DNA, 25 bp, Homo sapien
ctgaaacatatgttaaggatatttt

SEQ ID NO: 2241524 - DNA, 25 bp, Homo sapien
gatcttcgcagatctgtctcagctg

SEQ ID NO: 2241525 - DNA, 25 bp, Homo sapien
tcagctgtttgtacaagtttgcaga

SEQ ID NO: 2241526 - DNA, 25 bp, Homo sapien
ctgtttgtacaagtttgcagaaatc

SEQ ID NO: 2241527 - DNA, 25 bp, Homo sapien
tttgatgtgatcttcgcagatctgt

SEQ ID NO: 2241528 - DNA, 25 bp, Homo sapien
ctgtgtttggctggagggtggttta

SEQ ID NO: 2241529 - DNA, 25 bp, Homo sapien
tgtgtttggctggagggtggtttaa

SEQ ID NO: 2241530 - DNA, 25 bp, Homo sapien
tgtttggctggagggtggtttaaga

SEQ ID NO: 2241531 - DNA, 25 bp, Homo sapien
ttcaatgagtcaaaatcaaacaagc

SEQ ID NO: 2241532 - DNA, 25 bp, Homo sapien
tacgtttcaatgagtcaaaatcaaa

SEQ ID NO: 2241533 - DNA, 25 bp, Homo sapien
cgtttcaatgagtcaaaatcaaaca

SEQ ID NO: 2241534 - DNA, 25 bp, Homo sapien
ctaattacgtttcaatgagtcaaaa

SEQ ID NO: 2241535 - DNA, 25 bp, Homo sapien
tgaaatagctttacctcctttatcc

SEQ ID NO: 2241536 - DNA, 25 bp, Homo sapien
tatgaaatagctttacctcctttat

SEQ ID NO: 2241537 - DNA, 25 bp, Homo sapien
atgaaatagctttacctcctttatc

SEQ ID NO: 2241538 - DNA, 25 bp, Homo sapien
atatctgcatgtcttgaggcctttc

SEQ ID NO: 2241539 - DNA, 25 bp, Homo sapien
aataatatctgcatgtcttgaggcc

SEQ ID NO: 2241540 - DNA, 25 bp, Homo sapien
atgaataatatctgcatgtcttgag

SEQ ID NO: 2241541 - DNA, 25 bp, Homo sapien
taatatctgcatgtcttgaggcctt

SEQ ID NO: 2241542 - DNA, 25 bp, Homo sapien
tgtacttaattgaagtactattctg

SEQ ID NO: 2241543 - DNA, 25 bp, Homo sapien
tacttaattgaagtactattctgaa

SEQ ID NO: 2241544 - DNA, 25 bp, Homo sapien
gtacttaattgaagtactattctga

SEQ ID NO: 2241545 - DNA, 25 bp, Homo sapien
taccgattgtcagtgttataaggaa

SEQ ID NO: 2241546 - DNA, 25 bp, Homo sapien
tgcaaaatccggatcaatcataccg

SEQ ID NO: 2241547 - DNA, 25 bp, Homo sapien
tataaggaataacagattaaataca

SEQ ID NO: 2241548 - DNA, 25 bp, Homo sapien
gaaacacccggtgtatgcttcagca

SEQ ID NO: 2241549 - DNA, 25 bp, Homo sapien
gatcactaacttcttagcagagcca

SEQ ID NO: 2241550 - DNA, 25 bp, Homo sapien
gctaggccgtttgcatgatgcaccg

SEQ ID NO: 2241551 - DNA, 25 bp, Homo sapien
tgatgcaccgaagccacagaagaga

SEQ ID NO: 2241552 - DNA, 25 bp, Homo sapien
gcagagccaggtttgctgttagcaa

SEQ ID NO: 2241553 - DNA, 25 bp, Homo sapien
ctgagatgttgcagcagttggtgaa

SEQ ID NO: 2241554 - DNA, 25 bp, Homo sapien
atgttgcagcagttggtgaagatga

SEQ ID NO: 2241555 - DNA, 25 bp, Homo sapien
gctgctgctgagatgttgcagcagt

SEQ ID NO: 2241556 - DNA, 25 bp, Homo sapien
aggaggaggaggattcctcagccat

SEQ ID NO: 2241557 - DNA, 25 bp, Homo sapien
aacgcagcttcttctgtatcggtac

SEQ ID NO: 2241558 - DNA, 25 bp, Homo sapien
caaaacgcagcttcttctgtatcgg

SEQ ID NO: 2241559 - DNA, 25 bp, Homo sapien
tcaaaacgcagcttcttctgtatcg

SEQ ID NO: 2241560 - DNA, 25 bp, Homo sapien
aaaacgcagcttcttctgtatcggt

SEQ ID NO: 2241561 - DNA, 25 bp, Homo sapien
ctgaaacccccaggcagaaggacga

SEQ ID NO: 2241562 - DNA, 25 bp, Homo sapien
acccccaggcagaaggacgaggttg

SEQ ID NO: 2241563 - DNA, 25 bp, Homo sapien
caggcagaaggacgaggttgaaggg

SEQ ID NO: 2241564 - DNA, 25 bp, Homo sapien
ccccaggcagaaggacgaggttgaa

SEQ ID NO: 2241565 - DNA, 25 bp, Homo sapien
agaggtgggcggagtggtgctggta

SEQ ID NO: 2241566 - DNA, 25 bp, Homo sapien
ttctctctcgttactactgttactg

SEQ ID NO: 2241567 - DNA, 25 bp, Homo sapien
aagtcttctctctcgttactactgt

SEQ ID NO: 2241568 - DNA, 25 bp, Homo sapien
gtgggcggagtggtgctggtattac

SEQ ID NO: 2241569 - DNA, 25 bp, Homo sapien
agcagctgagggactgggggaagaa

SEQ ID NO: 2241570 - DNA, 25 bp, Homo sapien
cagcagcagctgagggactggggga

SEQ ID NO: 2241571 - DNA, 25 bp, Homo sapien
cagctgagggactgggggaagaaaa

SEQ ID NO: 2241572 - DNA, 25 bp, Homo sapien
gcagcagctgagggactgggggaag

SEQ ID NO: 2241573 - DNA, 25 bp, Homo sapien
aaaatagcggggtcaacaggcagag

SEQ ID NO: 2241574 - DNA, 25 bp, Homo sapien
aacaggcagaggagcatcaaaaacc

SEQ ID NO: 2241575 - DNA, 25 bp, Homo sapien
aggcagaggagcatcaaaaacctac

SEQ ID NO: 2241576 - DNA, 25 bp, Homo sapien
gaaaatagcggggtcaacaggcaga

SEQ ID NO: 2241577 - DNA, 25 bp, Homo sapien
gtttatatgcctgcgtgcgtgtagg

SEQ ID NO: 2241578 - DNA, 25 bp, Homo sapien
agggtttgggaaggcggataggctg

SEQ ID NO: 2241579 - DNA, 25 bp, Homo sapien
tttgggaaggcggataggctgacac

SEQ ID NO: 2241580 - DNA, 25 bp, Homo sapien
agaaacacagaggacgagaaggaaa

SEQ ID NO: 2241581 - DNA, 25 bp, Homo sapien
cacagaggacgagaaggaaagtgaa

SEQ ID NO: 2241582 - DNA, 25 bp, Homo sapien
cagacaggtaaacggccgtgccgtc

SEQ ID NO: 2241583 - DNA, 25 bp, Homo sapien
gactcagcgagtctgtgaggctgca

SEQ ID NO: 2241584 - DNA, 25 bp, Homo sapien
cctttctgcaggagcgactcagcga

SEQ ID NO: 2241585 - DNA, 25 bp, Homo sapien
cccctgcttttcgatctctctcccc

SEQ ID NO: 2241586 - DNA, 25 bp, Homo sapien
agaaccagggcttgttattgtcaat

SEQ ID NO: 2241587 - DNA, 25 bp, Homo sapien
cacaagaggctaaagatggcgccat

SEQ ID NO: 2241588 - DNA, 25 bp, Homo sapien
ccagggcttgttattgtcaatagca

SEQ ID NO: 2241589 - DNA, 25 bp, Homo sapien
caatagcacaagaggctaaagatgg

SEQ ID NO: 2241590 - DNA, 25 bp, Homo sapien
gactgggcagacacttttcatagcg

SEQ ID NO: 2241591 - DNA, 25 bp, Homo sapien
ccccaggtccgcaggacttgagtgg

SEQ ID NO: 2241592 - DNA, 25 bp, Homo sapien
gagctcctgattggagctttctgaa

SEQ ID NO: 2241593 - DNA, 25 bp, Homo sapien
gggccttcgagacaccttcggagct

SEQ ID NO: 2241594 - DNA, 25 bp, Homo sapien
atttctggaaattactcaagggcgg

SEQ ID NO: 2241595 - DNA, 25 bp, Homo sapien
tgacttattgaaggcagaccatgac

SEQ ID NO: 2241596 - DNA, 25 bp, Homo sapien
gatcatggcccatttaggcaactgt

SEQ ID NO: 2241597 - DNA, 25 bp, Homo sapien
caacctggtggaagaatggactctc

SEQ ID NO: 2241598 - DNA, 25 bp, Homo sapien
gggagttgaatatgcaccgattttg

SEQ ID NO: 2241599 - DNA, 25 bp, Homo sapien
cagttccctgcagatacgttggaac

SEQ ID NO: 2241600 - DNA, 25 bp, Homo sapien
tgtgggttccgcagagctgactgtg

SEQ ID NO: 2241601 - DNA, 25 bp, Homo sapien
tgcagatacgttggaacaaccatat

SEQ ID NO: 2241602 - DNA, 25 bp, Homo sapien
gctgtgtgactgatgttcagtaggc

SEQ ID NO: 2241603 - DNA, 25 bp, Homo sapien
atgctgtgtgactgatgttcagtag

SEQ ID NO: 2241604 - DNA, 25 bp, Homo sapien
tgctgtgtgactgatgttcagtagg

SEQ ID NO: 2241605 - DNA, 25 bp, Homo sapien
catgctgtgtgactgatgttcagta

SEQ ID NO: 2241606 - DNA, 25 bp, Homo sapien
ttcccatctcctgatccagatgact

SEQ ID NO: 2241607 - DNA, 25 bp, Homo sapien
tctcctgatccagatgactgtgaca

SEQ ID NO: 2241608 - DNA, 25 bp, Homo sapien
ctgatccagatgactgtgacatcat

SEQ ID NO: 2241609 - DNA, 25 bp, Homo sapien
catctcctgatccagatgactgtga

SEQ ID NO: 2241610 - DNA, 25 bp, Homo sapien
gagaattcacttttccagcagtcct

SEQ ID NO: 2241611 - DNA, 25 bp, Homo sapien
cacttttccagcagtcctctcccat

SEQ ID NO: 2241612 - DNA, 25 bp, Homo sapien
ctacgatagaaaacagagaattcac

SEQ ID NO: 2241613 - DNA, 25 bp, Homo sapien
cgatagaaaacagagaattcacttt

SEQ ID NO: 2241614 - DNA, 25 bp, Homo sapien
caacagaggcctggttggagccaaa

SEQ ID NO: 2241615 - DNA, 25 bp, Homo sapien
caccttccgggatgatagactgcag

SEQ ID NO: 2241616 - DNA, 25 bp, Homo sapien
taaggtccgagctgtctaaagcaga

SEQ ID NO: 2241617 - DNA, 25 bp, Homo sapien
taggttgttctataccaagactggc

SEQ ID NO: 2241618 - DNA, 25 bp, Homo sapien
ctttcagacctgtgcgtggaattgg

SEQ ID NO: 2241619 - DNA, 25 bp, Homo sapien
tttcagacctgtgcgtggaattggg

SEQ ID NO: 2241620 - DNA, 25 bp, Homo sapien
ggcattgtgattagcaccagcagag

SEQ ID NO: 2241621 - DNA, 25 bp, Homo sapien
cttgtctctgggcattgtgattagc

SEQ ID NO: 2241622 - DNA, 25 bp, Homo sapien
aagggcatgaatagacatctctcca

SEQ ID NO: 2241623 - DNA, 25 bp, Homo sapien
agggcatgaatagacatctctccaa

SEQ ID NO: 2241624 - DNA, 25 bp, Homo sapien
cattaatacacattcgatgcatgca

SEQ ID NO: 2241625 - DNA, 25 bp, Homo sapien
aagtttctctgaacaggtaaagata

SEQ ID NO: 2241626 - DNA, 25 bp, Homo sapien
catgtgtgtaagactatattttcag

SEQ ID NO: 2241627 - DNA, 25 bp, Homo sapien
taaataccctgacttcattaataca

SEQ ID NO: 2241628 - DNA, 25 bp, Homo sapien
cctcatgaagagtagaccttaattt

SEQ ID NO: 2241629 - DNA, 25 bp, Homo sapien
agaagaagcacagagcaatatggga

SEQ ID NO: 2241630 - DNA, 25 bp, Homo sapien
taaaacctcatgaagagtagacctt

SEQ ID NO: 2241631 - DNA, 25 bp, Homo sapien
cacagagcaatatgggaatgcagtt

SEQ ID NO: 2241632 - DNA, 25 bp, Homo sapien
caactgctgaggaaccggttgccta

SEQ ID NO: 2241633 - DNA, 25 bp, Homo sapien
tgaggaacccgtaactgacgcaagt

SEQ ID NO: 2241634 - DNA, 25 bp, Homo sapien
tgacgataggtagcaacgaagcacg

SEQ ID NO: 2241635 - DNA, 25 bp, Homo sapien
aaagcgcctacgtggagtccagagg

SEQ ID NO: 2241636 - DNA, 25 bp, Homo sapien
tgactgagagccgtaaagcgcggct

SEQ ID NO: 2241637 - DNA, 25 bp, Homo sapien
gttttccggataacgactacagctc

SEQ ID NO: 2241638 - DNA, 25 bp, Homo sapien
gcgcggctggctctcgttttccgga

SEQ ID NO: 2241639 - DNA, 25 bp, Homo sapien
agctccgactgtcagtgccggcctt

SEQ ID NO: 2241640 - DNA, 25 bp, Homo sapien
ctcgtgtgaggggatctgccggacc

SEQ ID NO: 2241641 - DNA, 25 bp, Homo sapien
gggatctgccggacccctgcaaatt

SEQ ID NO: 2241642 - DNA, 25 bp, Homo sapien
cggacccctgcaaattcaatttctt

SEQ ID NO: 2241643 - DNA, 25 bp, Homo sapien
cattccgggcccttccctatcgtcg

SEQ ID NO: 2241644 - DNA, 25 bp, Homo sapien
agaagtaaggacatgctgtggcctc

SEQ ID NO: 2241645 - DNA, 25 bp, Homo sapien
gttcaagaagtaaggacatgctgtg

SEQ ID NO: 2241646 - DNA, 25 bp, Homo sapien
tcaagaagtaaggacatgctgtggc

SEQ ID NO: 2241647 - DNA, 25 bp, Homo sapien
aagaagtaaggacatgctgtggcct

SEQ ID NO: 2241648 - DNA, 25 bp, Homo sapien
tccccagttcagattcccctatgaa

SEQ ID NO: 2241649 - DNA, 25 bp, Homo sapien
tggcctaacatcctttgtgctccac

SEQ ID NO: 2241650 - DNA, 25 bp, Homo sapien
tcccagggcatattaagtagtctcc

SEQ ID NO: 2241651 - DNA, 25 bp, Homo sapien
aaagaatagagttccctctccccag

SEQ ID NO: 2241652 - DNA, 25 bp, Homo sapien
tatttgaggcctgtagctccttatg

SEQ ID NO: 2241653 - DNA, 25 bp, Homo sapien
ggaggcaccctatttgaggcctgta

SEQ ID NO: 2241654 - DNA, 25 bp, Homo sapien
ggaggaggcaccctatttgaggcct

SEQ ID NO: 2241655 - DNA, 25 bp, Homo sapien
caccctatttgaggcctgtagctcc

SEQ ID NO: 2241656 - DNA, 25 bp, Homo sapien
tcagaatcaaactttgaacctttat

SEQ ID NO: 2241657 - DNA, 25 bp, Homo sapien
cagaatcaaactttgaacctttatt

SEQ ID NO: 2241658 - DNA, 25 bp, Homo sapien
caagactgcctatggagtattagca

SEQ ID NO: 2241659 - DNA, 25 bp, Homo sapien
tttgaccaagactgcctatggagta

SEQ ID NO: 2241660 - DNA, 25 bp, Homo sapien
ctgcctatggagtattagcaatgaa

SEQ ID NO: 2241661 - DNA, 25 bp, Homo sapien
gttttttgaccaagactgcctatgg

SEQ ID NO: 2241662 - DNA, 25 bp, Homo sapien
aataggaatacagggatagagagcc

SEQ ID NO: 2241663 - DNA, 25 bp, Homo sapien
tgtgtcaaaccaacctacaatctag

SEQ ID NO: 2241664 - DNA, 25 bp, Homo sapien
ttttctactgtgctgaggtacactg

SEQ ID NO: 2241665 - DNA, 25 bp, Homo sapien
cactgttacagtgggtgtaaggaac

SEQ ID NO: 2241666 - DNA, 25 bp, Homo sapien
caggctaacgttcaaaatatggcag

SEQ ID NO: 2241667 - DNA, 25 bp, Homo sapien
tctactaggttctaagtgacgtggc

SEQ ID NO: 2241668 - DNA, 25 bp, Homo sapien
gagttgccgtgattcagcatcccaa

SEQ ID NO: 2241669 - DNA, 25 bp, Homo sapien
tccggtgacataatggcctgatcag

SEQ ID NO: 2241670 - DNA, 25 bp, Homo sapien
tttcagccaatatgtgaatatagga

SEQ ID NO: 2241671 - DNA, 25 bp, Homo sapien
tataggagacttcaaaagcataatc

SEQ ID NO: 2241672 - DNA, 25 bp, Homo sapien
caatatgtgaatataggagacttca

SEQ ID NO: 2241673 - DNA, 25 bp, Homo sapien
tcaaaagcataatcaattactccct

SEQ ID NO: 2241674 - DNA, 25 bp, Homo sapien
tgcaggaatctcacttaagtagcgg

SEQ ID NO: 2241675 - DNA, 25 bp, Homo sapien
gatgtctgttcctgccgactgatgt

SEQ ID NO: 2241676 - DNA, 25 bp, Homo sapien
ggtctgagagaaggcacatcctcat

SEQ ID NO: 2241677 - DNA, 25 bp, Homo sapien
gctcctgaatgcaaaggtctgagag

SEQ ID NO: 2241678 - DNA, 25 bp, Homo sapien
tgtgcacaagctctacttatatatc

SEQ ID NO: 2241679 - DNA, 25 bp, Homo sapien
tgcatggcacagattaaatgtacag

SEQ ID NO: 2241680 - DNA, 25 bp, Homo sapien
caatgaaagagttcccctaatttga

SEQ ID NO: 2241681 - DNA, 25 bp, Homo sapien
tagttaaacttgtccagatgagtaa

SEQ ID NO: 2241682 - DNA, 25 bp, Homo sapien
tatcatatttgtgtggctggagtaa

SEQ ID NO: 2241683 - DNA, 25 bp, Homo sapien
tcaagccaggtgatttgtgaccatt

SEQ ID NO: 2241684 - DNA, 25 bp, Homo sapien
taagttggcaagactctgttccacg

SEQ ID NO: 2241685 - DNA, 25 bp, Homo sapien
tattattagtcactttcaagccagg

SEQ ID NO: 2241686 - DNA, 25 bp, Homo sapien
gattttatctgcaagactggctgca

SEQ ID NO: 2241687 - DNA, 25 bp, Homo sapien
tatgacagccactagccgtatgtag

SEQ ID NO: 2241688 - DNA, 25 bp, Homo sapien
gggcctgctaaaagtcatgctgtgg

SEQ ID NO: 2241689 - DNA, 25 bp, Homo sapien
gaactcacacaaggcaatggtctgg

SEQ ID NO: 2241690 - DNA, 25 bp, Homo sapien
ggtggaggttgggatgagccgagat

SEQ ID NO: 2241691 - DNA, 25 bp, Homo sapien
gaggttgggatgagccgagatcacg

SEQ ID NO: 2241692 - DNA, 25 bp, Homo sapien
gtggaggttgggatgagccgagatc

SEQ ID NO: 2241693 - DNA, 25 bp, Homo sapien
gggaggtggaggttgggatgagccg

SEQ ID NO: 2241694 - DNA, 25 bp, Homo sapien
ggaacttggggaggcttagaacata

SEQ ID NO: 2241695 - DNA, 25 bp, Homo sapien
gaaggcaaatccattggaacttggg

SEQ ID NO: 2241696 - DNA, 25 bp, Homo sapien
tagttgcttagttgtacattttgag

SEQ ID NO: 2241697 - DNA, 25 bp, Homo sapien
tgtacattttgagaaggcaaatcca

SEQ ID NO: 2241698 - DNA, 25 bp, Homo sapien
taaccaatcagcaaaaatatgtgcc

SEQ ID NO: 2241699 - DNA, 25 bp, Homo sapien
tgtgccccacagatttctaatgttc

SEQ ID NO: 2241700 - DNA, 25 bp, Homo sapien
tcacaaattcacaactagagatatc

SEQ ID NO: 2241701 - DNA, 25 bp, Homo sapien
tatcttagaacgctaaagacctgtt

SEQ ID NO: 2241702 - DNA, 25 bp, Homo sapien
ctttccaacacatttacaatgttca

SEQ ID NO: 2241703 - DNA, 25 bp, Homo sapien
aacacttctttccaacacatttaca

SEQ ID NO: 2241704 - DNA, 25 bp, Homo sapien
tctttccaacacatttacaatgttc

SEQ ID NO: 2241705 - DNA, 25 bp, Homo sapien
acttctttccaacacatttacaatg

SEQ ID NO: 2241706 - DNA, 25 bp, Homo sapien
aatgtactactgactttaatgtgtg

SEQ ID NO: 2241707 - DNA, 25 bp, Homo sapien
aatgtgtggttataccagtgccacc

SEQ ID NO: 2241708 - DNA, 25 bp, Homo sapien
catattcacgcttttctaccacttc

SEQ ID NO: 2241709 - DNA, 25 bp, Homo sapien
gacaacacacgtcctatacaaagat

SEQ ID NO: 2241710 - DNA, 25 bp, Homo sapien
aatatgcccaaatgccctaaggcgg

SEQ ID NO: 2241711 - DNA, 25 bp, Homo sapien
catgcatctgatttggagtcagtcc

SEQ ID NO: 2241712 - DNA, 25 bp, Homo sapien
tgaacaacagccttctactacctgg

SEQ ID NO: 2241713 - DNA, 25 bp, Homo sapien
catatttcaggcaaactgctagctg

SEQ ID NO: 2241714 - DNA, 25 bp, Homo sapien
agaaaatgcttccaagcatcacacc

SEQ ID NO: 2241715 - DNA, 25 bp, Homo sapien
agtgatcaaagcacagaaaatgctt

SEQ ID NO: 2241716 - DNA, 25 bp, Homo sapien
aagcacagaaaatgcttccaagcat

SEQ ID NO: 2241717 - DNA, 25 bp, Homo sapien
acagaaaatgcttccaagcatcaca

SEQ ID NO: 2241718 - DNA, 25 bp, Homo sapien
cttcaaaaaggagctgctttcagaa

SEQ ID NO: 2241719 - DNA, 25 bp, Homo sapien
aaaaggagctgctttcagaaagcat

SEQ ID NO: 2241720 - DNA, 25 bp, Homo sapien
caaaaaggagctgctttcagaaagc

SEQ ID NO: 2241721 - DNA, 25 bp, Homo sapien
tcaaaaaggagctgctttcagaaag

SEQ ID NO: 2241722 - DNA, 25 bp, Homo sapien
gaactttgcaacaactcctctatgg

SEQ ID NO: 2241723 - DNA, 25 bp, Homo sapien
aaaggctctcaaaatctttagcttc

SEQ ID NO: 2241724 - DNA, 25 bp, Homo sapien
gcttgaaatcaagttagttgcatat

SEQ ID NO: 2241725 - DNA, 25 bp, Homo sapien
agcttccaatggaatctgattactg

SEQ ID NO: 2241726 - DNA, 25 bp, Homo sapien
aaaactacccaatgtcagtcacttc

SEQ ID NO: 2241727 - DNA, 25 bp, Homo sapien
gatgtaatagaagcccataataaaa

SEQ ID NO: 2241728 - DNA, 25 bp, Homo sapien
ttctcttatggttgaaaggagcctt

SEQ ID NO: 2241729 - DNA, 25 bp, Homo sapien
gagctacttagacttcccagttttc

SEQ ID NO: 2241730 - DNA, 25 bp, Homo sapien
attagaattgtcggctgtgtgcggt

SEQ ID NO: 2241731 - DNA, 25 bp, Homo sapien
ttagaattgtcggctgtgtgcggtg

SEQ ID NO: 2241732 - DNA, 25 bp, Homo sapien
tagaattgtcggctgtgtgcggtgg

SEQ ID NO: 2241733 - DNA, 25 bp, Homo sapien
tattagaattgtcggctgtgtgcgg

SEQ ID NO: 2241734 - DNA, 25 bp, Homo sapien
gctcaattatggcatatgtgtcaga

SEQ ID NO: 2241735 - DNA, 25 bp, Homo sapien
tatgtgtcagaattcttcctgatgg

SEQ ID NO: 2241736 - DNA, 25 bp, Homo sapien
atggcatatgtgtcagaattcttcc

SEQ ID NO: 2241737 - DNA, 25 bp, Homo sapien
tctggccaatacataattcacatgt

SEQ ID NO: 2241738 - DNA, 25 bp, Homo sapien
ctctgagggaccaagagagcgcccc

SEQ ID NO: 2241739 - DNA, 25 bp, Homo sapien
ccccaggaagaagactctcggtctc

SEQ ID NO: 2241740 - DNA, 25 bp, Homo sapien
ctcgatatccctctgagggaccaag

SEQ ID NO: 2241741 - DNA, 25 bp, Homo sapien
cccaggaagaagactctcggtctcc

SEQ ID NO: 2241742 - DNA, 25 bp, Homo sapien
ggtttcctctcacgttggcgcacca

SEQ ID NO: 2241743 - DNA, 25 bp, Homo sapien
tctagaacggcttggggacaggaaa

SEQ ID NO: 2241744 - DNA, 25 bp, Homo sapien
tgttctagctgcaggcggtgttctc

SEQ ID NO: 2241745 - DNA, 25 bp, Homo sapien
ctccgttacgctcctgaccaggctg

SEQ ID NO: 2241746 - DNA, 25 bp, Homo sapien
agcgccaggaaacgagcgccgcgaa

SEQ ID NO: 2241747 - DNA, 25 bp, Homo sapien
tgggcggagccgtccgtttgcccgc

SEQ ID NO: 2241748 - DNA, 25 bp, Homo sapien
ctgggcggagccgtccgtttgcccg

SEQ ID NO: 2241749 - DNA, 25 bp, Homo sapien
tggggagcgccaggaaacgagcgcc

SEQ ID NO: 2241750 - DNA, 25 bp, Homo sapien
aattgcgagagcgagagattcttgc

SEQ ID NO: 2241751 - DNA, 25 bp, Homo sapien
cccggtgtcgctttttatcagacct

SEQ ID NO: 2241752 - DNA, 25 bp, Homo sapien
ttcttgctcccggtgtcgcttttta

SEQ ID NO: 2241753 - DNA, 25 bp, Homo sapien
tctgatgtacccctgcgtccttgaa

SEQ ID NO: 2241754 - DNA, 25 bp, Homo sapien
agtggacagcatatgctaaaacaga

SEQ ID NO: 2241755 - DNA, 25 bp, Homo sapien
aggtagtggacagcatatgctaaaa

SEQ ID NO: 2241756 - DNA, 25 bp, Homo sapien
ggaggtagtggacagcatatgctaa

SEQ ID NO: 2241757 - DNA, 25 bp, Homo sapien
tcttggaggtagtggacagcatatg

SEQ ID NO: 2241758 - DNA, 25 bp, Homo sapien
tgagccaagcaggttgacaatttcc

SEQ ID NO: 2241759 - DNA, 25 bp, Homo sapien
gcagctttattttgataggccacgt

SEQ ID NO: 2241760 - DNA, 25 bp, Homo sapien
catgagagaagtttgcccaggtgaa

SEQ ID NO: 2241761 - DNA, 25 bp, Homo sapien
taggccacgtagttgagccgcaaac

SEQ ID NO: 2241762 - DNA, 25 bp, Homo sapien
ttgaagaacttttactactgcggca

SEQ ID NO: 2241763 - DNA, 25 bp, Homo sapien
gatgttgacacaagtatacagcctt

SEQ ID NO: 2241764 - DNA, 25 bp, Homo sapien
aactagacataaggccacttgtgtg

SEQ ID NO: 2241765 - DNA, 25 bp, Homo sapien
tactgcggcaaactagacataaggc

SEQ ID NO: 2241766 - DNA, 25 bp, Homo sapien
gggtaatatgaccatagttctaatt

SEQ ID NO: 2241767 - DNA, 25 bp, Homo sapien
catacaagtccggtggtttactggg

SEQ ID NO: 2241768 - DNA, 25 bp, Homo sapien
tcatgtacaggtctgagactgtata

SEQ ID NO: 2241769 - DNA, 25 bp, Homo sapien
tctaatttgaatgtacagagcacca

SEQ ID NO: 2241770 - DNA, 25 bp, Homo sapien
tgctaaaagcacgaagagcctctca

SEQ ID NO: 2241771 - DNA, 25 bp, Homo sapien
cattgacctttggaacacatgtggt

SEQ ID NO: 2241772 - DNA, 25 bp, Homo sapien
gaatctctgatgtcaatggaggcaa

SEQ ID NO: 2241773 - DNA, 25 bp, Homo sapien
tgcagaagattgtgagggccaaaca

SEQ ID NO: 2241774 - DNA, 25 bp, Homo sapien
tgtcaaacagttaatccacacagga

SEQ ID NO: 2241775 - DNA, 25 bp, Homo sapien
catacgattttctgtacaaccatga

SEQ ID NO: 2241776 - DNA, 25 bp, Homo sapien
ccacagatgaggactggatacatac

SEQ ID NO: 2241777 - DNA, 25 bp, Homo sapien
gaaaacgtgatgcagtacagaattc

SEQ ID NO: 2241778 - DNA, 25 bp, Homo sapien
gattctggtatgctggacagaaagg

SEQ ID NO: 2241779 - DNA, 25 bp, Homo sapien
gtggctgattctggtatgctggaca

SEQ ID NO: 2241780 - DNA, 25 bp, Homo sapien
cagaaaggtttatgatgcccaatgg

SEQ ID NO: 2241781 - DNA, 25 bp, Homo sapien
caatgggttaatcagctttgaccaa

SEQ ID NO: 2241782 - DNA, 25 bp, Homo sapien
acagcatgatgctttgggtaagtcg

SEQ ID NO: 2241783 - DNA, 25 bp, Homo sapien
cctgtcttgcggaaaacagcatgat

SEQ ID NO: 2241784 - DNA, 25 bp, Homo sapien
attccctttatagatctgcagtctg

SEQ ID NO: 2241785 - DNA, 25 bp, Homo sapien
tgggtaagtcgtcgttatcttcact

SEQ ID NO: 2241786 - DNA, 25 bp, Homo sapien
gcagcctctgggaactatctgcatt

SEQ ID NO: 2241787 - DNA, 25 bp, Homo sapien
ggtttcccgcctgaagacaggaaca

SEQ ID NO: 2241788 - DNA, 25 bp, Homo sapien
ccataatgagcttggaaggctgaca

SEQ ID NO: 2241789 - DNA, 25 bp, Homo sapien
ggtattccagatgtatgcacagcag

SEQ ID NO: 2241790 - DNA, 25 bp, Homo sapien
gttctatgatatgcctgttggattg

SEQ ID NO: 2241791 - DNA, 25 bp, Homo sapien
tgattgttttgcagtaatgaggttc

SEQ ID NO: 2241792 - DNA, 25 bp, Homo sapien
gggccctattagtgtagttttctca

SEQ ID NO: 2241793 - DNA, 25 bp, Homo sapien
tgaccacactcagcatgggccctat

SEQ ID NO: 2241794 - DNA, 25 bp, Homo sapien
ttagctatcttttcccccagtgtgg

SEQ ID NO: 2241795 - DNA, 25 bp, Homo sapien
tgtttaagaggcagttagagccctt

SEQ ID NO: 2241796 - DNA, 25 bp, Homo sapien
gactgggaccacattgataactgtg

SEQ ID NO: 2241797 - DNA, 25 bp, Homo sapien
ccagtgtggacatcaaaaaaagact

SEQ ID NO: 2241798 - DNA, 25 bp, Homo sapien
taaatatatgtctagacacccgctt

SEQ ID NO: 2241799 - DNA, 25 bp, Homo sapien
gatggataaatcaaagaggtagaag

SEQ ID NO: 2241800 - DNA, 25 bp, Homo sapien
gaattatctttgattgaaggaggtg

SEQ ID NO: 2241801 - DNA, 25 bp, Homo sapien
tttgtgtgtttgaatcaatctctcc

SEQ ID NO: 2241802 - DNA, 25 bp, Homo sapien
ttttcttactgatttgtttgagtgt

SEQ ID NO: 2241803 - DNA, 25 bp, Homo sapien
tttcttactgatttgtttgagtgtg

SEQ ID NO: 2241804 - DNA, 25 bp, Homo sapien
gaaaatggacagcaggtgatgccat

SEQ ID NO: 2241805 - DNA, 25 bp, Homo sapien
ggctttcaaagctatcccttcatct

SEQ ID NO: 2241806 - DNA, 25 bp, Homo sapien
ttctctccataacaaatctctctca

SEQ ID NO: 2241807 - DNA, 25 bp, Homo sapien
caggtgatgccatcaaaacaggctt

SEQ ID NO: 2241808 - DNA, 25 bp, Homo sapien
catgaaatcctaacctaagccaaag

SEQ ID NO: 2241809 - DNA, 25 bp, Homo sapien
atgaaatcctaacctaagccaaagt

SEQ ID NO: 2241810 - DNA, 25 bp, Homo sapien
gcttcccactcctgttgtcttttct

SEQ ID NO: 2241811 - DNA, 25 bp, Homo sapien
tcactggtgcaacagagccactggg

SEQ ID NO: 2241812 - DNA, 25 bp, Homo sapien
gaacagacacgctgcttcccactcc

SEQ ID NO: 2241813 - DNA, 25 bp, Homo sapien
ttccttttcactggtgcaacagagc

SEQ ID NO: 2241814 - DNA, 25 bp, Homo sapien
tggcaaagaagtgtgcacctgaatc

SEQ ID NO: 2241815 - DNA, 25 bp, Homo sapien
ggcactgggcttgtcatagagcaag

SEQ ID NO: 2241816 - DNA, 25 bp, Homo sapien
tcttctttgtgcagggaggtaggat

SEQ ID NO: 2241817 - DNA, 25 bp, Homo sapien
tataaagactactgccaatattaaa

SEQ ID NO: 2241818 - DNA, 25 bp, Homo sapien
tagggctctcttcatgggaagtata

SEQ ID NO: 2241819 - DNA, 25 bp, Homo sapien
caaccaggatgtcacattccctatc

SEQ ID NO: 2241820 - DNA, 25 bp, Homo sapien
gattcagaattccatggaacagtct

SEQ ID NO: 2241821 - DNA, 25 bp, Homo sapien
tgagcctgctgcctgtagatgcaaa

SEQ ID NO: 2241822 - DNA, 25 bp, Homo sapien
actggttatctgcataaggccatcg

SEQ ID NO: 2241823 - DNA, 25 bp, Homo sapien
cgagcatcagcagaactatacattt

SEQ ID NO: 2241824 - DNA, 25 bp, Homo sapien
gaacattaaatagtttgcaccagtt

SEQ ID NO: 2241825 - DNA, 25 bp, Homo sapien
tagtttgcaccagttcatgtttggt

SEQ ID NO: 2241826 - DNA, 25 bp, Homo sapien
ctcctgagctgacgagaacatccac

SEQ ID NO: 2241827 - DNA, 25 bp, Homo sapien
tgtaaatagtggttctctgtcctgc

SEQ ID NO: 2241828 - DNA, 25 bp, Homo sapien
ctgtttagaggggtctcatttgtaa

SEQ ID NO: 2241829 - DNA, 25 bp, Homo sapien
ctcttgccctctcctgagctgacga

SEQ ID NO: 2241830 - DNA, 25 bp, Homo sapien
cgccaattccgctttttcatggtcc

SEQ ID NO: 2241831 - DNA, 25 bp, Homo sapien
cagcttcatcacaaaggtgaattgc

SEQ ID NO: 2241832 - DNA, 25 bp, Homo sapien
agcttcatcacaaaggtgaattgcc

SEQ ID NO: 2241833 - DNA, 25 bp, Homo sapien
aaaggtgaattgccttaatgacatc

SEQ ID NO: 2241834 - DNA, 25 bp, Homo sapien
taccaacacacctgagctagatgct

SEQ ID NO: 2241835 - DNA, 25 bp, Homo sapien
ccataatcatggcatcatctttctc

SEQ ID NO: 2241836 - DNA, 25 bp, Homo sapien
tgggaaaagcaataccttttctcat

SEQ ID NO: 2241837 - DNA, 25 bp, Homo sapien
ggctcagtaccaacacacctgagct

SEQ ID NO: 2241838 - DNA, 25 bp, Homo sapien
ttagcgatgtcgccccccccccatc

SEQ ID NO: 2241839 - DNA, 25 bp, Homo sapien
tgcttgtccttgtccgacatcttcc

SEQ ID NO: 2241840 - DNA, 25 bp, Homo sapien
cttgtccttgtccgacatcttccta

SEQ ID NO: 2241841 - DNA, 25 bp, Homo sapien
gcttgtccttgtccgacatcttcct

SEQ ID NO: 2241842 - DNA, 25 bp, Homo sapien
ttgatcttcgcaacatgacaaatac

SEQ ID NO: 2241843 - DNA, 25 bp, Homo sapien
gaacctgttctgtagtccttccctg

SEQ ID NO: 2241844 - DNA, 25 bp, Homo sapien
tagcttccttgatcttcgcaacatg

SEQ ID NO: 2241845 - DNA, 25 bp, Homo sapien
tgacaaatacaatggaacctgttct

SEQ ID NO: 2241846 - DNA, 25 bp, Homo sapien
agaagggccattgaagaggttttgc

SEQ ID NO: 2241847 - DNA, 25 bp, Homo sapien
ctgatggctttcaggtgcgcattga

SEQ ID NO: 2241848 - DNA, 25 bp, Homo sapien
tggctttcaggtgcgcattgatatt

SEQ ID NO: 2241849 - DNA, 25 bp, Homo sapien
ttcaggtgcgcattgatatttggta

SEQ ID NO: 2241850 - DNA, 25 bp, Homo sapien
ttcatcccacttttcgggctgagat

SEQ ID NO: 2241851 - DNA, 25 bp, Homo sapien
cttttcgggctgagatttagtgact

SEQ ID NO: 2241852 - DNA, 25 bp, Homo sapien
ccacttttcgggctgagatttagtg

SEQ ID NO: 2241853 - DNA, 25 bp, Homo sapien
catcccacttttcgggctgagattt

SEQ ID NO: 2241854 - DNA, 25 bp, Homo sapien
tggttttcacaacagttccatggcc

SEQ ID NO: 2241855 - DNA, 25 bp, Homo sapien
ttttcacaacagttccatggccctc

SEQ ID NO: 2241856 - DNA, 25 bp, Homo sapien
ttcacaacagttccatggccctcac

SEQ ID NO: 2241857 - DNA, 25 bp, Homo sapien
ggttttcacaacagttccatggccc

SEQ ID NO: 2241858 - DNA, 25 bp, Homo sapien
tttccacagggacactgtatttccc

SEQ ID NO: 2241859 - DNA, 25 bp, Homo sapien
ttccagtaaatctcccacccaaagc

SEQ ID NO: 2241860 - DNA, 25 bp, Homo sapien
atttccacagggacactgtatttcc

SEQ ID NO: 2241861 - DNA, 25 bp, Homo sapien
cccaaagcggctgattatttctagt

SEQ ID NO: 2241862 - DNA, 25 bp, Homo sapien
tctgcaggctcgcaaatggcatcga

SEQ ID NO: 2241863 - DNA, 25 bp, Homo sapien
cattagagaattgggcttcgactca

SEQ ID NO: 2241864 - DNA, 25 bp, Homo sapien
tatcaaatataggttggtagagggc

SEQ ID NO: 2241865 - DNA, 25 bp, Homo sapien
ggtagagggcggcaagttttctcaa

SEQ ID NO: 2241866 - DNA, 25 bp, Homo sapien
ttcaccagctgtgcccgcaccgcag

SEQ ID NO: 2241867 - DNA, 25 bp, Homo sapien
cccgcttcaccagctgtgcccgcac

SEQ ID NO: 2241868 - DNA, 25 bp, Homo sapien
cgcttcaccagctgtgcccgcaccg

SEQ ID NO: 2241869 - DNA, 25 bp, Homo sapien
cttggacacatggatccccgcttcc

SEQ ID NO: 2241870 - DNA, 25 bp, Homo sapien
cacggcctcctctgaggtcggttcc

SEQ ID NO: 2241871 - DNA, 25 bp, Homo sapien
acggcctcctctgaggtcggttcct

SEQ ID NO: 2241872 - DNA, 25 bp, Homo sapien
ccacggcctcctctgaggtcggttc

SEQ ID NO: 2241873 - DNA, 25 bp, Homo sapien
gtacaggaacacgaagccaatgccc

SEQ ID NO: 2241874 - DNA, 25 bp, Homo sapien
cggctgaggtgacggttcgctatct

SEQ ID NO: 2241875 - DNA, 25 bp, Homo sapien
ttcgctatctggatgtggtcgttgt

SEQ ID NO: 2241876 - DNA, 25 bp, Homo sapien
tggatcaggccgaggccctcgcctt

SEQ ID NO: 2241877 - DNA, 25 bp, Homo sapien
cacctcggccgcaggcaccatgtcg

SEQ ID NO: 2241878 - DNA, 25 bp, Homo sapien
acctcggccgcaggcaccatgtcgc

SEQ ID NO: 2241879 - DNA, 25 bp, Homo sapien
cctcggccgcaggcaccatgtcgct

SEQ ID NO: 2241880 - DNA, 25 bp, Homo sapien
tagatgtcactggatatcacttttg

SEQ ID NO: 2241881 - DNA, 25 bp, Homo sapien
catccatgaaagttagatgtcactg

SEQ ID NO: 2241882 - DNA, 25 bp, Homo sapien
cacttttgatgtaacgaactttgga

SEQ ID NO: 2241883 - DNA, 25 bp, Homo sapien
cgaactttggaatgatatgtgttac

SEQ ID NO: 2241884 - DNA, 25 bp, Homo sapien
aaacaatagtacaacattaaccagc

SEQ ID NO: 2241885 - DNA, 25 bp, Homo sapien
caacatttgtgtgctatatcttaaa

SEQ ID NO: 2241886 - DNA, 25 bp, Homo sapien
tcttaaacaagtagagaagcccatc

SEQ ID NO: 2241887 - DNA, 25 bp, Homo sapien
aatagtacaacattaaccagcacca

SEQ ID NO: 2241888 - DNA, 25 bp, Homo sapien
agcttggatatcagggtgcttgtgg

SEQ ID NO: 2241889 - DNA, 25 bp, Homo sapien
gagcttggatatcagggtgcttgtg

SEQ ID NO: 2241890 - DNA, 25 bp, Homo sapien
tcagtcaaatgatcacaccaacctt

SEQ ID NO: 2241891 - DNA, 25 bp, Homo sapien
tgaaggtttcagtcaaatgatcaca

SEQ ID NO: 2241892 - DNA, 25 bp, Homo sapien
aaccttgtctgcctagcactagaaa

SEQ ID NO: 2241893 - DNA, 25 bp, Homo sapien
aatgatcacaccaaccttgtctgcc

SEQ ID NO: 2241894 - DNA, 25 bp, Homo sapien
ttttcttggcttcacctctgctgcg

SEQ ID NO: 2241895 - DNA, 25 bp, Homo sapien
ggattttcttggcttcacctctgct

SEQ ID NO: 2241896 - DNA, 25 bp, Homo sapien
gattttcttggcttcacctctgctg

SEQ ID NO: 2241897 - DNA, 25 bp, Homo sapien
ctggattttcttggcttcacctctg

SEQ ID NO: 2241898 - DNA, 25 bp, Homo sapien
cttttcgggctgagatttagtgact

SEQ ID NO: 2241899 - DNA, 25 bp, Homo sapien
ttcatcccacttttcgggctgagat

SEQ ID NO: 2241900 - DNA, 25 bp, Homo sapien
catcccacttttcgggctgagattt

SEQ ID NO: 2241901 - DNA, 25 bp, Homo sapien
ccacttttcgggctgagatttagtg

SEQ ID NO: 2241902 - DNA, 25 bp, Homo sapien
tggttttcacaacagttccatggcc

SEQ ID NO: 2241903 - DNA, 25 bp, Homo sapien
ttttcacaacagttccatggccctc

SEQ ID NO: 2241904 - DNA, 25 bp, Homo sapien
ttcacaacagttccatggccctcac

SEQ ID NO: 2241905 - DNA, 25 bp, Homo sapien
ggttttcacaacagttccatggccc

SEQ ID NO: 2241906 - DNA, 25 bp, Homo sapien
cccaaagcggctgattatttctagt

SEQ ID NO: 2241907 - DNA, 25 bp, Homo sapien
tttccacagggacactgtatttccc

SEQ ID NO: 2241908 - DNA, 25 bp, Homo sapien
ttccagtaaatctcccacccaaagc

SEQ ID NO: 2241909 - DNA, 25 bp, Homo sapien
atttccacagggacactgtatttcc

SEQ ID NO: 2241910 - DNA, 25 bp, Homo sapien
ggccctgcctagaaccctgggacac

SEQ ID NO: 2241911 - DNA, 25 bp, Homo sapien
gccctgcctagaaccctgggacaca

SEQ ID NO: 2241912 - DNA, 25 bp, Homo sapien
ccgctgctgccgctagcccgttcct

SEQ ID NO: 2241913 - DNA, 25 bp, Homo sapien
ctgctgccgctagcccgttccttac

SEQ ID NO: 2241914 - DNA, 25 bp, Homo sapien
cctgtgcggtcggttcttctgtggc

SEQ ID NO: 2241915 - DNA, 25 bp, Homo sapien
atcaggcggctgagttgacggttct

SEQ ID NO: 2241916 - DNA, 25 bp, Homo sapien
ttgccccagaggttgcgcgcagcag

SEQ ID NO: 2241917 - DNA, 25 bp, Homo sapien
gcaggctctgggaccgatgcggcct

SEQ ID NO: 2241918 - DNA, 25 bp, Homo sapien
aagtgaatgcccgacgccgggtagc

SEQ ID NO: 2241919 - DNA, 25 bp, Homo sapien
caggagcacgaagtgaatgcccgac

SEQ ID NO: 2241920 - DNA, 25 bp, Homo sapien
ggcgaccaccgccaagtcgaagttg

SEQ ID NO: 2241921 - DNA, 25 bp, Homo sapien
gtcgcgggcccgatatctgagtcct

SEQ ID NO: 2241922 - DNA, 25 bp, Homo sapien
cacctcggccgcaggcaccacgtcg

SEQ ID NO: 2241923 - DNA, 25 bp, Homo sapien
caggcaccacgtcgctgctgtcggg

SEQ ID NO: 2241924 - DNA, 25 bp, Homo sapien
cctcctggttaccagctccggccgc

SEQ ID NO: 2241925 - DNA, 25 bp, Homo sapien
gccgcaggcaccacgtcgctgctgt

SEQ ID NO: 2241926 - DNA, 25 bp, Homo sapien
tgaccactgaggtggctacggccga

SEQ ID NO: 2241927 - DNA, 25 bp, Homo sapien
gaccacggtgaagacggtgaccact

SEQ ID NO: 2241928 - DNA, 25 bp, Homo sapien
gccgctgagggaataagagtctctc

SEQ ID NO: 2241929 - DNA, 25 bp, Homo sapien
tctcagacgacaccctaagatggga

SEQ ID NO: 2241930 - DNA, 25 bp, Homo sapien
cgaactttggaatgatatgtgttac

SEQ ID NO: 2241931 - DNA, 25 bp, Homo sapien
tagatgtcactggatatcacttttg

SEQ ID NO: 2241932 - DNA, 25 bp, Homo sapien
catccatgaaagttagatgtcactg

SEQ ID NO: 2241933 - DNA, 25 bp, Homo sapien
cacttttgatgtaacgaactttgga

SEQ ID NO: 2241934 - DNA, 25 bp, Homo sapien
aatagtacaacattaaccagcacca

SEQ ID NO: 2241935 - DNA, 25 bp, Homo sapien
caacatttgtgtgctatatcttaaa

SEQ ID NO: 2241936 - DNA, 25 bp, Homo sapien
aaacaatagtacaacattaaccagc

SEQ ID NO: 2241937 - DNA, 25 bp, Homo sapien
tcttaaacaagtagagaagcccatc

SEQ ID NO: 2241938 - DNA, 25 bp, Homo sapien
agcttggatatcagggtgcttgtgg

SEQ ID NO: 2241939 - DNA, 25 bp, Homo sapien
gagcttggatatcagggtgcttgtg

SEQ ID NO: 2241940 - DNA, 25 bp, Homo sapien
aaccttgtctgcctagcactagaaa

SEQ ID NO: 2241941 - DNA, 25 bp, Homo sapien
tcagtcaaatgatcacaccaacctt

SEQ ID NO: 2241942 - DNA, 25 bp, Homo sapien
tgaaggtttcagtcaaatgatcaca

SEQ ID NO: 2241943 - DNA, 25 bp, Homo sapien
aatgatcacaccaaccttgtctgcc

SEQ ID NO: 2241944 - DNA, 25 bp, Homo sapien
ctggattttcttggcttcacctctg

SEQ ID NO: 2241945 - DNA, 25 bp, Homo sapien
ttttcttggcttcacctctgctgcg

SEQ ID NO: 2241946 - DNA, 25 bp, Homo sapien
ggattttcttggcttcacctctgct

SEQ ID NO: 2241947 - DNA, 25 bp, Homo sapien
gattttcttggcttcacctctgctg

SEQ ID NO: 2241948 - DNA, 25 bp, Homo sapien
ttcatcccacttttcgggctgagat

SEQ ID NO: 2241949 - DNA, 25 bp, Homo sapien
catcccacttttcgggctgagattt

SEQ ID NO: 2241950 - DNA, 25 bp, Homo sapien
ccacttttcgggctgagatttagtg

SEQ ID NO: 2241951 - DNA, 25 bp, Homo sapien
cttttcgggctgagatttagtgact

SEQ ID NO: 2241952 - DNA, 25 bp, Homo sapien
ggttttcacaacagttccatggccc

SEQ ID NO: 2241953 - DNA, 25 bp, Homo sapien
ttttcacaacagttccatggccctc

SEQ ID NO: 2241954 - DNA, 25 bp, Homo sapien
ttcacaacagttccatggccctcac

SEQ ID NO: 2241955 - DNA, 25 bp, Homo sapien
tggttttcacaacagttccatggcc

SEQ ID NO: 2241956 - DNA, 25 bp, Homo sapien
tttccacagggacactgtatttccc

SEQ ID NO: 2241957 - DNA, 25 bp, Homo sapien
ttccagtaaatctcccacccaaagc

SEQ ID NO: 2241958 - DNA, 25 bp, Homo sapien
atttccacagggacactgtatttcc

SEQ ID NO: 2241959 - DNA, 25 bp, Homo sapien
cccaaagcggctgattatttctagt

SEQ ID NO: 2241960 - DNA, 25 bp, Homo sapien
ggccctgcctagaaccctgggacac

SEQ ID NO: 2241961 - DNA, 25 bp, Homo sapien
gccctgcctagaaccctgggacaca

SEQ ID NO: 2241962 - DNA, 25 bp, Homo sapien
ccgctgctgccgctagcccgttcct

SEQ ID NO: 2241963 - DNA, 25 bp, Homo sapien
ctgctgccgctagcccgttccttac

SEQ ID NO: 2241964 - DNA, 25 bp, Homo sapien
ttgccccagaggttgcgcgcagcag

SEQ ID NO: 2241965 - DNA, 25 bp, Homo sapien
cctgtgcggtcggttcttctgtggc

SEQ ID NO: 2241966 - DNA, 25 bp, Homo sapien
gcaggctctgggaccgatgcggcct

SEQ ID NO: 2241967 - DNA, 25 bp, Homo sapien
atcaggcggctgagttgacggttct

SEQ ID NO: 2241968 - DNA, 25 bp, Homo sapien
gtcgcgggcccgatatctgagtcct

SEQ ID NO: 2241969 - DNA, 25 bp, Homo sapien
aagtgaatgcccgacgccgggtagc

SEQ ID NO: 2241970 - DNA, 25 bp, Homo sapien
ggcgaccaccgccaagtcgaagttg

SEQ ID NO: 2241971 - DNA, 25 bp, Homo sapien
caggagcacgaagtgaatgcccgac

SEQ ID NO: 2241972 - DNA, 25 bp, Homo sapien
cctcctggttaccagctccggccgc

SEQ ID NO: 2241973 - DNA, 25 bp, Homo sapien
cacctcggccgcaggcaccacgtcg

SEQ ID NO: 2241974 - DNA, 25 bp, Homo sapien
gccgcaggcaccacgtcgctgctgt

SEQ ID NO: 2241975 - DNA, 25 bp, Homo sapien
caggcaccacgtcgctgctgtcggg

SEQ ID NO: 2241976 - DNA, 25 bp, Homo sapien
tctcagacgacaccctaagatggga

SEQ ID NO: 2241977 - DNA, 25 bp, Homo sapien
gaccacggtgaagacggtgaccact

SEQ ID NO: 2241978 - DNA, 25 bp, Homo sapien
tgaccactgaggtggctacggccga

SEQ ID NO: 2241979 - DNA, 25 bp, Homo sapien
gccgctgagggaataagagtctctc

SEQ ID NO: 2241980 - DNA, 25 bp, Homo sapien
cgaactttggaatgatatgtgttac

SEQ ID NO: 2241981 - DNA, 25 bp, Homo sapien
catccatgaaagttagatgtcactg

SEQ ID NO: 2241982 - DNA, 25 bp, Homo sapien
tagatgtcactggatatcacttttg

SEQ ID NO: 2241983 - DNA, 25 bp, Homo sapien
cacttttgatgtaacgaactttgga

SEQ ID NO: 2241984 - DNA, 25 bp, Homo sapien
aaacaatagtacaacattaaccagc

SEQ ID NO: 2241985 - DNA, 25 bp, Homo sapien
tcttaaacaagtagagaagcccatc

SEQ ID NO: 2241986 - DNA, 25 bp, Homo sapien
caacatttgtgtgctatatcttaaa

SEQ ID NO: 2241987 - DNA, 25 bp, Homo sapien
aatagtacaacattaaccagcacca

SEQ ID NO: 2241988 - DNA, 25 bp, Homo sapien
agcttggatatcagggtgcttgtgg

SEQ ID NO: 2241989 - DNA, 25 bp, Homo sapien
gagcttggatatcagggtgcttgtg

SEQ ID NO: 2241990 - DNA, 25 bp, Homo sapien
tcagtcaaatgatcacaccaacctt

SEQ ID NO: 2241991 - DNA, 25 bp, Homo sapien
aaccttgtctgcctagcactagaaa

SEQ ID NO: 2241992 - DNA, 25 bp, Homo sapien
tgaaggtttcagtcaaatgatcaca

SEQ ID NO: 2241993 - DNA, 25 bp, Homo sapien
aatgatcacaccaaccttgtctgcc

SEQ ID NO: 2241994 - DNA, 25 bp, Homo sapien
ggattttcttggcttcacctctgct

SEQ ID NO: 2241995 - DNA, 25 bp, Homo sapien
ctggattttcttggcttcacctctg

SEQ ID NO: 2241996 - DNA, 25 bp, Homo sapien
ttttcttggcttcacctctgctgcg

SEQ ID NO: 2241997 - DNA, 25 bp, Homo sapien
gattttcttggcttcacctctgctg

SEQ ID NO: 2241998 - DNA, 25 bp, Homo sapien
ttcatcccacttttcgggctgagat

SEQ ID NO: 2241999 - DNA, 25 bp, Homo sapien
catcccacttttcgggctgagattt

SEQ ID NO: 2242000 - DNA, 25 bp, Homo sapien
ccacttttcgggctgagatttagtg

SEQ ID NO: 2242001 - DNA, 25 bp, Homo sapien
cttttcgggctgagatttagtgact

SEQ ID NO: 2242002 - DNA, 25 bp, Homo sapien
ggttttcacaacagttccatggccc

SEQ ID NO: 2242003 - DNA, 25 bp, Homo sapien
ttcacaacagttccatggccctcac

SEQ ID NO: 2242004 - DNA, 25 bp, Homo sapien
ttttcacaacagttccatggccctc

SEQ ID NO: 2242005 - DNA, 25 bp, Homo sapien
tggttttcacaacagttccatggcc

SEQ ID NO: 2242006 - DNA, 25 bp, Homo sapien
ttccagtaaatctcccacccaaagc

SEQ ID NO: 2242007 - DNA, 25 bp, Homo sapien
tttccacagggacactgtatttccc

SEQ ID NO: 2242008 - DNA, 25 bp, Homo sapien
cccaaagcggctgattatttctagt

SEQ ID NO: 2242009 - DNA, 25 bp, Homo sapien
atttccacagggacactgtatttcc

SEQ ID NO: 2242010 - DNA, 25 bp, Homo sapien
ggccctgcctagaaccctgggacac

SEQ ID NO: 2242011 - DNA, 25 bp, Homo sapien
gccctgcctagaaccctgggacaca

SEQ ID NO: 2242012 - DNA, 25 bp, Homo sapien
ccgctgctgccgctagcccgttcct

SEQ ID NO: 2242013 - DNA, 25 bp, Homo sapien
ctgctgccgctagcccgttccttac

SEQ ID NO: 2242014 - DNA, 25 bp, Homo sapien
ttgccccagaggttgcgcgcagcag

SEQ ID NO: 2242015 - DNA, 25 bp, Homo sapien
gcaggctctgggaccgatgcggcct

SEQ ID NO: 2242016 - DNA, 25 bp, Homo sapien
cctgtgcggtcggttcttctgtggc

SEQ ID NO: 2242017 - DNA, 25 bp, Homo sapien
atcaggcggctgagttgacggttct

SEQ ID NO: 2242018 - DNA, 25 bp, Homo sapien
caggagcacgaagtgaatgcccgac

SEQ ID NO: 2242019 - DNA, 25 bp, Homo sapien
aagtgaatgcccgacgccgggtagc

SEQ ID NO: 2242020 - DNA, 25 bp, Homo sapien
ggcgaccaccgccaagtcgaagttg

SEQ ID NO: 2242021 - DNA, 25 bp, Homo sapien
gtcgcgggcccgatatctgagtcct

SEQ ID NO: 2242022 - DNA, 25 bp, Homo sapien
caggcaccacgtcgctgctgtcggg

SEQ ID NO: 2242023 - DNA, 25 bp, Homo sapien
cctcctggttaccagctccggccgc

SEQ ID NO: 2242024 - DNA, 25 bp, Homo sapien
cacctcggccgcaggcaccacgtcg

SEQ ID NO: 2242025 - DNA, 25 bp, Homo sapien
gccgcaggcaccacgtcgctgctgt

SEQ ID NO: 2242026 - DNA, 25 bp, Homo sapien
tctcagacgacaccctaagatggga

SEQ ID NO: 2242027 - DNA, 25 bp, Homo sapien
tgaccactgaggtggctacggccga

SEQ ID NO: 2242028 - DNA, 25 bp, Homo sapien
gaccacggtgaagacggtgaccact

SEQ ID NO: 2242029 - DNA, 25 bp, Homo sapien
gccgctgagggaataagagtctctc

SEQ ID NO: 2242030 - DNA, 25 bp, Homo sapien
cgaactttggaatgatatgtgttac

SEQ ID NO: 2242031 - DNA, 25 bp, Homo sapien
catccatgaaagttagatgtcactg

SEQ ID NO: 2242032 - DNA, 25 bp, Homo sapien
tagatgtcactggatatcacttttg

SEQ ID NO: 2242033 - DNA, 25 bp, Homo sapien
cacttttgatgtaacgaactttgga

SEQ ID NO: 2242034 - DNA, 25 bp, Homo sapien
aatagtacaacattaaccagcacca

SEQ ID NO: 2242035 - DNA, 25 bp, Homo sapien
caacatttgtgtgctatatcttaaa

SEQ ID NO: 2242036 - DNA, 25 bp, Homo sapien
aaacaatagtacaacattaaccagc

SEQ ID NO: 2242037 - DNA, 25 bp, Homo sapien
tcttaaacaagtagagaagcccatc

SEQ ID NO: 2242038 - DNA, 25 bp, Homo sapien
agcttggatatcagggtgcttgtgg

SEQ ID NO: 2242039 - DNA, 25 bp, Homo sapien
gagcttggatatcagggtgcttgtg

SEQ ID NO: 2242040 - DNA, 25 bp, Homo sapien
aaccttgtctgcctagcactagaaa

SEQ ID NO: 2242041 - DNA, 25 bp, Homo sapien
tgaaggtttcagtcaaatgatcaca

SEQ ID NO: 2242042 - DNA, 25 bp, Homo sapien
aatgatcacaccaaccttgtctgcc

SEQ ID NO: 2242043 - DNA, 25 bp, Homo sapien
tcagtcaaatgatcacaccaacctt

SEQ ID NO: 2242044 - DNA, 25 bp, Homo sapien
ggattttcttggcttcacctctgct

SEQ ID NO: 2242045 - DNA, 25 bp, Homo sapien
ctggattttcttggcttcacctctg

SEQ ID NO: 2242046 - DNA, 25 bp, Homo sapien
ttttcttggcttcacctctgctgcg

SEQ ID NO: 2242047 - DNA, 25 bp, Homo sapien
gattttcttggcttcacctctgctg

SEQ ID NO: 2242048 - DNA, 25 bp, Homo sapien
ttcatcccacttttcgggctgagat

SEQ ID NO: 2242049 - DNA, 25 bp, Homo sapien
ccacttttcgggctgagatttagtg

SEQ ID NO: 2242050 - DNA, 25 bp, Homo sapien
catcccacttttcgggctgagattt

SEQ ID NO: 2242051 - DNA, 25 bp, Homo sapien
cttttcgggctgagatttagtgact

SEQ ID NO: 2242052 - DNA, 25 bp, Homo sapien
ggttttcacaacagttccatggccc

SEQ ID NO: 2242053 - DNA, 25 bp, Homo sapien
ttttcacaacagttccatggccctc

SEQ ID NO: 2242054 - DNA, 25 bp, Homo sapien
ttcacaacagttccatggccctcac

SEQ ID NO: 2242055 - DNA, 25 bp, Homo sapien
tggttttcacaacagttccatggcc

SEQ ID NO: 2242056 - DNA, 25 bp, Homo sapien
cccaaagcggctgattatttctagt

SEQ ID NO: 2242057 - DNA, 25 bp, Homo sapien
tttccacagggacactgtatttccc

SEQ ID NO: 2242058 - DNA, 25 bp, Homo sapien
ttccagtaaatctcccacccaaagc

SEQ ID NO: 2242059 - DNA, 25 bp, Homo sapien
atttccacagggacactgtatttcc

SEQ ID NO: 2242060 - DNA, 25 bp, Homo sapien
ggccctgcctagaaccctgggacac

SEQ ID NO: 2242061 - DNA, 25 bp, Homo sapien
gccctgcctagaaccctgggacaca

SEQ ID NO: 2242062 - DNA, 25 bp, Homo sapien
ccgctgctgccgctagcccgttcct

SEQ ID NO: 2242063 - DNA, 25 bp, Homo sapien
ctgctgccgctagcccgttccttac

SEQ ID NO: 2242064 - DNA, 25 bp, Homo sapien
ttgccccagaggttgcgcgcagcag

SEQ ID NO: 2242065 - DNA, 25 bp, Homo sapien
atcaggcggctgagttgacggttct

SEQ ID NO: 2242066 - DNA, 25 bp, Homo sapien
cctgtgcggtcggttcttctgtggc

SEQ ID NO: 2242067 - DNA, 25 bp, Homo sapien
gcaggctctgggaccgatgcggcct

SEQ ID NO: 2242068 - DNA, 25 bp, Homo sapien
aagtgaatgcccgacgccgggtagc

SEQ ID NO: 2242069 - DNA, 25 bp, Homo sapien
ggcgaccaccgccaagtcgaagttg

SEQ ID NO: 2242070 - DNA, 25 bp, Homo sapien
caggagcacgaagtgaatgcccgac

SEQ ID NO: 2242071 - DNA, 25 bp, Homo sapien
gtcgcgggcccgatatctgagtcct

SEQ ID NO: 2242072 - DNA, 25 bp, Homo sapien
gccgcaggcaccacgtcgctgctgt

SEQ ID NO: 2242073 - DNA, 25 bp, Homo sapien
caggcaccacgtcgctgctgtcggg

SEQ ID NO: 2242074 - DNA, 25 bp, Homo sapien
cctcctggttaccagctccggccgc

SEQ ID NO: 2242075 - DNA, 25 bp, Homo sapien
cacctcggccgcaggcaccacgtcg

SEQ ID NO: 2242076 - DNA, 25 bp, Homo sapien
tctcagacgacaccctaagatggga

SEQ ID NO: 2242077 - DNA, 25 bp, Homo sapien
tgaccactgaggtggctacggccga

SEQ ID NO: 2242078 - DNA, 25 bp, Homo sapien
gccgctgagggaataagagtctctc

SEQ ID NO: 2242079 - DNA, 25 bp, Homo sapien
gaccacggtgaagacggtgaccact

SEQ ID NO: 2242080 - DNA, 25 bp, Homo sapien
cgaactttggaatgatatgtgttac

SEQ ID NO: 2242081 - DNA, 25 bp, Homo sapien
tagatgtcactggatatcacttttg

SEQ ID NO: 2242082 - DNA, 25 bp, Homo sapien
catccatgaaagttagatgtcactg

SEQ ID NO: 2242083 - DNA, 25 bp, Homo sapien
cacttttgatgtaacgaactttgga

SEQ ID NO: 2242084 - DNA, 25 bp, Homo sapien
aatagtacaacattaaccagcacca

SEQ ID NO: 2242085 - DNA, 25 bp, Homo sapien
caacatttgtgtgctatatcttaaa

SEQ ID NO: 2242086 - DNA, 25 bp, Homo sapien
aaacaatagtacaacattaaccagc

SEQ ID NO: 2242087 - DNA, 25 bp, Homo sapien
tcttaaacaagtagagaagcccatc

SEQ ID NO: 2242088 - DNA, 25 bp, Homo sapien
agcttggatatcagggtgcttgtgg

SEQ ID NO: 2242089 - DNA, 25 bp, Homo sapien
gagcttggatatcagggtgcttgtg

SEQ ID NO: 2242090 - DNA, 25 bp, Homo sapien
tgaaggtttcagtcaaatgatcaca

SEQ ID NO: 2242091 - DNA, 25 bp, Homo sapien
aaccttgtctgcctagcactagaaa

SEQ ID NO: 2242092 - DNA, 25 bp, Homo sapien
aatgatcacaccaaccttgtctgcc

SEQ ID NO: 2242093 - DNA, 25 bp, Homo sapien
tcagtcaaatgatcacaccaacctt

SEQ ID NO: 2242094 - DNA, 25 bp, Homo sapien
ggattttcttggcttcacctctgct

SEQ ID NO: 2242095 - DNA, 25 bp, Homo sapien
ctggattttcttggcttcacctctg

SEQ ID NO: 2242096 - DNA, 25 bp, Homo sapien
ttttcttggcttcacctctgctgcg

SEQ ID NO: 2242097 - DNA, 25 bp, Homo sapien
gattttcttggcttcacctctgctg

SEQ ID NO: 2242098 - DNA, 25 bp, Homo sapien
ttcatcccacttttcgggctgagat

SEQ ID NO: 2242099 - DNA, 25 bp, Homo sapien
cttttcgggctgagatttagtgact

SEQ ID NO: 2242100 - DNA, 25 bp, Homo sapien
catcccacttttcgggctgagattt

SEQ ID NO: 2242101 - DNA, 25 bp, Homo sapien
ccacttttcgggctgagatttagtg

SEQ ID NO: 2242102 - DNA, 25 bp, Homo sapien
ggttttcacaacagttccatggccc

SEQ ID NO: 2242103 - DNA, 25 bp, Homo sapien
ttttcacaacagttccatggccctc

SEQ ID NO: 2242104 - DNA, 25 bp, Homo sapien
ttcacaacagttccatggccctcac

SEQ ID NO: 2242105 - DNA, 25 bp, Homo sapien
tggttttcacaacagttccatggcc

SEQ ID NO: 2242106 - DNA, 25 bp, Homo sapien
cccaaagcggctgattatttctagt

SEQ ID NO: 2242107 - DNA, 25 bp, Homo sapien
tttccacagggacactgtatttccc

SEQ ID NO: 2242108 - DNA, 25 bp, Homo sapien
ttccagtaaatctcccacccaaagc

SEQ ID NO: 2242109 - DNA, 25 bp, Homo sapien
atttccacagggacactgtatttcc

SEQ ID NO: 2242110 - DNA, 25 bp, Homo sapien
ggccctgcctagaaccctgggacac

SEQ ID NO: 2242111 - DNA, 25 bp, Homo sapien
gccctgcctagaaccctgggacaca

SEQ ID NO: 2242112 - DNA, 25 bp, Homo sapien
ctgctgccgctagcccgttccttac

SEQ ID NO: 2242113 - DNA, 25 bp, Homo sapien
ccgctgctgccgctagcccgttcct

SEQ ID NO: 2242114 - DNA, 25 bp, Homo sapien
cctgtgcggtcggttcttctgtggc

SEQ ID NO: 2242115 - DNA, 25 bp, Homo sapien
atcaggcggctgagttgacggttct

SEQ ID NO: 2242116 - DNA, 25 bp, Homo sapien
gcaggctctgggaccgatgcggcct

SEQ ID NO: 2242117 - DNA, 25 bp, Homo sapien
ttgccccagaggttgcgcgcagcag

SEQ ID NO: 2242118 - DNA, 25 bp, Homo sapien
aagtgaatgcccgacgccgggtagc

SEQ ID NO: 2242119 - DNA, 25 bp, Homo sapien
ggcgaccaccgccaagtcgaagttg

SEQ ID NO: 2242120 - DNA, 25 bp, Homo sapien
caggagcacgaagtgaatgcccgac

SEQ ID NO: 2242121 - DNA, 25 bp, Homo sapien
gtcgcgggcccgatatctgagtcct

SEQ ID NO: 2242122 - DNA, 25 bp, Homo sapien
caggcaccacgtcgctgctgtcggg

SEQ ID NO: 2242123 - DNA, 25 bp, Homo sapien
cctcctggttaccagctccggccgc

SEQ ID NO: 2242124 - DNA, 25 bp, Homo sapien
cacctcggccgcaggcaccacgtcg

SEQ ID NO: 2242125 - DNA, 25 bp, Homo sapien
gccgcaggcaccacgtcgctgctgt

SEQ ID NO: 2242126 - DNA, 25 bp, Homo sapien
cgaactttggaatgatatgtgttac

SEQ ID NO: 2242127 - DNA, 25 bp, Homo sapien
tagatgtcactggatatcacttttg

SEQ ID NO: 2242128 - DNA, 25 bp, Homo sapien
cacttttgatgtaacgaactttgga

SEQ ID NO: 2242129 - DNA, 25 bp, Homo sapien
catccatgaaagttagatgtcactg

SEQ ID NO: 2242130 - DNA, 25 bp, Homo sapien
aaccttgtctgcctagcactagaaa

SEQ ID NO: 2242131 - DNA, 25 bp, Homo sapien
tccttttgtaactcacgagcttgga

SEQ ID NO: 2242132 - DNA, 25 bp, Homo sapien
tcttaaacaagtagagaagcccatc

SEQ ID NO: 2242133 - DNA, 25 bp, Homo sapien
tcttttcctcccgactgtgggatga

SEQ ID NO: 2242134 - DNA, 25 bp, Homo sapien
ggattttcttggcttcacctctgct

SEQ ID NO: 2242135 - DNA, 25 bp, Homo sapien
ctggattttcttggcttcacctctg

SEQ ID NO: 2242136 - DNA, 25 bp, Homo sapien
ttttcttggcttcacctctgctgcg

SEQ ID NO: 2242137 - DNA, 25 bp, Homo sapien
gattttcttggcttcacctctgctg

SEQ ID NO: 2242138 - DNA, 25 bp, Homo sapien
ttcatcccacttttcgggctgagat

SEQ ID NO: 2242139 - DNA, 25 bp, Homo sapien
ccacttttcgggctgagatttagtg

SEQ ID NO: 2242140 - DNA, 25 bp, Homo sapien
catcccacttttcgggctgagattt

SEQ ID NO: 2242141 - DNA, 25 bp, Homo sapien
cttttcgggctgagatttagtgact

SEQ ID NO: 2242142 - DNA, 25 bp, Homo sapien
ttttcacaacagttccatggccctc

SEQ ID NO: 2242143 - DNA, 25 bp, Homo sapien
ttcacaacagttccatggccctcac

SEQ ID NO: 2242144 - DNA, 25 bp, Homo sapien
tggttttcacaacagttccatggcc

SEQ ID NO: 2242145 - DNA, 25 bp, Homo sapien
ggttttcacaacagttccatggccc

SEQ ID NO: 2242146 - DNA, 25 bp, Homo sapien
tttccacagggacactgtatttccc

SEQ ID NO: 2242147 - DNA, 25 bp, Homo sapien
ttccagtaaatctcccacccaaagc

SEQ ID NO: 2242148 - DNA, 25 bp, Homo sapien
atttccacagggacactgtatttcc

SEQ ID NO: 2242149 - DNA, 25 bp, Homo sapien
cccaaagcggctgattatttctagt

SEQ ID NO: 2242150 - DNA, 25 bp, Homo sapien
gccctgcctagaaccctgggacaca

SEQ ID NO: 2242151 - DNA, 25 bp, Homo sapien
ccgctgctgccgctagcccgttcct

SEQ ID NO: 2242152 - DNA, 25 bp, Homo sapien
ctgctgccgctagcccgttccttac

SEQ ID NO: 2242153 - DNA, 25 bp, Homo sapien
ggccctgcctagaaccctgggacac

SEQ ID NO: 2242154 - DNA, 25 bp, Homo sapien
ctgtgcggtcggttcttctgtggct

SEQ ID NO: 2242155 - DNA, 25 bp, Homo sapien
tgtgcggtcggttcttctgtggctg

SEQ ID NO: 2242156 - DNA, 25 bp, Homo sapien
gtcgcgggcccgatatctgagtcct

SEQ ID NO: 2242157 - DNA, 25 bp, Homo sapien
aagtgaatgcccgacgccgggtagc

SEQ ID NO: 2242158 - DNA, 25 bp, Homo sapien
caggagcacgaagtgaatgcccgac

SEQ ID NO: 2242159 - DNA, 25 bp, Homo sapien
ggcgaccaccgccaagtcgaagttg

SEQ ID NO: 2242160 - DNA, 25 bp, Homo sapien
caggcaccacgtcgctgctgtcggg

SEQ ID NO: 2242161 - DNA, 25 bp, Homo sapien
cctcctggttaccagctccggccgc

SEQ ID NO: 2242162 - DNA, 25 bp, Homo sapien
cacctcggccgcaggcaccacgtcg

SEQ ID NO: 2242163 - DNA, 25 bp, Homo sapien
gccgcaggcaccacgtcgctgctgt

SEQ ID NO: 2242164 - DNA, 25 bp, Homo sapien
tctcagacgacaccctaagatggga

SEQ ID NO: 2242165 - DNA, 25 bp, Homo sapien
tgaccactgaggtggctacggccga

SEQ ID NO: 2242166 - DNA, 25 bp, Homo sapien
gaccacggtgaagacggtgaccact

SEQ ID NO: 2242167 - DNA, 25 bp, Homo sapien
gccgctgagggaataagagtctctc

SEQ ID NO: 2242168 - DNA, 25 bp, Homo sapien
cgaactttggaatgatatgtgttac

SEQ ID NO: 2242169 - DNA, 25 bp, Homo sapien
tagatgtcactggatatcacttttg

SEQ ID NO: 2242170 - DNA, 25 bp, Homo sapien
cacttttgatgtaacgaactttgga

SEQ ID NO: 2242171 - DNA, 25 bp, Homo sapien
catccatgaaagttagatgtcactg

SEQ ID NO: 2242172 - DNA, 25 bp, Homo sapien
aatagtacaacattaaccagcacca

SEQ ID NO: 2242173 - DNA, 25 bp, Homo sapien
tcttaaacaagtagagaagcccatc

SEQ ID NO: 2242174 - DNA, 25 bp, Homo sapien
caacatttgtgtgctatatcttaaa

SEQ ID NO: 2242175 - DNA, 25 bp, Homo sapien
tcttttcctcccgactgtgggatga

SEQ ID NO: 2242176 - DNA, 25 bp, Homo sapien
agcttggatatcagggtgcttgtgg

SEQ ID NO: 2242177 - DNA, 25 bp, Homo sapien
gagcttggatatcagggtgcttgtg

SEQ ID NO: 2242178 - DNA, 25 bp, Homo sapien
tcagtcaaatgatcacaccaacctt

SEQ ID NO: 2242179 - DNA, 25 bp, Homo sapien
aaccttgtctgcctagcactagaaa

SEQ ID NO: 2242180 - DNA, 25 bp, Homo sapien
tgaaggtttcagtcaaatgatcaca

SEQ ID NO: 2242181 - DNA, 25 bp, Homo sapien
aatgatcacaccaaccttgtctgcc

SEQ ID NO: 2242182 - DNA, 25 bp, Homo sapien
ggattttcttggcttcacctctgct

SEQ ID NO: 2242183 - DNA, 25 bp, Homo sapien
ctggattttcttggcttcacctctg

SEQ ID NO: 2242184 - DNA, 25 bp, Homo sapien
ttttcttggcttcacctctgctgcg

SEQ ID NO: 2242185 - DNA, 25 bp, Homo sapien
gattttcttggcttcacctctgctg

SEQ ID NO: 2242186 - DNA, 25 bp, Homo sapien
ttcatcccacttttcgggctgagat

SEQ ID NO: 2242187 - DNA, 25 bp, Homo sapien
catcccacttttcgggctgagattt

SEQ ID NO: 2242188 - DNA, 25 bp, Homo sapien
ccacttttcgggctgagatttagtg

SEQ ID NO: 2242189 - DNA, 25 bp, Homo sapien
cttttcgggctgagatttagtgact

SEQ ID NO: 2242190 - DNA, 25 bp, Homo sapien
ggttttcacaacagttccatggccc

SEQ ID NO: 2242191 - DNA, 25 bp, Homo sapien
ttttcacaacagttccatggccctc

SEQ ID NO: 2242192 - DNA, 25 bp, Homo sapien
ttcacaacagttccatggccctcac

SEQ ID NO: 2242193 - DNA, 25 bp, Homo sapien
tggttttcacaacagttccatggcc

SEQ ID NO: 2242194 - DNA, 25 bp, Homo sapien
cccaaagcggctgattatttctagt

SEQ ID NO: 2242195 - DNA, 25 bp, Homo sapien
tttccacagggacactgtatttccc

SEQ ID NO: 2242196 - DNA, 25 bp, Homo sapien
ttccagtaaatctcccacccaaagc

SEQ ID NO: 2242197 - DNA, 25 bp, Homo sapien
atttccacagggacactgtatttcc

SEQ ID NO: 2242198 - DNA, 25 bp, Homo sapien
ctgctgccgctagcccgttccttac

SEQ ID NO: 2242199 - DNA, 25 bp, Homo sapien
ggccctgcctagaaccctgggacac

SEQ ID NO: 2242200 - DNA, 25 bp, Homo sapien
gccctgcctagaaccctgggacaca

SEQ ID NO: 2242201 - DNA, 25 bp, Homo sapien
ccgctgctgccgctagcccgttcct

SEQ ID NO: 2242202 - DNA, 25 bp, Homo sapien
cctgtgcggtcggttcttctgtggc

SEQ ID NO: 2242203 - DNA, 25 bp, Homo sapien
ttgccccagaggttgcgcgcagcag

SEQ ID NO: 2242204 - DNA, 25 bp, Homo sapien
atcaggcggctgagttgacggttct

SEQ ID NO: 2242205 - DNA, 25 bp, Homo sapien
gcaggctctgggaccgatgcggcct

SEQ ID NO: 2242206 - DNA, 25 bp, Homo sapien
aagtgaatgcccgacgccgggtagc

SEQ ID NO: 2242207 - DNA, 25 bp, Homo sapien
caggagcacgaagtgaatgcccgac

SEQ ID NO: 2242208 - DNA, 25 bp, Homo sapien
ggcgaccaccgccaagtcgaagttg

SEQ ID NO: 2242209 - DNA, 25 bp, Homo sapien
gtcgcgggcccgatatctgagtcct

SEQ ID NO: 2242210 - DNA, 25 bp, Homo sapien
caggcaccacgtcgctgctgtcggg

SEQ ID NO: 2242211 - DNA, 25 bp, Homo sapien
cctcctggttaccagctccggccgc

SEQ ID NO: 2242212 - DNA, 25 bp, Homo sapien
cacctcggccgcaggcaccacgtcg

SEQ ID NO: 2242213 - DNA, 25 bp, Homo sapien
gccgcaggcaccacgtcgctgctgt

SEQ ID NO: 2242214 - DNA, 25 bp, Homo sapien
tctcagacgacaccctaagatggga

SEQ ID NO: 2242215 - DNA, 25 bp, Homo sapien
gccgctgagggaataagagtctctc

SEQ ID NO: 2242216 - DNA, 25 bp, Homo sapien
gaccacggtgaagacggtgaccact

SEQ ID NO: 2242217 - DNA, 25 bp, Homo sapien
tgaccactgaggtggctacggccga

SEQ ID NO: 2242218 - DNA, 25 bp, Homo sapien
cgaactttggaatgatatgtgttac

SEQ ID NO: 2242219 - DNA, 25 bp, Homo sapien
catccatgaaagttagatgtcactg

SEQ ID NO: 2242220 - DNA, 25 bp, Homo sapien
tagatgtcactggatatcacttttg

SEQ ID NO: 2242221 - DNA, 25 bp, Homo sapien
cacttttgatgtaacgaactttgga

SEQ ID NO: 2242222 - DNA, 25 bp, Homo sapien
aatagtacaacattaaccagcacca

SEQ ID NO: 2242223 - DNA, 25 bp, Homo sapien
caacatttgtgtgctatatcttaaa

SEQ ID NO: 2242224 - DNA, 25 bp, Homo sapien
tcttaaacaagtagagaagcccatc

SEQ ID NO: 2242225 - DNA, 25 bp, Homo sapien
tcttttcctcccgactgtgggatga

SEQ ID NO: 2242226 - DNA, 25 bp, Homo sapien
agcttggatatcagggtgcttgtgg

SEQ ID NO: 2242227 - DNA, 25 bp, Homo sapien
gagcttggatatcagggtgcttgtg

SEQ ID NO: 2242228 - DNA, 25 bp, Homo sapien
tcagtcaaatgatcacaccaacctt

SEQ ID NO: 2242229 - DNA, 25 bp, Homo sapien
aaccttgtctgcctagcactagaaa

SEQ ID NO: 2242230 - DNA, 25 bp, Homo sapien
tgaaggtttcagtcaaatgatcaca

SEQ ID NO: 2242231 - DNA, 25 bp, Homo sapien
aatgatcacaccaaccttgtctgcc

SEQ ID NO: 2242232 - DNA, 25 bp, Homo sapien
ggattttcttggcttcacctctgct

SEQ ID NO: 2242233 - DNA, 25 bp, Homo sapien
ctggattttcttggcttcacctctg

SEQ ID NO: 2242234 - DNA, 25 bp, Homo sapien
ttttcttggcttcacctctgctgcg

SEQ ID NO: 2242235 - DNA, 25 bp, Homo sapien
gattttcttggcttcacctctgctg

SEQ ID NO: 2242236 - DNA, 25 bp, Homo sapien
ttcatcccacttttcgggctgagat

SEQ ID NO: 2242237 - DNA, 25 bp, Homo sapien
cttttcgggctgagatttagtgact

SEQ ID NO: 2242238 - DNA, 25 bp, Homo sapien
ccacttttcgggctgagatttagtg

SEQ ID NO: 2242239 - DNA, 25 bp, Homo sapien
catcccacttttcgggctgagattt

SEQ ID NO: 2242240 - DNA, 25 bp, Homo sapien
ggttttcacaacagttccatggccc

SEQ ID NO: 2242241 - DNA, 25 bp, Homo sapien
tggttttcacaacagttccatggcc

SEQ ID NO: 2242242 - DNA, 25 bp, Homo sapien
ttttcacaacagttccatggccctc

SEQ ID NO: 2242243 - DNA, 25 bp, Homo sapien
ttcacaacagttccatggccctcac

SEQ ID NO: 2242244 - DNA, 25 bp, Homo sapien
cccaaagcggctgattatttctagt

SEQ ID NO: 2242245 - DNA, 25 bp, Homo sapien
tttccacagggacactgtatttccc

SEQ ID NO: 2242246 - DNA, 25 bp, Homo sapien
ttccagtaaatctcccacccaaagc

SEQ ID NO: 2242247 - DNA, 25 bp, Homo sapien
atttccacagggacactgtatttcc

SEQ ID NO: 2242248 - DNA, 25 bp, Homo sapien
ccgctgctgccgctagcccgttcct

SEQ ID NO: 2242249 - DNA, 25 bp, Homo sapien
ctgctgccgctagcccgttccttac

SEQ ID NO: 2242250 - DNA, 25 bp, Homo sapien
ggccctgcctagaaccctgggacac

SEQ ID NO: 2242251 - DNA, 25 bp, Homo sapien
gccctgcctagaaccctgggacaca

SEQ ID NO: 2242252 - DNA, 25 bp, Homo sapien
ttgccccagaggttgcgcgcagcag

SEQ ID NO: 2242253 - DNA, 25 bp, Homo sapien
cctgtgcggtcggttcttctgtggc

SEQ ID NO: 2242254 - DNA, 25 bp, Homo sapien
atcaggcggctgagttgacggttct

SEQ ID NO: 2242255 - DNA, 25 bp, Homo sapien
gcaggctctgggaccgatgcggcct

SEQ ID NO: 2242256 - DNA, 25 bp, Homo sapien
gtcgcgggcccgatatctgagtcct

SEQ ID NO: 2242257 - DNA, 25 bp, Homo sapien
caggagcacgaagtgaatgcccgac

SEQ ID NO: 2242258 - DNA, 25 bp, Homo sapien
aagtgaatgcccgacgccgggtagc

SEQ ID NO: 2242259 - DNA, 25 bp, Homo sapien
ggcgaccaccgccaagtcgaagttg

SEQ ID NO: 2242260 - DNA, 25 bp, Homo sapien
caggcaccacgtcgctgctgtcggg

SEQ ID NO: 2242261 - DNA, 25 bp, Homo sapien
cctcctggttaccagctccggccgc

SEQ ID NO: 2242262 - DNA, 25 bp, Homo sapien
cacctcggccgcaggcaccacgtcg

SEQ ID NO: 2242263 - DNA, 25 bp, Homo sapien
gccgcaggcaccacgtcgctgctgt

SEQ ID NO: 2242264 - DNA, 25 bp, Homo sapien
tctcagacgacaccctaagatggga

SEQ ID NO: 2242265 - DNA, 25 bp, Homo sapien
gaccacggtgaagacggtgaccact

SEQ ID NO: 2242266 - DNA, 25 bp, Homo sapien
tgaccactgaggtggctacggccga

SEQ ID NO: 2242267 - DNA, 25 bp, Homo sapien
gccgctgagggaataagagtctctc

SEQ ID NO: 2242268 - DNA, 25 bp, Homo sapien
cgaactttggaatgatatgtgttac

SEQ ID NO: 2242269 - DNA, 25 bp, Homo sapien
tagatgtcactggatatcacttttg

SEQ ID NO: 2242270 - DNA, 25 bp, Homo sapien
catccatgaaagttagatgtcactg

SEQ ID NO: 2242271 - DNA, 25 bp, Homo sapien
cacttttgatgtaacgaactttgga

SEQ ID NO: 2242272 - DNA, 25 bp, Homo sapien
aatagtacaacattaaccagcacca

SEQ ID NO: 2242273 - DNA, 25 bp, Homo sapien
caacatttgtgtgctatatcttaaa

SEQ ID NO: 2242274 - DNA, 25 bp, Homo sapien
tcttaaacaagtagagaagcccatc

SEQ ID NO: 2242275 - DNA, 25 bp, Homo sapien
tcttttcctcccgactgtgggatga

SEQ ID NO: 2242276 - DNA, 25 bp, Homo sapien
agcttggatatcagggtgcttgtgg

SEQ ID NO: 2242277 - DNA, 25 bp, Homo sapien
gagcttggatatcagggtgcttgtg

SEQ ID NO: 2242278 - DNA, 25 bp, Homo sapien
tcagtcaaatgatcacaccaacctt

SEQ ID NO: 2242279 - DNA, 25 bp, Homo sapien
aaccttgtctgcctagcactagaaa

SEQ ID NO: 2242280 - DNA, 25 bp, Homo sapien
tgaaggtttcagtcaaatgatcaca

SEQ ID NO: 2242281 - DNA, 25 bp, Homo sapien
aatgatcacaccaaccttgtctgcc

SEQ ID NO: 2242282 - DNA, 25 bp, Homo sapien
ggattttcttggcttcacctctgct

SEQ ID NO: 2242283 - DNA, 25 bp, Homo sapien
ttttcttggcttcacctctgctgcg

SEQ ID NO: 2242284 - DNA, 25 bp, Homo sapien
gattttcttggcttcacctctgctg

SEQ ID NO: 2242285 - DNA, 25 bp, Homo sapien
ctggattttcttggcttcacctctg

SEQ ID NO: 2242286 - DNA, 25 bp, Homo sapien
ttcatcccacttttcgggctgagat

SEQ ID NO: 2242287 - DNA, 25 bp, Homo sapien
catcccacttttcgggctgagattt

SEQ ID NO: 2242288 - DNA, 25 bp, Homo sapien
ccacttttcgggctgagatttagtg

SEQ ID NO: 2242289 - DNA, 25 bp, Homo sapien
cttttcgggctgagatttagtgact

SEQ ID NO: 2242290 - DNA, 25 bp, Homo sapien
tggttttcacaacagttccatggcc

SEQ ID NO: 2242291 - DNA, 25 bp, Homo sapien
ggttttcacaacagttccatggccc

SEQ ID NO: 2242292 - DNA, 25 bp, Homo sapien
ttttcacaacagttccatggccctc

SEQ ID NO: 2242293 - DNA, 25 bp, Homo sapien
ttcacaacagttccatggccctcac

SEQ ID NO: 2242294 - DNA, 25 bp, Homo sapien
cccaaagcggctgattatttctagt

SEQ ID NO: 2242295 - DNA, 25 bp, Homo sapien
tttccacagggacactgtatttccc

SEQ ID NO: 2242296 - DNA, 25 bp, Homo sapien
ttccagtaaatctcccacccaaagc

SEQ ID NO: 2242297 - DNA, 25 bp, Homo sapien
atttccacagggacactgtatttcc

SEQ ID NO: 2242298 - DNA, 25 bp, Homo sapien
ggccctgcctagaaccctgggacac

SEQ ID NO: 2242299 - DNA, 25 bp, Homo sapien
gccctgcctagaaccctgggacaca

SEQ ID NO: 2242300 - DNA, 25 bp, Homo sapien
ccgctgctgccgctagcccgttcct

SEQ ID NO: 2242301 - DNA, 25 bp, Homo sapien
ctgctgccgctagcccgttccttac

SEQ ID NO: 2242302 - DNA, 25 bp, Homo sapien
ttgccccagaggttgcgcgcagcag

SEQ ID NO: 2242303 - DNA, 25 bp, Homo sapien
atcaggcggctgagttgacggttct

SEQ ID NO: 2242304 - DNA, 25 bp, Homo sapien
gcaggctctgggaccgatgcggcct

SEQ ID NO: 2242305 - DNA, 25 bp, Homo sapien
cctgtgcggtcggttcttctgtggc

SEQ ID NO: 2242306 - DNA, 25 bp, Homo sapien
caggagcacgaagtgaatgcccgac

SEQ ID NO: 2242307 - DNA, 25 bp, Homo sapien
aagtgaatgcccgacgccgggtagc

SEQ ID NO: 2242308 - DNA, 25 bp, Homo sapien
ggcgaccaccgccaagtcgaagttg

SEQ ID NO: 2242309 - DNA, 25 bp, Homo sapien
gtcgcgggcccgatatctgagtcct

SEQ ID NO: 2242310 - DNA, 25 bp, Homo sapien
caggcaccacgtcgctgctgtcggg

SEQ ID NO: 2242311 - DNA, 25 bp, Homo sapien
cctcctggttaccagctccggccgc

SEQ ID NO: 2242312 - DNA, 25 bp, Homo sapien
cacctcggccgcaggcaccacgtcg

SEQ ID NO: 2242313 - DNA, 25 bp, Homo sapien
gccgcaggcaccacgtcgctgctgt

SEQ ID NO: 2242314 - DNA, 25 bp, Homo sapien
tgaccactgaggtggctacggccga

SEQ ID NO: 2242315 - DNA, 25 bp, Homo sapien
gccgctgagggaataagagtctctc

SEQ ID NO: 2242316 - DNA, 25 bp, Homo sapien
gaccacggtgaagacggtgaccact

SEQ ID NO: 2242317 - DNA, 25 bp, Homo sapien
tctcagacgacaccctaagatggga

SEQ ID NO: 2242318 - DNA, 25 bp, Homo sapien
cgaactttggaatgatatgtgttac

SEQ ID NO: 2242319 - DNA, 25 bp, Homo sapien
tagatgtcactggatatcacttttg

SEQ ID NO: 2242320 - DNA, 25 bp, Homo sapien
catccatgaaagttagatgtcactg

SEQ ID NO: 2242321 - DNA, 25 bp, Homo sapien
cacttttgatgtaacgaactttgga

SEQ ID NO: 2242322 - DNA, 25 bp, Homo sapien
aatagtacaacattaaccagcacca

SEQ ID NO: 2242323 - DNA, 25 bp, Homo sapien
caacatttgtgtgctatatcttaaa

SEQ ID NO: 2242324 - DNA, 25 bp, Homo sapien
tcttaaacaagtagagaagcccatc

SEQ ID NO: 2242325 - DNA, 25 bp, Homo sapien
tcttttcctcccgactgtgggatga

SEQ ID NO: 2242326 - DNA, 25 bp, Homo sapien
agcttggatatcagggtgcttgtgg

SEQ ID NO: 2242327 - DNA, 25 bp, Homo sapien
gagcttggatatcagggtgcttgtg

SEQ ID NO: 2242328 - DNA, 25 bp, Homo sapien
aaccttgtctgcctagcactagaaa

SEQ ID NO: 2242329 - DNA, 25 bp, Homo sapien
tgaaggtttcagtcaaatgatcaca

SEQ ID NO: 2242330 - DNA, 25 bp, Homo sapien
tcagtcaaatgatcacaccaacctt

SEQ ID NO: 2242331 - DNA, 25 bp, Homo sapien
aatgatcacaccaaccttgtctgcc

SEQ ID NO: 2242332 - DNA, 25 bp, Homo sapien
ggattttcttggcttcacctctgct

SEQ ID NO: 2242333 - DNA, 25 bp, Homo sapien
ctggattttcttggcttcacctctg

SEQ ID NO: 2242334 - DNA, 25 bp, Homo sapien
ttttcttggcttcacctctgctgcg

SEQ ID NO: 2242335 - DNA, 25 bp, Homo sapien
gattttcttggcttcacctctgctg

SEQ ID NO: 2242336 - DNA, 25 bp, Homo sapien
ttcatcccacttttcgggctgagat

SEQ ID NO: 2242337 - DNA, 25 bp, Homo sapien
catcccacttttcgggctgagattt

SEQ ID NO: 2242338 - DNA, 25 bp, Homo sapien
ccacttttcgggctgagatttagtg

SEQ ID NO: 2242339 - DNA, 25 bp, Homo sapien
cttttcgggctgagatttagtgact

SEQ ID NO: 2242340 - DNA, 25 bp, Homo sapien
tggttttcacaacagttccatggcc

SEQ ID NO: 2242341 - DNA, 25 bp, Homo sapien
ggttttcacaacagttccatggccc

SEQ ID NO: 2242342 - DNA, 25 bp, Homo sapien
ttttcacaacagttccatggccctc

SEQ ID NO: 2242343 - DNA, 25 bp, Homo sapien
ttcacaacagttccatggccctcac

SEQ ID NO: 2242344 - DNA, 25 bp, Homo sapien
cccaaagcggctgattatttctagt

SEQ ID NO: 2242345 - DNA, 25 bp, Homo sapien
tttccacagggacactgtatttccc

SEQ ID NO: 2242346 - DNA, 25 bp, Homo sapien
ttccagtaaatctcccacccaaagc

SEQ ID NO: 2242347 - DNA, 25 bp, Homo sapien
atttccacagggacactgtatttcc

SEQ ID NO: 2242348 - DNA, 25 bp, Homo sapien
ggccctgcctagaaccctgggacac

SEQ ID NO: 2242349 - DNA, 25 bp, Homo sapien
gccctgcctagaaccctgggacaca

SEQ ID NO: 2242350 - DNA, 25 bp, Homo sapien
ccgctgctgccgctagcccgttcct

SEQ ID NO: 2242351 - DNA, 25 bp, Homo sapien
ctgctgccgctagcccgttccttac

SEQ ID NO: 2242352 - DNA, 25 bp, Homo sapien
ttgccccagaggttgcgcgcagcag

SEQ ID NO: 2242353 - DNA, 25 bp, Homo sapien
cctgtgcggtcggttcttctgtggc

SEQ ID NO: 2242354 - DNA, 25 bp, Homo sapien
atcaggcggctgagttgacggttct

SEQ ID NO: 2242355 - DNA, 25 bp, Homo sapien
gcaggctctgggaccgatgcggcct

SEQ ID NO: 2242356 - DNA, 25 bp, Homo sapien
aagtgaatgcccgacgccgggtagc

SEQ ID NO: 2242357 - DNA, 25 bp, Homo sapien
ggcgaccaccgccaagtcgaagttg

SEQ ID NO: 2242358 - DNA, 25 bp, Homo sapien
caggagcacgaagtgaatgcccgac

SEQ ID NO: 2242359 - DNA, 25 bp, Homo sapien
gtcgcgggcccgatatctgagtcct

SEQ ID NO: 2242360 - DNA, 25 bp, Homo sapien
caggcaccacgtcgctgctgtcggg

SEQ ID NO: 2242361 - DNA, 25 bp, Homo sapien
cctcctggttaccagctccggccgc

SEQ ID NO: 2242362 - DNA, 25 bp, Homo sapien
cacctcggccgcaggcaccacgtcg

SEQ ID NO: 2242363 - DNA, 25 bp, Homo sapien
gccgcaggcaccacgtcgctgctgt

SEQ ID NO: 2242364 - DNA, 25 bp, Homo sapien
tctcagacgacaccctaagatggga

SEQ ID NO: 2242365 - DNA, 25 bp, Homo sapien
tgaccactgaggtggctacggccga

SEQ ID NO: 2242366 - DNA, 25 bp, Homo sapien
gaccacggtgaagacggtgaccact

SEQ ID NO: 2242367 - DNA, 25 bp, Homo sapien
gccgctgagggaataagagtctctc

SEQ ID NO: 2242368 - DNA, 25 bp, Homo sapien
cacttttgatgtaacgaactttgga

SEQ ID NO: 2242369 - DNA, 25 bp, Homo sapien
cgaactttggaatgatatgtgttac

SEQ ID NO: 2242370 - DNA, 25 bp, Homo sapien
catccatgaaagttagatgtcactg

SEQ ID NO: 2242371 - DNA, 25 bp, Homo sapien
tagatgtcactggatatcacttttg

SEQ ID NO: 2242372 - DNA, 25 bp, Homo sapien
aaccttgtctgcctagcactagaaa

SEQ ID NO: 2242373 - DNA, 25 bp, Homo sapien
tccttttgtaactcacgagcttgga

SEQ ID NO: 2242374 - DNA, 25 bp, Homo sapien
tcttaaacaagtagagaagcccatc

SEQ ID NO: 2242375 - DNA, 25 bp, Homo sapien
tcttttcctcccgactgtgggatga

SEQ ID NO: 2242376 - DNA, 25 bp, Homo sapien
tcacctctgctgcgtctaggtccct

SEQ ID NO: 2242377 - DNA, 25 bp, Homo sapien
cacctctgctgcgtctaggtccctt

SEQ ID NO: 2242378 - DNA, 25 bp, Homo sapien
acctctgctgcgtctaggtcccttt

SEQ ID NO: 2242379 - DNA, 25 bp, Homo sapien
ttcatcccacttttcgggctgagat

SEQ ID NO: 2242380 - DNA, 25 bp, Homo sapien
ccacttttcgggctgagatttagtg

SEQ ID NO: 2242381 - DNA, 25 bp, Homo sapien
catcccacttttcgggctgagattt

SEQ ID NO: 2242382 - DNA, 25 bp, Homo sapien
cttttcgggctgagatttagtgact

SEQ ID NO: 2242383 - DNA, 25 bp, Homo sapien
tggttttcacaacagttccatggcc

SEQ ID NO: 2242384 - DNA, 25 bp, Homo sapien
ggttttcacaacagttccatggccc

SEQ ID NO: 2242385 - DNA, 25 bp, Homo sapien
ttttcacaacagttccatggccctc

SEQ ID NO: 2242386 - DNA, 25 bp, Homo sapien
ttcacaacagttccatggccctcac

SEQ ID NO: 2242387 - DNA, 25 bp, Homo sapien
tttccacagggacactgtatttccc

SEQ ID NO: 2242388 - DNA, 25 bp, Homo sapien
cccaaagcggctgattatttctagt

SEQ ID NO: 2242389 - DNA, 25 bp, Homo sapien
ttccagtaaatctcccacccaaagc

SEQ ID NO: 2242390 - DNA, 25 bp, Homo sapien
atttccacagggacactgtatttcc

SEQ ID NO: 2242391 - DNA, 25 bp, Homo sapien
ggccctgcctagaaccctgggacac

SEQ ID NO: 2242392 - DNA, 25 bp, Homo sapien
gccctgcctagaaccctgggacaca

SEQ ID NO: 2242393 - DNA, 25 bp, Homo sapien
ccgctgctgccgctagcccgttcct

SEQ ID NO: 2242394 - DNA, 25 bp, Homo sapien
ctgctgccgctagcccgttccttac

SEQ ID NO: 2242395 - DNA, 25 bp, Homo sapien
cctgtgcggtcggttcttctgtggc

SEQ ID NO: 2242396 - DNA, 25 bp, Homo sapien
ttgccccagaggttgcgcgcagcag

SEQ ID NO: 2242397 - DNA, 25 bp, Homo sapien
atcaggcggctgagttgacggttct

SEQ ID NO: 2242398 - DNA, 25 bp, Homo sapien
gcaggctctgggaccgatgcggcct

SEQ ID NO: 2242399 - DNA, 25 bp, Homo sapien
gtcgcgggcccgatatctgagtcct

SEQ ID NO: 2242400 - DNA, 25 bp, Homo sapien
aagtgaatgcccgacgccgggtagc

SEQ ID NO: 2242401 - DNA, 25 bp, Homo sapien
caggagcacgaagtgaatgcccgac

SEQ ID NO: 2242402 - DNA, 25 bp, Homo sapien
ggcgaccaccgccaagtcgaagttg

SEQ ID NO: 2242403 - DNA, 25 bp, Homo sapien
caggcaccacgtcgctgctgtcggg

SEQ ID NO: 2242404 - DNA, 25 bp, Homo sapien
cctcctggttaccagctccggccgc

SEQ ID NO: 2242405 - DNA, 25 bp, Homo sapien
cacctcggccgcaggcaccacgtcg

SEQ ID NO: 2242406 - DNA, 25 bp, Homo sapien
gccgcaggcaccacgtcgctgctgt

SEQ ID NO: 2242407 - DNA, 25 bp, Homo sapien
tctcagacgacaccctaagatggga

SEQ ID NO: 2242408 - DNA, 25 bp, Homo sapien
gccgctgagggaataagagtctctc

SEQ ID NO: 2242409 - DNA, 25 bp, Homo sapien
tgaccactgaggtggctacggccga

SEQ ID NO: 2242410 - DNA, 25 bp, Homo sapien
gaccacggtgaagacggtgaccact

SEQ ID NO: 2242411 - DNA, 25 bp, Homo sapien
ttattgagtaactcttcccctgtgt

SEQ ID NO: 2242412 - DNA, 25 bp, Homo sapien
tgtggccatgtacgctttagcactt

SEQ ID NO: 2242413 - DNA, 25 bp, Homo sapien
ctgatgtgtggccatgtacgcttta

SEQ ID NO: 2242414 - DNA, 25 bp, Homo sapien
tcccctgtgtactgatgtgtggcca

SEQ ID NO: 2242415 - DNA, 25 bp, Homo sapien
cctttctgtcaatgtccatccagtt

SEQ ID NO: 2242416 - DNA, 25 bp, Homo sapien
tgttgctcaggactctcaggtggaa

SEQ ID NO: 2242417 - DNA, 25 bp, Homo sapien
tctctttcaacatgaagtgatagct

SEQ ID NO: 2242418 - DNA, 25 bp, Homo sapien
agctcttaacttctgttgctcagga

SEQ ID NO: 2242419 - DNA, 25 bp, Homo sapien
ggaaatcggacagaagactcaggac

SEQ ID NO: 2242420 - DNA, 25 bp, Homo sapien
ttatggataattcctatagtccagt

SEQ ID NO: 2242421 - DNA, 25 bp, Homo sapien
tatggataattcctatagtccagtt

SEQ ID NO: 2242422 - DNA, 25 bp, Homo sapien
gcatgaatatccttggggctaatga

SEQ ID NO: 2242423 - DNA, 25 bp, Homo sapien
cgtgaacaattctgctgcaggagca

SEQ ID NO: 2242424 - DNA, 25 bp, Homo sapien
gaaggagatggaggtaaagccgtga

SEQ ID NO: 2242425 - DNA, 25 bp, Homo sapien
taaagccgtgaacaattctgctgca

SEQ ID NO: 2242426 - DNA, 25 bp, Homo sapien
ctgcaaagaaagtaggtatcataat

SEQ ID NO: 2242427 - DNA, 25 bp, Homo sapien
gcaaagaaagtaggtatcataatgt

SEQ ID NO: 2242428 - DNA, 25 bp, Homo sapien
caaagaaagtaggtatcataatgtg

SEQ ID NO: 2242429 - DNA, 25 bp, Homo sapien
tgcaaagaaagtaggtatcataatg

SEQ ID NO: 2242430 - DNA, 25 bp, Homo sapien
cgtcactatacagttctttgctatg

SEQ ID NO: 2242431 - DNA, 25 bp, Homo sapien
ctatacagttctttgctatggtcga

SEQ ID NO: 2242432 - DNA, 25 bp, Homo sapien
tttgctatggtcgaatccttcagcg

SEQ ID NO: 2242433 - DNA, 25 bp, Homo sapien
tatggtcgaatccttcagcgtcctc

SEQ ID NO: 2242434 - DNA, 25 bp, Homo sapien
taaagctggtgttaagatcaatccc

SEQ ID NO: 2242435 - DNA, 25 bp, Homo sapien
cacgcctgtgttactggtaaaccca

SEQ ID NO: 2242436 - DNA, 25 bp, Homo sapien
catggacgcatctctgctactggcc

SEQ ID NO: 2242437 - DNA, 25 bp, Homo sapien
tatgatattaatgcacacgcctgtg

SEQ ID NO: 2242438 - DNA, 25 bp, Homo sapien
caagctatttggcaaaaggtgggcc

SEQ ID NO: 2242439 - DNA, 25 bp, Homo sapien
gaaatggggatacttcctgattggc

SEQ ID NO: 2242440 - DNA, 25 bp, Homo sapien
ggctgtataagactgtcttcagtga

SEQ ID NO: 2242441 - DNA, 25 bp, Homo sapien
ctctgggcaagctatttggcaaaag

SEQ ID NO: 2242442 - DNA, 25 bp, Homo sapien
ctctcccctcttctactttaataat

SEQ ID NO: 2242443 - DNA, 25 bp, Homo sapien
cttctactttaataattattgcaac

SEQ ID NO: 2242444 - DNA, 25 bp, Homo sapien
cctcttctactttaataattattgc

SEQ ID NO: 2242445 - DNA, 25 bp, Homo sapien
tccactctcccctcttctactttaa

SEQ ID NO: 2242446 - DNA, 25 bp, Homo sapien
tctaggcgatgtcctttgacagcgg

SEQ ID NO: 2242447 - DNA, 25 bp, Homo sapien
cttctctaggcgatgtcctttgaca

SEQ ID NO: 2242448 - DNA, 25 bp, Homo sapien
tctctaggcgatgtcctttgacagc

SEQ ID NO: 2242449 - DNA, 25 bp, Homo sapien
ctctaggcgatgtcctttgacagcg

SEQ ID NO: 2242450 - DNA, 25 bp, Homo sapien
gcattctgtcagaagctatatgctc

SEQ ID NO: 2242451 - DNA, 25 bp, Homo sapien
tcagaagctatatgctccatgagct

SEQ ID NO: 2242452 - DNA, 25 bp, Homo sapien
gaagctatatgctccatgagcttct

SEQ ID NO: 2242453 - DNA, 25 bp, Homo sapien
tctgtcagaagctatatgctccatg

SEQ ID NO: 2242454 - DNA, 25 bp, Homo sapien
gaacaggactccatagagcaaggtg

SEQ ID NO: 2242455 - DNA, 25 bp, Homo sapien
tctgtatattccactcaggccttga

SEQ ID NO: 2242456 - DNA, 25 bp, Homo sapien
actcaggccttgattctttctctga

SEQ ID NO: 2242457 - DNA, 25 bp, Homo sapien
caggtgcttttctacagtgccaatg

SEQ ID NO: 2242458 - DNA, 25 bp, Homo sapien
tttttaatgcctcccattgctactg

SEQ ID NO: 2242459 - DNA, 25 bp, Homo sapien
cacttcccagtttttgaaccttcag

SEQ ID NO: 2242460 - DNA, 25 bp, Homo sapien
ccttcaggaacagctgtgtcagcct

SEQ ID NO: 2242461 - DNA, 25 bp, Homo sapien
aaatctgccatctgtttgtctcact

SEQ ID NO: 2242462 - DNA, 25 bp, Homo sapien
cagatggatttgtggcactggaact

SEQ ID NO: 2242463 - DNA, 25 bp, Homo sapien
ccaccttcagtctgttggaaggaaa

SEQ ID NO: 2242464 - DNA, 25 bp, Homo sapien
tacagtcctcgaagtgacacagcag

SEQ ID NO: 2242465 - DNA, 25 bp, Homo sapien
ggaacatagggcgacacccaccttc

SEQ ID NO: 2242466 - DNA, 25 bp, Homo sapien
tagaaaagttaactttgtgtggctc

SEQ ID NO: 2242467 - DNA, 25 bp, Homo sapien
aacacaggctagaatagaaaagtta

SEQ ID NO: 2242468 - DNA, 25 bp, Homo sapien
caggctagaatagaaaagttaactt

SEQ ID NO: 2242469 - DNA, 25 bp, Homo sapien
cacaggctagaatagaaaagttaac

SEQ ID NO: 2242470 - DNA, 25 bp, Homo sapien
gctgttgtgtatgcccaaggataga

SEQ ID NO: 2242471 - DNA, 25 bp, Homo sapien
caggaatggtggtaggactgcctca

SEQ ID NO: 2242472 - DNA, 25 bp, Homo sapien
gaagtagtccaaacataagatcctg

SEQ ID NO: 2242473 - DNA, 25 bp, Homo sapien
gactgcctcatataaagggctctgc

SEQ ID NO: 2242474 - DNA, 25 bp, Homo sapien
ttgagtctgaagctgctgctaccct

SEQ ID NO: 2242475 - DNA, 25 bp, Homo sapien
cagctcggttgccctttgagtctga

SEQ ID NO: 2242476 - DNA, 25 bp, Homo sapien
tgagtctgaagctgctgctaccctc

SEQ ID NO: 2242477 - DNA, 25 bp, Homo sapien
gctgagcgatatttgcagagatgcg

SEQ ID NO: 2242478 - DNA, 25 bp, Homo sapien
cagtgggacccggaatgtctttgga

SEQ ID NO: 2242479 - DNA, 25 bp, Homo sapien
caactatgtgggatagactctctaa

SEQ ID NO: 2242480 - DNA, 25 bp, Homo sapien
tatatagcaaagcaactgaggtagt

SEQ ID NO: 2242481 - DNA, 25 bp, Homo sapien
taaagtcctctaatagagactgttt

SEQ ID NO: 2242482 - DNA, 25 bp, Homo sapien
ctgtttattaagtggtggttgatgc

SEQ ID NO: 2242483 - DNA, 25 bp, Homo sapien
gaccgtcttctacaataaagtcctc

SEQ ID NO: 2242484 - DNA, 25 bp, Homo sapien
tattgttccccacttgaccgtcttc

SEQ ID NO: 2242485 - DNA, 25 bp, Homo sapien
tgatttcagttcttagatacaagtc

SEQ ID NO: 2242486 - DNA, 25 bp, Homo sapien
agatacaagtctttgatccctctcg

SEQ ID NO: 2242487 - DNA, 25 bp, Homo sapien
caagtctttgatccctctcgagttg

SEQ ID NO: 2242488 - DNA, 25 bp, Homo sapien
tttcagttcttagatacaagtcttt

SEQ ID NO: 2242489 - DNA, 25 bp, Homo sapien
ttggttgcttacattgtgagtcaca

SEQ ID NO: 2242490 - DNA, 25 bp, Homo sapien
cactttcaatcctgaggggataact

SEQ ID NO: 2242491 - DNA, 25 bp, Homo sapien
ggttgcttacattgtgagtcacact

SEQ ID NO: 2242492 - DNA, 25 bp, Homo sapien
cttggtggtgtctcaatgtgttcac

SEQ ID NO: 2242493 - DNA, 25 bp, Homo sapien
tcaaagtcccttgttgatactattt

SEQ ID NO: 2242494 - DNA, 25 bp, Homo sapien
ttccatattcaagcattaggaatgc

SEQ ID NO: 2242495 - DNA, 25 bp, Homo sapien
ggaagcaccaccagagggaggagct

SEQ ID NO: 2242496 - DNA, 25 bp, Homo sapien
ttaatcaacctcttcaatggtgggc

SEQ ID NO: 2242497 - DNA, 25 bp, Homo sapien
aatcaacctcttcaatggtgggccc

SEQ ID NO: 2242498 - DNA, 25 bp, Homo sapien
tggtgggccctgaggaagcaccacc

SEQ ID NO: 2242499 - DNA, 25 bp, Homo sapien
ttcattatacttgtgcagaatcttg

SEQ ID NO: 2242500 - DNA, 25 bp, Homo sapien
ctcggcagtctgattcttatcgagc

SEQ ID NO: 2242501 - DNA, 25 bp, Homo sapien
cctggaagtttctcatctttgagag

SEQ ID NO: 2242502 - DNA, 25 bp, Homo sapien
ccttctcggcagtctgattcttatc

SEQ ID NO: 2242503 - DNA, 25 bp, Homo sapien
tgacactttccctctgcttctgatc

SEQ ID NO: 2242504 - DNA, 25 bp, Homo sapien
gatgacactttccctctgcttctga

SEQ ID NO: 2242505 - DNA, 25 bp, Homo sapien
cttggatgacactttccctctgctt

SEQ ID NO: 2242506 - DNA, 25 bp, Homo sapien
acactttccctctgcttctgatctt

SEQ ID NO: 2242507 - DNA, 25 bp, Homo sapien
ggtcagttatgactctaccagcagt

SEQ ID NO: 2242508 - DNA, 25 bp, Homo sapien
gtttgatgaggtcagttatgactct

SEQ ID NO: 2242509 - DNA, 25 bp, Homo sapien
gtcgtccttggtcatggtatgctca

SEQ ID NO: 2242510 - DNA, 25 bp, Homo sapien
gaggatgccattggaattagtgtca

SEQ ID NO: 2242511 - DNA, 25 bp, Homo sapien
cataagcaacagcttcatcagggtt

SEQ ID NO: 2242512 - DNA, 25 bp, Homo sapien
caccataagcaacagcttcatcagg

SEQ ID NO: 2242513 - DNA, 25 bp, Homo sapien
ataagcaacagcttcatcagggttg

SEQ ID NO: 2242514 - DNA, 25 bp, Homo sapien
ctgcaccataagcaacagcttcatc

SEQ ID NO: 2242515 - DNA, 25 bp, Homo sapien
cttattcagttattttccatggaag

SEQ ID NO: 2242516 - DNA, 25 bp, Homo sapien
tggaagaagtcttggagaagcttct

SEQ ID NO: 2242517 - DNA, 25 bp, Homo sapien
tgaatcttggggatatgagtagaac

SEQ ID NO: 2242518 - DNA, 25 bp, Homo sapien
ttcagttattttccatggaagaagt

SEQ ID NO: 2242519 - DNA, 25 bp, Homo sapien
caggtactggaggtatagatgtcga

SEQ ID NO: 2242520 - DNA, 25 bp, Homo sapien
agacagtactcttagcacgttcaca

SEQ ID NO: 2242521 - DNA, 25 bp, Homo sapien
ctggaagagacagtactcttagcac

SEQ ID NO: 2242522 - DNA, 25 bp, Homo sapien
tctctaccgggtccagggtgctaag

SEQ ID NO: 2242523 - DNA, 25 bp, Homo sapien
tggttgaccattcggttgtcaaaat

SEQ ID NO: 2242524 - DNA, 25 bp, Homo sapien
accattcggttgtcaaaatcttctc

SEQ ID NO: 2242525 - DNA, 25 bp, Homo sapien
ttgaccattcggttgtcaaaatctt

SEQ ID NO: 2242526 - DNA, 25 bp, Homo sapien
atggttgaccattcggttgtcaaaa

SEQ ID NO: 2242527 - DNA, 25 bp, Homo sapien
tgaggattgacacatcaaaaatgcc

SEQ ID NO: 2242528 - DNA, 25 bp, Homo sapien
attgacacatcaaaaatgccacttc

SEQ ID NO: 2242529 - DNA, 25 bp, Homo sapien
aatgccacttcccaggtcaaagatc

SEQ ID NO: 2242530 - DNA, 25 bp, Homo sapien
caggtcaaagatcagcatgtttctt

SEQ ID NO: 2242531 - DNA, 25 bp, Homo sapien
gcagcagcagttggctcattaataa

SEQ ID NO: 2242532 - DNA, 25 bp, Homo sapien
ttttgtctaagctgtaagcaatagc

SEQ ID NO: 2242533 - DNA, 25 bp, Homo sapien
tctaagctgtaagcaatagcagcag

SEQ ID NO: 2242534 - DNA, 25 bp, Homo sapien
ctttttgtctaagctgtaagcaata

SEQ ID NO: 2242535 - DNA, 25 bp, Homo sapien
ccagcaatagttccagcatctttgt

SEQ ID NO: 2242536 - DNA, 25 bp, Homo sapien
gcaatagttccagcatctttgttag

SEQ ID NO: 2242537 - DNA, 25 bp, Homo sapien
tacattgagaccagcaatagttcca

SEQ ID NO: 2242538 - DNA, 25 bp, Homo sapien
taagtacattgagaccagcaatagt

SEQ ID NO: 2242539 - DNA, 25 bp, Homo sapien
actgagtcattaaagtaagccggca

SEQ ID NO: 2242540 - DNA, 25 bp, Homo sapien
ctgagtcattaaagtaagccggcac

SEQ ID NO: 2242541 - DNA, 25 bp, Homo sapien
gtccaaacagacgtttggcatcaaa

SEQ ID NO: 2242542 - DNA, 25 bp, Homo sapien
tctttgaggcatcactgatcaatcg

SEQ ID NO: 2242543 - DNA, 25 bp, Homo sapien
ttgaggcatcactgatcaatcgttc

SEQ ID NO: 2242544 - DNA, 25 bp, Homo sapien
tgatcaatcgttcagtgtccataaa

SEQ ID NO: 2242545 - DNA, 25 bp, Homo sapien
tgcaggcaagctcaatgagctacag

SEQ ID NO: 2242546 - DNA, 25 bp, Homo sapien
cctggctccaacgatgaagaaagtc

SEQ ID NO: 2242547 - DNA, 25 bp, Homo sapien
caagctcaatgagctacagtttcat

SEQ ID NO: 2242548 - DNA, 25 bp, Homo sapien
gttaatctagttactgggctatgca

SEQ ID NO: 2242549 - DNA, 25 bp, Homo sapien
caggtgggacactgtgatctctgtt

SEQ ID NO: 2242550 - DNA, 25 bp, Homo sapien
ggcaccacaggtgggacactgtgat

SEQ ID NO: 2242551 - DNA, 25 bp, Homo sapien
ggacactgtgatctctgttgttacc

SEQ ID NO: 2242552 - DNA, 25 bp, Homo sapien
gtggcccctggcaccacaggtggga

SEQ ID NO: 2242553 - DNA, 25 bp, Homo sapien
tccacacttgaatgagagccactct

SEQ ID NO: 2242554 - DNA, 25 bp, Homo sapien
ctgacttcgcaagctttcaagcctg

SEQ ID NO: 2242555 - DNA, 25 bp, Homo sapien
tttggcggctgaggcctgacttcgc

SEQ ID NO: 2242556 - DNA, 25 bp, Homo sapien
tgcctctaggcccagtgttttggcg

SEQ ID NO: 2242557 - DNA, 25 bp, Homo sapien
ggaggagggagagtgcatgtttcac

SEQ ID NO: 2242558 - DNA, 25 bp, Homo sapien
gagagtgcatgtttcactgtcaaag

SEQ ID NO: 2242559 - DNA, 25 bp, Homo sapien
tgcatgtttcactgtcaaagaccat

SEQ ID NO: 2242560 - DNA, 25 bp, Homo sapien
gagggagagtgcatgtttcactgtc

SEQ ID NO: 2242561 - DNA, 25 bp, Homo sapien
ctgaagaacgttaacaatagtaact

SEQ ID NO: 2242562 - DNA, 25 bp, Homo sapien
cattctctgtaattaaccccagtgt

SEQ ID NO: 2242563 - DNA, 25 bp, Homo sapien
ctgcttacttatataaggcctctag

SEQ ID NO: 2242564 - DNA, 25 bp, Homo sapien
ttacttatataaggcctctagctcc

SEQ ID NO: 2242565 - DNA, 25 bp, Homo sapien
gggctgaagttattgccacgtttca

SEQ ID NO: 2242566 - DNA, 25 bp, Homo sapien
tattgccacgtttcagcaaggacat

SEQ ID NO: 2242567 - DNA, 25 bp, Homo sapien
ctaaattgggctgaagttattgcca

SEQ ID NO: 2242568 - DNA, 25 bp, Homo sapien
aagttattgccacgtttcagcaagg

SEQ ID NO: 2242569 - DNA, 25 bp, Homo sapien
tgttctaaggggagactaagtagca

SEQ ID NO: 2242570 - DNA, 25 bp, Homo sapien
atgttctaaggggagactaagtagc

SEQ ID NO: 2242571 - DNA, 25 bp, Homo sapien
tatgttctaaggggagactaagtag

SEQ ID NO: 2242572 - DNA, 25 bp, Homo sapien
gttctaaggggagactaagtagcat

SEQ ID NO: 2242573 - DNA, 25 bp, Homo sapien
cagacactcaagattagtgccagga

SEQ ID NO: 2242574 - DNA, 25 bp, Homo sapien
agagcaatgaaaaggccttttggca

SEQ ID NO: 2242575 - DNA, 25 bp, Homo sapien
gggctagagtggtatttagtcaaat

SEQ ID NO: 2242576 - DNA, 25 bp, Homo sapien
actcaagattagtgccaggacagga

SEQ ID NO: 2242577 - DNA, 25 bp, Homo sapien
tcagtgtctaatcgtgctggcttgc

SEQ ID NO: 2242578 - DNA, 25 bp, Homo sapien
tttcctatggtaggtgggcaccaga

SEQ ID NO: 2242579 - DNA, 25 bp, Homo sapien
gctggcttgccatccagttacttca

SEQ ID NO: 2242580 - DNA, 25 bp, Homo sapien
taatcgtgctggcttgccatccagt

SEQ ID NO: 2242581 - DNA, 25 bp, Homo sapien
catttcctatcccaagattcttaga

SEQ ID NO: 2242582 - DNA, 25 bp, Homo sapien
tgccatttcctatcccaagattctt

SEQ ID NO: 2242583 - DNA, 25 bp, Homo sapien
ttcctatcccaagattcttagacat

SEQ ID NO: 2242584 - DNA, 25 bp, Homo sapien
tacactgccatttcctatcccaaga

SEQ ID NO: 2242585 - DNA, 25 bp, Homo sapien
ccaggatggatgtgtaggaacaaac

SEQ ID NO: 2242586 - DNA, 25 bp, Homo sapien
gaacagatttgtggctcggtgctga

SEQ ID NO: 2242587 - DNA, 25 bp, Homo sapien
tagaattgtggatccatgcccagga

SEQ ID NO: 2242588 - DNA, 25 bp, Homo sapien
tctgtgagcgcaataaggaagtcat

SEQ ID NO: 2242589 - DNA, 25 bp, Homo sapien
actaagtatacccaagtgtgaacct

SEQ ID NO: 2242590 - DNA, 25 bp, Homo sapien
agtcaaaactaagtatacccaagtg

SEQ ID NO: 2242591 - DNA, 25 bp, Homo sapien
tcaaaactaagtatacccaagtgtg

SEQ ID NO: 2242592 - DNA, 25 bp, Homo sapien
caaaactaagtatacccaagtgtga

SEQ ID NO: 2242593 - DNA, 25 bp, Homo sapien
gcccaggtcactagcaaggatattg

SEQ ID NO: 2242594 - DNA, 25 bp, Homo sapien
tgttggcacctacactcgagaactg

SEQ ID NO: 2242595 - DNA, 25 bp, Homo sapien
gatgcatataataccctgcccaggt

SEQ ID NO: 2242596 - DNA, 25 bp, Homo sapien
taaggtatggcagcaagtaattgac

SEQ ID NO: 2242597 - DNA, 25 bp, Homo sapien
ttttccaatatacttgagtctgagg

SEQ ID NO: 2242598 - DNA, 25 bp, Homo sapien
aagagcagagatatttttcaccaga

SEQ ID NO: 2242599 - DNA, 25 bp, Homo sapien
cagtagcttccaaacaagagcagag

SEQ ID NO: 2242600 - DNA, 25 bp, Homo sapien
gaggctctgagttgaagacttttgt

SEQ ID NO: 2242601 - DNA, 25 bp, Homo sapien
cacactgtgctactattttgagata

SEQ ID NO: 2242602 - DNA, 25 bp, Homo sapien
cccggttatcttgcttagattccag

SEQ ID NO: 2242603 - DNA, 25 bp, Homo sapien
ttttgagatatacgtggccactaag

SEQ ID NO: 2242604 - DNA, 25 bp, Homo sapien
ggtaagtccattatagtctagtgta

SEQ ID NO: 2242605 - DNA, 25 bp, Homo sapien
ttaatgcttccttccggagctcttt

SEQ ID NO: 2242606 - DNA, 25 bp, Homo sapien
taatgcttccttccggagctctttt

SEQ ID NO: 2242607 - DNA, 25 bp, Homo sapien
ggatcattactccaacagccagaga

SEQ ID NO: 2242608 - DNA, 25 bp, Homo sapien
tctgcttgccctgcatatggaaatc

SEQ ID NO: 2242609 - DNA, 25 bp, Homo sapien
tcagactgcctgaaacttagtgagt

SEQ ID NO: 2242610 - DNA, 25 bp, Homo sapien
tatggaaatccagagtgtggacctg

SEQ ID NO: 2242611 - DNA, 25 bp, Homo sapien
tattatcaactcctgtttgtttctg

SEQ ID NO: 2242612 - DNA, 25 bp, Homo sapien
ctagatccatagcaggtctgtggga

SEQ ID NO: 2242613 - DNA, 25 bp, Homo sapien
gttttgtagtctttaccagataata

SEQ ID NO: 2242614 - DNA, 25 bp, Homo sapien
gtctgtgggaggacattaaatgcat

SEQ ID NO: 2242615 - DNA, 25 bp, Homo sapien
tttattgcatgcatgctactggatg

SEQ ID NO: 2242616 - DNA, 25 bp, Homo sapien
gatttgtatgaaggagaaggaacaa

SEQ ID NO: 2242617 - DNA, 25 bp, Homo sapien
ccagttaaagtctattacatccact

SEQ ID NO: 2242618 - DNA, 25 bp, Homo sapien
ctactggatgcgatggccagagagt

SEQ ID NO: 2242619 - DNA, 25 bp, Homo sapien
cagtaagatgcatagtggaaaagaa

SEQ ID NO: 2242620 - DNA, 25 bp, Homo sapien
gtaagatgcatagtggaaaagaaga

SEQ ID NO: 2242621 - DNA, 25 bp, Homo sapien
agcagtaagatgcatagtggaaaag

SEQ ID NO: 2242622 - DNA, 25 bp, Homo sapien
taagatgcatagtggaaaagaagat

SEQ ID NO: 2242623 - DNA, 25 bp, Homo sapien
tgagccctttaagttctcctgttcc

SEQ ID NO: 2242624 - DNA, 25 bp, Homo sapien
ttgagccctttaagttctcctgttc

SEQ ID NO: 2242625 - DNA, 25 bp, Homo sapien
gagccctttaagttctcctgttcca

SEQ ID NO: 2242626 - DNA, 25 bp, Homo sapien
agccctttaagttctcctgttccat

SEQ ID NO: 2242627 - DNA, 25 bp, Homo sapien
tgtccctgagtcaccatgagaattt

SEQ ID NO: 2242628 - DNA, 25 bp, Homo sapien
catgtccctgagtcaccatgagaat

SEQ ID NO: 2242629 - DNA, 25 bp, Homo sapien
tccctgagtcaccatgagaatttag

SEQ ID NO: 2242630 - DNA, 25 bp, Homo sapien
tcatgtccctgagtcaccatgagaa

SEQ ID NO: 2242631 - DNA, 25 bp, Homo sapien
gcatatgtaggatcacagtgtcctc

SEQ ID NO: 2242632 - DNA, 25 bp, Homo sapien
gtccagtagagcaacaacgctgtca

SEQ ID NO: 2242633 - DNA, 25 bp, Homo sapien
gttcagcaacccctttcatgaaagg

SEQ ID NO: 2242634 - DNA, 25 bp, Homo sapien
cagtgtcctcacagtagtccagtag

SEQ ID NO: 2242635 - DNA, 25 bp, Homo sapien
ttcatgtaatatgttatgcatttct

SEQ ID NO: 2242636 - DNA, 25 bp, Homo sapien
gatttcatgtaatatgttatgcatt

SEQ ID NO: 2242637 - DNA, 25 bp, Homo sapien
ttgatttcatgtaatatgttatgca

SEQ ID NO: 2242638 - DNA, 25 bp, Homo sapien
tgatttgatttcatgtaatatgtta

SEQ ID NO: 2242639 - DNA, 25 bp, Homo sapien
cctgtaagtgatagtgcatgacatc

SEQ ID NO: 2242640 - DNA, 25 bp, Homo sapien
aagtgatagtgcatgacatcaacac

SEQ ID NO: 2242641 - DNA, 25 bp, Homo sapien
tttcctgtaagtgatagtgcatgac

SEQ ID NO: 2242642 - DNA, 25 bp, Homo sapien
tgtttcctgtaagtgatagtgcatg

SEQ ID NO: 2242643 - DNA, 25 bp, Homo sapien
cagtgataactgtgctttgggtttc

SEQ ID NO: 2242644 - DNA, 25 bp, Homo sapien
gtttctaccaatgagcgagccatca

SEQ ID NO: 2242645 - DNA, 25 bp, Homo sapien
gttcttgtaaatctcactgtggctg

SEQ ID NO: 2242646 - DNA, 25 bp, Homo sapien
ttcaccctcggggacttcagtagag

SEQ ID NO: 2242647 - DNA, 25 bp, Homo sapien
gcaaagtagattattttactaaggc

SEQ ID NO: 2242648 - DNA, 25 bp, Homo sapien
agattattttactaaggccaaacat

SEQ ID NO: 2242649 - DNA, 25 bp, Homo sapien
tagattattttactaaggccaaaca

SEQ ID NO: 2242650 - DNA, 25 bp, Homo sapien
ctgcaaagtagattattttactaag

SEQ ID NO: 2242651 - DNA, 25 bp, Homo sapien
tatggaggaataattaatagtgcca

SEQ ID NO: 2242652 - DNA, 25 bp, Homo sapien
aaatgcctatggaggaataattaat

SEQ ID NO: 2242653 - DNA, 25 bp, Homo sapien
tgcctatggaggaataattaatagt

SEQ ID NO: 2242654 - DNA, 25 bp, Homo sapien
cctatggaggaataattaatagtgc

SEQ ID NO: 2242655 - DNA, 25 bp, Homo sapien
ttcaaatgccaacattaccagccag

SEQ ID NO: 2242656 - DNA, 25 bp, Homo sapien
aaatgccaacattaccagccagtaa

SEQ ID NO: 2242657 - DNA, 25 bp, Homo sapien
ctttggtgtaggcaactcatgggaa

SEQ ID NO: 2242658 - DNA, 25 bp, Homo sapien
ctctttggtgtaggcaactcatggg

SEQ ID NO: 2242659 - DNA, 25 bp, Homo sapien
gaaataataagtatttggagaccga

SEQ ID NO: 2242660 - DNA, 25 bp, Homo sapien
aataataagtatttggagaccgact

SEQ ID NO: 2242661 - DNA, 25 bp, Homo sapien
tctctttgtaatgaaataataagta

SEQ ID NO: 2242662 - DNA, 25 bp, Homo sapien
aataagtatttggagaccgactgag

SEQ ID NO: 2242663 - DNA, 25 bp, Homo sapien
atgtcccactacgttggtaccaatt

SEQ ID NO: 2242664 - DNA, 25 bp, Homo sapien
aatgtcccactacgttggtaccaat

SEQ ID NO: 2242665 - DNA, 25 bp, Homo sapien
ccacattctcaggtagcttataaaa

SEQ ID NO: 2242666 - DNA, 25 bp, Homo sapien
caagtctgattctgtagtggtttac

SEQ ID NO: 2242667 - DNA, 25 bp, Homo sapien
gcggcatcacataaacagatgacat

SEQ ID NO: 2242668 - DNA, 25 bp, Homo sapien
tggcggcatcacataaacagatgac

SEQ ID NO: 2242669 - DNA, 25 bp, Homo sapien
ctgctggcggcatcacataaacaga

SEQ ID NO: 2242670 - DNA, 25 bp, Homo sapien
gctggcggcatcacataaacagatg

SEQ ID NO: 2242671 - DNA, 25 bp, Homo sapien
ccatgagggattagaggaagcctga

SEQ ID NO: 2242672 - DNA, 25 bp, Homo sapien
tctaggaatgaaccttcttagccat

SEQ ID NO: 2242673 - DNA, 25 bp, Homo sapien
ctgcaaactgatgctagacaaatta

SEQ ID NO: 2242674 - DNA, 25 bp, Homo sapien
ttcttagccatgagggattagagga

SEQ ID NO: 2242675 - DNA, 25 bp, Homo sapien
catttgcagaacctgacattctctg

SEQ ID NO: 2242676 - DNA, 25 bp, Homo sapien
tatgaggatacctctactggaaagt

SEQ ID NO: 2242677 - DNA, 25 bp, Homo sapien
gattggttgagctgtcatttgcaga

SEQ ID NO: 2242678 - DNA, 25 bp, Homo sapien
tatagaacaatatgactgtggccct

SEQ ID NO: 2242679 - DNA, 25 bp, Homo sapien
tattaccagcgttaaaatcattacc

SEQ ID NO: 2242680 - DNA, 25 bp, Homo sapien
tcagtaagatattaccagcgttaaa

SEQ ID NO: 2242681 - DNA, 25 bp, Homo sapien
gcagatggccggctgataattgttt

SEQ ID NO: 2242682 - DNA, 25 bp, Homo sapien
ataattgtttatggggacagatggc

SEQ ID NO: 2242683 - DNA, 25 bp, Homo sapien
tgaaccagggttttgactgatgtgc

SEQ ID NO: 2242684 - DNA, 25 bp, Homo sapien
ataactctgaaccagggttttgact

SEQ ID NO: 2242685 - DNA, 25 bp, Homo sapien
tctgaaccagggttttgactgatgt

SEQ ID NO: 2242686 - DNA, 25 bp, Homo sapien
aactctgaaccagggttttgactga

SEQ ID NO: 2242687 - DNA, 25 bp, Homo sapien
gagaagttccatatcttgtgctgac

SEQ ID NO: 2242688 - DNA, 25 bp, Homo sapien
ttgagcatttggctagggttcgtga

SEQ ID NO: 2242689 - DNA, 25 bp, Homo sapien
cagcacgtgttgagcatttggctag

SEQ ID NO: 2242690 - DNA, 25 bp, Homo sapien
gttcgtgagaggtacaagagaagtt

SEQ ID NO: 2242691 - DNA, 25 bp, Homo sapien
cccaagtggtattacttgagggaga

SEQ ID NO: 2242692 - DNA, 25 bp, Homo sapien
tgttattccacctagatgtatccaa

SEQ ID NO: 2242693 - DNA, 25 bp, Homo sapien
tcatggtcccatgaatcttgaaggg

SEQ ID NO: 2242694 - DNA, 25 bp, Homo sapien
aaactctaagagttcatcatggtcc

SEQ ID NO: 2242695 - DNA, 25 bp, Homo sapien
accaaggactctgacagctgagagt

SEQ ID NO: 2242696 - DNA, 25 bp, Homo sapien
ctgaataaacttggtgactgtaatt

SEQ ID NO: 2242697 - DNA, 25 bp, Homo sapien
tgacagctgagagttctgaataaac

SEQ ID NO: 2242698 - DNA, 25 bp, Homo sapien
aacctgagctaaaaaaacccatcag

SEQ ID NO: 2242699 - DNA, 25 bp, Homo sapien
tagacatcattaggtgccacagctc

SEQ ID NO: 2242700 - DNA, 25 bp, Homo sapien
gacatcattaggtgccacagctctt

SEQ ID NO: 2242701 - DNA, 25 bp, Homo sapien
agacatcattaggtgccacagctct

SEQ ID NO: 2242702 - DNA, 25 bp, Homo sapien
ttagacatcattaggtgccacagct

SEQ ID NO: 2242703 - DNA, 25 bp, Homo sapien
tcaactgtaaatccctcagaagctc

SEQ ID NO: 2242704 - DNA, 25 bp, Homo sapien
ctgcaaattgagtacctcaactgta

SEQ ID NO: 2242705 - DNA, 25 bp, Homo sapien
tgtggttgtatactcattttccttc

SEQ ID NO: 2242706 - DNA, 25 bp, Homo sapien
gacttaccatcaagcatcaaagcag

SEQ ID NO: 2242707 - DNA, 25 bp, Homo sapien
ggagatacccctttgccaaatggca

SEQ ID NO: 2242708 - DNA, 25 bp, Homo sapien
ttgccccttcaaaacaggcactgga

SEQ ID NO: 2242709 - DNA, 25 bp, Homo sapien
ttcaaaacaggcactggatgctgca

SEQ ID NO: 2242710 - DNA, 25 bp, Homo sapien
ggctctaagccagatgttgcccctt

SEQ ID NO: 2242711 - DNA, 25 bp, Homo sapien
gtgtcttactggtattctctttatt

SEQ ID NO: 2242712 - DNA, 25 bp, Homo sapien
gggtgtcttactggtattctcttta

SEQ ID NO: 2242713 - DNA, 25 bp, Homo sapien
ggtgtcttactggtattctctttat

SEQ ID NO: 2242714 - DNA, 25 bp, Homo sapien
gtcttactggtattctctttatttc

SEQ ID NO: 2242715 - DNA, 25 bp, Homo sapien
cctttgtaggttctgaaatctaatt

SEQ ID NO: 2242716 - DNA, 25 bp, Homo sapien
ttcttcctttgtaggttctgaaatc

SEQ ID NO: 2242717 - DNA, 25 bp, Homo sapien
tgtcatttaccagggtgtttcttcc

SEQ ID NO: 2242718 - DNA, 25 bp, Homo sapien
cagcaggcttttgtcatttaccagg

SEQ ID NO: 2242719 - DNA, 25 bp, Homo sapien
tatgtatctcctccaaagtaggggc

SEQ ID NO: 2242720 - DNA, 25 bp, Homo sapien
ttatgtatctcctccaaagtagggg

SEQ ID NO: 2242721 - DNA, 25 bp, Homo sapien
atgtatctcctccaaagtaggggca

SEQ ID NO: 2242722 - DNA, 25 bp, Homo sapien
tcagtgaggcactagcagcaacgtg

SEQ ID NO: 2242723 - DNA, 25 bp, Homo sapien
gaacacgcagagcttaccagaagtc

SEQ ID NO: 2242724 - DNA, 25 bp, Homo sapien
gaaattgcgtttcactagcagggtc

SEQ ID NO: 2242725 - DNA, 25 bp, Homo sapien
tagcagggtcattcatcagtgaggc

SEQ ID NO: 2242726 - DNA, 25 bp, Homo sapien
acacactcaggacgcacgggtgagt

SEQ ID NO: 2242727 - DNA, 25 bp, Homo sapien
gcacacactcaggacgcacgggtga

SEQ ID NO: 2242728 - DNA, 25 bp, Homo sapien
acgggtgagtggcggctccctgtcc

SEQ ID NO: 2242729 - DNA, 25 bp, Homo sapien
aggggcacacactcaggacgcacgg

SEQ ID NO: 2242730 - DNA, 25 bp, Homo sapien
aattaggcttcagctatttatcttt

SEQ ID NO: 2242731 - DNA, 25 bp, Homo sapien
ccagtgttatctattagaatatttc

SEQ ID NO: 2242732 - DNA, 25 bp, Homo sapien
gtataatatgagagatgaagatcca

SEQ ID NO: 2242733 - DNA, 25 bp, Homo sapien
tttttgtataatatgagagatgaag

SEQ ID NO: 2242734 - DNA, 25 bp, Homo sapien
gaatgtttgcctgtcttgctaggct

SEQ ID NO: 2242735 - DNA, 25 bp, Homo sapien
tgaatgtttgcctgtcttgctaggc

SEQ ID NO: 2242736 - DNA, 25 bp, Homo sapien
agctgacttgtccaggtagttccca

SEQ ID NO: 2242737 - DNA, 25 bp, Homo sapien
actgtgctgtatgggaaaatggtac

SEQ ID NO: 2242738 - DNA, 25 bp, Homo sapien
acatctgggaaggataagatattcc

SEQ ID NO: 2242739 - DNA, 25 bp, Homo sapien
taactcttacatccttgaaacctgg

SEQ ID NO: 2242740 - DNA, 25 bp, Homo sapien
tgtttgtgtcagattgtttaccctg

SEQ ID NO: 2242741 - DNA, 25 bp, Homo sapien
gtttgtgtcagattgtttaccctgc

SEQ ID NO: 2242742 - DNA, 25 bp, Homo sapien
atttgtttgtgtcagattgtttacc

SEQ ID NO: 2242743 - DNA, 25 bp, Homo sapien
ttgtgtcagattgtttaccctgctc

SEQ ID NO: 2242744 - DNA, 25 bp, Homo sapien
ttactgttcgagttttgtgtattct

SEQ ID NO: 2242745 - DNA, 25 bp, Homo sapien
ttcctgctagattcacacatataca

SEQ ID NO: 2242746 - DNA, 25 bp, Homo sapien
tgacataatctgctgatatacacag

SEQ ID NO: 2242747 - DNA, 25 bp, Homo sapien
tacacacgctaaagtgaagcctgtc

SEQ ID NO: 2242748 - DNA, 25 bp, Homo sapien
ctggttttatgacaccgtggcagga

SEQ ID NO: 2242749 - DNA, 25 bp, Homo sapien
catctagcatatggcaggtcctgtc

SEQ ID NO: 2242750 - DNA, 25 bp, Homo sapien
ttagtgggccccaggtatgtagagc

SEQ ID NO: 2242751 - DNA, 25 bp, Homo sapien
ggaaccagttatgtgccagatcaaa

SEQ ID NO: 2242752 - DNA, 25 bp, Homo sapien
cattctttcctttggcgactgttcg

SEQ ID NO: 2242753 - DNA, 25 bp, Homo sapien
ggagtatcatggatgtcgctggcat

SEQ ID NO: 2242754 - DNA, 25 bp, Homo sapien
taataccagcaaagttatcaggcat

SEQ ID NO: 2242755 - DNA, 25 bp, Homo sapien
ggcgactgttcgtactcttggagta

SEQ ID NO: 2242756 - DNA, 25 bp, Homo sapien
tgccccagaaatcagctcctggcct

SEQ ID NO: 2242757 - DNA, 25 bp, Homo sapien
ccccagaaatcagctcctggcctgt

SEQ ID NO: 2242758 - DNA, 25 bp, Homo sapien
ccagaaatcagctcctggcctgttg

SEQ ID NO: 2242759 - DNA, 25 bp, Homo sapien
agaaatcagctcctggcctgttgct

SEQ ID NO: 2242760 - DNA, 25 bp, Homo sapien
aacgttgtgtttctactgtagccca

SEQ ID NO: 2242761 - DNA, 25 bp, Homo sapien
gatagtcagctcaggtcatatggtg

SEQ ID NO: 2242762 - DNA, 25 bp, Homo sapien
ggcaaggctttgctccaaaactgga

SEQ ID NO: 2242763 - DNA, 25 bp, Homo sapien
gtagcccagcaacaagccaagagct

SEQ ID NO: 2242764 - DNA, 25 bp, Homo sapien
tttcctctttgcaagagcgagcaaa

SEQ ID NO: 2242765 - DNA, 25 bp, Homo sapien
aatatagacaattgcctgagttttc

SEQ ID NO: 2242766 - DNA, 25 bp, Homo sapien
ctctttgcaagagcgagcaaagcaa

SEQ ID NO: 2242767 - DNA, 25 bp, Homo sapien
atatagacaattgcctgagttttcc

SEQ ID NO: 2242768 - DNA, 25 bp, Homo sapien
aaggcaatatgctcgtacttcatac

SEQ ID NO: 2242769 - DNA, 25 bp, Homo sapien
cataaggcaatatgctcgtacttca

SEQ ID NO: 2242770 - DNA, 25 bp, Homo sapien
ggcaatatgctcgtacttcatacaa

SEQ ID NO: 2242771 - DNA, 25 bp, Homo sapien
aatatgctcgtacttcatacaaaag

SEQ ID NO: 2242772 - DNA, 25 bp, Homo sapien
caccaactgttctatagcttctgaa

SEQ ID NO: 2242773 - DNA, 25 bp, Homo sapien
agaagccaaagttaggcaaatatgc

SEQ ID NO: 2242774 - DNA, 25 bp, Homo sapien
actgttctatagcttctgaaataga

SEQ ID NO: 2242775 - DNA, 25 bp, Homo sapien
gaagccaaagttaggcaaatatgca

SEQ ID NO: 2242776 - DNA, 25 bp, Homo sapien
ttcagtgccagatgttgtagaattt

SEQ ID NO: 2242777 - DNA, 25 bp, Homo sapien
tcagtgccagatgttgtagaatttc

SEQ ID NO: 2242778 - DNA, 25 bp, Homo sapien
gataattgtagaaatgtagcgccag

SEQ ID NO: 2242779 - DNA, 25 bp, Homo sapien
ccaagcagcttttgtgggttgccat

SEQ ID NO: 2242780 - DNA, 25 bp, Homo sapien
gggttgccatgggttcagtctctaa

SEQ ID NO: 2242781 - DNA, 25 bp, Homo sapien
aatgtagcgccagaaagattttcca

SEQ ID NO: 2242782 - DNA, 25 bp, Homo sapien
ggatatggggaaacccttcgaggca

SEQ ID NO: 2242783 - DNA, 25 bp, Homo sapien
caggatccaaggtgagtacgaagga

SEQ ID NO: 2242784 - DNA, 25 bp, Homo sapien
gaaacccttcgaggcatctggactt

SEQ ID NO: 2242785 - DNA, 25 bp, Homo sapien
tcagcagtgagtgcaaaaggcgttt

SEQ ID NO: 2242786 - DNA, 25 bp, Homo sapien
caaaaagcaggtgtagaaggacttc

SEQ ID NO: 2242787 - DNA, 25 bp, Homo sapien
aaagcaggtgtagaaggacttcagc

SEQ ID NO: 2242788 - DNA, 25 bp, Homo sapien
ggcaaaaagcaggtgtagaaggact

SEQ ID NO: 2242789 - DNA, 25 bp, Homo sapien
aaaagcaggtgtagaaggacttcag

SEQ ID NO: 2242790 - DNA, 25 bp, Homo sapien
caccagttgttggcacaccacaaag

SEQ ID NO: 2242791 - DNA, 25 bp, Homo sapien
agatgagatgatcaaagtcatcggg

SEQ ID NO: 2242792 - DNA, 25 bp, Homo sapien
gatcaaagtcatcggggtgaccaag

SEQ ID NO: 2242793 - DNA, 25 bp, Homo sapien
ttgggcaagatgagatgatcaaagt

SEQ ID NO: 2242794 - DNA, 25 bp, Homo sapien
tatcatggacggcaaactgatcaag

SEQ ID NO: 2242795 - DNA, 25 bp, Homo sapien
taccctatcatggacggcaaactga

SEQ ID NO: 2242796 - DNA, 25 bp, Homo sapien
ccagggctaccctatcatggacggc

SEQ ID NO: 2242797 - DNA, 25 bp, Homo sapien
gatcggccagggctaccctatcatg

SEQ ID NO: 2242798 - DNA, 25 bp, Homo sapien
tcaactccaccaacgttcagggtca

SEQ ID NO: 2242799 - DNA, 25 bp, Homo sapien
gttgacaatagctctgttacctgat

SEQ ID NO: 2242800 - DNA, 25 bp, Homo sapien
ttcagggtcaatgccactatgcagc

SEQ ID NO: 2242801 - DNA, 25 bp, Homo sapien
catctctgttgacaatagctctgtt

SEQ ID NO: 2242802 - DNA, 25 bp, Homo sapien
cacttctttcccactcctttcctca

SEQ ID NO: 2242803 - DNA, 25 bp, Homo sapien
cctcatcccacttctttcccactcc

SEQ ID NO: 2242804 - DNA, 25 bp, Homo sapien
acttctttcccactcctttcctcat

SEQ ID NO: 2242805 - DNA, 25 bp, Homo sapien
catcccacttctttcccactccttt

SEQ ID NO: 2242806 - DNA, 25 bp, Homo sapien
tgctgccaatatgcgctataaattc

SEQ ID NO: 2242807 - DNA, 25 bp, Homo sapien
gcatcttttaacacctagctcaact

SEQ ID NO: 2242808 - DNA, 25 bp, Homo sapien
taattatgcctcttatgctggttcc

SEQ ID NO: 2242809 - DNA, 25 bp, Homo sapien
tctcctatgagttgatataacagga

SEQ ID NO: 2242810 - DNA, 25 bp, Homo sapien
actacagagtgggtactgctgagta

SEQ ID NO: 2242811 - DNA, 25 bp, Homo sapien
ctacagagtgggtactgctgagtac

SEQ ID NO: 2242812 - DNA, 25 bp, Homo sapien
aaacactacagagtgggtactgctg

SEQ ID NO: 2242813 - DNA, 25 bp, Homo sapien
acactacagagtgggtactgctgag

SEQ ID NO: 2242814 - DNA, 25 bp, Homo sapien
tgagaccaagtaggaatccagtgat

SEQ ID NO: 2242815 - DNA, 25 bp, Homo sapien
ctgagtcagcggagacaactaaaac

SEQ ID NO: 2242816 - DNA, 25 bp, Homo sapien
gcattgagaccaagtaggaatccag

SEQ ID NO: 2242817 - DNA, 25 bp, Homo sapien
gagtcagcggagacaactaaaaccc

SEQ ID NO: 2242818 - DNA, 25 bp, Homo sapien
cagtttatagcttttatgctgacgt

SEQ ID NO: 2242819 - DNA, 25 bp, Homo sapien
tacttccatgacagcaaaagctagc

SEQ ID NO: 2242820 - DNA, 25 bp, Homo sapien
gacagcaaaagctagcagtttatag

SEQ ID NO: 2242821 - DNA, 25 bp, Homo sapien
tgctgacgttccacatctaccatct

SEQ ID NO: 2242822 - DNA, 25 bp, Homo sapien
catgggtgagtccattggtccttaa

SEQ ID NO: 2242823 - DNA, 25 bp, Homo sapien
tgctgagggcatagacacagagact

SEQ ID NO: 2242824 - DNA, 25 bp, Homo sapien
caagtaatggtcaaggccacgccat

SEQ ID NO: 2242825 - DNA, 25 bp, Homo sapien
taaaggagaccttgtccctatgcag

SEQ ID NO: 2242826 - DNA, 25 bp, Homo sapien
tagttttccgctagcaacttgaatt

SEQ ID NO: 2242827 - DNA, 25 bp, Homo sapien
agttggagccctagttttccgctag

SEQ ID NO: 2242828 - DNA, 25 bp, Homo sapien
tagcaagattcaggttcagttggag

SEQ ID NO: 2242829 - DNA, 25 bp, Homo sapien
caagattcaggttcagttggagccc

SEQ ID NO: 2242830 - DNA, 25 bp, Homo sapien
cttttctttggttgacagctgggcc

SEQ ID NO: 2242831 - DNA, 25 bp, Homo sapien
gagtactcaggcctaaatgcattca

SEQ ID NO: 2242832 - DNA, 25 bp, Homo sapien
tccattcccagcttgcctttgtctt

SEQ ID NO: 2242833 - DNA, 25 bp, Homo sapien
catgagctgcttattccctggtggg

SEQ ID NO: 2242834 - DNA, 25 bp, Homo sapien
gaaagggaggacttggcgaagagga

SEQ ID NO: 2242835 - DNA, 25 bp, Homo sapien
aagggaggacttggcgaagaggaca

SEQ ID NO: 2242836 - DNA, 25 bp, Homo sapien
aggacttggcgaagaggacagccag

SEQ ID NO: 2242837 - DNA, 25 bp, Homo sapien
gggaggacttggcgaagaggacagc

SEQ ID NO: 2242838 - DNA, 25 bp, Homo sapien
caaccatcatcaggcaacatttctt

SEQ ID NO: 2242839 - DNA, 25 bp, Homo sapien
catcatcaggcaacatttcttcctc

SEQ ID NO: 2242840 - DNA, 25 bp, Homo sapien
tcaaccatcatcaggcaacatttct

SEQ ID NO: 2242841 - DNA, 25 bp, Homo sapien
accatcatcaggcaacatttcttcc

SEQ ID NO: 2242842 - DNA, 25 bp, Homo sapien
tacctgtgagtctagcttaatatcg

SEQ ID NO: 2242843 - DNA, 25 bp, Homo sapien
gaaattacccaagcaccatcttgcc

SEQ ID NO: 2242844 - DNA, 25 bp, Homo sapien
cggaagatgatgaatcagtcctgat

SEQ ID NO: 2242845 - DNA, 25 bp, Homo sapien
tgccatagctcaaaattgtaagatg

SEQ ID NO: 2242846 - DNA, 25 bp, Homo sapien
tggtcatcgaactcaatggtgggaa

SEQ ID NO: 2242847 - DNA, 25 bp, Homo sapien
tgacagtcagtaagtggtcatcgaa

SEQ ID NO: 2242848 - DNA, 25 bp, Homo sapien
tcagtaagtggtcatcgaactcaat

SEQ ID NO: 2242849 - DNA, 25 bp, Homo sapien
caatggtgggaatgtcaggttctag

SEQ ID NO: 2242850 - DNA, 25 bp, Homo sapien
ctcgaacaacctgttcagcccgttt

SEQ ID NO: 2242851 - DNA, 25 bp, Homo sapien
ttttctagaatataggctccaagga

SEQ ID NO: 2242852 - DNA, 25 bp, Homo sapien
tccaaggaaggtaagagcttcggcc

SEQ ID NO: 2242853 - DNA, 25 bp, Homo sapien
tcggcccattcgacatttgtatagt

SEQ ID NO: 2242854 - DNA, 25 bp, Homo sapien
tatgttattcgacagctgatctctc

SEQ ID NO: 2242855 - DNA, 25 bp, Homo sapien
ccatggtactctaatattgtgagca

SEQ ID NO: 2242856 - DNA, 25 bp, Homo sapien
taggagcatgagtatgttattcgac

SEQ ID NO: 2242857 - DNA, 25 bp, Homo sapien
gctgatctctcggttcccatggtac

SEQ ID NO: 2242858 - DNA, 25 bp, Homo sapien
ctactgaaacagagctatttctttt

SEQ ID NO: 2242859 - DNA, 25 bp, Homo sapien
tcctgaatgttactgagagtctctg

SEQ ID NO: 2242860 - DNA, 25 bp, Homo sapien
aataagcagctctatcaatcaagac

SEQ ID NO: 2242861 - DNA, 25 bp, Homo sapien
tcttgctgctcatcatgggtacgta

SEQ ID NO: 2242862 - DNA, 25 bp, Homo sapien
tatgttatatggagggtagatgata

SEQ ID NO: 2242863 - DNA, 25 bp, Homo sapien
tgttatatggagggtagatgataac

SEQ ID NO: 2242864 - DNA, 25 bp, Homo sapien
atgttatatggagggtagatgataa

SEQ ID NO: 2242865 - DNA, 25 bp, Homo sapien
gcatactgaagggacttttgccata

SEQ ID NO: 2242866 - DNA, 25 bp, Homo sapien
gcgccagtaccaactgcatttgatg

SEQ ID NO: 2242867 - DNA, 25 bp, Homo sapien
tgattagagcgccagtaccaactgc

SEQ ID NO: 2242868 - DNA, 25 bp, Homo sapien
ttgatagtgattagagcgccagtac

SEQ ID NO: 2242869 - DNA, 25 bp, Homo sapien
ggcaccataatctcctgaaagggat

SEQ ID NO: 2242870 - DNA, 25 bp, Homo sapien
ccttaagtttctcattagcagtacc

SEQ ID NO: 2242871 - DNA, 25 bp, Homo sapien
cactaataacaggtctgtactaaca

SEQ ID NO: 2242872 - DNA, 25 bp, Homo sapien
cattgttgtatagaataacgttcag

SEQ ID NO: 2242873 - DNA, 25 bp, Homo sapien
aaaatgtgttcagggcatgttgtga

SEQ ID NO: 2242874 - DNA, 25 bp, Homo sapien
atgtgttcagggcatgttgtgaccc

SEQ ID NO: 2242875 - DNA, 25 bp, Homo sapien
tgttcagggcatgttgtgaccccag

SEQ ID NO: 2242876 - DNA, 25 bp, Homo sapien
agggcatgttgtgaccccagaagtc

SEQ ID NO: 2242877 - DNA, 25 bp, Homo sapien
catccagtgcgtgtaattcctgatc

SEQ ID NO: 2242878 - DNA, 25 bp, Homo sapien
tgcgtgtaattcctgatcattcttg

SEQ ID NO: 2242879 - DNA, 25 bp, Homo sapien
cttatactcatccagtgcgtgtaat

SEQ ID NO: 2242880 - DNA, 25 bp, Homo sapien
tactcatccagtgcgtgtaattcct

SEQ ID NO: 2242881 - DNA, 25 bp, Homo sapien
ttctgattccattaataagaccatt

SEQ ID NO: 2242882 - DNA, 25 bp, Homo sapien
ctgattccattaataagaccattca

SEQ ID NO: 2242883 - DNA, 25 bp, Homo sapien
tctgattccattaataagaccattc

SEQ ID NO: 2242884 - DNA, 25 bp, Homo sapien
tcagggtgctaggaagacgattcct

SEQ ID NO: 2242885 - DNA, 25 bp, Homo sapien
tcttgatcctgtctacgtctcttga

SEQ ID NO: 2242886 - DNA, 25 bp, Homo sapien
cctcctctacaaaggccaatgaact

SEQ ID NO: 2242887 - DNA, 25 bp, Homo sapien
tggtttcatggcatcccatccacca

SEQ ID NO: 2242888 - DNA, 25 bp, Homo sapien
aaagagaagctcattagggtgaacc

SEQ ID NO: 2242889 - DNA, 25 bp, Homo sapien
ctgtgtttctatgccccttgaagca

SEQ ID NO: 2242890 - DNA, 25 bp, Homo sapien
gctcattagggtgaacctgccattc

SEQ ID NO: 2242891 - DNA, 25 bp, Homo sapien
taattcattggagggctggtccctg

SEQ ID NO: 2242892 - DNA, 25 bp, Homo sapien
caaatgatcagtctattaggaacca

SEQ ID NO: 2242893 - DNA, 25 bp, Homo sapien
gagtcccacgggtaggtaatggcaa

SEQ ID NO: 2242894 - DNA, 25 bp, Homo sapien
aggagagacactgaaggtgacatct

SEQ ID NO: 2242895 - DNA, 25 bp, Homo sapien
gacatcttgggaccaaatgatcagt

SEQ ID NO: 2242896 - DNA, 25 bp, Homo sapien
cactcacacacaattcttctctcag

SEQ ID NO: 2242897 - DNA, 25 bp, Homo sapien
tcactcacacacaattcttctctca

SEQ ID NO: 2242898 - DNA, 25 bp, Homo sapien
ctcactcacacacaattcttctctc

SEQ ID NO: 2242899 - DNA, 25 bp, Homo sapien
actcacacacaattcttctctcagt

SEQ ID NO: 2242900 - DNA, 25 bp, Homo sapien
taaatttcttgccacaggtcattgg

SEQ ID NO: 2242901 - DNA, 25 bp, Homo sapien
aaatttcttgccacaggtcattgga

SEQ ID NO: 2242902 - DNA, 25 bp, Homo sapien
acataaatttcttgccacaggtcat

SEQ ID NO: 2242903 - DNA, 25 bp, Homo sapien
aatacataaatttcttgccacaggt

SEQ ID NO: 2242904 - DNA, 25 bp, Homo sapien
tatttgtctccccgatccttcctag

SEQ ID NO: 2242905 - DNA, 25 bp, Homo sapien
ttatagctgcctatgttctgccagt

SEQ ID NO: 2242906 - DNA, 25 bp, Homo sapien
ccgatccttcctagcaactgctcct

SEQ ID NO: 2242907 - DNA, 25 bp, Homo sapien
tgctcctccaacgattaccctcttt

SEQ ID NO: 2242908 - DNA, 25 bp, Homo sapien
atggggaggaggaaagaagttactg

SEQ ID NO: 2242909 - DNA, 25 bp, Homo sapien
tgccaatggggaggaggaaagaagt

SEQ ID NO: 2242910 - DNA, 25 bp, Homo sapien
gaaagaagttactggaaggttcagc

SEQ ID NO: 2242911 - DNA, 25 bp, Homo sapien
ctgccaatggggaggaggaaagaag

SEQ ID NO: 2242912 - DNA, 25 bp, Homo sapien
tggccttcttgggacttaaagacat

SEQ ID NO: 2242913 - DNA, 25 bp, Homo sapien
ttggccttcttgggacttaaagaca

SEQ ID NO: 2242914 - DNA, 25 bp, Homo sapien
cagtccagtcctcacatattgtttg

SEQ ID NO: 2242915 - DNA, 25 bp, Homo sapien
ccagtcctcacatattgtttgtcct

SEQ ID NO: 2242916 - DNA, 25 bp, Homo sapien
catgaaataattagacgacttggcc

SEQ ID NO: 2242917 - DNA, 25 bp, Homo sapien
catctgcaactccttggtgatacca

SEQ ID NO: 2242918 - DNA, 25 bp, Homo sapien
tctttggtggttactcaattgtccc

SEQ ID NO: 2242919 - DNA, 25 bp, Homo sapien
cagctagaatctgatagagtcagag

SEQ ID NO: 2242920 - DNA, 25 bp, Homo sapien
gcatccatcgttctctcatttatac

SEQ ID NO: 2242921 - DNA, 25 bp, Homo sapien
ggtccaggtctcagaaaaatatact

SEQ ID NO: 2242922 - DNA, 25 bp, Homo sapien
gaagctcagatctagactgactgtc

SEQ ID NO: 2242923 - DNA, 25 bp, Homo sapien
ccctttcacgacttgaaggaagctc

SEQ ID NO: 2242924 - DNA, 25 bp, Homo sapien
acaaattcaccaaaactcatggaca

SEQ ID NO: 2242925 - DNA, 25 bp, Homo sapien
cactgggtgacattgttttgattgg

SEQ ID NO: 2242926 - DNA, 25 bp, Homo sapien
ggcacaggatgcaataacgtcagag

SEQ ID NO: 2242927 - DNA, 25 bp, Homo sapien
cagcagttgaggcagttggagctcc

SEQ ID NO: 2242928 - DNA, 25 bp, Homo sapien
caagtgtagccaatccactgggtga

SEQ ID NO: 2242929 - DNA, 25 bp, Homo sapien
attcttggagctcattgtaataact

SEQ ID NO: 2242930 - DNA, 25 bp, Homo sapien
aataactacccctatgaattctgaa

SEQ ID NO: 2242931 - DNA, 25 bp, Homo sapien
cttggagctcattgtaataactacc

SEQ ID NO: 2242932 - DNA, 25 bp, Homo sapien
actacccctatgaattctgaatctt

SEQ ID NO: 2242933 - DNA, 25 bp, Homo sapien
ggtcttcactgccagatgcctgtac

SEQ ID NO: 2242934 - DNA, 25 bp, Homo sapien
ccagatgcctgtacagttctgccac

SEQ ID NO: 2242935 - DNA, 25 bp, Homo sapien
tcactgccagatgcctgtacagttc

SEQ ID NO: 2242936 - DNA, 25 bp, Homo sapien
ttggtcttcactgccagatgcctgt

SEQ ID NO: 2242937 - DNA, 25 bp, Homo sapien
taaagcaagttttccatcagcggtt

SEQ ID NO: 2242938 - DNA, 25 bp, Homo sapien
tgttagcctaatggtgccctccgag

SEQ ID NO: 2242939 - DNA, 25 bp, Homo sapien
gccttgatagctgcaactgtgaact

SEQ ID NO: 2242940 - DNA, 25 bp, Homo sapien
tcattgcgttggtacaaaccttccg

SEQ ID NO: 2242941 - DNA, 25 bp, Homo sapien
ggtctgatagaggctgcaagataat

SEQ ID NO: 2242942 - DNA, 25 bp, Homo sapien
gagagtcttattgaaattatccttg

SEQ ID NO: 2242943 - DNA, 25 bp, Homo sapien
tcagtgtaacttctgaaacgggtct

SEQ ID NO: 2242944 - DNA, 25 bp, Homo sapien
gcttctatcacagacttcatttctt

SEQ ID NO: 2242945 - DNA, 25 bp, Homo sapien
gaaacatccacagctatcgcccagg

SEQ ID NO: 2242946 - DNA, 25 bp, Homo sapien
gactgaagacaatccttggaaacat

SEQ ID NO: 2242947 - DNA, 25 bp, Homo sapien
ttggaaacatccacagctatcgccc

SEQ ID NO: 2242948 - DNA, 25 bp, Homo sapien
tgaagacaatccttggaaacatcca

SEQ ID NO: 2242949 - DNA, 25 bp, Homo sapien
gaaggccaccgtcactgaaatccgg

SEQ ID NO: 2242950 - DNA, 25 bp, Homo sapien
tgaaatccggtctgtactgtaggac

SEQ ID NO: 2242951 - DNA, 25 bp, Homo sapien
taggacttcataggttctttgctcg

SEQ ID NO: 2242952 - DNA, 25 bp, Homo sapien
cgcagcatgctatggagaaggccac

SEQ ID NO: 2242953 - DNA, 25 bp, Homo sapien
tctctgctgtaaaagcggagcggca

SEQ ID NO: 2242954 - DNA, 25 bp, Homo sapien
gagcggcagagaccgggcatgcgca

SEQ ID NO: 2242955 - DNA, 25 bp, Homo sapien
aagcggagcggcagagaccgggcat

SEQ ID NO: 2242956 - DNA, 25 bp, Homo sapien
tctgctgtaaaagcggagcggcaga

SEQ ID NO: 2242957 - DNA, 25 bp, Homo sapien
tgaaatccttagttgtaccgggtga

SEQ ID NO: 2242958 - DNA, 25 bp, Homo sapien
attcatcaggcccaaagccggttct

SEQ ID NO: 2242959 - DNA, 25 bp, Homo sapien
tgactgttaaagctagtgcctggct

SEQ ID NO: 2242960 - DNA, 25 bp, Homo sapien
tgcctggctctaggaacgagctgaa

SEQ ID NO: 2242961 - DNA, 25 bp, Homo sapien
aacaaatgtgcttgtggattacgca

SEQ ID NO: 2242962 - DNA, 25 bp, Homo sapien
aaattgctgttgtacacctttacag

SEQ ID NO: 2242963 - DNA, 25 bp, Homo sapien
atattccctctccgcactgtcattg

SEQ ID NO: 2242964 - DNA, 25 bp, Homo sapien
cattagcacacagatctcatattcc

SEQ ID NO: 2242965 - DNA, 25 bp, Homo sapien
tggctcactggctgccgttcttgtc

SEQ ID NO: 2242966 - DNA, 25 bp, Homo sapien
gatgctcggcagatggctcactggc

SEQ ID NO: 2242967 - DNA, 25 bp, Homo sapien
cggcttctttcgctagtagagtcgt

SEQ ID NO: 2242968 - DNA, 25 bp, Homo sapien
tagtagagtcgtcagcgagatgctc

SEQ ID NO: 2242969 - DNA, 25 bp, Homo sapien
tgttcctaactcctacactctgttt

SEQ ID NO: 2242970 - DNA, 25 bp, Homo sapien
ttgcttcctaaatcccctaatctga

SEQ ID NO: 2242971 - DNA, 25 bp, Homo sapien
taatctgagatttgtgtgagttgcc

SEQ ID NO: 2242972 - DNA, 25 bp, Homo sapien
tctattctcactaatctaccaacat

SEQ ID NO: 2242973 - DNA, 25 bp, Homo sapien
tagaatccactggacaactgcactt

SEQ ID NO: 2242974 - DNA, 25 bp, Homo sapien
gaccatggacatttctgcagtgcct

SEQ ID NO: 2242975 - DNA, 25 bp, Homo sapien
agcataggtcagctgcaaactcccc

SEQ ID NO: 2242976 - DNA, 25 bp, Homo sapien
ccccggtagtgttcagatcttgcaa

SEQ ID NO: 2242977 - DNA, 25 bp, Homo sapien
gaaatgccagccgaccaggcatttc

SEQ ID NO: 2242978 - DNA, 25 bp, Homo sapien
aatgccagccgaccaggcatttcct

SEQ ID NO: 2242979 - DNA, 25 bp, Homo sapien
acagaaatgccagccgaccaggcat

SEQ ID NO: 2242980 - DNA, 25 bp, Homo sapien
cagaaatgccagccgaccaggcatt

SEQ ID NO: 2242981 - DNA, 25 bp, Homo sapien
tttctcagagcttccccagtatttc

SEQ ID NO: 2242982 - DNA, 25 bp, Homo sapien
ctttctcagagcttccccagtattt

SEQ ID NO: 2242983 - DNA, 25 bp, Homo sapien
tctcagagcttccccagtatttcat

SEQ ID NO: 2242984 - DNA, 25 bp, Homo sapien
ttctcagagcttccccagtatttca

SEQ ID NO: 2242985 - DNA, 25 bp, Homo sapien
ttcccaggagatcaaactcatccat

SEQ ID NO: 2242986 - DNA, 25 bp, Homo sapien
cttcccaggagatcaaactcatcca

SEQ ID NO: 2242987 - DNA, 25 bp, Homo sapien
gcctctgtccaagacctagggaaaa

SEQ ID NO: 2242988 - DNA, 25 bp, Homo sapien
gaaatccccagtctgtgatgctctg

SEQ ID NO: 2242989 - DNA, 25 bp, Homo sapien
gtatccataactgctgattggttca

SEQ ID NO: 2242990 - DNA, 25 bp, Homo sapien
gggcacacatttgtatccataactg

SEQ ID NO: 2242991 - DNA, 25 bp, Homo sapien
tgagtatacagcttctctcaggcaa

SEQ ID NO: 2242992 - DNA, 25 bp, Homo sapien
tataactgagtatacagcttctctc

SEQ ID NO: 2242993 - DNA, 25 bp, Homo sapien
tacagcttctctcaggcaataccat

SEQ ID NO: 2242994 - DNA, 25 bp, Homo sapien
tttataactgagtatacagcttctc

SEQ ID NO: 2242995 - DNA, 25 bp, Homo sapien
gctacactagagtccccaggaatcc

SEQ ID NO: 2242996 - DNA, 25 bp, Homo sapien
cagctggggagctacactagagtcc

SEQ ID NO: 2242997 - DNA, 25 bp, Homo sapien
cattgaagggaacgcagctggggag

SEQ ID NO: 2242998 - DNA, 25 bp, Homo sapien
aacgcagctggggagctacactaga

SEQ ID NO: 2242999 - DNA, 25 bp, Homo sapien
tccagctcagactcagaaaagcagt

SEQ ID NO: 2243000 - DNA, 25 bp, Homo sapien
tttccagctcagactcagaaaagca

SEQ ID NO: 2243001 - DNA, 25 bp, Homo sapien
ttccagctcagactcagaaaagcag

SEQ ID NO: 2243002 - DNA, 25 bp, Homo sapien
tatttaaatgagagagtccatttac

SEQ ID NO: 2243003 - DNA, 25 bp, Homo sapien
tttaaatgagagagtccatttacaa

SEQ ID NO: 2243004 - DNA, 25 bp, Homo sapien
gatgagaggtatgggcctaatttct

SEQ ID NO: 2243005 - DNA, 25 bp, Homo sapien
tcttggccaaaaatcaattggttgt

SEQ ID NO: 2243006 - DNA, 25 bp, Homo sapien
ggttgttatggctttgtagtatact

SEQ ID NO: 2243007 - DNA, 25 bp, Homo sapien
gcctgtggatatccagatttgccaa

SEQ ID NO: 2243008 - DNA, 25 bp, Homo sapien
aattagcttctatcacttcacaagg

SEQ ID NO: 2243009 - DNA, 25 bp, Homo sapien
attagcttctatcacttcacaaggc

SEQ ID NO: 2243010 - DNA, 25 bp, Homo sapien
ttagcttctatcacttcacaaggcc

SEQ ID NO: 2243011 - DNA, 25 bp, Homo sapien
agggctttctggtaacaggtgcact

SEQ ID NO: 2243012 - DNA, 25 bp, Homo sapien
ctttctggtaacaggtgcactccat

SEQ ID NO: 2243013 - DNA, 25 bp, Homo sapien
agtccaagtcccttagggctttctg

SEQ ID NO: 2243014 - DNA, 25 bp, Homo sapien
ggctttctggtaacaggtgcactcc

SEQ ID NO: 2243015 - DNA, 25 bp, Homo sapien
gatgggtcagaatcttcaaatagcc

SEQ ID NO: 2243016 - DNA, 25 bp, Homo sapien
cagtgaagatatagcatgtgtcagc

SEQ ID NO: 2243017 - DNA, 25 bp, Homo sapien
cacttcttctgtgaggaggatctcc

SEQ ID NO: 2243018 - DNA, 25 bp, Homo sapien
tgctacaaccaaggagaatccagtg

SEQ ID NO: 2243019 - DNA, 25 bp, Homo sapien
tgtggctgtgccccagacacactct

SEQ ID NO: 2243020 - DNA, 25 bp, Homo sapien
ctactgtggctgtgccccagacaca

SEQ ID NO: 2243021 - DNA, 25 bp, Homo sapien
tactgtggctgtgccccagacacac

SEQ ID NO: 2243022 - DNA, 25 bp, Homo sapien
ggctgtgccccagacacactcttcc

SEQ ID NO: 2243023 - DNA, 25 bp, Homo sapien
tgccaagaattcgttggctacagac

SEQ ID NO: 2243024 - DNA, 25 bp, Homo sapien
tgggaagccactgtgcgctgtagtc

SEQ ID NO: 2243025 - DNA, 25 bp, Homo sapien
tagtctcggtgccaagaattcgttg

SEQ ID NO: 2243026 - DNA, 25 bp, Homo sapien
cactgtgcgctgtagtctcggtgcc

SEQ ID NO: 2243027 - DNA, 25 bp, Homo sapien
ttccagcccagtagtgttgattttc

SEQ ID NO: 2243028 - DNA, 25 bp, Homo sapien
tttggactgagtactgaaaagttct

SEQ ID NO: 2243029 - DNA, 25 bp, Homo sapien
tatctccagtagtgaagaccctgac

SEQ ID NO: 2243030 - DNA, 25 bp, Homo sapien
tgataggaaaggcaacggacaacag

SEQ ID NO: 2243031 - DNA, 25 bp, Homo sapien
aggccaaactcatttcgtatccagc

SEQ ID NO: 2243032 - DNA, 25 bp, Homo sapien
aatcatgcaggccaaactcatttcg

SEQ ID NO: 2243033 - DNA, 25 bp, Homo sapien
tgcaggccaaactcatttcgtatcc

SEQ ID NO: 2243034 - DNA, 25 bp, Homo sapien
tcatgcaggccaaactcatttcgta

SEQ ID NO: 2243035 - DNA, 25 bp, Homo sapien
tcagtggttgagacaacggaagcag

SEQ ID NO: 2243036 - DNA, 25 bp, Homo sapien
atagtggttctggatggctgctgcc

SEQ ID NO: 2243037 - DNA, 25 bp, Homo sapien
tgctgtgatctgcatcagtggttga

SEQ ID NO: 2243038 - DNA, 25 bp, Homo sapien
tgctgccgccacatcactcatgctg

SEQ ID NO: 2243039 - DNA, 25 bp, Homo sapien
gaattcagccgtgtaagtccctgta

SEQ ID NO: 2243040 - DNA, 25 bp, Homo sapien
tgcaatgcacaataaccacaccagg

SEQ ID NO: 2243041 - DNA, 25 bp, Homo sapien
gagaaaaatcactaggacaacgttg

SEQ ID NO: 2243042 - DNA, 25 bp, Homo sapien
gggaatgtctactacaagaacaagc

SEQ ID NO: 2243043 - DNA, 25 bp, Homo sapien
ggatcccctggcttatgaaatctgg

SEQ ID NO: 2243044 - DNA, 25 bp, Homo sapien
gcagagtcggttgctctaagccaat

SEQ ID NO: 2243045 - DNA, 25 bp, Homo sapien
tcctagtcagcaggttcagtcctta

SEQ ID NO: 2243046 - DNA, 25 bp, Homo sapien
ctcagaaatcaaaaccaggcgtatt

SEQ ID NO: 2243047 - DNA, 25 bp, Homo sapien
tttccaccatatgggtgatccctcc

SEQ ID NO: 2243048 - DNA, 25 bp, Homo sapien
tacaattcaacccagaaatagggca

SEQ ID NO: 2243049 - DNA, 25 bp, Homo sapien
tttatgagctctatgttttccacca

SEQ ID NO: 2243050 - DNA, 25 bp, Homo sapien
tttacccttacaatgtgcaatgcac

SEQ ID NO: 2243051 - DNA, 25 bp, Homo sapien
tcatgtataacctgtgatatgcctg

SEQ ID NO: 2243052 - DNA, 25 bp, Homo sapien
tgcatatacctgtgtgcgtaggctg

SEQ ID NO: 2243053 - DNA, 25 bp, Homo sapien
atacctgtgtgcgtaggctgctgag

SEQ ID NO: 2243054 - DNA, 25 bp, Homo sapien
gttgcttactttgccgttgcttggt

SEQ ID NO: 2243055 - DNA, 25 bp, Homo sapien
ggatgccagatttcttttccagata

SEQ ID NO: 2243056 - DNA, 25 bp, Homo sapien
cccaatgccggatgccagatttctt

SEQ ID NO: 2243057 - DNA, 25 bp, Homo sapien
atttcttttccagatacttggccat

SEQ ID NO: 2243058 - DNA, 25 bp, Homo sapien
tgccggatgccagatttcttttcca

SEQ ID NO: 2243059 - DNA, 25 bp, Homo sapien
tacagcgttacccaacagtggcaga

SEQ ID NO: 2243060 - DNA, 25 bp, Homo sapien
catatggccatatcagaaggacagc

SEQ ID NO: 2243061 - DNA, 25 bp, Homo sapien
cattttgctggtttaggccctgcca

SEQ ID NO: 2243062 - DNA, 25 bp, Homo sapien
tgaaacaatctggtttgccctctgg

SEQ ID NO: 2243063 - DNA, 25 bp, Homo sapien
tgagaggaaatcaccgaaaacgtgg

SEQ ID NO: 2243064 - DNA, 25 bp, Homo sapien
taaatatccccttgcctttgcagat

SEQ ID NO: 2243065 - DNA, 25 bp, Homo sapien
tcccactggaggcatgtgatgagag

SEQ ID NO: 2243066 - DNA, 25 bp, Homo sapien
aacgtggctgcttcaaggatcctga

SEQ ID NO: 2243067 - DNA, 25 bp, Homo sapien
tgtcagatacggtgtggagccctac

SEQ ID NO: 2243068 - DNA, 25 bp, Homo sapien
cagatacggtgtggagccctacaat

SEQ ID NO: 2243069 - DNA, 25 bp, Homo sapien
gcccaaagtgtcagatacggtgtgg

SEQ ID NO: 2243070 - DNA, 25 bp, Homo sapien
aagtgtcagatacggtgtggagccc

SEQ ID NO: 2243071 - DNA, 25 bp, Homo sapien
catacttctgttgagatgtttctaa

SEQ ID NO: 2243072 - DNA, 25 bp, Homo sapien
taaaatcaagcccactgattcttct

SEQ ID NO: 2243073 - DNA, 25 bp, Homo sapien
tctgctaaatctgggcccactcaaa

SEQ ID NO: 2243074 - DNA, 25 bp, Homo sapien
gtgtgtgtaaaatcaagcccactga

SEQ ID NO: 2243075 - DNA, 25 bp, Homo sapien
agatgcttgaaggcggcatactcct

SEQ ID NO: 2243076 - DNA, 25 bp, Homo sapien
gaaggcggcatactccttaagagtc

SEQ ID NO: 2243077 - DNA, 25 bp, Homo sapien
ttgaaggcggcatactccttaagag

SEQ ID NO: 2243078 - DNA, 25 bp, Homo sapien
gcttgaaggcggcatactccttaag

SEQ ID NO: 2243079 - DNA, 25 bp, Homo sapien
ttcctttaatcactacttccaatat

SEQ ID NO: 2243080 - DNA, 25 bp, Homo sapien
cttctctttgtggcctgccagtttc

SEQ ID NO: 2243081 - DNA, 25 bp, Homo sapien
tctttgtggcctgccagtttctcca

SEQ ID NO: 2243082 - DNA, 25 bp, Homo sapien
tctctttgtggcctgccagtttctc

SEQ ID NO: 2243083 - DNA, 25 bp, Homo sapien
ctttgtggcctgccagtttctccat

SEQ ID NO: 2243084 - DNA, 25 bp, Homo sapien
cacttgtacatgacattttggggca

SEQ ID NO: 2243085 - DNA, 25 bp, Homo sapien
ggcccacttgtacatgacattttgg

SEQ ID NO: 2243086 - DNA, 25 bp, Homo sapien
gcccacttgtacatgacattttggg

SEQ ID NO: 2243087 - DNA, 25 bp, Homo sapien
ccacttgtacatgacattttggggc

SEQ ID NO: 2243088 - DNA, 25 bp, Homo sapien
gttcagcaatacaaagctcctacag

SEQ ID NO: 2243089 - DNA, 25 bp, Homo sapien
caagggacaagtgatcgctggtacc

SEQ ID NO: 2243090 - DNA, 25 bp, Homo sapien
cgccgccaagatttgtctaacataa

SEQ ID NO: 2243091 - DNA, 25 bp, Homo sapien
aaggttacactggtagaattcggca

SEQ ID NO: 2243092 - DNA, 25 bp, Homo sapien
gccgaacagttccagtccgatctca

SEQ ID NO: 2243093 - DNA, 25 bp, Homo sapien
taaatttctggtcgcagccgaacag

SEQ ID NO: 2243094 - DNA, 25 bp, Homo sapien
cacaggtaaccttatgcagcacatt

SEQ ID NO: 2243095 - DNA, 25 bp, Homo sapien
tttccacatggagcaataaagcagg

SEQ ID NO: 2243096 - DNA, 25 bp, Homo sapien
tccatcggtaacaaagacttgagtc

SEQ ID NO: 2243097 - DNA, 25 bp, Homo sapien
aattgaacattgtgtgcgtgtggga

SEQ ID NO: 2243098 - DNA, 25 bp, Homo sapien
aaaacattccacaacggcaagcaat

SEQ ID NO: 2243099 - DNA, 25 bp, Homo sapien
caagaagttaatgagttccatcggt

SEQ ID NO: 2243100 - DNA, 25 bp, Homo sapien
acttatattaagatgcagtgtctgc

SEQ ID NO: 2243101 - DNA, 25 bp, Homo sapien
catatttcttaaaaccagggctaga

SEQ ID NO: 2243102 - DNA, 25 bp, Homo sapien
tagaagggtccttagaaaataatca

SEQ ID NO: 2243103 - DNA, 25 bp, Homo sapien
tcctttcctttatgtattgacattt

SEQ ID NO: 2243104 - DNA, 25 bp, Homo sapien
gaaatgctgacaaataatttacata

SEQ ID NO: 2243105 - DNA, 25 bp, Homo sapien
aaatgctgacaaataatttacatac

SEQ ID NO: 2243106 - DNA, 25 bp, Homo sapien
atgaaatgctgacaaataatttaca

SEQ ID NO: 2243107 - DNA, 25 bp, Homo sapien
tgaaatgctgacaaataatttacat

SEQ ID NO: 2243108 - DNA, 25 bp, Homo sapien
ttaaatggacagcaccagaagctct

SEQ ID NO: 2243109 - DNA, 25 bp, Homo sapien
gagttcacacacaaagacggcctat

SEQ ID NO: 2243110 - DNA, 25 bp, Homo sapien
tatcattctgagagtgacgcacgga

SEQ ID NO: 2243111 - DNA, 25 bp, Homo sapien
taaaggtgccacgttacaagaggca

SEQ ID NO: 2243112 - DNA, 25 bp, Homo sapien
agctgaaacttaactgcacccaggg

SEQ ID NO: 2243113 - DNA, 25 bp, Homo sapien
cacccagggatgcttttcaggataa

SEQ ID NO: 2243114 - DNA, 25 bp, Homo sapien
tatgtttcacaatgccgtcctatgc

SEQ ID NO: 2243115 - DNA, 25 bp, Homo sapien
tgaatatttgctctaccgtaagtgg

SEQ ID NO: 2243116 - DNA, 25 bp, Homo sapien
gaggattaagagtttatggctcacc

SEQ ID NO: 2243117 - DNA, 25 bp, Homo sapien
agcccatacccttatacagaactgg

SEQ ID NO: 2243118 - DNA, 25 bp, Homo sapien
gaactggctctcagacatttctcac

SEQ ID NO: 2243119 - DNA, 25 bp, Homo sapien
tataaggcaacctctcgaatccctg

SEQ ID NO: 2243120 - DNA, 25 bp, Homo sapien
taaatctcacataaagcattaagtg

SEQ ID NO: 2243121 - DNA, 25 bp, Homo sapien
aaatctcacataaagcattaagtgc

SEQ ID NO: 2243122 - DNA, 25 bp, Homo sapien
tcacataaagcattaagtgcattac

SEQ ID NO: 2243123 - DNA, 25 bp, Homo sapien
ttttaaatctcacataaagcattaa

SEQ ID NO: 2243124 - DNA, 25 bp, Homo sapien
atctgtgcttgtccgaggacttatg

SEQ ID NO: 2243125 - DNA, 25 bp, Homo sapien
tatctgtgcttgtccgaggacttat

SEQ ID NO: 2243126 - DNA, 25 bp, Homo sapien
ttatctgtgcttgtccgaggactta

SEQ ID NO: 2243127 - DNA, 25 bp, Homo sapien
tctgtgcttgtccgaggacttatga

SEQ ID NO: 2243128 - DNA, 25 bp, Homo sapien
cctcctgaactgtcccgtttctctt

SEQ ID NO: 2243129 - DNA, 25 bp, Homo sapien
tcctcctgaactgtcccgtttctct

SEQ ID NO: 2243130 - DNA, 25 bp, Homo sapien
ctcctgaactgtcccgtttctcttt

SEQ ID NO: 2243131 - DNA, 25 bp, Homo sapien
ttcctcctgaactgtcccgtttctc

SEQ ID NO: 2243132 - DNA, 25 bp, Homo sapien
tatgatgctatgatggtcagagaga

SEQ ID NO: 2243133 - DNA, 25 bp, Homo sapien
tttatggcagatgcgtgagattcac

SEQ ID NO: 2243134 - DNA, 25 bp, Homo sapien
gtatactaactctaccctcctggta

SEQ ID NO: 2243135 - DNA, 25 bp, Homo sapien
tgaacaaaagactataggactagga

SEQ ID NO: 2243136 - DNA, 25 bp, Homo sapien
tcagatttaaatgaatcactgcctt

SEQ ID NO: 2243137 - DNA, 25 bp, Homo sapien
gccaccggaggagattttatccatc

SEQ ID NO: 2243138 - DNA, 25 bp, Homo sapien
cagatttaaatgaatcactgccttt

SEQ ID NO: 2243139 - DNA, 25 bp, Homo sapien
ttttgccaccggaggagattttatc

SEQ ID NO: 2243140 - DNA, 25 bp, Homo sapien
cttcacggtcgttgtttgagtgatc

SEQ ID NO: 2243141 - DNA, 25 bp, Homo sapien
cgtctcttggttaagtccggtggca

SEQ ID NO: 2243142 - DNA, 25 bp, Homo sapien
cattctcctctttacgtctcttggt

SEQ ID NO: 2243143 - DNA, 25 bp, Homo sapien
tccggtggcacttcacggtcgttgt

SEQ ID NO: 2243144 - DNA, 25 bp, Homo sapien
tgaagatccttattaacgtagaaaa

SEQ ID NO: 2243145 - DNA, 25 bp, Homo sapien
ggctgaagatccttattaacgtaga

SEQ ID NO: 2243146 - DNA, 25 bp, Homo sapien
acagagattactaggctgaagatcc

SEQ ID NO: 2243147 - DNA, 25 bp, Homo sapien
cagagattactaggctgaagatcct

SEQ ID NO: 2243148 - DNA, 25 bp, Homo sapien
tggtggaggagtatgattaatgtag

SEQ ID NO: 2243149 - DNA, 25 bp, Homo sapien
tctccttactcttggacagtggtgg

SEQ ID NO: 2243150 - DNA, 25 bp, Homo sapien
ctccttactcttggacagtggtgga

SEQ ID NO: 2243151 - DNA, 25 bp, Homo sapien
gtggaggagtatgattaatgtagag

SEQ ID NO: 2243152 - DNA, 25 bp, Homo sapien
aaatgggtggtgctaggaatcaaga

SEQ ID NO: 2243153 - DNA, 25 bp, Homo sapien
gaatacctaaccttactgccaggca

SEQ ID NO: 2243154 - DNA, 25 bp, Homo sapien
gatgtgggagactgacttgaatcac

SEQ ID NO: 2243155 - DNA, 25 bp, Homo sapien
ccaaagtgcaaaggcttaagagatc

SEQ ID NO: 2243156 - DNA, 25 bp, Homo sapien
tagcgtattacagaataaccccgat

SEQ ID NO: 2243157 - DNA, 25 bp, Homo sapien
taaatggaacttctcccagcatagc

SEQ ID NO: 2243158 - DNA, 25 bp, Homo sapien
ccagcatagctgagacttttgatta

SEQ ID NO: 2243159 - DNA, 25 bp, Homo sapien
tttggtccaccagtaaagaaatcat

SEQ ID NO: 2243160 - DNA, 25 bp, Homo sapien
ttgctgaagattccttgagttcgat

SEQ ID NO: 2243161 - DNA, 25 bp, Homo sapien
gaagattccttgagttcgatgagac

SEQ ID NO: 2243162 - DNA, 25 bp, Homo sapien
attccttgagttcgatgagactgtc

SEQ ID NO: 2243163 - DNA, 25 bp, Homo sapien
gctgaagattccttgagttcgatga

SEQ ID NO: 2243164 - DNA, 25 bp, Homo sapien
gctggcatagttctcagaacccaga

SEQ ID NO: 2243165 - DNA, 25 bp, Homo sapien
gagctggcatagttctcagaaccca

SEQ ID NO: 2243166 - DNA, 25 bp, Homo sapien
ggtgagctggcatagttctcagaac

SEQ ID NO: 2243167 - DNA, 25 bp, Homo sapien
caggtgagctggcatagttctcaga

SEQ ID NO: 2243168 - DNA, 25 bp, Homo sapien
caccacagtgctcttgatgaacaat

SEQ ID NO: 2243169 - DNA, 25 bp, Homo sapien
agttcaacgtactgcaaattcaaag

SEQ ID NO: 2243170 - DNA, 25 bp, Homo sapien
tcaactacgatattccaccacagtg

SEQ ID NO: 2243171 - DNA, 25 bp, Homo sapien
taaatatggagcaaggaatggctac

SEQ ID NO: 2243172 - DNA, 25 bp, Homo sapien
tgagtcttcaagaaggctacaccca

SEQ ID NO: 2243173 - DNA, 25 bp, Homo sapien
ctgagtcttcaagaaggctacaccc

SEQ ID NO: 2243174 - DNA, 25 bp, Homo sapien
gagtcttcaagaaggctacacccac

SEQ ID NO: 2243175 - DNA, 25 bp, Homo sapien
gctgcagttgaatgcctggggtttc

SEQ ID NO: 2243176 - DNA, 25 bp, Homo sapien
ctctttgctgggtggtaggattgga

SEQ ID NO: 2243177 - DNA, 25 bp, Homo sapien
gccacatctgcttttatcgtaacgc

SEQ ID NO: 2243178 - DNA, 25 bp, Homo sapien
taacgcaaggttcaacttgttggga

SEQ ID NO: 2243179 - DNA, 25 bp, Homo sapien
ctccaagggaagatacaacagaagc

SEQ ID NO: 2243180 - DNA, 25 bp, Homo sapien
aagggaagatacaacagaagctgca

SEQ ID NO: 2243181 - DNA, 25 bp, Homo sapien
agatacaacagaagctgcatgctca

SEQ ID NO: 2243182 - DNA, 25 bp, Homo sapien
gatacaacagaagctgcatgctcac

SEQ ID NO: 2243183 - DNA, 25 bp, Homo sapien
acacaactacaggagaactgatcac

SEQ ID NO: 2243184 - DNA, 25 bp, Homo sapien
tgtgtcatccaggaagtcttcagtg

SEQ ID NO: 2243185 - DNA, 25 bp, Homo sapien
ctgcttaaagcagttgaggcacttc

SEQ ID NO: 2243186 - DNA, 25 bp, Homo sapien
aaagattcgtttgcttgtagctacc

SEQ ID NO: 2243187 - DNA, 25 bp, Homo sapien
tcttagaaggcacacatcggtatga

SEQ ID NO: 2243188 - DNA, 25 bp, Homo sapien
ggtgagcctaacatggacgctgcct

SEQ ID NO: 2243189 - DNA, 25 bp, Homo sapien
tcagtccaccaatatagaaaaattc

SEQ ID NO: 2243190 - DNA, 25 bp, Homo sapien
cagtggctccagtgaatgcttggca

SEQ ID NO: 2243191 - DNA, 25 bp, Homo sapien
cactggtattccaaacaggtgagcc

SEQ ID NO: 2243192 - DNA, 25 bp, Homo sapien
gagtatcaattttgcggcgtttttg

SEQ ID NO: 2243193 - DNA, 25 bp, Homo sapien
ggtgagtatcaattttgcggcgttt

SEQ ID NO: 2243194 - DNA, 25 bp, Homo sapien
aagggtgagtatcaattttgcggcg

SEQ ID NO: 2243195 - DNA, 25 bp, Homo sapien
tggagaagggtgagtatcaattttg

SEQ ID NO: 2243196 - DNA, 25 bp, Homo sapien
caaggagacaataaccaactataca

SEQ ID NO: 2243197 - DNA, 25 bp, Homo sapien
acaaggagacaataaccaactatac

SEQ ID NO: 2243198 - DNA, 25 bp, Homo sapien
tgatttcaaggacccagaaactggt

SEQ ID NO: 2243199 - DNA, 25 bp, Homo sapien
tcagacttcggcgttctttccttgg

SEQ ID NO: 2243200 - DNA, 25 bp, Homo sapien
ctttaccaagtaccctggcctctgg

SEQ ID NO: 2243201 - DNA, 25 bp, Homo sapien
caggctctggaatatctgatctggg

SEQ ID NO: 2243202 - DNA, 25 bp, Homo sapien
tttctttgtcattttctttaacagc

SEQ ID NO: 2243203 - DNA, 25 bp, Homo sapien
gtcattttctttaacagctttgttg

SEQ ID NO: 2243204 - DNA, 25 bp, Homo sapien
ttctttgtcattttctttaacagct

SEQ ID NO: 2243205 - DNA, 25 bp, Homo sapien
tttgtcattttctttaacagctttg

SEQ ID NO: 2243206 - DNA, 25 bp, Homo sapien
tatatcctttgatatatgataaaat

SEQ ID NO: 2243207 - DNA, 25 bp, Homo sapien
aggaagaagtaatggtcgggtgcag

SEQ ID NO: 2243208 - DNA, 25 bp, Homo sapien
gaagaagtaatggtcgggtgcagtg

SEQ ID NO: 2243209 - DNA, 25 bp, Homo sapien
ggaagaagtaatggtcgggtgcagt

SEQ ID NO: 2243210 - DNA, 25 bp, Homo sapien
tccctttaggtgtggtactagaagc

SEQ ID NO: 2243211 - DNA, 25 bp, Homo sapien
aacagctttcacaccacactgagat

SEQ ID NO: 2243212 - DNA, 25 bp, Homo sapien
tggtactagaagctttattaacagc

SEQ ID NO: 2243213 - DNA, 25 bp, Homo sapien
acagctttcacaccacactgagatc

SEQ ID NO: 2243214 - DNA, 25 bp, Homo sapien
acttcttaacgcttatatactccta

SEQ ID NO: 2243215 - DNA, 25 bp, Homo sapien
aataagctacaatttcagagcaaaa

SEQ ID NO: 2243216 - DNA, 25 bp, Homo sapien
acagcaagctgattacttcttaacg

SEQ ID NO: 2243217 - DNA, 25 bp, Homo sapien
tgtaaataagctacaatttcagagc

SEQ ID NO: 2243218 - DNA, 25 bp, Homo sapien
caactgcattcctcggaggggggtc

SEQ ID NO: 2243219 - DNA, 25 bp, Homo sapien
gatttagatgcacttcctattgatg

SEQ ID NO: 2243220 - DNA, 25 bp, Homo sapien
accaccaggcccattttgcacactg

SEQ ID NO: 2243221 - DNA, 25 bp, Homo sapien
cagtactgctttcatccgatttaga

SEQ ID NO: 2243222 - DNA, 25 bp, Homo sapien
tatagaacgcccagctttcttaaaa

SEQ ID NO: 2243223 - DNA, 25 bp, Homo sapien
ctgaaagtcgcacaaagtgtttaaa

SEQ ID NO: 2243224 - DNA, 25 bp, Homo sapien
cattctactatgtggttctagagaa

SEQ ID NO: 2243225 - DNA, 25 bp, Homo sapien
actatcatccagtatagaccggaag

SEQ ID NO: 2243226 - DNA, 25 bp, Homo sapien
cagcctgtggaaacatgatcgcata

SEQ ID NO: 2243227 - DNA, 25 bp, Homo sapien
gaaacatgatcgcataatctcccat

SEQ ID NO: 2243228 - DNA, 25 bp, Homo sapien
tgtggaaacatgatcgcataatctc

SEQ ID NO: 2243229 - DNA, 25 bp, Homo sapien
tgatcgcataatctcccataatctc

SEQ ID NO: 2243230 - DNA, 25 bp, Homo sapien
tgaaggcagaagataaacttcaaca

SEQ ID NO: 2243231 - DNA, 25 bp, Homo sapien
ctgaaggcagaagataaacttcaac

SEQ ID NO: 2243232 - DNA, 25 bp, Homo sapien
cttctgtcatctagtcttgtaaatc

SEQ ID NO: 2243233 - DNA, 25 bp, Homo sapien
tcatctagtcttgtaaatcacatta

SEQ ID NO: 2243234 - DNA, 25 bp, Homo sapien
tctgtcatctagtcttgtaaatcac

SEQ ID NO: 2243235 - DNA, 25 bp, Homo sapien
tgtcatctagtcttgtaaatcacat

SEQ ID NO: 2243236 - DNA, 25 bp, Homo sapien
ccatagccaatgcatatagatctgg

SEQ ID NO: 2243237 - DNA, 25 bp, Homo sapien
tattcctgatgtgagtatattcgcc

SEQ ID NO: 2243238 - DNA, 25 bp, Homo sapien
tttgttagcacaatcaagatattcc

SEQ ID NO: 2243239 - DNA, 25 bp, Homo sapien
tccaaagcttgacccagattcaaaa

SEQ ID NO: 2243240 - DNA, 25 bp, Homo sapien
tacaacatgtcgaaaattttcatag

SEQ ID NO: 2243241 - DNA, 25 bp, Homo sapien
catagtctaattgatcagccttatt

SEQ ID NO: 2243242 - DNA, 25 bp, Homo sapien
caccatcaaatccagttgcccgtaa

SEQ ID NO: 2243243 - DNA, 25 bp, Homo sapien
cccgtaatatggtaaggaatcctgg

SEQ ID NO: 2243244 - DNA, 25 bp, Homo sapien
acagcttgcaactgtgtaaattatg

SEQ ID NO: 2243245 - DNA, 25 bp, Homo sapien
attttcagtacagcttgcaactgtg

SEQ ID NO: 2243246 - DNA, 25 bp, Homo sapien
gctctatcactatgccacctggtca

SEQ ID NO: 2243247 - DNA, 25 bp, Homo sapien
gcaaagaaaccttccgtatcgactg

SEQ ID NO: 2243248 - DNA, 25 bp, Homo sapien
tcgatcatagcaaagaagtgtggaa

SEQ ID NO: 2243249 - DNA, 25 bp, Homo sapien
catcgaggaaatatacacagctgta

SEQ ID NO: 2243250 - DNA, 25 bp, Homo sapien
gctgtagaaattttgtgatggtctc

SEQ ID NO: 2243251 - DNA, 25 bp, Homo sapien
cagtaaacagcatcaattgctgaaa

SEQ ID NO: 2243252 - DNA, 25 bp, Homo sapien
tgctaaaagccagttgtccttttcc

SEQ ID NO: 2243253 - DNA, 25 bp, Homo sapien
aagggcagtacagcgctccttctct

SEQ ID NO: 2243254 - DNA, 25 bp, Homo sapien
ttcaagaagcttgtcctgaagggca

SEQ ID NO: 2243255 - DNA, 25 bp, Homo sapien
gcttgtcctgaagggcagtacagcg

SEQ ID NO: 2243256 - DNA, 25 bp, Homo sapien
taaggagaccactgcttcatggaca

SEQ ID NO: 2243257 - DNA, 25 bp, Homo sapien
gatgtcatcccagactttggaaaca

SEQ ID NO: 2243258 - DNA, 25 bp, Homo sapien
cttctcgttcatagctggtgtgtgg

SEQ ID NO: 2243259 - DNA, 25 bp, Homo sapien
ggtgtgtggaactgcaaggtcatac

SEQ ID NO: 2243260 - DNA, 25 bp, Homo sapien
acacaacataatttatagctttgac

SEQ ID NO: 2243261 - DNA, 25 bp, Homo sapien
cacaacataatttatagctttgact

SEQ ID NO: 2243262 - DNA, 25 bp, Homo sapien
cacacaacataatttatagctttga

SEQ ID NO: 2243263 - DNA, 25 bp, Homo sapien
tgagcggcagcaaagacacttgtac

SEQ ID NO: 2243264 - DNA, 25 bp, Homo sapien
gaaataatttggatcgttcttgagc

SEQ ID NO: 2243265 - DNA, 25 bp, Homo sapien
taatttggatcgttcttgagcggca

SEQ ID NO: 2243266 - DNA, 25 bp, Homo sapien
ggatcgttcttgagcggcagcaaag

SEQ ID NO: 2243267 - DNA, 25 bp, Homo sapien
acattggcctagacaggaaaaatgc

SEQ ID NO: 2243268 - DNA, 25 bp, Homo sapien
gagtacatcaattgaaggcactcgc

SEQ ID NO: 2243269 - DNA, 25 bp, Homo sapien
cgctttatataatcttctgtgctca

SEQ ID NO: 2243270 - DNA, 25 bp, Homo sapien
aaatatgatgggcatacattggcct

SEQ ID NO: 2243271 - DNA, 25 bp, Homo sapien
caaactgcaccagggtatcatgaca

SEQ ID NO: 2243272 - DNA, 25 bp, Homo sapien
ccaaactgcaccagggtatcatgac

SEQ ID NO: 2243273 - DNA, 25 bp, Homo sapien
accaaactgcaccagggtatcatga

SEQ ID NO: 2243274 - DNA, 25 bp, Homo sapien
gattaagaagtcattttaggaatat

SEQ ID NO: 2243275 - DNA, 25 bp, Homo sapien
ttttccaaagtgattaagaagtcat

SEQ ID NO: 2243276 - DNA, 25 bp, Homo sapien
aataagacaaaatcaacatattttc

SEQ ID NO: 2243277 - DNA, 25 bp, Homo sapien
caaaatcaacatattttccaaagtg

SEQ ID NO: 2243278 - DNA, 25 bp, Homo sapien
atgtttctctccaccttcctgaaag

SEQ ID NO: 2243279 - DNA, 25 bp, Homo sapien
aagtttcaaatgtttctctccacct

SEQ ID NO: 2243280 - DNA, 25 bp, Homo sapien
gtttctctccaccttcctgaaagat

SEQ ID NO: 2243281 - DNA, 25 bp, Homo sapien
ttctctccaccttcctgaaagatta

SEQ ID NO: 2243282 - DNA, 25 bp, Homo sapien
ggcaagatcatggtccaatagagca

SEQ ID NO: 2243283 - DNA, 25 bp, Homo sapien
gatcatggtccaatagagcatcctt

SEQ ID NO: 2243284 - DNA, 25 bp, Homo sapien
tttctctgctgagccataagcagac

SEQ ID NO: 2243285 - DNA, 25 bp, Homo sapien
ggtccaatagagcatcctttaatct

SEQ ID NO: 2243286 - DNA, 25 bp, Homo sapien
ttttagctgctctccaccagtcata

SEQ ID NO: 2243287 - DNA, 25 bp, Homo sapien
ttagctgctctccaccagtcatagc

SEQ ID NO: 2243288 - DNA, 25 bp, Homo sapien
cagtcatagcctctagttgctccat

SEQ ID NO: 2243289 - DNA, 25 bp, Homo sapien
tctccaccagtcatagcctctagtt

SEQ ID NO: 2243290 - DNA, 25 bp, Homo sapien
cctctgtaatttctattcctgccat

SEQ ID NO: 2243291 - DNA, 25 bp, Homo sapien
ttcctctgtaatttctattcctgcc

SEQ ID NO: 2243292 - DNA, 25 bp, Homo sapien
tcctctgtaatttctattcctgcca

SEQ ID NO: 2243293 - DNA, 25 bp, Homo sapien
acatactgaagaagaccagcaagat

SEQ ID NO: 2243294 - DNA, 25 bp, Homo sapien
tggcaacatactgaagaagaccagc

SEQ ID NO: 2243295 - DNA, 25 bp, Homo sapien
tttgcccgcctttagctgattggca

SEQ ID NO: 2243296 - DNA, 25 bp, Homo sapien
cttttgcccgcctttagctgattgg

SEQ ID NO: 2243297 - DNA, 25 bp, Homo sapien
agccagcttgagatggttgtgtcat

SEQ ID NO: 2243298 - DNA, 25 bp, Homo sapien
ccttttctggattagctaaagcttc

SEQ ID NO: 2243299 - DNA, 25 bp, Homo sapien
cttttctggattagctaaagcttca

SEQ ID NO: 2243300 - DNA, 25 bp, Homo sapien
tttctggattagctaaagcttcaat

SEQ ID NO: 2243301 - DNA, 25 bp, Homo sapien
tccttttctggattagctaaagctt

SEQ ID NO: 2243302 - DNA, 25 bp, Homo sapien
tacaggtgttattaagttatcatac

SEQ ID NO: 2243303 - DNA, 25 bp, Homo sapien
tcaatgaatctactacaggtgttat

SEQ ID NO: 2243304 - DNA, 25 bp, Homo sapien
caagacatcataattcagtgaagtg

SEQ ID NO: 2243305 - DNA, 25 bp, Homo sapien
ggtatttcaatgaatctactacagg

SEQ ID NO: 2243306 - DNA, 25 bp, Homo sapien
ttggattgctgtggctcaacttccc

SEQ ID NO: 2243307 - DNA, 25 bp, Homo sapien
aaatggttggattgctgtggctcaa

SEQ ID NO: 2243308 - DNA, 25 bp, Homo sapien
tcaaacaaaatggttggattgctgt

SEQ ID NO: 2243309 - DNA, 25 bp, Homo sapien
gctgtggctcaacttcccaatttgt

SEQ ID NO: 2243310 - DNA, 25 bp, Homo sapien
tactaaaagtgggtgactgttataa

SEQ ID NO: 2243311 - DNA, 25 bp, Homo sapien
ttactaaaagtgggtgactgttata

SEQ ID NO: 2243312 - DNA, 25 bp, Homo sapien
attcttccactggccatacagacga

SEQ ID NO: 2243313 - DNA, 25 bp, Homo sapien
gtacctggtcagtaatgctaagcaa

SEQ ID NO: 2243314 - DNA, 25 bp, Homo sapien
tacaagcattgcagtccatcaaaga

SEQ ID NO: 2243315 - DNA, 25 bp, Homo sapien
aaagagatggaagtagtacctggtc

SEQ ID NO: 2243316 - DNA, 25 bp, Homo sapien
tgctaagcaaacagctaaggataac

SEQ ID NO: 2243317 - DNA, 25 bp, Homo sapien
cttgtttgcttccatcagactgaaa

SEQ ID NO: 2243318 - DNA, 25 bp, Homo sapien
ttgtgagtttgctgagagtgatggt

SEQ ID NO: 2243319 - DNA, 25 bp, Homo sapien
ttgtaaatagtgccgcagtaaacaa

SEQ ID NO: 2243320 - DNA, 25 bp, Homo sapien
cttgtgagtttgctgagagtgatgg

SEQ ID NO: 2243321 - DNA, 25 bp, Homo sapien
taaatagtgccgcagtaaacaaaca

SEQ ID NO: 2243322 - DNA, 25 bp, Homo sapien
tgcatatggttaggacacactggaa

SEQ ID NO: 2243323 - DNA, 25 bp, Homo sapien
ggagtaacgggccataccatatagt

SEQ ID NO: 2243324 - DNA, 25 bp, Homo sapien
tacgggaacattctgtacaggtttg

SEQ ID NO: 2243325 - DNA, 25 bp, Homo sapien
catggctgtcctaacatcttagtgc

SEQ ID NO: 2243326 - DNA, 25 bp, Homo sapien
gcctttagcacctttaggaactcca

SEQ ID NO: 2243327 - DNA, 25 bp, Homo sapien
ggtaacagaacatattgaacacgtc

SEQ ID NO: 2243328 - DNA, 25 bp, Homo sapien
tttgcaaataaaatgggatcgtgag

SEQ ID NO: 2243329 - DNA, 25 bp, Homo sapien
aaatgacttgcctatgcgcaccact

SEQ ID NO: 2243330 - DNA, 25 bp, Homo sapien
ctgctcagcaggtgccccactgtgg

SEQ ID NO: 2243331 - DNA, 25 bp, Homo sapien
cagcaggtgccccactgtggagtca

SEQ ID NO: 2243332 - DNA, 25 bp, Homo sapien
aggtgccccactgtggagtcacagg

SEQ ID NO: 2243333 - DNA, 25 bp, Homo sapien
gtgccccactgtggagtcacagggg

SEQ ID NO: 2243334 - DNA, 25 bp, Homo sapien
actctctaagaagcctgcatggtcc

SEQ ID NO: 2243335 - DNA, 25 bp, Homo sapien
gcctgcatggtccacggcccatgaa

SEQ ID NO: 2243336 - DNA, 25 bp, Homo sapien
taagaagcctgcatggtccacggcc

SEQ ID NO: 2243337 - DNA, 25 bp, Homo sapien
tcactctctaagaagcctgcatggt

SEQ ID NO: 2243338 - DNA, 25 bp, Homo sapien
cacagctgctatcaatactgctcct

SEQ ID NO: 2243339 - DNA, 25 bp, Homo sapien
gctctgatctatggggctgtagcca

SEQ ID NO: 2243340 - DNA, 25 bp, Homo sapien
acagctgctatcaatactgctccta

SEQ ID NO: 2243341 - DNA, 25 bp, Homo sapien
gaggcaggctctgatctatggggct

SEQ ID NO: 2243342 - DNA, 25 bp, Homo sapien
cataatgttctgtgcatgttgccaa

SEQ ID NO: 2243343 - DNA, 25 bp, Homo sapien
caagggctattagcttgtgtgaagc

SEQ ID NO: 2243344 - DNA, 25 bp, Homo sapien
taataaggcttccaacaagccaagt

SEQ ID NO: 2243345 - DNA, 25 bp, Homo sapien
tgaagctgcatagtatggaggcatc

SEQ ID NO: 2243346 - DNA, 25 bp, Homo sapien
ttttctttctctcgctcatccattt

SEQ ID NO: 2243347 - DNA, 25 bp, Homo sapien
tctctcgctcatccattttttcaga

SEQ ID NO: 2243348 - DNA, 25 bp, Homo sapien
tctttctctcgctcatccatttttt

SEQ ID NO: 2243349 - DNA, 25 bp, Homo sapien
ttctctcgctcatccattttttcag

SEQ ID NO: 2243350 - DNA, 25 bp, Homo sapien
tctcgtttgtgttcatccataatgc

SEQ ID NO: 2243351 - DNA, 25 bp, Homo sapien
tttgcttagcttccgcaatttctcg

SEQ ID NO: 2243352 - DNA, 25 bp, Homo sapien
tagcttccgcaatttctcgtttgtg

SEQ ID NO: 2243353 - DNA, 25 bp, Homo sapien
taatgcaattatcagccggaagaag

SEQ ID NO: 2243354 - DNA, 25 bp, Homo sapien
ctgctgcaactctgtataaagatga

SEQ ID NO: 2243355 - DNA, 25 bp, Homo sapien
aactctgtataaagatgatggtgtc

SEQ ID NO: 2243356 - DNA, 25 bp, Homo sapien
agattaaattgtagaagtactgctg

SEQ ID NO: 2243357 - DNA, 25 bp, Homo sapien
gaagtactgctgcaactctgtataa

SEQ ID NO: 2243358 - DNA, 25 bp, Homo sapien
cagtacaaggattattatgccaaca

SEQ ID NO: 2243359 - DNA, 25 bp, Homo sapien
aaacggacacaatttacaatgcagg

SEQ ID NO: 2243360 - DNA, 25 bp, Homo sapien
gcacaagatttagtctgcagttctg

SEQ ID NO: 2243361 - DNA, 25 bp, Homo sapien
ccatttagtgcagaaaggacaatta

SEQ ID NO: 2243362 - DNA, 25 bp, Homo sapien
gacagatttataacctgggtgatgg

SEQ ID NO: 2243363 - DNA, 25 bp, Homo sapien
caatagtgtacaaaacctctgcacc

SEQ ID NO: 2243364 - DNA, 25 bp, Homo sapien
gaggacttacaaaccacaaatgtaa

SEQ ID NO: 2243365 - DNA, 25 bp, Homo sapien
tatagtgtgccatttgacagattta

SEQ ID NO: 2243366 - DNA, 25 bp, Homo sapien
tagcattagcaacctgcaccaggag

SEQ ID NO: 2243367 - DNA, 25 bp, Homo sapien
ttatggatccttgagtctactgccc

SEQ ID NO: 2243368 - DNA, 25 bp, Homo sapien
tggcaaaagccataccagccctgag

SEQ ID NO: 2243369 - DNA, 25 bp, Homo sapien
tttttgtggcgagacagagctctgg

SEQ ID NO: 2243370 - DNA, 25 bp, Homo sapien
ccaccaagcccagctaatttttccg

SEQ ID NO: 2243371 - DNA, 25 bp, Homo sapien
atctccacctctcgcgttcaagtga

SEQ ID NO: 2243372 - DNA, 25 bp, Homo sapien
gccaggattacaggtctgcaccacc

SEQ ID NO: 2243373 - DNA, 25 bp, Homo sapien
ctcagccaccctagtagccaggatt

SEQ ID NO: 2243374 - DNA, 25 bp, Homo sapien
tatatattcacactgccacatcttg

SEQ ID NO: 2243375 - DNA, 25 bp, Homo sapien
cacctctcccaaggcaaaacttaat

SEQ ID NO: 2243376 - DNA, 25 bp, Homo sapien
gctagaacacctgagatgagaccaa

SEQ ID NO: 2243377 - DNA, 25 bp, Homo sapien
cattgttcgttactcatgcagagaa

SEQ ID NO: 2243378 - DNA, 25 bp, Homo sapien
tatgacacagtgtttgcggttcaca

SEQ ID NO: 2243379 - DNA, 25 bp, Homo sapien
agaagtcatcgtgttctggcctgca

SEQ ID NO: 2243380 - DNA, 25 bp, Homo sapien
tccaaaactctattgggatccagat

SEQ ID NO: 2243381 - DNA, 25 bp, Homo sapien
gttcacacatactcatgtaagattc

SEQ ID NO: 2243382 - DNA, 25 bp, Homo sapien
ggaggaggaaatcacctagtcagag

SEQ ID NO: 2243383 - DNA, 25 bp, Homo sapien
aaaataatcagggaatagcagggag

SEQ ID NO: 2243384 - DNA, 25 bp, Homo sapien
tttatcacctacataccaagtatta

SEQ ID NO: 2243385 - DNA, 25 bp, Homo sapien
catattatatggtgatatgtgcaaa

SEQ ID NO: 2243386 - DNA, 25 bp, Homo sapien
acttccagataaatcttgccccaat

SEQ ID NO: 2243387 - DNA, 25 bp, Homo sapien
tcagcaatcagcttggcataacctt

SEQ ID NO: 2243388 - DNA, 25 bp, Homo sapien
agcaatcagcttggcataaccttca

SEQ ID NO: 2243389 - DNA, 25 bp, Homo sapien
ttccagataaatcttgccccaattc

SEQ ID NO: 2243390 - DNA, 25 bp, Homo sapien
ctggatccaggcgttcctttagaac

SEQ ID NO: 2243391 - DNA, 25 bp, Homo sapien
tgattgtttgataagccctaatgat

SEQ ID NO: 2243392 - DNA, 25 bp, Homo sapien
ttgctgtgattgtttgataagccct

SEQ ID NO: 2243393 - DNA, 25 bp, Homo sapien
ggatccaggcgttcctttagaactg

SEQ ID NO: 2243394 - DNA, 25 bp, Homo sapien
gaatgtcaatatcctccttcattaa

SEQ ID NO: 2243395 - DNA, 25 bp, Homo sapien
aactgaatgtcaatatcctccttca

SEQ ID NO: 2243396 - DNA, 25 bp, Homo sapien
tgtcaatatcctccttcattaacat

SEQ ID NO: 2243397 - DNA, 25 bp, Homo sapien
aaagtcaactgaatgtcaatatcct

SEQ ID NO: 2243398 - DNA, 25 bp, Homo sapien
caactgtgtaaaatagtctctcttg

SEQ ID NO: 2243399 - DNA, 25 bp, Homo sapien
aacatgctaataccaactgtgtaaa

SEQ ID NO: 2243400 - DNA, 25 bp, Homo sapien
caaacatgctaataccaactgtgta

SEQ ID NO: 2243401 - DNA, 25 bp, Homo sapien
accaactgtgtaaaatagtctctct

SEQ ID NO: 2243402 - DNA, 25 bp, Homo sapien
aatggagggcatatcctcacgaaat

SEQ ID NO: 2243403 - DNA, 25 bp, Homo sapien
gaatggagggcatatcctcacgaaa

SEQ ID NO: 2243404 - DNA, 25 bp, Homo sapien
agaatggagggcatatcctcacgaa

SEQ ID NO: 2243405 - DNA, 25 bp, Homo sapien
tggagggcatatcctcacgaaattc

SEQ ID NO: 2243406 - DNA, 25 bp, Homo sapien
aaactgtacatttttcatccaagac

SEQ ID NO: 2243407 - DNA, 25 bp, Homo sapien
tccaagactttaaatgttgtgctca

SEQ ID NO: 2243408 - DNA, 25 bp, Homo sapien
atttttcatccaagactttaaatgt

SEQ ID NO: 2243409 - DNA, 25 bp, Homo sapien
aggaagactgttaaaaactgtacat

SEQ ID NO: 2243410 - DNA, 25 bp, Homo sapien
tgtcactaagaacattagatgcctg

SEQ ID NO: 2243411 - DNA, 25 bp, Homo sapien
tgcctgttcatgctttagatttcct

SEQ ID NO: 2243412 - DNA, 25 bp, Homo sapien
tcctttaattacatgatatgacaac

SEQ ID NO: 2243413 - DNA, 25 bp, Homo sapien
tatgacaactcatagagagcttgct

SEQ ID NO: 2243414 - DNA, 25 bp, Homo sapien
gataactgtcaactacaagtagcaa

SEQ ID NO: 2243415 - DNA, 25 bp, Homo sapien
taattaccacagtcccctttcctga

SEQ ID NO: 2243416 - DNA, 25 bp, Homo sapien
gagttttaaccataccctagtgtga

SEQ ID NO: 2243417 - DNA, 25 bp, Homo sapien
tagttagtggtcaggtgaacacctc

SEQ ID NO: 2243418 - DNA, 25 bp, Homo sapien
aatcacttttagctttgcccctcct

SEQ ID NO: 2243419 - DNA, 25 bp, Homo sapien
tagacacaatcacttttagctttgc

SEQ ID NO: 2243420 - DNA, 25 bp, Homo sapien
cacaatcacttttagctttgcccct

SEQ ID NO: 2243421 - DNA, 25 bp, Homo sapien
tttgcccctcctttgccaaatccac

SEQ ID NO: 2243422 - DNA, 25 bp, Homo sapien
gtatgttgaactatcatggctttta

SEQ ID NO: 2243423 - DNA, 25 bp, Homo sapien
tatgttgaactatcatggcttttat

SEQ ID NO: 2243424 - DNA, 25 bp, Homo sapien
atgttgaactatcatggcttttatt

SEQ ID NO: 2243425 - DNA, 25 bp, Homo sapien
ttttaatctcaaaccacctaactca

SEQ ID NO: 2243426 - DNA, 25 bp, Homo sapien
gagccacggagccaggcctataaat

SEQ ID NO: 2243427 - DNA, 25 bp, Homo sapien
gagccaggcctataaatgccttttt

SEQ ID NO: 2243428 - DNA, 25 bp, Homo sapien
caacatcccattaggtgggaccaca

SEQ ID NO: 2243429 - DNA, 25 bp, Homo sapien
tcaacagagtaaacttttgctggtc

SEQ ID NO: 2243430 - DNA, 25 bp, Homo sapien
gattatacataaccttgcagctcac

SEQ ID NO: 2243431 - DNA, 25 bp, Homo sapien
tatgtcaataccctatcatcaggat

SEQ ID NO: 2243432 - DNA, 25 bp, Homo sapien
gatgccagattacaatcatccacag

SEQ ID NO: 2243433 - DNA, 25 bp, Homo sapien
aattcgcctctccctgatttctccc

SEQ ID NO: 2243434 - DNA, 25 bp, Homo sapien
attcgcctctccctgatttctccca

SEQ ID NO: 2243435 - DNA, 25 bp, Homo sapien
tcttcctctcactagtagcagaagc

SEQ ID NO: 2243436 - DNA, 25 bp, Homo sapien
agcaccgcccacgaggaatgccggg

SEQ ID NO: 2243437 - DNA, 25 bp, Homo sapien
tgtagcacgcgagcgaagggtcaaa

SEQ ID NO: 2243438 - DNA, 25 bp, Homo sapien
agaagcccggatgtgtagcacgcga

SEQ ID NO: 2243439 - DNA, 25 bp, Homo sapien
cccagagaggttagcatagcatgca

SEQ ID NO: 2243440 - DNA, 25 bp, Homo sapien
gctgagctgctcatttgttggttta

SEQ ID NO: 2243441 - DNA, 25 bp, Homo sapien
ggtgtttgaccattccaaagaggta

SEQ ID NO: 2243442 - DNA, 25 bp, Homo sapien
gcatgcagggatagcttttaacctt

SEQ ID NO: 2243443 - DNA, 25 bp, Homo sapien
tatatacgtgggtcatgtccttggc

SEQ ID NO: 2243444 - DNA, 25 bp, Homo sapien
ggttggccataaaccctggtctagc

SEQ ID NO: 2243445 - DNA, 25 bp, Homo sapien
gggcagctgtctcagtatgtctagc

SEQ ID NO: 2243446 - DNA, 25 bp, Homo sapien
gcccccttagtggaggcataagcag

SEQ ID NO: 2243447 - DNA, 25 bp, Homo sapien
gatcagagttattatggaggacttg

SEQ ID NO: 2243448 - DNA, 25 bp, Homo sapien
gggatcagagttattatggaggact

SEQ ID NO: 2243449 - DNA, 25 bp, Homo sapien
tcagggatcagagttattatggagg

SEQ ID NO: 2243450 - DNA, 25 bp, Homo sapien
cagagttattatggaggacttggtg

SEQ ID NO: 2243451 - DNA, 25 bp, Homo sapien
gaaaaatatgtcaagcgctgatctt

SEQ ID NO: 2243452 - DNA, 25 bp, Homo sapien
aaaaatatgtcaagcgctgatctta

SEQ ID NO: 2243453 - DNA, 25 bp, Homo sapien
caaaggccaacctccagggagtgga

SEQ ID NO: 2243454 - DNA, 25 bp, Homo sapien
agggagtggagagtggctgaaggtc

SEQ ID NO: 2243455 - DNA, 25 bp, Homo sapien
aagacaaaggccaacctccagggag

SEQ ID NO: 2243456 - DNA, 25 bp, Homo sapien
gaaggtcaagttgagcaccagtggc

SEQ ID NO: 2243457 - DNA, 25 bp, Homo sapien
aaaagcctagtgaagtaaagcagtg

SEQ ID NO: 2243458 - DNA, 25 bp, Homo sapien
ggagaataaacatgcaactacgagt

SEQ ID NO: 2243459 - DNA, 25 bp, Homo sapien
tttgaacaaattagcggaaggcagg

SEQ ID NO: 2243460 - DNA, 25 bp, Homo sapien
tgttagaagatagggtagggcaccc

SEQ ID NO: 2243461 - DNA, 25 bp, Homo sapien
cataggcagagggagtagtttgaac

SEQ ID NO: 2243462 - DNA, 25 bp, Homo sapien
attagctgagtgtgctgtcgcctgc

SEQ ID NO: 2243463 - DNA, 25 bp, Homo sapien
aattagctgagtgtgctgtcgcctg

SEQ ID NO: 2243464 - DNA, 25 bp, Homo sapien
cctggaaggtggaggttgcagtgag

SEQ ID NO: 2243465 - DNA, 25 bp, Homo sapien
tcccagctacttgggaagctgaggc

SEQ ID NO: 2243466 - DNA, 25 bp, Homo sapien
tgggcctggtagcacacgcctgtaa

SEQ ID NO: 2243467 - DNA, 25 bp, Homo sapien
agaagaattgcttgaacctggaagg

SEQ ID NO: 2243468 - DNA, 25 bp, Homo sapien
ctccagtaccaagagatagaatcaa

SEQ ID NO: 2243469 - DNA, 25 bp, Homo sapien
cagaagaacaacattagaaataaga

SEQ ID NO: 2243470 - DNA, 25 bp, Homo sapien
tactgggaacataagaactgaggtc

SEQ ID NO: 2243471 - DNA, 25 bp, Homo sapien
ttaaagaatatagccacgcacggtg

SEQ ID NO: 2243472 - DNA, 25 bp, Homo sapien
tgtttggtgccttcctccaaaccca

SEQ ID NO: 2243473 - DNA, 25 bp, Homo sapien
caaacccaaggtttctgtctttcat

SEQ ID NO: 2243474 - DNA, 25 bp, Homo sapien
cccaaggtttctgtctttcatcagt

SEQ ID NO: 2243475 - DNA, 25 bp, Homo sapien
aaggtttctgtctttcatcagtcat

SEQ ID NO: 2243476 - DNA, 25 bp, Homo sapien
tatcatcccgattgctccctaagga

SEQ ID NO: 2243477 - DNA, 25 bp, Homo sapien
gatgttgcacatctggacactaatg

SEQ ID NO: 2243478 - DNA, 25 bp, Homo sapien
caaggttttaatctggaggattgcc

SEQ ID NO: 2243479 - DNA, 25 bp, Homo sapien
gctgaattggatctggatgttgcac

SEQ ID NO: 2243480 - DNA, 25 bp, Homo sapien
cgggttcaaggcattcttctgtttc

SEQ ID NO: 2243481 - DNA, 25 bp, Homo sapien
cgctccccgggttcaaggcattctt

SEQ ID NO: 2243482 - DNA, 25 bp, Homo sapien
ctccgctccccgggttcaaggcatt

SEQ ID NO: 2243483 - DNA, 25 bp, Homo sapien
ggttcaaggcattcttctgtttcag

SEQ ID NO: 2243484 - DNA, 25 bp, Homo sapien
agtgcagagtgagaaggggggaaag

SEQ ID NO: 2243485 - DNA, 25 bp, Homo sapien
agagtagaacaaggagtttgatcag

SEQ ID NO: 2243486 - DNA, 25 bp, Homo sapien
aaagagtagaacaaggagtttgatc

SEQ ID NO: 2243487 - DNA, 25 bp, Homo sapien
ggaaagagtagaacaaggagtttga

SEQ ID NO: 2243488 - DNA, 25 bp, Homo sapien
aataatttagtctgctgatcaaaag

SEQ ID NO: 2243489 - DNA, 25 bp, Homo sapien
aattaatagctttatattgcctttc

SEQ ID NO: 2243490 - DNA, 25 bp, Homo sapien
cctgtccctttgattacgggctaag

SEQ ID NO: 2243491 - DNA, 25 bp, Homo sapien
gtgagtgtatataatgtgatttggc

SEQ ID NO: 2243492 - DNA, 25 bp, Homo sapien
agtgaccttagagagtatccagttc

SEQ ID NO: 2243493 - DNA, 25 bp, Homo sapien
cctgactgggacatagtttgaaggt

SEQ ID NO: 2243494 - DNA, 25 bp, Homo sapien
tatagccagcccttcatatctgtgg

SEQ ID NO: 2243495 - DNA, 25 bp, Homo sapien
taacagagttatagaatgacagggc

SEQ ID NO: 2243496 - DNA, 25 bp, Homo sapien
aagtcatctggacatgaattaaagt

SEQ ID NO: 2243497 - DNA, 25 bp, Homo sapien
aaagtcatctggacatgaattaaag

SEQ ID NO: 2243498 - DNA, 25 bp, Homo sapien
gttgttaagcaacagtataacaact

SEQ ID NO: 2243499 - DNA, 25 bp, Homo sapien
tgttgttaagcaacagtataacaac

SEQ ID NO: 2243500 - DNA, 25 bp, Homo sapien
gtgatgaagatgtgcatacattata

SEQ ID NO: 2243501 - DNA, 25 bp, Homo sapien
tgatgaagatgtgcatacattatat

SEQ ID NO: 2243502 - DNA, 25 bp, Homo sapien
gggagccaagatggcgccaccgcac

SEQ ID NO: 2243503 - DNA, 25 bp, Homo sapien
ctactagagcgactgaggcaggaga

SEQ ID NO: 2243504 - DNA, 25 bp, Homo sapien
agtcccagctactagagcgactgag

SEQ ID NO: 2243505 - DNA, 25 bp, Homo sapien
attgcttgaacctgggaggcggagg

SEQ ID NO: 2243506 - DNA, 25 bp, Homo sapien
tttgagacagagtactatatttgtg

SEQ ID NO: 2243507 - DNA, 25 bp, Homo sapien
ttttcacttagaacctttctgtgtg

SEQ ID NO: 2243508 - DNA, 25 bp, Homo sapien
tgagacagagtactatatttgtgaa

SEQ ID NO: 2243509 - DNA, 25 bp, Homo sapien
tttcacttagaacctttctgtgtgg

SEQ ID NO: 2243510 - DNA, 25 bp, Homo sapien
taactacttgtagttccaggaggag

SEQ ID NO: 2243511 - DNA, 25 bp, Homo sapien
gcccaggcttcagttcttttagtag

SEQ ID NO: 2243512 - DNA, 25 bp, Homo sapien
gaagactatgtcactttaatgcttt

SEQ ID NO: 2243513 - DNA, 25 bp, Homo sapien
ttctaggtgttagctaaattaacta

SEQ ID NO: 2243514 - DNA, 25 bp, Homo sapien
tggagacactgcaataggtcacttc

SEQ ID NO: 2243515 - DNA, 25 bp, Homo sapien
gataggccctcctcgagtttttctc

SEQ ID NO: 2243516 - DNA, 25 bp, Homo sapien
tcttggcggtcaaaggtccaataca

SEQ ID NO: 2243517 - DNA, 25 bp, Homo sapien
cctgtccaaggaaaaagcggcgctt

SEQ ID NO: 2243518 - DNA, 25 bp, Homo sapien
gagtggctttctaccgcagggctct

SEQ ID NO: 2243519 - DNA, 25 bp, Homo sapien
agtggctttctaccgcagggctctt

SEQ ID NO: 2243520 - DNA, 25 bp, Homo sapien
tcttcttttcgactaccctcgctga

SEQ ID NO: 2243521 - DNA, 25 bp, Homo sapien
gactaccctcgctgaagattttctc

SEQ ID NO: 2243522 - DNA, 25 bp, Homo sapien
tcaaggcacgaactgagctgatcct

SEQ ID NO: 2243523 - DNA, 25 bp, Homo sapien
tgagactttctcttccgtggcctag

SEQ ID NO: 2243524 - DNA, 25 bp, Homo sapien
gaaacagcatcaagtagttccgcaa

SEQ ID NO: 2243525 - DNA, 25 bp, Homo sapien
gattttcgtgcttcagtgctcggct

SEQ ID NO: 2243526 - DNA, 25 bp, Homo sapien
ctacttttgtgcgtgctgttaaaca

SEQ ID NO: 2243527 - DNA, 25 bp, Homo sapien
cctaccaaagaattgtgtaaggcgt

SEQ ID NO: 2243528 - DNA, 25 bp, Homo sapien
aatacagaagcgctcattgttacta

SEQ ID NO: 2243529 - DNA, 25 bp, Homo sapien
ggcgtaaggcggctgtatagttaca

SEQ ID NO: 2243530 - DNA, 25 bp, Homo sapien
ttcagaattgttagagacttgccca

SEQ ID NO: 2243531 - DNA, 25 bp, Homo sapien
taaacttctcatagtggtcaggaac

SEQ ID NO: 2243532 - DNA, 25 bp, Homo sapien
tagcaactagaaaaggcttagcggc

SEQ ID NO: 2243533 - DNA, 25 bp, Homo sapien
tacatggtgatacactgcctcccag

SEQ ID NO: 2243534 - DNA, 25 bp, Homo sapien
ccagggaagatattgacagcagatt

SEQ ID NO: 2243535 - DNA, 25 bp, Homo sapien
ttggtgtgcgttgcctctccaggta

SEQ ID NO: 2243536 - DNA, 25 bp, Homo sapien
gatggcccctactagatgatgcctg

SEQ ID NO: 2243537 - DNA, 25 bp, Homo sapien
tactatgccacagcaagggaaaatt

SEQ ID NO: 2243538 - DNA, 25 bp, Homo sapien
caattttgccgtgaatgaaatgggt

SEQ ID NO: 2243539 - DNA, 25 bp, Homo sapien
gaatagctaaataacttctgtgtga

SEQ ID NO: 2243540 - DNA, 25 bp, Homo sapien
ggatttaaggatagactggagtcag

SEQ ID NO: 2243541 - DNA, 25 bp, Homo sapien
gactgcttatatgaactgaggcaaa

SEQ ID NO: 2243542 - DNA, 25 bp, Homo sapien
gatgtatttattcccctaccctgaa

SEQ ID NO: 2243543 - DNA, 25 bp, Homo sapien
tcaaccctgaaagtttgcttgtcct

SEQ ID NO: 2243544 - DNA, 25 bp, Homo sapien
gaaggtaaccagtctcaaacatgct

SEQ ID NO: 2243545 - DNA, 25 bp, Homo sapien
ctaaataatgatgacctctgctgga

SEQ ID NO: 2243546 - DNA, 25 bp, Homo sapien
taggcagctagacatcgtttaaaac

SEQ ID NO: 2243547 - DNA, 25 bp, Homo sapien
tcagaaatcaagcattgggctgtgg

SEQ ID NO: 2243548 - DNA, 25 bp, Homo sapien
tcagatgggtgaataccaaaaggct

SEQ ID NO: 2243549 - DNA, 25 bp, Homo sapien
actcattttgcgaggcttaggcagc

SEQ ID NO: 2243550 - DNA, 25 bp, Homo sapien
cgtgccttcactaataccaccccca

SEQ ID NO: 2243551 - DNA, 25 bp, Homo sapien
ttccacatagcatcccgtgccttca

SEQ ID NO: 2243552 - DNA, 25 bp, Homo sapien
cagaggaacattataacatcctgct

SEQ ID NO: 2243553 - DNA, 25 bp, Homo sapien
ggcttcacttccacatagcatcccg

SEQ ID NO: 2243554 - DNA, 25 bp, Homo sapien
tgcatccctggtgttaacggtggtg

SEQ ID NO: 2243555 - DNA, 25 bp, Homo sapien
aaccttgcatccctggtgttaacgg

SEQ ID NO: 2243556 - DNA, 25 bp, Homo sapien
cttgcatccctggtgttaacggtgg

SEQ ID NO: 2243557 - DNA, 25 bp, Homo sapien
tggtgttaacggtggtgggtgtcca

SEQ ID NO: 2243558 - DNA, 25 bp, Homo sapien
tgctgtatctagttgaggcagggca

SEQ ID NO: 2243559 - DNA, 25 bp, Homo sapien
cctgctgtatctagttgaggcaggg

SEQ ID NO: 2243560 - DNA, 25 bp, Homo sapien
ctgctgtatctagttgaggcagggc

SEQ ID NO: 2243561 - DNA, 25 bp, Homo sapien
ccctgccttggtaaggacctttgtg

SEQ ID NO: 2243562 - DNA, 25 bp, Homo sapien
ggagaggttcgcttctcattctttt

SEQ ID NO: 2243563 - DNA, 25 bp, Homo sapien
aagggagaggttcgcttctcattct

SEQ ID NO: 2243564 - DNA, 25 bp, Homo sapien
cctgccttggtaaggacctttgtgg

SEQ ID NO: 2243565 - DNA, 25 bp, Homo sapien
agcacattctctctaggtctaaggc

SEQ ID NO: 2243566 - DNA, 25 bp, Homo sapien
taaagaactttccatgctggccaca

SEQ ID NO: 2243567 - DNA, 25 bp, Homo sapien
tttgactaaagaactttccatgctg

SEQ ID NO: 2243568 - DNA, 25 bp, Homo sapien
atgaatgaggctggcgcactggcta

SEQ ID NO: 2243569 - DNA, 25 bp, Homo sapien
agtacttgccacagaaggcttcccc

SEQ ID NO: 2243570 - DNA, 25 bp, Homo sapien
gtgagtacttgccacagaaggcttc

SEQ ID NO: 2243571 - DNA, 25 bp, Homo sapien
caagtgagtacttgccacagaaggc

SEQ ID NO: 2243572 - DNA, 25 bp, Homo sapien
ctaaacaagtgagtacttgccacag

SEQ ID NO: 2243573 - DNA, 25 bp, Homo sapien
catttggtgatcgtgttgggcttct

SEQ ID NO: 2243574 - DNA, 25 bp, Homo sapien
tccacatttggtgatcgtgttgggc

SEQ ID NO: 2243575 - DNA, 25 bp, Homo sapien
gtcctctccacatttggtgatcgtg

SEQ ID NO: 2243576 - DNA, 25 bp, Homo sapien
tttggtgatcgtgttgggcttctca

SEQ ID NO: 2243577 - DNA, 25 bp, Homo sapien
ccacgcccagtatttctgtacaaaa

SEQ ID NO: 2243578 - DNA, 25 bp, Homo sapien
tgcacgtgctccaaccaagtaaggt

SEQ ID NO: 2243579 - DNA, 25 bp, Homo sapien
cccagggagattagccagaggcaag

SEQ ID NO: 2243580 - DNA, 25 bp, Homo sapien
caggaatggaacatatatctcccgg

SEQ ID NO: 2243581 - DNA, 25 bp, Homo sapien
ctgtgagaagtaaatggcgatgtcc

SEQ ID NO: 2243582 - DNA, 25 bp, Homo sapien
ctcgtcctgtgagaagtaaatggcg

SEQ ID NO: 2243583 - DNA, 25 bp, Homo sapien
tgagaagtaaatggcgatgtcctca

SEQ ID NO: 2243584 - DNA, 25 bp, Homo sapien
gtcctgtgagaagtaaatggcgatg

SEQ ID NO: 2243585 - DNA, 25 bp, Homo sapien
tatatgttcttctgtagtcatggta

SEQ ID NO: 2243586 - DNA, 25 bp, Homo sapien
aggaccaagaccagcgcggtgaccc

SEQ ID NO: 2243587 - DNA, 25 bp, Homo sapien
agttctgccgctgccattggaacct

SEQ ID NO: 2243588 - DNA, 25 bp, Homo sapien
tgccattggaacctgtggacggtgc

SEQ ID NO: 2243589 - DNA, 25 bp, Homo sapien
gcggtgacccgagcaaagctgtcac

SEQ ID NO: 2243590 - DNA, 25 bp, Homo sapien
ttcactcttgttgaatggcacaaac

SEQ ID NO: 2243591 - DNA, 25 bp, Homo sapien
aaaatggtaagcatacctcacagtt

SEQ ID NO: 2243592 - DNA, 25 bp, Homo sapien
gttgcaccgtatgactactgaagta

SEQ ID NO: 2243593 - DNA, 25 bp, Homo sapien
cattatttgcccttcagttgcaccg

SEQ ID NO: 2243594 - DNA, 25 bp, Homo sapien
gcaagcttcactcactaaaacatca

SEQ ID NO: 2243595 - DNA, 25 bp, Homo sapien
gggctggactgctggactcctagca

SEQ ID NO: 2243596 - DNA, 25 bp, Homo sapien
cttctgctgtgccaacgcaagcttc

SEQ ID NO: 2243597 - DNA, 25 bp, Homo sapien
gctggactgctggactcctagcaac

SEQ ID NO: 2243598 - DNA, 25 bp, Homo sapien
tacccagagtctcattaaccccaca

SEQ ID NO: 2243599 - DNA, 25 bp, Homo sapien
tgaagaacatcatagcccacaccag

SEQ ID NO: 2243600 - DNA, 25 bp, Homo sapien
cgggtgcagtagcagcaaaccactt

SEQ ID NO: 2243601 - DNA, 25 bp, Homo sapien
aggagtctagatgtttgtttaacgg

SEQ ID NO: 2243602 - DNA, 25 bp, Homo sapien
ccagtaagttccatttttcctcata

SEQ ID NO: 2243603 - DNA, 25 bp, Homo sapien
ttccagtaagttccatttttcctca

SEQ ID NO: 2243604 - DNA, 25 bp, Homo sapien
atatgagctagagttggattctgct

SEQ ID NO: 2243605 - DNA, 25 bp, Homo sapien
ttcctcatatgagctagagttggat

SEQ ID NO: 2243606 - DNA, 25 bp, Homo sapien
gacaaaagctaccacagcttcttca

SEQ ID NO: 2243607 - DNA, 25 bp, Homo sapien
agacaaaagctaccacagcttcttc

SEQ ID NO: 2243608 - DNA, 25 bp, Homo sapien
ccattcttattgagccagttgctaa

SEQ ID NO: 2243609 - DNA, 25 bp, Homo sapien
ttgtccttcttatggttgtgcttga

SEQ ID NO: 2243610 - DNA, 25 bp, Homo sapien
taacgacggggttgcagacttcctc

SEQ ID NO: 2243611 - DNA, 25 bp, Homo sapien
tctgtagtaccattcttattgagcc

SEQ ID NO: 2243612 - DNA, 25 bp, Homo sapien
aagtggagaagctgtatatttgacc

SEQ ID NO: 2243613 - DNA, 25 bp, Homo sapien
gaagctgtatatttgacctcaaaga

SEQ ID NO: 2243614 - DNA, 25 bp, Homo sapien
ctaagtggagaagctgtatatttga

SEQ ID NO: 2243615 - DNA, 25 bp, Homo sapien
ggagaagctgtatatttgacctcaa

SEQ ID NO: 2243616 - DNA, 25 bp, Homo sapien
atttctttctgcttcaacctttttg

SEQ ID NO: 2243617 - DNA, 25 bp, Homo sapien
ctcttaggtcaaagatgagcacatt

SEQ ID NO: 2243618 - DNA, 25 bp, Homo sapien
ctttctgcttcaacctttttgtcta

SEQ ID NO: 2243619 - DNA, 25 bp, Homo sapien
tgagcacatttctttctgcttcaac

SEQ ID NO: 2243620 - DNA, 25 bp, Homo sapien
ttccaacatcctcggtagtcagatg

SEQ ID NO: 2243621 - DNA, 25 bp, Homo sapien
tgagaatcattaatgtaagttggca

SEQ ID NO: 2243622 - DNA, 25 bp, Homo sapien
cctcggtagtcagatgttgagaatc

SEQ ID NO: 2243623 - DNA, 25 bp, Homo sapien
tgtaagttggcattgtgaccacagc

SEQ ID NO: 2243624 - DNA, 25 bp, Homo sapien
tgtcagaccataaatgacacctcct

SEQ ID NO: 2243625 - DNA, 25 bp, Homo sapien
gcaagaacgaccaatgcttcatatc

SEQ ID NO: 2243626 - DNA, 25 bp, Homo sapien
ttcaccagcaagaacgaccaatgct

SEQ ID NO: 2243627 - DNA, 25 bp, Homo sapien
tcattcaccagcaagaacgaccaat

SEQ ID NO: 2243628 - DNA, 25 bp, Homo sapien
ctgcatcattcaccagcaagaacga

SEQ ID NO: 2243629 - DNA, 25 bp, Homo sapien
agatgatagataaagactattacca

SEQ ID NO: 2243630 - DNA, 25 bp, Homo sapien
gatgatagataaagactattaccac

SEQ ID NO: 2243631 - DNA, 25 bp, Homo sapien
agtgaagttggtgaaccctggtatc

SEQ ID NO: 2243632 - DNA, 25 bp, Homo sapien
tatcttggttggagttgagagtgct

SEQ ID NO: 2243633 - DNA, 25 bp, Homo sapien
tgttttgtgcaatgagcacctgcaa

SEQ ID NO: 2243634 - DNA, 25 bp, Homo sapien
gcacctgcaatgttgcaagtgaagt

SEQ ID NO: 2243635 - DNA, 25 bp, Homo sapien
cgttgatgaattagtatgaattggg

SEQ ID NO: 2243636 - DNA, 25 bp, Homo sapien
gttatgcatgccgtatatttacccc

SEQ ID NO: 2243637 - DNA, 25 bp, Homo sapien
ctaggcatggaaacgttgatgaatt

SEQ ID NO: 2243638 - DNA, 25 bp, Homo sapien
gggcctggtttgcaatgtgatttgc

SEQ ID NO: 2243639 - DNA, 25 bp, Homo sapien
taggagggtgccagagcacaggcag

SEQ ID NO: 2243640 - DNA, 25 bp, Homo sapien
aatgcacaggaaaaaggatgagctc

SEQ ID NO: 2243641 - DNA, 25 bp, Homo sapien
gcacaggcagtcattgtttgggtat

SEQ ID NO: 2243642 - DNA, 25 bp, Homo sapien
gcagtcattgtttgggtattgactc

SEQ ID NO: 2243643 - DNA, 25 bp, Homo sapien
ctttcttcctgcaactgcagatggc

SEQ ID NO: 2243644 - DNA, 25 bp, Homo sapien
tgcagatggcgctggaccctcaaat

SEQ ID NO: 2243645 - DNA, 25 bp, Homo sapien
cctgcaactgcagatggcgctggac

SEQ ID NO: 2243646 - DNA, 25 bp, Homo sapien
tggcgctggaccctcaaatagtccc

SEQ ID NO: 2243647 - DNA, 25 bp, Homo sapien
caacacaatgcataaaacaacagag

SEQ ID NO: 2243648 - DNA, 25 bp, Homo sapien
caacaacacaatgcataaaacaaca

SEQ ID NO: 2243649 - DNA, 25 bp, Homo sapien
acacaatgcataaaacaacagagac

SEQ ID NO: 2243650 - DNA, 25 bp, Homo sapien
cacaatgcataaaacaacagagacc

SEQ ID NO: 2243651 - DNA, 25 bp, Homo sapien
ctcgggctcctactgatactttcat

SEQ ID NO: 2243652 - DNA, 25 bp, Homo sapien
ccaccacctggacctcgggctccta

SEQ ID NO: 2243653 - DNA, 25 bp, Homo sapien
ctggacctcgggctcctactgatac

SEQ ID NO: 2243654 - DNA, 25 bp, Homo sapien
gacctcgggctcctactgatacttt

SEQ ID NO: 2243655 - DNA, 25 bp, Homo sapien
taacttcctgatatagatgtccagc

SEQ ID NO: 2243656 - DNA, 25 bp, Homo sapien
agcatgccttgctgattgatgatgt

SEQ ID NO: 2243657 - DNA, 25 bp, Homo sapien
gacacaggaatcaaggaatgttctg

SEQ ID NO: 2243658 - DNA, 25 bp, Homo sapien
gatgaaaccatcctttcaggaccat

SEQ ID NO: 2243659 - DNA, 25 bp, Homo sapien
cagtgcatgtgaattctgaacatat

SEQ ID NO: 2243660 - DNA, 25 bp, Homo sapien
ttataagatgtggagagacagatga

SEQ ID NO: 2243661 - DNA, 25 bp, Homo sapien
gctctgtgtccagagaaatttaacg

SEQ ID NO: 2243662 - DNA, 25 bp, Homo sapien
agctgacagccagatatctattgca

SEQ ID NO: 2243663 - DNA, 25 bp, Homo sapien
tggtgcaaagggtgacttgcacatt

SEQ ID NO: 2243664 - DNA, 25 bp, Homo sapien
tgtacagtaaatggtttccactggg

SEQ ID NO: 2243665 - DNA, 25 bp, Homo sapien
aatgtctgtacagtaaatggtttcc

SEQ ID NO: 2243666 - DNA, 25 bp, Homo sapien
caaagggtgacttgcacattgttga

SEQ ID NO: 2243667 - DNA, 25 bp, Homo sapien
tcttaagtatatctggaaagtgatc

SEQ ID NO: 2243668 - DNA, 25 bp, Homo sapien
agtatatctggaaagtgatctgtcc

SEQ ID NO: 2243669 - DNA, 25 bp, Homo sapien
actcttaagtatatctggaaagtga

SEQ ID NO: 2243670 - DNA, 25 bp, Homo sapien
ttaagtatatctggaaagtgatctg

SEQ ID NO: 2243671 - DNA, 25 bp, Homo sapien
acaccaaaaggacctagctctgtag

SEQ ID NO: 2243672 - DNA, 25 bp, Homo sapien
aagcaaaagtgcaagcaagtacaga

SEQ ID NO: 2243673 - DNA, 25 bp, Homo sapien
caagcaagtacagaaaaaggtggtt

SEQ ID NO: 2243674 - DNA, 25 bp, Homo sapien
cagaaaaaatctcctagaacaccaa

SEQ ID NO: 2243675 - DNA, 25 bp, Homo sapien
ttttttccacatccctgtcaccatt

SEQ ID NO: 2243676 - DNA, 25 bp, Homo sapien
ttccacatccctgtcaccattatca

SEQ ID NO: 2243677 - DNA, 25 bp, Homo sapien
ttgggttttttccacatccctgtca

SEQ ID NO: 2243678 - DNA, 25 bp, Homo sapien
ggttttttccacatccctgtcacca

SEQ ID NO: 2243679 - DNA, 25 bp, Homo sapien
tcttgagtaattagccaggaaatct

SEQ ID NO: 2243680 - DNA, 25 bp, Homo sapien
cactcttaggttagctagtcttgag

SEQ ID NO: 2243681 - DNA, 25 bp, Homo sapien
gccattcctggatattcatgctaga

SEQ ID NO: 2243682 - DNA, 25 bp, Homo sapien
taaacaggaaggaccgtgagtgaat

SEQ ID NO: 2243683 - DNA, 25 bp, Homo sapien
ctgatgatgaaaagggatacctgca

SEQ ID NO: 2243684 - DNA, 25 bp, Homo sapien
agctgatgatgaaaagggatacctg

SEQ ID NO: 2243685 - DNA, 25 bp, Homo sapien
gctgatgatgaaaagggatacctgc

SEQ ID NO: 2243686 - DNA, 25 bp, Homo sapien
atcatcagactcctcagattcttct

SEQ ID NO: 2243687 - DNA, 25 bp, Homo sapien
tcatcatcagactcctcagattctt

SEQ ID NO: 2243688 - DNA, 25 bp, Homo sapien
gtcaaaaagaccaaagcccatgtca

SEQ ID NO: 2243689 - DNA, 25 bp, Homo sapien
tttgcttccagtttcttctcctcag

SEQ ID NO: 2243690 - DNA, 25 bp, Homo sapien
accggcgagaagctcctgcttgcca

SEQ ID NO: 2243691 - DNA, 25 bp, Homo sapien
aggtggttgacttgtgcctggctgc

SEQ ID NO: 2243692 - DNA, 25 bp, Homo sapien
ctcctcctcggcctgcccaagagtc

SEQ ID NO: 2243693 - DNA, 25 bp, Homo sapien
gcatctcccttgcacagttctcctc

SEQ ID NO: 2243694 - DNA, 25 bp, Homo sapien
tccacagtttaccttcgctccggga

SEQ ID NO: 2243695 - DNA, 25 bp, Homo sapien
ccttttggggcagctgcagagaatg

SEQ ID NO: 2243696 - DNA, 25 bp, Homo sapien
gagaatgccatttcgggtggtgaaa

SEQ ID NO: 2243697 - DNA, 25 bp, Homo sapien
gggcagctgcagagaatgccatttc

SEQ ID NO: 2243698 - DNA, 25 bp, Homo sapien
tatgtttgcatgttcacttccaaga

SEQ ID NO: 2243699 - DNA, 25 bp, Homo sapien
ttgcatgttcacttccaagagcctt

SEQ ID NO: 2243700 - DNA, 25 bp, Homo sapien
tttgcatgttcacttccaagagcct

SEQ ID NO: 2243701 - DNA, 25 bp, Homo sapien
tgaattatgtttgcatgttcacttc

SEQ ID NO: 2243702 - DNA, 25 bp, Homo sapien
caaaagaccatttaactgcagccag

SEQ ID NO: 2243703 - DNA, 25 bp, Homo sapien
aatgcatgcttctggcctgaaagcc

SEQ ID NO: 2243704 - DNA, 25 bp, Homo sapien
tgcagccagagaacatgaacctgta

SEQ ID NO: 2243705 - DNA, 25 bp, Homo sapien
cagtcacttttcagcacaggagagc

SEQ ID NO: 2243706 - DNA, 25 bp, Homo sapien
gaaacaaccatggagtattccctgc

SEQ ID NO: 2243707 - DNA, 25 bp, Homo sapien
cagaatgttcttcataggagagtcc

SEQ ID NO: 2243708 - DNA, 25 bp, Homo sapien
tgcagaactgcaagtcaatgaaggc

SEQ ID NO: 2243709 - DNA, 25 bp, Homo sapien
taacttactcgaatggtgtgtggct

SEQ ID NO: 2243710 - DNA, 25 bp, Homo sapien
cttgattcgatttcctgaagatggc

SEQ ID NO: 2243711 - DNA, 25 bp, Homo sapien
tgtatgtatcggcatcccagacacg

SEQ ID NO: 2243712 - DNA, 25 bp, Homo sapien
ctgaaacaatgtggcagcaactgct

SEQ ID NO: 2243713 - DNA, 25 bp, Homo sapien
gtaaattaccgttcatgtgcacaaa

SEQ ID NO: 2243714 - DNA, 25 bp, Homo sapien
accatcttccgtcacattgaaaggc

SEQ ID NO: 2243715 - DNA, 25 bp, Homo sapien
ataccatcttccgtcacattgaaag

SEQ ID NO: 2243716 - DNA, 25 bp, Homo sapien
aaaataccatcttccgtcacattga

SEQ ID NO: 2243717 - DNA, 25 bp, Homo sapien
tcacattgaaaggcagttggatatg

SEQ ID NO: 2243718 - DNA, 25 bp, Homo sapien
cagtctttggtgacgcaaaggcaga

SEQ ID NO: 2243719 - DNA, 25 bp, Homo sapien
aaacaggcagtctttggtgacgcaa

SEQ ID NO: 2243720 - DNA, 25 bp, Homo sapien
tttaaaaacaggcagtctttggtga

SEQ ID NO: 2243721 - DNA, 25 bp, Homo sapien
gtgacgcaaaggcagagatattttt

SEQ ID NO: 2243722 - DNA, 25 bp, Homo sapien
tctaaatactgctcaacagacaaaa

SEQ ID NO: 2243723 - DNA, 25 bp, Homo sapien
tcctgcctatttcgctctgtctcat

SEQ ID NO: 2243724 - DNA, 25 bp, Homo sapien
tcgctctgtctcataaagtgaatat

SEQ ID NO: 2243725 - DNA, 25 bp, Homo sapien
taaatactgctcaacagacaaaaca

SEQ ID NO: 2243726 - DNA, 25 bp, Homo sapien
tcccataccggatgttgaagcacag

SEQ ID NO: 2243727 - DNA, 25 bp, Homo sapien
ttaatgaagtagtgagtgtccctcc

SEQ ID NO: 2243728 - DNA, 25 bp, Homo sapien
tggagctgaatatctgcaaaccgtc

SEQ ID NO: 2243729 - DNA, 25 bp, Homo sapien
ggagttcacactgaatgcccaggat

SEQ ID NO: 2243730 - DNA, 25 bp, Homo sapien
gccgtagaagctcgtaagttaattc

SEQ ID NO: 2243731 - DNA, 25 bp, Homo sapien
ccaggtagtacattgtgtaattgga

SEQ ID NO: 2243732 - DNA, 25 bp, Homo sapien
ctaattcaggtttgggaaatccagg

SEQ ID NO: 2243733 - DNA, 25 bp, Homo sapien
tttccaggatcccactcttgagttt

SEQ ID NO: 2243734 - DNA, 25 bp, Homo sapien
gatcgtaactataacgccactgggt

SEQ ID NO: 2243735 - DNA, 25 bp, Homo sapien
taactccatggcaataaggtgacct

SEQ ID NO: 2243736 - DNA, 25 bp, Homo sapien
taggctggacttactcgcgacacgt

SEQ ID NO: 2243737 - DNA, 25 bp, Homo sapien
tagtcgaaccgtgcattcacaaggc

SEQ ID NO: 2243738 - DNA, 25 bp, Homo sapien
gatgttccggtagtagcccactgaa

SEQ ID NO: 2243739 - DNA, 25 bp, Homo sapien
tactcaaagatgtaacgccgctggc

SEQ ID NO: 2243740 - DNA, 25 bp, Homo sapien
cagggtctgtagcaatcggccatct

SEQ ID NO: 2243741 - DNA, 25 bp, Homo sapien
taaaagaagtgctactgtccggtgg

SEQ ID NO: 2243742 - DNA, 25 bp, Homo sapien
tatatctgcttacaggagaccacag

SEQ ID NO: 2243743 - DNA, 25 bp, Homo sapien
tcatcatagatctttcctgtgcggg

SEQ ID NO: 2243744 - DNA, 25 bp, Homo sapien
gagaccacagaatgggtcgcccagt

SEQ ID NO: 2243745 - DNA, 25 bp, Homo sapien
tgaataaacgtcaccaatcccgaag

SEQ ID NO: 2243746 - DNA, 25 bp, Homo sapien
tgcatttgcccagggtagggttgac

SEQ ID NO: 2243747 - DNA, 25 bp, Homo sapien
gaaccatctggattcacccgatagg

SEQ ID NO: 2243748 - DNA, 25 bp, Homo sapien
tggcaaaagtgacacgcagggaacc

SEQ ID NO: 2243749 - DNA, 25 bp, Homo sapien
tctgccgccactcgatgaggtttgc

SEQ ID NO: 2243750 - DNA, 25 bp, Homo sapien
gccgtactccacaaaataccactaa

SEQ ID NO: 2243751 - DNA, 25 bp, Homo sapien
atcacagttgccgtactccacaaaa

SEQ ID NO: 2243752 - DNA, 25 bp, Homo sapien
gtgtactcttagagtgtctggtgtc

SEQ ID NO: 2243753 - DNA, 25 bp, Homo sapien
ctaacaaaagttagtgtactcttag

SEQ ID NO: 2243754 - DNA, 25 bp, Homo sapien
tcaagttggttgacatgaggacatt

SEQ ID NO: 2243755 - DNA, 25 bp, Homo sapien
tatatatggtactagttgccgtcaa

SEQ ID NO: 2243756 - DNA, 25 bp, Homo sapien
ttcacggttggaagtatctagctcc

SEQ ID NO: 2243757 - DNA, 25 bp, Homo sapien
ttgcattggtcaggtgtccctcggg

SEQ ID NO: 2243758 - DNA, 25 bp, Homo sapien
ttgatgtggagctgttcttttattg

SEQ ID NO: 2243759 - DNA, 25 bp, Homo sapien
tgatgtggagctgttcttttattgc

SEQ ID NO: 2243760 - DNA, 25 bp, Homo sapien
tttgatgtggagctgttcttttatt

SEQ ID NO: 2243761 - DNA, 25 bp, Homo sapien
atggtatctgcagggtggtgtctct

SEQ ID NO: 2243762 - DNA, 25 bp, Homo sapien
ctctgatgctcaatatggccctgga

SEQ ID NO: 2243763 - DNA, 25 bp, Homo sapien
aattctgctagttcacagttaaagc

SEQ ID NO: 2243764 - DNA, 25 bp, Homo sapien
ggatcaaaacatacagatcccacct

SEQ ID NO: 2243765 - DNA, 25 bp, Homo sapien
cctgatcagcgggtgaagcaatctc

SEQ ID NO: 2243766 - DNA, 25 bp, Homo sapien
cctgctgatggtacgaattcgaaca

SEQ ID NO: 2243767 - DNA, 25 bp, Homo sapien
tcagccagtatacttgtccgccagg

SEQ ID NO: 2243768 - DNA, 25 bp, Homo sapien
gaacatttccgaggtctgccacata

SEQ ID NO: 2243769 - DNA, 25 bp, Homo sapien
tgtccataggatttactgcaaggtc

SEQ ID NO: 2243770 - DNA, 25 bp, Homo sapien
tgaattgctaccttgctgaccagga

SEQ ID NO: 2243771 - DNA, 25 bp, Homo sapien
caattttgcagtcacagtcagtggg

SEQ ID NO: 2243772 - DNA, 25 bp, Homo sapien
tttcagctatgaagagcagcccgct

SEQ ID NO: 2243773 - DNA, 25 bp, Homo sapien
aacacataccattaggttaccatgt

SEQ ID NO: 2243774 - DNA, 25 bp, Homo sapien
cataccattaggttaccatgtcttt

SEQ ID NO: 2243775 - DNA, 25 bp, Homo sapien
ctgtgaaacgaacagaacacatacc

SEQ ID NO: 2243776 - DNA, 25 bp, Homo sapien
aacgaacagaacacataccattagg

SEQ ID NO: 2243777 - DNA, 25 bp, Homo sapien
catgtggggctctttgcccatgtct

SEQ ID NO: 2243778 - DNA, 25 bp, Homo sapien
caccatgtggggctctttgcccatg

SEQ ID NO: 2243779 - DNA, 25 bp, Homo sapien
tttgcccatgtctgagtctctccca

SEQ ID NO: 2243780 - DNA, 25 bp, Homo sapien
tgagtctctcccatacatccagcag

SEQ ID NO: 2243781 - DNA, 25 bp, Homo sapien
ataaccctgagcataaaggagctct

SEQ ID NO: 2243782 - DNA, 25 bp, Homo sapien
tctcccaacaaccttccctgagaaa

SEQ ID NO: 2243783 - DNA, 25 bp, Homo sapien
taaccctgagcataaaggagctctt

SEQ ID NO: 2243784 - DNA, 25 bp, Homo sapien
gtggaatgtgcctatctcccaacaa

SEQ ID NO: 2243785 - DNA, 25 bp, Homo sapien
taacaggcataattgctctgagttt

SEQ ID NO: 2243786 - DNA, 25 bp, Homo sapien
gagtttccgtcgaccctttcttgca

SEQ ID NO: 2243787 - DNA, 25 bp, Homo sapien
ttaataacaggcataattgctctga

SEQ ID NO: 2243788 - DNA, 25 bp, Homo sapien
tgaagcctcaattttggaaatggca

SEQ ID NO: 2243789 - DNA, 25 bp, Homo sapien
caaaagcaggtttgcaagccttgca

SEQ ID NO: 2243790 - DNA, 25 bp, Homo sapien
ttaaggcccctgacaactttggcta

SEQ ID NO: 2243791 - DNA, 25 bp, Homo sapien
taataagagctaacgtgccattgtc

SEQ ID NO: 2243792 - DNA, 25 bp, Homo sapien
cattgagcacggtacttgactttta

SEQ ID NO: 2243793 - DNA, 25 bp, Homo sapien
cagtgggctgcattgtatttcccaa

SEQ ID NO: 2243794 - DNA, 25 bp, Homo sapien
agtgggctgcattgtatttcccaac

SEQ ID NO: 2243795 - DNA, 25 bp, Homo sapien
gattttgtagaattgtggtaaaatc

SEQ ID NO: 2243796 - DNA, 25 bp, Homo sapien
tgattttgtagaattgtggtaaaat

SEQ ID NO: 2243797 - DNA, 25 bp, Homo sapien
agaattttggacccagatgagagct

SEQ ID NO: 2243798 - DNA, 25 bp, Homo sapien
gaattttggacccagatgagagcta

SEQ ID NO: 2243799 - DNA, 25 bp, Homo sapien
tgacaataatacttgaaaaccagtg

SEQ ID NO: 2243800 - DNA, 25 bp, Homo sapien
atacttgaaaaccagtgatgcctac

SEQ ID NO: 2243801 - DNA, 25 bp, Homo sapien
ctacatgagaaaattgttatccatt

SEQ ID NO: 2243802 - DNA, 25 bp, Homo sapien
catgagaaaattgttatccatttcc

SEQ ID NO: 2243803 - DNA, 25 bp, Homo sapien
aaatccatgcctatcaactgtgatg

SEQ ID NO: 2243804 - DNA, 25 bp, Homo sapien
ccatttgagccgattacagttgtga

SEQ ID NO: 2243805 - DNA, 25 bp, Homo sapien
catcaattttgcgaatcatagtccc

SEQ ID NO: 2243806 - DNA, 25 bp, Homo sapien
tcctgagtcacagctcagtggttgt

SEQ ID NO: 2243807 - DNA, 25 bp, Homo sapien
cagggcttgttctgctgacagtttg

SEQ ID NO: 2243808 - DNA, 25 bp, Homo sapien
tcagggcttgttctgctgacagttt

SEQ ID NO: 2243809 - DNA, 25 bp, Homo sapien
cataaagccatctggggctagcaag

SEQ ID NO: 2243810 - DNA, 25 bp, Homo sapien
acataaagccatctggggctagcaa

SEQ ID NO: 2243811 - DNA, 25 bp, Homo sapien
gggctagcaagatctgcagattcaa

SEQ ID NO: 2243812 - DNA, 25 bp, Homo sapien
ggggctagcaagatctgcagattca

SEQ ID NO: 2243813 - DNA, 25 bp, Homo sapien
tgggcaaaatttgttccaacggtca

SEQ ID NO: 2243814 - DNA, 25 bp, Homo sapien
cacttaaacaatcaaaggtacagtc

SEQ ID NO: 2243815 - DNA, 25 bp, Homo sapien
ttgttccaacggtcatgttcattga

SEQ ID NO: 2243816 - DNA, 25 bp, Homo sapien
tcattagcacttaaacaatcaaagg

SEQ ID NO: 2243817 - DNA, 25 bp, Homo sapien
gcagttgtttaatgagataaacaac

SEQ ID NO: 2243818 - DNA, 25 bp, Homo sapien
aagcagttgtttaatgagataaaca

SEQ ID NO: 2243819 - DNA, 25 bp, Homo sapien
tcaaagcagttgtttaatgagataa

SEQ ID NO: 2243820 - DNA, 25 bp, Homo sapien
caaagcagttgtttaatgagataaa

SEQ ID NO: 2243821 - DNA, 25 bp, Homo sapien
tccacactctgacctacaagtgtga

SEQ ID NO: 2243822 - DNA, 25 bp, Homo sapien
ccacactctgacctacaagtgtgac

SEQ ID NO: 2243823 - DNA, 25 bp, Homo sapien
gtcttgattgagattggagtttcca

SEQ ID NO: 2243824 - DNA, 25 bp, Homo sapien
ttccttatccttgtcttgattgaga

SEQ ID NO: 2243825 - DNA, 25 bp, Homo sapien
catttccctgtctattttcctctaa

SEQ ID NO: 2243826 - DNA, 25 bp, Homo sapien
gagattggagtttccaaggccattt

SEQ ID NO: 2243827 - DNA, 25 bp, Homo sapien
atgagaggtggagtaaagagtctgg

SEQ ID NO: 2243828 - DNA, 25 bp, Homo sapien
ctatgagaggtggagtaaagagtct

SEQ ID NO: 2243829 - DNA, 25 bp, Homo sapien
tatgagaggtggagtaaagagtctg

SEQ ID NO: 2243830 - DNA, 25 bp, Homo sapien
tgagaggtggagtaaagagtctggg

SEQ ID NO: 2243831 - DNA, 25 bp, Homo sapien
ctttgtgtcccatcctttttcagat

SEQ ID NO: 2243832 - DNA, 25 bp, Homo sapien
ttttctccacttcttccctgttctc

SEQ ID NO: 2243833 - DNA, 25 bp, Homo sapien
ttgtgtcccatcctttttcagattc

SEQ ID NO: 2243834 - DNA, 25 bp, Homo sapien
gtcccatcctttttcagattccttc

SEQ ID NO: 2243835 - DNA, 25 bp, Homo sapien
aaatctgaccatatgaagttagaaa

SEQ ID NO: 2243836 - DNA, 25 bp, Homo sapien
aagaagatatattgataaatctgac

SEQ ID NO: 2243837 - DNA, 25 bp, Homo sapien
tctttacgacaggaagattcttcca

SEQ ID NO: 2243838 - DNA, 25 bp, Homo sapien
gacacaaactctagagatgttaaga

SEQ ID NO: 2243839 - DNA, 25 bp, Homo sapien
ggagtaacccattgtcaaccatcag

SEQ ID NO: 2243840 - DNA, 25 bp, Homo sapien
tactatgacactccttcttggagag

SEQ ID NO: 2243841 - DNA, 25 bp, Homo sapien
taacatgctcaggtgggagtaaccc

SEQ ID NO: 2243842 - DNA, 25 bp, Homo sapien
cttcagcaggtctcctgtaacatgc

SEQ ID NO: 2243843 - DNA, 25 bp, Homo sapien
gggtggtgaggactcttctttttca

SEQ ID NO: 2243844 - DNA, 25 bp, Homo sapien
ttttggcaggggtggtgaggactct

SEQ ID NO: 2243845 - DNA, 25 bp, Homo sapien
gcaggggtggtgaggactcttcttt

SEQ ID NO: 2243846 - DNA, 25 bp, Homo sapien
tcacttttttggcaggggtggtgag

SEQ ID NO: 2243847 - DNA, 25 bp, Homo sapien
ttgctggactgtggggagtttccag

SEQ ID NO: 2243848 - DNA, 25 bp, Homo sapien
ctgtggggagtttccaggaggtaat

SEQ ID NO: 2243849 - DNA, 25 bp, Homo sapien
ttagttgctggactgtggggagttt

SEQ ID NO: 2243850 - DNA, 25 bp, Homo sapien
gactgtggggagtttccaggaggta

SEQ ID NO: 2243851 - DNA, 25 bp, Homo sapien
gctattcagtgaagcttccgatgct

SEQ ID NO: 2243852 - DNA, 25 bp, Homo sapien
gagggctattcagtgaagcttccga

SEQ ID NO: 2243853 - DNA, 25 bp, Homo sapien
ctcgagggctattcagtgaagcttc

SEQ ID NO: 2243854 - DNA, 25 bp, Homo sapien
tattcagtgaagcttccgatgctct

SEQ ID NO: 2243855 - DNA, 25 bp, Homo sapien
gatttcaacttgtagactttgcgag

SEQ ID NO: 2243856 - DNA, 25 bp, Homo sapien
ccatagccagatagtatttgtgagc

SEQ ID NO: 2243857 - DNA, 25 bp, Homo sapien
gattcagacacagggtccatagcca

SEQ ID NO: 2243858 - DNA, 25 bp, Homo sapien
ggacagatctttcgtctccacaaga

SEQ ID NO: 2243859 - DNA, 25 bp, Homo sapien
cttggaagtattgagatccatgtca

SEQ ID NO: 2243860 - DNA, 25 bp, Homo sapien
ttggaagtattgagatccatgtcag

SEQ ID NO: 2243861 - DNA, 25 bp, Homo sapien
gcttggaagtattgagatccatgtc

SEQ ID NO: 2243862 - DNA, 25 bp, Homo sapien
tggaagtattgagatccatgtcagt

SEQ ID NO: 2243863 - DNA, 25 bp, Homo sapien
tacccattatggttgatatgactgg

SEQ ID NO: 2243864 - DNA, 25 bp, Homo sapien
tctccttacaaaattgaagtcgcca

SEQ ID NO: 2243865 - DNA, 25 bp, Homo sapien
ctaaggcgacaggagcaaagagttt

SEQ ID NO: 2243866 - DNA, 25 bp, Homo sapien
ccattgcagttggtgcaggctacac

SEQ ID NO: 2243867 - DNA, 25 bp, Homo sapien
tgtaaaacgactgtcctttgctccc

SEQ ID NO: 2243868 - DNA, 25 bp, Homo sapien
tcagggcacgtttcatattcatatc

SEQ ID NO: 2243869 - DNA, 25 bp, Homo sapien
tattcaaagaccagcctcctaggtt

SEQ ID NO: 2243870 - DNA, 25 bp, Homo sapien
ccagagaataaagtcagggcacgtt

SEQ ID NO: 2243871 - DNA, 25 bp, Homo sapien
gaacactggctcattatactgcata

SEQ ID NO: 2243872 - DNA, 25 bp, Homo sapien
cctcataatgttctaagcctgagaa

SEQ ID NO: 2243873 - DNA, 25 bp, Homo sapien
tactgcatatcctgaagcggctttc

SEQ ID NO: 2243874 - DNA, 25 bp, Homo sapien
ttaaaatagcccctgttggtctgtg

SEQ ID NO: 2243875 - DNA, 25 bp, Homo sapien
tctgcctgactctttagatgcccct

SEQ ID NO: 2243876 - DNA, 25 bp, Homo sapien
gatgcccctgaagagctcagtcctt

SEQ ID NO: 2243877 - DNA, 25 bp, Homo sapien
agctttcgagtacctgcctctgcct

SEQ ID NO: 2243878 - DNA, 25 bp, Homo sapien
ctttagatgcccctgaagagctcag

SEQ ID NO: 2243879 - DNA, 25 bp, Homo sapien
tgaaaatggactggctatcctttga

SEQ ID NO: 2243880 - DNA, 25 bp, Homo sapien
ttgaaaatggactggctatcctttg

SEQ ID NO: 2243881 - DNA, 25 bp, Homo sapien
cttgaaaatggactggctatccttt

SEQ ID NO: 2243882 - DNA, 25 bp, Homo sapien
gaaaatggactggctatcctttgaa

SEQ ID NO: 2243883 - DNA, 25 bp, Homo sapien
tgagatacacagcaagttagcagac

SEQ ID NO: 2243884 - DNA, 25 bp, Homo sapien
taaatggctgacacaatacaatatt

SEQ ID NO: 2243885 - DNA, 25 bp, Homo sapien
tttctctaagaggaacctgaatatg

SEQ ID NO: 2243886 - DNA, 25 bp, Homo sapien
aagggtgttctggactgcacagtaa

SEQ ID NO: 2243887 - DNA, 25 bp, Homo sapien
catagatgtcggtcttgttccaagc

SEQ ID NO: 2243888 - DNA, 25 bp, Homo sapien
cctacaggaatcgttgaatgtgtca

SEQ ID NO: 2243889 - DNA, 25 bp, Homo sapien
taattgcggcgggaaaccacttctg

SEQ ID NO: 2243890 - DNA, 25 bp, Homo sapien
tgtcagaaggatccgtagcagggtt

SEQ ID NO: 2243891 - DNA, 25 bp, Homo sapien
tgctgaaagaagacccgtacttcct

SEQ ID NO: 2243892 - DNA, 25 bp, Homo sapien
catctgtgaagggattggcatacca

SEQ ID NO: 2243893 - DNA, 25 bp, Homo sapien
ccaatcaaatgtactcattaaacac

SEQ ID NO: 2243894 - DNA, 25 bp, Homo sapien
aagcctggaaactttcgtgctgaaa

SEQ ID NO: 2243895 - DNA, 25 bp, Homo sapien
tacaactctctgcatggtgactttc

SEQ ID NO: 2243896 - DNA, 25 bp, Homo sapien
gacaggaccctccaaatgatgtgag

SEQ ID NO: 2243897 - DNA, 25 bp, Homo sapien
tccaaggcaaccagagtgttctctt

SEQ ID NO: 2243898 - DNA, 25 bp, Homo sapien
ggatggcgggtctgatacaactctc

SEQ ID NO: 2243899 - DNA, 25 bp, Homo sapien
tcttgccggctgatggtaaacccat

SEQ ID NO: 2243900 - DNA, 25 bp, Homo sapien
tatggccaccacttggcctcgaatc

SEQ ID NO: 2243901 - DNA, 25 bp, Homo sapien
cactagaggagttccatctatggcc

SEQ ID NO: 2243902 - DNA, 25 bp, Homo sapien
atcactgtggtgcaagaaactgaca

SEQ ID NO: 2243903 - DNA, 25 bp, Homo sapien
tttatgaaggtccaagctggtgagt

SEQ ID NO: 2243904 - DNA, 25 bp, Homo sapien
tctatatggcttatatttatgaagg

SEQ ID NO: 2243905 - DNA, 25 bp, Homo sapien
tatctcgttctgagtagacttgtct

SEQ ID NO: 2243906 - DNA, 25 bp, Homo sapien
ttccttcattctgtatctcgttctg

SEQ ID NO: 2243907 - DNA, 25 bp, Homo sapien
caaaagtacgcttgctttggaggtc

SEQ ID NO: 2243908 - DNA, 25 bp, Homo sapien
tgggaaaaagatcaagtgttttgaa

SEQ ID NO: 2243909 - DNA, 25 bp, Homo sapien
ccaaagtaatgggaaaaagatcaag

SEQ ID NO: 2243910 - DNA, 25 bp, Homo sapien
taattgcttgtcaaaagtacgcttg

SEQ ID NO: 2243911 - DNA, 25 bp, Homo sapien
tattcagcaattgtcgcactgtgta

SEQ ID NO: 2243912 - DNA, 25 bp, Homo sapien
ccgattcttagtctattcaatttat

SEQ ID NO: 2243913 - DNA, 25 bp, Homo sapien
ccctagttgtgtacttggtgtaatg

SEQ ID NO: 2243914 - DNA, 25 bp, Homo sapien
gcactgtgtatttatcaacccctag

SEQ ID NO: 2243915 - DNA, 25 bp, Homo sapien
gatcccctggcagaaaagccctttc

SEQ ID NO: 2243916 - DNA, 25 bp, Homo sapien
ttggattttgggttctgccagagac

SEQ ID NO: 2243917 - DNA, 25 bp, Homo sapien
agccctttcttgtgattcactggca

SEQ ID NO: 2243918 - DNA, 25 bp, Homo sapien
tcactggcagttggattttgggttc

SEQ ID NO: 2243919 - DNA, 25 bp, Homo sapien
catgagtactgtccttgccaatgag

SEQ ID NO: 2243920 - DNA, 25 bp, Homo sapien
tgctgaatgaggtcaagaggatctg

SEQ ID NO: 2243921 - DNA, 25 bp, Homo sapien
ggatccacacagtcggttaaaccat

SEQ ID NO: 2243922 - DNA, 25 bp, Homo sapien
ccctggcagagaggacttatataac

SEQ ID NO: 2243923 - DNA, 25 bp, Homo sapien
ccaaaaccaatattgattatttagc

SEQ ID NO: 2243924 - DNA, 25 bp, Homo sapien
ttatttagcttcaagagaaaaatat

SEQ ID NO: 2243925 - DNA, 25 bp, Homo sapien
ttgattatttagcttcaagagaaaa

SEQ ID NO: 2243926 - DNA, 25 bp, Homo sapien
caatattgattatttagcttcaaga

SEQ ID NO: 2243927 - DNA, 25 bp, Homo sapien
cagtgccaaccattttgatccaggg

SEQ ID NO: 2243928 - DNA, 25 bp, Homo sapien
ccaagttatctccacaaagcatttc

SEQ ID NO: 2243929 - DNA, 25 bp, Homo sapien
ggtacatcgtccatttccaaagcag

SEQ ID NO: 2243930 - DNA, 25 bp, Homo sapien
gacaacattgcagcctgtcccactc

SEQ ID NO: 2243931 - DNA, 25 bp, Homo sapien
cattggccatgctcagtacaatgag

SEQ ID NO: 2243932 - DNA, 25 bp, Homo sapien
gcaaattcctcttgagcagactcca

SEQ ID NO: 2243933 - DNA, 25 bp, Homo sapien
acaatgagaatgacaggagcgttcc

SEQ ID NO: 2243934 - DNA, 25 bp, Homo sapien
ccatccagggctacactcacatttt

SEQ ID NO: 2243935 - DNA, 25 bp, Homo sapien
cacgagtcggataggattcagcaca

SEQ ID NO: 2243936 - DNA, 25 bp, Homo sapien
ccaaatagagtttctggactgattc

SEQ ID NO: 2243937 - DNA, 25 bp, Homo sapien
ccaggtgggaagcaatatcctcatg

SEQ ID NO: 2243938 - DNA, 25 bp, Homo sapien
tcagcacagtaagaatccaggtggg

SEQ ID NO: 2243939 - DNA, 25 bp, Homo sapien
tatccaagcctccattgataggcat

SEQ ID NO: 2243940 - DNA, 25 bp, Homo sapien
ctcaagtctctgttactgtgagtag

SEQ ID NO: 2243941 - DNA, 25 bp, Homo sapien
ttaactttttcatagcagccattct

SEQ ID NO: 2243942 - DNA, 25 bp, Homo sapien
tgataggcatctaagtgatctcaag

SEQ ID NO: 2243943 - DNA, 25 bp, Homo sapien
aggtccacctacagatcttccaatg

SEQ ID NO: 2243944 - DNA, 25 bp, Homo sapien
tttatagttagacctacaagccagt

SEQ ID NO: 2243945 - DNA, 25 bp, Homo sapien
ggtaagagctagctagctacagcta

SEQ ID NO: 2243946 - DNA, 25 bp, Homo sapien
tctctcaggcaatggactgattcat

SEQ ID NO: 2243947 - DNA, 25 bp, Homo sapien
ggctctcattcttgggtctgggaaa

SEQ ID NO: 2243948 - DNA, 25 bp, Homo sapien
gctaaaatgcttgtgtggccacact

SEQ ID NO: 2243949 - DNA, 25 bp, Homo sapien
gccacacttctaggttgccaagcaa

SEQ ID NO: 2243950 - DNA, 25 bp, Homo sapien
acaaagtgctttcccttggcctagg

SEQ ID NO: 2243951 - DNA, 25 bp, Homo sapien
tataactttgtttacccaaccatga

SEQ ID NO: 2243952 - DNA, 25 bp, Homo sapien
ccatgatataggtgtaaagcagaaa

SEQ ID NO: 2243953 - DNA, 25 bp, Homo sapien
gaatagtagaacttgccttccccat

SEQ ID NO: 2243954 - DNA, 25 bp, Homo sapien
gaaatacaattatgctgtggccaac

SEQ ID NO: 2243955 - DNA, 25 bp, Homo sapien
catctattttaaccagttgccttca

SEQ ID NO: 2243956 - DNA, 25 bp, Homo sapien
catgttgtagtggactatgatctca

SEQ ID NO: 2243957 - DNA, 25 bp, Homo sapien
tgagcccaggagtatcatgttgtag

SEQ ID NO: 2243958 - DNA, 25 bp, Homo sapien
aaagtacattcaagactgggcacag

SEQ ID NO: 2243959 - DNA, 25 bp, Homo sapien
gggcaagctgtagtggtagacactt

SEQ ID NO: 2243960 - DNA, 25 bp, Homo sapien
gacactttctccataggatctctca

SEQ ID NO: 2243961 - DNA, 25 bp, Homo sapien
ttccttttgggatctattgtcactt

SEQ ID NO: 2243962 - DNA, 25 bp, Homo sapien
ccttttgggatctattgtcacttca

SEQ ID NO: 2243963 - DNA, 25 bp, Homo sapien
ggttaaagaagcctatatcaaatat

SEQ ID NO: 2243964 - DNA, 25 bp, Homo sapien
aatatcattttagagctgttaacaa

SEQ ID NO: 2243965 - DNA, 25 bp, Homo sapien
ctttgtgaagtgtcgtgaggccatc

SEQ ID NO: 2243966 - DNA, 25 bp, Homo sapien
cattttagagctgttaacaatactc

SEQ ID NO: 2243967 - DNA, 25 bp, Homo sapien
tgcctcacatgctgtcggagacata

SEQ ID NO: 2243968 - DNA, 25 bp, Homo sapien
taggcatggcatacagagaccttca

SEQ ID NO: 2243969 - DNA, 25 bp, Homo sapien
tcaagtccaagctcctaggcatggc

SEQ ID NO: 2243970 - DNA, 25 bp, Homo sapien
taccgaacgactttgctaaaatgca

SEQ ID NO: 2243971 - DNA, 25 bp, Homo sapien
gagaaggaaattaactccactacac

SEQ ID NO: 2243972 - DNA, 25 bp, Homo sapien
ggagaaggaaattaactccactaca

SEQ ID NO: 2243973 - DNA, 25 bp, Homo sapien
gagtagaggaaggagaaggaaatta

SEQ ID NO: 2243974 - DNA, 25 bp, Homo sapien
ttaagagtagaggaaggagaaggaa

SEQ ID NO: 2243975 - DNA, 25 bp, Homo sapien
ccagaagaaaagttccgtgtcctga

SEQ ID NO: 2243976 - DNA, 25 bp, Homo sapien
gatcctgtccacttgggatcacagc

SEQ ID NO: 2243977 - DNA, 25 bp, Homo sapien
tcctgtccacttgggatcacagctg

SEQ ID NO: 2243978 - DNA, 25 bp, Homo sapien
agctgcatactccagcgtccagaag

SEQ ID NO: 2243979 - DNA, 25 bp, Homo sapien
gatgccatggttggaacacattggg

SEQ ID NO: 2243980 - DNA, 25 bp, Homo sapien
gaacacattgggtctaggcagtcct

SEQ ID NO: 2243981 - DNA, 25 bp, Homo sapien
ctccccagccagtagaacagtgaca

SEQ ID NO: 2243982 - DNA, 25 bp, Homo sapien
cagccagtagaacagtgacattctc

SEQ ID NO: 2243983 - DNA, 25 bp, Homo sapien
tgattaatagtgaacaggtatggcc

SEQ ID NO: 2243984 - DNA, 25 bp, Homo sapien
aggggtgattaatagtgaacaggta

SEQ ID NO: 2243985 - DNA, 25 bp, Homo sapien
gtgattaatagtgaacaggtatggc

SEQ ID NO: 2243986 - DNA, 25 bp, Homo sapien
gggtgattaatagtgaacaggtatg

SEQ ID NO: 2243987 - DNA, 25 bp, Homo sapien
aagcaatagattaaaatgggattct

SEQ ID NO: 2243988 - DNA, 25 bp, Homo sapien
cagaatgacaccttggacaactgag

SEQ ID NO: 2243989 - DNA, 25 bp, Homo sapien
caatagattaaaatgggattctgac

SEQ ID NO: 2243990 - DNA, 25 bp, Homo sapien
ctaggagaacagaatgacaccttgg

SEQ ID NO: 2243991 - DNA, 25 bp, Homo sapien
gactcccatgatgcaggtgccgtgg

SEQ ID NO: 2243992 - DNA, 25 bp, Homo sapien
gttcttccggaacgtcacactctgg

SEQ ID NO: 2243993 - DNA, 25 bp, Homo sapien
tgccgtggccaaagcatgttggatc

SEQ ID NO: 2243994 - DNA, 25 bp, Homo sapien
acagtgtcctttctcgtattctcca

SEQ ID NO: 2243995 - DNA, 25 bp, Homo sapien
tgcaattggttgaacagtcatccat

SEQ ID NO: 2243996 - DNA, 25 bp, Homo sapien
acaatgacaatggccagagatacac

SEQ ID NO: 2243997 - DNA, 25 bp, Homo sapien
ttgcaattggttgaacagtcatcca

SEQ ID NO: 2243998 - DNA, 25 bp, Homo sapien
attgcaattggttgaacagtcatcc

SEQ ID NO: 2243999 - DNA, 25 bp, Homo sapien
cgaagttaagatcaggttccgaggg

SEQ ID NO: 2244000 - DNA, 25 bp, Homo sapien
tgtaaaacgccagataccaaggtcc

SEQ ID NO: 2244001 - DNA, 25 bp, Homo sapien
tgtatcatcagagcccttggagtcc

SEQ ID NO: 2244002 - DNA, 25 bp, Homo sapien
tgtagttaacacgaatacttgctcc

SEQ ID NO: 2244003 - DNA, 25 bp, Homo sapien
gaacttcagatatattggatggtgg

SEQ ID NO: 2244004 - DNA, 25 bp, Homo sapien
tggtggatagtaatctggaaacgcc

SEQ ID NO: 2244005 - DNA, 25 bp, Homo sapien
cagagagtccttggctaaagaaata

SEQ ID NO: 2244006 - DNA, 25 bp, Homo sapien
tggaaacgccagaataaaccaggtg

SEQ ID NO: 2244007 - DNA, 25 bp, Homo sapien
agtgtctatcgcccgtcccttctga

SEQ ID NO: 2244008 - DNA, 25 bp, Homo sapien
tgtctatcgcccgtcccttctgaaa

SEQ ID NO: 2244009 - DNA, 25 bp, Homo sapien
tccagtgtctatcgcccgtcccttc

SEQ ID NO: 2244010 - DNA, 25 bp, Homo sapien
tctccagtgtctatcgcccgtccct

SEQ ID NO: 2244011 - DNA, 25 bp, Homo sapien
ttattcatgtggtttgttgtgctta

SEQ ID NO: 2244012 - DNA, 25 bp, Homo sapien
tctattttattcatgtggtttgttg

SEQ ID NO: 2244013 - DNA, 25 bp, Homo sapien
attttattcatgtggtttgttgtgc

SEQ ID NO: 2244014 - DNA, 25 bp, Homo sapien
tattcatgtggtttgttgtgcttac

SEQ ID NO: 2244015 - DNA, 25 bp, Homo sapien
gaattattcccaattctacctcaat

SEQ ID NO: 2244016 - DNA, 25 bp, Homo sapien
tactgaaactatgggttgactcaaa

SEQ ID NO: 2244017 - DNA, 25 bp, Homo sapien
ctatgggttgactcaaagggctgct

SEQ ID NO: 2244018 - DNA, 25 bp, Homo sapien
caatatcttgggctataatatcctt

SEQ ID NO: 2244019 - DNA, 25 bp, Homo sapien
tgttttgtcaaagccttagcagctg

SEQ ID NO: 2244020 - DNA, 25 bp, Homo sapien
atagtgtgtacagctgaaagggatc

SEQ ID NO: 2244021 - DNA, 25 bp, Homo sapien
aagggatcttacagataagttagcc

SEQ ID NO: 2244022 - DNA, 25 bp, Homo sapien
ctaacgcatagtgtgtacagctgaa

SEQ ID NO: 2244023 - DNA, 25 bp, Homo sapien
tgcatacagctctccttcaactggt

SEQ ID NO: 2244024 - DNA, 25 bp, Homo sapien
caagtcaggccgaacaaatgcactg

SEQ ID NO: 2244025 - DNA, 25 bp, Homo sapien
taagtagtgtccatggactcggtcc

SEQ ID NO: 2244026 - DNA, 25 bp, Homo sapien
caactggttgcaactgccaagtcag

SEQ ID NO: 2244027 - DNA, 25 bp, Homo sapien
agctgttaaagtagctgttgttaac

SEQ ID NO: 2244028 - DNA, 25 bp, Homo sapien
ccaaatccttgacttaatatacaac

SEQ ID NO: 2244029 - DNA, 25 bp, Homo sapien
aatccttgacttaatatacaacaga

SEQ ID NO: 2244030 - DNA, 25 bp, Homo sapien
tccaaatccttgacttaatatacaa

SEQ ID NO: 2244031 - DNA, 25 bp, Homo sapien
aaatccttgacttaatatacaacag

SEQ ID NO: 2244032 - DNA, 25 bp, Homo sapien
taatctgtatatcaaactcccttga

SEQ ID NO: 2244033 - DNA, 25 bp, Homo sapien
tcaaaatttcctaatctagtagggc

SEQ ID NO: 2244034 - DNA, 25 bp, Homo sapien
cttgaactgaaagtggtgggtcaaa

SEQ ID NO: 2244035 - DNA, 25 bp, Homo sapien
tatgtttttgtccacctgacatgtc

SEQ ID NO: 2244036 - DNA, 25 bp, Homo sapien
caagcaaatgtgcttctgactggca

SEQ ID NO: 2244037 - DNA, 25 bp, Homo sapien
catatggcttatttgtaaattcaag

SEQ ID NO: 2244038 - DNA, 25 bp, Homo sapien
attcaagcaaatgtgcttctgactg

SEQ ID NO: 2244039 - DNA, 25 bp, Homo sapien
actactacttcatatggcttatttg

SEQ ID NO: 2244040 - DNA, 25 bp, Homo sapien
ccattgatatcgatgcgatttcccc

SEQ ID NO: 2244041 - DNA, 25 bp, Homo sapien
gactattgatgtcccattgatatcg

SEQ ID NO: 2244042 - DNA, 25 bp, Homo sapien
tgcacagaatgactattgatgtccc

SEQ ID NO: 2244043 - DNA, 25 bp, Homo sapien
tttcccctagtggattgagggcagc

SEQ ID NO: 2244044 - DNA, 25 bp, Homo sapien
attgcagtggcgctcaatgctgtgc

SEQ ID NO: 2244045 - DNA, 25 bp, Homo sapien
aatcacataggctagtaacaaggcc

SEQ ID NO: 2244046 - DNA, 25 bp, Homo sapien
agtcactgtgattgcagtggcgctc

SEQ ID NO: 2244047 - DNA, 25 bp, Homo sapien
caaggccaaagtcactgtgattgca

SEQ ID NO: 2244048 - DNA, 25 bp, Homo sapien
ggcaggtcgggaaaaggtgcttcga

SEQ ID NO: 2244049 - DNA, 25 bp, Homo sapien
aggcaggtcgggaaaaggtgcttcg

SEQ ID NO: 2244050 - DNA, 25 bp, Homo sapien
gcaggtcgggaaaaggtgcttcgag

SEQ ID NO: 2244051 - DNA, 25 bp, Homo sapien
ttctgactggctgcactgaagatcg

SEQ ID NO: 2244052 - DNA, 25 bp, Homo sapien
tacacggtattggatgtcagagggt

SEQ ID NO: 2244053 - DNA, 25 bp, Homo sapien
gaaccagatccatgtttgaacagga

SEQ ID NO: 2244054 - DNA, 25 bp, Homo sapien
tggctgcactgaagatcgcagagga

SEQ ID NO: 2244055 - DNA, 25 bp, Homo sapien
agcctgtaacttccagatctcactg

SEQ ID NO: 2244056 - DNA, 25 bp, Homo sapien
agaccacaggctgccgccctgcctg

SEQ ID NO: 2244057 - DNA, 25 bp, Homo sapien
cactccagcctgtaacttccagatc

SEQ ID NO: 2244058 - DNA, 25 bp, Homo sapien
cctgtaactccagctcactgtaact

SEQ ID NO: 2244059 - DNA, 25 bp, Homo sapien
tcctctgaagagagtccgctgcagg

SEQ ID NO: 2244060 - DNA, 25 bp, Homo sapien
tggctgcgggtagtcattgatctcc

SEQ ID NO: 2244061 - DNA, 25 bp, Homo sapien
tggtatgttgctgttcaggacccag

SEQ ID NO: 2244062 - DNA, 25 bp, Homo sapien
tatgcagatggactgaatcctgcgt

SEQ ID NO: 2244063 - DNA, 25 bp, Homo sapien
tgtaaattctttagggctatagcag

SEQ ID NO: 2244064 - DNA, 25 bp, Homo sapien
atgtaaattctttagggctatagca

SEQ ID NO: 2244065 - DNA, 25 bp, Homo sapien
gaaaaacgccagaggctttcgatgc

SEQ ID NO: 2244066 - DNA, 25 bp, Homo sapien
ggtttgtgctgaggcccactttgca

SEQ ID NO: 2244067 - DNA, 25 bp, Homo sapien
tgatttcttgtaacaccagcacgtt

SEQ ID NO: 2244068 - DNA, 25 bp, Homo sapien
gatgcctagcaaaggactcagctgg

SEQ ID NO: 2244069 - DNA, 25 bp, Homo sapien
tgtgagcaggtagttttaagatttg

SEQ ID NO: 2244070 - DNA, 25 bp, Homo sapien
ttaagatttgcatgttacggctaat

SEQ ID NO: 2244071 - DNA, 25 bp, Homo sapien
taacttgtgagcaggtagttttaag

SEQ ID NO: 2244072 - DNA, 25 bp, Homo sapien
ttacggctaatatccattaacttca

SEQ ID NO: 2244073 - DNA, 25 bp, Homo sapien
taacactcatccactctagcttcat

SEQ ID NO: 2244074 - DNA, 25 bp, Homo sapien
ttaacactcatccactctagcttca

SEQ ID NO: 2244075 - DNA, 25 bp, Homo sapien
aattggtaaagtcaccactcatcat

SEQ ID NO: 2244076 - DNA, 25 bp, Homo sapien
ttgactttgaagaattggtaaagtc

SEQ ID NO: 2244077 - DNA, 25 bp, Homo sapien
cattggcctttttgactttgaagaa

SEQ ID NO: 2244078 - DNA, 25 bp, Homo sapien
gaattggtaaagtcaccactcatca

SEQ ID NO: 2244079 - DNA, 25 bp, Homo sapien
gaaaactgcccactatccacagaga

SEQ ID NO: 2244080 - DNA, 25 bp, Homo sapien
caagttttactaataagatgatctc

SEQ ID NO: 2244081 - DNA, 25 bp, Homo sapien
tctgagagtcaaatactctggcagc

SEQ ID NO: 2244082 - DNA, 25 bp, Homo sapien
ggcagctggcccctgatccaagttt

SEQ ID NO: 2244083 - DNA, 25 bp, Homo sapien
tttcacactttaatgtcagattcat

SEQ ID NO: 2244084 - DNA, 25 bp, Homo sapien
ttttcacactttaatgtcagattca

SEQ ID NO: 2244085 - DNA, 25 bp, Homo sapien
cttttcacactttaatgtcagattc

SEQ ID NO: 2244086 - DNA, 25 bp, Homo sapien
gtaggatgtagccgtcaggtgtgcc

SEQ ID NO: 2244087 - DNA, 25 bp, Homo sapien
aggatgtagccgtcaggtgtgccat

SEQ ID NO: 2244088 - DNA, 25 bp, Homo sapien
ggtgtaggatgtagccgtcaggtgt

SEQ ID NO: 2244089 - DNA, 25 bp, Homo sapien
gtgtaggatgtagccgtcaggtgtg

SEQ ID NO: 2244090 - DNA, 25 bp, Homo sapien
tatctgaatagaccagtgttgtgta

SEQ ID NO: 2244091 - DNA, 25 bp, Homo sapien
tgaaggctttagtagaggcaaaatg

SEQ ID NO: 2244092 - DNA, 25 bp, Homo sapien
tgtaatgttcaatatagtgtcagtt

SEQ ID NO: 2244093 - DNA, 25 bp, Homo sapien
aatgcaactcttgccattgccgtgg

SEQ ID NO: 2244094 - DNA, 25 bp, Homo sapien
cattgacatctgagtgaatgtgaca

SEQ ID NO: 2244095 - DNA, 25 bp, Homo sapien
ccttaaacattgacatctgagtgaa

SEQ ID NO: 2244096 - DNA, 25 bp, Homo sapien
acattgacatctgagtgaatgtgac

SEQ ID NO: 2244097 - DNA, 25 bp, Homo sapien
gaaccttaaacattgacatctgagt

SEQ ID NO: 2244098 - DNA, 25 bp, Homo sapien
ctttagttatttcgacatactcacg

SEQ ID NO: 2244099 - DNA, 25 bp, Homo sapien
tctctttagttatttcgacatactc

SEQ ID NO: 2244100 - DNA, 25 bp, Homo sapien
tatttcgacatactcacgtcttatt

SEQ ID NO: 2244101 - DNA, 25 bp, Homo sapien
tagttatttcgacatactcacgtct

SEQ ID NO: 2244102 - DNA, 25 bp, Homo sapien
cactttcctccacagaggtgaccat

SEQ ID NO: 2244103 - DNA, 25 bp, Homo sapien
tgcagatcttcagatttccactttc

SEQ ID NO: 2244104 - DNA, 25 bp, Homo sapien
gcagatcttcagatttccactttcc

SEQ ID NO: 2244105 - DNA, 25 bp, Homo sapien
gatcttcagatttccactttcctcc

SEQ ID NO: 2244106 - DNA, 25 bp, Homo sapien
cttgagtagacccagcttgagcctc

SEQ ID NO: 2244107 - DNA, 25 bp, Homo sapien
ttgagtagacccagcttgagcctcc

SEQ ID NO: 2244108 - DNA, 25 bp, Homo sapien
gagcctccatgtcacaacaaacagg

SEQ ID NO: 2244109 - DNA, 25 bp, Homo sapien
tccatgtcacaacaaacaggagaga

SEQ ID NO: 2244110 - DNA, 25 bp, Homo sapien
catggtcagtgtcagtcaaggataa

SEQ ID NO: 2244111 - DNA, 25 bp, Homo sapien
cattcttagtgcatggtcaggtgag

SEQ ID NO: 2244112 - DNA, 25 bp, Homo sapien
tggacaaacaggaactatgctctga

SEQ ID NO: 2244113 - DNA, 25 bp, Homo sapien
aaggataatgcagagttggcccggc

SEQ ID NO: 2244114 - DNA, 25 bp, Homo sapien
ccgagaaacgctgtgcatgtctgtt

SEQ ID NO: 2244115 - DNA, 25 bp, Homo sapien
tgtgtccacatcagatcccatctct

SEQ ID NO: 2244116 - DNA, 25 bp, Homo sapien
catctctagctggtagccatgccga

SEQ ID NO: 2244117 - DNA, 25 bp, Homo sapien
agtgtgagaggtttcacagaattcc

SEQ ID NO: 2244118 - DNA, 25 bp, Homo sapien
tcagtccaagctggctggctagata

SEQ ID NO: 2244119 - DNA, 25 bp, Homo sapien
gtccaagctggctggctagatatgt

SEQ ID NO: 2244120 - DNA, 25 bp, Homo sapien
cagtccaagctggctggctagatat

SEQ ID NO: 2244121 - DNA, 25 bp, Homo sapien
agtccaagctggctggctagatatg

SEQ ID NO: 2244122 - DNA, 25 bp, Homo sapien
gtccctttgtcaactgccagaagta

SEQ ID NO: 2244123 - DNA, 25 bp, Homo sapien
tgtcaactgccagaagtataattct

SEQ ID NO: 2244124 - DNA, 25 bp, Homo sapien
caagccatgtaagtccctttgtcaa

SEQ ID NO: 2244125 - DNA, 25 bp, Homo sapien
tcttgaatggtattgaagcaagcca

SEQ ID NO: 2244126 - DNA, 25 bp, Homo sapien
cattacaattatctgaatttgcatt

SEQ ID NO: 2244127 - DNA, 25 bp, Homo sapien
tgatcattacaattatctgaatttg

SEQ ID NO: 2244128 - DNA, 25 bp, Homo sapien
atgattgatcattacaattatctga

SEQ ID NO: 2244129 - DNA, 25 bp, Homo sapien
ttacaattatctgaatttgcatttc

SEQ ID NO: 2244130 - DNA, 25 bp, Homo sapien
ctggggcttagagtatgtgggatgg

SEQ ID NO: 2244131 - DNA, 25 bp, Homo sapien
ggcttagagtatgtgggatgggaag

SEQ ID NO: 2244132 - DNA, 25 bp, Homo sapien
gggcttagagtatgtgggatgggaa

SEQ ID NO: 2244133 - DNA, 25 bp, Homo sapien
ggggcttagagtatgtgggatggga

SEQ ID NO: 2244134 - DNA, 25 bp, Homo sapien
ttgccacattaatattacacctgcc

SEQ ID NO: 2244135 - DNA, 25 bp, Homo sapien
cattaatattacacctgccatctgt

SEQ ID NO: 2244136 - DNA, 25 bp, Homo sapien
gccatctgtgatctttgccatgtaa

SEQ ID NO: 2244137 - DNA, 25 bp, Homo sapien
gtaaatacagatcctgagattaaga

SEQ ID NO: 2244138 - DNA, 25 bp, Homo sapien
ttcaattggataaaacattaacttc

SEQ ID NO: 2244139 - DNA, 25 bp, Homo sapien
cttcaattggataaaacattaactt

SEQ ID NO: 2244140 - DNA, 25 bp, Homo sapien
aagtcttcaattggataaaacatta

SEQ ID NO: 2244141 - DNA, 25 bp, Homo sapien
tcaattggataaaacattaacttcc

SEQ ID NO: 2244142 - DNA, 25 bp, Homo sapien
tggttatactcgtgcagggtctccc

SEQ ID NO: 2244143 - DNA, 25 bp, Homo sapien
gtagggtttgcagtcagtttgctcc

SEQ ID NO: 2244144 - DNA, 25 bp, Homo sapien
gaagaactggtgtaagctagatcca

SEQ ID NO: 2244145 - DNA, 25 bp, Homo sapien
tccctggagttgtatgactgtcttg

SEQ ID NO: 2244146 - DNA, 25 bp, Homo sapien
ctgattaagcaagctcagtttcatg

SEQ ID NO: 2244147 - DNA, 25 bp, Homo sapien
tctgattaagcaagctcagtttcat

SEQ ID NO: 2244148 - DNA, 25 bp, Homo sapien
aagcttctgccatctttaagtggga

SEQ ID NO: 2244149 - DNA, 25 bp, Homo sapien
cagcagagcagtgccagtggatctc

SEQ ID NO: 2244150 - DNA, 25 bp, Homo sapien
tgccagtggatctcacactacagat

SEQ ID NO: 2244151 - DNA, 25 bp, Homo sapien
cagtattagaaatggccatggtctc

SEQ ID NO: 2244152 - DNA, 25 bp, Homo sapien
agaaaacgtaggtaataccaatcag

SEQ ID NO: 2244153 - DNA, 25 bp, Homo sapien
gagttaccatcctattcttgcgcat

SEQ ID NO: 2244154 - DNA, 25 bp, Homo sapien
tgttaccattataaggcccacaagc

SEQ ID NO: 2244155 - DNA, 25 bp, Homo sapien
tcttgcgcattagcacctgttacca

SEQ ID NO: 2244156 - DNA, 25 bp, Homo sapien
gcttcttaacaggtcattggtgcaa

SEQ ID NO: 2244157 - DNA, 25 bp, Homo sapien
ttcccgttcaccctgctgatattct

SEQ ID NO: 2244158 - DNA, 25 bp, Homo sapien
gttcaccctgctgatattcttaaag

SEQ ID NO: 2244159 - DNA, 25 bp, Homo sapien
caccctgctgatattcttaaaggcc

SEQ ID NO: 2244160 - DNA, 25 bp, Homo sapien
ccctgctgatattcttaaaggccat

SEQ ID NO: 2244161 - DNA, 25 bp, Homo sapien
tcacacgtctattaaatccaagtcc

SEQ ID NO: 2244162 - DNA, 25 bp, Homo sapien
tccaagtccttatacaaggatactc

SEQ ID NO: 2244163 - DNA, 25 bp, Homo sapien
tacaaggatactctatgaatgacaa

SEQ ID NO: 2244164 - DNA, 25 bp, Homo sapien
ttaaatccaagtccttatacaagga

SEQ ID NO: 2244165 - DNA, 25 bp, Homo sapien
gtcaaaaacgaactggcaaggccat

SEQ ID NO: 2244166 - DNA, 25 bp, Homo sapien
catgtcctgccgaatgtgggtcagt

SEQ ID NO: 2244167 - DNA, 25 bp, Homo sapien
tgctacacggatacagaagaaaacc

SEQ ID NO: 2244168 - DNA, 25 bp, Homo sapien
taatcccgtatcaggtggctaaagc

SEQ ID NO: 2244169 - DNA, 25 bp, Homo sapien
ctgggtgaaggttgttagtaagact

SEQ ID NO: 2244170 - DNA, 25 bp, Homo sapien
tctaccaccatagagacagattgat

SEQ ID NO: 2244171 - DNA, 25 bp, Homo sapien
tgatggttgccagtatctatgaaca

SEQ ID NO: 2244172 - DNA, 25 bp, Homo sapien
ctataggtggcagtatcaatctacc

SEQ ID NO: 2244173 - DNA, 25 bp, Homo sapien
ggaggaaataatagtaccgatgtac

SEQ ID NO: 2244174 - DNA, 25 bp, Homo sapien
tcatgcatacaaagctgccaagtgc

SEQ ID NO: 2244175 - DNA, 25 bp, Homo sapien
gtttagtatattcccagaactgtgc

SEQ ID NO: 2244176 - DNA, 25 bp, Homo sapien
aagtgcaatgcctacaacacataag

SEQ ID NO: 2244177 - DNA, 25 bp, Homo sapien
caattatgtggccttatgtgtgtgg

SEQ ID NO: 2244178 - DNA, 25 bp, Homo sapien
gaataagctacaatgaacacttgag

SEQ ID NO: 2244179 - DNA, 25 bp, Homo sapien
ggtttatccctgttatagtacttca

SEQ ID NO: 2244180 - DNA, 25 bp, Homo sapien
tgcttgtgaggcaatgacaaacttt

SEQ ID NO: 2244181 - DNA, 25 bp, Homo sapien
gcagacatggagtaaagccacttac

SEQ ID NO: 2244182 - DNA, 25 bp, Homo sapien
tttccaagccccataactgcgtaag

SEQ ID NO: 2244183 - DNA, 25 bp, Homo sapien
tcagacgcatgctgcaacatcaact

SEQ ID NO: 2244184 - DNA, 25 bp, Homo sapien
taccttcagattgcctttcagacgc

SEQ ID NO: 2244185 - DNA, 25 bp, Homo sapien
ttggtggaatatcatctagttgttc

SEQ ID NO: 2244186 - DNA, 25 bp, Homo sapien
caatgcttaggagtgaagttcagag

SEQ ID NO: 2244187 - DNA, 25 bp, Homo sapien
ggaatatcatctagttgttctttaa

SEQ ID NO: 2244188 - DNA, 25 bp, Homo sapien
atgcaatgcttaggagtgaagttca

SEQ ID NO: 2244189 - DNA, 25 bp, Homo sapien
ttgggatcccctgctatgaacttcc

SEQ ID NO: 2244190 - DNA, 25 bp, Homo sapien
gacaggagtgagcttgggatcccct

SEQ ID NO: 2244191 - DNA, 25 bp, Homo sapien
ctataagacaggagtgagcttggga

SEQ ID NO: 2244192 - DNA, 25 bp, Homo sapien
tgagcttgggatcccctgctatgaa

SEQ ID NO: 2244193 - DNA, 25 bp, Homo sapien
tttaccacttcctcctcccaatatg

SEQ ID NO: 2244194 - DNA, 25 bp, Homo sapien
ttaccacttcctcctcccaatatgc

SEQ ID NO: 2244195 - DNA, 25 bp, Homo sapien
ccacttcctcctcccaatatgcact

SEQ ID NO: 2244196 - DNA, 25 bp, Homo sapien
acttcctcctcccaatatgcactcc

SEQ ID NO: 2244197 - DNA, 25 bp, Homo sapien
agttatcagagaatggaccttgtaa

SEQ ID NO: 2244198 - DNA, 25 bp, Homo sapien
cagagaatggaccttgtaatttggg

SEQ ID NO: 2244199 - DNA, 25 bp, Homo sapien
ctttcaagaaatcatagttatcaga

SEQ ID NO: 2244200 - DNA, 25 bp, Homo sapien
tttcaagaaatcatagttatcagag

SEQ ID NO: 2244201 - DNA, 25 bp, Homo sapien
aactgaatgctatcggttccatctc

SEQ ID NO: 2244202 - DNA, 25 bp, Homo sapien
gaatgctatcggttccatctcctct

SEQ ID NO: 2244203 - DNA, 25 bp, Homo sapien
actgaatgctatcggttccatctcc

SEQ ID NO: 2244204 - DNA, 25 bp, Homo sapien
taaactgaatgctatcggttccatc

SEQ ID NO: 2244205 - DNA, 25 bp, Homo sapien
tgaggcagagccacaagtggtttat

SEQ ID NO: 2244206 - DNA, 25 bp, Homo sapien
gacagtggagtcctaacaatcagat

SEQ ID NO: 2244207 - DNA, 25 bp, Homo sapien
ccacattgtggaattggtggagtga

SEQ ID NO: 2244208 - DNA, 25 bp, Homo sapien
caatcagataccacattgtggaatt

SEQ ID NO: 2244209 - DNA, 25 bp, Homo sapien
agttggctcttgaggtgaaccttga

SEQ ID NO: 2244210 - DNA, 25 bp, Homo sapien
gggaaggtataacaccatacagtgc

SEQ ID NO: 2244211 - DNA, 25 bp, Homo sapien
gagagatcattgagcattgtgggct

SEQ ID NO: 2244212 - DNA, 25 bp, Homo sapien
caactgtcatatgaacccagagaga

SEQ ID NO: 2244213 - DNA, 25 bp, Homo sapien
cacagttccaagcacattgtaggag

SEQ ID NO: 2244214 - DNA, 25 bp, Homo sapien
cattcatgtcaccacaagggctgta

SEQ ID NO: 2244215 - DNA, 25 bp, Homo sapien
cactttaagggtcagtgacatcctc

SEQ ID NO: 2244216 - DNA, 25 bp, Homo sapien
taaacagctaggttatgatgcacgt

SEQ ID NO: 2244217 - DNA, 25 bp, Homo sapien
tccatatctcatgacccactaaagg

SEQ ID NO: 2244218 - DNA, 25 bp, Homo sapien
ccatatctcatgacccactaaaggg

SEQ ID NO: 2244219 - DNA, 25 bp, Homo sapien
tgtccatatctcatgacccactaaa

SEQ ID NO: 2244220 - DNA, 25 bp, Homo sapien
catatctcatgacccactaaaggga

SEQ ID NO: 2244221 - DNA, 25 bp, Homo sapien
atcagcatacagaatattcacaatt

SEQ ID NO: 2244222 - DNA, 25 bp, Homo sapien
ttcacaatttgattacttaatccag

SEQ ID NO: 2244223 - DNA, 25 bp, Homo sapien
cagagctacaccaaggatgaaacaa

SEQ ID NO: 2244224 - DNA, 25 bp, Homo sapien
atttgattacttaatccagagctac

SEQ ID NO: 2244225 - DNA, 25 bp, Homo sapien
aataacaacttctatagactagccc

SEQ ID NO: 2244226 - DNA, 25 bp, Homo sapien
tagctgtatgaaacttaaacataac

SEQ ID NO: 2244227 - DNA, 25 bp, Homo sapien
actacttggagaattaataacttcg

SEQ ID NO: 2244228 - DNA, 25 bp, Homo sapien
taataacttcgttctacaataacaa

SEQ ID NO: 2244229 - DNA, 25 bp, Homo sapien
ctttttctgacctgatccacaaatt

SEQ ID NO: 2244230 - DNA, 25 bp, Homo sapien
acactttcatacatctgcctgaggg

SEQ ID NO: 2244231 - DNA, 25 bp, Homo sapien
aaaaattgcactcatctacaccagg

SEQ ID NO: 2244232 - DNA, 25 bp, Homo sapien
tctgacctgatccacaaattctgga

SEQ ID NO: 2244233 - DNA, 25 bp, Homo sapien
gaaaacaacctttaatgtgatacaa

SEQ ID NO: 2244234 - DNA, 25 bp, Homo sapien
gatacaaagtatcactgaggccttt

SEQ ID NO: 2244235 - DNA, 25 bp, Homo sapien
cagttagggatatgagaaatggcca

SEQ ID NO: 2244236 - DNA, 25 bp, Homo sapien
agaaaggaaacggtcacagaaatgc

SEQ ID NO: 2244237 - DNA, 25 bp, Homo sapien
ttatcctattttataagctacaaat

SEQ ID NO: 2244238 - DNA, 25 bp, Homo sapien
atgccttcagggtaaacaacaatgt

SEQ ID NO: 2244239 - DNA, 25 bp, Homo sapien
gccttcagggtaaacaacaatgtta

SEQ ID NO: 2244240 - DNA, 25 bp, Homo sapien
ttcagggtaaacaacaatgttaatg

SEQ ID NO: 2244241 - DNA, 25 bp, Homo sapien
cttcagggtaaacaacaatgttaat

SEQ ID NO: 2244242 - DNA, 25 bp, Homo sapien
tgctgccctgctttcgccagtgcat

SEQ ID NO: 2244243 - DNA, 25 bp, Homo sapien
tcttctggaagcttacagacgcagg

SEQ ID NO: 2244244 - DNA, 25 bp, Homo sapien
gcttacagacgcaggctttgctgcc

SEQ ID NO: 2244245 - DNA, 25 bp, Homo sapien
tttccgcagaaaagtggtccaaagc

SEQ ID NO: 2244246 - DNA, 25 bp, Homo sapien
ccagtggtattaatgaggcaagcag

SEQ ID NO: 2244247 - DNA, 25 bp, Homo sapien
tacagacagcatcagattaaggtgc

SEQ ID NO: 2244248 - DNA, 25 bp, Homo sapien
ttaattgcctttgaagctcctgcca

SEQ ID NO: 2244249 - DNA, 25 bp, Homo sapien
taaggtgctggactatatacatggc

SEQ ID NO: 2244250 - DNA, 25 bp, Homo sapien
tgcttaatcctctggatgcagttct

SEQ ID NO: 2244251 - DNA, 25 bp, Homo sapien
catgcttaatcctctggatgcagtt

SEQ ID NO: 2244252 - DNA, 25 bp, Homo sapien
cttaatcctctggatgcagttctct

SEQ ID NO: 2244253 - DNA, 25 bp, Homo sapien
gcttaatcctctggatgcagttctc

SEQ ID NO: 2244254 - DNA, 25 bp, Homo sapien
gaaatgagtgtagaccacggttccc

SEQ ID NO: 2244255 - DNA, 25 bp, Homo sapien
gaggactaattatctgactgggcca

SEQ ID NO: 2244256 - DNA, 25 bp, Homo sapien
tgtatggagccatagtggcctgcaa

SEQ ID NO: 2244257 - DNA, 25 bp, Homo sapien
tataaagtgcctaccagttcttggc

SEQ ID NO: 2244258 - DNA, 25 bp, Homo sapien
gagagacagagatcgacacactgca

SEQ ID NO: 2244259 - DNA, 25 bp, Homo sapien
tcgacacactgcatgagccaaaaga

SEQ ID NO: 2244260 - DNA, 25 bp, Homo sapien
gagatcgacacactgcatgagccaa

SEQ ID NO: 2244261 - DNA, 25 bp, Homo sapien
gacagagatcgacacactgcatgag

SEQ ID NO: 2244262 - DNA, 25 bp, Homo sapien
cacactctgggatgtccaaatctgg

SEQ ID NO: 2244263 - DNA, 25 bp, Homo sapien
cacaagccctgaatggaacaatcta

SEQ ID NO: 2244264 - DNA, 25 bp, Homo sapien
gagaaagtcctgctacccacagggc

SEQ ID NO: 2244265 - DNA, 25 bp, Homo sapien
caaatctggttgagctaaacacatc

SEQ ID NO: 2244266 - DNA, 25 bp, Homo sapien
tcctgtgctgccaatgctgggcttc

SEQ ID NO: 2244267 - DNA, 25 bp, Homo sapien
cctgccactttccaaaatgattatg

SEQ ID NO: 2244268 - DNA, 25 bp, Homo sapien
ttatgaaaagctttgaatggagtca

SEQ ID NO: 2244269 - DNA, 25 bp, Homo sapien
ccaatgctgggcttctaattcctgc

SEQ ID NO: 2244270 - DNA, 25 bp, Homo sapien
gtccacatttcttaatggacgtagt

SEQ ID NO: 2244271 - DNA, 25 bp, Homo sapien
tagagtactgtttgtccacatttct

SEQ ID NO: 2244272 - DNA, 25 bp, Homo sapien
tgtccacatttcttaatggacgtag

SEQ ID NO: 2244273 - DNA, 25 bp, Homo sapien
agagtactgtttgtccacatttctt

SEQ ID NO: 2244274 - DNA, 25 bp, Homo sapien
gcaaaacctatcaaacttcaaatag

SEQ ID NO: 2244275 - DNA, 25 bp, Homo sapien
tattggacacgataaaaggacatga

SEQ ID NO: 2244276 - DNA, 25 bp, Homo sapien
gcctggcttggtctattcattacta

SEQ ID NO: 2244277 - DNA, 25 bp, Homo sapien
tataaaaatctagctgtaggttctc

SEQ ID NO: 2244278 - DNA, 25 bp, Homo sapien
tgttagcaggatgttcaactcccag

SEQ ID NO: 2244279 - DNA, 25 bp, Homo sapien
tcaaatgttagcaggatgttcaact

SEQ ID NO: 2244280 - DNA, 25 bp, Homo sapien
tgttcaactcccaggataatgatta

SEQ ID NO: 2244281 - DNA, 25 bp, Homo sapien
taatgattaagcgaagatttccttt

SEQ ID NO: 2244282 - DNA, 25 bp, Homo sapien
tattaaggtgaaatggaggtctgtg

SEQ ID NO: 2244283 - DNA, 25 bp, Homo sapien
tgaaatggaggtctgtgaaaaagct

SEQ ID NO: 2244284 - DNA, 25 bp, Homo sapien
aaaaaagtatatatagtgattctca

SEQ ID NO: 2244285 - DNA, 25 bp, Homo sapien
tggaggtctgtgaaaaagctggact

SEQ ID NO: 2244286 - DNA, 25 bp, Homo sapien
atgcctggtcctagtattaccggca

SEQ ID NO: 2244287 - DNA, 25 bp, Homo sapien
ctcctccacgaagcgtttccagata

SEQ ID NO: 2244288 - DNA, 25 bp, Homo sapien
ccacgaagcgtttccagatatctgc

SEQ ID NO: 2244289 - DNA, 25 bp, Homo sapien
tagtattaccggcattacctcctcc

SEQ ID NO: 2244290 - DNA, 25 bp, Homo sapien
cagagcaagtctgtagaaattggct

SEQ ID NO: 2244291 - DNA, 25 bp, Homo sapien
gaaattggcttcatatacatcaggc

SEQ ID NO: 2244292 - DNA, 25 bp, Homo sapien
tgcaaggaggctagcaaaaaatgct

SEQ ID NO: 2244293 - DNA, 25 bp, Homo sapien
gattagttgcaatctaactgcctga

SEQ ID NO: 2244294 - DNA, 25 bp, Homo sapien
catttctaatgatgagacctgccaa

SEQ ID NO: 2244295 - DNA, 25 bp, Homo sapien
aatgatgagacctgccaaaacttgt

SEQ ID NO: 2244296 - DNA, 25 bp, Homo sapien
gaacttctcggtttacattattggc

SEQ ID NO: 2244297 - DNA, 25 bp, Homo sapien
tcttttccattagaggtgactgtgg

SEQ ID NO: 2244298 - DNA, 25 bp, Homo sapien
caaattgctagtgctttccacagca

SEQ ID NO: 2244299 - DNA, 25 bp, Homo sapien
tttgtgcaatttcccttgaacatcc

SEQ ID NO: 2244300 - DNA, 25 bp, Homo sapien
tatgaacaagacttaatttgtgcaa

SEQ ID NO: 2244301 - DNA, 25 bp, Homo sapien
agcagggtaagttccgccctctttg

SEQ ID NO: 2244302 - DNA, 25 bp, Homo sapien
ctggaagcttgaactgcgaacaagg

SEQ ID NO: 2244303 - DNA, 25 bp, Homo sapien
ctgggaagcccagcgagccctcgaa

SEQ ID NO: 2244304 - DNA, 25 bp, Homo sapien
agttggttggtaaaagtgccgcctg

SEQ ID NO: 2244305 - DNA, 25 bp, Homo sapien
cttgaactgcgaacaaggccgacct

SEQ ID NO: 2244306 - DNA, 25 bp, Homo sapien
gaacctagctactattgcaccagcg

SEQ ID NO: 2244307 - DNA, 25 bp, Homo sapien
cccagggtcctatgtgtgtgcgaga

SEQ ID NO: 2244308 - DNA, 25 bp, Homo sapien
gacgaccgctgccagaagggtgctt

SEQ ID NO: 2244309 - DNA, 25 bp, Homo sapien
gtgaactccgggctgagccgaagct

SEQ ID NO: 2244310 - DNA, 25 bp, Homo sapien
gctaacatctgtccgactgggccag

SEQ ID NO: 2244311 - DNA, 25 bp, Homo sapien
cgtgggagataccaagtgccgagcc

SEQ ID NO: 2244312 - DNA, 25 bp, Homo sapien
tggatgcacgctagagcaggctctg

SEQ ID NO: 2244313 - DNA, 25 bp, Homo sapien
cagaaactcgcgtcagaagccttag

SEQ ID NO: 2244314 - DNA, 25 bp, Homo sapien
gaaataggagtctagcggattccca

SEQ ID NO: 2244315 - DNA, 25 bp, Homo sapien
aataggagtctagcggattcccagg

SEQ ID NO: 2244316 - DNA, 25 bp, Homo sapien
gggcgcgcagagcagctagggagca

SEQ ID NO: 2244317 - DNA, 25 bp, Homo sapien
gcaccgcgtgtgctcccaagggact

SEQ ID NO: 2244318 - DNA, 25 bp, Homo sapien
tataggtatttgcaaagagggagca

SEQ ID NO: 2244319 - DNA, 25 bp, Homo sapien
ggagttctctgaaccgtgtgttccc

SEQ ID NO: 2244320 - DNA, 25 bp, Homo sapien
agagaggtagtacagagtgacgcca

SEQ ID NO: 2244321 - DNA, 25 bp, Homo sapien
tgggcgaacaccaaagcttccaact

SEQ ID NO: 2244322 - DNA, 25 bp, Homo sapien
aaggggaggaaatacaaagagctga

SEQ ID NO: 2244323 - DNA, 25 bp, Homo sapien
cacaccaccaaggggaggaaataca

SEQ ID NO: 2244324 - DNA, 25 bp, Homo sapien
gaggaaatacaaagagctgaacact

SEQ ID NO: 2244325 - DNA, 25 bp, Homo sapien
gggaggaaatacaaagagctgaaca

SEQ ID NO: 2244326 - DNA, 25 bp, Homo sapien
ggctgtaaaattgcagtcaccagct

SEQ ID NO: 2244327 - DNA, 25 bp, Homo sapien
ctgtaaaattgcagtcaccagcttg

SEQ ID NO: 2244328 - DNA, 25 bp, Homo sapien
ccaaacagcttccataaacagggct

SEQ ID NO: 2244329 - DNA, 25 bp, Homo sapien
agggctgtaaaattgcagtcaccag

SEQ ID NO: 2244330 - DNA, 25 bp, Homo sapien
actcttaatagttggcagtttgtta

SEQ ID NO: 2244331 - DNA, 25 bp, Homo sapien
ccaattgtcaagtaagccaaactct

SEQ ID NO: 2244332 - DNA, 25 bp, Homo sapien
gtaagccaaactcttaatagttggc

SEQ ID NO: 2244333 - DNA, 25 bp, Homo sapien
tcctttaccaattgtcaagtaagcc

SEQ ID NO: 2244334 - DNA, 25 bp, Homo sapien
cattgagagtctggaatggtgaatt

SEQ ID NO: 2244335 - DNA, 25 bp, Homo sapien
caaggcataagagggcattgagagt

SEQ ID NO: 2244336 - DNA, 25 bp, Homo sapien
gatcctgcaaggcataagagggcat

SEQ ID NO: 2244337 - DNA, 25 bp, Homo sapien
tcctgcaaggcataagagggcattg

SEQ ID NO: 2244338 - DNA, 25 bp, Homo sapien
ctctggctcttctggtttacaaggg

SEQ ID NO: 2244339 - DNA, 25 bp, Homo sapien
aaggggtaaggtgcctcagggtcat

SEQ ID NO: 2244340 - DNA, 25 bp, Homo sapien
caaggggtaaggtgcctcagggtca

SEQ ID NO: 2244341 - DNA, 25 bp, Homo sapien
tggctcttctggtttacaaggggta

SEQ ID NO: 2244342 - DNA, 25 bp, Homo sapien
aagagagtttccgtacatatttcat

SEQ ID NO: 2244343 - DNA, 25 bp, Homo sapien
caaatgtgagtttatgtgcaaaagt

SEQ ID NO: 2244344 - DNA, 25 bp, Homo sapien
aaatgtgagtttatgtgcaaaagtt

SEQ ID NO: 2244345 - DNA, 25 bp, Homo sapien
atgtgagtttatgtgcaaaagtttg

SEQ ID NO: 2244346 - DNA, 25 bp, Homo sapien
cagcactctgcttcacgtggcactg

SEQ ID NO: 2244347 - DNA, 25 bp, Homo sapien
gcactctgcttcacgtggcactgct

SEQ ID NO: 2244348 - DNA, 25 bp, Homo sapien
actctgcttcacgtggcactgcttg

SEQ ID NO: 2244349 - DNA, 25 bp, Homo sapien
tctgcttcacgtggcactgcttgca

SEQ ID NO: 2244350 - DNA, 25 bp, Homo sapien
tttcttgtagaattcgtctaggcag

SEQ ID NO: 2244351 - DNA, 25 bp, Homo sapien
taggcagtacatctcgttttggctg

SEQ ID NO: 2244352 - DNA, 25 bp, Homo sapien
aattcgtctaggcagtacatctcgt

SEQ ID NO: 2244353 - DNA, 25 bp, Homo sapien
tgtagaattcgtctaggcagtacat

SEQ ID NO: 2244354 - DNA, 25 bp, Homo sapien
ggatgcaccgggcacaggtcacaca

SEQ ID NO: 2244355 - DNA, 25 bp, Homo sapien
tggatgcaccgggcacaggtcacac

SEQ ID NO: 2244356 - DNA, 25 bp, Homo sapien
gatgcaccgggcacaggtcacacac

SEQ ID NO: 2244357 - DNA, 25 bp, Homo sapien
ctggatgcaccgggcacaggtcaca

SEQ ID NO: 2244358 - DNA, 25 bp, Homo sapien
cctggccacacttgccgcacttctc

SEQ ID NO: 2244359 - DNA, 25 bp, Homo sapien
cagggccctgatgatgtgctcccgg

SEQ ID NO: 2244360 - DNA, 25 bp, Homo sapien
ctgatgatgtgctcccggaccacct

SEQ ID NO: 2244361 - DNA, 25 bp, Homo sapien
acttgccgcacttctccagtgtgtc

SEQ ID NO: 2244362 - DNA, 25 bp, Homo sapien
ggtcgcccatcctggtagaagctct

SEQ ID NO: 2244363 - DNA, 25 bp, Homo sapien
tctgcccagctagctggcggtggca

SEQ ID NO: 2244364 - DNA, 25 bp, Homo sapien
agaggggtcgcccatcctggtagaa

SEQ ID NO: 2244365 - DNA, 25 bp, Homo sapien
gtttgcagaggggtcgcccatcctg

SEQ ID NO: 2244366 - DNA, 25 bp, Homo sapien
ctgggcatggtactgcctctttatg

SEQ ID NO: 2244367 - DNA, 25 bp, Homo sapien
ggtactgcctctttatggcctccac

SEQ ID NO: 2244368 - DNA, 25 bp, Homo sapien
catggtactgcctctttatggcctc

SEQ ID NO: 2244369 - DNA, 25 bp, Homo sapien
tactgcctctttatggcctccacag

SEQ ID NO: 2244370 - DNA, 25 bp, Homo sapien
tctgtggacgactctctctcaacag

SEQ ID NO: 2244371 - DNA, 25 bp, Homo sapien
gtggacgactctctctcaacaggct

SEQ ID NO: 2244372 - DNA, 25 bp, Homo sapien
gatgtctgtggacgactctctctca

SEQ ID NO: 2244373 - DNA, 25 bp, Homo sapien
acagatgtctgtggacgactctctc

SEQ ID NO: 2244374 - DNA, 25 bp, Homo sapien
ccaggctggactgaaggtccctcca

SEQ ID NO: 2244375 - DNA, 25 bp, Homo sapien
ccaggcccgaggggactgggcccag

SEQ ID NO: 2244376 - DNA, 25 bp, Homo sapien
ctggactgaaggtccctccactggg

SEQ ID NO: 2244377 - DNA, 25 bp, Homo sapien
tggggaaggcggaagctcttcctcc

SEQ ID NO: 2244378 - DNA, 25 bp, Homo sapien
cttcttcagaagacaggagcaccgg

SEQ ID NO: 2244379 - DNA, 25 bp, Homo sapien
cttcagaagacaggagcaccggagg

SEQ ID NO: 2244380 - DNA, 25 bp, Homo sapien
ttcttcagaagacaggagcaccgga

SEQ ID NO: 2244381 - DNA, 25 bp, Homo sapien
tcttcagaagacaggagcaccggag

SEQ ID NO: 2244382 - DNA, 25 bp, Homo sapien
ggctttcccgctaagccagctccgg

SEQ ID NO: 2244383 - DNA, 25 bp, Homo sapien
ctttcccgctaagccagctccgggt

SEQ ID NO: 2244384 - DNA, 25 bp, Homo sapien
ttcccgctaagccagctccgggtgc

SEQ ID NO: 2244385 - DNA, 25 bp, Homo sapien
gggctgggctttcccgctaagccag

SEQ ID NO: 2244386 - DNA, 25 bp, Homo sapien
gcctcccaggggaggccacatcagg

SEQ ID NO: 2244387 - DNA, 25 bp, Homo sapien
ggagcctcccaggggaggccacatc

SEQ ID NO: 2244388 - DNA, 25 bp, Homo sapien
tcccaggggaggccacatcaggcct

SEQ ID NO: 2244389 - DNA, 25 bp, Homo sapien
caggggaggccacatcaggcctcac

SEQ ID NO: 2244390 - DNA, 25 bp, Homo sapien
tccgaaggcccggaagttcaggcca

SEQ ID NO: 2244391 - DNA, 25 bp, Homo sapien
tgtggctgggatccaattctcctgg

SEQ ID NO: 2244392 - DNA, 25 bp, Homo sapien
ggcccggaagttcaggccagctcca

SEQ ID NO: 2244393 - DNA, 25 bp, Homo sapien
caaccacagctaaatcgtggcacag

SEQ ID NO: 2244394 - DNA, 25 bp, Homo sapien
taatgacggtcacatgtggcaaact

SEQ ID NO: 2244395 - DNA, 25 bp, Homo sapien
gctccaagggctcatatcctcaatg

SEQ ID NO: 2244396 - DNA, 25 bp, Homo sapien
tcaaatggtggaggagagagctcca

SEQ ID NO: 2244397 - DNA, 25 bp, Homo sapien
catgaaaatgctccgtaagtgctaa

SEQ ID NO: 2244398 - DNA, 25 bp, Homo sapien
caatgcctgggcgatgaactgccat

SEQ ID NO: 2244399 - DNA, 25 bp, Homo sapien
ggcgctggtaccaaatacttctcct

SEQ ID NO: 2244400 - DNA, 25 bp, Homo sapien
acttctcctttacttttgtcatcaa

SEQ ID NO: 2244401 - DNA, 25 bp, Homo sapien
tagtgtttttgaaggcgctggtacc

SEQ ID NO: 2244402 - DNA, 25 bp, Homo sapien
tcttgaagttggcacagtcagcagt

SEQ ID NO: 2244403 - DNA, 25 bp, Homo sapien
aagttggcacagtcagcagttgcca

SEQ ID NO: 2244404 - DNA, 25 bp, Homo sapien
tgaagttggcacagtcagcagttgc

SEQ ID NO: 2244405 - DNA, 25 bp, Homo sapien
ttgaagttggcacagtcagcagttg

SEQ ID NO: 2244406 - DNA, 25 bp, Homo sapien
tgtcttcttggtgaactgacactct

SEQ ID NO: 2244407 - DNA, 25 bp, Homo sapien
tatctggatgctcaaatgttgggtg

SEQ ID NO: 2244408 - DNA, 25 bp, Homo sapien
ggtgaactgacactctgcctcttat

SEQ ID NO: 2244409 - DNA, 25 bp, Homo sapien
ttctttacatatctggatgctcaaa

SEQ ID NO: 2244410 - DNA, 25 bp, Homo sapien
gaggttgatagcctgaagacaagaa

SEQ ID NO: 2244411 - DNA, 25 bp, Homo sapien
aactgtgttgttagaaagcgtgtca

SEQ ID NO: 2244412 - DNA, 25 bp, Homo sapien
tccttccagtgcacaggctagttag

SEQ ID NO: 2244413 - DNA, 25 bp, Homo sapien
gaaaaggccattgtccaaggctctg

SEQ ID NO: 2244414 - DNA, 25 bp, Homo sapien
ttgtggatctagattcattaggaat

SEQ ID NO: 2244415 - DNA, 25 bp, Homo sapien
agagcagaggccctcccagcaacca

SEQ ID NO: 2244416 - DNA, 25 bp, Homo sapien
caaggttttgtggatctagattcat

SEQ ID NO: 2244417 - DNA, 25 bp, Homo sapien
ggcagcaaggttttgtggatctaga

SEQ ID NO: 2244418 - DNA, 25 bp, Homo sapien
cccatggatttcacgtgtgttctgc

SEQ ID NO: 2244419 - DNA, 25 bp, Homo sapien
tgtgttctataccttgtctacaata

SEQ ID NO: 2244420 - DNA, 25 bp, Homo sapien
tcagcgtataagtccatcaccaatt

SEQ ID NO: 2244421 - DNA, 25 bp, Homo sapien
taccttgtctacaatatcctataac

SEQ ID NO: 2244422 - DNA, 25 bp, Homo sapien
tattaaatggcccatgtggtcattc

SEQ ID NO: 2244423 - DNA, 25 bp, Homo sapien
tctgcaggaaaagtattaaatggcc

SEQ ID NO: 2244424 - DNA, 25 bp, Homo sapien
tcataatgccagcagtttctgcagg

SEQ ID NO: 2244425 - DNA, 25 bp, Homo sapien
cataatgccagcagtttctgcagga

SEQ ID NO: 2244426 - DNA, 25 bp, Homo sapien
ttttgctagatttggcagcatgggc

SEQ ID NO: 2244427 - DNA, 25 bp, Homo sapien
tttttccacctccatgaatatccat

SEQ ID NO: 2244428 - DNA, 25 bp, Homo sapien
tcttttttccacctccatgaatatc

SEQ ID NO: 2244429 - DNA, 25 bp, Homo sapien
cttcttttttccacctccatgaata

SEQ ID NO: 2244430 - DNA, 25 bp, Homo sapien
ttttttccacctccatgaatatcca

SEQ ID NO: 2244431 - DNA, 25 bp, Homo sapien
gcaggtgttaaatcctccactaatc

SEQ ID NO: 2244432 - DNA, 25 bp, Homo sapien
caggtgttaaatcctccactaatct

SEQ ID NO: 2244433 - DNA, 25 bp, Homo sapien
tagcaggtgttaaatcctccactaa

SEQ ID NO: 2244434 - DNA, 25 bp, Homo sapien
ctagcaggtgttaaatcctccacta

SEQ ID NO: 2244435 - DNA, 25 bp, Homo sapien
gtttctctcctacataggcagtaag

SEQ ID NO: 2244436 - DNA, 25 bp, Homo sapien
aatattggaattgatggcagtaaag

SEQ ID NO: 2244437 - DNA, 25 bp, Homo sapien
taagtaaagccaagttgatatttag

SEQ ID NO: 2244438 - DNA, 25 bp, Homo sapien
ggcagtaagaactttgaaattagta

SEQ ID NO: 2244439 - DNA, 25 bp, Homo sapien
cttctagaagttatattcagtatac

SEQ ID NO: 2244440 - DNA, 25 bp, Homo sapien
aatctttgatccttctagaagttat

SEQ ID NO: 2244441 - DNA, 25 bp, Homo sapien
ctaatctttgatccttctagaagtt

SEQ ID NO: 2244442 - DNA, 25 bp, Homo sapien
gatccttctagaagttatattcagt

SEQ ID NO: 2244443 - DNA, 25 bp, Homo sapien
tcactaaactcttaacaactggggc

SEQ ID NO: 2244444 - DNA, 25 bp, Homo sapien
actcttaacaactggggccacaagc

SEQ ID NO: 2244445 - DNA, 25 bp, Homo sapien
taaactcttaacaactggggccaca

SEQ ID NO: 2244446 - DNA, 25 bp, Homo sapien
aactcttaacaactggggccacaag

SEQ ID NO: 2244447 - DNA, 25 bp, Homo sapien
cttctaaagcaatcagaaagggcaa

SEQ ID NO: 2244448 - DNA, 25 bp, Homo sapien
taacttctaaagcaatcagaaaggg

SEQ ID NO: 2244449 - DNA, 25 bp, Homo sapien
ttctaaagcaatcagaaagggcaac

SEQ ID NO: 2244450 - DNA, 25 bp, Homo sapien
acttctaaagcaatcagaaagggca

SEQ ID NO: 2244451 - DNA, 25 bp, Homo sapien
gcatctgccagggactgacctatcg

SEQ ID NO: 2244452 - DNA, 25 bp, Homo sapien
catcatcagaaaggagtagactcct

SEQ ID NO: 2244453 - DNA, 25 bp, Homo sapien
tatcgttccctctggtctggacgcc

SEQ ID NO: 2244454 - DNA, 25 bp, Homo sapien
aatccaacttggcatcatcatcaga

SEQ ID NO: 2244455 - DNA, 25 bp, Homo sapien
taaataagaacacggagggcctgag

SEQ ID NO: 2244456 - DNA, 25 bp, Homo sapien
gaatcacgccctagaatggtgtgtg

SEQ ID NO: 2244457 - DNA, 25 bp, Homo sapien
tgaatttaaagagatgtgtacccca

SEQ ID NO: 2244458 - DNA, 25 bp, Homo sapien
ggtgtgtgccacactctagaatggt

SEQ ID NO: 2244459 - DNA, 25 bp, Homo sapien
gcctaatacattaagcacacgtaag

SEQ ID NO: 2244460 - DNA, 25 bp, Homo sapien
ttgactgccgaaaggaccacttgtg

SEQ ID NO: 2244461 - DNA, 25 bp, Homo sapien
cacacgtaagttggactggttccac

SEQ ID NO: 2244462 - DNA, 25 bp, Homo sapien
ggtaaacctgtgcactttgagaaca

SEQ ID NO: 2244463 - DNA, 25 bp, Homo sapien
caaagtagttcacccagacgtcatc

SEQ ID NO: 2244464 - DNA, 25 bp, Homo sapien
accttgttgagggtgcccaggtcca

SEQ ID NO: 2244465 - DNA, 25 bp, Homo sapien
ggcacacattctctcggcagtaggg

SEQ ID NO: 2244466 - DNA, 25 bp, Homo sapien
ttcagatagtgcaccagcctgcgac

SEQ ID NO: 2244467 - DNA, 25 bp, Homo sapien
cctgcgacgacgagctcccggctcc

SEQ ID NO: 2244468 - DNA, 25 bp, Homo sapien
cgtccgccgccgctaaaccctgcga

SEQ ID NO: 2244469 - DNA, 25 bp, Homo sapien
gccgccgctaaaccctgcgacgacg

SEQ ID NO: 2244470 - DNA, 25 bp, Homo sapien
gctaaaccctgcgacgacgagctcc

SEQ ID NO: 2244471 - DNA, 25 bp, Homo sapien
ggcgctttccgtttcctgctacctg

SEQ ID NO: 2244472 - DNA, 25 bp, Homo sapien
cgctttccgtttcctgctacctgtt

SEQ ID NO: 2244473 - DNA, 25 bp, Homo sapien
gcgctttccgtttcctgctacctgt

SEQ ID NO: 2244474 - DNA, 25 bp, Homo sapien
tcgtcctggccagagatgcgcggcc

SEQ ID NO: 2244475 - DNA, 25 bp, Homo sapien
gagctcaggatctctaagaccaaga

SEQ ID NO: 2244476 - DNA, 25 bp, Homo sapien
cagacttcagtctgaggctcggcgg

SEQ ID NO: 2244477 - DNA, 25 bp, Homo sapien
atgcgcggcctgacgtagcagagcc

SEQ ID NO: 2244478 - DNA, 25 bp, Homo sapien
gccaaggtgggttgaatctccctct

SEQ ID NO: 2244479 - DNA, 25 bp, Homo sapien
caataccatgttgcaaagatctctt

SEQ ID NO: 2244480 - DNA, 25 bp, Homo sapien
tcttttcattggcttaacctccctg

SEQ ID NO: 2244481 - DNA, 25 bp, Homo sapien
ccctctttaagtttccaataccatg

SEQ ID NO: 2244482 - DNA, 25 bp, Homo sapien
tcccctattgttccatagactgagt

SEQ ID NO: 2244483 - DNA, 25 bp, Homo sapien
tagactgagtctaaatggaattcac

SEQ ID NO: 2244484 - DNA, 25 bp, Homo sapien
taagcaacattgtgcttaattcccc

SEQ ID NO: 2244485 - DNA, 25 bp, Homo sapien
catttgcagaacttaggagagttgg

SEQ ID NO: 2244486 - DNA, 25 bp, Homo sapien
cattttgatgttgctttcagctttg

SEQ ID NO: 2244487 - DNA, 25 bp, Homo sapien
ttgtaaagccttattttgttggtgc

SEQ ID NO: 2244488 - DNA, 25 bp, Homo sapien
aagccttattttgttggtgctttgc

SEQ ID NO: 2244489 - DNA, 25 bp, Homo sapien
gccttattttgttggtgctttgcat

SEQ ID NO: 2244490 - DNA, 25 bp, Homo sapien
gctctgcacagggtcacttggggct

SEQ ID NO: 2244491 - DNA, 25 bp, Homo sapien
tccccggggtctgccccatgtcgtg

SEQ ID NO: 2244492 - DNA, 25 bp, Homo sapien
gtctgccccatgtcgtggtgaccac

SEQ ID NO: 2244493 - DNA, 25 bp, Homo sapien
gctggggccatgatttgcaccatcc

SEQ ID NO: 2244494 - DNA, 25 bp, Homo sapien
tgttgaccacatgatcactgctgga

SEQ ID NO: 2244495 - DNA, 25 bp, Homo sapien
tagtctgatgccacatacatccaga

SEQ ID NO: 2244496 - DNA, 25 bp, Homo sapien
taagtaaagctgacatgccaaatag

SEQ ID NO: 2244497 - DNA, 25 bp, Homo sapien
cccttacaatagtgagaaagacctc

SEQ ID NO: 2244498 - DNA, 25 bp, Homo sapien
cttctgtcacattgtaaggggtttc

SEQ ID NO: 2244499 - DNA, 25 bp, Homo sapien
tcttctgctttcacgataacatttt

SEQ ID NO: 2244500 - DNA, 25 bp, Homo sapien
gtataagccaggtattattctcttc

SEQ ID NO: 2244501 - DNA, 25 bp, Homo sapien
tgtcacattgtaaggggtttctttc

SEQ ID NO: 2244502 - DNA, 25 bp, Homo sapien
ggttctcaacttcttcgcattggtt

SEQ ID NO: 2244503 - DNA, 25 bp, Homo sapien
cgcccggccgtatcatcttttctaa

SEQ ID NO: 2244504 - DNA, 25 bp, Homo sapien
agtctgccaaaccacaattgttcca

SEQ ID NO: 2244505 - DNA, 25 bp, Homo sapien
tctgaagccttaggtgtttggtcgg

SEQ ID NO: 2244506 - DNA, 25 bp, Homo sapien
aagtaatgctatacaagtctgccaa

SEQ ID NO: 2244507 - DNA, 25 bp, Homo sapien
caagcatttatatctcaggtcctga

SEQ ID NO: 2244508 - DNA, 25 bp, Homo sapien
gatagcattgggagagtttttacag

SEQ ID NO: 2244509 - DNA, 25 bp, Homo sapien
attgcaagtagctatcaagcattta

SEQ ID NO: 2244510 - DNA, 25 bp, Homo sapien
cattgggagagtttttacaggtaga

SEQ ID NO: 2244511 - DNA, 25 bp, Homo sapien
tgaaccttactaccttttccatgta

SEQ ID NO: 2244512 - DNA, 25 bp, Homo sapien
ctgaaccttactaccttttccatgt

SEQ ID NO: 2244513 - DNA, 25 bp, Homo sapien
taactctcctattccccaatgtcta

SEQ ID NO: 2244514 - DNA, 25 bp, Homo sapien
ctaaggttgggagtatgaatgaatc

SEQ ID NO: 2244515 - DNA, 25 bp, Homo sapien
taatggttttaagctgcattcatgt

SEQ ID NO: 2244516 - DNA, 25 bp, Homo sapien
tgaatgaatcaatcacctaggtagt

SEQ ID NO: 2244517 - DNA, 25 bp, Homo sapien
gccagtgctcacatatccattttcc

SEQ ID NO: 2244518 - DNA, 25 bp, Homo sapien
ctgccagtgctcacatatccatttt

SEQ ID NO: 2244519 - DNA, 25 bp, Homo sapien
gctgccagtgctcacatatccattt

SEQ ID NO: 2244520 - DNA, 25 bp, Homo sapien
tgccagtgctcacatatccattttc

SEQ ID NO: 2244521 - DNA, 25 bp, Homo sapien
ctttcatctttgacatatcgaagga

SEQ ID NO: 2244522 - DNA, 25 bp, Homo sapien
catctttgacatatcgaaggaacat

SEQ ID NO: 2244523 - DNA, 25 bp, Homo sapien
cttgtcaggtagtcttaggcttttc

SEQ ID NO: 2244524 - DNA, 25 bp, Homo sapien
tcaggtagtcttaggcttttctttc

SEQ ID NO: 2244525 - DNA, 25 bp, Homo sapien
tctagcttgcatagagggtggcaat

SEQ ID NO: 2244526 - DNA, 25 bp, Homo sapien
cagcatgctgcacttttggtctcca

SEQ ID NO: 2244527 - DNA, 25 bp, Homo sapien
tagcaaattactggcaacacatgac

SEQ ID NO: 2244528 - DNA, 25 bp, Homo sapien
tcatgatatgcaggttgagaactgc

SEQ ID NO: 2244529 - DNA, 25 bp, Homo sapien
tatggagtggtaaaaactgggatct

SEQ ID NO: 2244530 - DNA, 25 bp, Homo sapien
gctgatgtcactaccctcaatatat

SEQ ID NO: 2244531 - DNA, 25 bp, Homo sapien
tcctactccatactcttgctgatgt

SEQ ID NO: 2244532 - DNA, 25 bp, Homo sapien
gaatttaaacatggttagcttctaa

SEQ ID NO: 2244533 - DNA, 25 bp, Homo sapien
tagtaggtacatacccaaaggatta

SEQ ID NO: 2244534 - DNA, 25 bp, Homo sapien
tctcaatcatatgtgggagttgagc

SEQ ID NO: 2244535 - DNA, 25 bp, Homo sapien
atttgaaccagcaatcccattagta

SEQ ID NO: 2244536 - DNA, 25 bp, Homo sapien
aaccagcaatcccattagtaggtac

SEQ ID NO: 2244537 - DNA, 25 bp, Homo sapien
gatggctccaatgccctgtgcaagt

SEQ ID NO: 2244538 - DNA, 25 bp, Homo sapien
catctgagtgcccaaacatctaagg

SEQ ID NO: 2244539 - DNA, 25 bp, Homo sapien
caaattactaatcctgggtcagcac

SEQ ID NO: 2244540 - DNA, 25 bp, Homo sapien
caactgacttggagacgcatgcaca

SEQ ID NO: 2244541 - DNA, 25 bp, Homo sapien
cattatcccggaagtagggcagcct

SEQ ID NO: 2244542 - DNA, 25 bp, Homo sapien
tagtgcgccatcgagcgatacgtcg

SEQ ID NO: 2244543 - DNA, 25 bp, Homo sapien
aacagtgtcatcgaacttgtccggg

SEQ ID NO: 2244544 - DNA, 25 bp, Homo sapien
gagcccacggcgtacacagacatat

SEQ ID NO: 2244545 - DNA, 25 bp, Homo sapien
ccgcctcgaccgcgggcgctttccg

SEQ ID NO: 2244546 - DNA, 25 bp, Homo sapien
cgcctcgaccgcgggcgctttccgt

SEQ ID NO: 2244547 - DNA, 25 bp, Homo sapien
cgctttccgtttcctgctacctgtt

SEQ ID NO: 2244548 - DNA, 25 bp, Homo sapien
ggcgctttccgtttcctgctacctg

SEQ ID NO: 2244549 - DNA, 25 bp, Homo sapien
ccttcggattctgaggcgcggcagt

SEQ ID NO: 2244550 - DNA, 25 bp, Homo sapien
caaggcgttggtggcggttgcagcg

SEQ ID NO: 2244551 - DNA, 25 bp, Homo sapien
gcgaaggcgggaagtgcgtctggcc

SEQ ID NO: 2244552 - DNA, 25 bp, Homo sapien
atggctgcgctggaaccgagccttc

SEQ ID NO: 2244553 - DNA, 25 bp, Homo sapien
aataagccatgtattgtgccaagtc

SEQ ID NO: 2244554 - DNA, 25 bp, Homo sapien
gaatccactgcctgatctaaggtgg

SEQ ID NO: 2244555 - DNA, 25 bp, Homo sapien
caccatgctcggtcagcattgaatg

SEQ ID NO: 2244556 - DNA, 25 bp, Homo sapien
gcattgaatgctcataggagcaaga

SEQ ID NO: 2244557 - DNA, 25 bp, Homo sapien
tctgtaaatatctatagacttaact

SEQ ID NO: 2244558 - DNA, 25 bp, Homo sapien
tgtaaatatctatagacttaacttc

SEQ ID NO: 2244559 - DNA, 25 bp, Homo sapien
gtaaatatctatagacttaacttcc

SEQ ID NO: 2244560 - DNA, 25 bp, Homo sapien
ctttctccacctgaatcagtttaat

SEQ ID NO: 2244561 - DNA, 25 bp, Homo sapien
ctgcagtagattttgattaagctgg

SEQ ID NO: 2244562 - DNA, 25 bp, Homo sapien
caatatttgtcacaataagcttcat

SEQ ID NO: 2244563 - DNA, 25 bp, Homo sapien
aaatcaatatttgtcacaataagct

SEQ ID NO: 2244564 - DNA, 25 bp, Homo sapien
tgattaagctggaaatcaatatttg

SEQ ID NO: 2244565 - DNA, 25 bp, Homo sapien
tgaagtgccttgacaagccctgatg

SEQ ID NO: 2244566 - DNA, 25 bp, Homo sapien
cgttattagttgcagctgtcagatg

SEQ ID NO: 2244567 - DNA, 25 bp, Homo sapien
taaggctcgttattagttgcagctg

SEQ ID NO: 2244568 - DNA, 25 bp, Homo sapien
cagagaagttgaggaatcttgaagt

SEQ ID NO: 2244569 - DNA, 25 bp, Homo sapien
gctctgccagattacttgtatcaat

SEQ ID NO: 2244570 - DNA, 25 bp, Homo sapien
ggctctgccagattacttgtatcaa

SEQ ID NO: 2244571 - DNA, 25 bp, Homo sapien
gccagattacttgtatcaataacca

SEQ ID NO: 2244572 - DNA, 25 bp, Homo sapien
tctgccagattacttgtatcaataa

SEQ ID NO: 2244573 - DNA, 25 bp, Homo sapien
ttgtgtcctttattaggcattcttc

SEQ ID NO: 2244574 - DNA, 25 bp, Homo sapien
tattgtgtcctttattaggcattct

SEQ ID NO: 2244575 - DNA, 25 bp, Homo sapien
ttattgtgtcctttattaggcattc

SEQ ID NO: 2244576 - DNA, 25 bp, Homo sapien
attattgtgtcctttattaggcatt

SEQ ID NO: 2244577 - DNA, 25 bp, Homo sapien
ccagtttctctataattatatcaga

SEQ ID NO: 2244578 - DNA, 25 bp, Homo sapien
gttaatcggagagatgtttgccacc

SEQ ID NO: 2244579 - DNA, 25 bp, Homo sapien
tatatcagaattcagcgttaatcgg

SEQ ID NO: 2244580 - DNA, 25 bp, Homo sapien
tacactgtcagctactcctattgca

SEQ ID NO: 2244581 - DNA, 25 bp, Homo sapien
atcacatggactacaaccatgacta

SEQ ID NO: 2244582 - DNA, 25 bp, Homo sapien
tatcacatggactacaaccatgact

SEQ ID NO: 2244583 - DNA, 25 bp, Homo sapien
ctatcacatggactacaaccatgac

SEQ ID NO: 2244584 - DNA, 25 bp, Homo sapien
gaaattctaattaatctactccctg

SEQ ID NO: 2244585 - DNA, 25 bp, Homo sapien
gggaaaaaagcatgcccacttcacc

SEQ ID NO: 2244586 - DNA, 25 bp, Homo sapien
cagggaaaaaagcatgcccacttca

SEQ ID NO: 2244587 - DNA, 25 bp, Homo sapien
ctcagggaaaaaagcatgcccactt

SEQ ID NO: 2244588 - DNA, 25 bp, Homo sapien
cccttccgaatctgctgtagacgaa

SEQ ID NO: 2244589 - DNA, 25 bp, Homo sapien
tggtcccttccgaatctgctgtaga

SEQ ID NO: 2244590 - DNA, 25 bp, Homo sapien
tcccttccgaatctgctgtagacga

SEQ ID NO: 2244591 - DNA, 25 bp, Homo sapien
ggtcccttccgaatctgctgtagac

SEQ ID NO: 2244592 - DNA, 25 bp, Homo sapien
gccaaatcaattgtagaagctgagc

SEQ ID NO: 2244593 - DNA, 25 bp, Homo sapien
gaagctgagcttatattgaatattt

SEQ ID NO: 2244594 - DNA, 25 bp, Homo sapien
tagaagctgagcttatattgaatat

SEQ ID NO: 2244595 - DNA, 25 bp, Homo sapien
ctgccaaatcaattgtagaagctga

SEQ ID NO: 2244596 - DNA, 25 bp, Homo sapien
gggaatctgattaattctgccccca

SEQ ID NO: 2244597 - DNA, 25 bp, Homo sapien
aaattaaacatgggaatctgattaa

SEQ ID NO: 2244598 - DNA, 25 bp, Homo sapien
ggaatctgattaattctgcccccaa

SEQ ID NO: 2244599 - DNA, 25 bp, Homo sapien
aattcatcttggcaatctgagctag

SEQ ID NO: 2244600 - DNA, 25 bp, Homo sapien
tataattcatcttggcaatctgagc

SEQ ID NO: 2244601 - DNA, 25 bp, Homo sapien
ttcatcttggcaatctgagctagtc

SEQ ID NO: 2244602 - DNA, 25 bp, Homo sapien
catcttggcaatctgagctagtcat

SEQ ID NO: 2244603 - DNA, 25 bp, Homo sapien
catgtgtgataatttgggtacttca

SEQ ID NO: 2244604 - DNA, 25 bp, Homo sapien
tcatgtgtgataatttgggtacttc

SEQ ID NO: 2244605 - DNA, 25 bp, Homo sapien
atgtgtgataatttgggtacttcat

SEQ ID NO: 2244606 - DNA, 25 bp, Homo sapien
tgtgtgataatttgggtacttcatg

SEQ ID NO: 2244607 - DNA, 25 bp, Homo sapien
tgttgttccttcccattgtaattaa

SEQ ID NO: 2244608 - DNA, 25 bp, Homo sapien
catatctcattaactgaaagcacaa

SEQ ID NO: 2244609 - DNA, 25 bp, Homo sapien
ttagtgaaggtgcacatctgctgcc

SEQ ID NO: 2244610 - DNA, 25 bp, Homo sapien
ttcagtgcaataagagaatttttga

SEQ ID NO: 2244611 - DNA, 25 bp, Homo sapien
tagcacatcaatgtttccgatgaaa

SEQ ID NO: 2244612 - DNA, 25 bp, Homo sapien
cttttagcttcttgatgtatgacat

SEQ ID NO: 2244613 - DNA, 25 bp, Homo sapien
ctttgccatctgcttttagcttctt

SEQ ID NO: 2244614 - DNA, 25 bp, Homo sapien
tctgcttttagcttcttgatgtatg

SEQ ID NO: 2244615 - DNA, 25 bp, Homo sapien
tgcttttagcttcttgatgtatgac

SEQ ID NO: 2244616 - DNA, 25 bp, Homo sapien
ctagtgaagttttgggcacacattg

SEQ ID NO: 2244617 - DNA, 25 bp, Homo sapien
ttgctagtgaagttttgggcacaca

SEQ ID NO: 2244618 - DNA, 25 bp, Homo sapien
aattgctagtgaagttttgggcaca

SEQ ID NO: 2244619 - DNA, 25 bp, Homo sapien
gctagtgaagttttgggcacacatt

SEQ ID NO: 2244620 - DNA, 25 bp, Homo sapien
aaacataatggtattgtgcacttaa

SEQ ID NO: 2244621 - DNA, 25 bp, Homo sapien
tatcataatatttacttcattgtgg

SEQ ID NO: 2244622 - DNA, 25 bp, Homo sapien
aatggtattgtgcacttaatagact

SEQ ID NO: 2244623 - DNA, 25 bp, Homo sapien
tcataatatttacttcattgtggtg

SEQ ID NO: 2244624 - DNA, 25 bp, Homo sapien
ctattttgagtagtcatccaggata

SEQ ID NO: 2244625 - DNA, 25 bp, Homo sapien
tattttgagtagtcatccaggatac

SEQ ID NO: 2244626 - DNA, 25 bp, Homo sapien
ccagctagttctatttcattgtacc

SEQ ID NO: 2244627 - DNA, 25 bp, Homo sapien
gaatctgtttgttccagcacctttc

SEQ ID NO: 2244628 - DNA, 25 bp, Homo sapien
tcattgtacctcttgaatctgtttg

SEQ ID NO: 2244629 - DNA, 25 bp, Homo sapien
gacattcagtccagctagttctatt

SEQ ID NO: 2244630 - DNA, 25 bp, Homo sapien
cctttggcacttgttctgtgttccc

SEQ ID NO: 2244631 - DNA, 25 bp, Homo sapien
cacattcctttggcacttgttctgt

SEQ ID NO: 2244632 - DNA, 25 bp, Homo sapien
gttctgtgttccctacggtcctcca

SEQ ID NO: 2244633 - DNA, 25 bp, Homo sapien
ttctgtgttccctacggtcctccat

SEQ ID NO: 2244634 - DNA, 25 bp, Homo sapien
tgtttgctggatttcatggagatca

SEQ ID NO: 2244635 - DNA, 25 bp, Homo sapien
ggatttcatggagatcagggtgcct

SEQ ID NO: 2244636 - DNA, 25 bp, Homo sapien
aagtgccttgatatatgtttgctgg

SEQ ID NO: 2244637 - DNA, 25 bp, Homo sapien
cagggtgcctgattactggagaata

SEQ ID NO: 2244638 - DNA, 25 bp, Homo sapien
gcaaggaagcttcacgatagcctgg

SEQ ID NO: 2244639 - DNA, 25 bp, Homo sapien
tggaaggacaccttatacaaaggca

SEQ ID NO: 2244640 - DNA, 25 bp, Homo sapien
acaaatctatagttggcaaggaagc

SEQ ID NO: 2244641 - DNA, 25 bp, Homo sapien
tggttggaaactcttttccaacagc

SEQ ID NO: 2244642 - DNA, 25 bp, Homo sapien
ttaatgacctgcaaggaccagggca

SEQ ID NO: 2244643 - DNA, 25 bp, Homo sapien
gacctgcaaggaccagggcaaatgc

SEQ ID NO: 2244644 - DNA, 25 bp, Homo sapien
tgacctgcaaggaccagggcaaatg

SEQ ID NO: 2244645 - DNA, 25 bp, Homo sapien
aatgacctgcaaggaccagggcaaa

SEQ ID NO: 2244646 - DNA, 25 bp, Homo sapien
tttcttgccctaattcgtcttcaac

SEQ ID NO: 2244647 - DNA, 25 bp, Homo sapien
cttttcttgccctaattcgtcttca

SEQ ID NO: 2244648 - DNA, 25 bp, Homo sapien
ctaattcgtcttcaactctggccat

SEQ ID NO: 2244649 - DNA, 25 bp, Homo sapien
tgccctaattcgtcttcaactctgg

SEQ ID NO: 2244650 - DNA, 25 bp, Homo sapien
tactagagctatgattttcccccag

SEQ ID NO: 2244651 - DNA, 25 bp, Homo sapien
ttactagagctatgattttccccca

SEQ ID NO: 2244652 - DNA, 25 bp, Homo sapien
ctaacaataacttcatcaaatttta

SEQ ID NO: 2244653 - DNA, 25 bp, Homo sapien
acaataacttcatcaaattttatga

SEQ ID NO: 2244654 - DNA, 25 bp, Homo sapien
catgcacagtaaaattatatgatca

SEQ ID NO: 2244655 - DNA, 25 bp, Homo sapien
tatcaggtgaggacatattagtgcc

SEQ ID NO: 2244656 - DNA, 25 bp, Homo sapien
gatgcaattgtcaataacagcagac

SEQ ID NO: 2244657 - DNA, 25 bp, Homo sapien
tgcaggccagattttaacgtgattt

SEQ ID NO: 2244658 - DNA, 25 bp, Homo sapien
ttcactcttcagtaatttgtgtatg

SEQ ID NO: 2244659 - DNA, 25 bp, Homo sapien
cactcttcagtaatttgtgtatgaa

SEQ ID NO: 2244660 - DNA, 25 bp, Homo sapien
cttcagtaatttgtgtatgaattta

SEQ ID NO: 2244661 - DNA, 25 bp, Homo sapien
ctcttcagtaatttgtgtatgaatt

SEQ ID NO: 2244662 - DNA, 25 bp, Homo sapien
cactaaccactcctctgtagagaag

SEQ ID NO: 2244663 - DNA, 25 bp, Homo sapien
gaggattattgctcagctgttcaag

SEQ ID NO: 2244664 - DNA, 25 bp, Homo sapien
ggattattgctcagctgttcaagct

SEQ ID NO: 2244665 - DNA, 25 bp, Homo sapien
gctgttcaagctcactaaccactcc

SEQ ID NO: 2244666 - DNA, 25 bp, Homo sapien
gtgttgcaaatggcatctggatttc

SEQ ID NO: 2244667 - DNA, 25 bp, Homo sapien
tgttgcaaatggcatctggatttca

SEQ ID NO: 2244668 - DNA, 25 bp, Homo sapien
gttgcaaatggcatctggatttcat

SEQ ID NO: 2244669 - DNA, 25 bp, Homo sapien
caaagagatctctggggcggttccc

SEQ ID NO: 2244670 - DNA, 25 bp, Homo sapien
ctaaggaaatctatcattgtgatca

SEQ ID NO: 2244671 - DNA, 25 bp, Homo sapien
ctgcatgacgttttggagccatcga

SEQ ID NO: 2244672 - DNA, 25 bp, Homo sapien
tctggggcggttccctcaatttgaa

SEQ ID NO: 2244673 - DNA, 25 bp, Homo sapien
ctttgatatgaagaagttgtacttc

SEQ ID NO: 2244674 - DNA, 25 bp, Homo sapien
cattattaagatgctttcaagatac

SEQ ID NO: 2244675 - DNA, 25 bp, Homo sapien
ttattaagatgctttcaagatacat

SEQ ID NO: 2244676 - DNA, 25 bp, Homo sapien
attattaagatgctttcaagataca

SEQ ID NO: 2244677 - DNA, 25 bp, Homo sapien
ttgccaagtgattggcaagatctaa

SEQ ID NO: 2244678 - DNA, 25 bp, Homo sapien
tgccaagtgattggcaagatctaac

SEQ ID NO: 2244679 - DNA, 25 bp, Homo sapien
caagtgattggcaagatctaacttt

SEQ ID NO: 2244680 - DNA, 25 bp, Homo sapien
gggctcaggtacagtagtctcatca

SEQ ID NO: 2244681 - DNA, 25 bp, Homo sapien
ctcttcttgaaacatagcctgaaac

SEQ ID NO: 2244682 - DNA, 25 bp, Homo sapien
ctgataaccgttctagctgaaaatc

SEQ ID NO: 2244683 - DNA, 25 bp, Homo sapien
tcccatcggagaattgtcctctatt

SEQ ID NO: 2244684 - DNA, 25 bp, Homo sapien
caatatactctgataaccgttctag

SEQ ID NO: 2244685 - DNA, 25 bp, Homo sapien
ctacttgactttctcaactcccatt

SEQ ID NO: 2244686 - DNA, 25 bp, Homo sapien
ttctcaactcccatttctgctcctt

SEQ ID NO: 2244687 - DNA, 25 bp, Homo sapien
tgactttctcaactcccatttctgc

SEQ ID NO: 2244688 - DNA, 25 bp, Homo sapien
tcaactcccatttctgctccttcac

SEQ ID NO: 2244689 - DNA, 25 bp, Homo sapien
tattttcaacaatcttatggataat

SEQ ID NO: 2244690 - DNA, 25 bp, Homo sapien
cacaatagtgaatttggatgatgta

SEQ ID NO: 2244691 - DNA, 25 bp, Homo sapien
aaactggtaagaaatctgctcaaaa

SEQ ID NO: 2244692 - DNA, 25 bp, Homo sapien
gataataagtctgaactgtgtagaa

SEQ ID NO: 2244693 - DNA, 25 bp, Homo sapien
tcagggcaccttcttagcatcaagt

SEQ ID NO: 2244694 - DNA, 25 bp, Homo sapien
gatcccagttgtatttctattgtaa

SEQ ID NO: 2244695 - DNA, 25 bp, Homo sapien
gcagagttgacactactgccaccca

SEQ ID NO: 2244696 - DNA, 25 bp, Homo sapien
ccccagaggaatgagtggtcgcagt

SEQ ID NO: 2244697 - DNA, 25 bp, Homo sapien
ttttattaacatcctctgggccaca

SEQ ID NO: 2244698 - DNA, 25 bp, Homo sapien
tattaacatcctctgggccacaagg

SEQ ID NO: 2244699 - DNA, 25 bp, Homo sapien
ttaacatcctctgggccacaaggca

SEQ ID NO: 2244700 - DNA, 25 bp, Homo sapien
ttattaacatcctctgggccacaag

SEQ ID NO: 2244701 - DNA, 25 bp, Homo sapien
agaagattatctttggttaacctgc

SEQ ID NO: 2244702 - DNA, 25 bp, Homo sapien
tcagaagattatctttggttaacct

SEQ ID NO: 2244703 - DNA, 25 bp, Homo sapien
aagattatctttggttaacctgcta

SEQ ID NO: 2244704 - DNA, 25 bp, Homo sapien
gattatctttggttaacctgctatg

SEQ ID NO: 2244705 - DNA, 25 bp, Homo sapien
aatcgaatgaccattattcagagca

SEQ ID NO: 2244706 - DNA, 25 bp, Homo sapien
gaatgaccattattcagagcatttt

SEQ ID NO: 2244707 - DNA, 25 bp, Homo sapien
tattcagagcattttccgaaaatgt

SEQ ID NO: 2244708 - DNA, 25 bp, Homo sapien
tgaccattattcagagcattttccg

SEQ ID NO: 2244709 - DNA, 25 bp, Homo sapien
acggaaaatgtggaaacctgctgaa

SEQ ID NO: 2244710 - DNA, 25 bp, Homo sapien
acagtgagagtcaaggacaccagga

SEQ ID NO: 2244711 - DNA, 25 bp, Homo sapien
aatacggaaaatgtggaaacctgct

SEQ ID NO: 2244712 - DNA, 25 bp, Homo sapien
tgagggatgtcaaaggctgagaaaa

SEQ ID NO: 2244713 - DNA, 25 bp, Homo sapien
aaacaagtacctgtgatatacggcc

SEQ ID NO: 2244714 - DNA, 25 bp, Homo sapien
aagagtgtgtgcatagcccagcctc

SEQ ID NO: 2244715 - DNA, 25 bp, Homo sapien
cacagatgctgcatgggatccctgc

SEQ ID NO: 2244716 - DNA, 25 bp, Homo sapien
ccaacagtccggaggaagtgcgtcc

SEQ ID NO: 2244717 - DNA, 25 bp, Homo sapien
ggtatcatatacttgacattctagc

SEQ ID NO: 2244718 - DNA, 25 bp, Homo sapien
tgtttccctatttagcaagtcaaac

SEQ ID NO: 2244719 - DNA, 25 bp, Homo sapien
tgtcacttgaacctgctgttttgca

SEQ ID NO: 2244720 - DNA, 25 bp, Homo sapien
gtcaaacatcttcccactataaatt

SEQ ID NO: 2244721 - DNA, 25 bp, Homo sapien
ttgaagattttaccattgtttgatg

SEQ ID NO: 2244722 - DNA, 25 bp, Homo sapien
gaagattttaccattgtttgatgca

SEQ ID NO: 2244723 - DNA, 25 bp, Homo sapien
aagatgctgatcaggtcaatatctt

SEQ ID NO: 2244724 - DNA, 25 bp, Homo sapien
ttttgaagattttaccattgtttga

SEQ ID NO: 2244725 - DNA, 25 bp, Homo sapien
ttcactccaactattttagctgctg

SEQ ID NO: 2244726 - DNA, 25 bp, Homo sapien
gaagtgagaaccagtgttattcatg

SEQ ID NO: 2244727 - DNA, 25 bp, Homo sapien
tacacagaatttcgaagaaatttgg

SEQ ID NO: 2244728 - DNA, 25 bp, Homo sapien
aatttggttactctgtagagaatga

SEQ ID NO: 2244729 - DNA, 25 bp, Homo sapien
aaagccatagtcgtaacaagctagt

SEQ ID NO: 2244730 - DNA, 25 bp, Homo sapien
catagtcgtaacaagctagtttgca

SEQ ID NO: 2244731 - DNA, 25 bp, Homo sapien
atggctgttccgcaagtaccaagac

SEQ ID NO: 2244732 - DNA, 25 bp, Homo sapien
gctgttccgcaagtaccaagactcc

SEQ ID NO: 2244733 - DNA, 25 bp, Homo sapien
tcaaattgtgccatggattgttccc

SEQ ID NO: 2244734 - DNA, 25 bp, Homo sapien
gaaagatatttcctaatgcagcagt

SEQ ID NO: 2244735 - DNA, 25 bp, Homo sapien
tgaccactggcttccgaaagatatt

SEQ ID NO: 2244736 - DNA, 25 bp, Homo sapien
taaaattggcttcaacgctggacat

SEQ ID NO: 2244737 - DNA, 25 bp, Homo sapien
gaatgggaagaattgttgaaggtca

SEQ ID NO: 2244738 - DNA, 25 bp, Homo sapien
cacatttgcatgtgttccaccagag

SEQ ID NO: 2244739 - DNA, 25 bp, Homo sapien
catgtgttccaccagaggtagtgca

SEQ ID NO: 2244740 - DNA, 25 bp, Homo sapien
atgggaagaattgttgaaggtcaca

SEQ ID NO: 2244741 - DNA, 25 bp, Homo sapien
gaagtggtcagactgcaattctgtt

SEQ ID NO: 2244742 - DNA, 25 bp, Homo sapien
tatgagtgaccatggtccagggaga

SEQ ID NO: 2244743 - DNA, 25 bp, Homo sapien
agtgaccatggtccagggagaaaac

SEQ ID NO: 2244744 - DNA, 25 bp, Homo sapien
cccaaaaagcctagagtagtggtct

SEQ ID NO: 2244745 - DNA, 25 bp, Homo sapien
agatattgtagattttgttccagat

SEQ ID NO: 2244746 - DNA, 25 bp, Homo sapien
ggagatattgtagattttgttccag

SEQ ID NO: 2244747 - DNA, 25 bp, Homo sapien
atattgtagattttgttccagatct

SEQ ID NO: 2244748 - DNA, 25 bp, Homo sapien
cttggagatattgtagattttgttc

SEQ ID NO: 2244749 - DNA, 25 bp, Homo sapien
cagacttccatatgtggttgcacag

SEQ ID NO: 2244750 - DNA, 25 bp, Homo sapien
gcctggcacgtttatcccaacaaag

SEQ ID NO: 2244751 - DNA, 25 bp, Homo sapien
gaaggaaagctgaattcatgttgac

SEQ ID NO: 2244752 - DNA, 25 bp, Homo sapien
taggcaggaagggataaaatctagc

SEQ ID NO: 2244753 - DNA, 25 bp, Homo sapien
gggtaaaacataccgagaaagtgca

SEQ ID NO: 2244754 - DNA, 25 bp, Homo sapien
tatgcattgcgtatagttctcctgg

SEQ ID NO: 2244755 - DNA, 25 bp, Homo sapien
tgcattatcatagccaaacacccag

SEQ ID NO: 2244756 - DNA, 25 bp, Homo sapien
gaggagatactctgttcctactggg

SEQ ID NO: 2244757 - DNA, 25 bp, Homo sapien
gccatctcccactggtactcctgta

SEQ ID NO: 2244758 - DNA, 25 bp, Homo sapien
taatctgacacttcaagatgtctcc

SEQ ID NO: 2244759 - DNA, 25 bp, Homo sapien
gtactcctgtaatctgacacttcaa

SEQ ID NO: 2244760 - DNA, 25 bp, Homo sapien
ctgacacttcaagatgtctcctctg

SEQ ID NO: 2244761 - DNA, 25 bp, Homo sapien
gcttgaaactgctcatagaggtcat

SEQ ID NO: 2244762 - DNA, 25 bp, Homo sapien
gaagcatctatcaggagaagctgtg

SEQ ID NO: 2244763 - DNA, 25 bp, Homo sapien
gaggtcatgatggatgcaccaatcc

SEQ ID NO: 2244764 - DNA, 25 bp, Homo sapien
tgcaaaaagaacctcgggcacttgg

SEQ ID NO: 2244765 - DNA, 25 bp, Homo sapien
acctctccccggctcttgcgtagct

SEQ ID NO: 2244766 - DNA, 25 bp, Homo sapien
ggctcttgcgtagctctttctctgg

SEQ ID NO: 2244767 - DNA, 25 bp, Homo sapien
ctctggctccaaggcgatgtagcac

SEQ ID NO: 2244768 - DNA, 25 bp, Homo sapien
agtctgtatgctcccaggacctctc

SEQ ID NO: 2244769 - DNA, 25 bp, Homo sapien
cctaggattcaaagagggctcggtc

SEQ ID NO: 2244770 - DNA, 25 bp, Homo sapien
taccacggccttgttgagtatgcaa

SEQ ID NO: 2244771 - DNA, 25 bp, Homo sapien
tagacaggtagaaaccaggcacact

SEQ ID NO: 2244772 - DNA, 25 bp, Homo sapien
tttacaatgtcccaagacggagctg

SEQ ID NO: 2244773 - DNA, 25 bp, Homo sapien
gaacacttacgtcactctctgagat

SEQ ID NO: 2244774 - DNA, 25 bp, Homo sapien
gtaggctaccttcagtccaccagga

SEQ ID NO: 2244775 - DNA, 25 bp, Homo sapien
ttgtcacccatgtacagctagtagg

SEQ ID NO: 2244776 - DNA, 25 bp, Homo sapien
tctgaagtttcaagttgtcacccat

SEQ ID NO: 2244777 - DNA, 25 bp, Homo sapien
tccaaggcaattgtcagctagatag

SEQ ID NO: 2244778 - DNA, 25 bp, Homo sapien
gagagagatatcatgggactatgcc

SEQ ID NO: 2244779 - DNA, 25 bp, Homo sapien
cctctaacgtgaaacacagatagca

SEQ ID NO: 2244780 - DNA, 25 bp, Homo sapien
tatgccatgtcatgcctttacagtg

SEQ ID NO: 2244781 - DNA, 25 bp, Homo sapien
taggggccaccgtagtatccagtgg

SEQ ID NO: 2244782 - DNA, 25 bp, Homo sapien
ctggtaggggccaccgtagtatcca

SEQ ID NO: 2244783 - DNA, 25 bp, Homo sapien
gtaggggccaccgtagtatccagtg

SEQ ID NO: 2244784 - DNA, 25 bp, Homo sapien
gggccaccgtagtatccagtggtct

SEQ ID NO: 2244785 - DNA, 25 bp, Homo sapien
agatttcgggacagatcttcattgg

SEQ ID NO: 2244786 - DNA, 25 bp, Homo sapien
tagatttcgggacagatcttcattg

SEQ ID NO: 2244787 - DNA, 25 bp, Homo sapien
tcttcattgggtttcctccatctac

SEQ ID NO: 2244788 - DNA, 25 bp, Homo sapien
gtttggcaaccagataccccatgga

SEQ ID NO: 2244789 - DNA, 25 bp, Homo sapien
aggagagtccatttgctgccattgc

SEQ ID NO: 2244790 - DNA, 25 bp, Homo sapien
tgtagttgccaagcatggcattcct

SEQ ID NO: 2244791 - DNA, 25 bp, Homo sapien
ttttcgcctcgtcccaacctgaaga

SEQ ID NO: 2244792 - DNA, 25 bp, Homo sapien
tggaaaaggatggtgatctcctcct

SEQ ID NO: 2244793 - DNA, 25 bp, Homo sapien
tgagacctcagcctgggttttctta

SEQ ID NO: 2244794 - DNA, 25 bp, Homo sapien
agacctcagcctgggttttcttaga

SEQ ID NO: 2244795 - DNA, 25 bp, Homo sapien
aaggatggtgatctcctcctgagac

SEQ ID NO: 2244796 - DNA, 25 bp, Homo sapien
cagagactgcgtagacaagtatgag

SEQ ID NO: 2244797 - DNA, 25 bp, Homo sapien
gcgtagacaagtatgagtccagttt

SEQ ID NO: 2244798 - DNA, 25 bp, Homo sapien
ctgttcagagactgcgtagacaagt

SEQ ID NO: 2244799 - DNA, 25 bp, Homo sapien
tgttggatccgtaagttaagtttga

SEQ ID NO: 2244800 - DNA, 25 bp, Homo sapien
tcagagaggtcacgaatggatatac

SEQ ID NO: 2244801 - DNA, 25 bp, Homo sapien
agaggtcacgaatggatataccaat

SEQ ID NO: 2244802 - DNA, 25 bp, Homo sapien
cagagaggtcacgaatggatatacc

SEQ ID NO: 2244803 - DNA, 25 bp, Homo sapien
gctcagagaggtcacgaatggatat

SEQ ID NO: 2244804 - DNA, 25 bp, Homo sapien
agaagcatcgaacaacagaagccat

SEQ ID NO: 2244805 - DNA, 25 bp, Homo sapien
ccacacaaagaagcatcgaacaaca

SEQ ID NO: 2244806 - DNA, 25 bp, Homo sapien
gcatcgaacaacagaagccataatt

SEQ ID NO: 2244807 - DNA, 25 bp, Homo sapien
gaagccataattttgatgtaagtac

SEQ ID NO: 2244808 - DNA, 25 bp, Homo sapien
gccattattgagagtcccgggctgt

SEQ ID NO: 2244809 - DNA, 25 bp, Homo sapien
cagttcattatgttgctggaggcca

SEQ ID NO: 2244810 - DNA, 25 bp, Homo sapien
ggcaaaaagaacttcgggcacttga

SEQ ID NO: 2244811 - DNA, 25 bp, Homo sapien
tggcccagaaaagagagtggtgccc

SEQ ID NO: 2244812 - DNA, 25 bp, Homo sapien
tcaggcctgtaacacaggcagcggc

SEQ ID NO: 2244813 - DNA, 25 bp, Homo sapien
ccctccctgctacaaagagctcagt

SEQ ID NO: 2244814 - DNA, 25 bp, Homo sapien
atgtccctccctgctacaaagagct

SEQ ID NO: 2244815 - DNA, 25 bp, Homo sapien
ccaggtgaggtgctttatgatgtcc

SEQ ID NO: 2244816 - DNA, 25 bp, Homo sapien
gctcttggcccataagccttggaaa

SEQ ID NO: 2244817 - DNA, 25 bp, Homo sapien
cattagcctgtgttgaaccttgtgg

SEQ ID NO: 2244818 - DNA, 25 bp, Homo sapien
cagtggcttcacgacatggagatcc

SEQ ID NO: 2244819 - DNA, 25 bp, Homo sapien
actcttcgttactgcaggtgccaca

SEQ ID NO: 2244820 - DNA, 25 bp, Homo sapien
ggctagttctgcacctgtctgagga

SEQ ID NO: 2244821 - DNA, 25 bp, Homo sapien
gactatgatgatcacctccctctgg

SEQ ID NO: 2244822 - DNA, 25 bp, Homo sapien
gcatttgactgcatcttggtggagc

SEQ ID NO: 2244823 - DNA, 25 bp, Homo sapien
tgtctgaggacccagttccactttc

SEQ ID NO: 2244824 - DNA, 25 bp, Homo sapien
ggataaatacacaaacctggtctgg

SEQ ID NO: 2244825 - DNA, 25 bp, Homo sapien
tcagtgtcagccaatgagagtcatt

SEQ ID NO: 2244826 - DNA, 25 bp, Homo sapien
tttttaagtttagcacgagcatctg

SEQ ID NO: 2244827 - DNA, 25 bp, Homo sapien
cctggtctggaagcaatagtactcc

SEQ ID NO: 2244828 - DNA, 25 bp, Homo sapien
aactcatcttatcctgtgtgattcc

SEQ ID NO: 2244829 - DNA, 25 bp, Homo sapien
gccccaaactcatcttatcctgtgt

SEQ ID NO: 2244830 - DNA, 25 bp, Homo sapien
cctgtttcagagatagtaacaagtt

SEQ ID NO: 2244831 - DNA, 25 bp, Homo sapien
tcagagatagtaacaagtttaggtt

SEQ ID NO: 2244832 - DNA, 25 bp, Homo sapien
acaggaaaaaagcctctctcctcca

SEQ ID NO: 2244833 - DNA, 25 bp, Homo sapien
ctctcctccagtaggccacccaaga

SEQ ID NO: 2244834 - DNA, 25 bp, Homo sapien
gcctctctcctccagtaggccaccc

SEQ ID NO: 2244835 - DNA, 25 bp, Homo sapien
ctctctcctccagtaggccacccaa

SEQ ID NO: 2244836 - DNA, 25 bp, Homo sapien
aagaaggtgggcctaggcccctgct

SEQ ID NO: 2244837 - DNA, 25 bp, Homo sapien
catctagcccaaaagggagctcatc

SEQ ID NO: 2244838 - DNA, 25 bp, Homo sapien
ccaataatttgggtactggacagga

SEQ ID NO: 2244839 - DNA, 25 bp, Homo sapien
taggcccctgctgttgtgaggaaac

SEQ ID NO: 2244840 - DNA, 25 bp, Homo sapien
gcgttggaccaccaaacagctactt

SEQ ID NO: 2244841 - DNA, 25 bp, Homo sapien
caaaattaaccagtccacacaggcg

SEQ ID NO: 2244842 - DNA, 25 bp, Homo sapien
caaaagcctgtctcctataagcagt

SEQ ID NO: 2244843 - DNA, 25 bp, Homo sapien
tgtcaaacggccctgctacatccag

SEQ ID NO: 2244844 - DNA, 25 bp, Homo sapien
gtacagacaagaggcaaagcaaggg

SEQ ID NO: 2244845 - DNA, 25 bp, Homo sapien
agacaagaggcaaagcaagggaagc

SEQ ID NO: 2244846 - DNA, 25 bp, Homo sapien
acagacaagaggcaaagcaagggaa

SEQ ID NO: 2244847 - DNA, 25 bp, Homo sapien
agtacagacaagaggcaaagcaagg

SEQ ID NO: 2244848 - DNA, 25 bp, Homo sapien
agacgtccagtccttccagcaggtg

SEQ ID NO: 2244849 - DNA, 25 bp, Homo sapien
gccagcaatggggatgtctccacta

SEQ ID NO: 2244850 - DNA, 25 bp, Homo sapien
gatgtctccactaagagacgtccag

SEQ ID NO: 2244851 - DNA, 25 bp, Homo sapien
cagtccttccagcaggtgttaacac

SEQ ID NO: 2244852 - DNA, 25 bp, Homo sapien
ataacatggatctcatagaactggt

SEQ ID NO: 2244853 - DNA, 25 bp, Homo sapien
ctcatagaactggttatgtttctgc

SEQ ID NO: 2244854 - DNA, 25 bp, Homo sapien
actgtacataacatggatctcatag

SEQ ID NO: 2244855 - DNA, 25 bp, Homo sapien
tacataacatggatctcatagaact

SEQ ID NO: 2244856 - DNA, 25 bp, Homo sapien
tggtgggcacaatggcagatataat

SEQ ID NO: 2244857 - DNA, 25 bp, Homo sapien
actgccttcacaccggttaactcgg

SEQ ID NO: 2244858 - DNA, 25 bp, Homo sapien
gttaactcggaagacataaggagct

SEQ ID NO: 2244859 - DNA, 25 bp, Homo sapien
taagctggtgggcacaatggcagat

SEQ ID NO: 2244860 - DNA, 25 bp, Homo sapien
gcaagttctggacctaaaatctgtg

SEQ ID NO: 2244861 - DNA, 25 bp, Homo sapien
tctggacctaaaatctgtgactcaa

SEQ ID NO: 2244862 - DNA, 25 bp, Homo sapien
tagagaggcaagttctggacctaaa

SEQ ID NO: 2244863 - DNA, 25 bp, Homo sapien
taaaatctgtgactcaaattgccaa

SEQ ID NO: 2244864 - DNA, 25 bp, Homo sapien
tcaaactccagactatacacaatat

SEQ ID NO: 2244865 - DNA, 25 bp, Homo sapien
caaactccagactatacacaatatt

SEQ ID NO: 2244866 - DNA, 25 bp, Homo sapien
aaactccagactatacacaatattc

SEQ ID NO: 2244867 - DNA, 25 bp, Homo sapien
actccagactatacacaatattcaa

SEQ ID NO: 2244868 - DNA, 25 bp, Homo sapien
acagtcctatgggaagcttcactga

SEQ ID NO: 2244869 - DNA, 25 bp, Homo sapien
gaacagtcctatgggaagcttcact

SEQ ID NO: 2244870 - DNA, 25 bp, Homo sapien
cctatgggaagcttcactgaattca

SEQ ID NO: 2244871 - DNA, 25 bp, Homo sapien
tctttgaacagtcctatgggaagct

SEQ ID NO: 2244872 - DNA, 25 bp, Homo sapien
tctctaagaggttccaaacatcccc

SEQ ID NO: 2244873 - DNA, 25 bp, Homo sapien
gtctctaagaggttccaaacatccc

SEQ ID NO: 2244874 - DNA, 25 bp, Homo sapien
ctctaagaggttccaaacatcccct

SEQ ID NO: 2244875 - DNA, 25 bp, Homo sapien
tcaattcactgtagctttcacactt

SEQ ID NO: 2244876 - DNA, 25 bp, Homo sapien
caattcactgtagctttcacacttt

SEQ ID NO: 2244877 - DNA, 25 bp, Homo sapien
aggaatagtggaattcccttcctct

SEQ ID NO: 2244878 - DNA, 25 bp, Homo sapien
ggaatagtggaattcccttcctctg

SEQ ID NO: 2244879 - DNA, 25 bp, Homo sapien
tcataaacacagttgctctcttcca

SEQ ID NO: 2244880 - DNA, 25 bp, Homo sapien
cataaacacagttgctctcttccat

SEQ ID NO: 2244881 - DNA, 25 bp, Homo sapien
gagacctgttctcaggttgaggggc

SEQ ID NO: 2244882 - DNA, 25 bp, Homo sapien
ttgagacctgttctcaggttgaggg

SEQ ID NO: 2244883 - DNA, 25 bp, Homo sapien
cttgagacctgttctcaggttgagg

SEQ ID NO: 2244884 - DNA, 25 bp, Homo sapien
gacctgttctcaggttgaggggcat

SEQ ID NO: 2244885 - DNA, 25 bp, Homo sapien
atgggaaagatctccaagttgggcc

SEQ ID NO: 2244886 - DNA, 25 bp, Homo sapien
aatgggaaagatctccaagttgggc

SEQ ID NO: 2244887 - DNA, 25 bp, Homo sapien
caatgggaaagatctccaagttggg

SEQ ID NO: 2244888 - DNA, 25 bp, Homo sapien
agcaatgggaaagatctccaagttg

SEQ ID NO: 2244889 - DNA, 25 bp, Homo sapien
cacagcgggatccatgcatgcgcat

SEQ ID NO: 2244890 - DNA, 25 bp, Homo sapien
ctgaatccatatttgaccacaacca

SEQ ID NO: 2244891 - DNA, 25 bp, Homo sapien
tctgaatccatatttgaccacaacc

SEQ ID NO: 2244892 - DNA, 25 bp, Homo sapien
tgaatccatatttgaccacaaccac

SEQ ID NO: 2244893 - DNA, 25 bp, Homo sapien
ttccaacgcgttcatttctaactga

SEQ ID NO: 2244894 - DNA, 25 bp, Homo sapien
catttctaactgaaacataaactga

SEQ ID NO: 2244895 - DNA, 25 bp, Homo sapien
ccaacgcgttcatttctaactgaaa

SEQ ID NO: 2244896 - DNA, 25 bp, Homo sapien
cgcgttcatttctaactgaaacata

SEQ ID NO: 2244897 - DNA, 25 bp, Homo sapien
gcccaggctaggacttctaaatgaa

SEQ ID NO: 2244898 - DNA, 25 bp, Homo sapien
gcttgtatctctggtggtattgtcc

SEQ ID NO: 2244899 - DNA, 25 bp, Homo sapien
gaccttgacaacctaattgtgcttg

SEQ ID NO: 2244900 - DNA, 25 bp, Homo sapien
gaacagacgctagggtgcaaagccc

SEQ ID NO: 2244901 - DNA, 25 bp, Homo sapien
tcagatgatccatattggattgtca

SEQ ID NO: 2244902 - DNA, 25 bp, Homo sapien
cagatgatccatattggattgtcat

SEQ ID NO: 2244903 - DNA, 25 bp, Homo sapien
atgatccatattggattgtcatcat

SEQ ID NO: 2244904 - DNA, 25 bp, Homo sapien
gatgatccatattggattgtcatca

SEQ ID NO: 2244905 - DNA, 25 bp, Homo sapien
gaaatcactcaaataggcggttagg

SEQ ID NO: 2244906 - DNA, 25 bp, Homo sapien
gaatggaaacacctactctgtgaaa

SEQ ID NO: 2244907 - DNA, 25 bp, Homo sapien
gcagtttgcatttgaaagcccggga

SEQ ID NO: 2244908 - DNA, 25 bp, Homo sapien
taggtccatggactagcagtggcag

SEQ ID NO: 2244909 - DNA, 25 bp, Homo sapien
gtcagcaaatcggatggtgcaactt

SEQ ID NO: 2244910 - DNA, 25 bp, Homo sapien
tatgcagattcatgccgaaggaccc

SEQ ID NO: 2244911 - DNA, 25 bp, Homo sapien
gaaggaccctgcatagtttgtcagc

SEQ ID NO: 2244912 - DNA, 25 bp, Homo sapien
caccatcctgggaatatgcagattc

SEQ ID NO: 2244913 - DNA, 25 bp, Homo sapien
atggggcaatagaagaatcaaataa

SEQ ID NO: 2244914 - DNA, 25 bp, Homo sapien
ctatatggggcaatagaagaatcaa

SEQ ID NO: 2244915 - DNA, 25 bp, Homo sapien
tatatggggcaatagaagaatcaaa

SEQ ID NO: 2244916 - DNA, 25 bp, Homo sapien
tatggggcaatagaagaatcaaata

SEQ ID NO: 2244917 - DNA, 25 bp, Homo sapien
ctagatagagtaaagacagactcat

SEQ ID NO: 2244918 - DNA, 25 bp, Homo sapien
cagaatttctttgagaagaattcat

SEQ ID NO: 2244919 - DNA, 25 bp, Homo sapien
cagtttcagagaggaacaccacccc

SEQ ID NO: 2244920 - DNA, 25 bp, Homo sapien
caccccagaatttctttgagaagaa

SEQ ID NO: 2244921 - DNA, 25 bp, Homo sapien
cagagaggaacaccaccccagaatt

SEQ ID NO: 2244922 - DNA, 25 bp, Homo sapien
cagagctgtgcaagtttcttgtaca

SEQ ID NO: 2244923 - DNA, 25 bp, Homo sapien
tgggatgattttaagcctgaaggac

SEQ ID NO: 2244924 - DNA, 25 bp, Homo sapien
aaggacagagctgtgcaagtttctt

SEQ ID NO: 2244925 - DNA, 25 bp, Homo sapien
ggatgattttaagcctgaaggacag

SEQ ID NO: 2244926 - DNA, 25 bp, Homo sapien
gctttttgcaaacccactcttagac

SEQ ID NO: 2244927 - DNA, 25 bp, Homo sapien
ctacttgtaaagaggagttaccaca

SEQ ID NO: 2244928 - DNA, 25 bp, Homo sapien
cggaaatagtcaagggtcatggagt

SEQ ID NO: 2244929 - DNA, 25 bp, Homo sapien
aatatgtagggctggtccttgagac

SEQ ID NO: 2244930 - DNA, 25 bp, Homo sapien
gatctactggcctgtcctaaaataa

SEQ ID NO: 2244931 - DNA, 25 bp, Homo sapien
taattggctcattaactagccatcc

SEQ ID NO: 2244932 - DNA, 25 bp, Homo sapien
tatagagctatgtgtccagatctac

SEQ ID NO: 2244933 - DNA, 25 bp, Homo sapien
tcctggtttagtaccaatatcaaag

SEQ ID NO: 2244934 - DNA, 25 bp, Homo sapien
cttctaaaaggtcagaaaagcccat

SEQ ID NO: 2244935 - DNA, 25 bp, Homo sapien
gggtacatttgtaactctcaggccc

SEQ ID NO: 2244936 - DNA, 25 bp, Homo sapien
cccagacatgtcaagttgtggttca

SEQ ID NO: 2244937 - DNA, 25 bp, Homo sapien
tggcccaggtataagtcctgcagtg

SEQ ID NO: 2244938 - DNA, 25 bp, Homo sapien
tgcttgagtgaaacatggcccaggt

SEQ ID NO: 2244939 - DNA, 25 bp, Homo sapien
cagtgttcccagtaatttgtttaag

SEQ ID NO: 2244940 - DNA, 25 bp, Homo sapien
gcagtgttcccagtaatttgtttaa

SEQ ID NO: 2244941 - DNA, 25 bp, Homo sapien
cagtaatttgtttaagttgtaagca

SEQ ID NO: 2244942 - DNA, 25 bp, Homo sapien
agcagtgttcccagtaatttgttta

SEQ ID NO: 2244943 - DNA, 25 bp, Homo sapien
tctcaaggtcacataccaaagataa

SEQ ID NO: 2244944 - DNA, 25 bp, Homo sapien
agaccacttggggacgttctcaagg

SEQ ID NO: 2244945 - DNA, 25 bp, Homo sapien
aaactgtagcagataaccttttcta

SEQ ID NO: 2244946 - DNA, 25 bp, Homo sapien
tttagaccacttggggacgttctca

SEQ ID NO: 2244947 - DNA, 25 bp, Homo sapien
tccaagttgtgagcccatgtcagag

SEQ ID NO: 2244948 - DNA, 25 bp, Homo sapien
tagcttttatagttctcaggacggc

SEQ ID NO: 2244949 - DNA, 25 bp, Homo sapien
tcaggacggctgagaatgatgagct

SEQ ID NO: 2244950 - DNA, 25 bp, Homo sapien
tgtataggttcaattaccagctggc

SEQ ID NO: 2244951 - DNA, 25 bp, Homo sapien
tgcaatgtccaacgtgtatactctg

SEQ ID NO: 2244952 - DNA, 25 bp, Homo sapien
aagtttcttctacagggcccaagtg

SEQ ID NO: 2244953 - DNA, 25 bp, Homo sapien
tggaatgcaatgtccaacgtgtata

SEQ ID NO: 2244954 - DNA, 25 bp, Homo sapien
aggctgacggccacttttgacttat

SEQ ID NO: 2244955 - DNA, 25 bp, Homo sapien
ccagtgtattctgccatcgcccaga

SEQ ID NO: 2244956 - DNA, 25 bp, Homo sapien
tcgcccagatagcactttcaaagag

SEQ ID NO: 2244957 - DNA, 25 bp, Homo sapien
atttgggaatgaaatcaccctccat

SEQ ID NO: 2244958 - DNA, 25 bp, Homo sapien
gggaatgaaatcaccctccattgat

SEQ ID NO: 2244959 - DNA, 25 bp, Homo sapien
catggcttgcttaagcccccctgaa

SEQ ID NO: 2244960 - DNA, 25 bp, Homo sapien
tacttccatgtaaatccattaagaa

SEQ ID NO: 2244961 - DNA, 25 bp, Homo sapien
aataattttaccatcctctttgatc

SEQ ID NO: 2244962 - DNA, 25 bp, Homo sapien
ctttgaagtccaatatgatgatatg

SEQ ID NO: 2244963 - DNA, 25 bp, Homo sapien
tgactgtcgtcatccttttgtgcca

SEQ ID NO: 2244964 - DNA, 25 bp, Homo sapien
ccagttctaaccacctggttgcaaa

SEQ ID NO: 2244965 - DNA, 25 bp, Homo sapien
tgtgccatcaaataggtcttatata

SEQ ID NO: 2244966 - DNA, 25 bp, Homo sapien
tattattgactgtcgtcatcctttt

SEQ ID NO: 2244967 - DNA, 25 bp, Homo sapien
ctcagctgttatcagttctcccttc

SEQ ID NO: 2244968 - DNA, 25 bp, Homo sapien
ctctcagctgttatcagttctccct

SEQ ID NO: 2244969 - DNA, 25 bp, Homo sapien
tcagctgttatcagttctcccttct

SEQ ID NO: 2244970 - DNA, 25 bp, Homo sapien
tctcagctgttatcagttctccctt

SEQ ID NO: 2244971 - DNA, 25 bp, Homo sapien
aaccctacacctagattccactctt

SEQ ID NO: 2244972 - DNA, 25 bp, Homo sapien
ctgcttacaccagtgaaagccacca

SEQ ID NO: 2244973 - DNA, 25 bp, Homo sapien
gccaccaaccctacacctagattcc

SEQ ID NO: 2244974 - DNA, 25 bp, Homo sapien
cacctagattccactctttcttcag

SEQ ID NO: 2244975 - DNA, 25 bp, Homo sapien
tcactctctgctctattccctaaag

SEQ ID NO: 2244976 - DNA, 25 bp, Homo sapien
cactctctgctctattccctaaaga

SEQ ID NO: 2244977 - DNA, 25 bp, Homo sapien
ttctcactctctgctctattcccta

SEQ ID NO: 2244978 - DNA, 25 bp, Homo sapien
ctcactctctgctctattccctaaa

SEQ ID NO: 2244979 - DNA, 25 bp, Homo sapien
cactgcacggaatatctgacagccc

SEQ ID NO: 2244980 - DNA, 25 bp, Homo sapien
ctgaaatttgctacccagctggagg

SEQ ID NO: 2244981 - DNA, 25 bp, Homo sapien
tgcttactagcctttgttcaggaag

SEQ ID NO: 2244982 - DNA, 25 bp, Homo sapien
gcccttgctgtcttggtgcatgtta

SEQ ID NO: 2244983 - DNA, 25 bp, Homo sapien
catcttggaaacgatgggaagtcaa

SEQ ID NO: 2244984 - DNA, 25 bp, Homo sapien
gaagtcaagtccacagaatagggta

SEQ ID NO: 2244985 - DNA, 25 bp, Homo sapien
aaacttcagctcgatttgggcagga

SEQ ID NO: 2244986 - DNA, 25 bp, Homo sapien
caaaacctaggagttgagtgacagg

SEQ ID NO: 2244987 - DNA, 25 bp, Homo sapien
catgaggtctgcagattgagtacac

SEQ ID NO: 2244988 - DNA, 25 bp, Homo sapien
tcatgaggtctgcagattgagtaca

SEQ ID NO: 2244989 - DNA, 25 bp, Homo sapien
tgtagttctacatgggcatccgtgt

SEQ ID NO: 2244990 - DNA, 25 bp, Homo sapien
ctgtagttctacatgggcatccgtg

SEQ ID NO: 2244991 - DNA, 25 bp, Homo sapien
tccactagaatgttttctgtccttc

SEQ ID NO: 2244992 - DNA, 25 bp, Homo sapien
ttatggtgtggccattctgttcttg

SEQ ID NO: 2244993 - DNA, 25 bp, Homo sapien
ctgcttatggtgtggccattctgtt

SEQ ID NO: 2244994 - DNA, 25 bp, Homo sapien
tatggtgtggccattctgttcttgg

SEQ ID NO: 2244995 - DNA, 25 bp, Homo sapien
gcttatggtgtggccattctgttct

SEQ ID NO: 2244996 - DNA, 25 bp, Homo sapien
gtctatgaggaaatgttacttgcat

SEQ ID NO: 2244997 - DNA, 25 bp, Homo sapien
ccgctagtctatgaggaaatgttac

SEQ ID NO: 2244998 - DNA, 25 bp, Homo sapien
taatggcttccgctagtctatgagg

SEQ ID NO: 2244999 - DNA, 25 bp, Homo sapien
cacttgtgctaatggcttccgctag

SEQ ID NO: 2245000 - DNA, 25 bp, Homo sapien
aacacatttcatgagggaatcttca

SEQ ID NO: 2245001 - DNA, 25 bp, Homo sapien
catggaatcagcatgtcgaggagtt

SEQ ID NO: 2245002 - DNA, 25 bp, Homo sapien
acacatttcatgagggaatcttcaa

SEQ ID NO: 2245003 - DNA, 25 bp, Homo sapien
agcatgtcgaggagtttagaaacac

SEQ ID NO: 2245004 - DNA, 25 bp, Homo sapien
cctgtggtaccgctcttcatcaaag

SEQ ID NO: 2245005 - DNA, 25 bp, Homo sapien
atctgttacctctaaagccctcagg

SEQ ID NO: 2245006 - DNA, 25 bp, Homo sapien
tgttacctctaaagccctcaggacc

SEQ ID NO: 2245007 - DNA, 25 bp, Homo sapien
tcatcaaagcagtcactgccagaca

SEQ ID NO: 2245008 - DNA, 25 bp, Homo sapien
tgcttgtccattttccaagttttcc

SEQ ID NO: 2245009 - DNA, 25 bp, Homo sapien
gcttgtccattttccaagttttcca

SEQ ID NO: 2245010 - DNA, 25 bp, Homo sapien
cttgcttgtccattttccaagtttt

SEQ ID NO: 2245011 - DNA, 25 bp, Homo sapien
cttgtccattttccaagttttccat

SEQ ID NO: 2245012 - DNA, 25 bp, Homo sapien
atataattattgagaacctactatg

SEQ ID NO: 2245013 - DNA, 25 bp, Homo sapien
actatgtaccagtactgtttaccat

SEQ ID NO: 2245014 - DNA, 25 bp, Homo sapien
ctgtttaccataagacaaagacaca

SEQ ID NO: 2245015 - DNA, 25 bp, Homo sapien
taaataacaagcaagtaaataagta

SEQ ID NO: 2245016 - DNA, 25 bp, Homo sapien
atgcaagccctcatcaacaacactt

SEQ ID NO: 2245017 - DNA, 25 bp, Homo sapien
aacacttccactagatcttcattta

SEQ ID NO: 2245018 - DNA, 25 bp, Homo sapien
tcatcaacaacacttccactagatc

SEQ ID NO: 2245019 - DNA, 25 bp, Homo sapien
tgacccagcatgcaagccctcatca

SEQ ID NO: 2245020 - DNA, 25 bp, Homo sapien
gattgccctttatcttctgtaaggc

SEQ ID NO: 2245021 - DNA, 25 bp, Homo sapien
ttctgtaaggcccagacagcatgga

SEQ ID NO: 2245022 - DNA, 25 bp, Homo sapien
gacagcatggactgtccactgccat

SEQ ID NO: 2245023 - DNA, 25 bp, Homo sapien
gatgattgccctttatcttctgtaa

SEQ ID NO: 2245024 - DNA, 25 bp, Homo sapien
aggtctctacagtaaaggccttcca

SEQ ID NO: 2245025 - DNA, 25 bp, Homo sapien
tctctacagtaaaggccttccagaa

SEQ ID NO: 2245026 - DNA, 25 bp, Homo sapien
ggtctctacagtaaaggccttccag

SEQ ID NO: 2245027 - DNA, 25 bp, Homo sapien
gtctctacagtaaaggccttccaga

SEQ ID NO: 2245028 - DNA, 25 bp, Homo sapien
ttcagccaagcatctaatctacctg

SEQ ID NO: 2245029 - DNA, 25 bp, Homo sapien
ggagccatagtactggtcacactgg

SEQ ID NO: 2245030 - DNA, 25 bp, Homo sapien
catagtactggtcacactgggtctg

SEQ ID NO: 2245031 - DNA, 25 bp, Homo sapien
acctgcaagaagatggtaactgctg

SEQ ID NO: 2245032 - DNA, 25 bp, Homo sapien
ggcccagtggcattatagccccatt

SEQ ID NO: 2245033 - DNA, 25 bp, Homo sapien
agggcccagtggcattatagcccca

SEQ ID NO: 2245034 - DNA, 25 bp, Homo sapien
gggcccagtggcattatagccccat

SEQ ID NO: 2245035 - DNA, 25 bp, Homo sapien
aaaggggaagattcagcgcagacat

SEQ ID NO: 2245036 - DNA, 25 bp, Homo sapien
tcaaagtgggttggggacagggtga

SEQ ID NO: 2245037 - DNA, 25 bp, Homo sapien
ctcaaagtgggttggggacagggtg

SEQ ID NO: 2245038 - DNA, 25 bp, Homo sapien
atggaaaggggaagattcagcgcag

SEQ ID NO: 2245039 - DNA, 25 bp, Homo sapien
cagaacgcaatagagtccagaatta

SEQ ID NO: 2245040 - DNA, 25 bp, Homo sapien
tccacaatgaggatataactgccat

SEQ ID NO: 2245041 - DNA, 25 bp, Homo sapien
tctgaaagaggagcataagggagca

SEQ ID NO: 2245042 - DNA, 25 bp, Homo sapien
taagagcactgtgaacctgcaaaga

SEQ ID NO: 2245043 - DNA, 25 bp, Homo sapien
cacgactggcctgtgtgtagaaact

SEQ ID NO: 2245044 - DNA, 25 bp, Homo sapien
catcatgttcatggataagaaggct

SEQ ID NO: 2245045 - DNA, 25 bp, Homo sapien
aataatagcatcatgttcatggata

SEQ ID NO: 2245046 - DNA, 25 bp, Homo sapien
cgactggcctgtgtgtagaaacttt

SEQ ID NO: 2245047 - DNA, 25 bp, Homo sapien
caaggttaccaagacaataaatggg

SEQ ID NO: 2245048 - DNA, 25 bp, Homo sapien
tcaaggttaccaagacaataaatgg

SEQ ID NO: 2245049 - DNA, 25 bp, Homo sapien
tcaactttttctccatgcgttgagt

SEQ ID NO: 2245050 - DNA, 25 bp, Homo sapien
tgcgttgagttagcagccacctcca

SEQ ID NO: 2245051 - DNA, 25 bp, Homo sapien
ttttctccatgcgttgagttagcag

SEQ ID NO: 2245052 - DNA, 25 bp, Homo sapien
tccatgcgttgagttagcagccacc

SEQ ID NO: 2245053 - DNA, 25 bp, Homo sapien
gaatgcaccactggcgcacctaata

SEQ ID NO: 2245054 - DNA, 25 bp, Homo sapien
tgcttaagggacagcctgagttgct

SEQ ID NO: 2245055 - DNA, 25 bp, Homo sapien
aaaatgaatcctgtgacttaaagcc

SEQ ID NO: 2245056 - DNA, 25 bp, Homo sapien
taaagaggctcactagtggaggact

SEQ ID NO: 2245057 - DNA, 25 bp, Homo sapien
gatgtgcaacattaagcaaggacta

SEQ ID NO: 2245058 - DNA, 25 bp, Homo sapien
caaaactcttgcaaagtggaagcaa

SEQ ID NO: 2245059 - DNA, 25 bp, Homo sapien
catgaaacaggccttaataagaggc

SEQ ID NO: 2245060 - DNA, 25 bp, Homo sapien
caaggactaagtacattctgccatg

SEQ ID NO: 2245061 - DNA, 25 bp, Homo sapien
ggaaacctgagtaaactggcacgat

SEQ ID NO: 2245062 - DNA, 25 bp, Homo sapien
tagggcccatctagattggcactgt

SEQ ID NO: 2245063 - DNA, 25 bp, Homo sapien
ttaattggctcactggctgactggc

SEQ ID NO: 2245064 - DNA, 25 bp, Homo sapien
ccgtgaagtcgtgtatggaaacctg

SEQ ID NO: 2245065 - DNA, 25 bp, Homo sapien
gggcctccttgcagtcccggtgcag

SEQ ID NO: 2245066 - DNA, 25 bp, Homo sapien
tgcagtcccggtgcagcaatggcag

SEQ ID NO: 2245067 - DNA, 25 bp, Homo sapien
caggtctggatagagaagaggtcaa

SEQ ID NO: 2245068 - DNA, 25 bp, Homo sapien
gaacagctgtgcaggtctggataga

SEQ ID NO: 2245069 - DNA, 25 bp, Homo sapien
cagtgcaggtggtgaacccccattc

SEQ ID NO: 2245070 - DNA, 25 bp, Homo sapien
ctagtagagctggttgccctgctgc

SEQ ID NO: 2245071 - DNA, 25 bp, Homo sapien
tgctgggcctgcgtcaggctgtcct

SEQ ID NO: 2245072 - DNA, 25 bp, Homo sapien
tgcgtcaggctgtccttgcagtgca

SEQ ID NO: 2245073 - DNA, 25 bp, Homo sapien
ggccctgcgctcagtgtgggaagtg

SEQ ID NO: 2245074 - DNA, 25 bp, Homo sapien
cctgcgctcagtgtgggaagtgcca

SEQ ID NO: 2245075 - DNA, 25 bp, Homo sapien
agtggccaggccctgcgctcagtgt

SEQ ID NO: 2245076 - DNA, 25 bp, Homo sapien
ccaggccctgcgctcagtgtgggaa

SEQ ID NO: 2245077 - DNA, 25 bp, Homo sapien
ctcttcctcagggcggatgggcagg

SEQ ID NO: 2245078 - DNA, 25 bp, Homo sapien
gtgacactgttaatgagcagcaggc

SEQ ID NO: 2245079 - DNA, 25 bp, Homo sapien
tgacactgttaatgagcagcaggct

SEQ ID NO: 2245080 - DNA, 25 bp, Homo sapien
gcgctcttcctcagggcggatgggc

SEQ ID NO: 2245081 - DNA, 25 bp, Homo sapien
cactctctttggttcggggagaagg

SEQ ID NO: 2245082 - DNA, 25 bp, Homo sapien
ccactctctttggttcggggagaag

SEQ ID NO: 2245083 - DNA, 25 bp, Homo sapien
tctctttggttcggggagaaggtgc

SEQ ID NO: 2245084 - DNA, 25 bp, Homo sapien
agcccactctctttggttcggggag

SEQ ID NO: 2245085 - DNA, 25 bp, Homo sapien
caggtggcagagtatggtccacaaa

SEQ ID NO: 2245086 - DNA, 25 bp, Homo sapien
gcaggtggcagagtatggtccacaa

SEQ ID NO: 2245087 - DNA, 25 bp, Homo sapien
agagtatggtccacaaatgcccact

SEQ ID NO: 2245088 - DNA, 25 bp, Homo sapien
tggcagagtatggtccacaaatgcc

SEQ ID NO: 2245089 - DNA, 25 bp, Homo sapien
gctgttgcaggggatccaaacttta

SEQ ID NO: 2245090 - DNA, 25 bp, Homo sapien
gttgcaggggatccaaactttatcc

SEQ ID NO: 2245091 - DNA, 25 bp, Homo sapien
tgttgcaggggatccaaactttatc

SEQ ID NO: 2245092 - DNA, 25 bp, Homo sapien
ggggctgttgcaggggatccaaact

SEQ ID NO: 2245093 - DNA, 25 bp, Homo sapien
caaagacatcttcagccatagggtg

SEQ ID NO: 2245094 - DNA, 25 bp, Homo sapien
caatgaccaaagtaggcacaacagc

SEQ ID NO: 2245095 - DNA, 25 bp, Homo sapien
agaactcatagtttcggaagtggga

SEQ ID NO: 2245096 - DNA, 25 bp, Homo sapien
caggacagatcggagaactcatagt

SEQ ID NO: 2245097 - DNA, 25 bp, Homo sapien
tggtaccgctcgctgagctcctcca

SEQ ID NO: 2245098 - DNA, 25 bp, Homo sapien
agccaggttgcaatccccctggtac

SEQ ID NO: 2245099 - DNA, 25 bp, Homo sapien
cccctggtaccgctcgctgagctcc

SEQ ID NO: 2245100 - DNA, 25 bp, Homo sapien
gcacagccaggttgcaatccccctg

SEQ ID NO: 2245101 - DNA, 25 bp, Homo sapien
ctcagccttcttgagcagtgtgtgc

SEQ ID NO: 2245102 - DNA, 25 bp, Homo sapien
gccttcttgagcagtgtgtgcagct

SEQ ID NO: 2245103 - DNA, 25 bp, Homo sapien
tgtgtgcagcttgtcctccaactcc

SEQ ID NO: 2245104 - DNA, 25 bp, Homo sapien
cagccttcttgagcagtgtgtgcag

SEQ ID NO: 2245105 - DNA, 25 bp, Homo sapien
ggcagtcctgcccaatttccagctt

SEQ ID NO: 2245106 - DNA, 25 bp, Homo sapien
agctctaggcagtcctgcccaattt

SEQ ID NO: 2245107 - DNA, 25 bp, Homo sapien
tggcgcagctccagctctaggcagt

SEQ ID NO: 2245108 - DNA, 25 bp, Homo sapien
cccaatttccagcttacattccagg

SEQ ID NO: 2245109 - DNA, 25 bp, Homo sapien
cgaggccaggcaccgacaaagctct

SEQ ID NO: 2245110 - DNA, 25 bp, Homo sapien
tgcatctcgtggccgaggccaggca

SEQ ID NO: 2245111 - DNA, 25 bp, Homo sapien
ccgaggccaggcaccgacaaagctc

SEQ ID NO: 2245112 - DNA, 25 bp, Homo sapien
ctcagtgcatctcgtggccgaggcc

SEQ ID NO: 2245113 - DNA, 25 bp, Homo sapien
ccagtcgcagctcccaatgctctgg

SEQ ID NO: 2245114 - DNA, 25 bp, Homo sapien
aggaatttccagtcgcagctcccaa

SEQ ID NO: 2245115 - DNA, 25 bp, Homo sapien
atttccagtcgcagctcccaatgct

SEQ ID NO: 2245116 - DNA, 25 bp, Homo sapien
cagtcgcagctcccaatgctctggt

SEQ ID NO: 2245117 - DNA, 25 bp, Homo sapien
ttcctttagccaacagctctttcta

SEQ ID NO: 2245118 - DNA, 25 bp, Homo sapien
gggaatccccatgcacttggcacct

SEQ ID NO: 2245119 - DNA, 25 bp, Homo sapien
gaatccccatgcacttggcacctgg

SEQ ID NO: 2245120 - DNA, 25 bp, Homo sapien
caggccaccatctcgctgtggggca

SEQ ID NO: 2245121 - DNA, 25 bp, Homo sapien
ttctcaaaagaagacatttatgcag

SEQ ID NO: 2245122 - DNA, 25 bp, Homo sapien
ccatcaaaaagtgggtgaaggacat

SEQ ID NO: 2245123 - DNA, 25 bp, Homo sapien
cacttctcaaaagaagacatttatg

SEQ ID NO: 2245124 - DNA, 25 bp, Homo sapien
gaacagacacttctcaaaagaagac

SEQ ID NO: 2245125 - DNA, 25 bp, Homo sapien
tcataataccccaaaagccggagcc

SEQ ID NO: 2245126 - DNA, 25 bp, Homo sapien
atcataataccccaaaagccggagc

SEQ ID NO: 2245127 - DNA, 25 bp, Homo sapien
gagcccaaagcagtaattatttccc

SEQ ID NO: 2245128 - DNA, 25 bp, Homo sapien
aagccggagcccaaagcagtaatta

SEQ ID NO: 2245129 - DNA, 25 bp, Homo sapien
tgtatatgtccctctgttgagagca

SEQ ID NO: 2245130 - DNA, 25 bp, Homo sapien
tatgtccctctgttgagagcaacaa

SEQ ID NO: 2245131 - DNA, 25 bp, Homo sapien
ctgtatatgtccctctgttgagagc

SEQ ID NO: 2245132 - DNA, 25 bp, Homo sapien
tatatgtccctctgttgagagcaac

SEQ ID NO: 2245133 - DNA, 25 bp, Homo sapien
tccatgatatgcaagtaaagacttt

SEQ ID NO: 2245134 - DNA, 25 bp, Homo sapien
ctcaggtttcggtatgggtccatga

SEQ ID NO: 2245135 - DNA, 25 bp, Homo sapien
tcggtatgggtccatgatatgcaag

SEQ ID NO: 2245136 - DNA, 25 bp, Homo sapien
tggggtttggagctttaaatatggc

SEQ ID NO: 2245137 - DNA, 25 bp, Homo sapien
tgtgctcagtaagcttagccactcc

SEQ ID NO: 2245138 - DNA, 25 bp, Homo sapien
tgccttgtgctcagtaagcttagcc

SEQ ID NO: 2245139 - DNA, 25 bp, Homo sapien
agcttagccactcccaaaggtttag

SEQ ID NO: 2245140 - DNA, 25 bp, Homo sapien
ctcccaaaggtttagctctctccat

SEQ ID NO: 2245141 - DNA, 25 bp, Homo sapien
tcctattgggtcctacctgcactgt

SEQ ID NO: 2245142 - DNA, 25 bp, Homo sapien
ctcctattgggtcctacctgcactg

SEQ ID NO: 2245143 - DNA, 25 bp, Homo sapien
taaggatgggagaagaacctctctg

SEQ ID NO: 2245144 - DNA, 25 bp, Homo sapien
tggccccagtacaggtttattgaat

SEQ ID NO: 2245145 - DNA, 25 bp, Homo sapien
gtgctagcagtgcaggcatgaacca

SEQ ID NO: 2245146 - DNA, 25 bp, Homo sapien
taaaatggcagaataggctgggcga

SEQ ID NO: 2245147 - DNA, 25 bp, Homo sapien
caagaagcaggtggttccatggggc

SEQ ID NO: 2245148 - DNA, 25 bp, Homo sapien
ctatttccatgtacgtacttcttcc

SEQ ID NO: 2245149 - DNA, 25 bp, Homo sapien
aggtggttccatggggcccctgtgg

SEQ ID NO: 2245150 - DNA, 25 bp, Homo sapien
aagcaggtggttccatggggcccct

SEQ ID NO: 2245151 - DNA, 25 bp, Homo sapien
tgtgaagaaggacagtgtgacctct

SEQ ID NO: 2245152 - DNA, 25 bp, Homo sapien
gaaagccgttagcaaatcaatccta

SEQ ID NO: 2245153 - DNA, 25 bp, Homo sapien
caggaggacccttagagtgaagaaa

SEQ ID NO: 2245154 - DNA, 25 bp, Homo sapien
tatttccaagcaatagatagcaagg

SEQ ID NO: 2245155 - DNA, 25 bp, Homo sapien
cacactgggcagataataccataaa

SEQ ID NO: 2245156 - DNA, 25 bp, Homo sapien
cactgggcagataataccataaacc

SEQ ID NO: 2245157 - DNA, 25 bp, Homo sapien
ggcagataataccataaacccttat

SEQ ID NO: 2245158 - DNA, 25 bp, Homo sapien
cggacacactgggcagataatacca

SEQ ID NO: 2245159 - DNA, 25 bp, Homo sapien
cttttcctctagctggaacgtgaat

SEQ ID NO: 2245160 - DNA, 25 bp, Homo sapien
ggaacgtgaatgaggtgggccactc

SEQ ID NO: 2245161 - DNA, 25 bp, Homo sapien
ctctagctggaacgtgaatgaggtg

SEQ ID NO: 2245162 - DNA, 25 bp, Homo sapien
ttcctctagctggaacgtgaatgag

SEQ ID NO: 2245163 - DNA, 25 bp, Homo sapien
gactccagctgtttagctgccgtga

SEQ ID NO: 2245164 - DNA, 25 bp, Homo sapien
agctgtttagctgccgtgatatgtc

SEQ ID NO: 2245165 - DNA, 25 bp, Homo sapien
ccgtgatatgtctttcataggaaaa

SEQ ID NO: 2245166 - DNA, 25 bp, Homo sapien
gtttagctgccgtgatatgtctttc

SEQ ID NO: 2245167 - DNA, 25 bp, Homo sapien
tggaacatcaacagcttgttaagga

SEQ ID NO: 2245168 - DNA, 25 bp, Homo sapien
ctggaacatcaacagcttgttaagg

SEQ ID NO: 2245169 - DNA, 25 bp, Homo sapien
ctggggagtgcaggggagaaatttt

SEQ ID NO: 2245170 - DNA, 25 bp, Homo sapien
tggggagtgcaggggagaaatttta

SEQ ID NO: 2245171 - DNA, 25 bp, Homo sapien
aattttggaggaactgagtgttttg

SEQ ID NO: 2245172 - DNA, 25 bp, Homo sapien
ttttggaggaactgagtgttttgaa

SEQ ID NO: 2245173 - DNA, 25 bp, Homo sapien
ggaagccaagttggtagccagagca

SEQ ID NO: 2245174 - DNA, 25 bp, Homo sapien
acagtgctaatgaggccatgcttgc

SEQ ID NO: 2245175 - DNA, 25 bp, Homo sapien
taatgaggccatgcttgccaatttg

SEQ ID NO: 2245176 - DNA, 25 bp, Homo sapien
tgctaatgaggccatgcttgccaat

SEQ ID NO: 2245177 - DNA, 25 bp, Homo sapien
tcagtggcatatgcaacaaagcaaa

SEQ ID NO: 2245178 - DNA, 25 bp, Homo sapien
tgagtttacaatggagagtcgctcc

SEQ ID NO: 2245179 - DNA, 25 bp, Homo sapien
gtcgctcctttggattggaggttcc

SEQ ID NO: 2245180 - DNA, 25 bp, Homo sapien
tcaaaaggccatacacatcaaatgc

SEQ ID NO: 2245181 - DNA, 25 bp, Homo sapien
ttgttttggcccatcatcttcactt

SEQ ID NO: 2245182 - DNA, 25 bp, Homo sapien
actcatctcctctctacccatcctt

SEQ ID NO: 2245183 - DNA, 25 bp, Homo sapien
tttgttttggcccatcatcttcact

SEQ ID NO: 2245184 - DNA, 25 bp, Homo sapien
cctctctacccatcctttgttttgg

SEQ ID NO: 2245185 - DNA, 25 bp, Homo sapien
tgcgctttttattcagagacagtag

SEQ ID NO: 2245186 - DNA, 25 bp, Homo sapien
ctcaaactgacggtagggaatttca

SEQ ID NO: 2245187 - DNA, 25 bp, Homo sapien
taatgacttgctgccctgcgttagc

SEQ ID NO: 2245188 - DNA, 25 bp, Homo sapien
ctgcgttagccctttcctgctctga

SEQ ID NO: 2245189 - DNA, 25 bp, Homo sapien
tcatttccagcttgacaaagtcctt

SEQ ID NO: 2245190 - DNA, 25 bp, Homo sapien
cttgacaaagtcctttcggcagccg

SEQ ID NO: 2245191 - DNA, 25 bp, Homo sapien
tttcggcagccgctttgtttgaggc

SEQ ID NO: 2245192 - DNA, 25 bp, Homo sapien
cggcagccgctttgtttgaggcttt

SEQ ID NO: 2245193 - DNA, 25 bp, Homo sapien
ttgtcttatggtgaaattgaacctg

SEQ ID NO: 2245194 - DNA, 25 bp, Homo sapien
aattgtcttatggtgaaattgaacc

SEQ ID NO: 2245195 - DNA, 25 bp, Homo sapien
cgtggcgataggtcaattgtcttat

SEQ ID NO: 2245196 - DNA, 25 bp, Homo sapien
gataggtcaattgtcttatggtgaa

SEQ ID NO: 2245197 - DNA, 25 bp, Homo sapien
tccctctggagacttagcctctcgt

SEQ ID NO: 2245198 - DNA, 25 bp, Homo sapien
ctgcacgtgaccataggggattaat

SEQ ID NO: 2245199 - DNA, 25 bp, Homo sapien
tctggagacttagcctctcgttccc

SEQ ID NO: 2245200 - DNA, 25 bp, Homo sapien
agtccacttctaaggctccctctgg

SEQ ID NO: 2245201 - DNA, 25 bp, Homo sapien
ggtcaatctctcacagtctataggg

SEQ ID NO: 2245202 - DNA, 25 bp, Homo sapien
ctgacccaactaggtaagaatgtgt

SEQ ID NO: 2245203 - DNA, 25 bp, Homo sapien
gggtcaatctctcacagtctatagg

SEQ ID NO: 2245204 - DNA, 25 bp, Homo sapien
ggtaagaatgtgttggccggtcact

SEQ ID NO: 2245205 - DNA, 25 bp, Homo sapien
tcttataagatcaggaacctggtgg

SEQ ID NO: 2245206 - DNA, 25 bp, Homo sapien
gtggaatacactaagaacctgggct

SEQ ID NO: 2245207 - DNA, 25 bp, Homo sapien
aatacaacactggattattcacatt

SEQ ID NO: 2245208 - DNA, 25 bp, Homo sapien
cctgggctttgggagtattcggctc

SEQ ID NO: 2245209 - DNA, 25 bp, Homo sapien
tgagtgtagaagcaaggctaacctg

SEQ ID NO: 2245210 - DNA, 25 bp, Homo sapien
gtgtagaagcaaggctaacctgaaa

SEQ ID NO: 2245211 - DNA, 25 bp, Homo sapien
tagaagcaaggctaacctgaaacaa

SEQ ID NO: 2245212 - DNA, 25 bp, Homo sapien
ttttgagtgtagaagcaaggctaac

SEQ ID NO: 2245213 - DNA, 25 bp, Homo sapien
tcatcatgatatgtccatatcttac

SEQ ID NO: 2245214 - DNA, 25 bp, Homo sapien
tcaacccagaagtgaagcacagtgt

SEQ ID NO: 2245215 - DNA, 25 bp, Homo sapien
acccagaagtgaagcacagtgtgca

SEQ ID NO: 2245216 - DNA, 25 bp, Homo sapien
gcacagtgtgcatcatcatcatgat

SEQ ID NO: 2245217 - DNA, 25 bp, Homo sapien
ctggggcagactctaggaagagaaa

SEQ ID NO: 2245218 - DNA, 25 bp, Homo sapien
tggcaggagttaggcaaggttctgc

SEQ ID NO: 2245219 - DNA, 25 bp, Homo sapien
caaggttctgcatgtggacttagcc

SEQ ID NO: 2245220 - DNA, 25 bp, Homo sapien
aggcaaggttctgcatgtggactta

SEQ ID NO: 2245221 - DNA, 25 bp, Homo sapien
ttccccgccgatagagccttacttg

SEQ ID NO: 2245222 - DNA, 25 bp, Homo sapien
agaacctatagtcatttccccttgg

SEQ ID NO: 2245223 - DNA, 25 bp, Homo sapien
ggtagccatgttcgtaaagccctcg

SEQ ID NO: 2245224 - DNA, 25 bp, Homo sapien
tgtaagagccatgggaagaacctat

SEQ ID NO: 2245225 - DNA, 25 bp, Homo sapien
ggcttacaaatattatcttataatc

SEQ ID NO: 2245226 - DNA, 25 bp, Homo sapien
actgtactgtccatgtcttgacaag

SEQ ID NO: 2245227 - DNA, 25 bp, Homo sapien
aacttaatacttcttgcataagcaa

SEQ ID NO: 2245228 - DNA, 25 bp, Homo sapien
agccaataaagactacaccttaact

SEQ ID NO: 2245229 - DNA, 25 bp, Homo sapien
tttaaatttaacatgccactatctc

SEQ ID NO: 2245230 - DNA, 25 bp, Homo sapien
ttgattatttagtgtattgaggtag

SEQ ID NO: 2245231 - DNA, 25 bp, Homo sapien
gattatttagtgtattgaggtagtc

SEQ ID NO: 2245232 - DNA, 25 bp, Homo sapien
gcactttaaatttaacatgccacta

SEQ ID NO: 2245233 - DNA, 25 bp, Homo sapien
ttaacccatggtagcaatgcttgca

SEQ ID NO: 2245234 - DNA, 25 bp, Homo sapien
tgtccctgtgggaagatgatcagtg

SEQ ID NO: 2245235 - DNA, 25 bp, Homo sapien
gggctccagagcactttaacccatg

SEQ ID NO: 2245236 - DNA, 25 bp, Homo sapien
gagttccatacctcacaactgctgg

SEQ ID NO: 2245237 - DNA, 25 bp, Homo sapien
tccccactcagtgagttagtcatat

SEQ ID NO: 2245238 - DNA, 25 bp, Homo sapien
actgagataggccccttgtatgcca

SEQ ID NO: 2245239 - DNA, 25 bp, Homo sapien
ccactcagtgagttagtcatatatg

SEQ ID NO: 2245240 - DNA, 25 bp, Homo sapien
ttccccactcagtgagttagtcata

SEQ ID NO: 2245241 - DNA, 25 bp, Homo sapien
tccaccaaagagaggcatctccact

SEQ ID NO: 2245242 - DNA, 25 bp, Homo sapien
tctgcaatacagaatctttgatgac

SEQ ID NO: 2245243 - DNA, 25 bp, Homo sapien
atagtgaatacttgtaggtttctct

SEQ ID NO: 2245244 - DNA, 25 bp, Homo sapien
tagaagctctgaatggtcctccacc

SEQ ID NO: 2245245 - DNA, 25 bp, Homo sapien
gcagcatgagttataaagcatgact

SEQ ID NO: 2245246 - DNA, 25 bp, Homo sapien
aatcacggaaaccaatgtggcagca

SEQ ID NO: 2245247 - DNA, 25 bp, Homo sapien
ggaacagaacttataccagtgggaa

SEQ ID NO: 2245248 - DNA, 25 bp, Homo sapien
tcctcttcactagagtcactttctt

SEQ ID NO: 2245249 - DNA, 25 bp, Homo sapien
taacctatacaagacagacagtgtg

SEQ ID NO: 2245250 - DNA, 25 bp, Homo sapien
cacaaagcagggcatcaggatctct

SEQ ID NO: 2245251 - DNA, 25 bp, Homo sapien
gaaaccataccttctgcccatgctg

SEQ ID NO: 2245252 - DNA, 25 bp, Homo sapien
catgaactcactctacaaccttggg

SEQ ID NO: 2245253 - DNA, 25 bp, Homo sapien
gcatcaatatccaggacaatcagca

SEQ ID NO: 2245254 - DNA, 25 bp, Homo sapien
cataaggattgacagcatcaatatc

SEQ ID NO: 2245255 - DNA, 25 bp, Homo sapien
tgctccataaggattgacagcatca

SEQ ID NO: 2245256 - DNA, 25 bp, Homo sapien
caaggtctcattgctccataaggat

SEQ ID NO: 2245257 - DNA, 25 bp, Homo sapien
aagcagcaggggcatattggaatat

SEQ ID NO: 2245258 - DNA, 25 bp, Homo sapien
agcaggggcatattggaatatcaga

SEQ ID NO: 2245259 - DNA, 25 bp, Homo sapien
tgaaaagcagcaggggcatattgga

SEQ ID NO: 2245260 - DNA, 25 bp, Homo sapien
gcagcaggggcatattggaatatca

SEQ ID NO: 2245261 - DNA, 25 bp, Homo sapien
gtccatttgctccaaggcgtagtta

SEQ ID NO: 2245262 - DNA, 25 bp, Homo sapien
ggttgttcggtggaatcttctgtac

SEQ ID NO: 2245263 - DNA, 25 bp, Homo sapien
cattccatggcctatcttggagaaa

SEQ ID NO: 2245264 - DNA, 25 bp, Homo sapien
caaggcgtagttatatccattgtct

SEQ ID NO: 2245265 - DNA, 25 bp, Homo sapien
caatctattctatctggtagggttt

SEQ ID NO: 2245266 - DNA, 25 bp, Homo sapien
attctatctggtagggtttctgcta

SEQ ID NO: 2245267 - DNA, 25 bp, Homo sapien
ctattctatctggtagggtttctgc

SEQ ID NO: 2245268 - DNA, 25 bp, Homo sapien
atctattctatctggtagggtttct

SEQ ID NO: 2245269 - DNA, 25 bp, Homo sapien
ccagttgtcagttaccaggcttcca

SEQ ID NO: 2245270 - DNA, 25 bp, Homo sapien
tgaggctggccatttatccgaactg

SEQ ID NO: 2245271 - DNA, 25 bp, Homo sapien
tgtgcccttgatggatatccctgag

SEQ ID NO: 2245272 - DNA, 25 bp, Homo sapien
gaacattagttccaagggtccagct

SEQ ID NO: 2245273 - DNA, 25 bp, Homo sapien
gaactgtgtcgccagaggtgagaat

SEQ ID NO: 2245274 - DNA, 25 bp, Homo sapien
gacaaaaggcacagctactgaccca

SEQ ID NO: 2245275 - DNA, 25 bp, Homo sapien
taaagcgcaggccttgaactgtgtc

SEQ ID NO: 2245276 - DNA, 25 bp, Homo sapien
tagctgcctggacttagggtgccat

SEQ ID NO: 2245277 - DNA, 25 bp, Homo sapien
catctgaagtgaacaaggccctggg

SEQ ID NO: 2245278 - DNA, 25 bp, Homo sapien
ccaaggcctgaagcccatggtaagt

SEQ ID NO: 2245279 - DNA, 25 bp, Homo sapien
tggcccagggtgtatctaacaatgt

SEQ ID NO: 2245280 - DNA, 25 bp, Homo sapien
gtaagtatttcctgggtaccactga

SEQ ID NO: 2245281 - DNA, 25 bp, Homo sapien
ctattgtgtattcctggcatcttta

SEQ ID NO: 2245282 - DNA, 25 bp, Homo sapien
ccctattgtgtattcctggcatctt

SEQ ID NO: 2245283 - DNA, 25 bp, Homo sapien
cctattgtgtattcctggcatcttt

SEQ ID NO: 2245284 - DNA, 25 bp, Homo sapien
tcaacagactctggacgacagcagc

SEQ ID NO: 2245285 - DNA, 25 bp, Homo sapien
gcctcactgctgagttcaacagact

SEQ ID NO: 2245286 - DNA, 25 bp, Homo sapien
tccagaagtgagcatcaagatgcag

SEQ ID NO: 2245287 - DNA, 25 bp, Homo sapien
tagagaagctgacatgacagctcca

SEQ ID NO: 2245288 - DNA, 25 bp, Homo sapien
tacaaccagcaataaagggataggc

SEQ ID NO: 2245289 - DNA, 25 bp, Homo sapien
tactccacaaggtgctacaaccagc

SEQ ID NO: 2245290 - DNA, 25 bp, Homo sapien
tgtggtctgctatgcctccttatgg

SEQ ID NO: 2245291 - DNA, 25 bp, Homo sapien
tagaggagcaacgaaagactaccct

SEQ ID NO: 2245292 - DNA, 25 bp, Homo sapien
caaggtaaactaccatattgtcaga

SEQ ID NO: 2245293 - DNA, 25 bp, Homo sapien
gattttctgcttggttgttattggt

SEQ ID NO: 2245294 - DNA, 25 bp, Homo sapien
tgcttagccttgttttggctatgtg

SEQ ID NO: 2245295 - DNA, 25 bp, Homo sapien
tatccggagactttgctgaactctc

SEQ ID NO: 2245296 - DNA, 25 bp, Homo sapien
tcacatgtattgacttgcatatcct

SEQ ID NO: 2245297 - DNA, 25 bp, Homo sapien
acatgtattgacttgcatatcctaa

SEQ ID NO: 2245298 - DNA, 25 bp, Homo sapien
cacatgtattgacttgcatatccta

SEQ ID NO: 2245299 - DNA, 25 bp, Homo sapien
atcacatgtattgacttgcatatcc

SEQ ID NO: 2245300 - DNA, 25 bp, Homo sapien
cgccaaggttgtaggggcaaaaatg

SEQ ID NO: 2245301 - DNA, 25 bp, Homo sapien
tgcccaagtggccgccaaggttgta

SEQ ID NO: 2245302 - DNA, 25 bp, Homo sapien
tctattgcttcccagcaacagaagt

SEQ ID NO: 2245303 - DNA, 25 bp, Homo sapien
cttcccagcaacagaagtaagctgc

SEQ ID NO: 2245304 - DNA, 25 bp, Homo sapien
aactgcttgatgaggaaaggatggc

SEQ ID NO: 2245305 - DNA, 25 bp, Homo sapien
tagggctgctagtgtttggaactgc

SEQ ID NO: 2245306 - DNA, 25 bp, Homo sapien
tggctgatgcctgaactgtaagcag

SEQ ID NO: 2245307 - DNA, 25 bp, Homo sapien
ctgaactgtaagcaggagggcccgt

SEQ ID NO: 2245308 - DNA, 25 bp, Homo sapien
aactcaagaagaagtgtgataaatg

SEQ ID NO: 2245309 - DNA, 25 bp, Homo sapien
ggagctttatggaacaggtttgaag

SEQ ID NO: 2245310 - DNA, 25 bp, Homo sapien
gctcacatccgaagcattgagtttt

SEQ ID NO: 2245311 - DNA, 25 bp, Homo sapien
ttcactgggtgaaaactcaagaaga

SEQ ID NO: 2245312 - DNA, 25 bp, Homo sapien
caccatattgcactgttgtttacct

SEQ ID NO: 2245313 - DNA, 25 bp, Homo sapien
gataagttgatagatgcggcaaacc

SEQ ID NO: 2245314 - DNA, 25 bp, Homo sapien
taaagaggcctatttcacattcagt

SEQ ID NO: 2245315 - DNA, 25 bp, Homo sapien
catgtggggctcaaatcctaggtga

SEQ ID NO: 2245316 - DNA, 25 bp, Homo sapien
acttgggaccaagccaaatgtccat

SEQ ID NO: 2245317 - DNA, 25 bp, Homo sapien
gcacatagacaccatggaatactat

SEQ ID NO: 2245318 - DNA, 25 bp, Homo sapien
tgggaccaagccaaatgtccatcaa

SEQ ID NO: 2245319 - DNA, 25 bp, Homo sapien
tgatagactggattaagaaaatgtg

SEQ ID NO: 2245320 - DNA, 25 bp, Homo sapien
tgactttgccttgacttgtggtgca

SEQ ID NO: 2245321 - DNA, 25 bp, Homo sapien
gggaatgactttgccttgacttgtg

SEQ ID NO: 2245322 - DNA, 25 bp, Homo sapien
tgggaatgactttgccttgacttgt

SEQ ID NO: 2245323 - DNA, 25 bp, Homo sapien
tgccttgacttgtggtgcatttacc

SEQ ID NO: 2245324 - DNA, 25 bp, Homo sapien
tgccaacagcagagcctccaacaag

SEQ ID NO: 2245325 - DNA, 25 bp, Homo sapien
tccaacaagtagaaggagactatga

SEQ ID NO: 2245326 - DNA, 25 bp, Homo sapien
gattccactgctccatgggggcagc

SEQ ID NO: 2245327 - DNA, 25 bp, Homo sapien
agactatgagtcctgcacagcagtg

SEQ ID NO: 2245328 - DNA, 25 bp, Homo sapien
cttcggcaatgtgctcagtggaaaa

SEQ ID NO: 2245329 - DNA, 25 bp, Homo sapien
tcaataccaagagtccaaatatatt

SEQ ID NO: 2245330 - DNA, 25 bp, Homo sapien
tcttcaataccaagagtccaaatat

SEQ ID NO: 2245331 - DNA, 25 bp, Homo sapien
ttcaataccaagagtccaaatatat

SEQ ID NO: 2245332 - DNA, 25 bp, Homo sapien
aataccaagagtccaaatatattgt

SEQ ID NO: 2245333 - DNA, 25 bp, Homo sapien
agcttccaagatcaggcaagattgg

SEQ ID NO: 2245334 - DNA, 25 bp, Homo sapien
aagatcaggcaagattgggcacgtt

SEQ ID NO: 2245335 - DNA, 25 bp, Homo sapien
cagcacccgtattcccagggggtct

SEQ ID NO: 2245336 - DNA, 25 bp, Homo sapien
tccaagatcaggcaagattgggcac

SEQ ID NO: 2245337 - DNA, 25 bp, Homo sapien
aagaccgtaactgtgcccactccca

SEQ ID NO: 2245338 - DNA, 25 bp, Homo sapien
aacaagcccagactcaatagaaaag

SEQ ID NO: 2245339 - DNA, 25 bp, Homo sapien
gaaacaattattatgctaatcacag

SEQ ID NO: 2245340 - DNA, 25 bp, Homo sapien
tattatgctaatcacagtatgcagt

SEQ ID NO: 2245341 - DNA, 25 bp, Homo sapien
cacagtatgcagtaacacaaacaag

SEQ ID NO: 2245342 - DNA, 25 bp, Homo sapien
tcaaagcagcggcatataaaacata

SEQ ID NO: 2245343 - DNA, 25 bp, Homo sapien
gaatctaggttctctttcaaagcag

SEQ ID NO: 2245344 - DNA, 25 bp, Homo sapien
tcttagagtaccatgaatacactgg

SEQ ID NO: 2245345 - DNA, 25 bp, Homo sapien
cactggaactggcaattagcatttg

SEQ ID NO: 2245346 - DNA, 25 bp, Homo sapien
ctcagtagctgactctgcttttctt

SEQ ID NO: 2245347 - DNA, 25 bp, Homo sapien
cttcttgacatccttctttccagag

SEQ ID NO: 2245348 - DNA, 25 bp, Homo sapien
tctttccagagctctcagtagctga

SEQ ID NO: 2245349 - DNA, 25 bp, Homo sapien
ttaggatttcaccttcttgacatcc

SEQ ID NO: 2245350 - DNA, 25 bp, Homo sapien
cattttaaatggcccaacaatgtta

SEQ ID NO: 2245351 - DNA, 25 bp, Homo sapien
acattttaaatggcccaacaatgtt

SEQ ID NO: 2245352 - DNA, 25 bp, Homo sapien
aatgttctgctccaatatgcacatt

SEQ ID NO: 2245353 - DNA, 25 bp, Homo sapien
ttaatgttctgctccaatatgcaca

SEQ ID NO: 2245354 - DNA, 25 bp, Homo sapien
tgaaatcaggatgcaacttacaact

SEQ ID NO: 2245355 - DNA, 25 bp, Homo sapien
gctgtacaaagcaacctgactggat

SEQ ID NO: 2245356 - DNA, 25 bp, Homo sapien
tacaatggaaggcatcttagattcg

SEQ ID NO: 2245357 - DNA, 25 bp, Homo sapien
tagggagttcctaaccatatgttct

SEQ ID NO: 2245358 - DNA, 25 bp, Homo sapien
aaatcagagtgttacagcgtctctg

SEQ ID NO: 2245359 - DNA, 25 bp, Homo sapien
cagagtgttacagcgtctctggaat

SEQ ID NO: 2245360 - DNA, 25 bp, Homo sapien
gagtgttacagcgtctctggaattc

SEQ ID NO: 2245361 - DNA, 25 bp, Homo sapien
aatcagagtgttacagcgtctctgg

SEQ ID NO: 2245362 - DNA, 25 bp, Homo sapien
tcaggacaatattcacacagggtat

SEQ ID NO: 2245363 - DNA, 25 bp, Homo sapien
taacaatctgaatgaacctcaaggg

SEQ ID NO: 2245364 - DNA, 25 bp, Homo sapien
ggcgtacaggatgcagcagttgtca

SEQ ID NO: 2245365 - DNA, 25 bp, Homo sapien
tgtgcactgtgaaccactaggtggg

SEQ ID NO: 2245366 - DNA, 25 bp, Homo sapien
gacaataagatgctgaaacgggaac

SEQ ID NO: 2245367 - DNA, 25 bp, Homo sapien
gtttcactgcaactaatgaccaaag

SEQ ID NO: 2245368 - DNA, 25 bp, Homo sapien
tgtctccgcaaaattcatctgaagc

SEQ ID NO: 2245369 - DNA, 25 bp, Homo sapien
ctatggactgaggtatgtctccgca

SEQ ID NO: 2245370 - DNA, 25 bp, Homo sapien
tctcatgcttcatgactgcctaacg

SEQ ID NO: 2245371 - DNA, 25 bp, Homo sapien
tttattctcatgcttcatgactgcc

SEQ ID NO: 2245372 - DNA, 25 bp, Homo sapien
tttttattctcatgcttcatgactg

SEQ ID NO: 2245373 - DNA, 25 bp, Homo sapien
tattctcatgcttcatgactgccta

SEQ ID NO: 2245374 - DNA, 25 bp, Homo sapien
aacttgggaaatgttgcacagcatg

SEQ ID NO: 2245375 - DNA, 25 bp, Homo sapien
taagttaggatcaaagtacaggcgt

SEQ ID NO: 2245376 - DNA, 25 bp, Homo sapien
taatcattgtgaggtaccacgaatc

SEQ ID NO: 2245377 - DNA, 25 bp, Homo sapien
gctaggcctcttgagctaaacaact

SEQ ID NO: 2245378 - DNA, 25 bp, Homo sapien
caactgtaggagtctatgggataga

SEQ ID NO: 2245379 - DNA, 25 bp, Homo sapien
ggtaccaaatcgaacactattgctg

SEQ ID NO: 2245380 - DNA, 25 bp, Homo sapien
tatccaaatctggtccaactgtagg

SEQ ID NO: 2245381 - DNA, 25 bp, Homo sapien
tgttacaacagttcaaggtaccaaa

SEQ ID NO: 2245382 - DNA, 25 bp, Homo sapien
gaaatcggtaagaaaggaatacata

SEQ ID NO: 2245383 - DNA, 25 bp, Homo sapien
taaactggggagcatttcgtacaca

SEQ ID NO: 2245384 - DNA, 25 bp, Homo sapien
tgatgaaatggagccttgtatcttg

SEQ ID NO: 2245385 - DNA, 25 bp, Homo sapien
actgaatgcgcaactgatgaaatgg

SEQ ID NO: 2245386 - DNA, 25 bp, Homo sapien
tcctttgctggttccatactgaatg

SEQ ID NO: 2245387 - DNA, 25 bp, Homo sapien
gctgaccactatttcaattaaaacg

SEQ ID NO: 2245388 - DNA, 25 bp, Homo sapien
taattgaatgtgcagtaagaagtca

SEQ ID NO: 2245389 - DNA, 25 bp, Homo sapien
atagtgcttttaattgaatgtgcag

SEQ ID NO: 2245390 - DNA, 25 bp, Homo sapien
gaatgtgcagtaagaagtcaaagct

SEQ ID NO: 2245391 - DNA, 25 bp, Homo sapien
tcattgcaacgttcccaaaatacag

SEQ ID NO: 2245392 - DNA, 25 bp, Homo sapien
ccagggctttcttgatactgatcct

SEQ ID NO: 2245393 - DNA, 25 bp, Homo sapien
tgcttctccacgttcaatttgagcc

SEQ ID NO: 2245394 - DNA, 25 bp, Homo sapien
tactgatccttcgttgaattcttgc

SEQ ID NO: 2245395 - DNA, 25 bp, Homo sapien
gacctcctcaggggatttgccctct

SEQ ID NO: 2245396 - DNA, 25 bp, Homo sapien
tgacctcctcaggggatttgccctc

SEQ ID NO: 2245397 - DNA, 25 bp, Homo sapien
ctgaatactccatgacctcctcagg

SEQ ID NO: 2245398 - DNA, 25 bp, Homo sapien
gctatgttatcaatgtcatctcttc

SEQ ID NO: 2245399 - DNA, 25 bp, Homo sapien
ctctcgagctatgttatcaatgtca

SEQ ID NO: 2245400 - DNA, 25 bp, Homo sapien
ctggttaaaatctcgtttagtccag

SEQ ID NO: 2245401 - DNA, 25 bp, Homo sapien
tctcgtttagtccagtttgtgaaac

SEQ ID NO: 2245402 - DNA, 25 bp, Homo sapien
tgtaagaggttcagctccatcaatc

SEQ ID NO: 2245403 - DNA, 25 bp, Homo sapien
tcttctggtgtaagaggttcagctc

SEQ ID NO: 2245404 - DNA, 25 bp, Homo sapien
ttgggatatcaggattccttggaac

SEQ ID NO: 2245405 - DNA, 25 bp, Homo sapien
cagagctggatttgggatatcagga

SEQ ID NO: 2245406 - DNA, 25 bp, Homo sapien
gcagcgactaacaggtaagagaacc

SEQ ID NO: 2245407 - DNA, 25 bp, Homo sapien
ggtcttgacactacacagaaggtgc

SEQ ID NO: 2245408 - DNA, 25 bp, Homo sapien
gaaatgtagcccagtcatagcatga

SEQ ID NO: 2245409 - DNA, 25 bp, Homo sapien
tgacgcatgatcatctggactagga

SEQ ID NO: 2245410 - DNA, 25 bp, Homo sapien
ctcaaataagcgtggtgggaaaaat

SEQ ID NO: 2245411 - DNA, 25 bp, Homo sapien
cttatagcctattgtcttccgataa

SEQ ID NO: 2245412 - DNA, 25 bp, Homo sapien
ttttccaggagctcaaataagcgtg

SEQ ID NO: 2245413 - DNA, 25 bp, Homo sapien
gcctattgtcttccgataataaaga

SEQ ID NO: 2245414 - DNA, 25 bp, Homo sapien
tcgctgacacgcaaagcctctctaa

SEQ ID NO: 2245415 - DNA, 25 bp, Homo sapien
catccactgcgtagtttgctttgcg

SEQ ID NO: 2245416 - DNA, 25 bp, Homo sapien
tgctttgcgttctcgtttaggaggt

SEQ ID NO: 2245417 - DNA, 25 bp, Homo sapien
tttaggaggttcaatccattccacc

SEQ ID NO: 2245418 - DNA, 25 bp, Homo sapien
cccattttttgcaggcgttcattca

SEQ ID NO: 2245419 - DNA, 25 bp, Homo sapien
attttttgcaggcgttcattcatct

SEQ ID NO: 2245420 - DNA, 25 bp, Homo sapien
ttttgcaggcgttcattcatctctg

SEQ ID NO: 2245421 - DNA, 25 bp, Homo sapien
tttttgcaggcgttcattcatctct

SEQ ID NO: 2245422 - DNA, 25 bp, Homo sapien
gccagcttgttagactgttggtcaa

SEQ ID NO: 2245423 - DNA, 25 bp, Homo sapien
aaaaacatgggtggctccatgccgt

SEQ ID NO: 2245424 - DNA, 25 bp, Homo sapien
taatgtcttcatctgtcaactcact

SEQ ID NO: 2245425 - DNA, 25 bp, Homo sapien
tcccctctttccagaatagttgtaa

SEQ ID NO: 2245426 - DNA, 25 bp, Homo sapien
ttctacaatcctctcttcaacagtg

SEQ ID NO: 2245427 - DNA, 25 bp, Homo sapien
gtataacaattgaatcgagtctcag

SEQ ID NO: 2245428 - DNA, 25 bp, Homo sapien
cagtgttgtcagtgatgagacggaa

SEQ ID NO: 2245429 - DNA, 25 bp, Homo sapien
ggaatacacgtactggtttcttctg

SEQ ID NO: 2245430 - DNA, 25 bp, Homo sapien
tgccaggttaattccgagacctcca

SEQ ID NO: 2245431 - DNA, 25 bp, Homo sapien
cagtctgaatcatatagtataacca

SEQ ID NO: 2245432 - DNA, 25 bp, Homo sapien
tgtagatcaacctgtgggttccagt

SEQ ID NO: 2245433 - DNA, 25 bp, Homo sapien
tataaccacatcagcacttgccagg

SEQ ID NO: 2245434 - DNA, 25 bp, Homo sapien
cccagaaattccacttctaggaatt

SEQ ID NO: 2245435 - DNA, 25 bp, Homo sapien
cagaaattccacttctaggaattta

SEQ ID NO: 2245436 - DNA, 25 bp, Homo sapien
cctttgacccagaaattccacttct

SEQ ID NO: 2245437 - DNA, 25 bp, Homo sapien
gaaattccacttctaggaatttatc

SEQ ID NO: 2245438 - DNA, 25 bp, Homo sapien
ggtctgctatagctggcaaattagg

SEQ ID NO: 2245439 - DNA, 25 bp, Homo sapien
gcaggccaaccttttagtgtcccaa

SEQ ID NO: 2245440 - DNA, 25 bp, Homo sapien
gccacactgaagattgaagagagaa

SEQ ID NO: 2245441 - DNA, 25 bp, Homo sapien
caagagctctataagaaccaagatc

SEQ ID NO: 2245442 - DNA, 25 bp, Homo sapien
tcataaccacgccacatgcaataat

SEQ ID NO: 2245443 - DNA, 25 bp, Homo sapien
catccagtcgacaatactcataacc

SEQ ID NO: 2245444 - DNA, 25 bp, Homo sapien
tcttcatgcggggtttgtccatcca

SEQ ID NO: 2245445 - DNA, 25 bp, Homo sapien
ttccaaaatatccagcaagcgagtc

SEQ ID NO: 2245446 - DNA, 25 bp, Homo sapien
taagagtcgcatcttgtccatcttg

SEQ ID NO: 2245447 - DNA, 25 bp, Homo sapien
cactgttgctgacaatatgctcatc

SEQ ID NO: 2245448 - DNA, 25 bp, Homo sapien
tgctcatcagtggtataaggtggac

SEQ ID NO: 2245449 - DNA, 25 bp, Homo sapien
tacaacactttcgaagctgcatcag

SEQ ID NO: 2245450 - DNA, 25 bp, Homo sapien
tgcatcttactcagccccaagtaaa

SEQ ID NO: 2245451 - DNA, 25 bp, Homo sapien
cgttgcatcttactcagccccaagt

SEQ ID NO: 2245452 - DNA, 25 bp, Homo sapien
ggtggcagactcttctctacatcag

SEQ ID NO: 2245453 - DNA, 25 bp, Homo sapien
aggtggcagactcttctctacatca

SEQ ID NO: 2245454 - DNA, 25 bp, Homo sapien
gaatggatagaagccagtggccaat

SEQ ID NO: 2245455 - DNA, 25 bp, Homo sapien
tactgaccaaaaagcgtaccctgaa

SEQ ID NO: 2245456 - DNA, 25 bp, Homo sapien
gaaaagcccacgaaagggactgata

SEQ ID NO: 2245457 - DNA, 25 bp, Homo sapien
caggaggagatagttagcagcttca

SEQ ID NO: 2245458 - DNA, 25 bp, Homo sapien
tgcatgaagtctttccacgagtttt

SEQ ID NO: 2245459 - DNA, 25 bp, Homo sapien
ccacgagtttttgatcaccaagaca

SEQ ID NO: 2245460 - DNA, 25 bp, Homo sapien
ttttagtgtcaaaccaagaatcaaa

SEQ ID NO: 2245461 - DNA, 25 bp, Homo sapien
ttttgatcaccaagacaatttttag

SEQ ID NO: 2245462 - DNA, 25 bp, Homo sapien
tccagttaggagcaagcggttagtc

SEQ ID NO: 2245463 - DNA, 25 bp, Homo sapien
gagtaaggcccacagttcatgcagg

SEQ ID NO: 2245464 - DNA, 25 bp, Homo sapien
tgcaaaggtgttccagttaggagca

SEQ ID NO: 2245465 - DNA, 25 bp, Homo sapien
gtcgacttgaactcacgaacaatct

SEQ ID NO: 2245466 - DNA, 25 bp, Homo sapien
gagaggttcatcataattgaagctt

SEQ ID NO: 2245467 - DNA, 25 bp, Homo sapien
gtgatccaaagagaggttcatcata

SEQ ID NO: 2245468 - DNA, 25 bp, Homo sapien
ggttcatcataattgaagcttttcc

SEQ ID NO: 2245469 - DNA, 25 bp, Homo sapien
ccaaagagaggttcatcataattga

SEQ ID NO: 2245470 - DNA, 25 bp, Homo sapien
catctcataagaagtaacgcaaaca

SEQ ID NO: 2245471 - DNA, 25 bp, Homo sapien
caatgaccaggtatcgccagtgaaa

SEQ ID NO: 2245472 - DNA, 25 bp, Homo sapien
tattctgtgagcttcatcaatgacc

SEQ ID NO: 2245473 - DNA, 25 bp, Homo sapien
cctggcatcatttcatcacgaataa

SEQ ID NO: 2245474 - DNA, 25 bp, Homo sapien
tctggcatccttgtctccgacaaaa

SEQ ID NO: 2245475 - DNA, 25 bp, Homo sapien
gtctccgacaaaacaaatgacacgg

SEQ ID NO: 2245476 - DNA, 25 bp, Homo sapien
gaactaaaaccatgtgaggtccagg

SEQ ID NO: 2245477 - DNA, 25 bp, Homo sapien
gggacccatcgtttaaattcattca

SEQ ID NO: 2245478 - DNA, 25 bp, Homo sapien
gtgtttcaggtaaccaagcaaagca

SEQ ID NO: 2245479 - DNA, 25 bp, Homo sapien
tcggtagtgtttcaggtaaccaagc

SEQ ID NO: 2245480 - DNA, 25 bp, Homo sapien
tagtgtttcaggtaaccaagcaaag

SEQ ID NO: 2245481 - DNA, 25 bp, Homo sapien
ggtagtgtttcaggtaaccaagcaa

SEQ ID NO: 2245482 - DNA, 25 bp, Homo sapien
gcattatcatcacaaggaaaaaaat

SEQ ID NO: 2245483 - DNA, 25 bp, Homo sapien
caaggaaaaaaatccatgaacattt

SEQ ID NO: 2245484 - DNA, 25 bp, Homo sapien
ctgcattatcatcacaaggaaaaaa

SEQ ID NO: 2245485 - DNA, 25 bp, Homo sapien
attatcatcacaaggaaaaaaatcc

SEQ ID NO: 2245486 - DNA, 25 bp, Homo sapien
aagagatcaaccaattcagtcctcg

SEQ ID NO: 2245487 - DNA, 25 bp, Homo sapien
gagatcaaccaattcagtcctcgaa

SEQ ID NO: 2245488 - DNA, 25 bp, Homo sapien
aaagagatcaaccaattcagtcctc

SEQ ID NO: 2245489 - DNA, 25 bp, Homo sapien
tttcatcagccaaaatgccattgac

SEQ ID NO: 2245490 - DNA, 25 bp, Homo sapien
ataatctctcagtggcccccctttc

SEQ ID NO: 2245491 - DNA, 25 bp, Homo sapien
taatctctcagtggcccccctttca

SEQ ID NO: 2245492 - DNA, 25 bp, Homo sapien
gataatctctcagtggccccccttt

SEQ ID NO: 2245493 - DNA, 25 bp, Homo sapien
tgataatctctcagtggcccccctt

SEQ ID NO: 2245494 - DNA, 25 bp, Homo sapien
tgaaggtgacacctcaaatctaata

SEQ ID NO: 2245495 - DNA, 25 bp, Homo sapien
ggtgacacctcaaatctaatacaca

SEQ ID NO: 2245496 - DNA, 25 bp, Homo sapien
cacattagatgttttccgactctca

SEQ ID NO: 2245497 - DNA, 25 bp, Homo sapien
gacacctcaaatctaatacacacat

SEQ ID NO: 2245498 - DNA, 25 bp, Homo sapien
ctgtctgcttcagtaaaaattcaaa

SEQ ID NO: 2245499 - DNA, 25 bp, Homo sapien
tcatctttctttattcggggacgtc

SEQ ID NO: 2245500 - DNA, 25 bp, Homo sapien
gggacgtcccaatttcatgttcagt

SEQ ID NO: 2245501 - DNA, 25 bp, Homo sapien
caaatctctttgctcggtcggcttt

SEQ ID NO: 2245502 - DNA, 25 bp, Homo sapien
attttctcttcatattctgggtcca

SEQ ID NO: 2245503 - DNA, 25 bp, Homo sapien
ttttctcttcatattctgggtccat

SEQ ID NO: 2245504 - DNA, 25 bp, Homo sapien
cattttctcttcatattctgggtcc

SEQ ID NO: 2245505 - DNA, 25 bp, Homo sapien
ttccttttcagatttaggcgcttta

SEQ ID NO: 2245506 - DNA, 25 bp, Homo sapien
tagcagcaagtttgagttgaaatga

SEQ ID NO: 2245507 - DNA, 25 bp, Homo sapien
gatttaggcgctttagcagcaagtt

SEQ ID NO: 2245508 - DNA, 25 bp, Homo sapien
ttttcagatttaggcgctttagcag

SEQ ID NO: 2245509 - DNA, 25 bp, Homo sapien
cttcttctcgcccttctccgtggcc

SEQ ID NO: 2245510 - DNA, 25 bp, Homo sapien
cttctcgcccttctccgtggccgcg

SEQ ID NO: 2245511 - DNA, 25 bp, Homo sapien
tccgtggccgcggtggcttcggtgg

SEQ ID NO: 2245512 - DNA, 25 bp, Homo sapien
gcggtggcttcggtggccgcggcgg

SEQ ID NO: 2245513 - DNA, 25 bp, Homo sapien
ccacggtggctgccactgcggcagt

SEQ ID NO: 2245514 - DNA, 25 bp, Homo sapien
tcctctatgaccacgatagtggcgg

SEQ ID NO: 2245515 - DNA, 25 bp, Homo sapien
gaccacgatagtggcggtcgcatcc

SEQ ID NO: 2245516 - DNA, 25 bp, Homo sapien
gtggctgccactgcggcagtgtcct

SEQ ID NO: 2245517 - DNA, 25 bp, Homo sapien
gcaggggacgagggctcctgggcgg

SEQ ID NO: 2245518 - DNA, 25 bp, Homo sapien
cctgggcggcggcagtggctgcact

SEQ ID NO: 2245519 - DNA, 25 bp, Homo sapien
gcggcagtggctgcactggaaagag

SEQ ID NO: 2245520 - DNA, 25 bp, Homo sapien
acgagggctcctgggcggcggcagt

SEQ ID NO: 2245521 - DNA, 25 bp, Homo sapien
ctccgcttccaaccccttcgctcag

SEQ ID NO: 2245522 - DNA, 25 bp, Homo sapien
gcttccaaccccttcgctcaggccc

SEQ ID NO: 2245523 - DNA, 25 bp, Homo sapien
gtggggaatcactccgcttccaacc

SEQ ID NO: 2245524 - DNA, 25 bp, Homo sapien
ggggtggggaatcactccgcttcca

SEQ ID NO: 2245525 - DNA, 25 bp, Homo sapien
tttcctctgctcctaactgtactgt

SEQ ID NO: 2245526 - DNA, 25 bp, Homo sapien
tcctaactgtactgtagaaggtctt

SEQ ID NO: 2245527 - DNA, 25 bp, Homo sapien
tgctcctaactgtactgtagaaggt

SEQ ID NO: 2245528 - DNA, 25 bp, Homo sapien
tctgctcctaactgtactgtagaag

SEQ ID NO: 2245529 - DNA, 25 bp, Homo sapien
cagtgaattcactgtctgcgtgcag

SEQ ID NO: 2245530 - DNA, 25 bp, Homo sapien
cacactgggtggaaccatattctct

SEQ ID NO: 2245531 - DNA, 25 bp, Homo sapien
actttgaacgaagtctgagtgaggc

SEQ ID NO: 2245532 - DNA, 25 bp, Homo sapien
gaggctagtgactccttgggtgtcc

SEQ ID NO: 2245533 - DNA, 25 bp, Homo sapien
ggcaggcccatctagagctattgct

SEQ ID NO: 2245534 - DNA, 25 bp, Homo sapien
catatccagtgttgtgtaaagagac

SEQ ID NO: 2245535 - DNA, 25 bp, Homo sapien
gaagtcttgtacctcaggcaggccc

SEQ ID NO: 2245536 - DNA, 25 bp, Homo sapien
aaataccaagggcagatgtcacctc

SEQ ID NO: 2245537 - DNA, 25 bp, Homo sapien
gaacaggtttgtcatctccgcaagg

SEQ ID NO: 2245538 - DNA, 25 bp, Homo sapien
tagggaaagactctgcacctgctgt

SEQ ID NO: 2245539 - DNA, 25 bp, Homo sapien
aatcctgggcattgactctgtgaca

SEQ ID NO: 2245540 - DNA, 25 bp, Homo sapien
cactaagttggtgtactgcctcgac

SEQ ID NO: 2245541 - DNA, 25 bp, Homo sapien
ggtatagcatgctggctgactgccc

SEQ ID NO: 2245542 - DNA, 25 bp, Homo sapien
ctctcttgatgacctcacgtacctg

SEQ ID NO: 2245543 - DNA, 25 bp, Homo sapien
ctgggcttcctggtatagcatgctg

SEQ ID NO: 2245544 - DNA, 25 bp, Homo sapien
ttgatgacctcacgtacctgctcca

SEQ ID NO: 2245545 - DNA, 25 bp, Homo sapien
tgtgcacctcggaggcagcaccgtg

SEQ ID NO: 2245546 - DNA, 25 bp, Homo sapien
tcttgactgtgcacctcggaggcag

SEQ ID NO: 2245547 - DNA, 25 bp, Homo sapien
ttctaaggcatgtccacgggccaag

SEQ ID NO: 2245548 - DNA, 25 bp, Homo sapien
tggagcatggagttctaaggcatgt

SEQ ID NO: 2245549 - DNA, 25 bp, Homo sapien
ctttgaagagcaaggatcgttttct

SEQ ID NO: 2245550 - DNA, 25 bp, Homo sapien
tgaagagcaaggatcgttttctgat

SEQ ID NO: 2245551 - DNA, 25 bp, Homo sapien
cgttttctgattgtagctgtggcca

SEQ ID NO: 2245552 - DNA, 25 bp, Homo sapien
caaggatcgttttctgattgtagct

SEQ ID NO: 2245553 - DNA, 25 bp, Homo sapien
ttggaagtcaaagggaggcaccagc

SEQ ID NO: 2245554 - DNA, 25 bp, Homo sapien
ctctgcactacatcctgaggtgtcc

SEQ ID NO: 2245555 - DNA, 25 bp, Homo sapien
cagaggacattggaagtcaaaggga

SEQ ID NO: 2245556 - DNA, 25 bp, Homo sapien
tctgcactacatcctgaggtgtccc

SEQ ID NO: 2245557 - DNA, 25 bp, Homo sapien
agttggacagccaccctctatggcg

SEQ ID NO: 2245558 - DNA, 25 bp, Homo sapien
ggcgggtcctctggcacattaagct

SEQ ID NO: 2245559 - DNA, 25 bp, Homo sapien
gaatctctgacccattcaacctgga

SEQ ID NO: 2245560 - DNA, 25 bp, Homo sapien
tttctgggcggagatgtccacaggc

SEQ ID NO: 2245561 - DNA, 25 bp, Homo sapien
ttcatcgtttgctgaatcccaggac

SEQ ID NO: 2245562 - DNA, 25 bp, Homo sapien
ccagcagtttaaatcttcatcgttt

SEQ ID NO: 2245563 - DNA, 25 bp, Homo sapien
ccaggaagcacagtttgcacctgtc

SEQ ID NO: 2245564 - DNA, 25 bp, Homo sapien
cctgtcttaatacccaggactcact

SEQ ID NO: 2245565 - DNA, 25 bp, Homo sapien
ggactgtctgccaggcaggttcaag

SEQ ID NO: 2245566 - DNA, 25 bp, Homo sapien
tcaaggaaccaagaccaggaacctg

SEQ ID NO: 2245567 - DNA, 25 bp, Homo sapien
gactgtctgccaggcaggttcaagg

SEQ ID NO: 2245568 - DNA, 25 bp, Homo sapien
gggactgtctgccaggcaggttcaa

SEQ ID NO: 2245569 - DNA, 25 bp, Homo sapien
ttctgaatgtcttcggagaaatttc

SEQ ID NO: 2245570 - DNA, 25 bp, Homo sapien
aatttcttagggctgagcctactag

SEQ ID NO: 2245571 - DNA, 25 bp, Homo sapien
gggctgagcctactagactgtgagt

SEQ ID NO: 2245572 - DNA, 25 bp, Homo sapien
tgtcttcggagaaatttcttagggc

SEQ ID NO: 2245573 - DNA, 25 bp, Homo sapien
gtgccatgaggagtgaagatgtcca

SEQ ID NO: 2245574 - DNA, 25 bp, Homo sapien
tgagaggtggagcatgcgaagtggg

SEQ ID NO: 2245575 - DNA, 25 bp, Homo sapien
ggctggaagcagagacccatgtgcc

SEQ ID NO: 2245576 - DNA, 25 bp, Homo sapien
agagacccatgtgccatgaggagtg

SEQ ID NO: 2245577 - DNA, 25 bp, Homo sapien
tctgctttcacactgttgaccaaag

SEQ ID NO: 2245578 - DNA, 25 bp, Homo sapien
accagacctagaccctttctcagtt

SEQ ID NO: 2245579 - DNA, 25 bp, Homo sapien
ccaagaaaatgtgagtagtggaatc

SEQ ID NO: 2245580 - DNA, 25 bp, Homo sapien
tgtgagtagtggaatctactaaaga

SEQ ID NO: 2245581 - DNA, 25 bp, Homo sapien
tccagggtttccgaagttgctccaa

SEQ ID NO: 2245582 - DNA, 25 bp, Homo sapien
ctccagggtttccgaagttgctcca

SEQ ID NO: 2245583 - DNA, 25 bp, Homo sapien
ttcccacacctctctggctcctctg

SEQ ID NO: 2245584 - DNA, 25 bp, Homo sapien
gtcttccctgtgctaaaatcttgag

SEQ ID NO: 2245585 - DNA, 25 bp, Homo sapien
taagggagtggccatgattactaca

SEQ ID NO: 2245586 - DNA, 25 bp, Homo sapien
aatcttgagcgacgtgaaggttcac

SEQ ID NO: 2245587 - DNA, 25 bp, Homo sapien
caacctatgtcaatgggagcatgct

SEQ ID NO: 2245588 - DNA, 25 bp, Homo sapien
caagcccagtaaaagagtttccatc

SEQ ID NO: 2245589 - DNA, 25 bp, Homo sapien
agctgacaagcccagtaaaagagtt

SEQ ID NO: 2245590 - DNA, 25 bp, Homo sapien
gcgaatgagctgtccccattatttc

SEQ ID NO: 2245591 - DNA, 25 bp, Homo sapien
ccagtaaaagagtttccatccaggc

SEQ ID NO: 2245592 - DNA, 25 bp, Homo sapien
agcttaaagtatctcgctcctggcc

SEQ ID NO: 2245593 - DNA, 25 bp, Homo sapien
atggtagggccattagcccaatgaa

SEQ ID NO: 2245594 - DNA, 25 bp, Homo sapien
taaggagactgaaccagggtggaaa

SEQ ID NO: 2245595 - DNA, 25 bp, Homo sapien
gcctcttttaggaatggtagggcca

SEQ ID NO: 2245596 - DNA, 25 bp, Homo sapien
gcccacacgcttgggcggttcctgg

SEQ ID NO: 2245597 - DNA, 25 bp, Homo sapien
cacgcttgggcggttcctggacagc

SEQ ID NO: 2245598 - DNA, 25 bp, Homo sapien
tggcagcagcccacacgcttgggcg

SEQ ID NO: 2245599 - DNA, 25 bp, Homo sapien
ttgggcggttcctggacagccaaag

SEQ ID NO: 2245600 - DNA, 25 bp, Homo sapien
caatgtcaccagagataggccatgg

SEQ ID NO: 2245601 - DNA, 25 bp, Homo sapien
gctgcagcaggcagtaaggcgtctc

SEQ ID NO: 2245602 - DNA, 25 bp, Homo sapien
tccctgacagggcagacttagtgag

SEQ ID NO: 2245603 - DNA, 25 bp, Homo sapien
gataggccatgggtcagcgttcatc

SEQ ID NO: 2245604 - DNA, 25 bp, Homo sapien
cagatgccctgaggaacagtatggc

SEQ ID NO: 2245605 - DNA, 25 bp, Homo sapien
ccagatgccctgaggaacagtatgg

SEQ ID NO: 2245606 - DNA, 25 bp, Homo sapien
gatgccctgaggaacagtatggcaa

SEQ ID NO: 2245607 - DNA, 25 bp, Homo sapien
tgccctgaggaacagtatggcaagg

SEQ ID NO: 2245608 - DNA, 25 bp, Homo sapien
agcaagtcatgggctgggcggagga

SEQ ID NO: 2245609 - DNA, 25 bp, Homo sapien
ccagggccgccataaggggaggaca

SEQ ID NO: 2245610 - DNA, 25 bp, Homo sapien
ggagcaagtcatgggctgggcggag

SEQ ID NO: 2245611 - DNA, 25 bp, Homo sapien
aggacagcagttgggaaggagcaag

SEQ ID NO: 2245612 - DNA, 25 bp, Homo sapien
gagcagaagggggtatttcctagaa

SEQ ID NO: 2245613 - DNA, 25 bp, Homo sapien
ggctcggcctgcgtgtgagcactca

SEQ ID NO: 2245614 - DNA, 25 bp, Homo sapien
tatttcctagaaatgcggcgggagt

SEQ ID NO: 2245615 - DNA, 25 bp, Homo sapien
gagttgaggccaaagccagggagca

SEQ ID NO: 2245616 - DNA, 25 bp, Homo sapien
gagctgaacttggagcctccagagc

SEQ ID NO: 2245617 - DNA, 25 bp, Homo sapien
tccagagctcccatccctctgagct

SEQ ID NO: 2245618 - DNA, 25 bp, Homo sapien
ccagagctcccatccctctgagctc

SEQ ID NO: 2245619 - DNA, 25 bp, Homo sapien
tttggcgtttgctcgttctcacacc

SEQ ID NO: 2245620 - DNA, 25 bp, Homo sapien
ttggcgtttgctcgttctcacacct

SEQ ID NO: 2245621 - DNA, 25 bp, Homo sapien
tggcgtttgctcgttctcacacctc

SEQ ID NO: 2245622 - DNA, 25 bp, Homo sapien
tgaccatcggggctaggagagcatc

SEQ ID NO: 2245623 - DNA, 25 bp, Homo sapien
gcagttggaggacccggagaattgg

SEQ ID NO: 2245624 - DNA, 25 bp, Homo sapien
ctggcagttggaggacccggagaat

SEQ ID NO: 2245625 - DNA, 25 bp, Homo sapien
ccatcggggctaggagagcatccag

SEQ ID NO: 2245626 - DNA, 25 bp, Homo sapien
tttcgctggtgcctcccagaggaaa

SEQ ID NO: 2245627 - DNA, 25 bp, Homo sapien
ggaccaagtctttctccactgttcc

SEQ ID NO: 2245628 - DNA, 25 bp, Homo sapien
ctttcgctggtgcctcccagaggaa

SEQ ID NO: 2245629 - DNA, 25 bp, Homo sapien
gaaaggtgaggaccaagtctttctc

SEQ ID NO: 2245630 - DNA, 25 bp, Homo sapien
gcaactctactttgtgaaacataaa

SEQ ID NO: 2245631 - DNA, 25 bp, Homo sapien
ccctgcacgtgcaatatgtgggcat

SEQ ID NO: 2245632 - DNA, 25 bp, Homo sapien
catgacctccaagagtaagggcgaa

SEQ ID NO: 2245633 - DNA, 25 bp, Homo sapien
tgaggccagttgacctagaaccgat

SEQ ID NO: 2245634 - DNA, 25 bp, Homo sapien
tagaaccgatttgggatgcaggcac

SEQ ID NO: 2245635 - DNA, 25 bp, Homo sapien
agcccacccactaccctcttctgtt

SEQ ID NO: 2245636 - DNA, 25 bp, Homo sapien
ttagtataagaatcataaacaacca

SEQ ID NO: 2245637 - DNA, 25 bp, Homo sapien
aatgaacagggccttaatatctttg

SEQ ID NO: 2245638 - DNA, 25 bp, Homo sapien
atttcttaatgaacagggccttaat

SEQ ID NO: 2245639 - DNA, 25 bp, Homo sapien
agactttctgggcaccgaccagtcc

SEQ ID NO: 2245640 - DNA, 25 bp, Homo sapien
gaagagactttctgggcaccgacca

SEQ ID NO: 2245641 - DNA, 25 bp, Homo sapien
ccaatccctgatgggggcgtcagtg

SEQ ID NO: 2245642 - DNA, 25 bp, Homo sapien
ggcgtcagtggcagaagagactttc

SEQ ID NO: 2245643 - DNA, 25 bp, Homo sapien
gaaaacaagggatctgctggagccc

SEQ ID NO: 2245644 - DNA, 25 bp, Homo sapien
tccggtcaacacgaagggaaggcca

SEQ ID NO: 2245645 - DNA, 25 bp, Homo sapien
gattgaaggctacctcggactcctg

SEQ ID NO: 2245646 - DNA, 25 bp, Homo sapien
caaggaatggctggtgatggcccct

SEQ ID NO: 2245647 - DNA, 25 bp, Homo sapien
gaggctttctggggctaggtctcca

SEQ ID NO: 2245648 - DNA, 25 bp, Homo sapien
ggaggctttctggggctaggtctcc

SEQ ID NO: 2245649 - DNA, 25 bp, Homo sapien
gctttctggggctaggtctccaaag

SEQ ID NO: 2245650 - DNA, 25 bp, Homo sapien
ggctttctggggctaggtctccaaa

SEQ ID NO: 2245651 - DNA, 25 bp, Homo sapien
tcttgtgagagaacgggaatcatcc

SEQ ID NO: 2245652 - DNA, 25 bp, Homo sapien
aacgggaatcatccaaactacagcc

SEQ ID NO: 2245653 - DNA, 25 bp, Homo sapien
actggacggattcttgtgagagaac

SEQ ID NO: 2245654 - DNA, 25 bp, Homo sapien
ccaggaagatggactggacggattc

SEQ ID NO: 2245655 - DNA, 25 bp, Homo sapien
gagaagcagaccaatctatggagga

SEQ ID NO: 2245656 - DNA, 25 bp, Homo sapien
gctgggcccactggtggctacagca

SEQ ID NO: 2245657 - DNA, 25 bp, Homo sapien
tgaatggacgtgaggcctccagaga

SEQ ID NO: 2245658 - DNA, 25 bp, Homo sapien
tctatggaggagacataaccgccgg

SEQ ID NO: 2245659 - DNA, 25 bp, Homo sapien
aactgtcctcttgttctctgcctga

SEQ ID NO: 2245660 - DNA, 25 bp, Homo sapien
caactctggcgacaatctacactgg

SEQ ID NO: 2245661 - DNA, 25 bp, Homo sapien
gcctgagagcccctagagctctctg

SEQ ID NO: 2245662 - DNA, 25 bp, Homo sapien
ggaaggggcaggcttcagctctcct

SEQ ID NO: 2245663 - DNA, 25 bp, Homo sapien
aaaggcatgggtcccttatgggaga

SEQ ID NO: 2245664 - DNA, 25 bp, Homo sapien
ggcatgggtcccttatgggagaggc

SEQ ID NO: 2245665 - DNA, 25 bp, Homo sapien
catgggtcccttatgggagaggcgg

SEQ ID NO: 2245666 - DNA, 25 bp, Homo sapien
tcagaaaggcatgggtcccttatgg

SEQ ID NO: 2245667 - DNA, 25 bp, Homo sapien
gccctggcccattccttgaccctct

SEQ ID NO: 2245668 - DNA, 25 bp, Homo sapien
cctctgggctgcaccaggtggcgga

SEQ ID NO: 2245669 - DNA, 25 bp, Homo sapien
ctgggctgcaccaggtggcggacat

SEQ ID NO: 2245670 - DNA, 25 bp, Homo sapien
ctggcccattccttgaccctctggg

SEQ ID NO: 2245671 - DNA, 25 bp, Homo sapien
ccattcccatcgggaagcggcatca

SEQ ID NO: 2245672 - DNA, 25 bp, Homo sapien
attcccatcgggaagcggcatcagg

SEQ ID NO: 2245673 - DNA, 25 bp, Homo sapien
cagcccattcccatcgggaagcggc

SEQ ID NO: 2245674 - DNA, 25 bp, Homo sapien
gcccattcccatcgggaagcggcat

SEQ ID NO: 2245675 - DNA, 25 bp, Homo sapien
tttgggttgtcacgcctgtacttgg

SEQ ID NO: 2245676 - DNA, 25 bp, Homo sapien
gtccttttgacagttatatcatgtt

SEQ ID NO: 2245677 - DNA, 25 bp, Homo sapien
gccattgatgtagctgactttctgt

SEQ ID NO: 2245678 - DNA, 25 bp, Homo sapien
catgtttctgacaggcacaagtggg

SEQ ID NO: 2245679 - DNA, 25 bp, Homo sapien
acatccccacgctctgttccttcct

SEQ ID NO: 2245680 - DNA, 25 bp, Homo sapien
tctgcttgcacacaatttccaagtg

SEQ ID NO: 2245681 - DNA, 25 bp, Homo sapien
gcacacaatttccaagtgttcagcc

SEQ ID NO: 2245682 - DNA, 25 bp, Homo sapien
acaatttccaagtgttcagcctcct

SEQ ID NO: 2245683 - DNA, 25 bp, Homo sapien
aggccattgtagctcagggtggtgg

SEQ ID NO: 2245684 - DNA, 25 bp, Homo sapien
caggccattgtagctcagggtggtg

SEQ ID NO: 2245685 - DNA, 25 bp, Homo sapien
tggcagacatggagaagagaagcat

SEQ ID NO: 2245686 - DNA, 25 bp, Homo sapien
ttcctacttttgattctgagtctgg

SEQ ID NO: 2245687 - DNA, 25 bp, Homo sapien
acttttgattctgagtctggctcac

SEQ ID NO: 2245688 - DNA, 25 bp, Homo sapien
tcctacttttgattctgagtctggc

SEQ ID NO: 2245689 - DNA, 25 bp, Homo sapien
ctacttttgattctgagtctggctc

SEQ ID NO: 2245690 - DNA, 25 bp, Homo sapien
cagataagctgacatctgaaaccct

SEQ ID NO: 2245691 - DNA, 25 bp, Homo sapien
gctgacatctgaaaccctggcttta

SEQ ID NO: 2245692 - DNA, 25 bp, Homo sapien
catcagataagctgacatctgaaac

SEQ ID NO: 2245693 - DNA, 25 bp, Homo sapien
taagctgacatctgaaaccctggct

SEQ ID NO: 2245694 - DNA, 25 bp, Homo sapien
tgaagtgccatcagccacgaagcta

SEQ ID NO: 2245695 - DNA, 25 bp, Homo sapien
tccaaacaatctcgagcctagagag

SEQ ID NO: 2245696 - DNA, 25 bp, Homo sapien
gaagctacaacatctccacgctgag

SEQ ID NO: 2245697 - DNA, 25 bp, Homo sapien
gactttcatgctatctgaactccaa

SEQ ID NO: 2245698 - DNA, 25 bp, Homo sapien
gggtacagtaggctctcctcacact

SEQ ID NO: 2245699 - DNA, 25 bp, Homo sapien
ttctttgcgaggagaggcctggctc

SEQ ID NO: 2245700 - DNA, 25 bp, Homo sapien
ctggctcaggttacacgggtgctta

SEQ ID NO: 2245701 - DNA, 25 bp, Homo sapien
aaagcccaaacgtatgctccggtgg

SEQ ID NO: 2245702 - DNA, 25 bp, Homo sapien
aggagacattgacacagaggacagg

SEQ ID NO: 2245703 - DNA, 25 bp, Homo sapien
ccaggagacattgacacagaggaca

SEQ ID NO: 2245704 - DNA, 25 bp, Homo sapien
gggctgctggggcgtggttggggac

SEQ ID NO: 2245705 - DNA, 25 bp, Homo sapien
caggagacattgacacagaggacag

SEQ ID NO: 2245706 - DNA, 25 bp, Homo sapien
cagcaggagcgcctgcacgcagagc

SEQ ID NO: 2245707 - DNA, 25 bp, Homo sapien
aggagcgcctgcacgcagagccgca

SEQ ID NO: 2245708 - DNA, 25 bp, Homo sapien
cacacaccgcggtcaaggagagcca

SEQ ID NO: 2245709 - DNA, 25 bp, Homo sapien
ctccacacaccgcggtcaaggagag

SEQ ID NO: 2245710 - DNA, 25 bp, Homo sapien
gcgagctctttcttagcggctggct

SEQ ID NO: 2245711 - DNA, 25 bp, Homo sapien
cggccgctgagtgtgcgcgctgagc

SEQ ID NO: 2245712 - DNA, 25 bp, Homo sapien
agcgccgcgaagctggcctcggcgg

SEQ ID NO: 2245713 - DNA, 25 bp, Homo sapien
gaggccaagaaaggcgcgagccgcg

SEQ ID NO: 2245714 - DNA, 25 bp, Homo sapien
tgcacactgtgctctacgggcctgc

SEQ ID NO: 2245715 - DNA, 25 bp, Homo sapien
gaacacttttgcatctgcacactgt

SEQ ID NO: 2245716 - DNA, 25 bp, Homo sapien
tctcacagtgcatcaggaacacttt

SEQ ID NO: 2245717 - DNA, 25 bp, Homo sapien
cactgtgctctacgggcctgctgta

SEQ ID NO: 2245718 - DNA, 25 bp, Homo sapien
ggtgatccatcagccgtggcacttg

SEQ ID NO: 2245719 - DNA, 25 bp, Homo sapien
gacaaacggctttgaagtgtgcctt

SEQ ID NO: 2245720 - DNA, 25 bp, Homo sapien
gcacttgcttaaggcactgcccagc

SEQ ID NO: 2245721 - DNA, 25 bp, Homo sapien
tcctgggctggatccctcttggctg

SEQ ID NO: 2245722 - DNA, 25 bp, Homo sapien
atttgatttccctagaccccatcaa

SEQ ID NO: 2245723 - DNA, 25 bp, Homo sapien
ttccctagaccccatcaagtcataa

SEQ ID NO: 2245724 - DNA, 25 bp, Homo sapien
tgatttccctagaccccatcaagtc

SEQ ID NO: 2245725 - DNA, 25 bp, Homo sapien
gatttccctagaccccatcaagtca

SEQ ID NO: 2245726 - DNA, 25 bp, Homo sapien
tactctactacctcacataattgga

SEQ ID NO: 2245727 - DNA, 25 bp, Homo sapien
tagccattcgaatagatctgtagtg

SEQ ID NO: 2245728 - DNA, 25 bp, Homo sapien
cttaatggctaatgaggaaagcatc

SEQ ID NO: 2245729 - DNA, 25 bp, Homo sapien
tgtctctatgactgtaactactcta

SEQ ID NO: 2245730 - DNA, 25 bp, Homo sapien
gacaactccatgtttaaccatttga

SEQ ID NO: 2245731 - DNA, 25 bp, Homo sapien
tccatagcaacagtaccactttcca

SEQ ID NO: 2245732 - DNA, 25 bp, Homo sapien
tatgtcttcaattctctcaggaata

SEQ ID NO: 2245733 - DNA, 25 bp, Homo sapien
tctgaacattcgtatgaatggagtc

SEQ ID NO: 2245734 - DNA, 25 bp, Homo sapien
taaatagaaggctattcatagtgcc

SEQ ID NO: 2245735 - DNA, 25 bp, Homo sapien
gcctgttcttcctgagtgagtttag

SEQ ID NO: 2245736 - DNA, 25 bp, Homo sapien
catctgaccctgaagttatatttgt

SEQ ID NO: 2245737 - DNA, 25 bp, Homo sapien
gatgtttataagggatactgctctg

SEQ ID NO: 2245738 - DNA, 25 bp, Homo sapien
tcatctagttcttgtgagggcccac

SEQ ID NO: 2245739 - DNA, 25 bp, Homo sapien
catctagttcttgtgagggcccact

SEQ ID NO: 2245740 - DNA, 25 bp, Homo sapien
tctagttcttgtgagggcccacttt

SEQ ID NO: 2245741 - DNA, 25 bp, Homo sapien
atcatctagttcttgtgagggccca

SEQ ID NO: 2245742 - DNA, 25 bp, Homo sapien
tttttaagctgctcattctgacgga

SEQ ID NO: 2245743 - DNA, 25 bp, Homo sapien
ggaacagtccccaagacaaacacaa

SEQ ID NO: 2245744 - DNA, 25 bp, Homo sapien
tgtctcccagggcttgtgcgacttg

SEQ ID NO: 2245745 - DNA, 25 bp, Homo sapien
gacctcacaggcgacattttttaag

SEQ ID NO: 2245746 - DNA, 25 bp, Homo sapien
cagtcccctggcaccgttgccctgg

SEQ ID NO: 2245747 - DNA, 25 bp, Homo sapien
cctggcaccgttgccctggccaggg

SEQ ID NO: 2245748 - DNA, 25 bp, Homo sapien
gagggcgtggcagcgcggcagtgcg

SEQ ID NO: 2245749 - DNA, 25 bp, Homo sapien
gcagcgcggcagtgcgcctacgcac

SEQ ID NO: 2245750 - DNA, 25 bp, Homo sapien
cacgctggttcccgcgctttcaaga

SEQ ID NO: 2245751 - DNA, 25 bp, Homo sapien
gacaagggggtgtcggctctaccca

SEQ ID NO: 2245752 - DNA, 25 bp, Homo sapien
cctcagagccccgagacaagggggt

SEQ ID NO: 2245753 - DNA, 25 bp, Homo sapien
tcccgcgctttcaagagcctcagag

SEQ ID NO: 2245754 - DNA, 25 bp, Homo sapien
cacctcaagctactaaagtgcctgg

SEQ ID NO: 2245755 - DNA, 25 bp, Homo sapien
ctcaagctactaaagtgcctggggg

SEQ ID NO: 2245756 - DNA, 25 bp, Homo sapien
tcaagctactaaagtgcctgggggc

SEQ ID NO: 2245757 - DNA, 25 bp, Homo sapien
acctcaagctactaaagtgcctggg

SEQ ID NO: 2245758 - DNA, 25 bp, Homo sapien
tggccaggtggaacatctagattct

SEQ ID NO: 2245759 - DNA, 25 bp, Homo sapien
taggccaaagagttgctccacattt

SEQ ID NO: 2245760 - DNA, 25 bp, Homo sapien
tccacatttggtcagggccaatctg

SEQ ID NO: 2245761 - DNA, 25 bp, Homo sapien
tctgggccctaatacctggccaggt

SEQ ID NO: 2245762 - DNA, 25 bp, Homo sapien
ggaagaagcggctctgactgtaagt

SEQ ID NO: 2245763 - DNA, 25 bp, Homo sapien
tggaacacgctggaaacaacccatg

SEQ ID NO: 2245764 - DNA, 25 bp, Homo sapien
gagctgacagtccattggagaaaca

SEQ ID NO: 2245765 - DNA, 25 bp, Homo sapien
cacggagaaccgagaaaagaagagc

SEQ ID NO: 2245766 - DNA, 25 bp, Homo sapien
agcgggagggctgcggggagcagct

SEQ ID NO: 2245767 - DNA, 25 bp, Homo sapien
agttagcaggaagcgggagggctgc

SEQ ID NO: 2245768 - DNA, 25 bp, Homo sapien
aagcgggagggctgcggggagcagc

SEQ ID NO: 2245769 - DNA, 25 bp, Homo sapien
gggagggctgcggggagcagctgag

SEQ ID NO: 2245770 - DNA, 25 bp, Homo sapien
tcagcagcttgagactgcagcccca

SEQ ID NO: 2245771 - DNA, 25 bp, Homo sapien
cattctcccctttattgtggagatg

SEQ ID NO: 2245772 - DNA, 25 bp, Homo sapien
ttgagccttggacggaatcagcagc

SEQ ID NO: 2245773 - DNA, 25 bp, Homo sapien
acacctgatatcagaaagggcccag

SEQ ID NO: 2245774 - DNA, 25 bp, Homo sapien
tgcttgcttgccaaccctgtgagct

SEQ ID NO: 2245775 - DNA, 25 bp, Homo sapien
tgagctgcccactgaggcaataggc

SEQ ID NO: 2245776 - DNA, 25 bp, Homo sapien
gaggttgatctggggctacaagccc

SEQ ID NO: 2245777 - DNA, 25 bp, Homo sapien
ttgagatgaatgtggtcaggaggag

SEQ ID NO: 2245778 - DNA, 25 bp, Homo sapien
ggaggttgatctggggctacaagcc

SEQ ID NO: 2245779 - DNA, 25 bp, Homo sapien
gctgcccgggaggttttgcaaactg

SEQ ID NO: 2245780 - DNA, 25 bp, Homo sapien
taaacaaattggcactgaccctggt

SEQ ID NO: 2245781 - DNA, 25 bp, Homo sapien
tccaggaatgttcggggcctcccat

SEQ ID NO: 2245782 - DNA, 25 bp, Homo sapien
cttttcagcctcaccacgttcttaa

SEQ ID NO: 2245783 - DNA, 25 bp, Homo sapien
ttccctttgcttcgtgattgtgtta

SEQ ID NO: 2245784 - DNA, 25 bp, Homo sapien
gtgttaagtgactgccaaaggcctg

SEQ ID NO: 2245785 - DNA, 25 bp, Homo sapien
tccctttgcttcgtgattgtgttaa

SEQ ID NO: 2245786 - DNA, 25 bp, Homo sapien
ggcacagtggattccgccatcacca

SEQ ID NO: 2245787 - DNA, 25 bp, Homo sapien
caccaccacctccggttgcatcttc

SEQ ID NO: 2245788 - DNA, 25 bp, Homo sapien
aggcacagtggattccgccatcacc

SEQ ID NO: 2245789 - DNA, 25 bp, Homo sapien
accacctccggttgcatcttctcca

SEQ ID NO: 2245790 - DNA, 25 bp, Homo sapien
cagagcacaaggttagacgatgctc

SEQ ID NO: 2245791 - DNA, 25 bp, Homo sapien
caaggttagacgatgctcgcctagc

SEQ ID NO: 2245792 - DNA, 25 bp, Homo sapien
gacgatgctcgcctagcaccggttc

SEQ ID NO: 2245793 - DNA, 25 bp, Homo sapien
ctttggcttctaatttggattgcct

SEQ ID NO: 2245794 - DNA, 25 bp, Homo sapien
aggaaacaattttattttcatgcat

SEQ ID NO: 2245795 - DNA, 25 bp, Homo sapien
ctataagtggagccaaggaaacaat

SEQ ID NO: 2245796 - DNA, 25 bp, Homo sapien
ccaaggaaacaattttattttcatg

SEQ ID NO: 2245797 - DNA, 25 bp, Homo sapien
tataagtggagccaaggaaacaatt

SEQ ID NO: 2245798 - DNA, 25 bp, Homo sapien
cagaggaggcaggagtctttgaggg

SEQ ID NO: 2245799 - DNA, 25 bp, Homo sapien
caggatggctactgcagcaaacaga

SEQ ID NO: 2245800 - DNA, 25 bp, Homo sapien
cccttcaggatggctactgcagcaa

SEQ ID NO: 2245801 - DNA, 25 bp, Homo sapien
ttgcccttcaggatggctactgcag

SEQ ID NO: 2245802 - DNA, 25 bp, Homo sapien
tcatgagtgcggttggctgtaatgt

SEQ ID NO: 2245803 - DNA, 25 bp, Homo sapien
tccagaagggtgacagctgtaagga

SEQ ID NO: 2245804 - DNA, 25 bp, Homo sapien
taaatatactcatgatggctgaggg

SEQ ID NO: 2245805 - DNA, 25 bp, Homo sapien
ctttaggtgtactgatggctgtagg

SEQ ID NO: 2245806 - DNA, 25 bp, Homo sapien
ctggaagggtgatagcagcaatggt

SEQ ID NO: 2245807 - DNA, 25 bp, Homo sapien
tggaagggtgatagcagcaatggtg

SEQ ID NO: 2245808 - DNA, 25 bp, Homo sapien
gaagggtgatagcagcaatggtgat

SEQ ID NO: 2245809 - DNA, 25 bp, Homo sapien
agggtgatagcagcaatggtgatga

SEQ ID NO: 2245810 - DNA, 25 bp, Homo sapien
catataatgtcgagctgattgtcca

SEQ ID NO: 2245811 - DNA, 25 bp, Homo sapien
gagcattgatccaacaggcagccag

SEQ ID NO: 2245812 - DNA, 25 bp, Homo sapien
gataaagggcttgggtacgccatat

SEQ ID NO: 2245813 - DNA, 25 bp, Homo sapien
gactgttcaacccaagagccgtctg

SEQ ID NO: 2245814 - DNA, 25 bp, Homo sapien
taggggccggcaggggctgcgattg

SEQ ID NO: 2245815 - DNA, 25 bp, Homo sapien
ctaggggccggcaggggctgcgatt

SEQ ID NO: 2245816 - DNA, 25 bp, Homo sapien
ccatggcccgcacccccaagctgcc

SEQ ID NO: 2245817 - DNA, 25 bp, Homo sapien
gtggcagggcttcctgtatgctgct

SEQ ID NO: 2245818 - DNA, 25 bp, Homo sapien
gcagggcttcctgtatgctgctgct

SEQ ID NO: 2245819 - DNA, 25 bp, Homo sapien
tgctgctgccgggtgtccatggccc

SEQ ID NO: 2245820 - DNA, 25 bp, Homo sapien
ctgcagcagtcagagtggcagctga

SEQ ID NO: 2245821 - DNA, 25 bp, Homo sapien
cagagtggcagctgaaggctcggtt

SEQ ID NO: 2245822 - DNA, 25 bp, Homo sapien
agtggcagctgaaggctcggttcat

SEQ ID NO: 2245823 - DNA, 25 bp, Homo sapien
tgcagcagtcagagtggcagctgaa

SEQ ID NO: 2245824 - DNA, 25 bp, Homo sapien
gacccatcccttccaagactcttgg

SEQ ID NO: 2245825 - DNA, 25 bp, Homo sapien
caaaggccatatgttgagtctgtag

SEQ ID NO: 2245826 - DNA, 25 bp, Homo sapien
ccatatgttgagtctgtaggtgagg

SEQ ID NO: 2245827 - DNA, 25 bp, Homo sapien
ctttcctctgcttgctcgacccatc

SEQ ID NO: 2245828 - DNA, 25 bp, Homo sapien
gccccggccacggcctctcaggagc

SEQ ID NO: 2245829 - DNA, 25 bp, Homo sapien
cacttctgccccggccacggcctct

SEQ ID NO: 2245830 - DNA, 25 bp, Homo sapien
cggccacggcctctcaggagccatc

SEQ ID NO: 2245831 - DNA, 25 bp, Homo sapien
ccacttctgccccggccacggcctc

SEQ ID NO: 2245832 - DNA, 25 bp, Homo sapien
tgctgggctgcccagcttggagcca

SEQ ID NO: 2245833 - DNA, 25 bp, Homo sapien
gctgggctgcccagcttggagccat

SEQ ID NO: 2245834 - DNA, 25 bp, Homo sapien
tcaaagggccctgctgggctgccca

SEQ ID NO: 2245835 - DNA, 25 bp, Homo sapien
ccctgctgggctgcccagcttggag

SEQ ID NO: 2245836 - DNA, 25 bp, Homo sapien
ccgagatggagccaacctggagatg

SEQ ID NO: 2245837 - DNA, 25 bp, Homo sapien
ccaacctggagatgggggcctgagg

SEQ ID NO: 2245838 - DNA, 25 bp, Homo sapien
agccaacctggagatgggggcctga

SEQ ID NO: 2245839 - DNA, 25 bp, Homo sapien
ggagccaacctggagatgggggcct

SEQ ID NO: 2245840 - DNA, 25 bp, Homo sapien
taggactgccggctaagtggacaca

SEQ ID NO: 2245841 - DNA, 25 bp, Homo sapien
tacgaagtctatgccctgaatcccc

SEQ ID NO: 2245842 - DNA, 25 bp, Homo sapien
ggacagaattgcctctcggaagcca

SEQ ID NO: 2245843 - DNA, 25 bp, Homo sapien
gagacttctcacaaggctgattaca

SEQ ID NO: 2245844 - DNA, 25 bp, Homo sapien
ctactactggtgatcttgtgaggcg

SEQ ID NO: 2245845 - DNA, 25 bp, Homo sapien
tctggcctccaatacgggacagtag

SEQ ID NO: 2245846 - DNA, 25 bp, Homo sapien
taaagactatgaagatctgcaccaa

SEQ ID NO: 2245847 - DNA, 25 bp, Homo sapien
tatcctgctgccttttggtacacgg

SEQ ID NO: 2245848 - DNA, 25 bp, Homo sapien
cttctagaagatgccaagtggtgcc

SEQ ID NO: 2245849 - DNA, 25 bp, Homo sapien
gtaggtagctgtgcaaggaccccaa

SEQ ID NO: 2245850 - DNA, 25 bp, Homo sapien
ggaatactagcactagccccatggg

SEQ ID NO: 2245851 - DNA, 25 bp, Homo sapien
tgaatccagcaaccaaggtctaggg

SEQ ID NO: 2245852 - DNA, 25 bp, Homo sapien
taacttcacagtaaccaatatagca

SEQ ID NO: 2245853 - DNA, 25 bp, Homo sapien
aacttcacagtaaccaatatagcat

SEQ ID NO: 2245854 - DNA, 25 bp, Homo sapien
ttcacagtaaccaatatagcatttg

SEQ ID NO: 2245855 - DNA, 25 bp, Homo sapien
cttcacagtaaccaatatagcattt

SEQ ID NO: 2245856 - DNA, 25 bp, Homo sapien
tatttctaaaaccattcaaggctcc

SEQ ID NO: 2245857 - DNA, 25 bp, Homo sapien
cattcaaggctccttcattaattgg

SEQ ID NO: 2245858 - DNA, 25 bp, Homo sapien
ttcaaggctccttcattaattggct

SEQ ID NO: 2245859 - DNA, 25 bp, Homo sapien
taaaaccattcaaggctccttcatt

SEQ ID NO: 2245860 - DNA, 25 bp, Homo sapien
tagctgctacggaatcagaatccac

SEQ ID NO: 2245861 - DNA, 25 bp, Homo sapien
ggagtcttgattatacaccacctag

SEQ ID NO: 2245862 - DNA, 25 bp, Homo sapien
tctgatcagatagggacagtcccag

SEQ ID NO: 2245863 - DNA, 25 bp, Homo sapien
gacctaagggtcctcaggagaacac

SEQ ID NO: 2245864 - DNA, 25 bp, Homo sapien
tgccgctggcatctcataaattctt

SEQ ID NO: 2245865 - DNA, 25 bp, Homo sapien
cacaggtgctctaggaaatatagcc

SEQ ID NO: 2245866 - DNA, 25 bp, Homo sapien
tacaacaagtggaaggtacctgtcc

SEQ ID NO: 2245867 - DNA, 25 bp, Homo sapien
cagtgtggttaccatagccagaggt

SEQ ID NO: 2245868 - DNA, 25 bp, Homo sapien
ttttagccccagaatgagaccagtg

SEQ ID NO: 2245869 - DNA, 25 bp, Homo sapien
gtctctgtgactgcctctggactca

SEQ ID NO: 2245870 - DNA, 25 bp, Homo sapien
tgagccagtctcaaaaacttttagc

SEQ ID NO: 2245871 - DNA, 25 bp, Homo sapien
caagaacccagttaggatcccctgg

SEQ ID NO: 2245872 - DNA, 25 bp, Homo sapien
tctgccactgccttgagttcagaaa

SEQ ID NO: 2245873 - DNA, 25 bp, Homo sapien
ccagttatcagaggtgactgacatc

SEQ ID NO: 2245874 - DNA, 25 bp, Homo sapien
gccagtgtgcaactgggtgactaaa

SEQ ID NO: 2245875 - DNA, 25 bp, Homo sapien
taaaagggacagcttacttgctctc

SEQ ID NO: 2245876 - DNA, 25 bp, Homo sapien
ggaggtggcatctcttcgggagtgc

SEQ ID NO: 2245877 - DNA, 25 bp, Homo sapien
gtggcatctcttcgggagtgctgct

SEQ ID NO: 2245878 - DNA, 25 bp, Homo sapien
gctgctgtcctccggcatctcattt

SEQ ID NO: 2245879 - DNA, 25 bp, Homo sapien
gctgtcctccggcatctcatttgag

SEQ ID NO: 2245880 - DNA, 25 bp, Homo sapien
ggcaaaataccccttcgatccagca

SEQ ID NO: 2245881 - DNA, 25 bp, Homo sapien
gctactggtctcttgagtactggga

SEQ ID NO: 2245882 - DNA, 25 bp, Homo sapien
ttgagtactgggaggtcgacttcca

SEQ ID NO: 2245883 - DNA, 25 bp, Homo sapien
agtggcaaaataccccttcgatcca

SEQ ID NO: 2245884 - DNA, 25 bp, Homo sapien
atattgccatggctgtagggattct

SEQ ID NO: 2245885 - DNA, 25 bp, Homo sapien
gctgtagggattctggacgcgattc

SEQ ID NO: 2245886 - DNA, 25 bp, Homo sapien
acagcagttcttcacaatattgcca

SEQ ID NO: 2245887 - DNA, 25 bp, Homo sapien
ttgccatggctgtagggattctgga

SEQ ID NO: 2245888 - DNA, 25 bp, Homo sapien
tcattggttgtctggttgagagcca

SEQ ID NO: 2245889 - DNA, 25 bp, Homo sapien
tgaaatccagtcagtcccacgacgg

SEQ ID NO: 2245890 - DNA, 25 bp, Homo sapien
tgagagccacgaggaaagtatgaaa

SEQ ID NO: 2245891 - DNA, 25 bp, Homo sapien
tcccacgacggaccagagtgtaaag

SEQ ID NO: 2245892 - DNA, 25 bp, Homo sapien
gtgaggtgtggttaaggagtattga

SEQ ID NO: 2245893 - DNA, 25 bp, Homo sapien
tgaggtgtggttaaggagtattgaa

SEQ ID NO: 2245894 - DNA, 25 bp, Homo sapien
gaggtgtggttaaggagtattgaag

SEQ ID NO: 2245895 - DNA, 25 bp, Homo sapien
ggtgtggttaaggagtattgaagaa

SEQ ID NO: 2245896 - DNA, 25 bp, Homo sapien
cagggacatactgccagcggaggat

SEQ ID NO: 2245897 - DNA, 25 bp, Homo sapien
tgctggaaagtagcttaagaaggct

SEQ ID NO: 2245898 - DNA, 25 bp, Homo sapien
cattctggttgctaccactaagact

SEQ ID NO: 2245899 - DNA, 25 bp, Homo sapien
ttagaccttggcactctctgatatc

SEQ ID NO: 2245900 - DNA, 25 bp, Homo sapien
tctccaagaagccaattttcaaaga

SEQ ID NO: 2245901 - DNA, 25 bp, Homo sapien
ttccaggagtttctttcaatgtctc

SEQ ID NO: 2245902 - DNA, 25 bp, Homo sapien
ggagtttctttcaatgtctccaaga

SEQ ID NO: 2245903 - DNA, 25 bp, Homo sapien
caggagtttctttcaatgtctccaa

SEQ ID NO: 2245904 - DNA, 25 bp, Homo sapien
gaagtagcggtagttcctctttcca

SEQ ID NO: 2245905 - DNA, 25 bp, Homo sapien
tgagggccacatagacgatgttgaa

SEQ ID NO: 2245906 - DNA, 25 bp, Homo sapien
tctttccaacacaattccccaccca

SEQ ID NO: 2245907 - DNA, 25 bp, Homo sapien
tgttgaaggcgaagacatagattgt

SEQ ID NO: 2245908 - DNA, 25 bp, Homo sapien
cctctatatgcagaaggactttcta

SEQ ID NO: 2245909 - DNA, 25 bp, Homo sapien
tacgtgacaattggctatttggtgc

SEQ ID NO: 2245910 - DNA, 25 bp, Homo sapien
aataaacaggtcaaaatagccaagg

SEQ ID NO: 2245911 - DNA, 25 bp, Homo sapien
taatcggtgggcctactaagttcaa

SEQ ID NO: 2245912 - DNA, 25 bp, Homo sapien
tcataaagcttgtacccctttggta

SEQ ID NO: 2245913 - DNA, 25 bp, Homo sapien
ggcagtacgtatcaagagccttcat

SEQ ID NO: 2245914 - DNA, 25 bp, Homo sapien
ggtagaataagtccattttcagcaa

SEQ ID NO: 2245915 - DNA, 25 bp, Homo sapien
aaagcaatttggcagtacgtatcaa

SEQ ID NO: 2245916 - DNA, 25 bp, Homo sapien
attacattcataatgtggaaccatc

SEQ ID NO: 2245917 - DNA, 25 bp, Homo sapien
ttaattacattcataatgtggaacc

SEQ ID NO: 2245918 - DNA, 25 bp, Homo sapien
ttcataatgtggaaccatcaccatt

SEQ ID NO: 2245919 - DNA, 25 bp, Homo sapien
aatgtggaaccatcaccattatcta

SEQ ID NO: 2245920 - DNA, 25 bp, Homo sapien
caatgtagctgcacttggaggcaga

SEQ ID NO: 2245921 - DNA, 25 bp, Homo sapien
aataatgatgctacgaacactggcg

SEQ ID NO: 2245922 - DNA, 25 bp, Homo sapien
cactggcgtacaagtaggttttgag

SEQ ID NO: 2245923 - DNA, 25 bp, Homo sapien
ccttgtaaggagaggatgagacacc

SEQ ID NO: 2245924 - DNA, 25 bp, Homo sapien
ggaaatactacctcacatcagacct

SEQ ID NO: 2245925 - DNA, 25 bp, Homo sapien
ccttatagttaagagtattaataag

SEQ ID NO: 2245926 - DNA, 25 bp, Homo sapien
ccttctttaaatatcaagtttcctg

SEQ ID NO: 2245927 - DNA, 25 bp, Homo sapien
ttaaatatcaagtttcctgcttcac

SEQ ID NO: 2245928 - DNA, 25 bp, Homo sapien
tatcaagtttcctgcttcacttaaa

SEQ ID NO: 2245929 - DNA, 25 bp, Homo sapien
agtttcctgcttcacttaaaatggg

SEQ ID NO: 2245930 - DNA, 25 bp, Homo sapien
taaagcaatatatatctcccaacct

SEQ ID NO: 2245931 - DNA, 25 bp, Homo sapien
ataaagcaatatatatctcccaacc

SEQ ID NO: 2245932 - DNA, 25 bp, Homo sapien
aaagcaatatatatctcccaacctt

SEQ ID NO: 2245933 - DNA, 25 bp, Homo sapien
tatctcccaacctttgcctaaagaa

SEQ ID NO: 2245934 - DNA, 25 bp, Homo sapien
tgtctcctcccactatgtaaggtgg

SEQ ID NO: 2245935 - DNA, 25 bp, Homo sapien
ttcttgggttgcgtcttagacagac

SEQ ID NO: 2245936 - DNA, 25 bp, Homo sapien
cagtaggcagtgattacaacaaagc

SEQ ID NO: 2245937 - DNA, 25 bp, Homo sapien
ggtgggtcccacatgaaaatccagt

SEQ ID NO: 2245938 - DNA, 25 bp, Homo sapien
gccttttccctaggcaatgtccctg

SEQ ID NO: 2245939 - DNA, 25 bp, Homo sapien
tgcctatctaaatttccctatctaa

SEQ ID NO: 2245940 - DNA, 25 bp, Homo sapien
ttctagttcaactcagccttttccc

SEQ ID NO: 2245941 - DNA, 25 bp, Homo sapien
ttttcaggagcttgttgcctatcta

SEQ ID NO: 2245942 - DNA, 25 bp, Homo sapien
tggccctggggcaccgcaccattgg

SEQ ID NO: 2245943 - DNA, 25 bp, Homo sapien
ctggaaattcttgatacgaggcggt

SEQ ID NO: 2245944 - DNA, 25 bp, Homo sapien
ttcttgatacgaggcggtggtcgct

SEQ ID NO: 2245945 - DNA, 25 bp, Homo sapien
ctggggcaccgcaccattggtagct

SEQ ID NO: 2245946 - DNA, 25 bp, Homo sapien
aagctggtcctcaacagtgtagcca

SEQ ID NO: 2245947 - DNA, 25 bp, Homo sapien
tgcttcatctggtagcgcccgagga

SEQ ID NO: 2245948 - DNA, 25 bp, Homo sapien
tgaagctggtcctcaacagtgtagc

SEQ ID NO: 2245949 - DNA, 25 bp, Homo sapien
cccgaggaatcactccagggtcact

SEQ ID NO: 2245950 - DNA, 25 bp, Homo sapien
cagctgaacagccaggtagcggcac

SEQ ID NO: 2245951 - DNA, 25 bp, Homo sapien
gcactcttggttacagagcacaata

SEQ ID NO: 2245952 - DNA, 25 bp, Homo sapien
cctggaccttgtcactgtgggcact

SEQ ID NO: 2245953 - DNA, 25 bp, Homo sapien
ctacatagtcttgtgtctcctcaaa

SEQ ID NO: 2245954 - DNA, 25 bp, Homo sapien
ctcttcccaatctcacataaggatg

SEQ ID NO: 2245955 - DNA, 25 bp, Homo sapien
aaagctcctgataggcttccctgtt

SEQ ID NO: 2245956 - DNA, 25 bp, Homo sapien
gctcctgataggcttccctgttcct

SEQ ID NO: 2245957 - DNA, 25 bp, Homo sapien
ttcctgcaaggctaccagaaatgcc

SEQ ID NO: 2245958 - DNA, 25 bp, Homo sapien
ttccctgttcctgcaaggctaccag

SEQ ID NO: 2245959 - DNA, 25 bp, Homo sapien
tggtaccacacacaagcacgtgcgt

SEQ ID NO: 2245960 - DNA, 25 bp, Homo sapien
taaagaacagatgtcagctttgcac

SEQ ID NO: 2245961 - DNA, 25 bp, Homo sapien
caactaactcaaagcctgggaacaa

SEQ ID NO: 2245962 - DNA, 25 bp, Homo sapien
gggcttatgcctgcctgactacaca

SEQ ID NO: 2245963 - DNA, 25 bp, Homo sapien
tactctgtgatgaccacgaagcaat

SEQ ID NO: 2245964 - DNA, 25 bp, Homo sapien
tacagacatcgctcaagaggacgtt

SEQ ID NO: 2245965 - DNA, 25 bp, Homo sapien
tctatcaaggacagccccaaatcag

SEQ ID NO: 2245966 - DNA, 25 bp, Homo sapien
cacaactagtatgtggtccagctga

SEQ ID NO: 2245967 - DNA, 25 bp, Homo sapien
caaaggcgaagaagagtgtacatgt

SEQ ID NO: 2245968 - DNA, 25 bp, Homo sapien
tcaaaggcgaagaagagtgtacatg

SEQ ID NO: 2245969 - DNA, 25 bp, Homo sapien
aaaggcgaagaagagtgtacatgtc

SEQ ID NO: 2245970 - DNA, 25 bp, Homo sapien
agagtgtacatgtccccaggatgag

SEQ ID NO: 2245971 - DNA, 25 bp, Homo sapien
atgacgcggccatcacagcaaaagg

SEQ ID NO: 2245972 - DNA, 25 bp, Homo sapien
ggccatcacagcaaaaggtgttcct

SEQ ID NO: 2245973 - DNA, 25 bp, Homo sapien
gagtttctcccatttccgtgtcacc

SEQ ID NO: 2245974 - DNA, 25 bp, Homo sapien
gggagtttctcccatttccgtgtca

SEQ ID NO: 2245975 - DNA, 25 bp, Homo sapien
gttttgcgattacacgagagaagaa

SEQ ID NO: 2245976 - DNA, 25 bp, Homo sapien
ggttttgcgattacacgagagaaga

SEQ ID NO: 2245977 - DNA, 25 bp, Homo sapien
gggttttgcgattacacgagagaag

SEQ ID NO: 2245978 - DNA, 25 bp, Homo sapien
gttgcctgctattcctgccgctggg

SEQ ID NO: 2245979 - DNA, 25 bp, Homo sapien
tattcctgccgctgggtcaaacatc

SEQ ID NO: 2245980 - DNA, 25 bp, Homo sapien
gctttgaaatcacgttgcctgctat

SEQ ID NO: 2245981 - DNA, 25 bp, Homo sapien
tgccgctgggtcaaacatcatcaaa

SEQ ID NO: 2245982 - DNA, 25 bp, Homo sapien
ccaattcgtgtttgttctctaaaag

SEQ ID NO: 2245983 - DNA, 25 bp, Homo sapien
gaaggtatgataaaaggttctcaaa

SEQ ID NO: 2245984 - DNA, 25 bp, Homo sapien
tcttcttaaataagcctctatgctt

SEQ ID NO: 2245985 - DNA, 25 bp, Homo sapien
tatgcttccaatctaatgctgatga

SEQ ID NO: 2245986 - DNA, 25 bp, Homo sapien
aggtgatcgtgccaattattaatac

SEQ ID NO: 2245987 - DNA, 25 bp, Homo sapien
ggtgatcgtgccaattattaatact

SEQ ID NO: 2245988 - DNA, 25 bp, Homo sapien
ttttataggtgatcgtgccaattat

SEQ ID NO: 2245989 - DNA, 25 bp, Homo sapien
tataggtgatcgtgccaattattaa

SEQ ID NO: 2245990 - DNA, 25 bp, Homo sapien
caacatcattaaaaggactctaaaa

SEQ ID NO: 2245991 - DNA, 25 bp, Homo sapien
tcaacatcattaaaaggactctaaa

SEQ ID NO: 2245992 - DNA, 25 bp, Homo sapien
tgagtccgggaaatgaaacaatctg

SEQ ID NO: 2245993 - DNA, 25 bp, Homo sapien
gctggtctagcctaacatttgtgag

SEQ ID NO: 2245994 - DNA, 25 bp, Homo sapien
caggaggttctggacgctctgtgca

SEQ ID NO: 2245995 - DNA, 25 bp, Homo sapien
tagccactcgaatatgaatcacagc

SEQ ID NO: 2245996 - DNA, 25 bp, Homo sapien
catcagagacctgtaggtgaaaggc

SEQ ID NO: 2245997 - DNA, 25 bp, Homo sapien
tcacaagggcgctttctgggacatg

SEQ ID NO: 2245998 - DNA, 25 bp, Homo sapien
gctaagaaaagtcacaagggcgctt

SEQ ID NO: 2245999 - DNA, 25 bp, Homo sapien
gaaaggctgacttaagcaggagaga

SEQ ID NO: 2246000 - DNA, 25 bp, Homo sapien
ctactcagcatcctgaattcccagg

SEQ ID NO: 2246001 - DNA, 25 bp, Homo sapien
attcccaggcccagagtttctcagc

SEQ ID NO: 2246002 - DNA, 25 bp, Homo sapien
ctctactcagcatcctgaattccca

SEQ ID NO: 2246003 - DNA, 25 bp, Homo sapien
catctctactcagcatcctgaattc

SEQ ID NO: 2246004 - DNA, 25 bp, Homo sapien
cggaagcctgcagcccgacggacgg

SEQ ID NO: 2246005 - DNA, 25 bp, Homo sapien
ggcctctatttaccgacaccacatg

SEQ ID NO: 2246006 - DNA, 25 bp, Homo sapien
acagccaactcgcgggctggagagg

SEQ ID NO: 2246007 - DNA, 25 bp, Homo sapien
ccccacgctggcaggactgaggcgg

SEQ ID NO: 2246008 - DNA, 25 bp, Homo sapien
gagcggagcagggaaacgagaaggt

SEQ ID NO: 2246009 - DNA, 25 bp, Homo sapien
ctaggagcggagcagggaaacgaga

SEQ ID NO: 2246010 - DNA, 25 bp, Homo sapien
agcagggaaacgagaaggtagaagg

SEQ ID NO: 2246011 - DNA, 25 bp, Homo sapien
cggagcagggaaacgagaaggtaga

SEQ ID NO: 2246012 - DNA, 25 bp, Homo sapien
agacaatctcctcccgataaaccgg

SEQ ID NO: 2246013 - DNA, 25 bp, Homo sapien
ggaagacaatctcctcccgataaac

SEQ ID NO: 2246014 - DNA, 25 bp, Homo sapien
aagacaatctcctcccgataaaccg

SEQ ID NO: 2246015 - DNA, 25 bp, Homo sapien
ctggaagacaatctcctcccgataa

SEQ ID NO: 2246016 - DNA, 25 bp, Homo sapien
cacgtgtagtcaccccgggccaggg

SEQ ID NO: 2246017 - DNA, 25 bp, Homo sapien
aaaatccgtcgggaagcagcgaccg

SEQ ID NO: 2246018 - DNA, 25 bp, Homo sapien
ggcaggttgggacgcgcgccacatc

SEQ ID NO: 2246019 - DNA, 25 bp, Homo sapien
ccgagttgagaagggcggtgccgac

SEQ ID NO: 2246020 - DNA, 25 bp, Homo sapien
gaatcacgtcggcagccaaaggtgg

SEQ ID NO: 2246021 - DNA, 25 bp, Homo sapien
caactcggccggcagctgacggcag

SEQ ID NO: 2246022 - DNA, 25 bp, Homo sapien
tgacggcaggaaacggaccgtccca

SEQ ID NO: 2246023 - DNA, 25 bp, Homo sapien
ccaaaggtggcagcgacttgtcctc

SEQ ID NO: 2246024 - DNA, 25 bp, Homo sapien
ctgacaaggggccccagtggtcggg

SEQ ID NO: 2246025 - DNA, 25 bp, Homo sapien
actggccaaatggaacgctcctcac

SEQ ID NO: 2246026 - DNA, 25 bp, Homo sapien
cactggccaaatggaacgctcctca

SEQ ID NO: 2246027 - DNA, 25 bp, Homo sapien
tgctcgccctctattggccgatcgg

SEQ ID NO: 2246028 - DNA, 25 bp, Homo sapien
tccagtagttgctcgccctctattg

SEQ ID NO: 2246029 - DNA, 25 bp, Homo sapien
tctattggccgatcggcctcggcgc

SEQ ID NO: 2246030 - DNA, 25 bp, Homo sapien
gtcaccaggtcgctccagtagttgc

SEQ ID NO: 2246031 - DNA, 25 bp, Homo sapien
acagctggtggtatagttccagtcc

SEQ ID NO: 2246032 - DNA, 25 bp, Homo sapien
catgatgtgccgtctgcaagccgga

SEQ ID NO: 2246033 - DNA, 25 bp, Homo sapien
tcctgagggttctccaagatatgta

SEQ ID NO: 2246034 - DNA, 25 bp, Homo sapien
tgcaagccggagatccgagacagct

SEQ ID NO: 2246035 - DNA, 25 bp, Homo sapien
gacaaagtagacaagtgcttgctta

SEQ ID NO: 2246036 - DNA, 25 bp, Homo sapien
cttatgattgtgttgaatgcgggaa

SEQ ID NO: 2246037 - DNA, 25 bp, Homo sapien
agatgtccaaaagagggaaatctat

SEQ ID NO: 2246038 - DNA, 25 bp, Homo sapien
taaagtttcatttagaggtgatgaa

SEQ ID NO: 2246039 - DNA, 25 bp, Homo sapien
tgatcttgaactcccgatttcaagc

SEQ ID NO: 2246040 - DNA, 25 bp, Homo sapien
aactcccgatttcaagcaatctgcc

SEQ ID NO: 2246041 - DNA, 25 bp, Homo sapien
gcaatctgcccacctcggcctccta

SEQ ID NO: 2246042 - DNA, 25 bp, Homo sapien
aatctgcccacctcggcctcctaaa

SEQ ID NO: 2246043 - DNA, 25 bp, Homo sapien
tttctgtggaataatggggcaaaag

SEQ ID NO: 2246044 - DNA, 25 bp, Homo sapien
gaaaagaatgttcttgtctattatt

SEQ ID NO: 2246045 - DNA, 25 bp, Homo sapien
aactttgggtgtcgctgatcttgtc

SEQ ID NO: 2246046 - DNA, 25 bp, Homo sapien
tatatatatattaggccgggcccgg

SEQ ID NO: 2246047 - DNA, 25 bp, Homo sapien
gatgagggttagacaaccaagtcca

SEQ ID NO: 2246048 - DNA, 25 bp, Homo sapien
caagttaggaacagatctccttgct

SEQ ID NO: 2246049 - DNA, 25 bp, Homo sapien
accaagtccaagttaggaacagatc

SEQ ID NO: 2246050 - DNA, 25 bp, Homo sapien
tgctgcatcatgacaaaacatgacc

SEQ ID NO: 2246051 - DNA, 25 bp, Homo sapien
tctcgagttgcacttgtcagggcca

SEQ ID NO: 2246052 - DNA, 25 bp, Homo sapien
ccccagtgggatcatttcgttcaag

SEQ ID NO: 2246053 - DNA, 25 bp, Homo sapien
ttcgttcaagtcagacacctttgga

SEQ ID NO: 2246054 - DNA, 25 bp, Homo sapien
cacctttggactctacagcattgca

SEQ ID NO: 2246055 - DNA, 25 bp, Homo sapien
ctctttagggactgttagcacatca

SEQ ID NO: 2246056 - DNA, 25 bp, Homo sapien
ctttagggactgttagcacatcaaa

SEQ ID NO: 2246057 - DNA, 25 bp, Homo sapien
tgttctacagtcctctttagggact

SEQ ID NO: 2246058 - DNA, 25 bp, Homo sapien
aactgttctacagtcctctttaggg

SEQ ID NO: 2246059 - DNA, 25 bp, Homo sapien
tcttcccatggtcctcttgtgtcct

SEQ ID NO: 2246060 - DNA, 25 bp, Homo sapien
ccatgctacctcttgggtttctgtc

SEQ ID NO: 2246061 - DNA, 25 bp, Homo sapien
tgtcctccatgctacctcttgggtt

SEQ ID NO: 2246062 - DNA, 25 bp, Homo sapien
cctccatgctacctcttgggtttct

SEQ ID NO: 2246063 - DNA, 25 bp, Homo sapien
ttctatcttatgcattctcacacat

SEQ ID NO: 2246064 - DNA, 25 bp, Homo sapien
ctgattctatcttatgcattctcac

SEQ ID NO: 2246065 - DNA, 25 bp, Homo sapien
ctatcttatgcattctcacacattc

SEQ ID NO: 2246066 - DNA, 25 bp, Homo sapien
gattctatcttatgcattctcacac

SEQ ID NO: 2246067 - DNA, 25 bp, Homo sapien
caaagctagtgctcaagaaacatcc

SEQ ID NO: 2246068 - DNA, 25 bp, Homo sapien
ggccattcttgatccctctggagca

SEQ ID NO: 2246069 - DNA, 25 bp, Homo sapien
tggccagggacctatcaaagctagt

SEQ ID NO: 2246070 - DNA, 25 bp, Homo sapien
gaaacatccttgagtgtaactggca

SEQ ID NO: 2246071 - DNA, 25 bp, Homo sapien
ttttcatgggactggtagcactttg

SEQ ID NO: 2246072 - DNA, 25 bp, Homo sapien
ttggaaaatcatagccaattcccag

SEQ ID NO: 2246073 - DNA, 25 bp, Homo sapien
agtaatcaccaccaacgatgggcca

SEQ ID NO: 2246074 - DNA, 25 bp, Homo sapien
tcatagccaattcccagtaatcacc

SEQ ID NO: 2246075 - DNA, 25 bp, Homo sapien
tcttggacctagtacagtggactcc

SEQ ID NO: 2246076 - DNA, 25 bp, Homo sapien
tgttgcccagtgaaacggacagagt

SEQ ID NO: 2246077 - DNA, 25 bp, Homo sapien
attttgctagcacagggcacagacc

SEQ ID NO: 2246078 - DNA, 25 bp, Homo sapien
ggccccaactcccagaaggcttgga

SEQ ID NO: 2246079 - DNA, 25 bp, Homo sapien
tgcttcgaataccaaggaatgcacc

SEQ ID NO: 2246080 - DNA, 25 bp, Homo sapien
catagtgctcgtttactctcccctt

SEQ ID NO: 2246081 - DNA, 25 bp, Homo sapien
gcggaggcagctttttcggttccca

SEQ ID NO: 2246082 - DNA, 25 bp, Homo sapien
gaggcagcacctttcggttggtaac

SEQ ID NO: 2246083 - DNA, 25 bp, Homo sapien
gctccaggtctgataggagagaccc

SEQ ID NO: 2246084 - DNA, 25 bp, Homo sapien
tacagtggggttgacaagatctcca

SEQ ID NO: 2246085 - DNA, 25 bp, Homo sapien
tctccctttagcagttcaaactcaa

SEQ ID NO: 2246086 - DNA, 25 bp, Homo sapien
cagtaaggatgaatccaaaagtggg

SEQ ID NO: 2246087 - DNA, 25 bp, Homo sapien
aatgggctgtcctttccgacctgca

SEQ ID NO: 2246088 - DNA, 25 bp, Homo sapien
gacctgcacccctcaacgattggga

SEQ ID NO: 2246089 - DNA, 25 bp, Homo sapien
tagtttctccctggagtcgagcatt

SEQ ID NO: 2246090 - DNA, 25 bp, Homo sapien
tatgcagccgatcttaaggaccagg

SEQ ID NO: 2246091 - DNA, 25 bp, Homo sapien
caggccctgagctatctcggagccg

SEQ ID NO: 2246092 - DNA, 25 bp, Homo sapien
gccctgagctatctcggagccgcag

SEQ ID NO: 2246093 - DNA, 25 bp, Homo sapien
gcagccccggggtcagagcggccgg

SEQ ID NO: 2246094 - DNA, 25 bp, Homo sapien
agagcggccggaagaaacaggaagt

SEQ ID NO: 2246095 - DNA, 25 bp, Homo sapien
cgggagtcctaaaagacaggccctg

SEQ ID NO: 2246096 - DNA, 25 bp, Homo sapien
aaatccagatgtgtttgggggtcat

SEQ ID NO: 2246097 - DNA, 25 bp, Homo sapien
ctgaactccgaaaatccagatgtgt

SEQ ID NO: 2246098 - DNA, 25 bp, Homo sapien
aactccgaaaatccagatgtgtttg

SEQ ID NO: 2246099 - DNA, 25 bp, Homo sapien
ctccgaaaatccagatgtgtttggg

SEQ ID NO: 2246100 - DNA, 25 bp, Homo sapien
ggcaccgggcaagggagccccattc

SEQ ID NO: 2246101 - DNA, 25 bp, Homo sapien
ctagtgcagagaacacaaagggcat

SEQ ID NO: 2246102 - DNA, 25 bp, Homo sapien
gcaagtgaagatggccctatccccg

SEQ ID NO: 2246103 - DNA, 25 bp, Homo sapien
gtgaagatggccctatccccgtgta

SEQ ID NO: 2246104 - DNA, 25 bp, Homo sapien
gaagatggccctatccccgtgtagg

SEQ ID NO: 2246105 - DNA, 25 bp, Homo sapien
aagcaagtgaagatggccctatccc

SEQ ID NO: 2246106 - DNA, 25 bp, Homo sapien
tcagatagcctcactacagcacact

SEQ ID NO: 2246107 - DNA, 25 bp, Homo sapien
accatgggtgcctgcttatatttcc

SEQ ID NO: 2246108 - DNA, 25 bp, Homo sapien
agagtttgcaccctaaccatgggtg

SEQ ID NO: 2246109 - DNA, 25 bp, Homo sapien
tatttcccattagggtcctgtctcc

SEQ ID NO: 2246110 - DNA, 25 bp, Homo sapien
tctccagccacaggtttcgtggcat

SEQ ID NO: 2246111 - DNA, 25 bp, Homo sapien
tcttgtgagccacttccacgggtat

SEQ ID NO: 2246112 - DNA, 25 bp, Homo sapien
tttgaagattgggattcacccctag

SEQ ID NO: 2246113 - DNA, 25 bp, Homo sapien
gattgggattcacccctagctcact

SEQ ID NO: 2246114 - DNA, 25 bp, Homo sapien
gagccacttccacgggtattcaaat

SEQ ID NO: 2246115 - DNA, 25 bp, Homo sapien
agaagcttccattgccgaaccagcg

SEQ ID NO: 2246116 - DNA, 25 bp, Homo sapien
tctccacctgagtgcagcgagatgc

SEQ ID NO: 2246117 - DNA, 25 bp, Homo sapien
cacagctggaacgagagatggcctc

SEQ ID NO: 2246118 - DNA, 25 bp, Homo sapien
tatctctggaggtgaacaggctccc

SEQ ID NO: 2246119 - DNA, 25 bp, Homo sapien
aatgctggctacacagccctgcatg

SEQ ID NO: 2246120 - DNA, 25 bp, Homo sapien
tgctcatggagttgtccctgtcccc

SEQ ID NO: 2246121 - DNA, 25 bp, Homo sapien
gacagtgaagatgtgaatcaccgtg

SEQ ID NO: 2246122 - DNA, 25 bp, Homo sapien
ggatgttgttctctactgcctccag

SEQ ID NO: 2246123 - DNA, 25 bp, Homo sapien
ggccttgacaggaggagttttggaa

SEQ ID NO: 2246124 - DNA, 25 bp, Homo sapien
tagcacaccagactgcgagttgcag

SEQ ID NO: 2246125 - DNA, 25 bp, Homo sapien
cagactgcgagttgcagagaggcct

SEQ ID NO: 2246126 - DNA, 25 bp, Homo sapien
aacctgaaccttcgtagcacaccag

SEQ ID NO: 2246127 - DNA, 25 bp, Homo sapien
gatgcagtagccttaagtgtagaca

SEQ ID NO: 2246128 - DNA, 25 bp, Homo sapien
tactcgggtcagacagccatgaagc

SEQ ID NO: 2246129 - DNA, 25 bp, Homo sapien
catgatgcggtggtcaatgacaacc

SEQ ID NO: 2246130 - DNA, 25 bp, Homo sapien
aatgacaacctggagaccatctggc

SEQ ID NO: 2246131 - DNA, 25 bp, Homo sapien
ccaaggggtacgatgaataaaggca

SEQ ID NO: 2246132 - DNA, 25 bp, Homo sapien
tggctagtgaacattgggtcacgat

SEQ ID NO: 2246133 - DNA, 25 bp, Homo sapien
tcagtaaatggggagcccccgccat

SEQ ID NO: 2246134 - DNA, 25 bp, Homo sapien
taaaggcaaggtggagtggctagtg

SEQ ID NO: 2246135 - DNA, 25 bp, Homo sapien
taatgagggtcttatcagaacgctc

SEQ ID NO: 2246136 - DNA, 25 bp, Homo sapien
cattaaatctacatccccggtcagg

SEQ ID NO: 2246137 - DNA, 25 bp, Homo sapien
tgtcctgcccatgcaaagaccagtg

SEQ ID NO: 2246138 - DNA, 25 bp, Homo sapien
catgccgagctcacgaacctatggt

SEQ ID NO: 2246139 - DNA, 25 bp, Homo sapien
atcaacccgtcatcttggaaaggtt

SEQ ID NO: 2246140 - DNA, 25 bp, Homo sapien
gaggggctatctttaaggagctgac

SEQ ID NO: 2246141 - DNA, 25 bp, Homo sapien
ttttgtgagcgtggaaataatttaa

SEQ ID NO: 2246142 - DNA, 25 bp, Homo sapien
taaaaatccattgttggccagccgt

SEQ ID NO: 2246143 - DNA, 25 bp, Homo sapien
aagatgcttactttcaaccatcagg

SEQ ID NO: 2246144 - DNA, 25 bp, Homo sapien
atggtgaccctttatcaagatgctt

SEQ ID NO: 2246145 - DNA, 25 bp, Homo sapien
gaccctttatcaagatgcttacttt

SEQ ID NO: 2246146 - DNA, 25 bp, Homo sapien
tttatcaagatgcttactttcaacc

SEQ ID NO: 2246147 - DNA, 25 bp, Homo sapien
aagtcggtccctatgaaaatgctgc

SEQ ID NO: 2246148 - DNA, 25 bp, Homo sapien
tgaggagcgcatcttccccaatgtg

SEQ ID NO: 2246149 - DNA, 25 bp, Homo sapien
taatagagttgtttccgtggctgac

SEQ ID NO: 2246150 - DNA, 25 bp, Homo sapien
ggaagagtaccttggtccagccagt

SEQ ID NO: 2246151 - DNA, 25 bp, Homo sapien
tggttgcccagaaggctcggattgt

SEQ ID NO: 2246152 - DNA, 25 bp, Homo sapien
aagatgagcctgatctctcaggagc

SEQ ID NO: 2246153 - DNA, 25 bp, Homo sapien
cagaaggctcccagatgtggtcaca

SEQ ID NO: 2246154 - DNA, 25 bp, Homo sapien
tgagcctgaggagagctcaagttca

SEQ ID NO: 2246155 - DNA, 25 bp, Homo sapien
cactcctaggtggatgttgctgggc

SEQ ID NO: 2246156 - DNA, 25 bp, Homo sapien
tcagcaccgtggtcagtgggatcgt

SEQ ID NO: 2246157 - DNA, 25 bp, Homo sapien
ccttgaaagtagaggccgctggaac

SEQ ID NO: 2246158 - DNA, 25 bp, Homo sapien
tgctgtagtgccagaagtcctgatg

SEQ ID NO: 2246159 - DNA, 25 bp, Homo sapien
gagaccgacatgctgaatttttggc

SEQ ID NO: 2246160 - DNA, 25 bp, Homo sapien
acggtcccaattccagactcgcaga

SEQ ID NO: 2246161 - DNA, 25 bp, Homo sapien
tttggcttctcccaagaagagctgc

SEQ ID NO: 2246162 - DNA, 25 bp, Homo sapien
actcgcagatggctggagaccgaca

SEQ ID NO: 2246163 - DNA, 25 bp, Homo sapien
ccaccagtttgaagatgcctttctc

SEQ ID NO: 2246164 - DNA, 25 bp, Homo sapien
tccacttgatgtacttgggacaggt

SEQ ID NO: 2246165 - DNA, 25 bp, Homo sapien
gagccaggaggaactcccacagata

SEQ ID NO: 2246166 - DNA, 25 bp, Homo sapien
tgggacaggtgtttctgtcttgcag

SEQ ID NO: 2246167 - DNA, 25 bp, Homo sapien
agtgacaggtgaggtacttcggttg

SEQ ID NO: 2246168 - DNA, 25 bp, Homo sapien
gatttcttcctaatggggatgctgg

SEQ ID NO: 2246169 - DNA, 25 bp, Homo sapien
tgaggtacttcggttgcccttggtc

SEQ ID NO: 2246170 - DNA, 25 bp, Homo sapien
caggtgaggtacttcggttgccctt

SEQ ID NO: 2246171 - DNA, 25 bp, Homo sapien
agaatgcccctcctggtcactagtg

SEQ ID NO: 2246172 - DNA, 25 bp, Homo sapien
cagagaatgcccctcctggtcacta

SEQ ID NO: 2246173 - DNA, 25 bp, Homo sapien
gagaatgcccctcctggtcactagt

SEQ ID NO: 2246174 - DNA, 25 bp, Homo sapien
aatgcccctcctggtcactagtgtc

SEQ ID NO: 2246175 - DNA, 25 bp, Homo sapien
tctggaagcatttcggaggtactga

SEQ ID NO: 2246176 - DNA, 25 bp, Homo sapien
cagggcatcgggctcagaggcagga

SEQ ID NO: 2246177 - DNA, 25 bp, Homo sapien
ggcaggaaacaggtagttgggcaga

SEQ ID NO: 2246178 - DNA, 25 bp, Homo sapien
cgccctgttcagggcatcgggctca

SEQ ID NO: 2246179 - DNA, 25 bp, Homo sapien
acatggtgtgcgaggtggcctcatt

SEQ ID NO: 2246180 - DNA, 25 bp, Homo sapien
gcttctcatccaggatatcgctggg

SEQ ID NO: 2246181 - DNA, 25 bp, Homo sapien
gacttccgcggttgacatggtgtgc

SEQ ID NO: 2246182 - DNA, 25 bp, Homo sapien
tgggagactccatattgagtaagac

SEQ ID NO: 2246183 - DNA, 25 bp, Homo sapien
gaagaaaagttccctcagggcacaa

SEQ ID NO: 2246184 - DNA, 25 bp, Homo sapien
gtccgggttccatggtgggaggaga

SEQ ID NO: 2246185 - DNA, 25 bp, Homo sapien
tggtccgggttccatggtgggagga

SEQ ID NO: 2246186 - DNA, 25 bp, Homo sapien
ctggtccgggttccatggtgggagg

SEQ ID NO: 2246187 - DNA, 25 bp, Homo sapien
ttctctgcccaggaagggaacagac

SEQ ID NO: 2246188 - DNA, 25 bp, Homo sapien
cttctctgcccaggaagggaacaga

SEQ ID NO: 2246189 - DNA, 25 bp, Homo sapien
tctgatcctgcgtcatgcacaaggt

SEQ ID NO: 2246190 - DNA, 25 bp, Homo sapien
caaggtcccgtctgttatgatgcca

SEQ ID NO: 2246191 - DNA, 25 bp, Homo sapien
gatgccattgtgaacgtcgtccaac

SEQ ID NO: 2246192 - DNA, 25 bp, Homo sapien
gggtagggtacctgctccacgatca

SEQ ID NO: 2246193 - DNA, 25 bp, Homo sapien
tgggcttgagaccaaactctgctgc

SEQ ID NO: 2246194 - DNA, 25 bp, Homo sapien
actctgctgctcactagcattgtga

SEQ ID NO: 2246195 - DNA, 25 bp, Homo sapien
agagaattctgttggattgtgctga

SEQ ID NO: 2246196 - DNA, 25 bp, Homo sapien
tgctgatctagagccagagtgcctg

SEQ ID NO: 2246197 - DNA, 25 bp, Homo sapien
catcccgttgcttgcgaactcaaag

SEQ ID NO: 2246198 - DNA, 25 bp, Homo sapien
tgcgaactcaaagatcaggtcactg

SEQ ID NO: 2246199 - DNA, 25 bp, Homo sapien
tgcttgcgaactcaaagatcaggtc

SEQ ID NO: 2246200 - DNA, 25 bp, Homo sapien
tatcatcatccatcccgttgcttgc

SEQ ID NO: 2246201 - DNA, 25 bp, Homo sapien
tgtcttttcagagagctgacaacgg

SEQ ID NO: 2246202 - DNA, 25 bp, Homo sapien
gctgacaacgggattatcagagccc

SEQ ID NO: 2246203 - DNA, 25 bp, Homo sapien
tcagagagctgacaacgggattatc

SEQ ID NO: 2246204 - DNA, 25 bp, Homo sapien
acgggattatcagagccctccagag

SEQ ID NO: 2246205 - DNA, 25 bp, Homo sapien
ccaggtactttggagcctagagcct

SEQ ID NO: 2246206 - DNA, 25 bp, Homo sapien
agtaggtggtggcctaagccaggct

SEQ ID NO: 2246207 - DNA, 25 bp, Homo sapien
gagtaggtggtggcctaagccaggc

SEQ ID NO: 2246208 - DNA, 25 bp, Homo sapien
gtaggtggtggcctaagccaggctc

SEQ ID NO: 2246209 - DNA, 25 bp, Homo sapien
ggagtaggtggtggcctaagccagg

SEQ ID NO: 2246210 - DNA, 25 bp, Homo sapien
tagctgtagagaccccaagatgtgc

SEQ ID NO: 2246211 - DNA, 25 bp, Homo sapien
tgttaaaagatattgccgggtgcgg

SEQ ID NO: 2246212 - DNA, 25 bp, Homo sapien
tagaaactaacgtgaagcctccttg

SEQ ID NO: 2246213 - DNA, 25 bp, Homo sapien
gccagcccagtgtgtgtcctagaaa

SEQ ID NO: 2246214 - DNA, 25 bp, Homo sapien
aaaggtttgctgaatgctggactaa

SEQ ID NO: 2246215 - DNA, 25 bp, Homo sapien
gcacaagctaaggtcctctggttga

SEQ ID NO: 2246216 - DNA, 25 bp, Homo sapien
aatcctaggcaagggtaagtacagg

SEQ ID NO: 2246217 - DNA, 25 bp, Homo sapien
tgaaggccatgcacaagctaaggtc

SEQ ID NO: 2246218 - DNA, 25 bp, Homo sapien
cagcctccctataatcctaggcaag

SEQ ID NO: 2246219 - DNA, 25 bp, Homo sapien
tgagaaggcagttgatgatcaggtc

SEQ ID NO: 2246220 - DNA, 25 bp, Homo sapien
gacagacaaggctgagcaagaatat

SEQ ID NO: 2246221 - DNA, 25 bp, Homo sapien
tggttgatcactgaaccctcaggaa

SEQ ID NO: 2246222 - DNA, 25 bp, Homo sapien
tagatcttagggctacagactaggg

SEQ ID NO: 2246223 - DNA, 25 bp, Homo sapien
tgctattacaggacacacgaggctc

SEQ ID NO: 2246224 - DNA, 25 bp, Homo sapien
gctcagcggccagagatttgcaggc

SEQ ID NO: 2246225 - DNA, 25 bp, Homo sapien
cctgacccctaggaaagcgcctatg

SEQ ID NO: 2246226 - DNA, 25 bp, Homo sapien
ctacagggcattagcagtgtggctg

SEQ ID NO: 2246227 - DNA, 25 bp, Homo sapien
ccattccacttccatcccgggatcg

SEQ ID NO: 2246228 - DNA, 25 bp, Homo sapien
gactcggggaatccattccacttcc

SEQ ID NO: 2246229 - DNA, 25 bp, Homo sapien
ccgactcggggaatccattccactt

SEQ ID NO: 2246230 - DNA, 25 bp, Homo sapien
ttccacttccatcccgggatcggga

SEQ ID NO: 2246231 - DNA, 25 bp, Homo sapien
caggaactcggcgccggcgaaagga

SEQ ID NO: 2246232 - DNA, 25 bp, Homo sapien
ccgagtggctcacgggcccagctcg

SEQ ID NO: 2246233 - DNA, 25 bp, Homo sapien
gaactcggcgccggcgaaaggagaa

SEQ ID NO: 2246234 - DNA, 25 bp, Homo sapien
actcggcgccggcgaaaggagaagt

SEQ ID NO: 2246235 - DNA, 25 bp, Homo sapien
ctcggcgccggggcaggctggtccg

SEQ ID NO: 2246236 - DNA, 25 bp, Homo sapien
cggggcaggctggtccgggcgggcg

SEQ ID NO: 2246237 - DNA, 25 bp, Homo sapien
cgccggggcaggctggtccgggcgg

SEQ ID NO: 2246238 - DNA, 25 bp, Homo sapien
ggcgccggggcaggctggtccgggc

SEQ ID NO: 2246239 - DNA, 25 bp, Homo sapien
caaggagttaggacacgaagttcta

SEQ ID NO: 2246240 - DNA, 25 bp, Homo sapien
gcagcatcatggcttctagagctca

SEQ ID NO: 2246241 - DNA, 25 bp, Homo sapien
gcttctagagctcagggcctgcaag

SEQ ID NO: 2246242 - DNA, 25 bp, Homo sapien
caagcaccacgaggatgtccaaggc

SEQ ID NO: 2246243 - DNA, 25 bp, Homo sapien
tctcctggaacttgatagtggacca

SEQ ID NO: 2246244 - DNA, 25 bp, Homo sapien
tcaggcgggatttggaacagcttct

SEQ ID NO: 2246245 - DNA, 25 bp, Homo sapien
gagccgatcatctgagaggtcactg

SEQ ID NO: 2246246 - DNA, 25 bp, Homo sapien
gagccttgagctgttctggacccca

SEQ ID NO: 2246247 - DNA, 25 bp, Homo sapien
tattaggttgaaagcctgggttatg

SEQ ID NO: 2246248 - DNA, 25 bp, Homo sapien
gggttatgatggctgtccacacagc

SEQ ID NO: 2246249 - DNA, 25 bp, Homo sapien
cttggtattaggttgaaagcctggg

SEQ ID NO: 2246250 - DNA, 25 bp, Homo sapien
ttgaaagcctgggttatgatggctg

SEQ ID NO: 2246251 - DNA, 25 bp, Homo sapien
gatcatggctgacaacagtcccact

SEQ ID NO: 2246252 - DNA, 25 bp, Homo sapien
gacaacagtcccactgtcaagcctt

SEQ ID NO: 2246253 - DNA, 25 bp, Homo sapien
gattgggagcctgtaggaatgtatg

SEQ ID NO: 2246254 - DNA, 25 bp, Homo sapien
taggatcatggctgacaacagtccc

SEQ ID NO: 2246255 - DNA, 25 bp, Homo sapien
ctacaatgacatactatacaaggat

SEQ ID NO: 2246256 - DNA, 25 bp, Homo sapien
taatgatttgtggaacactaggatc

SEQ ID NO: 2246257 - DNA, 25 bp, Homo sapien
tgtatacaacactaaagcaagacaa

SEQ ID NO: 2246258 - DNA, 25 bp, Homo sapien
tcacaggatactagatgagttttcc

SEQ ID NO: 2246259 - DNA, 25 bp, Homo sapien
gaatttacctacatagttgaaaata

SEQ ID NO: 2246260 - DNA, 25 bp, Homo sapien
caaaggacttgatcattcacactca

SEQ ID NO: 2246261 - DNA, 25 bp, Homo sapien
aaatgctcctttacccattcgacct

SEQ ID NO: 2246262 - DNA, 25 bp, Homo sapien
aaaatattcacaaaggacttgatca

SEQ ID NO: 2246263 - DNA, 25 bp, Homo sapien
gaatagtttggctacttcattgaga

SEQ ID NO: 2246264 - DNA, 25 bp, Homo sapien
ttcatgctgctcaccgtccttaatg

SEQ ID NO: 2246265 - DNA, 25 bp, Homo sapien
tacttcattgagatcttcatgctgc

SEQ ID NO: 2246266 - DNA, 25 bp, Homo sapien
catgaatgttgaatagtttggctac

SEQ ID NO: 2246267 - DNA, 25 bp, Homo sapien
tctgaggcctcggactctgtctcac

SEQ ID NO: 2246268 - DNA, 25 bp, Homo sapien
gtctcactctctgatcggataccag

SEQ ID NO: 2246269 - DNA, 25 bp, Homo sapien
tagaagatgacacctttgccgtagt

SEQ ID NO: 2246270 - DNA, 25 bp, Homo sapien
accactttgtccctgaggtagaaga

SEQ ID NO: 2246271 - DNA, 25 bp, Homo sapien
ttcaccagcccctctccagtgacaa

SEQ ID NO: 2246272 - DNA, 25 bp, Homo sapien
ggtatctggatttcttcaaactgca

SEQ ID NO: 2246273 - DNA, 25 bp, Homo sapien
aaattcatgctatgaatatttcctg

SEQ ID NO: 2246274 - DNA, 25 bp, Homo sapien
tgggcacagggtcagtctgacccta

SEQ ID NO: 2246275 - DNA, 25 bp, Homo sapien
gccgtgttcttgagattcgcctgaa

SEQ ID NO: 2246276 - DNA, 25 bp, Homo sapien
gaagtccattccaagagaggtgcct

SEQ ID NO: 2246277 - DNA, 25 bp, Homo sapien
gaatctatgctttgaccaggatacc

SEQ ID NO: 2246278 - DNA, 25 bp, Homo sapien
gacccatggaggatagccagtctta

SEQ ID NO: 2246279 - DNA, 25 bp, Homo sapien
tggggttgtcttgtgcagttgcttt

SEQ ID NO: 2246280 - DNA, 25 bp, Homo sapien
tagcttcatagccaacatcggggcc

SEQ ID NO: 2246281 - DNA, 25 bp, Homo sapien
accaactgtgggcaaactactgtcc

SEQ ID NO: 2246282 - DNA, 25 bp, Homo sapien
ctactgtccacaagaccaatagctt

SEQ ID NO: 2246283 - DNA, 25 bp, Homo sapien
agaacattgactgatgccagtacgg

SEQ ID NO: 2246284 - DNA, 25 bp, Homo sapien
ccttcccaactttatatcgtagaag

SEQ ID NO: 2246285 - DNA, 25 bp, Homo sapien
ccaactttatatcgtagaagcatgc

SEQ ID NO: 2246286 - DNA, 25 bp, Homo sapien
caatcttccactcacaacagcgtga

SEQ ID NO: 2246287 - DNA, 25 bp, Homo sapien
agtctatttccaggccaccagtctt

SEQ ID NO: 2246288 - DNA, 25 bp, Homo sapien
tggccaactcaacattgggctccag

SEQ ID NO: 2246289 - DNA, 25 bp, Homo sapien
cacccagatgttagagcgtgcttgt

SEQ ID NO: 2246290 - DNA, 25 bp, Homo sapien
tgtagctctgcatttacccggaagc

SEQ ID NO: 2246291 - DNA, 25 bp, Homo sapien
tagcattgggcatcaccttaacccc

SEQ ID NO: 2246292 - DNA, 25 bp, Homo sapien
tgactccaacggattgcacaatagc

SEQ ID NO: 2246293 - DNA, 25 bp, Homo sapien
ttcagcttgataagtaacttgccac

SEQ ID NO: 2246294 - DNA, 25 bp, Homo sapien
tcctgccgtctttcagcttgataag

SEQ ID NO: 2246295 - DNA, 25 bp, Homo sapien
tttccatggtccagttgctgaggta

SEQ ID NO: 2246296 - DNA, 25 bp, Homo sapien
catggtccagttgctgaggtattcg

SEQ ID NO: 2246297 - DNA, 25 bp, Homo sapien
ctttctcggggaagagttgaatcac

SEQ ID NO: 2246298 - DNA, 25 bp, Homo sapien
tctcggggaagagttgaatcacttc

SEQ ID NO: 2246299 - DNA, 25 bp, Homo sapien
tgctggccccagattaagcttcaga

SEQ ID NO: 2246300 - DNA, 25 bp, Homo sapien
cagagtagttacagcaggaagcaaa

SEQ ID NO: 2246301 - DNA, 25 bp, Homo sapien
gatggtgaactctgtgcacttccac

SEQ ID NO: 2246302 - DNA, 25 bp, Homo sapien
cacttacaggacagtgggcatgagg

SEQ ID NO: 2246303 - DNA, 25 bp, Homo sapien
acctctgaataggaagcatcctcct

SEQ ID NO: 2246304 - DNA, 25 bp, Homo sapien
tgcaacctctgaataggaagcatcc

SEQ ID NO: 2246305 - DNA, 25 bp, Homo sapien
ctctgaataggaagcatcctcctga

SEQ ID NO: 2246306 - DNA, 25 bp, Homo sapien
caacctctgaataggaagcatcctc

SEQ ID NO: 2246307 - DNA, 25 bp, Homo sapien
gccatgaaacattccaactggagct

SEQ ID NO: 2246308 - DNA, 25 bp, Homo sapien
gcagcagttcaaagacacccataat

SEQ ID NO: 2246309 - DNA, 25 bp, Homo sapien
tcaagctgggaaccatcatgtgccc

SEQ ID NO: 2246310 - DNA, 25 bp, Homo sapien
gagctcacagatctctcaagctggg

SEQ ID NO: 2246311 - DNA, 25 bp, Homo sapien
caaggaagcccccaccgataatcgt

SEQ ID NO: 2246312 - DNA, 25 bp, Homo sapien
ttgacttcccgtgaaatcttctcca

SEQ ID NO: 2246313 - DNA, 25 bp, Homo sapien
ccaccgataatcgtaattgatttga

SEQ ID NO: 2246314 - DNA, 25 bp, Homo sapien
aagagcacaggccagttcgctacca

SEQ ID NO: 2246315 - DNA, 25 bp, Homo sapien
tctgctccagccctatcaatggcag

SEQ ID NO: 2246316 - DNA, 25 bp, Homo sapien
tccagccctatcaatggcagacaga

SEQ ID NO: 2246317 - DNA, 25 bp, Homo sapien
tttctgaaaagcgttgttctactct

SEQ ID NO: 2246318 - DNA, 25 bp, Homo sapien
gaaaagcgttgttctactcttcacc

SEQ ID NO: 2246319 - DNA, 25 bp, Homo sapien
gcaatcaagcacttttcataggtta

SEQ ID NO: 2246320 - DNA, 25 bp, Homo sapien
ctgttgcaatcaagcacttttcata

SEQ ID NO: 2246321 - DNA, 25 bp, Homo sapien
cacttttcataggttatttgagagc

SEQ ID NO: 2246322 - DNA, 25 bp, Homo sapien
caagcacttttcataggttatttga

SEQ ID NO: 2246323 - DNA, 25 bp, Homo sapien
tcctgagcagagacatagaaagaag

SEQ ID NO: 2246324 - DNA, 25 bp, Homo sapien
tctgaaaaccacagttcttttgaaa

SEQ ID NO: 2246325 - DNA, 25 bp, Homo sapien
gttcttttgaaagaggaggtcgcat

SEQ ID NO: 2246326 - DNA, 25 bp, Homo sapien
tccattccactgtttgaatcgcagt

SEQ ID NO: 2246327 - DNA, 25 bp, Homo sapien
aatcgcagtgtctttgtgacatttg

SEQ ID NO: 2246328 - DNA, 25 bp, Homo sapien
caggatcttcagatacaatcagtac

SEQ ID NO: 2246329 - DNA, 25 bp, Homo sapien
gcagctcaggatcttcagatacaat

SEQ ID NO: 2246330 - DNA, 25 bp, Homo sapien
gctcaggatcttcagatacaatcag

SEQ ID NO: 2246331 - DNA, 25 bp, Homo sapien
cagctcaggatcttcagatacaatc

SEQ ID NO: 2246332 - DNA, 25 bp, Homo sapien
caggaaaggaacatgacttggcgcc

SEQ ID NO: 2246333 - DNA, 25 bp, Homo sapien
atgacttggcgccttgtcttgagga

SEQ ID NO: 2246334 - DNA, 25 bp, Homo sapien
atcccgagcccggatggatctggct

SEQ ID NO: 2246335 - DNA, 25 bp, Homo sapien
gctgtgcctccaccaattagcagga

SEQ ID NO: 2246336 - DNA, 25 bp, Homo sapien
gcaacagaacagactggatgaatct

SEQ ID NO: 2246337 - DNA, 25 bp, Homo sapien
caacagaacagactggatgaatctt

SEQ ID NO: 2246338 - DNA, 25 bp, Homo sapien
tttcatcctctttcatagtcttgta

SEQ ID NO: 2246339 - DNA, 25 bp, Homo sapien
tcatcctctttcatagtcttgtagg

SEQ ID NO: 2246340 - DNA, 25 bp, Homo sapien
catcctctttcatagtcttgtaggc

SEQ ID NO: 2246341 - DNA, 25 bp, Homo sapien
cagataacgcggcctttttctgttt

SEQ ID NO: 2246342 - DNA, 25 bp, Homo sapien
cacctgtagatgctagtgatctaga

SEQ ID NO: 2246343 - DNA, 25 bp, Homo sapien
ctacaattaagaagtacactaggtt

SEQ ID NO: 2246344 - DNA, 25 bp, Homo sapien
gatcctaggtgatgagactgcacaa

SEQ ID NO: 2246345 - DNA, 25 bp, Homo sapien
gaagtacactaggttgctgccatct

SEQ ID NO: 2246346 - DNA, 25 bp, Homo sapien
cagctcctactgttgataagcccac

SEQ ID NO: 2246347 - DNA, 25 bp, Homo sapien
aacacagaattatcgattttgcccc

SEQ ID NO: 2246348 - DNA, 25 bp, Homo sapien
ccctgatgcaccagagctagccatt

SEQ ID NO: 2246349 - DNA, 25 bp, Homo sapien
gcccacaataaggactaacacagaa

SEQ ID NO: 2246350 - DNA, 25 bp, Homo sapien
agaggaacatgccatcgctggaaca

SEQ ID NO: 2246351 - DNA, 25 bp, Homo sapien
ggaacatgccatcgctggaacaagt

SEQ ID NO: 2246352 - DNA, 25 bp, Homo sapien
gaggaacatgccatcgctggaacaa

SEQ ID NO: 2246353 - DNA, 25 bp, Homo sapien
acatgccatcgctggaacaagttgc

SEQ ID NO: 2246354 - DNA, 25 bp, Homo sapien
tcctggggcatacaaaagcaggtga

SEQ ID NO: 2246355 - DNA, 25 bp, Homo sapien
aaaatgcaaaacccactcatggctc

SEQ ID NO: 2246356 - DNA, 25 bp, Homo sapien
aatgcaaaacccactcatggctcct

SEQ ID NO: 2246357 - DNA, 25 bp, Homo sapien
tggctcctggggcatacaaaagcag

SEQ ID NO: 2246358 - DNA, 25 bp, Homo sapien
atcgtgcccggataactgaacattt

SEQ ID NO: 2246359 - DNA, 25 bp, Homo sapien
cagtcagaccacacatacaatgcaa

SEQ ID NO: 2246360 - DNA, 25 bp, Homo sapien
gacgacacacagatgtttgctcaat

SEQ ID NO: 2246361 - DNA, 25 bp, Homo sapien
tggaaaagccaacttactccttgac

SEQ ID NO: 2246362 - DNA, 25 bp, Homo sapien
tactcgattcacatgagcaggcaac

SEQ ID NO: 2246363 - DNA, 25 bp, Homo sapien
gatggtacaagatgctaaggacaca

SEQ ID NO: 2246364 - DNA, 25 bp, Homo sapien
tagggttcagtcacgagaatttacc

SEQ ID NO: 2246365 - DNA, 25 bp, Homo sapien
cctaaagtcagggagtcggtgatca

SEQ ID NO: 2246366 - DNA, 25 bp, Homo sapien
ggacgcacacggtccgcaccaaggg

SEQ ID NO: 2246367 - DNA, 25 bp, Homo sapien
gcttctgcttcaaagcacccgccgc

SEQ ID NO: 2246368 - DNA, 25 bp, Homo sapien
ctctgcctcgggcttcggacgcaca

SEQ ID NO: 2246369 - DNA, 25 bp, Homo sapien
gggcttcggacgcacacggtccgca

SEQ ID NO: 2246370 - DNA, 25 bp, Homo sapien
attggacagagaagccggcctgcta

SEQ ID NO: 2246371 - DNA, 25 bp, Homo sapien
tcccagctccgggtgggcattggac

SEQ ID NO: 2246372 - DNA, 25 bp, Homo sapien
gaccgacgggtcaaacaccgtgagc

SEQ ID NO: 2246373 - DNA, 25 bp, Homo sapien
ttcggcgaccgctattcgggacctc

SEQ ID NO: 2246374 - DNA, 25 bp, Homo sapien
gcattgcgattggtccgcacggcga

SEQ ID NO: 2246375 - DNA, 25 bp, Homo sapien
gaacctgttcaaggagggactcgtg

SEQ ID NO: 2246376 - DNA, 25 bp, Homo sapien
gatttgcgcatgcactagctggccg

SEQ ID NO: 2246377 - DNA, 25 bp, Homo sapien
caaagacgctggctctaggtagccg

SEQ ID NO: 2246378 - DNA, 25 bp, Homo sapien
tgtgaattggcaaagggcaaagccc

SEQ ID NO: 2246379 - DNA, 25 bp, Homo sapien
gggcattaacttccaatacagaggg

SEQ ID NO: 2246380 - DNA, 25 bp, Homo sapien
taacagacaccttttattagggcaa

SEQ ID NO: 2246381 - DNA, 25 bp, Homo sapien
gggaacgatccagcaaactaggcat

SEQ ID NO: 2246382 - DNA, 25 bp, Homo sapien
ggtgccggcgcacgcacacacgggc

SEQ ID NO: 2246383 - DNA, 25 bp, Homo sapien
gcgcacgcacacacgggcggacaca

SEQ ID NO: 2246384 - DNA, 25 bp, Homo sapien
cggcgcacgcacacacgggcggaca

SEQ ID NO: 2246385 - DNA, 25 bp, Homo sapien
acggtgccggcgcacgcacacacgg

SEQ ID NO: 2246386 - DNA, 25 bp, Homo sapien
agggcacacagatgtgctgagagat

SEQ ID NO: 2246387 - DNA, 25 bp, Homo sapien
cacacagatgtgctgagagatccct

SEQ ID NO: 2246388 - DNA, 25 bp, Homo sapien
aagcaaggctcagcttcttctgcaa

SEQ ID NO: 2246389 - DNA, 25 bp, Homo sapien
gagagatccctggaaagcaaggctc

SEQ ID NO: 2246390 - DNA, 25 bp, Homo sapien
gactgcatgcctgctagaggaagat

SEQ ID NO: 2246391 - DNA, 25 bp, Homo sapien
taatgataggcccaagacagagcat

SEQ ID NO: 2246392 - DNA, 25 bp, Homo sapien
cagcaaatttcatgaatctgggaca

SEQ ID NO: 2246393 - DNA, 25 bp, Homo sapien
aaaaatgtgagtatcggtcgggtgc

SEQ ID NO: 2246394 - DNA, 25 bp, Homo sapien
taaacgtcagcctggatgttgaagc

SEQ ID NO: 2246395 - DNA, 25 bp, Homo sapien
acgtcagcctggatgttgaagcact

SEQ ID NO: 2246396 - DNA, 25 bp, Homo sapien
ctaaacgtcagcctggatgttgaag

SEQ ID NO: 2246397 - DNA, 25 bp, Homo sapien
tcagcctggatgttgaagcactgat

SEQ ID NO: 2246398 - DNA, 25 bp, Homo sapien
gaagttgtgctctatttggtgggcc

SEQ ID NO: 2246399 - DNA, 25 bp, Homo sapien
gatcaaaagccaaagctcccaatgg

SEQ ID NO: 2246400 - DNA, 25 bp, Homo sapien
gccacaaactagaggacgtctcaca

SEQ ID NO: 2246401 - DNA, 25 bp, Homo sapien
tcagtcaggtaggaagggactctcc

SEQ ID NO: 2246402 - DNA, 25 bp, Homo sapien
tgcaccaggttgcatgaactccatg

SEQ ID NO: 2246403 - DNA, 25 bp, Homo sapien
tctgaaggcaagtcaagtatagcag

SEQ ID NO: 2246404 - DNA, 25 bp, Homo sapien
caatgtagtggcatctgaaagctga

SEQ ID NO: 2246405 - DNA, 25 bp, Homo sapien
gcatttttggagagagccaactgga

SEQ ID NO: 2246406 - DNA, 25 bp, Homo sapien
agtgggttcagaagttgaggtactt

SEQ ID NO: 2246407 - DNA, 25 bp, Homo sapien
ccagtagtgggttcagaagttgagg

SEQ ID NO: 2246408 - DNA, 25 bp, Homo sapien
tcagaagttgaggtacttttggaaa

SEQ ID NO: 2246409 - DNA, 25 bp, Homo sapien
gtagtgggttcagaagttgaggtac

SEQ ID NO: 2246410 - DNA, 25 bp, Homo sapien
gtttagccatacgatctaagccgga

SEQ ID NO: 2246411 - DNA, 25 bp, Homo sapien
tagccatacgatctaagccggaaga

SEQ ID NO: 2246412 - DNA, 25 bp, Homo sapien
gccatacgatctaagccggaagaat

SEQ ID NO: 2246413 - DNA, 25 bp, Homo sapien
catacgatctaagccggaagaatca

SEQ ID NO: 2246414 - DNA, 25 bp, Homo sapien
tatgccagtctgagggttttagaca

SEQ ID NO: 2246415 - DNA, 25 bp, Homo sapien
gatctaaatcttatggcaacccaaa

SEQ ID NO: 2246416 - DNA, 25 bp, Homo sapien
taaccagcctatgtgtctcatgcag

SEQ ID NO: 2246417 - DNA, 25 bp, Homo sapien
taaatatgatgtgataccaccccac

SEQ ID NO: 2246418 - DNA, 25 bp, Homo sapien
caattttctattcagatgtgagatc

SEQ ID NO: 2246419 - DNA, 25 bp, Homo sapien
cctcagatctttcaaatcatacagt

SEQ ID NO: 2246420 - DNA, 25 bp, Homo sapien
ttctattcagatgtgagatccactc

SEQ ID NO: 2246421 - DNA, 25 bp, Homo sapien
tgcacccgacccatacacagaattt

SEQ ID NO: 2246422 - DNA, 25 bp, Homo sapien
tttacctggatggttgctatgagag

SEQ ID NO: 2246423 - DNA, 25 bp, Homo sapien
cgtttacctggatggttgctatgag

SEQ ID NO: 2246424 - DNA, 25 bp, Homo sapien
aaccgtttacctggatggttgctat

SEQ ID NO: 2246425 - DNA, 25 bp, Homo sapien
ccgtttacctggatggttgctatga

SEQ ID NO: 2246426 - DNA, 25 bp, Homo sapien
caagattagccaggattagcctagc

SEQ ID NO: 2246427 - DNA, 25 bp, Homo sapien
cactacttgagataaaggccattgc

SEQ ID NO: 2246428 - DNA, 25 bp, Homo sapien
tgtgttagacaaccaggcaagatta

SEQ ID NO: 2246429 - DNA, 25 bp, Homo sapien
tagcctagcacagtattactcaaag

SEQ ID NO: 2246430 - DNA, 25 bp, Homo sapien
aaactgcagtggatgtatatagaaa

SEQ ID NO: 2246431 - DNA, 25 bp, Homo sapien
tggaatgacattcaatgcacttgtg

SEQ ID NO: 2246432 - DNA, 25 bp, Homo sapien
tacagttagtattgtacttgcaaaa

SEQ ID NO: 2246433 - DNA, 25 bp, Homo sapien
tgcacttgtgaattccccgacgaca

SEQ ID NO: 2246434 - DNA, 25 bp, Homo sapien
ttttctgttgcgctgtcgcttttgc

SEQ ID NO: 2246435 - DNA, 25 bp, Homo sapien
tctgttgcgctgtcgcttttgcttg

SEQ ID NO: 2246436 - DNA, 25 bp, Homo sapien
gttgcgctgtcgcttttgcttgtaa

SEQ ID NO: 2246437 - DNA, 25 bp, Homo sapien
tgcgctgtcgcttttgcttgtaaga

SEQ ID NO: 2246438 - DNA, 25 bp, Homo sapien
tattttgagatgtcggaggtgtgac

SEQ ID NO: 2246439 - DNA, 25 bp, Homo sapien
cttacttgtcttagatctactggca

SEQ ID NO: 2246440 - DNA, 25 bp, Homo sapien
ggacttagctatacgtccccttggc

SEQ ID NO: 2246441 - DNA, 25 bp, Homo sapien
tgtagttgcatgaagcttacttgtc

SEQ ID NO: 2246442 - DNA, 25 bp, Homo sapien
cgcaaccgaaaggtgcagttggtaa

SEQ ID NO: 2246443 - DNA, 25 bp, Homo sapien
tggagcgcaaccgaaaggtgcagtt

SEQ ID NO: 2246444 - DNA, 25 bp, Homo sapien
agaagtgcctggagcgcaaccgaaa

SEQ ID NO: 2246445 - DNA, 25 bp, Homo sapien
gtgcagttggtaattttgactggag

SEQ ID NO: 2246446 - DNA, 25 bp, Homo sapien
tctccttgctggtcaaaaattgtag

SEQ ID NO: 2246447 - DNA, 25 bp, Homo sapien
acgatgctgcgccttatgttcagct

SEQ ID NO: 2246448 - DNA, 25 bp, Homo sapien
gctttataaatgtacgatgctgcgc

SEQ ID NO: 2246449 - DNA, 25 bp, Homo sapien
gcattttgggcaacgatgaactcct

SEQ ID NO: 2246450 - DNA, 25 bp, Homo sapien
gcttcatgtaatgattcatgtaggg

SEQ ID NO: 2246451 - DNA, 25 bp, Homo sapien
catgggctgctctaaaatgagcttc

SEQ ID NO: 2246452 - DNA, 25 bp, Homo sapien
aaaatgttgatgatctaaactggca

SEQ ID NO: 2246453 - DNA, 25 bp, Homo sapien
tttcatgggctgctctaaaatgagc

SEQ ID NO: 2246454 - DNA, 25 bp, Homo sapien
tcaccaggtttatgggtgtccttca

SEQ ID NO: 2246455 - DNA, 25 bp, Homo sapien
tggcaaacatatggcatttcaccag

SEQ ID NO: 2246456 - DNA, 25 bp, Homo sapien
aaatgataattcacagattttgcaa

SEQ ID NO: 2246457 - DNA, 25 bp, Homo sapien
gaatatgctctgtttcaaatgataa

SEQ ID NO: 2246458 - DNA, 25 bp, Homo sapien
tcaaagtcaacaatattcaggattc

SEQ ID NO: 2246459 - DNA, 25 bp, Homo sapien
gtgcaattgatcatagcattctata

SEQ ID NO: 2246460 - DNA, 25 bp, Homo sapien
tcacagttcggatgatcaaagtcaa

SEQ ID NO: 2246461 - DNA, 25 bp, Homo sapien
tcacacctggctttagaacacattt

SEQ ID NO: 2246462 - DNA, 25 bp, Homo sapien
ttcccagctttcattgttctgcttc

SEQ ID NO: 2246463 - DNA, 25 bp, Homo sapien
gagtgtgtgtactctcaatgtggca

SEQ ID NO: 2246464 - DNA, 25 bp, Homo sapien
tcaatgtggcactgcagttggaagg

SEQ ID NO: 2246465 - DNA, 25 bp, Homo sapien
gggatattgccggtaacagtgctgg

SEQ ID NO: 2246466 - DNA, 25 bp, Homo sapien
aacaatttgccagtaagagcaaaaa

SEQ ID NO: 2246467 - DNA, 25 bp, Homo sapien
cttcatcacatggacgttctgattt

SEQ ID NO: 2246468 - DNA, 25 bp, Homo sapien
aaactcattgactaacatgatcaac

SEQ ID NO: 2246469 - DNA, 25 bp, Homo sapien
tttttaagaactttcgagcaactga

SEQ ID NO: 2246470 - DNA, 25 bp, Homo sapien
ggttgtgtaagtctttggctctttc

SEQ ID NO: 2246471 - DNA, 25 bp, Homo sapien
cctggttggaactagactttgagca

SEQ ID NO: 2246472 - DNA, 25 bp, Homo sapien
ccattatgtataagcttgattatca

SEQ ID NO: 2246473 - DNA, 25 bp, Homo sapien
aacacagtaatatttaagtgaagcc

SEQ ID NO: 2246474 - DNA, 25 bp, Homo sapien
gaagcctggttggaactagactttg

SEQ ID NO: 2246475 - DNA, 25 bp, Homo sapien
tggacaagctcttaggtaatctgct

SEQ ID NO: 2246476 - DNA, 25 bp, Homo sapien
gctcttaggtaatctgctccagcat

SEQ ID NO: 2246477 - DNA, 25 bp, Homo sapien
tttggacaagctcttaggtaatctg

SEQ ID NO: 2246478 - DNA, 25 bp, Homo sapien
acaagctcttaggtaatctgctcca

SEQ ID NO: 2246479 - DNA, 25 bp, Homo sapien
gaacatcttcactggtctttggttt

SEQ ID NO: 2246480 - DNA, 25 bp, Homo sapien
ttttgacagcataacttgggaggat

SEQ ID NO: 2246481 - DNA, 25 bp, Homo sapien
tgaagtggagggatttatctgagga

SEQ ID NO: 2246482 - DNA, 25 bp, Homo sapien
ttgacagcataacttgggaggatgt

SEQ ID NO: 2246483 - DNA, 25 bp, Homo sapien
ttcaacacatatgaagtatttttca

SEQ ID NO: 2246484 - DNA, 25 bp, Homo sapien
aacacatatgaagtatttttcatac

SEQ ID NO: 2246485 - DNA, 25 bp, Homo sapien
tcaacacatatgaagtatttttcat

SEQ ID NO: 2246486 - DNA, 25 bp, Homo sapien
caacacatatgaagtatttttcata

SEQ ID NO: 2246487 - DNA, 25 bp, Homo sapien
gaattatccgatccaacttgtgaat

SEQ ID NO: 2246488 - DNA, 25 bp, Homo sapien
aaattgctggtatgtcttgggatgg

SEQ ID NO: 2246489 - DNA, 25 bp, Homo sapien
tgattcctgggtcgagtcaaacagt

SEQ ID NO: 2246490 - DNA, 25 bp, Homo sapien
cttctctaaaaattgctggtatgtc

SEQ ID NO: 2246491 - DNA, 25 bp, Homo sapien
gtgggtctctgcagcgttgacttgc

SEQ ID NO: 2246492 - DNA, 25 bp, Homo sapien
tctctgcagcgttgacttgcagtcc

SEQ ID NO: 2246493 - DNA, 25 bp, Homo sapien
aagatgaaatctaggcgaggcagcc

SEQ ID NO: 2246494 - DNA, 25 bp, Homo sapien
aggtttagacgcattctcaacagta

SEQ ID NO: 2246495 - DNA, 25 bp, Homo sapien
gtggctcactctttattccttttga

SEQ ID NO: 2246496 - DNA, 25 bp, Homo sapien
tggctcactctttattccttttgaa

SEQ ID NO: 2246497 - DNA, 25 bp, Homo sapien
acaaagatcagttcatcgtcatcct

SEQ ID NO: 2246498 - DNA, 25 bp, Homo sapien
atatctctccaacaaagatcagttc

SEQ ID NO: 2246499 - DNA, 25 bp, Homo sapien
ctaattttcaagagaagagaagcta

SEQ ID NO: 2246500 - DNA, 25 bp, Homo sapien
taattttcaagagaagagaagctaa

SEQ ID NO: 2246501 - DNA, 25 bp, Homo sapien
aattttcaagagaagagaagctaac

SEQ ID NO: 2246502 - DNA, 25 bp, Homo sapien
ggttgaaaaggtttgtcgtcatcca

SEQ ID NO: 2246503 - DNA, 25 bp, Homo sapien
ttggttgaaaaggtttgtcgtcatc

SEQ ID NO: 2246504 - DNA, 25 bp, Homo sapien
tggttgaaaaggtttgtcgtcatcc

SEQ ID NO: 2246505 - DNA, 25 bp, Homo sapien
gttgaaaaggtttgtcgtcatccat

SEQ ID NO: 2246506 - DNA, 25 bp, Homo sapien
tgtatcctgagttctcgtgcactga

SEQ ID NO: 2246507 - DNA, 25 bp, Homo sapien
tgccaagttctagggaaaatacaaa

SEQ ID NO: 2246508 - DNA, 25 bp, Homo sapien
cttttgtgctcagggtagtatgcca

SEQ ID NO: 2246509 - DNA, 25 bp, Homo sapien
gatatacagagctaattcagtctcc

SEQ ID NO: 2246510 - DNA, 25 bp, Homo sapien
tagttatctattgcactacaaggtg

SEQ ID NO: 2246511 - DNA, 25 bp, Homo sapien
gatgttgatccaagagtacgaagtt

SEQ ID NO: 2246512 - DNA, 25 bp, Homo sapien
gggaaaaatgctgtatgatctcaca

SEQ ID NO: 2246513 - DNA, 25 bp, Homo sapien
aggtgaccacagctaatactaataa

SEQ ID NO: 2246514 - DNA, 25 bp, Homo sapien
cctccttccgcgcggcacaggcggg

SEQ ID NO: 2246515 - DNA, 25 bp, Homo sapien
tgcctccttccgcgcggcacaggcg

SEQ ID NO: 2246516 - DNA, 25 bp, Homo sapien
ctgctgcctccttccgcgcggcaca

SEQ ID NO: 2246517 - DNA, 25 bp, Homo sapien
tgctgcctccttccgcgcggcacag

SEQ ID NO: 2246518 - DNA, 25 bp, Homo sapien
gaggagcgcgaaaaacctcaggcga

SEQ ID NO: 2246519 - DNA, 25 bp, Homo sapien
cgaaaaacctcaggcgacagcctca

SEQ ID NO: 2246520 - DNA, 25 bp, Homo sapien
gcaacagcgactcccccggagactt

SEQ ID NO: 2246521 - DNA, 25 bp, Homo sapien
atcggtctgactggggttcggataa

SEQ ID NO: 2246522 - DNA, 25 bp, Homo sapien
tcatcctcgcagacaaaggctctga

SEQ ID NO: 2246523 - DNA, 25 bp, Homo sapien
tgccactcatcctcgcagacaaagg

SEQ ID NO: 2246524 - DNA, 25 bp, Homo sapien
caaaggctctgatgccctggacttc

SEQ ID NO: 2246525 - DNA, 25 bp, Homo sapien
gctgtgctggaccactgtcccttct

SEQ ID NO: 2246526 - DNA, 25 bp, Homo sapien
cagaatgtttcacaaattatcgtgt

SEQ ID NO: 2246527 - DNA, 25 bp, Homo sapien
aatacagaatgtttcacaaattatc

SEQ ID NO: 2246528 - DNA, 25 bp, Homo sapien
aatgtttcacaaattatcgtgtcat

SEQ ID NO: 2246529 - DNA, 25 bp, Homo sapien
atacagaatgtttcacaaattatcg

SEQ ID NO: 2246530 - DNA, 25 bp, Homo sapien
gaattgccttgtcatctcagttgaa

SEQ ID NO: 2246531 - DNA, 25 bp, Homo sapien
caacgtgcctgacaaggttattgaa

SEQ ID NO: 2246532 - DNA, 25 bp, Homo sapien
tgtcaacgtgcctgacaaggttatt

SEQ ID NO: 2246533 - DNA, 25 bp, Homo sapien
tgaattgccttgtcatctcagttga

SEQ ID NO: 2246534 - DNA, 25 bp, Homo sapien
gaaaacggcctgctttccaaatgtg

SEQ ID NO: 2246535 - DNA, 25 bp, Homo sapien
ctgaattatatgtgagcccagccct

SEQ ID NO: 2246536 - DNA, 25 bp, Homo sapien
taaatgtaattggttagccccagac

SEQ ID NO: 2246537 - DNA, 25 bp, Homo sapien
tgctatatgtgttacagacctcggt

SEQ ID NO: 2246538 - DNA, 25 bp, Homo sapien
gtgactgcaaatacatcatttcccc

SEQ ID NO: 2246539 - DNA, 25 bp, Homo sapien
cgcttctccctcttccgtttgttgg

SEQ ID NO: 2246540 - DNA, 25 bp, Homo sapien
ctggagacctgtgactgcaaataca

SEQ ID NO: 2246541 - DNA, 25 bp, Homo sapien
gcttctccctcttccgtttgttggc

SEQ ID NO: 2246542 - DNA, 25 bp, Homo sapien
ctgctccacccccttcttcctccag

SEQ ID NO: 2246543 - DNA, 25 bp, Homo sapien
cactgctccacccccttcttcctcc

SEQ ID NO: 2246544 - DNA, 25 bp, Homo sapien
actgctccacccccttcttcctcca

SEQ ID NO: 2246545 - DNA, 25 bp, Homo sapien
tgctccacccccttcttcctccagt

SEQ ID NO: 2246546 - DNA, 25 bp, Homo sapien
gatcttcaagtagcggaagggctgc

SEQ ID NO: 2246547 - DNA, 25 bp, Homo sapien
cattcttgtggatcaacagcagcac

SEQ ID NO: 2246548 - DNA, 25 bp, Homo sapien
tgagaacagacacagtacggagagc

SEQ ID NO: 2246549 - DNA, 25 bp, Homo sapien
gaggtaagacactaaccacagcccg

SEQ ID NO: 2246550 - DNA, 25 bp, Homo sapien
ttagtagcaatgatgagggaggcca

SEQ ID NO: 2246551 - DNA, 25 bp, Homo sapien
ctagtgtgttagtagcaatgatgag

SEQ ID NO: 2246552 - DNA, 25 bp, Homo sapien
caggacagcaaggatcactccaaat

SEQ ID NO: 2246553 - DNA, 25 bp, Homo sapien
agcaaggatcactccaaatgagaaa

SEQ ID NO: 2246554 - DNA, 25 bp, Homo sapien
gtctcgaagtggcaggacttcactt

SEQ ID NO: 2246555 - DNA, 25 bp, Homo sapien
ctcgaagtggcaggacttcacttac

SEQ ID NO: 2246556 - DNA, 25 bp, Homo sapien
tctcgaagtggcaggacttcactta

SEQ ID NO: 2246557 - DNA, 25 bp, Homo sapien
agctgtgggttcagagctacagcac

SEQ ID NO: 2246558 - DNA, 25 bp, Homo sapien
gattctggccttcgctggcagtcca

SEQ ID NO: 2246559 - DNA, 25 bp, Homo sapien
agctgaaattctcatgggccagggg

SEQ ID NO: 2246560 - DNA, 25 bp, Homo sapien
tcagagctacagcacgattctggcc

SEQ ID NO: 2246561 - DNA, 25 bp, Homo sapien
catttgcttgggtacattagaacta

SEQ ID NO: 2246562 - DNA, 25 bp, Homo sapien
gcagctgcataagtcactcctgttt

SEQ ID NO: 2246563 - DNA, 25 bp, Homo sapien
cattttccaggaataggaacgtggg

SEQ ID NO: 2246564 - DNA, 25 bp, Homo sapien
gaggttagaccaaagggcaactgtg

SEQ ID NO: 2246565 - DNA, 25 bp, Homo sapien
ctcttgactccacggagtcaagtta

SEQ ID NO: 2246566 - DNA, 25 bp, Homo sapien
ctggacctaaggtgtgcttgggttt

SEQ ID NO: 2246567 - DNA, 25 bp, Homo sapien
tggacctaaggtgtgcttgggtttc

SEQ ID NO: 2246568 - DNA, 25 bp, Homo sapien
ctccacggagtcaagttagcccttt

SEQ ID NO: 2246569 - DNA, 25 bp, Homo sapien
gcgcgaacccgaggagatgaagtaa

SEQ ID NO: 2246570 - DNA, 25 bp, Homo sapien
attcctgagtgctgagcgcgaaccc

SEQ ID NO: 2246571 - DNA, 25 bp, Homo sapien
tgcgctgcctttcccgggcgctgat

SEQ ID NO: 2246572 - DNA, 25 bp, Homo sapien
gaagtaaggcgtcagcttccttttg

SEQ ID NO: 2246573 - DNA, 25 bp, Homo sapien
tggccgataaggtgtcctggcactc

SEQ ID NO: 2246574 - DNA, 25 bp, Homo sapien
tggcactccgagtacaaggacagcg

SEQ ID NO: 2246575 - DNA, 25 bp, Homo sapien
tgaatgaacgagaggtccagcttgg

SEQ ID NO: 2246576 - DNA, 25 bp, Homo sapien
cctttaactaaggtgaagctgatca

SEQ ID NO: 2246577 - DNA, 25 bp, Homo sapien
tgtctgcccgggaatccgtgttaca

SEQ ID NO: 2246578 - DNA, 25 bp, Homo sapien
gggaatccgtgttacatctcttttc

SEQ ID NO: 2246579 - DNA, 25 bp, Homo sapien
gcccgggaatccgtgttacatctct

SEQ ID NO: 2246580 - DNA, 25 bp, Homo sapien
tgctgtctgcccgggaatccgtgtt

SEQ ID NO: 2246581 - DNA, 25 bp, Homo sapien
tatttagagtcattgggagggctgc

SEQ ID NO: 2246582 - DNA, 25 bp, Homo sapien
catagaccccagttgaagatggaat

SEQ ID NO: 2246583 - DNA, 25 bp, Homo sapien
cattgtccctgtaccagagtatgta

SEQ ID NO: 2246584 - DNA, 25 bp, Homo sapien
cagttactaggtttggacagcttga

SEQ ID NO: 2246585 - DNA, 25 bp, Homo sapien
cacaaagagtctttatttgctcctt

SEQ ID NO: 2246586 - DNA, 25 bp, Homo sapien
tgtcacaaagagtctttatttgctc

SEQ ID NO: 2246587 - DNA, 25 bp, Homo sapien
cactgtcacaaagagtctttatttg

SEQ ID NO: 2246588 - DNA, 25 bp, Homo sapien
gtcacaaagagtctttatttgctcc

SEQ ID NO: 2246589 - DNA, 25 bp, Homo sapien
ttaattagtctagccaagaacaagg

SEQ ID NO: 2246590 - DNA, 25 bp, Homo sapien
gaacaaggccaatattttatcgaaa

SEQ ID NO: 2246591 - DNA, 25 bp, Homo sapien
tatcgaaaatcatggcattaaacac

SEQ ID NO: 2246592 - DNA, 25 bp, Homo sapien
actcaggctttgataagttttagca

SEQ ID NO: 2246593 - DNA, 25 bp, Homo sapien
cttcatcatacacggaatcagatac

SEQ ID NO: 2246594 - DNA, 25 bp, Homo sapien
gcaataaactctataacaatgttac

SEQ ID NO: 2246595 - DNA, 25 bp, Homo sapien
gatccatatatttctacgacttcat

SEQ ID NO: 2246596 - DNA, 25 bp, Homo sapien
ttttggctaaagtagcaataaactc

SEQ ID NO: 2246597 - DNA, 25 bp, Homo sapien
cacagaagactgtggtagggacagt

SEQ ID NO: 2246598 - DNA, 25 bp, Homo sapien
taaaaccagctattctcccaaggaa

SEQ ID NO: 2246599 - DNA, 25 bp, Homo sapien
gaatcaacgaagttctcaattgccc

SEQ ID NO: 2246600 - DNA, 25 bp, Homo sapien
tataacgtcgtccagaaatgtagca

SEQ ID NO: 2246601 - DNA, 25 bp, Homo sapien
caaatctaatctcacgttcagaaat

SEQ ID NO: 2246602 - DNA, 25 bp, Homo sapien
aatctaatctcacgttcagaaattt

SEQ ID NO: 2246603 - DNA, 25 bp, Homo sapien
cagggacaaatctaatctcacgttc

SEQ ID NO: 2246604 - DNA, 25 bp, Homo sapien
aaatctaatctcacgttcagaaatt

SEQ ID NO: 2246605 - DNA, 25 bp, Homo sapien
agtccagtttcagtctcagataaag

SEQ ID NO: 2246606 - DNA, 25 bp, Homo sapien
aaagggaatatacatgctggaagca

SEQ ID NO: 2246607 - DNA, 25 bp, Homo sapien
gcatcaacaaactcataatttggca

SEQ ID NO: 2246608 - DNA, 25 bp, Homo sapien
aactcataatttggcagcacctctc

SEQ ID NO: 2246609 - DNA, 25 bp, Homo sapien
caagagatggctatcatcattgatg

SEQ ID NO: 2246610 - DNA, 25 bp, Homo sapien
cttggagagtggagtaagaagacat

SEQ ID NO: 2246611 - DNA, 25 bp, Homo sapien
gagtacatttctgatgatagtctca

SEQ ID NO: 2246612 - DNA, 25 bp, Homo sapien
gaagcaaaacagagatgcatgaagg

SEQ ID NO: 2246613 - DNA, 25 bp, Homo sapien
agatagctgaattcacgatgaagga

SEQ ID NO: 2246614 - DNA, 25 bp, Homo sapien
tgaattcacgatgaaggacaattct

SEQ ID NO: 2246615 - DNA, 25 bp, Homo sapien
gctgaattcacgatgaaggacaatt

SEQ ID NO: 2246616 - DNA, 25 bp, Homo sapien
tagctgaattcacgatgaaggacaa

SEQ ID NO: 2246617 - DNA, 25 bp, Homo sapien
aaatggcatcaaccatagcctgaac

SEQ ID NO: 2246618 - DNA, 25 bp, Homo sapien
cttttgtaagagactcgtatagatt

SEQ ID NO: 2246619 - DNA, 25 bp, Homo sapien
gcatattgcatgtttagaaattatt

SEQ ID NO: 2246620 - DNA, 25 bp, Homo sapien
cgtatagatttgaatgagaaatatc

SEQ ID NO: 2246621 - DNA, 25 bp, Homo sapien
ggataattttagctaccctctcagc

SEQ ID NO: 2246622 - DNA, 25 bp, Homo sapien
aaaaggcagctttggtatgacatct

SEQ ID NO: 2246623 - DNA, 25 bp, Homo sapien
tatttaccacatcagaaattttgac

SEQ ID NO: 2246624 - DNA, 25 bp, Homo sapien
tatcaggtagttgttcctgttcata

SEQ ID NO: 2246625 - DNA, 25 bp, Homo sapien
tactaatggcactaaagatattctt

SEQ ID NO: 2246626 - DNA, 25 bp, Homo sapien
acacaaatagctgccacaattaaat

SEQ ID NO: 2246627 - DNA, 25 bp, Homo sapien
tgttgttaaagtggcataggaagct

SEQ ID NO: 2246628 - DNA, 25 bp, Homo sapien
ttcgtagatttactaatggcactaa

SEQ ID NO: 2246629 - DNA, 25 bp, Homo sapien
tcttgaaatttgtgaccgtagatgt

SEQ ID NO: 2246630 - DNA, 25 bp, Homo sapien
tgaacctggaagaccataactcagc

SEQ ID NO: 2246631 - DNA, 25 bp, Homo sapien
gacatggtgtgctctaatgctgatt

SEQ ID NO: 2246632 - DNA, 25 bp, Homo sapien
cagagacaccggatatctgagatag

SEQ ID NO: 2246633 - DNA, 25 bp, Homo sapien
tactttcattaatgggtgtggctga

SEQ ID NO: 2246634 - DNA, 25 bp, Homo sapien
tctacaatatgatggtttaagctct

SEQ ID NO: 2246635 - DNA, 25 bp, Homo sapien
gcctttccattgcaccagtggtttt

SEQ ID NO: 2246636 - DNA, 25 bp, Homo sapien
gtgatttgtagaggatcatccttgc

SEQ ID NO: 2246637 - DNA, 25 bp, Homo sapien
gcagaatatctgacatatgaaggta

SEQ ID NO: 2246638 - DNA, 25 bp, Homo sapien
tgactcatagaaacgagtacactgc

SEQ ID NO: 2246639 - DNA, 25 bp, Homo sapien
gtacactgctctataaaagttctga

SEQ ID NO: 2246640 - DNA, 25 bp, Homo sapien
tgtaagcgttttcatttccttgagg

SEQ ID NO: 2246641 - DNA, 25 bp, Homo sapien
cagcccaattaacagtgtaagcgtt

SEQ ID NO: 2246642 - DNA, 25 bp, Homo sapien
ttccagaatattacgtactccatca

SEQ ID NO: 2246643 - DNA, 25 bp, Homo sapien
tgatcagaaggtaaagcttttacat

SEQ ID NO: 2246644 - DNA, 25 bp, Homo sapien
tgtgtcaccattcgaaattcattca

SEQ ID NO: 2246645 - DNA, 25 bp, Homo sapien
cactttgctgtcacaagttgatcag

SEQ ID NO: 2246646 - DNA, 25 bp, Homo sapien
tcacaacttttcatttatttggata

SEQ ID NO: 2246647 - DNA, 25 bp, Homo sapien
cacaacttttcatttatttggatac

SEQ ID NO: 2246648 - DNA, 25 bp, Homo sapien
gagattatatcagagcatctgctca

SEQ ID NO: 2246649 - DNA, 25 bp, Homo sapien
tattggtagttgtctcttgactgcc

SEQ ID NO: 2246650 - DNA, 25 bp, Homo sapien
tgtgaaactgctatccacctcagca

SEQ ID NO: 2246651 - DNA, 25 bp, Homo sapien
gcaaatgataagctgtcagggtcaa

SEQ ID NO: 2246652 - DNA, 25 bp, Homo sapien
tattgactgaatggccatgggacac

SEQ ID NO: 2246653 - DNA, 25 bp, Homo sapien
tgatgttttgcatcatggctaaaaa

SEQ ID NO: 2246654 - DNA, 25 bp, Homo sapien
gggacacagaagatatgtctttgag

SEQ ID NO: 2246655 - DNA, 25 bp, Homo sapien
gtctttgagcacttctgctaaaata

SEQ ID NO: 2246656 - DNA, 25 bp, Homo sapien
gaaccagagagaactgggacaaaat

SEQ ID NO: 2246657 - DNA, 25 bp, Homo sapien
tatagtgtcgattgcttcctctgta

SEQ ID NO: 2246658 - DNA, 25 bp, Homo sapien
caatcaaattggctgtatcaggttc

SEQ ID NO: 2246659 - DNA, 25 bp, Homo sapien
tatcaggttcagtgctagattttct

SEQ ID NO: 2246660 - DNA, 25 bp, Homo sapien
catgtgaattcaagatgagcaagtt

SEQ ID NO: 2246661 - DNA, 25 bp, Homo sapien
tgctgataagcaggttcccatgtga

SEQ ID NO: 2246662 - DNA, 25 bp, Homo sapien
gctgataagcaggttcccatgtgaa

SEQ ID NO: 2246663 - DNA, 25 bp, Homo sapien
ttcccatgtgaattcaagatgagca

SEQ ID NO: 2246664 - DNA, 25 bp, Homo sapien
tcatgtaaaccatatcctctgcaat

SEQ ID NO: 2246665 - DNA, 25 bp, Homo sapien
ttacaatcatgtaaaccatatcctc

SEQ ID NO: 2246666 - DNA, 25 bp, Homo sapien
cttagaaaatgcaagagtcatcagc

SEQ ID NO: 2246667 - DNA, 25 bp, Homo sapien
atgcaagagtcatcagcttttttac

SEQ ID NO: 2246668 - DNA, 25 bp, Homo sapien
ttctttgtcagtttggtcaacccaa

SEQ ID NO: 2246669 - DNA, 25 bp, Homo sapien
tcaacccaaacttcagctgtaacag

SEQ ID NO: 2246670 - DNA, 25 bp, Homo sapien
gaagagatatcaacattgcagagca

SEQ ID NO: 2246671 - DNA, 25 bp, Homo sapien
gagttaaatcagacaacacttctag

SEQ ID NO: 2246672 - DNA, 25 bp, Homo sapien
gaatcgtggtcttgagtggtcacaa

SEQ ID NO: 2246673 - DNA, 25 bp, Homo sapien
aatgtgtaagtggtatgagcatccc

SEQ ID NO: 2246674 - DNA, 25 bp, Homo sapien
tcacaagacaagtagatctccacac

SEQ ID NO: 2246675 - DNA, 25 bp, Homo sapien
tacagacagaatcgtggtcttgagt

SEQ ID NO: 2246676 - DNA, 25 bp, Homo sapien
tgggcctttttacacttaaatcagc

SEQ ID NO: 2246677 - DNA, 25 bp, Homo sapien
ctggttcatagctgaagcttggttt

SEQ ID NO: 2246678 - DNA, 25 bp, Homo sapien
tggttcatagctgaagcttggtttc

SEQ ID NO: 2246679 - DNA, 25 bp, Homo sapien
ttacacttaaatcagcatgtctcac

SEQ ID NO: 2246680 - DNA, 25 bp, Homo sapien
ttgttctatctacatctggtacaaa

SEQ ID NO: 2246681 - DNA, 25 bp, Homo sapien
tctacatctggtacaaaagaaatgt

SEQ ID NO: 2246682 - DNA, 25 bp, Homo sapien
tctatctacatctggtacaaaagaa

SEQ ID NO: 2246683 - DNA, 25 bp, Homo sapien
gttctatctacatctggtacaaaag

SEQ ID NO: 2246684 - DNA, 25 bp, Homo sapien
tgtctcagaatatctggtaaagatt

SEQ ID NO: 2246685 - DNA, 25 bp, Homo sapien
cttgtctcagaatatctggtaaaga

SEQ ID NO: 2246686 - DNA, 25 bp, Homo sapien
ctcttgtctcagaatatctggtaaa

SEQ ID NO: 2246687 - DNA, 25 bp, Homo sapien
tctcagaatatctggtaaagattgt

SEQ ID NO: 2246688 - DNA, 25 bp, Homo sapien
tctgcctatcagtaagggcagccat

SEQ ID NO: 2246689 - DNA, 25 bp, Homo sapien
ttcatttgaaggacatgacagttta

SEQ ID NO: 2246690 - DNA, 25 bp, Homo sapien
ccttcatttgaaggacatgacagtt

SEQ ID NO: 2246691 - DNA, 25 bp, Homo sapien
tcatttgaaggacatgacagtttag

SEQ ID NO: 2246692 - DNA, 25 bp, Homo sapien
ctccttcatttgaaggacatgacag

SEQ ID NO: 2246693 - DNA, 25 bp, Homo sapien
acattccatcaaggatgtaattgct

SEQ ID NO: 2246694 - DNA, 25 bp, Homo sapien
ttttgatagcaatcttggtaccatt

SEQ ID NO: 2246695 - DNA, 25 bp, Homo sapien
ctgtcgtgttactctatacattcca

SEQ ID NO: 2246696 - DNA, 25 bp, Homo sapien
caatcttggtaccattttgagaatg

SEQ ID NO: 2246697 - DNA, 25 bp, Homo sapien
gaagcagtaagatggggaagcttcc

SEQ ID NO: 2246698 - DNA, 25 bp, Homo sapien
ccattttgggggctccacaaaggca

SEQ ID NO: 2246699 - DNA, 25 bp, Homo sapien
acatggacgccatctttggaaaaga

SEQ ID NO: 2246700 - DNA, 25 bp, Homo sapien
gatggggaagcttcctgaaagtctg

SEQ ID NO: 2246701 - DNA, 25 bp, Homo sapien
atggctgcggccgagttggcggaca

SEQ ID NO: 2246702 - DNA, 25 bp, Homo sapien
ggcggaagatggctgcggccgagtt

SEQ ID NO: 2246703 - DNA, 25 bp, Homo sapien
ccgagttggcggacactcagctgat

SEQ ID NO: 2246704 - DNA, 25 bp, Homo sapien
ggcggcggaagatggctgcggccga

SEQ ID NO: 2246705 - DNA, 25 bp, Homo sapien
tcctcgctgattagcttcctgcctg

SEQ ID NO: 2246706 - DNA, 25 bp, Homo sapien
gagatttgacctgaaaaacaatgaa

SEQ ID NO: 2246707 - DNA, 25 bp, Homo sapien
tgcctgctgtcagtgctggacgaag

SEQ ID NO: 2246708 - DNA, 25 bp, Homo sapien
cacatgaacacacttccgattttct

SEQ ID NO: 2246709 - DNA, 25 bp, Homo sapien
tttctctagaagtgcttgtttctaa

SEQ ID NO: 2246710 - DNA, 25 bp, Homo sapien
gtttttctctagaagtgcttgtttc

SEQ ID NO: 2246711 - DNA, 25 bp, Homo sapien
ttgtttttctctagaagtgcttgtt

SEQ ID NO: 2246712 - DNA, 25 bp, Homo sapien
tctctagaagtgcttgtttctaaaa

SEQ ID NO: 2246713 - DNA, 25 bp, Homo sapien
tctatttacgacttaatttttgtca

SEQ ID NO: 2246714 - DNA, 25 bp, Homo sapien
tttttgtcagacacaacaggacttt

SEQ ID NO: 2246715 - DNA, 25 bp, Homo sapien
cttccagccagtttgtcctcaggtt

SEQ ID NO: 2246716 - DNA, 25 bp, Homo sapien
cttgcttctctatttacgacttaat

SEQ ID NO: 2246717 - DNA, 25 bp, Homo sapien
agatttcttcttatgtggtcctgta

SEQ ID NO: 2246718 - DNA, 25 bp, Homo sapien
caagatttcttcttatgtggtcctg

SEQ ID NO: 2246719 - DNA, 25 bp, Homo sapien
gagatcaagatttcttcttatgtgg

SEQ ID NO: 2246720 - DNA, 25 bp, Homo sapien
tcttcttatgtggtcctgtattggg

SEQ ID NO: 2246721 - DNA, 25 bp, Homo sapien
tgaactgagagcatcccactgcact

SEQ ID NO: 2246722 - DNA, 25 bp, Homo sapien
ctgagctcgggaagttgatgctgca

SEQ ID NO: 2246723 - DNA, 25 bp, Homo sapien
tgctgcagtgaactgagagcatccc

SEQ ID NO: 2246724 - DNA, 25 bp, Homo sapien
gcagtgaactgagagcatcccactg

SEQ ID NO: 2246725 - DNA, 25 bp, Homo sapien
aaactagtcacatactgcctgtatt

SEQ ID NO: 2246726 - DNA, 25 bp, Homo sapien
actagtcacatactgcctgtattta

SEQ ID NO: 2246727 - DNA, 25 bp, Homo sapien
taaactagtcacatactgcctgtat

SEQ ID NO: 2246728 - DNA, 25 bp, Homo sapien
tagtcacatactgcctgtatttact

SEQ ID NO: 2246729 - DNA, 25 bp, Homo sapien
gatatgctctgacctctggaatggg

SEQ ID NO: 2246730 - DNA, 25 bp, Homo sapien
gacacagatccaaaagatgatatgc

SEQ ID NO: 2246731 - DNA, 25 bp, Homo sapien
attatcgcttcctgggataacaggc

SEQ ID NO: 2246732 - DNA, 25 bp, Homo sapien
gcagcttgaccccaagacacagatc

SEQ ID NO: 2246733 - DNA, 25 bp, Homo sapien
ggccgccttagtggcggcggcttcg

SEQ ID NO: 2246734 - DNA, 25 bp, Homo sapien
tcattcacacccttcacgctttagg

SEQ ID NO: 2246735 - DNA, 25 bp, Homo sapien
cttatagcagttgccgaggtacagc

SEQ ID NO: 2246736 - DNA, 25 bp, Homo sapien
ctttaggtcctgatcaggtgtgggc

SEQ ID NO: 2246737 - DNA, 25 bp, Homo sapien
gggtagcaggcggtcctcgtttctc

SEQ ID NO: 2246738 - DNA, 25 bp, Homo sapien
ctagatgtcttaaacaagagtgggc

SEQ ID NO: 2246739 - DNA, 25 bp, Homo sapien
cttggcttgcaattgcataacccca

SEQ ID NO: 2246740 - DNA, 25 bp, Homo sapien
ggtttgccagcaatctttggtattc

SEQ ID NO: 2246741 - DNA, 25 bp, Homo sapien
tcagatggaattcttctggtgtgtc

SEQ ID NO: 2246742 - DNA, 25 bp, Homo sapien
tgggtaaagtttgggccatggtcca

SEQ ID NO: 2246743 - DNA, 25 bp, Homo sapien
cattccagcatcaacgttatgttca

SEQ ID NO: 2246744 - DNA, 25 bp, Homo sapien
tcatctaattcagggatgggtaaag

SEQ ID NO: 2246745 - DNA, 25 bp, Homo sapien
aagtttgggccatggtccatcctga

SEQ ID NO: 2246746 - DNA, 25 bp, Homo sapien
tgccgcggctctatcctctggtact

SEQ ID NO: 2246747 - DNA, 25 bp, Homo sapien
cctcaggactgtgccgcggctctat

SEQ ID NO: 2246748 - DNA, 25 bp, Homo sapien
actgtgccgcggctctatcctctgg

SEQ ID NO: 2246749 - DNA, 25 bp, Homo sapien
tgtgccgcggctctatcctctggta

SEQ ID NO: 2246750 - DNA, 25 bp, Homo sapien
gggctgccaaaataaactaccacaa

SEQ ID NO: 2246751 - DNA, 25 bp, Homo sapien
caaactgggtgcttaaaacaataga

SEQ ID NO: 2246752 - DNA, 25 bp, Homo sapien
tcaaggtgttgatagtgtggagtcc

SEQ ID NO: 2246753 - DNA, 25 bp, Homo sapien
cccaataccaaaatctctattagtt

SEQ ID NO: 2246754 - DNA, 25 bp, Homo sapien
tacccaatgcttggaatgtgagcag

SEQ ID NO: 2246755 - DNA, 25 bp, Homo sapien
gaatgtggtggccaactgagcagct

SEQ ID NO: 2246756 - DNA, 25 bp, Homo sapien
taaagttcagaagtcgagggcacat

SEQ ID NO: 2246757 - DNA, 25 bp, Homo sapien
gaacaatgcagccatatgccggtcc

SEQ ID NO: 2246758 - DNA, 25 bp, Homo sapien
caaatttaaattgtgagatacattt

SEQ ID NO: 2246759 - DNA, 25 bp, Homo sapien
tagtgtaacttctacttggtgtttg

SEQ ID NO: 2246760 - DNA, 25 bp, Homo sapien
cttgtagtgtaacttctacttggtg

SEQ ID NO: 2246761 - DNA, 25 bp, Homo sapien
tccttgtagtgtaacttctacttgg

SEQ ID NO: 2246762 - DNA, 25 bp, Homo sapien
tagtactggtggcatatggtgttcc

SEQ ID NO: 2246763 - DNA, 25 bp, Homo sapien
tcttacccaacagaggagtcaaaag

SEQ ID NO: 2246764 - DNA, 25 bp, Homo sapien
catgctcttttaggtgttgctctcg

SEQ ID NO: 2246765 - DNA, 25 bp, Homo sapien
gttgctctcgcataccttgtttagt

SEQ ID NO: 2246766 - DNA, 25 bp, Homo sapien
aagctgccacttcaaccgttggctc

SEQ ID NO: 2246767 - DNA, 25 bp, Homo sapien
agttgaaagcagaacacaggccgtc

SEQ ID NO: 2246768 - DNA, 25 bp, Homo sapien
acaggccgtccattgtgctagcaaa

SEQ ID NO: 2246769 - DNA, 25 bp, Homo sapien
tccagtttctagattcataggagtt

SEQ ID NO: 2246770 - DNA, 25 bp, Homo sapien
cttgagtgggacctgggccttgact

SEQ ID NO: 2246771 - DNA, 25 bp, Homo sapien
tgagtgggacctgggccttgacttc

SEQ ID NO: 2246772 - DNA, 25 bp, Homo sapien
gggacctgggccttgacttctctgc

SEQ ID NO: 2246773 - DNA, 25 bp, Homo sapien
gtgggacctgggccttgacttctct

SEQ ID NO: 2246774 - DNA, 25 bp, Homo sapien
tctctgggaaatttgacctggcagt

SEQ ID NO: 2246775 - DNA, 25 bp, Homo sapien
ttctctgggaaatttgacctggcag

SEQ ID NO: 2246776 - DNA, 25 bp, Homo sapien
gaactattccctgaggtcgggcact

SEQ ID NO: 2246777 - DNA, 25 bp, Homo sapien
tgggcaaagtgtgtagctgacatct

SEQ ID NO: 2246778 - DNA, 25 bp, Homo sapien
gctgttggaagctttgtctgggcaa

SEQ ID NO: 2246779 - DNA, 25 bp, Homo sapien
cagtgcgcagtgtcgtgttttcaaa

SEQ ID NO: 2246780 - DNA, 25 bp, Homo sapien
tggactgtgccgaataagagtaggc

SEQ ID NO: 2246781 - DNA, 25 bp, Homo sapien
gccgaataagagtaggcgaaggcat

SEQ ID NO: 2246782 - DNA, 25 bp, Homo sapien
agtatatggactgtgccgaataaga

SEQ ID NO: 2246783 - DNA, 25 bp, Homo sapien
gactgtgccgaataagagtaggcga

SEQ ID NO: 2246784 - DNA, 25 bp, Homo sapien
cgctgccgagttcaaagagcctgga

SEQ ID NO: 2246785 - DNA, 25 bp, Homo sapien
tgtagagcatgcataaggccgctgc

SEQ ID NO: 2246786 - DNA, 25 bp, Homo sapien
caagttaggagcacaacagctaggt

SEQ ID NO: 2246787 - DNA, 25 bp, Homo sapien
gaagaggccaaactgtaagattcat

SEQ ID NO: 2246788 - DNA, 25 bp, Homo sapien
agttaacaatccctctctaaacata

SEQ ID NO: 2246789 - DNA, 25 bp, Homo sapien
attctagttaacaatccctctctaa

SEQ ID NO: 2246790 - DNA, 25 bp, Homo sapien
aacaatccctctctaaacatacaca

SEQ ID NO: 2246791 - DNA, 25 bp, Homo sapien
tctagttaacaatccctctctaaac

SEQ ID NO: 2246792 - DNA, 25 bp, Homo sapien
aagaagcgccctaagtatttcagag

SEQ ID NO: 2246793 - DNA, 25 bp, Homo sapien
caggcttgagtacagaatctggtga

SEQ ID NO: 2246794 - DNA, 25 bp, Homo sapien
gagtgagctagttttccagcgccag

SEQ ID NO: 2246795 - DNA, 25 bp, Homo sapien
tgagttccatcaggtttaacagctg

SEQ ID NO: 2246796 - DNA, 25 bp, Homo sapien
ggtactttaatatactgccatgtgt

SEQ ID NO: 2246797 - DNA, 25 bp, Homo sapien
cagaacggtgagaggtttgttaaca

SEQ ID NO: 2246798 - DNA, 25 bp, Homo sapien
aaagtccacgcaggtactttaatat

SEQ ID NO: 2246799 - DNA, 25 bp, Homo sapien
tccagaacggtgagaggtttgttaa

SEQ ID NO: 2246800 - DNA, 25 bp, Homo sapien
ttttgttacacgacactagcctcat

SEQ ID NO: 2246801 - DNA, 25 bp, Homo sapien
atagttttcccaggagcgtccattt

SEQ ID NO: 2246802 - DNA, 25 bp, Homo sapien
ttcccaggagcgtccattttgttac

SEQ ID NO: 2246803 - DNA, 25 bp, Homo sapien
tccattttgttacacgacactagcc

SEQ ID NO: 2246804 - DNA, 25 bp, Homo sapien
tatattgaagaaacgctaactactg

SEQ ID NO: 2246805 - DNA, 25 bp, Homo sapien
gatgttgcagttttgagtccaaagg

SEQ ID NO: 2246806 - DNA, 25 bp, Homo sapien
gaagacatttaacaagcaacttggt

SEQ ID NO: 2246807 - DNA, 25 bp, Homo sapien
tccaaaggcagtctcgaagcagaat

SEQ ID NO: 2246808 - DNA, 25 bp, Homo sapien
taggtattccaagagcccgagactg

SEQ ID NO: 2246809 - DNA, 25 bp, Homo sapien
tgtaaaattaacctgagcttcctgc

SEQ ID NO: 2246810 - DNA, 25 bp, Homo sapien
cacgaatgggctgctgtggaaccct

SEQ ID NO: 2246811 - DNA, 25 bp, Homo sapien
gaaccctgtttccagttgtcaagac

SEQ ID NO: 2246812 - DNA, 25 bp, Homo sapien
tttgccgatgggcactaccaaggtg

SEQ ID NO: 2246813 - DNA, 25 bp, Homo sapien
tctggcaattcgcactccaggtgga

SEQ ID NO: 2246814 - DNA, 25 bp, Homo sapien
tgctgccattgcgatttgccgatgg

SEQ ID NO: 2246815 - DNA, 25 bp, Homo sapien
accaaggtgtctctggcaattcgca

SEQ ID NO: 2246816 - DNA, 25 bp, Homo sapien
ggcagttacacagaggacttagtgc

SEQ ID NO: 2246817 - DNA, 25 bp, Homo sapien
gcagtactcggtttgcaattcaaca

SEQ ID NO: 2246818 - DNA, 25 bp, Homo sapien
tcttcaggatcccaagttgttaggc

SEQ ID NO: 2246819 - DNA, 25 bp, Homo sapien
taaaaggtgaacctggtcaggcacc

SEQ ID NO: 2246820 - DNA, 25 bp, Homo sapien
ttaggtcagcttcaagccctcgaag

SEQ ID NO: 2246821 - DNA, 25 bp, Homo sapien
gacactccacatcgctggtgcagat

SEQ ID NO: 2246822 - DNA, 25 bp, Homo sapien
ttcctgcttgaaggtatgctggagt

SEQ ID NO: 2246823 - DNA, 25 bp, Homo sapien
agtctacccatgagacactccacat

SEQ ID NO: 2246824 - DNA, 25 bp, Homo sapien
aacagatgtattcaatgcttgctcc

SEQ ID NO: 2246825 - DNA, 25 bp, Homo sapien
gacggtgcaagtaggaacagatgta

SEQ ID NO: 2246826 - DNA, 25 bp, Homo sapien
cttattatcaagacggtgcaagtag

SEQ ID NO: 2246827 - DNA, 25 bp, Homo sapien
gcttgctccaaatgggtgaacatga

SEQ ID NO: 2246828 - DNA, 25 bp, Homo sapien
aaagccctcctctcctccattgtac

SEQ ID NO: 2246829 - DNA, 25 bp, Homo sapien
gtaaagccctcctctcctccattgt

SEQ ID NO: 2246830 - DNA, 25 bp, Homo sapien
aggtaaagccctcctctcctccatt

SEQ ID NO: 2246831 - DNA, 25 bp, Homo sapien
ttaggtaaagccctcctctcctcca

SEQ ID NO: 2246832 - DNA, 25 bp, Homo sapien
ccaggcattgtacgtggcatgtgtg

SEQ ID NO: 2246833 - DNA, 25 bp, Homo sapien
ggcatgtgtgcattagcttccttac

SEQ ID NO: 2246834 - DNA, 25 bp, Homo sapien
tggcatgtgtgcattagcttcctta

SEQ ID NO: 2246835 - DNA, 25 bp, Homo sapien
aggcattgtacgtggcatgtgtgca

SEQ ID NO: 2246836 - DNA, 25 bp, Homo sapien
cactagcagtgcttcacgttcagat

SEQ ID NO: 2246837 - DNA, 25 bp, Homo sapien
cttctcaagagggtattcgctatcc

SEQ ID NO: 2246838 - DNA, 25 bp, Homo sapien
tatcctggtttgaggcacacagcct

SEQ ID NO: 2246839 - DNA, 25 bp, Homo sapien
gactgctgttcatggtcttctcaag

SEQ ID NO: 2246840 - DNA, 25 bp, Homo sapien
tgagttggttttatgaagtggaaga

SEQ ID NO: 2246841 - DNA, 25 bp, Homo sapien
tctctgggattatgcttgtttcttt

SEQ ID NO: 2246842 - DNA, 25 bp, Homo sapien
ggaagaattaaaagcacgttgcaaa

SEQ ID NO: 2246843 - DNA, 25 bp, Homo sapien
tttaatagtgcccacaaaactggaa

SEQ ID NO: 2246844 - DNA, 25 bp, Homo sapien
gtattcctcttggactttgagtaga

SEQ ID NO: 2246845 - DNA, 25 bp, Homo sapien
ccacctgtaacttgtcatctttgag

SEQ ID NO: 2246846 - DNA, 25 bp, Homo sapien
cctgtaacttgtcatctttgagttt

SEQ ID NO: 2246847 - DNA, 25 bp, Homo sapien
caacattttttccacctgtaacttg

SEQ ID NO: 2246848 - DNA, 25 bp, Homo sapien
gaagctcagaaaaccaaaatgcctt

SEQ ID NO: 2246849 - DNA, 25 bp, Homo sapien
gctcagaaaaccaaaatgcctttac

SEQ ID NO: 2246850 - DNA, 25 bp, Homo sapien
agaagctcagaaaaccaaaatgcct

SEQ ID NO: 2246851 - DNA, 25 bp, Homo sapien
ccagaagctcagaaaaccaaaatgc

SEQ ID NO: 2246852 - DNA, 25 bp, Homo sapien
gagcagttctacttcattccggtag

SEQ ID NO: 2246853 - DNA, 25 bp, Homo sapien
tgttagggtcatcttctctgtggac

SEQ ID NO: 2246854 - DNA, 25 bp, Homo sapien
gctgccaacggaggctgtcattttc

SEQ ID NO: 2246855 - DNA, 25 bp, Homo sapien
ttcattccggtaggcatcgagctgc

SEQ ID NO: 2246856 - DNA, 25 bp, Homo sapien
cctggcccaagatttcttaatatgc

SEQ ID NO: 2246857 - DNA, 25 bp, Homo sapien
cacacacacgaatatagcattgact

SEQ ID NO: 2246858 - DNA, 25 bp, Homo sapien
cgtctcacagaggaaaagtaaatgt

SEQ ID NO: 2246859 - DNA, 25 bp, Homo sapien
gcacgttttcatgtacttcttttaa

SEQ ID NO: 2246860 - DNA, 25 bp, Homo sapien
gctggtcccatttgggaaagatgaa

SEQ ID NO: 2246861 - DNA, 25 bp, Homo sapien
ggcgttcttgcatgactccaccctg

SEQ ID NO: 2246862 - DNA, 25 bp, Homo sapien
caggctcatggcagtgttggcgttc

SEQ ID NO: 2246863 - DNA, 25 bp, Homo sapien
agatgaaaccgcaggccaggctcat

SEQ ID NO: 2246864 - DNA, 25 bp, Homo sapien
tgtgcagtagccaatacagctttta

SEQ ID NO: 2246865 - DNA, 25 bp, Homo sapien
tccagtctctaaacgaataagattc

SEQ ID NO: 2246866 - DNA, 25 bp, Homo sapien
gagaaaagctatttggtaagctcca

SEQ ID NO: 2246867 - DNA, 25 bp, Homo sapien
gaaaatagctataagatgatctgtc

SEQ ID NO: 2246868 - DNA, 25 bp, Homo sapien
ttctcgcctgattcccattaattca

SEQ ID NO: 2246869 - DNA, 25 bp, Homo sapien
tcttcttctcgcctgattcccatta

SEQ ID NO: 2246870 - DNA, 25 bp, Homo sapien
taattcatcattatgaatgttgcga

SEQ ID NO: 2246871 - DNA, 25 bp, Homo sapien
catcattatgaatgttgcgaatttc

SEQ ID NO: 2246872 - DNA, 25 bp, Homo sapien
atggatttgtggactttcccttaag

SEQ ID NO: 2246873 - DNA, 25 bp, Homo sapien
tggtacacagccactatctgctcaa

SEQ ID NO: 2246874 - DNA, 25 bp, Homo sapien
acacgctgatgttcttccgctgggc

SEQ ID NO: 2246875 - DNA, 25 bp, Homo sapien
accacacgctgatgttcttccgctg

SEQ ID NO: 2246876 - DNA, 25 bp, Homo sapien
ccatgccttctgcttggaggcggaa

SEQ ID NO: 2246877 - DNA, 25 bp, Homo sapien
cccatagagagcaagtgactaagtg

SEQ ID NO: 2246878 - DNA, 25 bp, Homo sapien
acaaggcagtgaaaaagggagcctt

SEQ ID NO: 2246879 - DNA, 25 bp, Homo sapien
tattctcattccagcagaactctaa

SEQ ID NO: 2246880 - DNA, 25 bp, Homo sapien
cttgagccttaacacaggatggctc

SEQ ID NO: 2246881 - DNA, 25 bp, Homo sapien
tccagaaagggcctgcttgaacttc

SEQ ID NO: 2246882 - DNA, 25 bp, Homo sapien
accaggcggcggacatggctgttgg

SEQ ID NO: 2246883 - DNA, 25 bp, Homo sapien
ccaggcggcggacatggctgttggc

SEQ ID NO: 2246884 - DNA, 25 bp, Homo sapien
cagaaagggcctgcttgaacttctc

SEQ ID NO: 2246885 - DNA, 25 bp, Homo sapien
tctcctcgctctatccaggtaagca

SEQ ID NO: 2246886 - DNA, 25 bp, Homo sapien
taagcaaggtctgtacagcttctga

SEQ ID NO: 2246887 - DNA, 25 bp, Homo sapien
ggcgctacgacggttgacctctcct

SEQ ID NO: 2246888 - DNA, 25 bp, Homo sapien
gagtagaagttattggcgctacgac

SEQ ID NO: 2246889 - DNA, 25 bp, Homo sapien
catgatctgaatagtggaccactgg

SEQ ID NO: 2246890 - DNA, 25 bp, Homo sapien
cgaaatcaacgtggagtctgcctgt

SEQ ID NO: 2246891 - DNA, 25 bp, Homo sapien
caggtcatctcgagcctgtgcgaaa

SEQ ID NO: 2246892 - DNA, 25 bp, Homo sapien
tactagagcccaggcgaatgcggta

SEQ ID NO: 2246893 - DNA, 25 bp, Homo sapien
cttcctccctcacttcctcctccat

SEQ ID NO: 2246894 - DNA, 25 bp, Homo sapien
tggtgggcacaatcctcacatctaa

SEQ ID NO: 2246895 - DNA, 25 bp, Homo sapien
tactcctcagcaaagcgaatgtggc

SEQ ID NO: 2246896 - DNA, 25 bp, Homo sapien
cacactgctcgaaaacttccacaat

SEQ ID NO: 2246897 - DNA, 25 bp, Homo sapien
ttcttcttgctcttgcgaatggcaa

SEQ ID NO: 2246898 - DNA, 25 bp, Homo sapien
gaatggcaatgatctctccacactg

SEQ ID NO: 2246899 - DNA, 25 bp, Homo sapien
caatatcagtgagcctttcctcaaa

SEQ ID NO: 2246900 - DNA, 25 bp, Homo sapien
cagctgtcagaatgatttggtttca

SEQ ID NO: 2246901 - DNA, 25 bp, Homo sapien
gggtacctacttacaacaatgccta

SEQ ID NO: 2246902 - DNA, 25 bp, Homo sapien
gcagcatttacagggaaatatgaaa

SEQ ID NO: 2246903 - DNA, 25 bp, Homo sapien
gttatttcccagtagactcaaaatg

SEQ ID NO: 2246904 - DNA, 25 bp, Homo sapien
tgttcctggagacggatagcagatg

SEQ ID NO: 2246905 - DNA, 25 bp, Homo sapien
gaaggtcccctggacaatcagcagg

SEQ ID NO: 2246906 - DNA, 25 bp, Homo sapien
tagacagctcaagattgaaggtccc

SEQ ID NO: 2246907 - DNA, 25 bp, Homo sapien
ccagaaaggggtatgcttgaagttg

SEQ ID NO: 2246908 - DNA, 25 bp, Homo sapien
ccatgtggaagtgaaccagaaaggg

SEQ ID NO: 2246909 - DNA, 25 bp, Homo sapien
cttccatgtggaagtgaaccagaaa

SEQ ID NO: 2246910 - DNA, 25 bp, Homo sapien
accagaaaggggtatgcttgaagtt

SEQ ID NO: 2246911 - DNA, 25 bp, Homo sapien
caggcatcattggagttattggtgg

SEQ ID NO: 2246912 - DNA, 25 bp, Homo sapien
cagcttttacagtgtatgatctctt

SEQ ID NO: 2246913 - DNA, 25 bp, Homo sapien
tactactggcatatctggaggaatt

SEQ ID NO: 2246914 - DNA, 25 bp, Homo sapien
ggaggtactattcccaaaccaggca

SEQ ID NO: 2246915 - DNA, 25 bp, Homo sapien
cctgatctcaggctatcttcttgct

SEQ ID NO: 2246916 - DNA, 25 bp, Homo sapien
ctgaagctgaaagagataacacagt

SEQ ID NO: 2246917 - DNA, 25 bp, Homo sapien
aattggctacttatgaatttccagg

SEQ ID NO: 2246918 - DNA, 25 bp, Homo sapien
cacaacaatcctaagggatgggaaa

SEQ ID NO: 2246919 - DNA, 25 bp, Homo sapien
caggtaaaattggttgtccggcaat

SEQ ID NO: 2246920 - DNA, 25 bp, Homo sapien
aattcccagcggtgccattccaaga

SEQ ID NO: 2246921 - DNA, 25 bp, Homo sapien
cagttggatcagacataggtagtgt

SEQ ID NO: 2246922 - DNA, 25 bp, Homo sapien
ctgtggcccatgcagttggatcaga

SEQ ID NO: 2246923 - DNA, 25 bp, Homo sapien
gaatccacgttcagagttctactgt

SEQ ID NO: 2246924 - DNA, 25 bp, Homo sapien
tccacgttcagagttctactgttat

SEQ ID NO: 2246925 - DNA, 25 bp, Homo sapien
ggaatccacgttcagagttctactg

SEQ ID NO: 2246926 - DNA, 25 bp, Homo sapien
gtggaatccacgttcagagttctac

SEQ ID NO: 2246927 - DNA, 25 bp, Homo sapien
ctgcatagcctatttcgtagaccca

SEQ ID NO: 2246928 - DNA, 25 bp, Homo sapien
catagcctatttcgtagacccacag

SEQ ID NO: 2246929 - DNA, 25 bp, Homo sapien
agcctatttcgtagacccacagcca

SEQ ID NO: 2246930 - DNA, 25 bp, Homo sapien
tagcctatttcgtagacccacagcc

SEQ ID NO: 2246931 - DNA, 25 bp, Homo sapien
tcctcaactgtgaacttagctctgt

SEQ ID NO: 2246932 - DNA, 25 bp, Homo sapien
aactgtgaacttagctctgtcatca

SEQ ID NO: 2246933 - DNA, 25 bp, Homo sapien
tgtggtcctcaactgtgaacttagc

SEQ ID NO: 2246934 - DNA, 25 bp, Homo sapien
tgtgtggtcctcaactgtgaactta

SEQ ID NO: 2246935 - DNA, 25 bp, Homo sapien
tgatcatgactttaaccctacttcc

SEQ ID NO: 2246936 - DNA, 25 bp, Homo sapien
ttttgtaatttcagggtgggctggc

SEQ ID NO: 2246937 - DNA, 25 bp, Homo sapien
ggatctttgagctgcggccaagggc

SEQ ID NO: 2246938 - DNA, 25 bp, Homo sapien
cttttgtaatttcagggtgggctgg

SEQ ID NO: 2246939 - DNA, 25 bp, Homo sapien
aggaggaatttggatgtgttacttg

SEQ ID NO: 2246940 - DNA, 25 bp, Homo sapien
aatttggatgtgttacttggcctgc

SEQ ID NO: 2246941 - DNA, 25 bp, Homo sapien
tggatgtgttacttggcctgcactc

SEQ ID NO: 2246942 - DNA, 25 bp, Homo sapien
gatgtgttacttggcctgcactctg

SEQ ID NO: 2246943 - DNA, 25 bp, Homo sapien
gttattgctcttacaaatttggaag

SEQ ID NO: 2246944 - DNA, 25 bp, Homo sapien
ttctagcttggcaggcgaatccact

SEQ ID NO: 2246945 - DNA, 25 bp, Homo sapien
ctcaccgggatattagttattgctc

SEQ ID NO: 2246946 - DNA, 25 bp, Homo sapien
cttgctcctctcaccgggatattag

SEQ ID NO: 2246947 - DNA, 25 bp, Homo sapien
tgtgttcagcccatttccacagggc

SEQ ID NO: 2246948 - DNA, 25 bp, Homo sapien
cacagggcatagcaccttcctgctg

SEQ ID NO: 2246949 - DNA, 25 bp, Homo sapien
ggctgccagctctattatctccatc

SEQ ID NO: 2246950 - DNA, 25 bp, Homo sapien
ggacatcaccacctctgtgctcatt

SEQ ID NO: 2246951 - DNA, 25 bp, Homo sapien
ccatccgtactaacatactccataa

SEQ ID NO: 2246952 - DNA, 25 bp, Homo sapien
tactaacatactccataaaccagtt

SEQ ID NO: 2246953 - DNA, 25 bp, Homo sapien
tccgtactaacatactccataaacc

SEQ ID NO: 2246954 - DNA, 25 bp, Homo sapien
agcccatccgtactaacatactcca

SEQ ID NO: 2246955 - DNA, 25 bp, Homo sapien
cagcacagcaagcaagtactatcac

SEQ ID NO: 2246956 - DNA, 25 bp, Homo sapien
ccacatcggtcaatttttagatcag

SEQ ID NO: 2246957 - DNA, 25 bp, Homo sapien
gctctattacctgctgaaaacaaag

SEQ ID NO: 2246958 - DNA, 25 bp, Homo sapien
gtactatcacaaaaggccccaactg

SEQ ID NO: 2246959 - DNA, 25 bp, Homo sapien
gaaggtcatgaatgtggcgcatgct

SEQ ID NO: 2246960 - DNA, 25 bp, Homo sapien
atgaatgtggcgcatgctttcaaaa

SEQ ID NO: 2246961 - DNA, 25 bp, Homo sapien
agcctggaaggtcatgaatgtggcg

SEQ ID NO: 2246962 - DNA, 25 bp, Homo sapien
ggtcatgaatgtggcgcatgctttc

SEQ ID NO: 2246963 - DNA, 25 bp, Homo sapien
ctgtaattaccaaccaaagagcctc

SEQ ID NO: 2246964 - DNA, 25 bp, Homo sapien
gctgtaattaccaaccaaagagcct

SEQ ID NO: 2246965 - DNA, 25 bp, Homo sapien
tgtaattaccaaccaaagagcctcc

SEQ ID NO: 2246966 - DNA, 25 bp, Homo sapien
cgctgtaattaccaaccaaagagcc

SEQ ID NO: 2246967 - DNA, 25 bp, Homo sapien
gacactccaggaacaattacaaaat

SEQ ID NO: 2246968 - DNA, 25 bp, Homo sapien
cgtctgctgtctgacatagcttcat

SEQ ID NO: 2246969 - DNA, 25 bp, Homo sapien
atgaacttcagtcacgtctgctgtc

SEQ ID NO: 2246970 - DNA, 25 bp, Homo sapien
tcccatccagacaggacactccagg

SEQ ID NO: 2246971 - DNA, 25 bp, Homo sapien
caagaatttcccactgccaaaactc

SEQ ID NO: 2246972 - DNA, 25 bp, Homo sapien
caacaagaatttcccactgccaaaa

SEQ ID NO: 2246973 - DNA, 25 bp, Homo sapien
ttcctccaacaagaatttcccactg

SEQ ID NO: 2246974 - DNA, 25 bp, Homo sapien
tccaacaagaatttcccactgccaa

SEQ ID NO: 2246975 - DNA, 25 bp, Homo sapien
gtttaattgactcatcgtactgcaa

SEQ ID NO: 2246976 - DNA, 25 bp, Homo sapien
tcgtactgcaaactttacagaaagc

SEQ ID NO: 2246977 - DNA, 25 bp, Homo sapien
cccttagtatctgtgttaagtcatt

SEQ ID NO: 2246978 - DNA, 25 bp, Homo sapien
catggtgaaagcaggtacaagcaaa

SEQ ID NO: 2246979 - DNA, 25 bp, Homo sapien
acttgaatgcccacattggcttttc

SEQ ID NO: 2246980 - DNA, 25 bp, Homo sapien
attttggaaaaggacaagatatctt

SEQ ID NO: 2246981 - DNA, 25 bp, Homo sapien
taaagatgtcactaacatttggaca

SEQ ID NO: 2246982 - DNA, 25 bp, Homo sapien
atttacataacctaaagatgtcact

SEQ ID NO: 2246983 - DNA, 25 bp, Homo sapien
tgaaatcagaggataataatggggc

SEQ ID NO: 2246984 - DNA, 25 bp, Homo sapien
aaatcagaggataataatggggctg

SEQ ID NO: 2246985 - DNA, 25 bp, Homo sapien
gaaatcagaggataataatggggct

SEQ ID NO: 2246986 - DNA, 25 bp, Homo sapien
ctgaaatcagaggataataatgggg

SEQ ID NO: 2246987 - DNA, 25 bp, Homo sapien
tgtagttatgacttgttgcctgctc

SEQ ID NO: 2246988 - DNA, 25 bp, Homo sapien
gaatcagcatctgaaaacggtatgt

SEQ ID NO: 2246989 - DNA, 25 bp, Homo sapien
gcctgctcagactttatgtcaagct

SEQ ID NO: 2246990 - DNA, 25 bp, Homo sapien
gcagaaccactgtatttgtatgagg

SEQ ID NO: 2246991 - DNA, 25 bp, Homo sapien
aactcttttatgagtgagtagagcc

SEQ ID NO: 2246992 - DNA, 25 bp, Homo sapien
ttttatgagtgagtagagcctagtc

SEQ ID NO: 2246993 - DNA, 25 bp, Homo sapien
tatgagtgagtagagcctagtcagg

SEQ ID NO: 2246994 - DNA, 25 bp, Homo sapien
tcttttatgagtgagtagagcctag

SEQ ID NO: 2246995 - DNA, 25 bp, Homo sapien
ttcatttctagcttccactgaagtg

SEQ ID NO: 2246996 - DNA, 25 bp, Homo sapien
acaggccatcactctcaagggcgct

SEQ ID NO: 2246997 - DNA, 25 bp, Homo sapien
caagggcgctgggacggtaaatggt

SEQ ID NO: 2246998 - DNA, 25 bp, Homo sapien
ggacggtaaatggtctgctctgaag

SEQ ID NO: 2246999 - DNA, 25 bp, Homo sapien
tctgtggtccacctaaggccaaaag

SEQ ID NO: 2247000 - DNA, 25 bp, Homo sapien
cccttattaaggctagcgaggacct

SEQ ID NO: 2247001 - DNA, 25 bp, Homo sapien
tagtttaggtatttgttcctgccca

SEQ ID NO: 2247002 - DNA, 25 bp, Homo sapien
tgcactttactaagctaggaggaga

SEQ ID NO: 2247003 - DNA, 25 bp, Homo sapien
actgagtagggctattagtctaccc

SEQ ID NO: 2247004 - DNA, 25 bp, Homo sapien
caagataataattcagctgacatgc

SEQ ID NO: 2247005 - DNA, 25 bp, Homo sapien
gctgtaatcagatgaaaatgtccaa

SEQ ID NO: 2247006 - DNA, 25 bp, Homo sapien
tgtccaaaggactaaagaaactgag

SEQ ID NO: 2247007 - DNA, 25 bp, Homo sapien
ttctcttccaagtgagcctgaacaa

SEQ ID NO: 2247008 - DNA, 25 bp, Homo sapien
tgagtctgaggtaaatcaaaaggct

SEQ ID NO: 2247009 - DNA, 25 bp, Homo sapien
gaaacaaaagtactctcaagcagat

SEQ ID NO: 2247010 - DNA, 25 bp, Homo sapien
gccttgtagtgctgtaattgttcac

SEQ ID NO: 2247011 - DNA, 25 bp, Homo sapien
ctaaggatgtaatctcacaaatgtc

SEQ ID NO: 2247012 - DNA, 25 bp, Homo sapien
ctgttctaaggatgtaatctcacaa

SEQ ID NO: 2247013 - DNA, 25 bp, Homo sapien
cagatttgatttgtgcctgttctaa

SEQ ID NO: 2247014 - DNA, 25 bp, Homo sapien
tcacaagcacccagatttgatttgt

SEQ ID NO: 2247015 - DNA, 25 bp, Homo sapien
tatcttccctcttccttttgtctag

SEQ ID NO: 2247016 - DNA, 25 bp, Homo sapien
aatatcttccctcttccttttgtct

SEQ ID NO: 2247017 - DNA, 25 bp, Homo sapien
tcatgaaatatcttccctcttcctt

SEQ ID NO: 2247018 - DNA, 25 bp, Homo sapien
tcttccctcttccttttgtctagta

SEQ ID NO: 2247019 - DNA, 25 bp, Homo sapien
ctgcaggggctcgttgttgttagca

SEQ ID NO: 2247020 - DNA, 25 bp, Homo sapien
gggtcaaagggcagctggttcaatc

SEQ ID NO: 2247021 - DNA, 25 bp, Homo sapien
ctgaaggagtatttgttctctttct

SEQ ID NO: 2247022 - DNA, 25 bp, Homo sapien
tgaccagagggccactggcactacc

SEQ ID NO: 2247023 - DNA, 25 bp, Homo sapien
aaagaaagccaaagtccagactcca

SEQ ID NO: 2247024 - DNA, 25 bp, Homo sapien
aaatgtcttctggaacttgtcaaac

SEQ ID NO: 2247025 - DNA, 25 bp, Homo sapien
cattaaatgtcttctggaacttgtc

SEQ ID NO: 2247026 - DNA, 25 bp, Homo sapien
atgtcttctggaacttgtcaaacat

SEQ ID NO: 2247027 - DNA, 25 bp, Homo sapien
ctccattaaatgtcttctggaactt

SEQ ID NO: 2247028 - DNA, 25 bp, Homo sapien
aaaaccagaatctgctccttgagaa

SEQ ID NO: 2247029 - DNA, 25 bp, Homo sapien
gaatctgctccttgagaagacagca

SEQ ID NO: 2247030 - DNA, 25 bp, Homo sapien
cactaggaaaaccagaatctgctcc

SEQ ID NO: 2247031 - DNA, 25 bp, Homo sapien
ggaaaaccagaatctgctccttgag

SEQ ID NO: 2247032 - DNA, 25 bp, Homo sapien
cacaatgaaccagtcaccacaattt

SEQ ID NO: 2247033 - DNA, 25 bp, Homo sapien
ttccattacagaggaggagttgatt

SEQ ID NO: 2247034 - DNA, 25 bp, Homo sapien
ggtagctgcactagctgttccatta

SEQ ID NO: 2247035 - DNA, 25 bp, Homo sapien
gagttgatttatgtgcagctgttga

SEQ ID NO: 2247036 - DNA, 25 bp, Homo sapien
agcatcacctggaagtctaacagaa

SEQ ID NO: 2247037 - DNA, 25 bp, Homo sapien
gaagaacacccacactaaactcctc

SEQ ID NO: 2247038 - DNA, 25 bp, Homo sapien
ggcagatatatagaggggcagaaaa

SEQ ID NO: 2247039 - DNA, 25 bp, Homo sapien
agaagaacacccacactaaactcct

SEQ ID NO: 2247040 - DNA, 25 bp, Homo sapien
tcaagccagtgagatgagttaccat

SEQ ID NO: 2247041 - DNA, 25 bp, Homo sapien
attttctgtgcctcagaagtgctag

SEQ ID NO: 2247042 - DNA, 25 bp, Homo sapien
ccatattcaagccagtgagatgagt

SEQ ID NO: 2247043 - DNA, 25 bp, Homo sapien
tctgtgcctcagaagtgctagcatc

SEQ ID NO: 2247044 - DNA, 25 bp, Homo sapien
ggctccggtttctggtcttgggcat

SEQ ID NO: 2247045 - DNA, 25 bp, Homo sapien
aatttgactgaaatccccagggcac

SEQ ID NO: 2247046 - DNA, 25 bp, Homo sapien
ggtcttgggcatttacaaattcttg

SEQ ID NO: 2247047 - DNA, 25 bp, Homo sapien
ttacttcctgcttactttgttcctc

SEQ ID NO: 2247048 - DNA, 25 bp, Homo sapien
tacttggaagagtctggcaattcct

SEQ ID NO: 2247049 - DNA, 25 bp, Homo sapien
cttaatttccgccaaggtaccagtg

SEQ ID NO: 2247050 - DNA, 25 bp, Homo sapien
tattgaaggatgaataccattgtcc

SEQ ID NO: 2247051 - DNA, 25 bp, Homo sapien
ggcaattcctcagatgactaaacat

SEQ ID NO: 2247052 - DNA, 25 bp, Homo sapien
ttagcacatgaagtcctggggtggc

SEQ ID NO: 2247053 - DNA, 25 bp, Homo sapien
gttgagcaccaacctcttttaccta

SEQ ID NO: 2247054 - DNA, 25 bp, Homo sapien
ctgagcaaatggtatataagaattc

SEQ ID NO: 2247055 - DNA, 25 bp, Homo sapien
cttttacctagtgtctcagttgcca

SEQ ID NO: 2247056 - DNA, 25 bp, Homo sapien
ggtatggcttattcaaccacaagtg

SEQ ID NO: 2247057 - DNA, 25 bp, Homo sapien
tgtgttctccaagaattgatctcaa

SEQ ID NO: 2247058 - DNA, 25 bp, Homo sapien
tgttctccaagaattgatctcaaat

SEQ ID NO: 2247059 - DNA, 25 bp, Homo sapien
tccaagaattgatctcaaatcaggt

SEQ ID NO: 2247060 - DNA, 25 bp, Homo sapien
aagaattgatctcaaatcaggttcc

SEQ ID NO: 2247061 - DNA, 25 bp, Homo sapien
attctgtagaataaaggtgtgcccc

SEQ ID NO: 2247062 - DNA, 25 bp, Homo sapien
gaactggcgcctagagctcaaaagc

SEQ ID NO: 2247063 - DNA, 25 bp, Homo sapien
ccctgagcgtggcaaggaattccca

SEQ ID NO: 2247064 - DNA, 25 bp, Homo sapien
tgctggaaacccctaaagcgctgga

SEQ ID NO: 2247065 - DNA, 25 bp, Homo sapien
ccggctaccgaagcgctagtcctta

SEQ ID NO: 2247066 - DNA, 25 bp, Homo sapien
tatacagccgcggaaaatcgggccg

SEQ ID NO: 2247067 - DNA, 25 bp, Homo sapien
gcagttcctgggctcgtagtgccct

SEQ ID NO: 2247068 - DNA, 25 bp, Homo sapien
tctggcccaaggctggactctcaca

SEQ ID NO: 2247069 - DNA, 25 bp, Homo sapien
gaatccaaccataagagtagctctg

SEQ ID NO: 2247070 - DNA, 25 bp, Homo sapien
caaccataagagtagctctgttagt

SEQ ID NO: 2247071 - DNA, 25 bp, Homo sapien
tgagaatccaaccataagagtagct

SEQ ID NO: 2247072 - DNA, 25 bp, Homo sapien
ctctgttagttttaatgattccaaa

SEQ ID NO: 2247073 - DNA, 25 bp, Homo sapien
caattgtggaatgcaccctgtaggg

SEQ ID NO: 2247074 - DNA, 25 bp, Homo sapien
ccatgcccacaattgtggaatgcac

SEQ ID NO: 2247075 - DNA, 25 bp, Homo sapien
ttcttcatactccatgcccacaatt

SEQ ID NO: 2247076 - DNA, 25 bp, Homo sapien
tggaatgcaccctgtagggccccaa

SEQ ID NO: 2247077 - DNA, 25 bp, Homo sapien
tggctgtcaaaaggtttgtccccat

SEQ ID NO: 2247078 - DNA, 25 bp, Homo sapien
ctataccagggataaggaggcaggc

SEQ ID NO: 2247079 - DNA, 25 bp, Homo sapien
ctctggctgtcaaaaggtttgtccc

SEQ ID NO: 2247080 - DNA, 25 bp, Homo sapien
tataccagggataaggaggcaggct

SEQ ID NO: 2247081 - DNA, 25 bp, Homo sapien
tgacagccatgcacctcacaactga

SEQ ID NO: 2247082 - DNA, 25 bp, Homo sapien
tttattctcatgtcaccaacagtga

SEQ ID NO: 2247083 - DNA, 25 bp, Homo sapien
aacactaggtttgagcttcgaagcc

SEQ ID NO: 2247084 - DNA, 25 bp, Homo sapien
ttcgaagccacaatacagaaaccag

SEQ ID NO: 2247085 - DNA, 25 bp, Homo sapien
aagtggccctcagacagcagaaagt

SEQ ID NO: 2247086 - DNA, 25 bp, Homo sapien
aagttgatcgacacctttggaaagg

SEQ ID NO: 2247087 - DNA, 25 bp, Homo sapien
cattgcatgtcacgaagcagcgcca

SEQ ID NO: 2247088 - DNA, 25 bp, Homo sapien
ccagggtagtggacatcaacagttc

SEQ ID NO: 2247089 - DNA, 25 bp, Homo sapien
tactgttgagtatgtttattggaaa

SEQ ID NO: 2247090 - DNA, 25 bp, Homo sapien
taccacaggtgcagaagttttacag

SEQ ID NO: 2247091 - DNA, 25 bp, Homo sapien
aatcacagaacttccctattaggtg

SEQ ID NO: 2247092 - DNA, 25 bp, Homo sapien
tcttttgtcatggagagactgctct

SEQ ID NO: 2247093 - DNA, 25 bp, Homo sapien
tagctggatctacacctgacacggc

SEQ ID NO: 2247094 - DNA, 25 bp, Homo sapien
gtcctttcaccagggcacagcgcat

SEQ ID NO: 2247095 - DNA, 25 bp, Homo sapien
gcttggcaggcaagtagctggatct

SEQ ID NO: 2247096 - DNA, 25 bp, Homo sapien
tcataaccgcacaattgtcgagctt

SEQ ID NO: 2247097 - DNA, 25 bp, Homo sapien
ttagccctgctagcaatgtccccag

SEQ ID NO: 2247098 - DNA, 25 bp, Homo sapien
ggtactcaatgacccggtcagccgg

SEQ ID NO: 2247099 - DNA, 25 bp, Homo sapien
aagacacagccgatagggagctcca

SEQ ID NO: 2247100 - DNA, 25 bp, Homo sapien
tagtaagggcatcctttgggcgaca

SEQ ID NO: 2247101 - DNA, 25 bp, Homo sapien
tgccctttcccagtgtcgtttgtaa

SEQ ID NO: 2247102 - DNA, 25 bp, Homo sapien
gtttgtaagttttgaccctgcatgc

SEQ ID NO: 2247103 - DNA, 25 bp, Homo sapien
tgtgcccatagagataagtgattcg

SEQ ID NO: 2247104 - DNA, 25 bp, Homo sapien
ggtcttccttagtgctgagtgtggc

SEQ ID NO: 2247105 - DNA, 25 bp, Homo sapien
aaagggctggatgaattctagcttc

SEQ ID NO: 2247106 - DNA, 25 bp, Homo sapien
cccaaagggctggatgaattctagc

SEQ ID NO: 2247107 - DNA, 25 bp, Homo sapien
tccccaaagggctggatgaattcta

SEQ ID NO: 2247108 - DNA, 25 bp, Homo sapien
agggctggatgaattctagcttctc

SEQ ID NO: 2247109 - DNA, 25 bp, Homo sapien
tcctctccaatcctggagagtaagt

SEQ ID NO: 2247110 - DNA, 25 bp, Homo sapien
gggccagtgtatgagtgtccaacag

SEQ ID NO: 2247111 - DNA, 25 bp, Homo sapien
aaggggccagtgtatgagtgtccaa

SEQ ID NO: 2247112 - DNA, 25 bp, Homo sapien
ccagtgtatgagtgtccaacagttc

SEQ ID NO: 2247113 - DNA, 25 bp, Homo sapien
tcccggcttgcagatgattgctttc

SEQ ID NO: 2247114 - DNA, 25 bp, Homo sapien
ttcccggcttgcagatgattgcttt

SEQ ID NO: 2247115 - DNA, 25 bp, Homo sapien
acaatatacacacgaaagtcccacc

SEQ ID NO: 2247116 - DNA, 25 bp, Homo sapien
gcatctaccacccttgtgatgatca

SEQ ID NO: 2247117 - DNA, 25 bp, Homo sapien
tctaaggaccagctcacaggcttcc

SEQ ID NO: 2247118 - DNA, 25 bp, Homo sapien
tcctgggtgtcctcaacaatataca

SEQ ID NO: 2247119 - DNA, 25 bp, Homo sapien
tgaggcccaaatcccctgatgaagg

SEQ ID NO: 2247120 - DNA, 25 bp, Homo sapien
ccaaatcccctgatgaaggctgggt

SEQ ID NO: 2247121 - DNA, 25 bp, Homo sapien
ggcccaaatcccctgatgaaggctg

SEQ ID NO: 2247122 - DNA, 25 bp, Homo sapien
caaatcccctgatgaaggctgggtc

SEQ ID NO: 2247123 - DNA, 25 bp, Homo sapien
gtggatccgagggagcagcgtccat

SEQ ID NO: 2247124 - DNA, 25 bp, Homo sapien
gagcagcgtccatcctttgtgcctt

SEQ ID NO: 2247125 - DNA, 25 bp, Homo sapien
ttggcctgtggatccgagggagcag

SEQ ID NO: 2247126 - DNA, 25 bp, Homo sapien
agcagcgtccatcctttgtgccttc

SEQ ID NO: 2247127 - DNA, 25 bp, Homo sapien
ccttgatgtgggtttctgacattgg

SEQ ID NO: 2247128 - DNA, 25 bp, Homo sapien
aataaggttctgatgattaggtgac

SEQ ID NO: 2247129 - DNA, 25 bp, Homo sapien
tctgacattggagtgaataaggttc

SEQ ID NO: 2247130 - DNA, 25 bp, Homo sapien
gggatgccagatcaatgcatccttg

SEQ ID NO: 2247131 - DNA, 25 bp, Homo sapien
cggtttctgaccatacacactctgc

SEQ ID NO: 2247132 - DNA, 25 bp, Homo sapien
ctgtccggtttctgaccatacacac

SEQ ID NO: 2247133 - DNA, 25 bp, Homo sapien
tctgaccatacacactctgctggga

SEQ ID NO: 2247134 - DNA, 25 bp, Homo sapien
cagtataatccactcctgaaattca

SEQ ID NO: 2247135 - DNA, 25 bp, Homo sapien
tgggctggcattgagcgcagaggaa

SEQ ID NO: 2247136 - DNA, 25 bp, Homo sapien
aataacatttgtctcttgggctggc

SEQ ID NO: 2247137 - DNA, 25 bp, Homo sapien
gaggaaccatttatgcaatctaatt

SEQ ID NO: 2247138 - DNA, 25 bp, Homo sapien
caatctaattattacgtcaattggg

SEQ ID NO: 2247139 - DNA, 25 bp, Homo sapien
tccatgtatctctgaaggccagagt

SEQ ID NO: 2247140 - DNA, 25 bp, Homo sapien
ggagatagtcagactatagtctgag

SEQ ID NO: 2247141 - DNA, 25 bp, Homo sapien
ccttaaagcatatgaggagatagtc

SEQ ID NO: 2247142 - DNA, 25 bp, Homo sapien
aggccagagtcaccaagtctatatc

SEQ ID NO: 2247143 - DNA, 25 bp, Homo sapien
caatgaagagacaaggcagcccttg

SEQ ID NO: 2247144 - DNA, 25 bp, Homo sapien
atgaagagacaaggcagcccttggg

SEQ ID NO: 2247145 - DNA, 25 bp, Homo sapien
aatgaagagacaaggcagcccttgg

SEQ ID NO: 2247146 - DNA, 25 bp, Homo sapien
cattggctgagagtccagagagcct

SEQ ID NO: 2247147 - DNA, 25 bp, Homo sapien
ttggctgagagtccagagagccttc

SEQ ID NO: 2247148 - DNA, 25 bp, Homo sapien
gcattggctgagagtccagagagcc

SEQ ID NO: 2247149 - DNA, 25 bp, Homo sapien
ggcattggctgagagtccagagagc

SEQ ID NO: 2247150 - DNA, 25 bp, Homo sapien
gcagctagggcaccctgtggtgagc

SEQ ID NO: 2247151 - DNA, 25 bp, Homo sapien
ctagggcaccctgtggtgagcaggc

SEQ ID NO: 2247152 - DNA, 25 bp, Homo sapien
agggttctcctattggcctggaata

SEQ ID NO: 2247153 - DNA, 25 bp, Homo sapien
ctcagggttctcctattggcctgga

SEQ ID NO: 2247154 - DNA, 25 bp, Homo sapien
ctctctctgcttaactggtgacatc

SEQ ID NO: 2247155 - DNA, 25 bp, Homo sapien
ggggacaggcagatagaggaggagg

SEQ ID NO: 2247156 - DNA, 25 bp, Homo sapien
ggaggaggtatcaagatcctctctc

SEQ ID NO: 2247157 - DNA, 25 bp, Homo sapien
tctggctgggcctgcttgctctcct

SEQ ID NO: 2247158 - DNA, 25 bp, Homo sapien
aggacttcgattcccaggtatggtg

SEQ ID NO: 2247159 - DNA, 25 bp, Homo sapien
ggcaacacagggtaagatgtagctt

SEQ ID NO: 2247160 - DNA, 25 bp, Homo sapien
ggtggtgactggcaacacagggtaa

SEQ ID NO: 2247161 - DNA, 25 bp, Homo sapien
ccaaaggacttcgattcccaggtat

SEQ ID NO: 2247162 - DNA, 25 bp, Homo sapien
cttgtaccaacccacagtagtcaga

SEQ ID NO: 2247163 - DNA, 25 bp, Homo sapien
agtagtcagatgactgtgaccaggg

SEQ ID NO: 2247164 - DNA, 25 bp, Homo sapien
caacccacagtagtcagatgactgt

SEQ ID NO: 2247165 - DNA, 25 bp, Homo sapien
acagtagtcagatgactgtgaccag

SEQ ID NO: 2247166 - DNA, 25 bp, Homo sapien
tgaagggagtaggcattcaagtctt

SEQ ID NO: 2247167 - DNA, 25 bp, Homo sapien
ttcaagtctttagagagagagggct

SEQ ID NO: 2247168 - DNA, 25 bp, Homo sapien
ccattagtccaaaaggaaggaacag

SEQ ID NO: 2247169 - DNA, 25 bp, Homo sapien
aggaaatccagttgggtcactcagc

SEQ ID NO: 2247170 - DNA, 25 bp, Homo sapien
tcctggcggacaatcaaagtaatta

SEQ ID NO: 2247171 - DNA, 25 bp, Homo sapien
tatattaaatcctggcggacaatca

SEQ ID NO: 2247172 - DNA, 25 bp, Homo sapien
aattgaagatcgcaatgtaatattc

SEQ ID NO: 2247173 - DNA, 25 bp, Homo sapien
aatcatcctgtggcatcatgaacat

SEQ ID NO: 2247174 - DNA, 25 bp, Homo sapien
tggaacctaaccaacacatccttgt

SEQ ID NO: 2247175 - DNA, 25 bp, Homo sapien
tgctccctggaacctaaccaacaca

SEQ ID NO: 2247176 - DNA, 25 bp, Homo sapien
ccatctgcagagtcacactgcgact

SEQ ID NO: 2247177 - DNA, 25 bp, Homo sapien
agtcacactgcgactccagctgctg

SEQ ID NO: 2247178 - DNA, 25 bp, Homo sapien
tcttcggtgaaatgattctgacgct

SEQ ID NO: 2247179 - DNA, 25 bp, Homo sapien
gagaatggatgctgtgcggaggcgg

SEQ ID NO: 2247180 - DNA, 25 bp, Homo sapien
cagagtcacacacataatttagtct

SEQ ID NO: 2247181 - DNA, 25 bp, Homo sapien
tctgacgctatagaggctccctgga

SEQ ID NO: 2247182 - DNA, 25 bp, Homo sapien
ggctcaactcctttggagatcagaa

SEQ ID NO: 2247183 - DNA, 25 bp, Homo sapien
caaagcctgacggtttattaataat

SEQ ID NO: 2247184 - DNA, 25 bp, Homo sapien
gaattgatacatctcctaagctcca

SEQ ID NO: 2247185 - DNA, 25 bp, Homo sapien
aattctctcaactgaagagagcccc

SEQ ID NO: 2247186 - DNA, 25 bp, Homo sapien
gagatgtgtccccttggagcaggcc

SEQ ID NO: 2247187 - DNA, 25 bp, Homo sapien
atgcacgcacgtgcatgtatggagg

SEQ ID NO: 2247188 - DNA, 25 bp, Homo sapien
aacattcgtaactgctttgagaggg

SEQ ID NO: 2247189 - DNA, 25 bp, Homo sapien
gtgtgtctgcacgtgcatgcacgca

SEQ ID NO: 2247190 - DNA, 25 bp, Homo sapien
gcttagttttcaatctcataactct

SEQ ID NO: 2247191 - DNA, 25 bp, Homo sapien
gttttcaatctcataactctcctgg

SEQ ID NO: 2247192 - DNA, 25 bp, Homo sapien
ttcaatctcataactctcctgggat

SEQ ID NO: 2247193 - DNA, 25 bp, Homo sapien
cgcttagttttcaatctcataactc

SEQ ID NO: 2247194 - DNA, 25 bp, Homo sapien
cagggtcccgccctcagaatcagct

SEQ ID NO: 2247195 - DNA, 25 bp, Homo sapien
gatccgcggccagatgactttctgg

SEQ ID NO: 2247196 - DNA, 25 bp, Homo sapien
cgatagagtcgctaacggtgctttg

SEQ ID NO: 2247197 - DNA, 25 bp, Homo sapien
ccataagcggactatgcgagtggtg

SEQ ID NO: 2247198 - DNA, 25 bp, Homo sapien
gaaaacagcagcttcggactgggcg

SEQ ID NO: 2247199 - DNA, 25 bp, Homo sapien
gtcaccagaaagacgtactccaatg

SEQ ID NO: 2247200 - DNA, 25 bp, Homo sapien
gcgtcaccagaaagacgtactccaa

SEQ ID NO: 2247201 - DNA, 25 bp, Homo sapien
tcaccagaaagacgtactccaatgt

SEQ ID NO: 2247202 - DNA, 25 bp, Homo sapien
accagaaagacgtactccaatgttt

SEQ ID NO: 2247203 - DNA, 25 bp, Homo sapien
ctgcagtgaggaaggggagcagagc

SEQ ID NO: 2247204 - DNA, 25 bp, Homo sapien
agagcttccagggccagagggaggg

SEQ ID NO: 2247205 - DNA, 25 bp, Homo sapien
agtgaggaaggggagcagagcttcc

SEQ ID NO: 2247206 - DNA, 25 bp, Homo sapien
cagagcttccagggccagagggagg

SEQ ID NO: 2247207 - DNA, 25 bp, Homo sapien
ctgtccctctttgttgacaacactg

SEQ ID NO: 2247208 - DNA, 25 bp, Homo sapien
gtccctctttgttgacaacactgtc

SEQ ID NO: 2247209 - DNA, 25 bp, Homo sapien
ccatagtctcttatattcttgactc

SEQ ID NO: 2247210 - DNA, 25 bp, Homo sapien
tagtctcttatattcttgactcttc

SEQ ID NO: 2247211 - DNA, 25 bp, Homo sapien
cctgatgctcgggtcaggatgagaa

SEQ ID NO: 2247212 - DNA, 25 bp, Homo sapien
ttccttctataaggtgccagacagg

SEQ ID NO: 2247213 - DNA, 25 bp, Homo sapien
taagaaggagttccacctgatgctc

SEQ ID NO: 2247214 - DNA, 25 bp, Homo sapien
tgctggtaaaagcagagatgtttct

SEQ ID NO: 2247215 - DNA, 25 bp, Homo sapien
taaacatctgtattgtgacagcagc

SEQ ID NO: 2247216 - DNA, 25 bp, Homo sapien
tgggacatgctctggtaacacacag

SEQ ID NO: 2247217 - DNA, 25 bp, Homo sapien
tgcatatgatccagaattacagctg

SEQ ID NO: 2247218 - DNA, 25 bp, Homo sapien
tacagctgatattatggatgacaac

SEQ ID NO: 2247219 - DNA, 25 bp, Homo sapien
gcatattgatttagtattaactgcc

SEQ ID NO: 2247220 - DNA, 25 bp, Homo sapien
gtcacttggcatcactgggcgtggc

SEQ ID NO: 2247221 - DNA, 25 bp, Homo sapien
caaatcttctaacgaaggctgggtc

SEQ ID NO: 2247222 - DNA, 25 bp, Homo sapien
gcactatttatctccaattttcggt

SEQ ID NO: 2247223 - DNA, 25 bp, Homo sapien
aggtccccatgttgaagctgaatac

SEQ ID NO: 2247224 - DNA, 25 bp, Homo sapien
gttgaagctgaatactgaacttagt

SEQ ID NO: 2247225 - DNA, 25 bp, Homo sapien
aaccaatcagcatagggcacctcag

SEQ ID NO: 2247226 - DNA, 25 bp, Homo sapien
ttccaatctgggcaggttattcctc

SEQ ID NO: 2247227 - DNA, 25 bp, Homo sapien
cactagaatcgaatgtttccgccat

SEQ ID NO: 2247228 - DNA, 25 bp, Homo sapien
tgcccaccctccactagaatcgaat

SEQ ID NO: 2247229 - DNA, 25 bp, Homo sapien
caccctccactagaatcgaatgttt

SEQ ID NO: 2247230 - DNA, 25 bp, Homo sapien
cctccactagaatcgaatgtttccg

SEQ ID NO: 2247231 - DNA, 25 bp, Homo sapien
cataattggtgaaacctgtgggttc

SEQ ID NO: 2247232 - DNA, 25 bp, Homo sapien
tgttgattccaagttggttacccca

SEQ ID NO: 2247233 - DNA, 25 bp, Homo sapien
tatgaaactcctcaggagcaacagt

SEQ ID NO: 2247234 - DNA, 25 bp, Homo sapien
cttgaaccacaaggtgcttttatga

SEQ ID NO: 2247235 - DNA, 25 bp, Homo sapien
tctgttcccctgacacagatatggg

SEQ ID NO: 2247236 - DNA, 25 bp, Homo sapien
agatatgggaagatgaccatatggg

SEQ ID NO: 2247237 - DNA, 25 bp, Homo sapien
acagatatgggaagatgaccatatg

SEQ ID NO: 2247238 - DNA, 25 bp, Homo sapien
cagatatgggaagatgaccatatgg

SEQ ID NO: 2247239 - DNA, 25 bp, Homo sapien
cattcggctgtagaacctgaaggag

SEQ ID NO: 2247240 - DNA, 25 bp, Homo sapien
ctgtagaacctgaaggagggcgctt

SEQ ID NO: 2247241 - DNA, 25 bp, Homo sapien
aagagcattcggctgtagaacctga

SEQ ID NO: 2247242 - DNA, 25 bp, Homo sapien
tagaacctgaaggagggcgcttgct

SEQ ID NO: 2247243 - DNA, 25 bp, Homo sapien
actgactcatgagcctcctcgcaac

SEQ ID NO: 2247244 - DNA, 25 bp, Homo sapien
cttttcaagctgtagacgatgggat

SEQ ID NO: 2247245 - DNA, 25 bp, Homo sapien
gagcctcctcgcaacctttttaatg

SEQ ID NO: 2247246 - DNA, 25 bp, Homo sapien
gcttttcaagctgtagacgatggga

SEQ ID NO: 2247247 - DNA, 25 bp, Homo sapien
gcttgttgagaagtgaagctacaat

SEQ ID NO: 2247248 - DNA, 25 bp, Homo sapien
tctttaggagaagccctcatgtcag

SEQ ID NO: 2247249 - DNA, 25 bp, Homo sapien
gctacaatgaagtgaagcgtggagt

SEQ ID NO: 2247250 - DNA, 25 bp, Homo sapien
cgtggagtaatgaatagtgagtgaa

SEQ ID NO: 2247251 - DNA, 25 bp, Homo sapien
ctaaattgtatgctttattgaacac

SEQ ID NO: 2247252 - DNA, 25 bp, Homo sapien
taaattgtatgctttattgaacact

SEQ ID NO: 2247253 - DNA, 25 bp, Homo sapien
tctaaattgtatgctttattgaaca

SEQ ID NO: 2247254 - DNA, 25 bp, Homo sapien
ctctaaattgtatgctttattgaac

SEQ ID NO: 2247255 - DNA, 25 bp, Homo sapien
tcctgctagcagtcgaaggagtcat

SEQ ID NO: 2247256 - DNA, 25 bp, Homo sapien
gatttgttgctattggccacaaggg

SEQ ID NO: 2247257 - DNA, 25 bp, Homo sapien
tcttcagatttgttgctattggcca

SEQ ID NO: 2247258 - DNA, 25 bp, Homo sapien
tctgggccagtgtatgtcctgctag

SEQ ID NO: 2247259 - DNA, 25 bp, Homo sapien
tttgttggtaaagatgccttaagct

SEQ ID NO: 2247260 - DNA, 25 bp, Homo sapien
taaagctcctttaatgggatccatg

SEQ ID NO: 2247261 - DNA, 25 bp, Homo sapien
cttaagctattaaggccatttgtta

SEQ ID NO: 2247262 - DNA, 25 bp, Homo sapien
gttttaaggaagttgcagtatatat

SEQ ID NO: 2247263 - DNA, 25 bp, Homo sapien
aaattaacatacatgcccgatgggt

SEQ ID NO: 2247264 - DNA, 25 bp, Homo sapien
ccgatgggttctcatctaataaaac

SEQ ID NO: 2247265 - DNA, 25 bp, Homo sapien
attaacatacatgcccgatgggttc

SEQ ID NO: 2247266 - DNA, 25 bp, Homo sapien
aacatacatgcccgatgggttctca

SEQ ID NO: 2247267 - DNA, 25 bp, Homo sapien
gagtgtagaagtgggtcccaaagaa

SEQ ID NO: 2247268 - DNA, 25 bp, Homo sapien
caaaatggagtgtagaagtgggtcc

SEQ ID NO: 2247269 - DNA, 25 bp, Homo sapien
tcagtcaactgaggggggaggtggc

SEQ ID NO: 2247270 - DNA, 25 bp, Homo sapien
cttctgtcacttgatctgtatcagt

SEQ ID NO: 2247271 - DNA, 25 bp, Homo sapien
cagactgttctactcagtagggaac

SEQ ID NO: 2247272 - DNA, 25 bp, Homo sapien
tggttgtctgcataccagactgttc

SEQ ID NO: 2247273 - DNA, 25 bp, Homo sapien
gcataccagactgttctactcagta

SEQ ID NO: 2247274 - DNA, 25 bp, Homo sapien
ctactcagtagggaacttgccaccc

SEQ ID NO: 2247275 - DNA, 25 bp, Homo sapien
ttgagacctgccaccatccagtctg

SEQ ID NO: 2247276 - DNA, 25 bp, Homo sapien
tgttctccctctggtatgcccctag

SEQ ID NO: 2247277 - DNA, 25 bp, Homo sapien
caggcctggcgccagcaagaattgc

SEQ ID NO: 2247278 - DNA, 25 bp, Homo sapien
gaccgatatgcttgctccctttgct

SEQ ID NO: 2247279 - DNA, 25 bp, Homo sapien
ggaaacatctcaccctggcagagct

SEQ ID NO: 2247280 - DNA, 25 bp, Homo sapien
gaatcccctttacccagctcaggtg

SEQ ID NO: 2247281 - DNA, 25 bp, Homo sapien
tgattagagaccaaggaacagcaga

SEQ ID NO: 2247282 - DNA, 25 bp, Homo sapien
taatagaatttcatgcgccagtaaa

SEQ ID NO: 2247283 - DNA, 25 bp, Homo sapien
tctctgagaggttgatgaaggagaa

SEQ ID NO: 2247284 - DNA, 25 bp, Homo sapien
gcagttccacagagattctctgaga

SEQ ID NO: 2247285 - DNA, 25 bp, Homo sapien
ggtgcctggttctccttcttggtta

SEQ ID NO: 2247286 - DNA, 25 bp, Homo sapien
ggtctggtctcttccgtctgtctct

SEQ ID NO: 2247287 - DNA, 25 bp, Homo sapien
ccacctggttcacagaagggggcca

SEQ ID NO: 2247288 - DNA, 25 bp, Homo sapien
cagaagggggccataatgaggcatt

SEQ ID NO: 2247289 - DNA, 25 bp, Homo sapien
ggagcatttgtatgattgtttttct

SEQ ID NO: 2247290 - DNA, 25 bp, Homo sapien
gggctcagatactaggggagcattt

SEQ ID NO: 2247291 - DNA, 25 bp, Homo sapien
ggttcgcagtcgaggccacttcttc

SEQ ID NO: 2247292 - DNA, 25 bp, Homo sapien
cacttcttccactctatggctagca

SEQ ID NO: 2247293 - DNA, 25 bp, Homo sapien
ggctacaacaaccaccacgattagg

SEQ ID NO: 2247294 - DNA, 25 bp, Homo sapien
cacgattaggctacttcggacaatg

SEQ ID NO: 2247295 - DNA, 25 bp, Homo sapien
tctgaccagatatcagggtaggcct

SEQ ID NO: 2247296 - DNA, 25 bp, Homo sapien
gctgcagctgtagtttccaatgcct

SEQ ID NO: 2247297 - DNA, 25 bp, Homo sapien
gatgtccttccctaacttgaacatg

SEQ ID NO: 2247298 - DNA, 25 bp, Homo sapien
gtcctcggcactgaagggtgatgtc

SEQ ID NO: 2247299 - DNA, 25 bp, Homo sapien
cagtcacccagatctccagggagtc

SEQ ID NO: 2247300 - DNA, 25 bp, Homo sapien
tccagggagtcactgtgatttgaag

SEQ ID NO: 2247301 - DNA, 25 bp, Homo sapien
tctccagggagtcactgtgatttga

SEQ ID NO: 2247302 - DNA, 25 bp, Homo sapien
gtcacccagatctccagggagtcac

SEQ ID NO: 2247303 - DNA, 25 bp, Homo sapien
tggcatccagaagtcagccctgtac

SEQ ID NO: 2247304 - DNA, 25 bp, Homo sapien
cctctgttgctctaaaggctcctga

SEQ ID NO: 2247305 - DNA, 25 bp, Homo sapien
ggcagttccccttgacactgaagag

SEQ ID NO: 2247306 - DNA, 25 bp, Homo sapien
taataaacacagctatagatcccag

SEQ ID NO: 2247307 - DNA, 25 bp, Homo sapien
caaagagaagaggtcactttccagt

SEQ ID NO: 2247308 - DNA, 25 bp, Homo sapien
aactggtccagtcagggtggtagca

SEQ ID NO: 2247309 - DNA, 25 bp, Homo sapien
ggaatgccccgtcattactggtgga

SEQ ID NO: 2247310 - DNA, 25 bp, Homo sapien
tccccagagctgcattgaagtggct

SEQ ID NO: 2247311 - DNA, 25 bp, Homo sapien
tgtaacgccccatgctagtaccaga

SEQ ID NO: 2247312 - DNA, 25 bp, Homo sapien
aaagtcccttggcagcgcaggatca

SEQ ID NO: 2247313 - DNA, 25 bp, Homo sapien
gatacagctatagttcccagagtcc

SEQ ID NO: 2247314 - DNA, 25 bp, Homo sapien
gaaactgtaagggaacatgggctcc

SEQ ID NO: 2247315 - DNA, 25 bp, Homo sapien
gctgagttccctgagacactccgaa

SEQ ID NO: 2247316 - DNA, 25 bp, Homo sapien
gaaaagtcataatatcggcagctgt

SEQ ID NO: 2247317 - DNA, 25 bp, Homo sapien
aattgaaagtcactcgggcaccagg

SEQ ID NO: 2247318 - DNA, 25 bp, Homo sapien
agggctggcccatgtcttgaagaag

SEQ ID NO: 2247319 - DNA, 25 bp, Homo sapien
ccgaaatgattagaaagtgagctgc

SEQ ID NO: 2247320 - DNA, 25 bp, Homo sapien
tagcaaatattggttctcggaggct

SEQ ID NO: 2247321 - DNA, 25 bp, Homo sapien
gacttctcacacagggacccttcaa

SEQ ID NO: 2247322 - DNA, 25 bp, Homo sapien
tgagtcctcagtgtgatcagggcag

SEQ ID NO: 2247323 - DNA, 25 bp, Homo sapien
aatccactttgcagatggacttctc

SEQ ID NO: 2247324 - DNA, 25 bp, Homo sapien
taagattggacacaggctctcagga

SEQ ID NO: 2247325 - DNA, 25 bp, Homo sapien
caaagctattaataacgattatggc

SEQ ID NO: 2247326 - DNA, 25 bp, Homo sapien
gcctgcctggctctaagattggaca

SEQ ID NO: 2247327 - DNA, 25 bp, Homo sapien
ttaatatcgtgcagccagaggccct

SEQ ID NO: 2247328 - DNA, 25 bp, Homo sapien
ttttatgacaagctccagcggctca

SEQ ID NO: 2247329 - DNA, 25 bp, Homo sapien
cttttatgacaagctccagcggctc

SEQ ID NO: 2247330 - DNA, 25 bp, Homo sapien
tttatgacaagctccagcggctcac

SEQ ID NO: 2247331 - DNA, 25 bp, Homo sapien
ttatacagagcaaaccccatgcctg

SEQ ID NO: 2247332 - DNA, 25 bp, Homo sapien
gcaccaagttgctggacaggttctt

SEQ ID NO: 2247333 - DNA, 25 bp, Homo sapien
gccatcctttgcaccggagttgtag

SEQ ID NO: 2247334 - DNA, 25 bp, Homo sapien
agttgtagttcctggccccggattg

SEQ ID NO: 2247335 - DNA, 25 bp, Homo sapien
cctcactgggctccgatacagccat

SEQ ID NO: 2247336 - DNA, 25 bp, Homo sapien
gcctcactgggctccgatacagcca

SEQ ID NO: 2247337 - DNA, 25 bp, Homo sapien
gaggaaagttggtctctgcccacag

SEQ ID NO: 2247338 - DNA, 25 bp, Homo sapien
tgcaccagagggttaagttcttcca

SEQ ID NO: 2247339 - DNA, 25 bp, Homo sapien
aaactccttagttgagccagaaggg

SEQ ID NO: 2247340 - DNA, 25 bp, Homo sapien
aatggcagtggtagctcccggtgtg

SEQ ID NO: 2247341 - DNA, 25 bp, Homo sapien
tagaaacagcagaattaatgaagcc

SEQ ID NO: 2247342 - DNA, 25 bp, Homo sapien
gaaacagcagaattaatgaagccat

SEQ ID NO: 2247343 - DNA, 25 bp, Homo sapien
agaaacagcagaattaatgaagcca

SEQ ID NO: 2247344 - DNA, 25 bp, Homo sapien
ctagaaacagcagaattaatgaagc

SEQ ID NO: 2247345 - DNA, 25 bp, Homo sapien
agtctcttctatcaataccccattg

SEQ ID NO: 2247346 - DNA, 25 bp, Homo sapien
tcttctatcaataccccattgcaca

SEQ ID NO: 2247347 - DNA, 25 bp, Homo sapien
cagtctcttctatcaataccccatt

SEQ ID NO: 2247348 - DNA, 25 bp, Homo sapien
tctcttctatcaataccccattgca

SEQ ID NO: 2247349 - DNA, 25 bp, Homo sapien
gagaagggccgtgactatgaagagc

SEQ ID NO: 2247350 - DNA, 25 bp, Homo sapien
gaagggccgtgactatgaagagcat

SEQ ID NO: 2247351 - DNA, 25 bp, Homo sapien
agcagagaagggccgtgactatgaa

SEQ ID NO: 2247352 - DNA, 25 bp, Homo sapien
cagagaagggccgtgactatgaaga

SEQ ID NO: 2247353 - DNA, 25 bp, Homo sapien
tgagctgttcccagcaaccaggctt

SEQ ID NO: 2247354 - DNA, 25 bp, Homo sapien
gagctgttcccagcaaccaggcttc

SEQ ID NO: 2247355 - DNA, 25 bp, Homo sapien
ggtgaccccttgagctgttcccagc

SEQ ID NO: 2247356 - DNA, 25 bp, Homo sapien
gaccccttgagctgttcccagcaac

SEQ ID NO: 2247357 - DNA, 25 bp, Homo sapien
ctagtgagaccagaaaagagatgag

SEQ ID NO: 2247358 - DNA, 25 bp, Homo sapien
tgagaccagaaaagagatgagagga

SEQ ID NO: 2247359 - DNA, 25 bp, Homo sapien
agaccagaaaagagatgagaggagt

SEQ ID NO: 2247360 - DNA, 25 bp, Homo sapien
accagaaaagagatgagaggagttg

SEQ ID NO: 2247361 - DNA, 25 bp, Homo sapien
acttgacccctgctgaaactttttg

SEQ ID NO: 2247362 - DNA, 25 bp, Homo sapien
taatgagtacgggacccaggtcagg

SEQ ID NO: 2247363 - DNA, 25 bp, Homo sapien
ctctaatgagtacgggacccaggtc

SEQ ID NO: 2247364 - DNA, 25 bp, Homo sapien
tgacccctgctgaaactttttgaaa

SEQ ID NO: 2247365 - DNA, 25 bp, Homo sapien
cacactgaccacagttgcagggcgg

SEQ ID NO: 2247366 - DNA, 25 bp, Homo sapien
ccttgttcccagtagagtagcctga

SEQ ID NO: 2247367 - DNA, 25 bp, Homo sapien
gattgcccaagtattctgtccctca

SEQ ID NO: 2247368 - DNA, 25 bp, Homo sapien
taacatccctactgggtcagaagtg

SEQ ID NO: 2247369 - DNA, 25 bp, Homo sapien
tctgagaactatgcatttctccacc

SEQ ID NO: 2247370 - DNA, 25 bp, Homo sapien
ctcttgcctctgagaactatgcatt

SEQ ID NO: 2247371 - DNA, 25 bp, Homo sapien
tccacccgctggcttgagtgctgac

SEQ ID NO: 2247372 - DNA, 25 bp, Homo sapien
tttctccacccgctggcttgagtgc

SEQ ID NO: 2247373 - DNA, 25 bp, Homo sapien
acttccaccttatccacagcactac

SEQ ID NO: 2247374 - DNA, 25 bp, Homo sapien
gcactaccaacagcaaggcaacaag

SEQ ID NO: 2247375 - DNA, 25 bp, Homo sapien
acagcactaccaacagcaaggcaac

SEQ ID NO: 2247376 - DNA, 25 bp, Homo sapien
ctgattctgagtctccgacacttcc

SEQ ID NO: 2247377 - DNA, 25 bp, Homo sapien
ctgcatgattagagacaacctgata

SEQ ID NO: 2247378 - DNA, 25 bp, Homo sapien
gacaacctgatagcttcattcagaa

SEQ ID NO: 2247379 - DNA, 25 bp, Homo sapien
gattagagacaacctgatagcttca

SEQ ID NO: 2247380 - DNA, 25 bp, Homo sapien
gagacaacctgatagcttcattcag

SEQ ID NO: 2247381 - DNA, 25 bp, Homo sapien
gatagctgcaactgtaggtccctgt

SEQ ID NO: 2247382 - DNA, 25 bp, Homo sapien
gatgatgaagtctccgtttactgag

SEQ ID NO: 2247383 - DNA, 25 bp, Homo sapien
ggctcactgcgatgtgaccagatgt

SEQ ID NO: 2247384 - DNA, 25 bp, Homo sapien
tactggatgagatactcggcactga

SEQ ID NO: 2247385 - DNA, 25 bp, Homo sapien
caatcaggaagacctcatacctgta

SEQ ID NO: 2247386 - DNA, 25 bp, Homo sapien
tgtgttgtcatcgatgctggtggca

SEQ ID NO: 2247387 - DNA, 25 bp, Homo sapien
gacaccgtaggctcacattctgacc

SEQ ID NO: 2247388 - DNA, 25 bp, Homo sapien
gatggcatcctaatggaggtcttcc

SEQ ID NO: 2247389 - DNA, 25 bp, Homo sapien
ttccaggtgagaagatagtggcagc

SEQ ID NO: 2247390 - DNA, 25 bp, Homo sapien
cagattttcaggacatcactaagga

SEQ ID NO: 2247391 - DNA, 25 bp, Homo sapien
cctcattagagcaaaggtcattcca

SEQ ID NO: 2247392 - DNA, 25 bp, Homo sapien
ggtcattccatagattggcccttgg

SEQ ID NO: 2247393 - DNA, 25 bp, Homo sapien
ggagtgaacctctatatgatgcgtc

SEQ ID NO: 2247394 - DNA, 25 bp, Homo sapien
tactagctctactgatagggaacca

SEQ ID NO: 2247395 - DNA, 25 bp, Homo sapien
tagagattggtgctgccttactagc

SEQ ID NO: 2247396 - DNA, 25 bp, Homo sapien
cccatttttagagtagaggaagcca

SEQ ID NO: 2247397 - DNA, 25 bp, Homo sapien
tgtggccaattccatctagaaacct

SEQ ID NO: 2247398 - DNA, 25 bp, Homo sapien
gatgccagcagccatagccacaccc

SEQ ID NO: 2247399 - DNA, 25 bp, Homo sapien
ctgggacaacaattgccagatgcca

SEQ ID NO: 2247400 - DNA, 25 bp, Homo sapien
tgccagatgccagcagccatagcca

SEQ ID NO: 2247401 - DNA, 25 bp, Homo sapien
gggacaacaattgccagatgccagc

SEQ ID NO: 2247402 - DNA, 25 bp, Homo sapien
gaatatggccattgtcccagttggg

SEQ ID NO: 2247403 - DNA, 25 bp, Homo sapien
gacttggtaatccacaggctctgca

SEQ ID NO: 2247404 - DNA, 25 bp, Homo sapien
gttaacattacacccaggaagagcg

SEQ ID NO: 2247405 - DNA, 25 bp, Homo sapien
tatgagtgcggcagatgtaaacccc

SEQ ID NO: 2247406 - DNA, 25 bp, Homo sapien
ccaaagcgtgatgttctcccaaggg

SEQ ID NO: 2247407 - DNA, 25 bp, Homo sapien
tccagtagcagcaccggtaaagacc

SEQ ID NO: 2247408 - DNA, 25 bp, Homo sapien
ggaacttgcttgatatccgagaggg

SEQ ID NO: 2247409 - DNA, 25 bp, Homo sapien
tctagaactttactgggctttgacc

SEQ ID NO: 2247410 - DNA, 25 bp, Homo sapien
attgatgtcatacccagactcatcc

SEQ ID NO: 2247411 - DNA, 25 bp, Homo sapien
agagcaaaacagtgaatgtcttcag

SEQ ID NO: 2247412 - DNA, 25 bp, Homo sapien
aagagcaaaacagtgaatgtcttca

SEQ ID NO: 2247413 - DNA, 25 bp, Homo sapien
gtgctctgagtcttgaagaattttt

SEQ ID NO: 2247414 - DNA, 25 bp, Homo sapien
cgaggcaggtctgggatccgggaag

SEQ ID NO: 2247415 - DNA, 25 bp, Homo sapien
aggcaggtctgggatccgggaagga

SEQ ID NO: 2247416 - DNA, 25 bp, Homo sapien
caggtctgggatccgggaaggaaag

SEQ ID NO: 2247417 - DNA, 25 bp, Homo sapien
tctgggatccgggaaggaaaggaga

SEQ ID NO: 2247418 - DNA, 25 bp, Homo sapien
tatgcgctcatttgtaggtacttac

SEQ ID NO: 2247419 - DNA, 25 bp, Homo sapien
ctatgcgctcatttgtaggtactta

SEQ ID NO: 2247420 - DNA, 25 bp, Homo sapien
ggtagttgaaggcccgctccgatgt

SEQ ID NO: 2247421 - DNA, 25 bp, Homo sapien
ccgctccgatgttggagattctcca

SEQ ID NO: 2247422 - DNA, 25 bp, Homo sapien
ggcccgctccgatgttggagattct

SEQ ID NO: 2247423 - DNA, 25 bp, Homo sapien
gttgaaggcccgctccgatgttgga

SEQ ID NO: 2247424 - DNA, 25 bp, Homo sapien
ctgcccggcatgagaagagctgtct

SEQ ID NO: 2247425 - DNA, 25 bp, Homo sapien
gacagcctcttcggctctgagcccc

SEQ ID NO: 2247426 - DNA, 25 bp, Homo sapien
gcccggcatgagaagagctgtctaa

SEQ ID NO: 2247427 - DNA, 25 bp, Homo sapien
cggcatgagaagagctgtctaagga

SEQ ID NO: 2247428 - DNA, 25 bp, Homo sapien
taaaatgtccacatggtcttgcatc

SEQ ID NO: 2247429 - DNA, 25 bp, Homo sapien
catggtcttgcatcaacgccctcac

SEQ ID NO: 2247430 - DNA, 25 bp, Homo sapien
ctttccattctttggcctcactagt

SEQ ID NO: 2247431 - DNA, 25 bp, Homo sapien
tagtgccccacagtctttgctgagc

SEQ ID NO: 2247432 - DNA, 25 bp, Homo sapien
gccctttgtctgggttctgcctgct

SEQ ID NO: 2247433 - DNA, 25 bp, Homo sapien
catcacagtacttattggttgctac

SEQ ID NO: 2247434 - DNA, 25 bp, Homo sapien
cagtacttattggttgctactaaac

SEQ ID NO: 2247435 - DNA, 25 bp, Homo sapien
ggacagccatatctcctgaattctc

SEQ ID NO: 2247436 - DNA, 25 bp, Homo sapien
ccagcctgggtgacagagagaggct

SEQ ID NO: 2247437 - DNA, 25 bp, Homo sapien
gagtggagatggcaccagtgcattc

SEQ ID NO: 2247438 - DNA, 25 bp, Homo sapien
tccagcctgggtgacagagagaggc

SEQ ID NO: 2247439 - DNA, 25 bp, Homo sapien
cagtgagtggagatggcaccagtgc

SEQ ID NO: 2247440 - DNA, 25 bp, Homo sapien
tctccaggatgtgtgtagaaagaag

SEQ ID NO: 2247441 - DNA, 25 bp, Homo sapien
ctttcccctctccaggatgtgtgta

SEQ ID NO: 2247442 - DNA, 25 bp, Homo sapien
ccctctccaggatgtgtgtagaaag

SEQ ID NO: 2247443 - DNA, 25 bp, Homo sapien
caggatgtgtgtagaaagaagatat

SEQ ID NO: 2247444 - DNA, 25 bp, Homo sapien
tatatccctcatctgcatctacgtc

SEQ ID NO: 2247445 - DNA, 25 bp, Homo sapien
gtttgtcagcccttgtatatccctc

SEQ ID NO: 2247446 - DNA, 25 bp, Homo sapien
tggtgtgaatcatcgccttcttcaa

SEQ ID NO: 2247447 - DNA, 25 bp, Homo sapien
cagtgcagatactgagttggtgtga

SEQ ID NO: 2247448 - DNA, 25 bp, Homo sapien
cttgtgcctcctcaaatgacatgga

SEQ ID NO: 2247449 - DNA, 25 bp, Homo sapien
tgtgcctcctcaaatgacatggatt

SEQ ID NO: 2247450 - DNA, 25 bp, Homo sapien
cctcctcaaatgacatggatttcat

SEQ ID NO: 2247451 - DNA, 25 bp, Homo sapien
tgcctcctcaaatgacatggatttc

SEQ ID NO: 2247452 - DNA, 25 bp, Homo sapien
gacaggcacagatgttctgggagac

SEQ ID NO: 2247453 - DNA, 25 bp, Homo sapien
ggcacagatgttctgggagacggac

SEQ ID NO: 2247454 - DNA, 25 bp, Homo sapien
cacagatgttctgggagacggacat

SEQ ID NO: 2247455 - DNA, 25 bp, Homo sapien
gtgggacaggcacagatgttctggg

SEQ ID NO: 2247456 - DNA, 25 bp, Homo sapien
tattgcaccaattttctcagaacta

SEQ ID NO: 2247457 - DNA, 25 bp, Homo sapien
ttattgcaccaattttctcagaact

SEQ ID NO: 2247458 - DNA, 25 bp, Homo sapien
attgcaccaattttctcagaactac

SEQ ID NO: 2247459 - DNA, 25 bp, Homo sapien
tgctcagtaccccataatagagact

SEQ ID NO: 2247460 - DNA, 25 bp, Homo sapien
ttcaataagtcttgatgggaagcca

SEQ ID NO: 2247461 - DNA, 25 bp, Homo sapien
tagagactaactacagtctgatggg

SEQ ID NO: 2247462 - DNA, 25 bp, Homo sapien
agggcaggggtaagcactgtataca

SEQ ID NO: 2247463 - DNA, 25 bp, Homo sapien
cctcagaacggcagtgatgatgtga

SEQ ID NO: 2247464 - DNA, 25 bp, Homo sapien
tgatcataagaagccagggtcagca

SEQ ID NO: 2247465 - DNA, 25 bp, Homo sapien
cagaacggcagtgatgatgtgatca

SEQ ID NO: 2247466 - DNA, 25 bp, Homo sapien
gatcataagaagccagggtcagcag

SEQ ID NO: 2247467 - DNA, 25 bp, Homo sapien
caaatcacggaagtgttcgaccaca

SEQ ID NO: 2247468 - DNA, 25 bp, Homo sapien
aaccagtttcatgatgggcttcaaa

SEQ ID NO: 2247469 - DNA, 25 bp, Homo sapien
ccacattggtggaacagaatgttaa

SEQ ID NO: 2247470 - DNA, 25 bp, Homo sapien
agaaatccagccacccatgaggcac

SEQ ID NO: 2247471 - DNA, 25 bp, Homo sapien
tgggttacaggtggctatatagcaa

SEQ ID NO: 2247472 - DNA, 25 bp, Homo sapien
tattgcagtgggttacaggtggcta

SEQ ID NO: 2247473 - DNA, 25 bp, Homo sapien
cataagacattacagccaggaagaa

SEQ ID NO: 2247474 - DNA, 25 bp, Homo sapien
ggctatatagcaatcataagacatt

SEQ ID NO: 2247475 - DNA, 25 bp, Homo sapien
ggctcaatggtactggtgcagccaa

SEQ ID NO: 2247476 - DNA, 25 bp, Homo sapien
ggtactggtgcagccaatctctagg

SEQ ID NO: 2247477 - DNA, 25 bp, Homo sapien
aatggtactggtgcagccaatctct

SEQ ID NO: 2247478 - DNA, 25 bp, Homo sapien
tcaatggtactggtgcagccaatct

SEQ ID NO: 2247479 - DNA, 25 bp, Homo sapien
tgaaggccatggagatccccaaaac

SEQ ID NO: 2247480 - DNA, 25 bp, Homo sapien
ctgaaatttgaatcgtgttttcttc

SEQ ID NO: 2247481 - DNA, 25 bp, Homo sapien
cgcaatgttgcccattacagtcacc

SEQ ID NO: 2247482 - DNA, 25 bp, Homo sapien
cacaggatcgcaatgttgcccatta

SEQ ID NO: 2247483 - DNA, 25 bp, Homo sapien
tctgcaagcagggactggcacatac

SEQ ID NO: 2247484 - DNA, 25 bp, Homo sapien
taagcgctccaacaaccttctgcaa

SEQ ID NO: 2247485 - DNA, 25 bp, Homo sapien
taattgagagatcgatgtcaggttc

SEQ ID NO: 2247486 - DNA, 25 bp, Homo sapien
gacatcctgaacgtccattcagtga

SEQ ID NO: 2247487 - DNA, 25 bp, Homo sapien
gtgggtacacagtaagtgtatacat

SEQ ID NO: 2247488 - DNA, 25 bp, Homo sapien
tgtgttacaaattgtccaattacac

SEQ ID NO: 2247489 - DNA, 25 bp, Homo sapien
attgactatagtcaaccccgttgtg

SEQ ID NO: 2247490 - DNA, 25 bp, Homo sapien
ccgttgtgctatcaagtaataggtc

SEQ ID NO: 2247491 - DNA, 25 bp, Homo sapien
tcctcattatactgaatactagtgg

SEQ ID NO: 2247492 - DNA, 25 bp, Homo sapien
cattatactgaatactagtggtttg

SEQ ID NO: 2247493 - DNA, 25 bp, Homo sapien
ctcattatactgaatactagtggtt

SEQ ID NO: 2247494 - DNA, 25 bp, Homo sapien
atactgaatactagtggtttgtttg

SEQ ID NO: 2247495 - DNA, 25 bp, Homo sapien
ttagattctgcccaaatgtaccctg

SEQ ID NO: 2247496 - DNA, 25 bp, Homo sapien
gtcaccaagggctcaaatttgctgg

SEQ ID NO: 2247497 - DNA, 25 bp, Homo sapien
tttgctggtcatctggtcaatctga

SEQ ID NO: 2247498 - DNA, 25 bp, Homo sapien
tgtaccctggcatgagttttgactc

SEQ ID NO: 2247499 - DNA, 25 bp, Homo sapien
ggagaggaattgtaaaccttcatga

SEQ ID NO: 2247500 - DNA, 25 bp, Homo sapien
ggaattgtaaaccttcatgaggaag

SEQ ID NO: 2247501 - DNA, 25 bp, Homo sapien
ttgttcctcagactttggaccatgg

SEQ ID NO: 2247502 - DNA, 25 bp, Homo sapien
gaaggagaggaattgtaaaccttca

SEQ ID NO: 2247503 - DNA, 25 bp, Homo sapien
aacacttcaaggataggtgcaggtg

SEQ ID NO: 2247504 - DNA, 25 bp, Homo sapien
gtgtttgcctcaaaccgagggcatt

SEQ ID NO: 2247505 - DNA, 25 bp, Homo sapien
tgggaagcacaagtgtttgcctcaa

SEQ ID NO: 2247506 - DNA, 25 bp, Homo sapien
ggtgaacacttcaaggataggtgca

SEQ ID NO: 2247507 - DNA, 25 bp, Homo sapien
catgttcatagctggtggccaccag

SEQ ID NO: 2247508 - DNA, 25 bp, Homo sapien
gccaccagctgcaagcagagctttg

SEQ ID NO: 2247509 - DNA, 25 bp, Homo sapien
gctgcaagcagagctttggggacat

SEQ ID NO: 2247510 - DNA, 25 bp, Homo sapien
tgttcatagctggtggccaccagct

SEQ ID NO: 2247511 - DNA, 25 bp, Homo sapien
caacagaggaccagttgctgaggaa

SEQ ID NO: 2247512 - DNA, 25 bp, Homo sapien
ggcagtcagaaaagaaccccattga

SEQ ID NO: 2247513 - DNA, 25 bp, Homo sapien
gcatcacaatggtgagacacataga

SEQ ID NO: 2247514 - DNA, 25 bp, Homo sapien
ggcccaggtttccatcaccatgact

SEQ ID NO: 2247515 - DNA, 25 bp, Homo sapien
aacaaatgccagttgagtctcaaac

SEQ ID NO: 2247516 - DNA, 25 bp, Homo sapien
gtctcaaactggtgaaagggtggaa

SEQ ID NO: 2247517 - DNA, 25 bp, Homo sapien
catgtttcagaggacaacttgaccc

SEQ ID NO: 2247518 - DNA, 25 bp, Homo sapien
taaaggttcacaagtggcaacattg

SEQ ID NO: 2247519 - DNA, 25 bp, Homo sapien
taaaaaagggcattcacctgcacac

SEQ ID NO: 2247520 - DNA, 25 bp, Homo sapien
cacaccattgtgagtcttttaaaaa

SEQ ID NO: 2247521 - DNA, 25 bp, Homo sapien
actgcaatggacacccttatacttg

SEQ ID NO: 2247522 - DNA, 25 bp, Homo sapien
tacagaaagcttcagagtacaaaag

SEQ ID NO: 2247523 - DNA, 25 bp, Homo sapien
tagttgtctgcataccaatagctgg

SEQ ID NO: 2247524 - DNA, 25 bp, Homo sapien
tatccggtcagtttcatggcccaga

SEQ ID NO: 2247525 - DNA, 25 bp, Homo sapien
tgtttctcataagggtatagttgtc

SEQ ID NO: 2247526 - DNA, 25 bp, Homo sapien
tggcccagacccagtcaagaactct

SEQ ID NO: 2247527 - DNA, 25 bp, Homo sapien
tcacacagctagtgccaaagttagg

SEQ ID NO: 2247528 - DNA, 25 bp, Homo sapien
gataaagcctatcgagcctcctttg

SEQ ID NO: 2247529 - DNA, 25 bp, Homo sapien
tattgacacagcaatatgctaggtg

SEQ ID NO: 2247530 - DNA, 25 bp, Homo sapien
tcaaatgcaaactctatccccttct

SEQ ID NO: 2247531 - DNA, 25 bp, Homo sapien
cagtggttagttctctgacttgcac

SEQ ID NO: 2247532 - DNA, 25 bp, Homo sapien
tttggttcctcacgagaaaggacca

SEQ ID NO: 2247533 - DNA, 25 bp, Homo sapien
gaaaggaccatagcaaattcaactc

SEQ ID NO: 2247534 - DNA, 25 bp, Homo sapien
tcaactctctatactcagtggttag

SEQ ID NO: 2247535 - DNA, 25 bp, Homo sapien
taggaacgctagtagccagaaaaat

SEQ ID NO: 2247536 - DNA, 25 bp, Homo sapien
cgctagtagccagaaaaatctcttc

SEQ ID NO: 2247537 - DNA, 25 bp, Homo sapien
ctttcttaggaacgctagtagccag

SEQ ID NO: 2247538 - DNA, 25 bp, Homo sapien
gatcccaaatcttcccatgttgcag

SEQ ID NO: 2247539 - DNA, 25 bp, Homo sapien
cttcacttaggctggtatcaaataa

SEQ ID NO: 2247540 - DNA, 25 bp, Homo sapien
ggcagagtcttcacttaggctggta

SEQ ID NO: 2247541 - DNA, 25 bp, Homo sapien
gaaaactcttgagtgccagaaagga

SEQ ID NO: 2247542 - DNA, 25 bp, Homo sapien
aaaactcttgagtgccagaaaggat

SEQ ID NO: 2247543 - DNA, 25 bp, Homo sapien
tagcattgagggtgcgggtgtctgt

SEQ ID NO: 2247544 - DNA, 25 bp, Homo sapien
tgcgggtgtctgtttggagctccag

SEQ ID NO: 2247545 - DNA, 25 bp, Homo sapien
tccagttctgcaaggtctaggaaag

SEQ ID NO: 2247546 - DNA, 25 bp, Homo sapien
aacccagctcagtcccgggtactga

SEQ ID NO: 2247547 - DNA, 25 bp, Homo sapien
ctgcgcccggccaataagctgattc

SEQ ID NO: 2247548 - DNA, 25 bp, Homo sapien
gcatgttccactgcataatctgagg

SEQ ID NO: 2247549 - DNA, 25 bp, Homo sapien
gcccgtgccaaggtagtctgcatgt

SEQ ID NO: 2247550 - DNA, 25 bp, Homo sapien
tgagataggctggtttcagtgcccg

SEQ ID NO: 2247551 - DNA, 25 bp, Homo sapien
gaggacaaatgtctggtaaaatctt

SEQ ID NO: 2247552 - DNA, 25 bp, Homo sapien
ctcaatgtttttcatagggcaactt

SEQ ID NO: 2247553 - DNA, 25 bp, Homo sapien
atgtttttcatagggcaactttcac

SEQ ID NO: 2247554 - DNA, 25 bp, Homo sapien
tctcaatgtttttcatagggcaact

SEQ ID NO: 2247555 - DNA, 25 bp, Homo sapien
tgtctcaatgtttttcatagggcaa

SEQ ID NO: 2247556 - DNA, 25 bp, Homo sapien
gggatcaccattgtataaaatactg

SEQ ID NO: 2247557 - DNA, 25 bp, Homo sapien
tcatagtacaggctaacagcagtca

SEQ ID NO: 2247558 - DNA, 25 bp, Homo sapien
cgaggcgggcaagtaagtgtacata

SEQ ID NO: 2247559 - DNA, 25 bp, Homo sapien
cagaagctaagggaattcctaggat

SEQ ID NO: 2247560 - DNA, 25 bp, Homo sapien
gagacaaggatcaccacaacagagg

SEQ ID NO: 2247561 - DNA, 25 bp, Homo sapien
ggaagacatgtaggagacaaggatc

SEQ ID NO: 2247562 - DNA, 25 bp, Homo sapien
ggtgaccagggtgaatcccccacag

SEQ ID NO: 2247563 - DNA, 25 bp, Homo sapien
aacagaggtgaccagggtgaatccc

SEQ ID NO: 2247564 - DNA, 25 bp, Homo sapien
accaagatcgggaggtgatccaagg

SEQ ID NO: 2247565 - DNA, 25 bp, Homo sapien
ccaagatcgggaggtgatccaagga

SEQ ID NO: 2247566 - DNA, 25 bp, Homo sapien
caccaagatcgggaggtgatccaag

SEQ ID NO: 2247567 - DNA, 25 bp, Homo sapien
caagatcgggaggtgatccaaggat

SEQ ID NO: 2247568 - DNA, 25 bp, Homo sapien
tgtcacagtgaccatcttaactaac

SEQ ID NO: 2247569 - DNA, 25 bp, Homo sapien
tgagcaaaccagtaccaacaatgag

SEQ ID NO: 2247570 - DNA, 25 bp, Homo sapien
catggttgacaaagcgatagttgtg

SEQ ID NO: 2247571 - DNA, 25 bp, Homo sapien
cgatagttgtgtgatggaagttgtc

SEQ ID NO: 2247572 - DNA, 25 bp, Homo sapien
agaaaagataatggcctcttgacat

SEQ ID NO: 2247573 - DNA, 25 bp, Homo sapien
taatgtggtagaacagtgggtgaca

SEQ ID NO: 2247574 - DNA, 25 bp, Homo sapien
caagctcatttaagttatacgggaa

SEQ ID NO: 2247575 - DNA, 25 bp, Homo sapien
caaacaagctcatttaagttatacg

SEQ ID NO: 2247576 - DNA, 25 bp, Homo sapien
gctgactctgatcagaaccacaagg

SEQ ID NO: 2247577 - DNA, 25 bp, Homo sapien
gaattttccactggcacaagctgag

SEQ ID NO: 2247578 - DNA, 25 bp, Homo sapien
gatgaagtcagtcaccatgggtgaa

SEQ ID NO: 2247579 - DNA, 25 bp, Homo sapien
gactccaaatagcaggacttcaagc

SEQ ID NO: 2247580 - DNA, 25 bp, Homo sapien
gaaactgagctcaaatttgaaggca

SEQ ID NO: 2247581 - DNA, 25 bp, Homo sapien
ttcactggtagattattgcagaaac

SEQ ID NO: 2247582 - DNA, 25 bp, Homo sapien
tcctaaacgaccataagaaactgag

SEQ ID NO: 2247583 - DNA, 25 bp, Homo sapien
ttattgcagaaaccctcatgctcct

SEQ ID NO: 2247584 - DNA, 25 bp, Homo sapien
gaggaccaagagtgggaaactgtca

SEQ ID NO: 2247585 - DNA, 25 bp, Homo sapien
ggataactccatgcccgtaacatga

SEQ ID NO: 2247586 - DNA, 25 bp, Homo sapien
caaacttgggacatagtgacaggat

SEQ ID NO: 2247587 - DNA, 25 bp, Homo sapien
tagagcatgggttgtctgattggca

SEQ ID NO: 2247588 - DNA, 25 bp, Homo sapien
gcagccacgcttggtgatattgcat

SEQ ID NO: 2247589 - DNA, 25 bp, Homo sapien
taaagagaatccgtaatccacgagc

SEQ ID NO: 2247590 - DNA, 25 bp, Homo sapien
tccacgagccatgtgattgagactc

SEQ ID NO: 2247591 - DNA, 25 bp, Homo sapien
tagcaaaggaagtcatagcacaggg

SEQ ID NO: 2247592 - DNA, 25 bp, Homo sapien
tataagatgacagttttccaacgac

SEQ ID NO: 2247593 - DNA, 25 bp, Homo sapien
taagatgacagttttccaacgacaa

SEQ ID NO: 2247594 - DNA, 25 bp, Homo sapien
ctataagatgacagttttccaacga

SEQ ID NO: 2247595 - DNA, 25 bp, Homo sapien
gatgacagttttccaacgacaactt

SEQ ID NO: 2247596 - DNA, 25 bp, Homo sapien
tgcaaaggggaaatcagcccactgc

SEQ ID NO: 2247597 - DNA, 25 bp, Homo sapien
gtgtaggtacctcagggactggtgg

SEQ ID NO: 2247598 - DNA, 25 bp, Homo sapien
acctcattggctgagaggtgtaggt

SEQ ID NO: 2247599 - DNA, 25 bp, Homo sapien
actggtgggtcttgagtgcaaaggg

SEQ ID NO: 2247600 - DNA, 25 bp, Homo sapien
ttgccacagcgaaagaaagacacct

SEQ ID NO: 2247601 - DNA, 25 bp, Homo sapien
tgctctattcctagaagtccagtgg

SEQ ID NO: 2247602 - DNA, 25 bp, Homo sapien
tgccagattgctgcagactttttgg

SEQ ID NO: 2247603 - DNA, 25 bp, Homo sapien
acagtttgaatctgcttagccacgg

SEQ ID NO: 2247604 - DNA, 25 bp, Homo sapien
ctgcaagtaccataacctcaggcac

SEQ ID NO: 2247605 - DNA, 25 bp, Homo sapien
ttcttgccttttgtttgtcatccat

SEQ ID NO: 2247606 - DNA, 25 bp, Homo sapien
cttccctcccccgatattcttgcct

SEQ ID NO: 2247607 - DNA, 25 bp, Homo sapien
attcttgccttttgtttgtcatcca

SEQ ID NO: 2247608 - DNA, 25 bp, Homo sapien
ccccgatattcttgccttttgtttg

SEQ ID NO: 2247609 - DNA, 25 bp, Homo sapien
ggccgaataggaacagctgcgatct

SEQ ID NO: 2247610 - DNA, 25 bp, Homo sapien
ttaaaagcagaatggaggagccaag

SEQ ID NO: 2247611 - DNA, 25 bp, Homo sapien
ggtgcgcgcaccgtccgcgagccga

SEQ ID NO: 2247612 - DNA, 25 bp, Homo sapien
aaaagcagaatggaggagccaagat

SEQ ID NO: 2247613 - DNA, 25 bp, Homo sapien
tgcatttccttgggggatgttagga

SEQ ID NO: 2247614 - DNA, 25 bp, Homo sapien
gcatttccttgggggatgttaggaa

SEQ ID NO: 2247615 - DNA, 25 bp, Homo sapien
ctgcatttccttgggggatgttagg

SEQ ID NO: 2247616 - DNA, 25 bp, Homo sapien
catttccttgggggatgttaggaag

SEQ ID NO: 2247617 - DNA, 25 bp, Homo sapien
gatgcagggtcgagctccaaactcg

SEQ ID NO: 2247618 - DNA, 25 bp, Homo sapien
ttgacaacaactgaagatgctctgt

SEQ ID NO: 2247619 - DNA, 25 bp, Homo sapien
gcaagaccatgtcgatgcagggtcg

SEQ ID NO: 2247620 - DNA, 25 bp, Homo sapien
cccttgacaacaactgaagatgctc

SEQ ID NO: 2247621 - DNA, 25 bp, Homo sapien
gattacatgtcatatcccaaatcat

SEQ ID NO: 2247622 - DNA, 25 bp, Homo sapien
gataggatctgcacatagtaagctt

SEQ ID NO: 2247623 - DNA, 25 bp, Homo sapien
ctcttgttcgaaactatatggagat

SEQ ID NO: 2247624 - DNA, 25 bp, Homo sapien
gatgataggatctgcacatagtaag

SEQ ID NO: 2247625 - DNA, 25 bp, Homo sapien
actatatggagatgataggatctgc

SEQ ID NO: 2247626 - DNA, 25 bp, Homo sapien
tctaattcaccatatataggtggtt

SEQ ID NO: 2247627 - DNA, 25 bp, Homo sapien
tattgcatgtcaatttggctactgg

SEQ ID NO: 2247628 - DNA, 25 bp, Homo sapien
acatatacactttctaattcaccat

SEQ ID NO: 2247629 - DNA, 25 bp, Homo sapien
cattgaattgactagatggtttagc

SEQ ID NO: 2247630 - DNA, 25 bp, Homo sapien
tcttatctcctccattacactatta

SEQ ID NO: 2247631 - DNA, 25 bp, Homo sapien
attattatgagcaatcgggtctgta

SEQ ID NO: 2247632 - DNA, 25 bp, Homo sapien
cttacaacaggtttgttgaaatctc

SEQ ID NO: 2247633 - DNA, 25 bp, Homo sapien
ggtctgtatacagttggccttggga

SEQ ID NO: 2247634 - DNA, 25 bp, Homo sapien
taaatcaggcctagactatcactgc

SEQ ID NO: 2247635 - DNA, 25 bp, Homo sapien
tacttgctcttgtaataaatcaggc

SEQ ID NO: 2247636 - DNA, 25 bp, Homo sapien
cctgctagtgtaccatgcaaagcac

SEQ ID NO: 2247637 - DNA, 25 bp, Homo sapien
cagtacgcgtcactttcatttcagc

SEQ ID NO: 2247638 - DNA, 25 bp, Homo sapien
tttacactagtgaagagatcccctt

SEQ ID NO: 2247639 - DNA, 25 bp, Homo sapien
ggtggtacactcacctttacactag

SEQ ID NO: 2247640 - DNA, 25 bp, Homo sapien
gagatccccttgttcatatagcaga

SEQ ID NO: 2247641 - DNA, 25 bp, Homo sapien
agtacatcataaggaattctgggtg

SEQ ID NO: 2247642 - DNA, 25 bp, Homo sapien
agatgcttctcgagcaggggacctg

SEQ ID NO: 2247643 - DNA, 25 bp, Homo sapien
agatctataagatgcttctcgagca

SEQ ID NO: 2247644 - DNA, 25 bp, Homo sapien
tctataagatgcttctcgagcaggg

SEQ ID NO: 2247645 - DNA, 25 bp, Homo sapien
tcagagagatctataagatgcttct

SEQ ID NO: 2247646 - DNA, 25 bp, Homo sapien
cagaagaaccagcttgcatcttgta

SEQ ID NO: 2247647 - DNA, 25 bp, Homo sapien
agaagaaccagcttgcatcttgtac

SEQ ID NO: 2247648 - DNA, 25 bp, Homo sapien
ccccagttttaagggatgtgtcaga

SEQ ID NO: 2247649 - DNA, 25 bp, Homo sapien
agcagccccagttttaagggatgtg

SEQ ID NO: 2247650 - DNA, 25 bp, Homo sapien
ctcgtggccactgggacgtatgaca

SEQ ID NO: 2247651 - DNA, 25 bp, Homo sapien
tcacccattgaacaggaaaaacagc

SEQ ID NO: 2247652 - DNA, 25 bp, Homo sapien
tcctgggccctaatttcacccattg

SEQ ID NO: 2247653 - DNA, 25 bp, Homo sapien
caagacctctttcgccatctcgtgg

SEQ ID NO: 2247654 - DNA, 25 bp, Homo sapien
ccggagtcctccttctgcccagtag

SEQ ID NO: 2247655 - DNA, 25 bp, Homo sapien
tgcccagtagcctgggttccctctg

SEQ ID NO: 2247656 - DNA, 25 bp, Homo sapien
tctggagtaaggccccggtagcctg

SEQ ID NO: 2247657 - DNA, 25 bp, Homo sapien
gggttccctctgagaccaggcccag

SEQ ID NO: 2247658 - DNA, 25 bp, Homo sapien
tatagacttgtagcaattagcttgc

SEQ ID NO: 2247659 - DNA, 25 bp, Homo sapien
tagagacttttgttgtgtcacaacg

SEQ ID NO: 2247660 - DNA, 25 bp, Homo sapien
tctcataactgggagcactataccc

SEQ ID NO: 2247661 - DNA, 25 bp, Homo sapien
taatagtttgtcctaaggtgcttga

SEQ ID NO: 2247662 - DNA, 25 bp, Homo sapien
taaagactctatattcgcaggttga

SEQ ID NO: 2247663 - DNA, 25 bp, Homo sapien
ctctatattcgcaggttgacttttg

SEQ ID NO: 2247664 - DNA, 25 bp, Homo sapien
ttaaaatgtgcccaagaatagacca

SEQ ID NO: 2247665 - DNA, 25 bp, Homo sapien
atgtgcccaagaatagaccataata

SEQ ID NO: 2247666 - DNA, 25 bp, Homo sapien
acagacaaatttctacagagtggcc

SEQ ID NO: 2247667 - DNA, 25 bp, Homo sapien
cttagaaaaggattgtggcagacca

SEQ ID NO: 2247668 - DNA, 25 bp, Homo sapien
cagagtggccttaacattgagcaaa

SEQ ID NO: 2247669 - DNA, 25 bp, Homo sapien
ttaaccgagggaaatcgatgcccag

SEQ ID NO: 2247670 - DNA, 25 bp, Homo sapien
agtaggcaccctgagccttgttttc

SEQ ID NO: 2247671 - DNA, 25 bp, Homo sapien
atgtagaatcagtaggcaccctgag

SEQ ID NO: 2247672 - DNA, 25 bp, Homo sapien
gaatcagtaggcaccctgagccttg

SEQ ID NO: 2247673 - DNA, 25 bp, Homo sapien
tcagtaggcaccctgagccttgttt

SEQ ID NO: 2247674 - DNA, 25 bp, Homo sapien
ttttcaagaactcagtattggccag

SEQ ID NO: 2247675 - DNA, 25 bp, Homo sapien
ctcatcaagcatctcctgttttcaa

SEQ ID NO: 2247676 - DNA, 25 bp, Homo sapien
cagccaggattgctccagtgcactc

SEQ ID NO: 2247677 - DNA, 25 bp, Homo sapien
gttttcaagaactcagtattggcca

SEQ ID NO: 2247678 - DNA, 25 bp, Homo sapien
ggcctccaggcgaggtcttcttgcc

SEQ ID NO: 2247679 - DNA, 25 bp, Homo sapien
ctaacgcctgaagagtgacatagac

SEQ ID NO: 2247680 - DNA, 25 bp, Homo sapien
gacatagacattggtggtatcttgg

SEQ ID NO: 2247681 - DNA, 25 bp, Homo sapien
ctcctctaacgcctgaagagtgaca

SEQ ID NO: 2247682 - DNA, 25 bp, Homo sapien
gaggcttttgtaggcatctgtctct

SEQ ID NO: 2247683 - DNA, 25 bp, Homo sapien
aacacacattgaggcttttgtaggc

SEQ ID NO: 2247684 - DNA, 25 bp, Homo sapien
tcaaacacacattgaggcttttgta

SEQ ID NO: 2247685 - DNA, 25 bp, Homo sapien
attgaggcttttgtaggcatctgtc

SEQ ID NO: 2247686 - DNA, 25 bp, Homo sapien
agtgctccagatatgccaagaagtc

SEQ ID NO: 2247687 - DNA, 25 bp, Homo sapien
agtcctgttacgtagccctcttctc

SEQ ID NO: 2247688 - DNA, 25 bp, Homo sapien
ctctgtaatggcgttaaacgactat

SEQ ID NO: 2247689 - DNA, 25 bp, Homo sapien
cgttaaacgtcttcctcgtgatggc

SEQ ID NO: 2247690 - DNA, 25 bp, Homo sapien
gcagtgcaagcattaccactatgta

SEQ ID NO: 2247691 - DNA, 25 bp, Homo sapien
aggcacgaggcaccttgactggcca

SEQ ID NO: 2247692 - DNA, 25 bp, Homo sapien
tgtttcactgataactggagtactt

SEQ ID NO: 2247693 - DNA, 25 bp, Homo sapien
gactggccaccatgtactatagctg

SEQ ID NO: 2247694 - DNA, 25 bp, Homo sapien
cagtgacaggttttacagttcaggc

SEQ ID NO: 2247695 - DNA, 25 bp, Homo sapien
gtcttgtgacctttgccataactgc

SEQ ID NO: 2247696 - DNA, 25 bp, Homo sapien
cctgtaaggccggtaagcaagctta

SEQ ID NO: 2247697 - DNA, 25 bp, Homo sapien
tatacatatatctgaaaagggccca

SEQ ID NO: 2247698 - DNA, 25 bp, Homo sapien
taaagggctccaagatagggattcc

SEQ ID NO: 2247699 - DNA, 25 bp, Homo sapien
tacagcgtccttcccagaaagactt

SEQ ID NO: 2247700 - DNA, 25 bp, Homo sapien
cttaataatgtgaagcacgactgcc

SEQ ID NO: 2247701 - DNA, 25 bp, Homo sapien
caaatctccaggtagccatattggg

SEQ ID NO: 2247702 - DNA, 25 bp, Homo sapien
aataacgcaatacgccattatagct

SEQ ID NO: 2247703 - DNA, 25 bp, Homo sapien
gggaaggtctgatctgtgcggtggt

SEQ ID NO: 2247704 - DNA, 25 bp, Homo sapien
tctgtgcggtggtggaagaggtttg

SEQ ID NO: 2247705 - DNA, 25 bp, Homo sapien
ttaataacgcaatacgccattatag

SEQ ID NO: 2247706 - DNA, 25 bp, Homo sapien
gaaacctgtacattggcgatatctt

SEQ ID NO: 2247707 - DNA, 25 bp, Homo sapien
aaacctgtacattggcgatatcttg

SEQ ID NO: 2247708 - DNA, 25 bp, Homo sapien
acctgtacattggcgatatcttggt

SEQ ID NO: 2247709 - DNA, 25 bp, Homo sapien
aacctgtacattggcgatatcttgg

SEQ ID NO: 2247710 - DNA, 25 bp, Homo sapien
gtgaggggcttgcaatgaagcagca

SEQ ID NO: 2247711 - DNA, 25 bp, Homo sapien
gagagtgaggggcttgcaatgaagc

SEQ ID NO: 2247712 - DNA, 25 bp, Homo sapien
gctgcccagcggtcctggcacagga

SEQ ID NO: 2247713 - DNA, 25 bp, Homo sapien
caggaagtcgtggggcggggtctcg

SEQ ID NO: 2247714 - DNA, 25 bp, Homo sapien
catccagggagttcttcgtattcta

SEQ ID NO: 2247715 - DNA, 25 bp, Homo sapien
tattctaagagccttctgtagtgca

SEQ ID NO: 2247716 - DNA, 25 bp, Homo sapien
ctgatcagacatccagggagttctt

SEQ ID NO: 2247717 - DNA, 25 bp, Homo sapien
gggagttcttcgtattctaagagcc

SEQ ID NO: 2247718 - DNA, 25 bp, Homo sapien
tttattatgatgtcaaagagtcttc

SEQ ID NO: 2247719 - DNA, 25 bp, Homo sapien
gggaacagaccttagtgatccatgc

SEQ ID NO: 2247720 - DNA, 25 bp, Homo sapien
tttttcactcagcatcgtatctgca

SEQ ID NO: 2247721 - DNA, 25 bp, Homo sapien
cctctctttaagaactcagtttctg

SEQ ID NO: 2247722 - DNA, 25 bp, Homo sapien
ccttcctggaaagattcgctgtggg

SEQ ID NO: 2247723 - DNA, 25 bp, Homo sapien
cgatgggctcgaagtcaaccagcag

SEQ ID NO: 2247724 - DNA, 25 bp, Homo sapien
tgtagaacctggagtgcgatgggct

SEQ ID NO: 2247725 - DNA, 25 bp, Homo sapien
tccttcctggaaagattcgctgtgg

SEQ ID NO: 2247726 - DNA, 25 bp, Homo sapien
gaggtcccggcacaggaaatcgtgg

SEQ ID NO: 2247727 - DNA, 25 bp, Homo sapien
tgtcaaatagtcctgtagttttggg

SEQ ID NO: 2247728 - DNA, 25 bp, Homo sapien
ctgtagttttgggtacagaccttag

SEQ ID NO: 2247729 - DNA, 25 bp, Homo sapien
ttatgatgtcaaatagtcctgtagt

SEQ ID NO: 2247730 - DNA, 25 bp, Homo sapien
gggtacagaccttaggtttccatgc

SEQ ID NO: 2247731 - DNA, 25 bp, Homo sapien
gcatcttgctacaggtctttgggtc

SEQ ID NO: 2247732 - DNA, 25 bp, Homo sapien
ggcagggcctctatttccccagttg

SEQ ID NO: 2247733 - DNA, 25 bp, Homo sapien
gtttgctggacaacaggaacccact

SEQ ID NO: 2247734 - DNA, 25 bp, Homo sapien
tggagcaagagttggcaggctttca

SEQ ID NO: 2247735 - DNA, 25 bp, Homo sapien
ggaacaggattttaccaagcgacat

SEQ ID NO: 2247736 - DNA, 25 bp, Homo sapien
actctccaggttctataccaagaca

SEQ ID NO: 2247737 - DNA, 25 bp, Homo sapien
taccaagcgacattcacagtattta

SEQ ID NO: 2247738 - DNA, 25 bp, Homo sapien
cagtaccgtgtacaaggaacaggat

SEQ ID NO: 2247739 - DNA, 25 bp, Homo sapien
tcagcagatacttcacggagacttt

SEQ ID NO: 2247740 - DNA, 25 bp, Homo sapien
actcagcagatacttcacggagact

SEQ ID NO: 2247741 - DNA, 25 bp, Homo sapien
cagcagatacttcacggagactttg

SEQ ID NO: 2247742 - DNA, 25 bp, Homo sapien
agcagatacttcacggagactttgc

SEQ ID NO: 2247743 - DNA, 25 bp, Homo sapien
tcactcagtattatatctgctgtgt

SEQ ID NO: 2247744 - DNA, 25 bp, Homo sapien
ctcttttcatgaactcagtatctgc

SEQ ID NO: 2247745 - DNA, 25 bp, Homo sapien
acatcaaattgtcttatagtactgg

SEQ ID NO: 2247746 - DNA, 25 bp, Homo sapien
agtatctgcacaaccaatcttctca

SEQ ID NO: 2247747 - DNA, 25 bp, Homo sapien
gaagtaaatcctatccagatagaca

SEQ ID NO: 2247748 - DNA, 25 bp, Homo sapien
taaatcctatccagatagacacagt

SEQ ID NO: 2247749 - DNA, 25 bp, Homo sapien
tgaaggagacaatttgatgccatgg

SEQ ID NO: 2247750 - DNA, 25 bp, Homo sapien
taaatcctatccagatggaacttgc

SEQ ID NO: 2247751 - DNA, 25 bp, Homo sapien
tcaggtcttaagagagctctggaca

SEQ ID NO: 2247752 - DNA, 25 bp, Homo sapien
agctctggacattgacggtatcttg

SEQ ID NO: 2247753 - DNA, 25 bp, Homo sapien
gctctggacattgacggtatcttgg

SEQ ID NO: 2247754 - DNA, 25 bp, Homo sapien
gagctctggacattgacggtatctt

SEQ ID NO: 2247755 - DNA, 25 bp, Homo sapien
gacagtaaggggcttggagtgaggc

SEQ ID NO: 2247756 - DNA, 25 bp, Homo sapien
ctggacagtaaggggcttggagtga

SEQ ID NO: 2247757 - DNA, 25 bp, Homo sapien
taaggggcttggagtgaggcagcgg

SEQ ID NO: 2247758 - DNA, 25 bp, Homo sapien
agtaaggggcttggagtgaggcagc

SEQ ID NO: 2247759 - DNA, 25 bp, Homo sapien
gataaatttggggatgagggcacaa

SEQ ID NO: 2247760 - DNA, 25 bp, Homo sapien
tagtctccatggcatcaaactgcct

SEQ ID NO: 2247761 - DNA, 25 bp, Homo sapien
gcacaaggataaaactgcttgaacc

SEQ ID NO: 2247762 - DNA, 25 bp, Homo sapien
aacaagttacagaccttggtggtct

SEQ ID NO: 2247763 - DNA, 25 bp, Homo sapien
gttcttcatgttctaccgcatgtgt

SEQ ID NO: 2247764 - DNA, 25 bp, Homo sapien
ctggctccccttcccgacaaccagg

SEQ ID NO: 2247765 - DNA, 25 bp, Homo sapien
cgcatgtgttgcattgtaggcaaca

SEQ ID NO: 2247766 - DNA, 25 bp, Homo sapien
gttctaccgcatgtgttgcattgta

SEQ ID NO: 2247767 - DNA, 25 bp, Homo sapien
tcgtattggggaccgacctcaggga

SEQ ID NO: 2247768 - DNA, 25 bp, Homo sapien
cagtgttctattatgatatcaaatt

SEQ ID NO: 2247769 - DNA, 25 bp, Homo sapien
tatcaaattgtcttgtcgtattggg

SEQ ID NO: 2247770 - DNA, 25 bp, Homo sapien
caagaactcagtttccgctcaacca

SEQ ID NO: 2247771 - DNA, 25 bp, Homo sapien
gcaaagaacttcgtgattatactag

SEQ ID NO: 2247772 - DNA, 25 bp, Homo sapien
gaattaggcatctctcacattcagt

SEQ ID NO: 2247773 - DNA, 25 bp, Homo sapien
tagatgtgaaccctaagaaaactgt

SEQ ID NO: 2247774 - DNA, 25 bp, Homo sapien
aaaactgtaagatggatgtattcac

SEQ ID NO: 2247775 - DNA, 25 bp, Homo sapien
tgtctgatgaccctgactagaattt

SEQ ID NO: 2247776 - DNA, 25 bp, Homo sapien
caagaaaagggcaaaagtgtgcatt

SEQ ID NO: 2247777 - DNA, 25 bp, Homo sapien
gtagatctctatggctagtattgcc

SEQ ID NO: 2247778 - DNA, 25 bp, Homo sapien
tctaactcattacccacaggatgtc

SEQ ID NO: 2247779 - DNA, 25 bp, Homo sapien
cttgtgttcttgtagtttcagcttc

SEQ ID NO: 2247780 - DNA, 25 bp, Homo sapien
aatatcttcttattagcaatggtgt

SEQ ID NO: 2247781 - DNA, 25 bp, Homo sapien
gcagagcagcttgaagaacatactg

SEQ ID NO: 2247782 - DNA, 25 bp, Homo sapien
tgtttgcaagccaggtacagtcttg

SEQ ID NO: 2247783 - DNA, 25 bp, Homo sapien
ttacaatattttcagatacagtagc

SEQ ID NO: 2247784 - DNA, 25 bp, Homo sapien
tacaatattttcagatacagtagcc

SEQ ID NO: 2247785 - DNA, 25 bp, Homo sapien
agacgggttcagcccctggccatag

SEQ ID NO: 2247786 - DNA, 25 bp, Homo sapien
cagacgggttcagcccctggccata

SEQ ID NO: 2247787 - DNA, 25 bp, Homo sapien
gacgggttcagcccctggccatagc

SEQ ID NO: 2247788 - DNA, 25 bp, Homo sapien
ggtgcaaaagtccaaatgctggcac

SEQ ID NO: 2247789 - DNA, 25 bp, Homo sapien
gtgcaaaagtccaaatgctggcact

SEQ ID NO: 2247790 - DNA, 25 bp, Homo sapien
aggtgcaaaagtccaaatgctggca

SEQ ID NO: 2247791 - DNA, 25 bp, Homo sapien
ctggtgattctagccaggaagtgct

SEQ ID NO: 2247792 - DNA, 25 bp, Homo sapien
aatgggcacgaagttctgcagccgg

SEQ ID NO: 2247793 - DNA, 25 bp, Homo sapien
taggaacagctggtgattctagcca

SEQ ID NO: 2247794 - DNA, 25 bp, Homo sapien
caccactcgtccaagtcaatgggca

SEQ ID NO: 2247795 - DNA, 25 bp, Homo sapien
tgcacaggccttgtcccgccctcac

SEQ ID NO: 2247796 - DNA, 25 bp, Homo sapien
cggctgggccaccatccagctgctg

SEQ ID NO: 2247797 - DNA, 25 bp, Homo sapien
ggctgggccaccatccagctgctgc

SEQ ID NO: 2247798 - DNA, 25 bp, Homo sapien
ctgggccaccatccagctgctgccg

SEQ ID NO: 2247799 - DNA, 25 bp, Homo sapien
ggccaccatccagctgctgccgcac

SEQ ID NO: 2247800 - DNA, 25 bp, Homo sapien
acacgattgaacacaagccttggcc

SEQ ID NO: 2247801 - DNA, 25 bp, Homo sapien
cacgattgaacacaagccttggccc

SEQ ID NO: 2247802 - DNA, 25 bp, Homo sapien
attcacacgattgaacacaagcctt

SEQ ID NO: 2247803 - DNA, 25 bp, Homo sapien
tcacacgattgaacacaagccttgg

SEQ ID NO: 2247804 - DNA, 25 bp, Homo sapien
tgcgcgaagggctgcgcccgctggg

SEQ ID NO: 2247805 - DNA, 25 bp, Homo sapien
gctgccggcttttcaggagctcctg

SEQ ID NO: 2247806 - DNA, 25 bp, Homo sapien
gtcccagcggctgcgcgaagggctg

SEQ ID NO: 2247807 - DNA, 25 bp, Homo sapien
gggctgcaaggtcggcggcgcgggc

SEQ ID NO: 2247808 - DNA, 25 bp, Homo sapien
aacttgctgggcccgttgatgatgg

SEQ ID NO: 2247809 - DNA, 25 bp, Homo sapien
caacttgctgggcccgttgatgatg

SEQ ID NO: 2247810 - DNA, 25 bp, Homo sapien
acttgctgggcccgttgatgatggt

SEQ ID NO: 2247811 - DNA, 25 bp, Homo sapien
tgcaccaactgtttcagtacacgtt

SEQ ID NO: 2247812 - DNA, 25 bp, Homo sapien
ccaccagatctcagtattccgtttt

SEQ ID NO: 2247813 - DNA, 25 bp, Homo sapien
tgtttcgaagaaatataaattactg

SEQ ID NO: 2247814 - DNA, 25 bp, Homo sapien
tgtggtcaataaggattttgcacca

SEQ ID NO: 2247815 - DNA, 25 bp, Homo sapien
tcttcagcaagcacacttgcctctg

SEQ ID NO: 2247816 - DNA, 25 bp, Homo sapien
cacaagaaaccaacgtcccatagct

SEQ ID NO: 2247817 - DNA, 25 bp, Homo sapien
ctgcaatgtcatctggaattggcct

SEQ ID NO: 2247818 - DNA, 25 bp, Homo sapien
gccttcatcataggatggtggtacc

SEQ ID NO: 2247819 - DNA, 25 bp, Homo sapien
ctgcagtccagacccaacaacagtg

SEQ ID NO: 2247820 - DNA, 25 bp, Homo sapien
gcagtccagacccaacaacagtgga

SEQ ID NO: 2247821 - DNA, 25 bp, Homo sapien
gtctgcagtccagacccaacaacag

SEQ ID NO: 2247822 - DNA, 25 bp, Homo sapien
tctgcagtccagacccaacaacagt

SEQ ID NO: 2247823 - DNA, 25 bp, Homo sapien
gataccacaagggaagccgatggcc

SEQ ID NO: 2247824 - DNA, 25 bp, Homo sapien
gccagtcccacagctttcatggggt

SEQ ID NO: 2247825 - DNA, 25 bp, Homo sapien
ctttcatggggttcttgcccctctt

SEQ ID NO: 2247826 - DNA, 25 bp, Homo sapien
aggataccacaagggaagccgatgg

SEQ ID NO: 2247827 - DNA, 25 bp, Homo sapien
taggagttcaggttcctccctgcct

SEQ ID NO: 2247828 - DNA, 25 bp, Homo sapien
ctgggaatgtattacatctcggggg

SEQ ID NO: 2247829 - DNA, 25 bp, Homo sapien
gagttcaggttcctccctgccttct

SEQ ID NO: 2247830 - DNA, 25 bp, Homo sapien
tacatctcgggggataggagttcag

SEQ ID NO: 2247831 - DNA, 25 bp, Homo sapien
ggtagtattggccttcattttcagg

SEQ ID NO: 2247832 - DNA, 25 bp, Homo sapien
ctgggtagtattggccttcattttc

SEQ ID NO: 2247833 - DNA, 25 bp, Homo sapien
gggtagtattggccttcattttcag

SEQ ID NO: 2247834 - DNA, 25 bp, Homo sapien
tgggtagtattggccttcattttca

SEQ ID NO: 2247835 - DNA, 25 bp, Homo sapien
ccagagctcccggaataattcagag

SEQ ID NO: 2247836 - DNA, 25 bp, Homo sapien
gatgctgctatcacaaggagctcag

SEQ ID NO: 2247837 - DNA, 25 bp, Homo sapien
ccaatttcgggtcagggcctgttca

SEQ ID NO: 2247838 - DNA, 25 bp, Homo sapien
gaacaaggtgaattggcctgaacca

SEQ ID NO: 2247839 - DNA, 25 bp, Homo sapien
tcacgatggcagtcgtgctccagat

SEQ ID NO: 2247840 - DNA, 25 bp, Homo sapien
tcctcacgatggcagtcgtgctcca

SEQ ID NO: 2247841 - DNA, 25 bp, Homo sapien
ctcacgggacggacgctgtaatggc

SEQ ID NO: 2247842 - DNA, 25 bp, Homo sapien
tttaaaactatttcctcacgatggc

SEQ ID NO: 2247843 - DNA, 25 bp, Homo sapien
caaggaggtttctcttcgaaggaat

SEQ ID NO: 2247844 - DNA, 25 bp, Homo sapien
tggtatctcaatgaaaactagaaga

SEQ ID NO: 2247845 - DNA, 25 bp, Homo sapien
ggaattataaaggtaacatctgctg

SEQ ID NO: 2247846 - DNA, 25 bp, Homo sapien
acatctgctgttggaaatctgctca

SEQ ID NO: 2247847 - DNA, 25 bp, Homo sapien
ttttgaggcatccactattagcagc

SEQ ID NO: 2247848 - DNA, 25 bp, Homo sapien
tattagcagcttgatgagtatattg

SEQ ID NO: 2247849 - DNA, 25 bp, Homo sapien
ttagaatacacaatctatgaagaac

SEQ ID NO: 2247850 - DNA, 25 bp, Homo sapien
gaacaaatggaaacactttatcaca

SEQ ID NO: 2247851 - DNA, 25 bp, Homo sapien
ggtgccctgaattctcaattcaaca

SEQ ID NO: 2247852 - DNA, 25 bp, Homo sapien
tcattggtcccactacacatagaat

SEQ ID NO: 2247853 - DNA, 25 bp, Homo sapien
tactgttgatcaaaccgtaagaatt

SEQ ID NO: 2247854 - DNA, 25 bp, Homo sapien
tagaaaatgagtactctccaatatc

SEQ ID NO: 2247855 - DNA, 25 bp, Homo sapien
tatccttgcaacttgagttgcttct

SEQ ID NO: 2247856 - DNA, 25 bp, Homo sapien
gcttctttctatcatagttttctca

SEQ ID NO: 2247857 - DNA, 25 bp, Homo sapien
ggaatatccttgcatgatacatgag

SEQ ID NO: 2247858 - DNA, 25 bp, Homo sapien
cataagtctcatcatatgtcgtgaa

SEQ ID NO: 2247859 - DNA, 25 bp, Homo sapien
taggaccttgtccaattctacaaat

SEQ ID NO: 2247860 - DNA, 25 bp, Homo sapien
tcaaaggcttgctcggggttatgat

SEQ ID NO: 2247861 - DNA, 25 bp, Homo sapien
ctggtaggaccttgtccaattctac

SEQ ID NO: 2247862 - DNA, 25 bp, Homo sapien
ggtaggaccttgtccaattctacaa

SEQ ID NO: 2247863 - DNA, 25 bp, Homo sapien
gcaagcaatttggttgcacctggga

SEQ ID NO: 2247864 - DNA, 25 bp, Homo sapien
tctgctaccacaaaggtcctaggcc

SEQ ID NO: 2247865 - DNA, 25 bp, Homo sapien
ccttcttggtttggcgggctgatcc

SEQ ID NO: 2247866 - DNA, 25 bp, Homo sapien
gaagcgaggtcacaggtaatgccac

SEQ ID NO: 2247867 - DNA, 25 bp, Homo sapien
tcaagctctgaactcgcctcctgag

SEQ ID NO: 2247868 - DNA, 25 bp, Homo sapien
tgataactaccacaataaccttggg

SEQ ID NO: 2247869 - DNA, 25 bp, Homo sapien
taatgccttcgtgaagacactgtct

SEQ ID NO: 2247870 - DNA, 25 bp, Homo sapien
gggctcccaattccatgttgataac

SEQ ID NO: 2247871 - DNA, 25 bp, Homo sapien
cttgggatatggagggaaaccacca

SEQ ID NO: 2247872 - DNA, 25 bp, Homo sapien
tcaggcctttgtcctgcttctcagc

SEQ ID NO: 2247873 - DNA, 25 bp, Homo sapien
ggcctttgtcctgcttctcagccat

SEQ ID NO: 2247874 - DNA, 25 bp, Homo sapien
aggcctttgtcctgcttctcagcca

SEQ ID NO: 2247875 - DNA, 25 bp, Homo sapien
aatcaggcctttgtcctgcttctca

SEQ ID NO: 2247876 - DNA, 25 bp, Homo sapien
gaaactcgactagtattacttcata

SEQ ID NO: 2247877 - DNA, 25 bp, Homo sapien
gcatcctgaaactcgactagtatta

SEQ ID NO: 2247878 - DNA, 25 bp, Homo sapien
cagattttgtttgggcctatatgga

SEQ ID NO: 2247879 - DNA, 25 bp, Homo sapien
gcaacagttattgggtttgtcatac

SEQ ID NO: 2247880 - DNA, 25 bp, Homo sapien
ttgaggcacataagacagctggtgg

SEQ ID NO: 2247881 - DNA, 25 bp, Homo sapien
tcagtttcccggagctaaagtgaac

SEQ ID NO: 2247882 - DNA, 25 bp, Homo sapien
gctgttgtaacttgagttgaggcac

SEQ ID NO: 2247883 - DNA, 25 bp, Homo sapien
tcaggaatttgctatggagttgcta

SEQ ID NO: 2247884 - DNA, 25 bp, Homo sapien
ctccatctgcctcgtcaaaggtcat

SEQ ID NO: 2247885 - DNA, 25 bp, Homo sapien
cctccatctgcctcgtcaaaggtca

SEQ ID NO: 2247886 - DNA, 25 bp, Homo sapien
gtttgtgtcctctttgatttcgttg

SEQ ID NO: 2247887 - DNA, 25 bp, Homo sapien
gtgtggtattatttctgagggttct

SEQ ID NO: 2247888 - DNA, 25 bp, Homo sapien
tgtgtcctctttgatttcgttgagc

SEQ ID NO: 2247889 - DNA, 25 bp, Homo sapien
gtcctctttgatttcgttgagcagt

SEQ ID NO: 2247890 - DNA, 25 bp, Homo sapien
ttccgggctattactagggatcttg

SEQ ID NO: 2247891 - DNA, 25 bp, Homo sapien
ccgggctattactagggatcttggg

SEQ ID NO: 2247892 - DNA, 25 bp, Homo sapien
gggctattactagggatcttgggtc

SEQ ID NO: 2247893 - DNA, 25 bp, Homo sapien
acttccgggctattactagggatct

SEQ ID NO: 2247894 - DNA, 25 bp, Homo sapien
catccacgatcatcaagaccatgca

SEQ ID NO: 2247895 - DNA, 25 bp, Homo sapien
tgcagggaaatatggtctcacaaat

SEQ ID NO: 2247896 - DNA, 25 bp, Homo sapien
tcttcaatgccacaacaccgacaaa

SEQ ID NO: 2247897 - DNA, 25 bp, Homo sapien
tcaatgccacaacaccgacaaacat

SEQ ID NO: 2247898 - DNA, 25 bp, Homo sapien
taacacccttcaaacattaaggaga

SEQ ID NO: 2247899 - DNA, 25 bp, Homo sapien
tgtgcagtgataacacccttcaaac

SEQ ID NO: 2247900 - DNA, 25 bp, Homo sapien
cttttaccctagatgagtttgtgca

SEQ ID NO: 2247901 - DNA, 25 bp, Homo sapien
agactttccagtagaaaccttacag

SEQ ID NO: 2247902 - DNA, 25 bp, Homo sapien
tgcttaacttccaagttcaggcacg

SEQ ID NO: 2247903 - DNA, 25 bp, Homo sapien
gcttaacttccaagttcaggcacgt

SEQ ID NO: 2247904 - DNA, 25 bp, Homo sapien
gacaattttcaaggtgttctcctgg

SEQ ID NO: 2247905 - DNA, 25 bp, Homo sapien
tgggtcttgacgcttgattcctcgg

SEQ ID NO: 2247906 - DNA, 25 bp, Homo sapien
gatcctccttactcctgagaagtgc

SEQ ID NO: 2247907 - DNA, 25 bp, Homo sapien
cctgggcattgacaacagatcctcc

SEQ ID NO: 2247908 - DNA, 25 bp, Homo sapien
tgtgtaacaaaagcgtacttgaatt

SEQ ID NO: 2247909 - DNA, 25 bp, Homo sapien
gtgtgtaacaaaagcgtacttgaat

SEQ ID NO: 2247910 - DNA, 25 bp, Homo sapien
tgtaacaaaagcgtacttgaatttc

SEQ ID NO: 2247911 - DNA, 25 bp, Homo sapien
ttcacatcccagaatgtatcctgct

SEQ ID NO: 2247912 - DNA, 25 bp, Homo sapien
tcttcacatcccagaatgtatcctg

SEQ ID NO: 2247913 - DNA, 25 bp, Homo sapien
cttcacatcccagaatgtatcctgc

SEQ ID NO: 2247914 - DNA, 25 bp, Homo sapien
ttcttcacatcccagaatgtatcct

SEQ ID NO: 2247915 - DNA, 25 bp, Homo sapien
tttgagggctactggcagtagcttg

SEQ ID NO: 2247916 - DNA, 25 bp, Homo sapien
ttgagtttgagggctactggcagta

SEQ ID NO: 2247917 - DNA, 25 bp, Homo sapien
caccccgcagctggggttgtaaagg

SEQ ID NO: 2247918 - DNA, 25 bp, Homo sapien
agtttgagggctactggcagtagct

SEQ ID NO: 2247919 - DNA, 25 bp, Homo sapien
ctgtttcatatggacccagagagcc

SEQ ID NO: 2247920 - DNA, 25 bp, Homo sapien
cattgcagagttcatacaaaggaga

SEQ ID NO: 2247921 - DNA, 25 bp, Homo sapien
taacaatgcttaacccatgagctcc

SEQ ID NO: 2247922 - DNA, 25 bp, Homo sapien
ataggtgttcagcagacgaatcccc

SEQ ID NO: 2247923 - DNA, 25 bp, Homo sapien
tttacaggcaatgtacagcaacaga

SEQ ID NO: 2247924 - DNA, 25 bp, Homo sapien
tatgcctgcctaagttctgaactgg

SEQ ID NO: 2247925 - DNA, 25 bp, Homo sapien
tttagtcaaagtggccattacatcc

SEQ ID NO: 2247926 - DNA, 25 bp, Homo sapien
gttggtatgatattccaggcagctc

SEQ ID NO: 2247927 - DNA, 25 bp, Homo sapien
tggagatgacaaatacccaccttgc

SEQ ID NO: 2247928 - DNA, 25 bp, Homo sapien
taagtcggtaacatggaactggctc

SEQ ID NO: 2247929 - DNA, 25 bp, Homo sapien
gcatgttctaaagtcccttcagagg

SEQ ID NO: 2247930 - DNA, 25 bp, Homo sapien
tgggccccacacaaatagtaaagac

SEQ ID NO: 2247931 - DNA, 25 bp, Homo sapien
gacgcactttgcttgtgaggccaga

SEQ ID NO: 2247932 - DNA, 25 bp, Homo sapien
cattgatgttgctcctaccgctagt

SEQ ID NO: 2247933 - DNA, 25 bp, Homo sapien
tgatgtagcaatgtgggatccgcct

SEQ ID NO: 2247934 - DNA, 25 bp, Homo sapien
taagttagctgctttgctggacgca

SEQ ID NO: 2247935 - DNA, 25 bp, Homo sapien
cgttcatggtactgagatgggtaat

SEQ ID NO: 2247936 - DNA, 25 bp, Homo sapien
gaggacctgcactgtcgttcatggt

SEQ ID NO: 2247937 - DNA, 25 bp, Homo sapien
cctgcactgtcgttcatggtactga

SEQ ID NO: 2247938 - DNA, 25 bp, Homo sapien
cactgtcgttcatggtactgagatg

SEQ ID NO: 2247939 - DNA, 25 bp, Homo sapien
tcaaatggcaagctcttcagcctcc

SEQ ID NO: 2247940 - DNA, 25 bp, Homo sapien
tctcccatattccaaaagttgcctt

SEQ ID NO: 2247941 - DNA, 25 bp, Homo sapien
tttctcccatattccaaaagttgcc

SEQ ID NO: 2247942 - DNA, 25 bp, Homo sapien
ctttcaaatggcaagctcttcagcc

SEQ ID NO: 2247943 - DNA, 25 bp, Homo sapien
aagccttgcaggcatctcggctggc

SEQ ID NO: 2247944 - DNA, 25 bp, Homo sapien
tttgatttgggctcttccgaaagcc

SEQ ID NO: 2247945 - DNA, 25 bp, Homo sapien
aactggaacccttgctgcagagtag

SEQ ID NO: 2247946 - DNA, 25 bp, Homo sapien
tccgaaagcctgaagaaagcatggt

SEQ ID NO: 2247947 - DNA, 25 bp, Homo sapien
gtgaactccaaggtatccttgcaca

SEQ ID NO: 2247948 - DNA, 25 bp, Homo sapien
actccaaggtatccttgcacaacac

SEQ ID NO: 2247949 - DNA, 25 bp, Homo sapien
ggtgaactccaaggtatccttgcac

SEQ ID NO: 2247950 - DNA, 25 bp, Homo sapien
gaactccaaggtatccttgcacaac

SEQ ID NO: 2247951 - DNA, 25 bp, Homo sapien
tggcatgaagtttgatgagaaaatg

SEQ ID NO: 2247952 - DNA, 25 bp, Homo sapien
tagcccagttaaaagtattgatctt

SEQ ID NO: 2247953 - DNA, 25 bp, Homo sapien
attggcatgaagtttgatgagaaaa

SEQ ID NO: 2247954 - DNA, 25 bp, Homo sapien
actcaacttgcggattttagcccag

SEQ ID NO: 2247955 - DNA, 25 bp, Homo sapien
gttggcttgtaagacagtgcaaacc

SEQ ID NO: 2247956 - DNA, 25 bp, Homo sapien
aatgtattaacaagagttggcttgt

SEQ ID NO: 2247957 - DNA, 25 bp, Homo sapien
tgcacttaatgagagggaccgccct

SEQ ID NO: 2247958 - DNA, 25 bp, Homo sapien
gcacagattgatcctgctgcactgg

SEQ ID NO: 2247959 - DNA, 25 bp, Homo sapien
tgaagggcttgaaaggaaagagatt

SEQ ID NO: 2247960 - DNA, 25 bp, Homo sapien
aagctgaagggcttgaaaggaaaga

SEQ ID NO: 2247961 - DNA, 25 bp, Homo sapien
gctgaagggcttgaaaggaaagaga

SEQ ID NO: 2247962 - DNA, 25 bp, Homo sapien
aaagctgaagggcttgaaaggaaag

SEQ ID NO: 2247963 - DNA, 25 bp, Homo sapien
gtactcccatgtgagcaacagccag

SEQ ID NO: 2247964 - DNA, 25 bp, Homo sapien
gggtgaggcctgatgccatacatat

SEQ ID NO: 2247965 - DNA, 25 bp, Homo sapien
gtgaatctgcatcccttcaccatca

SEQ ID NO: 2247966 - DNA, 25 bp, Homo sapien
ccagcttccttgctatgtccagtag

SEQ ID NO: 2247967 - DNA, 25 bp, Homo sapien
gcttctgatgaaagtgcatgatctt

SEQ ID NO: 2247968 - DNA, 25 bp, Homo sapien
gaaagtgcatgatcttgccctctaa

SEQ ID NO: 2247969 - DNA, 25 bp, Homo sapien
cagtcttggtttggtaagtaccgag

SEQ ID NO: 2247970 - DNA, 25 bp, Homo sapien
gtaccgagtttgtgccagatgcttc

SEQ ID NO: 2247971 - DNA, 25 bp, Homo sapien
gacagctttcccagaggcggtagga

SEQ ID NO: 2247972 - DNA, 25 bp, Homo sapien
aagcccatgcccaaattagcccaaa

SEQ ID NO: 2247973 - DNA, 25 bp, Homo sapien
tagcccaaaccagttcctggacagc

SEQ ID NO: 2247974 - DNA, 25 bp, Homo sapien
gagaattatcctggggtaagcagag

SEQ ID NO: 2247975 - DNA, 25 bp, Homo sapien
ccatcaacgctgtacagttgtcact

SEQ ID NO: 2247976 - DNA, 25 bp, Homo sapien
gagataccatcaacgctgtacagtt

SEQ ID NO: 2247977 - DNA, 25 bp, Homo sapien
ttgtaagatgtgagataccatcaac

SEQ ID NO: 2247978 - DNA, 25 bp, Homo sapien
tgtgagataccatcaacgctgtaca

SEQ ID NO: 2247979 - DNA, 25 bp, Homo sapien
cttctcccagatccaagatgattca

SEQ ID NO: 2247980 - DNA, 25 bp, Homo sapien
tctcccagatccaagatgattcaag

SEQ ID NO: 2247981 - DNA, 25 bp, Homo sapien
tttccttctcccagatccaagatga

SEQ ID NO: 2247982 - DNA, 25 bp, Homo sapien
tcccagatccaagatgattcaagaa

SEQ ID NO: 2247983 - DNA, 25 bp, Homo sapien
aaagttggccaatcatcctctggtg

SEQ ID NO: 2247984 - DNA, 25 bp, Homo sapien
ggtggtttctgccacgtagcaaagc

SEQ ID NO: 2247985 - DNA, 25 bp, Homo sapien
ctggtggtttctgccacgtagcaaa

SEQ ID NO: 2247986 - DNA, 25 bp, Homo sapien
ttggccaatcatcctctggtggttt

SEQ ID NO: 2247987 - DNA, 25 bp, Homo sapien
ttgtaagttcttcccgcagatgtcc

SEQ ID NO: 2247988 - DNA, 25 bp, Homo sapien
cttgtaagttcttcccgcagatgtc

SEQ ID NO: 2247989 - DNA, 25 bp, Homo sapien
tcccgcagatgtccagggtccactg

SEQ ID NO: 2247990 - DNA, 25 bp, Homo sapien
tgttatgggcttcaaaagctccagc

SEQ ID NO: 2247991 - DNA, 25 bp, Homo sapien
ctttgttatgggcttcaaaagctcc

SEQ ID NO: 2247992 - DNA, 25 bp, Homo sapien
tgggcttcaaaagctccagccaaac

SEQ ID NO: 2247993 - DNA, 25 bp, Homo sapien
tatgggcttcaaaagctccagccaa

SEQ ID NO: 2247994 - DNA, 25 bp, Homo sapien
gttaaacaatgccttcccggatgac

SEQ ID NO: 2247995 - DNA, 25 bp, Homo sapien
gcaactcaggttaaacaatgccttc

SEQ ID NO: 2247996 - DNA, 25 bp, Homo sapien
tcaggttaaacaatgccttcccgga

SEQ ID NO: 2247997 - DNA, 25 bp, Homo sapien
taaacaatgccttcccggatgactt

SEQ ID NO: 2247998 - DNA, 25 bp, Homo sapien
cttctgctgggataagggtttgcgt

SEQ ID NO: 2247999 - DNA, 25 bp, Homo sapien
tgcgtccatcatcgctgagtttagg

SEQ ID NO: 2248000 - DNA, 25 bp, Homo sapien
ggataagggtttgcgtccatcatcg

SEQ ID NO: 2248001 - DNA, 25 bp, Homo sapien
ccatcatcgctgagtttaggcttca

SEQ ID NO: 2248002 - DNA, 25 bp, Homo sapien
agaagaggaggaagtgggtaaagag

SEQ ID NO: 2248003 - DNA, 25 bp, Homo sapien
gacccagaagaggaggaagtgggta

SEQ ID NO: 2248004 - DNA, 25 bp, Homo sapien
ccagaagaggaggaagtgggtaaag

SEQ ID NO: 2248005 - DNA, 25 bp, Homo sapien
cttggacccagaagaggaggaagtg

SEQ ID NO: 2248006 - DNA, 25 bp, Homo sapien
tccccaatctcttccgccatggcct

SEQ ID NO: 2248007 - DNA, 25 bp, Homo sapien
cagttccccaatctcttccgccatg

SEQ ID NO: 2248008 - DNA, 25 bp, Homo sapien
aagccagttccccaatctcttccgc

SEQ ID NO: 2248009 - DNA, 25 bp, Homo sapien
gttccccaatctcttccgccatggc

SEQ ID NO: 2248010 - DNA, 25 bp, Homo sapien
ctgggaatcatccaaaaactgcact

SEQ ID NO: 2248011 - DNA, 25 bp, Homo sapien
ggaatcatccaaaaactgcactttt

SEQ ID NO: 2248012 - DNA, 25 bp, Homo sapien
gggaatcatccaaaaactgcacttt

SEQ ID NO: 2248013 - DNA, 25 bp, Homo sapien
tgggaatcatccaaaaactgcactt

SEQ ID NO: 2248014 - DNA, 25 bp, Homo sapien
agcgaggccgttgggctgcaagcag

SEQ ID NO: 2248015 - DNA, 25 bp, Homo sapien
gctggatgtggtgcactcgggcccc

SEQ ID NO: 2248016 - DNA, 25 bp, Homo sapien
tctcagcgaggccgttgggctgcaa

SEQ ID NO: 2248017 - DNA, 25 bp, Homo sapien
tggatgtggtgcactcgggcccccc

SEQ ID NO: 2248018 - DNA, 25 bp, Homo sapien
ttcctctagccttcttaaactcagc

SEQ ID NO: 2248019 - DNA, 25 bp, Homo sapien
tagcatctgggcagtctcctgtttg

SEQ ID NO: 2248020 - DNA, 25 bp, Homo sapien
ggcacacttccgtttgcttgaagta

SEQ ID NO: 2248021 - DNA, 25 bp, Homo sapien
ttgaagtaatgcacacccaagggca

SEQ ID NO: 2248022 - DNA, 25 bp, Homo sapien
agctaaacaagagccggagctctca

SEQ ID NO: 2248023 - DNA, 25 bp, Homo sapien
caaaatagcagcacccgtggaggag

SEQ ID NO: 2248024 - DNA, 25 bp, Homo sapien
gctctcaaaatagcagcacccgtgg

SEQ ID NO: 2248025 - DNA, 25 bp, Homo sapien
caagagccggagctctcaaaatagc

SEQ ID NO: 2248026 - DNA, 25 bp, Homo sapien
ggtggagcttgccagcatctgttct

SEQ ID NO: 2248027 - DNA, 25 bp, Homo sapien
gcatctgttctttcttcctaggatc

SEQ ID NO: 2248028 - DNA, 25 bp, Homo sapien
tgggtggagcttgccagcatctgtt

SEQ ID NO: 2248029 - DNA, 25 bp, Homo sapien
ccagcatctgttctttcttcctagg

SEQ ID NO: 2248030 - DNA, 25 bp, Homo sapien
tccacaggcatcgcttcatactcct

SEQ ID NO: 2248031 - DNA, 25 bp, Homo sapien
ccacaggcatcgcttcatactcctc

SEQ ID NO: 2248032 - DNA, 25 bp, Homo sapien
catgttcggtcaagctgattgttcc

SEQ ID NO: 2248033 - DNA, 25 bp, Homo sapien
aagcctcctttgctgacggtgtcgg

SEQ ID NO: 2248034 - DNA, 25 bp, Homo sapien
ccagtaagatgcaagcctccgtaat

SEQ ID NO: 2248035 - DNA, 25 bp, Homo sapien
gacggtgtcggcttcaatgcagatg

SEQ ID NO: 2248036 - DNA, 25 bp, Homo sapien
ctgtacaaagaaggccttcgtacag

SEQ ID NO: 2248037 - DNA, 25 bp, Homo sapien
tcattggcaggtctctctgtaggtc

SEQ ID NO: 2248038 - DNA, 25 bp, Homo sapien
aggccttcgtacaggggtctcctct

SEQ ID NO: 2248039 - DNA, 25 bp, Homo sapien
gtctcctctggttcattggcaggtc

SEQ ID NO: 2248040 - DNA, 25 bp, Homo sapien
tagaagtttcatgagtctgaggcca

SEQ ID NO: 2248041 - DNA, 25 bp, Homo sapien
acaagatagaagtttcatgagtctg

SEQ ID NO: 2248042 - DNA, 25 bp, Homo sapien
ctgtatacaagatagaagtttcatg

SEQ ID NO: 2248043 - DNA, 25 bp, Homo sapien
gagtctgaggccactccttaagagt

SEQ ID NO: 2248044 - DNA, 25 bp, Homo sapien
gatttttagagacccaagatatcag

SEQ ID NO: 2248045 - DNA, 25 bp, Homo sapien
ttttagagacccaagatatcagtac

SEQ ID NO: 2248046 - DNA, 25 bp, Homo sapien
ttgatttttagagacccaagatatc

SEQ ID NO: 2248047 - DNA, 25 bp, Homo sapien
tttttagagacccaagatatcagta

SEQ ID NO: 2248048 - DNA, 25 bp, Homo sapien
caccaaaggccagtcattgcaaaca

SEQ ID NO: 2248049 - DNA, 25 bp, Homo sapien
cccaccaaaggccagtcattgcaaa

SEQ ID NO: 2248050 - DNA, 25 bp, Homo sapien
aaaggccagtcattgcaaacacagg

SEQ ID NO: 2248051 - DNA, 25 bp, Homo sapien
ccaaaggccagtcattgcaaacaca

SEQ ID NO: 2248052 - DNA, 25 bp, Homo sapien
agtaaagaggttatgattcaaacta

SEQ ID NO: 2248053 - DNA, 25 bp, Homo sapien
tctgtttccactttcagtaaagagg

SEQ ID NO: 2248054 - DNA, 25 bp, Homo sapien
ctcctgtaacaatgatcacatatgt

SEQ ID NO: 2248055 - DNA, 25 bp, Homo sapien
cctcctgtaacaatgatcacatatg

SEQ ID NO: 2248056 - DNA, 25 bp, Homo sapien
taatctgtcttaacactagtcacac

SEQ ID NO: 2248057 - DNA, 25 bp, Homo sapien
tatgctgggataaatgtaaaatcgg

SEQ ID NO: 2248058 - DNA, 25 bp, Homo sapien
ggataaatgtaaaatcggggcagca

SEQ ID NO: 2248059 - DNA, 25 bp, Homo sapien
atagaatcctggctttgcctttgca

SEQ ID NO: 2248060 - DNA, 25 bp, Homo sapien
gcctttgcaagctgcaggattgaga

SEQ ID NO: 2248061 - DNA, 25 bp, Homo sapien
gctctccttagtaggttatcacagt

SEQ ID NO: 2248062 - DNA, 25 bp, Homo sapien
tctccttagtaggttatcacagtgt

SEQ ID NO: 2248063 - DNA, 25 bp, Homo sapien
ctctccttagtaggttatcacagtg

SEQ ID NO: 2248064 - DNA, 25 bp, Homo sapien
ttcttccaatgattttgaagtgttt

SEQ ID NO: 2248065 - DNA, 25 bp, Homo sapien
tgaagtgttttaaagaacaccgtca

SEQ ID NO: 2248066 - DNA, 25 bp, Homo sapien
tgattttgaagtgttttaaagaaca

SEQ ID NO: 2248067 - DNA, 25 bp, Homo sapien
ctgtagttttcttccaatgattttg

SEQ ID NO: 2248068 - DNA, 25 bp, Homo sapien
cagtcttcgctgaggagatacaata

SEQ ID NO: 2248069 - DNA, 25 bp, Homo sapien
tgacaccagggaacaaattatcagt

SEQ ID NO: 2248070 - DNA, 25 bp, Homo sapien
tctttggccccataggaactcatgt

SEQ ID NO: 2248071 - DNA, 25 bp, Homo sapien
tgtaccaatacagggagtgtttcca

SEQ ID NO: 2248072 - DNA, 25 bp, Homo sapien
tcctgggctccaaattgaactctgc

SEQ ID NO: 2248073 - DNA, 25 bp, Homo sapien
tctgcttctgatctcattattcctt

SEQ ID NO: 2248074 - DNA, 25 bp, Homo sapien
tacctgtcccttggaccagatgttc

SEQ ID NO: 2248075 - DNA, 25 bp, Homo sapien
accgtttctccagccttcaccaatg

SEQ ID NO: 2248076 - DNA, 25 bp, Homo sapien
gaagttccagcagacacgctgttgg

SEQ ID NO: 2248077 - DNA, 25 bp, Homo sapien
cagacacgctgttggtaaattgcac

SEQ ID NO: 2248078 - DNA, 25 bp, Homo sapien
tctggagccctatggcgtggtgacc

SEQ ID NO: 2248079 - DNA, 25 bp, Homo sapien
taaattgcaccttttacatctgggc

SEQ ID NO: 2248080 - DNA, 25 bp, Homo sapien
aagacaacttctgtggtgaactctt

SEQ ID NO: 2248081 - DNA, 25 bp, Homo sapien
aaagacaacttctgtggtgaactct

SEQ ID NO: 2248082 - DNA, 25 bp, Homo sapien
gggacaccattctcactgtgctcaa

SEQ ID NO: 2248083 - DNA, 25 bp, Homo sapien
acaccattctcactgtgctcaatct

SEQ ID NO: 2248084 - DNA, 25 bp, Homo sapien
tttccatataccttgctccagacct

SEQ ID NO: 2248085 - DNA, 25 bp, Homo sapien
accattctcactgtgctcaatctct

SEQ ID NO: 2248086 - DNA, 25 bp, Homo sapien
ttcgccatgccccaagctgaaatta

SEQ ID NO: 2248087 - DNA, 25 bp, Homo sapien
atgcagttcgccatgccccaagctg

SEQ ID NO: 2248088 - DNA, 25 bp, Homo sapien
tgtcacatgcagttcgccatgcccc

SEQ ID NO: 2248089 - DNA, 25 bp, Homo sapien
gccatgccccaagctgaaattacac

SEQ ID NO: 2248090 - DNA, 25 bp, Homo sapien
tactcacttggttaaacacgttgac

SEQ ID NO: 2248091 - DNA, 25 bp, Homo sapien
cctctcatcgttactcacttggtta

SEQ ID NO: 2248092 - DNA, 25 bp, Homo sapien
cttgctggatgaagggataccactc

SEQ ID NO: 2248093 - DNA, 25 bp, Homo sapien
taaacacgttgaccttgctggatga

SEQ ID NO: 2248094 - DNA, 25 bp, Homo sapien
gagccctactgcagtgatttgaaca

SEQ ID NO: 2248095 - DNA, 25 bp, Homo sapien
aaagctgggctcctaaaatcgagaa

SEQ ID NO: 2248096 - DNA, 25 bp, Homo sapien
taaaaaatagcccagagacttggcg

SEQ ID NO: 2248097 - DNA, 25 bp, Homo sapien
gaaaaagccctcattgtcacgatgt

SEQ ID NO: 2248098 - DNA, 25 bp, Homo sapien
gctcagttctgcaacccaggttgta

SEQ ID NO: 2248099 - DNA, 25 bp, Homo sapien
taaggtcgatggatcttgaaggcca

SEQ ID NO: 2248100 - DNA, 25 bp, Homo sapien
catgtgcagaagtctactagatgtc

SEQ ID NO: 2248101 - DNA, 25 bp, Homo sapien
gatgtcaattacaagcctgataggc

SEQ ID NO: 2248102 - DNA, 25 bp, Homo sapien
gaaatcaagagatatagataaatcc

SEQ ID NO: 2248103 - DNA, 25 bp, Homo sapien
tggtctatccacatccacaggatga

SEQ ID NO: 2248104 - DNA, 25 bp, Homo sapien
cctgagttaggctctacaatattaa

SEQ ID NO: 2248105 - DNA, 25 bp, Homo sapien
taggcatacctttaagcaaacaaag

SEQ ID NO: 2248106 - DNA, 25 bp, Homo sapien
tatgaaataaatagggtctcccaag

SEQ ID NO: 2248107 - DNA, 25 bp, Homo sapien
gaacacaagttatcctcgacctcac

SEQ ID NO: 2248108 - DNA, 25 bp, Homo sapien
tatacgagagtaccaaacacagaac

SEQ ID NO: 2248109 - DNA, 25 bp, Homo sapien
ggatatcacattcaagcacgttgca

SEQ ID NO: 2248110 - DNA, 25 bp, Homo sapien
tagtatggctagaacacttccttgg

SEQ ID NO: 2248111 - DNA, 25 bp, Homo sapien
gcaaaagcggaacctatggcataga

SEQ ID NO: 2248112 - DNA, 25 bp, Homo sapien
catccagagcaggtctaactaggca

SEQ ID NO: 2248113 - DNA, 25 bp, Homo sapien
taaacaacagtgtgagcccaatgat

SEQ ID NO: 2248114 - DNA, 25 bp, Homo sapien
actggatgacagatgagcattttaa

SEQ ID NO: 2248115 - DNA, 25 bp, Homo sapien
gtgaactggatgacagatgagcatt

SEQ ID NO: 2248116 - DNA, 25 bp, Homo sapien
catgtgaactggatgacagatgagc

SEQ ID NO: 2248117 - DNA, 25 bp, Homo sapien
tgaactggatgacagatgagcattt

SEQ ID NO: 2248118 - DNA, 25 bp, Homo sapien
taaacaggtgttaggcacgaggcct

SEQ ID NO: 2248119 - DNA, 25 bp, Homo sapien
tgccatacagcaaaagaagtccctt

SEQ ID NO: 2248120 - DNA, 25 bp, Homo sapien
actcggtggcgcttaaccaagggca

SEQ ID NO: 2248121 - DNA, 25 bp, Homo sapien
cagtagcctttgttagcatcccagg

SEQ ID NO: 2248122 - DNA, 25 bp, Homo sapien
atttcaaggctaatatcttcattta

SEQ ID NO: 2248123 - DNA, 25 bp, Homo sapien
ttttagaaattcagtttattggata

SEQ ID NO: 2248124 - DNA, 25 bp, Homo sapien
ttggatattttatttcaaggctaat

SEQ ID NO: 2248125 - DNA, 25 bp, Homo sapien
gaaattcagtttattggatatttta

SEQ ID NO: 2248126 - DNA, 25 bp, Homo sapien
tgtattatggtttaactcaacccaa

SEQ ID NO: 2248127 - DNA, 25 bp, Homo sapien
tgtgcattctggatgctaaatcaga

SEQ ID NO: 2248128 - DNA, 25 bp, Homo sapien
taaagaaatttaaggcagtgccata

SEQ ID NO: 2248129 - DNA, 25 bp, Homo sapien
aactcacttaaaatcctggtgatgg

SEQ ID NO: 2248130 - DNA, 25 bp, Homo sapien
gctcggtatggccatgattgaggtt

SEQ ID NO: 2248131 - DNA, 25 bp, Homo sapien
ctgctcggtatggccatgattgagg

SEQ ID NO: 2248132 - DNA, 25 bp, Homo sapien
tatggccatgattgaggttatcttc

SEQ ID NO: 2248133 - DNA, 25 bp, Homo sapien
cggtatggccatgattgaggttatc

SEQ ID NO: 2248134 - DNA, 25 bp, Homo sapien
gaatagttcatttgcctgacgatct

SEQ ID NO: 2248135 - DNA, 25 bp, Homo sapien
actgatcttgcttctccggcaggga

SEQ ID NO: 2248136 - DNA, 25 bp, Homo sapien
tgccttctgaagacataacctctct

SEQ ID NO: 2248137 - DNA, 25 bp, Homo sapien
tgacgatctcagcaaaaagttcatc

SEQ ID NO: 2248138 - DNA, 25 bp, Homo sapien
aaccttggccgtttttgatgtagag

SEQ ID NO: 2248139 - DNA, 25 bp, Homo sapien
tctcatggaggcaaactgctcagtt

SEQ ID NO: 2248140 - DNA, 25 bp, Homo sapien
tgattaaccaggctataaaccagga

SEQ ID NO: 2248141 - DNA, 25 bp, Homo sapien
tgtccagaatttccagcacggaggg

SEQ ID NO: 2248142 - DNA, 25 bp, Homo sapien
tccctaacaccactaccttgtattc

SEQ ID NO: 2248143 - DNA, 25 bp, Homo sapien
ggcagatttgccaacccctccactc

SEQ ID NO: 2248144 - DNA, 25 bp, Homo sapien
ctcaatgaaagtcccagtgacaaac

SEQ ID NO: 2248145 - DNA, 25 bp, Homo sapien
aaagtcccagtgacaaactgcacag

SEQ ID NO: 2248146 - DNA, 25 bp, Homo sapien
cgaggcggaaggtgggcggaaatct

SEQ ID NO: 2248147 - DNA, 25 bp, Homo sapien
cccgctagctgtggcgcggctagac

SEQ ID NO: 2248148 - DNA, 25 bp, Homo sapien
cgcggctagacgaggcggaaggtgg

SEQ ID NO: 2248149 - DNA, 25 bp, Homo sapien
gggaaagatcaccccgctagctgtg

SEQ ID NO: 2248150 - DNA, 25 bp, Homo sapien
tgcggcgaggcggacgtcggaggag

SEQ ID NO: 2248151 - DNA, 25 bp, Homo sapien
gaagggatggtaatgcccttcctat

SEQ ID NO: 2248152 - DNA, 25 bp, Homo sapien
cgagggtggcgaggaggcgcgtgcc

SEQ ID NO: 2248153 - DNA, 25 bp, Homo sapien
cttcctataggaactgcagcccgag

SEQ ID NO: 2248154 - DNA, 25 bp, Homo sapien
cgttccagttaccgctgcccgggcg

SEQ ID NO: 2248155 - DNA, 25 bp, Homo sapien
agggctccgttccagttaccgctgc

SEQ ID NO: 2248156 - DNA, 25 bp, Homo sapien
ggctccgttccagttaccgctgccc

SEQ ID NO: 2248157 - DNA, 25 bp, Homo sapien
ctccgttccagttaccgctgcccgg

SEQ ID NO: 2248158 - DNA, 25 bp, Homo sapien
ctcctctgtctctccgctgccccag

SEQ ID NO: 2248159 - DNA, 25 bp, Homo sapien
gctctgtcacgccaaggccatggcc

SEQ ID NO: 2248160 - DNA, 25 bp, Homo sapien
gaggctctgtcacgccaaggccatg

SEQ ID NO: 2248161 - DNA, 25 bp, Homo sapien
tggctcctctgtctctccgctgccc

SEQ ID NO: 2248162 - DNA, 25 bp, Homo sapien
ctgctcgccgcggggaaagaagcgg

SEQ ID NO: 2248163 - DNA, 25 bp, Homo sapien
agggactccaggcgaacccacctct

SEQ ID NO: 2248164 - DNA, 25 bp, Homo sapien
cagggactccaggcgaacccacctc

SEQ ID NO: 2248165 - DNA, 25 bp, Homo sapien
tgctcgccgcggggaaagaagcggg

SEQ ID NO: 2248166 - DNA, 25 bp, Homo sapien
agactggacgggatcacttccggtg

SEQ ID NO: 2248167 - DNA, 25 bp, Homo sapien
gagactggacgggatcacttccggt

SEQ ID NO: 2248168 - DNA, 25 bp, Homo sapien
actggacgggatcacttccggtggg

SEQ ID NO: 2248169 - DNA, 25 bp, Homo sapien
tggacgggatcacttccggtgggga

SEQ ID NO: 2248170 - DNA, 25 bp, Homo sapien
ggcgagccgggtggcgctggagccg

SEQ ID NO: 2248171 - DNA, 25 bp, Homo sapien
tcttcggggcgagccgggtggcgct

SEQ ID NO: 2248172 - DNA, 25 bp, Homo sapien
ctcttcggggcgagccgggtggcgc

SEQ ID NO: 2248173 - DNA, 25 bp, Homo sapien
agccgggtggcgctggagccgcgcc

SEQ ID NO: 2248174 - DNA, 25 bp, Homo sapien
agcgagcgagccggccggggacggt

SEQ ID NO: 2248175 - DNA, 25 bp, Homo sapien
gcccggccctaggacttgagcggct

SEQ ID NO: 2248176 - DNA, 25 bp, Homo sapien
ctccctggccggtgcggaacctgcg

SEQ ID NO: 2248177 - DNA, 25 bp, Homo sapien
gcggctgccgcggaccgtcccaccc

SEQ ID NO: 2248178 - DNA, 25 bp, Homo sapien
agccgcccggccctaggacttgagc

SEQ ID NO: 2248179 - DNA, 25 bp, Homo sapien
taccgtctggtagatccgccttgac

SEQ ID NO: 2248180 - DNA, 25 bp, Homo sapien
gcgttttacttagccgtgcctgaca

SEQ ID NO: 2248181 - DNA, 25 bp, Homo sapien
gagatgcatgcaaactacccttaga

SEQ ID NO: 2248182 - DNA, 25 bp, Homo sapien
tttgattccaaccactacacggcag

SEQ ID NO: 2248183 - DNA, 25 bp, Homo sapien
cagaaacctgcgagactcagtggcc

SEQ ID NO: 2248184 - DNA, 25 bp, Homo sapien
gaatcatagtagtgtgaggtcccac

SEQ ID NO: 2248185 - DNA, 25 bp, Homo sapien
ttggacattagaacacaggcgaatc

SEQ ID NO: 2248186 - DNA, 25 bp, Homo sapien
gtggccagcctagcaaaaatgactc

SEQ ID NO: 2248187 - DNA, 25 bp, Homo sapien
agtcttcaaaggagagtttagttca

SEQ ID NO: 2248188 - DNA, 25 bp, Homo sapien
cttcaaaggagagtttagttcaatt

SEQ ID NO: 2248189 - DNA, 25 bp, Homo sapien
tcttcaaaggagagtttagttcaat

SEQ ID NO: 2248190 - DNA, 25 bp, Homo sapien
gtcttcaaaggagagtttagttcaa

SEQ ID NO: 2248191 - DNA, 25 bp, Homo sapien
tgatccagccagtgttgagcaatcg

SEQ ID NO: 2248192 - DNA, 25 bp, Homo sapien
tccaccagccgtgcttgtaactgag

SEQ ID NO: 2248193 - DNA, 25 bp, Homo sapien
ggtctgtgagttatgagtttcccca

SEQ ID NO: 2248194 - DNA, 25 bp, Homo sapien
ccctgtgtcgtatcagaggcactgc

SEQ ID NO: 2248195 - DNA, 25 bp, Homo sapien
tgttggcaattctaatatctctgaa

SEQ ID NO: 2248196 - DNA, 25 bp, Homo sapien
gcaattctaatatctctgaatgtgt

SEQ ID NO: 2248197 - DNA, 25 bp, Homo sapien
ttggcaattctaatatctctgaatg

SEQ ID NO: 2248198 - DNA, 25 bp, Homo sapien
ctgttggcaattctaatatctctga

SEQ ID NO: 2248199 - DNA, 25 bp, Homo sapien
tgacaacgtcagcatgagagaggct

SEQ ID NO: 2248200 - DNA, 25 bp, Homo sapien
agtaggcaccttacagagatcctca

SEQ ID NO: 2248201 - DNA, 25 bp, Homo sapien
tgttgccatgacaacgtcagcatga

SEQ ID NO: 2248202 - DNA, 25 bp, Homo sapien
ttccttgttgccatgacaacgtcag

SEQ ID NO: 2248203 - DNA, 25 bp, Homo sapien
tatagctaccaggagaaagtaatct

SEQ ID NO: 2248204 - DNA, 25 bp, Homo sapien
tagacggtaagtagtaacagctgct

SEQ ID NO: 2248205 - DNA, 25 bp, Homo sapien
cattcggtccattgatatgaaccac

SEQ ID NO: 2248206 - DNA, 25 bp, Homo sapien
gtgcctttttggagcaatgtcccca

SEQ ID NO: 2248207 - DNA, 25 bp, Homo sapien
cattgcaacgtctgtccctgaagga

SEQ ID NO: 2248208 - DNA, 25 bp, Homo sapien
aacatgttgggtaactgagcaggga

SEQ ID NO: 2248209 - DNA, 25 bp, Homo sapien
agaaccgacccaagactcaagctgt

SEQ ID NO: 2248210 - DNA, 25 bp, Homo sapien
ggctgcataccaactctaaagacgc

SEQ ID NO: 2248211 - DNA, 25 bp, Homo sapien
caaaattgttggtctggaccataag

SEQ ID NO: 2248212 - DNA, 25 bp, Homo sapien
ttgttggtctggaccataaggaaac

SEQ ID NO: 2248213 - DNA, 25 bp, Homo sapien
tctggaccataaggaaacatggtag

SEQ ID NO: 2248214 - DNA, 25 bp, Homo sapien
ccataaggaaacatggtagggctcc

SEQ ID NO: 2248215 - DNA, 25 bp, Homo sapien
tttgttggccttctggtcatccagc

SEQ ID NO: 2248216 - DNA, 25 bp, Homo sapien
tgttggccttctggtcatccagcat

SEQ ID NO: 2248217 - DNA, 25 bp, Homo sapien
tgccgcttgtctgaagcacagtgac

SEQ ID NO: 2248218 - DNA, 25 bp, Homo sapien
ttcttcaatgcctgccgcttgtctg

SEQ ID NO: 2248219 - DNA, 25 bp, Homo sapien
gaaggtttggagagctcttgacagc

SEQ ID NO: 2248220 - DNA, 25 bp, Homo sapien
gtttggagagctcttgacagctgag

SEQ ID NO: 2248221 - DNA, 25 bp, Homo sapien
ccactcatgggagtctgagcacctg

SEQ ID NO: 2248222 - DNA, 25 bp, Homo sapien
ttctccacccactcatgggagtctg

SEQ ID NO: 2248223 - DNA, 25 bp, Homo sapien
cagtgtctagcactatgtctgggac

SEQ ID NO: 2248224 - DNA, 25 bp, Homo sapien
tgacgcattgctttgtgaatcacgt

SEQ ID NO: 2248225 - DNA, 25 bp, Homo sapien
gatgaatggaaaaccttggaagtgt

SEQ ID NO: 2248226 - DNA, 25 bp, Homo sapien
cacgtcaatgtgacactggtggcaa

SEQ ID NO: 2248227 - DNA, 25 bp, Homo sapien
atctggtcgttgtttctcagaactc

SEQ ID NO: 2248228 - DNA, 25 bp, Homo sapien
taatctggtcgttgtttctcagaac

SEQ ID NO: 2248229 - DNA, 25 bp, Homo sapien
aatctggtcgttgtttctcagaact

SEQ ID NO: 2248230 - DNA, 25 bp, Homo sapien
ctaatctggtcgttgtttctcagaa

SEQ ID NO: 2248231 - DNA, 25 bp, Homo sapien
ctagtcccacatatgcggttctctt

SEQ ID NO: 2248232 - DNA, 25 bp, Homo sapien
ccctgatatgttcaatgcctgaatg

SEQ ID NO: 2248233 - DNA, 25 bp, Homo sapien
ccacatatgcggttctcttttcctc

SEQ ID NO: 2248234 - DNA, 25 bp, Homo sapien
tcccacatatgcggttctcttttcc

SEQ ID NO: 2248235 - DNA, 25 bp, Homo sapien
tgcattgaggaataatagggagacc

SEQ ID NO: 2248236 - DNA, 25 bp, Homo sapien
tagggagaccatcactgtaaagcat

SEQ ID NO: 2248237 - DNA, 25 bp, Homo sapien
ctggtgagtgcctaatgcgaggatc

SEQ ID NO: 2248238 - DNA, 25 bp, Homo sapien
gaggtgatgacctacatggtgtgca

SEQ ID NO: 2248239 - DNA, 25 bp, Homo sapien
ggagatgcggacctcatgcttttct

SEQ ID NO: 2248240 - DNA, 25 bp, Homo sapien
ccagatacatcatagcttccgaaac

SEQ ID NO: 2248241 - DNA, 25 bp, Homo sapien
agatacatcatagcttccgaaactc

SEQ ID NO: 2248242 - DNA, 25 bp, Homo sapien
tgttgttttgacctcccccagatac

SEQ ID NO: 2248243 - DNA, 25 bp, Homo sapien
ggacccaaaggcaattagattcttc

SEQ ID NO: 2248244 - DNA, 25 bp, Homo sapien
acccaaaggcaattagattcttctt

SEQ ID NO: 2248245 - DNA, 25 bp, Homo sapien
gacccaaaggcaattagattcttct

SEQ ID NO: 2248246 - DNA, 25 bp, Homo sapien
ttttggtgtcttcctcaaaagcatc

SEQ ID NO: 2248247 - DNA, 25 bp, Homo sapien
aattttggtgtcttcctcaaaagca

SEQ ID NO: 2248248 - DNA, 25 bp, Homo sapien
ttggtgtcttcctcaaaagcatctt

SEQ ID NO: 2248249 - DNA, 25 bp, Homo sapien
tggtgtcttcctcaaaagcatcttt

SEQ ID NO: 2248250 - DNA, 25 bp, Homo sapien
taaaggcaaagtcttagtccccatc

SEQ ID NO: 2248251 - DNA, 25 bp, Homo sapien
gttgcactttgcaccggatgccctg

SEQ ID NO: 2248252 - DNA, 25 bp, Homo sapien
cctgcctaagggagtagtgtaagtc

SEQ ID NO: 2248253 - DNA, 25 bp, Homo sapien
tggtggctgccctttgtatccaaaa

SEQ ID NO: 2248254 - DNA, 25 bp, Homo sapien
taaatacggccattcttgaacacca

SEQ ID NO: 2248255 - DNA, 25 bp, Homo sapien
tgatggtcgggaatgcttgccctga

SEQ ID NO: 2248256 - DNA, 25 bp, Homo sapien
tagggcagctgacacttgacaagga

SEQ ID NO: 2248257 - DNA, 25 bp, Homo sapien
cattaaacggctcaaagtgggctta

SEQ ID NO: 2248258 - DNA, 25 bp, Homo sapien
aataaacatagaagtagcatactaa

SEQ ID NO: 2248259 - DNA, 25 bp, Homo sapien
gcactacagcactataacttgaaaa

SEQ ID NO: 2248260 - DNA, 25 bp, Homo sapien
ggaatgagctattgcattttggagg

SEQ ID NO: 2248261 - DNA, 25 bp, Homo sapien
aaacaagcactacagcactataact

SEQ ID NO: 2248262 - DNA, 25 bp, Homo sapien
gaaactccagagtatgaccccgtgg

SEQ ID NO: 2248263 - DNA, 25 bp, Homo sapien
tagaaagcctccgtaacagcaaagc

SEQ ID NO: 2248264 - DNA, 25 bp, Homo sapien
ccaaattggagagccggtgagctga

SEQ ID NO: 2248265 - DNA, 25 bp, Homo sapien
tgttctagaaactgcccggtgtgtg

SEQ ID NO: 2248266 - DNA, 25 bp, Homo sapien
ggtttgctttgcttaatacattgac

SEQ ID NO: 2248267 - DNA, 25 bp, Homo sapien
tacattgactgcaacacgcttattg

SEQ ID NO: 2248268 - DNA, 25 bp, Homo sapien
aaggccatatggaggtttccatgga

SEQ ID NO: 2248269 - DNA, 25 bp, Homo sapien
tgttggtagaataagacatacgaga

SEQ ID NO: 2248270 - DNA, 25 bp, Homo sapien
tacatctgtgaaacaaacatgctgc

SEQ ID NO: 2248271 - DNA, 25 bp, Homo sapien
ctacatctgtgaaacaaacatgctg

SEQ ID NO: 2248272 - DNA, 25 bp, Homo sapien
tgctgctattcagttcatctattga

SEQ ID NO: 2248273 - DNA, 25 bp, Homo sapien
caaacatgctgctattcagttcatc

SEQ ID NO: 2248274 - DNA, 25 bp, Homo sapien
gctggtggcaggtgttgttgctgca

SEQ ID NO: 2248275 - DNA, 25 bp, Homo sapien
cctgtagttggtgcagcgaacggaa

SEQ ID NO: 2248276 - DNA, 25 bp, Homo sapien
cgaacggaacgctggtggcaggtgt

SEQ ID NO: 2248277 - DNA, 25 bp, Homo sapien
agacacagtggtaggtgtagcaccg

SEQ ID NO: 2248278 - DNA, 25 bp, Homo sapien
ccaactaggacttgagaaagtagga

SEQ ID NO: 2248279 - DNA, 25 bp, Homo sapien
gctgttgttagggtagaaatagaga

SEQ ID NO: 2248280 - DNA, 25 bp, Homo sapien
gccacagtggcaaccaactaggact

SEQ ID NO: 2248281 - DNA, 25 bp, Homo sapien
gaaagtaggactattttgatgctac

SEQ ID NO: 2248282 - DNA, 25 bp, Homo sapien
tttgaagcgggtgccatgcacagta

SEQ ID NO: 2248283 - DNA, 25 bp, Homo sapien
gcgggtgccatgcacagtattggcc

SEQ ID NO: 2248284 - DNA, 25 bp, Homo sapien
tgaagcgggtgccatgcacagtatt

SEQ ID NO: 2248285 - DNA, 25 bp, Homo sapien
tatttgaagcgggtgccatgcacag

SEQ ID NO: 2248286 - DNA, 25 bp, Homo sapien
tgtacaccacgcagaaaagcgtgga

SEQ ID NO: 2248287 - DNA, 25 bp, Homo sapien
cagaaaagcgtggaaagtaaaagag

SEQ ID NO: 2248288 - DNA, 25 bp, Homo sapien
atgcaagtccaacaatctcccatgt

SEQ ID NO: 2248289 - DNA, 25 bp, Homo sapien
tgcaatatcaattactcagcacatg

SEQ ID NO: 2248290 - DNA, 25 bp, Homo sapien
tgctaggaataaagtcatgtcaact

SEQ ID NO: 2248291 - DNA, 25 bp, Homo sapien
gaagtagccaaggtagagtgatcta

SEQ ID NO: 2248292 - DNA, 25 bp, Homo sapien
cttccagggctactgaattcattcc

SEQ ID NO: 2248293 - DNA, 25 bp, Homo sapien
caaccaccttgactagacttccagg

SEQ ID NO: 2248294 - DNA, 25 bp, Homo sapien
agagactatatgctcattcttaaac

SEQ ID NO: 2248295 - DNA, 25 bp, Homo sapien
tcttgggcatttaccattgtgtcaa

SEQ ID NO: 2248296 - DNA, 25 bp, Homo sapien
aattgaacaaatttctggcttaaca

SEQ ID NO: 2248297 - DNA, 25 bp, Homo sapien
aaaaaactgctgtactctcaatggt

SEQ ID NO: 2248298 - DNA, 25 bp, Homo sapien
gcctttttatttgacagcactctac

SEQ ID NO: 2248299 - DNA, 25 bp, Homo sapien
tatcaaagacatattgacaacgcat

SEQ ID NO: 2248300 - DNA, 25 bp, Homo sapien
tttccataatatcgaagctgggagt

SEQ ID NO: 2248301 - DNA, 25 bp, Homo sapien
gacagcactctactgtctgtgacag

SEQ ID NO: 2248302 - DNA, 25 bp, Homo sapien
tgcagtgcctagagctgtgttctca

SEQ ID NO: 2248303 - DNA, 25 bp, Homo sapien
actcgctgcagtgcctagagctgtg

SEQ ID NO: 2248304 - DNA, 25 bp, Homo sapien
tcaccaaactcgctgcagtgcctag

SEQ ID NO: 2248305 - DNA, 25 bp, Homo sapien
caaactcgctgcagtgcctagagct

SEQ ID NO: 2248306 - DNA, 25 bp, Homo sapien
ggataaatgccggctgtgggagctg

SEQ ID NO: 2248307 - DNA, 25 bp, Homo sapien
ataaatgccggctgtgggagctgca

SEQ ID NO: 2248308 - DNA, 25 bp, Homo sapien
ctgcagggataaatgccggctgtgg

SEQ ID NO: 2248309 - DNA, 25 bp, Homo sapien
gcagggataaatgccggctgtggga

SEQ ID NO: 2248310 - DNA, 25 bp, Homo sapien
gcaccattgggcttttccagtgctg

SEQ ID NO: 2248311 - DNA, 25 bp, Homo sapien
ggggtggcaccattgggcttttcca

SEQ ID NO: 2248312 - DNA, 25 bp, Homo sapien
tgctgatctctttggtatcagttgc

SEQ ID NO: 2248313 - DNA, 25 bp, Homo sapien
tttggtatcagttgcagtgtaccag

SEQ ID NO: 2248314 - DNA, 25 bp, Homo sapien
tcctgtggataacaaaggtctcaag

SEQ ID NO: 2248315 - DNA, 25 bp, Homo sapien
cagatggcaaaggtcagtactaaaa

SEQ ID NO: 2248316 - DNA, 25 bp, Homo sapien
gagtaactatcctaccatgtgtcca

SEQ ID NO: 2248317 - DNA, 25 bp, Homo sapien
taatgccatgacctcgttcctgtgg

SEQ ID NO: 2248318 - DNA, 25 bp, Homo sapien
agtacttgcatttctcccgcgagca

SEQ ID NO: 2248319 - DNA, 25 bp, Homo sapien
ggcaatcattctccccacgggtaca

SEQ ID NO: 2248320 - DNA, 25 bp, Homo sapien
ccgcgagcatcgacctttgatgtaa

SEQ ID NO: 2248321 - DNA, 25 bp, Homo sapien
catggaagcatcagtagggtgagca

SEQ ID NO: 2248322 - DNA, 25 bp, Homo sapien
caagttctgcaggaacgaggcccat

SEQ ID NO: 2248323 - DNA, 25 bp, Homo sapien
cctggcattgcaagaggtgggtttc

SEQ ID NO: 2248324 - DNA, 25 bp, Homo sapien
gaacgcatcagttttgggccaacag

SEQ ID NO: 2248325 - DNA, 25 bp, Homo sapien
ggtttccaggaatcagaacaggtgt

SEQ ID NO: 2248326 - DNA, 25 bp, Homo sapien
cccaggatgtggtatgtaaggattg

SEQ ID NO: 2248327 - DNA, 25 bp, Homo sapien
tgtggtatgtaaggattgaaagcca

SEQ ID NO: 2248328 - DNA, 25 bp, Homo sapien
ggatgtggtatgtaaggattgaaag

SEQ ID NO: 2248329 - DNA, 25 bp, Homo sapien
ccaggatgtggtatgtaaggattga

SEQ ID NO: 2248330 - DNA, 25 bp, Homo sapien
gaattgatggagtcataggaaaaga

SEQ ID NO: 2248331 - DNA, 25 bp, Homo sapien
attgatggagtcataggaaaagaac

SEQ ID NO: 2248332 - DNA, 25 bp, Homo sapien
ttgatggagtcataggaaaagaacc

SEQ ID NO: 2248333 - DNA, 25 bp, Homo sapien
ctggaattgatggagtcataggaaa

SEQ ID NO: 2248334 - DNA, 25 bp, Homo sapien
ggattatatggtacacaaactagag

SEQ ID NO: 2248335 - DNA, 25 bp, Homo sapien
tactgtagtcatcctagaggtcctg

SEQ ID NO: 2248336 - DNA, 25 bp, Homo sapien
caagaatccctgttaggcaggaaga

SEQ ID NO: 2248337 - DNA, 25 bp, Homo sapien
tgcctagccttgtctttatccaggg

SEQ ID NO: 2248338 - DNA, 25 bp, Homo sapien
cagccatgggttaagtcaagcagcc

SEQ ID NO: 2248339 - DNA, 25 bp, Homo sapien
tattgagaagaagcaagctatccca

SEQ ID NO: 2248340 - DNA, 25 bp, Homo sapien
tacagcctgaaatggtctgaacact

SEQ ID NO: 2248341 - DNA, 25 bp, Homo sapien
caagggcttagcgttgactaacagc

SEQ ID NO: 2248342 - DNA, 25 bp, Homo sapien
gatctttatcggcaattttcaaaat

SEQ ID NO: 2248343 - DNA, 25 bp, Homo sapien
agtccctgccaggttattccactgt

SEQ ID NO: 2248344 - DNA, 25 bp, Homo sapien
tattccactgttgatctttatcggc

SEQ ID NO: 2248345 - DNA, 25 bp, Homo sapien
tgccaggttattccactgttgatct

SEQ ID NO: 2248346 - DNA, 25 bp, Homo sapien
gagcgttttggagcataagctgcat

SEQ ID NO: 2248347 - DNA, 25 bp, Homo sapien
ttgagcgttttggagcataagctgc

SEQ ID NO: 2248348 - DNA, 25 bp, Homo sapien
agtgatgacatttgagcgttttgga

SEQ ID NO: 2248349 - DNA, 25 bp, Homo sapien
gcgttttggagcataagctgcatct

SEQ ID NO: 2248350 - DNA, 25 bp, Homo sapien
acttgcagttctctcgggtacaccg

SEQ ID NO: 2248351 - DNA, 25 bp, Homo sapien
cagtcttctgttgaatcagattgtt

SEQ ID NO: 2248352 - DNA, 25 bp, Homo sapien
tgttccgcccattaatctccagctg

SEQ ID NO: 2248353 - DNA, 25 bp, Homo sapien
taatctccagctgcgtttttaagtg

SEQ ID NO: 2248354 - DNA, 25 bp, Homo sapien
tccttctcatttgactatttttcat

SEQ ID NO: 2248355 - DNA, 25 bp, Homo sapien
cttccttctcatttgactatttttc

SEQ ID NO: 2248356 - DNA, 25 bp, Homo sapien
ttccttctcatttgactatttttca

SEQ ID NO: 2248357 - DNA, 25 bp, Homo sapien
gttttcttgacacatcccatacaca

SEQ ID NO: 2248358 - DNA, 25 bp, Homo sapien
taacaagtttgaataggcgagaagc

SEQ ID NO: 2248359 - DNA, 25 bp, Homo sapien
tttggcgcaaaccagataacaagtt

SEQ ID NO: 2248360 - DNA, 25 bp, Homo sapien
catacacagggcaatgactttggcg

SEQ ID NO: 2248361 - DNA, 25 bp, Homo sapien
ccagcagcagatccatatctaatca

SEQ ID NO: 2248362 - DNA, 25 bp, Homo sapien
ccatatctaatcagcacctgggcct

SEQ ID NO: 2248363 - DNA, 25 bp, Homo sapien
gcagcagatccatatctaatcagca

SEQ ID NO: 2248364 - DNA, 25 bp, Homo sapien
gatccatatctaatcagcacctggg

SEQ ID NO: 2248365 - DNA, 25 bp, Homo sapien
tctccatggaatcagcccaggctct

SEQ ID NO: 2248366 - DNA, 25 bp, Homo sapien
taaacggccatgacttgacaaaagt

SEQ ID NO: 2248367 - DNA, 25 bp, Homo sapien
gtaacagtccagcagtatcccatgg

SEQ ID NO: 2248368 - DNA, 25 bp, Homo sapien
tcccatggagattgagaaccgatag

SEQ ID NO: 2248369 - DNA, 25 bp, Homo sapien
catgagggcttaagcataaacggcc

SEQ ID NO: 2248370 - DNA, 25 bp, Homo sapien
ccttgtatccacatttcgaaaaaat

SEQ ID NO: 2248371 - DNA, 25 bp, Homo sapien
tgcacagaagtaccttgtatccaca

SEQ ID NO: 2248372 - DNA, 25 bp, Homo sapien
ctatttccggatgcacagaagtacc

SEQ ID NO: 2248373 - DNA, 25 bp, Homo sapien
gaagtaccttgtatccacatttcga

SEQ ID NO: 2248374 - DNA, 25 bp, Homo sapien
taacactggtacgagactcttaaca

SEQ ID NO: 2248375 - DNA, 25 bp, Homo sapien
gaaatggtgtgtatcctatctgagg

SEQ ID NO: 2248376 - DNA, 25 bp, Homo sapien
aacacctggttaaagtggcatctgc

SEQ ID NO: 2248377 - DNA, 25 bp, Homo sapien
tctcatgattagaccgagaccatgt

SEQ ID NO: 2248378 - DNA, 25 bp, Homo sapien
gggtcctggtcacatatgcacagcc

SEQ ID NO: 2248379 - DNA, 25 bp, Homo sapien
caaccctgacaagctgttatggcat

SEQ ID NO: 2248380 - DNA, 25 bp, Homo sapien
tgatcttgagcaaagcaaccctgac

SEQ ID NO: 2248381 - DNA, 25 bp, Homo sapien
cctgggagacatgcaaagagtaagc

SEQ ID NO: 2248382 - DNA, 25 bp, Homo sapien
tgggcaaacttgcaatctgcatcag

SEQ ID NO: 2248383 - DNA, 25 bp, Homo sapien
caatctgcatcagctcgagagcaag

SEQ ID NO: 2248384 - DNA, 25 bp, Homo sapien
tcagctcgagagcaagttcctctct

SEQ ID NO: 2248385 - DNA, 25 bp, Homo sapien
aaacaggccaccacacgaccatttt

SEQ ID NO: 2248386 - DNA, 25 bp, Homo sapien
tcagggcaacattgacagccgtcat

SEQ ID NO: 2248387 - DNA, 25 bp, Homo sapien
cttggtatcacgaatcagggcaaca

SEQ ID NO: 2248388 - DNA, 25 bp, Homo sapien
ggtatcacgaatcagggcaacattg

SEQ ID NO: 2248389 - DNA, 25 bp, Homo sapien
cacgaatcagggcaacattgacagc

SEQ ID NO: 2248390 - DNA, 25 bp, Homo sapien
tgtaccctctttaggacaatattac

SEQ ID NO: 2248391 - DNA, 25 bp, Homo sapien
ttactgtggactattaaaggattaa

SEQ ID NO: 2248392 - DNA, 25 bp, Homo sapien
tctttaggacaatattactgtggac

SEQ ID NO: 2248393 - DNA, 25 bp, Homo sapien
caatattactgtggactattaaagg

SEQ ID NO: 2248394 - DNA, 25 bp, Homo sapien
aaagaaatggaccagctgctgacag

SEQ ID NO: 2248395 - DNA, 25 bp, Homo sapien
taaactacaagcacaccaggttcgg

SEQ ID NO: 2248396 - DNA, 25 bp, Homo sapien
gctggctgcccttcgatttgtggaa

SEQ ID NO: 2248397 - DNA, 25 bp, Homo sapien
caagcagcagagttttcagaaaagg

SEQ ID NO: 2248398 - DNA, 25 bp, Homo sapien
tggcccagatagaatagttctcttc

SEQ ID NO: 2248399 - DNA, 25 bp, Homo sapien
gttggaaagcaacaccttacccaca

SEQ ID NO: 2248400 - DNA, 25 bp, Homo sapien
tgaatgttggccaagtagtcaatgt

SEQ ID NO: 2248401 - DNA, 25 bp, Homo sapien
tccaagatcaatctcaacaaatctc

SEQ ID NO: 2248402 - DNA, 25 bp, Homo sapien
tcagataaattagcgcccttcccct

SEQ ID NO: 2248403 - DNA, 25 bp, Homo sapien
tctacacatgttaagggcacaattt

SEQ ID NO: 2248404 - DNA, 25 bp, Homo sapien
ttcaatttgagtattggaagaatca

SEQ ID NO: 2248405 - DNA, 25 bp, Homo sapien
ctttgtgccaactgctctacacatg

SEQ ID NO: 2248406 - DNA, 25 bp, Homo sapien
gaatcctagtgtaaaggcaaatcag

SEQ ID NO: 2248407 - DNA, 25 bp, Homo sapien
tgtcagacgcaacataagggaagta

SEQ ID NO: 2248408 - DNA, 25 bp, Homo sapien
tgtgctgtaaaaagatgtcagtcac

SEQ ID NO: 2248409 - DNA, 25 bp, Homo sapien
taaagaggacccaaaattcaggctc

SEQ ID NO: 2248410 - DNA, 25 bp, Homo sapien
gggacccttaacagcacagaaccca

SEQ ID NO: 2248411 - DNA, 25 bp, Homo sapien
cacatacaaagggagaatacacacg

SEQ ID NO: 2248412 - DNA, 25 bp, Homo sapien
tcaaactgagtcctatgcttgggct

SEQ ID NO: 2248413 - DNA, 25 bp, Homo sapien
tagtcctgggagtcattacgattgc

SEQ ID NO: 2248414 - DNA, 25 bp, Homo sapien
caagctgctgtgatactgggaagta

SEQ ID NO: 2248415 - DNA, 25 bp, Homo sapien
caaagctctaaaatcgcaacaaagt

SEQ ID NO: 2248416 - DNA, 25 bp, Homo sapien
gattatatgccatgcaagaagttcc

SEQ ID NO: 2248417 - DNA, 25 bp, Homo sapien
tgtggcactgctcacgatatcgcgt

SEQ ID NO: 2248418 - DNA, 25 bp, Homo sapien
aaggcattatttcctcggcgtccga

SEQ ID NO: 2248419 - DNA, 25 bp, Homo sapien
tgctagcgcaaacccagaggctaag

SEQ ID NO: 2248420 - DNA, 25 bp, Homo sapien
gctgctagcgcaaacccagaggcta

SEQ ID NO: 2248421 - DNA, 25 bp, Homo sapien
cttacgctgctagcgcaaacccaga

SEQ ID NO: 2248422 - DNA, 25 bp, Homo sapien
acgctgctagcgcaaacccagaggc

SEQ ID NO: 2248423 - DNA, 25 bp, Homo sapien
caagtcggccgctctggggtataaa

SEQ ID NO: 2248424 - DNA, 25 bp, Homo sapien
ccggctccaagtcggccgctctggg

SEQ ID NO: 2248425 - DNA, 25 bp, Homo sapien
gggacttgcaacccggctccaagtc

SEQ ID NO: 2248426 - DNA, 25 bp, Homo sapien
ggccgctctggggtataaaatgtca

SEQ ID NO: 2248427 - DNA, 25 bp, Homo sapien
ccttgaccccttcgtgctttttgca

SEQ ID NO: 2248428 - DNA, 25 bp, Homo sapien
tgcaagactcctttcggttccaggg

SEQ ID NO: 2248429 - DNA, 25 bp, Homo sapien
cacgctgactctcggacggaggcga

SEQ ID NO: 2248430 - DNA, 25 bp, Homo sapien
acgcgcacgctgactctcggacgga

SEQ ID NO: 2248431 - DNA, 25 bp, Homo sapien
gacgggcgggaatgcggccaagggc

SEQ ID NO: 2248432 - DNA, 25 bp, Homo sapien
cgggacgggcgggaatgcggccaag

SEQ ID NO: 2248433 - DNA, 25 bp, Homo sapien
ggcgggaatgcggccaagggccgcc

SEQ ID NO: 2248434 - DNA, 25 bp, Homo sapien
cgggcgggaatgcggccaagggccg

SEQ ID NO: 2248435 - DNA, 25 bp, Homo sapien
tgtagggcgctgtttcgtcgcgaaa

SEQ ID NO: 2248436 - DNA, 25 bp, Homo sapien
tcgtgcctggttctccgagagcgca

SEQ ID NO: 2248437 - DNA, 25 bp, Homo sapien
gcgcagcgcgggctttattctcagg

SEQ ID NO: 2248438 - DNA, 25 bp, Homo sapien
tgtgtggttcgctcactcgtgcctg

SEQ ID NO: 2248439 - DNA, 25 bp, Homo sapien
cacatatgcaggatcgtcagtgaca

SEQ ID NO: 2248440 - DNA, 25 bp, Homo sapien
gcaggatcgtcagtgacaagctcat

SEQ ID NO: 2248441 - DNA, 25 bp, Homo sapien
tacgaagacaattgtagttgataac

SEQ ID NO: 2248442 - DNA, 25 bp, Homo sapien
gttgataacgcacacatatgcagga

SEQ ID NO: 2248443 - DNA, 25 bp, Homo sapien
taaaagtcaaatgtgtctgacatac

SEQ ID NO: 2248444 - DNA, 25 bp, Homo sapien
aaatttgccgaattgcctgaactgc

SEQ ID NO: 2248445 - DNA, 25 bp, Homo sapien
aagtaggcagtgttggctatcacag

SEQ ID NO: 2248446 - DNA, 25 bp, Homo sapien
ttggcagtcccaagatctaccacag

SEQ ID NO: 2248447 - DNA, 25 bp, Homo sapien
ccccatgtgtctgaagacttaggca

SEQ ID NO: 2248448 - DNA, 25 bp, Homo sapien
tctgccagttgcttgaaggttctga

SEQ ID NO: 2248449 - DNA, 25 bp, Homo sapien
gatggctgcaattagcatatgtgaa

SEQ ID NO: 2248450 - DNA, 25 bp, Homo sapien
tgtaggattccccagattgcacatg

SEQ ID NO: 2248451 - DNA, 25 bp, Homo sapien
gtaaaattatgaagacgccctctga

SEQ ID NO: 2248452 - DNA, 25 bp, Homo sapien
ttctttttctgaatcgtccccagac

SEQ ID NO: 2248453 - DNA, 25 bp, Homo sapien
tttctgaatcgtccccagacctgga

SEQ ID NO: 2248454 - DNA, 25 bp, Homo sapien
tatgaagacgccctctgatatttct

SEQ ID NO: 2248455 - DNA, 25 bp, Homo sapien
cactggataatgattatacacaaga

SEQ ID NO: 2248456 - DNA, 25 bp, Homo sapien
cacgtgtaacactggataatgatta

SEQ ID NO: 2248457 - DNA, 25 bp, Homo sapien
gattatacacaagaaatggagcata

SEQ ID NO: 2248458 - DNA, 25 bp, Homo sapien
gataatgattatacacaagaaatgg

SEQ ID NO: 2248459 - DNA, 25 bp, Homo sapien
tgtgactgtccccttaacctctgtt

SEQ ID NO: 2248460 - DNA, 25 bp, Homo sapien
tgtgaatttagggtttctactttca

SEQ ID NO: 2248461 - DNA, 25 bp, Homo sapien
ccagtttcttgcctgtttttgtgac

SEQ ID NO: 2248462 - DNA, 25 bp, Homo sapien
tctactttcatccagtttcttgcct

SEQ ID NO: 2248463 - DNA, 25 bp, Homo sapien
cagtatatagccagtaactgaagcc

SEQ ID NO: 2248464 - DNA, 25 bp, Homo sapien
gtatatagccagtaactgaagccat

SEQ ID NO: 2248465 - DNA, 25 bp, Homo sapien
agcctccacatccagtatatagcca

SEQ ID NO: 2248466 - DNA, 25 bp, Homo sapien
cacatccagtatatagccagtaact

SEQ ID NO: 2248467 - DNA, 25 bp, Homo sapien
tctaatgtcactaagcgatgtggcg

SEQ ID NO: 2248468 - DNA, 25 bp, Homo sapien
tgttgcagccagaataaggtttccc

SEQ ID NO: 2248469 - DNA, 25 bp, Homo sapien
tgataagcagactgagagggctctc

SEQ ID NO: 2248470 - DNA, 25 bp, Homo sapien
gagggctctcaagcttggctccaca

SEQ ID NO: 2248471 - DNA, 25 bp, Homo sapien
aagttttagttcatctaggtgtctc

SEQ ID NO: 2248472 - DNA, 25 bp, Homo sapien
taggtgtctcactatatcttcatga

SEQ ID NO: 2248473 - DNA, 25 bp, Homo sapien
tagttcatctaggtgtctcactata

SEQ ID NO: 2248474 - DNA, 25 bp, Homo sapien
tcactatatcttcatgagaatccaa

SEQ ID NO: 2248475 - DNA, 25 bp, Homo sapien
accattcagaggagtcccttcaacg

SEQ ID NO: 2248476 - DNA, 25 bp, Homo sapien
cattcagaggagtcccttcaacgtc

SEQ ID NO: 2248477 - DNA, 25 bp, Homo sapien
cagaggagtcccttcaacgtcttcc

SEQ ID NO: 2248478 - DNA, 25 bp, Homo sapien
caaaccattcagaggagtcccttca

SEQ ID NO: 2248479 - DNA, 25 bp, Homo sapien
tccttttcagccaatctatattcca

SEQ ID NO: 2248480 - DNA, 25 bp, Homo sapien
ccttttcagccaatctatattccaa

SEQ ID NO: 2248481 - DNA, 25 bp, Homo sapien
ttttcagccaatctatattccaata

SEQ ID NO: 2248482 - DNA, 25 bp, Homo sapien
ttcagccaatctatattccaatatc

SEQ ID NO: 2248483 - DNA, 25 bp, Homo sapien
caggtacatgttggcctgatttagc

SEQ ID NO: 2248484 - DNA, 25 bp, Homo sapien
catagtcagggacaggtacatgttg

SEQ ID NO: 2248485 - DNA, 25 bp, Homo sapien
cctgatttagctggcaaatggctag

SEQ ID NO: 2248486 - DNA, 25 bp, Homo sapien
catgttggcctgatttagctggcaa

SEQ ID NO: 2248487 - DNA, 25 bp, Homo sapien
aaaattcctacatttctcgaatttg

SEQ ID NO: 2248488 - DNA, 25 bp, Homo sapien
ctacatttctcgaatttgcgtgtca

SEQ ID NO: 2248489 - DNA, 25 bp, Homo sapien
aattcctacatttctcgaatttgcg

SEQ ID NO: 2248490 - DNA, 25 bp, Homo sapien
ttcctacatttctcgaatttgcgtg

SEQ ID NO: 2248491 - DNA, 25 bp, Homo sapien
tagtaaccatactgccgaaatgaag

SEQ ID NO: 2248492 - DNA, 25 bp, Homo sapien
cttcagtgtcgacaggaaattccct

SEQ ID NO: 2248493 - DNA, 25 bp, Homo sapien
tgccactgatgtagagacccagttg

SEQ ID NO: 2248494 - DNA, 25 bp, Homo sapien
gaacctcttgaatgcatgagccaga

SEQ ID NO: 2248495 - DNA, 25 bp, Homo sapien
caccccatccagcaccacttcccat

SEQ ID NO: 2248496 - DNA, 25 bp, Homo sapien
ccaagtccaccccatccagcaccac

SEQ ID NO: 2248497 - DNA, 25 bp, Homo sapien
agtccaccccatccagcaccacttc

SEQ ID NO: 2248498 - DNA, 25 bp, Homo sapien
tccaccccatccagcaccacttccc

SEQ ID NO: 2248499 - DNA, 25 bp, Homo sapien
ccctcggagagctactgccagatga

SEQ ID NO: 2248500 - DNA, 25 bp, Homo sapien
aaccaggaaacactcataatacaag

SEQ ID NO: 2248501 - DNA, 25 bp, Homo sapien
agaccctcacatcatccctcggaga

SEQ ID NO: 2248502 - DNA, 25 bp, Homo sapien
agatgacaaccaggaaacactcata

SEQ ID NO: 2248503 - DNA, 25 bp, Homo sapien
caggatttcagtgccaaggatgggt

SEQ ID NO: 2248504 - DNA, 25 bp, Homo sapien
aggatgggtgtaaatagattttctt

SEQ ID NO: 2248505 - DNA, 25 bp, Homo sapien
tacagattgcatacccggtcccctt

SEQ ID NO: 2248506 - DNA, 25 bp, Homo sapien
gacagatttacagattgcatacccg

SEQ ID NO: 2248507 - DNA, 25 bp, Homo sapien
tgcacagtcactgcaccatcctgtg

SEQ ID NO: 2248508 - DNA, 25 bp, Homo sapien
gtgccatacaccatctgcacagtca

SEQ ID NO: 2248509 - DNA, 25 bp, Homo sapien
agggccttgatttccctcctggtgc

SEQ ID NO: 2248510 - DNA, 25 bp, Homo sapien
cactgaatatttagagggccttgat

SEQ ID NO: 2248511 - DNA, 25 bp, Homo sapien
tttcaggatagttttctcctgaagt

SEQ ID NO: 2248512 - DNA, 25 bp, Homo sapien
ttttcaggatagttttctcctgaag

SEQ ID NO: 2248513 - DNA, 25 bp, Homo sapien
gccatttgtactgagaaacagctca

SEQ ID NO: 2248514 - DNA, 25 bp, Homo sapien
ctcagaacagtgccatttgtactga

SEQ ID NO: 2248515 - DNA, 25 bp, Homo sapien
tccttggacacttaaaactgtcagg

SEQ ID NO: 2248516 - DNA, 25 bp, Homo sapien
gagatttgagttgccttattccaca

SEQ ID NO: 2248517 - DNA, 25 bp, Homo sapien
tcaggcggcctcattcttgccaagt

SEQ ID NO: 2248518 - DNA, 25 bp, Homo sapien
aattgtgaggtgttgatcaaattcc

SEQ ID NO: 2248519 - DNA, 25 bp, Homo sapien
ttgctagaactttctacaaagtact

SEQ ID NO: 2248520 - DNA, 25 bp, Homo sapien
cagagtcagcatactctgtgttttt

SEQ ID NO: 2248521 - DNA, 25 bp, Homo sapien
ttcagagtcagcatactctgtgttt

SEQ ID NO: 2248522 - DNA, 25 bp, Homo sapien
ctttctacaaagtactcggcttttg

SEQ ID NO: 2248523 - DNA, 25 bp, Homo sapien
caccaatggacagatgtttacagtt

SEQ ID NO: 2248524 - DNA, 25 bp, Homo sapien
taatcagtatagacagagaaaatgc

SEQ ID NO: 2248525 - DNA, 25 bp, Homo sapien
cagttgaaatcatgggatttacata

SEQ ID NO: 2248526 - DNA, 25 bp, Homo sapien
tgaatggtttgtaaagctacaccaa

SEQ ID NO: 2248527 - DNA, 25 bp, Homo sapien
tgaaattacagtgccctgaaagcgc

SEQ ID NO: 2248528 - DNA, 25 bp, Homo sapien
gggtttgcccacattatcaaggtgc

SEQ ID NO: 2248529 - DNA, 25 bp, Homo sapien
gaaaactgcccggaatcatgatgct

SEQ ID NO: 2248530 - DNA, 25 bp, Homo sapien
gagaagcagcgccaaaatgattcca

SEQ ID NO: 2248531 - DNA, 25 bp, Homo sapien
tgtttaatgtgagatacaccctgtg

SEQ ID NO: 2248532 - DNA, 25 bp, Homo sapien
taaaactacccatgtttggagagga

SEQ ID NO: 2248533 - DNA, 25 bp, Homo sapien
gatttcatatttagtccaaccccaa

SEQ ID NO: 2248534 - DNA, 25 bp, Homo sapien
gctcggtaagattcaccatcagttg

SEQ ID NO: 2248535 - DNA, 25 bp, Homo sapien
cctatgtagtcgttggtgccattgc

SEQ ID NO: 2248536 - DNA, 25 bp, Homo sapien
attctgattcggattctggctctgg

SEQ ID NO: 2248537 - DNA, 25 bp, Homo sapien
agtcaggttctgattggcattcgga

SEQ ID NO: 2248538 - DNA, 25 bp, Homo sapien
gccattgctggtgttatcattctgc

SEQ ID NO: 2248539 - DNA, 25 bp, Homo sapien
cctaccagggtcaggtcggagagca

SEQ ID NO: 2248540 - DNA, 25 bp, Homo sapien
aaaaaggtctttggcatagctgtac

SEQ ID NO: 2248541 - DNA, 25 bp, Homo sapien
tgaggccgaagaacgccatgtgctt

SEQ ID NO: 2248542 - DNA, 25 bp, Homo sapien
caaacagatattgggtcttccgctg

SEQ ID NO: 2248543 - DNA, 25 bp, Homo sapien
agattgtagggacagtccataaact

SEQ ID NO: 2248544 - DNA, 25 bp, Homo sapien
ctagattgtagggacagtccataaa

SEQ ID NO: 2248545 - DNA, 25 bp, Homo sapien
tagattgtagggacagtccataaac

SEQ ID NO: 2248546 - DNA, 25 bp, Homo sapien
ggacactgggtctcggaggatggtg

SEQ ID NO: 2248547 - DNA, 25 bp, Homo sapien
ctcactcaagtaccgggacactggg

SEQ ID NO: 2248548 - DNA, 25 bp, Homo sapien
ctcttcggaggttggaggccttcca

SEQ ID NO: 2248549 - DNA, 25 bp, Homo sapien
cagctcttcggaggttggaggcctt

SEQ ID NO: 2248550 - DNA, 25 bp, Homo sapien
aaaccaacagtcagagatatgggcg

SEQ ID NO: 2248551 - DNA, 25 bp, Homo sapien
ataagtggagtcatggaggtacatg

SEQ ID NO: 2248552 - DNA, 25 bp, Homo sapien
gatatgggcgaaataagtggagtca

SEQ ID NO: 2248553 - DNA, 25 bp, Homo sapien
catggaggtacatggcatatgtggt

SEQ ID NO: 2248554 - DNA, 25 bp, Homo sapien
catgcattgtaatgggggctgctcg

SEQ ID NO: 2248555 - DNA, 25 bp, Homo sapien
gctgctcggtgttctaaccccccaa

SEQ ID NO: 2248556 - DNA, 25 bp, Homo sapien
ggctgctcggtgttctaacccccca

SEQ ID NO: 2248557 - DNA, 25 bp, Homo sapien
aggcatgcattgtaatgggggctgc

SEQ ID NO: 2248558 - DNA, 25 bp, Homo sapien
gaggctactggttcacgaaaggcca

SEQ ID NO: 2248559 - DNA, 25 bp, Homo sapien
gaggatcatgctgtaaacatttact

SEQ ID NO: 2248560 - DNA, 25 bp, Homo sapien
gcaaagttctgaggatcatgctgta

SEQ ID NO: 2248561 - DNA, 25 bp, Homo sapien
ccagggaatgttacttgagcaaagt

SEQ ID NO: 2248562 - DNA, 25 bp, Homo sapien
gcatctggaactgccagagctaggg

SEQ ID NO: 2248563 - DNA, 25 bp, Homo sapien
tcaaattgccatcccttgaggattg

SEQ ID NO: 2248564 - DNA, 25 bp, Homo sapien
aaattgccatcccttgaggattggc

SEQ ID NO: 2248565 - DNA, 25 bp, Homo sapien
tgaggattggcatctggaactgcca

SEQ ID NO: 2248566 - DNA, 25 bp, Homo sapien
atcttacttcactgaaagtgggtga

SEQ ID NO: 2248567 - DNA, 25 bp, Homo sapien
tcttacttcactgaaagtgggtgag

SEQ ID NO: 2248568 - DNA, 25 bp, Homo sapien
ttagcctcggcatatcaatcgtgtt

SEQ ID NO: 2248569 - DNA, 25 bp, Homo sapien
cactgtgggcaggaaaaatgaaatc

SEQ ID NO: 2248570 - DNA, 25 bp, Homo sapien
ttcagtggcaaaacagattgcctcc

SEQ ID NO: 2248571 - DNA, 25 bp, Homo sapien
caatgaggcattgagattcttggaa

SEQ ID NO: 2248572 - DNA, 25 bp, Homo sapien
gcttccagtagtttcgcggctgctg

SEQ ID NO: 2248573 - DNA, 25 bp, Homo sapien
tgctcacctaacaatgaagttgggc

SEQ ID NO: 2248574 - DNA, 25 bp, Homo sapien
ttatgcgcaggcaaacgacaggcac

SEQ ID NO: 2248575 - DNA, 25 bp, Homo sapien
gcagtcagtcctcagaacctcaagg

SEQ ID NO: 2248576 - DNA, 25 bp, Homo sapien
cgcatacactgagagctcattttgt

SEQ ID NO: 2248577 - DNA, 25 bp, Homo sapien
atcagcgcatacactgagagctcat

SEQ ID NO: 2248578 - DNA, 25 bp, Homo sapien
gtggaagataaagaagtactcccac

SEQ ID NO: 2248579 - DNA, 25 bp, Homo sapien
tgtactttggtaggctctgtggaag

SEQ ID NO: 2248580 - DNA, 25 bp, Homo sapien
gacatatcccattccatctgttcct

SEQ ID NO: 2248581 - DNA, 25 bp, Homo sapien
tccagggtagtctggctctgctgct

SEQ ID NO: 2248582 - DNA, 25 bp, Homo sapien
tgaaagtcatttccagggtagtctg

SEQ ID NO: 2248583 - DNA, 25 bp, Homo sapien
tagaagaaactgcttgcacctccct

SEQ ID NO: 2248584 - DNA, 25 bp, Homo sapien
tcttaactcagattctaccaattgc

SEQ ID NO: 2248585 - DNA, 25 bp, Homo sapien
ggagattcttcactcaaaaagtaag

SEQ ID NO: 2248586 - DNA, 25 bp, Homo sapien
attgctccttttgtagctcaaatgg

SEQ ID NO: 2248587 - DNA, 25 bp, Homo sapien
aatggagattcttcactcaaaaagt

SEQ ID NO: 2248588 - DNA, 25 bp, Homo sapien
tgtagtgacatatcttattgctaga

SEQ ID NO: 2248589 - DNA, 25 bp, Homo sapien
caaagctgtgctcttgtagtgacat

SEQ ID NO: 2248590 - DNA, 25 bp, Homo sapien
tctggactgagtttctgcgtgtcac

SEQ ID NO: 2248591 - DNA, 25 bp, Homo sapien
tattgctagattagagcttttagca

SEQ ID NO: 2248592 - DNA, 25 bp, Homo sapien
atgtgttccgggtctttgtggatga

SEQ ID NO: 2248593 - DNA, 25 bp, Homo sapien
cactcttagatgtgttccgggtctt

SEQ ID NO: 2248594 - DNA, 25 bp, Homo sapien
cttagatgtgttccgggtctttgtg

SEQ ID NO: 2248595 - DNA, 25 bp, Homo sapien
ttcccactcttagatgtgttccggg

SEQ ID NO: 2248596 - DNA, 25 bp, Homo sapien
ctgcgttagtgtttggagaaccccg

SEQ ID NO: 2248597 - DNA, 25 bp, Homo sapien
caccttcaataactccacagcttat

SEQ ID NO: 2248598 - DNA, 25 bp, Homo sapien
atgggaagtccgtgaattcagatat

SEQ ID NO: 2248599 - DNA, 25 bp, Homo sapien
gtccgtgaattcagatattctttca

SEQ ID NO: 2248600 - DNA, 25 bp, Homo sapien
caataactccacagcttatgtcaaa

SEQ ID NO: 2248601 - DNA, 25 bp, Homo sapien
gattccttagggacctgagaccagg

SEQ ID NO: 2248602 - DNA, 25 bp, Homo sapien
cgtcctcgatgacttcctggcaaag

SEQ ID NO: 2248603 - DNA, 25 bp, Homo sapien
ctgaagaattcatttggtgctgcct

SEQ ID NO: 2248604 - DNA, 25 bp, Homo sapien
agaatgtggccacattctgagtggg

SEQ ID NO: 2248605 - DNA, 25 bp, Homo sapien
ctggctatcctcctcacaaattcaa

SEQ ID NO: 2248606 - DNA, 25 bp, Homo sapien
cctggctatcctcctcacaaattca

SEQ ID NO: 2248607 - DNA, 25 bp, Homo sapien
tattctgccagtcgtacttcttaag

SEQ ID NO: 2248608 - DNA, 25 bp, Homo sapien
cagtcgtacttcttaaggccattac

SEQ ID NO: 2248609 - DNA, 25 bp, Homo sapien
cctattctgccagtcgtacttctta

SEQ ID NO: 2248610 - DNA, 25 bp, Homo sapien
tctgccagtcgtacttcttaaggcc

SEQ ID NO: 2248611 - DNA, 25 bp, Homo sapien
acctaaagcgtacctgtaatatgac

SEQ ID NO: 2248612 - DNA, 25 bp, Homo sapien
cctaaagcgtacctgtaatatgacc

SEQ ID NO: 2248613 - DNA, 25 bp, Homo sapien
aacctaaagcgtacctgtaatatga

SEQ ID NO: 2248614 - DNA, 25 bp, Homo sapien
taacctaaagcgtacctgtaatatg

SEQ ID NO: 2248615 - DNA, 25 bp, Homo sapien
cagcgcttttcgttctttgccagtc

SEQ ID NO: 2248616 - DNA, 25 bp, Homo sapien
gtctggctttctgcatcccttctag

SEQ ID NO: 2248617 - DNA, 25 bp, Homo sapien
tgagtcctctgttgtgaccattgta

SEQ ID NO: 2248618 - DNA, 25 bp, Homo sapien
gaccattgtattcagcgcttttcgt

SEQ ID NO: 2248619 - DNA, 25 bp, Homo sapien
acaggcagacgtgcctgaagcactg

SEQ ID NO: 2248620 - DNA, 25 bp, Homo sapien
gcagacgtgcctgaagcactgtaaa

SEQ ID NO: 2248621 - DNA, 25 bp, Homo sapien
tcaacaacacactctactgtgtcat

SEQ ID NO: 2248622 - DNA, 25 bp, Homo sapien
ttgccaacggttggggtcttctcaa

SEQ ID NO: 2248623 - DNA, 25 bp, Homo sapien
ctgcatctagaatctgaaaaatcct

SEQ ID NO: 2248624 - DNA, 25 bp, Homo sapien
atctagaatctgaaaaatcctccac

SEQ ID NO: 2248625 - DNA, 25 bp, Homo sapien
cttgctgcatctagaatctgaaaaa

SEQ ID NO: 2248626 - DNA, 25 bp, Homo sapien
tgctgcatctagaatctgaaaaatc

SEQ ID NO: 2248627 - DNA, 25 bp, Homo sapien
taagtaatctacaatgtactgacct

SEQ ID NO: 2248628 - DNA, 25 bp, Homo sapien
ctccagccgcaagaaataagtaatc

SEQ ID NO: 2248629 - DNA, 25 bp, Homo sapien
caatgtactgacctaccccatgatt

SEQ ID NO: 2248630 - DNA, 25 bp, Homo sapien
catccagagcccaatgtgctcgtct

SEQ ID NO: 2248631 - DNA, 25 bp, Homo sapien
tttgccaaaccatctggcacagtac

SEQ ID NO: 2248632 - DNA, 25 bp, Homo sapien
gccaaaccatctggcacagtacaca

SEQ ID NO: 2248633 - DNA, 25 bp, Homo sapien
tctggcacagtacacaaaatatctt

SEQ ID NO: 2248634 - DNA, 25 bp, Homo sapien
aaccatctggcacagtacacaaaat

SEQ ID NO: 2248635 - DNA, 25 bp, Homo sapien
taagaagcactacgccctgtgcgtt

SEQ ID NO: 2248636 - DNA, 25 bp, Homo sapien
cacccgctcagtgcctcctggtttc

SEQ ID NO: 2248637 - DNA, 25 bp, Homo sapien
tgtgcgttccagactgagccacccg

SEQ ID NO: 2248638 - DNA, 25 bp, Homo sapien
tcagcaagcacatttggcctgtaat

SEQ ID NO: 2248639 - DNA, 25 bp, Homo sapien
caggttcctgcatagttcaagaaaa

SEQ ID NO: 2248640 - DNA, 25 bp, Homo sapien
caacaactgggaggttaagagcagc

SEQ ID NO: 2248641 - DNA, 25 bp, Homo sapien
cagagagggattttcgaaaagccag

SEQ ID NO: 2248642 - DNA, 25 bp, Homo sapien
gaaaagcccacgtgggcaacaactg

SEQ ID NO: 2248643 - DNA, 25 bp, Homo sapien
taggatgcgggctccataggcaaga

SEQ ID NO: 2248644 - DNA, 25 bp, Homo sapien
tcaaggcagcccaagtaaggcaggc

SEQ ID NO: 2248645 - DNA, 25 bp, Homo sapien
ggagccatccctcaaacacagctgt

SEQ ID NO: 2248646 - DNA, 25 bp, Homo sapien
gaaagaggcttgtacgtgcccagaa

SEQ ID NO: 2248647 - DNA, 25 bp, Homo sapien
cccactagggcaagaatgaaggctc

SEQ ID NO: 2248648 - DNA, 25 bp, Homo sapien
acctcatggtgttggctcccgtggc

SEQ ID NO: 2248649 - DNA, 25 bp, Homo sapien
gacgcctgcagggtttgatcaggac

SEQ ID NO: 2248650 - DNA, 25 bp, Homo sapien
cctgctgagttctgagactgagttc

SEQ ID NO: 2248651 - DNA, 25 bp, Homo sapien
tgctcttgcactatgggaaccctga

SEQ ID NO: 2248652 - DNA, 25 bp, Homo sapien
actatgggaaccctgaattgcccaa

SEQ ID NO: 2248653 - DNA, 25 bp, Homo sapien
gagatggagtcgggtggatgctgct

SEQ ID NO: 2248654 - DNA, 25 bp, Homo sapien
cagctgcgccggcaaagccattcag

SEQ ID NO: 2248655 - DNA, 25 bp, Homo sapien
ctagagagtgtttccaaggctgacc

SEQ ID NO: 2248656 - DNA, 25 bp, Homo sapien
aaggctgacccatgagattctgacg

SEQ ID NO: 2248657 - DNA, 25 bp, Homo sapien
catgtgcttgatgtggacccagaca

SEQ ID NO: 2248658 - DNA, 25 bp, Homo sapien
gacgcaattggtatgagtagggcct

SEQ ID NO: 2248659 - DNA, 25 bp, Homo sapien
agactggacacagtcgagtttgggc

SEQ ID NO: 2248660 - DNA, 25 bp, Homo sapien
tcttgaagtttcctgcaaaacacca

SEQ ID NO: 2248661 - DNA, 25 bp, Homo sapien
ccagactggacacagtcgagtttgg

SEQ ID NO: 2248662 - DNA, 25 bp, Homo sapien
actggacacagtcgagtttgggcat

SEQ ID NO: 2248663 - DNA, 25 bp, Homo sapien
tccagaaacttctctctggccactc

SEQ ID NO: 2248664 - DNA, 25 bp, Homo sapien
ccagaaacttctctctggccactct

SEQ ID NO: 2248665 - DNA, 25 bp, Homo sapien
ctccagaaacttctctctggccact

SEQ ID NO: 2248666 - DNA, 25 bp, Homo sapien
acctcctcgccaggtgattctgctg

SEQ ID NO: 2248667 - DNA, 25 bp, Homo sapien
tcttttctgaatgaaacttcttatc

SEQ ID NO: 2248668 - DNA, 25 bp, Homo sapien
acaggcacctcctcgccaggtgatt

SEQ ID NO: 2248669 - DNA, 25 bp, Homo sapien
tatctttttcaacaggcacctcctc

SEQ ID NO: 2248670 - DNA, 25 bp, Homo sapien
taaaccatccccgtgcaaagaagtg

SEQ ID NO: 2248671 - DNA, 25 bp, Homo sapien
cagctccactgtatttgagtgctga

SEQ ID NO: 2248672 - DNA, 25 bp, Homo sapien
tcgtctgcacacagcctgatataga

SEQ ID NO: 2248673 - DNA, 25 bp, Homo sapien
gactcatcaagcctgtctcgtctgc

SEQ ID NO: 2248674 - DNA, 25 bp, Homo sapien
ggaatccctcacttgtaagcgtgct

SEQ ID NO: 2248675 - DNA, 25 bp, Homo sapien
atccctcacttgtaagcgtgcttgc

SEQ ID NO: 2248676 - DNA, 25 bp, Homo sapien
gctgggaatccctcacttgtaagcg

SEQ ID NO: 2248677 - DNA, 25 bp, Homo sapien
cttgtaggctgggaatccctcactt

SEQ ID NO: 2248678 - DNA, 25 bp, Homo sapien
cacgaaggcctttgaccctgaaagc

SEQ ID NO: 2248679 - DNA, 25 bp, Homo sapien
cctggaagtgggcacgaaggccttt

SEQ ID NO: 2248680 - DNA, 25 bp, Homo sapien
catcctgagaagccaatcctggaag

SEQ ID NO: 2248681 - DNA, 25 bp, Homo sapien
gaagtgggcacgaaggcctttgacc

SEQ ID NO: 2248682 - DNA, 25 bp, Homo sapien
ggtacggagaaacagcagacagtgc

SEQ ID NO: 2248683 - DNA, 25 bp, Homo sapien
tgttcaggagcttttaagatggcct

SEQ ID NO: 2248684 - DNA, 25 bp, Homo sapien
gactcgagatgttctctctgcaccg

SEQ ID NO: 2248685 - DNA, 25 bp, Homo sapien
cagacagtgcagactcgagatgttc

SEQ ID NO: 2248686 - DNA, 25 bp, Homo sapien
gctgcctgtcatagctaatggctca

SEQ ID NO: 2248687 - DNA, 25 bp, Homo sapien
tgtgccctgacagatagcatgttgg

SEQ ID NO: 2248688 - DNA, 25 bp, Homo sapien
aataggtcttaatcagtgtgtgccc

SEQ ID NO: 2248689 - DNA, 25 bp, Homo sapien
cacttgacgatgctagggccatggc

SEQ ID NO: 2248690 - DNA, 25 bp, Homo sapien
agacctgggccacggtgtatgagtt

SEQ ID NO: 2248691 - DNA, 25 bp, Homo sapien
ggatggctacaactgctcccctgtc

SEQ ID NO: 2248692 - DNA, 25 bp, Homo sapien
ggtgcaggatggctacaactgctcc

SEQ ID NO: 2248693 - DNA, 25 bp, Homo sapien
aagacctgggccacggtgtatgagt

SEQ ID NO: 2248694 - DNA, 25 bp, Homo sapien
tccacgtagttgtgtctgaacagaa

SEQ ID NO: 2248695 - DNA, 25 bp, Homo sapien
gatgcatttattgctgcaggccaga

SEQ ID NO: 2248696 - DNA, 25 bp, Homo sapien
gattatgcagcagacaccgggctat

SEQ ID NO: 2248697 - DNA, 25 bp, Homo sapien
gaccagagattaggctccaagtata

SEQ ID NO: 2248698 - DNA, 25 bp, Homo sapien
ctctttacctgctggcaaaggttga

SEQ ID NO: 2248699 - DNA, 25 bp, Homo sapien
tctttacctgctggcaaaggttgaa

SEQ ID NO: 2248700 - DNA, 25 bp, Homo sapien
tgaaaaccaactaatacactaggtg

SEQ ID NO: 2248701 - DNA, 25 bp, Homo sapien
catgcctcctgggagaaattcacca

SEQ ID NO: 2248702 - DNA, 25 bp, Homo sapien
tgcctcctgggagaaattcaccaac

SEQ ID NO: 2248703 - DNA, 25 bp, Homo sapien
atacactaggtgttgttcctgactc

SEQ ID NO: 2248704 - DNA, 25 bp, Homo sapien
cagggctgcttgatgacagccatga

SEQ ID NO: 2248705 - DNA, 25 bp, Homo sapien
ggaggccaggtaaaagagacatttc

SEQ ID NO: 2248706 - DNA, 25 bp, Homo sapien
gggctgcttgatgacagccatgaga

SEQ ID NO: 2248707 - DNA, 25 bp, Homo sapien
gccaggtaaaagagacatttcaagg

SEQ ID NO: 2248708 - DNA, 25 bp, Homo sapien
ccaacctcagaacctggtatataaa

SEQ ID NO: 2248709 - DNA, 25 bp, Homo sapien
tattcaggctcgtctcccaggacat

SEQ ID NO: 2248710 - DNA, 25 bp, Homo sapien
gcacggccccatctatattcaggct

SEQ ID NO: 2248711 - DNA, 25 bp, Homo sapien
gcaaaaccctatgcgatgaacacat

SEQ ID NO: 2248712 - DNA, 25 bp, Homo sapien
tcagaggcctgttgtcaaaatagct

SEQ ID NO: 2248713 - DNA, 25 bp, Homo sapien
ttcctgcacaagattctcgtttgga

SEQ ID NO: 2248714 - DNA, 25 bp, Homo sapien
tcaaaatagcttgggctagtttctc

SEQ ID NO: 2248715 - DNA, 25 bp, Homo sapien
tgcacaagattctcgtttggaagga

SEQ ID NO: 2248716 - DNA, 25 bp, Homo sapien
tatggttcacggtgtcagggaaggc

SEQ ID NO: 2248717 - DNA, 25 bp, Homo sapien
gacttgggctctgtaaagaactgct

SEQ ID NO: 2248718 - DNA, 25 bp, Homo sapien
tgatggtccagttacaagattgaag

SEQ ID NO: 2248719 - DNA, 25 bp, Homo sapien
gaaaagtcattagtgaggtccccaa

SEQ ID NO: 2248720 - DNA, 25 bp, Homo sapien
gccaaaaccgttagaaagagcctga

SEQ ID NO: 2248721 - DNA, 25 bp, Homo sapien
ccgccagtgaatacataaattccat

SEQ ID NO: 2248722 - DNA, 25 bp, Homo sapien
ttaccgccagtgaatacataaattc

SEQ ID NO: 2248723 - DNA, 25 bp, Homo sapien
taccgccagtgaatacataaattcc

SEQ ID NO: 2248724 - DNA, 25 bp, Homo sapien
accgccagtgaatacataaattcca

SEQ ID NO: 2248725 - DNA, 25 bp, Homo sapien
cctttcagtataaaaagcctggcaa

SEQ ID NO: 2248726 - DNA, 25 bp, Homo sapien
aatctgaaacagctgagttggacac

SEQ ID NO: 2248727 - DNA, 25 bp, Homo sapien
taaagcaacaggatgaatctgaaac

SEQ ID NO: 2248728 - DNA, 25 bp, Homo sapien
caaagtagaacaaggcagctgtttc

SEQ ID NO: 2248729 - DNA, 25 bp, Homo sapien
taagtgagttgctaaaatgttcaga

SEQ ID NO: 2248730 - DNA, 25 bp, Homo sapien
gagatgattctcagcaagcaaataa

SEQ ID NO: 2248731 - DNA, 25 bp, Homo sapien
aatccattccttttagcctgttcca

SEQ ID NO: 2248732 - DNA, 25 bp, Homo sapien
taataacccaagtgctttctaatgg

SEQ ID NO: 2248733 - DNA, 25 bp, Homo sapien
agcagtttgctcaccttatgtctta

SEQ ID NO: 2248734 - DNA, 25 bp, Homo sapien
ttgctcaccttatgtcttacaaagg

SEQ ID NO: 2248735 - DNA, 25 bp, Homo sapien
gctcaccttatgtcttacaaaggcc

SEQ ID NO: 2248736 - DNA, 25 bp, Homo sapien
cagtttgctcaccttatgtcttaca

SEQ ID NO: 2248737 - DNA, 25 bp, Homo sapien
aaggcagtaatgacagcggctctct

SEQ ID NO: 2248738 - DNA, 25 bp, Homo sapien
caaattgtagctgtatgaaggtaac

SEQ ID NO: 2248739 - DNA, 25 bp, Homo sapien
gctctcttaaacagtacccgatgat

SEQ ID NO: 2248740 - DNA, 25 bp, Homo sapien
tgaccccaacccagtaaaggcagta

SEQ ID NO: 2248741 - DNA, 25 bp, Homo sapien
ggcaacagaagtaccgctcaccttt

SEQ ID NO: 2248742 - DNA, 25 bp, Homo sapien
ctactgggtatcaaactgggcaaca

SEQ ID NO: 2248743 - DNA, 25 bp, Homo sapien
tactgggtatcaaactgggcaacag

SEQ ID NO: 2248744 - DNA, 25 bp, Homo sapien
tgggcaacagaagtaccgctcacct

SEQ ID NO: 2248745 - DNA, 25 bp, Homo sapien
aaggagatagatcctggtgactcta

SEQ ID NO: 2248746 - DNA, 25 bp, Homo sapien
cagtgcatccgacagaagcagcctc

SEQ ID NO: 2248747 - DNA, 25 bp, Homo sapien
ctctgaaggagatagatcctggtga

SEQ ID NO: 2248748 - DNA, 25 bp, Homo sapien
tggtgactctattcccatatgaggg

SEQ ID NO: 2248749 - DNA, 25 bp, Homo sapien
gataaggaagcaccatccaacctgc

SEQ ID NO: 2248750 - DNA, 25 bp, Homo sapien
atatggcttgtctgataatcagata

SEQ ID NO: 2248751 - DNA, 25 bp, Homo sapien
ataaggaagcaccatccaacctgcc

SEQ ID NO: 2248752 - DNA, 25 bp, Homo sapien
ggcttgtctgataatcagataagga

SEQ ID NO: 2248753 - DNA, 25 bp, Homo sapien
aattggtctctggccaccagatgaa

SEQ ID NO: 2248754 - DNA, 25 bp, Homo sapien
gaattggtctctggccaccagatga

SEQ ID NO: 2248755 - DNA, 25 bp, Homo sapien
ttggtctctggccaccagatgaagg

SEQ ID NO: 2248756 - DNA, 25 bp, Homo sapien
tggtctctggccaccagatgaaggt

SEQ ID NO: 2248757 - DNA, 25 bp, Homo sapien
tcgaatttggtttacttgcaccatt

SEQ ID NO: 2248758 - DNA, 25 bp, Homo sapien
tttggtttacttgcaccattgcccc

SEQ ID NO: 2248759 - DNA, 25 bp, Homo sapien
atgaatcagctgctaacaacactgg

SEQ ID NO: 2248760 - DNA, 25 bp, Homo sapien
aatcagctgctaacaacactgggac

SEQ ID NO: 2248761 - DNA, 25 bp, Homo sapien
tcatttagaaatcaatggctgagga

SEQ ID NO: 2248762 - DNA, 25 bp, Homo sapien
ttagaaatcaatggctgaggaagct

SEQ ID NO: 2248763 - DNA, 25 bp, Homo sapien
agaaatcaatggctgaggaagctga

SEQ ID NO: 2248764 - DNA, 25 bp, Homo sapien
tttagaaatcaatggctgaggaagc

SEQ ID NO: 2248765 - DNA, 25 bp, Homo sapien
ggattcttcaggattgggatctggc

SEQ ID NO: 2248766 - DNA, 25 bp, Homo sapien
ctcagccccagaatacaatttcaaa

SEQ ID NO: 2248767 - DNA, 25 bp, Homo sapien
tttcaaaaggtgtttggattcttca

SEQ ID NO: 2248768 - DNA, 25 bp, Homo sapien
aggattgggatctggcaccctctgc

SEQ ID NO: 2248769 - DNA, 25 bp, Homo sapien
taggctgccttacaacagcgcctga

SEQ ID NO: 2248770 - DNA, 25 bp, Homo sapien
tcctccaagtgaagagacattgtct

SEQ ID NO: 2248771 - DNA, 25 bp, Homo sapien
gagcagtcccacacaccagatttct

SEQ ID NO: 2248772 - DNA, 25 bp, Homo sapien
gccctccgcgaggtctatcgataac

SEQ ID NO: 2248773 - DNA, 25 bp, Homo sapien
cgtccccttggcagacaaattgtcc

SEQ ID NO: 2248774 - DNA, 25 bp, Homo sapien
cttccttagggcacaagagaagcca

SEQ ID NO: 2248775 - DNA, 25 bp, Homo sapien
aagagaagccaaagaggtcggtcat

SEQ ID NO: 2248776 - DNA, 25 bp, Homo sapien
tccttagggcacaagagaagccaaa

SEQ ID NO: 2248777 - DNA, 25 bp, Homo sapien
cttagggcacaagagaagccaaaga

SEQ ID NO: 2248778 - DNA, 25 bp, Homo sapien
gcccaggatgccagatcatagtcaa

SEQ ID NO: 2248779 - DNA, 25 bp, Homo sapien
catagtcaaactccgcagtaatgat

SEQ ID NO: 2248780 - DNA, 25 bp, Homo sapien
actccgcagtaatgatgagaagtct

SEQ ID NO: 2248781 - DNA, 25 bp, Homo sapien
gatgccagatcatagtcaaactccg

SEQ ID NO: 2248782 - DNA, 25 bp, Homo sapien
gagacagccaagagtatgaagtcca

SEQ ID NO: 2248783 - DNA, 25 bp, Homo sapien
tggtctagcacaacatctggcccaa

SEQ ID NO: 2248784 - DNA, 25 bp, Homo sapien
caaagacctccccagacttgagtgg

SEQ ID NO: 2248785 - DNA, 25 bp, Homo sapien
tgaagtccaagtagagcagaagtcc

SEQ ID NO: 2248786 - DNA, 25 bp, Homo sapien
cgcctaaaatagatacttggaggtg

SEQ ID NO: 2248787 - DNA, 25 bp, Homo sapien
ctgttgccgagtaacatcgaggctc

SEQ ID NO: 2248788 - DNA, 25 bp, Homo sapien
gagtaacatcgaggctcttcctgag

SEQ ID NO: 2248789 - DNA, 25 bp, Homo sapien
tcctgagctggagtcgcctaaaata

SEQ ID NO: 2248790 - DNA, 25 bp, Homo sapien
aagagctgtggcataacggtgccat

SEQ ID NO: 2248791 - DNA, 25 bp, Homo sapien
caagatatggaaattttgggcaaca

SEQ ID NO: 2248792 - DNA, 25 bp, Homo sapien
cactagatgcctctgcaatgataaa

SEQ ID NO: 2248793 - DNA, 25 bp, Homo sapien
tatgagtttaacagccaaaccaaga

SEQ ID NO: 2248794 - DNA, 25 bp, Homo sapien
tacacactgtgaagtcattcctcaa

SEQ ID NO: 2248795 - DNA, 25 bp, Homo sapien
tatacgaaacattacatcagcagca

SEQ ID NO: 2248796 - DNA, 25 bp, Homo sapien
tctgtcctgtagcaaggtccttagg

SEQ ID NO: 2248797 - DNA, 25 bp, Homo sapien
aaagaagtaagcaaacactgtgcct

SEQ ID NO: 2248798 - DNA, 25 bp, Homo sapien
cagggagttttggaatccactgaca

SEQ ID NO: 2248799 - DNA, 25 bp, Homo sapien
actgacaattaccacctccataatc

SEQ ID NO: 2248800 - DNA, 25 bp, Homo sapien
agggagttttggaatccactgacaa

SEQ ID NO: 2248801 - DNA, 25 bp, Homo sapien
tggaagagccagatgagagacacag

SEQ ID NO: 2248802 - DNA, 25 bp, Homo sapien
gatggcatagaccttgagaggcagt

SEQ ID NO: 2248803 - DNA, 25 bp, Homo sapien
ggcaaccctggtagcttgattaaac

SEQ ID NO: 2248804 - DNA, 25 bp, Homo sapien
tgattaaaccaagccataatgatgg

SEQ ID NO: 2248805 - DNA, 25 bp, Homo sapien
taagcattagtcagcgtacggaaaa

SEQ ID NO: 2248806 - DNA, 25 bp, Homo sapien
gagagccagctgtaagcattagtca

SEQ ID NO: 2248807 - DNA, 25 bp, Homo sapien
cagctgtaagcattagtcagcgtac

SEQ ID NO: 2248808 - DNA, 25 bp, Homo sapien
cagagagagccagctgtaagcatta

SEQ ID NO: 2248809 - DNA, 25 bp, Homo sapien
aatgaaaatgcctggtcctggaagt

SEQ ID NO: 2248810 - DNA, 25 bp, Homo sapien
tgaaaatgcctggtcctggaagtgt

SEQ ID NO: 2248811 - DNA, 25 bp, Homo sapien
tctggccatcccagatacagtaggt

SEQ ID NO: 2248812 - DNA, 25 bp, Homo sapien
ccagatacagtaggtctcagaaagc

SEQ ID NO: 2248813 - DNA, 25 bp, Homo sapien
tatactcttagaacatactgtgcca

SEQ ID NO: 2248814 - DNA, 25 bp, Homo sapien
tgcatcattcacaccaatatgcttc

SEQ ID NO: 2248815 - DNA, 25 bp, Homo sapien
gcatagatccttacctaaaagcaga

SEQ ID NO: 2248816 - DNA, 25 bp, Homo sapien
ggaggcagctgcaaagcatagatcc

SEQ ID NO: 2248817 - DNA, 25 bp, Homo sapien
agttgtcacctccttataagtcctg

SEQ ID NO: 2248818 - DNA, 25 bp, Homo sapien
ccttataagtcctgtccactagaaa

SEQ ID NO: 2248819 - DNA, 25 bp, Homo sapien
cctccttataagtcctgtccactag

SEQ ID NO: 2248820 - DNA, 25 bp, Homo sapien
gtcacctccttataagtcctgtcca

SEQ ID NO: 2248821 - DNA, 25 bp, Homo sapien
ccaatgggtgtggtaatcctggccc

SEQ ID NO: 2248822 - DNA, 25 bp, Homo sapien
tccccagtgaatagaaagccttagg

SEQ ID NO: 2248823 - DNA, 25 bp, Homo sapien
aaatccgttcttctcccaatgggtg

SEQ ID NO: 2248824 - DNA, 25 bp, Homo sapien
tcaaggtgcagtcaacagagcaagg

SEQ ID NO: 2248825 - DNA, 25 bp, Homo sapien
ccacatttcaccatcggtgcagctg

SEQ ID NO: 2248826 - DNA, 25 bp, Homo sapien
accatcggtgcagctgcctttacct

SEQ ID NO: 2248827 - DNA, 25 bp, Homo sapien
acatttcaccatcggtgcagctgcc

SEQ ID NO: 2248828 - DNA, 25 bp, Homo sapien
ttcaccatcggtgcagctgccttta

SEQ ID NO: 2248829 - DNA, 25 bp, Homo sapien
gattatcagaactcacagaactggt

SEQ ID NO: 2248830 - DNA, 25 bp, Homo sapien
agaactggtcctgcaacctcctagg

SEQ ID NO: 2248831 - DNA, 25 bp, Homo sapien
gcccttgaggtagcaatgcatttct

SEQ ID NO: 2248832 - DNA, 25 bp, Homo sapien
ggctatcccctattcttcaaagtga

SEQ ID NO: 2248833 - DNA, 25 bp, Homo sapien
tctgctatagtcatggctgtggaat

SEQ ID NO: 2248834 - DNA, 25 bp, Homo sapien
cacctacaaggtctgtcagtatgag

SEQ ID NO: 2248835 - DNA, 25 bp, Homo sapien
gctttcatggtgaccaagaccttgt

SEQ ID NO: 2248836 - DNA, 25 bp, Homo sapien
caattgtaccaatggattgaggtcc

SEQ ID NO: 2248837 - DNA, 25 bp, Homo sapien
tagtgataagcaagcctgggaacca

SEQ ID NO: 2248838 - DNA, 25 bp, Homo sapien
ggagacttgcgaaacagtagccctg

SEQ ID NO: 2248839 - DNA, 25 bp, Homo sapien
ggaaaatagcgacagagggacaccc

SEQ ID NO: 2248840 - DNA, 25 bp, Homo sapien
gacctctagcaactggacatcgcgt

SEQ ID NO: 2248841 - DNA, 25 bp, Homo sapien
agtgcatttcttctgacccacgcgg

SEQ ID NO: 2248842 - DNA, 25 bp, Homo sapien
gatgttacgcaccaagtggcggccg

SEQ ID NO: 2248843 - DNA, 25 bp, Homo sapien
cacgtattggaggacgatcacggca

SEQ ID NO: 2248844 - DNA, 25 bp, Homo sapien
tacccggccggtggcaagtgcattt

SEQ ID NO: 2248845 - DNA, 25 bp, Homo sapien
agcccgcgctcgtcgtgcccccgca

SEQ ID NO: 2248846 - DNA, 25 bp, Homo sapien
gcccgcgctcgtcgtgcccccgcac

SEQ ID NO: 2248847 - DNA, 25 bp, Homo sapien
ttcccctggagccgctgctgcgccc

SEQ ID NO: 2248848 - DNA, 25 bp, Homo sapien
ccttcccctggagccgctgctgcgc

SEQ ID NO: 2248849 - DNA, 25 bp, Homo sapien
cgcccccttcccctggagccgctgc

SEQ ID NO: 2248850 - DNA, 25 bp, Homo sapien
ccccttcccctggagccgctgctgc

SEQ ID NO: 2248851 - DNA, 25 bp, Homo sapien
gcttccttccttcccggcaggctca

SEQ ID NO: 2248852 - DNA, 25 bp, Homo sapien
cttcccggcaggctcagcgctgtgg

SEQ ID NO: 2248853 - DNA, 25 bp, Homo sapien
cccggcaggctcagcgctgtggctt

SEQ ID NO: 2248854 - DNA, 25 bp, Homo sapien
cttccttcccggcaggctcagcgct

SEQ ID NO: 2248855 - DNA, 25 bp, Homo sapien
tatcctctttggagcgcacacctct

SEQ ID NO: 2248856 - DNA, 25 bp, Homo sapien
cgcgcccgcttggtcatccggtatg

SEQ ID NO: 2248857 - DNA, 25 bp, Homo sapien
tctgtccgggtttctccccgcatgc

SEQ ID NO: 2248858 - DNA, 25 bp, Homo sapien
gtgtctcgctccactctcggtggct

SEQ ID NO: 2248859 - DNA, 25 bp, Homo sapien
agcacgtggttcagcgagtggccca

SEQ ID NO: 2248860 - DNA, 25 bp, Homo sapien
ttctttggagaagatcgcacggagc

SEQ ID NO: 2248861 - DNA, 25 bp, Homo sapien
aagatcgcacggagcacgtggttca

SEQ ID NO: 2248862 - DNA, 25 bp, Homo sapien
ggccatggggccgaaattctttgga

SEQ ID NO: 2248863 - DNA, 25 bp, Homo sapien
ccagcgtcgcctgagaacgtgcatc

SEQ ID NO: 2248864 - DNA, 25 bp, Homo sapien
gtcgcctgagaacgtgcatccgcct

SEQ ID NO: 2248865 - DNA, 25 bp, Homo sapien
tgagaacgtgcatccgcctgcggcg

SEQ ID NO: 2248866 - DNA, 25 bp, Homo sapien
gcagcgcgaaaagcggggcgcacgc

SEQ ID NO: 2248867 - DNA, 25 bp, Homo sapien
aggagcggccgggtgtggaatccgt

SEQ ID NO: 2248868 - DNA, 25 bp, Homo sapien
gagcggccgggtgtggaatccgtga

SEQ ID NO: 2248869 - DNA, 25 bp, Homo sapien
cggccgggtgtggaatccgtgagac

SEQ ID NO: 2248870 - DNA, 25 bp, Homo sapien
cgggtgtggaatccgtgagacacac

SEQ ID NO: 2248871 - DNA, 25 bp, Homo sapien
ggccggctcgctgccaattcggcct

SEQ ID NO: 2248872 - DNA, 25 bp, Homo sapien
tccggttgccgcggcggctcgaact

SEQ ID NO: 2248873 - DNA, 25 bp, Homo sapien
acaggtggtgcggacgggcgctcct

SEQ ID NO: 2248874 - DNA, 25 bp, Homo sapien
ccctaggagggcccgcgcgaactga

SEQ ID NO: 2248875 - DNA, 25 bp, Homo sapien
taataatgcctcacgcctaagagct

SEQ ID NO: 2248876 - DNA, 25 bp, Homo sapien
tcttttcttggagtacggaggtcac

SEQ ID NO: 2248877 - DNA, 25 bp, Homo sapien
aatttccattctccagcggaagcgg

SEQ ID NO: 2248878 - DNA, 25 bp, Homo sapien
gagctcgagccacttcacaagcaga

SEQ ID NO: 2248879 - DNA, 25 bp, Homo sapien
gttgtctctatggtgtggtatgatt

SEQ ID NO: 2248880 - DNA, 25 bp, Homo sapien
tttctgagggtagtggacaaacttc

SEQ ID NO: 2248881 - DNA, 25 bp, Homo sapien
tctagtagtccctgaaagagtttgg

SEQ ID NO: 2248882 - DNA, 25 bp, Homo sapien
cctaaaatcgtcaatggagctccaa

SEQ ID NO: 2248883 - DNA, 25 bp, Homo sapien
gagctccaaagacaaacgtttccag

SEQ ID NO: 2248884 - DNA, 25 bp, Homo sapien
actgagtacaggtttaggagccgtc

SEQ ID NO: 2248885 - DNA, 25 bp, Homo sapien
tttccacagtaaagacccgggcatc

SEQ ID NO: 2248886 - DNA, 25 bp, Homo sapien
tctgcaaatgaaactgagtacaggt

SEQ ID NO: 2248887 - DNA, 25 bp, Homo sapien
gggcatcaggaccacatcccatcag

SEQ ID NO: 2248888 - DNA, 25 bp, Homo sapien
gcgtactacgccaacaagggtcatc

SEQ ID NO: 2248889 - DNA, 25 bp, Homo sapien
ctaaggtgctctgcgtactacgcca

SEQ ID NO: 2248890 - DNA, 25 bp, Homo sapien
ggttgttgctaaggtgctctgcgta

SEQ ID NO: 2248891 - DNA, 25 bp, Homo sapien
cagccagggttgttgctaaggtgct

SEQ ID NO: 2248892 - DNA, 25 bp, Homo sapien
gaaaacaggcagatgagtattgtcg

SEQ ID NO: 2248893 - DNA, 25 bp, Homo sapien
tattgtcggtgatgggactagtcca

SEQ ID NO: 2248894 - DNA, 25 bp, Homo sapien
gatgggactagtccatgcaaaagaa

SEQ ID NO: 2248895 - DNA, 25 bp, Homo sapien
agaaaggaaccatcaaagagtgcat

SEQ ID NO: 2248896 - DNA, 25 bp, Homo sapien
tgatctgaaacagggcccgaatggg

SEQ ID NO: 2248897 - DNA, 25 bp, Homo sapien
agagtcctctctaccccagattgcg

SEQ ID NO: 2248898 - DNA, 25 bp, Homo sapien
gggacaacaactgtcacggcctcaa

SEQ ID NO: 2248899 - DNA, 25 bp, Homo sapien
cagattgcggtaacaattctgagcc

SEQ ID NO: 2248900 - DNA, 25 bp, Homo sapien
gacagaagagcatgcagaacaggaa

SEQ ID NO: 2248901 - DNA, 25 bp, Homo sapien
gagacagaagagcatgcagaacagg

SEQ ID NO: 2248902 - DNA, 25 bp, Homo sapien
aggagacagaagagcatgcagaaca

SEQ ID NO: 2248903 - DNA, 25 bp, Homo sapien
cagaagagcatgcagaacaggaagg

SEQ ID NO: 2248904 - DNA, 25 bp, Homo sapien
caccaaactgacagtagacgcaccc

SEQ ID NO: 2248905 - DNA, 25 bp, Homo sapien
accaaactgacagtagacgcacccc

SEQ ID NO: 2248906 - DNA, 25 bp, Homo sapien
caaactgacagtagacgcaccccat

SEQ ID NO: 2248907 - DNA, 25 bp, Homo sapien
acaccaaactgacagtagacgcacc

SEQ ID NO: 2248908 - DNA, 25 bp, Homo sapien
tttgtcctgagtctagagctgacgc

SEQ ID NO: 2248909 - DNA, 25 bp, Homo sapien
ctgagtctagagctgacgccctcat

SEQ ID NO: 2248910 - DNA, 25 bp, Homo sapien
cttgctcacccttccttgcctcctt

SEQ ID NO: 2248911 - DNA, 25 bp, Homo sapien
tgcctcctttgtcctgagtctagag

SEQ ID NO: 2248912 - DNA, 25 bp, Homo sapien
tagaaatactagcagcagcaattcc

SEQ ID NO: 2248913 - DNA, 25 bp, Homo sapien
tctgcagttccaaaattccttgctc

SEQ ID NO: 2248914 - DNA, 25 bp, Homo sapien
caaacacttggttatctttccccat

SEQ ID NO: 2248915 - DNA, 25 bp, Homo sapien
tggaactgggcattgcaagccttat

SEQ ID NO: 2248916 - DNA, 25 bp, Homo sapien
ctgggggccagtggaactgggcatt

SEQ ID NO: 2248917 - DNA, 25 bp, Homo sapien
ctggctgaacggagacaccaaacac

SEQ ID NO: 2248918 - DNA, 25 bp, Homo sapien
ttcagcagaaccatgtgaagtctct

SEQ ID NO: 2248919 - DNA, 25 bp, Homo sapien
ccttagcaggatcaagagatgctcc

SEQ ID NO: 2248920 - DNA, 25 bp, Homo sapien
cagcttctcatgacttctggacgga

SEQ ID NO: 2248921 - DNA, 25 bp, Homo sapien
tctgcttctaccatacccttagcag

SEQ ID NO: 2248922 - DNA, 25 bp, Homo sapien
tcttgccagacgttgcagaaaatgg

SEQ ID NO: 2248923 - DNA, 25 bp, Homo sapien
gggtaaatcgtgttcactaccacac

SEQ ID NO: 2248924 - DNA, 25 bp, Homo sapien
gcatgtatcctacatgggtaaatcg

SEQ ID NO: 2248925 - DNA, 25 bp, Homo sapien
gactctgtcctgatgcatctctcaa

SEQ ID NO: 2248926 - DNA, 25 bp, Homo sapien
ctaccataggcttaatttggaggag

SEQ ID NO: 2248927 - DNA, 25 bp, Homo sapien
ttctaccataggcttaatttggagg

SEQ ID NO: 2248928 - DNA, 25 bp, Homo sapien
tctaccataggcttaatttggagga

SEQ ID NO: 2248929 - DNA, 25 bp, Homo sapien
taccataggcttaatttggaggaga

SEQ ID NO: 2248930 - DNA, 25 bp, Homo sapien
tcagattgctatcccttaccccaag

SEQ ID NO: 2248931 - DNA, 25 bp, Homo sapien
agtgtatgtagtacagtagtggttc

SEQ ID NO: 2248932 - DNA, 25 bp, Homo sapien
ggttctcaaactgtatcaagcatca

SEQ ID NO: 2248933 - DNA, 25 bp, Homo sapien
gcatcacggtctccatcagattgct

SEQ ID NO: 2248934 - DNA, 25 bp, Homo sapien
taatgagccggtaggtatgatctcc

SEQ ID NO: 2248935 - DNA, 25 bp, Homo sapien
caaaaccacgtaggaatagggcagc

SEQ ID NO: 2248936 - DNA, 25 bp, Homo sapien
tggaaagctttgaggcagtgcctgc

SEQ ID NO: 2248937 - DNA, 25 bp, Homo sapien
taaaagaagatgtacccagtgcaac

SEQ ID NO: 2248938 - DNA, 25 bp, Homo sapien
tacgtatctccgattattgataatc

SEQ ID NO: 2248939 - DNA, 25 bp, Homo sapien
tctccgattattgataatcttgaag

SEQ ID NO: 2248940 - DNA, 25 bp, Homo sapien
aatatacgtatctccgattattgat

SEQ ID NO: 2248941 - DNA, 25 bp, Homo sapien
aataaaatatacgtatctccgatta

SEQ ID NO: 2248942 - DNA, 25 bp, Homo sapien
tttgcttgcaagtcctgacacttga

SEQ ID NO: 2248943 - DNA, 25 bp, Homo sapien
cattacaacgttctttgctcagcag

SEQ ID NO: 2248944 - DNA, 25 bp, Homo sapien
gaacttccagccctgatcctgctat

SEQ ID NO: 2248945 - DNA, 25 bp, Homo sapien
tttctgtccagagtaaccctcaact

SEQ ID NO: 2248946 - DNA, 25 bp, Homo sapien
tccaacaatcattgttgggtcaagg

SEQ ID NO: 2248947 - DNA, 25 bp, Homo sapien
ttcttgccattgattattccaacaa

SEQ ID NO: 2248948 - DNA, 25 bp, Homo sapien
gggaacatccatgaccacaggtcca

SEQ ID NO: 2248949 - DNA, 25 bp, Homo sapien
cattgttgggtcaaggtcatcctgg

SEQ ID NO: 2248950 - DNA, 25 bp, Homo sapien
tatctaattccgtttggcaggtact

SEQ ID NO: 2248951 - DNA, 25 bp, Homo sapien
tattgtgatatctaattccgtttgg

SEQ ID NO: 2248952 - DNA, 25 bp, Homo sapien
tttggcaggtactagaggtttgctg

SEQ ID NO: 2248953 - DNA, 25 bp, Homo sapien
aattccgtttggcaggtactagagg

SEQ ID NO: 2248954 - DNA, 25 bp, Homo sapien
ctactgagtttgttggcctgataaa

SEQ ID NO: 2248955 - DNA, 25 bp, Homo sapien
tgtcaaccaacagcagaagtctact

SEQ ID NO: 2248956 - DNA, 25 bp, Homo sapien
ggcctgataaagacagacacgttta

SEQ ID NO: 2248957 - DNA, 25 bp, Homo sapien
ccctttctaggatatggaggacata

SEQ ID NO: 2248958 - DNA, 25 bp, Homo sapien
ctgagaggcaagcacttagcaagca

SEQ ID NO: 2248959 - DNA, 25 bp, Homo sapien
gcagcccaggttaaagcagaaacag

SEQ ID NO: 2248960 - DNA, 25 bp, Homo sapien
cctgagaggcaagcacttagcaagc

SEQ ID NO: 2248961 - DNA, 25 bp, Homo sapien
ggctgcagtgagctgtgattgcatc

SEQ ID NO: 2248962 - DNA, 25 bp, Homo sapien
ggtcaaggctgcagtgagctgtgat

SEQ ID NO: 2248963 - DNA, 25 bp, Homo sapien
ctgtagccccagttaggaggctgag

SEQ ID NO: 2248964 - DNA, 25 bp, Homo sapien
gtgggaggatcacttgagttcagga

SEQ ID NO: 2248965 - DNA, 25 bp, Homo sapien
gtataccttgcctgaaaattgacag

SEQ ID NO: 2248966 - DNA, 25 bp, Homo sapien
cagttactgtataccttgcctgaaa

SEQ ID NO: 2248967 - DNA, 25 bp, Homo sapien
ggaattttgacccagttactgtata

SEQ ID NO: 2248968 - DNA, 25 bp, Homo sapien
cattcatcagaaaggaattttgacc

SEQ ID NO: 2248969 - DNA, 25 bp, Homo sapien
cagcactggcatcagttagcaccgg

SEQ ID NO: 2248970 - DNA, 25 bp, Homo sapien
ctcttgctgctatcaggtggggaat

SEQ ID NO: 2248971 - DNA, 25 bp, Homo sapien
gatgtggcgagaaggacccagattt

SEQ ID NO: 2248972 - DNA, 25 bp, Homo sapien
ggtgcaagggagtgctgtcagcact

SEQ ID NO: 2248973 - DNA, 25 bp, Homo sapien
tgtttgcatttgttaggttgcagaa

SEQ ID NO: 2248974 - DNA, 25 bp, Homo sapien
ggatgtttgcatttgttaggttgca

SEQ ID NO: 2248975 - DNA, 25 bp, Homo sapien
ttgcatttgttaggttgcagaaatt

SEQ ID NO: 2248976 - DNA, 25 bp, Homo sapien
ctgggatgtttgcatttgttaggtt

SEQ ID NO: 2248977 - DNA, 25 bp, Homo sapien
ttgtccagtgactgcagactctcac

SEQ ID NO: 2248978 - DNA, 25 bp, Homo sapien
caccctggatggttgttgtttcctg

SEQ ID NO: 2248979 - DNA, 25 bp, Homo sapien
gtttgtccagtgactgcagactctc

SEQ ID NO: 2248980 - DNA, 25 bp, Homo sapien
cagcaccctggatggttgttgtttc

SEQ ID NO: 2248981 - DNA, 25 bp, Homo sapien
cacatatgacttccttccctgcttg

SEQ ID NO: 2248982 - DNA, 25 bp, Homo sapien
ggttggctcccatgcacatatgact

SEQ ID NO: 2248983 - DNA, 25 bp, Homo sapien
tcttaggttggctcccatgcacata

SEQ ID NO: 2248984 - DNA, 25 bp, Homo sapien
tttcttgttcttaggttggctccca

SEQ ID NO: 2248985 - DNA, 25 bp, Homo sapien
atccagcatctgtcacagttggctg

SEQ ID NO: 2248986 - DNA, 25 bp, Homo sapien
gctcagctctgtcctagttctgaca

SEQ ID NO: 2248987 - DNA, 25 bp, Homo sapien
tgacaaggatttcacggaaataatt

SEQ ID NO: 2248988 - DNA, 25 bp, Homo sapien
tgtcctagttctgacaaggatttca

SEQ ID NO: 2248989 - DNA, 25 bp, Homo sapien
gcaccttgctccttgatataggatt

SEQ ID NO: 2248990 - DNA, 25 bp, Homo sapien
aagtaatacaaagccagaatgcacc

SEQ ID NO: 2248991 - DNA, 25 bp, Homo sapien
tgcaccagaaactaccacttcatag

SEQ ID NO: 2248992 - DNA, 25 bp, Homo sapien
gaaactaccacttcataggaaagta

SEQ ID NO: 2248993 - DNA, 25 bp, Homo sapien
ctggaagtactgagctttggttcca

SEQ ID NO: 2248994 - DNA, 25 bp, Homo sapien
aaagagctgcaataactgtctggtt

SEQ ID NO: 2248995 - DNA, 25 bp, Homo sapien
tggttccactaataccctttccatg

SEQ ID NO: 2248996 - DNA, 25 bp, Homo sapien
catggggcctaaccctcaaatttga

SEQ ID NO: 2248997 - DNA, 25 bp, Homo sapien
ttttcataggaaatagcctgaggct

SEQ ID NO: 2248998 - DNA, 25 bp, Homo sapien
atagcctgaggctgtcgcagcccca

SEQ ID NO: 2248999 - DNA, 25 bp, Homo sapien
catctctgcagcctcgaccataaga

SEQ ID NO: 2249000 - DNA, 25 bp, Homo sapien
tctctgcagcctcgaccataagaga

SEQ ID NO: 2249001 - DNA, 25 bp, Homo sapien
ttcatctctgcagcctcgaccataa

SEQ ID NO: 2249002 - DNA, 25 bp, Homo sapien
tctatttcatctctgcagcctcgac

SEQ ID NO: 2249003 - DNA, 25 bp, Homo sapien
tgtggcctttgctactggcaggcca

SEQ ID NO: 2249004 - DNA, 25 bp, Homo sapien
gggctctgaaagatgtgtggccttt

SEQ ID NO: 2249005 - DNA, 25 bp, Homo sapien
aagatgtgtggcctttgctactggc

SEQ ID NO: 2249006 - DNA, 25 bp, Homo sapien
ggccactgacaaataaccctgtctt

SEQ ID NO: 2249007 - DNA, 25 bp, Homo sapien
tgccacttccgtaaactctccagtg

SEQ ID NO: 2249008 - DNA, 25 bp, Homo sapien
gagagatgccacttccgtaaactct

SEQ ID NO: 2249009 - DNA, 25 bp, Homo sapien
gatgccacttccgtaaactctccag

SEQ ID NO: 2249010 - DNA, 25 bp, Homo sapien
gagatgccacttccgtaaactctcc

SEQ ID NO: 2249011 - DNA, 25 bp, Homo sapien
aatgcaaatgcttgaactatatttt

SEQ ID NO: 2249012 - DNA, 25 bp, Homo sapien
caaatgcttgaactatattttacat

SEQ ID NO: 2249013 - DNA, 25 bp, Homo sapien
caaatgcaaatgcttgaactatatt

SEQ ID NO: 2249014 - DNA, 25 bp, Homo sapien
tgcaaatgcttgaactatattttac

SEQ ID NO: 2249015 - DNA, 25 bp, Homo sapien
gaaggtttggactgcaggtctattt

SEQ ID NO: 2249016 - DNA, 25 bp, Homo sapien
ttggggaaggtttggactgcaggtc

SEQ ID NO: 2249017 - DNA, 25 bp, Homo sapien
aggtttggactgcaggtctattttc

SEQ ID NO: 2249018 - DNA, 25 bp, Homo sapien
gggaaggtttggactgcaggtctat

SEQ ID NO: 2249019 - DNA, 25 bp, Homo sapien
gcttatcagtaggaggatgttgctg

SEQ ID NO: 2249020 - DNA, 25 bp, Homo sapien
ctggggacagttttcatatacgagc

SEQ ID NO: 2249021 - DNA, 25 bp, Homo sapien
tggggacagttttcatatacgagct

SEQ ID NO: 2249022 - DNA, 25 bp, Homo sapien
aagccgtcttctttgctaggatctc

SEQ ID NO: 2249023 - DNA, 25 bp, Homo sapien
catatttgtttaggagcccctcgga

SEQ ID NO: 2249024 - DNA, 25 bp, Homo sapien
ttctttgctaggatctctggttctg

SEQ ID NO: 2249025 - DNA, 25 bp, Homo sapien
cctcggactccattaaaagccgtct

SEQ ID NO: 2249026 - DNA, 25 bp, Homo sapien
ccacaaagaacaactcctgcaaagg

SEQ ID NO: 2249027 - DNA, 25 bp, Homo sapien
caggtgctcctagacacggggccca

SEQ ID NO: 2249028 - DNA, 25 bp, Homo sapien
tctgcaaacagcgtagcaggtgctc

SEQ ID NO: 2249029 - DNA, 25 bp, Homo sapien
caccgagggccttaaaccaatcttg

SEQ ID NO: 2249030 - DNA, 25 bp, Homo sapien
ctgaagctgaatcttaaggcgagag

SEQ ID NO: 2249031 - DNA, 25 bp, Homo sapien
aacagcacgtcttaatcatacggga

SEQ ID NO: 2249032 - DNA, 25 bp, Homo sapien
agctgaatcttaaggcgagaggacg

SEQ ID NO: 2249033 - DNA, 25 bp, Homo sapien
acacatcaacagcacgtcttaatca

SEQ ID NO: 2249034 - DNA, 25 bp, Homo sapien
caatcgcaatgttggtcaggtcact

SEQ ID NO: 2249035 - DNA, 25 bp, Homo sapien
tgtactgagatccaccggagcttgt

SEQ ID NO: 2249036 - DNA, 25 bp, Homo sapien
tctgatttgtcgtcggagatgctgc

SEQ ID NO: 2249037 - DNA, 25 bp, Homo sapien
aaagccacgtgccattagacctgga

SEQ ID NO: 2249038 - DNA, 25 bp, Homo sapien
tagaataagttgttgaagttcagac

SEQ ID NO: 2249039 - DNA, 25 bp, Homo sapien
ctgtagaataagttgttgaagttca

SEQ ID NO: 2249040 - DNA, 25 bp, Homo sapien
gtagaataagttgttgaagttcaga

SEQ ID NO: 2249041 - DNA, 25 bp, Homo sapien
tgtagaataagttgttgaagttcag

SEQ ID NO: 2249042 - DNA, 25 bp, Homo sapien
gcgccgttttatgtttttcacgtca

SEQ ID NO: 2249043 - DNA, 25 bp, Homo sapien
tttaaggcatcgtaggtgcgccgtt

SEQ ID NO: 2249044 - DNA, 25 bp, Homo sapien
ttccacccgtaagttctgacagttc

SEQ ID NO: 2249045 - DNA, 25 bp, Homo sapien
actcgtttggtgaggcgtggttgct

SEQ ID NO: 2249046 - DNA, 25 bp, Homo sapien
ccttcatggaaagacggcacaggcc

SEQ ID NO: 2249047 - DNA, 25 bp, Homo sapien
caccgtctcccagaccttcatggaa

SEQ ID NO: 2249048 - DNA, 25 bp, Homo sapien
ttgggcttcctaccacagggatgtt

SEQ ID NO: 2249049 - DNA, 25 bp, Homo sapien
ctgaacttggcgaccagctcgccca

SEQ ID NO: 2249050 - DNA, 25 bp, Homo sapien
taagaccttgagttcttcgttagct

SEQ ID NO: 2249051 - DNA, 25 bp, Homo sapien
ggttctcgtccattaagaccttgag

SEQ ID NO: 2249052 - DNA, 25 bp, Homo sapien
tgagttcttcgttagcttcagtgag

SEQ ID NO: 2249053 - DNA, 25 bp, Homo sapien
cggctggtctggttctcgtccatta

SEQ ID NO: 2249054 - DNA, 25 bp, Homo sapien
gttaacagatttgggaaataaatgc

SEQ ID NO: 2249055 - DNA, 25 bp, Homo sapien
gctataaatgttcacctttccagag

SEQ ID NO: 2249056 - DNA, 25 bp, Homo sapien
aacaattcttccaggccgagtgtag

SEQ ID NO: 2249057 - DNA, 25 bp, Homo sapien
agaaaaacaattcttccaggccgag

SEQ ID NO: 2249058 - DNA, 25 bp, Homo sapien
aataagggtctgttgggtgcttcaa

SEQ ID NO: 2249059 - DNA, 25 bp, Homo sapien
caagattccacatggctcaaataga

SEQ ID NO: 2249060 - DNA, 25 bp, Homo sapien
gagaaatttcaagaccttccaagat

SEQ ID NO: 2249061 - DNA, 25 bp, Homo sapien
ggccacttggaccaggatcctgtat

SEQ ID NO: 2249062 - DNA, 25 bp, Homo sapien
gggaaagtgtgaatgaaagtcctac

SEQ ID NO: 2249063 - DNA, 25 bp, Homo sapien
gaaagtcctactatcacaaattatg

SEQ ID NO: 2249064 - DNA, 25 bp, Homo sapien
tgaaagtcctactatcacaaattat

SEQ ID NO: 2249065 - DNA, 25 bp, Homo sapien
gaaagtgtgaatgaaagtcctacta

SEQ ID NO: 2249066 - DNA, 25 bp, Homo sapien
tctagaatggtcattagaatggtca

SEQ ID NO: 2249067 - DNA, 25 bp, Homo sapien
gaagtctagaatggtcattagaatg

SEQ ID NO: 2249068 - DNA, 25 bp, Homo sapien
caaagaagtctagaatggtcattag

SEQ ID NO: 2249069 - DNA, 25 bp, Homo sapien
tggcatcaaagaagtctagaatggt

SEQ ID NO: 2249070 - DNA, 25 bp, Homo sapien
ttgacaaacccaactactgaatcgg

SEQ ID NO: 2249071 - DNA, 25 bp, Homo sapien
tgtctccaaggagcgaccggaggtc

SEQ ID NO: 2249072 - DNA, 25 bp, Homo sapien
gggaagtccggacagctgcactttg

SEQ ID NO: 2249073 - DNA, 25 bp, Homo sapien
tggaagtaaaactccaaggctttga

SEQ ID NO: 2249074 - DNA, 25 bp, Homo sapien
ttagtcctgaaacaatgcgccctac

SEQ ID NO: 2249075 - DNA, 25 bp, Homo sapien
agacccttagtcctgaaacaatgcg

SEQ ID NO: 2249076 - DNA, 25 bp, Homo sapien
tgagctggcgtcctccttttgagac

SEQ ID NO: 2249077 - DNA, 25 bp, Homo sapien
taatgagctggcgtcctccttttga

SEQ ID NO: 2249078 - DNA, 25 bp, Homo sapien
ctttgttgaagcgcaaagagctttt

SEQ ID NO: 2249079 - DNA, 25 bp, Homo sapien
cagcctcagcgggattccactgcat

SEQ ID NO: 2249080 - DNA, 25 bp, Homo sapien
agcgggattccactgcattcttgac

SEQ ID NO: 2249081 - DNA, 25 bp, Homo sapien
cattcttgacagtccggctcctttc

SEQ ID NO: 2249082 - DNA, 25 bp, Homo sapien
tccgcacattttctcgaccgaggct

SEQ ID NO: 2249083 - DNA, 25 bp, Homo sapien
tgggtgctcaactacccagtgagag

SEQ ID NO: 2249084 - DNA, 25 bp, Homo sapien
ttaggctgacaatgcaagcccgcac

SEQ ID NO: 2249085 - DNA, 25 bp, Homo sapien
cctcttaggctgacaatgcaagccc

SEQ ID NO: 2249086 - DNA, 25 bp, Homo sapien
ctggtcttgtgggtgctcaactacc

SEQ ID NO: 2249087 - DNA, 25 bp, Homo sapien
cagcatccacctctgggccactcac

SEQ ID NO: 2249088 - DNA, 25 bp, Homo sapien
tcccttgactctcaacgatgctaac

SEQ ID NO: 2249089 - DNA, 25 bp, Homo sapien
tctcaacgatgctaacagcatccac

SEQ ID NO: 2249090 - DNA, 25 bp, Homo sapien
tgactctcaacgatgctaacagcat

SEQ ID NO: 2249091 - DNA, 25 bp, Homo sapien
tcaggcttggataggaaacctctat

SEQ ID NO: 2249092 - DNA, 25 bp, Homo sapien
caggcttggataggaaacctctata

SEQ ID NO: 2249093 - DNA, 25 bp, Homo sapien
ggcttggataggaaacctctataag

SEQ ID NO: 2249094 - DNA, 25 bp, Homo sapien
ttggataggaaacctctataagcat

SEQ ID NO: 2249095 - DNA, 25 bp, Homo sapien
tcttggccacagctagagaaggatg

SEQ ID NO: 2249096 - DNA, 25 bp, Homo sapien
gaactgagagcaattgtctgaagga

SEQ ID NO: 2249097 - DNA, 25 bp, Homo sapien
tctacagttacatcaagctcttggc

SEQ ID NO: 2249098 - DNA, 25 bp, Homo sapien
aaggccatgtctgaacataggacaa

SEQ ID NO: 2249099 - DNA, 25 bp, Homo sapien
tggctaatgcactgatgtagtgctc

SEQ ID NO: 2249100 - DNA, 25 bp, Homo sapien
cgatggctaatgcactgatgtagtg

SEQ ID NO: 2249101 - DNA, 25 bp, Homo sapien
tgccgatggctaatgcactgatgta

SEQ ID NO: 2249102 - DNA, 25 bp, Homo sapien
gctaatgcactgatgtagtgctcca

SEQ ID NO: 2249103 - DNA, 25 bp, Homo sapien
cacattttcctagtatcctcatctc

SEQ ID NO: 2249104 - DNA, 25 bp, Homo sapien
ctaatgactgaaccattggatgcag

SEQ ID NO: 2249105 - DNA, 25 bp, Homo sapien
ccattggatgcagtaaccaaggtgt

SEQ ID NO: 2249106 - DNA, 25 bp, Homo sapien
agtaaccaaggtgtagttacacatt

SEQ ID NO: 2249107 - DNA, 25 bp, Homo sapien
tggcttagcagtgacattacatgtg

SEQ ID NO: 2249108 - DNA, 25 bp, Homo sapien
aaagtcaggtcttctcctaacaagg

SEQ ID NO: 2249109 - DNA, 25 bp, Homo sapien
ttacatgtgcatgcgcgtgtgcgtg

SEQ ID NO: 2249110 - DNA, 25 bp, Homo sapien
tagaagccaagagttatccagtcag

SEQ ID NO: 2249111 - DNA, 25 bp, Homo sapien
gataactctctgagccatattttgg

SEQ ID NO: 2249112 - DNA, 25 bp, Homo sapien
cattttccaagttctcacaaggccc

SEQ ID NO: 2249113 - DNA, 25 bp, Homo sapien
ggagaccagattcatttctaccaag

SEQ ID NO: 2249114 - DNA, 25 bp, Homo sapien
caaatcagtaagagttcagaagaac

SEQ ID NO: 2249115 - DNA, 25 bp, Homo sapien
ataactggctacttctaataaaatt

SEQ ID NO: 2249116 - DNA, 25 bp, Homo sapien
gctttaataaataactggctacttc

SEQ ID NO: 2249117 - DNA, 25 bp, Homo sapien
ataaataactggctacttctaataa

SEQ ID NO: 2249118 - DNA, 25 bp, Homo sapien
ctttaataaataactggctacttct

SEQ ID NO: 2249119 - DNA, 25 bp, Homo sapien
ccctaaacccaagtgtgaacatgtg

SEQ ID NO: 2249120 - DNA, 25 bp, Homo sapien
gaaatctcgaccactctaacaaagg

SEQ ID NO: 2249121 - DNA, 25 bp, Homo sapien
tatcttggatcgtagcacattgctg

SEQ ID NO: 2249122 - DNA, 25 bp, Homo sapien
aaaactttgcccgagtgttgacagc

SEQ ID NO: 2249123 - DNA, 25 bp, Homo sapien
ttcttttaataagataacatgataa

SEQ ID NO: 2249124 - DNA, 25 bp, Homo sapien
ttttcttttaataagataacatgat

SEQ ID NO: 2249125 - DNA, 25 bp, Homo sapien
taataagataacatgataaataaaa

SEQ ID NO: 2249126 - DNA, 25 bp, Homo sapien
ctttttcttttaataagataacatg

SEQ ID NO: 2249127 - DNA, 25 bp, Homo sapien
gtcagcacttcttaaaccagtggcc

SEQ ID NO: 2249128 - DNA, 25 bp, Homo sapien
gaaacaaggcgagatcacagttgga

SEQ ID NO: 2249129 - DNA, 25 bp, Homo sapien
tacctacactgttagccacgtttaa

SEQ ID NO: 2249130 - DNA, 25 bp, Homo sapien
tggtagaaaagtgataactggtgcc

SEQ ID NO: 2249131 - DNA, 25 bp, Homo sapien
gacagtgaggaggtaggcctgtgcc

SEQ ID NO: 2249132 - DNA, 25 bp, Homo sapien
agtgaggaggtaggcctgtgcccca

SEQ ID NO: 2249133 - DNA, 25 bp, Homo sapien
ggacggacaccagcactgtcggctt

SEQ ID NO: 2249134 - DNA, 25 bp, Homo sapien
agcactgtcggctttctcattggca

SEQ ID NO: 2249135 - DNA, 25 bp, Homo sapien
tcagaagacatacaagagcaattcg

SEQ ID NO: 2249136 - DNA, 25 bp, Homo sapien
catacaagagcaattcgtactttca

SEQ ID NO: 2249137 - DNA, 25 bp, Homo sapien
cgtactttcaaaccacaaatgctta

SEQ ID NO: 2249138 - DNA, 25 bp, Homo sapien
gagcaattcgtactttcaaaccaca

SEQ ID NO: 2249139 - DNA, 25 bp, Homo sapien
cacgtcgttcccattgtatgcattc

SEQ ID NO: 2249140 - DNA, 25 bp, Homo sapien
catcttgctggtcatcactcgaaga

SEQ ID NO: 2249141 - DNA, 25 bp, Homo sapien
aagtccacgtcgttcccattgtatg

SEQ ID NO: 2249142 - DNA, 25 bp, Homo sapien
tcgaagagccatgatttgacgaagg

SEQ ID NO: 2249143 - DNA, 25 bp, Homo sapien
cctctcatcgttgcaaacgttgctc

SEQ ID NO: 2249144 - DNA, 25 bp, Homo sapien
tcatcgttgcaaacgttgctcggaa

SEQ ID NO: 2249145 - DNA, 25 bp, Homo sapien
cgttgcaaacgttgctcggaaggga

SEQ ID NO: 2249146 - DNA, 25 bp, Homo sapien
catcctcattgccgtttcctgcagc

SEQ ID NO: 2249147 - DNA, 25 bp, Homo sapien
ggtccaaactagtgccagctgctgt

SEQ ID NO: 2249148 - DNA, 25 bp, Homo sapien
acgagaaattcgtccagctgggagg

SEQ ID NO: 2249149 - DNA, 25 bp, Homo sapien
gcactttcagagatggaacgagaaa

SEQ ID NO: 2249150 - DNA, 25 bp, Homo sapien
ggtgatgtggtctgaagcgagcact

SEQ ID NO: 2249151 - DNA, 25 bp, Homo sapien
gttcataatagcatcagaaatcttc

SEQ ID NO: 2249152 - DNA, 25 bp, Homo sapien
cataatagcatcagaaatcttcaca

SEQ ID NO: 2249153 - DNA, 25 bp, Homo sapien
cttgaacactattatcctgcatgtt

SEQ ID NO: 2249154 - DNA, 25 bp, Homo sapien
attatcctgcatgttcataatagca

SEQ ID NO: 2249155 - DNA, 25 bp, Homo sapien
tgaaaggaccctctagcctctctgc

SEQ ID NO: 2249156 - DNA, 25 bp, Homo sapien
gttgaaaggaccctctagcctctct

SEQ ID NO: 2249157 - DNA, 25 bp, Homo sapien
aatgttgaaaggaccctctagcctc

SEQ ID NO: 2249158 - DNA, 25 bp, Homo sapien
tcaatgttgaaaggaccctctagcc

SEQ ID NO: 2249159 - DNA, 25 bp, Homo sapien
ctaatatgaggtttggggaagaaca

SEQ ID NO: 2249160 - DNA, 25 bp, Homo sapien
ggtttggggaagaacaatacagcat

SEQ ID NO: 2249161 - DNA, 25 bp, Homo sapien
atgaggtttggggaagaacaataca

SEQ ID NO: 2249162 - DNA, 25 bp, Homo sapien
gaggtttggggaagaacaatacagc

SEQ ID NO: 2249163 - DNA, 25 bp, Homo sapien
ccatggtgttgtgtgttgcgcagct

SEQ ID NO: 2249164 - DNA, 25 bp, Homo sapien
tgcgcagctgaagaatgcaactgaa

SEQ ID NO: 2249165 - DNA, 25 bp, Homo sapien
tgcaactgaagagcattctgcctgc

SEQ ID NO: 2249166 - DNA, 25 bp, Homo sapien
gagccagccggctatacacaagagc

SEQ ID NO: 2249167 - DNA, 25 bp, Homo sapien
gcagtagttgtaacatggcttcaca

SEQ ID NO: 2249168 - DNA, 25 bp, Homo sapien
tggttggccaaacagcctctcatga

SEQ ID NO: 2249169 - DNA, 25 bp, Homo sapien
ccggcagtgggagcagtagatcatc

SEQ ID NO: 2249170 - DNA, 25 bp, Homo sapien
tagatcatcttcaacagggcatggg

SEQ ID NO: 2249171 - DNA, 25 bp, Homo sapien
tggagtgttactttggatatcactt

SEQ ID NO: 2249172 - DNA, 25 bp, Homo sapien
ggagtgttactttggatatcactta

SEQ ID NO: 2249173 - DNA, 25 bp, Homo sapien
gagtgttactttggatatcacttat

SEQ ID NO: 2249174 - DNA, 25 bp, Homo sapien
ctggagtgttactttggatatcact

SEQ ID NO: 2249175 - DNA, 25 bp, Homo sapien
tttgagcatccctaaaccgaacacc

SEQ ID NO: 2249176 - DNA, 25 bp, Homo sapien
tctggtgaaagtccaagatcttctg

SEQ ID NO: 2249177 - DNA, 25 bp, Homo sapien
caaacataacagtggactaagtcag

SEQ ID NO: 2249178 - DNA, 25 bp, Homo sapien
tctttaagcatcaggttggtattca

SEQ ID NO: 2249179 - DNA, 25 bp, Homo sapien
aagaattcaaaggctcaagaaaaca

SEQ ID NO: 2249180 - DNA, 25 bp, Homo sapien
aattcaaaggctcaagaaaacactg

SEQ ID NO: 2249181 - DNA, 25 bp, Homo sapien
gaattcaaaggctcaagaaaacact

SEQ ID NO: 2249182 - DNA, 25 bp, Homo sapien
agaattcaaaggctcaagaaaacac

SEQ ID NO: 2249183 - DNA, 25 bp, Homo sapien
ttctgagaacgacgtccagaagaat

SEQ ID NO: 2249184 - DNA, 25 bp, Homo sapien
cagaagaatgcaacacagggaaggc

SEQ ID NO: 2249185 - DNA, 25 bp, Homo sapien
cacagggaaggcacaactgcttact

SEQ ID NO: 2249186 - DNA, 25 bp, Homo sapien
ggcacaactgcttacttccccgtaa

SEQ ID NO: 2249187 - DNA, 25 bp, Homo sapien
ttgagggcctaaagttgacagcact

SEQ ID NO: 2249188 - DNA, 25 bp, Homo sapien
gcatccaggctttttagcaatggcc

SEQ ID NO: 2249189 - DNA, 25 bp, Homo sapien
tgacagcactaagatcagccttgca

SEQ ID NO: 2249190 - DNA, 25 bp, Homo sapien
cagaatctgctgttgttgtgcatcc

SEQ ID NO: 2249191 - DNA, 25 bp, Homo sapien
tgatcacatactacaatttcacttt

SEQ ID NO: 2249192 - DNA, 25 bp, Homo sapien
acacagtctatctagtccaattcgc

SEQ ID NO: 2249193 - DNA, 25 bp, Homo sapien
tcatcagctcctgatcacatactac

SEQ ID NO: 2249194 - DNA, 25 bp, Homo sapien
gtctatctagtccaattcgctgaat

SEQ ID NO: 2249195 - DNA, 25 bp, Homo sapien
gcagtgtagtccacactaattgtcg

SEQ ID NO: 2249196 - DNA, 25 bp, Homo sapien
cacactaattgtcgtagaaacctgt

SEQ ID NO: 2249197 - DNA, 25 bp, Homo sapien
tcatgagtcaacagcagtgtagtcc

SEQ ID NO: 2249198 - DNA, 25 bp, Homo sapien
ctaattgtcgtagaaacctgtcttc

SEQ ID NO: 2249199 - DNA, 25 bp, Homo sapien
caaaacaaccaaatgtggagcctgt

SEQ ID NO: 2249200 - DNA, 25 bp, Homo sapien
caaccaaatgtggagcctgtgtgtg

SEQ ID NO: 2249201 - DNA, 25 bp, Homo sapien
gattaaatgctttcctagactatga

SEQ ID NO: 2249202 - DNA, 25 bp, Homo sapien
ctatgactagtaggctgacagtcac

SEQ ID NO: 2249203 - DNA, 25 bp, Homo sapien
gtaacctggagcttcaatttgcgag

SEQ ID NO: 2249204 - DNA, 25 bp, Homo sapien
ccttgagcgaaagtacgggctgcta

SEQ ID NO: 2249205 - DNA, 25 bp, Homo sapien
tgcgagggacatctccgaagggctt

SEQ ID NO: 2249206 - DNA, 25 bp, Homo sapien
gctacaaaagcacgagtaacctgga

SEQ ID NO: 2249207 - DNA, 25 bp, Homo sapien
tcaggggatctttagtaagtgtggc

SEQ ID NO: 2249208 - DNA, 25 bp, Homo sapien
agtgtggctatataaacgacaatta

SEQ ID NO: 2249209 - DNA, 25 bp, Homo sapien
tccaatgtaaaaccctctcagggga

SEQ ID NO: 2249210 - DNA, 25 bp, Homo sapien
gtaagtgtggctatataaacgacaa

SEQ ID NO: 2249211 - DNA, 25 bp, Homo sapien
gtctctgtgcaacttcactgctcca

SEQ ID NO: 2249212 - DNA, 25 bp, Homo sapien
tctctgtgcaacttcactgctccat

SEQ ID NO: 2249213 - DNA, 25 bp, Homo sapien
tgtacttcttcaccacacataatgt

SEQ ID NO: 2249214 - DNA, 25 bp, Homo sapien
aaaggtactatgtaattagaatggc

SEQ ID NO: 2249215 - DNA, 25 bp, Homo sapien
tggtaacaagccctttgcagaaata

SEQ ID NO: 2249216 - DNA, 25 bp, Homo sapien
caagaaaagcatgcttcaaaggtac

SEQ ID NO: 2249217 - DNA, 25 bp, Homo sapien
agtacactttcaattggctcatatt

SEQ ID NO: 2249218 - DNA, 25 bp, Homo sapien
acactttcaattggctcatattggc

SEQ ID NO: 2249219 - DNA, 25 bp, Homo sapien
tcagataggatcaaagtacactttc

SEQ ID NO: 2249220 - DNA, 25 bp, Homo sapien
tcaattggctcatattggctatttc

SEQ ID NO: 2249221 - DNA, 25 bp, Homo sapien
catacagattccagtgcatccggaa

SEQ ID NO: 2249222 - DNA, 25 bp, Homo sapien
tccggaagtattctagccataaagc

SEQ ID NO: 2249223 - DNA, 25 bp, Homo sapien
cataaagctacagggtaaactcgtc

SEQ ID NO: 2249224 - DNA, 25 bp, Homo sapien
cgtctctggtatccaacaaggacaa

SEQ ID NO: 2249225 - DNA, 25 bp, Homo sapien
ttcttgtaacgtgaagcaaagacag

SEQ ID NO: 2249226 - DNA, 25 bp, Homo sapien
gacagcttgcaaatgattgcactgt

SEQ ID NO: 2249227 - DNA, 25 bp, Homo sapien
actgttcgctgaccacacttttgaa

SEQ ID NO: 2249228 - DNA, 25 bp, Homo sapien
tgaaatcatctttactttgcaggct

SEQ ID NO: 2249229 - DNA, 25 bp, Homo sapien
tgtggtataattttgtacacgttta

SEQ ID NO: 2249230 - DNA, 25 bp, Homo sapien
tttgtacacgtttacaaggattgac

SEQ ID NO: 2249231 - DNA, 25 bp, Homo sapien
tctctccaatattaattggtgtggt

SEQ ID NO: 2249232 - DNA, 25 bp, Homo sapien
gctactatcacttcagtctctccaa

SEQ ID NO: 2249233 - DNA, 25 bp, Homo sapien
tgttccttctgctattgctgtccat

SEQ ID NO: 2249234 - DNA, 25 bp, Homo sapien
caaaaacgggtagcagcaataaaag

SEQ ID NO: 2249235 - DNA, 25 bp, Homo sapien
cttcaaaaacgggtagcagcaataa

SEQ ID NO: 2249236 - DNA, 25 bp, Homo sapien
tatactaaggatacacccttcaaaa

SEQ ID NO: 2249237 - DNA, 25 bp, Homo sapien
cacccttcaaaaacgggtagcagca

SEQ ID NO: 2249238 - DNA, 25 bp, Homo sapien
ggcccagagtggcccatgcactcca

SEQ ID NO: 2249239 - DNA, 25 bp, Homo sapien
ataaaaggcccagagtggcccatgc

SEQ ID NO: 2249240 - DNA, 25 bp, Homo sapien
cataaaaggcccagagtggcccatg

SEQ ID NO: 2249241 - DNA, 25 bp, Homo sapien
acataaaaggcccagagtggcccat

SEQ ID NO: 2249242 - DNA, 25 bp, Homo sapien
aatgcaggttgctatataactccag

SEQ ID NO: 2249243 - DNA, 25 bp, Homo sapien
taagctacctaagaccccatgagga

SEQ ID NO: 2249244 - DNA, 25 bp, Homo sapien
agcataaatacatgtggccagcggg

SEQ ID NO: 2249245 - DNA, 25 bp, Homo sapien
gatctaaattcatgtagccacaaag

SEQ ID NO: 2249246 - DNA, 25 bp, Homo sapien
tgataagcaaattgtcaaccaaggt

SEQ ID NO: 2249247 - DNA, 25 bp, Homo sapien
aatagctttaaactgcactccagac

SEQ ID NO: 2249248 - DNA, 25 bp, Homo sapien
gaaatcaaccaaggcttcttactgc

SEQ ID NO: 2249249 - DNA, 25 bp, Homo sapien
tatagagaaggccagtcagaaacac

SEQ ID NO: 2249250 - DNA, 25 bp, Homo sapien
gaattcacaggaatatccgaaatgg

SEQ ID NO: 2249251 - DNA, 25 bp, Homo sapien
acaggaatatccgaaatggttaaca

SEQ ID NO: 2249252 - DNA, 25 bp, Homo sapien
ggaatatccgaaatggttaacagct

SEQ ID NO: 2249253 - DNA, 25 bp, Homo sapien
ttagaattcacaggaatatccgaaa

SEQ ID NO: 2249254 - DNA, 25 bp, Homo sapien
tacagccaagatctggagacacgaa

SEQ ID NO: 2249255 - DNA, 25 bp, Homo sapien
agatctacagccaagatctggagac

SEQ ID NO: 2249256 - DNA, 25 bp, Homo sapien
tctggagacacgaaaaatgattact

SEQ ID NO: 2249257 - DNA, 25 bp, Homo sapien
cacgaaaaatgattacttcctgaac

SEQ ID NO: 2249258 - DNA, 25 bp, Homo sapien
caaatagtggtaaacatgatgccct

SEQ ID NO: 2249259 - DNA, 25 bp, Homo sapien
tgaactcggcaggtcagaggtacta

SEQ ID NO: 2249260 - DNA, 25 bp, Homo sapien
gatggtatccaccagccagttttga

SEQ ID NO: 2249261 - DNA, 25 bp, Homo sapien
gtagataaatcactgggaccagatg

SEQ ID NO: 2249262 - DNA, 25 bp, Homo sapien
actaagcactacagtgcatgggatc

SEQ ID NO: 2249263 - DNA, 25 bp, Homo sapien
cactacagtgcatgggatcttcaga

SEQ ID NO: 2249264 - DNA, 25 bp, Homo sapien
aaaggttgggctccactacagccag

SEQ ID NO: 2249265 - DNA, 25 bp, Homo sapien
cagtgcatgggatcttcagagaaca

SEQ ID NO: 2249266 - DNA, 25 bp, Homo sapien
ctaatcctcggcagccactgaagac

SEQ ID NO: 2249267 - DNA, 25 bp, Homo sapien
gaagacagccaggatgaaacttttt

SEQ ID NO: 2249268 - DNA, 25 bp, Homo sapien
aagacagccaggatgaaactttttt

SEQ ID NO: 2249269 - DNA, 25 bp, Homo sapien
atcctcggcagccactgaagacagc

SEQ ID NO: 2249270 - DNA, 25 bp, Homo sapien
tcaaagccaagaagagcccgtgtgc

SEQ ID NO: 2249271 - DNA, 25 bp, Homo sapien
aagccaagaagagcccgtgtgctca

SEQ ID NO: 2249272 - DNA, 25 bp, Homo sapien
agaagagcccgtgtgctcaggccag

SEQ ID NO: 2249273 - DNA, 25 bp, Homo sapien
caagaagagcccgtgtgctcaggcc

SEQ ID NO: 2249274 - DNA, 25 bp, Homo sapien
catgcactgcagtggtttattgaaa

SEQ ID NO: 2249275 - DNA, 25 bp, Homo sapien
taaagcactctgcaaccatgacctg

SEQ ID NO: 2249276 - DNA, 25 bp, Homo sapien
gcagtggtttattgaaaggaggcaa

SEQ ID NO: 2249277 - DNA, 25 bp, Homo sapien
ctggattgccttggcactatacaca

SEQ ID NO: 2249278 - DNA, 25 bp, Homo sapien
ggctttcgggttctgtctcctgaag

SEQ ID NO: 2249279 - DNA, 25 bp, Homo sapien
tcccccacatgggacattgacaagg

SEQ ID NO: 2249280 - DNA, 25 bp, Homo sapien
tgcttttgtctctcccccacatggg

SEQ ID NO: 2249281 - DNA, 25 bp, Homo sapien
atgccttcatgtgttggctttcggg

SEQ ID NO: 2249282 - DNA, 25 bp, Homo sapien
cgggcagatagtcaatgtctgtggc

SEQ ID NO: 2249283 - DNA, 25 bp, Homo sapien
cgtgacaggtacaagcaggaaccat

SEQ ID NO: 2249284 - DNA, 25 bp, Homo sapien
accatgaaaggtcccaggtcgggca

SEQ ID NO: 2249285 - DNA, 25 bp, Homo sapien
ggtcgggcatcatttcccaagggtg

SEQ ID NO: 2249286 - DNA, 25 bp, Homo sapien
gagtgagagcccaatccaaaagcag

SEQ ID NO: 2249287 - DNA, 25 bp, Homo sapien
acagccagagaaccctaaatcagga

SEQ ID NO: 2249288 - DNA, 25 bp, Homo sapien
cagcaggaaagcactgccttttggg

SEQ ID NO: 2249289 - DNA, 25 bp, Homo sapien
tgccttttgggatctctgcagaagc

SEQ ID NO: 2249290 - DNA, 25 bp, Homo sapien
gaaacttccacaggcctcaggtcac

SEQ ID NO: 2249291 - DNA, 25 bp, Homo sapien
tgaaagcagacaaaccgtggaagcc

SEQ ID NO: 2249292 - DNA, 25 bp, Homo sapien
tgtaccctccggatcacaaagctga

SEQ ID NO: 2249293 - DNA, 25 bp, Homo sapien
gatgaggcagacaatttaaaaggcg

SEQ ID NO: 2249294 - DNA, 25 bp, Homo sapien
tggaagccaatgacacaggaaacgc

SEQ ID NO: 2249295 - DNA, 25 bp, Homo sapien
gatgttagactagactttaggcata

SEQ ID NO: 2249296 - DNA, 25 bp, Homo sapien
ttggcatgtgctgatgttagactag

SEQ ID NO: 2249297 - DNA, 25 bp, Homo sapien
gcagaggaatttggcatgtgctgat

SEQ ID NO: 2249298 - DNA, 25 bp, Homo sapien
gactagactttaggcataagggtaa

SEQ ID NO: 2249299 - DNA, 25 bp, Homo sapien
cagacctttcataaaagcctaaagg

SEQ ID NO: 2249300 - DNA, 25 bp, Homo sapien
tgagagcggactcagacctttcata

SEQ ID NO: 2249301 - DNA, 25 bp, Homo sapien
gctttagcactaattgtctggtacc

SEQ ID NO: 2249302 - DNA, 25 bp, Homo sapien
ctgtggtctctatgaaaatgagagc

SEQ ID NO: 2249303 - DNA, 25 bp, Homo sapien
gctaaagtccttggtggtcttccaa

SEQ ID NO: 2249304 - DNA, 25 bp, Homo sapien
ccaaggattccagctaaaaaggcac

SEQ ID NO: 2249305 - DNA, 25 bp, Homo sapien
aattgcactgcatgagctaaagtcc

SEQ ID NO: 2249306 - DNA, 25 bp, Homo sapien
tgctgctggtcactaataactcccc

SEQ ID NO: 2249307 - DNA, 25 bp, Homo sapien
caaaatgtgggaatgacaactgtaa

SEQ ID NO: 2249308 - DNA, 25 bp, Homo sapien
tcaaaatgtgggaatgacaactgta

SEQ ID NO: 2249309 - DNA, 25 bp, Homo sapien
aaaatgtgggaatgacaactgtaac

SEQ ID NO: 2249310 - DNA, 25 bp, Homo sapien
ttcacgccaatcatctccgctgtgc

SEQ ID NO: 2249311 - DNA, 25 bp, Homo sapien
tgtgcccaggcctaaactgtgcagg

SEQ ID NO: 2249312 - DNA, 25 bp, Homo sapien
tcagcggctggtggttcacttcatt

SEQ ID NO: 2249313 - DNA, 25 bp, Homo sapien
gcagggcacaaagaccccaggtttg

SEQ ID NO: 2249314 - DNA, 25 bp, Homo sapien
gctttgaggacatacttgagctccc

SEQ ID NO: 2249315 - DNA, 25 bp, Homo sapien
tatttctagacagacgccagttaca

SEQ ID NO: 2249316 - DNA, 25 bp, Homo sapien
caataaaatcgtgccgctttgagga

SEQ ID NO: 2249317 - DNA, 25 bp, Homo sapien
catgttatttggtaactgccaaggt

SEQ ID NO: 2249318 - DNA, 25 bp, Homo sapien
gtctctatttgcataaccatctcca

SEQ ID NO: 2249319 - DNA, 25 bp, Homo sapien
cgccaaaatccggtgaactttctca

SEQ ID NO: 2249320 - DNA, 25 bp, Homo sapien
ctttctcacaggctaagccgtctct

SEQ ID NO: 2249321 - DNA, 25 bp, Homo sapien
ggtttcctgtaatcagtcctttcaa

SEQ ID NO: 2249322 - DNA, 25 bp, Homo sapien
gacagtcgcactgggcaacccggcg

SEQ ID NO: 2249323 - DNA, 25 bp, Homo sapien
gcggggagcggagcgcgacagtcgc

SEQ ID NO: 2249324 - DNA, 25 bp, Homo sapien
ggcttcccgggacggcgaataatgc

SEQ ID NO: 2249325 - DNA, 25 bp, Homo sapien
cggagcgcgacagtcgcactgggca

SEQ ID NO: 2249326 - DNA, 25 bp, Homo sapien
acttttcgacttgagctcggcagcc

SEQ ID NO: 2249327 - DNA, 25 bp, Homo sapien
taaagacgtcgcacttccgagcaac

SEQ ID NO: 2249328 - DNA, 25 bp, Homo sapien
aagcgcgggcaagccgaaccgtgcc

SEQ ID NO: 2249329 - DNA, 25 bp, Homo sapien
tgttgaagcctttggacacgtaaag

SEQ ID NO: 2249330 - DNA, 25 bp, Homo sapien
gagttggtggaagaggcgagcaggc

SEQ ID NO: 2249331 - DNA, 25 bp, Homo sapien
tcaggcaacggtccccggtgccagg

SEQ ID NO: 2249332 - DNA, 25 bp, Homo sapien
gctggtccgctcgtccggctggact

SEQ ID NO: 2249333 - DNA, 25 bp, Homo sapien
cgaaaagtagagctgggcctcgcgt

SEQ ID NO: 2249334 - DNA, 25 bp, Homo sapien
gcctgcaatgacttcctgacagaac

SEQ ID NO: 2249335 - DNA, 25 bp, Homo sapien
tgtttttgtgtggagtgctgtggat

SEQ ID NO: 2249336 - DNA, 25 bp, Homo sapien
tgacttcctgacagaactgtttctc

SEQ ID NO: 2249337 - DNA, 25 bp, Homo sapien
acaccagatgtttacgctccacttc

SEQ ID NO: 2249338 - DNA, 25 bp, Homo sapien
cagttgtaggttcccatccgtttgc

SEQ ID NO: 2249339 - DNA, 25 bp, Homo sapien
cacagctgcagattcccaatcctga

SEQ ID NO: 2249340 - DNA, 25 bp, Homo sapien
tcatatttccctcttcccgtgatgt

SEQ ID NO: 2249341 - DNA, 25 bp, Homo sapien
ccaatcctgatcctcactgggagaa

SEQ ID NO: 2249342 - DNA, 25 bp, Homo sapien
tttgggcacccagagttaggcaact

SEQ ID NO: 2249343 - DNA, 25 bp, Homo sapien
acttgggtgtgggatccatccttag

SEQ ID NO: 2249344 - DNA, 25 bp, Homo sapien
tctctgtgctagtctttctttgggc

SEQ ID NO: 2249345 - DNA, 25 bp, Homo sapien
ccatccttagtggataaagctatgc

SEQ ID NO: 2249346 - DNA, 25 bp, Homo sapien
ttcagggtcactgtctattggcatc

SEQ ID NO: 2249347 - DNA, 25 bp, Homo sapien
gggatgctgcaattagagttttctt

SEQ ID NO: 2249348 - DNA, 25 bp, Homo sapien
tataagaagaaagtaccggggatgc

SEQ ID NO: 2249349 - DNA, 25 bp, Homo sapien
cagaaacaacttataagaagaaagt

SEQ ID NO: 2249350 - DNA, 25 bp, Homo sapien
taacttgttcatagtttcctccttc

SEQ ID NO: 2249351 - DNA, 25 bp, Homo sapien
tggattaaaatttaacttgttcata

SEQ ID NO: 2249352 - DNA, 25 bp, Homo sapien
acttgttcatagtttcctccttcag

SEQ ID NO: 2249353 - DNA, 25 bp, Homo sapien
ttgttcatagtttcctccttcagca

SEQ ID NO: 2249354 - DNA, 25 bp, Homo sapien
tctgatttcccaggaacctttagca

SEQ ID NO: 2249355 - DNA, 25 bp, Homo sapien
tcagatttatcatacaacatcgggc

SEQ ID NO: 2249356 - DNA, 25 bp, Homo sapien
tggatgtgtaggtctgctctcagga

SEQ ID NO: 2249357 - DNA, 25 bp, Homo sapien
gaggtttccgcttctgattatgctg

SEQ ID NO: 2249358 - DNA, 25 bp, Homo sapien
cagaattagcccagaaagtctggag

SEQ ID NO: 2249359 - DNA, 25 bp, Homo sapien
gtcagaattagcccagaaagtctgg

SEQ ID NO: 2249360 - DNA, 25 bp, Homo sapien
tcagaattagcccagaaagtctgga

SEQ ID NO: 2249361 - DNA, 25 bp, Homo sapien
agaattagcccagaaagtctggagt

SEQ ID NO: 2249362 - DNA, 25 bp, Homo sapien
tggctggtgtgcttacaagttcaca

SEQ ID NO: 2249363 - DNA, 25 bp, Homo sapien
tggtgtgcttacaagttcacagcca

SEQ ID NO: 2249364 - DNA, 25 bp, Homo sapien
atgtggaaaaatagctggctggtgt

SEQ ID NO: 2249365 - DNA, 25 bp, Homo sapien
atagctggctggtgtgcttacaagt

SEQ ID NO: 2249366 - DNA, 25 bp, Homo sapien
ccagagagccttgtgccatattggc

SEQ ID NO: 2249367 - DNA, 25 bp, Homo sapien
tatgatgtcctttagtgtggtggga

SEQ ID NO: 2249368 - DNA, 25 bp, Homo sapien
ggggtctgtgcatactgctggctcc

SEQ ID NO: 2249369 - DNA, 25 bp, Homo sapien
catagagcatctcttggacctctat

SEQ ID NO: 2249370 - DNA, 25 bp, Homo sapien
cttgaagttactgacgccacttgcc

SEQ ID NO: 2249371 - DNA, 25 bp, Homo sapien
cttgccatacgtgtggcggctggca

SEQ ID NO: 2249372 - DNA, 25 bp, Homo sapien
gctcatccacatatttacccaacca

SEQ ID NO: 2249373 - DNA, 25 bp, Homo sapien
tttgaaaacttgaagttactgacgc

SEQ ID NO: 2249374 - DNA, 25 bp, Homo sapien
gccttctctgaagtctacggtttca

SEQ ID NO: 2249375 - DNA, 25 bp, Homo sapien
gcttccggagaactcttcaagagga

SEQ ID NO: 2249376 - DNA, 25 bp, Homo sapien
ttggattcagctgctgtgacttgca

SEQ ID NO: 2249377 - DNA, 25 bp, Homo sapien
tggactcacaggaacattacggatg

SEQ ID NO: 2249378 - DNA, 25 bp, Homo sapien
cacacaccagcctggaaggtatttt

SEQ ID NO: 2249379 - DNA, 25 bp, Homo sapien
aagcatccaggccagatcgtatgag

SEQ ID NO: 2249380 - DNA, 25 bp, Homo sapien
tgagaaggcctgtgactcactgtgc

SEQ ID NO: 2249381 - DNA, 25 bp, Homo sapien
cacaccagcctggaaggtattttct

SEQ ID NO: 2249382 - DNA, 25 bp, Homo sapien
cgattttagtatgtgtgctgcccaa

SEQ ID NO: 2249383 - DNA, 25 bp, Homo sapien
tccgattttagtatgtgtgctgccc

SEQ ID NO: 2249384 - DNA, 25 bp, Homo sapien
gcatgtcattcatgcacagggccca

SEQ ID NO: 2249385 - DNA, 25 bp, Homo sapien
ttgcatgtcattcatgcacagggcc

SEQ ID NO: 2249386 - DNA, 25 bp, Homo sapien
caagtcaaatatgaccttaggctgg

SEQ ID NO: 2249387 - DNA, 25 bp, Homo sapien
catgttctggaaactgaagcaagtc

SEQ ID NO: 2249388 - DNA, 25 bp, Homo sapien
ccatctacatagctgaagccagcag

SEQ ID NO: 2249389 - DNA, 25 bp, Homo sapien
aagccagcaggtcttggacgtgaca

SEQ ID NO: 2249390 - DNA, 25 bp, Homo sapien
tttgggttgaatggtgccacaaaat

SEQ ID NO: 2249391 - DNA, 25 bp, Homo sapien
ctgggcagagggaccggcatttact

SEQ ID NO: 2249392 - DNA, 25 bp, Homo sapien
attggagggacagcacattcatgcc

SEQ ID NO: 2249393 - DNA, 25 bp, Homo sapien
tgccttttgggttgaatggtgccac

SEQ ID NO: 2249394 - DNA, 25 bp, Homo sapien
gaggccaagagtgagagttgctccc

SEQ ID NO: 2249395 - DNA, 25 bp, Homo sapien
gggtttgctgatgacaccttctgca

SEQ ID NO: 2249396 - DNA, 25 bp, Homo sapien
gagagttgctccctataaatcatgg

SEQ ID NO: 2249397 - DNA, 25 bp, Homo sapien
tgcaacctgacccaaagcaacggct

SEQ ID NO: 2249398 - DNA, 25 bp, Homo sapien
cagcaagcctgagacagcagcaaag

SEQ ID NO: 2249399 - DNA, 25 bp, Homo sapien
agcaaagaagctggggagtgatttc

SEQ ID NO: 2249400 - DNA, 25 bp, Homo sapien
gctggggagtgatttctttgcactg

SEQ ID NO: 2249401 - DNA, 25 bp, Homo sapien
tggagagaggcaacagcaagcctga

SEQ ID NO: 2249402 - DNA, 25 bp, Homo sapien
tacctgatttacatagaggattcct

SEQ ID NO: 2249403 - DNA, 25 bp, Homo sapien
tgtacctgatttacatagaggattc

SEQ ID NO: 2249404 - DNA, 25 bp, Homo sapien
tttacatagaggattcctatttggg

SEQ ID NO: 2249405 - DNA, 25 bp, Homo sapien
cctgatttacatagaggattcctat

SEQ ID NO: 2249406 - DNA, 25 bp, Homo sapien
gctggaggaggtatacaggataaca

SEQ ID NO: 2249407 - DNA, 25 bp, Homo sapien
ttccctttatcgaggaagaccacag

SEQ ID NO: 2249408 - DNA, 25 bp, Homo sapien
ccatgcaaagagagaacgatagaaa

SEQ ID NO: 2249409 - DNA, 25 bp, Homo sapien
catggtaaccatgttctagcagcca

SEQ ID NO: 2249410 - DNA, 25 bp, Homo sapien
cagtgcaccaggaagaagaagcaca

SEQ ID NO: 2249411 - DNA, 25 bp, Homo sapien
agtgcaccaggaagaagaagcacac

SEQ ID NO: 2249412 - DNA, 25 bp, Homo sapien
tcagtgcaccaggaagaagaagcac

SEQ ID NO: 2249413 - DNA, 25 bp, Homo sapien
gccatgctggtgagaagcttcagcg

SEQ ID NO: 2249414 - DNA, 25 bp, Homo sapien
tccttcggagttgcctgctgactgt

SEQ ID NO: 2249415 - DNA, 25 bp, Homo sapien
ggaatgaacgttcccgaggttgtga

SEQ ID NO: 2249416 - DNA, 25 bp, Homo sapien
tgactgtttccaggcgcatcatcca

SEQ ID NO: 2249417 - DNA, 25 bp, Homo sapien
ggccctaatatagcaacagagcaat

SEQ ID NO: 2249418 - DNA, 25 bp, Homo sapien
gaaacctcaggacattgcttggcaa

SEQ ID NO: 2249419 - DNA, 25 bp, Homo sapien
ggcctccaagacatgcatacgtgaa

SEQ ID NO: 2249420 - DNA, 25 bp, Homo sapien
agagcaatactgctatctctgtgtt

SEQ ID NO: 2249421 - DNA, 25 bp, Homo sapien
ccattcgctcttgaatccaaaacag

SEQ ID NO: 2249422 - DNA, 25 bp, Homo sapien
gccattcgctcttgaatccaaaaca

SEQ ID NO: 2249423 - DNA, 25 bp, Homo sapien
cattcgctcttgaatccaaaacaga

SEQ ID NO: 2249424 - DNA, 25 bp, Homo sapien
gccttagccacataagagccattcc

SEQ ID NO: 2249425 - DNA, 25 bp, Homo sapien
gcatgtcagcgagtgcccattctca

SEQ ID NO: 2249426 - DNA, 25 bp, Homo sapien
ctttggacctgcatgtcagcgagtg

SEQ ID NO: 2249427 - DNA, 25 bp, Homo sapien
acagtcctcaatgccttagccacat

SEQ ID NO: 2249428 - DNA, 25 bp, Homo sapien
gaaatccggtcggacagcaatttct

SEQ ID NO: 2249429 - DNA, 25 bp, Homo sapien
gtaagttgagcctctgaagtcacta

SEQ ID NO: 2249430 - DNA, 25 bp, Homo sapien
ttctttgccaagagattagagaaag

SEQ ID NO: 2249431 - DNA, 25 bp, Homo sapien
gccatgcagaaatccggtcggacag

SEQ ID NO: 2249432 - DNA, 25 bp, Homo sapien
tctctaaaatctcttctaaccctta

SEQ ID NO: 2249433 - DNA, 25 bp, Homo sapien
tcttttcctttctctatagcttctt

SEQ ID NO: 2249434 - DNA, 25 bp, Homo sapien
cttctttatctcactactttttctt

SEQ ID NO: 2249435 - DNA, 25 bp, Homo sapien
tttctctatagcttctttctctaaa

SEQ ID NO: 2249436 - DNA, 25 bp, Homo sapien
tgaaaacgtatcaaattctggatgc

SEQ ID NO: 2249437 - DNA, 25 bp, Homo sapien
agggttgaaaacgtatcaaattctg

SEQ ID NO: 2249438 - DNA, 25 bp, Homo sapien
tctggatgctgatctttgtcgccat

SEQ ID NO: 2249439 - DNA, 25 bp, Homo sapien
gaaagatagggttgaaaacgtatca

SEQ ID NO: 2249440 - DNA, 25 bp, Homo sapien
aatatgcccaagtgcaagtaatgga

SEQ ID NO: 2249441 - DNA, 25 bp, Homo sapien
aaagcttgaaatgcaaagcatgccc

SEQ ID NO: 2249442 - DNA, 25 bp, Homo sapien
atagacaaagcttgaaatgcaaagc

SEQ ID NO: 2249443 - DNA, 25 bp, Homo sapien
ctttggcttttactgattcatagac

SEQ ID NO: 2249444 - DNA, 25 bp, Homo sapien
tttccattaaactgtgggatttcac

SEQ ID NO: 2249445 - DNA, 25 bp, Homo sapien
aaagttgctaagtcttcatgctggt

SEQ ID NO: 2249446 - DNA, 25 bp, Homo sapien
cacatgtatgggaggtgctaggcaa

SEQ ID NO: 2249447 - DNA, 25 bp, Homo sapien
agttgctaagtcttcatgctggtgt

SEQ ID NO: 2249448 - DNA, 25 bp, Homo sapien
atattgccgattccagcaagatggc

SEQ ID NO: 2249449 - DNA, 25 bp, Homo sapien
atgtttggatgatattgccgattcc

SEQ ID NO: 2249450 - DNA, 25 bp, Homo sapien
aagactgccatatgtttggatgata

SEQ ID NO: 2249451 - DNA, 25 bp, Homo sapien
gatgatattgccgattccagcaaga

SEQ ID NO: 2249452 - DNA, 25 bp, Homo sapien
tatattgttatagccagtgtaccca

SEQ ID NO: 2249453 - DNA, 25 bp, Homo sapien
gaccaaatgcttaaagtgattcacc

SEQ ID NO: 2249454 - DNA, 25 bp, Homo sapien
gagcctggtctttggccccatgacc

SEQ ID NO: 2249455 - DNA, 25 bp, Homo sapien
gatacacagtctaggtccaagagcc

SEQ ID NO: 2249456 - DNA, 25 bp, Homo sapien
ctgactcttggtagtgctcacactg

SEQ ID NO: 2249457 - DNA, 25 bp, Homo sapien
tgctcacactgcaatactgacacag

SEQ ID NO: 2249458 - DNA, 25 bp, Homo sapien
gcccagatagcaagagagtcagaca

SEQ ID NO: 2249459 - DNA, 25 bp, Homo sapien
agcccagatagcaagagagtcagac

SEQ ID NO: 2249460 - DNA, 25 bp, Homo sapien
tgggagaatctcacttcttagtcct

SEQ ID NO: 2249461 - DNA, 25 bp, Homo sapien
gatccgaccacattttgggagaatc

SEQ ID NO: 2249462 - DNA, 25 bp, Homo sapien
tagaaaatctccagtgatccgacca

SEQ ID NO: 2249463 - DNA, 25 bp, Homo sapien
cctctagcagttggtactgtatgtg

SEQ ID NO: 2249464 - DNA, 25 bp, Homo sapien
tcagcactaactgcttgtagccggg

SEQ ID NO: 2249465 - DNA, 25 bp, Homo sapien
aattggtgacatgtgctcatagaca

SEQ ID NO: 2249466 - DNA, 25 bp, Homo sapien
agtctctgccattcgtaaggatccg

SEQ ID NO: 2249467 - DNA, 25 bp, Homo sapien
gaattgctccctggaaaagtctctg

SEQ ID NO: 2249468 - DNA, 25 bp, Homo sapien
caattgattagcgagaaccacctgg

SEQ ID NO: 2249469 - DNA, 25 bp, Homo sapien
tgttattatggtgagctttgcttcc

SEQ ID NO: 2249470 - DNA, 25 bp, Homo sapien
gcttcgcaaagctctagggtgagct

SEQ ID NO: 2249471 - DNA, 25 bp, Homo sapien
taagtcccctttgtgagccctggga

SEQ ID NO: 2249472 - DNA, 25 bp, Homo sapien
tcttcaatatattggtttcctttcc

SEQ ID NO: 2249473 - DNA, 25 bp, Homo sapien
cctttcctttgagtaaatgcccagt

SEQ ID NO: 2249474 - DNA, 25 bp, Homo sapien
gagtaaatgcccagtagtgagattg

SEQ ID NO: 2249475 - DNA, 25 bp, Homo sapien
tgttgttggaaaccaaggttgagtc

SEQ ID NO: 2249476 - DNA, 25 bp, Homo sapien
catttccctacaagctttctactca

SEQ ID NO: 2249477 - DNA, 25 bp, Homo sapien
cacttttcagcaggcaacatgattt

SEQ ID NO: 2249478 - DNA, 25 bp, Homo sapien
ttttcaccagaccactctattaatg

SEQ ID NO: 2249479 - DNA, 25 bp, Homo sapien
gactaccagcctacgtttatgaagg

SEQ ID NO: 2249480 - DNA, 25 bp, Homo sapien
ccagtttcaggtaggattaggaaga

SEQ ID NO: 2249481 - DNA, 25 bp, Homo sapien
ggagagtagataagatctgcattct

SEQ ID NO: 2249482 - DNA, 25 bp, Homo sapien
tgaggtgtgaaagcgccattgcact

SEQ ID NO: 2249483 - DNA, 25 bp, Homo sapien
aagggacatccggataatagccagt

SEQ ID NO: 2249484 - DNA, 25 bp, Homo sapien
gcagacagcgggttcaatttatttt

SEQ ID NO: 2249485 - DNA, 25 bp, Homo sapien
aaaagaaggaggctacctgagaact

SEQ ID NO: 2249486 - DNA, 25 bp, Homo sapien
catttgggtcagcactaatcagtta

SEQ ID NO: 2249487 - DNA, 25 bp, Homo sapien
gaatgtaagggaattgcagacagcg

SEQ ID NO: 2249488 - DNA, 25 bp, Homo sapien
agcggagctgattcttcacttttat

SEQ ID NO: 2249489 - DNA, 25 bp, Homo sapien
aggaagcggagctgattcttcactt

SEQ ID NO: 2249490 - DNA, 25 bp, Homo sapien
caaggaagcggagctgattcttcac

SEQ ID NO: 2249491 - DNA, 25 bp, Homo sapien
gcaaggaagcggagctgattcttca

SEQ ID NO: 2249492 - DNA, 25 bp, Homo sapien
cctgagggccgttgtcagattccat

SEQ ID NO: 2249493 - DNA, 25 bp, Homo sapien
cacaccgcacgaagggtccctgagg

SEQ ID NO: 2249494 - DNA, 25 bp, Homo sapien
agagacccagcacaccgcacgaagg

SEQ ID NO: 2249495 - DNA, 25 bp, Homo sapien
tccctgagggccgttgtcagattcc

SEQ ID NO: 2249496 - DNA, 25 bp, Homo sapien
ccaaggcttcattctcatattctgt

SEQ ID NO: 2249497 - DNA, 25 bp, Homo sapien
caaggcttcattctcatattctgtt

SEQ ID NO: 2249498 - DNA, 25 bp, Homo sapien
gggtctccagccttactagagtaaa

SEQ ID NO: 2249499 - DNA, 25 bp, Homo sapien
gcctctgccaattcccagataagta

SEQ ID NO: 2249500 - DNA, 25 bp, Homo sapien
aagtactctctttgctagattagcc

SEQ ID NO: 2249501 - DNA, 25 bp, Homo sapien
tggctaaacaaggttactggaccca

SEQ ID NO: 2249502 - DNA, 25 bp, Homo sapien
tggacctgagattggcctaggccca

SEQ ID NO: 2249503 - DNA, 25 bp, Homo sapien
cagtccagtcacagttataaaggct

SEQ ID NO: 2249504 - DNA, 25 bp, Homo sapien
tataaaggctggacctgagattggc

SEQ ID NO: 2249505 - DNA, 25 bp, Homo sapien
cacagttataaaggctggacctgag

SEQ ID NO: 2249506 - DNA, 25 bp, Homo sapien
gtctctgagccttgctacccgcttt

SEQ ID NO: 2249507 - DNA, 25 bp, Homo sapien
cttgcgggccaccaagttcaaattc

SEQ ID NO: 2249508 - DNA, 25 bp, Homo sapien
cccttgcgggccaccaagttcaaat

SEQ ID NO: 2249509 - DNA, 25 bp, Homo sapien
tgagccttgctacccgctttgtgga

SEQ ID NO: 2249510 - DNA, 25 bp, Homo sapien
aatcatttccatgctcatctgggtg

SEQ ID NO: 2249511 - DNA, 25 bp, Homo sapien
tgtctctcatcattgcctcttattc

SEQ ID NO: 2249512 - DNA, 25 bp, Homo sapien
gatacaatcatttccatgctcatct

SEQ ID NO: 2249513 - DNA, 25 bp, Homo sapien
tcatcattgcctcttattcttgaat

SEQ ID NO: 2249514 - DNA, 25 bp, Homo sapien
gattagttctaacgtgggcttctcc

SEQ ID NO: 2249515 - DNA, 25 bp, Homo sapien
caatgtcctgattagttctaacgtg

SEQ ID NO: 2249516 - DNA, 25 bp, Homo sapien
gagctcagtaggtaacaatgtcctg

SEQ ID NO: 2249517 - DNA, 25 bp, Homo sapien
cactgagctcagtaggtaacaatgt

SEQ ID NO: 2249518 - DNA, 25 bp, Homo sapien
tcctctgagattccttgtagtcata

SEQ ID NO: 2249519 - DNA, 25 bp, Homo sapien
catcctctgagattccttgtagtca

SEQ ID NO: 2249520 - DNA, 25 bp, Homo sapien
tctgagattccttgtagtcatattc

SEQ ID NO: 2249521 - DNA, 25 bp, Homo sapien
gattccttgtagtcatattcaatta

SEQ ID NO: 2249522 - DNA, 25 bp, Homo sapien
gtttactgccaagtactgcatttac

SEQ ID NO: 2249523 - DNA, 25 bp, Homo sapien
ctataggaatataatgtttactgcc

SEQ ID NO: 2249524 - DNA, 25 bp, Homo sapien
taggctctgagtaaacgcagagccc

SEQ ID NO: 2249525 - DNA, 25 bp, Homo sapien
gccctatgggctaaggctataggaa

SEQ ID NO: 2249526 - DNA, 25 bp, Homo sapien
gcactattgtttgacatcagtagat

SEQ ID NO: 2249527 - DNA, 25 bp, Homo sapien
tacaaagagccgcttacaagactcc

SEQ ID NO: 2249528 - DNA, 25 bp, Homo sapien
gacatcagtagatgaggatcctgga

SEQ ID NO: 2249529 - DNA, 25 bp, Homo sapien
acaagactccctgtttgcactattg

SEQ ID NO: 2249530 - DNA, 25 bp, Homo sapien
cctgaattgaacactctggcgagaa

SEQ ID NO: 2249531 - DNA, 25 bp, Homo sapien
taaatacacccagattgcgtgggcc

SEQ ID NO: 2249532 - DNA, 25 bp, Homo sapien
aaacttctggtgctttcgctttgaa

SEQ ID NO: 2249533 - DNA, 25 bp, Homo sapien
gtttgccgttgtctaccatactggg

SEQ ID NO: 2249534 - DNA, 25 bp, Homo sapien
acttcagtgaatggatggcactcaa

SEQ ID NO: 2249535 - DNA, 25 bp, Homo sapien
cactataatctctctcgatctttct

SEQ ID NO: 2249536 - DNA, 25 bp, Homo sapien
gaaacacagtagtctctccaacaca

SEQ ID NO: 2249537 - DNA, 25 bp, Homo sapien
tctttgtgaggctgtcacgaaacac

SEQ ID NO: 2249538 - DNA, 25 bp, Homo sapien
catagttctttgaaggtagagccca

SEQ ID NO: 2249539 - DNA, 25 bp, Homo sapien
gagcccatggtgtaggtctgcccta

SEQ ID NO: 2249540 - DNA, 25 bp, Homo sapien
cactggtcccagtctgtggctaaca

SEQ ID NO: 2249541 - DNA, 25 bp, Homo sapien
tgtggctaacaaattccatagttct

SEQ ID NO: 2249542 - DNA, 25 bp, Homo sapien
tgtaaatacgtatccctctcttccc

SEQ ID NO: 2249543 - DNA, 25 bp, Homo sapien
gagtacttttctagtcacttccatg

SEQ ID NO: 2249544 - DNA, 25 bp, Homo sapien
tcactgcaagcggtggagagtactt

SEQ ID NO: 2249545 - DNA, 25 bp, Homo sapien
catacatgtaaatacgtatccctct

SEQ ID NO: 2249546 - DNA, 25 bp, Homo sapien
caataaggcatgtgcatgtacgcac

SEQ ID NO: 2249547 - DNA, 25 bp, Homo sapien
gttaataaccaaaggcctcactctg

SEQ ID NO: 2249548 - DNA, 25 bp, Homo sapien
tagttctgagtaagtccacagtggc

SEQ ID NO: 2249549 - DNA, 25 bp, Homo sapien
taagatgtgacaccagactttctgg

SEQ ID NO: 2249550 - DNA, 25 bp, Homo sapien
gaacagatattactctcagaagtga

SEQ ID NO: 2249551 - DNA, 25 bp, Homo sapien
gctcactatctaaggaaagcacata

SEQ ID NO: 2249552 - DNA, 25 bp, Homo sapien
tcagtggccttgaatgtaactaacc

SEQ ID NO: 2249553 - DNA, 25 bp, Homo sapien
ggacctcatttttgtgacataccag

SEQ ID NO: 2249554 - DNA, 25 bp, Homo sapien
gactctgtgagtgggtaaaaggcca

SEQ ID NO: 2249555 - DNA, 25 bp, Homo sapien
taaaaggccatgagcaacaggtctt

SEQ ID NO: 2249556 - DNA, 25 bp, Homo sapien
cctttggttcagtgatcccagcaga

SEQ ID NO: 2249557 - DNA, 25 bp, Homo sapien
agactgaaaggatgactgaccctga

SEQ ID NO: 2249558 - DNA, 25 bp, Homo sapien
tggcagtatgtctatacagccatta

SEQ ID NO: 2249559 - DNA, 25 bp, Homo sapien
ctgtcagctggtttcagcttttgtg

SEQ ID NO: 2249560 - DNA, 25 bp, Homo sapien
tgtcagctggtttcagcttttgtgg

SEQ ID NO: 2249561 - DNA, 25 bp, Homo sapien
ctcatggagattgaactggtttttc

SEQ ID NO: 2249562 - DNA, 25 bp, Homo sapien
cagctcatggagattgaactggttt

SEQ ID NO: 2249563 - DNA, 25 bp, Homo sapien
tttcagctcatggagattgaactgg

SEQ ID NO: 2249564 - DNA, 25 bp, Homo sapien
tggagattgaactggtttttcattc

SEQ ID NO: 2249565 - DNA, 25 bp, Homo sapien
gatgagaattgagggcctccctgaa

SEQ ID NO: 2249566 - DNA, 25 bp, Homo sapien
tgagaattgagggcctccctgaacc

SEQ ID NO: 2249567 - DNA, 25 bp, Homo sapien
atgagaattgagggcctccctgaac

SEQ ID NO: 2249568 - DNA, 25 bp, Homo sapien
taaagggctgcaatatgttatctgc

SEQ ID NO: 2249569 - DNA, 25 bp, Homo sapien
tagacagccatcatgaacgacacgg

SEQ ID NO: 2249570 - DNA, 25 bp, Homo sapien
ccaatgttaagctacgagggtgcta

SEQ ID NO: 2249571 - DNA, 25 bp, Homo sapien
tagcagtactacttcagagccaatg

SEQ ID NO: 2249572 - DNA, 25 bp, Homo sapien
aatagccaagggaagcttcaaatcc

SEQ ID NO: 2249573 - DNA, 25 bp, Homo sapien
gactgcagttagttatgatggtgtc

SEQ ID NO: 2249574 - DNA, 25 bp, Homo sapien
ctgcagttagttatgatggtgtcac

SEQ ID NO: 2249575 - DNA, 25 bp, Homo sapien
aaaccttgcaatgaatagccaaggg

SEQ ID NO: 2249576 - DNA, 25 bp, Homo sapien
gaactttttagcagaggtgccctcc

SEQ ID NO: 2249577 - DNA, 25 bp, Homo sapien
tcctcggtaaagtatgggtcaaggc

SEQ ID NO: 2249578 - DNA, 25 bp, Homo sapien
aactttctttgccatcgcgattgag

SEQ ID NO: 2249579 - DNA, 25 bp, Homo sapien
gcatttaagcctagctgagaggaac

SEQ ID NO: 2249580 - DNA, 25 bp, Homo sapien
agctccagctgaatcacaaagggaa

SEQ ID NO: 2249581 - DNA, 25 bp, Homo sapien
ggaactaaggcatcgtgccacaaag

SEQ ID NO: 2249582 - DNA, 25 bp, Homo sapien
tgccacaaagtaaagcagttgtcta

SEQ ID NO: 2249583 - DNA, 25 bp, Homo sapien
cacgcccagctccaattcataatga

SEQ ID NO: 2249584 - DNA, 25 bp, Homo sapien
gggagtgcccattaatgtacaacaa

SEQ ID NO: 2249585 - DNA, 25 bp, Homo sapien
gaaagcagattgttgcttgccaggg

SEQ ID NO: 2249586 - DNA, 25 bp, Homo sapien
gtgcccattaatgtacaacaaggtt

SEQ ID NO: 2249587 - DNA, 25 bp, Homo sapien
aatgccactgaatcgtataccctaa

SEQ ID NO: 2249588 - DNA, 25 bp, Homo sapien
cacataatgaggagatggaagaatc

SEQ ID NO: 2249589 - DNA, 25 bp, Homo sapien
cacttagcatggtacttaatataca

SEQ ID NO: 2249590 - DNA, 25 bp, Homo sapien
caaataaataaggacccacataatg

SEQ ID NO: 2249591 - DNA, 25 bp, Homo sapien
tggaagaatcgaagacaaaagaaag

SEQ ID NO: 2249592 - DNA, 25 bp, Homo sapien
ttttctggtgcaattaatggagata

SEQ ID NO: 2249593 - DNA, 25 bp, Homo sapien
ttctggtgcaattaatggagataga

SEQ ID NO: 2249594 - DNA, 25 bp, Homo sapien
catatgacaattattcctcaaatat

SEQ ID NO: 2249595 - DNA, 25 bp, Homo sapien
tttctggtgcaattaatggagatag

SEQ ID NO: 2249596 - DNA, 25 bp, Homo sapien
ggctgcagatgtagccaggcaaagc

SEQ ID NO: 2249597 - DNA, 25 bp, Homo sapien
gtcgttttccgccacagggctatgg

SEQ ID NO: 2249598 - DNA, 25 bp, Homo sapien
gtccattccagcaaagggtgtcgtt

SEQ ID NO: 2249599 - DNA, 25 bp, Homo sapien
caggcaaagcactatagaagctgat

SEQ ID NO: 2249600 - DNA, 25 bp, Homo sapien
tagatttgactacaagaacctcaga

SEQ ID NO: 2249601 - DNA, 25 bp, Homo sapien
gaattaaataaatcctggttctcaa

SEQ ID NO: 2249602 - DNA, 25 bp, Homo sapien
ttatctccattagaatccacttaga

SEQ ID NO: 2249603 - DNA, 25 bp, Homo sapien
cacttagaatccaaggtagatttga

SEQ ID NO: 2249604 - DNA, 25 bp, Homo sapien
gataataagcagatctatattggcg

SEQ ID NO: 2249605 - DNA, 25 bp, Homo sapien
taaagagatcttcaggataataagc

SEQ ID NO: 2249606 - DNA, 25 bp, Homo sapien
tatattggcgttgttgagaatgggc

SEQ ID NO: 2249607 - DNA, 25 bp, Homo sapien
tcttcggctggataaggtttcttca

SEQ ID NO: 2249608 - DNA, 25 bp, Homo sapien
gccaggatccagaagcaccgtcctt

SEQ ID NO: 2249609 - DNA, 25 bp, Homo sapien
ggaagacattttagtaaccttagca

SEQ ID NO: 2249610 - DNA, 25 bp, Homo sapien
gggacccagcaaggtatagatcagg

SEQ ID NO: 2249611 - DNA, 25 bp, Homo sapien
gaagcaccgtccttgtacctacata

SEQ ID NO: 2249612 - DNA, 25 bp, Homo sapien
gcaggacttcactgtgacctggtcc

SEQ ID NO: 2249613 - DNA, 25 bp, Homo sapien
ccacagcaggacttcactgtgacct

SEQ ID NO: 2249614 - DNA, 25 bp, Homo sapien
cagcaggacttcactgtgacctggt

SEQ ID NO: 2249615 - DNA, 25 bp, Homo sapien
ggacttcactgtgacctggtcccat

SEQ ID NO: 2249616 - DNA, 25 bp, Homo sapien
gagtgagagaagagcctcaaagaca

SEQ ID NO: 2249617 - DNA, 25 bp, Homo sapien
agggagtgagagaagagcctcaaag

SEQ ID NO: 2249618 - DNA, 25 bp, Homo sapien
agagaagagcctcaaagacataggt

SEQ ID NO: 2249619 - DNA, 25 bp, Homo sapien
tgagagaagagcctcaaagacatag

SEQ ID NO: 2249620 - DNA, 25 bp, Homo sapien
ggtactactgttggtaacactgcca

SEQ ID NO: 2249621 - DNA, 25 bp, Homo sapien
aactagggcgcaggtactactgttg

SEQ ID NO: 2249622 - DNA, 25 bp, Homo sapien
gcgcaggtactactgttggtaacac

SEQ ID NO: 2249623 - DNA, 25 bp, Homo sapien
ctagggcgcaggtactactgttggt

SEQ ID NO: 2249624 - DNA, 25 bp, Homo sapien
tgaagccttggccttttgattaaaa

SEQ ID NO: 2249625 - DNA, 25 bp, Homo sapien
tttgattaaaaacgtgaagctgaca

SEQ ID NO: 2249626 - DNA, 25 bp, Homo sapien
gctgacatatggtgcctccccatgc

SEQ ID NO: 2249627 - DNA, 25 bp, Homo sapien
aggaaacaagccttctaggttccat

SEQ ID NO: 2249628 - DNA, 25 bp, Homo sapien
tccaaggccaggatccaggatagtt

SEQ ID NO: 2249629 - DNA, 25 bp, Homo sapien
taagccttcctagttgctgggctga

SEQ ID NO: 2249630 - DNA, 25 bp, Homo sapien
tttcattctgcagagtagagctccc

SEQ ID NO: 2249631 - DNA, 25 bp, Homo sapien
tgccttacaaattgcattcaatgag

SEQ ID NO: 2249632 - DNA, 25 bp, Homo sapien
actgagcacctcttgacagccaaag

SEQ ID NO: 2249633 - DNA, 25 bp, Homo sapien
tgggagcaatcaggcccttaaaggc

SEQ ID NO: 2249634 - DNA, 25 bp, Homo sapien
agaaagggcctgcatcactgagcac

SEQ ID NO: 2249635 - DNA, 25 bp, Homo sapien
actctcataaccagctgggagctgg

SEQ ID NO: 2249636 - DNA, 25 bp, Homo sapien
aataaggcccaaatcctctgacaac

SEQ ID NO: 2249637 - DNA, 25 bp, Homo sapien
caataaggcccaaatcctctgacaa

SEQ ID NO: 2249638 - DNA, 25 bp, Homo sapien
ataaggcccaaatcctctgacaact

SEQ ID NO: 2249639 - DNA, 25 bp, Homo sapien
ccaataaggcccaaatcctctgaca

SEQ ID NO: 2249640 - DNA, 25 bp, Homo sapien
gaaacctgggtcataataagcttgg

SEQ ID NO: 2249641 - DNA, 25 bp, Homo sapien
cagtccctggcagtaagagcagtac

SEQ ID NO: 2249642 - DNA, 25 bp, Homo sapien
catgaccacattgcagtaaccgcca

SEQ ID NO: 2249643 - DNA, 25 bp, Homo sapien
cacattctggtgagcattcggccac

SEQ ID NO: 2249644 - DNA, 25 bp, Homo sapien
ggtgtagttcttggcatggcgaaca

SEQ ID NO: 2249645 - DNA, 25 bp, Homo sapien
gcattggtgtagttcttggcatggc

SEQ ID NO: 2249646 - DNA, 25 bp, Homo sapien
catggcgaacaacaatttcaaaggc

SEQ ID NO: 2249647 - DNA, 25 bp, Homo sapien
tcttggcatggcgaacaacaatttc

SEQ ID NO: 2249648 - DNA, 25 bp, Homo sapien
caagcatccctaaaatgaattctat

SEQ ID NO: 2249649 - DNA, 25 bp, Homo sapien
gaattctatacaaggcaagctttat

SEQ ID NO: 2249650 - DNA, 25 bp, Homo sapien
gatatgccactcctgtagatctcaa

SEQ ID NO: 2249651 - DNA, 25 bp, Homo sapien
caagctttatctcaagtacagtgca

SEQ ID NO: 2249652 - DNA, 25 bp, Homo sapien
gctgtttggctacactgggtctact

SEQ ID NO: 2249653 - DNA, 25 bp, Homo sapien
cagaaacaaggctcaagggccaaga

SEQ ID NO: 2249654 - DNA, 25 bp, Homo sapien
gagtcgcagttcgttcaaagggcta

SEQ ID NO: 2249655 - DNA, 25 bp, Homo sapien
ccagaaatgcattacctgtgttgcc

SEQ ID NO: 2249656 - DNA, 25 bp, Homo sapien
taagtaaagattgactccatggacc

SEQ ID NO: 2249657 - DNA, 25 bp, Homo sapien
caaaagtctctaatgcctatacgca

SEQ ID NO: 2249658 - DNA, 25 bp, Homo sapien
caatttactgagcatcgagcgccta

SEQ ID NO: 2249659 - DNA, 25 bp, Homo sapien
tccaggaagagctcgagagtaagta

SEQ ID NO: 2249660 - DNA, 25 bp, Homo sapien
caggcggcctgcataccaaatgtga

SEQ ID NO: 2249661 - DNA, 25 bp, Homo sapien
gaagaacagtaccaattgacaaaga

SEQ ID NO: 2249662 - DNA, 25 bp, Homo sapien
ttgacaaagaagcacaaaactagac

SEQ ID NO: 2249663 - DNA, 25 bp, Homo sapien
atgagttagtcatgaaggcagagcc

SEQ ID NO: 2249664 - DNA, 25 bp, Homo sapien
taatgaggtggacccttcatctttg

SEQ ID NO: 2249665 - DNA, 25 bp, Homo sapien
gtgaaggacttcagccatggaatat

SEQ ID NO: 2249666 - DNA, 25 bp, Homo sapien
caaataaaccacctgtcatcctgga

SEQ ID NO: 2249667 - DNA, 25 bp, Homo sapien
tgaagagtcagctcttgaacactag

SEQ ID NO: 2249668 - DNA, 25 bp, Homo sapien
tgtgaacaacagaccccaaaaccat

SEQ ID NO: 2249669 - DNA, 25 bp, Homo sapien
caaattggcatgtcaggaccggcgc

SEQ ID NO: 2249670 - DNA, 25 bp, Homo sapien
gactgcaggacaaagggttcagtaa

SEQ ID NO: 2249671 - DNA, 25 bp, Homo sapien
aaaaccatctgttcttgccagagcc

SEQ ID NO: 2249672 - DNA, 25 bp, Homo sapien
gatggcataggttttggctactgtg

SEQ ID NO: 2249673 - DNA, 25 bp, Homo sapien
gatgctcttagtaagtgtactccaa

SEQ ID NO: 2249674 - DNA, 25 bp, Homo sapien
cagttaatgtgtatgggcatatgca

SEQ ID NO: 2249675 - DNA, 25 bp, Homo sapien
gaaatatcctaactctgcaccctgg

SEQ ID NO: 2249676 - DNA, 25 bp, Homo sapien
caacgttaacaccagggtcagtcac

SEQ ID NO: 2249677 - DNA, 25 bp, Homo sapien
tatacaacgttaacaccagggtcag

SEQ ID NO: 2249678 - DNA, 25 bp, Homo sapien
gaagaaattcaaggagtagacagct

SEQ ID NO: 2249679 - DNA, 25 bp, Homo sapien
caaggagtagacagctgaatatagc

SEQ ID NO: 2249680 - DNA, 25 bp, Homo sapien
tgtaaacgtgccttcacaaccgcct

SEQ ID NO: 2249681 - DNA, 25 bp, Homo sapien
tttagcctcaaaggcacacatttgg

SEQ ID NO: 2249682 - DNA, 25 bp, Homo sapien
acagaatccccactgtaaatgcact

SEQ ID NO: 2249683 - DNA, 25 bp, Homo sapien
cacttccttatggtaacaggttggc

SEQ ID NO: 2249684 - DNA, 25 bp, Homo sapien
tcaaaaagaggcacgtcaagatccc

SEQ ID NO: 2249685 - DNA, 25 bp, Homo sapien
catggccattgcaaaggattcggac

SEQ ID NO: 2249686 - DNA, 25 bp, Homo sapien
taacctggctgcaaatcggaatggc

SEQ ID NO: 2249687 - DNA, 25 bp, Homo sapien
caagacctgagttgatagatgagcc

SEQ ID NO: 2249688 - DNA, 25 bp, Homo sapien
ttcattatcgaaggagaaactgtac

SEQ ID NO: 2249689 - DNA, 25 bp, Homo sapien
tatcgaaggagaaactgtactccat

SEQ ID NO: 2249690 - DNA, 25 bp, Homo sapien
cattatcgaaggagaaactgtactc

SEQ ID NO: 2249691 - DNA, 25 bp, Homo sapien
ttatcgaaggagaaactgtactcca

SEQ ID NO: 2249692 - DNA, 25 bp, Homo sapien
cccttcagcaaagggagtatttgtt

SEQ ID NO: 2249693 - DNA, 25 bp, Homo sapien
tctctgaagcacacatactttgcgg

SEQ ID NO: 2249694 - DNA, 25 bp, Homo sapien
ttgtcagaaatagttccccaccctg

SEQ ID NO: 2249695 - DNA, 25 bp, Homo sapien
tttccgaaaactgaggcttgtctgc

SEQ ID NO: 2249696 - DNA, 25 bp, Homo sapien
atcttttctattgacaattcaatca

SEQ ID NO: 2249697 - DNA, 25 bp, Homo sapien
gtaaaatcttttctattgacaattc

SEQ ID NO: 2249698 - DNA, 25 bp, Homo sapien
aaaatcttttctattgacaattcaa

SEQ ID NO: 2249699 - DNA, 25 bp, Homo sapien
tgtaaaatcttttctattgacaatt

SEQ ID NO: 2249700 - DNA, 25 bp, Homo sapien
ggcaagtcacatatcccctaagtgg

SEQ ID NO: 2249701 - DNA, 25 bp, Homo sapien
cttactgggtgattttcggcaagtc

SEQ ID NO: 2249702 - DNA, 25 bp, Homo sapien
gattctagttcgagctctatcacaa

SEQ ID NO: 2249703 - DNA, 25 bp, Homo sapien
ggacactaaagtaacagcagaagct

SEQ ID NO: 2249704 - DNA, 25 bp, Homo sapien
agaaagatcttttacaacagtgagc

SEQ ID NO: 2249705 - DNA, 25 bp, Homo sapien
gatcttttacaacagtgagcacaca

SEQ ID NO: 2249706 - DNA, 25 bp, Homo sapien
ttttacaacagtgagcacacacacg

SEQ ID NO: 2249707 - DNA, 25 bp, Homo sapien
gaaagaaagatcttttacaacagtg

SEQ ID NO: 2249708 - DNA, 25 bp, Homo sapien
tctgtggaattcatcccatagagca

SEQ ID NO: 2249709 - DNA, 25 bp, Homo sapien
catagagcacacagatagagaaggg

SEQ ID NO: 2249710 - DNA, 25 bp, Homo sapien
gactggaagatgaactaggagatac

SEQ ID NO: 2249711 - DNA, 25 bp, Homo sapien
cctgcttcctaaaacgttctgtgga

SEQ ID NO: 2249712 - DNA, 25 bp, Homo sapien
acaaaagcagcattgaagcatgcat

SEQ ID NO: 2249713 - DNA, 25 bp, Homo sapien
aaacaaaagcagcattgaagcatgc

SEQ ID NO: 2249714 - DNA, 25 bp, Homo sapien
tgaagtggccataccaaacaaaagc

SEQ ID NO: 2249715 - DNA, 25 bp, Homo sapien
aagtggccataccaaacaaaagcag

SEQ ID NO: 2249716 - DNA, 25 bp, Homo sapien
caaactttactgttcaaacccagca

SEQ ID NO: 2249717 - DNA, 25 bp, Homo sapien
caaagcctgggaagtatcatgatga

SEQ ID NO: 2249718 - DNA, 25 bp, Homo sapien
tacgtggtaatccttgctaccaagg

SEQ ID NO: 2249719 - DNA, 25 bp, Homo sapien
tcattagcttctctacagtcactgg

SEQ ID NO: 2249720 - DNA, 25 bp, Homo sapien
tctgggtgacaatagtctttaccta

SEQ ID NO: 2249721 - DNA, 25 bp, Homo sapien
gcaacttctccgcttagggtcccaa

SEQ ID NO: 2249722 - DNA, 25 bp, Homo sapien
tactctaacttctttccttaggcag

SEQ ID NO: 2249723 - DNA, 25 bp, Homo sapien
gcatatctatttggtgagctcatcc

SEQ ID NO: 2249724 - DNA, 25 bp, Homo sapien
gaagcaccaacatacaaatgagctg

SEQ ID NO: 2249725 - DNA, 25 bp, Homo sapien
tatccaggtacacagggcatgacat

SEQ ID NO: 2249726 - DNA, 25 bp, Homo sapien
ccatgaggtcagtgcccaaagctat

SEQ ID NO: 2249727 - DNA, 25 bp, Homo sapien
ccaaagctatgagttcaggagtccc

SEQ ID NO: 2249728 - DNA, 25 bp, Homo sapien
gacagaaaccagaatgagtctcatt

SEQ ID NO: 2249729 - DNA, 25 bp, Homo sapien
tccatcactgctccaattatactag

SEQ ID NO: 2249730 - DNA, 25 bp, Homo sapien
gggaccagattcatcttaatgaaaa

SEQ ID NO: 2249731 - DNA, 25 bp, Homo sapien
cattgcactttggattgggaccaga

SEQ ID NO: 2249732 - DNA, 25 bp, Homo sapien
gaggacacatccctcaatggcttgg

SEQ ID NO: 2249733 - DNA, 25 bp, Homo sapien
tatttgtgcctacccaaatcccatg

SEQ ID NO: 2249734 - DNA, 25 bp, Homo sapien
ctgggctctcaaaagaagaggtgct

SEQ ID NO: 2249735 - DNA, 25 bp, Homo sapien
gaggtgctatggcagggaccactta

SEQ ID NO: 2249736 - DNA, 25 bp, Homo sapien
gcaatcattcctacatgccaacaga

SEQ ID NO: 2249737 - DNA, 25 bp, Homo sapien
taaatatgtggttaatgttcagcca

SEQ ID NO: 2249738 - DNA, 25 bp, Homo sapien
gttactgtctactctactcttgaag

SEQ ID NO: 2249739 - DNA, 25 bp, Homo sapien
cagccaatagaccacataacaaagg

SEQ ID NO: 2249740 - DNA, 25 bp, Homo sapien
cacgtagggtagttttgagtttgca

SEQ ID NO: 2249741 - DNA, 25 bp, Homo sapien
gtagaagccgttgctcacacaacat

SEQ ID NO: 2249742 - DNA, 25 bp, Homo sapien
tgcatactgtagaagccgttgctca

SEQ ID NO: 2249743 - DNA, 25 bp, Homo sapien
ccattctcccaaacatcacgtaggg

SEQ ID NO: 2249744 - DNA, 25 bp, Homo sapien
tgattactggcaaatttcccttccc

SEQ ID NO: 2249745 - DNA, 25 bp, Homo sapien
cccacagatggtgtctggaaaaata

SEQ ID NO: 2249746 - DNA, 25 bp, Homo sapien
aacacactacgcctttttgattact

SEQ ID NO: 2249747 - DNA, 25 bp, Homo sapien
tcctaagagagataacacactacgc

SEQ ID NO: 2249748 - DNA, 25 bp, Homo sapien
tatgacaagtgttcatcctggatct

SEQ ID NO: 2249749 - DNA, 25 bp, Homo sapien
cacagattacaaacttgccagtgag

SEQ ID NO: 2249750 - DNA, 25 bp, Homo sapien
tgtgaggcatgcactataaacttcc

SEQ ID NO: 2249751 - DNA, 25 bp, Homo sapien
tcattcatgatgcaaggaggtttct

SEQ ID NO: 2249752 - DNA, 25 bp, Homo sapien
aaggcataggtaaataagagatgga

SEQ ID NO: 2249753 - DNA, 25 bp, Homo sapien
ctatgggaccaaccgtacagagaaa

SEQ ID NO: 2249754 - DNA, 25 bp, Homo sapien
ccatttagcacctgaataagatcat

SEQ ID NO: 2249755 - DNA, 25 bp, Homo sapien
tctcaggctcctagcccaccattta

SEQ ID NO: 2249756 - DNA, 25 bp, Homo sapien
acccacccctagatactactatggg

SEQ ID NO: 2249757 - DNA, 25 bp, Homo sapien
ttcatcagcagagctcaaataatac

SEQ ID NO: 2249758 - DNA, 25 bp, Homo sapien
ggtgagccaaaccactgtcacaggt

SEQ ID NO: 2249759 - DNA, 25 bp, Homo sapien
tcaaataatacttgtggaatcaatg

SEQ ID NO: 2249760 - DNA, 25 bp, Homo sapien
tgtgcacatgcaccatttgtcgctg

SEQ ID NO: 2249761 - DNA, 25 bp, Homo sapien
tgcaccatttgtcgctgacactcat

SEQ ID NO: 2249762 - DNA, 25 bp, Homo sapien
tcatcagtattatgtgcacatgcac

SEQ ID NO: 2249763 - DNA, 25 bp, Homo sapien
tcctcatcagtattatgtgcacatg

SEQ ID NO: 2249764 - DNA, 25 bp, Homo sapien
ttaggaaatgtcaaagtgtcagacc

SEQ ID NO: 2249765 - DNA, 25 bp, Homo sapien
taagtggaaataaactctgcattcc

SEQ ID NO: 2249766 - DNA, 25 bp, Homo sapien
gtgtcagaccatgtaagtggaaata

SEQ ID NO: 2249767 - DNA, 25 bp, Homo sapien
caaacatcctgcagtttaggaaatg

SEQ ID NO: 2249768 - DNA, 25 bp, Homo sapien
gtgtccacacaaccggctagtcagg

SEQ ID NO: 2249769 - DNA, 25 bp, Homo sapien
ttttaagctctcagtcgggctgggc

SEQ ID NO: 2249770 - DNA, 25 bp, Homo sapien
aaacagtattcctatggtgacaccc

SEQ ID NO: 2249771 - DNA, 25 bp, Homo sapien
cagtctttcggagagtcatcgcacc

SEQ ID NO: 2249772 - DNA, 25 bp, Homo sapien
aagtgatgatatgcaggtttccagc

SEQ ID NO: 2249773 - DNA, 25 bp, Homo sapien
tgcacaaacgaactaaccctcagga

SEQ ID NO: 2249774 - DNA, 25 bp, Homo sapien
gaaggacacacaccgtctaatcatg

SEQ ID NO: 2249775 - DNA, 25 bp, Homo sapien
catgtcagacgatgtaagtgtgcaa

SEQ ID NO: 2249776 - DNA, 25 bp, Homo sapien
gtgcctctgacccttggaaatgcaa

SEQ ID NO: 2249777 - DNA, 25 bp, Homo sapien
ggatctctcctaaggtataagtgag

SEQ ID NO: 2249778 - DNA, 25 bp, Homo sapien
aagtgagacaggcacaatgtgcatc

SEQ ID NO: 2249779 - DNA, 25 bp, Homo sapien
tctagaatttgctcagggatctctc

SEQ ID NO: 2249780 - DNA, 25 bp, Homo sapien
catgctcacgtggatggtgccagga

SEQ ID NO: 2249781 - DNA, 25 bp, Homo sapien
ggccatatatatctccgggttgctg

SEQ ID NO: 2249782 - DNA, 25 bp, Homo sapien
ccgatgagtattcacaaggacaggt

SEQ ID NO: 2249783 - DNA, 25 bp, Homo sapien
tataaggataccgtgctattctgcc

SEQ ID NO: 2249784 - DNA, 25 bp, Homo sapien
aaacgggagccttttgccatcaaag

SEQ ID NO: 2249785 - DNA, 25 bp, Homo sapien
catctggcaccattcctagaagtgg

SEQ ID NO: 2249786 - DNA, 25 bp, Homo sapien
gggttgccttagtacagacatctgg

SEQ ID NO: 2249787 - DNA, 25 bp, Homo sapien
gatttgagcattctaggcatctggc

SEQ ID NO: 2249788 - DNA, 25 bp, Homo sapien
taaacggctcaaaggcacacacatg

SEQ ID NO: 2249789 - DNA, 25 bp, Homo sapien
tcccatgatgcctgaccttgttaag

SEQ ID NO: 2249790 - DNA, 25 bp, Homo sapien
cagatctggcattatgttgagccca

SEQ ID NO: 2249791 - DNA, 25 bp, Homo sapien
taaatcctgcttaggccagctcaag

SEQ ID NO: 2249792 - DNA, 25 bp, Homo sapien
cacagagctgggtgtatatttacat

SEQ ID NO: 2249793 - DNA, 25 bp, Homo sapien
gatatccctgatcaacattggcaca

SEQ ID NO: 2249794 - DNA, 25 bp, Homo sapien
cacagctattaccaaccaattccag

SEQ ID NO: 2249795 - DNA, 25 bp, Homo sapien
tttcttctggtggtcaaagcgtctc

SEQ ID NO: 2249796 - DNA, 25 bp, Homo sapien
ggttaatacgacagcatgccactat

SEQ ID NO: 2249797 - DNA, 25 bp, Homo sapien
gagatcttacctaggaccatttcaa

SEQ ID NO: 2249798 - DNA, 25 bp, Homo sapien
gctccaattgtgctagagctgacaa

SEQ ID NO: 2249799 - DNA, 25 bp, Homo sapien
tatttctttgcaagagggtagacca

SEQ ID NO: 2249800 - DNA, 25 bp, Homo sapien
cacaagactgtgattggaggagcag

SEQ ID NO: 2249801 - DNA, 25 bp, Homo sapien
ggaaagtcgccaaatacctggccca

SEQ ID NO: 2249802 - DNA, 25 bp, Homo sapien
ttcatccaggtagttgctgagccct

SEQ ID NO: 2249803 - DNA, 25 bp, Homo sapien
gaccctgaccgagatgtactgagca

SEQ ID NO: 2249804 - DNA, 25 bp, Homo sapien
catagcaagggaacctaaccaagac

SEQ ID NO: 2249805 - DNA, 25 bp, Homo sapien
taaggccctcacaattggaaatttc

SEQ ID NO: 2249806 - DNA, 25 bp, Homo sapien
tgccctaacaaagtcctcacagagc

SEQ ID NO: 2249807 - DNA, 25 bp, Homo sapien
aatttaatgactatagatgccaggc

SEQ ID NO: 2249808 - DNA, 25 bp, Homo sapien
ctcttctctgagattcaccccatcc

SEQ ID NO: 2249809 - DNA, 25 bp, Homo sapien
cttctctgagattcaccccatccat

SEQ ID NO: 2249810 - DNA, 25 bp, Homo sapien
ttctctgagattcaccccatccatg

SEQ ID NO: 2249811 - DNA, 25 bp, Homo sapien
tcttctctgagattcaccccatcca

SEQ ID NO: 2249812 - DNA, 25 bp, Homo sapien
ctgggggatgaggtgaaactgaggg

SEQ ID NO: 2249813 - DNA, 25 bp, Homo sapien
tgggggatgaggtgaaactgagggc

SEQ ID NO: 2249814 - DNA, 25 bp, Homo sapien
gggggatgaggtgaaactgagggct

SEQ ID NO: 2249815 - DNA, 25 bp, Homo sapien
accaatcaggtccttgctggctggg

SEQ ID NO: 2249816 - DNA, 25 bp, Homo sapien
tgggaaccaaggcagcaccggtagc

SEQ ID NO: 2249817 - DNA, 25 bp, Homo sapien
ctaccaatcaggtccttgctggctg

SEQ ID NO: 2249818 - DNA, 25 bp, Homo sapien
aaccaaggcagcaccggtagccact

SEQ ID NO: 2249819 - DNA, 25 bp, Homo sapien
tgccatctggccattaagcagttct

SEQ ID NO: 2249820 - DNA, 25 bp, Homo sapien
ctggcagtagtctggttgccatctg

SEQ ID NO: 2249821 - DNA, 25 bp, Homo sapien
tctgacgtcttttgctctggcagta

SEQ ID NO: 2249822 - DNA, 25 bp, Homo sapien
tctttctccccgcaacaatgaggga

SEQ ID NO: 2249823 - DNA, 25 bp, Homo sapien
tggcttggtaaccttaaagccagga

SEQ ID NO: 2249824 - DNA, 25 bp, Homo sapien
cctgggagaatgacacttggcagca

SEQ ID NO: 2249825 - DNA, 25 bp, Homo sapien
tatacttccacttggcttggtaacc

SEQ ID NO: 2249826 - DNA, 25 bp, Homo sapien
ggcagcaagtagctcaagaagaatg

SEQ ID NO: 2249827 - DNA, 25 bp, Homo sapien
ttgtggtcccaccttacaaaggagc

SEQ ID NO: 2249828 - DNA, 25 bp, Homo sapien
gtgtttgtactagttgtggtcccac

SEQ ID NO: 2249829 - DNA, 25 bp, Homo sapien
tactagttgtggtcccaccttacaa

SEQ ID NO: 2249830 - DNA, 25 bp, Homo sapien
tgtggtcccaccttacaaaggagct

SEQ ID NO: 2249831 - DNA, 25 bp, Homo sapien
caaaagatcaaggtgagcttaccca

SEQ ID NO: 2249832 - DNA, 25 bp, Homo sapien
gtcagcagtcttctcccagtgtcag

SEQ ID NO: 2249833 - DNA, 25 bp, Homo sapien
aagcttctaattctgcaggccccaa

SEQ ID NO: 2249834 - DNA, 25 bp, Homo sapien
tatgccagcaatcagtacccaaatg

SEQ ID NO: 2249835 - DNA, 25 bp, Homo sapien
tgcaggtttagaaaaggatccctaa

SEQ ID NO: 2249836 - DNA, 25 bp, Homo sapien
gatccctaaggtgttcagacagctt

SEQ ID NO: 2249837 - DNA, 25 bp, Homo sapien
gttcagacagcttgttgcaggatcc

SEQ ID NO: 2249838 - DNA, 25 bp, Homo sapien
agaaaaggatccctaaggtgttcag

SEQ ID NO: 2249839 - DNA, 25 bp, Homo sapien
ctactacagtttcaccgtctgtatt

SEQ ID NO: 2249840 - DNA, 25 bp, Homo sapien
cagtttcaccgtctgtattaaagat

SEQ ID NO: 2249841 - DNA, 25 bp, Homo sapien
tacagtttcaccgtctgtattaaag

SEQ ID NO: 2249842 - DNA, 25 bp, Homo sapien
gtttcaccgtctgtattaaagatgt

SEQ ID NO: 2249843 - DNA, 25 bp, Homo sapien
tatcaactcatggtcaactaagctt

SEQ ID NO: 2249844 - DNA, 25 bp, Homo sapien
caggctccataataacttcacaata

SEQ ID NO: 2249845 - DNA, 25 bp, Homo sapien
gaggaacaatattagaaatgttgta

SEQ ID NO: 2249846 - DNA, 25 bp, Homo sapien
tgttcaattcgaatttccctcctgg

SEQ ID NO: 2249847 - DNA, 25 bp, Homo sapien
gcacaggctccagtgcatttctaga

SEQ ID NO: 2249848 - DNA, 25 bp, Homo sapien
ggatgtccagaatccacactccagg

SEQ ID NO: 2249849 - DNA, 25 bp, Homo sapien
cttaagctacccttcaaggactggg

SEQ ID NO: 2249850 - DNA, 25 bp, Homo sapien
tagagcacctttccagctaccaggg

SEQ ID NO: 2249851 - DNA, 25 bp, Homo sapien
aatctgtggcactgaatcttgttca

SEQ ID NO: 2249852 - DNA, 25 bp, Homo sapien
tgtggcactgaatcttgttcacagt

SEQ ID NO: 2249853 - DNA, 25 bp, Homo sapien
atggttcttgttcacaaggtgcaaa

SEQ ID NO: 2249854 - DNA, 25 bp, Homo sapien
tcacaaggtgcaaatctgtggcact

SEQ ID NO: 2249855 - DNA, 25 bp, Homo sapien
caatgaaacttaagctacagggacc

SEQ ID NO: 2249856 - DNA, 25 bp, Homo sapien
tagacatgctatccagttgctcagc

SEQ ID NO: 2249857 - DNA, 25 bp, Homo sapien
gaggagactgcttatgaccatgaga

SEQ ID NO: 2249858 - DNA, 25 bp, Homo sapien
ggctaatgaaagtacccacctccta

SEQ ID NO: 2249859 - DNA, 25 bp, Homo sapien
taaatgagacaactgagaccgatgg

SEQ ID NO: 2249860 - DNA, 25 bp, Homo sapien
gagcaatacaggtgcctcagtccct

SEQ ID NO: 2249861 - DNA, 25 bp, Homo sapien
taatgtgctttgttgagcccactag

SEQ ID NO: 2249862 - DNA, 25 bp, Homo sapien
gaagtatctcacagtcaatagaagg

SEQ ID NO: 2249863 - DNA, 25 bp, Homo sapien
tatataacttcactcatggccatgg

SEQ ID NO: 2249864 - DNA, 25 bp, Homo sapien
aaaatatgcctttgagttggtgcca

SEQ ID NO: 2249865 - DNA, 25 bp, Homo sapien
gaaagtccactaattaatgccagca

SEQ ID NO: 2249866 - DNA, 25 bp, Homo sapien
tgacttctaaatcaataaagggccc

SEQ ID NO: 2249867 - DNA, 25 bp, Homo sapien
gaaaaatggctcagtactcacttaa

SEQ ID NO: 2249868 - DNA, 25 bp, Homo sapien
tgtgagctgacagaaaagggtattc

SEQ ID NO: 2249869 - DNA, 25 bp, Homo sapien
gaagaagcacagaaacgctgccctc

SEQ ID NO: 2249870 - DNA, 25 bp, Homo sapien
aagctttgcttgaataatgtcccta

SEQ ID NO: 2249871 - DNA, 25 bp, Homo sapien
ctcctctctgccataatagtgtgga

SEQ ID NO: 2249872 - DNA, 25 bp, Homo sapien
ctgccataatagtgtggaccaaaaa

SEQ ID NO: 2249873 - DNA, 25 bp, Homo sapien
gatctctagacttataccaaccttt

SEQ ID NO: 2249874 - DNA, 25 bp, Homo sapien
tctctgccataatagtgtggaccaa

SEQ ID NO: 2249875 - DNA, 25 bp, Homo sapien
tacatcatgaactccagccttgtcg

SEQ ID NO: 2249876 - DNA, 25 bp, Homo sapien
gccttgtcgaggttaatgtctgtaa

SEQ ID NO: 2249877 - DNA, 25 bp, Homo sapien
tactggagtctaaataactgcccca

SEQ ID NO: 2249878 - DNA, 25 bp, Homo sapien
taaagtggtccacataaatgagctg

SEQ ID NO: 2249879 - DNA, 25 bp, Homo sapien
accacattgtgaacatcacttggac

SEQ ID NO: 2249880 - DNA, 25 bp, Homo sapien
tgtaaccacattgtgaacatcactt

SEQ ID NO: 2249881 - DNA, 25 bp, Homo sapien
acttgtaaccacattgtgaacatca

SEQ ID NO: 2249882 - DNA, 25 bp, Homo sapien
taaccacattgtgaacatcacttgg

SEQ ID NO: 2249883 - DNA, 25 bp, Homo sapien
agactgaagcagctgttccatgttc

SEQ ID NO: 2249884 - DNA, 25 bp, Homo sapien
catgttcaatcgtgctgttagttgg

SEQ ID NO: 2249885 - DNA, 25 bp, Homo sapien
tgctgttagttggtatttttcttcc

SEQ ID NO: 2249886 - DNA, 25 bp, Homo sapien
cttggaaaaccgcagcattctgaat

SEQ ID NO: 2249887 - DNA, 25 bp, Homo sapien
ttgggcccttagggagacatacttg

SEQ ID NO: 2249888 - DNA, 25 bp, Homo sapien
ttagggagacatacttgcaaatctg

SEQ ID NO: 2249889 - DNA, 25 bp, Homo sapien
gcccttagggagacatacttgcaaa

SEQ ID NO: 2249890 - DNA, 25 bp, Homo sapien
gggcccttagggagacatacttgca

SEQ ID NO: 2249891 - DNA, 25 bp, Homo sapien
agaaatcatcttagggaacccagct

SEQ ID NO: 2249892 - DNA, 25 bp, Homo sapien
ttaaagcaaccgtggagataagcca

SEQ ID NO: 2249893 - DNA, 25 bp, Homo sapien
gcccagtaaaggttgaatccccaga

SEQ ID NO: 2249894 - DNA, 25 bp, Homo sapien
aatggctgcattaaaaaccggtggg

SEQ ID NO: 2249895 - DNA, 25 bp, Homo sapien
cactccatacatggccgtcgtctgt

SEQ ID NO: 2249896 - DNA, 25 bp, Homo sapien
gctgggctgccttcgtgacgtagca

SEQ ID NO: 2249897 - DNA, 25 bp, Homo sapien
acgtagcattcccacaggttcaagc

SEQ ID NO: 2249898 - DNA, 25 bp, Homo sapien
atggccgtcgtctgtctacatgtct

SEQ ID NO: 2249899 - DNA, 25 bp, Homo sapien
catttctatggcactcaacatgcaa

SEQ ID NO: 2249900 - DNA, 25 bp, Homo sapien
tccaaagtgggccaaattagcatta

SEQ ID NO: 2249901 - DNA, 25 bp, Homo sapien
caaattagcattattggtgactgtc

SEQ ID NO: 2249902 - DNA, 25 bp, Homo sapien
aagctgccagtgctagaagtagttc

SEQ ID NO: 2249903 - DNA, 25 bp, Homo sapien
taaataccacagatctgtaaggtga

SEQ ID NO: 2249904 - DNA, 25 bp, Homo sapien
cctcttataagatttaactagtcta

SEQ ID NO: 2249905 - DNA, 25 bp, Homo sapien
cagtgtatgtttccgtaactggcac

SEQ ID NO: 2249906 - DNA, 25 bp, Homo sapien
tacttcttccagagagttatagtat

SEQ ID NO: 2249907 - DNA, 25 bp, Homo sapien
ttctctgctgatatacccaccttca

SEQ ID NO: 2249908 - DNA, 25 bp, Homo sapien
cccctgatacacgtagcatttcaaa

SEQ ID NO: 2249909 - DNA, 25 bp, Homo sapien
cgtagcatttcaaaacacgcatttt

SEQ ID NO: 2249910 - DNA, 25 bp, Homo sapien
tttcaaaacacgcattttctctgct

SEQ ID NO: 2249911 - DNA, 25 bp, Homo sapien
taagccgcctttttctaggctacag

SEQ ID NO: 2249912 - DNA, 25 bp, Homo sapien
taataagccgcctttttctaggcta

SEQ ID NO: 2249913 - DNA, 25 bp, Homo sapien
agatcagtaataagccgcctttttc

SEQ ID NO: 2249914 - DNA, 25 bp, Homo sapien
cagtaataagccgcctttttctagg

SEQ ID NO: 2249915 - DNA, 25 bp, Homo sapien
cagcacctattacagaggctgccaa

SEQ ID NO: 2249916 - DNA, 25 bp, Homo sapien
gcacctattacagaggctgccaagg

SEQ ID NO: 2249917 - DNA, 25 bp, Homo sapien
agggattgtgtctcactcctctctg

SEQ ID NO: 2249918 - DNA, 25 bp, Homo sapien
gagctccttgacaaaagggattgtg

SEQ ID NO: 2249919 - DNA, 25 bp, Homo sapien
gccatgtcctccatcagattgatgg

SEQ ID NO: 2249920 - DNA, 25 bp, Homo sapien
agccatgtcctccatcagattgatg

SEQ ID NO: 2249921 - DNA, 25 bp, Homo sapien
taagcacagcttggtatcagtatca

SEQ ID NO: 2249922 - DNA, 25 bp, Homo sapien
tggcaacccagatacggaggctagt

SEQ ID NO: 2249923 - DNA, 25 bp, Homo sapien
ggagttgcaacactaccacggtttg

SEQ ID NO: 2249924 - DNA, 25 bp, Homo sapien
tctctctggacattaggaccgctaa

SEQ ID NO: 2249925 - DNA, 25 bp, Homo sapien
ataaacatctagacttatgagctca

SEQ ID NO: 2249926 - DNA, 25 bp, Homo sapien
ttgtatccattcttgattgcgcctg

SEQ ID NO: 2249927 - DNA, 25 bp, Homo sapien
aacatctagacttatgagctcattg

SEQ ID NO: 2249928 - DNA, 25 bp, Homo sapien
tcttgattgcgcctgtgggtaggtt

SEQ ID NO: 2249929 - DNA, 25 bp, Homo sapien
ttaaataagggcaaaagagctgtac

SEQ ID NO: 2249930 - DNA, 25 bp, Homo sapien
aattaaataagggcaaaagagctgt

SEQ ID NO: 2249931 - DNA, 25 bp, Homo sapien
aaattaaataagggcaaaagagctg

SEQ ID NO: 2249932 - DNA, 25 bp, Homo sapien
attaaataagggcaaaagagctgta

SEQ ID NO: 2249933 - DNA, 25 bp, Homo sapien
aactctgtgcgcctggtttccatct

SEQ ID NO: 2249934 - DNA, 25 bp, Homo sapien
caaatgctaactctgtgcgcctggt

SEQ ID NO: 2249935 - DNA, 25 bp, Homo sapien
gtgcgcctggtttccatctgtggtg

SEQ ID NO: 2249936 - DNA, 25 bp, Homo sapien
tgctaactctgtgcgcctggtttcc

SEQ ID NO: 2249937 - DNA, 25 bp, Homo sapien
tatggccatccctaggcctcaaggg

SEQ ID NO: 2249938 - DNA, 25 bp, Homo sapien
tagaactgctatcctgtgacttgaa

SEQ ID NO: 2249939 - DNA, 25 bp, Homo sapien
cagtgcctgccatgtagaagatgct

SEQ ID NO: 2249940 - DNA, 25 bp, Homo sapien
tcaggacacgcagtttcatgccagg

SEQ ID NO: 2249941 - DNA, 25 bp, Homo sapien
ttatacagatgctgcaaagaggcag

SEQ ID NO: 2249942 - DNA, 25 bp, Homo sapien
tgcaaagaggcaggcagccagagag

SEQ ID NO: 2249943 - DNA, 25 bp, Homo sapien
tacagatgctgcaaagaggcaggca

SEQ ID NO: 2249944 - DNA, 25 bp, Homo sapien
acagatgctgcaaagaggcaggcag

SEQ ID NO: 2249945 - DNA, 25 bp, Homo sapien
gcaagggagggcgagtgcctgcagg

SEQ ID NO: 2249946 - DNA, 25 bp, Homo sapien
agaggggggttgctaaatgactatc

SEQ ID NO: 2249947 - DNA, 25 bp, Homo sapien
agggagggcgagtgcctgcaggagt

SEQ ID NO: 2249948 - DNA, 25 bp, Homo sapien
ttgctaaatgactatctgtgctttc

SEQ ID NO: 2249949 - DNA, 25 bp, Homo sapien
ctcctggcttcgaatcagccaaatg

SEQ ID NO: 2249950 - DNA, 25 bp, Homo sapien
ggtgcgcatccgcattcacaacttg

SEQ ID NO: 2249951 - DNA, 25 bp, Homo sapien
ccatgacttgttgagagccaccagc

SEQ ID NO: 2249952 - DNA, 25 bp, Homo sapien
ttttggctagggctgctccccgatc

SEQ ID NO: 2249953 - DNA, 25 bp, Homo sapien
tcacaacttggtccaaccatcgggc

SEQ ID NO: 2249954 - DNA, 25 bp, Homo sapien
gacttggtgacaggtggcgtccggc

SEQ ID NO: 2249955 - DNA, 25 bp, Homo sapien
ctggcacgggagtttctggcaccca

SEQ ID NO: 2249956 - DNA, 25 bp, Homo sapien
gcctgtcccgggaagtccaagctga

SEQ ID NO: 2249957 - DNA, 25 bp, Homo sapien
acccacttgagtccgggctgcagtc

SEQ ID NO: 2249958 - DNA, 25 bp, Homo sapien
tgcaaaagtttcctcgcagctacct

SEQ ID NO: 2249959 - DNA, 25 bp, Homo sapien
gtgctgctacccagccgctgcaaaa

SEQ ID NO: 2249960 - DNA, 25 bp, Homo sapien
tgaggagcaagagacgtgctgctac

SEQ ID NO: 2249961 - DNA, 25 bp, Homo sapien
ccggagcgagagcagtcccaggact

SEQ ID NO: 2249962 - DNA, 25 bp, Homo sapien
ctgatggttttgtttccgacctagg

SEQ ID NO: 2249963 - DNA, 25 bp, Homo sapien
tccggagagaggaggttgtgttcca

SEQ ID NO: 2249964 - DNA, 25 bp, Homo sapien
catgaattagtttgtcatctgatgg

SEQ ID NO: 2249965 - DNA, 25 bp, Homo sapien
aaattgtctggggtgtgcaaggtcc

SEQ ID NO: 2249966 - DNA, 25 bp, Homo sapien
tagccagcagctattatcttgctgt

SEQ ID NO: 2249967 - DNA, 25 bp, Homo sapien
tgtagccagcagctattatcttgct

SEQ ID NO: 2249968 - DNA, 25 bp, Homo sapien
ctgtagccagcagctattatcttgc

SEQ ID NO: 2249969 - DNA, 25 bp, Homo sapien
gtagccagcagctattatcttgctg

SEQ ID NO: 2249970 - DNA, 25 bp, Homo sapien
gctccaaaagcagcataaatcaagt

SEQ ID NO: 2249971 - DNA, 25 bp, Homo sapien
ctccaaaagcagcataaatcaagtt

SEQ ID NO: 2249972 - DNA, 25 bp, Homo sapien
ggctccaaaagcagcataaatcaag

SEQ ID NO: 2249973 - DNA, 25 bp, Homo sapien
ccaaaagcagcataaatcaagtttt

SEQ ID NO: 2249974 - DNA, 25 bp, Homo sapien
agagctaaatttgttggcctgtttg

SEQ ID NO: 2249975 - DNA, 25 bp, Homo sapien
tccaactcctgaggcaatagcaggt

SEQ ID NO: 2249976 - DNA, 25 bp, Homo sapien
ttaagagctaaatttgttggcctgt

SEQ ID NO: 2249977 - DNA, 25 bp, Homo sapien
tgttgtcctgccacttgtgtgagtc

SEQ ID NO: 2249978 - DNA, 25 bp, Homo sapien
ttgagtcagataagaggagggagcc

SEQ ID NO: 2249979 - DNA, 25 bp, Homo sapien
ccgtggtgatagtggcagcagccat

SEQ ID NO: 2249980 - DNA, 25 bp, Homo sapien
catgtcgtcgcagcttgagctcaag

SEQ ID NO: 2249981 - DNA, 25 bp, Homo sapien
taagcctctaatgccaaaacttttg

SEQ ID NO: 2249982 - DNA, 25 bp, Homo sapien
catataacagagcatttttcattca

SEQ ID NO: 2249983 - DNA, 25 bp, Homo sapien
atataacagagcatttttcattcat

SEQ ID NO: 2249984 - DNA, 25 bp, Homo sapien
cgaggtgaccatactgtagacagca

SEQ ID NO: 2249985 - DNA, 25 bp, Homo sapien
tagccttggaggctgatcatggtcc

SEQ ID NO: 2249986 - DNA, 25 bp, Homo sapien
cagaattagggatcagacatgggtc

SEQ ID NO: 2249987 - DNA, 25 bp, Homo sapien
gcagtataagccacagacatcgagg

SEQ ID NO: 2249988 - DNA, 25 bp, Homo sapien
ccatttctttgggtacacgtactga

SEQ ID NO: 2249989 - DNA, 25 bp, Homo sapien
tgactgccaattattattacacttg

SEQ ID NO: 2249990 - DNA, 25 bp, Homo sapien
tctttgggtacacgtactgaacttc

SEQ ID NO: 2249991 - DNA, 25 bp, Homo sapien
ttacacttgtgctgctgttctggtc

SEQ ID NO: 2249992 - DNA, 25 bp, Homo sapien
agtcatagatcttcctaaccctcac

SEQ ID NO: 2249993 - DNA, 25 bp, Homo sapien
ttagtcatagatcttcctaaccctc

SEQ ID NO: 2249994 - DNA, 25 bp, Homo sapien
tagtcatagatcttcctaaccctca

SEQ ID NO: 2249995 - DNA, 25 bp, Homo sapien
tttacacgtgctagggaatgcaggg

SEQ ID NO: 2249996 - DNA, 25 bp, Homo sapien
tgctagggaatgcagggagctcatc

SEQ ID NO: 2249997 - DNA, 25 bp, Homo sapien
cagggagctcatctcctcctcactg

SEQ ID NO: 2249998 - DNA, 25 bp, Homo sapien
gctccctggcttttacacgtgctag

SEQ ID NO: 2249999 - DNA, 25 bp, Homo sapien
tctggggaactgcatagtttttgct

SEQ ID NO: 2250000 - DNA, 25 bp, Homo sapien
gctctggggaactgcatagtttttg

SEQ ID NO: 2250001 - DNA, 25 bp, Homo sapien
agggtgaggctctggggaactgcat

SEQ ID NO: 2250002 - DNA, 25 bp, Homo sapien
gtgaggctctggggaactgcatagt

SEQ ID NO: 2250003 - DNA, 25 bp, Homo sapien
acgtactaggtataatttcaatatg

SEQ ID NO: 2250004 - DNA, 25 bp, Homo sapien
tcaatatgtcatccagtctttgttc

SEQ ID NO: 2250005 - DNA, 25 bp, Homo sapien
agaagtgtttgatacgagtttacgt

SEQ ID NO: 2250006 - DNA, 25 bp, Homo sapien
gctgtcactcattgcattgtttgcc

SEQ ID NO: 2250007 - DNA, 25 bp, Homo sapien
cttgatatcagacaaagggaatact

SEQ ID NO: 2250008 - DNA, 25 bp, Homo sapien
atcttgatatcagacaaagggaata

SEQ ID NO: 2250009 - DNA, 25 bp, Homo sapien
tatttctcagcaatcttgatatcag

SEQ ID NO: 2250010 - DNA, 25 bp, Homo sapien
ttctgaattgtatttctcagcaatc

SEQ ID NO: 2250011 - DNA, 25 bp, Homo sapien
actgatggtgaacaagcaattgagg

SEQ ID NO: 2250012 - DNA, 25 bp, Homo sapien
tgacctgtaactgatggtgaacaag

SEQ ID NO: 2250013 - DNA, 25 bp, Homo sapien
tgatggtgaacaagcaattgaggta

SEQ ID NO: 2250014 - DNA, 25 bp, Homo sapien
gtaactgatggtgaacaagcaattg

SEQ ID NO: 2250015 - DNA, 25 bp, Homo sapien
ggcagctctttgtgtggggataaaa

SEQ ID NO: 2250016 - DNA, 25 bp, Homo sapien
tgttcagcaatctctggctatgtga

SEQ ID NO: 2250017 - DNA, 25 bp, Homo sapien
tctggctatgtgatttcttacagct

SEQ ID NO: 2250018 - DNA, 25 bp, Homo sapien
gggataaaagcttgttcagcaatct

SEQ ID NO: 2250019 - DNA, 25 bp, Homo sapien
ctggaagactgcctcgtccaccaga

SEQ ID NO: 2250020 - DNA, 25 bp, Homo sapien
ctcgtccaccagatctttgcaggga

SEQ ID NO: 2250021 - DNA, 25 bp, Homo sapien
gatctttgcagggagttagtgagtc

SEQ ID NO: 2250022 - DNA, 25 bp, Homo sapien
gactgcctcgtccaccagatctttg

SEQ ID NO: 2250023 - DNA, 25 bp, Homo sapien
gaaacttgggcccagcgagaatctc

SEQ ID NO: 2250024 - DNA, 25 bp, Homo sapien
agaaacttgggcccagcgagaatct

SEQ ID NO: 2250025 - DNA, 25 bp, Homo sapien
aaagcctgaaaggccaagacttctt

SEQ ID NO: 2250026 - DNA, 25 bp, Homo sapien
caaagcctgaaaggccaagacttct

SEQ ID NO: 2250027 - DNA, 25 bp, Homo sapien
ttggctgaataactctttattcatc

SEQ ID NO: 2250028 - DNA, 25 bp, Homo sapien
gctgaataactctttattcatcagc

SEQ ID NO: 2250029 - DNA, 25 bp, Homo sapien
catgtacaatgtgaatctatcatct

SEQ ID NO: 2250030 - DNA, 25 bp, Homo sapien
ttcccacaaccctctacctatcacc

SEQ ID NO: 2250031 - DNA, 25 bp, Homo sapien
tctctccatcacctcactatcccac

SEQ ID NO: 2250032 - DNA, 25 bp, Homo sapien
accctctacctatcaccaccttctg

SEQ ID NO: 2250033 - DNA, 25 bp, Homo sapien
atttcatctgtgcttgccagaaatt

SEQ ID NO: 2250034 - DNA, 25 bp, Homo sapien
tgcttgccagaaatttggtattcat

SEQ ID NO: 2250035 - DNA, 25 bp, Homo sapien
atctgtgcttgccagaaatttggta

SEQ ID NO: 2250036 - DNA, 25 bp, Homo sapien
tgtgcttgccagaaatttggtattc

SEQ ID NO: 2250037 - DNA, 25 bp, Homo sapien
catcacttcatggagttatgttggg

SEQ ID NO: 2250038 - DNA, 25 bp, Homo sapien
cgccgaacagcagaaggcgcagttt

SEQ ID NO: 2250039 - DNA, 25 bp, Homo sapien
ccgatggagcggagttgcagcacct

SEQ ID NO: 2250040 - DNA, 25 bp, Homo sapien
gcgcagtttactgcacaggtgcatc

SEQ ID NO: 2250041 - DNA, 25 bp, Homo sapien
ctttatatagaacacaagtaatgca

SEQ ID NO: 2250042 - DNA, 25 bp, Homo sapien
tatatagaacacaagtaatgcaaca

SEQ ID NO: 2250043 - DNA, 25 bp, Homo sapien
ttatatagaacacaagtaatgcaac

SEQ ID NO: 2250044 - DNA, 25 bp, Homo sapien
tttatatagaacacaagtaatgcaa

SEQ ID NO: 2250045 - DNA, 25 bp, Homo sapien
aacctgcaaaactaattgtaagtag

SEQ ID NO: 2250046 - DNA, 25 bp, Homo sapien
tatacatatatacgctgaaatgcaa

SEQ ID NO: 2250047 - DNA, 25 bp, Homo sapien
tatatacgctgaaatgcaaacctgc

SEQ ID NO: 2250048 - DNA, 25 bp, Homo sapien
gcaaaactaattgtaagtagcaatg

SEQ ID NO: 2250049 - DNA, 25 bp, Homo sapien
ggcatttagggcagtagattctaag

SEQ ID NO: 2250050 - DNA, 25 bp, Homo sapien
tttagggcagtagattctaagctgc

SEQ ID NO: 2250051 - DNA, 25 bp, Homo sapien
gcagtagattctaagctgcttcact

SEQ ID NO: 2250052 - DNA, 25 bp, Homo sapien
gggcagtagattctaagctgcttca

SEQ ID NO: 2250053 - DNA, 25 bp, Homo sapien
ccatggtaatgtaagaagtgcttac

SEQ ID NO: 2250054 - DNA, 25 bp, Homo sapien
tagatctcaaaaagctacctgcact

SEQ ID NO: 2250055 - DNA, 25 bp, Homo sapien
gatctcaaaaagctacctgcactgt

SEQ ID NO: 2250056 - DNA, 25 bp, Homo sapien
agtagatctcaaaaagctacctgca

SEQ ID NO: 2250057 - DNA, 25 bp, Homo sapien
tctcaaaaagctacctgcactgtaa

SEQ ID NO: 2250058 - DNA, 25 bp, Homo sapien
agctcttcttttccgtcctcacaga

SEQ ID NO: 2250059 - DNA, 25 bp, Homo sapien
aggagctcttcttttccgtcctcac

SEQ ID NO: 2250060 - DNA, 25 bp, Homo sapien
ctcttcttttccgtcctcacagatc

SEQ ID NO: 2250061 - DNA, 25 bp, Homo sapien
gagctcttcttttccgtcctcacag

SEQ ID NO: 2250062 - DNA, 25 bp, Homo sapien
tgaacacgaataacactggcaactg

SEQ ID NO: 2250063 - DNA, 25 bp, Homo sapien
taaaccaaagtaggcagattagctc

SEQ ID NO: 2250064 - DNA, 25 bp, Homo sapien
ttttgggctccatacggaaagtgac

SEQ ID NO: 2250065 - DNA, 25 bp, Homo sapien
cacagatggctgagagatgtcacat

SEQ ID NO: 2250066 - DNA, 25 bp, Homo sapien
atccctcgcgcacgctgggcagtca

SEQ ID NO: 2250067 - DNA, 25 bp, Homo sapien
gacagggcgcccttctagttactac

SEQ ID NO: 2250068 - DNA, 25 bp, Homo sapien
ctctccaatccccttaaattgcaaa

SEQ ID NO: 2250069 - DNA, 25 bp, Homo sapien
agttactaccttttgctaattagcg

SEQ ID NO: 2250070 - DNA, 25 bp, Homo sapien
taatgctcccgttgaagtccgcgag

SEQ ID NO: 2250071 - DNA, 25 bp, Homo sapien
gcgtctctcacacccttacctaatg

SEQ ID NO: 2250072 - DNA, 25 bp, Homo sapien
cttttgcctcttcccgcgtctctca

SEQ ID NO: 2250073 - DNA, 25 bp, Homo sapien
tgaagtccgcgagcagcccgcgcgt

SEQ ID NO: 2250074 - DNA, 25 bp, Homo sapien
agaagtgagaaaaagcgtccactaa

SEQ ID NO: 2250075 - DNA, 25 bp, Homo sapien
cactaaatggatcaaggccgcgagc

SEQ ID NO: 2250076 - DNA, 25 bp, Homo sapien
gtatacccagtgtcccagcgcgcag

SEQ ID NO: 2250077 - DNA, 25 bp, Homo sapien
atcacagctgccccaacgaagggct

SEQ ID NO: 2250078 - DNA, 25 bp, Homo sapien
tccttaattaaaggcgcgcctggga

SEQ ID NO: 2250079 - DNA, 25 bp, Homo sapien
cagttacccacgggcggaccgcagt

SEQ ID NO: 2250080 - DNA, 25 bp, Homo sapien
ttaaaggcgcgcctgggacagcggc

SEQ ID NO: 2250081 - DNA, 25 bp, Homo sapien
tggccggagccggtgcgggtgccac

SEQ ID NO: 2250082 - DNA, 25 bp, Homo sapien
cttgtcccatctcgctcccgcggcg

SEQ ID NO: 2250083 - DNA, 25 bp, Homo sapien
accttgtcccatctcgctcccgcgg

SEQ ID NO: 2250084 - DNA, 25 bp, Homo sapien
gaggcccacggagccgtgggacagg

SEQ ID NO: 2250085 - DNA, 25 bp, Homo sapien
ccccaccggagacagacgacgaggc

SEQ ID NO: 2250086 - DNA, 25 bp, Homo sapien
tccccagtccagattggaatcccag

SEQ ID NO: 2250087 - DNA, 25 bp, Homo sapien
catgttcataacctgcaagtcgaca

SEQ ID NO: 2250088 - DNA, 25 bp, Homo sapien
cgacaatttcctcacatgtcaattg

SEQ ID NO: 2250089 - DNA, 25 bp, Homo sapien
tcaaaatgtaactttatgttcatgt

SEQ ID NO: 2250090 - DNA, 25 bp, Homo sapien
aatgtcacttgtgtttatcactgag

SEQ ID NO: 2250091 - DNA, 25 bp, Homo sapien
tcactgagattcatggagtcaaaac

SEQ ID NO: 2250092 - DNA, 25 bp, Homo sapien
gatgtcaacattcccatgatcaaca

SEQ ID NO: 2250093 - DNA, 25 bp, Homo sapien
tctttgttgcaacctcgtctatgtt

SEQ ID NO: 2250094 - DNA, 25 bp, Homo sapien
agaggttcgggctctccagacggca

SEQ ID NO: 2250095 - DNA, 25 bp, Homo sapien
ccggccaggctttgactgcgggacg

SEQ ID NO: 2250096 - DNA, 25 bp, Homo sapien
agacggcatccacgcttccaggtat

SEQ ID NO: 2250097 - DNA, 25 bp, Homo sapien
tcgggcaggctcgttgctaggcaac

SEQ ID NO: 2250098 - DNA, 25 bp, Homo sapien
tcagacagttcatttgggtccttct

SEQ ID NO: 2250099 - DNA, 25 bp, Homo sapien
tccccacaatgttgcatggtaaaac

SEQ ID NO: 2250100 - DNA, 25 bp, Homo sapien
tggtatttaatggttttctgcaagt

SEQ ID NO: 2250101 - DNA, 25 bp, Homo sapien
cttctaaggaaagagggtaatgatg

SEQ ID NO: 2250102 - DNA, 25 bp, Homo sapien
atctatataattgttgggtaaaaat

SEQ ID NO: 2250103 - DNA, 25 bp, Homo sapien
gattgctgtaataattcctactgat

SEQ ID NO: 2250104 - DNA, 25 bp, Homo sapien
aaaatgtgactggcaattaacatca

SEQ ID NO: 2250105 - DNA, 25 bp, Homo sapien
gcatttttatcatctatataattgt

SEQ ID NO: 2250106 - DNA, 25 bp, Homo sapien
cactgaactctccaaatagttcatc

SEQ ID NO: 2250107 - DNA, 25 bp, Homo sapien
ttcactgaactctccaaatagttca

SEQ ID NO: 2250108 - DNA, 25 bp, Homo sapien
cttcactgaactctccaaatagttc

SEQ ID NO: 2250109 - DNA, 25 bp, Homo sapien
tcactgaactctccaaatagttcat

SEQ ID NO: 2250110 - DNA, 25 bp, Homo sapien
ccaagtagttgccagtagggatgta

SEQ ID NO: 2250111 - DNA, 25 bp, Homo sapien
caagtagttgccagtagggatgtac

SEQ ID NO: 2250112 - DNA, 25 bp, Homo sapien
agccaagtagttgccagtagggatg

SEQ ID NO: 2250113 - DNA, 25 bp, Homo sapien
caaagccaagtagttgccagtaggg

SEQ ID NO: 2250114 - DNA, 25 bp, Homo sapien
gaattgctcaatgtgaccccagagg

SEQ ID NO: 2250115 - DNA, 25 bp, Homo sapien
ttgtcggacactggaatggcttgcc

SEQ ID NO: 2250116 - DNA, 25 bp, Homo sapien
tacaactactttgacctgccgggag

SEQ ID NO: 2250117 - DNA, 25 bp, Homo sapien
ggcaccaagatgatgactccagagg

SEQ ID NO: 2250118 - DNA, 25 bp, Homo sapien
gagcccgtctctcctcgaatgaaag

SEQ ID NO: 2250119 - DNA, 25 bp, Homo sapien
tcgctttattgtcagggaccccaga

SEQ ID NO: 2250120 - DNA, 25 bp, Homo sapien
tgaaaggaaacaacctccggcgaca

SEQ ID NO: 2250121 - DNA, 25 bp, Homo sapien
actgctggagaaccgagaccgactt

SEQ ID NO: 2250122 - DNA, 25 bp, Homo sapien
ggggagggggcgcaacatttgagga

SEQ ID NO: 2250123 - DNA, 25 bp, Homo sapien
agggggcgcaacatttgaggaggga

SEQ ID NO: 2250124 - DNA, 25 bp, Homo sapien
gggcgcaacatttgaggagggaaaa

SEQ ID NO: 2250125 - DNA, 25 bp, Homo sapien
tcgggggagggggcgcaacatttga

SEQ ID NO: 2250126 - DNA, 25 bp, Homo sapien
tcacggtaacctctctctactgggt

SEQ ID NO: 2250127 - DNA, 25 bp, Homo sapien
caatattgcgaagttcagtggagat

SEQ ID NO: 2250128 - DNA, 25 bp, Homo sapien
gacacagcttgtatagtcagaacaa

SEQ ID NO: 2250129 - DNA, 25 bp, Homo sapien
ttgaaagtgattgtgctgtaaacct

SEQ ID NO: 2250130 - DNA, 25 bp, Homo sapien
tgtcctggagcaacaattggttgtg

SEQ ID NO: 2250131 - DNA, 25 bp, Homo sapien
tccttgacagaaattgatatgcctc

SEQ ID NO: 2250132 - DNA, 25 bp, Homo sapien
ttggttgtgatgtgaaaacatgtca

SEQ ID NO: 2250133 - DNA, 25 bp, Homo sapien
tgtcgttttgctgtagatgtgttct

SEQ ID NO: 2250134 - DNA, 25 bp, Homo sapien
cactgtggtgtgattggctaaacaa

SEQ ID NO: 2250135 - DNA, 25 bp, Homo sapien
tttagaaaaatggacctcagcagtg

SEQ ID NO: 2250136 - DNA, 25 bp, Homo sapien
taaacagtgtaatctttgcaagcgt

SEQ ID NO: 2250137 - DNA, 25 bp, Homo sapien
gaatttcagatagtacttgctcaga

SEQ ID NO: 2250138 - DNA, 25 bp, Homo sapien
tcacgcgatgactggaacccgaaga

SEQ ID NO: 2250139 - DNA, 25 bp, Homo sapien
gtttacggccgccatgaagcaacgc

SEQ ID NO: 2250140 - DNA, 25 bp, Homo sapien
aatcagggagccctctgaataggag

SEQ ID NO: 2250141 - DNA, 25 bp, Homo sapien
cgcgcgccggtaggtttgggaatca

SEQ ID NO: 2250142 - DNA, 25 bp, Homo sapien
ttgtttgttgaaccggccaagctgc

SEQ ID NO: 2250143 - DNA, 25 bp, Homo sapien
ggcctccctcctcaaccgttctgat

SEQ ID NO: 2250144 - DNA, 25 bp, Homo sapien
ttcttgtttgttgaaccggccaagc

SEQ ID NO: 2250145 - DNA, 25 bp, Homo sapien
tttgttgaaccggccaagctgctgg

SEQ ID NO: 2250146 - DNA, 25 bp, Homo sapien
cattcccagaagtatgacaattatc

SEQ ID NO: 2250147 - DNA, 25 bp, Homo sapien
acttccctagtacaagttagctgta

SEQ ID NO: 2250148 - DNA, 25 bp, Homo sapien
ggtatgctgaatacctacgtaccca

SEQ ID NO: 2250149 - DNA, 25 bp, Homo sapien
gggctcatcaagctgaatcaaggga

SEQ ID NO: 2250150 - DNA, 25 bp, Homo sapien
tgtccaaaggtacagagctagtccg

SEQ ID NO: 2250151 - DNA, 25 bp, Homo sapien
cattaagtctctgatcagtctgcag

SEQ ID NO: 2250152 - DNA, 25 bp, Homo sapien
tgaggcatagggaattgtccaaagg

SEQ ID NO: 2250153 - DNA, 25 bp, Homo sapien
ggacctcctggaattgagtgatgaa

SEQ ID NO: 2250154 - DNA, 25 bp, Homo sapien
gttgtggtgagttgggcgagccatt

SEQ ID NO: 2250155 - DNA, 25 bp, Homo sapien
tggtgagttgggcgagccattgcac

SEQ ID NO: 2250156 - DNA, 25 bp, Homo sapien
ggtgagttgggcgagccattgcact

SEQ ID NO: 2250157 - DNA, 25 bp, Homo sapien
tgtggtgagttgggcgagccattgc

SEQ ID NO: 2250158 - DNA, 25 bp, Homo sapien
tgaccatggtacactcagcacggat

SEQ ID NO: 2250159 - DNA, 25 bp, Homo sapien
ccttcaatggacacatgggtagtca

SEQ ID NO: 2250160 - DNA, 25 bp, Homo sapien
tgtagtgtcaactcattgctgcccc

SEQ ID NO: 2250161 - DNA, 25 bp, Homo sapien
tccaggtgatcaaccaagtgccttg

SEQ ID NO: 2250162 - DNA, 25 bp, Homo sapien
gaatattgttaattataccaccgtg

SEQ ID NO: 2250163 - DNA, 25 bp, Homo sapien
gaaatgtcagttgctgcattcctaa

SEQ ID NO: 2250164 - DNA, 25 bp, Homo sapien
tctgtggccatctgcttagtagagc

SEQ ID NO: 2250165 - DNA, 25 bp, Homo sapien
ctatagactatcagttccctttggg

SEQ ID NO: 2250166 - DNA, 25 bp, Homo sapien
cattcctaaaagtcaccagactttc

SEQ ID NO: 2250167 - DNA, 25 bp, Homo sapien
gctgatagcactctcgcaaacctgg

SEQ ID NO: 2250168 - DNA, 25 bp, Homo sapien
aagggcaagcattctctttatgcct

SEQ ID NO: 2250169 - DNA, 25 bp, Homo sapien
cgagacatgagagcattgagcccaa

SEQ ID NO: 2250170 - DNA, 25 bp, Homo sapien
tgctttagcgccaggttttgcacaa

SEQ ID NO: 2250171 - DNA, 25 bp, Homo sapien
aaggctgactctccatagatcacag

SEQ ID NO: 2250172 - DNA, 25 bp, Homo sapien
gtggatgaaaccctcacacagaagc

SEQ ID NO: 2250173 - DNA, 25 bp, Homo sapien
agtgagagaactgccccgctgtgga

SEQ ID NO: 2250174 - DNA, 25 bp, Homo sapien
aatttcagggtatgagatttttctg

SEQ ID NO: 2250175 - DNA, 25 bp, Homo sapien
ttttctgggttactcggatgaatgg

SEQ ID NO: 2250176 - DNA, 25 bp, Homo sapien
ctcggatgaatggaatgcaggctac

SEQ ID NO: 2250177 - DNA, 25 bp, Homo sapien
gggctactagctatctgaaatcaac

SEQ ID NO: 2250178 - DNA, 25 bp, Homo sapien
tgcttcctgcggatttgcaggaggc

SEQ ID NO: 2250179 - DNA, 25 bp, Homo sapien
aaggacctggttcttggtgcttcct

SEQ ID NO: 2250180 - DNA, 25 bp, Homo sapien
tcctgcggatttgcaggaggcacac

SEQ ID NO: 2250181 - DNA, 25 bp, Homo sapien
cttggtgcttcctgcggatttgcag

SEQ ID NO: 2250182 - DNA, 25 bp, Homo sapien
tgggcgagcatccaagtaccacctt

SEQ ID NO: 2250183 - DNA, 25 bp, Homo sapien
gggcgagcatccaagtaccaccttc

SEQ ID NO: 2250184 - DNA, 25 bp, Homo sapien
ggccctgggcgagcatccaagtacc

SEQ ID NO: 2250185 - DNA, 25 bp, Homo sapien
cctgggcgagcatccaagtaccacc

SEQ ID NO: 2250186 - DNA, 25 bp, Homo sapien
taagcctggctgaacttgccaaaga

SEQ ID NO: 2250187 - DNA, 25 bp, Homo sapien
gggttttaagcctggctgaacttgc

SEQ ID NO: 2250188 - DNA, 25 bp, Homo sapien
cccacaggggttttaagcctggctg

SEQ ID NO: 2250189 - DNA, 25 bp, Homo sapien
cttgccaaagagatcagctgtggag

SEQ ID NO: 2250190 - DNA, 25 bp, Homo sapien
tataactcccatctcataggctcag

SEQ ID NO: 2250191 - DNA, 25 bp, Homo sapien
agctctatagcagtccaggattcag

SEQ ID NO: 2250192 - DNA, 25 bp, Homo sapien
gccccatttgccttgatgagttgat

SEQ ID NO: 2250193 - DNA, 25 bp, Homo sapien
ttctgcaaatgttgccctgagctct

SEQ ID NO: 2250194 - DNA, 25 bp, Homo sapien
ccttctatttgggacacttgggtgg

SEQ ID NO: 2250195 - DNA, 25 bp, Homo sapien
gactgactcatttggcgggaaaacc

SEQ ID NO: 2250196 - DNA, 25 bp, Homo sapien
gtcattcaatgtcccagcactggag

SEQ ID NO: 2250197 - DNA, 25 bp, Homo sapien
ggacagttgcccatattaacggaaa

SEQ ID NO: 2250198 - DNA, 25 bp, Homo sapien
aaatcagtactgctaactggagatg

SEQ ID NO: 2250199 - DNA, 25 bp, Homo sapien
aaaatcagtactgctaactggagat

SEQ ID NO: 2250200 - DNA, 25 bp, Homo sapien
tatgatgcacatttagcaacgctga

SEQ ID NO: 2250201 - DNA, 25 bp, Homo sapien
taagggccacgtctgtctaataaac

SEQ ID NO: 2250202 - DNA, 25 bp, Homo sapien
taacatcgggtcaattaatcagctg

SEQ ID NO: 2250203 - DNA, 25 bp, Homo sapien
tatacaatgccacgtgcacgcagct

SEQ ID NO: 2250204 - DNA, 25 bp, Homo sapien
taggcacactgcaacttggatcgtg

SEQ ID NO: 2250205 - DNA, 25 bp, Homo sapien
cttggatcgtgtaaataaaggtaca

SEQ ID NO: 2250206 - DNA, 25 bp, Homo sapien
aggaaaatctaggcacactgcaact

SEQ ID NO: 2250207 - DNA, 25 bp, Homo sapien
cactgcaacttggatcgtgtaaata

SEQ ID NO: 2250208 - DNA, 25 bp, Homo sapien
ggctgtgtggacgagctcaatttcg

SEQ ID NO: 2250209 - DNA, 25 bp, Homo sapien
gagctcaatttcgatgcatctcggg

SEQ ID NO: 2250210 - DNA, 25 bp, Homo sapien
catctcgggagacccgggcaaaagg

SEQ ID NO: 2250211 - DNA, 25 bp, Homo sapien
caaaaggccgcttggattccgggag

SEQ ID NO: 2250212 - DNA, 25 bp, Homo sapien
cgcccccaaccggtcaggatccctg

SEQ ID NO: 2250213 - DNA, 25 bp, Homo sapien
tcaggatcccttgctcgccgccccc

SEQ ID NO: 2250214 - DNA, 25 bp, Homo sapien
aggatcccttgctcgccgcccccaa

SEQ ID NO: 2250215 - DNA, 25 bp, Homo sapien
gctcgccgcccccaaccggtcagga

SEQ ID NO: 2250216 - DNA, 25 bp, Homo sapien
tccactggaggaagccggatggcgc

SEQ ID NO: 2250217 - DNA, 25 bp, Homo sapien
gatggcgcgggcttggtctttcagg

SEQ ID NO: 2250218 - DNA, 25 bp, Homo sapien
cggatggcgcgggcttggtctttca

SEQ ID NO: 2250219 - DNA, 25 bp, Homo sapien
aggaagccggatggcgcgggcttgg

SEQ ID NO: 2250220 - DNA, 25 bp, Homo sapien
tggctccagggggaaccgtacagga

SEQ ID NO: 2250221 - DNA, 25 bp, Homo sapien
cagaaggggcgtcacaaggtggctc

SEQ ID NO: 2250222 - DNA, 25 bp, Homo sapien
ttcgccgtttgagcctggagattgc

SEQ ID NO: 2250223 - DNA, 25 bp, Homo sapien
gacctgttcgccgtttgagcctgga

SEQ ID NO: 2250224 - DNA, 25 bp, Homo sapien
tgagcctggagattgcgggcctgag

SEQ ID NO: 2250225 - DNA, 25 bp, Homo sapien
cgactcccagctctagacttcggaa

SEQ ID NO: 2250226 - DNA, 25 bp, Homo sapien
agagccagcgtctcgggccgctgaa

SEQ ID NO: 2250227 - DNA, 25 bp, Homo sapien
attcagaccagaggagtttgggtgt

SEQ ID NO: 2250228 - DNA, 25 bp, Homo sapien
cagaccagaggagtttgggtgtctt

SEQ ID NO: 2250229 - DNA, 25 bp, Homo sapien
gcgaattagcccttttctagtcaga

SEQ ID NO: 2250230 - DNA, 25 bp, Homo sapien
agactgttaagctctcaggcgggca

SEQ ID NO: 2250231 - DNA, 25 bp, Homo sapien
tagcccttttctagtcagactgtta

SEQ ID NO: 2250232 - DNA, 25 bp, Homo sapien
gatttgcacagaaagcgaattagcc

SEQ ID NO: 2250233 - DNA, 25 bp, Homo sapien
ttagagggcgacagttgtgcagcac

SEQ ID NO: 2250234 - DNA, 25 bp, Homo sapien
tctagagtgctggagctccacggag

SEQ ID NO: 2250235 - DNA, 25 bp, Homo sapien
ttttgaagtcacgaagggctcctga

SEQ ID NO: 2250236 - DNA, 25 bp, Homo sapien
gcaaagcagctagaaacgcacatcc

SEQ ID NO: 2250237 - DNA, 25 bp, Homo sapien
accgcagagaggtgtaaagacttct

SEQ ID NO: 2250238 - DNA, 25 bp, Homo sapien
tgtcctgtgggtggtattctgattg

SEQ ID NO: 2250239 - DNA, 25 bp, Homo sapien
gagcgcgtttaccaggaaccgcaga

SEQ ID NO: 2250240 - DNA, 25 bp, Homo sapien
aagataggttttcttcgttgtcctg

SEQ ID NO: 2250241 - DNA, 25 bp, Homo sapien
aatcttgggtctcgctgctcccggg

SEQ ID NO: 2250242 - DNA, 25 bp, Homo sapien
aaaatgaagcatcattcacgtccag

SEQ ID NO: 2250243 - DNA, 25 bp, Homo sapien
ggcaaacgtttgatgcaatcttggg

SEQ ID NO: 2250244 - DNA, 25 bp, Homo sapien
gtccagtcacatatgcagagacggg

SEQ ID NO: 2250245 - DNA, 25 bp, Homo sapien
gctgggtaggcccgaacggcagtcc

SEQ ID NO: 2250246 - DNA, 25 bp, Homo sapien
tgctgggtaggcccgaacggcagtc

SEQ ID NO: 2250247 - DNA, 25 bp, Homo sapien
tgggtaggcccgaacggcagtccca

SEQ ID NO: 2250248 - DNA, 25 bp, Homo sapien
tggcagcggaaacaataccccagag

SEQ ID NO: 2250249 - DNA, 25 bp, Homo sapien
ctggcagcggaaacaataccccaga

SEQ ID NO: 2250250 - DNA, 25 bp, Homo sapien
gcagcggaaacaataccccagagca

SEQ ID NO: 2250251 - DNA, 25 bp, Homo sapien
gcggaaacaataccccagagcaccg

SEQ ID NO: 2250252 - DNA, 25 bp, Homo sapien
tcgctcactgcagaactgttcccgc

SEQ ID NO: 2250253 - DNA, 25 bp, Homo sapien
cgctcactgcagaactgttcccgct

SEQ ID NO: 2250254 - DNA, 25 bp, Homo sapien
gctcactgcagaactgttcccgctg

SEQ ID NO: 2250255 - DNA, 25 bp, Homo sapien
ctgcgtggacaagggcgaggacccg

SEQ ID NO: 2250256 - DNA, 25 bp, Homo sapien
tgagcgcgggcaccgcgtctctcct

SEQ ID NO: 2250257 - DNA, 25 bp, Homo sapien
atgcgccccagcctagccaggaata

SEQ ID NO: 2250258 - DNA, 25 bp, Homo sapien
gaggacccgccggaaacagagacgc

SEQ ID NO: 2250259 - DNA, 25 bp, Homo sapien
gtggcaggaacacgcgtccggcaga

SEQ ID NO: 2250260 - DNA, 25 bp, Homo sapien
acctggtggcaggaacacgcgtccg

SEQ ID NO: 2250261 - DNA, 25 bp, Homo sapien
tcctgagccggcctcgcggggagcg

SEQ ID NO: 2250262 - DNA, 25 bp, Homo sapien
tgctcctgagccggcctcgcgggga

SEQ ID NO: 2250263 - DNA, 25 bp, Homo sapien
aaacctcaccggtagcttcagctga

SEQ ID NO: 2250264 - DNA, 25 bp, Homo sapien
tcatgtcctgaaatggccggcactg

SEQ ID NO: 2250265 - DNA, 25 bp, Homo sapien
tagatgtcctaactcactgctagtg

SEQ ID NO: 2250266 - DNA, 25 bp, Homo sapien
ttattcttaaacaccccagctgagt

SEQ ID NO: 2250267 - DNA, 25 bp, Homo sapien
tgttccacacaaatatacgagccat

SEQ ID NO: 2250268 - DNA, 25 bp, Homo sapien
gagaaaaatgtcgttgactgccctt

SEQ ID NO: 2250269 - DNA, 25 bp, Homo sapien
cgaatttataacatccagactgaga

SEQ ID NO: 2250270 - DNA, 25 bp, Homo sapien
gccatcatgtcagaagttaaagtca

SEQ ID NO: 2250271 - DNA, 25 bp, Homo sapien
caaacgccacagcacttttttcaga

SEQ ID NO: 2250272 - DNA, 25 bp, Homo sapien
gggaaagacgccagccaccaagtcc

SEQ ID NO: 2250273 - DNA, 25 bp, Homo sapien
cggccgcactcatttgttaaacact

SEQ ID NO: 2250274 - DNA, 25 bp, Homo sapien
tgtttttctgcctgccgtaacccac

SEQ ID NO: 2250275 - DNA, 25 bp, Homo sapien
aaaatggcgccgaaatcgaagaact

SEQ ID NO: 2250276 - DNA, 25 bp, Homo sapien
aatggcgccgaaatcgaagaacttc

SEQ ID NO: 2250277 - DNA, 25 bp, Homo sapien
aaatggcgccgaaatcgaagaactt

SEQ ID NO: 2250278 - DNA, 25 bp, Homo sapien
tgcgaagctgtttcgccgcgtccga

SEQ ID NO: 2250279 - DNA, 25 bp, Homo sapien
agagacagaccgagcgagcgacaca

SEQ ID NO: 2250280 - DNA, 25 bp, Homo sapien
agcgacacacggacagcgacggaca

SEQ ID NO: 2250281 - DNA, 25 bp, Homo sapien
agcgagcgaacgtgcaagccagcga

SEQ ID NO: 2250282 - DNA, 25 bp, Homo sapien
cttggaggcgagcggcgcagccggc

SEQ ID NO: 2250283 - DNA, 25 bp, Homo sapien
tttgctcggtgcttacagggagtac

SEQ ID NO: 2250284 - DNA, 25 bp, Homo sapien
tctggcggtgtcctttgagctgccg

SEQ ID NO: 2250285 - DNA, 25 bp, Homo sapien
cgcaaggtggctgagcgaagctttt

SEQ ID NO: 2250286 - DNA, 25 bp, Homo sapien
aaagccaagggcacgaggtagcgca

SEQ ID NO: 2250287 - DNA, 25 bp, Homo sapien
gactcggtgggctcggctgcaccac

SEQ ID NO: 2250288 - DNA, 25 bp, Homo sapien
cagactcggtgggctcggctgcacc

SEQ ID NO: 2250289 - DNA, 25 bp, Homo sapien
agactcggtgggctcggctgcacca

SEQ ID NO: 2250290 - DNA, 25 bp, Homo sapien
ctcggtgggctcggctgcaccacgg

SEQ ID NO: 2250291 - DNA, 25 bp, Homo sapien
agacagcgcgcagggtagcccagaa

SEQ ID NO: 2250292 - DNA, 25 bp, Homo sapien
cattccccgagggaggccgtagttg

SEQ ID NO: 2250293 - DNA, 25 bp, Homo sapien
gggccgcgggaactgagccgcgcgc

SEQ ID NO: 2250294 - DNA, 25 bp, Homo sapien
gtagttgtcgcggcctgcagacagc

SEQ ID NO: 2250295 - DNA, 25 bp, Homo sapien
ttcacatgagagatggtaacacggc

SEQ ID NO: 2250296 - DNA, 25 bp, Homo sapien
tgaagagtgctaagggatgctatcc

SEQ ID NO: 2250297 - DNA, 25 bp, Homo sapien
gagatagagtgtcaattcgccgggc

SEQ ID NO: 2250298 - DNA, 25 bp, Homo sapien
cagaactgaactcactcgtggttgc

SEQ ID NO: 2250299 - DNA, 25 bp, Homo sapien
gatggctaacatcctcaagagttgg

SEQ ID NO: 2250300 - DNA, 25 bp, Homo sapien
tgctggcggtaaagatgatggctaa

SEQ ID NO: 2250301 - DNA, 25 bp, Homo sapien
aagaagtgagaacaaggtgctgtgc

SEQ ID NO: 2250302 - DNA, 25 bp, Homo sapien
ctgaccaagggttgttgagctcata

SEQ ID NO: 2250303 - DNA, 25 bp, Homo sapien
tgggactgacacttggaacacatcc

SEQ ID NO: 2250304 - DNA, 25 bp, Homo sapien
gggactgacacttggaacacatcct

SEQ ID NO: 2250305 - DNA, 25 bp, Homo sapien
ctgggactgacacttggaacacatc

SEQ ID NO: 2250306 - DNA, 25 bp, Homo sapien
agtaggcagaggagttgtgacttta

SEQ ID NO: 2250307 - DNA, 25 bp, Homo sapien
atgaaagccgtgttttttaacagat

SEQ ID NO: 2250308 - DNA, 25 bp, Homo sapien
tgtgactttagttgcaggatggtat

SEQ ID NO: 2250309 - DNA, 25 bp, Homo sapien
tagttgcaggatggtatagaacctt

SEQ ID NO: 2250310 - DNA, 25 bp, Homo sapien
tctctttctcaaaagtgctcacatg

SEQ ID NO: 2250311 - DNA, 25 bp, Homo sapien
tcacatgagggtcacaagagcactt

SEQ ID NO: 2250312 - DNA, 25 bp, Homo sapien
gaaatagcatcttcaggagacccca

SEQ ID NO: 2250313 - DNA, 25 bp, Homo sapien
gcttaattcatgaagttgctatagg

SEQ ID NO: 2250314 - DNA, 25 bp, Homo sapien
aagagaccaatcctcagaaatatca

SEQ ID NO: 2250315 - DNA, 25 bp, Homo sapien
tgaagagaccaatcctcagaaatat

SEQ ID NO: 2250316 - DNA, 25 bp, Homo sapien
tgtgtgaagagaccaatcctcagaa

SEQ ID NO: 2250317 - DNA, 25 bp, Homo sapien
tgtgaagagaccaatcctcagaaat

SEQ ID NO: 2250318 - DNA, 25 bp, Homo sapien
gaagacacaaggtggacaatcgcag

SEQ ID NO: 2250319 - DNA, 25 bp, Homo sapien
ggacaatcgcagttgggcctttgac

SEQ ID NO: 2250320 - DNA, 25 bp, Homo sapien
cctttgactggactgtgacaagctg

SEQ ID NO: 2250321 - DNA, 25 bp, Homo sapien
gactggactgtgacaagctgaacac

SEQ ID NO: 2250322 - DNA, 25 bp, Homo sapien
cacaaacttagatggcgtgccctta

SEQ ID NO: 2250323 - DNA, 25 bp, Homo sapien
tgctgtagataaccatgtcctgaga

SEQ ID NO: 2250324 - DNA, 25 bp, Homo sapien
tgctcttgctggctactctcatgga

SEQ ID NO: 2250325 - DNA, 25 bp, Homo sapien
gcacatgacactgggatcacaaact

SEQ ID NO: 2250326 - DNA, 25 bp, Homo sapien
agcacagtcattggactttgtcctg

SEQ ID NO: 2250327 - DNA, 25 bp, Homo sapien
ggaggatcatcagtcctatgaactt

SEQ ID NO: 2250328 - DNA, 25 bp, Homo sapien
catcagtcctatgaacttaaaaact

SEQ ID NO: 2250329 - DNA, 25 bp, Homo sapien
ggatcatcagtcctatgaacttaaa

SEQ ID NO: 2250330 - DNA, 25 bp, Homo sapien
gtgaggaggatcatcagtcctatga

SEQ ID NO: 2250331 - DNA, 25 bp, Homo sapien
aggaaacaggaagccgtccagtgag

SEQ ID NO: 2250332 - DNA, 25 bp, Homo sapien
acaggaagccgtccagtgaggattt

SEQ ID NO: 2250333 - DNA, 25 bp, Homo sapien
agataatgaaccacaggaaacagga

SEQ ID NO: 2250334 - DNA, 25 bp, Homo sapien
ggaaacaggaagccgtccagtgagg

SEQ ID NO: 2250335 - DNA, 25 bp, Homo sapien
cagctgccctggctcattggcagtt

SEQ ID NO: 2250336 - DNA, 25 bp, Homo sapien
gaaaaagaaactctggcacaaaatg

SEQ ID NO: 2250337 - DNA, 25 bp, Homo sapien
gctcattggcagttctgctaagaaa

SEQ ID NO: 2250338 - DNA, 25 bp, Homo sapien
aaaaagaaactctggcacaaaatgg

SEQ ID NO: 2250339 - DNA, 25 bp, Homo sapien
ggatattccttcatccacccctgtt

SEQ ID NO: 2250340 - DNA, 25 bp, Homo sapien
gatgtctcctacagagacgagtttt

SEQ ID NO: 2250341 - DNA, 25 bp, Homo sapien
ctagagtcccatcaatctgccactc

SEQ ID NO: 2250342 - DNA, 25 bp, Homo sapien
aaattcctggcgcagatgtctccta

SEQ ID NO: 2250343 - DNA, 25 bp, Homo sapien
agaagcaacagcgattttaatcttg

SEQ ID NO: 2250344 - DNA, 25 bp, Homo sapien
aatcctggattatttatctcttgct

SEQ ID NO: 2250345 - DNA, 25 bp, Homo sapien
cacagaagcaacagcgattttaatc

SEQ ID NO: 2250346 - DNA, 25 bp, Homo sapien
aagcaacagcgattttaatcttgaa

SEQ ID NO: 2250347 - DNA, 25 bp, Homo sapien
taaacacaggcagaacgtctttctc

SEQ ID NO: 2250348 - DNA, 25 bp, Homo sapien
tacccacaaattctgcaactgacac

SEQ ID NO: 2250349 - DNA, 25 bp, Homo sapien
cataaacacaggcagaacgtctttc

SEQ ID NO: 2250350 - DNA, 25 bp, Homo sapien
gatttcctgttacccacaaattctg

SEQ ID NO: 2250351 - DNA, 25 bp, Homo sapien
aagtctcagctgttaaacccgaggg

SEQ ID NO: 2250352 - DNA, 25 bp, Homo sapien
ctggaaacaaagtctcagctgttaa

SEQ ID NO: 2250353 - DNA, 25 bp, Homo sapien
acaaagtctcagctgttaaacccga

SEQ ID NO: 2250354 - DNA, 25 bp, Homo sapien
ctcagctgttaaacccgaggggccg

SEQ ID NO: 2250355 - DNA, 25 bp, Homo sapien
gaggagcctggagaatactgaagga

SEQ ID NO: 2250356 - DNA, 25 bp, Homo sapien
ggagaatactgaaggatggagaaaa

SEQ ID NO: 2250357 - DNA, 25 bp, Homo sapien
agcctggagaatactgaaggatgga

SEQ ID NO: 2250358 - DNA, 25 bp, Homo sapien
cctggagaatactgaaggatggaga

SEQ ID NO: 2250359 - DNA, 25 bp, Homo sapien
tcaagcaatacagggcatccgatca

SEQ ID NO: 2250360 - DNA, 25 bp, Homo sapien
aatacagggcatccgatcaagggag

SEQ ID NO: 2250361 - DNA, 25 bp, Homo sapien
tcaagggaggggttgagcaacagct

SEQ ID NO: 2250362 - DNA, 25 bp, Homo sapien
agcaatacagggcatccgatcaagg

SEQ ID NO: 2250363 - DNA, 25 bp, Homo sapien
tatagactaaagtgtcccctgagct

SEQ ID NO: 2250364 - DNA, 25 bp, Homo sapien
taacagatcttcagtatgtgcccag

SEQ ID NO: 2250365 - DNA, 25 bp, Homo sapien
tgagctgagctcgtcagctgctgaa

SEQ ID NO: 2250366 - DNA, 25 bp, Homo sapien
gatcatactcgtgtagcttgtgaga

SEQ ID NO: 2250367 - DNA, 25 bp, Homo sapien
tgttaaggctttcgagcattttgcc

SEQ ID NO: 2250368 - DNA, 25 bp, Homo sapien
ctgcataggatttcatagtatggac

SEQ ID NO: 2250369 - DNA, 25 bp, Homo sapien
ccacttaagttagaccatgagcatt

SEQ ID NO: 2250370 - DNA, 25 bp, Homo sapien
catagtataaatgttactgcatagg

SEQ ID NO: 2250371 - DNA, 25 bp, Homo sapien
tgtgctaggcattagactctctcct

SEQ ID NO: 2250372 - DNA, 25 bp, Homo sapien
tgatcacttacactctatttcctgg

SEQ ID NO: 2250373 - DNA, 25 bp, Homo sapien
gcataagtgctagaggcataacaca

SEQ ID NO: 2250374 - DNA, 25 bp, Homo sapien
cattgagtaaagacactatgctagc

SEQ ID NO: 2250375 - DNA, 25 bp, Homo sapien
tggcagctggggataatttgtcagt

SEQ ID NO: 2250376 - DNA, 25 bp, Homo sapien
gctggggataatttgtcagtttcct

SEQ ID NO: 2250377 - DNA, 25 bp, Homo sapien
cttctggcagctggggataatttgt

SEQ ID NO: 2250378 - DNA, 25 bp, Homo sapien
tcttctggcagctggggataatttg

SEQ ID NO: 2250379 - DNA, 25 bp, Homo sapien
ttgagctgatagtcagagcaggcat

SEQ ID NO: 2250380 - DNA, 25 bp, Homo sapien
gagctgatagtcagagcaggcattt

SEQ ID NO: 2250381 - DNA, 25 bp, Homo sapien
tgagctgatagtcagagcaggcatt

SEQ ID NO: 2250382 - DNA, 25 bp, Homo sapien
ttctcctccttgagagtagggttca

SEQ ID NO: 2250383 - DNA, 25 bp, Homo sapien
attctcctccttgagagtagggttc

SEQ ID NO: 2250384 - DNA, 25 bp, Homo sapien
cacttacattgagaaaacccctgca

SEQ ID NO: 2250385 - DNA, 25 bp, Homo sapien
cccacttacattgagaaaacccctg

SEQ ID NO: 2250386 - DNA, 25 bp, Homo sapien
acttacattgagaaaacccctgcat

SEQ ID NO: 2250387 - DNA, 25 bp, Homo sapien
ccacttacattgagaaaacccctgc

SEQ ID NO: 2250388 - DNA, 25 bp, Homo sapien
gacctttgacacaatccgatcttca

SEQ ID NO: 2250389 - DNA, 25 bp, Homo sapien
cgatcttcagtcttcagggagaact

SEQ ID NO: 2250390 - DNA, 25 bp, Homo sapien
tcagatgcagccagagtcactgctc

SEQ ID NO: 2250391 - DNA, 25 bp, Homo sapien
aagtccagacatgaggtgcacagcc

SEQ ID NO: 2250392 - DNA, 25 bp, Homo sapien
caagattcttgagctgcaatcagga

SEQ ID NO: 2250393 - DNA, 25 bp, Homo sapien
attgagcaacgagctccaatctggg

SEQ ID NO: 2250394 - DNA, 25 bp, Homo sapien
ccctggagtgaattagttttggctg

SEQ ID NO: 2250395 - DNA, 25 bp, Homo sapien
ttgagcaatcacccaacactccaaa

SEQ ID NO: 2250396 - DNA, 25 bp, Homo sapien
aaggtggaacgaaataggcatggct

SEQ ID NO: 2250397 - DNA, 25 bp, Homo sapien
acgaaataggcatggctaggaaaag

SEQ ID NO: 2250398 - DNA, 25 bp, Homo sapien
gactgaaggtggaacgaaataggca

SEQ ID NO: 2250399 - DNA, 25 bp, Homo sapien
ctgcagaaagactgaaggtggaacg

SEQ ID NO: 2250400 - DNA, 25 bp, Homo sapien
gtctccaaccttctttttcaatcaa

SEQ ID NO: 2250401 - DNA, 25 bp, Homo sapien
aatctgtctccaaccttctttttca

SEQ ID NO: 2250402 - DNA, 25 bp, Homo sapien
cacaatctgtctccaaccttctttt

SEQ ID NO: 2250403 - DNA, 25 bp, Homo sapien
tctgtctccaaccttctttttcaat

SEQ ID NO: 2250404 - DNA, 25 bp, Homo sapien
tcagcagatttgaaagcccgttctt

SEQ ID NO: 2250405 - DNA, 25 bp, Homo sapien
gcagatttgaaagcccgttctttat

SEQ ID NO: 2250406 - DNA, 25 bp, Homo sapien
cgttctttatcccagtgagatagaa

SEQ ID NO: 2250407 - DNA, 25 bp, Homo sapien
cccagtgagatagaagctcatcaac

SEQ ID NO: 2250408 - DNA, 25 bp, Homo sapien
gaattcctataggtctcaaaggcca

SEQ ID NO: 2250409 - DNA, 25 bp, Homo sapien
tcaaagcgcagggaagtgcatttcg

SEQ ID NO: 2250410 - DNA, 25 bp, Homo sapien
caagttctctgacagaccaaggtcc

SEQ ID NO: 2250411 - DNA, 25 bp, Homo sapien
gaatgggtctcaaatctgctgaagg

SEQ ID NO: 2250412 - DNA, 25 bp, Homo sapien
attcctgaaggttctaccagtggct

SEQ ID NO: 2250413 - DNA, 25 bp, Homo sapien
taccttcataggagagtcactcttt

SEQ ID NO: 2250414 - DNA, 25 bp, Homo sapien
gggtggcctttaccttcataggaga

SEQ ID NO: 2250415 - DNA, 25 bp, Homo sapien
atttgcccccaggattggaaaaatg

SEQ ID NO: 2250416 - DNA, 25 bp, Homo sapien
aaaaatgtatctcagtcactggaac

SEQ ID NO: 2250417 - DNA, 25 bp, Homo sapien
gggactgtcctccatgcatctgttt

SEQ ID NO: 2250418 - DNA, 25 bp, Homo sapien
tgaccttacagcagaaatccagcag

SEQ ID NO: 2250419 - DNA, 25 bp, Homo sapien
ctgaaaagcccaacacccctgggtg

SEQ ID NO: 2250420 - DNA, 25 bp, Homo sapien
tccagcaggcaaagggacccaactg

SEQ ID NO: 2250421 - DNA, 25 bp, Homo sapien
aatagctgtgattaaagatagaggc

SEQ ID NO: 2250422 - DNA, 25 bp, Homo sapien
acagggctgcatttggggcatctcc

SEQ ID NO: 2250423 - DNA, 25 bp, Homo sapien
tgaatagctgtgattaaagatagag

SEQ ID NO: 2250424 - DNA, 25 bp, Homo sapien
cttgaatagctgtgattaaagatag

SEQ ID NO: 2250425 - DNA, 25 bp, Homo sapien
ctaagggacacgttgcttttggtgc

SEQ ID NO: 2250426 - DNA, 25 bp, Homo sapien
tgcttttggtgctccaattaggcat

SEQ ID NO: 2250427 - DNA, 25 bp, Homo sapien
attcctcacagagccagtactcatc

SEQ ID NO: 2250428 - DNA, 25 bp, Homo sapien
gccagtactcatcctgtctaaggga

SEQ ID NO: 2250429 - DNA, 25 bp, Homo sapien
tacacggccagggtccacgtgtaca

SEQ ID NO: 2250430 - DNA, 25 bp, Homo sapien
tctgctagggatgtagggactggca

SEQ ID NO: 2250431 - DNA, 25 bp, Homo sapien
agggaaatcaggcagctggaaccga

SEQ ID NO: 2250432 - DNA, 25 bp, Homo sapien
cagctggaaccgaatgagaagggca

SEQ ID NO: 2250433 - DNA, 25 bp, Homo sapien
aaaagtacgtaaagatcaccctgct

SEQ ID NO: 2250434 - DNA, 25 bp, Homo sapien
tgagtcaccgtttttacagctttgg

SEQ ID NO: 2250435 - DNA, 25 bp, Homo sapien
gggcttgacattcctcacgttcagg

SEQ ID NO: 2250436 - DNA, 25 bp, Homo sapien
tttggacaggataacttagggaggc

SEQ ID NO: 2250437 - DNA, 25 bp, Homo sapien
aatgcaggaggttcaaaaggggcct

SEQ ID NO: 2250438 - DNA, 25 bp, Homo sapien
gactggctgctgactgataaagaat

SEQ ID NO: 2250439 - DNA, 25 bp, Homo sapien
tccctttcttgccaaatgcaggagg

SEQ ID NO: 2250440 - DNA, 25 bp, Homo sapien
ggcctgtgaataattgtgtgggaca

SEQ ID NO: 2250441 - DNA, 25 bp, Homo sapien
catgataaggccctcagaatcctct

SEQ ID NO: 2250442 - DNA, 25 bp, Homo sapien
tgaaatagcgacaagccaggtgcat

SEQ ID NO: 2250443 - DNA, 25 bp, Homo sapien
tgcgtgccaacatgataaggccctc

SEQ ID NO: 2250444 - DNA, 25 bp, Homo sapien
cctcttgcatgaaatagcgacaagc

SEQ ID NO: 2250445 - DNA, 25 bp, Homo sapien
atccagtgctggagacactctgccc

SEQ ID NO: 2250446 - DNA, 25 bp, Homo sapien
catccagtgctggagacactctgcc

SEQ ID NO: 2250447 - DNA, 25 bp, Homo sapien
ccatccagtgctggagacactctgc

SEQ ID NO: 2250448 - DNA, 25 bp, Homo sapien
tccagtgctggagacactctgccca

SEQ ID NO: 2250449 - DNA, 25 bp, Homo sapien
tggctgatgcctgaaattccactgt

SEQ ID NO: 2250450 - DNA, 25 bp, Homo sapien
tgcctgaaattccactgttggggtt

SEQ ID NO: 2250451 - DNA, 25 bp, Homo sapien
gatgcctgaaattccactgttgggg

SEQ ID NO: 2250452 - DNA, 25 bp, Homo sapien
tgaaattccactgttggggttcttg

SEQ ID NO: 2250453 - DNA, 25 bp, Homo sapien
gatggacgcacaggcagtatgtgcc

SEQ ID NO: 2250454 - DNA, 25 bp, Homo sapien
tctccttcagacttcgttgtcagtc

SEQ ID NO: 2250455 - DNA, 25 bp, Homo sapien
gacttcgttgtcagtctcgttttct

SEQ ID NO: 2250456 - DNA, 25 bp, Homo sapien
agtccagcagaaagatacttgcctt

SEQ ID NO: 2250457 - DNA, 25 bp, Homo sapien
ttcaaagatctgtaggggtcctagg

SEQ ID NO: 2250458 - DNA, 25 bp, Homo sapien
atctgtaggggtcctaggaaacctg

SEQ ID NO: 2250459 - DNA, 25 bp, Homo sapien
taggggtcctaggaaacctgattga

SEQ ID NO: 2250460 - DNA, 25 bp, Homo sapien
caaagatctgtaggggtcctaggaa

SEQ ID NO: 2250461 - DNA, 25 bp, Homo sapien
gggatacaggccacatgcttcagaa

SEQ ID NO: 2250462 - DNA, 25 bp, Homo sapien
gaagcacagaggactttaaccttag

SEQ ID NO: 2250463 - DNA, 25 bp, Homo sapien
cagtatatgctaagaggaatggtat

SEQ ID NO: 2250464 - DNA, 25 bp, Homo sapien
gaatggtatagagtaggcaataagg

SEQ ID NO: 2250465 - DNA, 25 bp, Homo sapien
ttaaccttagttgatgtgtaacagc

SEQ ID NO: 2250466 - DNA, 25 bp, Homo sapien
caagagcagcctgtttagttgcttg

SEQ ID NO: 2250467 - DNA, 25 bp, Homo sapien
tctcattaacccatggccaatcggc

SEQ ID NO: 2250468 - DNA, 25 bp, Homo sapien
gcttgtttcctgtggctaacacctg

SEQ ID NO: 2250469 - DNA, 25 bp, Homo sapien
ggacaatgacatactctgggagagg

SEQ ID NO: 2250470 - DNA, 25 bp, Homo sapien
gaaattatctgctagtcactcagct

SEQ ID NO: 2250471 - DNA, 25 bp, Homo sapien
tagtgaagtttgcactctgccaagg

SEQ ID NO: 2250472 - DNA, 25 bp, Homo sapien
gatgcacggagaacatcagcctctg

SEQ ID NO: 2250473 - DNA, 25 bp, Homo sapien
gctatatttcgagttgcctggtcac

SEQ ID NO: 2250474 - DNA, 25 bp, Homo sapien
tttcaagccatcatggcggggtact

SEQ ID NO: 2250475 - DNA, 25 bp, Homo sapien
tcaagccatcatggcggggtactgg

SEQ ID NO: 2250476 - DNA, 25 bp, Homo sapien
aaaatgccaacgccaactatatttc

SEQ ID NO: 2250477 - DNA, 25 bp, Homo sapien
ttcaagccatcatggcggggtactg

SEQ ID NO: 2250478 - DNA, 25 bp, Homo sapien
ctcgtgtaagttttcctcgggaatg

SEQ ID NO: 2250479 - DNA, 25 bp, Homo sapien
caaagggtggcactccttgacagac

SEQ ID NO: 2250480 - DNA, 25 bp, Homo sapien
cttgacagactcctcgtgtaagttt

SEQ ID NO: 2250481 - DNA, 25 bp, Homo sapien
tcctcgggaatgtctggaagacaag

SEQ ID NO: 2250482 - DNA, 25 bp, Homo sapien
taacagaagtactgcacgctaagtg

SEQ ID NO: 2250483 - DNA, 25 bp, Homo sapien
tagatacactgcataccatcgaaga

SEQ ID NO: 2250484 - DNA, 25 bp, Homo sapien
gctccatggacgcttttgtacacag

SEQ ID NO: 2250485 - DNA, 25 bp, Homo sapien
gaagtagagacttttcccagatgag

SEQ ID NO: 2250486 - DNA, 25 bp, Homo sapien
attccttagggcaacaggtttgagg

SEQ ID NO: 2250487 - DNA, 25 bp, Homo sapien
ggtagcaaagtcataagaacctgtg

SEQ ID NO: 2250488 - DNA, 25 bp, Homo sapien
cataagcggctcaaacaggaaaggg

SEQ ID NO: 2250489 - DNA, 25 bp, Homo sapien
tgactaatccaagcatcctgtaagt

SEQ ID NO: 2250490 - DNA, 25 bp, Homo sapien
cactgctgcggaaaaggaccattaa

SEQ ID NO: 2250491 - DNA, 25 bp, Homo sapien
gaaactatgtagtcaacagaggaca

SEQ ID NO: 2250492 - DNA, 25 bp, Homo sapien
gcaagagaatttctgatcaaatctg

SEQ ID NO: 2250493 - DNA, 25 bp, Homo sapien
gcaatacacatcagtgcctttctta

SEQ ID NO: 2250494 - DNA, 25 bp, Homo sapien
tcattatggatcaaagttctctgcg

SEQ ID NO: 2250495 - DNA, 25 bp, Homo sapien
caaaaccagatactagtaaggtcac

SEQ ID NO: 2250496 - DNA, 25 bp, Homo sapien
taggaaacagcagttaaaacgttga

SEQ ID NO: 2250497 - DNA, 25 bp, Homo sapien
gtaaggtcactaggctcacaaaatt

SEQ ID NO: 2250498 - DNA, 25 bp, Homo sapien
ccatcaagatgaacgaagagcatga

SEQ ID NO: 2250499 - DNA, 25 bp, Homo sapien
gagcatgctactggagactctgcgg

SEQ ID NO: 2250500 - DNA, 25 bp, Homo sapien
gggtctgaggataagccactgctgc

SEQ ID NO: 2250501 - DNA, 25 bp, Homo sapien
gactctgcggtagcgctgcctttag

SEQ ID NO: 2250502 - DNA, 25 bp, Homo sapien
taagactcttcgaggtcctgtatca

SEQ ID NO: 2250503 - DNA, 25 bp, Homo sapien
gacacagtttcaagagctcacaaat

SEQ ID NO: 2250504 - DNA, 25 bp, Homo sapien
tagaggcaccagaccgcctaaccta

SEQ ID NO: 2250505 - DNA, 25 bp, Homo sapien
tataagcaaatgcaactatcagggt

SEQ ID NO: 2250506 - DNA, 25 bp, Homo sapien
gataagacccttcgtaaatactgca

SEQ ID NO: 2250507 - DNA, 25 bp, Homo sapien
aatagaagcctcacaatagccactg

SEQ ID NO: 2250508 - DNA, 25 bp, Homo sapien
tagccactgctagagatggtttagg

SEQ ID NO: 2250509 - DNA, 25 bp, Homo sapien
acattcacgggtctacagggtaggg

SEQ ID NO: 2250510 - DNA, 25 bp, Homo sapien
aaggatagagtttcatccaatagtc

SEQ ID NO: 2250511 - DNA, 25 bp, Homo sapien
aggatagagtttcatccaatagtcc

SEQ ID NO: 2250512 - DNA, 25 bp, Homo sapien
atccaatagtcctcttgacaagctt

SEQ ID NO: 2250513 - DNA, 25 bp, Homo sapien
ctaaggatagagtttcatccaatag

SEQ ID NO: 2250514 - DNA, 25 bp, Homo sapien
tggaaaggcactctgtaccaaaatc

SEQ ID NO: 2250515 - DNA, 25 bp, Homo sapien
gaaaggcactctgtaccaaaatcag

SEQ ID NO: 2250516 - DNA, 25 bp, Homo sapien
ggcactctgtaccaaaatcagcata

SEQ ID NO: 2250517 - DNA, 25 bp, Homo sapien
actctgtaccaaaatcagcatactg

SEQ ID NO: 2250518 - DNA, 25 bp, Homo sapien
caccattggcaactaatgacaggct

SEQ ID NO: 2250519 - DNA, 25 bp, Homo sapien
tttcacattatcctccatagagatt

SEQ ID NO: 2250520 - DNA, 25 bp, Homo sapien
cgaaagcgaaggtgtcagaaagaca

SEQ ID NO: 2250521 - DNA, 25 bp, Homo sapien
ctaacaggagctgggaacgaaagcg

SEQ ID NO: 2250522 - DNA, 25 bp, Homo sapien
tggtagtgccttggaagagtctctt

SEQ ID NO: 2250523 - DNA, 25 bp, Homo sapien
gataacatattggtagtgccttgga

SEQ ID NO: 2250524 - DNA, 25 bp, Homo sapien
catgaactgagatcagacagttgcg

SEQ ID NO: 2250525 - DNA, 25 bp, Homo sapien
gcgcggcatctggagataacatatt

SEQ ID NO: 2250526 - DNA, 25 bp, Homo sapien
tggctactgagaacattcctaggac

SEQ ID NO: 2250527 - DNA, 25 bp, Homo sapien
ctactgagaacattcctaggactac

SEQ ID NO: 2250528 - DNA, 25 bp, Homo sapien
cattcctaggactacaaataactcc

SEQ ID NO: 2250529 - DNA, 25 bp, Homo sapien
acattcctaggactacaaataactc

SEQ ID NO: 2250530 - DNA, 25 bp, Homo sapien
aagaggaccaagaacactgggtcta

SEQ ID NO: 2250531 - DNA, 25 bp, Homo sapien
ggacttggtggcaatccactgctgc

SEQ ID NO: 2250532 - DNA, 25 bp, Homo sapien
cttggtggcaatccactgctgctca

SEQ ID NO: 2250533 - DNA, 25 bp, Homo sapien
cttgaaaatcgtcttggactgggaa

SEQ ID NO: 2250534 - DNA, 25 bp, Homo sapien
tcttggactgggaactggacttggt

SEQ ID NO: 2250535 - DNA, 25 bp, Homo sapien
tttctccggcttgtcaaaatcactg

SEQ ID NO: 2250536 - DNA, 25 bp, Homo sapien
atttctccggcttgtcaaaatcact

SEQ ID NO: 2250537 - DNA, 25 bp, Homo sapien
catcccatgattggcttatctgcat

SEQ ID NO: 2250538 - DNA, 25 bp, Homo sapien
aagctctcatcccatgattggctta

SEQ ID NO: 2250539 - DNA, 25 bp, Homo sapien
tctcatcccatgattggcttatctg

SEQ ID NO: 2250540 - DNA, 25 bp, Homo sapien
gctctcatcccatgattggcttatc

SEQ ID NO: 2250541 - DNA, 25 bp, Homo sapien
ttctctgttcaccatatccaggcct

SEQ ID NO: 2250542 - DNA, 25 bp, Homo sapien
catgtgcagtttctctgttcaccat

SEQ ID NO: 2250543 - DNA, 25 bp, Homo sapien
agtttctctgttcaccatatccagg

SEQ ID NO: 2250544 - DNA, 25 bp, Homo sapien
gtgcagtttctctgttcaccatatc

SEQ ID NO: 2250545 - DNA, 25 bp, Homo sapien
cattgacataatcacagtagagtgg

SEQ ID NO: 2250546 - DNA, 25 bp, Homo sapien
ctcattgacataatcacagtagagt

SEQ ID NO: 2250547 - DNA, 25 bp, Homo sapien
taatcacagtagagtggaacattca

SEQ ID NO: 2250548 - DNA, 25 bp, Homo sapien
tgacataatcacagtagagtggaac

SEQ ID NO: 2250549 - DNA, 25 bp, Homo sapien
ccttttgatctgatgcagtctgcta

SEQ ID NO: 2250550 - DNA, 25 bp, Homo sapien
cagtctgctactaggaatacgatta

SEQ ID NO: 2250551 - DNA, 25 bp, Homo sapien
ggaatacgattaggtgaggatgaca

SEQ ID NO: 2250552 - DNA, 25 bp, Homo sapien
ttttgatctgatgcagtctgctact

SEQ ID NO: 2250553 - DNA, 25 bp, Homo sapien
cctccgagttctaagtgtgtaaggt

SEQ ID NO: 2250554 - DNA, 25 bp, Homo sapien
gtgtgtaaggttggaaaacctgtga

SEQ ID NO: 2250555 - DNA, 25 bp, Homo sapien
tgttgtactattcctccgagttcta

SEQ ID NO: 2250556 - DNA, 25 bp, Homo sapien
aattgttgtactattcctccgagtt

SEQ ID NO: 2250557 - DNA, 25 bp, Homo sapien
ctgagcccatggattaggggagcgc

SEQ ID NO: 2250558 - DNA, 25 bp, Homo sapien
aggctcaaggtccagctccattttc

SEQ ID NO: 2250559 - DNA, 25 bp, Homo sapien
attaggggagcgctgctggatctcc

SEQ ID NO: 2250560 - DNA, 25 bp, Homo sapien
catggattaggggagcgctgctgga

SEQ ID NO: 2250561 - DNA, 25 bp, Homo sapien
cctggtgcttagctatggactccca

SEQ ID NO: 2250562 - DNA, 25 bp, Homo sapien
ctcctggtgcttagctatggactcc

SEQ ID NO: 2250563 - DNA, 25 bp, Homo sapien
tcctggtgcttagctatggactccc

SEQ ID NO: 2250564 - DNA, 25 bp, Homo sapien
gctcctggtgcttagctatggactc

SEQ ID NO: 2250565 - DNA, 25 bp, Homo sapien
ctggggactggcagctgggggcggg

SEQ ID NO: 2250566 - DNA, 25 bp, Homo sapien
gactgagctgctggggactggcagc

SEQ ID NO: 2250567 - DNA, 25 bp, Homo sapien
tgagctgctggggactggcagctgg

SEQ ID NO: 2250568 - DNA, 25 bp, Homo sapien
gcaggactgagctgctggggactgg

SEQ ID NO: 2250569 - DNA, 25 bp, Homo sapien
gaggacgaagaggtagtggtggaag

SEQ ID NO: 2250570 - DNA, 25 bp, Homo sapien
aaggatggagggaaaacaaggatgg

SEQ ID NO: 2250571 - DNA, 25 bp, Homo sapien
aggatggagggaaaacaaggatgga

SEQ ID NO: 2250572 - DNA, 25 bp, Homo sapien
gaagaggtagtggtggaaggtgaca

SEQ ID NO: 2250573 - DNA, 25 bp, Homo sapien
aaagcaggaggacagagaggataag

SEQ ID NO: 2250574 - DNA, 25 bp, Homo sapien
ggataggtggaaaagcaggaggaca

SEQ ID NO: 2250575 - DNA, 25 bp, Homo sapien
aaggataggtggaaaagcaggagga

SEQ ID NO: 2250576 - DNA, 25 bp, Homo sapien
cagagaggataagaggagggcagag

SEQ ID NO: 2250577 - DNA, 25 bp, Homo sapien
gctgctatctttccggctgaggacc

SEQ ID NO: 2250578 - DNA, 25 bp, Homo sapien
cagcggcggaactcatgctgctatc

SEQ ID NO: 2250579 - DNA, 25 bp, Homo sapien
aggaaactaggcagcggcggaactc

SEQ ID NO: 2250580 - DNA, 25 bp, Homo sapien
ccgggctacagatgctgcggctgcc

SEQ ID NO: 2250581 - DNA, 25 bp, Homo sapien
ccctcccgcctcgaggacaggttgg

SEQ ID NO: 2250582 - DNA, 25 bp, Homo sapien
gccctgggatcggtgcttctcccct

SEQ ID NO: 2250583 - DNA, 25 bp, Homo sapien
ctctctcgggttctaatggtctggg

SEQ ID NO: 2250584 - DNA, 25 bp, Homo sapien
ctgacagtcgggtaggacccggccg

SEQ ID NO: 2250585 - DNA, 25 bp, Homo sapien
gcctcccacgcttcagaagcgggaa

SEQ ID NO: 2250586 - DNA, 25 bp, Homo sapien
tgggccagttcttccgcgtccgggc

SEQ ID NO: 2250587 - DNA, 25 bp, Homo sapien
cgggaacctccgctgggccagttct

SEQ ID NO: 2250588 - DNA, 25 bp, Homo sapien
cgcgtccgggcacccatcgggtcct

SEQ ID NO: 2250589 - DNA, 25 bp, Homo sapien
ctcccttgttcctggtgtccggaga

SEQ ID NO: 2250590 - DNA, 25 bp, Homo sapien
ccttgttcctggtgtccggagatcc

SEQ ID NO: 2250591 - DNA, 25 bp, Homo sapien
tgttcctggtgtccggagatcccac

SEQ ID NO: 2250592 - DNA, 25 bp, Homo sapien
gagatcccaccctcaaccttgggtg

SEQ ID NO: 2250593 - DNA, 25 bp, Homo sapien
gacaagttgcttaatcactgtagcc

SEQ ID NO: 2250594 - DNA, 25 bp, Homo sapien
ggcaacagcctgaatgtctaacaat

SEQ ID NO: 2250595 - DNA, 25 bp, Homo sapien
tagcaatgactgcataaccccttgg

SEQ ID NO: 2250596 - DNA, 25 bp, Homo sapien
tagggaataggtcaatcgaaagagc

SEQ ID NO: 2250597 - DNA, 25 bp, Homo sapien
catccaccatcaatgtgttctgcat

SEQ ID NO: 2250598 - DNA, 25 bp, Homo sapien
ccatccaccatcaatgtgttctgca

SEQ ID NO: 2250599 - DNA, 25 bp, Homo sapien
tggcctgtgaccctgcgtctagtcc

SEQ ID NO: 2250600 - DNA, 25 bp, Homo sapien
accctgcgtctagtccctcttccat

SEQ ID NO: 2250601 - DNA, 25 bp, Homo sapien
ccgggagatcaacgctagcagagct

SEQ ID NO: 2250602 - DNA, 25 bp, Homo sapien
tagcagagctaaaatggccgatggt

SEQ ID NO: 2250603 - DNA, 25 bp, Homo sapien
ggagatcaacgctagcagagctaaa

SEQ ID NO: 2250604 - DNA, 25 bp, Homo sapien
gagtgagtccgggagatcaacgcta

SEQ ID NO: 2250605 - DNA, 25 bp, Homo sapien
gcagcatgggggtaattacctccca

SEQ ID NO: 2250606 - DNA, 25 bp, Homo sapien
aacagcagcatgggggtaattacct

SEQ ID NO: 2250607 - DNA, 25 bp, Homo sapien
agaagaagaatgagcaaaagggggg

SEQ ID NO: 2250608 - DNA, 25 bp, Homo sapien
cactatcacgaaaacagcagcatgg

SEQ ID NO: 2250609 - DNA, 25 bp, Homo sapien
tctttacaatgtgttattacacaca

SEQ ID NO: 2250610 - DNA, 25 bp, Homo sapien
tgttctttacaatgtgttattacac

SEQ ID NO: 2250611 - DNA, 25 bp, Homo sapien
gttctttacaatgtgttattacaca

SEQ ID NO: 2250612 - DNA, 25 bp, Homo sapien
tctgttctttacaatgtgttattac

SEQ ID NO: 2250613 - DNA, 25 bp, Homo sapien
atgtgcacttgcacacacgtgcaca

SEQ ID NO: 2250614 - DNA, 25 bp, Homo sapien
gtgcacttgcacacacgtgcacaca

SEQ ID NO: 2250615 - DNA, 25 bp, Homo sapien
tgtgcacttgcacacacgtgcacac

SEQ ID NO: 2250616 - DNA, 25 bp, Homo sapien
tgcacttgcacacacgtgcacacac

SEQ ID NO: 2250617 - DNA, 25 bp, Homo sapien
tacatgacccctagcaatcaaagtg

SEQ ID NO: 2250618 - DNA, 25 bp, Homo sapien
tctgtgagaccctaggataagcatg

SEQ ID NO: 2250619 - DNA, 25 bp, Homo sapien
cattaaccagaggtaaagccagggt

SEQ ID NO: 2250620 - DNA, 25 bp, Homo sapien
ggtgtcactcagaagcatccttgct

SEQ ID NO: 2250621 - DNA, 25 bp, Homo sapien
tgttctaagtatggccattgtgata

SEQ ID NO: 2250622 - DNA, 25 bp, Homo sapien
ctaagtatggccattgtgataagac

SEQ ID NO: 2250623 - DNA, 25 bp, Homo sapien
tctaagtatggccattgtgataaga

SEQ ID NO: 2250624 - DNA, 25 bp, Homo sapien
tcatgttctaagtatggccattgtg

SEQ ID NO: 2250625 - DNA, 25 bp, Homo sapien
gattcacacttaagtggaggtagag

SEQ ID NO: 2250626 - DNA, 25 bp, Homo sapien
tcccccagtgtaggcagcatcaggg

SEQ ID NO: 2250627 - DNA, 25 bp, Homo sapien
gcgattccacatcccccagtgtagg

SEQ ID NO: 2250628 - DNA, 25 bp, Homo sapien
aggtagagaggcaccagcgattcca

SEQ ID NO: 2250629 - DNA, 25 bp, Homo sapien
tcccaggaagacagttagtaaacta

SEQ ID NO: 2250630 - DNA, 25 bp, Homo sapien
caggaagacagttagtaaactaggt

SEQ ID NO: 2250631 - DNA, 25 bp, Homo sapien
tagtaaactaggtcctgaggataca

SEQ ID NO: 2250632 - DNA, 25 bp, Homo sapien
ttagtaaactaggtcctgaggatac

SEQ ID NO: 2250633 - DNA, 25 bp, Homo sapien
gtgagttcttactgaaaggtggtca

SEQ ID NO: 2250634 - DNA, 25 bp, Homo sapien
ggccaccacagaccagtattctgat

SEQ ID NO: 2250635 - DNA, 25 bp, Homo sapien
tgaatcattgcaggatggaatgctg

SEQ ID NO: 2250636 - DNA, 25 bp, Homo sapien
gaccatcccaccctagtcagtagaa

SEQ ID NO: 2250637 - DNA, 25 bp, Homo sapien
aaagtgagtctcacaacactgctgc

SEQ ID NO: 2250638 - DNA, 25 bp, Homo sapien
tacttatgcacataggcaaggtctg

SEQ ID NO: 2250639 - DNA, 25 bp, Homo sapien
caaggtctggaaagtaacatggaac

SEQ ID NO: 2250640 - DNA, 25 bp, Homo sapien
tctgcctggcacactatcttatgaa

SEQ ID NO: 2250641 - DNA, 25 bp, Homo sapien
tatgaacagtgcactaagcttggcc

SEQ ID NO: 2250642 - DNA, 25 bp, Homo sapien
aaggctacagcaacatctacccgct

SEQ ID NO: 2250643 - DNA, 25 bp, Homo sapien
gaagtagttgaccatgtttgaagtg

SEQ ID NO: 2250644 - DNA, 25 bp, Homo sapien
taatgtgtaagacctcaaaagggct

SEQ ID NO: 2250645 - DNA, 25 bp, Homo sapien
tgttcttttgctgatgggagaagag

SEQ ID NO: 2250646 - DNA, 25 bp, Homo sapien
ctttggctttgctcggaaacttgga

SEQ ID NO: 2250647 - DNA, 25 bp, Homo sapien
tgtctattacaccatagtgacagga

SEQ ID NO: 2250648 - DNA, 25 bp, Homo sapien
gaaacttggagacggaatttgtcta

SEQ ID NO: 2250649 - DNA, 25 bp, Homo sapien
tccactattaccagtgcaacagaag

SEQ ID NO: 2250650 - DNA, 25 bp, Homo sapien
gaaggccaataatacacctctactt

SEQ ID NO: 2250651 - DNA, 25 bp, Homo sapien
ccatgtatgcaggtagaaacaagca

SEQ ID NO: 2250652 - DNA, 25 bp, Homo sapien
gagaaaagagtatacagcactgtaa

SEQ ID NO: 2250653 - DNA, 25 bp, Homo sapien
cataaatattaacacacttaaaacg

SEQ ID NO: 2250654 - DNA, 25 bp, Homo sapien
tgcagcatcaacgacaacatactta

SEQ ID NO: 2250655 - DNA, 25 bp, Homo sapien
catacttatttggagtagtacacaa

SEQ ID NO: 2250656 - DNA, 25 bp, Homo sapien
acctgcagcatcaacgacaacatac

SEQ ID NO: 2250657 - DNA, 25 bp, Homo sapien
caacgacaacatacttatttggagt

SEQ ID NO: 2250658 - DNA, 25 bp, Homo sapien
ccagaaaatagagctaggagactca

SEQ ID NO: 2250659 - DNA, 25 bp, Homo sapien
cccagaaaatagagctaggagactc

SEQ ID NO: 2250660 - DNA, 25 bp, Homo sapien
gtgttgactgatcatctgcataaaa

SEQ ID NO: 2250661 - DNA, 25 bp, Homo sapien
ggattgtacagtgtcaacacttgct

SEQ ID NO: 2250662 - DNA, 25 bp, Homo sapien
gactgatcatctgcataaaatatga

SEQ ID NO: 2250663 - DNA, 25 bp, Homo sapien
caaactcatagggattgtacagtgt

SEQ ID NO: 2250664 - DNA, 25 bp, Homo sapien
acaggaagatttccttccactaact

SEQ ID NO: 2250665 - DNA, 25 bp, Homo sapien
ttccttccactaactctggttgtct

SEQ ID NO: 2250666 - DNA, 25 bp, Homo sapien
ccactaactctggttgtcttttttg

SEQ ID NO: 2250667 - DNA, 25 bp, Homo sapien
gaagatttccttccactaactctgg

SEQ ID NO: 2250668 - DNA, 25 bp, Homo sapien
tgtttttacagtctcaaatctattt

SEQ ID NO: 2250669 - DNA, 25 bp, Homo sapien
tcttagattcagttaaaaactccaa

SEQ ID NO: 2250670 - DNA, 25 bp, Homo sapien
taaaaactccaaagcattttggcaa

SEQ ID NO: 2250671 - DNA, 25 bp, Homo sapien
ctgaatcccccttgctgcagtttct

SEQ ID NO: 2250672 - DNA, 25 bp, Homo sapien
aggtaaaggatgcagtgacccgaga

SEQ ID NO: 2250673 - DNA, 25 bp, Homo sapien
ggaggtaaaggatgcagtgacccga

SEQ ID NO: 2250674 - DNA, 25 bp, Homo sapien
tgggaggtaaaggatgcagtgaccc

SEQ ID NO: 2250675 - DNA, 25 bp, Homo sapien
tgacccgagatcacactgctgcact

SEQ ID NO: 2250676 - DNA, 25 bp, Homo sapien
aaaggtggtatctctgatttgtgga

SEQ ID NO: 2250677 - DNA, 25 bp, Homo sapien
gaagagaacatccaaatttggcatc

SEQ ID NO: 2250678 - DNA, 25 bp, Homo sapien
tctaaaactctgtcgagatgagaat

SEQ ID NO: 2250679 - DNA, 25 bp, Homo sapien
ttcactccttaatcagggaaaattc

SEQ ID NO: 2250680 - DNA, 25 bp, Homo sapien
acgccgtctctattaaacatactaa

SEQ ID NO: 2250681 - DNA, 25 bp, Homo sapien
aagaaactgttcctgaaggccaggc

SEQ ID NO: 2250682 - DNA, 25 bp, Homo sapien
aaaagaaactgttcctgaaggccag

SEQ ID NO: 2250683 - DNA, 25 bp, Homo sapien
aaacgccgtctctattaaacatact

SEQ ID NO: 2250684 - DNA, 25 bp, Homo sapien
catgaatcacgaataggctatctcc

SEQ ID NO: 2250685 - DNA, 25 bp, Homo sapien
tgtgggctaaacagaataatttcga

SEQ ID NO: 2250686 - DNA, 25 bp, Homo sapien
ctctttgtgagttgaacatgtacac

SEQ ID NO: 2250687 - DNA, 25 bp, Homo sapien
ggttcataaatctgactgggaagtc

SEQ ID NO: 2250688 - DNA, 25 bp, Homo sapien
caaccatcaagatccgtgcagaggt

SEQ ID NO: 2250689 - DNA, 25 bp, Homo sapien
ggtgcaaccatcaagatccgtgcag

SEQ ID NO: 2250690 - DNA, 25 bp, Homo sapien
gctggtgcaaccatcaagatccgtg

SEQ ID NO: 2250691 - DNA, 25 bp, Homo sapien
agagcagctggtgcaaccatcaaga

SEQ ID NO: 2250692 - DNA, 25 bp, Homo sapien
tcgctccaaccctgccgatttcctt

SEQ ID NO: 2250693 - DNA, 25 bp, Homo sapien
tccttccagttgctcgctggggcaa

SEQ ID NO: 2250694 - DNA, 25 bp, Homo sapien
cagttgctcgctggggcaaccggct

SEQ ID NO: 2250695 - DNA, 25 bp, Homo sapien
gggacgcctcgctccaaccctgccg

SEQ ID NO: 2250696 - DNA, 25 bp, Homo sapien
tgctcctccgctcctttgtcagcgt

SEQ ID NO: 2250697 - DNA, 25 bp, Homo sapien
caacaccggcttcctcggaaagcag

SEQ ID NO: 2250698 - DNA, 25 bp, Homo sapien
tcggcaacaccggcttcctcggaaa

SEQ ID NO: 2250699 - DNA, 25 bp, Homo sapien
ggcaacaccggcttcctcggaaagc

SEQ ID NO: 2250700 - DNA, 25 bp, Homo sapien
gataccggaggactcaaatgccacc

SEQ ID NO: 2250701 - DNA, 25 bp, Homo sapien
ctgctgggataccggaggactcaaa

SEQ ID NO: 2250702 - DNA, 25 bp, Homo sapien
tgggataccggaggactcaaatgcc

SEQ ID NO: 2250703 - DNA, 25 bp, Homo sapien
taccggaggactcaaatgccacctc

SEQ ID NO: 2250704 - DNA, 25 bp, Homo sapien
taatcttctctatgttgttccattt

SEQ ID NO: 2250705 - DNA, 25 bp, Homo sapien
ctctatgttgttccatttttagtat

SEQ ID NO: 2250706 - DNA, 25 bp, Homo sapien
atgaatctgtttgtcatccttgtgc

SEQ ID NO: 2250707 - DNA, 25 bp, Homo sapien
atcttctctatgttgttccattttt

SEQ ID NO: 2250708 - DNA, 25 bp, Homo sapien
caagtggtaattcatacttggtgtc

SEQ ID NO: 2250709 - DNA, 25 bp, Homo sapien
caaaccctgatgagtgttgctattt

SEQ ID NO: 2250710 - DNA, 25 bp, Homo sapien
cctgtccggtaccaaaccctgatga

SEQ ID NO: 2250711 - DNA, 25 bp, Homo sapien
atacttggtgtctccacgctcttgg

SEQ ID NO: 2250712 - DNA, 25 bp, Homo sapien
tggaggctggaagtaaccacaggct

SEQ ID NO: 2250713 - DNA, 25 bp, Homo sapien
tgtactttacccctgggtgctgctt

SEQ ID NO: 2250714 - DNA, 25 bp, Homo sapien
gccgtggaggctggaagtaaccaca

SEQ ID NO: 2250715 - DNA, 25 bp, Homo sapien
cttccctctgggtctgccgtggagg

SEQ ID NO: 2250716 - DNA, 25 bp, Homo sapien
gctctattgtagaagggcccagatg

SEQ ID NO: 2250717 - DNA, 25 bp, Homo sapien
ttaccagaaggctctattgtagaag

SEQ ID NO: 2250718 - DNA, 25 bp, Homo sapien
cagaaggctctattgtagaagggcc

SEQ ID NO: 2250719 - DNA, 25 bp, Homo sapien
gaaggctctattgtagaagggccca

SEQ ID NO: 2250720 - DNA, 25 bp, Homo sapien
cagttctgtaggctgcccatttgca

SEQ ID NO: 2250721 - DNA, 25 bp, Homo sapien
agactgttggaaactgtgcggtgta

SEQ ID NO: 2250722 - DNA, 25 bp, Homo sapien
gtggccaatttgccatgaggaggtt

SEQ ID NO: 2250723 - DNA, 25 bp, Homo sapien
agtggccaagactgttggaaactgt

SEQ ID NO: 2250724 - DNA, 25 bp, Homo sapien
tgcgttttcagtaaggtctttttca

SEQ ID NO: 2250725 - DNA, 25 bp, Homo sapien
tttcagtaaggtctttttcagcttg

SEQ ID NO: 2250726 - DNA, 25 bp, Homo sapien
agtaaggtctttttcagcttgtcca

SEQ ID NO: 2250727 - DNA, 25 bp, Homo sapien
taaggtctttttcagcttgtccagg

SEQ ID NO: 2250728 - DNA, 25 bp, Homo sapien
ccaggtcatggcttctcctgcctgt

SEQ ID NO: 2250729 - DNA, 25 bp, Homo sapien
cctgtggctggatggctaattctgt

SEQ ID NO: 2250730 - DNA, 25 bp, Homo sapien
tgcttctgtggccaggtcatggctt

SEQ ID NO: 2250731 - DNA, 25 bp, Homo sapien
gctccatttgtctgtacaaatggca

SEQ ID NO: 2250732 - DNA, 25 bp, Homo sapien
tcagcaggactctttgcgccatcaa

SEQ ID NO: 2250733 - DNA, 25 bp, Homo sapien
acttcagcaggactctttgcgccat

SEQ ID NO: 2250734 - DNA, 25 bp, Homo sapien
caacttcagcaggactctttgcgcc

SEQ ID NO: 2250735 - DNA, 25 bp, Homo sapien
ttcagcaggactctttgcgccatca

SEQ ID NO: 2250736 - DNA, 25 bp, Homo sapien
gccatcctgactgtattgttcacta

SEQ ID NO: 2250737 - DNA, 25 bp, Homo sapien
tggtatttcttcttacgttcttctc

SEQ ID NO: 2250738 - DNA, 25 bp, Homo sapien
gggcagcgcagggcatgacacgcag

SEQ ID NO: 2250739 - DNA, 25 bp, Homo sapien
gtggccttttgaaggtattagaatc

SEQ ID NO: 2250740 - DNA, 25 bp, Homo sapien
tttgtaagagttgaggatggcccac

SEQ ID NO: 2250741 - DNA, 25 bp, Homo sapien
gattagacagaaatgatcaccccaa

SEQ ID NO: 2250742 - DNA, 25 bp, Homo sapien
cacacagagagcatacaccaaggta

SEQ ID NO: 2250743 - DNA, 25 bp, Homo sapien
tccttacatgaacccataggtggga

SEQ ID NO: 2250744 - DNA, 25 bp, Homo sapien
ccacctgcaggtatatatttagagc

SEQ ID NO: 2250745 - DNA, 25 bp, Homo sapien
tggcggctgcgcaagaacttctttt

SEQ ID NO: 2250746 - DNA, 25 bp, Homo sapien
tctggcctcggtgattctcaacgtc

SEQ ID NO: 2250747 - DNA, 25 bp, Homo sapien
tctgtcccacggtcggtgagtcagc

SEQ ID NO: 2250748 - DNA, 25 bp, Homo sapien
tcttatatgccagatcaaaggcgaa

SEQ ID NO: 2250749 - DNA, 25 bp, Homo sapien
gacctgctctctttcgtgattgctg

SEQ ID NO: 2250750 - DNA, 25 bp, Homo sapien
tgagcactactaacacgcttctgag

SEQ ID NO: 2250751 - DNA, 25 bp, Homo sapien
catgagctgaatatctctggcaact

SEQ ID NO: 2250752 - DNA, 25 bp, Homo sapien
gatcaattgctctaggccctggctc

SEQ ID NO: 2250753 - DNA, 25 bp, Homo sapien
cacacaggatcaattgctctaggcc

SEQ ID NO: 2250754 - DNA, 25 bp, Homo sapien
cctggtaaatactgagttaccatct

SEQ ID NO: 2250755 - DNA, 25 bp, Homo sapien
tgacacacaggatcaattgctctag

SEQ ID NO: 2250756 - DNA, 25 bp, Homo sapien
aaagctgctgaatcccacgttcaaa

SEQ ID NO: 2250757 - DNA, 25 bp, Homo sapien
ttcaaacaagcagtccacaagccac

SEQ ID NO: 2250758 - DNA, 25 bp, Homo sapien
cacgttcaaacaagcagtccacaag

SEQ ID NO: 2250759 - DNA, 25 bp, Homo sapien
tgaatcccacgttcaaacaagcagt

SEQ ID NO: 2250760 - DNA, 25 bp, Homo sapien
gaagctactgtgtcattcgaatggc

SEQ ID NO: 2250761 - DNA, 25 bp, Homo sapien
gaaaggcagctctattcatcatggc

SEQ ID NO: 2250762 - DNA, 25 bp, Homo sapien
tagtctacagccaatagtgacacgt

SEQ ID NO: 2250763 - DNA, 25 bp, Homo sapien
tgacacgtacacacatgccaatagt

SEQ ID NO: 2250764 - DNA, 25 bp, Homo sapien
gcccacattccgccccatggacacg

SEQ ID NO: 2250765 - DNA, 25 bp, Homo sapien
attccgccccatggacacgcctcca

SEQ ID NO: 2250766 - DNA, 25 bp, Homo sapien
gcccacattccgccccatggacagg

SEQ ID NO: 2250767 - DNA, 25 bp, Homo sapien
ccatggacacgcctccacaaccatg

SEQ ID NO: 2250768 - DNA, 25 bp, Homo sapien
aactccgactggaataactgctgct

SEQ ID NO: 2250769 - DNA, 25 bp, Homo sapien
gtttggcactttccacagatgcacc

SEQ ID NO: 2250770 - DNA, 25 bp, Homo sapien
gaataactgctgcttactcctctgc

SEQ ID NO: 2250771 - DNA, 25 bp, Homo sapien
tgagggagaaacaggtccgtttggc

SEQ ID NO: 2250772 - DNA, 25 bp, Homo sapien
atgcctgacgtttgccagtgggcca

SEQ ID NO: 2250773 - DNA, 25 bp, Homo sapien
tgtggatgtgcaatgttgtcctgtg

SEQ ID NO: 2250774 - DNA, 25 bp, Homo sapien
gtgggccatgtatgctcgtatgaca

SEQ ID NO: 2250775 - DNA, 25 bp, Homo sapien
ctcgtatgacatctgtggatgtgca

SEQ ID NO: 2250776 - DNA, 25 bp, Homo sapien
catctgttatctctacaactgcaaa

SEQ ID NO: 2250777 - DNA, 25 bp, Homo sapien
tgtgtcctctggacaattatattga

SEQ ID NO: 2250778 - DNA, 25 bp, Homo sapien
ctacaactgcaaaatcaccttgtgt

SEQ ID NO: 2250779 - DNA, 25 bp, Homo sapien
aatcaccttgtgtgtcctctggaca

SEQ ID NO: 2250780 - DNA, 25 bp, Homo sapien
ctcagtaatccctgaggaagcttgc

SEQ ID NO: 2250781 - DNA, 25 bp, Homo sapien
ttcacagcaggattaatgaggtatg

SEQ ID NO: 2250782 - DNA, 25 bp, Homo sapien
ggagatgcctcagtaatccctgagg

SEQ ID NO: 2250783 - DNA, 25 bp, Homo sapien
taatccctgaggaagcttgctggcc

SEQ ID NO: 2250784 - DNA, 25 bp, Homo sapien
ggtattaagacacagtcagcccagg

SEQ ID NO: 2250785 - DNA, 25 bp, Homo sapien
tcaagaattaaccagcaaaaaggct

SEQ ID NO: 2250786 - DNA, 25 bp, Homo sapien
gaagagcagcctattccagccaatt

SEQ ID NO: 2250787 - DNA, 25 bp, Homo sapien
tactctcagtgtttaccgtcctcag

SEQ ID NO: 2250788 - DNA, 25 bp, Homo sapien
caggctacctggtaacttgaggcca

SEQ ID NO: 2250789 - DNA, 25 bp, Homo sapien
caggttaccacaggactctatctta

SEQ ID NO: 2250790 - DNA, 25 bp, Homo sapien
gaccacatttacaggaccagggagg

SEQ ID NO: 2250791 - DNA, 25 bp, Homo sapien
tataatgcaggagtcaacatcagtc

SEQ ID NO: 2250792 - DNA, 25 bp, Homo sapien
cttttctccaggtagtataaaggag

SEQ ID NO: 2250793 - DNA, 25 bp, Homo sapien
gatacaagttattttgttgatcaaa

SEQ ID NO: 2250794 - DNA, 25 bp, Homo sapien
gcagaagatacaagttattttgttg

SEQ ID NO: 2250795 - DNA, 25 bp, Homo sapien
gtataaaggagttaagcagaagata

SEQ ID NO: 2250796 - DNA, 25 bp, Homo sapien
tgggtctcgctgaaggtaacaggtc

SEQ ID NO: 2250797 - DNA, 25 bp, Homo sapien
ccatgtggcaggagcacaaaaagtc

SEQ ID NO: 2250798 - DNA, 25 bp, Homo sapien
tggcaggagcacaaaaagtctctgg

SEQ ID NO: 2250799 - DNA, 25 bp, Homo sapien
aatgggtctcgctgaaggtaacagg

SEQ ID NO: 2250800 - DNA, 25 bp, Homo sapien
cggcggctgtcagtggtctgtcagt

SEQ ID NO: 2250801 - DNA, 25 bp, Homo sapien
cggctgtcagtggtctgtcagtgtg

SEQ ID NO: 2250802 - DNA, 25 bp, Homo sapien
tgtcagtggtctgtcagtgtgtaac

SEQ ID NO: 2250803 - DNA, 25 bp, Homo sapien
agcggcggctgtcagtggtctgtca

SEQ ID NO: 2250804 - DNA, 25 bp, Homo sapien
gctgagctggcacgagagggcggag

SEQ ID NO: 2250805 - DNA, 25 bp, Homo sapien
ggctgagctggcacgagagggcgga

SEQ ID NO: 2250806 - DNA, 25 bp, Homo sapien
gggacaggagcgcaggggacatcgt

SEQ ID NO: 2250807 - DNA, 25 bp, Homo sapien
tggaacaaaggcaagcactacgcgg

SEQ ID NO: 2250808 - DNA, 25 bp, Homo sapien
acaaaggcaagcactacgcgggagg

SEQ ID NO: 2250809 - DNA, 25 bp, Homo sapien
aggagcgcaggggacatcgtggcgg

SEQ ID NO: 2250810 - DNA, 25 bp, Homo sapien
ggcggccagtaacacagcggaccct

SEQ ID NO: 2250811 - DNA, 25 bp, Homo sapien
gcgaccctggcggcggccagtaaca

SEQ ID NO: 2250812 - DNA, 25 bp, Homo sapien
ggcgccggtggcgaccctggcggcg

SEQ ID NO: 2250813 - DNA, 25 bp, Homo sapien
ggagggcgccggtggcgaccctggc

SEQ ID NO: 2250814 - DNA, 25 bp, Homo sapien
cctcgtcctcctcccatccaaagac

SEQ ID NO: 2250815 - DNA, 25 bp, Homo sapien
tcctcgtcctcctcccatccaaaga

SEQ ID NO: 2250816 - DNA, 25 bp, Homo sapien
ccgcttcatctcagccaggaagccc

SEQ ID NO: 2250817 - DNA, 25 bp, Homo sapien
cttcttgatgtaggggatcacccac

SEQ ID NO: 2250818 - DNA, 25 bp, Homo sapien
aagccccggtaatcactgaggaggg

SEQ ID NO: 2250819 - DNA, 25 bp, Homo sapien
ccaggaagccccggtaatcactgag

SEQ ID NO: 2250820 - DNA, 25 bp, Homo sapien
tgaggcgggtgatgaggaacgtcac

SEQ ID NO: 2250821 - DNA, 25 bp, Homo sapien
gtgaggcgggtgatgaggaacgtca

SEQ ID NO: 2250822 - DNA, 25 bp, Homo sapien
ttctcgtccacgaacatgtaggagc

SEQ ID NO: 2250823 - DNA, 25 bp, Homo sapien
gttctcgtccacgaacatgtaggag

SEQ ID NO: 2250824 - DNA, 25 bp, Homo sapien
tgttctcgtccacgaacatgtagga

SEQ ID NO: 2250825 - DNA, 25 bp, Homo sapien
gtgttctcgtccacgaacatgtagg

SEQ ID NO: 2250826 - DNA, 25 bp, Homo sapien
ggaatcgggttcctccagcgacgcg

SEQ ID NO: 2250827 - DNA, 25 bp, Homo sapien
gggaatcgggttcctccagcgacgc

SEQ ID NO: 2250828 - DNA, 25 bp, Homo sapien
agggaatcgggttcctccagcgacg

SEQ ID NO: 2250829 - DNA, 25 bp, Homo sapien
tggagcccattgacgtccagcgaag

SEQ ID NO: 2250830 - DNA, 25 bp, Homo sapien
ttgacgtccagcgaagcgaggagca

SEQ ID NO: 2250831 - DNA, 25 bp, Homo sapien
ccgggtggagcccattgacgtccag

SEQ ID NO: 2250832 - DNA, 25 bp, Homo sapien
tggccttgccgatccggcctgcgac

SEQ ID NO: 2250833 - DNA, 25 bp, Homo sapien
tttgttccaggaatagcgctccagg

SEQ ID NO: 2250834 - DNA, 25 bp, Homo sapien
ctttgttccaggaatagcgctccag

SEQ ID NO: 2250835 - DNA, 25 bp, Homo sapien
gttccaggaatagcgctccaggctc

SEQ ID NO: 2250836 - DNA, 25 bp, Homo sapien
tgttccaggaatagcgctccaggct

SEQ ID NO: 2250837 - DNA, 25 bp, Homo sapien
tacatttggacgctgtcctgcgctc

SEQ ID NO: 2250838 - DNA, 25 bp, Homo sapien
ctgcgctccagctgcaagctgggct

SEQ ID NO: 2250839 - DNA, 25 bp, Homo sapien
gtcctgcgctccagctgcaagctgg

SEQ ID NO: 2250840 - DNA, 25 bp, Homo sapien
gtacatttggacgctgtcctgcgct

SEQ ID NO: 2250841 - DNA, 25 bp, Homo sapien
tctgtcaccttcagcgagacctatt

SEQ ID NO: 2250842 - DNA, 25 bp, Homo sapien
gttttgcccataacgcagtattctg

SEQ ID NO: 2250843 - DNA, 25 bp, Homo sapien
tgttcaacacagtaacccctgcatt

SEQ ID NO: 2250844 - DNA, 25 bp, Homo sapien
gctctgctctaatacactacctgga

SEQ ID NO: 2250845 - DNA, 25 bp, Homo sapien
aatatgtgttatttttccagagcat

SEQ ID NO: 2250846 - DNA, 25 bp, Homo sapien
tgaggaataaatcacaagagtgttt

SEQ ID NO: 2250847 - DNA, 25 bp, Homo sapien
ccagagcatacgaatgaggaataaa

SEQ ID NO: 2250848 - DNA, 25 bp, Homo sapien
tttttccagagcatacgaatgagga

SEQ ID NO: 2250849 - DNA, 25 bp, Homo sapien
gccttccactgtgatcctaagtttt

SEQ ID NO: 2250850 - DNA, 25 bp, Homo sapien
gtgagtcaatttaactgtgagtcaa

SEQ ID NO: 2250851 - DNA, 25 bp, Homo sapien
aactgtgagtcaatttaactgtgag

SEQ ID NO: 2250852 - DNA, 25 bp, Homo sapien
ccttccactgtgatcctaagttttc

SEQ ID NO: 2250853 - DNA, 25 bp, Homo sapien
caactttagatatcccgtgggatca

SEQ ID NO: 2250854 - DNA, 25 bp, Homo sapien
taatacttggtgttagcggtggtca

SEQ ID NO: 2250855 - DNA, 25 bp, Homo sapien
gaagtactgataacctgctatgtgg

SEQ ID NO: 2250856 - DNA, 25 bp, Homo sapien
tgccaggtggctagaaatgggaact

SEQ ID NO: 2250857 - DNA, 25 bp, Homo sapien
aacaggattctaggcaaaactaact

SEQ ID NO: 2250858 - DNA, 25 bp, Homo sapien
gattcgatttggttgccaggcacac

SEQ ID NO: 2250859 - DNA, 25 bp, Homo sapien
gaagaaaacaggattctaggcaaaa

SEQ ID NO: 2250860 - DNA, 25 bp, Homo sapien
ggagcagggcttactgtgttgaaca

SEQ ID NO: 2250861 - DNA, 25 bp, Homo sapien
gccagctgtctggatcactgtccag

SEQ ID NO: 2250862 - DNA, 25 bp, Homo sapien
ccacagtctgttggtgagatgcggt

SEQ ID NO: 2250863 - DNA, 25 bp, Homo sapien
tggtgagatgcggtggatggcgatg

SEQ ID NO: 2250864 - DNA, 25 bp, Homo sapien
gatggcgatggcagtggtagcgtag

SEQ ID NO: 2250865 - DNA, 25 bp, Homo sapien
cactaggagccacagtctgttggtg

SEQ ID NO: 2250866 - DNA, 25 bp, Homo sapien
ttggctggcagtctggaggagtgga

SEQ ID NO: 2250867 - DNA, 25 bp, Homo sapien
ggctggcagtctggaggagtggagg

SEQ ID NO: 2250868 - DNA, 25 bp, Homo sapien
tggctggcagtctggaggagtggag

SEQ ID NO: 2250869 - DNA, 25 bp, Homo sapien
ctgaagtgcaggacagcgtccaaat

SEQ ID NO: 2250870 - DNA, 25 bp, Homo sapien
tgaagtgcaggacagcgtccaaatg

SEQ ID NO: 2250871 - DNA, 25 bp, Homo sapien
aagtgcaggacagcgtccaaatgtg

SEQ ID NO: 2250872 - DNA, 25 bp, Homo sapien
tgcaggacagcgtccaaatgtgcat

SEQ ID NO: 2250873 - DNA, 25 bp, Homo sapien
cgctctagagtgcggcccaggagct

SEQ ID NO: 2250874 - DNA, 25 bp, Homo sapien
gggagggcgcctgtggagaccctag

SEQ ID NO: 2250875 - DNA, 25 bp, Homo sapien
agaccctagcggtggccactggcac

SEQ ID NO: 2250876 - DNA, 25 bp, Homo sapien
gcgcgctctagagtgcggcccagga

SEQ ID NO: 2250877 - DNA, 25 bp, Homo sapien
cctcgtcctcctcccatccaaagac

SEQ ID NO: 2250878 - DNA, 25 bp, Homo sapien
tcctcgtcctcctcccatccaaaga

SEQ ID NO: 2250879 - DNA, 25 bp, Homo sapien
tgaggcgggtgatgaggaacgtcac

SEQ ID NO: 2250880 - DNA, 25 bp, Homo sapien
gtgaggcgggtgatgaggaacgtca

SEQ ID NO: 2250881 - DNA, 25 bp, Homo sapien
tgatgtaggggatcacccactgcag

SEQ ID NO: 2250882 - DNA, 25 bp, Homo sapien
ttctcgtccacgaacatgtaggagc

SEQ ID NO: 2250883 - DNA, 25 bp, Homo sapien
gttctcgtccacgaacatgtaggag

SEQ ID NO: 2250884 - DNA, 25 bp, Homo sapien
tgttctcgtccacgaacatgtagga

SEQ ID NO: 2250885 - DNA, 25 bp, Homo sapien
gtgttctcgtccacgaacatgtagg

SEQ ID NO: 2250886 - DNA, 25 bp, Homo sapien
gggaatcgggttcctccagcgacgc

SEQ ID NO: 2250887 - DNA, 25 bp, Homo sapien
ggaatcgggttcctccagcgacgcg

SEQ ID NO: 2250888 - DNA, 25 bp, Homo sapien
agggaatcgggttcctccagcgacg

SEQ ID NO: 2250889 - DNA, 25 bp, Homo sapien
tccgcggagtttcgctgggttgcgt

SEQ ID NO: 2250890 - DNA, 25 bp, Homo sapien
ggtcagcgctaaggcgtcgccggaa

SEQ ID NO: 2250891 - DNA, 25 bp, Homo sapien
gcgcgctccgcggagtttcgctggg

SEQ ID NO: 2250892 - DNA, 25 bp, Homo sapien
tgcgtgggggtcagcgctaaggcgt

SEQ ID NO: 2250893 - DNA, 25 bp, Homo sapien
catggcctccttagtggatttagca

SEQ ID NO: 2250894 - DNA, 25 bp, Homo sapien
atggcctccttagtggatttagcat

SEQ ID NO: 2250895 - DNA, 25 bp, Homo sapien
tggcctccttagtggatttagcatt

SEQ ID NO: 2250896 - DNA, 25 bp, Homo sapien
ccatggcctccttagtggatttagc

SEQ ID NO: 2250897 - DNA, 25 bp, Homo sapien
tgtagtgtcctcagacagaccctga

SEQ ID NO: 2250898 - DNA, 25 bp, Homo sapien
cctggttggtgactatcctgacatg

SEQ ID NO: 2250899 - DNA, 25 bp, Homo sapien
tggtgactatcctgacatgaacaga

SEQ ID NO: 2250900 - DNA, 25 bp, Homo sapien
tcttctgtagtgtcctcagacagac

SEQ ID NO: 2250901 - DNA, 25 bp, Homo sapien
tgtcttaaattcaatgtaggacatc

SEQ ID NO: 2250902 - DNA, 25 bp, Homo sapien
cttaaattcaatgtaggacatccct

SEQ ID NO: 2250903 - DNA, 25 bp, Homo sapien
aattcaatgtaggacatccctttgc

SEQ ID NO: 2250904 - DNA, 25 bp, Homo sapien
ctccatagagtcttcaaacacttct

SEQ ID NO: 2250905 - DNA, 25 bp, Homo sapien
ttcaaccttgttgcttttgtcggag

SEQ ID NO: 2250906 - DNA, 25 bp, Homo sapien
gagttgtgtcttattgccttttccc

SEQ ID NO: 2250907 - DNA, 25 bp, Homo sapien
tgctttgcccagtgcgactatcttc

SEQ ID NO: 2250908 - DNA, 25 bp, Homo sapien
gacaggtgtggaaacttcaaccttg

SEQ ID NO: 2250909 - DNA, 25 bp, Homo sapien
ctgaggtataataagctcattttcg

SEQ ID NO: 2250910 - DNA, 25 bp, Homo sapien
gctcattttcgctgctatctttatc

SEQ ID NO: 2250911 - DNA, 25 bp, Homo sapien
taataagctcattttcgctgctatc

SEQ ID NO: 2250912 - DNA, 25 bp, Homo sapien
ggtataataagctcattttcgctgc

SEQ ID NO: 2250913 - DNA, 25 bp, Homo sapien
tctatcttctttggggtataagcca

SEQ ID NO: 2250914 - DNA, 25 bp, Homo sapien
cctcatcttcactatcttcttctat

SEQ ID NO: 2250915 - DNA, 25 bp, Homo sapien
cttctatcttctttggggtataagc

SEQ ID NO: 2250916 - DNA, 25 bp, Homo sapien
atcttcactatcttcttctatcttc

SEQ ID NO: 2250917 - DNA, 25 bp, Homo sapien
caaatccttcattgtgggattattt

SEQ ID NO: 2250918 - DNA, 25 bp, Homo sapien
tcatccaccttgtaatatgtatcaa

SEQ ID NO: 2250919 - DNA, 25 bp, Homo sapien
tccctaaaaggagaccctgtactca

SEQ ID NO: 2250920 - DNA, 25 bp, Homo sapien
aaggagaccctgtactcattaagca

SEQ ID NO: 2250921 - DNA, 25 bp, Homo sapien
aagttgagctgtgcgtggtgactca

SEQ ID NO: 2250922 - DNA, 25 bp, Homo sapien
agttgagctgtgcgtggtgactcac

SEQ ID NO: 2250923 - DNA, 25 bp, Homo sapien
gttgagctgtgcgtggtgactcaca

SEQ ID NO: 2250924 - DNA, 25 bp, Homo sapien
tcaatctcttaggtcccaatcaatc

SEQ ID NO: 2250925 - DNA, 25 bp, Homo sapien
caatctcttaggtcccaatcaatct

SEQ ID NO: 2250926 - DNA, 25 bp, Homo sapien
tattccattccaccattactccagc

SEQ ID NO: 2250927 - DNA, 25 bp, Homo sapien
gcacacctggatttcttatctgcct

SEQ ID NO: 2250928 - DNA, 25 bp, Homo sapien
cagggtcatcttccacctttgctat

SEQ ID NO: 2250929 - DNA, 25 bp, Homo sapien
gactgtgttgcccagatcttggctc

SEQ ID NO: 2250930 - DNA, 25 bp, Homo sapien
catggcaggctctcatcggatgtcc

SEQ ID NO: 2250931 - DNA, 25 bp, Homo sapien
taagtggaagagctggattcacggc

SEQ ID NO: 2250932 - DNA, 25 bp, Homo sapien
ggtcccatttgagcagaaccggcct

SEQ ID NO: 2250933 - DNA, 25 bp, Homo sapien
gtttgcctggcaccatacagtagta

SEQ ID NO: 2250934 - DNA, 25 bp, Homo sapien
tcatcccccatcttggtttgccaag

SEQ ID NO: 2250935 - DNA, 25 bp, Homo sapien
tgccaagtcacgtgatccctggagt

SEQ ID NO: 2250936 - DNA, 25 bp, Homo sapien
ggatgggaccatcagggactgaaga

SEQ ID NO: 2250937 - DNA, 25 bp, Homo sapien
tcttggtttgccaagtcacgtgatc

SEQ ID NO: 2250938 - DNA, 25 bp, Homo sapien
ttctccagggttctgcagtaacctg

SEQ ID NO: 2250939 - DNA, 25 bp, Homo sapien
gacagagtttgcctccaaggctggg

SEQ ID NO: 2250940 - DNA, 25 bp, Homo sapien
ttttgcctgcttgccaacccttaca

SEQ ID NO: 2250941 - DNA, 25 bp, Homo sapien
gctctctcctgtgggagccactaag

SEQ ID NO: 2250942 - DNA, 25 bp, Homo sapien
cagcctctgaacaggaaacacggtc

SEQ ID NO: 2250943 - DNA, 25 bp, Homo sapien
tgaacaggaaacacggtccctgcca

SEQ ID NO: 2250944 - DNA, 25 bp, Homo sapien
gtcggttctcagcacagcctctgaa

SEQ ID NO: 2250945 - DNA, 25 bp, Homo sapien
tcagcacagcctctgaacaggaaac

SEQ ID NO: 2250946 - DNA, 25 bp, Homo sapien
tcattccggtcggtgtctagaagct

SEQ ID NO: 2250947 - DNA, 25 bp, Homo sapien
cattccggtcggtgtctagaagctc

SEQ ID NO: 2250948 - DNA, 25 bp, Homo sapien
tccggtcggtgtctagaagctccac

SEQ ID NO: 2250949 - DNA, 25 bp, Homo sapien
ggtcggtgtctagaagctccaccgc

SEQ ID NO: 2250950 - DNA, 25 bp, Homo sapien
gttccctgcagtcgggggtctctga

SEQ ID NO: 2250951 - DNA, 25 bp, Homo sapien
ctgcagctccgacacacatttctcc

SEQ ID NO: 2250952 - DNA, 25 bp, Homo sapien
cacatgcaatcagcaaagaactttc

SEQ ID NO: 2250953 - DNA, 25 bp, Homo sapien
agagtcccaggatgagccccttgca

SEQ ID NO: 2250954 - DNA, 25 bp, Homo sapien
gtggttggatcactctgtccctgga

SEQ ID NO: 2250955 - DNA, 25 bp, Homo sapien
ccagtggcctgctgaggagggtacg

SEQ ID NO: 2250956 - DNA, 25 bp, Homo sapien
cccaggaactgagaatgtggccctc

SEQ ID NO: 2250957 - DNA, 25 bp, Homo sapien
ggtacgtggtaggtggttggatcac

SEQ ID NO: 2250958 - DNA, 25 bp, Homo sapien
gcattgtacaccagttagcagcaca

SEQ ID NO: 2250959 - DNA, 25 bp, Homo sapien
caatccaagccgtgaggatgagatt

SEQ ID NO: 2250960 - DNA, 25 bp, Homo sapien
cagtgcaagagatgcggaaatgggg

SEQ ID NO: 2250961 - DNA, 25 bp, Homo sapien
tgagcattgtacaccagttagcagc

SEQ ID NO: 2250962 - DNA, 25 bp, Homo sapien
gatcttctgtactgctccaaagaaa

SEQ ID NO: 2250963 - DNA, 25 bp, Homo sapien
tctttcctgtgatcttctgtactgc

SEQ ID NO: 2250964 - DNA, 25 bp, Homo sapien
ccaaagaaagcgagatccccagatt

SEQ ID NO: 2250965 - DNA, 25 bp, Homo sapien
cctaggagccctatgcttccctctt

SEQ ID NO: 2250966 - DNA, 25 bp, Homo sapien
gtgccccagggtagggatgagactc

SEQ ID NO: 2250967 - DNA, 25 bp, Homo sapien
tcagaggtgccccagggtagggatg

SEQ ID NO: 2250968 - DNA, 25 bp, Homo sapien
ccccagggtagggatgagactcttg

SEQ ID NO: 2250969 - DNA, 25 bp, Homo sapien
cagaggtgccccagggtagggatga

SEQ ID NO: 2250970 - DNA, 25 bp, Homo sapien
ggacggtaggaatgcgtctctccca

SEQ ID NO: 2250971 - DNA, 25 bp, Homo sapien
agcagggagagaccagtcctctggc

SEQ ID NO: 2250972 - DNA, 25 bp, Homo sapien
aatgcaaagcttgcagggtgccctc

SEQ ID NO: 2250973 - DNA, 25 bp, Homo sapien
taggaatgcgtctctcccactcttc

SEQ ID NO: 2250974 - DNA, 25 bp, Homo sapien
cattccccaggtttcagtggacacc

SEQ ID NO: 2250975 - DNA, 25 bp, Homo sapien
tccccaggtttcagtggacaccctg

SEQ ID NO: 2250976 - DNA, 25 bp, Homo sapien
tccattccccaggtttcagtggaca

SEQ ID NO: 2250977 - DNA, 25 bp, Homo sapien
cttccattccccaggtttcagtgga

SEQ ID NO: 2250978 - DNA, 25 bp, Homo sapien
caaggcgccccgacctctgcagggc

SEQ ID NO: 2250979 - DNA, 25 bp, Homo sapien
agctcttcgggctggtttgctccgg

SEQ ID NO: 2250980 - DNA, 25 bp, Homo sapien
tgccttccatatttccccccaactg

SEQ ID NO: 2250981 - DNA, 25 bp, Homo sapien
ggtttgctccggtgccttccatatt

SEQ ID NO: 2250982 - DNA, 25 bp, Homo sapien
ttttgccaatgtgaggcaacaggta

SEQ ID NO: 2250983 - DNA, 25 bp, Homo sapien
aggcaacaggtagtccgagctcagg

SEQ ID NO: 2250984 - DNA, 25 bp, Homo sapien
caggtagtccgagctcaggtagttt

SEQ ID NO: 2250985 - DNA, 25 bp, Homo sapien
tttgccaatgtgaggcaacaggtag

SEQ ID NO: 2250986 - DNA, 25 bp, Homo sapien
ccaattgtaggggcctgttcagtgc

SEQ ID NO: 2250987 - DNA, 25 bp, Homo sapien
gcccaattgtaggggcctgttcagt

SEQ ID NO: 2250988 - DNA, 25 bp, Homo sapien
aattgtaggggcctgttcagtgcat

SEQ ID NO: 2250989 - DNA, 25 bp, Homo sapien
ttgtaggggcctgttcagtgcattt

SEQ ID NO: 2250990 - DNA, 25 bp, Homo sapien
ggcggcgtaggtctagagtccaggg

SEQ ID NO: 2250991 - DNA, 25 bp, Homo sapien
gaaccgccaagccagacagggctgc

SEQ ID NO: 2250992 - DNA, 25 bp, Homo sapien
gccgccgagcgcgacagccgaaccg

SEQ ID NO: 2250993 - DNA, 25 bp, Homo sapien
ccgccgaccgatcgacccgcaagag

SEQ ID NO: 2250994 - DNA, 25 bp, Homo sapien
ccgagcgcgacagccgaaccgccaa

SEQ ID NO: 2250995 - DNA, 25 bp, Homo sapien
cagggatcgattgctgtgacactgt

SEQ ID NO: 2250996 - DNA, 25 bp, Homo sapien
gagcggattgaagggcggagctgcc

SEQ ID NO: 2250997 - DNA, 25 bp, Homo sapien
agctgccagggatcgattgctgtga

SEQ ID NO: 2250998 - DNA, 25 bp, Homo sapien
tttcgggcgcctcccaaggcaggag

SEQ ID NO: 2250999 - DNA, 25 bp, Homo sapien
ggacagtctggaccgctaagctgat

SEQ ID NO: 2251000 - DNA, 25 bp, Homo sapien
ggaggacagtctggaccgctaagct

SEQ ID NO: 2251001 - DNA, 25 bp, Homo sapien
gaggacagtctggaccgctaagctg

SEQ ID NO: 2251002 - DNA, 25 bp, Homo sapien
gacagtctggaccgctaagctgatt

SEQ ID NO: 2251003 - DNA, 25 bp, Homo sapien
catagtgcagtaattctgcgctaaa

SEQ ID NO: 2251004 - DNA, 25 bp, Homo sapien
atttctctttaatgcgcatagtgca

SEQ ID NO: 2251005 - DNA, 25 bp, Homo sapien
tctgcgctaaagagtgccaccaaac

SEQ ID NO: 2251006 - DNA, 25 bp, Homo sapien
ctctttaatgcgcatagtgcagtaa

SEQ ID NO: 2251007 - DNA, 25 bp, Homo sapien
catacaatgttgtctcgggttttca

SEQ ID NO: 2251008 - DNA, 25 bp, Homo sapien
tcagcagtcttcttgatccatacaa

SEQ ID NO: 2251009 - DNA, 25 bp, Homo sapien
tatttgctggtcacgtatatctctg

SEQ ID NO: 2251010 - DNA, 25 bp, Homo sapien
tgtgttggcgaatttccccgttgtc

SEQ ID NO: 2251011 - DNA, 25 bp, Homo sapien
tcagtttttacagactgaatttcct

SEQ ID NO: 2251012 - DNA, 25 bp, Homo sapien
cctgtttgtagccagctctagttgt

SEQ ID NO: 2251013 - DNA, 25 bp, Homo sapien
tagccagctctagttgtcaccttgt

SEQ ID NO: 2251014 - DNA, 25 bp, Homo sapien
atttcctgtttgtagccagctctag

SEQ ID NO: 2251015 - DNA, 25 bp, Homo sapien
gggaccaaaaattgttgtagcctca

SEQ ID NO: 2251016 - DNA, 25 bp, Homo sapien
ggaccaaaaattgttgtagcctcat

SEQ ID NO: 2251017 - DNA, 25 bp, Homo sapien
caagttctctaggtgaacactgagt

SEQ ID NO: 2251018 - DNA, 25 bp, Homo sapien
aaacaaaagtcaagttctctaggtg

SEQ ID NO: 2251019 - DNA, 25 bp, Homo sapien
ctggaaacaaaagtcaagttctcta

SEQ ID NO: 2251020 - DNA, 25 bp, Homo sapien
aaagtcaagttctctaggtgaacac

SEQ ID NO: 2251021 - DNA, 25 bp, Homo sapien
gtttaaactcggcacagcctccaat

SEQ ID NO: 2251022 - DNA, 25 bp, Homo sapien
ctctctggtctccaacccacccaga

SEQ ID NO: 2251023 - DNA, 25 bp, Homo sapien
cacccagacttccagtgtgagtaga

SEQ ID NO: 2251024 - DNA, 25 bp, Homo sapien
tttcctcgtttaaactcggcacagc

SEQ ID NO: 2251025 - DNA, 25 bp, Homo sapien
tttaatgactcaaacatgggaggag

SEQ ID NO: 2251026 - DNA, 25 bp, Homo sapien
tgggcaggcttcagcatgtaagcca

SEQ ID NO: 2251027 - DNA, 25 bp, Homo sapien
aggcttcagcatgtaagccacatga

SEQ ID NO: 2251028 - DNA, 25 bp, Homo sapien
tatgggcaggcttcagcatgtaagc

SEQ ID NO: 2251029 - DNA, 25 bp, Homo sapien
ggcaggcttcagcatgtaagccaca

SEQ ID NO: 2251030 - DNA, 25 bp, Homo sapien
gagttgctttatgacagcatccaca

SEQ ID NO: 2251031 - DNA, 25 bp, Homo sapien
ccctagagttgctttatgacagcat

SEQ ID NO: 2251032 - DNA, 25 bp, Homo sapien
caaggccatgtccaccctagagttg

SEQ ID NO: 2251033 - DNA, 25 bp, Homo sapien
aggccatgtccaccctagagttgct

SEQ ID NO: 2251034 - DNA, 25 bp, Homo sapien
ccatcttgacaggtcgatgtcactt

SEQ ID NO: 2251035 - DNA, 25 bp, Homo sapien
ttgatgttcagtgcgggctccctgg

SEQ ID NO: 2251036 - DNA, 25 bp, Homo sapien
cctgggactgcctttagggacttct

SEQ ID NO: 2251037 - DNA, 25 bp, Homo sapien
tcttgcgtttgaaggatttgtctga

SEQ ID NO: 2251038 - DNA, 25 bp, Homo sapien
agtaaaacagcacaaccgaggaagt

SEQ ID NO: 2251039 - DNA, 25 bp, Homo sapien
actccattattcatgttatgcagag

SEQ ID NO: 2251040 - DNA, 25 bp, Homo sapien
caaagttcagtactttacatttgca

SEQ ID NO: 2251041 - DNA, 25 bp, Homo sapien
ctttggtaaatccatccatgacaaa

SEQ ID NO: 2251042 - DNA, 25 bp, Homo sapien
tccattattcatgttatgcagagta

SEQ ID NO: 2251043 - DNA, 25 bp, Homo sapien
taacagcttggcactccctctcttt

SEQ ID NO: 2251044 - DNA, 25 bp, Homo sapien
aacagtaacagcttggcactccctc

SEQ ID NO: 2251045 - DNA, 25 bp, Homo sapien
tgggccagagggtaaacagtaacag

SEQ ID NO: 2251046 - DNA, 25 bp, Homo sapien
cagggcctgattggttcagcaccaa

SEQ ID NO: 2251047 - DNA, 25 bp, Homo sapien
cccatagcagctggaactttattca

SEQ ID NO: 2251048 - DNA, 25 bp, Homo sapien
ctcccatagcagctggaactttatt

SEQ ID NO: 2251049 - DNA, 25 bp, Homo sapien
tcccatagcagctggaactttattc

SEQ ID NO: 2251050 - DNA, 25 bp, Homo sapien
tcaaaaattgtccagcatttgatcc

SEQ ID NO: 2251051 - DNA, 25 bp, Homo sapien
tcttcaaaaattgtccagcatttga

SEQ ID NO: 2251052 - DNA, 25 bp, Homo sapien
catttgatccaaccacacgtgttct

SEQ ID NO: 2251053 - DNA, 25 bp, Homo sapien
ctcttcaaaaattgtccagcatttg

SEQ ID NO: 2251054 - DNA, 25 bp, Homo sapien
gcttggtgcatcatatggtctgctc

SEQ ID NO: 2251055 - DNA, 25 bp, Homo sapien
tgaagcttttagagcagtgcctaca

SEQ ID NO: 2251056 - DNA, 25 bp, Homo sapien
gatctctgtctgtagcttgtcccgc

SEQ ID NO: 2251057 - DNA, 25 bp, Homo sapien
tctcccacgtatagattcttaagcg

SEQ ID NO: 2251058 - DNA, 25 bp, Homo sapien
cacacgtgaactggctggtgccgat

SEQ ID NO: 2251059 - DNA, 25 bp, Homo sapien
tgttgaagtgcctagaaagtagctt

SEQ ID NO: 2251060 - DNA, 25 bp, Homo sapien
tcagggcacttgtgaggcagctctc

SEQ ID NO: 2251061 - DNA, 25 bp, Homo sapien
taacggttggacctatgagggaatc

SEQ ID NO: 2251062 - DNA, 25 bp, Homo sapien
aggtgggcaagtgttcactgaacgc

SEQ ID NO: 2251063 - DNA, 25 bp, Homo sapien
tgacacgacgtctgtggactgtcag

SEQ ID NO: 2251064 - DNA, 25 bp, Homo sapien
aagccccgaagagcagctactgggt

SEQ ID NO: 2251065 - DNA, 25 bp, Homo sapien
ccaagccccgaagagcagctactgg

SEQ ID NO: 2251066 - DNA, 25 bp, Homo sapien
gcagctactgggtgacacgacgtct

SEQ ID NO: 2251067 - DNA, 25 bp, Homo sapien
ttcaggaaacactccccagggagag

SEQ ID NO: 2251068 - DNA, 25 bp, Homo sapien
cttcattcaggaaacactccccagg

SEQ ID NO: 2251069 - DNA, 25 bp, Homo sapien
cattcaggaaacactccccagggag

SEQ ID NO: 2251070 - DNA, 25 bp, Homo sapien
agtgcagacacccatccttctgttt

SEQ ID NO: 2251071 - DNA, 25 bp, Homo sapien
catgggaccatgctttgactcagag

SEQ ID NO: 2251072 - DNA, 25 bp, Homo sapien
taaaccctgtcaaaaccatgaagag

SEQ ID NO: 2251073 - DNA, 25 bp, Homo sapien
gagactcagaaaactatgggctaat

SEQ ID NO: 2251074 - DNA, 25 bp, Homo sapien
ccccactgctgtaggactgctgtaa

SEQ ID NO: 2251075 - DNA, 25 bp, Homo sapien
tgtgtcactctcctagtggatgacc

SEQ ID NO: 2251076 - DNA, 25 bp, Homo sapien
tttcactgaggtcttgtgcaccaag

SEQ ID NO: 2251077 - DNA, 25 bp, Homo sapien
caccaaggtcttgtgtctctctata

SEQ ID NO: 2251078 - DNA, 25 bp, Homo sapien
gtggatgacccataagacaccccgg

SEQ ID NO: 2251079 - DNA, 25 bp, Homo sapien
agtgcttggtgatgctttaatgaca

SEQ ID NO: 2251080 - DNA, 25 bp, Homo sapien
tctgctcattgagtctgccaggcac

SEQ ID NO: 2251081 - DNA, 25 bp, Homo sapien
gaaccacaggtaagtatcattgctg

SEQ ID NO: 2251082 - DNA, 25 bp, Homo sapien
cattcagtcattgaacttaataaca

SEQ ID NO: 2251083 - DNA, 25 bp, Homo sapien
tacaggttgtacaggcagcataacg

SEQ ID NO: 2251084 - DNA, 25 bp, Homo sapien
caaaactgaagtcaaattgtaactt

SEQ ID NO: 2251085 - DNA, 25 bp, Homo sapien
caacaaacaccgcaagttatgtggg

SEQ ID NO: 2251086 - DNA, 25 bp, Homo sapien
tgaaagaggctatggaacaatacag

SEQ ID NO: 2251087 - DNA, 25 bp, Homo sapien
cccaggcctccgtcatcctggaatc

SEQ ID NO: 2251088 - DNA, 25 bp, Homo sapien
tccgtcatcctggaatccgctgctg

SEQ ID NO: 2251089 - DNA, 25 bp, Homo sapien
aatgctttggctccgacgttccctt

SEQ ID NO: 2251090 - DNA, 25 bp, Homo sapien
taaatgctttggctccgacgttccc

SEQ ID NO: 2251091 - DNA, 25 bp, Homo sapien
ccagtgtctcaattagatttgccag

SEQ ID NO: 2251092 - DNA, 25 bp, Homo sapien
tcaattagatttgccagaaaagtca

SEQ ID NO: 2251093 - DNA, 25 bp, Homo sapien
gtgtctcaattagatttgccagaaa

SEQ ID NO: 2251094 - DNA, 25 bp, Homo sapien
gtctcaattagatttgccagaaaag

SEQ ID NO: 2251095 - DNA, 25 bp, Homo sapien
ccatttcttccatgtacgctagtaa

SEQ ID NO: 2251096 - DNA, 25 bp, Homo sapien
gggtgatagaaatcgctctccaaat

SEQ ID NO: 2251097 - DNA, 25 bp, Homo sapien
ttcttccatgtacgctagtaatgca

SEQ ID NO: 2251098 - DNA, 25 bp, Homo sapien
tagaaatcgctctccaaataaagca

SEQ ID NO: 2251099 - DNA, 25 bp, Homo sapien
ccttgatgtttgagatgcctggctc

SEQ ID NO: 2251100 - DNA, 25 bp, Homo sapien
tcttccgtatgaatacaacggatgg

SEQ ID NO: 2251101 - DNA, 25 bp, Homo sapien
acaacggatgggcttcacagaagtt

SEQ ID NO: 2251102 - DNA, 25 bp, Homo sapien
ggaatattcaacttctaacaagtca

SEQ ID NO: 2251103 - DNA, 25 bp, Homo sapien
tccaattaaaactctggttcctgag

SEQ ID NO: 2251104 - DNA, 25 bp, Homo sapien
gttcctgagtctgagggtccagcac

SEQ ID NO: 2251105 - DNA, 25 bp, Homo sapien
cttcagaaacaatggctatggaaaa

SEQ ID NO: 2251106 - DNA, 25 bp, Homo sapien
taaagatggcgaggcacaacatcca

SEQ ID NO: 2251107 - DNA, 25 bp, Homo sapien
tgtgacaactccctgcacagttgtc

SEQ ID NO: 2251108 - DNA, 25 bp, Homo sapien
gaaacttgtgacaactccctgcaca

SEQ ID NO: 2251109 - DNA, 25 bp, Homo sapien
cacagaaacttgtgacaactccctg

SEQ ID NO: 2251110 - DNA, 25 bp, Homo sapien
cttgtgacaactccctgcacagttg

SEQ ID NO: 2251111 - DNA, 25 bp, Homo sapien
cctgtcgctctgcagggtcggccgt

SEQ ID NO: 2251112 - DNA, 25 bp, Homo sapien
aagcaagtctcagaagcctgagcat

SEQ ID NO: 2251113 - DNA, 25 bp, Homo sapien
tgtcgctctgcagggtcggccgtcc

SEQ ID NO: 2251114 - DNA, 25 bp, Homo sapien
caaagcaagtctcagaagcctgagc

SEQ ID NO: 2251115 - DNA, 25 bp, Homo sapien
tcagtgggcggtcaatagttactcc

SEQ ID NO: 2251116 - DNA, 25 bp, Homo sapien
tactaaaaggcgatgggtgggaaca

SEQ ID NO: 2251117 - DNA, 25 bp, Homo sapien
cgggcaggttcttgtggctactaaa

SEQ ID NO: 2251118 - DNA, 25 bp, Homo sapien
taccactgtccaaccaatgggcgtg

SEQ ID NO: 2251119 - DNA, 25 bp, Homo sapien
tcttccacgtatgtgagtaatgcgg

SEQ ID NO: 2251120 - DNA, 25 bp, Homo sapien
ggtgatagaaaccgctctccactta

SEQ ID NO: 2251121 - DNA, 25 bp, Homo sapien
tagtattctttatcaccccacttct

SEQ ID NO: 2251122 - DNA, 25 bp, Homo sapien
catgatttttgtactggggtgatag

SEQ ID NO: 2251123 - DNA, 25 bp, Homo sapien
cgcttccgcatgaatacaacgagtg

SEQ ID NO: 2251124 - DNA, 25 bp, Homo sapien
tccgcatgaatacaacgagtgggct

SEQ ID NO: 2251125 - DNA, 25 bp, Homo sapien
taaccagttgcccttataaggcaca

SEQ ID NO: 2251126 - DNA, 25 bp, Homo sapien
ttaagaagcctggttcagtggaata

SEQ ID NO: 2251127 - DNA, 25 bp, Homo sapien
caactacagaaatgatccctgcaag

SEQ ID NO: 2251128 - DNA, 25 bp, Homo sapien
atttggtactgtgccctgtcacaga

SEQ ID NO: 2251129 - DNA, 25 bp, Homo sapien
ctgtgccctgtcacagaaacttctc

SEQ ID NO: 2251130 - DNA, 25 bp, Homo sapien
tggtactgtgccctgtcacagaaac

SEQ ID NO: 2251131 - DNA, 25 bp, Homo sapien
tgagggtccatcatcgttaagaggg

SEQ ID NO: 2251132 - DNA, 25 bp, Homo sapien
aaaactctgatttttgagtctgagg

SEQ ID NO: 2251133 - DNA, 25 bp, Homo sapien
cagaaacaatgtccatagggaaata

SEQ ID NO: 2251134 - DNA, 25 bp, Homo sapien
aacagtatcttcacttatagaagta

SEQ ID NO: 2251135 - DNA, 25 bp, Homo sapien
aaatggtgagacagattgcaatgca

SEQ ID NO: 2251136 - DNA, 25 bp, Homo sapien
ttatctgcactctggaccaaatgga

SEQ ID NO: 2251137 - DNA, 25 bp, Homo sapien
gcatgtggaacattctcgaggatag

SEQ ID NO: 2251138 - DNA, 25 bp, Homo sapien
caatgagtagattgtccagacagaa

SEQ ID NO: 2251139 - DNA, 25 bp, Homo sapien
tgtgacaactccctgcacagttgtc

SEQ ID NO: 2251140 - DNA, 25 bp, Homo sapien
gaaacttgtgacaactccctgcaca

SEQ ID NO: 2251141 - DNA, 25 bp, Homo sapien
cacagaaacttgtgacaactccctg

SEQ ID NO: 2251142 - DNA, 25 bp, Homo sapien
cttgtgacaactccctgcacagttg

SEQ ID NO: 2251143 - DNA, 25 bp, Homo sapien
tgaggagagcccctattaggaggct

SEQ ID NO: 2251144 - DNA, 25 bp, Homo sapien
cgcacagaagatggagccgccgtca

SEQ ID NO: 2251145 - DNA, 25 bp, Homo sapien
caccagatcctcataccgggggtga

SEQ ID NO: 2251146 - DNA, 25 bp, Homo sapien
tcacgtgctgtacccgccagagcca

SEQ ID NO: 2251147 - DNA, 25 bp, Homo sapien
tgagcgggcaggttcctgtcgccac

SEQ ID NO: 2251148 - DNA, 25 bp, Homo sapien
tgagtgagcgggcaggttcctgtcg

SEQ ID NO: 2251149 - DNA, 25 bp, Homo sapien
tcctgtcgccactaagaggtggtgg

SEQ ID NO: 2251150 - DNA, 25 bp, Homo sapien
gggcaggttcctgtcgccactaaga

SEQ ID NO: 2251151 - DNA, 25 bp, Homo sapien
gcacttctgtgaggttccctggcag

SEQ ID NO: 2251152 - DNA, 25 bp, Homo sapien
cacggggcacttctgtgaggttccc

SEQ ID NO: 2251153 - DNA, 25 bp, Homo sapien
tgacacggggcacttctgtgaggtt

SEQ ID NO: 2251154 - DNA, 25 bp, Homo sapien
gggcacttctgtgaggttccctggc

SEQ ID NO: 2251155 - DNA, 25 bp, Homo sapien
tatttgaagtcagtttagctgctcc

SEQ ID NO: 2251156 - DNA, 25 bp, Homo sapien
tccttaaaggagaagtgggtctctc

SEQ ID NO: 2251157 - DNA, 25 bp, Homo sapien
cttcactttcagtttacgaatgtcc

SEQ ID NO: 2251158 - DNA, 25 bp, Homo sapien
ggaaatcattatatccttttcatga

SEQ ID NO: 2251159 - DNA, 25 bp, Homo sapien
tccgagggtgctgtggatcatccac

SEQ ID NO: 2251160 - DNA, 25 bp, Homo sapien
gttgggagccacgaaacatgggcaa

SEQ ID NO: 2251161 - DNA, 25 bp, Homo sapien
tctgcatatgtctgtgagttggcgt

SEQ ID NO: 2251162 - DNA, 25 bp, Homo sapien
ctgctattgtgttggtggtatttgc

SEQ ID NO: 2251163 - DNA, 25 bp, Homo sapien
tctgcgaacccttcctttggtggta

SEQ ID NO: 2251164 - DNA, 25 bp, Homo sapien
gaagtccacccattgcattcatgcg

SEQ ID NO: 2251165 - DNA, 25 bp, Homo sapien
gttgctcccaccataagtttctgcg

SEQ ID NO: 2251166 - DNA, 25 bp, Homo sapien
cattcatgcggaagcggtaattact

SEQ ID NO: 2251167 - DNA, 25 bp, Homo sapien
ggtgtaatgggaattccagaaaata

SEQ ID NO: 2251168 - DNA, 25 bp, Homo sapien
ctgttgggtgtaatgggaattccag

SEQ ID NO: 2251169 - DNA, 25 bp, Homo sapien
tgggtgtaatgggaattccagaaaa

SEQ ID NO: 2251170 - DNA, 25 bp, Homo sapien
gttgggtgtaatgggaattccagaa

SEQ ID NO: 2251171 - DNA, 25 bp, Homo sapien
cccagtgcataaatcgtaatgacaa

SEQ ID NO: 2251172 - DNA, 25 bp, Homo sapien
caagtagatgatatcgtcaatgtgg

SEQ ID NO: 2251173 - DNA, 25 bp, Homo sapien
tcaatgtggtcatggtggagagcat

SEQ ID NO: 2251174 - DNA, 25 bp, Homo sapien
ttggagagcgatttctatcacccca

SEQ ID NO: 2251175 - DNA, 25 bp, Homo sapien
tagctctatttgtgccagcagggac

SEQ ID NO: 2251176 - DNA, 25 bp, Homo sapien
tctttctaaggcgatttcttagcac

SEQ ID NO: 2251177 - DNA, 25 bp, Homo sapien
gatttcttagcaccaatctcttgct

SEQ ID NO: 2251178 - DNA, 25 bp, Homo sapien
cttgctgcagcatccgttattagct

SEQ ID NO: 2251179 - DNA, 25 bp, Homo sapien
ccccatcaagtggatcttgtgcaaa

SEQ ID NO: 2251180 - DNA, 25 bp, Homo sapien
agacaaccccatcaagtggatcttg

SEQ ID NO: 2251181 - DNA, 25 bp, Homo sapien
caaccccatcaagtggatcttgtgc

SEQ ID NO: 2251182 - DNA, 25 bp, Homo sapien
catcaagtggatcttgtgcaaatgg

SEQ ID NO: 2251183 - DNA, 25 bp, Homo sapien
tacttagacatgagcatggaatctg

SEQ ID NO: 2251184 - DNA, 25 bp, Homo sapien
ctctcctccgtagcccagaaaacgc

SEQ ID NO: 2251185 - DNA, 25 bp, Homo sapien
tagacatgagcatggaatctgtcat

SEQ ID NO: 2251186 - DNA, 25 bp, Homo sapien
gaacttgtacttagacatgagcatg

SEQ ID NO: 2251187 - DNA, 25 bp, Homo sapien
gctgtctctgctacacagggactct

SEQ ID NO: 2251188 - DNA, 25 bp, Homo sapien
tctgggtttgagctctccgctgtct

SEQ ID NO: 2251189 - DNA, 25 bp, Homo sapien
tgtcacccagtagctgctcttcggg

SEQ ID NO: 2251190 - DNA, 25 bp, Homo sapien
gacagtccacagacgtcgtgtcacc

SEQ ID NO: 2251191 - DNA, 25 bp, Homo sapien
aacattcattcaagagagctgcctc

SEQ ID NO: 2251192 - DNA, 25 bp, Homo sapien
tcaacattcattcaagagagctgcc

SEQ ID NO: 2251193 - DNA, 25 bp, Homo sapien
caacattcattcaagagagctgcct

SEQ ID NO: 2251194 - DNA, 25 bp, Homo sapien
cattcattcaagagagctgcctcac

SEQ ID NO: 2251195 - DNA, 25 bp, Homo sapien
gcaccagccagttcacgtgtgggag

SEQ ID NO: 2251196 - DNA, 25 bp, Homo sapien
tccctcataggtccaaccgttatcg

SEQ ID NO: 2251197 - DNA, 25 bp, Homo sapien
aaccgttatcggcaccagccagttc

SEQ ID NO: 2251198 - DNA, 25 bp, Homo sapien
cagccagttcacgtgtgggagaccc

SEQ ID NO: 2251199 - DNA, 25 bp, Homo sapien
gcacagtgcataacaagcgaataat

SEQ ID NO: 2251200 - DNA, 25 bp, Homo sapien
aataataagtcgcacctcacagcac

SEQ ID NO: 2251201 - DNA, 25 bp, Homo sapien
tgtgaatgcacagtgcataacaagc

SEQ ID NO: 2251202 - DNA, 25 bp, Homo sapien
taacaagcgaataataagtcgcacc

SEQ ID NO: 2251203 - DNA, 25 bp, Homo sapien
tcaacacagtccacctttgaagtat

SEQ ID NO: 2251204 - DNA, 25 bp, Homo sapien
tatggactatttcgaagaaataatg

SEQ ID NO: 2251205 - DNA, 25 bp, Homo sapien
aagaaataatggcaactcataagca

SEQ ID NO: 2251206 - DNA, 25 bp, Homo sapien
tttcttcaatacaaccacagtgttc

SEQ ID NO: 2251207 - DNA, 25 bp, Homo sapien
ctgcagggatggttccatagtgtgc

SEQ ID NO: 2251208 - DNA, 25 bp, Homo sapien
taagggaggagagacattacacttt

SEQ ID NO: 2251209 - DNA, 25 bp, Homo sapien
ccccaggcggctcagcatcaggtaa

SEQ ID NO: 2251210 - DNA, 25 bp, Homo sapien
attacactttgtccgcttgcccctg

SEQ ID NO: 2251211 - DNA, 25 bp, Homo sapien
catcccgagcagaaacagtcatggg

SEQ ID NO: 2251212 - DNA, 25 bp, Homo sapien
tagcccggtcatatgggctgaatac

SEQ ID NO: 2251213 - DNA, 25 bp, Homo sapien
ggctgaatactgccatatataaaca

SEQ ID NO: 2251214 - DNA, 25 bp, Homo sapien
cgggccagccctctacttcttgtcc

SEQ ID NO: 2251215 - DNA, 25 bp, Homo sapien
gagaccccagtcacctaacattgtg

SEQ ID NO: 2251216 - DNA, 25 bp, Homo sapien
ctgggagttgttgcagcttcttggc

SEQ ID NO: 2251217 - DNA, 25 bp, Homo sapien
gaccccagtcacctaacattgtgtt

SEQ ID NO: 2251218 - DNA, 25 bp, Homo sapien
ggagttgttgcagcttcttggcatt

SEQ ID NO: 2251219 - DNA, 25 bp, Homo sapien
aatttagggttgcagggcctctcca

SEQ ID NO: 2251220 - DNA, 25 bp, Homo sapien
tcaagggagacaaatcaagacctct

SEQ ID NO: 2251221 - DNA, 25 bp, Homo sapien
caagacctctaagtgggctcctgaa

SEQ ID NO: 2251222 - DNA, 25 bp, Homo sapien
tagaaatttagggttgcagggcctc

SEQ ID NO: 2251223 - DNA, 25 bp, Homo sapien
tctcggagggcagtaggtaaagttc

SEQ ID NO: 2251224 - DNA, 25 bp, Homo sapien
taagcagggcccctcgtgtctccaa

SEQ ID NO: 2251225 - DNA, 25 bp, Homo sapien
acaccttctcggagggcagtaggta

SEQ ID NO: 2251226 - DNA, 25 bp, Homo sapien
cagactctacaacgttagtaaacac

SEQ ID NO: 2251227 - DNA, 25 bp, Homo sapien
gtgatcaaagaccatgtccagccaa

SEQ ID NO: 2251228 - DNA, 25 bp, Homo sapien
ctcgggtaacacagagacgggtcag

SEQ ID NO: 2251229 - DNA, 25 bp, Homo sapien
accaggtgatcaaagaccatgtcca

SEQ ID NO: 2251230 - DNA, 25 bp, Homo sapien
cacagagacgggtcagaagtcaaga

SEQ ID NO: 2251231 - DNA, 25 bp, Homo sapien
tcaggggaaggatttattgatccac

SEQ ID NO: 2251232 - DNA, 25 bp, Homo sapien
aggggaaggatttattgatccacac

SEQ ID NO: 2251233 - DNA, 25 bp, Homo sapien
caggggaaggatttattgatccaca

SEQ ID NO: 2251234 - DNA, 25 bp, Homo sapien
tactgagtaaaacgctcagcaccga

SEQ ID NO: 2251235 - DNA, 25 bp, Homo sapien
caggtccaccctggtatggcttgct

SEQ ID NO: 2251236 - DNA, 25 bp, Homo sapien
tcagcaccgatttagaggccaggct

SEQ ID NO: 2251237 - DNA, 25 bp, Homo sapien
attgtgtggcgtgtcggcaaaggcc

SEQ ID NO: 2251238 - DNA, 25 bp, Homo sapien
cttattcaggcttgaaccagaagga

SEQ ID NO: 2251239 - DNA, 25 bp, Homo sapien
gactatgacttcacttggtgctgaa

SEQ ID NO: 2251240 - DNA, 25 bp, Homo sapien
tggtgctgaaccaatcaggccctgg

SEQ ID NO: 2251241 - DNA, 25 bp, Homo sapien
ggacaattgtgagtcaccatagtga

SEQ ID NO: 2251242 - DNA, 25 bp, Homo sapien
cagcatcaaacagtggctgtgaggt

SEQ ID NO: 2251243 - DNA, 25 bp, Homo sapien
tggctgtgaggtggagaataggtgg

SEQ ID NO: 2251244 - DNA, 25 bp, Homo sapien
agtggctgtgaggtggagaataggt

SEQ ID NO: 2251245 - DNA, 25 bp, Homo sapien
tgcagcccagcatcaaacagtggct

SEQ ID NO: 2251246 - DNA, 25 bp, Homo sapien
cttagtggcggccaaatgtaacctt

SEQ ID NO: 2251247 - DNA, 25 bp, Homo sapien
agggagagaagatttggccaaaatt

SEQ ID NO: 2251248 - DNA, 25 bp, Homo sapien
ttctcaggagatcttagtggcggcc

SEQ ID NO: 2251249 - DNA, 25 bp, Homo sapien
gagagaagatttggccaaaattcct

SEQ ID NO: 2251250 - DNA, 25 bp, Homo sapien
tcaaatcactaaccagacagccagg

SEQ ID NO: 2251251 - DNA, 25 bp, Homo sapien
ctctcattgctcaaatcactaacca

SEQ ID NO: 2251252 - DNA, 25 bp, Homo sapien
aggctgactggagaccatgcacaca

SEQ ID NO: 2251253 - DNA, 25 bp, Homo sapien
gaagccaaggtgatgtcttccatgg

SEQ ID NO: 2251254 - DNA, 25 bp, Homo sapien
gacaaggagtcagtgtcggtttcca

SEQ ID NO: 2251255 - DNA, 25 bp, Homo sapien
ccaagataatggaaccgtgaatatg

SEQ ID NO: 2251256 - DNA, 25 bp, Homo sapien
tgcctcgaatattttaacctccaaa

SEQ ID NO: 2251257 - DNA, 25 bp, Homo sapien
gttccatgggagaggcatcttgcct

SEQ ID NO: 2251258 - DNA, 25 bp, Homo sapien
ctgtctttgggcccctcctcctctc

SEQ ID NO: 2251259 - DNA, 25 bp, Homo sapien
cctgtctttgggcccctcctcctct

SEQ ID NO: 2251260 - DNA, 25 bp, Homo sapien
tgtctttgggcccctcctcctctcc

SEQ ID NO: 2251261 - DNA, 25 bp, Homo sapien
gtcctcagaaaggcaatggagctca

SEQ ID NO: 2251262 - DNA, 25 bp, Homo sapien
ccagttcctgagcttttgtatgctg

SEQ ID NO: 2251263 - DNA, 25 bp, Homo sapien
tcctcagaaaggcaatggagctcat

SEQ ID NO: 2251264 - DNA, 25 bp, Homo sapien
ttcctgagcttttgtatgctgcctt

SEQ ID NO: 2251265 - DNA, 25 bp, Homo sapien
gatgttccctcctggtatcagctgt

SEQ ID NO: 2251266 - DNA, 25 bp, Homo sapien
gattcctatcattgggtgcctcata

SEQ ID NO: 2251267 - DNA, 25 bp, Homo sapien
tcaagtgcttgcaaggtccctaggc

SEQ ID NO: 2251268 - DNA, 25 bp, Homo sapien
catatagggttgtagttgatcagcc

SEQ ID NO: 2251269 - DNA, 25 bp, Homo sapien
tgtctaagaaggctcgatcgcctac

SEQ ID NO: 2251270 - DNA, 25 bp, Homo sapien
aggctcgatcgcctactaaagtttc

SEQ ID NO: 2251271 - DNA, 25 bp, Homo sapien
ttgcataagctacacgtataaggct

SEQ ID NO: 2251272 - DNA, 25 bp, Homo sapien
gagacactagacatgcttcccttct

SEQ ID NO: 2251273 - DNA, 25 bp, Homo sapien
gatacttcgcatcctgatgtttgta

SEQ ID NO: 2251274 - DNA, 25 bp, Homo sapien
gtacactgtgtgtatcaccaggatt

SEQ ID NO: 2251275 - DNA, 25 bp, Homo sapien
tgtacactgtgtgtatcaccaggat

SEQ ID NO: 2251276 - DNA, 25 bp, Homo sapien
tcttttttgatacttcgcatcctga

SEQ ID NO: 2251277 - DNA, 25 bp, Homo sapien
gtattgcattattagctgatttcac

SEQ ID NO: 2251278 - DNA, 25 bp, Homo sapien
tcttgtagctaggtaatagttcact

SEQ ID NO: 2251279 - DNA, 25 bp, Homo sapien
tttaagtatcgagatgttcaaagga

SEQ ID NO: 2251280 - DNA, 25 bp, Homo sapien
gctccaaactcttatactatttagt

SEQ ID NO: 2251281 - DNA, 25 bp, Homo sapien
tacacaatgggaaggaagaatcttt

SEQ ID NO: 2251282 - DNA, 25 bp, Homo sapien
tctacacaatgggaaggaagaatct

SEQ ID NO: 2251283 - DNA, 25 bp, Homo sapien
cacaatgggaaggaagaatctttac

SEQ ID NO: 2251284 - DNA, 25 bp, Homo sapien
ttaacttctacacaatgggaaggaa

SEQ ID NO: 2251285 - DNA, 25 bp, Homo sapien
tcaagaggattcaataattgccact

SEQ ID NO: 2251286 - DNA, 25 bp, Homo sapien
caagaggattcaataattgccactc

SEQ ID NO: 2251287 - DNA, 25 bp, Homo sapien
gcaaggccacagtcaagtcacctga

SEQ ID NO: 2251288 - DNA, 25 bp, Homo sapien
taggcaatagggacaagcagaggca

SEQ ID NO: 2251289 - DNA, 25 bp, Homo sapien
taggccaggtgctgaagatgtgaac

SEQ ID NO: 2251290 - DNA, 25 bp, Homo sapien
cagtaaatcacctgggaggtgccca

SEQ ID NO: 2251291 - DNA, 25 bp, Homo sapien
tccagtgtttgattcttttctgctc

SEQ ID NO: 2251292 - DNA, 25 bp, Homo sapien
ccagtgtttgattcttttctgctca

SEQ ID NO: 2251293 - DNA, 25 bp, Homo sapien
gagtttagatgccatcttccagtgt

SEQ ID NO: 2251294 - DNA, 25 bp, Homo sapien
ggcaggatgagtttagatgccatct

SEQ ID NO: 2251295 - DNA, 25 bp, Homo sapien
tgtgggtagaaaatagccagggaaa

SEQ ID NO: 2251296 - DNA, 25 bp, Homo sapien
gaagacaattatgatgaagctcctc

SEQ ID NO: 2251297 - DNA, 25 bp, Homo sapien
tcccacctgggagacatcatagctg

SEQ ID NO: 2251298 - DNA, 25 bp, Homo sapien
aattcccaggacattctaggtgaac

SEQ ID NO: 2251299 - DNA, 25 bp, Homo sapien
taggtgaactaattactaccacagc

SEQ ID NO: 2251300 - DNA, 25 bp, Homo sapien
ttgtagtacccggtatgtattccaa

SEQ ID NO: 2251301 - DNA, 25 bp, Homo sapien
ttctggaacacacccattggttggg

SEQ ID NO: 2251302 - DNA, 25 bp, Homo sapien
tacccggtatgtattccaatattct

SEQ ID NO: 2251303 - DNA, 25 bp, Homo sapien
ccaatattctttctggaacacaccc

SEQ ID NO: 2251304 - DNA, 25 bp, Homo sapien
ccttgctagctgtcctaaaggagca

SEQ ID NO: 2251305 - DNA, 25 bp, Homo sapien
cagaagagcgacttaatctgtctaa

SEQ ID NO: 2251306 - DNA, 25 bp, Homo sapien
gaaacctgtggactattgatgcatg

SEQ ID NO: 2251307 - DNA, 25 bp, Homo sapien
cctggccctagagaagacaaaatgc

SEQ ID NO: 2251308 - DNA, 25 bp, Homo sapien
ttcattgtacatgtaggcaatcttt

SEQ ID NO: 2251309 - DNA, 25 bp, Homo sapien
tccggttgcttcatgataacggaag

SEQ ID NO: 2251310 - DNA, 25 bp, Homo sapien
aattccaccaggaccagagcctgtt

SEQ ID NO: 2251311 - DNA, 25 bp, Homo sapien
tgatagtctcaagcggtccggttgc

SEQ ID NO: 2251312 - DNA, 25 bp, Homo sapien
tgcaagcgctctcaggaccaagatt

SEQ ID NO: 2251313 - DNA, 25 bp, Homo sapien
gttttactcttgtatgtgacactga

SEQ ID NO: 2251314 - DNA, 25 bp, Homo sapien
agttttactcttgtatgtgacactg

SEQ ID NO: 2251315 - DNA, 25 bp, Homo sapien
tttactcttgtatgtgacactgaca

SEQ ID NO: 2251316 - DNA, 25 bp, Homo sapien
ttttactcttgtatgtgacactgac

SEQ ID NO: 2251317 - DNA, 25 bp, Homo sapien
tggtaccacctttgacaaatcaggg

SEQ ID NO: 2251318 - DNA, 25 bp, Homo sapien
gacaaatcagggtgcatcaggttgg

SEQ ID NO: 2251319 - DNA, 25 bp, Homo sapien
ggttggtaccaaatcaatgaattgt

SEQ ID NO: 2251320 - DNA, 25 bp, Homo sapien
gcatcaggttggtaccaaatcaatg

SEQ ID NO: 2251321 - DNA, 25 bp, Homo sapien
actttcctcttcctcggctcgacta

SEQ ID NO: 2251322 - DNA, 25 bp, Homo sapien
ggtagcaaagctctccgctgctgca

SEQ ID NO: 2251323 - DNA, 25 bp, Homo sapien
gctcgactacgcctctgcctctgtg

SEQ ID NO: 2251324 - DNA, 25 bp, Homo sapien
tgctgcaccactaggggaagcgacg

SEQ ID NO: 2251325 - DNA, 25 bp, Homo sapien
gtggggagtcttggaatatcagttc

SEQ ID NO: 2251326 - DNA, 25 bp, Homo sapien
tggcgagtgaagctccaagatgtgg

SEQ ID NO: 2251327 - DNA, 25 bp, Homo sapien
tcttccagggtcgagttctgtggac

SEQ ID NO: 2251328 - DNA, 25 bp, Homo sapien
aaagcgcgggatgcctggcgagtga

SEQ ID NO: 2251329 - DNA, 25 bp, Homo sapien
cctatccctgatttgccacgtattg

SEQ ID NO: 2251330 - DNA, 25 bp, Homo sapien
tgtgcatccagattgttcctgctgg

SEQ ID NO: 2251331 - DNA, 25 bp, Homo sapien
gatttgccacgtattgtgcatccag

SEQ ID NO: 2251332 - DNA, 25 bp, Homo sapien
tggtgccaaggtctcctatccctga

SEQ ID NO: 2251333 - DNA, 25 bp, Homo sapien
aggagcctcacccagtaagagatgc

SEQ ID NO: 2251334 - DNA, 25 bp, Homo sapien
ccaggagcctcacccagtaagagat

SEQ ID NO: 2251335 - DNA, 25 bp, Homo sapien
tctaccaggagcctcacccagtaag

SEQ ID NO: 2251336 - DNA, 25 bp, Homo sapien
gagcctcacccagtaagagatgcca

SEQ ID NO: 2251337 - DNA, 25 bp, Homo sapien
tagaatatttacctcaccccgcaaa

SEQ ID NO: 2251338 - DNA, 25 bp, Homo sapien
gttgtgtaaccaatgtggcaatcaa

SEQ ID NO: 2251339 - DNA, 25 bp, Homo sapien
catttcatgccgaaggagatgcaac

SEQ ID NO: 2251340 - DNA, 25 bp, Homo sapien
tgaaccatgcagctttaacttctca

SEQ ID NO: 2251341 - DNA, 25 bp, Homo sapien
cagccagaagttgtagcttctcagc

SEQ ID NO: 2251342 - DNA, 25 bp, Homo sapien
gaggccccagtcacctaacataatg

SEQ ID NO: 2251343 - DNA, 25 bp, Homo sapien
gcagttgggctccttaaacagaaca

SEQ ID NO: 2251344 - DNA, 25 bp, Homo sapien
taaagttaatccagaggacaagcag

SEQ ID NO: 2251345 - DNA, 25 bp, Homo sapien
gactgttggcattacgttctgagag

SEQ ID NO: 2251346 - DNA, 25 bp, Homo sapien
gaagccaggtgatggttgtcagtat

SEQ ID NO: 2251347 - DNA, 25 bp, Homo sapien
tattctgctctgaaccagaaggaag

SEQ ID NO: 2251348 - DNA, 25 bp, Homo sapien
tctgagagcagtcgtgagtaatcat

SEQ ID NO: 2251349 - DNA, 25 bp, Homo sapien
tataaaactttcatgctgtacatgc

SEQ ID NO: 2251350 - DNA, 25 bp, Homo sapien
gctgtacatgctaaaacatattcca

SEQ ID NO: 2251351 - DNA, 25 bp, Homo sapien
aacatataaaactttcatgctgtac

SEQ ID NO: 2251352 - DNA, 25 bp, Homo sapien
ctttcatgctgtacatgctaaaaca

SEQ ID NO: 2251353 - DNA, 25 bp, Homo sapien
cattggtttagaaatggtataccaa

SEQ ID NO: 2251354 - DNA, 25 bp, Homo sapien
caactaaaactgatgtggcgtggta

SEQ ID NO: 2251355 - DNA, 25 bp, Homo sapien
gatacttgtcacctcaccctagatg

SEQ ID NO: 2251356 - DNA, 25 bp, Homo sapien
tatcaagtgtaccacagcagagctc

SEQ ID NO: 2251357 - DNA, 25 bp, Homo sapien
tccaggccagggtagaaactctctc

SEQ ID NO: 2251358 - DNA, 25 bp, Homo sapien
cagtaacactgtagtcagaggctga

SEQ ID NO: 2251359 - DNA, 25 bp, Homo sapien
ggcaacccgaggcactgattaaaat

SEQ ID NO: 2251360 - DNA, 25 bp, Homo sapien
gaagtaggaatgattatgaccccag

SEQ ID NO: 2251361 - DNA, 25 bp, Homo sapien
tcggtaggctattggatctcacagt

SEQ ID NO: 2251362 - DNA, 25 bp, Homo sapien
cagatgcccacgctctaacattagg

SEQ ID NO: 2251363 - DNA, 25 bp, Homo sapien
tagtatcaccggcagcagggcttca

SEQ ID NO: 2251364 - DNA, 25 bp, Homo sapien
tgagcaccattagtatcaccggcag

SEQ ID NO: 2251365 - DNA, 25 bp, Homo sapien
taacattaggagaaccagaattgag

SEQ ID NO: 2251366 - DNA, 25 bp, Homo sapien
ccaacatccgttgtcctgtgcctga

SEQ ID NO: 2251367 - DNA, 25 bp, Homo sapien
agcttgaccaacatccgttgtcctg

SEQ ID NO: 2251368 - DNA, 25 bp, Homo sapien
cctgtgcctgaagaaccaatgccaa

SEQ ID NO: 2251369 - DNA, 25 bp, Homo sapien
acaatgcccaccactgctcggcctt

SEQ ID NO: 2251370 - DNA, 25 bp, Homo sapien
agttatgagggagcacatggcccag

SEQ ID NO: 2251371 - DNA, 25 bp, Homo sapien
tggcccagagaagattggaggtcca

SEQ ID NO: 2251372 - DNA, 25 bp, Homo sapien
tcccaactgctgcaaggacctactt

SEQ ID NO: 2251373 - DNA, 25 bp, Homo sapien
tactcctgggcctcttagcagtggc

SEQ ID NO: 2251374 - DNA, 25 bp, Homo sapien
ggtgacttaggatcaacattcaagg

SEQ ID NO: 2251375 - DNA, 25 bp, Homo sapien
ttgtgctttacctgccctggcatgg

SEQ ID NO: 2251376 - DNA, 25 bp, Homo sapien
caggtatacacagctcaatgatcca

SEQ ID NO: 2251377 - DNA, 25 bp, Homo sapien
aatgatccaccgcaagtaaaacctg

SEQ ID NO: 2251378 - DNA, 25 bp, Homo sapien
gacaagcttacttgggtggccctgg

SEQ ID NO: 2251379 - DNA, 25 bp, Homo sapien
cactggcccgtgtaaggtctactca

SEQ ID NO: 2251380 - DNA, 25 bp, Homo sapien
gccagcagtgcgattattacggaca

SEQ ID NO: 2251381 - DNA, 25 bp, Homo sapien
ttgaccagtgcagaaagtgaagccc

SEQ ID NO: 2251382 - DNA, 25 bp, Homo sapien
ctattccctcagtttcacaagctct

SEQ ID NO: 2251383 - DNA, 25 bp, Homo sapien
agctcgcccgttgcagcttctgcac

SEQ ID NO: 2251384 - DNA, 25 bp, Homo sapien
tccagaatctgctccatggagcgca

SEQ ID NO: 2251385 - DNA, 25 bp, Homo sapien
ctgggacaggatagtcaggaactcc

SEQ ID NO: 2251386 - DNA, 25 bp, Homo sapien
gcaccctgctgtggatgtcctggga

SEQ ID NO: 2251387 - DNA, 25 bp, Homo sapien
tggcgaaacacccatggcgaaactg

SEQ ID NO: 2251388 - DNA, 25 bp, Homo sapien
tagcacggaagtttggcgtccacag

SEQ ID NO: 2251389 - DNA, 25 bp, Homo sapien
gcttaggaccaacgttagggctgcg

SEQ ID NO: 2251390 - DNA, 25 bp, Homo sapien
ggctccgggcgtaggaacttccata

SEQ ID NO: 2251391 - DNA, 25 bp, Homo sapien
gtcagcatccctgtgggcgcacagc

SEQ ID NO: 2251392 - DNA, 25 bp, Homo sapien
cagttgccggtgagcttgggagaac

SEQ ID NO: 2251393 - DNA, 25 bp, Homo sapien
aacagcttgaggctggttggaagcc

SEQ ID NO: 2251394 - DNA, 25 bp, Homo sapien
gagatgtagtccgtagcgcagtccc

SEQ ID NO: 2251395 - DNA, 25 bp, Homo sapien
agcacgtatttagcggccaggctgg

SEQ ID NO: 2251396 - DNA, 25 bp, Homo sapien
ttgatgccatggtgtgttggcaaag

SEQ ID NO: 2251397 - DNA, 25 bp, Homo sapien
tctactgagtaaaatgttcagcacg

SEQ ID NO: 2251398 - DNA, 25 bp, Homo sapien
gtcatttttgtgattcccaagctgt

SEQ ID NO: 2251399 - DNA, 25 bp, Homo sapien
tcaccgtagtaaccatgacttcact

SEQ ID NO: 2251400 - DNA, 25 bp, Homo sapien
ggcaattgtgagtcaccgtagtaac

SEQ ID NO: 2251401 - DNA, 25 bp, Homo sapien
cactttgtactgaaccaataaggcc

SEQ ID NO: 2251402 - DNA, 25 bp, Homo sapien
cctattgagtcctgaacccgaagga

SEQ ID NO: 2251403 - DNA, 25 bp, Homo sapien
gctttcttagttgagctatcttcct

SEQ ID NO: 2251404 - DNA, 25 bp, Homo sapien
taaagccagtcccaacaagcttgca

SEQ ID NO: 2251405 - DNA, 25 bp, Homo sapien
aggttgtttggagccgctgcgtcat

SEQ ID NO: 2251406 - DNA, 25 bp, Homo sapien
gcgtcatggataaataactccctaa

SEQ ID NO: 2251407 - DNA, 25 bp, Homo sapien
tgaacatcaagaagcctgacaagtc

SEQ ID NO: 2251408 - DNA, 25 bp, Homo sapien
ctgaacatcaagaagcctgacaagt

SEQ ID NO: 2251409 - DNA, 25 bp, Homo sapien
tgcaagaagcccacccaaaatgtgc

SEQ ID NO: 2251410 - DNA, 25 bp, Homo sapien
gcaagaagcccacccaaaatgtgct

SEQ ID NO: 2251411 - DNA, 25 bp, Homo sapien
gggcttttgttcatcctaacgcaca

SEQ ID NO: 2251412 - DNA, 25 bp, Homo sapien
cacagtgcaggggtgctcagacacg

SEQ ID NO: 2251413 - DNA, 25 bp, Homo sapien
tttgttcatcctaacgcacagtgca

SEQ ID NO: 2251414 - DNA, 25 bp, Homo sapien
cttttgttcatcctaacgcacagtg

SEQ ID NO: 2251415 - DNA, 25 bp, Homo sapien
tgtaaaataagtagaggccaaattc

SEQ ID NO: 2251416 - DNA, 25 bp, Homo sapien
gttgtgtaaaataagtagaggccaa

SEQ ID NO: 2251417 - DNA, 25 bp, Homo sapien
ctcccaatgtccaagccacgtccat

SEQ ID NO: 2251418 - DNA, 25 bp, Homo sapien
gtcccataacccctcccaatgtcca

SEQ ID NO: 2251419 - DNA, 25 bp, Homo sapien
taacgtccgcctgcaggtgcggatc

SEQ ID NO: 2251420 - DNA, 25 bp, Homo sapien
cttctacatcgtggcctcggtgatg

SEQ ID NO: 2251421 - DNA, 25 bp, Homo sapien
gggcggctcggacccctggactcta

SEQ ID NO: 2251422 - DNA, 25 bp, Homo sapien
tgaggctcgcgctcgagcgggtcag

SEQ ID NO: 2251423 - DNA, 25 bp, Homo sapien
acattcatggtgatatggctataga

SEQ ID NO: 2251424 - DNA, 25 bp, Homo sapien
ttcctggcagtctcccctccaagta

SEQ ID NO: 2251425 - DNA, 25 bp, Homo sapien
cctggtattcctggcagtctcccct

SEQ ID NO: 2251426 - DNA, 25 bp, Homo sapien
gggcacattcatggtgatatggcta

SEQ ID NO: 2251427 - DNA, 25 bp, Homo sapien
agcagctggaccacgcaggatcggc

SEQ ID NO: 2251428 - DNA, 25 bp, Homo sapien
aggacatatgaaaggtgaccagcca

SEQ ID NO: 2251429 - DNA, 25 bp, Homo sapien
gctggaccacgcaggatcggccagc

SEQ ID NO: 2251430 - DNA, 25 bp, Homo sapien
gactctgagtgaggacatatgaaag

SEQ ID NO: 2251431 - DNA, 25 bp, Homo sapien
ttcagcaacgagcacagtcgcctgt

SEQ ID NO: 2251432 - DNA, 25 bp, Homo sapien
cagcaacgagcacagtcgcctgtta

SEQ ID NO: 2251433 - DNA, 25 bp, Homo sapien
aacgagcacagtcgcctgttactcc

SEQ ID NO: 2251434 - DNA, 25 bp, Homo sapien
gcaacgagcacagtcgcctgttact

SEQ ID NO: 2251435 - DNA, 25 bp, Homo sapien
ggccaggtgaaactcgagctctccg

SEQ ID NO: 2251436 - DNA, 25 bp, Homo sapien
tcgagctctccgtgaccaagctgag

SEQ ID NO: 2251437 - DNA, 25 bp, Homo sapien
tctccgtgaccaagctgagggcaga

SEQ ID NO: 2251438 - DNA, 25 bp, Homo sapien
tgaaactcgagctctccgtgaccaa

SEQ ID NO: 2251439 - DNA, 25 bp, Homo sapien
aatcctctcaaccatggccatattg

SEQ ID NO: 2251440 - DNA, 25 bp, Homo sapien
tatctttgaggtatgtatccatcag

SEQ ID NO: 2251441 - DNA, 25 bp, Homo sapien
gatactatcatctatcaccccatgt

SEQ ID NO: 2251442 - DNA, 25 bp, Homo sapien
ttacaacctttgcaccggtgtgata

SEQ ID NO: 2251443 - DNA, 25 bp, Homo sapien
ggcttgatgtttaaggtgcctggct

SEQ ID NO: 2251444 - DNA, 25 bp, Homo sapien
gcttcactgagcatggcttgatgtt

SEQ ID NO: 2251445 - DNA, 25 bp, Homo sapien
tgcctggctgcatgtaatactcaac

SEQ ID NO: 2251446 - DNA, 25 bp, Homo sapien
cagtcaccgttataaggcaagagac

SEQ ID NO: 2251447 - DNA, 25 bp, Homo sapien
tcacatttatgtcggcagctgattc

SEQ ID NO: 2251448 - DNA, 25 bp, Homo sapien
tgtatgtgttcatgcacagctggcc

SEQ ID NO: 2251449 - DNA, 25 bp, Homo sapien
tacatgtgtgtctgactgaccctgt

SEQ ID NO: 2251450 - DNA, 25 bp, Homo sapien
catgtgtgcacaatcagcctgggcc

SEQ ID NO: 2251451 - DNA, 25 bp, Homo sapien
gcagctgaccaacccctgttgccag

SEQ ID NO: 2251452 - DNA, 25 bp, Homo sapien
cacaccaaaagctctcgtggtcctt

SEQ ID NO: 2251453 - DNA, 25 bp, Homo sapien
atgtgtacacaccaaaagctctcgt

SEQ ID NO: 2251454 - DNA, 25 bp, Homo sapien
tcgtggtccttgcagctgaccaacc

SEQ ID NO: 2251455 - DNA, 25 bp, Homo sapien
ctatgcatgcacaagaaaccagccc

SEQ ID NO: 2251456 - DNA, 25 bp, Homo sapien
tgtagcagtgtacatgcatgctgcc

SEQ ID NO: 2251457 - DNA, 25 bp, Homo sapien
tcacttccacaactagcgcctgtag

SEQ ID NO: 2251458 - DNA, 25 bp, Homo sapien
gtgtgtactggccaccatttgcatt

SEQ ID NO: 2251459 - DNA, 25 bp, Homo sapien
agaaggttccagtatgtttctatcc

SEQ ID NO: 2251460 - DNA, 25 bp, Homo sapien
aactcgagtgcccaacagaaggttc

SEQ ID NO: 2251461 - DNA, 25 bp, Homo sapien
tagaaccaccaaggaccatgcagtt

SEQ ID NO: 2251462 - DNA, 25 bp, Homo sapien
cagagttgtagaccctagctgccca

SEQ ID NO: 2251463 - DNA, 25 bp, Homo sapien
ctccagcactcggaaattcagaaga

SEQ ID NO: 2251464 - DNA, 25 bp, Homo sapien
ccagcactcggaaattcagaagagc

SEQ ID NO: 2251465 - DNA, 25 bp, Homo sapien
agcactcggaaattcagaagagctc

SEQ ID NO: 2251466 - DNA, 25 bp, Homo sapien
cctgacaagggactcctggcctatt

SEQ ID NO: 2251467 - DNA, 25 bp, Homo sapien
tccattatcaaagcctgaggtgcag

SEQ ID NO: 2251468 - DNA, 25 bp, Homo sapien
cccaagggccttcggatgtagttca

SEQ ID NO: 2251469 - DNA, 25 bp, Homo sapien
gaaagccttagcaataccctcccaa

SEQ ID NO: 2251470 - DNA, 25 bp, Homo sapien
gctattcttgttagtgcaagccaga

SEQ ID NO: 2251471 - DNA, 25 bp, Homo sapien
tgtagctgttcacattgtgtcttgg

SEQ ID NO: 2251472 - DNA, 25 bp, Homo sapien
tgccatggagaccaagtacagccat

SEQ ID NO: 2251473 - DNA, 25 bp, Homo sapien
gggacatcaaatagacattcatcct

SEQ ID NO: 2251474 - DNA, 25 bp, Homo sapien
gacattcatcctgcagactgccatg

SEQ ID NO: 2251475 - DNA, 25 bp, Homo sapien
tgtctggtacataggaagggctgca

SEQ ID NO: 2251476 - DNA, 25 bp, Homo sapien
tctggtacataggaagggctgcata

SEQ ID NO: 2251477 - DNA, 25 bp, Homo sapien
agggctgcatacatggaattggctg

SEQ ID NO: 2251478 - DNA, 25 bp, Homo sapien
gaattggctgtggtcatatgcaaaa

SEQ ID NO: 2251479 - DNA, 25 bp, Homo sapien
tctgtgacgttagagccttccagca

SEQ ID NO: 2251480 - DNA, 25 bp, Homo sapien
ctggcatctgtgacgttagagcctt

SEQ ID NO: 2251481 - DNA, 25 bp, Homo sapien
catgttatcgaagatggccttgtag

SEQ ID NO: 2251482 - DNA, 25 bp, Homo sapien
cttcagatagaaggtcatgttatcg

SEQ ID NO: 2251483 - DNA, 25 bp, Homo sapien
caagtctgccgcatctgtgtggctc

SEQ ID NO: 2251484 - DNA, 25 bp, Homo sapien
tacacatctccagatttgtcggcca

SEQ ID NO: 2251485 - DNA, 25 bp, Homo sapien
taacaacattgacaggtgtgccagg

SEQ ID NO: 2251486 - DNA, 25 bp, Homo sapien
tggatcttctcatccgggttggcag

SEQ ID NO: 2251487 - DNA, 25 bp, Homo sapien
caagatgggttatccaaggccagtc

SEQ ID NO: 2251488 - DNA, 25 bp, Homo sapien
cagtcttttgcgggctgagggagcc

SEQ ID NO: 2251489 - DNA, 25 bp, Homo sapien
gtcctacaagatgggttatccaagg

SEQ ID NO: 2251490 - DNA, 25 bp, Homo sapien
ccatacagtcctacaagatgggtta

SEQ ID NO: 2251491 - DNA, 25 bp, Homo sapien
gcagtgcccgggtttcctgtgcttc

SEQ ID NO: 2251492 - DNA, 25 bp, Homo sapien
ctgcagggcagtgcccgggtttcct

SEQ ID NO: 2251493 - DNA, 25 bp, Homo sapien
gtgcccgggtttcctgtgcttctct

SEQ ID NO: 2251494 - DNA, 25 bp, Homo sapien
ttctctgccagtgagctggttccat

SEQ ID NO: 2251495 - DNA, 25 bp, Homo sapien
cgattgcagttagcgaagaattttc

SEQ ID NO: 2251496 - DNA, 25 bp, Homo sapien
tattttcgtcttcgccactggcagg

SEQ ID NO: 2251497 - DNA, 25 bp, Homo sapien
aattttctgtgcaaactgtccaagc

SEQ ID NO: 2251498 - DNA, 25 bp, Homo sapien
gaatgtgagtacgtcctgccaggaa

SEQ ID NO: 2251499 - DNA, 25 bp, Homo sapien
cagaagttgtcagtgaacagagacg

SEQ ID NO: 2251500 - DNA, 25 bp, Homo sapien
ccaatggcatgggttctggtcacat

SEQ ID NO: 2251501 - DNA, 25 bp, Homo sapien
tgagcagacagaagttgtcagtgaa

SEQ ID NO: 2251502 - DNA, 25 bp, Homo sapien
tggtcacatggtgccgatggtaggt

SEQ ID NO: 2251503 - DNA, 25 bp, Homo sapien
gtcatagccagatcattggtttttt

SEQ ID NO: 2251504 - DNA, 25 bp, Homo sapien
aatattccgacacacactgatgctt

SEQ ID NO: 2251505 - DNA, 25 bp, Homo sapien
tgtatcctgcttcattcgtggttcc

SEQ ID NO: 2251506 - DNA, 25 bp, Homo sapien
gggagtgtatcctgcttcattcgtg

SEQ ID NO: 2251507 - DNA, 25 bp, Homo sapien
ggttccaaatattccgacacacact

SEQ ID NO: 2251508 - DNA, 25 bp, Homo sapien
atattgacagacctaccctatgggt

SEQ ID NO: 2251509 - DNA, 25 bp, Homo sapien
ccaaccagtcagatgagaaggtgga

SEQ ID NO: 2251510 - DNA, 25 bp, Homo sapien
tacccctttagcaccacatgtcaga

SEQ ID NO: 2251511 - DNA, 25 bp, Homo sapien
cctgatcaaagctggaggaaaggat

SEQ ID NO: 2251512 - DNA, 25 bp, Homo sapien
gtcactagtgtcctatctgtgccag

SEQ ID NO: 2251513 - DNA, 25 bp, Homo sapien
taaacggctgagaaatatcggaaca

SEQ ID NO: 2251514 - DNA, 25 bp, Homo sapien
ggttgcagcacgcaagtcactagtg

SEQ ID NO: 2251515 - DNA, 25 bp, Homo sapien
cagagtagcatttgctgttgctccc

SEQ ID NO: 2251516 - DNA, 25 bp, Homo sapien
taagactgaagagcccttttggccc

SEQ ID NO: 2251517 - DNA, 25 bp, Homo sapien
tgtaagagggcctgagtaatctccc

SEQ ID NO: 2251518 - DNA, 25 bp, Homo sapien
cccttttttcagaagtggccatgaa

SEQ ID NO: 2251519 - DNA, 25 bp, Homo sapien
cctcagggcttcaaggtgttacacc

SEQ ID NO: 2251520 - DNA, 25 bp, Homo sapien
ctctagatatctgtggcacagcaat

SEQ ID NO: 2251521 - DNA, 25 bp, Homo sapien
gtaaggtgaaaagcctctagatatc

SEQ ID NO: 2251522 - DNA, 25 bp, Homo sapien
tgaacctagtggacttatgctaagt

SEQ ID NO: 2251523 - DNA, 25 bp, Homo sapien
gcaatatgcatacagttaacactac

SEQ ID NO: 2251524 - DNA, 25 bp, Homo sapien
taccacgggtaatgagaggtcactc

SEQ ID NO: 2251525 - DNA, 25 bp, Homo sapien
tcacaggctaaattcggtaaacacc

SEQ ID NO: 2251526 - DNA, 25 bp, Homo sapien
gaatcaaagaagtaagaagctgcta

SEQ ID NO: 2251527 - DNA, 25 bp, Homo sapien
caacttggtgctcttactgtgtcct

SEQ ID NO: 2251528 - DNA, 25 bp, Homo sapien
taggtaaacccaggctcagcttctt

SEQ ID NO: 2251529 - DNA, 25 bp, Homo sapien
cattcaatcgtgtctttcctgggtc

SEQ ID NO: 2251530 - DNA, 25 bp, Homo sapien
cagcaagttctggacgtcacacaaa

SEQ ID NO: 2251531 - DNA, 25 bp, Homo sapien
tgcttcttggagacgttcctggaca

SEQ ID NO: 2251532 - DNA, 25 bp, Homo sapien
tttctgtgaagccagacagcacagc

SEQ ID NO: 2251533 - DNA, 25 bp, Homo sapien
tggtttgccttgctccaccgggttg

SEQ ID NO: 2251534 - DNA, 25 bp, Homo sapien
ggttgctcctctcttggatgtaatc

SEQ ID NO: 2251535 - DNA, 25 bp, Homo sapien
tttgccttgctccaccgggttgctc

SEQ ID NO: 2251536 - DNA, 25 bp, Homo sapien
gggttgctcctctcttggatgtaat

SEQ ID NO: 2251537 - DNA, 25 bp, Homo sapien
aaaggcatggtcaactttttgaggc

SEQ ID NO: 2251538 - DNA, 25 bp, Homo sapien
tgaaaggcatggtcaactttttgag

SEQ ID NO: 2251539 - DNA, 25 bp, Homo sapien
gaaaggcatggtcaactttttgagg

SEQ ID NO: 2251540 - DNA, 25 bp, Homo sapien
aaggcatggtcaactttttgaggca

SEQ ID NO: 2251541 - DNA, 25 bp, Homo sapien
cagtaaggatgactggttgttccag

SEQ ID NO: 2251542 - DNA, 25 bp, Homo sapien
tccagtaaggatgactggttgttcc

SEQ ID NO: 2251543 - DNA, 25 bp, Homo sapien
acatccagtaaggatgactggttgt

SEQ ID NO: 2251544 - DNA, 25 bp, Homo sapien
gtaaggatgactggttgttccaggt

SEQ ID NO: 2251545 - DNA, 25 bp, Homo sapien
caaattcaagttgcctagaaagtcc

SEQ ID NO: 2251546 - DNA, 25 bp, Homo sapien
gaaagtcctgactgatggagcatag

SEQ ID NO: 2251547 - DNA, 25 bp, Homo sapien
gcatagttgaggctgatagggctga

SEQ ID NO: 2251548 - DNA, 25 bp, Homo sapien
tgggtgcagaagctggacacatgct

SEQ ID NO: 2251549 - DNA, 25 bp, Homo sapien
catagggtacctgctttatgccaaa

SEQ ID NO: 2251550 - DNA, 25 bp, Homo sapien
tagggtacctgctttatgccaaaac

SEQ ID NO: 2251551 - DNA, 25 bp, Homo sapien
ggtacctgctttatgccaaaaccta

SEQ ID NO: 2251552 - DNA, 25 bp, Homo sapien
tacctgctttatgccaaaacctaat

SEQ ID NO: 2251553 - DNA, 25 bp, Homo sapien
caaggttatacaatacctggccact

SEQ ID NO: 2251554 - DNA, 25 bp, Homo sapien
tcttggctttcttcggtcatctggt

SEQ ID NO: 2251555 - DNA, 25 bp, Homo sapien
aagcctctggagattcacgttcacc

SEQ ID NO: 2251556 - DNA, 25 bp, Homo sapien
caatgaggaattgagttcaggcatg

SEQ ID NO: 2251557 - DNA, 25 bp, Homo sapien
cagcgttaacaaggacaatgcacag

SEQ ID NO: 2251558 - DNA, 25 bp, Homo sapien
tggaaagccaaagcactatttctcc

SEQ ID NO: 2251559 - DNA, 25 bp, Homo sapien
cctccatagccagggtttctttgga

SEQ ID NO: 2251560 - DNA, 25 bp, Homo sapien
cacagccttgctatacagcgttaac

SEQ ID NO: 2251561 - DNA, 25 bp, Homo sapien
gataaagcccttactgccaccgaaa

SEQ ID NO: 2251562 - DNA, 25 bp, Homo sapien
actgccaccgaaagaaaacagagtg

SEQ ID NO: 2251563 - DNA, 25 bp, Homo sapien
tggcactaagtaccttgataaagcc

SEQ ID NO: 2251564 - DNA, 25 bp, Homo sapien
ttccccagtgcaggaactgatggca

SEQ ID NO: 2251565 - DNA, 25 bp, Homo sapien
ggtgcagcagttgagaagacgttat

SEQ ID NO: 2251566 - DNA, 25 bp, Homo sapien
atctcctcttcgtggacatcgtgag

SEQ ID NO: 2251567 - DNA, 25 bp, Homo sapien
gttgagaagacgttatctagttggc

SEQ ID NO: 2251568 - DNA, 25 bp, Homo sapien
gacgttatctagttggcattgccaa

SEQ ID NO: 2251569 - DNA, 25 bp, Homo sapien
atatggaaaccaagtggaacagtac

SEQ ID NO: 2251570 - DNA, 25 bp, Homo sapien
ccaagtggaacagtacaaataataa

SEQ ID NO: 2251571 - DNA, 25 bp, Homo sapien
tgtccttcttccctatgaatgcata

SEQ ID NO: 2251572 - DNA, 25 bp, Homo sapien
cttccctatgaatgcatatggaaac

SEQ ID NO: 2251573 - DNA, 25 bp, Homo sapien
acagatccctggtactcatggatgg

SEQ ID NO: 2251574 - DNA, 25 bp, Homo sapien
gatccctggtactcatggatggaat

SEQ ID NO: 2251575 - DNA, 25 bp, Homo sapien
tccctggtactcatggatggaatac

SEQ ID NO: 2251576 - DNA, 25 bp, Homo sapien
cagatccctggtactcatggatgga

SEQ ID NO: 2251577 - DNA, 25 bp, Homo sapien
gagccctggtagaacatttgataag

SEQ ID NO: 2251578 - DNA, 25 bp, Homo sapien
taatgagccctggtagaacatttga

SEQ ID NO: 2251579 - DNA, 25 bp, Homo sapien
ttgcttccatattaatgagccctgg

SEQ ID NO: 2251580 - DNA, 25 bp, Homo sapien
tccatattaatgagccctggtagaa

SEQ ID NO: 2251581 - DNA, 25 bp, Homo sapien
ggaacagttgcgatgacattatcgg

SEQ ID NO: 2251582 - DNA, 25 bp, Homo sapien
tgacattatcgggtgctggttggcc

SEQ ID NO: 2251583 - DNA, 25 bp, Homo sapien
tgctggtggaacagttgcgatgaca

SEQ ID NO: 2251584 - DNA, 25 bp, Homo sapien
tgcgatgacattatcgggtgctggt

SEQ ID NO: 2251585 - DNA, 25 bp, Homo sapien
gctgttgccaaataactaagccgta

SEQ ID NO: 2251586 - DNA, 25 bp, Homo sapien
tgacctgacattattaggttgtggt

SEQ ID NO: 2251587 - DNA, 25 bp, Homo sapien
ccgtagtggaagagttgacctgaca

SEQ ID NO: 2251588 - DNA, 25 bp, Homo sapien
cattattaggttgtggtcggttatt

SEQ ID NO: 2251589 - DNA, 25 bp, Homo sapien
tgttggagcagttgaaaaaacgtta

SEQ ID NO: 2251590 - DNA, 25 bp, Homo sapien
tcttcagggacgtagtaagtgatgg

SEQ ID NO: 2251591 - DNA, 25 bp, Homo sapien
cctgtcatattaagacctgttggag

SEQ ID NO: 2251592 - DNA, 25 bp, Homo sapien
tatcagctcctgtcatattaagacc

SEQ ID NO: 2251593 - DNA, 25 bp, Homo sapien
gaagagtcaacaacacgttatcagg

SEQ ID NO: 2251594 - DNA, 25 bp, Homo sapien
agttgacaagtcgtgatcagttggg

SEQ ID NO: 2251595 - DNA, 25 bp, Homo sapien
gaatatcagccgctgccatattaat

SEQ ID NO: 2251596 - DNA, 25 bp, Homo sapien
ccattctctctttgtggacattgtg

SEQ ID NO: 2251597 - DNA, 25 bp, Homo sapien
ctcatggccggaatatcagccgctg

SEQ ID NO: 2251598 - DNA, 25 bp, Homo sapien
cctgcattacactgcatgcgtatgg

SEQ ID NO: 2251599 - DNA, 25 bp, Homo sapien
cattacactgcatgcgtatggaaac

SEQ ID NO: 2251600 - DNA, 25 bp, Homo sapien
tgcattacactgcatgcgtatggaa

SEQ ID NO: 2251601 - DNA, 25 bp, Homo sapien
gcattacactgcatgcgtatggaaa

SEQ ID NO: 2251602 - DNA, 25 bp, Homo sapien
tgtaggacagtacagctggtgaaca

SEQ ID NO: 2251603 - DNA, 25 bp, Homo sapien
gacagtacagctggtgaacaaacat

SEQ ID NO: 2251604 - DNA, 25 bp, Homo sapien
catgtaggacagtacagctggtgaa

SEQ ID NO: 2251605 - DNA, 25 bp, Homo sapien
cagtacagctggtgaacaaacatac

SEQ ID NO: 2251606 - DNA, 25 bp, Homo sapien
ccatatgacgaacctgtggtggaat

SEQ ID NO: 2251607 - DNA, 25 bp, Homo sapien
acctgtggtggaatagttgacaaga

SEQ ID NO: 2251608 - DNA, 25 bp, Homo sapien
cgaacctgtggtggaatagttgaca

SEQ ID NO: 2251609 - DNA, 25 bp, Homo sapien
tatgacgaacctgtggtggaatagt

SEQ ID NO: 2251610 - DNA, 25 bp, Homo sapien
atagatgcctggtactcatcaatgg

SEQ ID NO: 2251611 - DNA, 25 bp, Homo sapien
gatgcctggtactcatcaatggaat

SEQ ID NO: 2251612 - DNA, 25 bp, Homo sapien
tagatgcctggtactcatcaatgga

SEQ ID NO: 2251613 - DNA, 25 bp, Homo sapien
agatgcctggtactcatcaatggaa

SEQ ID NO: 2251614 - DNA, 25 bp, Homo sapien
gcatcgggaaaccaattgaagaagt

SEQ ID NO: 2251615 - DNA, 25 bp, Homo sapien
attgacggtagcatcgggaaaccaa

SEQ ID NO: 2251616 - DNA, 25 bp, Homo sapien
caagatgttatgtggttgtgtttgg

SEQ ID NO: 2251617 - DNA, 25 bp, Homo sapien
cggtagcatcgggaaaccaattgaa

SEQ ID NO: 2251618 - DNA, 25 bp, Homo sapien
atgcagtaaacaagtacgacagcag

SEQ ID NO: 2251619 - DNA, 25 bp, Homo sapien
cacaggtttcttgtactcatcattt

SEQ ID NO: 2251620 - DNA, 25 bp, Homo sapien
taaacaagtacgacagcagaataaa

SEQ ID NO: 2251621 - DNA, 25 bp, Homo sapien
ctcttggcataatgaatacatgcag

SEQ ID NO: 2251622 - DNA, 25 bp, Homo sapien
cttctcaagttgctgaattaaggca

SEQ ID NO: 2251623 - DNA, 25 bp, Homo sapien
ctcaagttgctgaattaaggcaact

SEQ ID NO: 2251624 - DNA, 25 bp, Homo sapien
tctcaagttgctgaattaaggcaac

SEQ ID NO: 2251625 - DNA, 25 bp, Homo sapien
caagttgctgaattaaggcaacttt

SEQ ID NO: 2251626 - DNA, 25 bp, Homo sapien
gcttccctgatggtaaattcaacaa

SEQ ID NO: 2251627 - DNA, 25 bp, Homo sapien
ttgtctcttgactttcatagatcct

SEQ ID NO: 2251628 - DNA, 25 bp, Homo sapien
ctttcatagatccttgtagttcttc

SEQ ID NO: 2251629 - DNA, 25 bp, Homo sapien
tgtagttcttcaagcaaaatgaaaa

SEQ ID NO: 2251630 - DNA, 25 bp, Homo sapien
ccaatgcgttgagtggcatacaatc

SEQ ID NO: 2251631 - DNA, 25 bp, Homo sapien
tgcgttgagtggcatacaatcttct

SEQ ID NO: 2251632 - DNA, 25 bp, Homo sapien
tgagtggcatacaatcttctgtcat

SEQ ID NO: 2251633 - DNA, 25 bp, Homo sapien
gttgagtggcatacaatcttctgtc

SEQ ID NO: 2251634 - DNA, 25 bp, Homo sapien
ctggaatccaaatgaaaaagttgag

SEQ ID NO: 2251635 - DNA, 25 bp, Homo sapien
cctgcaggacgctatgcatgcatat

SEQ ID NO: 2251636 - DNA, 25 bp, Homo sapien
tcttccctgcaggacgctatgcatg

SEQ ID NO: 2251637 - DNA, 25 bp, Homo sapien
ttccctgcaggacgctatgcatgca

SEQ ID NO: 2251638 - DNA, 25 bp, Homo sapien
ttcttccctgcaggacgctatgcat

SEQ ID NO: 2251639 - DNA, 25 bp, Homo sapien
gatccttggtactcctggatgaaat

SEQ ID NO: 2251640 - DNA, 25 bp, Homo sapien
tccttggtactcctggatgaaatac

SEQ ID NO: 2251641 - DNA, 25 bp, Homo sapien
cagatccttggtactcctggatgaa

SEQ ID NO: 2251642 - DNA, 25 bp, Homo sapien
acagatccttggtactcctggatga

SEQ ID NO: 2251643 - DNA, 25 bp, Homo sapien
ccagtggaactgttgacaaggagtt

SEQ ID NO: 2251644 - DNA, 25 bp, Homo sapien
cccagtggaactgttgacaaggagt

SEQ ID NO: 2251645 - DNA, 25 bp, Homo sapien
cagtggaactgttgacaaggagtta

SEQ ID NO: 2251646 - DNA, 25 bp, Homo sapien
tttcactgacatcgtgagtgatggt

SEQ ID NO: 2251647 - DNA, 25 bp, Homo sapien
tcgtggccagaataccagcttctgc

SEQ ID NO: 2251648 - DNA, 25 bp, Homo sapien
cacaggaagttatcagttgctggtt

SEQ ID NO: 2251649 - DNA, 25 bp, Homo sapien
aagccctggtgtaacagtgcacagg

SEQ ID NO: 2251650 - DNA, 25 bp, Homo sapien
cagatcattggtactcatggctgga

SEQ ID NO: 2251651 - DNA, 25 bp, Homo sapien
gatcattggtactcatggctggaat

SEQ ID NO: 2251652 - DNA, 25 bp, Homo sapien
acagatcattggtactcatggctgg

SEQ ID NO: 2251653 - DNA, 25 bp, Homo sapien
tcattggtactcatggctggaatac

SEQ ID NO: 2251654 - DNA, 25 bp, Homo sapien
gccccggtggaacagctgacaatat

SEQ ID NO: 2251655 - DNA, 25 bp, Homo sapien
gatgtattaataagccccggtggaa

SEQ ID NO: 2251656 - DNA, 25 bp, Homo sapien
tcttcataggcattgtgagtgacag

SEQ ID NO: 2251657 - DNA, 25 bp, Homo sapien
tatattatcagctgcttgttggcca

SEQ ID NO: 2251658 - DNA, 25 bp, Homo sapien
catccctggtactcatgggtggaat

SEQ ID NO: 2251659 - DNA, 25 bp, Homo sapien
aacatccctggtactcatgggtgga

SEQ ID NO: 2251660 - DNA, 25 bp, Homo sapien
tccctggtactcatgggtggaatac

SEQ ID NO: 2251661 - DNA, 25 bp, Homo sapien
aaacatccctggtactcatgggtgg

SEQ ID NO: 2251662 - DNA, 25 bp, Homo sapien
tctccatggacattgagattgacta

SEQ ID NO: 2251663 - DNA, 25 bp, Homo sapien
ctctccatggacattgagattgact

SEQ ID NO: 2251664 - DNA, 25 bp, Homo sapien
ttctctccatggacattgagattga

SEQ ID NO: 2251665 - DNA, 25 bp, Homo sapien
taggacaatccaacttataagcaaa

SEQ ID NO: 2251666 - DNA, 25 bp, Homo sapien
aggacaatccaacttataagcaaac

SEQ ID NO: 2251667 - DNA, 25 bp, Homo sapien
gacaatccaacttataagcaaacat

SEQ ID NO: 2251668 - DNA, 25 bp, Homo sapien
ggacaatccaacttataagcaaaca

SEQ ID NO: 2251669 - DNA, 25 bp, Homo sapien
tcacttcatagacattgtgattgat

SEQ ID NO: 2251670 - DNA, 25 bp, Homo sapien
ctcacttcatagacattgtgattga

SEQ ID NO: 2251671 - DNA, 25 bp, Homo sapien
ttaacacgctctggtggaaaagtta

SEQ ID NO: 2251672 - DNA, 25 bp, Homo sapien
ccctaggactcatggccgaaaaatc

SEQ ID NO: 2251673 - DNA, 25 bp, Homo sapien
cattattcagttgcagttggtcatt

SEQ ID NO: 2251674 - DNA, 25 bp, Homo sapien
gccgaaaaatcagctactgccatgt

SEQ ID NO: 2251675 - DNA, 25 bp, Homo sapien
ttatcaggtgctggctggtcgttat

SEQ ID NO: 2251676 - DNA, 25 bp, Homo sapien
tgctggctggtcgttatttatcttc

SEQ ID NO: 2251677 - DNA, 25 bp, Homo sapien
aggtgctggctggtcgttatttatc

SEQ ID NO: 2251678 - DNA, 25 bp, Homo sapien
tcaggtgctggctggtcgttattta

SEQ ID NO: 2251679 - DNA, 25 bp, Homo sapien
atggatgaaataccagctgctgcta

SEQ ID NO: 2251680 - DNA, 25 bp, Homo sapien
ggtactcatggatgaaataccagct

SEQ ID NO: 2251681 - DNA, 25 bp, Homo sapien
ccagctgctgctatattaataagcg

SEQ ID NO: 2251682 - DNA, 25 bp, Homo sapien
accgatccctggtactcatggatga

SEQ ID NO: 2251683 - DNA, 25 bp, Homo sapien
taaccaccgcgacatactcttcctt

SEQ ID NO: 2251684 - DNA, 25 bp, Homo sapien
tgtttgtttaaccaccgcgacatac

SEQ ID NO: 2251685 - DNA, 25 bp, Homo sapien
tcctgtttgtttaaccaccgcgaca

SEQ ID NO: 2251686 - DNA, 25 bp, Homo sapien
tttgtttaaccaccgcgacatactc

SEQ ID NO: 2251687 - DNA, 25 bp, Homo sapien
tgtaaacacgtagccaactgtatga

SEQ ID NO: 2251688 - DNA, 25 bp, Homo sapien
taaacacgtagccaactgtatgaag

SEQ ID NO: 2251689 - DNA, 25 bp, Homo sapien
cacgtagccaactgtatgaagttct

SEQ ID NO: 2251690 - DNA, 25 bp, Homo sapien
atcatttgtaaacacgtagccaact

SEQ ID NO: 2251691 - DNA, 25 bp, Homo sapien
tgtgttactagaacactttgattta

SEQ ID NO: 2251692 - DNA, 25 bp, Homo sapien
gttactagaacactttgatttataa

SEQ ID NO: 2251693 - DNA, 25 bp, Homo sapien
gtgtgttactagaacactttgattt

SEQ ID NO: 2251694 - DNA, 25 bp, Homo sapien
tgttactagaacactttgatttata

SEQ ID NO: 2251695 - DNA, 25 bp, Homo sapien
aactggcacataaatcagtgctaca

SEQ ID NO: 2251696 - DNA, 25 bp, Homo sapien
actggcacataaatcagtgctacac

SEQ ID NO: 2251697 - DNA, 25 bp, Homo sapien
agaaggttctgcgttcctctgctta

SEQ ID NO: 2251698 - DNA, 25 bp, Homo sapien
gaaggttctgcgttcctctgcttac

SEQ ID NO: 2251699 - DNA, 25 bp, Homo sapien
gcttcctggttctctaggctggcac

SEQ ID NO: 2251700 - DNA, 25 bp, Homo sapien
tggcacccactgagcgagagccttc

SEQ ID NO: 2251701 - DNA, 25 bp, Homo sapien
agtccgctgtacaggccgcctttag

SEQ ID NO: 2251702 - DNA, 25 bp, Homo sapien
ttctcctagggactctggcgccctg

SEQ ID NO: 2251703 - DNA, 25 bp, Homo sapien
tgtctcatcccttttggatggggct

SEQ ID NO: 2251704 - DNA, 25 bp, Homo sapien
atcccttttggatggggctgtttct

SEQ ID NO: 2251705 - DNA, 25 bp, Homo sapien
gtttctgagttgctgtatcttagcc

SEQ ID NO: 2251706 - DNA, 25 bp, Homo sapien
tctcatcccttttggatggggctgt

SEQ ID NO: 2251707 - DNA, 25 bp, Homo sapien
tctggggtgtagaacttttccttgc

SEQ ID NO: 2251708 - DNA, 25 bp, Homo sapien
cattgctggaatttttcttaactct

SEQ ID NO: 2251709 - DNA, 25 bp, Homo sapien
tgctggaatttttcttaactctggg

SEQ ID NO: 2251710 - DNA, 25 bp, Homo sapien
ctctggggtgtagaacttttccttg

SEQ ID NO: 2251711 - DNA, 25 bp, Homo sapien
cagtgctccatggaacagaaatgcg

SEQ ID NO: 2251712 - DNA, 25 bp, Homo sapien
gaggccctagagacatcaccattga

SEQ ID NO: 2251713 - DNA, 25 bp, Homo sapien
tggccaagtttccaagtataaggga

SEQ ID NO: 2251714 - DNA, 25 bp, Homo sapien
gttggatccagacactaataccgtt

SEQ ID NO: 2251715 - DNA, 25 bp, Homo sapien
aaggcacactttggttcccatccca

SEQ ID NO: 2251716 - DNA, 25 bp, Homo sapien
atccaaggcacactttggttcccat

SEQ ID NO: 2251717 - DNA, 25 bp, Homo sapien
tccaaggcacactttggttcccatc

SEQ ID NO: 2251718 - DNA, 25 bp, Homo sapien
caaggcacactttggttcccatccc

SEQ ID NO: 2251719 - DNA, 25 bp, Homo sapien
tctggaaacatgcagggctcgttat

SEQ ID NO: 2251720 - DNA, 25 bp, Homo sapien
ctatacttggacacctttacaggtt

SEQ ID NO: 2251721 - DNA, 25 bp, Homo sapien
taaagcagaaacctgttcctcgacc

SEQ ID NO: 2251722 - DNA, 25 bp, Homo sapien
tattaattgtatgtcctctttgtac

SEQ ID NO: 2251723 - DNA, 25 bp, Homo sapien
catacgttgctgtgcagttggtact

SEQ ID NO: 2251724 - DNA, 25 bp, Homo sapien
ttgctgtgcagttggtactgaaggt

SEQ ID NO: 2251725 - DNA, 25 bp, Homo sapien
ctgtgcagttggtactgaaggtcgc

SEQ ID NO: 2251726 - DNA, 25 bp, Homo sapien
ctacgcatacgttgctgtgcagttg

SEQ ID NO: 2251727 - DNA, 25 bp, Homo sapien
ggacacatgatcgtagccctgtggg

SEQ ID NO: 2251728 - DNA, 25 bp, Homo sapien
gggctttatctcaacctctggtgga

SEQ ID NO: 2251729 - DNA, 25 bp, Homo sapien
cggtgtttctttcccgctcagtcgc

SEQ ID NO: 2251730 - DNA, 25 bp, Homo sapien
ccttggttgcctgtgtcggcctcgg

SEQ ID NO: 2251731 - DNA, 25 bp, Homo sapien
aaaattattatctgtaggtgctctc

SEQ ID NO: 2251732 - DNA, 25 bp, Homo sapien
tattatctgtaggtgctctctcccg

SEQ ID NO: 2251733 - DNA, 25 bp, Homo sapien
tgtaggtgctctctcccggtgccgc

SEQ ID NO: 2251734 - DNA, 25 bp, Homo sapien
aatggggtaatgttccttggattct

SEQ ID NO: 2251735 - DNA, 25 bp, Homo sapien
tctggaaacatgcagggctcgttat

SEQ ID NO: 2251736 - DNA, 25 bp, Homo sapien
ctatacttggacacctttacaggtt

SEQ ID NO: 2251737 - DNA, 25 bp, Homo sapien
tattaattgtatgtcctctttgtac

SEQ ID NO: 2251738 - DNA, 25 bp, Homo sapien
taaagcagaaacctgttcctcgacc

SEQ ID NO: 2251739 - DNA, 25 bp, Homo sapien
agaaggttctgcattcctccgcata

SEQ ID NO: 2251740 - DNA, 25 bp, Homo sapien
aaggttctgcattcctccgcatacg

SEQ ID NO: 2251741 - DNA, 25 bp, Homo sapien
tgcattcctccgcatacgttgctgt

SEQ ID NO: 2251742 - DNA, 25 bp, Homo sapien
ttctgcattcctccgcatacgttgc

SEQ ID NO: 2251743 - DNA, 25 bp, Homo sapien
tgtaggtgctctctcccggtgccgc

SEQ ID NO: 2251744 - DNA, 25 bp, Homo sapien
tattatctgtaggtgctctctcccg

SEQ ID NO: 2251745 - DNA, 25 bp, Homo sapien
aaaattattatctgtaggtgctctc

SEQ ID NO: 2251746 - DNA, 25 bp, Homo sapien
aatggggtaatgttccttggattct

SEQ ID NO: 2251747 - DNA, 25 bp, Homo sapien
ctgtaactgtgattctttactgcag

SEQ ID NO: 2251748 - DNA, 25 bp, Homo sapien
gttctgtaactgtgattctttactg

SEQ ID NO: 2251749 - DNA, 25 bp, Homo sapien
tggttctgtaactgtgattctttac

SEQ ID NO: 2251750 - DNA, 25 bp, Homo sapien
tctgtaactgtgattctttactgca

SEQ ID NO: 2251751 - DNA, 25 bp, Homo sapien
aaactcattggggtaccaacaaatg

SEQ ID NO: 2251752 - DNA, 25 bp, Homo sapien
gcaatgtctggggttattacgggga

SEQ ID NO: 2251753 - DNA, 25 bp, Homo sapien
gccctgcactgccggggctccgcat

SEQ ID NO: 2251754 - DNA, 25 bp, Homo sapien
gtggccttggactgtagcagttgga

SEQ ID NO: 2251755 - DNA, 25 bp, Homo sapien
cagtggtggccttggactgtagcag

SEQ ID NO: 2251756 - DNA, 25 bp, Homo sapien
tggtggccttggactgtagcagttg

SEQ ID NO: 2251757 - DNA, 25 bp, Homo sapien
gttctctctctcggtgccacgggag

SEQ ID NO: 2251758 - DNA, 25 bp, Homo sapien
ggttctctctctcggtgccacggga

SEQ ID NO: 2251759 - DNA, 25 bp, Homo sapien
ttctctctctcggtgccacgggagg

SEQ ID NO: 2251760 - DNA, 25 bp, Homo sapien
tgaggctgtccggttctaccaatgt

SEQ ID NO: 2251761 - DNA, 25 bp, Homo sapien
ctctcctttcagcatttgttggtac

SEQ ID NO: 2251762 - DNA, 25 bp, Homo sapien
catttgttggtaccccaatgagttt

SEQ ID NO: 2251763 - DNA, 25 bp, Homo sapien
tccccgtaataaccccagacattgc

SEQ ID NO: 2251764 - DNA, 25 bp, Homo sapien
gcatttggggtgtgataatcctcca

SEQ ID NO: 2251765 - DNA, 25 bp, Homo sapien
tcattaacgagattatgcatttggg

SEQ ID NO: 2251766 - DNA, 25 bp, Homo sapien
gcaatatcctgctccattgtagaaa

SEQ ID NO: 2251767 - DNA, 25 bp, Homo sapien
gattcggtaacatatgccaggagac

SEQ ID NO: 2251768 - DNA, 25 bp, Homo sapien
ttaaggtgcttaacaaagtctcgtc

SEQ ID NO: 2251769 - DNA, 25 bp, Homo sapien
tcttcttaaggtgcttaacaaagtc

SEQ ID NO: 2251770 - DNA, 25 bp, Homo sapien
gcttaacaaagtctcgtctcataca

SEQ ID NO: 2251771 - DNA, 25 bp, Homo sapien
ggtgcttaacaaagtctcgtctcat

SEQ ID NO: 2251772 - DNA, 25 bp, Homo sapien
ttcctgactgcagtaggtccttgca

SEQ ID NO: 2251773 - DNA, 25 bp, Homo sapien
gatggattcaaaaaatcgtttcctg

SEQ ID NO: 2251774 - DNA, 25 bp, Homo sapien
caaaaaatcgtttcctgactgcagt

SEQ ID NO: 2251775 - DNA, 25 bp, Homo sapien
ccttgatgatggattcaaaaaatcg

SEQ ID NO: 2251776 - DNA, 25 bp, Homo sapien
gctgaaaccagtgaagtcatcaatc

SEQ ID NO: 2251777 - DNA, 25 bp, Homo sapien
tctctgcattctaggtcatctccag

SEQ ID NO: 2251778 - DNA, 25 bp, Homo sapien
tgctggtaacgtttcctcccacagg

SEQ ID NO: 2251779 - DNA, 25 bp, Homo sapien
caacgcatcggagttccttcactaa

SEQ ID NO: 2251780 - DNA, 25 bp, Homo sapien
ccctccacatagacctcatgaatga

SEQ ID NO: 2251781 - DNA, 25 bp, Homo sapien
tccacatagacctcatgaatgacag

SEQ ID NO: 2251782 - DNA, 25 bp, Homo sapien
catcagttggtgtttgaccactttc

SEQ ID NO: 2251783 - DNA, 25 bp, Homo sapien
aaaagccatcagttggtgtttgacc

SEQ ID NO: 2251784 - DNA, 25 bp, Homo sapien
tgagctgtgagatatgtgtgtttca

SEQ ID NO: 2251785 - DNA, 25 bp, Homo sapien
gagctgtgagatatgtgtgtttcat

SEQ ID NO: 2251786 - DNA, 25 bp, Homo sapien
gttgagctgtgagatatgtgtgttt

SEQ ID NO: 2251787 - DNA, 25 bp, Homo sapien
ctctgggtacatctatgtgctcctc

SEQ ID NO: 2251788 - DNA, 25 bp, Homo sapien
tgcacaatgagcaaatgaaacatac

SEQ ID NO: 2251789 - DNA, 25 bp, Homo sapien
gtgcacaatgagcaaatgaaacata

SEQ ID NO: 2251790 - DNA, 25 bp, Homo sapien
tgggctagtggtaaggaagcagtcc

SEQ ID NO: 2251791 - DNA, 25 bp, Homo sapien
ccttctgtggaggtacccttgggca

SEQ ID NO: 2251792 - DNA, 25 bp, Homo sapien
cttgggcagggcttgaaggaaaaag

SEQ ID NO: 2251793 - DNA, 25 bp, Homo sapien
gagttccaggttgcggtgaggccaa

SEQ ID NO: 2251794 - DNA, 25 bp, Homo sapien
tctgccttttctgatacgaaggact

SEQ ID NO: 2251795 - DNA, 25 bp, Homo sapien
tttctgatacgaaggactgtcacat

SEQ ID NO: 2251796 - DNA, 25 bp, Homo sapien
ggactgtcacattccctgggacgtt

SEQ ID NO: 2251797 - DNA, 25 bp, Homo sapien
aggactgtcacattccctgggacgt

SEQ ID NO: 2251798 - DNA, 25 bp, Homo sapien
tagagaatccaaggaacattacccc

SEQ ID NO: 2251799 - DNA, 25 bp, Homo sapien
gaatccaaggaacattaccccattc

SEQ ID NO: 2251800 - DNA, 25 bp, Homo sapien
ggcttagagaatccaaggaacatta

SEQ ID NO: 2251801 - DNA, 25 bp, Homo sapien
gagaatccaaggaacattaccccat

SEQ ID NO: 2251802 - DNA, 25 bp, Homo sapien
tttctagaaacctgccctctgggag

SEQ ID NO: 2251803 - DNA, 25 bp, Homo sapien
gagacggcggcacctcacaaaatgg

SEQ ID NO: 2251804 - DNA, 25 bp, Homo sapien
agttgtggcgcctccccactggtgg

SEQ ID NO: 2251805 - DNA, 25 bp, Homo sapien
cagtgaagttgtggcgcctccccac

SEQ ID NO: 2251806 - DNA, 25 bp, Homo sapien
ttaatgagtgcagcacacaaaaatg

SEQ ID NO: 2251807 - DNA, 25 bp, Homo sapien
gagttaatgagtgcagcacacaaaa

SEQ ID NO: 2251808 - DNA, 25 bp, Homo sapien
atgagtgcagcacacaaaaatggca

SEQ ID NO: 2251809 - DNA, 25 bp, Homo sapien
tgagtgcagcacacaaaaatggcac

SEQ ID NO: 2251810 - DNA, 25 bp, Homo sapien
ctgctgcagaaaccacgactgtaat

SEQ ID NO: 2251811 - DNA, 25 bp, Homo sapien
taataatatctaccagcacaggtgg

SEQ ID NO: 2251812 - DNA, 25 bp, Homo sapien
ctgtaatagtatttacctaatgggt

SEQ ID NO: 2251813 - DNA, 25 bp, Homo sapien
taccagcacaggtgggaatacaaaa

SEQ ID NO: 2251814 - DNA, 25 bp, Homo sapien
ttaaggtgcttaacaaagtctcgtc

SEQ ID NO: 2251815 - DNA, 25 bp, Homo sapien
tcttcttaaggtgcttaacaaagtc

SEQ ID NO: 2251816 - DNA, 25 bp, Homo sapien
gcttaacaaagtctcgtctcataca

SEQ ID NO: 2251817 - DNA, 25 bp, Homo sapien
ggtgcttaacaaagtctcgtctcat

SEQ ID NO: 2251818 - DNA, 25 bp, Homo sapien
ttcctgactgcagtaggtccttgca

SEQ ID NO: 2251819 - DNA, 25 bp, Homo sapien
caaaaaatcgtttcctgactgcagt

SEQ ID NO: 2251820 - DNA, 25 bp, Homo sapien
gatggattcaaaaaatcgtttcctg

SEQ ID NO: 2251821 - DNA, 25 bp, Homo sapien
ccttgatgatggattcaaaaaatcg

SEQ ID NO: 2251822 - DNA, 25 bp, Homo sapien
cgtccaaggcatcggatttccttca

SEQ ID NO: 2251823 - DNA, 25 bp, Homo sapien
ttcgtccaaggcatcggatttcctt

SEQ ID NO: 2251824 - DNA, 25 bp, Homo sapien
tcgtccaaggcatcggatttccttc

SEQ ID NO: 2251825 - DNA, 25 bp, Homo sapien
aagccatcagttggtgtttgaccac

SEQ ID NO: 2251826 - DNA, 25 bp, Homo sapien
gccatcagttggtgtttgaccactt

SEQ ID NO: 2251827 - DNA, 25 bp, Homo sapien
catcagttggtgtttgaccactttc

SEQ ID NO: 2251828 - DNA, 25 bp, Homo sapien
aaaagccatcagttggtgtttgacc

SEQ ID NO: 2251829 - DNA, 25 bp, Homo sapien
ctggaaatcaaactgagaagttgag

SEQ ID NO: 2251830 - DNA, 25 bp, Homo sapien
ctctgggtacatctatgtgctcctc

SEQ ID NO: 2251831 - DNA, 25 bp, Homo sapien
ggagttccaggttgcggtgaggcca

SEQ ID NO: 2251832 - DNA, 25 bp, Homo sapien
tgcggtgaggccaaggatatgggct

SEQ ID NO: 2251833 - DNA, 25 bp, Homo sapien
gaggccaaggatatgggctggagtg

SEQ ID NO: 2251834 - DNA, 25 bp, Homo sapien
cttgggcagggcttgaaggaaaaag

SEQ ID NO: 2251835 - DNA, 25 bp, Homo sapien
tttctgatacgaaggactgtcacat

SEQ ID NO: 2251836 - DNA, 25 bp, Homo sapien
aggactgtcacattccctgggacgt

SEQ ID NO: 2251837 - DNA, 25 bp, Homo sapien
ggactgtcacattccctgggacgtt

SEQ ID NO: 2251838 - DNA, 25 bp, Homo sapien
tctgccttttctgatacgaaggact

SEQ ID NO: 2251839 - DNA, 25 bp, Homo sapien
tagagaatccaaggaacattacccc

SEQ ID NO: 2251840 - DNA, 25 bp, Homo sapien
gaatccaaggaacattaccccattc

SEQ ID NO: 2251841 - DNA, 25 bp, Homo sapien
ggcttagagaatccaaggaacatta

SEQ ID NO: 2251842 - DNA, 25 bp, Homo sapien
gagaatccaaggaacattaccccat

SEQ ID NO: 2251843 - DNA, 25 bp, Homo sapien
tcattaacgagattatgcatttggg

SEQ ID NO: 2251844 - DNA, 25 bp, Homo sapien
gcaatatcctgctccattgtagaaa

SEQ ID NO: 2251845 - DNA, 25 bp, Homo sapien
ggaaggccagttgattcggtaacat

SEQ ID NO: 2251846 - DNA, 25 bp, Homo sapien
gattcggtaacatatgccaggagac

SEQ ID NO: 2251847 - DNA, 25 bp, Homo sapien
tcttcttaaggtgcttaacaaagtc

SEQ ID NO: 2251848 - DNA, 25 bp, Homo sapien
ttaaggtgcttaacaaagtctcgtc

SEQ ID NO: 2251849 - DNA, 25 bp, Homo sapien
gcttaacaaagtctcgtctcataca

SEQ ID NO: 2251850 - DNA, 25 bp, Homo sapien
ggtgcttaacaaagtctcgtctcat

SEQ ID NO: 2251851 - DNA, 25 bp, Homo sapien
ttcctgactgcagtaggtccttgca

SEQ ID NO: 2251852 - DNA, 25 bp, Homo sapien
gatggattcaaaaaatcgtttcctg

SEQ ID NO: 2251853 - DNA, 25 bp, Homo sapien
ccttgatgatggattcaaaaaatcg

SEQ ID NO: 2251854 - DNA, 25 bp, Homo sapien
caaaaaatcgtttcctgactgcagt

SEQ ID NO: 2251855 - DNA, 25 bp, Homo sapien
gctgaaaccagtgaagtcatcaatc

SEQ ID NO: 2251856 - DNA, 25 bp, Homo sapien
tctctgcattctaggtcatctccag

SEQ ID NO: 2251857 - DNA, 25 bp, Homo sapien
tgctggtaacgtttcctcccacagg

SEQ ID NO: 2251858 - DNA, 25 bp, Homo sapien
caacgcatcggagttccttcactaa

SEQ ID NO: 2251859 - DNA, 25 bp, Homo sapien
ccctccacatagacctcatgaatga

SEQ ID NO: 2251860 - DNA, 25 bp, Homo sapien
tccacatagacctcatgaatgacag

SEQ ID NO: 2251861 - DNA, 25 bp, Homo sapien
catcagttggtgtttgaccactttc

SEQ ID NO: 2251862 - DNA, 25 bp, Homo sapien
aaaagccatcagttggtgtttgacc

SEQ ID NO: 2251863 - DNA, 25 bp, Homo sapien
gagctgtgagatatgtgtgtttcat

SEQ ID NO: 2251864 - DNA, 25 bp, Homo sapien
tgagctgtgagatatgtgtgtttca

SEQ ID NO: 2251865 - DNA, 25 bp, Homo sapien
gttgagctgtgagatatgtgtgttt

SEQ ID NO: 2251866 - DNA, 25 bp, Homo sapien
ctctgggtacatctatgtgctcctc

SEQ ID NO: 2251867 - DNA, 25 bp, Homo sapien
tgcacaatgagcaaatgaaacatac

SEQ ID NO: 2251868 - DNA, 25 bp, Homo sapien
gtgcacaatgagcaaatgaaacata

SEQ ID NO: 2251869 - DNA, 25 bp, Homo sapien
tgggctagtggtaaggaagcagtcc

SEQ ID NO: 2251870 - DNA, 25 bp, Homo sapien
ccttctgtggaggtacccttgggca

SEQ ID NO: 2251871 - DNA, 25 bp, Homo sapien
cttgggcagggcttgaaggaaaaag

SEQ ID NO: 2251872 - DNA, 25 bp, Homo sapien
gagttccaggttgcggtgaggccaa

SEQ ID NO: 2251873 - DNA, 25 bp, Homo sapien
tttctgatacgaaggactgtcacat

SEQ ID NO: 2251874 - DNA, 25 bp, Homo sapien
tctgccttttctgatacgaaggact

SEQ ID NO: 2251875 - DNA, 25 bp, Homo sapien
ggactgtcacattccctgggacgtt

SEQ ID NO: 2251876 - DNA, 25 bp, Homo sapien
aggactgtcacattccctgggacgt

SEQ ID NO: 2251877 - DNA, 25 bp, Homo sapien
tttctagaaacctgccctctgggag

SEQ ID NO: 2251878 - DNA, 25 bp, Homo sapien
gagacggcggcacctcacaaaatgg

SEQ ID NO: 2251879 - DNA, 25 bp, Homo sapien
agttgtggcgcctccccactggtgg

SEQ ID NO: 2251880 - DNA, 25 bp, Homo sapien
cagtgaagttgtggcgcctccccac

SEQ ID NO: 2251881 - DNA, 25 bp, Homo sapien
cagtgaagttgtggcgcctccccac

SEQ ID NO: 2251882 - DNA, 25 bp, Homo sapien
tccacatagacctcatgaatgacag

SEQ ID NO: 2251883 - DNA, 25 bp, Homo sapien
catcagttggtgtttgaccactttc

SEQ ID NO: 2251884 - DNA, 25 bp, Homo sapien
tcctgtcataagctctggtgaaaca

SEQ ID NO: 2251885 - DNA, 25 bp, Homo sapien
aaaagccatcagttggtgtttgacc

SEQ ID NO: 2251886 - DNA, 25 bp, Homo sapien
ctggaaatcaaactgagaagttgag

SEQ ID NO: 2251887 - DNA, 25 bp, Homo sapien
ctctgggtacatctatgtgctcctc

SEQ ID NO: 2251888 - DNA, 25 bp, Homo sapien
tgcaataaggctgtctcctgctcct

SEQ ID NO: 2251889 - DNA, 25 bp, Homo sapien
ccttgtttccttgccaacagggcca

SEQ ID NO: 2251890 - DNA, 25 bp, Homo sapien
tgttttctttggacatggcacagcc

SEQ ID NO: 2251891 - DNA, 25 bp, Homo sapien
tgctccttgtttccttgccaacagg

SEQ ID NO: 2251892 - DNA, 25 bp, Homo sapien
ggcctttctaagcaaggcaaaatct

SEQ ID NO: 2251893 - DNA, 25 bp, Homo sapien
tatgtggaagcatactgggcaaaga

SEQ ID NO: 2251894 - DNA, 25 bp, Homo sapien
gacaatttggcagtaactactgaac

SEQ ID NO: 2251895 - DNA, 25 bp, Homo sapien
agtttagtacccagtattggcatgg

SEQ ID NO: 2251896 - DNA, 25 bp, Homo sapien
tgcaatttagaacttccccttggat

SEQ ID NO: 2251897 - DNA, 25 bp, Homo sapien
tgacactttcaatgggagtttggct

SEQ ID NO: 2251898 - DNA, 25 bp, Homo sapien
ttcctgtgagtacaagacacttgaa

SEQ ID NO: 2251899 - DNA, 25 bp, Homo sapien
ccatctgatcttttcgccatgtgca

SEQ ID NO: 2251900 - DNA, 25 bp, Homo sapien
aaaactgcagtaagattttacatgt

SEQ ID NO: 2251901 - DNA, 25 bp, Homo sapien
aactgcagtaagattttacatgtac

SEQ ID NO: 2251902 - DNA, 25 bp, Homo sapien
ctgcagtaagattttacatgtacaa

SEQ ID NO: 2251903 - DNA, 25 bp, Homo sapien
taaaactgcagtaagattttacatg

SEQ ID NO: 2251904 - DNA, 25 bp, Homo sapien
tggacagggcaaggtcatttaaaga

SEQ ID NO: 2251905 - DNA, 25 bp, Homo sapien
acatatcccaaaaacacgtgtttag

SEQ ID NO: 2251906 - DNA, 25 bp, Homo sapien
gattggaaacatatcccaaaaacac

SEQ ID NO: 2251907 - DNA, 25 bp, Homo sapien
tcatttaaagattggaaacatatcc

SEQ ID NO: 2251908 - DNA, 25 bp, Homo sapien
ttagcaggactcttcccgactgagg

SEQ ID NO: 2251909 - DNA, 25 bp, Homo sapien
taaagagccttgattggtacacact

SEQ ID NO: 2251910 - DNA, 25 bp, Homo sapien
cctggcctgaggtatacaagctgct

SEQ ID NO: 2251911 - DNA, 25 bp, Homo sapien
gactgggctggcgtaacaaaccaaa

SEQ ID NO: 2251912 - DNA, 25 bp, Homo sapien
tcaatgatgtgttagaggacaatgc

SEQ ID NO: 2251913 - DNA, 25 bp, Homo sapien
aagaatttgctgtatccgaaggccg

SEQ ID NO: 2251914 - DNA, 25 bp, Homo sapien
gccggaaaagtactcgaccacgatg

SEQ ID NO: 2251915 - DNA, 25 bp, Homo sapien
taacgacgcagtgattcgagttttc

SEQ ID NO: 2251916 - DNA, 25 bp, Homo sapien
tctcctgcaatatgaactataccgt

SEQ ID NO: 2251917 - DNA, 25 bp, Homo sapien
taaactctcctgcaatatgaactat

SEQ ID NO: 2251918 - DNA, 25 bp, Homo sapien
actataccgtaacaggtaactgcaa

SEQ ID NO: 2251919 - DNA, 25 bp, Homo sapien
gcaatatgaactataccgtaacagg

SEQ ID NO: 2251920 - DNA, 25 bp, Homo sapien
tctgttaatcgcatataagaacgat

SEQ ID NO: 2251921 - DNA, 25 bp, Homo sapien
ttctgttaatcgcatataagaacga

SEQ ID NO: 2251922 - DNA, 25 bp, Homo sapien
tctttttctgttaatcgcatataag

SEQ ID NO: 2251923 - DNA, 25 bp, Homo sapien
ttttctgttaatcgcatataagaac

SEQ ID NO: 2251924 - DNA, 25 bp, Homo sapien
gcggtccccgtgccccaggcactta

SEQ ID NO: 2251925 - DNA, 25 bp, Homo sapien
aagcggtccccgtgccccaggcact

SEQ ID NO: 2251926 - DNA, 25 bp, Homo sapien
agcggtccccgtgccccaggcactt

SEQ ID NO: 2251927 - DNA, 25 bp, Homo sapien
cgaagcggtccccgtgccccaggca

SEQ ID NO: 2251928 - DNA, 25 bp, Homo sapien
cgtgggctagggcaaagagaccgat

SEQ ID NO: 2251929 - DNA, 25 bp, Homo sapien
ggcaaagagaccgatgcccaccagc

SEQ ID NO: 2251930 - DNA, 25 bp, Homo sapien
gccccttccacagcgacggcgccat

SEQ ID NO: 2251931 - DNA, 25 bp, Homo sapien
gaaaaggcggcgtgggctagggcaa

SEQ ID NO: 2251932 - DNA, 25 bp, Homo sapien
gcagaaagctacacggaaaaaggtc

SEQ ID NO: 2251933 - DNA, 25 bp, Homo sapien
ctgaagtcctgagcgcaaagtgtct

SEQ ID NO: 2251934 - DNA, 25 bp, Homo sapien
gaacccacgaacctgcgctatggag

SEQ ID NO: 2251935 - DNA, 25 bp, Homo sapien
tcataaacgaagaggcgaaagcggg

SEQ ID NO: 2251936 - DNA, 25 bp, Homo sapien
cgaggagatcgtgtccgagaagcaa

SEQ ID NO: 2251937 - DNA, 25 bp, Homo sapien
aatctggctcttcaagcaccgccgg

SEQ ID NO: 2251938 - DNA, 25 bp, Homo sapien
aaccggcctggctatgatttatggc

SEQ ID NO: 2251939 - DNA, 25 bp, Homo sapien
ggcccctttggttgctcctcgcagt

SEQ ID NO: 2251940 - DNA, 25 bp, Homo sapien
agacctctaagattcagcccactgg

SEQ ID NO: 2251941 - DNA, 25 bp, Homo sapien
tcctgtgatattgggttagctacgt

SEQ ID NO: 2251942 - DNA, 25 bp, Homo sapien
ttagctacgtaaatcctggaaaatg

SEQ ID NO: 2251943 - DNA, 25 bp, Homo sapien
tcaaaatgggatgcctagacctcta

SEQ ID NO: 2251944 - DNA, 25 bp, Homo sapien
tgaactggtcattcgaggaacacgc

SEQ ID NO: 2251945 - DNA, 25 bp, Homo sapien
cagttctgaagatgccttggatcgg

SEQ ID NO: 2251946 - DNA, 25 bp, Homo sapien
gataatacgagacatggtccagcct

SEQ ID NO: 2251947 - DNA, 25 bp, Homo sapien
tccagcgccccaaggagatttatgg

SEQ ID NO: 2251948 - DNA, 25 bp, Homo sapien
tattctgtcgggttactgacctcac

SEQ ID NO: 2251949 - DNA, 25 bp, Homo sapien
tacatgatgtgtgcctcttcacgca

SEQ ID NO: 2251950 - DNA, 25 bp, Homo sapien
tatgtagtggtagcgactttcctgc

SEQ ID NO: 2251951 - DNA, 25 bp, Homo sapien
taatgttgtaccctttcgtggcagc

SEQ ID NO: 2251952 - DNA, 25 bp, Homo sapien
aaagaagaggcgatctgcttggagt

SEQ ID NO: 2251953 - DNA, 25 bp, Homo sapien
cctgtgagtggctcgtgcgtgcttc

SEQ ID NO: 2251954 - DNA, 25 bp, Homo sapien
cttggagttgccattggtgggcaca

SEQ ID NO: 2251955 - DNA, 25 bp, Homo sapien
attggtgggcacacaaacctgtgag

SEQ ID NO: 2251956 - DNA, 25 bp, Homo sapien
tggtgccaccatcggctcaaagcag

SEQ ID NO: 2251957 - DNA, 25 bp, Homo sapien
cagactgaagtctcaaggcccaaag

SEQ ID NO: 2251958 - DNA, 25 bp, Homo sapien
tcttcaagacttgggatggtggctc

SEQ ID NO: 2251959 - DNA, 25 bp, Homo sapien
tcctccagaggaaagttggaagcct

SEQ ID NO: 2251960 - DNA, 25 bp, Homo sapien
tctggatgagaatgcgtacgcagat

SEQ ID NO: 2251961 - DNA, 25 bp, Homo sapien
aatgcgtacgcagatagaaatttgg

SEQ ID NO: 2251962 - DNA, 25 bp, Homo sapien
tttgtttgtacaagagcttggtctc

SEQ ID NO: 2251963 - DNA, 25 bp, Homo sapien
tttggctctaaaaagccctgaacag

SEQ ID NO: 2251964 - DNA, 25 bp, Homo sapien
gattcacgtcctgagacctagtctc

SEQ ID NO: 2251965 - DNA, 25 bp, Homo sapien
tacttgattcacgtcctgagaccta

SEQ ID NO: 2251966 - DNA, 25 bp, Homo sapien
atcagcttttacttgattcacgtcc

SEQ ID NO: 2251967 - DNA, 25 bp, Homo sapien
gcttttacttgattcacgtcctgag

SEQ ID NO: 2251968 - DNA, 25 bp, Homo sapien
taaaccatgagaagtacccaaacag

SEQ ID NO: 2251969 - DNA, 25 bp, Homo sapien
ggacactagaactgatccactgcat

SEQ ID NO: 2251970 - DNA, 25 bp, Homo sapien
tgggttcctggtcaccaaggctgct

SEQ ID NO: 2251971 - DNA, 25 bp, Homo sapien
tgatggccccaagtttgtgatggac

SEQ ID NO: 2251972 - DNA, 25 bp, Homo sapien
tctacctgtaggttgagttctgccc

SEQ ID NO: 2251973 - DNA, 25 bp, Homo sapien
tgccctccagagtgaacagatatgc

SEQ ID NO: 2251974 - DNA, 25 bp, Homo sapien
tcaagatcccctgtatatagcaagg

SEQ ID NO: 2251975 - DNA, 25 bp, Homo sapien
tctcctgcgctctagtgatcttgcc

SEQ ID NO: 2251976 - DNA, 25 bp, Homo sapien
gttgctcatgtcaagcaattcttca

SEQ ID NO: 2251977 - DNA, 25 bp, Homo sapien
cagttgctcatgtcaagcaattctt

SEQ ID NO: 2251978 - DNA, 25 bp, Homo sapien
ttgctcatgtcaagcaattcttcac

SEQ ID NO: 2251979 - DNA, 25 bp, Homo sapien
tcagttgctcatgtcaagcaattct

SEQ ID NO: 2251980 - DNA, 25 bp, Homo sapien
tggcaatttagcgacaaaaacggtc

SEQ ID NO: 2251981 - DNA, 25 bp, Homo sapien
taaattttcgcgttgtacaagccag

SEQ ID NO: 2251982 - DNA, 25 bp, Homo sapien
caaataggcgtcaacaggtccgtcg

SEQ ID NO: 2251983 - DNA, 25 bp, Homo sapien
tatattcttcgtctgtgcactgcca

SEQ ID NO: 2251984 - DNA, 25 bp, Homo sapien
ctccgccgggttaatgggcaggtca

SEQ ID NO: 2251985 - DNA, 25 bp, Homo sapien
actccgcattggtggcgtctcggcg

SEQ ID NO: 2251986 - DNA, 25 bp, Homo sapien
atggcagtgggcactccgcattggt

SEQ ID NO: 2251987 - DNA, 25 bp, Homo sapien
taatccttattgttgatggcagtgg

SEQ ID NO: 2251988 - DNA, 25 bp, Homo sapien
agggtggagtaggaacacacaggga

SEQ ID NO: 2251989 - DNA, 25 bp, Homo sapien
ggtggagtaggaacacacagggaag

SEQ ID NO: 2251990 - DNA, 25 bp, Homo sapien
ctccttctttgaagggaggaggagc

SEQ ID NO: 2251991 - DNA, 25 bp, Homo sapien
tcctccttctttgaagggaggagga

SEQ ID NO: 2251992 - DNA, 25 bp, Homo sapien
agagtattgaaggcctgactcttca

SEQ ID NO: 2251993 - DNA, 25 bp, Homo sapien
agagagaacaagacttgcaaggaca

SEQ ID NO: 2251994 - DNA, 25 bp, Homo sapien
gagagaacaagacttgcaaggacat

SEQ ID NO: 2251995 - DNA, 25 bp, Homo sapien
cagagagtattgaaggcctgactct

SEQ ID NO: 2251996 - DNA, 25 bp, Homo sapien
gaaatagggccttaagagtgtttga

SEQ ID NO: 2251997 - DNA, 25 bp, Homo sapien
taagagtgtttgaattcctggacct

SEQ ID NO: 2251998 - DNA, 25 bp, Homo sapien
gatgaaaacattgcaacagtggcaa

SEQ ID NO: 2251999 - DNA, 25 bp, Homo sapien
taatctgtgtttagcaatctgaaat

SEQ ID NO: 2252000 - DNA, 25 bp, Homo sapien
caagttggaggaaagtagtagagtc

SEQ ID NO: 2252001 - DNA, 25 bp, Homo sapien
tgagagttgtggcagagtggatctg

SEQ ID NO: 2252002 - DNA, 25 bp, Homo sapien
actgctacaagttggaggaaagtag

SEQ ID NO: 2252003 - DNA, 25 bp, Homo sapien
gaaggagtattgtcagaggtggagc

SEQ ID NO: 2252004 - DNA, 25 bp, Homo sapien
gatgggtaagatgccaacgtcataa

SEQ ID NO: 2252005 - DNA, 25 bp, Homo sapien
cagatgggtaagatgccaacgtcat

SEQ ID NO: 2252006 - DNA, 25 bp, Homo sapien
tgggtaagatgccaacgtcataaca

SEQ ID NO: 2252007 - DNA, 25 bp, Homo sapien
gtaagatgccaacgtcataacaagg

SEQ ID NO: 2252008 - DNA, 25 bp, Homo sapien
tctagaaggaccaaacttcagtgct

SEQ ID NO: 2252009 - DNA, 25 bp, Homo sapien
gcagtgtagcgggacttctcttgcc

SEQ ID NO: 2252010 - DNA, 25 bp, Homo sapien
tgtagcgggacttctcttgccatct

SEQ ID NO: 2252011 - DNA, 25 bp, Homo sapien
tcttgccatctagaaggaccaaact

SEQ ID NO: 2252012 - DNA, 25 bp, Homo sapien
agacagctgcgcgggcgagcatccc

SEQ ID NO: 2252013 - DNA, 25 bp, Homo sapien
cggcggagggggctcagtccgcagc

SEQ ID NO: 2252014 - DNA, 25 bp, Homo sapien
gagggggctcagtccgcagccgccg

SEQ ID NO: 2252015 - DNA, 25 bp, Homo sapien
gccgccgccgagacagctgcgcggg

SEQ ID NO: 2252016 - DNA, 25 bp, Homo sapien
gtactgcggcttcggcggcctcgct

SEQ ID NO: 2252017 - DNA, 25 bp, Homo sapien
acgagggactgcgagtgcgaggtcc

SEQ ID NO: 2252018 - DNA, 25 bp, Homo sapien
cagggctgggtactgcggcttcggc

SEQ ID NO: 2252019 - DNA, 25 bp, Homo sapien
tctttccgcttgtgcgcgcgtgtgt

SEQ ID NO: 2252020 - DNA, 25 bp, Homo sapien
gtgaaatgggggctctccatgtttt

SEQ ID NO: 2252021 - DNA, 25 bp, Homo sapien
gggtatttcagctccagcgtggaat

SEQ ID NO: 2252022 - DNA, 25 bp, Homo sapien
ttgcttcgctcaacgaggatggcgg

SEQ ID NO: 2252023 - DNA, 25 bp, Homo sapien
cgcctcggttttcttgactgggatg

SEQ ID NO: 2252024 - DNA, 25 bp, Homo sapien
atgaagcggtgggtcgactcccttg

SEQ ID NO: 2252025 - DNA, 25 bp, Homo sapien
tggctttttgagaatctgttgccct

SEQ ID NO: 2252026 - DNA, 25 bp, Homo sapien
ctggctttttgagaatctgttgccc

SEQ ID NO: 2252027 - DNA, 25 bp, Homo sapien
cgtggatccatatccttctatcaca

SEQ ID NO: 2252028 - DNA, 25 bp, Homo sapien
ttctatcacattcatctgccactgc

SEQ ID NO: 2252029 - DNA, 25 bp, Homo sapien
caggctctccgtggatccatatcct

SEQ ID NO: 2252030 - DNA, 25 bp, Homo sapien
atatccttctatcacattcatctgc

SEQ ID NO: 2252031 - DNA, 25 bp, Homo sapien
tgtctgtcaggtctgtgataagacc

SEQ ID NO: 2252032 - DNA, 25 bp, Homo sapien
caaggattagaaggcaaatgggagc

SEQ ID NO: 2252033 - DNA, 25 bp, Homo sapien
gggagccatcactcaagcactgtgt

SEQ ID NO: 2252034 - DNA, 25 bp, Homo sapien
ggtgaaaaacctcatagttcatgtg

SEQ ID NO: 2252035 - DNA, 25 bp, Homo sapien
tggatttctttcagtcagcttcaca

SEQ ID NO: 2252036 - DNA, 25 bp, Homo sapien
gcttcacaatcgacaccaaatcctg

SEQ ID NO: 2252037 - DNA, 25 bp, Homo sapien
cttgatgccagtagtgagctactgc

SEQ ID NO: 2252038 - DNA, 25 bp, Homo sapien
caccaaatcctgcagctgacgtgac

SEQ ID NO: 2252039 - DNA, 25 bp, Homo sapien
ttgccacctattggctcctctttgt

SEQ ID NO: 2252040 - DNA, 25 bp, Homo sapien
tgcttcttgccacctattggctcct

SEQ ID NO: 2252041 - DNA, 25 bp, Homo sapien
cacctattggctcctctttgtcttc

SEQ ID NO: 2252042 - DNA, 25 bp, Homo sapien
tcttgccacctattggctcctcttt

SEQ ID NO: 2252043 - DNA, 25 bp, Homo sapien
caagaaccctgtccctatagtcagc

SEQ ID NO: 2252044 - DNA, 25 bp, Homo sapien
caggcttttggcctggcaaacaaga

SEQ ID NO: 2252045 - DNA, 25 bp, Homo sapien
tccctatagtcagcagattcatcca

SEQ ID NO: 2252046 - DNA, 25 bp, Homo sapien
caaatgttagcgcttcaccatgggc

SEQ ID NO: 2252047 - DNA, 25 bp, Homo sapien
actgccagtgctcatgttatatgat

SEQ ID NO: 2252048 - DNA, 25 bp, Homo sapien
gccagtgctcatgttatatgataaa

SEQ ID NO: 2252049 - DNA, 25 bp, Homo sapien
tgccagtgctcatgttatatgataa

SEQ ID NO: 2252050 - DNA, 25 bp, Homo sapien
cactgccagtgctcatgttatatga

SEQ ID NO: 2252051 - DNA, 25 bp, Homo sapien
tgccacacatccagcgtgaggtaag

SEQ ID NO: 2252052 - DNA, 25 bp, Homo sapien
ttgccaggcacaacagaactatttg

SEQ ID NO: 2252053 - DNA, 25 bp, Homo sapien
caaagggctttatttgtaccaggag

SEQ ID NO: 2252054 - DNA, 25 bp, Homo sapien
caacttgggcatatgaaaagggaat

SEQ ID NO: 2252055 - DNA, 25 bp, Homo sapien
tcatgtcgttgcacgaacagtaggg

SEQ ID NO: 2252056 - DNA, 25 bp, Homo sapien
gctgccagccacgagaaggttaggc

SEQ ID NO: 2252057 - DNA, 25 bp, Homo sapien
tggagcaaatgctgggatgggacag

SEQ ID NO: 2252058 - DNA, 25 bp, Homo sapien
tgcacgaacagtagggagcaggaaa

SEQ ID NO: 2252059 - DNA, 25 bp, Homo sapien
aaagagtgcttctgctcggtgacat

SEQ ID NO: 2252060 - DNA, 25 bp, Homo sapien
ctggtgatagaaggccaaagagtgc

SEQ ID NO: 2252061 - DNA, 25 bp, Homo sapien
gatttgccctcaagttcagaacaac

SEQ ID NO: 2252062 - DNA, 25 bp, Homo sapien
cattaatagggtccaggagattttc

SEQ ID NO: 2252063 - DNA, 25 bp, Homo sapien
aagagggaatgtaacctttgccagc

SEQ ID NO: 2252064 - DNA, 25 bp, Homo sapien
taggtcagttacttcatgtctgttt

SEQ ID NO: 2252065 - DNA, 25 bp, Homo sapien
cttcagctgtattccctatttcaga

SEQ ID NO: 2252066 - DNA, 25 bp, Homo sapien
ttttctaattaggtcagttacttca

SEQ ID NO: 2252067 - DNA, 25 bp, Homo sapien
cttgtttctctgctgtaagtacact

SEQ ID NO: 2252068 - DNA, 25 bp, Homo sapien
tcacataggatcttgacctgacttt

SEQ ID NO: 2252069 - DNA, 25 bp, Homo sapien
gatcttgacctgacttttggtcctc

SEQ ID NO: 2252070 - DNA, 25 bp, Homo sapien
ttggtcctctcgtgggtgttttcca

SEQ ID NO: 2252071 - DNA, 25 bp, Homo sapien
tggtcctctcgtgggtgttttccat

SEQ ID NO: 2252072 - DNA, 25 bp, Homo sapien
gttaggatgccggaggctggctaca

SEQ ID NO: 2252073 - DNA, 25 bp, Homo sapien
tctgcaaacagacgagtatctgctt

SEQ ID NO: 2252074 - DNA, 25 bp, Homo sapien
tatctgctttaaacttgaaacgacc

SEQ ID NO: 2252075 - DNA, 25 bp, Homo sapien
ttgaaacgaccataaaaggagagag

SEQ ID NO: 2252076 - DNA, 25 bp, Homo sapien
tatgcttaggacaggtgatagtact

SEQ ID NO: 2252077 - DNA, 25 bp, Homo sapien
gatgggaccatgtacttatggctag

SEQ ID NO: 2252078 - DNA, 25 bp, Homo sapien
tattcttagtttgaccttgcctccc

SEQ ID NO: 2252079 - DNA, 25 bp, Homo sapien
tatggctagtcggaaagtggaaagt

SEQ ID NO: 2252080 - DNA, 25 bp, Homo sapien
tcagccccttttctgaagtccgaag

SEQ ID NO: 2252081 - DNA, 25 bp, Homo sapien
ggggtgctggtgacgtttctctttc

SEQ ID NO: 2252082 - DNA, 25 bp, Homo sapien
tattcactgataatggagtgggggt

SEQ ID NO: 2252083 - DNA, 25 bp, Homo sapien
ggtgctggtgacgtttctctttctt

SEQ ID NO: 2252084 - DNA, 25 bp, Homo sapien
gctttacaattggatactatgtaca

SEQ ID NO: 2252085 - DNA, 25 bp, Homo sapien
aggtgcagaggagtatgtatagtat

SEQ ID NO: 2252086 - DNA, 25 bp, Homo sapien
gactaactgtggtatagctttacaa

SEQ ID NO: 2252087 - DNA, 25 bp, Homo sapien
tttcttacagcattgtgataacaaa

SEQ ID NO: 2252088 - DNA, 25 bp, Homo sapien
caacatcctgagcccttatctcttt

SEQ ID NO: 2252089 - DNA, 25 bp, Homo sapien
atcctgagcccttatctcttttcca

SEQ ID NO: 2252090 - DNA, 25 bp, Homo sapien
actttgagttttgctctctgctgcc

SEQ ID NO: 2252091 - DNA, 25 bp, Homo sapien
cagtcattctcaggcccatggtcct

SEQ ID NO: 2252092 - DNA, 25 bp, Homo sapien
gcagactctccttgcgttctccttt

SEQ ID NO: 2252093 - DNA, 25 bp, Homo sapien
cctttctggacttcgtgttcctgtc

SEQ ID NO: 2252094 - DNA, 25 bp, Homo sapien
tttctggacttcgtgttcctgtcat

SEQ ID NO: 2252095 - DNA, 25 bp, Homo sapien
ctctagctgcagactctccttgcgt

SEQ ID NO: 2252096 - DNA, 25 bp, Homo sapien
ttgtggaggagcctatactctgtcc

SEQ ID NO: 2252097 - DNA, 25 bp, Homo sapien
taccatgcacaggttgacgaacagg

SEQ ID NO: 2252098 - DNA, 25 bp, Homo sapien
gccaatcctctccaacttgtggagg

SEQ ID NO: 2252099 - DNA, 25 bp, Homo sapien
gacgaacagggaagacaagctgcca

SEQ ID NO: 2252100 - DNA, 25 bp, Homo sapien
aatgctattgttgcaggcccaagct

SEQ ID NO: 2252101 - DNA, 25 bp, Homo sapien
ctggttgatgcaaatggaagtaact

SEQ ID NO: 2252102 - DNA, 25 bp, Homo sapien
tgctattgttgcaggcccaagctcc

SEQ ID NO: 2252103 - DNA, 25 bp, Homo sapien
gatgcaaatggaagtaactggaata

SEQ ID NO: 2252104 - DNA, 25 bp, Homo sapien
cacagccttatcagctggggttgag

SEQ ID NO: 2252105 - DNA, 25 bp, Homo sapien
ccccttaaatgtatgttcacaaatg

SEQ ID NO: 2252106 - DNA, 25 bp, Homo sapien
gactggtctaggtgctgctcctgaa

SEQ ID NO: 2252107 - DNA, 25 bp, Homo sapien
cgcttccccttaaatgtatgttcac

SEQ ID NO: 2252108 - DNA, 25 bp, Homo sapien
tcgaagcttagcagctcctcgaggc

SEQ ID NO: 2252109 - DNA, 25 bp, Homo sapien
catggccctgacctaaatcaaagaa

SEQ ID NO: 2252110 - DNA, 25 bp, Homo sapien
agtgtgccacgggaaacgcttgcct

SEQ ID NO: 2252111 - DNA, 25 bp, Homo sapien
gactgtgtcaagagtgagccaccca

SEQ ID NO: 2252112 - DNA, 25 bp, Homo sapien
gcaagaagcataggagataaaaccc

SEQ ID NO: 2252113 - DNA, 25 bp, Homo sapien
catgcaagagttgcagcggctgctc

SEQ ID NO: 2252114 - DNA, 25 bp, Homo sapien
tagaaagacctgagaaaacgagcct

SEQ ID NO: 2252115 - DNA, 25 bp, Homo sapien
cccgtgtggcatgttttctgagcgt

SEQ ID NO: 2252116 - DNA, 25 bp, Homo sapien
gtttggaaacttgcatgaaaatatt

SEQ ID NO: 2252117 - DNA, 25 bp, Homo sapien
gggtttggaaacttgcatgaaaata

SEQ ID NO: 2252118 - DNA, 25 bp, Homo sapien
tgggtttggaaacttgcatgaaaat

SEQ ID NO: 2252119 - DNA, 25 bp, Homo sapien
ggtttggaaacttgcatgaaaatat

SEQ ID NO: 2252120 - DNA, 25 bp, Homo sapien
cagggctgtcatcaacatggatatg

SEQ ID NO: 2252121 - DNA, 25 bp, Homo sapien
cagtgactagttgaatcccttgtaa

SEQ ID NO: 2252122 - DNA, 25 bp, Homo sapien
cggaagtaaccgcaaaactctagag

SEQ ID NO: 2252123 - DNA, 25 bp, Homo sapien
ggatttccacctaccgcttacctga

SEQ ID NO: 2252124 - DNA, 25 bp, Homo sapien
agagtgacacccctaaggctcagga

SEQ ID NO: 2252125 - DNA, 25 bp, Homo sapien
gagcttgatccttcacctgtgagac

SEQ ID NO: 2252126 - DNA, 25 bp, Homo sapien
taaggagaccaaaggcaaggaggct

SEQ ID NO: 2252127 - DNA, 25 bp, Homo sapien
tgtgacctggaacaaatgctgctct

SEQ ID NO: 2252128 - DNA, 25 bp, Homo sapien
ttttactaatccaagactggcagcc

SEQ ID NO: 2252129 - DNA, 25 bp, Homo sapien
ggaatcatatactgtgtgtgcatac

SEQ ID NO: 2252130 - DNA, 25 bp, Homo sapien
gtgtgcccatcacacgaactcactg

SEQ ID NO: 2252131 - DNA, 25 bp, Homo sapien
tactctgagtggcaaagaaccaggg

SEQ ID NO: 2252132 - DNA, 25 bp, Homo sapien
tatactcaacgacagaactggagag

SEQ ID NO: 2252133 - DNA, 25 bp, Homo sapien
tacaggactcccagcatttcaggtt

SEQ ID NO: 2252134 - DNA, 25 bp, Homo sapien
ccacagttacagtttcaggaaagca

SEQ ID NO: 2252135 - DNA, 25 bp, Homo sapien
tttaccaggttcaagtcagaagcag

SEQ ID NO: 2252136 - DNA, 25 bp, Homo sapien
cttccaaagctatatggtgcaaaga

SEQ ID NO: 2252137 - DNA, 25 bp, Homo sapien
gggagcgggttcagggtcaattgcc

SEQ ID NO: 2252138 - DNA, 25 bp, Homo sapien
aagctatatggtgcaaagactgccc

SEQ ID NO: 2252139 - DNA, 25 bp, Homo sapien
gcgggttcagggtcaattgcctttc

SEQ ID NO: 2252140 - DNA, 25 bp, Homo sapien
ccaaatgaggagaaacaggtttgct

SEQ ID NO: 2252141 - DNA, 25 bp, Homo sapien
aggagaaacaggtttgcttcttctc

SEQ ID NO: 2252142 - DNA, 25 bp, Homo sapien
aatgaggagaaacaggtttgcttct

SEQ ID NO: 2252143 - DNA, 25 bp, Homo sapien
tgaggagaaacaggtttgcttcttc

SEQ ID NO: 2252144 - DNA, 25 bp, Homo sapien
gactttggcaagatgtcatggaatc

SEQ ID NO: 2252145 - DNA, 25 bp, Homo sapien
gatgtcatggaatccttcagatttt

SEQ ID NO: 2252146 - DNA, 25 bp, Homo sapien
ttattgtctaaaggtgtctgaggac

SEQ ID NO: 2252147 - DNA, 25 bp, Homo sapien
tctaaaggtgtctgaggactttggc

SEQ ID NO: 2252148 - DNA, 25 bp, Homo sapien
gatcttgtcacagatacgctgctgc

SEQ ID NO: 2252149 - DNA, 25 bp, Homo sapien
gctgctgctcataattcatactaac

SEQ ID NO: 2252150 - DNA, 25 bp, Homo sapien
aacaatgttggtgatcttgtcacag

SEQ ID NO: 2252151 - DNA, 25 bp, Homo sapien
gacaaagatagttctgtgtgactta

SEQ ID NO: 2252152 - DNA, 25 bp, Homo sapien
tcatccgcctttctggttttcgttg

SEQ ID NO: 2252153 - DNA, 25 bp, Homo sapien
gtggtgttggtttcatccgcctttc

SEQ ID NO: 2252154 - DNA, 25 bp, Homo sapien
tctggttttcgttgtgtgactggtc

SEQ ID NO: 2252155 - DNA, 25 bp, Homo sapien
gtgtgactggtcattcttttggaag

SEQ ID NO: 2252156 - DNA, 25 bp, Homo sapien
tcttctagaaataccagcttgtgtg

SEQ ID NO: 2252157 - DNA, 25 bp, Homo sapien
cattttaaatttggtaggtgagcct

SEQ ID NO: 2252158 - DNA, 25 bp, Homo sapien
ttttcttggcattgttgaacggcat

SEQ ID NO: 2252159 - DNA, 25 bp, Homo sapien
ttttggctctttacggacctggctg

SEQ ID NO: 2252160 - DNA, 25 bp, Homo sapien
gggatggggagtgggtactgcctgc

SEQ ID NO: 2252161 - DNA, 25 bp, Homo sapien
ctatgatcctgatgggatggggagt

SEQ ID NO: 2252162 - DNA, 25 bp, Homo sapien
tatgatcctgatgggatggggagtg

SEQ ID NO: 2252163 - DNA, 25 bp, Homo sapien
tcatatatgtcatggctggatgttt

SEQ ID NO: 2252164 - DNA, 25 bp, Homo sapien
tatgtcatggctggatgtttctgtg

SEQ ID NO: 2252165 - DNA, 25 bp, Homo sapien
cattcaatgagtccttgtcgctttc

SEQ ID NO: 2252166 - DNA, 25 bp, Homo sapien
cgctttcttcgttgtcagcctcagc

SEQ ID NO: 2252167 - DNA, 25 bp, Homo sapien
gcctcagacttttggactcgagtga

SEQ ID NO: 2252168 - DNA, 25 bp, Homo sapien
gcttgagggaaaactcccaatgagt

SEQ ID NO: 2252169 - DNA, 25 bp, Homo sapien
catgatgactcccagcgctttttga

SEQ ID NO: 2252170 - DNA, 25 bp, Homo sapien
cagcctttggttgctgcttgaggga

SEQ ID NO: 2252171 - DNA, 25 bp, Homo sapien
cacatctgtctttcttgtccgcttc

SEQ ID NO: 2252172 - DNA, 25 bp, Homo sapien
tctgtctttcttgtccgcttcataa

SEQ ID NO: 2252173 - DNA, 25 bp, Homo sapien
ctttgaggcattcacatctgtcttt

SEQ ID NO: 2252174 - DNA, 25 bp, Homo sapien
tttcttgtccgcttcataatttctt

SEQ ID NO: 2252175 - DNA, 25 bp, Homo sapien
tcgtgttctttcttgcgtttgtcag

SEQ ID NO: 2252176 - DNA, 25 bp, Homo sapien
gtgttctttcttgcgtttgtcagct

SEQ ID NO: 2252177 - DNA, 25 bp, Homo sapien
gttctttcttgcgtttgtcagcttc

SEQ ID NO: 2252178 - DNA, 25 bp, Homo sapien
tctttcttgcgtttgtcagcttcct

SEQ ID NO: 2252179 - DNA, 25 bp, Homo sapien
tttgagtttcaagtggtcttctgct

SEQ ID NO: 2252180 - DNA, 25 bp, Homo sapien
tgagtttcaagtggtcttctgcttg

SEQ ID NO: 2252181 - DNA, 25 bp, Homo sapien
ttgagtttcaagtggtcttctgctt

SEQ ID NO: 2252182 - DNA, 25 bp, Homo sapien
gagtttcaagtggtcttctgcttgg

SEQ ID NO: 2252183 - DNA, 25 bp, Homo sapien
tcggcattcataatacctgcagtac

SEQ ID NO: 2252184 - DNA, 25 bp, Homo sapien
cctgcagtactcttattaccagact

SEQ ID NO: 2252185 - DNA, 25 bp, Homo sapien
tgtcaaaatttttgttgccgcctcg

SEQ ID NO: 2252186 - DNA, 25 bp, Homo sapien
caaggcggcgcaattctgtcaaaat

SEQ ID NO: 2252187 - DNA, 25 bp, Homo sapien
tatatatatatgtgcgtagtccaaa

SEQ ID NO: 2252188 - DNA, 25 bp, Homo sapien
gagagctaatcaactctcactccaa

SEQ ID NO: 2252189 - DNA, 25 bp, Homo sapien
cacaagcaaactataggtgattatc

SEQ ID NO: 2252190 - DNA, 25 bp, Homo sapien
aataaatatgtgcaacagttaagag

SEQ ID NO: 2252191 - DNA, 25 bp, Homo sapien
catagatcatatgcctttggctcaa

SEQ ID NO: 2252192 - DNA, 25 bp, Homo sapien
tcatatgcctttggctcaaagcctc

SEQ ID NO: 2252193 - DNA, 25 bp, Homo sapien
gatcatatgcctttggctcaaagcc

SEQ ID NO: 2252194 - DNA, 25 bp, Homo sapien
cttcatagatcatatgcctttggct

SEQ ID NO: 2252195 - DNA, 25 bp, Homo sapien
gcacagacagggtgtgttgaatagg

SEQ ID NO: 2252196 - DNA, 25 bp, Homo sapien
cacagacagggtgtgttgaataggc

SEQ ID NO: 2252197 - DNA, 25 bp, Homo sapien
tgcacagacagggtgtgttgaatag

SEQ ID NO: 2252198 - DNA, 25 bp, Homo sapien
acagacagggtgtgttgaataggca

SEQ ID NO: 2252199 - DNA, 25 bp, Homo sapien
ggagacggcagaccacaagcatttt

SEQ ID NO: 2252200 - DNA, 25 bp, Homo sapien
tgatgaccatttataacactcagtg

SEQ ID NO: 2252201 - DNA, 25 bp, Homo sapien
gatagacgcttcttggcaataggga

SEQ ID NO: 2252202 - DNA, 25 bp, Homo sapien
caatagggattaaggcctgtttgtc

SEQ ID NO: 2252203 - DNA, 25 bp, Homo sapien
tgacctatcgtgaactatacaacaa

SEQ ID NO: 2252204 - DNA, 25 bp, Homo sapien
cattgatatttgcttctggactaac

SEQ ID NO: 2252205 - DNA, 25 bp, Homo sapien
tgtaaataatatgctggttatgttg

SEQ ID NO: 2252206 - DNA, 25 bp, Homo sapien
ttgtaaaatctgacctatcgtgaac

SEQ ID NO: 2252207 - DNA, 25 bp, Homo sapien
cgtctctcgcttttgccttgggaga

SEQ ID NO: 2252208 - DNA, 25 bp, Homo sapien
gggggatgctttcaccatcgcctca

SEQ ID NO: 2252209 - DNA, 25 bp, Homo sapien
tccttgggtgaccctttcacactct

SEQ ID NO: 2252210 - DNA, 25 bp, Homo sapien
tctccttgggggctacttctgcgct

SEQ ID NO: 2252211 - DNA, 25 bp, Homo sapien
ggtgcatccacacttgccttgggag

SEQ ID NO: 2252212 - DNA, 25 bp, Homo sapien
gctactatgctcaccttgggaactg

SEQ ID NO: 2252213 - DNA, 25 bp, Homo sapien
tcaccacagggaatgagtccgtgct

SEQ ID NO: 2252214 - DNA, 25 bp, Homo sapien
gacgcttccatgcttgtgttgcaga

SEQ ID NO: 2252215 - DNA, 25 bp, Homo sapien
tcgacatgggaaacataacagccct

SEQ ID NO: 2252216 - DNA, 25 bp, Homo sapien
ggaggtattttcattgtcgacatgg

SEQ ID NO: 2252217 - DNA, 25 bp, Homo sapien
taacagccctcaattcgtcgctagt

SEQ ID NO: 2252218 - DNA, 25 bp, Homo sapien
tacatttacgcaagggtacagtgac

SEQ ID NO: 2252219 - DNA, 25 bp, Homo sapien
gaatgaggacagagcatgaaattcc

SEQ ID NO: 2252220 - DNA, 25 bp, Homo sapien
ctgaatgaggacagagcatgaaatt

SEQ ID NO: 2252221 - DNA, 25 bp, Homo sapien
tgaatgaggacagagcatgaaattc

SEQ ID NO: 2252222 - DNA, 25 bp, Homo sapien
tcactatttaaaatttgtatttaga

SEQ ID NO: 2252223 - DNA, 25 bp, Homo sapien
aggttactatctcttctatttaaag

SEQ ID NO: 2252224 - DNA, 25 bp, Homo sapien
cacgtggcttcctttcggcttgttc

SEQ ID NO: 2252225 - DNA, 25 bp, Homo sapien
cctttcggcttgttctttatcagta

SEQ ID NO: 2252226 - DNA, 25 bp, Homo sapien
tctttatcagtagacgaatgtaggt

SEQ ID NO: 2252227 - DNA, 25 bp, Homo sapien
aagtttttcagtagatgcagatcgt

SEQ ID NO: 2252228 - DNA, 25 bp, Homo sapien
ttggcaacggaattttgaaggcctg

SEQ ID NO: 2252229 - DNA, 25 bp, Homo sapien
tcagtagatgcagatcgtttattgg

SEQ ID NO: 2252230 - DNA, 25 bp, Homo sapien
tggcaacggaattttgaaggcctgc

SEQ ID NO: 2252231 - DNA, 25 bp, Homo sapien
gataatcatcagcaagtctcctccg

SEQ ID NO: 2252232 - DNA, 25 bp, Homo sapien
tcagaattcgccattgcagagcctc

SEQ ID NO: 2252233 - DNA, 25 bp, Homo sapien
cagcaagtctcctccgttccaaagt

SEQ ID NO: 2252234 - DNA, 25 bp, Homo sapien
caaagtacgataaagaatggctgta

SEQ ID NO: 2252235 - DNA, 25 bp, Homo sapien
gtttttcatattggagcttggtctt

SEQ ID NO: 2252236 - DNA, 25 bp, Homo sapien
tttcatattggagcttggtctttct

SEQ ID NO: 2252237 - DNA, 25 bp, Homo sapien
tcttctgcagctattctccgttgtt

SEQ ID NO: 2252238 - DNA, 25 bp, Homo sapien
ttctgcagctattctccgttgttct

SEQ ID NO: 2252239 - DNA, 25 bp, Homo sapien
tgtcatttttaagcatggatccatc

SEQ ID NO: 2252240 - DNA, 25 bp, Homo sapien
cttgctaatctttgttttatgtcat

SEQ ID NO: 2252241 - DNA, 25 bp, Homo sapien
ttatgtcatttttaagcatggatcc

SEQ ID NO: 2252242 - DNA, 25 bp, Homo sapien
tatgtcatttttaagcatggatcca

SEQ ID NO: 2252243 - DNA, 25 bp, Homo sapien
cctttccttagcaatctcgtttgct

SEQ ID NO: 2252244 - DNA, 25 bp, Homo sapien
aacacgattaaccacatcttgcttc

SEQ ID NO: 2252245 - DNA, 25 bp, Homo sapien
tgaggaatgggttgcaacacgatta

SEQ ID NO: 2252246 - DNA, 25 bp, Homo sapien
ttagcaatctcgtttgctgcagcaa

SEQ ID NO: 2252247 - DNA, 25 bp, Homo sapien
gccgtccgccatcatcggagtcggg

SEQ ID NO: 2252248 - DNA, 25 bp, Homo sapien
ggtggtggctctccgcatacattgc

SEQ ID NO: 2252249 - DNA, 25 bp, Homo sapien
ctcaaggatgggctgccgccagcgc

SEQ ID NO: 2252250 - DNA, 25 bp, Homo sapien
gcctccgcttgggtcgtggccgggc

SEQ ID NO: 2252251 - DNA, 25 bp, Homo sapien
cttcctcagctgttgtgggggagaa

SEQ ID NO: 2252252 - DNA, 25 bp, Homo sapien
tcctcagctgttgtgggggagaagg

SEQ ID NO: 2252253 - DNA, 25 bp, Homo sapien
ttcctcagctgttgtgggggagaag

SEQ ID NO: 2252254 - DNA, 25 bp, Homo sapien
cctcagctgttgtgggggagaaggc

SEQ ID NO: 2252255 - DNA, 25 bp, Homo sapien
tactaatgcataattcacagctgaa

SEQ ID NO: 2252256 - DNA, 25 bp, Homo sapien
tgcataattcacagctgaaaataga

SEQ ID NO: 2252257 - DNA, 25 bp, Homo sapien
aacgatgatgaatgctgtccaaata

SEQ ID NO: 2252258 - DNA, 25 bp, Homo sapien
aatttcattaacttcggaaacgatg

SEQ ID NO: 2252259 - DNA, 25 bp, Homo sapien
tcctcttaatggctctactgtaatg

SEQ ID NO: 2252260 - DNA, 25 bp, Homo sapien
taggaattagttctgcaaccctctg

SEQ ID NO: 2252261 - DNA, 25 bp, Homo sapien
tctgcagacatgtgaatagtaatgt

SEQ ID NO: 2252262 - DNA, 25 bp, Homo sapien
tagtaatgttaggaattagttctgc

SEQ ID NO: 2252263 - DNA, 25 bp, Homo sapien
tccaccacttagagaatatctgtgg

SEQ ID NO: 2252264 - DNA, 25 bp, Homo sapien
gataaacactgagagaaaggcctct

SEQ ID NO: 2252265 - DNA, 25 bp, Homo sapien
ggctcttcaactctgcaagcagagg

SEQ ID NO: 2252266 - DNA, 25 bp, Homo sapien
aaaggcctctttgggatgtctttca

SEQ ID NO: 2252267 - DNA, 25 bp, Homo sapien
gtagatggcccctcgaagctcttca

SEQ ID NO: 2252268 - DNA, 25 bp, Homo sapien
ggattgtgaagatccagtccccaga

SEQ ID NO: 2252269 - DNA, 25 bp, Homo sapien
gattgtgaagatccagtccccagaa

SEQ ID NO: 2252270 - DNA, 25 bp, Homo sapien
ttgtgaagatccagtccccagaatc

SEQ ID NO: 2252271 - DNA, 25 bp, Homo sapien
attgtgaagatccagtccccagaat

SEQ ID NO: 2252272 - DNA, 25 bp, Homo sapien
tctgtttccgagttggaatcctcgg

SEQ ID NO: 2252273 - DNA, 25 bp, Homo sapien
ggtctaaagctcagctctttattca

SEQ ID NO: 2252274 - DNA, 25 bp, Homo sapien
atgggatgcagcttggaataaggtg

SEQ ID NO: 2252275 - DNA, 25 bp, Homo sapien
ctttcatgggatgcagcttggaata

SEQ ID NO: 2252276 - DNA, 25 bp, Homo sapien
tcatgggatgcagcttggaataagg

SEQ ID NO: 2252277 - DNA, 25 bp, Homo sapien
ttcatgggatgcagcttggaataag

SEQ ID NO: 2252278 - DNA, 25 bp, Homo sapien
cttttgcaagttaaatagttgttat

SEQ ID NO: 2252279 - DNA, 25 bp, Homo sapien
gttaaatagttgttatgcccaggga

SEQ ID NO: 2252280 - DNA, 25 bp, Homo sapien
tttgcaagttaaatagttgttatgc

SEQ ID NO: 2252281 - DNA, 25 bp, Homo sapien
aagttaaatagttgttatgcccagg

SEQ ID NO: 2252282 - DNA, 25 bp, Homo sapien
atgtctgcctttgagtcataggccg

SEQ ID NO: 2252283 - DNA, 25 bp, Homo sapien
tgtctgcctttgagtcataggccga

SEQ ID NO: 2252284 - DNA, 25 bp, Homo sapien
gtctgcctttgagtcataggccgac

SEQ ID NO: 2252285 - DNA, 25 bp, Homo sapien
cgggtgctatccagaacggggtgcc

SEQ ID NO: 2252286 - DNA, 25 bp, Homo sapien
ctcgggtgctatccagaacggggtg

SEQ ID NO: 2252287 - DNA, 25 bp, Homo sapien
gtgctatccagaacggggtgcccac

SEQ ID NO: 2252288 - DNA, 25 bp, Homo sapien
ggtgctatccagaacggggtgccca

SEQ ID NO: 2252289 - DNA, 25 bp, Homo sapien
gccatgccaaagtccaccagcttca

SEQ ID NO: 2252290 - DNA, 25 bp, Homo sapien
gccagccatgccaaagtccaccagc

SEQ ID NO: 2252291 - DNA, 25 bp, Homo sapien
gttccttttggtctgggtgtctgcc

SEQ ID NO: 2252292 - DNA, 25 bp, Homo sapien
ggtgtctgccagttggccagccatg

SEQ ID NO: 2252293 - DNA, 25 bp, Homo sapien
cctctatggattttcttctccgaat

SEQ ID NO: 2252294 - DNA, 25 bp, Homo sapien
ttggccgctttaacacctctatgga

SEQ ID NO: 2252295 - DNA, 25 bp, Homo sapien
ctcagacagcaggacgttggccgct

SEQ ID NO: 2252296 - DNA, 25 bp, Homo sapien
caggacgttggccgctttaacacct

SEQ ID NO: 2252297 - DNA, 25 bp, Homo sapien
taacagatctagtgtggagcctcca

SEQ ID NO: 2252298 - DNA, 25 bp, Homo sapien
gtggagcctccatcaggatattcca

SEQ ID NO: 2252299 - DNA, 25 bp, Homo sapien
catctaacgggccaggttctaacag

SEQ ID NO: 2252300 - DNA, 25 bp, Homo sapien
ggttctaacagatctagtgtggagc

SEQ ID NO: 2252301 - DNA, 25 bp, Homo sapien
tgtgatttcttgttgaatgtcctct

SEQ ID NO: 2252302 - DNA, 25 bp, Homo sapien
ttgttgaatgtcctctatctcatct

SEQ ID NO: 2252303 - DNA, 25 bp, Homo sapien
gatttcttgttgaatgtcctctatc

SEQ ID NO: 2252304 - DNA, 25 bp, Homo sapien
tgaatgtcctctatctcatcttcag

SEQ ID NO: 2252305 - DNA, 25 bp, Homo sapien
tgtcttataaagtcctacgaggccc

SEQ ID NO: 2252306 - DNA, 25 bp, Homo sapien
cacacgtttgatggcatggctttca

SEQ ID NO: 2252307 - DNA, 25 bp, Homo sapien
taactaactcttgtatgcggcactg

SEQ ID NO: 2252308 - DNA, 25 bp, Homo sapien
atagcaaatctgacggtggccgggc

SEQ ID NO: 2252309 - DNA, 25 bp, Homo sapien
tcccagtcaggtgtgctgctcacat

SEQ ID NO: 2252310 - DNA, 25 bp, Homo sapien
ttcccagtcaggtgtgctgctcaca

SEQ ID NO: 2252311 - DNA, 25 bp, Homo sapien
ggcttcccagtcaggtgtgctgctc

SEQ ID NO: 2252312 - DNA, 25 bp, Homo sapien
gcttcccagtcaggtgtgctgctca

SEQ ID NO: 2252313 - DNA, 25 bp, Homo sapien
tgccttcaggaagggtaacagggtg

SEQ ID NO: 2252314 - DNA, 25 bp, Homo sapien
aagcaactggtatcagtggttgcct

SEQ ID NO: 2252315 - DNA, 25 bp, Homo sapien
gaacacatctgctgagctttcttca

SEQ ID NO: 2252316 - DNA, 25 bp, Homo sapien
tcacacgatgacctccaaagaacac

SEQ ID NO: 2252317 - DNA, 25 bp, Homo sapien
gatgacctccaaagaacacatctgc

SEQ ID NO: 2252318 - DNA, 25 bp, Homo sapien
acgatgacctccaaagaacacatct

SEQ ID NO: 2252319 - DNA, 25 bp, Homo sapien
gcattaacagctgtgcattggccac

SEQ ID NO: 2252320 - DNA, 25 bp, Homo sapien
attaacagctgtgcattggccactg

SEQ ID NO: 2252321 - DNA, 25 bp, Homo sapien
gcaagcattaacagctgtgcattgg

SEQ ID NO: 2252322 - DNA, 25 bp, Homo sapien
tcagttcatcagtgagttagcaagc

SEQ ID NO: 2252323 - DNA, 25 bp, Homo sapien
tgtgctaacttctgtagaaactgtg

SEQ ID NO: 2252324 - DNA, 25 bp, Homo sapien
tagtgctgtgtgctaacttctgtag

SEQ ID NO: 2252325 - DNA, 25 bp, Homo sapien
gaatagtgctgtgtgctaacttctg

SEQ ID NO: 2252326 - DNA, 25 bp, Homo sapien
gctgtgtgctaacttctgtagaaac

SEQ ID NO: 2252327 - DNA, 25 bp, Homo sapien
ggcatcttctgggtatctatctcca

SEQ ID NO: 2252328 - DNA, 25 bp, Homo sapien
tgtactcacaagtaattctattgcc

SEQ ID NO: 2252329 - DNA, 25 bp, Homo sapien
tggcttatggaagctacacagtact

SEQ ID NO: 2252330 - DNA, 25 bp, Homo sapien
tgctgagcgcccaatagtcatggct

SEQ ID NO: 2252331 - DNA, 25 bp, Homo sapien
tcgttctctcatgatcaataccaga

SEQ ID NO: 2252332 - DNA, 25 bp, Homo sapien
tagcttatgaagtagccattaatga

SEQ ID NO: 2252333 - DNA, 25 bp, Homo sapien
gccattaatgatccgaatttgtttg

SEQ ID NO: 2252334 - DNA, 25 bp, Homo sapien
ggacctggagtcagcggccttcgtt

SEQ ID NO: 2252335 - DNA, 25 bp, Homo sapien
cctctagttgctatcttgtggctga

SEQ ID NO: 2252336 - DNA, 25 bp, Homo sapien
gctgctggaacttttacttcttgtt

SEQ ID NO: 2252337 - DNA, 25 bp, Homo sapien
gattacgaggtaagctgctggaact

SEQ ID NO: 2252338 - DNA, 25 bp, Homo sapien
tctgaagcagcgttgccttcctcgg

SEQ ID NO: 2252339 - DNA, 25 bp, Homo sapien
catgttagatagagccagcacctta

SEQ ID NO: 2252340 - DNA, 25 bp, Homo sapien
atttcatgttagatagagccagcac

SEQ ID NO: 2252341 - DNA, 25 bp, Homo sapien
tcatgttagatagagccagcacctt

SEQ ID NO: 2252342 - DNA, 25 bp, Homo sapien
gttagatagagccagcaccttagca

SEQ ID NO: 2252343 - DNA, 25 bp, Homo sapien
agaggcagccataatagcaaaagcc

SEQ ID NO: 2252344 - DNA, 25 bp, Homo sapien
gcaaaagccgttagggctttgcagg

SEQ ID NO: 2252345 - DNA, 25 bp, Homo sapien
gcagccataatagcaaaagccgtta

SEQ ID NO: 2252346 - DNA, 25 bp, Homo sapien
cataatagcaaaagccgttagggct

SEQ ID NO: 2252347 - DNA, 25 bp, Homo sapien
caattgcctgttgtggtcacacttt

SEQ ID NO: 2252348 - DNA, 25 bp, Homo sapien
tgctgggctggcctttgctccaggt

SEQ ID NO: 2252349 - DNA, 25 bp, Homo sapien
cctgttgtggtcacactttgcctgc

SEQ ID NO: 2252350 - DNA, 25 bp, Homo sapien
ttgcctgttgtggtcacactttgcc

SEQ ID NO: 2252351 - DNA, 25 bp, Homo sapien
tggtcccactgtttcccttgtgatg

SEQ ID NO: 2252352 - DNA, 25 bp, Homo sapien
gaagtcagtccaccaagactatcca

SEQ ID NO: 2252353 - DNA, 25 bp, Homo sapien
agggcagctcaagcacacccaagaa

SEQ ID NO: 2252354 - DNA, 25 bp, Homo sapien
ttgtgatgcccctcaaccaccacag

SEQ ID NO: 2252355 - DNA, 25 bp, Homo sapien
tggcccttgagaggggcagtctttc

SEQ ID NO: 2252356 - DNA, 25 bp, Homo sapien
gaggggcagtctttcaatggagacc

SEQ ID NO: 2252357 - DNA, 25 bp, Homo sapien
ggcagtctttcaatggagaccccat

SEQ ID NO: 2252358 - DNA, 25 bp, Homo sapien
ttgagaggggcagtctttcaatgga

SEQ ID NO: 2252359 - DNA, 25 bp, Homo sapien
gacggacactccctacgagtgggac

SEQ ID NO: 2252360 - DNA, 25 bp, Homo sapien
cctgagctaggtaggaaacatgagc

SEQ ID NO: 2252361 - DNA, 25 bp, Homo sapien
aacatgagcggcaccaacttggatg

SEQ ID NO: 2252362 - DNA, 25 bp, Homo sapien
aatgcaagaattgtacggagacggc

SEQ ID NO: 2252363 - DNA, 25 bp, Homo sapien
ttactgaagatttcattgctacata

SEQ ID NO: 2252364 - DNA, 25 bp, Homo sapien
ttctcagtagcgatgatgatgacga

SEQ ID NO: 2252365 - DNA, 25 bp, Homo sapien
cgaatttgaagatgacggctctgaa

SEQ ID NO: 2252366 - DNA, 25 bp, Homo sapien
tgaagatgctgacgaaaagttgttc

SEQ ID NO: 2252367 - DNA, 25 bp, Homo sapien
catgaacatgtgcatagtggtagga

SEQ ID NO: 2252368 - DNA, 25 bp, Homo sapien
cagaagctttggcagaccttcgact

SEQ ID NO: 2252369 - DNA, 25 bp, Homo sapien
aagctttggcagaccttcgactcac

SEQ ID NO: 2252370 - DNA, 25 bp, Homo sapien
acactgtgcacagagttggaacatg

SEQ ID NO: 2252371 - DNA, 25 bp, Homo sapien
aagacactgtgcacagagttggaac

SEQ ID NO: 2252372 - DNA, 25 bp, Homo sapien
gcttcatttggaagatacatgatca

SEQ ID NO: 2252373 - DNA, 25 bp, Homo sapien
tagcctctgcaaactctgagctttt

SEQ ID NO: 2252374 - DNA, 25 bp, Homo sapien
ctttctgctccatgactcactctag

SEQ ID NO: 2252375 - DNA, 25 bp, Homo sapien
gactcactctagcttctagcctctg

SEQ ID NO: 2252376 - DNA, 25 bp, Homo sapien
cgatctgcaattgtgaacaatcaat

SEQ ID NO: 2252377 - DNA, 25 bp, Homo sapien
aagggatgggtggaagtagaacaag

SEQ ID NO: 2252378 - DNA, 25 bp, Homo sapien
agataacccactaccttcggacgag

SEQ ID NO: 2252379 - DNA, 25 bp, Homo sapien
gtgagaagggatgggtggaagtaga
